United States Patent Application Publication US 2006/0003322 A1 - sequence listing, part 16

SEQ ID NO: 650187 - RNA, 22 nt, Human
gccaguggcucccugggggaca

SEQ ID NO: 650188 - RNA, 18 nt, Human
gcccagguguguacagcc

SEQ ID NO: 650189 - RNA, 19 nt, Human
gcugcagacccccacgggc

SEQ ID NO: 650190 - RNA, 19 nt, Human
ggaagucccaugugucccc

SEQ ID NO: 650191 - RNA, 22 nt, Human
ggccagagccugaggugcccgg

SEQ ID NO: 650192 - RNA, 20 nt, Human
ggcccuggggaguuggggcc

SEQ ID NO: 650193 - RNA, 19 nt, Human
gggcagguggcccuggagg

SEQ ID NO: 650194 - RNA, 24 nt, Human
ggucagcagugcagaugggggcag

SEQ ID NO: 650195 - RNA, 19 nt, Human
guccaagcaagccuccagg

SEQ ID NO: 650196 - RNA, 20 nt, Human
uacacagguccauacauggg

SEQ ID NO: 650197 - RNA, 19 nt, Human
uacccgcaggccuccucaa

SEQ ID NO: 650198 - RNA, 19 nt, Human
uaggagagaccaagccgug

SEQ ID NO: 650199 - RNA, 26 nt, Human
uauguauauauuuaacacacacaucu

SEQ ID NO: 650200 - RNA, 23 nt, Human
ucccaagcaagccuccaggcccu

SEQ ID NO: 650201 - RNA, 18 nt, Human
ucccagcccacacaaaac

SEQ ID NO: 650202 - RNA, 20 nt, Human
ucccugggggacagcaaccc

SEQ ID NO: 650203 - RNA, 25 nt, Human
ugcauacacagguccauacauggug

SEQ ID NO: 650204 - RNA, 24 nt, Human
ugccuagggcugcagacccccacg

SEQ ID NO: 650205 - RNA, 24 nt, Human
uggcucccugggggacagcaaccc

SEQ ID NO: 650206 - RNA, 21 nt, Human
uggcugaaggcaacucaacac

SEQ ID NO: 650207 - RNA, 18 nt, Human
ugggacccuccaaguccc

SEQ ID NO: 650208 - RNA, 20 nt, Human
ugggacccuccaagucccag

SEQ ID NO: 650209 - RNA, 21 nt, Human
uggggaguuggggcccaggug

SEQ ID NO: 650210 - RNA, 23 nt, Human
uggggaguuggggcccaggugug

SEQ ID NO: 650211 - RNA, 20 nt, Human
ugggggcagguggcccugga

SEQ ID NO: 650212 - RNA, 22 nt, Human
ugggggcagguggcccuggagg

SEQ ID NO: 650213 - RNA, 22 nt, Human
uguacccugucuguacuuagga

SEQ ID NO: 650214 - RNA, 20 nt, Human
uguaggagagaccaagccgu

SEQ ID NO: 650215 - RNA, 24 nt, Human
uguauauauuuaacacacacaucu

SEQ ID NO: 650216 - RNA, 19 nt, Human
ugugucucaguucuucugg

SEQ ID NO: 650217 - RNA, 24 nt, Human
uuccucauccuccaugccgggggc

SEQ ID NO: 650218 - RNA, 20 nt, Human
uugcauacacagguccauac

SEQ ID NO: 650219 - RNA, 21 nt, Human
ccuuccaccagacccucuucc

SEQ ID NO: 650220 - RNA, 19 nt, Human
uacauggauuaauaaaaag

SEQ ID NO: 650221 - RNA, 23 nt, Human
aaaaaaaaccaaaaaaaaacugg

SEQ ID NO: 650222 - RNA, 23 nt, Human
aaaaaaaccaaaaaaaaacuggc

SEQ ID NO: 650223 - RNA, 25 nt, Human
aaaaaaacuggcuccuuccccaggc

SEQ ID NO: 650224 - RNA, 27 nt, Human
aaaaaaccaaaaaaaaacuggccguua

SEQ ID NO: 650225 - RNA, 21 nt, Human
aaaaaacuaugaaauccuuaa

SEQ ID NO: 650226 - RNA, 24 nt, Human
aaaaaacuggcuccuuccccaggc

SEQ ID NO: 650227 - RNA, 20 nt, Human
aaaaaccaaaaaaaaacugg

SEQ ID NO: 650228 - RNA, 19 nt, Human
aaaaccaaaaaaaaacugg

SEQ ID NO: 650229 - RNA, 18 nt, Human
aaacuggcuccuucccca

SEQ ID NO: 650230 - RNA, 20 nt, Human
aaagcccagcccagagcuga

SEQ ID NO: 650231 - RNA, 21 nt, Human
aaagcccagcccagagcugac

SEQ ID NO: 650232 - RNA, 29 nt, Human
aaagggagcaguugcaguauuucagaggg

SEQ ID NO: 650233 - RNA, 20 nt, Human
aacaugaugaaacccugucu

SEQ ID NO: 650234 - RNA, 21 nt, Human
aacaugaugaaacccugucuc

SEQ ID NO: 650235 - RNA, 18 nt, Human
aagcccagcccagagcug

SEQ ID NO: 650236 - RNA, 25 nt, Human
aaggcaggcagaucacuugagguca

SEQ ID NO: 650237 - RNA, 21 nt, Human
aauguggugaaacccugucuc

SEQ ID NO: 650238 - RNA, 20 nt, Human
aauugcuugaaccugggugg

SEQ ID NO: 650239 - RNA, 23 nt, Human
acagccagugucacgcagaaagc

SEQ ID NO: 650240 - RNA, 22 nt, Human
acccuggguccuuucgggcccc

SEQ ID NO: 650241 - RNA, 24 nt, Human
acccugucucuacuaaaaauacaa

SEQ ID NO: 650242 - RNA, 20 nt, Human
acccugucucuacuaaauaa

SEQ ID NO: 650243 - RNA, 24 nt, Human
accuaaggucagggguuugagacu

SEQ ID NO: 650244 - RNA, 22 nt, Human
acugcagugaugcuucuggcuc

SEQ ID NO: 650245 - RNA, 24 nt, Human
acuugaggucaggaguucgagacc

SEQ ID NO: 650246 - RNA, 23 nt, Human
agaucacuugaggucaggaguuc

SEQ ID NO: 650247 - RNA, 24 nt, Human
agcagcuguguggcccccagaaag

SEQ ID NO: 650248 - RNA, 20 nt, Human
agccgggcaugauggcacgc

SEQ ID NO: 650249 - RNA, 24 nt, Human
agccuggccaacaugaugaaaccc

SEQ ID NO: 650250 - RNA, 22 nt, Human
agccuggccaauguggugaaac

SEQ ID NO: 650251 - RNA, 24 nt, Human
agccuggccaauguggugaaaccc

SEQ ID NO: 650252 - RNA, 25 nt, Human
agccuggccaauguggugaaacccu

SEQ ID NO: 650253 - RNA, 24 nt, Human
agcuguguggcccccagaaagccc

SEQ ID NO: 650254 - RNA, 26 nt, Human
aggcagaucacuugaggucaggaguu

SEQ ID NO: 650255 - RNA, 22 nt, Human
aggcaggauaauugcuugaacc

SEQ ID NO: 650256 - RNA, 24 nt, Human
aggcaggauaauugcuugaaccug

SEQ ID NO: 650257 - RNA, 26 nt, Human
aggcaggcagaucacuugaggucagg

SEQ ID NO: 650258 - RNA, 20 nt, Human
aggcugaggcaggauaauug

SEQ ID NO: 650259 - RNA, 24 nt, Human
aggcugaggcaggauaauugcuug

SEQ ID NO: 650260 - RNA, 22 nt, Human
agucaggcagcgggaugggcuc

SEQ ID NO: 650261 - RNA, 24 nt, Human
aguggcucacgccuguaaucccag

SEQ ID NO: 650262 - RNA, 19 nt, Human
auccauuuuuuugggcaac

SEQ ID NO: 650263 - RNA, 20 nt, Human
augaaauccuuaaaaaaaaa

SEQ ID NO: 650264 - RNA, 24 nt, Human
caacaucuccaaaaaaaaaaaaaa

SEQ ID NO: 650265 - RNA, 24 nt, Human
caacaugaugaaacccugucucua

SEQ ID NO: 650266 - RNA, 18 nt, Human
caagcacagccgaagcag

SEQ ID NO: 650267 - RNA, 24 nt, Human
caaggcaggcagaucacuugaggu

SEQ ID NO: 650268 - RNA, 23 nt, Human
caaggugaugcuguccgccuccu

SEQ ID NO: 650269 - RNA, 21 nt, Human
cacaaccaggccugagcaccc

SEQ ID NO: 650270 - RNA, 21 nt, Human
cacagccgaagcagagaaacc

SEQ ID NO: 650271 - RNA, 23 nt, Human
caccacagcggccagcuccaguc

SEQ ID NO: 650272 - RNA, 18 nt, Human
caccuaaggucagggguu

SEQ ID NO: 650273 - RNA, 24 nt, Human
caccuacucgggaggcugaggcag

SEQ ID NO: 650274 - RNA, 24 nt, Human
cacgccuguaaucccagcacucug

SEQ ID NO: 650275 - RNA, 23 nt, Human
cacuugaggucaggaguucgaga

SEQ ID NO: 650276 - RNA, 23 nt, Human
cagaaagcccagcccagagcuga

SEQ ID NO: 650277 - RNA, 24 nt, Human
cagaucacuugaggucaggaguuc

SEQ ID NO: 650278 - RNA, 27 nt, Human
cagaucacuugaggucaggaguucgag

SEQ ID NO: 650279 - RNA, 24 nt, Human
cagcacucugggaggccgaggcgg

SEQ ID NO: 650280 - RNA, 24 nt, Human
cagcacuuugggagaccaaggcag

SEQ ID NO: 650281 - RNA, 24 nt, Human
cagcacuuugggagaccaaggcag

SEQ ID NO: 650282 - RNA, 28 nt, Human
cagcagcauccucaguggggugacuggu

SEQ ID NO: 650283 - RNA, 21 nt, Human
cagcagcuguguggcccccag

SEQ ID NO: 650284 - RNA, 18 nt, Human
cagcugccggagauaccg

SEQ ID NO: 650285 - RNA, 24 nt, Human
caggcagaucacuugaggucagga

SEQ ID NO: 650286 - RNA, 18 nt, Human
cagggcagcccccucccu

SEQ ID NO: 650287 - RNA, 22 nt, Human
caugccacuucaagcacagccg

SEQ ID NO: 650288 - RNA, 24 nt, Human
caugccuguauucccagcacuuug

SEQ ID NO: 650289 - RNA, 26 nt, Human
ccaaaaaaaaacuggcuccuucccca

SEQ ID NO: 650290 - RNA, 19 nt, Human
ccacaagcagcuccucucc

SEQ ID NO: 650291 - RNA, 22 nt, Human
ccaccacagcggccagcuccag

SEQ ID NO: 650292 - RNA, 23 nt, Human
ccaccuaaggucagggguuugag

SEQ ID NO: 650293 - RNA, 25 nt, Human
ccagagcugacagccagugucacgc

SEQ ID NO: 650294 - RNA, 21 nt, Human
cccacaagcagcuccucucca

SEQ ID NO: 650295 - RNA, 23 nt, Human
cccagaaagcccagcccagagcu

SEQ ID NO: 650296 - RNA, 20 nt, Human
ccccagaaagcccagcccag

SEQ ID NO: 650297 - RNA, 21 nt, Human
ccccaggagcuacccgcugcc

SEQ ID NO: 650298 - RNA, 23 nt, Human
ccccaggagcuacccgcugccau

SEQ ID NO: 650299 - RNA, 22 nt, Human
cccccagaaagcccagcccaga

SEQ ID NO: 650300 - RNA, 20 nt, Human
cccgccgccucagcagcugu

SEQ ID NO: 650301 - RNA, 18 nt, Human
cccuucuugguccucuuc

SEQ ID NO: 650302 - RNA, 21 nt, Human
ccgccuccucacugcccacaa

SEQ ID NO: 650303 - RNA, 19 nt, Human
ccggagauaccggcccaag

SEQ ID NO: 650304 - RNA, 22 nt, Human
ccuaaggucagggguuugagac

SEQ ID NO: 650305 - RNA, 21 nt, Human
ccugagcacauauggcccagc

SEQ ID NO: 650306 - RNA, 22 nt, Human
ccuggccaacaugaugaaaccc

SEQ ID NO: 650307 - RNA, 24 nt, Human
ccuggccaacaugaugaaacccug

SEQ ID NO: 650308 - RNA, 22 nt, Human
ccuggccaauguggugaaaccc

SEQ ID NO: 650309 - RNA, 24 nt, Human
ccuggccaauguggugaaacccug

SEQ ID NO: 650310 - RNA, 18 nt, Human
ccuguaaucccagcacuc

SEQ ID NO: 650311 - RNA, 24 nt, Human
cgagaccagccuggccaauguggu

SEQ ID NO: 650312 - RNA, 25 nt, Human
cgccucaacccgccgccucagcagc

SEQ ID NO: 650313 - RNA, 24 nt, Human
cgccuguaaucccagcacucuggg

SEQ ID NO: 650314 - RNA, 23 nt, Human
cucacgccuguaaucccagcacu

SEQ ID NO: 650315 - RNA, 24 nt, Human
cucacgccuguaaucccagcacuc

SEQ ID NO: 650316 - RNA, 20 nt, Human
cucacugcccacaagcagcu

SEQ ID NO: 650317 - RNA, 23 nt, Human
cucaugccuguauucccagcacu

SEQ ID NO: 650318 - RNA, 24 nt, Human
cucaugccuguauucccagcacuu

SEQ ID NO: 650319 - RNA, 20 nt, Human
cuccacacaggccgcuaucc

SEQ ID NO: 650320 - RNA, 21 nt, Human
cucuacuaaaaauacaaaaag

SEQ ID NO: 650321 - RNA, 24 nt, Human
cugaccaccuaaggucagggguuu

SEQ ID NO: 650322 - RNA, 27 nt, Human
cugcacuagaggaaggcaguggagcag

SEQ ID NO: 650323 - RNA, 19 nt, Human
cugcagugaugcuucuggc

SEQ ID NO: 650324 - RNA, 24 nt, Human
cuggccaauguggugaaacccugu

SEQ ID NO: 650325 - RNA, 22 nt, Human
cuguccgccuccucacugccca

SEQ ID NO: 650326 - RNA, 22 nt, Human
cuuucgggccgccucaacccgc

SEQ ID NO: 650327 - RNA, 19 nt, Human
gaaacccugucucuacuaa

SEQ ID NO: 650328 - RNA, 24 nt, Human
gaccaccuaaggucagggguuuga

SEQ ID NO: 650329 - RNA, 21 nt, Human
gacuuacagucagcuuucccu

SEQ ID NO: 650330 - RNA, 20 nt, Human
gagacuagccuggccaacau

SEQ ID NO: 650331 - RNA, 25 nt, Human
gaggcgggcugaccaccuaagguca

SEQ ID NO: 650332 - RNA, 21 nt, Human
gagugcgguggcucaugccug

SEQ ID NO: 650333 - RNA, 24 nt, Human
gaucacuugaggucaggaguucga

SEQ ID NO: 650334 - RNA, 30 nt, Human
gcaacaucuccaaaaaaaaaaaaaaaaaaa

SEQ ID NO: 650335 - RNA, 24 nt, Human
gccaacaugaugaaacccugucuc

SEQ ID NO: 650336 - RNA, 24 nt, Human
gccaauguggugaaacccugucuc

SEQ ID NO: 650337 - RNA, 19 nt, Human
gccccaggagcuacccgcu

SEQ ID NO: 650338 - RNA, 18 nt, Human
gccccauggcaggccugu

SEQ ID NO: 650339 - RNA, 20 nt, Human
gccgaagcagagaaaccucu

SEQ ID NO: 650340 - RNA, 21 nt, Human
gccgcuauccacaaccaggcc

SEQ ID NO: 650341 - RNA, 20 nt, Human
gccucaacccgccgccucag

SEQ ID NO: 650342 - RNA, 21 nt, Human
gcugccggagauaccggccca

SEQ ID NO: 650343 - RNA, 24 nt, Human
ggccacaguggcucacgccuguaa

SEQ ID NO: 650344 - RNA, 21 nt, Human
ggccgagugcgguggcucaug

SEQ ID NO: 650345 - RNA, 19 nt, Human
ggguggacggagugggagg

SEQ ID NO: 650346 - RNA, 23 nt, Human
gguggcucaugccuguauuccca

SEQ ID NO: 650347 - RNA, 24 nt, Human
gguggcucaugccuguauucccag

SEQ ID NO: 650348 - RNA, 20 nt, Human
ggugggggagcccugcagca

SEQ ID NO: 650349 - RNA, 21 nt, Human
gugaaacccugucucuacuaa

SEQ ID NO: 650350 - RNA, 22 nt, Human
gugguuccugaguccaccacag

SEQ ID NO: 650351 - RNA, 26 nt, Human
uaaaaaaaaaaccaaaaaaaaacugg

SEQ ID NO: 650352 - RNA, 18 nt, Human
uagaggccgugugggggu

SEQ ID NO: 650353 - RNA, 24 nt, Human
uagccuggccaacaugaugaaacc

SEQ ID NO: 650354 - RNA, 23 nt, Human
uagguuggccacaguggcucacg

SEQ ID NO: 650355 - RNA, 21 nt, Human
ucacugcagugaugcuucugg

SEQ ID NO: 650356 - RNA, 22 nt, Human
ucacugcagugaugcuucuggc

SEQ ID NO: 650357 - RNA, 20 nt, Human
ucacuugaggucaggaguuc

SEQ ID NO: 650358 - RNA, 22 nt, Human
ucagcagcuguguggcccccag

SEQ ID NO: 650359 - RNA, 21 nt, Human
uccacacaggccgcuauccac

SEQ ID NO: 650360 - RNA, 23 nt, Human
uccacacaggccgcuauccacaa

SEQ ID NO: 650361 - RNA, 26 nt, Human
uccacacaggccgcuauccacaacca

SEQ ID NO: 650362 - RNA, 21 nt, Human
uccccaggcugccagcagcau

SEQ ID NO: 650363 - RNA, 21 nt, Human
ucccugacugggcaaaaggga

SEQ ID NO: 650364 - RNA, 21 nt, Human
ucccugagcacauauggccca

SEQ ID NO: 650365 - RNA, 27 nt, Human
ucccugagcacauauggcccagcccuu

SEQ ID NO: 650366 - RNA, 21 nt, Human
uccuuaaaaaaaaaaccaaaa

SEQ ID NO: 650367 - RNA, 23 nt, Human
ucgggaggcugaggcaggauaau

SEQ ID NO: 650368 - RNA, 20 nt, Human
ucuccaaaaaaaaaaaaaaa

SEQ ID NO: 650369 - RNA, 25 nt, Human
ucuccacacaggccgcuauccacaa

SEQ ID NO: 650370 - RNA, 21 nt, Human
ucucuacuaaaaauacaaaaa

SEQ ID NO: 650371 - RNA, 22 nt, Human
ucuuccaggcugcacuagagga

SEQ ID NO: 650372 - RNA, 24 nt, Human
ugaaauccuuaaaaaaaaaaccaa

SEQ ID NO: 650373 - RNA, 23 nt, Human
ugagacuagccuggccaacauga

SEQ ID NO: 650374 - RNA, 23 nt, Human
ugagcacccuggguccuuucggg

SEQ ID NO: 650375 - RNA, 24 nt, Human
ugagccagacagguaagcagagac

SEQ ID NO: 650376 - RNA, 24 nt, Human
ugaggcaggauaauugcuugaacc

SEQ ID NO: 650377 - RNA, 25 nt, Human
ugaggcaggauaauugcuugaaccu

SEQ ID NO: 650378 - RNA, 20 nt, Human
ugaugcuucuggcucagccc

SEQ ID NO: 650379 - RNA, 19 nt, Human
ugcccaagcugagccagac

SEQ ID NO: 650380 - RNA, 22 nt, Human
ugcccaagcugagccagacagg

SEQ ID NO: 650381 - RNA, 19 nt, Human
ugccuguauucccagcacu

SEQ ID NO: 650382 - RNA, 23 nt, Human
ugccuguauucccagcacuuugg

SEQ ID NO: 650383 - RNA, 24 nt, Human
uggcaggccugugugcaccacagg

SEQ ID NO: 650384 - RNA, 24 nt, Human
uggccaacaugaugaaacccuguc

SEQ ID NO: 650385 - RNA, 24 nt, Human
uggccaauguggugaaacccuguc

SEQ ID NO: 650386 - RNA, 19 nt, Human
uggccacaguggcucacgc

SEQ ID NO: 650387 - RNA, 24 nt, Human
uggccgagugcgguggcucaugcc

SEQ ID NO: 650388 - RNA, 22 nt, Human
uggcucacgccuguaaucccag

SEQ ID NO: 650389 - RNA, 24 nt, Human
uggcucacgccuguaaucccagca

SEQ ID NO: 650390 - RNA, 21 nt, Human
uggcucaugccuguauuccca

SEQ ID NO: 650391 - RNA, 24 nt, Human
uggcucaugccuguauucccagca

SEQ ID NO: 650392 - RNA, 24 nt, Human
ugggagaccaaggcaggcagauca

SEQ ID NO: 650393 - RNA, 18 nt, Human
ugggaggccgaggcgggc

SEQ ID NO: 650394 - RNA, 21 nt, Human
uggguggugguuucagugagc

SEQ ID NO: 650395 - RNA, 19 nt, Human
uggugaaacccugucucua

SEQ ID NO: 650396 - RNA, 27 nt, Human
uguguggcccccagaaagcccagccca

SEQ ID NO: 650397 - RNA, 21 nt, Human
uuacagucagcuuucccugac

SEQ ID NO: 650398 - RNA, 23 nt, Human
uucuugguccucuucuauccucc

SEQ ID NO: 650399 - RNA, 18 nt, Human
uugcuugaaccugggugg

SEQ ID NO: 650400 - RNA, 22 nt, Human
uuucagugagcccagauugcac

SEQ ID NO: 650401 - RNA, 21 nt, Human
uuuuugaggaaaaagaauggc

SEQ ID NO: 650402 - RNA, 19 nt, Human
uuuuuuuuuuuuuugagga

SEQ ID NO: 650403 - RNA, 18 nt, Human
uuuuuuuuuuuuuuuuug

SEQ ID NO: 650404 - RNA, 21 nt, Human
uuuuuuuuuuuuuuuuugagg

SEQ ID NO: 650405 - RNA, 19 nt, Human
aaacucagaaaagagacaa

SEQ ID NO: 650406 - RNA, 20 nt, Human
caaaacagagcaaaacaucc

SEQ ID NO: 650407 - RNA, 22 nt, Human
cagguaccaaaacagagcaaaa

SEQ ID NO: 650408 - RNA, 18 nt, Human
ccaaaacagagcaaaaca

SEQ ID NO: 650409 - RNA, 19 nt, Human
cucagaaaagagacaauuu

SEQ ID NO: 650410 - RNA, 23 nt, Human
ggagaaccaaauugaaacucaga

SEQ ID NO: 650411 - RNA, 20 nt, Human
guaaauauuagcugguugcu

SEQ ID NO: 650412 - RNA, 19 nt, Human
uaccaaaacagagcaaaac

SEQ ID NO: 650413 - RNA, 20 nt, Human
uaccaaaacagagcaaaaca

SEQ ID NO: 650414 - RNA, 23 nt, Human
uaccaaaacagagcaaaacaucc

SEQ ID NO: 650415 - RNA, 21 nt, Human
ucaaagggcuuucccaaaaaa

SEQ ID NO: 650416 - RNA, 18 nt, Human
ugaggcccaccagauccu

SEQ ID NO: 650417 - RNA, 22 nt, Human
uuucugaggcccaccagauccu

SEQ ID NO: 650418 - RNA, 23 nt, Human
uuucugaggcccaccagauccug

SEQ ID NO: 650419 - RNA, 25 nt, Human
uuucugaggcccaccagauccugau

SEQ ID NO: 650420 - RNA, 20 nt, Human
aacagagugagacuccaucu

SEQ ID NO: 650421 - RNA, 24 nt, Human
aaucacuugaaccugggaggugga

SEQ ID NO: 650422 - RNA, 18 nt, Human
aauuagccaggcauggug

SEQ ID NO: 650423 - RNA, 24 nt, Human
acugcacuccggccuggguaacag

SEQ ID NO: 650424 - RNA, 26 nt, Human
acugcacuccggccuggguaacagag

SEQ ID NO: 650425 - RNA, 24 nt, Human
acugcgccacugcacuccggccug

SEQ ID NO: 650426 - RNA, 20 nt, Human
agccaggcaugguggugggc

SEQ ID NO: 650427 - RNA, 22 nt, Human
aggcaugagaaucacuugaacc

SEQ ID NO: 650428 - RNA, 24 nt, Human
aggcaugagaaucacuugaaccug

SEQ ID NO: 650429 - RNA, 24 nt, Human
agguggagguugcagugagccgag

SEQ ID NO: 650430 - RNA, 22 nt, Human
cacuccggccuggguaacagag

SEQ ID NO: 650431 - RNA, 22 nt, Human
cacuccggccuggguaacagag

SEQ ID NO: 650432 - RNA, 24 nt, Human
cacuccggccuggguaacagagug

SEQ ID NO: 650433 - RNA, 18 nt, Human
cacugcacuccggccugg

SEQ ID NO: 650434 - RNA, 19 nt, Human
cacugcacuccggccuggg

SEQ ID NO: 650435 - RNA, 19 nt, Human
cacugcacuccggccuggg

SEQ ID NO: 650436 - RNA, 22 nt, Human
cacugcacuccggccuggguaa

SEQ ID NO: 650437 - RNA, 23 nt, Human
cacugcacuccggccuggguaac

SEQ ID NO: 650438 - RNA, 24 nt, Human
cacugcacuccggccuggguaaca

SEQ ID NO: 650439 - RNA, 21 nt, Human
cacuugaaccugggaggugga

SEQ ID NO: 650440 - RNA, 25 nt, Human
cagcuuuauuaaaccacgggauaac

SEQ ID NO: 650441 - RNA, 20 nt, Human
ccacugcacuccggccuggg

SEQ ID NO: 650442 - RNA, 20 nt, Human
ccacugcacuccggccuggg

SEQ ID NO: 650443 - RNA, 20 nt, Human
ccacugcacuccggccuggg

SEQ ID NO: 650444 - RNA, 21 nt, Human
ccacugcacuccggccugggu

SEQ ID NO: 650445 - RNA, 22 nt, Human
ccacugcacuccggccugggua

SEQ ID NO: 650446 - RNA, 24 nt, Human
ccacugcacuccggccuggguaac

SEQ ID NO: 650447 - RNA, 21 nt, Human
ccggccuggguaacagaguga

SEQ ID NO: 650448 - RNA, 21 nt, Human
ccugggagguggagguugcag

SEQ ID NO: 650449 - RNA, 22 nt, Human
ccuggguaacagagugagacuc

SEQ ID NO: 650450 - RNA, 24 nt, Human
cgggggacugaggcaugagaauca

SEQ ID NO: 650451 - RNA, 27 nt, Human
cuagcugcccuucuagcaaugcucccu

SEQ ID NO: 650452 - RNA, 18 nt, Human
cuguaaucccagcuacuc

SEQ ID NO: 650453 - RNA, 21 nt, Human
cuguaaucccagcuacucggg

SEQ ID NO: 650454 - RNA, 21 nt, Human
cuugaaccugggagguggagg

SEQ ID NO: 650455 - RNA, 24 nt, Human
gacuccaucuaguuguuacacaau

SEQ ID NO: 650456 - RNA, 23 nt, Human
gagaaucacuugaaccugggagg

SEQ ID NO: 650457 - RNA, 21 nt, Human
gagacugcgccacugcacucc

SEQ ID NO: 650458 - RNA, 23 nt, Human
gagguugcagugagccgagacug

SEQ ID NO: 650459 - RNA, 23 nt, Human
gcacuccggccuggguaacagag

SEQ ID NO: 650460 - RNA, 19 nt, Human
gccacugcacuccggccug

SEQ ID NO: 650461 - RNA, 24 nt, Human
gccacugcacuccggccuggguaa

SEQ ID NO: 650462 - RNA, 23 nt, Human
gccuggguaacagagugagacuc

SEQ ID NO: 650463 - RNA, 18 nt, Human
ggagguugcagugagccg

SEQ ID NO: 650464 - RNA, 20 nt, Human
ggagguugcagugagccgag

SEQ ID NO: 650465 - RNA, 22 nt, Human
ggagguugcagugagccgagac

SEQ ID NO: 650466 - RNA, 18 nt, Human
ggauaacggcugcccgca

SEQ ID NO: 650467 - RNA, 19 nt, Human
ggcaucuguaaucccagcu

SEQ ID NO: 650468 - RNA, 24 nt, Human
gguggugggcaucuguaaucccag

SEQ ID NO: 650469 - RNA, 22 nt, Human
uaacagagugagacuccaucua

SEQ ID NO: 650470 - RNA, 21 nt, Human
uaacggcugcccgcagccucc

SEQ ID NO: 650471 - RNA, 18 nt, Human
uacacaaugaagagcauu

SEQ ID NO: 650472 - RNA, 21 nt, Human
uagcugcccuucuagcaaugc

SEQ ID NO: 650473 - RNA, 19 nt, Human
ucacuugaaccugggaggu

SEQ ID NO: 650474 - RNA, 24 nt, Human
ucacuugaaccugggagguggagg

SEQ ID NO: 650475 - RNA, 24 nt, Human
uccggccuggguaacagagugaga

SEQ ID NO: 650476 - RNA, 21 nt, Human
ucuguaaucccagcuacucgg

SEQ ID NO: 650477 - RNA, 22 nt, Human
ucuguaaucccagcuacucggg

SEQ ID NO: 650478 - RNA, 24 nt, Human
ugaaccugggagguggagguugca

SEQ ID NO: 650479 - RNA, 22 nt, Human
ugagccgagacugcgccacugc

SEQ ID NO: 650480 - RNA, 20 nt, Human
ugaggcaugagaaucacuug

SEQ ID NO: 650481 - RNA, 24 nt, Human
ugaggcaugagaaucacuugaacc

SEQ ID NO: 650482 - RNA, 18 nt, Human
ugggagguggagguugca

SEQ ID NO: 650483 - RNA, 29 nt, Human
ugggagguggagguugcagugacaacggu

SEQ ID NO: 650484 - RNA, 24 nt, Human
ugggagguggagguugcagugagc

SEQ ID NO: 650485 - RNA, 21 nt, Human
uggugggcaucuguaauccca

SEQ ID NO: 650486 - RNA, 22 nt, Human
uggugggcaucuguaaucccag

SEQ ID NO: 650487 - RNA, 24 nt, Human
uuagccaggcaugguggugggcau

SEQ ID NO: 650488 - RNA, 24 nt, Human
uugaaccugggagguggagguugc

SEQ ID NO: 650489 - RNA, 18 nt, Human
uugcagugagccgagacu

SEQ ID NO: 650490 - RNA, 19 nt, Human
uugcagugagccgagacug

SEQ ID NO: 650491 - RNA, 20 nt, Human
uugcagugagccgagacugc

SEQ ID NO: 650492 - RNA, 22 nt, Human
uugcagugagccgagacugcgc

SEQ ID NO: 650493 - RNA, 20 nt, Human
uuuuuuuuuuuuuuuuuggu

SEQ ID NO: 650494 - RNA, 23 nt, Human
uuuuuuuuuuuuuuuuuggugag

SEQ ID NO: 650495 - RNA, 23 nt, Human
aaauaucaaguaaccauaaaaau

SEQ ID NO: 650496 - RNA, 19 nt, Human
aaccauaaaaauauucagc

SEQ ID NO: 650497 - RNA, 23 nt, Human
aagaaaucaugguacuucuuaga

SEQ ID NO: 650498 - RNA, 18 nt, Human
agccucaucauaagauaa

SEQ ID NO: 650499 - RNA, 24 nt, Human
cacagagccgcagagagcgcgucc

SEQ ID NO: 650500 - RNA, 18 nt, Human
cagcgagaaacggaggag

SEQ ID NO: 650501 - RNA, 20 nt, Human
ccgcuacacuccacggcggc

SEQ ID NO: 650502 - RNA, 24 nt, Human
ccgcuacacuccacggcggcgggg

SEQ ID NO: 650503 - RNA, 19 nt, Human
cgaagcagcgagaaacgga

SEQ ID NO: 650504 - RNA, 19 nt, Human
cggccgcugccggcgcuca

SEQ ID NO: 650505 - RNA, 24 nt, Human
cggcgagcccuuuccgcuacacuc

SEQ ID NO: 650506 - RNA, 21 nt, Human
cucacuacgccggcagccgcc

SEQ ID NO: 650507 - RNA, 21 nt, Human
cuccacggcggcgggcucacu

SEQ ID NO: 650508 - RNA, 22 nt, Human
gccgcagagagcgcgucccgaa

SEQ ID NO: 650509 - RNA, 21 nt, Human
ucagguuuuuuuuuuuuuugg

SEQ ID NO: 650510 - RNA, 22 nt, Human
uuagagcaauuugcaaaagggg

SEQ ID NO: 650511 - RNA, 20 nt, Human
aaaaagccuucuuaaccuuu

SEQ ID NO: 650512 - RNA, 21 nt, Human
aaccugucuccucagcugcug

SEQ ID NO: 650513 - RNA, 18 nt, Human
agagcaaaaaagccuucu

SEQ ID NO: 650514 - RNA, 23 nt, Human
agccagcucaaaccugucuccuc

SEQ ID NO: 650515 - RNA, 21 nt, Human
aggcaggagguggcgaucccg

SEQ ID NO: 650516 - RNA, 22 nt, Human
aggcaggagguggcgaucccgg

SEQ ID NO: 650517 - RNA, 21 nt, Human
aggcagggccggacccuggug

SEQ ID NO: 650518 - RNA, 23 nt, Human
agggggcugccgcgcuccgggcc

SEQ ID NO: 650519 - RNA, 18 nt, Human
cagagcaaaaaagccuuc

SEQ ID NO: 650520 - RNA, 23 nt, Human
cagccagcucaaaccugucuccu

SEQ ID NO: 650521 - RNA, 18 nt, Human
ccagcccggcgaacaucc

SEQ ID NO: 650522 - RNA, 18 nt, Human
ccgccgggcagccuuggg

SEQ ID NO: 650523 - RNA, 18 nt, Human
ccuggcucgggugggggg

SEQ ID NO: 650524 - RNA, 18 nt, Human
cgagaaggcaggaggugg

SEQ ID NO: 650525 - RNA, 25 nt, Human
cggcgaggucccaggucauacgggg

SEQ ID NO: 650526 - RNA, 24 nt, Human
cuccucuacacucaccaacuucuc

SEQ ID NO: 650527 - RNA, 22 nt, Human
cuucagccagcucaaaccuguc

SEQ ID NO: 650528 - RNA, 19 nt, Human
cuuccuccuuucagccucc

SEQ ID NO: 650529 - RNA, 24 nt, Human
cuuucagccuccucuacacucacc

SEQ ID NO: 650530 - RNA, 21 nt, Human
gaacauccgaacagccgagaa

SEQ ID NO: 650531 - RNA, 24 nt, Human
ggaaguccuggcucgggugggggg

SEQ ID NO: 650532 - RNA, 22 nt, Human
ggcucggagcagggggcugccg

SEQ ID NO: 650533 - RNA, 23 nt, Human
ggcucgggugggggggcaguccu

SEQ ID NO: 650534 - RNA, 19 nt, Human
ggugggggggcagucccgg

SEQ ID NO: 650535 - RNA, 21 nt, Human
uaaguugcaaaaacacauuaa

SEQ ID NO: 650536 - RNA, 24 nt, Human
uacagagcaaaaaagccuucuuaa

SEQ ID NO: 650537 - RNA, 24 nt, Human
uacggagggacccaggaggucucg

SEQ ID NO: 650538 - RNA, 24 nt, Human
uccagcuacggagggacccaggag

SEQ ID NO: 650539 - RNA, 18 nt, Human
uccaggcuacagagcaaa

SEQ ID NO: 650540 - RNA, 22 nt, Human
uccuuucagccuccucuacacu

SEQ ID NO: 650541 - RNA, 23 nt, Human
ucgggacggcgaggucccagguc

SEQ ID NO: 650542 - RNA, 19 nt, Human
ucucugauaggugggcaga

SEQ ID NO: 650543 - RNA, 21 nt, Human
ugauaggugggcagaccucuu

SEQ ID NO: 650544 - RNA, 20 nt, Human
ugggcagaccucuuccugcu

SEQ ID NO: 650545 - RNA, 18 nt, Human
ugucccuucuccugaugu

SEQ ID NO: 650546 - RNA, 20 nt, Human
uucugcuucucugauaggug

SEQ ID NO: 650547 - RNA, 23 nt, Human
uugcaaaaacacauuaagcuccu

SEQ ID NO: 650548 - RNA, 25 nt, Human
uuggggcagaggugcagggaggcag

SEQ ID NO: 650549 - RNA, 21 nt, Human
uuuuuuuuuuuuuuuuuacag

SEQ ID NO: 650550 - RNA, 21 nt, Human
acccgccccgcgcucggaccc

SEQ ID NO: 650551 - RNA, 23 nt, Human
acgcagcccaggccgaggcccuu

SEQ ID NO: 650552 - RNA, 21 nt, Human
acugcaaggaguauuucaaaa

SEQ ID NO: 650553 - RNA, 21 nt, Human
acuucuuuuaaagaaggugau

SEQ ID NO: 650554 - RNA, 23 nt, Human
agcccaggccgaggcccuucggc

SEQ ID NO: 650555 - RNA, 21 nt, Human
auggcgcugaggaacgcuuua

SEQ ID NO: 650556 - RNA, 27 nt, Human
caggccgaggcccuucggcaacccgcc

SEQ ID NO: 650557 - RNA, 24 nt, Human
ccccgcgcucggacccagccacuc

SEQ ID NO: 650558 - RNA, 19 nt, Human
ccccggugccugccggugg

SEQ ID NO: 650559 - RNA, 20 nt, Human
ccggugccugccggugcugu

SEQ ID NO: 650560 - RNA, 22 nt, Human
ccguccccgcucuccagcacgc

SEQ ID NO: 650561 - RNA, 22 nt, Human
ccucagcggugucggagaaaga

SEQ ID NO: 650562 - RNA, 18 nt, Human
ccuguugcugcagccucu

SEQ ID NO: 650563 - RNA, 18 nt, Human
cgcucggacccagccacu

SEQ ID NO: 650564 - RNA, 22 nt, Human
cucgcggaccuuuucucugucg

SEQ ID NO: 650565 - RNA, 19 nt, Human
gaaaaugcuuuuacuguau

SEQ ID NO: 650566 - RNA, 20 nt, Human
gaccuguugcugcagccucu

SEQ ID NO: 650567 - RNA, 19 nt, Human
gcucuccagcacgcagccc

SEQ ID NO: 650568 - RNA, 21 nt, Human
ggaccuguugcugcagccucu

SEQ ID NO: 650569 - RNA, 22 nt, Human
uaagugaagaucaaaugacccc

SEQ ID NO: 650570 - RNA, 18 nt, Human
uaugacaccaacaacgug

SEQ ID NO: 650571 - RNA, 23 nt, Human
uauugaauaugacaccaacaacg

SEQ ID NO: 650572 - RNA, 24 nt, Human
ucgcggaccuuuucucugucgcuc

SEQ ID NO: 650573 - RNA, 21 nt, Human
ugaggaacgcuuuagagccga

SEQ ID NO: 650574 - RNA, 22 nt, Human
uuuaguuuuuucaauaccuucu

SEQ ID NO: 650575 - RNA, 18 nt, Human
uuuccgggcggauggcgc

SEQ ID NO: 650576 - RNA, 24 nt, Human
uuuccgggcggauggcgcugagga

SEQ ID NO: 650577 - RNA, 26 nt, Human
uuuuuuuuuuuuuuuuuuuaguuuuu

SEQ ID NO: 650578 - RNA, 24 nt, Human
aaaaaauaucagagauacuaaaac

SEQ ID NO: 650579 - RNA, 23 nt, Human
aaaaagaccucauacagucugcu

SEQ ID NO: 650580 - RNA, 21 nt, Human
aaacauaacuuuuaagagcaa

SEQ ID NO: 650581 - RNA, 21 nt, Human
aaacauauguagugaaaaaga

SEQ ID NO: 650582 - RNA, 21 nt, Human
aaacauucauacaaaaacaua

SEQ ID NO: 650583 - RNA, 20 nt, Human
aaauauagcuacacaaaacc

SEQ ID NO: 650584 - RNA, 24 nt, Human
aaauauagcuacacaaaaccagaa

SEQ ID NO: 650585 - RNA, 22 nt, Human
aaauaucagagauacuaaaacu

SEQ ID NO: 650586 - RNA, 20 nt, Human
aaaugcuaaagguuuacauu

SEQ ID NO: 650587 - RNA, 18 nt, Human
aaccauauaacucccaaa

SEQ ID NO: 650588 - RNA, 27 nt, Human
aaguaaauauaaauuagccaaguccau

SEQ ID NO: 650589 - RNA, 21 nt, Human
aagugguauuuuaaaaaaaga

SEQ ID NO: 650590 - RNA, 20 nt, Human
acacucuacaagaauguaaa

SEQ ID NO: 650591 - RNA, 18 nt, Human
acauucauacaugacaug

SEQ ID NO: 650592 - RNA, 23 nt, Human
agugaaacauaacuuuuaagagc

SEQ ID NO: 650593 - RNA, 18 nt, Human
caaaaaauaucagagaua

SEQ ID NO: 650594 - RNA, 22 nt, Human
caagaacacucuacaagaaugu

SEQ ID NO: 650595 - RNA, 23 nt, Human
cacaguaucucagugugaacaaa

SEQ ID NO: 650596 - RNA, 22 nt, Human
caccagcagugguauuaaaccc

SEQ ID NO: 650597 - RNA, 25 nt, Human
cacuuucaccucaaugaaauugaag

SEQ ID NO: 650598 - RNA, 24 nt, Human
cagacgugcaauaaucugaaauua

SEQ ID NO: 650599 - RNA, 22 nt, Human
cagcagugguauuaaaccccaa

SEQ ID NO: 650600 - RNA, 22 nt, Human
cauauucaccuuuuuccuuaga

SEQ ID NO: 650601 - RNA, 18 nt, Human
cauuccagaauuugguuc

SEQ ID NO: 650602 - RNA, 19 nt, Human
cauuuuacauacacaguau

SEQ ID NO: 650603 - RNA, 25 nt, Human
cccagccucggcgcugacgaccagc

SEQ ID NO: 650604 - RNA, 22 nt, Human
cgcugacgaccagcgcccggca

SEQ ID NO: 650605 - RNA, 23 nt, Human
cucagcccagccucggcgcugac

SEQ ID NO: 650606 - RNA, 18 nt, Human
cugaaauuauuauaaucu

SEQ ID NO: 650607 - RNA, 21 nt, Human
cuguaaaccauucuaaaucac

SEQ ID NO: 650608 - RNA, 23 nt, Human
cugugaggaauaucuagcuauau

SEQ ID NO: 650609 - RNA, 24 nt, Human
cuugaaggacuacugcagagaaau

SEQ ID NO: 650610 - RNA, 25 nt, Human
gcacaaagaaagguuauauuuuauc

SEQ ID NO: 650611 - RNA, 19 nt, Human
gcacuuucaccucaaugaa

SEQ ID NO: 650612 - RNA, 22 nt, Human
ggauauuuuuccacuucaaugu

SEQ ID NO: 650613 - RNA, 20 nt, Human
ggaugaugugugaaccacca

SEQ ID NO: 650614 - RNA, 24 nt, Human
ggugcagagaguguuucaagaaca

SEQ ID NO: 650615 - RNA, 19 nt, Human
gucaggcauauuaaggaug

SEQ ID NO: 650616 - RNA, 25 nt, Human
uaaaaaaagaccucauacagucugc

SEQ ID NO: 650617 - RNA, 24 nt, Human
uaaaaaagcaaaaaaauagaaaua

SEQ ID NO: 650618 - RNA, 23 nt, Human
uaaaauauagcuacacaaaacca

SEQ ID NO: 650619 - RNA, 22 nt, Human
uaaauauaaauuagccaagucc

SEQ ID NO: 650620 - RNA, 18 nt, Human
uaagagcaagaaaucugc

SEQ ID NO: 650621 - RNA, 24 nt, Human
uaauaauuaaggcauuuuacauac

SEQ ID NO: 650622 - RNA, 22 nt, Human
uacaggaaugaaaaauauuaga

SEQ ID NO: 650623 - RNA, 26 nt, Human
uaccaaauaaccauauaacucccaaa

SEQ ID NO: 650624 - RNA, 24 nt, Human
uagcuacacaaaaccagaacucag

SEQ ID NO: 650625 - RNA, 19 nt, Human
uagugguuucauuacgugg

SEQ ID NO: 650626 - RNA, 18 nt, Human
uaguuuuuuaaaacagau

SEQ ID NO: 650627 - RNA, 18 nt, Human
uauaaaauauagcuacac

SEQ ID NO: 650628 - RNA, 18 nt, Human
uauuaaggaugggaugau

SEQ ID NO: 650629 - RNA, 30 nt, Human
ucaagaacacucuacaagaauguaaacccc

SEQ ID NO: 650630 - RNA, 23 nt, Human
ugaaacauaacuuuuaagagcaa

SEQ ID NO: 650631 - RNA, 21 nt, Human
ugaugauuggucuuggugguu

SEQ ID NO: 650632 - RNA, 21 nt, Human
ugcagagaaauucaauuacua

SEQ ID NO: 650633 - RNA, 23 nt, Human
uggccucuuaaauaacucaccuc

SEQ ID NO: 650634 - RNA, 22 nt, Human
ugggaugaugugugaaccacca

SEQ ID NO: 650635 - RNA, 23 nt, Human
ugggaugaugugugaaccaccag

SEQ ID NO: 650636 - RNA, 21 nt, Human
ugguauuuuaaaaaaagaccu

SEQ ID NO: 650637 - RNA, 24 nt, Human
uuaaaaaagcaaaaaaauagaaau

SEQ ID NO: 650638 - RNA, 21 nt, Human
uuaaaacagauauugguauca

SEQ ID NO: 650639 - RNA, 21 nt, Human
uuaaauaacucaccucucaaa

SEQ ID NO: 650640 - RNA, 23 nt, Human
uuaaggcauuuuacauacacagu

SEQ ID NO: 650641 - RNA, 23 nt, Human
uucaagaacacucuacaagaaug

SEQ ID NO: 650642 - RNA, 21 nt, Human
uuccuagugguaaguccuguc

SEQ ID NO: 650643 - RNA, 19 nt, Human
uugaaggacuacugcagag

SEQ ID NO: 650644 - RNA, 21 nt, Human
uuggaauuuaaaauacaagau

SEQ ID NO: 650645 - RNA, 19 nt, Human
uuggugguuccuaguggua

SEQ ID NO: 650646 - RNA, 19 nt, Human
uuuaaaacagauauuggua

SEQ ID NO: 650647 - RNA, 22 nt, Human
uuucagucuuuucaacauaaga

SEQ ID NO: 650648 - RNA, 18 nt, Human
aaaaaaaaaaugaaaggu

SEQ ID NO: 650649 - RNA, 20 nt, Human
aaaaagcagcacaaauacuu

SEQ ID NO: 650650 - RNA, 19 nt, Human
aagcagcacaaauacuugc

SEQ ID NO: 650651 - RNA, 25 nt, Human
acccugccacccacgacagaaacaa

SEQ ID NO: 650652 - RNA, 21 nt, Human
agaaacaggccgggaguccac

SEQ ID NO: 650653 - RNA, 19 nt, Human
auguuuacaucucuuugca

SEQ ID NO: 650654 - RNA, 19 nt, Human
cacccuacaaaucaucaua

SEQ ID NO: 650655 - RNA, 19 nt, Human
cagcucuaaacggcgccag

SEQ ID NO: 650656 - RNA, 20 nt, Human
ccacgacagaaacaagcacu

SEQ ID NO: 650657 - RNA, 25 nt, Human
cccacgacagaaacaagcacugagc

SEQ ID NO: 650658 - RNA, 22 nt, Human
cgggcccggggacagaaaccag

SEQ ID NO: 650659 - RNA, 19 nt, Human
gcuugaggggccuuggccc

SEQ ID NO: 650660 - RNA, 19 nt, Human
gcuuuuuuuuuuuccucca

SEQ ID NO: 650661 - RNA, 21 nt, Human
ggacagaaaccagacguucca

SEQ ID NO: 650662 - RNA, 20 nt, Human
ggauggcuuuuuuuuuuucc

SEQ ID NO: 650663 - RNA, 23 nt, Human
ggcaggaagggguggcuccaggu

SEQ ID NO: 650664 - RNA, 20 nt, Human
ggcaggaagggguggcuccg

SEQ ID NO: 650665 - RNA, 18 nt, Human
gggcaggaagggguggcu

SEQ ID NO: 650666 - RNA, 21 nt, Human
gguggcuccaggucucacugu

SEQ ID NO: 650667 - RNA, 24 nt, Human
gugcuugaggggccuuggcccugu

SEQ ID NO: 650668 - RNA, 22 nt, Human
uauuuuuuaagugugaauguaa

SEQ ID NO: 650669 - RNA, 18 nt, Human
uccaaaaagcagcacaaa

SEQ ID NO: 650670 - RNA, 22 nt, Human
uccacgggcucccagcucuaaa

SEQ ID NO: 650671 - RNA, 19 nt, Human
uccagggagaaggggagaa

SEQ ID NO: 650672 - RNA, 19 nt, Human
ucuccaaaaagcagcacaa

SEQ ID NO: 650673 - RNA, 22 nt, Human
ucugcagucaugcauuuaguuu

SEQ ID NO: 650674 - RNA, 22 nt, Human
uguauguuuacaucucuuugca

SEQ ID NO: 650675 - RNA, 21 nt, Human
uucaagaaaaaaaaaaugaaa

SEQ ID NO: 650676 - RNA, 24 nt, Human
uucaagaaaaaaaaaaugaaaggu

SEQ ID NO: 650677 - RNA, 24 nt, Human
uugccucauuggauggcuuuuuuu

SEQ ID NO: 650678 - RNA, 20 nt, Human
uuuuuuuuuuuccuccaggg

SEQ ID NO: 650679 - RNA, 18 nt, Human
accccgcccggcgcagga

SEQ ID NO: 650680 - RNA, 18 nt, Human
agcccugcgaccuggccc

SEQ ID NO: 650681 - RNA, 23 nt, Human
agcccugcgaccuggcccuuccg

SEQ ID NO: 650682 - RNA, 19 nt, Human
caggagcaguuggcugccu

SEQ ID NO: 650683 - RNA, 22 nt, Human
ccaccuuaucuuuguccuccuc

SEQ ID NO: 650684 - RNA, 19 nt, Human
cccgccgccugcagcucca

SEQ ID NO: 650685 - RNA, 18 nt, Human
ccggcgcucggagccgcu

SEQ ID NO: 650686 - RNA, 18 nt, Human
ccuccagacagauaagcc

SEQ ID NO: 650687 - RNA, 19 nt, Human
ccuccagacagauaagccc

SEQ ID NO: 650688 - RNA, 22 nt, Human
ccuccagacagauaagccccug

SEQ ID NO: 650689 - RNA, 21 nt, Human
cgccugcagcuccaggagccc

SEQ ID NO: 650690 - RNA, 20 nt, Human
cgcucggagccgcuggcggc

SEQ ID NO: 650691 - RNA, 26 nt, Human
cuccaggagcccugcgaccuggcccu

SEQ ID NO: 650692 - RNA, 20 nt, Human
gacagauaagccccugcaug

SEQ ID NO: 650693 - RNA, 23 nt, Human
ggcgacgaccccgcccggcgcag

SEQ ID NO: 650694 - RNA, 19 nt, Human
ugagucaagcauuuguagc

SEQ ID NO: 650695 - RNA, 20 nt, Human
ugagucaagcauuuguagcc

SEQ ID NO: 650696 - RNA, 24 nt, Human
uuccggcgcucggagccgcuggcg

SEQ ID NO: 650697 - RNA, 20 nt, Human
uuuuuuuuuuuuuuucccaa

SEQ ID NO: 650698 - RNA, 24 nt, Human
uuuuuuuuuuuuuuuuuucccaag

SEQ ID NO: 650699 - RNA, 19 nt, Human
aaaacaaaaaaguaaggac

SEQ ID NO: 650700 - RNA, 21 nt, Human
aaaaccuuuauaaccaccagg

SEQ ID NO: 650701 - RNA, 19 nt, Human
aacaaaaaaguaaggaccu

SEQ ID NO: 650702 - RNA, 23 nt, Human
aagaaaaacgauuuuagggucca

SEQ ID NO: 650703 - RNA, 22 nt, Human
acaaaaacauuuuccuaaacca

SEQ ID NO: 650704 - RNA, 18 nt, Human
aggaaggaaaacaaaaaa

SEQ ID NO: 650705 - RNA, 18 nt, Human
cacugcuggaaauuaucc

SEQ ID NO: 650706 - RNA, 20 nt, Human
cauuggaaauugaagggagu

SEQ ID NO: 650707 - RNA, 19 nt, Human
ccaccagaugucccuccuc

SEQ ID NO: 650708 - RNA, 21 nt, Human
ccuccucccucuaggaacaaa

SEQ ID NO: 650709 - RNA, 22 nt, Human
cguggaccaccagaugucccuc

SEQ ID NO: 650710 - RNA, 21 nt, Human
cucaggaaggaaaacaaaaaa

SEQ ID NO: 650711 - RNA, 20 nt, Human
cucccucuaggaacaaaaac

SEQ ID NO: 650712 - RNA, 20 nt, Human
cuccucccucuaggaacaaa

SEQ ID NO: 650713 - RNA, 25 nt, Human
cuccuuguccagagucaccacuguu

SEQ ID NO: 650714 - RNA, 18 nt, Human
cugggcugcucaccugag

SEQ ID NO: 650715 - RNA, 19 nt, Human
gcuggguaaaaggcaaggc

SEQ ID NO: 650716 - RNA, 18 nt, Human
uaaaaggcaaggcuacca

SEQ ID NO: 650717 - RNA, 25 nt, Human
uacuugaauaguuccaucaggauga

SEQ ID NO: 650718 - RNA, 19 nt, Human
uauacauucacagcuugac

SEQ ID NO: 650719 - RNA, 19 nt, Human
ucaugagggcaaagacuac

SEQ ID NO: 650720 - RNA, 23 nt, Human
uccucuaacagauccccggcuau

SEQ ID NO: 650721 - RNA, 20 nt, Human
ucguugucucuuucugggcu

SEQ ID NO: 650722 - RNA, 18 nt, Human
ucugugcuggguaaaagg

SEQ ID NO: 650723 - RNA, 24 nt, Human
ugggaauaaggugcuccagaauac

SEQ ID NO: 650724 - RNA, 21 nt, Human
uuaaagguuucguugucucuu

SEQ ID NO: 650725 - RNA, 20 nt, Human
uugcugcuuaagaaaaacga

SEQ ID NO: 650726 - RNA, 18 nt, Human
uuucguugucucuuucug

SEQ ID NO: 650727 - RNA, 21 nt, Human
uuuuuuuuuugcauguaacuu

SEQ ID NO: 650728 - RNA, 18 nt, Human
uuuuuuuuuuuuuuuuug

SEQ ID NO: 650729 - RNA, 21 nt, Human
uuuuuuuuuuuuuuuuugcau

SEQ ID NO: 650730 - RNA, 25 nt, Human
uuuuuuuuuuuuuuuuugcauguaa

SEQ ID NO: 650731 - RNA, 19 nt, Human
agcccacccuccuguccca

SEQ ID NO: 650732 - RNA, 18 nt, Human
caccucuccccucuggcc

SEQ ID NO: 650733 - RNA, 18 nt, Human
cagcccacccuccugucc

SEQ ID NO: 650734 - RNA, 20 nt, Human
cccagggggagcaccucucc

SEQ ID NO: 650735 - RNA, 18 nt, Human
ccccucuggccaccacuc

SEQ ID NO: 650736 - RNA, 18 nt, Human
ccgggagcugcucugagc

SEQ ID NO: 650737 - RNA, 23 nt, Human
ccucuggccaccacucugcuggg

SEQ ID NO: 650738 - RNA, 19 nt, Human
gaggagggcagggcagggc

SEQ ID NO: 650739 - RNA, 23 nt, Human
gccuuguuccugcaggccagggu

SEQ ID NO: 650740 - RNA, 22 nt, Human
gugccccugccgggagcugcuc

SEQ ID NO: 650741 - RNA, 21 nt, Human
ucaugaggagggcagggcagg

SEQ ID NO: 650742 - RNA, 21 nt, Human
ugcccaccagcccacccuccu

SEQ ID NO: 650743 - RNA, 21 nt, Human
ugccccugccgggagcugcuc

SEQ ID NO: 650744 - RNA, 23 nt, Human
ugccccugccgggagcugcucug

SEQ ID NO: 650745 - RNA, 20 nt, Human
ugccuuguuccugcaggcca

SEQ ID NO: 650746 - RNA, 24 nt, Human
uuuuuuuugccgugagugccccug

SEQ ID NO: 650747 - RNA, 21 nt, Human
uuuuuuuuuuuuuugccguga

SEQ ID NO: 650748 - RNA, 22 nt, Human
uuuuuuuuuuuuuuuuugccgu

SEQ ID NO: 650749 - RNA, 25 nt, Human
uuuuuuuuuuuuuuuuuugccguga

SEQ ID NO: 650750 - RNA, 27 nt, Human
uuuuuuuuuuuuuuuuuuuuuuugggg

SEQ ID NO: 650751 - RNA, 19 nt, Human
aagcuggccgugccaaguu

SEQ ID NO: 650752 - RNA, 24 nt, Human
agucagcaaaguucuuuauugggu

SEQ ID NO: 650753 - RNA, 19 nt, Human
ccgugauagcgggacuucc

SEQ ID NO: 650754 - RNA, 23 nt, Human
gugauagcgggacuuccaaacac

SEQ ID NO: 650755 - RNA, 20 nt, Human
uccugggucccaagcuggcc

SEQ ID NO: 650756 - RNA, 22 nt, Human
uuaguagucagcaaaguucuuu

SEQ ID NO: 650757 - RNA, 18 nt, Human
aacagcuuccucuggugu

SEQ ID NO: 650758 - RNA, 24 nt, Human
accgcaguccccuucccccccccc

SEQ ID NO: 650759 - RNA, 20 nt, Human
acggggucaugccaaacaga

SEQ ID NO: 650760 - RNA, 18 nt, Human
acggguccccugggcugg

SEQ ID NO: 650761 - RNA, 20 nt, Human
agaggcuccccgcacacugg

SEQ ID NO: 650762 - RNA, 22 nt, Human
aggccaucauggcuucccaugg

SEQ ID NO: 650763 - RNA, 19 nt, Human
agggccccgcccuccaccc

SEQ ID NO: 650764 - RNA, 20 nt, Human
aggugcggccgucccugacu

SEQ ID NO: 650765 - RNA, 22 nt, Human
cacaacaacccugugagguagg

SEQ ID NO: 650766 - RNA, 21 nt, Human
cacaucagggccccgcccucc

SEQ ID NO: 650767 - RNA, 19 nt, Human
cagaaagaugaggccugcg

SEQ ID NO: 650768 - RNA, 22 nt, Human
cagagccaggagacacgggguc

SEQ ID NO: 650769 - RNA, 24 nt, Human
cagcucggcccgcuuccccugcag

SEQ ID NO: 650770 - RNA, 19 nt, Human
caggagccgggccacagag

SEQ ID NO: 650771 - RNA, 23 nt, Human
cagggcggggccgugugugggcc

SEQ ID NO: 650772 - RNA, 21 nt, Human
ccacagagcggcgggcggccu

SEQ ID NO: 650773 - RNA, 24 nt, Human
ccagggcggggccgugugugggcc

SEQ ID NO: 650774 - RNA, 19 nt, Human
ccccccagacuguggucaa

SEQ ID NO: 650775 - RNA, 21 nt, Human
ccccgcgcuggacuugcugac

SEQ ID NO: 650776 - RNA, 18 nt, Human
cccgcgccucggccaucc

SEQ ID NO: 650777 - RNA, 23 nt, Human
cccgcggcacagaaagaugaggc

SEQ ID NO: 650778 - RNA, 20 nt, Human
ccuccaccccccgcauucuc

SEQ ID NO: 650779 - RNA, 19 nt, Human
ccugcagcccagcuuuacc

SEQ ID NO: 650780 - RNA, 22 nt, Human
ccugcgcucaaggccccagggc

SEQ ID NO: 650781 - RNA, 21 nt, Human
cggagucccgcggcacagaaa

SEQ ID NO: 650782 - RNA, 25 nt, Human
cuccaugcuaggccaucauggcuuc

SEQ ID NO: 650783 - RNA, 21 nt, Human
cugcagagccaggagacacgg

SEQ ID NO: 650784 - RNA, 24 nt, Human
cugguguccaccgcaguccccuuc

SEQ ID NO: 650785 - RNA, 21 nt, Human
gagcaggagccgggccacaga

SEQ ID NO: 650786 - RNA, 21 nt, Human
gcaggugcggccgucccugac

SEQ ID NO: 650787 - RNA, 23 nt, Human
ggcaaugacugguucaagaggaa

SEQ ID NO: 650788 - RNA, 23 nt, Human
ggcaggugcggccgucccugacu

SEQ ID NO: 650789 - RNA, 18 nt, Human
ggccugaggugcgcacug

SEQ ID NO: 650790 - RNA, 18 nt, Human
ggccugcagagccaggag

SEQ ID NO: 650791 - RNA, 22 nt, Human
gggccacagagcggcgggcggc

SEQ ID NO: 650792 - RNA, 20 nt, Human
gggccccgcccuccaccccc

SEQ ID NO: 650793 - RNA, 20 nt, Human
gggcggggccgugugugggc

SEQ ID NO: 650794 - RNA, 22 nt, Human
gggcggggccgugugugggccu

SEQ ID NO: 650795 - RNA, 23 nt, Human
gggcugggcugccugccucucug

SEQ ID NO: 650796 - RNA, 22 nt, Human
gugagcgggcagcuccaugcag

SEQ ID NO: 650797 - RNA, 24 nt, Human
uaaacuuucccucaacuuccaggc

SEQ ID NO: 650798 - RNA, 18 nt, Human
uagcccccgcgcuggacu

SEQ ID NO: 650799 - RNA, 22 nt, Human
uccaacaucacaacaggaaaca

SEQ ID NO: 650800 - RNA, 22 nt, Human
uccaggcagggccugggaacag

SEQ ID NO: 650801 - RNA, 20 nt, Human
uccaguuucugccgucuggg

SEQ ID NO: 650802 - RNA, 19 nt, Human
uccccgcacacuggagccg

SEQ ID NO: 650803 - RNA, 21 nt, Human
uccccugggcugggcugccug

SEQ ID NO: 650804 - RNA, 19 nt, Human
uccccuuccccccccccca

SEQ ID NO: 650805 - RNA, 23 nt, Human
uccccuucccccccccccagacu

SEQ ID NO: 650806 - RNA, 18 nt, Human
ucccgcgccucggccacc

SEQ ID NO: 650807 - RNA, 26 nt, Human
ucuacuccacaucagggccccgcccu

SEQ ID NO: 650808 - RNA, 20 nt, Human
ugacuccagcacaugaacac

SEQ ID NO: 650809 - RNA, 24 nt, Human
ugagccucacaacaacccugugag

SEQ ID NO: 650810 - RNA, 18 nt, Human
ugcagagccaggagacac

SEQ ID NO: 650811 - RNA, 18 nt, Human
uggaaugucccgcgccuc

SEQ ID NO: 650812 - RNA, 18 nt, Human
uggaaugucccgcgccuc

SEQ ID NO: 650813 - RNA, 22 nt, Human
uggaaugucccgcgccucggcc

SEQ ID NO: 650814 - RNA, 18 nt, Human
uuuuuuuuuuuuuuuuug

SEQ ID NO: 650815 - RNA, 20 nt, Human
uuuuuuuuuuuuuuuuugcu

SEQ ID NO: 650816 - RNA, 22 nt, Human
uuuuuuuuuuuuuuuuugcuga

SEQ ID NO: 650817 - RNA, 21 nt, Human
agcagugguagguagucccuc

SEQ ID NO: 650818 - RNA, 20 nt, Human
agccccugggcaggugcacu

SEQ ID NO: 650819 - RNA, 23 nt, Human
agcugguggcgauggcacagccg

SEQ ID NO: 650820 - RNA, 22 nt, Human
agggagaguccuggagccccug

SEQ ID NO: 650821 - RNA, 23 nt, Human
aggggcugucccgggucugagca

SEQ ID NO: 650822 - RNA, 23 nt, Human
agggggaaagagguuagggggcc

SEQ ID NO: 650823 - RNA, 22 nt, Human
agguuagggggcaagagguggg

SEQ ID NO: 650824 - RNA, 19 nt, Human
aguccuggagccccuggag

SEQ ID NO: 650825 - RNA, 19 nt, Human
caagaggugggccccccag

SEQ ID NO: 650826 - RNA, 24 nt, Human
caccccccgucucagggacccgcu

SEQ ID NO: 650827 - RNA, 27 nt, Human
cacuuccuuuauuucucaucauuuaca

SEQ ID NO: 650828 - RNA, 24 nt, Human
cagccaccccccgucucagggacc

SEQ ID NO: 650829 - RNA, 22 nt, Human
cagccccugggcaggugcacug

SEQ ID NO: 650830 - RNA, 22 nt, Human
cagcgaggaagccucggaccuc

SEQ ID NO: 650831 - RNA, 21 nt, Human
cauuuacaaaagauguacaga

SEQ ID NO: 650832 - RNA, 24 nt, Human
ccaccccccgucucagggacccgc

SEQ ID NO: 650833 - RNA, 18 nt, Human
ccccugggcaggugcacu

SEQ ID NO: 650834 - RNA, 18 nt, Human
cgacucagcuggcagcga

SEQ ID NO: 650835 - RNA, 18 nt, Human
cugaacagccccugggca

SEQ ID NO: 650836 - RNA, 21 nt, Human
cugagcaggaggcugggagcu

SEQ ID NO: 650837 - RNA, 21 nt, Human
cugguggcgauggcacagccu

SEQ ID NO: 650838 - RNA, 30 nt, Human
cuucuuggaucugcugcuguugcugccguc

SEQ ID NO: 650839 - RNA, 25 nt, Human
gagcaggaggcugggagcugguggc

SEQ ID NO: 650840 - RNA, 22 nt, Human
gcaagaggugggccccccaggg

SEQ ID NO: 650841 - RNA, 19 nt, Human
gcacggagcagguacaagg

SEQ ID NO: 650842 - RNA, 19 nt, Human
gcagaaaagggggaaagag

SEQ ID NO: 650843 - RNA, 21 nt, Human
gccauugccagcucugaacag

SEQ ID NO: 650844 - RNA, 21 nt, Human
gcgauggcacagccgggagca

SEQ ID NO: 650845 - RNA, 23 nt, Human
ggcaagaggugggccccccaggg

SEQ ID NO: 650846 - RNA, 24 nt, Human
gggcaagaggugggccccccaggg

SEQ ID NO: 650847 - RNA, 22 nt, Human
gggcagaaaagggggaaagagg

SEQ ID NO: 650848 - RNA, 24 nt, Human
gggcagaaaagggggaaagaggag

SEQ ID NO: 650849 - RNA, 22 nt, Human
ggggagggcagccaccccccgu

SEQ ID NO: 650850 - RNA, 21 nt, Human
gguggcgauggcacagccggg

SEQ ID NO: 650851 - RNA, 23 nt, Human
guagguagucccucaggugccca

SEQ ID NO: 650852 - RNA, 18 nt, Human
uccuggagccccuggagg

SEQ ID NO: 650853 - RNA, 19 nt, Human
ucugcugcuguugcugcug

SEQ ID NO: 650854 - RNA, 27 nt, Human
ucuuggaucugcugcuguugcugcugu

SEQ ID NO: 650855 - RNA, 23 nt, Human
ugaacagccccugggcaggugca

SEQ ID NO: 650856 - RNA, 23 nt, Human
uggaucugcugcuguugcugcug

SEQ ID NO: 650857 - RNA, 27 nt, Human
uguccuguccccccauuccgccugcuu

SEQ ID NO: 650858 - RNA, 23 nt, Human
ugucgcugccauugccagcucug

SEQ ID NO: 650859 - RNA, 18 nt, Human
uguguugggcacggagca

SEQ ID NO: 650860 - RNA, 23 nt, Human
uuuggagcugcucaggcugccgg

SEQ ID NO: 650861 - RNA, 19 nt, Human
uuuuuuuuuuuuuuuugcg

SEQ ID NO: 650862 - RNA, 21 nt, Human
uuuuuuuuuuuuuuuuugcgu

SEQ ID NO: 650863 - RNA, 20 nt, Human
uuuuuuuuuuuuuuuuuugg

SEQ ID NO: 650864 - RNA, 22 nt, Human
aaaaaaaaacaugguucaauaa

SEQ ID NO: 650865 - RNA, 21 nt, Human
aauaaaacaaaggacccacac

SEQ ID NO: 650866 - RNA, 20 nt, Human
aauuucuuuauaauuccaug

SEQ ID NO: 650867 - RNA, 22 nt, Human
aggaaggaguuauaugacuuua

SEQ ID NO: 650868 - RNA, 21 nt, Human
auggcccaggaaccuucuucc

SEQ ID NO: 650869 - RNA, 22 nt, Human
caggaaccuucuuccaugguuc

SEQ ID NO: 650870 - RNA, 24 nt, Human
cuccuauuugguuuuguuuuuguu

SEQ ID NO: 650871 - RNA, 23 nt, Human
cugcaacacauacugauggccca

SEQ ID NO: 650872 - RNA, 18 nt, Human
cuggcaaguacugucugc

SEQ ID NO: 650873 - RNA, 20 nt, Human
cugucugcauuguucaaaau

SEQ ID NO: 650874 - RNA, 18 nt, Human
cuuugaaaaauauccaga

SEQ ID NO: 650875 - RNA, 20 nt, Human
gaagcaagagguccggcccu

SEQ ID NO: 650876 - RNA, 24 nt, Human
gcccaggaaccuucuuccaugguu

SEQ ID NO: 650877 - RNA, 21 nt, Human
ggaaaaaaaaacaugguucaa

SEQ ID NO: 650878 - RNA, 24 nt, Human
gguucagaaaaguaaagaaaauga

SEQ ID NO: 650879 - RNA, 18 nt, Human
guaaaaagcaagucuuug

SEQ ID NO: 650880 - RNA, 19 nt, Human
uaauacauacgcuuucccu

SEQ ID NO: 650881 - RNA, 21 nt, Human
uauagaaaucacccugguuua

SEQ ID NO: 650882 - RNA, 19 nt, Human
uauuugguuuuguuuuugu

SEQ ID NO: 650883 - RNA, 21 nt, Human
ucacaaugugcguaaaaagca

SEQ ID NO: 650884 - RNA, 21 nt, Human
uccuggcugugagcucugcaa

SEQ ID NO: 650885 - RNA, 21 nt, Human
ucuaaaggaauacaaacacca

SEQ ID NO: 650886 - RNA, 21 nt, Human
ugacuuuauaagugggaacca

SEQ ID NO: 650887 - RNA, 26 nt, Human
ugagcucugcaacacauacugauggc

SEQ ID NO: 650888 - RNA, 19 nt, Human
ugauuuauagaaaucaccc

SEQ ID NO: 650889 - RNA, 20 nt, Human
ugauuuauagaaaucacccu

SEQ ID NO: 650890 - RNA, 25 nt, Human
uuccccccgaaagccucuuucauga

SEQ ID NO: 650891 - RNA, 22 nt, Human
uugaaaaauauccagaucucua

SEQ ID NO: 650892 - RNA, 21 nt, Human
uugggacucuggcaaguacug

SEQ ID NO: 650893 - RNA, 23 nt, Human
uuuuuuuucaaugccaaaaacug

SEQ ID NO: 650894 - RNA, 19 nt, Human
uuuuuuuuuuuuuuuucaa

SEQ ID NO: 650895 - RNA, 24 nt, Human
aaaaagaacaccucucuucgcaaa

SEQ ID NO: 650896 - RNA, 22 nt, Human
aaaaccauaggugugcuuacca

SEQ ID NO: 650897 - RNA, 21 nt, Human
acaaggcacagcaucagggca

SEQ ID NO: 650898 - RNA, 28 nt, Human
acagaaaaaaauacagaaauuaaaaaaa

SEQ ID NO: 650899 - RNA, 23 nt, Human
acaggccagccccuuggaggggu

SEQ ID NO: 650900 - RNA, 18 nt, Human
accagcaccaggaggggc

SEQ ID NO: 650901 - RNA, 18 nt, Human
accaggaggggcugacag

SEQ ID NO: 650902 - RNA, 21 nt, Human
agaaaaaaauacagaaauuaa

SEQ ID NO: 650903 - RNA, 25 nt, Human
agaaaaaaauacagaaauuaaaaaa

SEQ ID NO: 650904 - RNA, 22 nt, Human
agacaggccagugucacaagga

SEQ ID NO: 650905 - RNA, 20 nt, Human
agauccagcaaugguucacu

SEQ ID NO: 650906 - RNA, 19 nt, Human
agcagccccuuccuggcuc

SEQ ID NO: 650907 - RNA, 21 nt, Human
agccggcccugggccaggcug

SEQ ID NO: 650908 - RNA, 20 nt, Human
agcucaaugggugacaaggc

SEQ ID NO: 650909 - RNA, 24 nt, Human
aggaaaaagaacaccucucuucgc

SEQ ID NO: 650910 - RNA, 20 nt, Human
agggaagaaccgucuggaua

SEQ ID NO: 650911 - RNA, 21 nt, Human
aggggcugacagcagacagca

SEQ ID NO: 650912 - RNA, 24 nt, Human
caaggcucacaggccagccccuug

SEQ ID NO: 650913 - RNA, 23 nt, Human
caauacagaaaaaaauacagaaa

SEQ ID NO: 650914 - RNA, 21 nt, Human
cagcaccaguaaggaaaaaga

SEQ ID NO: 650915 - RNA, 19 nt, Human
cagcagccccuuccuggcu

SEQ ID NO: 650916 - RNA, 19 nt, Human
cagccucaccaggcaaagc

SEQ ID NO: 650917 - RNA, 18 nt, Human
caggccagccccuuggag

SEQ ID NO: 650918 - RNA, 24 nt, Human
ccaaaaccauaggugugcuuacca

SEQ ID NO: 650919 - RNA, 22 nt, Human
ccaggccaggugaguucagaca

SEQ ID NO: 650920 - RNA, 19 nt, Human
cccagcacagggccaggca

SEQ ID NO: 650921 - RNA, 24 nt, Human
ccccuuggaggggugggccgggca

SEQ ID NO: 650922 - RNA, 21 nt, Human
cccgugugcccaccccugcua

SEQ ID NO: 650923 - RNA, 21 nt, Human
ccucagcagccccuuccuggc

SEQ ID NO: 650924 - RNA, 21 nt, Human
ccugcuaggccuuagaugcca

SEQ ID NO: 650925 - RNA, 21 nt, Human
ccuggcucuggacucuggagg

SEQ ID NO: 650926 - RNA, 24 nt, Human
ccuggcucuggacucuggaggggg

SEQ ID NO: 650927 - RNA, 19 nt, Human
ccuggugcucccuccagcc

SEQ ID NO: 650928 - RNA, 21 nt, Human
ccuggugcucccuccagccuc

SEQ ID NO: 650929 - RNA, 22 nt, Human
ccuuccuggcucuggacucugg

SEQ ID NO: 650930 - RNA, 24 nt, Human
cgccaggcucccugggcucugcag

SEQ ID NO: 650931 - RNA, 20 nt, Human
cggcccugggccaggcuggg

SEQ ID NO: 650932 - RNA, 22 nt, Human
cugacagcagacagcagguccu

SEQ ID NO: 650933 - RNA, 24 nt, Human
cuggcuggcugcguggcccccucu

SEQ ID NO: 650934 - RNA, 18 nt, Human
gacccgugugcccacccc

SEQ ID NO: 650935 - RNA, 21 nt, Human
gcaaagccggcccugggccag

SEQ ID NO: 650936 - RNA, 23 nt, Human
gccacagaaucugagauccagca

SEQ ID NO: 650937 - RNA, 18 nt, Human
gccaggcucccugggcuc

SEQ ID NO: 650938 - RNA, 18 nt, Human
gccccuuccuggcucugg

SEQ ID NO: 650939 - RNA, 20 nt, Human
gcccucagcagccccuuccu

SEQ ID NO: 650940 - RNA, 19 nt, Human
gccggcccugggccaggcu

SEQ ID NO: 650941 - RNA, 19 nt, Human
gcgccuuguggcuuccuuu

SEQ ID NO: 650942 - RNA, 21 nt, Human
gcucacaggccagccccuugg

SEQ ID NO: 650943 - RNA, 21 nt, Human
ggaggggugggccgggcagag

SEQ ID NO: 650944 - RNA, 21 nt, Human
ggccaggcuggguguagggcc

SEQ ID NO: 650945 - RNA, 19 nt, Human
ggcucuggacucuggaggg

SEQ ID NO: 650946 - RNA, 18 nt, Human
gggcagggcuugggcccg

SEQ ID NO: 650947 - RNA, 20 nt, Human
gggcagggcuugggcccggg

SEQ ID NO: 650948 - RNA, 20 nt, Human
gggccaggcaucuggcuggc

SEQ ID NO: 650949 - RNA, 24 nt, Human
gggccaggcaucuggcuggcugcg

SEQ ID NO: 650950 - RNA, 24 nt, Human
uaaaaagcaauaguuaaaaagcau

SEQ ID NO: 650951 - RNA, 23 nt, Human
uaaagacuuguuuuucuucuagg

SEQ ID NO: 650952 - RNA, 23 nt, Human
uaaggaaaaagaacaccucucuu

SEQ ID NO: 650953 - RNA, 22 nt, Human
uacaauacagaaaaaaauacag

SEQ ID NO: 650954 - RNA, 27 nt, Human
uagaaaaccccuaaugucccaugaaga

SEQ ID NO: 650955 - RNA, 21 nt, Human
ucagcagccccuuccuggcuc

SEQ ID NO: 650956 - RNA, 22 nt, Human
ucagcagccccuuccuggcucu

SEQ ID NO: 650957 - RNA, 19 nt, Human
ucaguggcccccgcgccuu

SEQ ID NO: 650958 - RNA, 20 nt, Human
uccauccuuccuuucagcac

SEQ ID NO: 650959 - RNA, 21 nt, Human
ucccagucaaggcucacaggc

SEQ ID NO: 650960 - RNA, 23 nt, Human
ucccucuugcagcucaaugggug

SEQ ID NO: 650961 - RNA, 22 nt, Human
ucuagggaagaaccgucuggau

SEQ ID NO: 650962 - RNA, 22 nt, Human
ugaagauacaauacagaaaaaa

SEQ ID NO: 650963 - RNA, 23 nt, Human
ugacaaggcacagcaucagggca

SEQ ID NO: 650964 - RNA, 20 nt, Human
ugacccgugugcccaccccu

SEQ ID NO: 650965 - RNA, 18 nt, Human
ugaguucagacaggccag

SEQ ID NO: 650966 - RNA, 24 nt, Human
ugccacagaaucugagauccagca

SEQ ID NO: 650967 - RNA, 18 nt, Human
uggcugcguggcccccuc

SEQ ID NO: 650968 - RNA, 24 nt, Human
uuaaaaagcaauaguuaaaaagca

SEQ ID NO: 650969 - RNA, 18 nt, Human
uuccucaguggcccccgc

SEQ ID NO: 650970 - RNA, 19 nt, Human
uuggucccucuugcagcuc

SEQ ID NO: 650971 - RNA, 21 nt, Human
uuucuaaaucucagcaaguua

SEQ ID NO: 650972 - RNA, 27 nt, Human
uuuuuuuuuuuuuuuuuuuuuuugggg

SEQ ID NO: 650973 - RNA, 21 nt, Human
aaguucauuuuuuacaccacc

SEQ ID NO: 650974 - RNA, 20 nt, Human
agcagacagcuuacuaaaac

SEQ ID NO: 650975 - RNA, 19 nt, Human
auaccuuuuuuuucuuucu

SEQ ID NO: 650976 - RNA, 24 nt, Human
caacucauuaauuugauuuccuca

SEQ ID NO: 650977 - RNA, 18 nt, Human
cagccuuuuucucucucc

SEQ ID NO: 650978 - RNA, 19 nt, Human
cagcuggaaacaaucugga

SEQ ID NO: 650979 - RNA, 22 nt, Human
caugcuguauucuaagaacaag

SEQ ID NO: 650980 - RNA, 22 nt, Human
ccagagacaauguguccuuucu

SEQ ID NO: 650981 - RNA, 23 nt, Human
cuggaucucacaugaaaauguua

SEQ ID NO: 650982 - RNA, 19 nt, Human
cuuucaacuucaucagugu

SEQ ID NO: 650983 - RNA, 20 nt, Human
guguccuuucuggaucucac

SEQ ID NO: 650984 - RNA, 27 nt, Human
uacgcuucuuccacuccaaccccuggg

SEQ ID NO: 650985 - RNA, 23 nt, Human
uaggaagaaagaagaaagcaaau

SEQ ID NO: 650986 - RNA, 18 nt, Human
uccauaauuugaaguuca

SEQ ID NO: 650987 - RNA, 21 nt, Human
ucuaagaacaagaaccuagau

SEQ ID NO: 650988 - RNA, 21 nt, Human
ucuuucuuucucucuucgaau

SEQ ID NO: 650989 - RNA, 21 nt, Human
uggcauggaaaaacaauuacc

SEQ ID NO: 650990 - RNA, 18 nt, Human
uucuuucuuucuuucucu

SEQ ID NO: 650991 - RNA, 24 nt, Human
uucuuucuuucuuucucucuucga

SEQ ID NO: 650992 - RNA, 18 nt, Human
uuuuacaccacccagcug

SEQ ID NO: 650993 - RNA, 23 nt, Human
uuuuuuuuuuuuuuuuuuuaggg

SEQ ID NO: 650994 - RNA, 24 nt, Human
acagaaaaauuggagagaaggugg

SEQ ID NO: 650995 - RNA, 20 nt, Human
acagaugcaaccagcaaggc

SEQ ID NO: 650996 - RNA, 23 nt, Human
agccaugcuggucuugaacuccu

SEQ ID NO: 650997 - RNA, 27 nt, Human
aggggggcuuccuuccuagacagggcu

SEQ ID NO: 650998 - RNA, 19 nt, Human
agggucaugguugugccuc

SEQ ID NO: 650999 - RNA, 22 nt, Human
aggugccagauaccaucaagcc

SEQ ID NO: 651000 - RNA, 22 nt, Human
aguuacagaaaaauuggagaga

SEQ ID NO: 651001 - RNA, 22 nt, Human
auaucauagcggcaggcaacaa

SEQ ID NO: 651002 - RNA, 19 nt, Human
auccaccugccuuggccuc

SEQ ID NO: 651003 - RNA, 24 nt, Human
augauccaccugccuuggccuccc

SEQ ID NO: 651004 - RNA, 23 nt, Human
auggaagaaacuccaaaggccca

SEQ ID NO: 651005 - RNA, 23 nt, Human
caccugccuuggccucccaaagc

SEQ ID NO: 651006 - RNA, 19 nt, Human
cacuguccauggacccccc

SEQ ID NO: 651007 - RNA, 21 nt, Human
cacuguccauggaccccccca

SEQ ID NO: 651008 - RNA, 22 nt, Human
cagaaagaacagaugcaaccag

SEQ ID NO: 651009 - RNA, 23 nt, Human
cagaaagaacagaugcaaccagc

SEQ ID NO: 651010 - RNA, 18 nt, Human
caucaagccaucaggagg

SEQ ID NO: 651011 - RNA, 18 nt, Human
ccaaagcacaagcuggga

SEQ ID NO: 651012 - RNA, 21 nt, Human
ccagcccagaugccaaggacc

SEQ ID NO: 651013 - RNA, 18 nt, Human
ccccccagcccagaugcc

SEQ ID NO: 651014 - RNA, 29 nt, Human
ccuaauccugggacugaguuccaggaauc

SEQ ID NO: 651015 - RNA, 21 nt, Human
ccucaaagcagagcuggcacc

SEQ ID NO: 651016 - RNA, 20 nt, Human
ccugaccucaaaugauccac

SEQ ID NO: 651017 - RNA, 21 nt, Human
ccugaccucaaaugauccacc

SEQ ID NO: 651018 - RNA, 23 nt, Human
ccugaccucaaaugauccaccug

SEQ ID NO: 651019 - RNA, 23 nt, Human
ccugaccucaaaugauccaccug

SEQ ID NO: 651020 - RNA, 21 nt, Human
ccugccuuggccucccaaagc

SEQ ID NO: 651021 - RNA, 24 nt, Human
cucuugcccuuugaagggcugugg

SEQ ID NO: 651022 - RNA, 21 nt, Human
cugcaggggggcuuccuuccu

SEQ ID NO: 651023 - RNA, 23 nt, Human
gaaaacccuaauccugggacuga

SEQ ID NO: 651024 - RNA, 24 nt, Human
gaaagaacagaugcaaccagcaag

SEQ ID NO: 651025 - RNA, 22 nt, Human
gaagaaacuccaaaggcccagg

SEQ ID NO: 651026 - RNA, 23 nt, Human
gaagguggcagggaugagggcgg

SEQ ID NO: 651027 - RNA, 24 nt, Human
gaccucaaaugauccaccugccuu

SEQ ID NO: 651028 - RNA, 19 nt, Human
gagcuggcaccaacgggca

SEQ ID NO: 651029 - RNA, 25 nt, Human
gauauggaagaaacuccaaaggccc

SEQ ID NO: 651030 - RNA, 23 nt, Human
gccaugcuggucuugaacuccug

SEQ ID NO: 651031 - RNA, 21 nt, Human
gccucccaaagcacaagcugg

SEQ ID NO: 651032 - RNA, 21 nt, Human
gcugcaggggggcuuccuucc

SEQ ID NO: 651033 - RNA, 23 nt, Human
gcuggucuugaacuccugaccuc

SEQ ID NO: 651034 - RNA, 19 nt, Human
ggucuugaacuccugaccu

SEQ ID NO: 651035 - RNA, 19 nt, Human
uaagaagaccaagaacugg

SEQ ID NO: 651036 - RNA, 21 nt, Human
uacagucaggugccagauacc

SEQ ID NO: 651037 - RNA, 23 nt, Human
uagcggcaggcaacaagcaugag

SEQ ID NO: 651038 - RNA, 22 nt, Human
uaguagagacuggguuuuagca

SEQ ID NO: 651039 - RNA, 24 nt, Human
uaguagagacuggguuuuagcaug

SEQ ID NO: 651040 - RNA, 23 nt, Human
uauggaagaaacuccaaaggccc

SEQ ID NO: 651041 - RNA, 23 nt, Human
ucaaaugauccaccugccuuggc

SEQ ID NO: 651042 - RNA, 21 nt, Human
ucaccuaucuggaguaggagu

SEQ ID NO: 651043 - RNA, 27 nt, Human
ucagugugaagucagaugcccuuuggg

SEQ ID NO: 651044 - RNA, 23 nt, Human
uccauggacccccccagcccaga

SEQ ID NO: 651045 - RNA, 18 nt, Human
ucccaaagcacaagcugg

SEQ ID NO: 651046 - RNA, 18 nt, Human
uccugaccucaaaugauc

SEQ ID NO: 651047 - RNA, 22 nt, Human
ucggcacaggccugccacugca

SEQ ID NO: 651048 - RNA, 22 nt, Human
ucuggccagaaagaacagaugg

SEQ ID NO: 651049 - RNA, 19 nt, Human
ucuugaacuccugaccuca

SEQ ID NO: 651050 - RNA, 21 nt, Human
ugagauggggauggguccuuc

SEQ ID NO: 651051 - RNA, 23 nt, Human
ugagauggggauggguccuucgg

SEQ ID NO: 651052 - RNA, 23 nt, Human
ugagcacaugggcugugaggcug

SEQ ID NO: 651053 - RNA, 18 nt, Human
ugcaggggggcuuccuuc

SEQ ID NO: 651054 - RNA, 20 nt, Human
ugccaaggaccaggauaugg

SEQ ID NO: 651055 - RNA, 19 nt, Human
ugccuuggccucccaaagc

SEQ ID NO: 651056 - RNA, 22 nt, Human
ugcuuaugggaaucagcguggg

SEQ ID NO: 651057 - RNA, 21 nt, Human
uggaagaaacuccaaaggccc

SEQ ID NO: 651058 - RNA, 19 nt, Human
uggaaucaagagcuagccu

SEQ ID NO: 651059 - RNA, 18 nt, Human
uggacccccccagcccag

SEQ ID NO: 651060 - RNA, 18 nt, Human
uggcaggucugagggcag

SEQ ID NO: 651061 - RNA, 21 nt, Human
uggccuggaaucaagagcuag

SEQ ID NO: 651062 - RNA, 19 nt, Human
uggguccuucggcacaggc

SEQ ID NO: 651063 - RNA, 19 nt, Human
uggguuuuagcauguaagc

SEQ ID NO: 651064 - RNA, 22 nt, Human
uguccauggacccccccagccc

SEQ ID NO: 651065 - RNA, 21 nt, Human
uguuacccaccaaggucucug

SEQ ID NO: 651066 - RNA, 18 nt, Human
uuaguagagacuggguuu

SEQ ID NO: 651067 - RNA, 18 nt, Human
uuaguagagacuggguuu

SEQ ID NO: 651068 - RNA, 18 nt, Human
uuggagagaagguggcag

SEQ ID NO: 651069 - RNA, 19 nt, Human
uuuuuaguagagacugggu

SEQ ID NO: 651070 - RNA, 21 nt, Human
uuuuuguauuuuuaguagaga

SEQ ID NO: 651071 - RNA, 18 nt, Human
uuuuuuguauuuuuagua

SEQ ID NO: 651072 - RNA, 21 nt, Human
uuuuuuguauuuuuaguagag

SEQ ID NO: 651073 - RNA, 24 nt, Human
uuuuuuuuguauuuuuaguagaga

SEQ ID NO: 651074 - RNA, 18 nt, Human
uuuuuuuuuuuuuuuuug

SEQ ID NO: 651075 - RNA, 25 nt, Human
uuuuuuuuuuuuuuuuuuguauuuu

SEQ ID NO: 651076 - RNA, 22 nt, Human
aaaaaaaaacaaaaaucucaaa

SEQ ID NO: 651077 - RNA, 19 nt, Human
aaaacaaaccaaaaaaaaa

SEQ ID NO: 651078 - RNA, 18 nt, Human
aaaaucuucagcuuucac

SEQ ID NO: 651079 - RNA, 25 nt, Human
aaacaaaaaucucaaaaucuucagc

SEQ ID NO: 651080 - RNA, 24 nt, Human
aaaucauagagaauugaccaaaac

SEQ ID NO: 651081 - RNA, 19 nt, Human
aacaaaccaaaaaaaaaac

SEQ ID NO: 651082 - RNA, 20 nt, Human
aauuugauuuuguauuguca

SEQ ID NO: 651083 - RNA, 19 nt, Human
agaaguaaaucauagagaa

SEQ ID NO: 651084 - RNA, 21 nt, Human
agagaaguaaaucauagagaa

SEQ ID NO: 651085 - RNA, 19 nt, Human
agagaccaauauaugaaca

SEQ ID NO: 651086 - RNA, 24 nt, Human
aguaaaucauagagaauugaccaa

SEQ ID NO: 651087 - RNA, 19 nt, Human
aucaaauuauguuggauca

SEQ ID NO: 651088 - RNA, 27 nt, Human
augagugagauuuuuuuuuuuuuuuuu

SEQ ID NO: 651089 - RNA, 19 nt, Human
caaaaagguuucaaaaaug

SEQ ID NO: 651090 - RNA, 23 nt, Human
cacgugcgugugugugugugugu

SEQ ID NO: 651091 - RNA, 24 nt, Human
cacgugcgugugugugugugugug

SEQ ID NO: 651092 - RNA, 22 nt, Human
cauagagaauugaccaaaacug

SEQ ID NO: 651093 - RNA, 19 nt, Human
cucagagaccaauauauga

SEQ ID NO: 651094 - RNA, 22 nt, Human
gaaaaaagggcauuacaaauau

SEQ ID NO: 651095 - RNA, 21 nt, Human
gagugagauuuuuuuuuuuuu

SEQ ID NO: 651096 - RNA, 22 nt, Human
gccuagaagggaccucagagac

SEQ ID NO: 651097 - RNA, 23 nt, Human
gcgugggauguguguguaaaaca

SEQ ID NO: 651098 - RNA, 18 nt, Human
ggaccucagagaccaaua

SEQ ID NO: 651099 - RNA, 21 nt, Human
ggcauuacaaauauaaauacu

SEQ ID NO: 651100 - RNA, 24 nt, Human
ggcauuacaaauauaaauacugca

SEQ ID NO: 651101 - RNA, 20 nt, Human
guuggagguucuuuuucuuc

SEQ ID NO: 651102 - RNA, 19 nt, Human
uacgucggcaauguaacau

SEQ ID NO: 651103 - RNA, 19 nt, Human
uauacacacaugcauauag

SEQ ID NO: 651104 - RNA, 22 nt, Human
ucaaaaauuaucagaagauuuu

SEQ ID NO: 651105 - RNA, 20 nt, Human
ucugaauauuuaaaccucua

SEQ ID NO: 651106 - RNA, 19 nt, Human
ugacaaaauaggauuaauu

SEQ ID NO: 651107 - RNA, 21 nt, Human
ugacaagaguucugcugaaga

SEQ ID NO: 651108 - RNA, 19 nt, Human
ugagagaaguaaaucauag

SEQ ID NO: 651109 - RNA, 19 nt, Human
ugagagaaguaaaucauag

SEQ ID NO: 651110 - RNA, 21 nt, Human
ugagauuuuuuuuuuuuuuuu

SEQ ID NO: 651111 - RNA, 23 nt, Human
ugagauuuuuuuuuuuuuuuuuu

SEQ ID NO: 651112 - RNA, 18 nt, Human
ugagguggguugcuacaa

SEQ ID NO: 651113 - RNA, 24 nt, Human
ugcgugugugugugugugugugug

SEQ ID NO: 651114 - RNA, 24 nt, Human
uguaaaacaaaccaaaaaaaaaac

SEQ ID NO: 651115 - RNA, 18 nt, Human
ugugcacgugcgugugug

SEQ ID NO: 651116 - RNA, 22 nt, Human
ugugcacgugcgugugugugug

SEQ ID NO: 651117 - RNA, 18 nt, Human
ugugugugugugugugug

SEQ ID NO: 651118 - RNA, 18 nt, Human
ugugugugugugugugug

SEQ ID NO: 651119 - RNA, 18 nt, Human
ugugugugugugugugug

SEQ ID NO: 651120 - RNA, 18 nt, Human
ugugugugugugugugug

SEQ ID NO: 651121 - RNA, 21 nt, Human
ugugugugugugugugugugu

SEQ ID NO: 651122 - RNA, 21 nt, Human
ugugugugugugugugugugu

SEQ ID NO: 651123 - RNA, 21 nt, Human
ugugugugugugugugugugu

SEQ ID NO: 651124 - RNA, 21 nt, Human
ugugugugugugugugugugu

SEQ ID NO: 651125 - RNA, 21 nt, Human
ugugugugugugugugugugu

SEQ ID NO: 651126 - RNA, 21 nt, Human
ugugugugugugugugugugu

SEQ ID NO: 651127 - RNA, 22 nt, Human
ugugugugugugugugugugug

SEQ ID NO: 651128 - RNA, 22 nt, Human
ugugugugugugugugugugug

SEQ ID NO: 651129 - RNA, 19 nt, Human
uguguguguguguguguug

SEQ ID NO: 651130 - RNA, 24 nt, Human
uuauacacacaugcauauauuccu

SEQ ID NO: 651131 - RNA, 20 nt, Human
uuccauuuaauauaaaccuu

SEQ ID NO: 651132 - RNA, 24 nt, Human
uuuacuaaguucaaaagauaaaua

SEQ ID NO: 651133 - RNA, 19 nt, Human
uuugguauuaauaaaccau

SEQ ID NO: 651134 - RNA, 25 nt, Human
uuuuuuuuuuuacauggcuaugggu

SEQ ID NO: 651135 - RNA, 23 nt, Human
uuuuuuuuuuuuuuuuuacaugg

SEQ ID NO: 651136 - RNA, 24 nt, Human
uuuuuuuuuuuuuuuuuuuuuccu

SEQ ID NO: 651137 - RNA, 19 nt, Human
aaaagccacaucagaggcu

SEQ ID NO: 651138 - RNA, 22 nt, Human
aagcaccaaccgggaaccaaaa

SEQ ID NO: 651139 - RNA, 24 nt, Human
acagugccagaagguuauagacac

SEQ ID NO: 651140 - RNA, 21 nt, Human
agaagguuauagacacaaagg

SEQ ID NO: 651141 - RNA, 18 nt, Human
agcugcgaacaggaagca

SEQ ID NO: 651142 - RNA, 23 nt, Human
cacaaaggccaaaugaacaauga

SEQ ID NO: 651143 - RNA, 20 nt, Human
cagugccagaagguuauaga

SEQ ID NO: 651144 - RNA, 21 nt, Human
ccgcagcugcgaacaggaagc

SEQ ID NO: 651145 - RNA, 18 nt, Human
gaaaagccacaucagagg

SEQ ID NO: 651146 - RNA, 22 nt, Human
gauaauaaacacagugccagaa

SEQ ID NO: 651147 - RNA, 19 nt, Human
ugaagugccgcagcugcga

SEQ ID NO: 651148 - RNA, 24 nt, Human
ugccgcagcugcgaacaggaagca

SEQ ID NO: 651149 - RNA, 24 nt, Human
aagcaucuuaagacagaaaguuuc

SEQ ID NO: 651150 - RNA, 18 nt, Human
aaggcggagagcuugacc

SEQ ID NO: 651151 - RNA, 21 nt, Human
acagcaggcugaugccucugu

SEQ ID NO: 651152 - RNA, 21 nt, Human
acccccuucuguuaagauguu

SEQ ID NO: 651153 - RNA, 21 nt, Human
acggcaguggggaagguggga

SEQ ID NO: 651154 - RNA, 21 nt, Human
acucaauuucucucugugauc

SEQ ID NO: 651155 - RNA, 21 nt, Human
auugcaauuagauauauuuac

SEQ ID NO: 651156 - RNA, 19 nt, Human
ccucuguuugacacccccu

SEQ ID NO: 651157 - RNA, 24 nt, Human
cgacggcaguggggaaggugggag

SEQ ID NO: 651158 - RNA, 22 nt, Human
cggcaguggggaaggugggagc

SEQ ID NO: 651159 - RNA, 20 nt, Human
cucugugaucaacagcaggc

SEQ ID NO: 651160 - RNA, 21 nt, Human
ucaaauuauguuuuucugggc

SEQ ID NO: 651161 - RNA, 24 nt, Human
ugugaucaacagcaggcugaugcc

SEQ ID NO: 651162 - RNA, 27 nt, Human
uguuauugcaauuagauauauuuacaa

SEQ ID NO: 651163 - RNA, 22 nt, Human
uuucugggcucuuaaacaccuc

SEQ ID NO: 651164 - RNA, 24 nt, Human
uuuuuuuuuuuuuuaaacuuuugg

SEQ ID NO: 651165 - RNA, 25 nt, Human
uuuuuuuuuuuuuuaaacuuuugga

SEQ ID NO: 651166 - RNA, 18 nt, Human
aaccuggguccugcacag

SEQ ID NO: 651167 - RNA, 21 nt, Human
aagaggggccucugucuggca

SEQ ID NO: 651168 - RNA, 20 nt, Human
aagccaccugugagcagagu

SEQ ID NO: 651169 - RNA, 23 nt, Human
aaggaagccaccugugagcagag

SEQ ID NO: 651170 - RNA, 22 nt, Human
agcccaaccccagccagggcaa

SEQ ID NO: 651171 - RNA, 18 nt, Human
agcuucgccccuccgcca

SEQ ID NO: 651172 - RNA, 24 nt, Human
aggaguugcagagagggguucagg

SEQ ID NO: 651173 - RNA, 21 nt, Human
aggggccucugucuggcaggc

SEQ ID NO: 651174 - RNA, 24 nt, Human
agggggaggagcccuggggagacc

SEQ ID NO: 651175 - RNA, 20 nt, Human
agugguguucagggcacagg

SEQ ID NO: 651176 - RNA, 20 nt, Human
caaagaggcggccucaaugc

SEQ ID NO: 651177 - RNA, 18 nt, Human
cacagaaaggagaggguc

SEQ ID NO: 651178 - RNA, 19 nt, Human
cagacagugaagggggcag

SEQ ID NO: 651179 - RNA, 23 nt, Human
cagacagugaagggggcaguggu

SEQ ID NO: 651180 - RNA, 19 nt, Human
cagaguggguccugaggcc

SEQ ID NO: 651181 - RNA, 22 nt, Human
cagcccaaccccagccagggca

SEQ ID NO: 651182 - RNA, 19 nt, Human
cagcuagucccccacucuc

SEQ ID NO: 651183 - RNA, 21 nt, Human
cagcugggcugcaccagccca

SEQ ID NO: 651184 - RNA, 26 nt, Human
caugcuugucuccagugagcuggagg

SEQ ID NO: 651185 - RNA, 26 nt, Human
ccaccggaucagagcaggugccaugc

SEQ ID NO: 651186 - RNA, 21 nt, Human
ccaccugugagcagagugggu

SEQ ID NO: 651187 - RNA, 20 nt, Human
ccaggccauggggcucaagc

SEQ ID NO: 651188 - RNA, 19 nt, Human
cccacagaaccgaggucgc

SEQ ID NO: 651189 - RNA, 20 nt, Human
cccagcugugucaccuucuc

SEQ ID NO: 651190 - RNA, 18 nt, Human
ccccagccagggcaaugg

SEQ ID NO: 651191 - RNA, 19 nt, Human
ccggcuugggagcucuggc

SEQ ID NO: 651192 - RNA, 22 nt, Human
ccuacccugguggccuuccaga

SEQ ID NO: 651193 - RNA, 19 nt, Human
ccucaaugcacgcagcccu

SEQ ID NO: 651194 - RNA, 19 nt, Human
ccucauggcugagauggga

SEQ ID NO: 651195 - RNA, 20 nt, Human
ccuuccagagcccacagaac

SEQ ID NO: 651196 - RNA, 21 nt, Human
cggccucaaugcacgcagccc

SEQ ID NO: 651197 - RNA, 18 nt, Human
cucacugaccccggcugu

SEQ ID NO: 651198 - RNA, 20 nt, Human
cucauggcugagaugggagc

SEQ ID NO: 651199 - RNA, 19 nt, Human
cucucuggauucccugagc

SEQ ID NO: 651200 - RNA, 18 nt, Human
cugcggcugguccugggg

SEQ ID NO: 651201 - RNA, 18 nt, Human
cuggaggacggcuccuuc

SEQ ID NO: 651202 - RNA, 21 nt, Human
cuggagggugguguggcgugg

SEQ ID NO: 651203 - RNA, 21 nt, Human
cuggggagacccuacccuggu

SEQ ID NO: 651204 - RNA, 24 nt, Human
gcacacacacgauucccuuucaca

SEQ ID NO: 651205 - RNA, 23 nt, Human
gcggccucaaugcacgcagcccu

SEQ ID NO: 651206 - RNA, 21 nt, Human
gcugcaccagcccaaccccag

SEQ ID NO: 651207 - RNA, 23 nt, Human
gcugcggcugguccuggggcugg

SEQ ID NO: 651208 - RNA, 23 nt, Human
gcugcuccucacugaccccggcu

SEQ ID NO: 651209 - RNA, 26 nt, Human
ggcuggaucucaggugacagagcugg

SEQ ID NO: 651210 - RNA, 24 nt, Human
gggcagugguguucagggcacagg

SEQ ID NO: 651211 - RNA, 22 nt, Human
ggucucuggcuggaucucaggu

SEQ ID NO: 651212 - RNA, 27 nt, Human
gguggaggagggucucuggcuggaucu

SEQ ID NO: 651213 - RNA, 24 nt, Human
gugccuggggcacacacacggugu

SEQ ID NO: 651214 - RNA, 22 nt, Human
gugcugggguggcugcggcugg

SEQ ID NO: 651215 - RNA, 20 nt, Human
uaaggaagccaccugugagc

SEQ ID NO: 651216 - RNA, 18 nt, Human
uagcagggaugcacgggc

SEQ ID NO: 651217 - RNA, 19 nt, Human
uccaagggcacguccacag

SEQ ID NO: 651218 - RNA, 19 nt, Human
uccacagacaucucucugg

SEQ ID NO: 651219 - RNA, 18 nt, Human
ucccugagccaggaguug

SEQ ID NO: 651220 - RNA, 21 nt, Human
ucccugagccaggaguuggcc

SEQ ID NO: 651221 - RNA, 22 nt, Human
ucccugagccaggaguuggccu

SEQ ID NO: 651222 - RNA, 21 nt, Human
ucccuuucacagaaaggagag

SEQ ID NO: 651223 - RNA, 21 nt, Human
uccggcuugggagcucuggca

SEQ ID NO: 651224 - RNA, 18 nt, Human
uccggggcaguggggucu

SEQ ID NO: 651225 - RNA, 26 nt, Human
uccuggggcuggaggacggcuccuuc

SEQ ID NO: 651226 - RNA, 19 nt, Human
ucucuuggggagcugacag

SEQ ID NO: 651227 - RNA, 22 nt, Human
ucuggauucccugagccaggag

SEQ ID NO: 651228 - RNA, 22 nt, Human
ucugggaugggccugagacuag

SEQ ID NO: 651229 - RNA, 19 nt, Human
ucuuuggaagcccuggcuu

SEQ ID NO: 651230 - RNA, 21 nt, Human
ugacagagcugggcuugcacc

SEQ ID NO: 651231 - RNA, 18 nt, Human
ugacagugugggaaacug

SEQ ID NO: 651232 - RNA, 20 nt, Human
ugacgaguggcuuggcuguc

SEQ ID NO: 651233 - RNA, 20 nt, Human
ugcaccaggccauggggcuu

SEQ ID NO: 651234 - RNA, 22 nt, Human
ugcaggaguguugugcaggggg

SEQ ID NO: 651235 - RNA, 20 nt, Human
ugcagggggaggagcccugg

SEQ ID NO: 651236 - RNA, 23 nt, Human
ugcagggggaggagcccugggga

SEQ ID NO: 651237 - RNA, 18 nt, Human
ugcuugucuccagugaga

SEQ ID NO: 651238 - RNA, 22 nt, Human
uggagggugguguggcgugguc

SEQ ID NO: 651239 - RNA, 20 nt, Human
uggcaggcccagcgcuugca

SEQ ID NO: 651240 - RNA, 19 nt, Human
uggccucugguccugaccu

SEQ ID NO: 651241 - RNA, 23 nt, Human
uggcugcggcugguccuggggcu

SEQ ID NO: 651242 - RNA, 23 nt, Human
ugggcuugcaccacaagaggggc

SEQ ID NO: 651243 - RNA, 24 nt, Human
ugggugcagggcuccugacgaguc

SEQ ID NO: 651244 - RNA, 21 nt, Human
uggugcacggccucggcgcuc

SEQ ID NO: 651245 - RNA, 20 nt, Human
ugucuccagugagcuggagg

SEQ ID NO: 651246 - RNA, 24 nt, Human
ugugcagggggaggagcccugggg

SEQ ID NO: 651247 - RNA, 19 nt, Human
uguugugcagggggaggag

SEQ ID NO: 651248 - RNA, 19 nt, Human
uuccagagcccacagaacc

SEQ ID NO: 651249 - RNA, 20 nt, Human
uucgccccuccgccagcugg

SEQ ID NO: 651250 - RNA, 21 nt, Human
uugacuguggaugguggagga

SEQ ID NO: 651251 - RNA, 24 nt, Human
uuucacagaaaggagagggucccc

SEQ ID NO: 651252 - RNA, 19 nt, Human
aaguuccaggagcauuucu

SEQ ID NO: 651253 - RNA, 18 nt, Human
acagcuuucuucugaggg

SEQ ID NO: 651254 - RNA, 22 nt, Human
agacagcaaugucugacaagaa

SEQ ID NO: 651255 - RNA, 18 nt, Human
cagcaaugucugacaagc

SEQ ID NO: 651256 - RNA, 20 nt, Human
ccaucuaaaaacagcuuucu

SEQ ID NO: 651257 - RNA, 29 nt, Human
cgggagaagccgaagguaaggaguuggac

SEQ ID NO: 651258 - RNA, 24 nt, Human
cugacaagcagcaucgcuuuucuc

SEQ ID NO: 651259 - RNA, 22 nt, Human
gaggaacucuuaagcuuagucu

SEQ ID NO: 651260 - RNA, 22 nt, Human
gggagaagccgaagguaaggag

SEQ ID NO: 651261 - RNA, 24 nt, Human
gucuuugauucugacagagguauu

SEQ ID NO: 651262 - RNA, 21 nt, Human
ucucagaaugaauggucagcu

SEQ ID NO: 651263 - RNA, 18 nt, Human
ugaauggucagcuuuuuu

SEQ ID NO: 651264 - RNA, 23 nt, Human
ugaggacuuccgggagaagccga

SEQ ID NO: 651265 - RNA, 21 nt, Human
uucccagucaccaucauguug

SEQ ID NO: 651266 - RNA, 19 nt, Human
uuucucagaaugaaugguc

SEQ ID NO: 651267 - RNA, 19 nt, Human
uuuuuuuuuuuuuuuuuaa

SEQ ID NO: 651268 - RNA, 24 nt, Human
aaaaacugcaaagaaacagaaagc

SEQ ID NO: 651269 - RNA, 18 nt, Human
aacacgucacuggagaaa

SEQ ID NO: 651270 - RNA, 24 nt, Human
aacuucgugacaucuggcaacccu

SEQ ID NO: 651271 - RNA, 20 nt, Human
aaguuccucuuuccaacuuc

SEQ ID NO: 651272 - RNA, 24 nt, Human
acucuaaaacccuggaaacaauua

SEQ ID NO: 651273 - RNA, 24 nt, Human
agacguugcaggucguuuugaacu

SEQ ID NO: 651274 - RNA, 22 nt, Human
aggccaggcgcaguggcucaca

SEQ ID NO: 651275 - RNA, 21 nt, Human
aggccgaggcggguggaucac

SEQ ID NO: 651276 - RNA, 24 nt, Human
aggcgcaguggcucacaccugcaa

SEQ ID NO: 651277 - RNA, 22 nt, Human
aggcggguggaucaccugaagg

SEQ ID NO: 651278 - RNA, 23 nt, Human
aguggcucacaccugcaauccca

SEQ ID NO: 651279 - RNA, 18 nt, Human
auagaauaccugauaccc

SEQ ID NO: 651280 - RNA, 19 nt, Human
auggcucuggcagaggccc

SEQ ID NO: 651281 - RNA, 24 nt, Human
caacaccuugggaggccgaggcgg

SEQ ID NO: 651282 - RNA, 24 nt, Human
caacuacucuaaaacccuggaaac

SEQ ID NO: 651283 - RNA, 24 nt, Human
cacaccugcaaucccaacaccuug

SEQ ID NO: 651284 - RNA, 24 nt, Human
caccugcaaucccaacaccuuggg

SEQ ID NO: 651285 - RNA, 19 nt, Human
cagaaacaacuuaaaacac

SEQ ID NO: 651286 - RNA, 24 nt, Human
cagaggcccauggccuccuuucuu

SEQ ID NO: 651287 - RNA, 22 nt, Human
cagcaguuugagaccagccugc

SEQ ID NO: 651288 - RNA, 22 nt, Human
caggagccuuccuguucuaguc

SEQ ID NO: 651289 - RNA, 19 nt, Human
caucuuaacaccuggcagc

SEQ ID NO: 651290 - RNA, 24 nt, Human
cauucaacuacucuaaaacccugg

SEQ ID NO: 651291 - RNA, 24 nt, Human
ccacauagaauaccugauacccag

SEQ ID NO: 651292 - RNA, 22 nt, Human
ccagagccagaaaggcccagga

SEQ ID NO: 651293 - RNA, 21 nt, Human
cccagaaacaacuuaaaacac

SEQ ID NO: 651294 - RNA, 23 nt, Human
ccccgcgccgccaucuuaacacc

SEQ ID NO: 651295 - RNA, 21 nt, Human
ccgccuaaggaggguuuucca

SEQ ID NO: 651296 - RNA, 20 nt, Human
ccuaaccugugcuccccuac

SEQ ID NO: 651297 - RNA, 21 nt, Human
ccuauccacucagggcaggag

SEQ ID NO: 651298 - RNA, 19 nt, Human
ccugcaaucccaacaccuu

SEQ ID NO: 651299 - RNA, 19 nt, Human
cgaggcggguggaucaccu

SEQ ID NO: 651300 - RNA, 20 nt, Human
cgaggcggguggaucaccug

SEQ ID NO: 651301 - RNA, 26 nt, Human
cgaggcggguggaucaccugaaguca

SEQ ID NO: 651302 - RNA, 27 nt, Human
cggguggaucaccugaagucagcaguu

SEQ ID NO: 651303 - RNA, 23 nt, Human
cucacaccugcaaucccaacacc

SEQ ID NO: 651304 - RNA, 22 nt, Human
cucccuuacccagaaacaacuu

SEQ ID NO: 651305 - RNA, 23 nt, Human
cugaccccagagugcagagcaug

SEQ ID NO: 651306 - RNA, 23 nt, Human
gaaaaacugcaaagaaacagaaa

SEQ ID NO: 651307 - RNA, 19 nt, Human
gaaacagaaagcuaaccuu

SEQ ID NO: 651308 - RNA, 24 nt, Human
gaaggcugggggaggagagccugg

SEQ ID NO: 651309 - RNA, 24 nt, Human
gagaaaauguaugaaacuguagca

SEQ ID NO: 651310 - RNA, 18 nt, Human
gagcauggcucuggcaga

SEQ ID NO: 651311 - RNA, 24 nt, Human
gaucaccugaagucagcaguuuga

SEQ ID NO: 651312 - RNA, 26 nt, Human
gauuacuuuccaaauacuggauuacu

SEQ ID NO: 651313 - RNA, 24 nt, Human
gcagagcauggcucuggcagaggc

SEQ ID NO: 651314 - RNA, 19 nt, Human
gcccaggagccuuccuguu

SEQ ID NO: 651315 - RNA, 18 nt, Human
gcccauggccuccuuucu

SEQ ID NO: 651316 - RNA, 18 nt, Human
gccucuagccgcuggccg

SEQ ID NO: 651317 - RNA, 23 nt, Human
gcgcacggcuacgcgagucgugc

SEQ ID NO: 651318 - RNA, 23 nt, Human
gcuguggcgggcgccaucuugga

SEQ ID NO: 651319 - RNA, 20 nt, Human
gggagcgcgggcgcggcccc

SEQ ID NO: 651320 - RNA, 26 nt, Human
ggguuuccuuaaacuauuaccugaga

SEQ ID NO: 651321 - RNA, 19 nt, Human
gugcagaaacuuuggaggc

SEQ ID NO: 651322 - RNA, 26 nt, Human
uaacuucgugacaucuggcaacccua

SEQ ID NO: 651323 - RNA, 25 nt, Human
uaagggauauaccuuaaaacugagc

SEQ ID NO: 651324 - RNA, 21 nt, Human
uagaagaaaaacugcaaagaa

SEQ ID NO: 651325 - RNA, 20 nt, Human
ucccagagccagaaaggccc

SEQ ID NO: 651326 - RNA, 24 nt, Human
ucuagaagaaaaacugcaaagaaa

SEQ ID NO: 651327 - RNA, 22 nt, Human
ucuggcaacccuaacccuaccu

SEQ ID NO: 651328 - RNA, 20 nt, Human
ucuggcagaggcccauggcc

SEQ ID NO: 651329 - RNA, 21 nt, Human
ucuucacauuucaaacuggau

SEQ ID NO: 651330 - RNA, 22 nt, Human
ugaaguuccucuuuccaacuuc

SEQ ID NO: 651331 - RNA, 21 nt, Human
ugaauauuuuuuacuauaacc

SEQ ID NO: 651332 - RNA, 20 nt, Human
ugacaucuggcaacccuaac

SEQ ID NO: 651333 - RNA, 26 nt, Human
ugagaccagccugcugggagguacac

SEQ ID NO: 651334 - RNA, 20 nt, Human
ugcaaagaaacagaaagcua

SEQ ID NO: 651335 - RNA, 22 nt, Human
ugcaaagaaacagaaagcuaac

SEQ ID NO: 651336 - RNA, 22 nt, Human
ugccugaaguuucaagucaaca

SEQ ID NO: 651337 - RNA, 23 nt, Human
uggaucaccugaagucagcaguu

SEQ ID NO: 651338 - RNA, 24 nt, Human
uggaucaccugaagucagcaguuu

SEQ ID NO: 651339 - RNA, 21 nt, Human
uggcgggcgccaucuuggagu

SEQ ID NO: 651340 - RNA, 18 nt, Human
uggcucuggcagaggccc

SEQ ID NO: 651341 - RNA, 21 nt, Human
ugggaacauuuuaagguucaa

SEQ ID NO: 651342 - RNA, 23 nt, Human
ugggaggccgaggcggguggauc

SEQ ID NO: 651343 - RNA, 24 nt, Human
ugggaggccgaggcggguggauca

SEQ ID NO: 651344 - RNA, 24 nt, Human
ugucccaucgaggugcagaaacuu

SEQ ID NO: 651345 - RNA, 18 nt, Human
uugaauuucacauaauga

SEQ ID NO: 651346 - RNA, 25 nt, Human
uugggaggccgaggcggguggauca

SEQ ID NO: 651347 - RNA, 18 nt, Human
uuucaagucaacacguca

SEQ ID NO: 651348 - RNA, 19 nt, Human
aacccagacuuucuuuuuu

SEQ ID NO: 651349 - RNA, 18 nt, Human
accugccgcugcggaaca

SEQ ID NO: 651350 - RNA, 18 nt, Human
aggcacaguagcacugua

SEQ ID NO: 651351 - RNA, 18 nt, Human
cgcugcggaacagcccaa

SEQ ID NO: 651352 - RNA, 22 nt, Human
cggaacagcccaaaucugagga

SEQ ID NO: 651353 - RNA, 23 nt, Human
cugcaaaacccuuccccggaucu

SEQ ID NO: 651354 - RNA, 18 nt, Human
gccuaggaagaugucugu

SEQ ID NO: 651355 - RNA, 22 nt, Human
guaaagcuuucucagaacauaa

SEQ ID NO: 651356 - RNA, 19 nt, Human
uacuggggggccccagcag

SEQ ID NO: 651357 - RNA, 18 nt, Human
ucugaggaaaccuuggac

SEQ ID NO: 651358 - RNA, 18 nt, Human
ucugcaaaacccuucccc

SEQ ID NO: 651359 - RNA, 21 nt, Human
ucugcaaaacccuuccccgga

SEQ ID NO: 651360 - RNA, 21 nt, Human
uggggggccccagcagccgug

SEQ ID NO: 651361 - RNA, 18 nt, Human
uucccgggaccugccgcu

SEQ ID NO: 651362 - RNA, 20 nt, Human
uugaaggacugaaagaauua

SEQ ID NO: 651363 - RNA, 20 nt, Human
aacugcaugacaugaaaagu

SEQ ID NO: 651364 - RNA, 27 nt, Human
aagcagcauggaccuucccugagagcc

SEQ ID NO: 651365 - RNA, 24 nt, Human
acgcuguagcagaggcugcccaac

SEQ ID NO: 651366 - RNA, 25 nt, Human
acucaggccaagcagcauggaccuu

SEQ ID NO: 651367 - RNA, 24 nt, Human
acugcucucaggagagugggggau

SEQ ID NO: 651368 - RNA, 23 nt, Human
agaaagccuugaacucaggccaa

SEQ ID NO: 651369 - RNA, 18 nt, Human
agccuggcuggaggaacc

SEQ ID NO: 651370 - RNA, 18 nt, Human
agcggugcagggggccug

SEQ ID NO: 651371 - RNA, 22 nt, Human
aggaauucugaaggggccgagu

SEQ ID NO: 651372 - RNA, 18 nt, Human
aggcugggcagggccagg

SEQ ID NO: 651373 - RNA, 21 nt, Human
auggaccuucccugagagccu

SEQ ID NO: 651374 - RNA, 22 nt, Human
cagaccccggcuucaggagcuc

SEQ ID NO: 651375 - RNA, 20 nt, Human
ccaaagcuuuaauuccucag

SEQ ID NO: 651376 - RNA, 27 nt, Human
ccaaagcuuuaauuccucaggcugacc

SEQ ID NO: 651377 - RNA, 24 nt, Human
ccaagacagaggcugggcagggcu

SEQ ID NO: 651378 - RNA, 22 nt, Human
cccaaccugauuaaagcugccc

SEQ ID NO: 651379 - RNA, 18 nt, Human
cccacuucccacuccccc

SEQ ID NO: 651380 - RNA, 21 nt, Human
cccagagggggcucuggagcg

SEQ ID NO: 651381 - RNA, 26 nt, Human
cccccgggcugcucaggggugagggu

SEQ ID NO: 651382 - RNA, 21 nt, Human
ccccuuaucccugcuguccac

SEQ ID NO: 651383 - RNA, 23 nt, Human
cccggcuucaggagcucggggug

SEQ ID NO: 651384 - RNA, 19 nt, Human
cccuggggcugagcuccca

SEQ ID NO: 651385 - RNA, 19 nt, Human
ccgcugugaccacugcucu

SEQ ID NO: 651386 - RNA, 18 nt, Human
ccugagaguccugaggaa

SEQ ID NO: 651387 - RNA, 25 nt, Human
ccugcccacggggguccacgggagu

SEQ ID NO: 651388 - RNA, 22 nt, Human
ccuggggcugagcucccaagac

SEQ ID NO: 651389 - RNA, 24 nt, Human
cgaacccuggggcugagcucccaa

SEQ ID NO: 651390 - RNA, 24 nt, Human
cgcugaggccugagccugccucuc

SEQ ID NO: 651391 - RNA, 18 nt, Human
cgggguggggucguggga

SEQ ID NO: 651392 - RNA, 18 nt, Human
cguggagagcgcuggggu

SEQ ID NO: 651393 - RNA, 19 nt, Human
cuacaggcagaaagccuug

SEQ ID NO: 651394 - RNA, 26 nt, Human
cucaaaucccucuccuguucucuggu

SEQ ID NO: 651395 - RNA, 27 nt, Human
cucaaaucccucuccuguucucuggug

SEQ ID NO: 651396 - RNA, 19 nt, Human
cucagaccccggcuucagg

SEQ ID NO: 651397 - RNA, 20 nt, Human
cuucccacuucccacucccc

SEQ ID NO: 651398 - RNA, 18 nt, Human
cuucccugagagccuggc

SEQ ID NO: 651399 - RNA, 22 nt, Human
cuugaacucaggccaagcagca

SEQ ID NO: 651400 - RNA, 23 nt, Human
cuuuuuggcaaagcugcaccuga

SEQ ID NO: 651401 - RNA, 23 nt, Human
gaccgaacccuggggcugagcuc

SEQ ID NO: 651402 - RNA, 19 nt, Human
gccugccucucugccuucu

SEQ ID NO: 651403 - RNA, 19 nt, Human
gcugggcagggccagggcc

SEQ ID NO: 651404 - RNA, 18 nt, Human
ggcugggcagggccaggg

SEQ ID NO: 651405 - RNA, 20 nt, Human
ggggcaggcagaggcggugu

SEQ ID NO: 651406 - RNA, 21 nt, Human
ggggcaggcagaggcggugug

SEQ ID NO: 651407 - RNA, 22 nt, Human
ggggguccacgggaguccaggc

SEQ ID NO: 651408 - RNA, 19 nt, Human
ucaaaucccucuccuguuc

SEQ ID NO: 651409 - RNA, 25 nt, Human
ucaagaggagccugggauugagacu

SEQ ID NO: 651410 - RNA, 18 nt, Human
ucaggccaagcagcaugg

SEQ ID NO: 651411 - RNA, 18 nt, Human
uccacgcugaggccugag

SEQ ID NO: 651412 - RNA, 19 nt, Human
uccaggcuacaggcagaaa

SEQ ID NO: 651413 - RNA, 24 nt, Human
ucccacuucccacucccccaccuc

SEQ ID NO: 651414 - RNA, 18 nt, Human
uccccguccuucgugccc

SEQ ID NO: 651415 - RNA, 19 nt, Human
ucccugagagccuggcugg

SEQ ID NO: 651416 - RNA, 22 nt, Human
ucuccuguucucuggugacuuc

SEQ ID NO: 651417 - RNA, 18 nt, Human
ugaaggggccgagucccc

SEQ ID NO: 651418 - RNA, 18 nt, Human
ugacuucccacuucccac

SEQ ID NO: 651419 - RNA, 22 nt, Human
ugacuucccacuucccacuccc

SEQ ID NO: 651420 - RNA, 24 nt, Human
ugagaguccugaggaauucugaag

SEQ ID NO: 651421 - RNA, 23 nt, Human
ugagcucccaagacagaggcugg

SEQ ID NO: 651422 - RNA, 21 nt, Human
ugccaucacaucuuguucuug

SEQ ID NO: 651423 - RNA, 22 nt, Human
uggaggaacccagggugaccca

SEQ ID NO: 651424 - RNA, 23 nt, Human
uggcaaagcugcaccugagaguc

SEQ ID NO: 651425 - RNA, 26 nt, Human
ugggaccgugcgcgauagcaucaguc

SEQ ID NO: 651426 - RNA, 18 nt, Human
uggugacuucccacuucc

SEQ ID NO: 651427 - RNA, 21 nt, Human
uguaccucuugcuguggcccc

SEQ ID NO: 651428 - RNA, 18 nt, Human
ugugaccacugcucucag

SEQ ID NO: 651429 - RNA, 18 nt, Human
uucaggagcucggggugg

SEQ ID NO: 651430 - RNA, 27 nt, Human
uuccucaggcugacagcggugcagggg

SEQ ID NO: 651431 - RNA, 22 nt, Human
uuuuuuuuuuuuuuuugcucuu

SEQ ID NO: 651432 - RNA, 18 nt, Human
uuuuuuuuuuuuuuuuug

SEQ ID NO: 651433 - RNA, 20 nt, Human
uuuuuuuuuuuuuuuuugcu

SEQ ID NO: 651434 - RNA, 25 nt, Human
aauaaugaaaaccaaaccucaagaa

SEQ ID NO: 651435 - RNA, 22 nt, Human
accaccgccaccuccucuguuc

SEQ ID NO: 651436 - RNA, 24 nt, Human
acccuaaaaauuaauaaugaaaac

SEQ ID NO: 651437 - RNA, 19 nt, Human
acuaaagguaaaaaagcca

SEQ ID NO: 651438 - RNA, 18 nt, Human
cacagugcccauacccua

SEQ ID NO: 651439 - RNA, 19 nt, Human
cacagugcccauacccuaa

SEQ ID NO: 651440 - RNA, 18 nt, Human
cacccaggcccuuuccca

SEQ ID NO: 651441 - RNA, 21 nt, Human
caccgccaccuccucuguuca

SEQ ID NO: 651442 - RNA, 24 nt, Human
cagcauaagaaaagcagauaguug

SEQ ID NO: 651443 - RNA, 21 nt, Human
cauggguaacacccaggcccu

SEQ ID NO: 651444 - RNA, 18 nt, Human
ccaccaccgccaccuccu

SEQ ID NO: 651445 - RNA, 22 nt, Human
cccuaaaaauuaauaaugaaaa

SEQ ID NO: 651446 - RNA, 21 nt, Human
ccucugucacuuuuccuagac

SEQ ID NO: 651447 - RNA, 18 nt, Human
gaacuaaagguaaaaaag

SEQ ID NO: 651448 - RNA, 19 nt, Human
gagggccaccaccgccacc

SEQ ID NO: 651449 - RNA, 20 nt, Human
uaacacccaggcccuuuccc

SEQ ID NO: 651450 - RNA, 21 nt, Human
uagcugcuuuguuccuuugug

SEQ ID NO: 651451 - RNA, 21 nt, Human
uaggcacagcuauggagucuu

SEQ ID NO: 651452 - RNA, 19 nt, Human
ucacuaagcagaggcucaa

SEQ ID NO: 651453 - RNA, 21 nt, Human
ucaggacuugaaaaugacuug

SEQ ID NO: 651454 - RNA, 23 nt, Human
uccucuguucaggguuugguugg

SEQ ID NO: 651455 - RNA, 22 nt, Human
ucugucacuuuuccuagacucc

SEQ ID NO: 651456 - RNA, 22 nt, Human
ugcuuuguuccuuuguguuuca

SEQ ID NO: 651457 - RNA, 24 nt, Human
uggcugaacuaaagguaaaaaagc

SEQ ID NO: 651458 - RNA, 21 nt, Human
uucauuuucaguacaugggua

SEQ ID NO: 651459 - RNA, 19 nt, Human
uuggcugaacuaaagguaa

SEQ ID NO: 651460 - RNA, 24 nt, Human
uuggcugaacuaaagguaaaaaag

SEQ ID NO: 651461 - RNA, 21 nt, Human
uuguguuucacuaagcagagg

SEQ ID NO: 651462 - RNA, 19 nt, Human
uuuagccauguugguaaaa

SEQ ID NO: 651463 - RNA, 19 nt, Human
uuuccuagacuccuaggca

SEQ ID NO: 651464 - RNA, 25 nt, Human
uuuuuuuuuuuuuuuuuuaauuuuu

SEQ ID NO: 651465 - RNA, 18 nt, Human
aacuagggaggaagggcc

SEQ ID NO: 651466 - RNA, 19 nt, Human
aagcuguugaauacuaaac

SEQ ID NO: 651467 - RNA, 22 nt, Human
aaguauugaggccucauaagcu

SEQ ID NO: 651468 - RNA, 18 nt, Human
acccgagcggaccuuggc

SEQ ID NO: 651469 - RNA, 19 nt, Human
agaaaacaucacaaagaaa

SEQ ID NO: 651470 - RNA, 21 nt, Human
agaaaacaucacaaagaaaac

SEQ ID NO: 651471 - RNA, 19 nt, Human
agcagaccccgggugugga

SEQ ID NO: 651472 - RNA, 20 nt, Human
aggaagcuguugaauacuaa

SEQ ID NO: 651473 - RNA, 21 nt, Human
aggccucauaagcugaaccug

SEQ ID NO: 651474 - RNA, 22 nt, Human
aggcuucugcugcccucucugc

SEQ ID NO: 651475 - RNA, 22 nt, Human
agggaggggacugcguggcugg

SEQ ID NO: 651476 - RNA, 21 nt, Human
cacagcuauuaaauacagaga

SEQ ID NO: 651477 - RNA, 18 nt, Human
cagaccccggguguggag

SEQ ID NO: 651478 - RNA, 19 nt, Human
cagacgcagaucuggcagc

SEQ ID NO: 651479 - RNA, 19 nt, Human
ccacaaaaagcggagggca

SEQ ID NO: 651480 - RNA, 19 nt, Human
cccauuuugucuauuucca

SEQ ID NO: 651481 - RNA, 21 nt, Human
cccucucugcuacugacgguc

SEQ ID NO: 651482 - RNA, 21 nt, Human
ccgcggagaccagcagacccc

SEQ ID NO: 651483 - RNA, 27 nt, Human
cgagccugugacauccgcggagaccag

SEQ ID NO: 651484 - RNA, 21 nt, Human
cucagugacggaaccggacac

SEQ ID NO: 651485 - RNA, 19 nt, Human
gaagugcacacugaauuaa

SEQ ID NO: 651486 - RNA, 19 nt, Human
gcagaaaacaucacaaaga

SEQ ID NO: 651487 - RNA, 22 nt, Human
ggugaagagaacuagggaggaa

SEQ ID NO: 651488 - RNA, 27 nt, Human
uaagcugaaccugacacaauaaauuua

SEQ ID NO: 651489 - RNA, 21 nt, Human
uacuaaacuaacucaaaucau

SEQ ID NO: 651490 - RNA, 23 nt, Human
ucaaggccuccucauuguauucu

SEQ ID NO: 651491 - RNA, 22 nt, Human
ucacccgagcggaccuuggcuc

SEQ ID NO: 651492 - RNA, 20 nt, Human
ucucugcuacugacggucaa

SEQ ID NO: 651493 - RNA, 18 nt, Human
ugccacagcuauuaaaua

SEQ ID NO: 651494 - RNA, 19 nt, Human
ugccgagccugugacaucc

SEQ ID NO: 651495 - RNA, 22 nt, Human
uggaaacuuuaugccacagcua

SEQ ID NO: 651496 - RNA, 19 nt, Human
uuggaaacuuuaugccaca

SEQ ID NO: 651497 - RNA, 23 nt, Human
uuuuuuuuuuuuuuuuuaucuuu

SEQ ID NO: 651498 - RNA, 19 nt, Human
augcauucaauaagaccag

SEQ ID NO: 651499 - RNA, 25 nt, Human
cauggaacauaauaaaccacuuuaa

SEQ ID NO: 651500 - RNA, 18 nt, Human
cuuuauggccaccucccc

SEQ ID NO: 651501 - RNA, 19 nt, Human
gaaagaagacucugccccu

SEQ ID NO: 651502 - RNA, 21 nt, Human
gugauguggagccuggugaug

SEQ ID NO: 651503 - RNA, 24 nt, Human
uaaaccacuuuaaaacagcaguuu

SEQ ID NO: 651504 - RNA, 22 nt, Human
uaagaccaguuucuuccaugga

SEQ ID NO: 651505 - RNA, 19 nt, Human
uggagccuggugaugugcc

SEQ ID NO: 651506 - RNA, 22 nt, Human
ugucaagaaauuuauuaaccuu

SEQ ID NO: 651507 - RNA, 25 nt, Human
ugucaagaaauuuauuaaccuuuau

SEQ ID NO: 651508 - RNA, 21 nt, Human
uuuuuuuuuuuuuuugucaag

SEQ ID NO: 651509 - RNA, 18 nt, Human
uuuuuuuuuuuuuuuuug

SEQ ID NO: 651510 - RNA, 19 nt, Human
uuuuuuuuuuuuuuuuugu

SEQ ID NO: 651511 - RNA, 21 nt, Human
aaaauaucucccaccucagcu

SEQ ID NO: 651512 - RNA, 22 nt, Human
aaaccaaagcuguacuggaaga

SEQ ID NO: 651513 - RNA, 18 nt, Human
aagacaccacggccauga

SEQ ID NO: 651514 - RNA, 20 nt, Human
aagacaccacggccaugaaa

SEQ ID NO: 651515 - RNA, 19 nt, Human
aaggagaagauuggcacca

SEQ ID NO: 651516 - RNA, 19 nt, Human
aaucuggucaaauagguca

SEQ ID NO: 651517 - RNA, 23 nt, Human
acagaucucagaucaaaugccag

SEQ ID NO: 651518 - RNA, 18 nt, Human
acugcacuccaggcugag

SEQ ID NO: 651519 - RNA, 27 nt, Human
acugcacuccaggcugagcgacaagag

SEQ ID NO: 651520 - RNA, 21 nt, Human
agaaugcuucagagaguccuc

SEQ ID NO: 651521 - RNA, 26 nt, Human
agaggaaagagggcaugugggaggcc

SEQ ID NO: 651522 - RNA, 21 nt, Human
agcaaaacucuuaaaaaaaaa

SEQ ID NO: 651523 - RNA, 24 nt, Human
agcccaggcuggagugcaguggcg

SEQ ID NO: 651524 - RNA, 22 nt, Human
aggaaagagggcaugugggagg

SEQ ID NO: 651525 - RNA, 19 nt, Human
aggagccagaagaguuggg

SEQ ID NO: 651526 - RNA, 21 nt, Human
aggagccagaagaguugggaa

SEQ ID NO: 651527 - RNA, 25 nt, Human
aggcuggagugcaguggcgcaaucu

SEQ ID NO: 651528 - RNA, 24 nt, Human
aggucccuugcagggccacaacuu

SEQ ID NO: 651529 - RNA, 21 nt, Human
agugcaguggcgcaaucucag

SEQ ID NO: 651530 - RNA, 24 nt, Human
agugcaguggcgcaaucucagcuc

SEQ ID NO: 651531 - RNA, 18 nt, Human
caacuucccaguugcacc

SEQ ID NO: 651532 - RNA, 21 nt, Human
caccaggggugcccuggagac

SEQ ID NO: 651533 - RNA, 22 nt, Human
caccugggcuggagguggaggc

SEQ ID NO: 651534 - RNA, 19 nt, Human
cacugcacuccaggcugag

SEQ ID NO: 651535 - RNA, 19 nt, Human
cacugcacuccaggcugag

SEQ ID NO: 651536 - RNA, 20 nt, Human
cacugcacuccaggcugagc

SEQ ID NO: 651537 - RNA, 23 nt, Human
cacugcacuccaggcugagcgac

SEQ ID NO: 651538 - RNA, 24 nt, Human
cacugcacuccaggcugagcgaca

SEQ ID NO: 651539 - RNA, 25 nt, Human
cagcacacaaccugcccugucccuu

SEQ ID NO: 651540 - RNA, 24 nt, Human
cauguccccuugcagcacacaacc

SEQ ID NO: 651541 - RNA, 24 nt, Human
ccaaagcuguacuggaagacacca

SEQ ID NO: 651542 - RNA, 19 nt, Human
ccacagaucucagaucaaa

SEQ ID NO: 651543 - RNA, 20 nt, Human
ccaccugggcuggaggugga

SEQ ID NO: 651544 - RNA, 20 nt, Human
ccagaccuucacagccccau

SEQ ID NO: 651545 - RNA, 21 nt, Human
ccaggagccagaagaguuggg

SEQ ID NO: 651546 - RNA, 19 nt, Human
cccagauauaaaaaucugc

SEQ ID NO: 651547 - RNA, 20 nt, Human
cccaugaucuucugcaaccg

SEQ ID NO: 651548 - RNA, 20 nt, Human
ccccagagaaggcacgagcu

SEQ ID NO: 651549 - RNA, 19 nt, Human
ccccgaaggagaagauugg

SEQ ID NO: 651550 - RNA, 25 nt, Human
ccgaaggagaagauugggggggcuc

SEQ ID NO: 651551 - RNA, 19 nt, Human
ccuagaaaaauaucuccca

SEQ ID NO: 651552 - RNA, 25 nt, Human
ccucccucccagccugguccuggac

SEQ ID NO: 651553 - RNA, 18 nt, Human
ccuccucccucccagccu

SEQ ID NO: 651554 - RNA, 22 nt, Human
ccuggcucccgcagguucugug

SEQ ID NO: 651555 - RNA, 19 nt, Human
ccugggcuggagguggagg

SEQ ID NO: 651556 - RNA, 24 nt, Human
cgcucuguagcccaggcuggagug

SEQ ID NO: 651557 - RNA, 21 nt, Human
cguaaccaggagccagaagag

SEQ ID NO: 651558 - RNA, 18 nt, Human
cucagaucaaaugccagc

SEQ ID NO: 651559 - RNA, 21 nt, Human
cucccagccugguccuggacu

SEQ ID NO: 651560 - RNA, 22 nt, Human
gaacagcucugaaauguacccc

SEQ ID NO: 651561 - RNA, 22 nt, Human
gagaguccucccagauauaaaa

SEQ ID NO: 651562 - RNA, 19 nt, Human
gaucuucugcaaccgauuc

SEQ ID NO: 651563 - RNA, 19 nt, Human
gcccaggcuggagugcagu

SEQ ID NO: 651564 - RNA, 20 nt, Human
gcccaggcuggagugcagug

SEQ ID NO: 651565 - RNA, 22 nt, Human
gcucuguagcccaggcuggagu

SEQ ID NO: 651566 - RNA, 19 nt, Human
gcuggagugcaguggcgca

SEQ ID NO: 651567 - RNA, 22 nt, Human
ggccaugaaagagugggaggga

SEQ ID NO: 651568 - RNA, 21 nt, Human
ggcuggagguggaggccuggg

SEQ ID NO: 651569 - RNA, 23 nt, Human
gggcuggagguggaggccugggu

SEQ ID NO: 651570 - RNA, 18 nt, Human
gguauuaaaccaaagcug

SEQ ID NO: 651571 - RNA, 20 nt, Human
gucccuuuggccuccucccu

SEQ ID NO: 651572 - RNA, 18 nt, Human
guccucccagauauaaaa

SEQ ID NO: 651573 - RNA, 18 nt, Human
uauagcguaaccaggagc

SEQ ID NO: 651574 - RNA, 21 nt, Human
ucaaggaugccucaccccaag

SEQ ID NO: 651575 - RNA, 21 nt, Human
ucacugcacuccaggcugagc

SEQ ID NO: 651576 - RNA, 21 nt, Human
ucagugaccaagaaauggagc

SEQ ID NO: 651577 - RNA, 22 nt, Human
ucccuuuggccuccucccuccc

SEQ ID NO: 651578 - RNA, 22 nt, Human
uccuagaaaaauaucucccacc

SEQ ID NO: 651579 - RNA, 23 nt, Human
ucucgcucuguagcccaggcugg

SEQ ID NO: 651580 - RNA, 24 nt, Human
ucucgcucuguagcccaggcugga

SEQ ID NO: 651581 - RNA, 24 nt, Human
ucuguagcccaggcuggagugcag

SEQ ID NO: 651582 - RNA, 18 nt, Human
ugcagggccacaacuucc

SEQ ID NO: 651583 - RNA, 23 nt, Human
ugcaguggcgcaaucucagcuca

SEQ ID NO: 651584 - RNA, 19 nt, Human
ugcccugucccuuuggccu

SEQ ID NO: 651585 - RNA, 20 nt, Human
ugcccugucccuuuggccuc

SEQ ID NO: 651586 - RNA, 22 nt, Human
ugcuucagagaguccucccaga

SEQ ID NO: 651587 - RNA, 24 nt, Human
uggaagacaccacggccaugaaag

SEQ ID NO: 651588 - RNA, 19 nt, Human
uggagguggaggccugggu

SEQ ID NO: 651589 - RNA, 18 nt, Human
uggagugcaguggcgcaa

SEQ ID NO: 651590 - RNA, 23 nt, Human
uggagugcaguggcgcaaucuca

SEQ ID NO: 651591 - RNA, 24 nt, Human
uggagugcaguggcgcaaucucag

SEQ ID NO: 651592 - RNA, 18 nt, Human
uggcaccaggggugcccu

SEQ ID NO: 651593 - RNA, 21 nt, Human
uggcaccaggggugcccugga

SEQ ID NO: 651594 - RNA, 20 nt, Human
uggccuccucccucccagcc

SEQ ID NO: 651595 - RNA, 23 nt, Human
uggcgcaaucucagcucacugca

SEQ ID NO: 651596 - RNA, 21 nt, Human
ugggaggccccagagaaggca

SEQ ID NO: 651597 - RNA, 23 nt, Human
ugggagggagaugcccaugaucu

SEQ ID NO: 651598 - RNA, 20 nt, Human
ugggcuggagguggaggccu

SEQ ID NO: 651599 - RNA, 23 nt, Human
uguauguguauguuucccagucu

SEQ ID NO: 651600 - RNA, 25 nt, Human
uguauguuucccagucuagaaugug

SEQ ID NO: 651601 - RNA, 23 nt, Human
ugucccuuuggccuccucccucc

SEQ ID NO: 651602 - RNA, 20 nt, Human
uguggucugaggcacccaca

SEQ ID NO: 651603 - RNA, 20 nt, Human
uuguauguguauguuucccu

SEQ ID NO: 651604 - RNA, 22 nt, Human
uuucucaaggaugccucacccc

SEQ ID NO: 651605 - RNA, 26 nt, Human
uuuuuuuuuuuuugagguagagucuc

SEQ ID NO: 651606 - RNA, 25 nt, Human
aaaaaaaaaaaaaaacccaaaacca

SEQ ID NO: 651607 - RNA, 26 nt, Human
aaaaaaaaguacaaagcuauaaagga

SEQ ID NO: 651608 - RNA, 26 nt, Human
aaaaaaaaguacaaagcuauaaagga

SEQ ID NO: 651609 - RNA, 23 nt, Human
aaaaaacccaaaaccaaaaaaca

SEQ ID NO: 651610 - RNA, 26 nt, Human
aaaaaacccaaaaccaaaaaacaaac

SEQ ID NO: 651611 - RNA, 26 nt, Human
aaaaacccaaaaccaaaaaacaaacc

SEQ ID NO: 651612 - RNA, 25 nt, Human
aaacaaaccaacaauacaugaagau

SEQ ID NO: 651613 - RNA, 28 nt, Human
aaccagacuucuaacaaauaaccauauu

SEQ ID NO: 651614 - RNA, 25 nt, Human
aagaaacauaacucagaggguaaac

SEQ ID NO: 651615 - RNA, 25 nt, Human
aagcacugaagacacacauuuugcu

SEQ ID NO: 651616 - RNA, 19 nt, Human
aauaauggaaauacaggga

SEQ ID NO: 651617 - RNA, 25 nt, Human
aauggcaacgcuaaaaaaaaaagua

SEQ ID NO: 651618 - RNA, 22 nt, Human
accggcucccugcgauccgcgc

SEQ ID NO: 651619 - RNA, 25 nt, Human
agacuucuaacaaauaaccauauua

SEQ ID NO: 651620 - RNA, 19 nt, Human
aggaaaaagagaaugucua

SEQ ID NO: 651621 - RNA, 21 nt, Human
agguauuuagucuuuaagugg

SEQ ID NO: 651622 - RNA, 22 nt, Human
auaaagaauaauggaaauacag

SEQ ID NO: 651623 - RNA, 22 nt, Human
caaauaaccauauuaauuuucc

SEQ ID NO: 651624 - RNA, 24 nt, Human
caaauggaauaaauuccaucacuu

SEQ ID NO: 651625 - RNA, 21 nt, Human
cauguaagaaaaacaaguauu

SEQ ID NO: 651626 - RNA, 20 nt, Human
ccaaaaccaaaaaacaaacc

SEQ ID NO: 651627 - RNA, 19 nt, Human
cccaaaaccaaaaaacaaa

SEQ ID NO: 651628 - RNA, 24 nt, Human
cccaaaaccaaaaaacaaaccaac

SEQ ID NO: 651629 - RNA, 19 nt, Human
cccacgaguccggacucca

SEQ ID NO: 651630 - RNA, 22 nt, Human
cccauuaaccuuucccuuuaaa

SEQ ID NO: 651631 - RNA, 18 nt, Human
ccgcgccgucugcggugc

SEQ ID NO: 651632 - RNA, 21 nt, Human
ccggcggcggaccggcucccu

SEQ ID NO: 651633 - RNA, 19 nt, Human
cggcggcggaccggcuccc

SEQ ID NO: 651634 - RNA, 27 nt, Human
cuuauaccaaaaaaaaaaaaaaaaaac

SEQ ID NO: 651635 - RNA, 18 nt, Human
cuuucccuuuaaacaggc

SEQ ID NO: 651636 - RNA, 22 nt, Human
gaagacacacauuuugcugacc

SEQ ID NO: 651637 - RNA, 18 nt, Human
gauaauauuccacugugg

SEQ ID NO: 651638 - RNA, 22 nt, Human
gcuauaaaggaacguuuuuaga

SEQ ID NO: 651639 - RNA, 30 nt, Human
guucuuauaccaaaaaaaaaaaaaaaaaaa

SEQ ID NO: 651640 - RNA, 21 nt, Human
uaaaauauagaccuacaaaaa

SEQ ID NO: 651641 - RNA, 25 nt, Human
uaaccauauuaauuuuccaguaauc

SEQ ID NO: 651642 - RNA, 24 nt, Human
uaccaaaaaaaaaaaaaaaaaacc

SEQ ID NO: 651643 - RNA, 22 nt, Human
uagaagaaacauaacucagagg

SEQ ID NO: 651644 - RNA, 21 nt, Human
uauccuaaaagaggaaaaaga

SEQ ID NO: 651645 - RNA, 20 nt, Human
uauuaugggccuuccuaaga

SEQ ID NO: 651646 - RNA, 24 nt, Human
ucaauggcaacgcuaaaaaaaaaa

SEQ ID NO: 651647 - RNA, 18 nt, Human
uccacacgcacacccagg

SEQ ID NO: 651648 - RNA, 21 nt, Human
uccaucacuuuuggcuuuuuu

SEQ ID NO: 651649 - RNA, 18 nt, Human
ugaagacacacauuuugc

SEQ ID NO: 651650 - RNA, 19 nt, Human
ugaagauguaagggaagag

SEQ ID NO: 651651 - RNA, 23 nt, Human
ugaagauguaagggaagagauua

SEQ ID NO: 651652 - RNA, 19 nt, Human
ugauguuaguucuuauacc

SEQ ID NO: 651653 - RNA, 20 nt, Human
uggcaacgcuaaaaaaaaaa

SEQ ID NO: 651654 - RNA, 21 nt, Human
uucaugcuuacuuuauauucc

SEQ ID NO: 651655 - RNA, 21 nt, Human
aaacacagcugugguucauac

SEQ ID NO: 651656 - RNA, 25 nt, Human
aaagguucugugugaaggagagugg

SEQ ID NO: 651657 - RNA, 21 nt, Human
acaaccaaaaaggcaaacuac

SEQ ID NO: 651658 - RNA, 19 nt, Human
agggaccagauuugccugu

SEQ ID NO: 651659 - RNA, 23 nt, Human
auacucaaucauuucauaucucc

SEQ ID NO: 651660 - RNA, 22 nt, Human
caaacugggaucgcuguccgcc

SEQ ID NO: 651661 - RNA, 25 nt, Human
cauaucuccaagagaauucuuuuua

SEQ ID NO: 651662 - RNA, 23 nt, Human
gaaggagagugagcaggguacaa

SEQ ID NO: 651663 - RNA, 25 nt, Human
uacaacaaccaaaaaggcaaacuac

SEQ ID NO: 651664 - RNA, 23 nt, Human
uaccaaaaaaaaauugcauacaa

SEQ ID NO: 651665 - RNA, 24 nt, Human
uaucaugugaauguuugaaacucu

SEQ ID NO: 651666 - RNA, 18 nt, Human
ucucugauauaggaaauc

SEQ ID NO: 651667 - RNA, 19 nt, Human
ugaaagguucugugugaag

SEQ ID NO: 651668 - RNA, 22 nt, Human
uguacaauaaaugaaagguucu

SEQ ID NO: 651669 - RNA, 24 nt, Human
uguuugaaacucucugauauagga

SEQ ID NO: 651670 - RNA, 20 nt, Human
uucucugucaaacucagucu

SEQ ID NO: 651671 - RNA, 27 nt, Human
uuugaaacucucugauauaggaaaucu

SEQ ID NO: 651672 - RNA, 18 nt, Human
uuuuuuuuuuuuuuuuug

SEQ ID NO: 651673 - RNA, 25 nt, Human
uuuuuuuuuuuuuuuuuugucguuu

SEQ ID NO: 651674 - RNA, 18 nt, Human
acagcagcacccaccugg

SEQ ID NO: 651675 - RNA, 21 nt, Human
acagcagcacccaccuggagc

SEQ ID NO: 651676 - RNA, 22 nt, Human
accuggagccccuuauagcagc

SEQ ID NO: 651677 - RNA, 25 nt, Human
accuggagccccuuauagcagcccu

SEQ ID NO: 651678 - RNA, 21 nt, Human
acuccgggaaccuccaacccu

SEQ ID NO: 651679 - RNA, 20 nt, Human
agagaugcgcucaggaaccc

SEQ ID NO: 651680 - RNA, 19 nt, Human
aggaacccaguucccugac

SEQ ID NO: 651681 - RNA, 23 nt, Human
aggaacccaguucccugaccucc

SEQ ID NO: 651682 - RNA, 18 nt, Human
aggucucaaaggucgacu

SEQ ID NO: 651683 - RNA, 22 nt, Human
aguagcaucccuagaaccuagc

SEQ ID NO: 651684 - RNA, 19 nt, Human
aucucauuuaaccuucacc

SEQ ID NO: 651685 - RNA, 20 nt, Human
caacccaacuaggaaggcac

SEQ ID NO: 651686 - RNA, 21 nt, Human
cacuuccauuucagcugggag

SEQ ID NO: 651687 - RNA, 23 nt, Human
cagagaccaaguuuccaaggccu

SEQ ID NO: 651688 - RNA, 22 nt, Human
caggaaccuucaucugucuugu

SEQ ID NO: 651689 - RNA, 20 nt, Human
caucucauuuaaccuucacc

SEQ ID NO: 651690 - RNA, 20 nt, Human
ccaagcacuuccauuucagc

SEQ ID NO: 651691 - RNA, 22 nt, Human
ccaggccgagguguccgaggcc

SEQ ID NO: 651692 - RNA, 19 nt, Human
cccaaucauaacagcagca

SEQ ID NO: 651693 - RNA, 22 nt, Human
cccaggccgagguguccgaggc

SEQ ID NO: 651694 - RNA, 22 nt, Human
ccccucaggagucuagguuccu

SEQ ID NO: 651695 - RNA, 23 nt, Human
ccccucaggagucuagguuccug

SEQ ID NO: 651696 - RNA, 27 nt, Human
ccuccccuccaugagggcaggaacugg

SEQ ID NO: 651697 - RNA, 19 nt, Human
ccugcugagccuccacuuc

SEQ ID NO: 651698 - RNA, 19 nt, Human
cgacauccgugaaacagcc

SEQ ID NO: 651699 - RNA, 23 nt, Human
cuccacuucgacauccgugaaac

SEQ ID NO: 651700 - RNA, 27 nt, Human
cuggagccccuuauagcagcccuucuc

SEQ ID NO: 651701 - RNA, 22 nt, Human
cuuauugccucccuccccucca

SEQ ID NO: 651702 - RNA, 28 nt, Human
cuuugcuuauugccucccuccccuccaa

SEQ ID NO: 651703 - RNA, 19 nt, Human
gaagaaacugaggcccagg

SEQ ID NO: 651704 - RNA, 18 nt, Human
gcacccaccuggagcccc

SEQ ID NO: 651705 - RNA, 25 nt, Human
ggaaaccaauggagagaugaauggc

SEQ ID NO: 651706 - RNA, 23 nt, Human
ggcccaggcugaaauccgguugc

SEQ ID NO: 651707 - RNA, 21 nt, Human
gggaaccuccaacccugcuga

SEQ ID NO: 651708 - RNA, 27 nt, Human
gggagacuccgggaaccuccaaccccc

SEQ ID NO: 651709 - RNA, 19 nt, Human
gugcucaguccacauuugg

SEQ ID NO: 651710 - RNA, 24 nt, Human
uacccaggccgagguguccgaggc

SEQ ID NO: 651711 - RNA, 24 nt, Human
uagcagcccuucuccucugcacuu

SEQ ID NO: 651712 - RNA, 21 nt, Human
uagcucaggccugacucacag

SEQ ID NO: 651713 - RNA, 24 nt, Human
uaggaaggcaccaucauuauccca

SEQ ID NO: 651714 - RNA, 23 nt, Human
uaugcagggacacagcaugcagu

SEQ ID NO: 651715 - RNA, 23 nt, Human
ucaggccugacucacagugugug

SEQ ID NO: 651716 - RNA, 20 nt, Human
uccaaggccuugucaagaag

SEQ ID NO: 651717 - RNA, 20 nt, Human
ucccauccaggcugcacccc

SEQ ID NO: 651718 - RNA, 20 nt, Human
ucccugaccucccauccagg

SEQ ID NO: 651719 - RNA, 22 nt, Human
ucugucuuguugacaguagcau

SEQ ID NO: 651720 - RNA, 19 nt, Human
ucuucggcucggacacacc

SEQ ID NO: 651721 - RNA, 19 nt, Human
ugaagaaacugaggcccag

SEQ ID NO: 651722 - RNA, 23 nt, Human
ugaagaaacugaggcccaggaag

SEQ ID NO: 651723 - RNA, 24 nt, Human
ugaagaaacugaggcccaggaagg

SEQ ID NO: 651724 - RNA, 18 nt, Human
ugaauggcacagagaugc

SEQ ID NO: 651725 - RNA, 23 nt, Human
ugaccucccauccaggcugcacc

SEQ ID NO: 651726 - RNA, 25 nt, Human
ugaccucccauccaggcugcacccc

SEQ ID NO: 651727 - RNA, 20 nt, Human
uggacuaguagauggcaguu

SEQ ID NO: 651728 - RNA, 19 nt, Human
uggcugcucuucggcucgg

SEQ ID NO: 651729 - RNA, 21 nt, Human
uuauagcagcccuucuccucu

SEQ ID NO: 651730 - RNA, 26 nt, Human
uuuccaaggccuugucaagaaguggg

SEQ ID NO: 651731 - RNA, 18 nt, Human
uuuuuuuuuuuuuuuuug

SEQ ID NO: 651732 - RNA, 19 nt, Human
aaacauagcuaaaauagug

SEQ ID NO: 651733 - RNA, 18 nt, Human
ccugcagguuucggcggc

SEQ ID NO: 651734 - RNA, 21 nt, Human
cuccugcagguuucggcggcu

SEQ ID NO: 651735 - RNA, 19 nt, Human
uaguagacuccugcagguu

SEQ ID NO: 651736 - RNA, 21 nt, Human
ugcauaguagacuccugcagg

SEQ ID NO: 651737 - RNA, 20 nt, Human
ugggaaaaacauagcuaaaa

SEQ ID NO: 651738 - RNA, 18 nt, Human
uuuuuuuuuuuuuuuuug

SEQ ID NO: 651739 - RNA, 28 nt, Human
aaaaagcucuaaaaucucaauggcuuaa

SEQ ID NO: 651740 - RNA, 19 nt, Human
aaagccccaguaguaucag

SEQ ID NO: 651741 - RNA, 19 nt, Human
aacaacacaugccuuucuc

SEQ ID NO: 651742 - RNA, 19 nt, Human
agacaggaaaacaaauuga

SEQ ID NO: 651743 - RNA, 20 nt, Human
aguaucagucuugacagaua

SEQ ID NO: 651744 - RNA, 18 nt, Human
caagccccaaaggaccag

SEQ ID NO: 651745 - RNA, 20 nt, Human
cacggcccugcccaagcccc

SEQ ID NO: 651746 - RNA, 22 nt, Human
cacggcccugcccaagccccaa

SEQ ID NO: 651747 - RNA, 20 nt, Human
ccaaaggaccagacugugcc

SEQ ID NO: 651748 - RNA, 21 nt, Human
cccaaaggaccagacugugcc

SEQ ID NO: 651749 - RNA, 20 nt, Human
ccccaaaggaccagacugug

SEQ ID NO: 651750 - RNA, 22 nt, Human
ccccaaaggaccagacugugcc

SEQ ID NO: 651751 - RNA, 18 nt, Human
ccucaugggugaguuggg

SEQ ID NO: 651752 - RNA, 24 nt, Human
ccuugcaggacuuaugcccagaag

SEQ ID NO: 651753 - RNA, 18 nt, Human
cuaggagaagacauugau

SEQ ID NO: 651754 - RNA, 24 nt, Human
ggccagaaccugugucacggcccu

SEQ ID NO: 651755 - RNA, 24 nt, Human
uaauauguaaagaacucccaaauc

SEQ ID NO: 651756 - RNA, 20 nt, Human
uaggaaaagccccaguagua

SEQ ID NO: 651757 - RNA, 24 nt, Human
uaggaaaagccccaguaguaucag

SEQ ID NO: 651758 - RNA, 25 nt, Human
ucaaaugucaaaagacaggaaaaca

SEQ ID NO: 651759 - RNA, 23 nt, Human
ucccaaaucaauaggaaaagccc

SEQ ID NO: 651760 - RNA, 22 nt, Human
ucccucaugggugaguuggggc

SEQ ID NO: 651761 - RNA, 22 nt, Human
ucugcaggaucuugugcugcca

SEQ ID NO: 651762 - RNA, 23 nt, Human
ugacaaaaagcucuaaaaucuca

SEQ ID NO: 651763 - RNA, 21 nt, Human
uuccauguugcuuuccuugca

SEQ ID NO: 651764 - RNA, 27 nt, Human
uugacagauagugacaaaaagcucuuu

SEQ ID NO: 651765 - RNA, 19 nt, Human
uuuuccauguugcuuuccu

SEQ ID NO: 651766 - RNA, 23 nt, Human
aaaaaaccagaucucaugagaac

SEQ ID NO: 651767 - RNA, 18 nt, Human
aaaaucccuccacuaccc

SEQ ID NO: 651768 - RNA, 22 nt, Human
aaaaucccuccacuacccccuc

SEQ ID NO: 651769 - RNA, 21 nt, Human
aagagagcaaaaggagagggg

SEQ ID NO: 651770 - RNA, 18 nt, Human
aagcagaugggaguaguc

SEQ ID NO: 651771 - RNA, 24 nt, Human
acagagaauggagaagacucaaaa

SEQ ID NO: 651772 - RNA, 22 nt, Human
acccccaugauccaaucaccuc

SEQ ID NO: 651773 - RNA, 25 nt, Human
accucccacugggccccuccuccaa

SEQ ID NO: 651774 - RNA, 19 nt, Human
acucaaaaaaccagaucuc

SEQ ID NO: 651775 - RNA, 22 nt, Human
agaacagguggcugagaccagg

SEQ ID NO: 651776 - RNA, 23 nt, Human
agaagcccguuucuucuuccaaa

SEQ ID NO: 651777 - RNA, 18 nt, Human
agaggaagagagcaaaag

SEQ ID NO: 651778 - RNA, 18 nt, Human
agaggccacugcugggga

SEQ ID NO: 651779 - RNA, 22 nt, Human
aggcccugacccagggaggagg

SEQ ID NO: 651780 - RNA, 19 nt, Human
agggaggaggugcuccaag

SEQ ID NO: 651781 - RNA, 18 nt, Human
agguaggagguggggaug

SEQ ID NO: 651782 - RNA, 25 nt, Human
agguaggagguggggaugccugggg

SEQ ID NO: 651783 - RNA, 24 nt, Human
aguccucggcacaacugucagcuc

SEQ ID NO: 651784 - RNA, 23 nt, Human
aucaccucccacugggccccucc

SEQ ID NO: 651785 - RNA, 24 nt, Human
augagaacucacucacuaucauga

SEQ ID NO: 651786 - RNA, 20 nt, Human
auuucaucaccaaggaaugg

SEQ ID NO: 651787 - RNA, 22 nt, Human
auuucaucaccaaggaauggca

SEQ ID NO: 651788 - RNA, 22 nt, Human
caaaaucccuccacuacccccu

SEQ ID NO: 651789 - RNA, 18 nt, Human
caacacuggggauuacaa

SEQ ID NO: 651790 - RNA, 21 nt, Human
cacaugagccuuuucuacuuu

SEQ ID NO: 651791 - RNA, 19 nt, Human
caccaaggaauggcauaca

SEQ ID NO: 651792 - RNA, 19 nt, Human
caccaugccugcccaaugg

SEQ ID NO: 651793 - RNA, 18 nt, Human
cacugcuggggacaaaau

SEQ ID NO: 651794 - RNA, 23 nt, Human
cacugggccccuccuccaacacu

SEQ ID NO: 651795 - RNA, 21 nt, Human
cauccaggcccugacccaggg

SEQ ID NO: 651796 - RNA, 20 nt, Human
cauucauuuuuucaaaacca

SEQ ID NO: 651797 - RNA, 21 nt, Human
ccaccaggcacugaaagacuc

SEQ ID NO: 651798 - RNA, 24 nt, Human
ccacccccaugauccaaucaccuc

SEQ ID NO: 651799 - RNA, 18 nt, Human
cccacugggccccuccuc

SEQ ID NO: 651800 - RNA, 20 nt, Human
cccacugggccccuccucca

SEQ ID NO: 651801 - RNA, 23 nt, Human
cccccaugauccaaucaccuccc

SEQ ID NO: 651802 - RNA, 19 nt, Human
cccccucaaggagaagccc

SEQ ID NO: 651803 - RNA, 28 nt, Human
cccuccacuacccccucaaggagaagcc

SEQ ID NO: 651804 - RNA, 22 nt, Human
cccugccccaccaggcacugaa

SEQ ID NO: 651805 - RNA, 20 nt, Human
ccucagcuccaggucuccug

SEQ ID NO: 651806 - RNA, 23 nt, Human
ccucccauggugcagugcagagu

SEQ ID NO: 651807 - RNA, 28 nt, Human
ccugcccugccccaccaggcacugaaag

SEQ ID NO: 651808 - RNA, 24 nt, Human
cucaggaaacugacaaucauggug

SEQ ID NO: 651809 - RNA, 18 nt, Human
cucuaagaacgagguagg

SEQ ID NO: 651810 - RNA, 21 nt, Human
cugcccugccccaccaggcac

SEQ ID NO: 651811 - RNA, 22 nt, Human
gaaagaggaagagagcaaaagg

SEQ ID NO: 651812 - RNA, 24 nt, Human
gagaacaguaagggagaaauccac

SEQ ID NO: 651813 - RNA, 18 nt, Human
gagaaggaggcauaucuu

SEQ ID NO: 651814 - RNA, 21 nt, Human
gagacuuggguggggacacag

SEQ ID NO: 651815 - RNA, 21 nt, Human
gagagcaaaaggagaggggga

SEQ ID NO: 651816 - RNA, 21 nt, Human
gagauuuggguggggauacag

SEQ ID NO: 651817 - RNA, 21 nt, Human
gauuuggguggggauacagau

SEQ ID NO: 651818 - RNA, 21 nt, Human
gcucauggcugugugugcacc

SEQ ID NO: 651819 - RNA, 22 nt, Human
ggaagagagcaaaaggagaggg

SEQ ID NO: 651820 - RNA, 19 nt, Human
ggagaaagaggaagagagc

SEQ ID NO: 651821 - RNA, 22 nt, Human
ggagguggggaugccuggggaa

SEQ ID NO: 651822 - RNA, 18 nt, Human
gggaagaagcagauggga

SEQ ID NO: 651823 - RNA, 23 nt, Human
ggugcagugcagagucuguuggg

SEQ ID NO: 651824 - RNA, 21 nt, Human
uaggagguggggaugccuggg

SEQ ID NO: 651825 - RNA, 22 nt, Human
ucacacugauauacaaaaagug

SEQ ID NO: 651826 - RNA, 25 nt, Human
ucacagagaauggagaagacucaaa

SEQ ID NO: 651827 - RNA, 19 nt, Human
uccacccccaugauccaau

SEQ ID NO: 651828 - RNA, 19 nt, Human
uccacuacccccucaagga

SEQ ID NO: 651829 - RNA, 22 nt, Human
ucccauggugcagugcagaguc

SEQ ID NO: 651830 - RNA, 18 nt, Human
ucccuccacuacccccuc

SEQ ID NO: 651831 - RNA, 26 nt, Human
ucuccugccgaugcuguuugcuugac

SEQ ID NO: 651832 - RNA, 23 nt, Human
ugacaacaccacguggcuggguc

SEQ ID NO: 651833 - RNA, 18 nt, Human
ugcagugcagagucuguu

SEQ ID NO: 651834 - RNA, 20 nt, Human
ugcccugccccaccaggcaa

SEQ ID NO: 651835 - RNA, 23 nt, Human
uggccggagaaagaggaagagag

SEQ ID NO: 651836 - RNA, 24 nt, Human
uggggaugccuggggaaggggguc

SEQ ID NO: 651837 - RNA, 22 nt, Human
uuuuuuuuuuuuuuuuuuaaug

SEQ ID NO: 651838 - RNA, 21 nt, Human
aacaccuccccccgccaaccu

SEQ ID NO: 651839 - RNA, 22 nt, Human
aauauaggggcaucuucagccu

SEQ ID NO: 651840 - RNA, 21 nt, Human
accauccauaaugcacccaga

SEQ ID NO: 651841 - RNA, 19 nt, Human
accccaacaccuccccccg

SEQ ID NO: 651842 - RNA, 21 nt, Human
accccaacaccuccccccgcc

SEQ ID NO: 651843 - RNA, 22 nt, Human
accccaacaccuccccccgcca

SEQ ID NO: 651844 - RNA, 25 nt, Human
accccaacaccuccccccgccaacc

SEQ ID NO: 651845 - RNA, 21 nt, Human
acuggggccuggccucugccc

SEQ ID NO: 651846 - RNA, 24 nt, Human
acuuccagaagcaccagaaacgga

SEQ ID NO: 651847 - RNA, 24 nt, Human
agacaccccuccucuucucugccc

SEQ ID NO: 651848 - RNA, 30 nt, Human
agagcccccucacggucccucucacacucu

SEQ ID NO: 651849 - RNA, 19 nt, Human
agcagagacuuccagaagc

SEQ ID NO: 651850 - RNA, 21 nt, Human
aggaccccaacaccucccccc

SEQ ID NO: 651851 - RNA, 23 nt, Human
aggaccccaacaccuccccccgc

SEQ ID NO: 651852 - RNA, 21 nt, Human
aguucuucccugugcugagca

SEQ ID NO: 651853 - RNA, 21 nt, Human
caaaccauccauaaugcaccc

SEQ ID NO: 651854 - RNA, 21 nt, Human
caacaccuccccccgccaacc

SEQ ID NO: 651855 - RNA, 21 nt, Human
caccagaaacggagccagaug

SEQ ID NO: 651856 - RNA, 19 nt, Human
caccucaauccaccaaacc

SEQ ID NO: 651857 - RNA, 21 nt, Human
caccucaauccaccaaaccau

SEQ ID NO: 651858 - RNA, 18 nt, Human
caccuccccccgccaacc

SEQ ID NO: 651859 - RNA, 21 nt, Human
cacucugccagucccccuaga

SEQ ID NO: 651860 - RNA, 24 nt, Human
cagauaggcccacccccaaaagcc

SEQ ID NO: 651861 - RNA, 20 nt, Human
cagcacuggggccuggccuc

SEQ ID NO: 651862 - RNA, 18 nt, Human
caucuccccucucagacc

SEQ ID NO: 651863 - RNA, 22 nt, Human
ccaacaccuccccccgccaacc

SEQ ID NO: 651864 - RNA, 25 nt, Human
cccaaaagccuggacaccuugagca

SEQ ID NO: 651865 - RNA, 21 nt, Human
cccaacaccuccccccgccaa

SEQ ID NO: 651866 - RNA, 19 nt, Human
cccacaccucaauccacca

SEQ ID NO: 651867 - RNA, 21 nt, Human
cccacccccaaaagccuggac

SEQ ID NO: 651868 - RNA, 23 nt, Human
cccagauaggcccacccccaaaa

SEQ ID NO: 651869 - RNA, 21 nt, Human
ccccaaaagccuggacaccuc

SEQ ID NO: 651870 - RNA, 19 nt, Human
ccccaacaccuccccccgc

SEQ ID NO: 651871 - RNA, 24 nt, Human
ccccaacaccuccccccgccaacc

SEQ ID NO: 651872 - RNA, 20 nt, Human
ccccacaccucaauccaccu

SEQ ID NO: 651873 - RNA, 22 nt, Human
cccccaaaagccuggacaccuu

SEQ ID NO: 651874 - RNA, 25 nt, Human
cccccaaaagccuggacaccuugag

SEQ ID NO: 651875 - RNA, 18 nt, Human
cccccuagacaccccucc

SEQ ID NO: 651876 - RNA, 18 nt, Human
cccuccucuucucugccc

SEQ ID NO: 651877 - RNA, 18 nt, Human
cccucuagccuaggaccc

SEQ ID NO: 651878 - RNA, 18 nt, Human
cccucucuccucagcccc

SEQ ID NO: 651879 - RNA, 22 nt, Human
cccugugcugagcagagacuuc

SEQ ID NO: 651880 - RNA, 19 nt, Human
ccuaggacccuccucccca

SEQ ID NO: 651881 - RNA, 23 nt, Human
ccucaauccaccaaaccauccau

SEQ ID NO: 651882 - RNA, 25 nt, Human
ccuccaggacagggucagggauggg

SEQ ID NO: 651883 - RNA, 22 nt, Human
ccuccuccccacaccucaaucc

SEQ ID NO: 651884 - RNA, 19 nt, Human
ccuggccucugcccccucc

SEQ ID NO: 651885 - RNA, 20 nt, Human
ccuggccucugcccccucca

SEQ ID NO: 651886 - RNA, 27 nt, Human
ccugugcugagcagagacuuccagaag

SEQ ID NO: 651887 - RNA, 27 nt, Human
cgcaugcaucuccccucucagacccuu

SEQ ID NO: 651888 - RNA, 20 nt, Human
cuaacuagggauacccccuc

SEQ ID NO: 651889 - RNA, 19 nt, Human
cucacggucccucucacac

SEQ ID NO: 651890 - RNA, 22 nt, Human
cucacggucccucucacacucu

SEQ ID NO: 651891 - RNA, 22 nt, Human
cucagcacuucuuccacuccca

SEQ ID NO: 651892 - RNA, 18 nt, Human
cuggccucugcccccucc

SEQ ID NO: 651893 - RNA, 20 nt, Human
cugugcccucucuccucagc

SEQ ID NO: 651894 - RNA, 22 nt, Human
gaaacggagccagaugaaagga

SEQ ID NO: 651895 - RNA, 20 nt, Human
gacccuccuccccacaccuc

SEQ ID NO: 651896 - RNA, 22 nt, Human
gagccagaugaaaggaccccaa

SEQ ID NO: 651897 - RNA, 24 nt, Human
gccagucccccuagacaccccucc

SEQ ID NO: 651898 - RNA, 23 nt, Human
gccuaggacccuccuccccacac

SEQ ID NO: 651899 - RNA, 21 nt, Human
gccuggccucugcccccucca

SEQ ID NO: 651900 - RNA, 24 nt, Human
uaggacccuccuccccacaccuca

SEQ ID NO: 651901 - RNA, 22 nt, Human
uauaggcaaauagcugcuggca

SEQ ID NO: 651902 - RNA, 19 nt, Human
uauuuguaccugccuuguu

SEQ ID NO: 651903 - RNA, 19 nt, Human
ucaauccaccaaaccaucc

SEQ ID NO: 651904 - RNA, 25 nt, Human
uccacucccaucaagagcccccuca

SEQ ID NO: 651905 - RNA, 23 nt, Human
uccagaagcaccagaaacggagc

SEQ ID NO: 651906 - RNA, 18 nt, Human
ucccaucaagagcccccu

SEQ ID NO: 651907 - RNA, 18 nt, Human
ucccugugcugagcagag

SEQ ID NO: 651908 - RNA, 19 nt, Human
uccuccccacaccucaauc

SEQ ID NO: 651909 - RNA, 25 nt, Human
ucuucagccuggacacgcaugcauc

SEQ ID NO: 651910 - RNA, 24 nt, Human
ugaaaggaccccaacaccuccccc

SEQ ID NO: 651911 - RNA, 19 nt, Human
ugagcacacaguuaugacc

SEQ ID NO: 651912 - RNA, 22 nt, Human
ugagcacacaguuaugaccagg

SEQ ID NO: 651913 - RNA, 24 nt, Human
ugagcagagacuuccagaagcacc

SEQ ID NO: 651914 - RNA, 19 nt, Human
ugcccucucuccucagccc

SEQ ID NO: 651915 - RNA, 21 nt, Human
uggcaaacuggcauuaccugg

SEQ ID NO: 651916 - RNA, 18 nt, Human
uggggccuggccucugcc

SEQ ID NO: 651917 - RNA, 20 nt, Human
uguggggaugggggggcaag

SEQ ID NO: 651918 - RNA, 21 nt, Human
uguuccagaaaacauugaagg

SEQ ID NO: 651919 - RNA, 23 nt, Human
uuaguucuucccugugcugagca

SEQ ID NO: 651920 - RNA, 23 nt, Human
uugaagguggcuucccaaagucu

SEQ ID NO: 651921 - RNA, 18 nt, Human
uuguaccugccuuguucc

SEQ ID NO: 651922 - RNA, 25 nt, Human
uuuuuuuuuuuuuuuugcuuuccaa

SEQ ID NO: 651923 - RNA, 23 nt, Human
uuuuuuuuuuuuuuuuuugcuuu

SEQ ID NO: 651924 - RNA, 20 nt, Human
uuuuuuuuuuuuuuuuuugg

SEQ ID NO: 651925 - RNA, 21 nt, Human
acccacagagccagagagggg

SEQ ID NO: 651926 - RNA, 22 nt, Human
agcgaggcuggcagguggcucu

SEQ ID NO: 651927 - RNA, 20 nt, Human
agguggcucugguuuugggg

SEQ ID NO: 651928 - RNA, 18 nt, Human
cacggcccacggggacag

SEQ ID NO: 651929 - RNA, 24 nt, Human
cagagcccagggacccacagagcc

SEQ ID NO: 651930 - RNA, 23 nt, Human
ccagugggccagcuuggggucug

SEQ ID NO: 651931 - RNA, 23 nt, Human
cccacagagccagagaggggacc

SEQ ID NO: 651932 - RNA, 21 nt, Human
cccagggacccacagagccag

SEQ ID NO: 651933 - RNA, 25 nt, Human
gaggggaccagugggccagcuuggg

SEQ ID NO: 651934 - RNA, 19 nt, Human
gcuacggccagcccugccc

SEQ ID NO: 651935 - RNA, 20 nt, Human
ggggagaagugggguggggu

SEQ ID NO: 651936 - RNA, 20 nt, Human
gggggagaaguggggugggg

SEQ ID NO: 651937 - RNA, 21 nt, Human
gguuugggaugagaagugggu

SEQ ID NO: 651938 - RNA, 21 nt, Human
guggcucugggggcacguccc

SEQ ID NO: 651939 - RNA, 18 nt, Human
uggcucugggggcacguc

SEQ ID NO: 651940 - RNA, 20 nt, Human
uggcucugggggcacguccc

SEQ ID NO: 651941 - RNA, 18 nt, Human
uggcucugguuuuggggg

SEQ ID NO: 651942 - RNA, 20 nt, Human
ugggaugagaaguggguggc

SEQ ID NO: 651943 - RNA, 18 nt, Human
ugggccagcuuggggucu

SEQ ID NO: 651944 - RNA, 21 nt, Human
ugggguguggccaugccacgg

SEQ ID NO: 651945 - RNA, 23 nt, Human
aaccgcguggccgucucugcccc

SEQ ID NO: 651946 - RNA, 25 nt, Human
aaccgcguggccgucucugccccca

SEQ ID NO: 651947 - RNA, 23 nt, Human
aaccucaacagaggcuacagccg

SEQ ID NO: 651948 - RNA, 23 nt, Human
aaccucaacagaggcuacagccg

SEQ ID NO: 651949 - RNA, 22 nt, Human
aagaaagcaagaguuuucaaaa

SEQ ID NO: 651950 - RNA, 22 nt, Human
aagaaagcaagaguuuucaaaa

SEQ ID NO: 651951 - RNA, 25 nt, Human
aagcaagaguuuucaaaacaacagc

SEQ ID NO: 651952 - RNA, 25 nt, Human
aagcaagaguuuucaaaacaacagc

SEQ ID NO: 651953 - RNA, 23 nt, Human
aaggaggaaaaagaaauacacca

SEQ ID NO: 651954 - RNA, 24 nt, Human
aaggcgggcacacccccacaaccc

SEQ ID NO: 651955 - RNA, 26 nt, Human
aaugaccauuuauuuccaaaggcgac

SEQ ID NO: 651956 - RNA, 26 nt, Human
aaugaccauuuauuuccaaaggcgac

SEQ ID NO: 651957 - RNA, 23 nt, Human
acaaaaaugucacagacgagagc

SEQ ID NO: 651958 - RNA, 23 nt, Human
acaaaaaugucacagacgagagc

SEQ ID NO: 651959 - RNA, 19 nt, Human
acacugaauuaccaaugau

SEQ ID NO: 651960 - RNA, 19 nt, Human
acacugaauuaccaaugau

SEQ ID NO: 651961 - RNA, 19 nt, Human
acagagaaaacacauuaca

SEQ ID NO: 651962 - RNA, 21 nt, Human
acagagcacgcaagaaccagc

SEQ ID NO: 651963 - RNA, 21 nt, Human
acagagcacgcaagaaccagc

SEQ ID NO: 651964 - RNA, 28 nt, Human
acagagcacgcaagaaccagccugacaa

SEQ ID NO: 651965 - RNA, 28 nt, Human
acagagcacgcaagaaccagccugacaa

SEQ ID NO: 651966 - RNA, 20 nt, Human
acagaggcuacagcaaaagg

SEQ ID NO: 651967 - RNA, 20 nt, Human
acagaggcuacagcaaaagg

SEQ ID NO: 651968 - RNA, 24 nt, Human
acccccacaaccccccuccagaca

SEQ ID NO: 651969 - RNA, 24 nt, Human
acuccugcaaccgcguggccgucu

SEQ ID NO: 651970 - RNA, 19 nt, Human
agaaaauccucuucaggag

SEQ ID NO: 651971 - RNA, 19 nt, Human
agaaaauccucuucaggag

SEQ ID NO: 651972 - RNA, 22 nt, Human
agaaaccaguaagaaaauccuc

SEQ ID NO: 651973 - RNA, 22 nt, Human
agaaaccaguaagaaaauccuc

SEQ ID NO: 651974 - RNA, 19 nt, Human
agaagaaagggacagaaag

SEQ ID NO: 651975 - RNA, 24 nt, Human
agaggcuacagcaaaaggggugau

SEQ ID NO: 651976 - RNA, 24 nt, Human
agaggcuacagcaaaaggggugau

SEQ ID NO: 651977 - RNA, 23 nt, Human
agcuccuucccagccuggggccu

SEQ ID NO: 651978 - RNA, 23 nt, Human
agcuccuucccagccuggggccu

SEQ ID NO: 651979 - RNA, 24 nt, Human
aggaaaaagaaauacaccaaacau

SEQ ID NO: 651980 - RNA, 21 nt, Human
aggagagagccaaagggaagg

SEQ ID NO: 651981 - RNA, 21 nt, Human
aggaggggacagaggacucug

SEQ ID NO: 651982 - RNA, 21 nt, Human
aggaggggacagaggacucug

SEQ ID NO: 651983 - RNA, 21 nt, Human
aggaggggacagaggacucug

SEQ ID NO: 651984 - RNA, 21 nt, Human
aggaggggacagaggacucug

SEQ ID NO: 651985 - RNA, 18 nt, Human
agggacagaaaggaggaa

SEQ ID NO: 651986 - RNA, 19 nt, Human
agggaggaaaaaaaaaaaa

SEQ ID NO: 651987 - RNA, 18 nt, Human
aggggaagaggggcagag

SEQ ID NO: 651988 - RNA, 18 nt, Human
aggggaagaggggcagag

SEQ ID NO: 651989 - RNA, 22 nt, Human
agggguaggggaagaggggcag

SEQ ID NO: 651990 - RNA, 22 nt, Human
agggguaggggaagaggggcag

SEQ ID NO: 651991 - RNA, 21 nt, Human
aucagcucacucuauauacac

SEQ ID NO: 651992 - RNA, 23 nt, Human
augcgaugaaguuugaggagaga

SEQ ID NO: 651993 - RNA, 23 nt, Human
augcgaugaaguuugaggagaga

SEQ ID NO: 651994 - RNA, 23 nt, Human
caaacuggugggggcacagagca

SEQ ID NO: 651995 - RNA, 23 nt, Human
caaacuggugggggcacagagca

SEQ ID NO: 651996 - RNA, 19 nt, Human
caacagaggcuacagcaaa

SEQ ID NO: 651997 - RNA, 19 nt, Human
caacagaggcuacagcaaa

SEQ ID NO: 651998 - RNA, 18 nt, Human
caaccccccuccagacac

SEQ ID NO: 651999 - RNA, 23 nt, Human
caaggcccgggguaaagugcugg

SEQ ID NO: 652000 - RNA, 20 nt, Human
caagggccugcaggagaccc

SEQ ID NO: 652001 - RNA, 20 nt, Human
caagggccugcaggagaccc

SEQ ID NO: 652002 - RNA, 21 nt, Human
caagggccugcaggagacccu

SEQ ID NO: 652003 - RNA, 21 nt, Human
caagggccugcaggagacccu

SEQ ID NO: 652004 - RNA, 22 nt, Human
cacaaccccccuccagacacca

SEQ ID NO: 652005 - RNA, 18 nt, Human
cacaagggccugcaggag

SEQ ID NO: 652006 - RNA, 18 nt, Human
cacaagggccugcaggag

SEQ ID NO: 652007 - RNA, 25 nt, Human
cacacccccacaaccccccuccaga

SEQ ID NO: 652008 - RNA, 18 nt, Human
caccaaaagaaagcaaga

SEQ ID NO: 652009 - RNA, 20 nt, Human
caccaaaagaaagcaagagu

SEQ ID NO: 652010 - RNA, 20 nt, Human
caccaaaagaaagcaagagu

SEQ ID NO: 652011 - RNA, 25 nt, Human
caccaaaagaaagcaagaguuuuca

SEQ ID NO: 652012 - RNA, 25 nt, Human
caccaaaagaaagcaagaguuuuca

SEQ ID NO: 652013 - RNA, 22 nt, Human
caccaaacauccuacugcccuc

SEQ ID NO: 652014 - RNA, 20 nt, Human
caccccaggcucaaggagaa

SEQ ID NO: 652015 - RNA, 23 nt, Human
cacgcaagaaccagccugacaaa

SEQ ID NO: 652016 - RNA, 23 nt, Human
cacgcaagaaccagccugacaaa

SEQ ID NO: 652017 - RNA, 18 nt, Human
cacuacaccccaggcuca

SEQ ID NO: 652018 - RNA, 18 nt, Human
cagacgagagcaacaagc

SEQ ID NO: 652019 - RNA, 23 nt, Human
cagcacuacaccccaggcucaag

SEQ ID NO: 652020 - RNA, 24 nt, Human
cagcaucacacaugguccuuuuuu

SEQ ID NO: 652021 - RNA, 24 nt, Human
cagcaucacacaugguccuuuuuu

SEQ ID NO: 652022 - RNA, 24 nt, Human
cagccuggggccuugccaaggagc

SEQ ID NO: 652023 - RNA, 24 nt, Human
cagccuggggccuugccaaggagc

SEQ ID NO: 652024 - RNA, 23 nt, Human
cagggcacugcccugccccaaua

SEQ ID NO: 652025 - RNA, 23 nt, Human
cagggcacugcccugccccaaua

SEQ ID NO: 652026 - RNA, 18 nt, Human
cagggguaggggaagagg

SEQ ID NO: 652027 - RNA, 18 nt, Human
cagggguaggggaagagg

SEQ ID NO: 652028 - RNA, 20 nt, Human
cagggguaggggaagagggg

SEQ ID NO: 652029 - RNA, 20 nt, Human
cagggguaggggaagagggg

SEQ ID NO: 652030 - RNA, 19 nt, Human
cauccuacugcccucuccc

SEQ ID NO: 652031 - RNA, 20 nt, Human
ccaaacauccuacugcccuc

SEQ ID NO: 652032 - RNA, 30 nt, Human
ccaaacauccuacugcccucucccaugauu

SEQ ID NO: 652033 - RNA, 21 nt, Human
ccacucccugagccaccuagc

SEQ ID NO: 652034 - RNA, 21 nt, Human
ccacucccugagccaccuagc

SEQ ID NO: 652035 - RNA, 21 nt, Human
cccacaaccccccuccagaca

SEQ ID NO: 652036 - RNA, 24 nt, Human
cccacaaccccccuccagacacca

SEQ ID NO: 652037 - RNA, 26 nt, Human
ccccaauaccagugcacagagaccug

SEQ ID NO: 652038 - RNA, 26 nt, Human
ccccaauaccagugcacagagaccug

SEQ ID NO: 652039 - RNA, 19 nt, Human
ccccacaaccccccuccag

SEQ ID NO: 652040 - RNA, 22 nt, Human
ccccagggcacugcccugcccc

SEQ ID NO: 652041 - RNA, 22 nt, Human
ccccagggcacugcccugcccc

SEQ ID NO: 652042 - RNA, 21 nt, Human
cccccacaaccccccuccaga

SEQ ID NO: 652043 - RNA, 21 nt, Human
cccccuccagacaccagggcu

SEQ ID NO: 652044 - RNA, 23 nt, Human
cccuccagacaccagggcaccga

SEQ ID NO: 652045 - RNA, 23 nt, Human
cccugagccaccuagcuuacccc

SEQ ID NO: 652046 - RNA, 23 nt, Human
cccugagccaccuagcuuacccc

SEQ ID NO: 652047 - RNA, 19 nt, Human
ccgccacaaagcgggcagg

SEQ ID NO: 652048 - RNA, 19 nt, Human
ccugcaaccgcguggccgu

SEQ ID NO: 652049 - RNA, 21 nt, Human
ccugcaggagacccuccauaa

SEQ ID NO: 652050 - RNA, 21 nt, Human
ccugcaggagacccuccauaa

SEQ ID NO: 652051 - RNA, 19 nt, Human
ccuucugccacucccugag

SEQ ID NO: 652052 - RNA, 19 nt, Human
ccuucugccacucccugag

SEQ ID NO: 652053 - RNA, 22 nt, Human
ccuucugccacucccugagcca

SEQ ID NO: 652054 - RNA, 23 nt, Human
ccuucugccacucccugagccac

SEQ ID NO: 652055 - RNA, 28 nt, Human
cgggugguggaccauguaaggcgggcac

SEQ ID NO: 652056 - RNA, 22 nt, Human
cuacaccccaggcucaaggaga

SEQ ID NO: 652057 - RNA, 23 nt, Human
cucagggaggaaaaaaaaaaaaa

SEQ ID NO: 652058 - RNA, 23 nt, Human
cuccaagucaagucacgacuugc

SEQ ID NO: 652059 - RNA, 19 nt, Human
cuccuccccuaccuccccu

SEQ ID NO: 652060 - RNA, 19 nt, Human
cuccuccccuaccuccccu

SEQ ID NO: 652061 - RNA, 22 nt, Human
cuccuucccagccuggggccuu

SEQ ID NO: 652062 - RNA, 22 nt, Human
cuccuucccagccuggggccuu

SEQ ID NO: 652063 - RNA, 22 nt, Human
cugagccaccuagcuuaccccc

SEQ ID NO: 652064 - RNA, 22 nt, Human
cugagccaccuagcuuaccccc

SEQ ID NO: 652065 - RNA, 22 nt, Human
cugagcccaaaucagcucacuc

SEQ ID NO: 652066 - RNA, 22 nt, Human
cugagcccaaaucagcucacuc

SEQ ID NO: 652067 - RNA, 19 nt, Human
gaaaccaguaagaaaaucc

SEQ ID NO: 652068 - RNA, 19 nt, Human
gaaaccaguaagaaaaucc

SEQ ID NO: 652069 - RNA, 18 nt, Human
gacaaaaauccuaagccu

SEQ ID NO: 652070 - RNA, 18 nt, Human
gacaaaaauccuaagccu

SEQ ID NO: 652071 - RNA, 21 nt, Human
gacagggguaggggaagaggg

SEQ ID NO: 652072 - RNA, 21 nt, Human
gacagggguaggggaagaggg

SEQ ID NO: 652073 - RNA, 19 nt, Human
gacagugacgggucugccc

SEQ ID NO: 652074 - RNA, 19 nt, Human
gacagugacgggucugccc

SEQ ID NO: 652075 - RNA, 22 nt, Human
gaccauguaaggcgggcacacc

SEQ ID NO: 652076 - RNA, 24 nt, Human
gaccauuuauuuccaaaggcgacu

SEQ ID NO: 652077 - RNA, 24 nt, Human
gaccauuuauuuccaaaggcgacu

SEQ ID NO: 652078 - RNA, 23 nt, Human
gacugcagauaccauuucgguac

SEQ ID NO: 652079 - RNA, 23 nt, Human
gacugcagauaccauuucgguac

SEQ ID NO: 652080 - RNA, 18 nt, Human
gagagccaaagggaagga

SEQ ID NO: 652081 - RNA, 19 nt, Human
gagcugggaaaggaagagu

SEQ ID NO: 652082 - RNA, 21 nt, Human
gaguuuucaaaacaacagcuu

SEQ ID NO: 652083 - RNA, 21 nt, Human
gaguuuucaaaacaacagcuu

SEQ ID NO: 652084 - RNA, 28 nt, Human
gccccaauaccagugcacagagaccugc

SEQ ID NO: 652085 - RNA, 28 nt, Human
gccccaauaccagugcacagagaccugc

SEQ ID NO: 652086 - RNA, 21 nt, Human
gcuaagcuccugacagaaacc

SEQ ID NO: 652087 - RNA, 21 nt, Human
gcuaagcuccugacagaaacc

SEQ ID NO: 652088 - RNA, 22 nt, Human
ggaaggacagggguaggggaag

SEQ ID NO: 652089 - RNA, 22 nt, Human
ggaaggacagggguaggggaag

SEQ ID NO: 652090 - RNA, 21 nt, Human
ggcuacagcaaaaggggugau

SEQ ID NO: 652091 - RNA, 21 nt, Human
ggcuacagcaaaaggggugau

SEQ ID NO: 652092 - RNA, 21 nt, Human
gggaagagcugggaaaggaag

SEQ ID NO: 652093 - RNA, 21 nt, Human
guaaggcgggcacacccccac

SEQ ID NO: 652094 - RNA, 21 nt, Human
guccuuuuuuccuccuccccu

SEQ ID NO: 652095 - RNA, 21 nt, Human
guccuuuuuuccuccuccccu

SEQ ID NO: 652096 - RNA, 20 nt, Human
guggaccauguaaggcgggc

SEQ ID NO: 652097 - RNA, 18 nt, Human
guggggagcugugcccac

SEQ ID NO: 652098 - RNA, 18 nt, Human
guggggagcugugcccac

SEQ ID NO: 652099 - RNA, 24 nt, Human
guggggggagcuccuucccagccu

SEQ ID NO: 652100 - RNA, 24 nt, Human
guggggggagcuccuucccagccu

SEQ ID NO: 652101 - RNA, 19 nt, Human
uaaaguucgccgaucaccc

SEQ ID NO: 652102 - RNA, 18 nt, Human
uaacagcaucacacaugg

SEQ ID NO: 652103 - RNA, 18 nt, Human
uaacagcaucacacaugg

SEQ ID NO: 652104 - RNA, 20 nt, Human
uaaggcgggcacacccccaa

SEQ ID NO: 652105 - RNA, 21 nt, Human
uaaguacacaaauuaaugacc

SEQ ID NO: 652106 - RNA, 21 nt, Human
uaaguacacaaauuaaugacc

SEQ ID NO: 652107 - RNA, 20 nt, Human
uacaagacagagaaaacaca

SEQ ID NO: 652108 - RNA, 20 nt, Human
uacaagacagagaaaacaca

SEQ ID NO: 652109 - RNA, 26 nt, Human
uacaagacagagaaaacacauuacaa

SEQ ID NO: 652110 - RNA, 26 nt, Human
uacaagacagagaaaacacauuacaa

SEQ ID NO: 652111 - RNA, 22 nt, Human
uacaccaaacauccuacugccc

SEQ ID NO: 652112 - RNA, 21 nt, Human
uagaaaccaguaagaaaaucc

SEQ ID NO: 652113 - RNA, 26 nt, Human
uagaacacaaaauggacaccaaaaga

SEQ ID NO: 652114 - RNA, 26 nt, Human
uagaacacaaaauggacaccaaaaga

SEQ ID NO: 652115 - RNA, 18 nt, Human
uagcaaaccaguguacaa

SEQ ID NO: 652116 - RNA, 24 nt, Human
uagggggaagagcugggaaaggaa

SEQ ID NO: 652117 - RNA, 18 nt, Human
uaucacauucucuucacu

SEQ ID NO: 652118 - RNA, 18 nt, Human
uaucacauucucuucacu

SEQ ID NO: 652119 - RNA, 19 nt, Human
ucaagaacuggguguucuc

SEQ ID NO: 652120 - RNA, 21 nt, Human
ucacagacgagagcaacaagc

SEQ ID NO: 652121 - RNA, 19 nt, Human
ucacugacucuacccgcca

SEQ ID NO: 652122 - RNA, 18 nt, Human
uccccuucaguagaaacc

SEQ ID NO: 652123 - RNA, 18 nt, Human
uccccuucaguagaaacc

SEQ ID NO: 652124 - RNA, 18 nt, Human
ucccugagccaccuagcu

SEQ ID NO: 652125 - RNA, 19 nt, Human
ucccugagccaccuagcuu

SEQ ID NO: 652126 - RNA, 19 nt, Human
ucccugagccaccuagcuu

SEQ ID NO: 652127 - RNA, 20 nt, Human
uccuacugcccucucccaug

SEQ ID NO: 652128 - RNA, 20 nt, Human
uccugagcccaaaucagcuc

SEQ ID NO: 652129 - RNA, 20 nt, Human
uccugagcccaaaucagcuc

SEQ ID NO: 652130 - RNA, 28 nt, Human
ucguagggggaagagcugggaaaggaag

SEQ ID NO: 652131 - RNA, 20 nt, Human
ucuccaguggccaccaacga

SEQ ID NO: 652132 - RNA, 19 nt, Human
ugaaguuugaggagagagc

SEQ ID NO: 652133 - RNA, 23 nt, Human
ugacucuacccgccacaaagcgg

SEQ ID NO: 652134 - RNA, 23 nt, Human
ugacucuacccgccacaaagcgg

SEQ ID NO: 652135 - RNA, 18 nt, Human
ugagauggaacacaagcc

SEQ ID NO: 652136 - RNA, 23 nt, Human
ugagcaaacuggugggggcacag

SEQ ID NO: 652137 - RNA, 23 nt, Human
ugagcaaacuggugggggcacag

SEQ ID NO: 652138 - RNA, 19 nt, Human
ugaggagagagagagaaag

SEQ ID NO: 652139 - RNA, 22 nt, Human
ugaggagagagagagaaagaga

SEQ ID NO: 652140 - RNA, 25 nt, Human
ugaggagagagccaaagggaaggag

SEQ ID NO: 652141 - RNA, 24 nt, Human
ugccaaggagcccacaagggccug

SEQ ID NO: 652142 - RNA, 24 nt, Human
ugccaaggagcccacaagggccug

SEQ ID NO: 652143 - RNA, 19 nt, Human
ugcccugccccaauaccag

SEQ ID NO: 652144 - RNA, 19 nt, Human
ugcccugccccaauaccag

SEQ ID NO: 652145 - RNA, 25 nt, Human
uggaacacaagcccagaggguugcc

SEQ ID NO: 652146 - RNA, 18 nt, Human
uggcagagggaaaaaugg

SEQ ID NO: 652147 - RNA, 18 nt, Human
uggcagagggaaaaaugg

SEQ ID NO: 652148 - RNA, 19 nt, Human
ugggaaaggaagaguggua

SEQ ID NO: 652149 - RNA, 22 nt, Human
ugggaaaggaagagugguagaa

SEQ ID NO: 652150 - RNA, 19 nt, Human
uggggagacugagucugug

SEQ ID NO: 652151 - RNA, 27 nt, Human
uguacaaaaaugucacagacgagagca

SEQ ID NO: 652152 - RNA, 27 nt, Human
uguacaaaaaugucacagacgagagca

SEQ ID NO: 652153 - RNA, 20 nt, Human
uguccccacggcugucuggg

SEQ ID NO: 652154 - RNA, 19 nt, Human
uugcugacuuggggagacu

SEQ ID NO: 652155 - RNA, 24 nt, Human
uuuuuuuuuuuuuuuuuuuuucag

SEQ ID NO: 652156 - RNA, 20 nt, Human
aaagauaucucacccaaagc

SEQ ID NO: 652157 - RNA, 20 nt, Human
aacauggugaaacccugucu

SEQ ID NO: 652158 - RNA, 21 nt, Human
aacauggugaaacccugucuc

SEQ ID NO: 652159 - RNA, 19 nt, Human
aacccgcaacccuuauccc

SEQ ID NO: 652160 - RNA, 20 nt, Human
aacccuuauccccaacccuc

SEQ ID NO: 652161 - RNA, 24 nt, Human
aagauaucucacccaaagccccag

SEQ ID NO: 652162 - RNA, 22 nt, Human
aauacaaaaaaaguuagcugga

SEQ ID NO: 652163 - RNA, 24 nt, Human
aaucucuugaacccgguaggcaga

SEQ ID NO: 652164 - RNA, 21 nt, Human
acccuuauccccaacccucac

SEQ ID NO: 652165 - RNA, 24 nt, Human
accugaggucaggaguuugagacc

SEQ ID NO: 652166 - RNA, 24 nt, Human
agagguugcaggguugcagugagc

SEQ ID NO: 652167 - RNA, 24 nt, Human
agaugugguggcucaugccuguaa

SEQ ID NO: 652168 - RNA, 23 nt, Human
agcuggaugugguggcaggugcc

SEQ ID NO: 652169 - RNA, 20 nt, Human
aggaguuugagaccagugug

SEQ ID NO: 652170 - RNA, 21 nt, Human
aggcagagguugcaggguugc

SEQ ID NO: 652171 - RNA, 18 nt, Human
aggcaggcggaucaccug

SEQ ID NO: 652172 - RNA, 22 nt, Human
aggcaggcggaucaccugaggu

SEQ ID NO: 652173 - RNA, 26 nt, Human
aggcaggcggaucaccugaggucagg

SEQ ID NO: 652174 - RNA, 24 nt, Human
aggcaggggaaucucuugaacccg

SEQ ID NO: 652175 - RNA, 23 nt, Human
aggcaucauaucuccuguaguug

SEQ ID NO: 652176 - RNA, 22 nt, Human
aggccagaugugguggcucaug

SEQ ID NO: 652177 - RNA, 24 nt, Human
aggccagaugugguggcucaugcc

SEQ ID NO: 652178 - RNA, 24 nt, Human
aggcugaggcaggggaaucucuug

SEQ ID NO: 652179 - RNA, 24 nt, Human
aguguggccaacauggugaaaccc

SEQ ID NO: 652180 - RNA, 23 nt, Human
augaggcaucauaucuccuguag

SEQ ID NO: 652181 - RNA, 19 nt, Human
augccuguaaucccagcac

SEQ ID NO: 652182 - RNA, 25 nt, Human
caaaaaaaguuagcuggauguggug

SEQ ID NO: 652183 - RNA, 24 nt, Human
caacauggugaaacccugucucua

SEQ ID NO: 652184 - RNA, 19 nt, Human
caacccgcaacccuuaucc

SEQ ID NO: 652185 - RNA, 21 nt, Human
caacccgcaacccuuaucccc

SEQ ID NO: 652186 - RNA, 23 nt, Human
caacccgcaacccuuauccccaa

SEQ ID NO: 652187 - RNA, 21 nt, Human
cacaacucgagggagcccuuc

SEQ ID NO: 652188 - RNA, 18 nt, Human
cacccuucgacaacccgc

SEQ ID NO: 652189 - RNA, 21 nt, Human
cacccuucgacaacccgcaac

SEQ ID NO: 652190 - RNA, 23 nt, Human
caccugaggucaggaguuugaga

SEQ ID NO: 652191 - RNA, 23 nt, Human
cagcacuuugggggccgaggcag

SEQ ID NO: 652192 - RNA, 25 nt, Human
cagcacuuugggggccgaggcaggc

SEQ ID NO: 652193 - RNA, 23 nt, Human
cagcagucgggugcauagucugu

SEQ ID NO: 652194 - RNA, 24 nt, Human
cagcuacuugggaggcugaggcag

SEQ ID NO: 652195 - RNA, 24 nt, Human
caggcggaucaccugaggucagga

SEQ ID NO: 652196 - RNA, 22 nt, Human
cccaaagccccacuucuggcuc

SEQ ID NO: 652197 - RNA, 23 nt, Human
cccaaagccccacuucuggcucc

SEQ ID NO: 652198 - RNA, 21 nt, Human
ccccaacccucacuuuuuccc

SEQ ID NO: 652199 - RNA, 23 nt, Human
cccgcaacccuuauccccaaccc

SEQ ID NO: 652200 - RNA, 21 nt, Human
cccgguaggcagagguugcag

SEQ ID NO: 652201 - RNA, 20 nt, Human
ccucacuuuuucccauccac

SEQ ID NO: 652202 - RNA, 22 nt, Human
ccugaggucaggaguuugagac

SEQ ID NO: 652203 - RNA, 20 nt, Human
ccuguaaucccagcacuuug

SEQ ID NO: 652204 - RNA, 22 nt, Human
ccuguaaucccagcacuuuggg

SEQ ID NO: 652205 - RNA, 18 nt, Human
ccuguaauuccagcuacu

SEQ ID NO: 652206 - RNA, 19 nt, Human
ccuguaauuccagcuacuu

SEQ ID NO: 652207 - RNA, 21 nt, Human
ccuguaauuccagcuacuugg

SEQ ID NO: 652208 - RNA, 22 nt, Human
ccuguaauuccagcuacuuggg

SEQ ID NO: 652209 - RNA, 20 nt, Human
cgaggcaggcggaucaccug

SEQ ID NO: 652210 - RNA, 24 nt, Human
cggaucaccugaggucaggaguuu

SEQ ID NO: 652211 - RNA, 19 nt, Human
cucacuuuuucccauccac

SEQ ID NO: 652212 - RNA, 24 nt, Human
cucaugccuguaaucccagcacuu

SEQ ID NO: 652213 - RNA, 23 nt, Human
cugcccuacugcuauuguuuugu

SEQ ID NO: 652214 - RNA, 19 nt, Human
gaacagcagcagucgggug

SEQ ID NO: 652215 - RNA, 25 nt, Human
gaggcaggcggaucaccugagguca

SEQ ID NO: 652216 - RNA, 21 nt, Human
gaucaccugaggucaggaguu

SEQ ID NO: 652217 - RNA, 24 nt, Human
gaucaccugaggucaggaguuuga

SEQ ID NO: 652218 - RNA, 21 nt, Human
gcaaagauaucucacccaaag

SEQ ID NO: 652219 - RNA, 24 nt, Human
gccaacauggugaaacccugucuc

SEQ ID NO: 652220 - RNA, 23 nt, Human
ggagcccuuccuucaguauacuu

SEQ ID NO: 652221 - RNA, 22 nt, Human
ggaucaccugaggucaggaguu

SEQ ID NO: 652222 - RNA, 25 nt, Human
ggaucaccugaggucaggaguuuga

SEQ ID NO: 652223 - RNA, 21 nt, Human
gggccgaggcaggcggaucac

SEQ ID NO: 652224 - RNA, 19 nt, Human
ggucaggaguuugagacca

SEQ ID NO: 652225 - RNA, 24 nt, Human
gguggcucaugccuguaaucccag

SEQ ID NO: 652226 - RNA, 23 nt, Human
guggcaggugccuguaauuccag

SEQ ID NO: 652227 - RNA, 19 nt, Human
guggccaacauggugaaac

SEQ ID NO: 652228 - RNA, 23 nt, Human
guggcucaugccuguaaucccag

SEQ ID NO: 652229 - RNA, 22 nt, Human
uagcuggaugugguggcaggug

SEQ ID NO: 652230 - RNA, 18 nt, Human
ucacccaaagccccacuu

SEQ ID NO: 652231 - RNA, 19 nt, Human
ucaccugaggucaggaguu

SEQ ID NO: 652232 - RNA, 22 nt, Human
ucaugccuguaaucccagcacu

SEQ ID NO: 652233 - RNA, 21 nt, Human
ucgagggagcccuuccuucag

SEQ ID NO: 652234 - RNA, 21 nt, Human
ugagaccaguguggccaacau

SEQ ID NO: 652235 - RNA, 24 nt, Human
ugagaccaguguggccaacauggu

SEQ ID NO: 652236 - RNA, 24 nt, Human
ugaggcaggggaaucucuugaacc

SEQ ID NO: 652237 - RNA, 25 nt, Human
ugaggcaggggaaucucuugaaccc

SEQ ID NO: 652238 - RNA, 18 nt, Human
ugaggucaggaguuugag

SEQ ID NO: 652239 - RNA, 23 nt, Human
ugccuguaaucccagcacuuugg

SEQ ID NO: 652240 - RNA, 23 nt, Human
ugccuguaaucccagcacuuugg

SEQ ID NO: 652241 - RNA, 24 nt, Human
ugccuguaauuccagcuacuuggg

SEQ ID NO: 652242 - RNA, 22 nt, Human
uggcaggugccuguaauuccag

SEQ ID NO: 652243 - RNA, 20 nt, Human
uggccaacauggugaaaccc

SEQ ID NO: 652244 - RNA, 23 nt, Human
uggccaacauggugaaacccugu

SEQ ID NO: 652245 - RNA, 24 nt, Human
uggccaacauggugaaacccuguc

SEQ ID NO: 652246 - RNA, 22 nt, Human
uggcucaugccuguaaucccag

SEQ ID NO: 652247 - RNA, 24 nt, Human
uggcucaugccuguaaucccagca

SEQ ID NO: 652248 - RNA, 18 nt, Human
ugggaggcugaggcaggg

SEQ ID NO: 652249 - RNA, 23 nt, Human
ugggggccgaggcaggcggauca

SEQ ID NO: 652250 - RNA, 24 nt, Human
ugguggcaggugccuguaauucca

SEQ ID NO: 652251 - RNA, 24 nt, Human
ugguggcucaugccuguaauccca

SEQ ID NO: 652252 - RNA, 21 nt, Human
uguauacauguuaucugugca

SEQ ID NO: 652253 - RNA, 24 nt, Human
uguggccaacauggugaaacccug

SEQ ID NO: 652254 - RNA, 24 nt, Human
uuagcuggaugugguggcaggugc

SEQ ID NO: 652255 - RNA, 18 nt, Human
uugcaggguugcagugag

SEQ ID NO: 652256 - RNA, 22 nt, Human
uugggaggcugaggcaggggaa

SEQ ID NO: 652257 - RNA, 20 nt, Human
uuugaacuaugauguauaca

SEQ ID NO: 652258 - RNA, 25 nt, Human
uuuuuuuaauuuacuaaauauuucu

SEQ ID NO: 652259 - RNA, 20 nt, Human
agguucuagaacagugaucu

SEQ ID NO: 652260 - RNA, 20 nt, Human
ccccugccucauggccugca

SEQ ID NO: 652261 - RNA, 24 nt, Human
ccguccuggagagggucuggcugu

SEQ ID NO: 652262 - RNA, 22 nt, Human
ccucauggccugcaugugggcc

SEQ ID NO: 652263 - RNA, 21 nt, Human
ccugcagcccgcuuuggcccc

SEQ ID NO: 652264 - RNA, 22 nt, Human
cucccaugccugggcuugugcu

SEQ ID NO: 652265 - RNA, 23 nt, Human
cuggugacgugauagcagccccu

SEQ ID NO: 652266 - RNA, 21 nt, Human
cuguuucucccaugccugggc

SEQ ID NO: 652267 - RNA, 20 nt, Human
uagcauccaaggcagaccau

SEQ ID NO: 652268 - RNA, 22 nt, Human
ugcagcccgcuuuggccccagg

SEQ ID NO: 652269 - RNA, 22 nt, Human
ugccugggcuugugcuaaugug

SEQ ID NO: 652270 - RNA, 23 nt, Human
uuuggccccaggccguccuggag

SEQ ID NO: 652271 - RNA, 25 nt, Human
uuuuuuuuuuuuuuuucuccagggg

SEQ ID NO: 652272 - RNA, 19 nt, Human
aagcacagaggggagaggg

SEQ ID NO: 652273 - RNA, 20 nt, Human
caagcacagaggggagaggg

SEQ ID NO: 652274 - RNA, 18 nt, Human
caccccacccuguuguag

SEQ ID NO: 652275 - RNA, 18 nt, Human
cagaguaacucggccugu

SEQ ID NO: 652276 - RNA, 20 nt, Human
caucacccacugcuagguag

SEQ ID NO: 652277 - RNA, 23 nt, Human
ccccucccucccuuuccccccca

SEQ ID NO: 652278 - RNA, 22 nt, Human
cccucccaccccacccuguugu

SEQ ID NO: 652279 - RNA, 19 nt, Human
cccuguuguagccccuccu

SEQ ID NO: 652280 - RNA, 23 nt, Human
ccuacccccuccccauccagggg

SEQ ID NO: 652281 - RNA, 24 nt, Human
ccucccaccccacccuguuguagc

SEQ ID NO: 652282 - RNA, 25 nt, Human
ccucccaccccacccuguuguagcc

SEQ ID NO: 652283 - RNA, 21 nt, Human
ccucccucccuuuccccccca

SEQ ID NO: 652284 - RNA, 24 nt, Human
ccucccucccuuucccccccaagc

SEQ ID NO: 652285 - RNA, 20 nt, Human
cgaauaaacagagagacgcu

SEQ ID NO: 652286 - RNA, 21 nt, Human
cucccaccccacccuguugua

SEQ ID NO: 652287 - RNA, 21 nt, Human
cuccuacccccuccccaucca

SEQ ID NO: 652288 - RNA, 20 nt, Human
ggagaggggccagggaagug

SEQ ID NO: 652289 - RNA, 20 nt, Human
guagccccuccuacccccuc

SEQ ID NO: 652290 - RNA, 20 nt, Human
uagccccuccuacccccucc

SEQ ID NO: 652291 - RNA, 21 nt, Human
uccggagccgccagagggccc

SEQ ID NO: 652292 - RNA, 20 nt, Human
ucuccuccccucccacccca

SEQ ID NO: 652293 - RNA, 18 nt, Human
uguagccccuccuacccc

SEQ ID NO: 652294 - RNA, 19 nt, Human
uguguccaucacccacugc

SEQ ID NO: 652295 - RNA, 24 nt, Human
uuacauucugggggguuaggggga

SEQ ID NO: 652296 - RNA, 18 nt, Human
uuagggggagucccccuc

SEQ ID NO: 652297 - RNA, 21 nt, Human
uuguagccccuccuacccccu

SEQ ID NO: 652298 - RNA, 26 nt, Human
uuuuuuuuuuuuuuuuucggccuuuu

SEQ ID NO: 652299 - RNA, 23 nt, Human
uuuuuuuuuuuuuuuuuuuucgg

SEQ ID NO: 652300 - RNA, 21 nt, Human
aaaagauacaggccugcccuc

SEQ ID NO: 652301 - RNA, 22 nt, Human
aaaggcugucuucagcaaacac

SEQ ID NO: 652302 - RNA, 25 nt, Human
aacagaaauaaaaauucugaccaaa

SEQ ID NO: 652303 - RNA, 22 nt, Human
aagagaaaugcugaagcuuucu

SEQ ID NO: 652304 - RNA, 19 nt, Human
aagauacaggccugcccuc

SEQ ID NO: 652305 - RNA, 19 nt, Human
aauaagugauuguggcaca

SEQ ID NO: 652306 - RNA, 18 nt, Human
acaacaggcaccuuaaac

SEQ ID NO: 652307 - RNA, 18 nt, Human
acaaguaacucaugaaag

SEQ ID NO: 652308 - RNA, 24 nt, Human
acagaaguaaaagauacaggccug

SEQ ID NO: 652309 - RNA, 21 nt, Human
acagaggagggaggacccaga

SEQ ID NO: 652310 - RNA, 22 nt, Human
accaaauaacucugugcucugc

SEQ ID NO: 652311 - RNA, 18 nt, Human
accagcucacaggcaaga

SEQ ID NO: 652312 - RNA, 20 nt, Human
acggaggaggcagagaaaag

SEQ ID NO: 652313 - RNA, 19 nt, Human
acuugaacuaccaauuccc

SEQ ID NO: 652314 - RNA, 19 nt, Human
agaaaaguagaagacauga

SEQ ID NO: 652315 - RNA, 20 nt, Human
agaccugaggcugugcccug

SEQ ID NO: 652316 - RNA, 20 nt, Human
agagaaaagcuuccacagug

SEQ ID NO: 652317 - RNA, 24 nt, Human
agaggccacaggucggcugugagc

SEQ ID NO: 652318 - RNA, 20 nt, Human
agaugggggauggcuucaga

SEQ ID NO: 652319 - RNA, 20 nt, Human
aggaagacagcgugcuguug

SEQ ID NO: 652320 - RNA, 27 nt, Human
aggcaagagaaaggaccacguuucugg

SEQ ID NO: 652321 - RNA, 22 nt, Human
aggccacaggucggcugugagc

SEQ ID NO: 652322 - RNA, 19 nt, Human
aggccgauguuugcuuaua

SEQ ID NO: 652323 - RNA, 22 nt, Human
aguaacucaugaaaggcaaugc

SEQ ID NO: 652324 - RNA, 23 nt, Human
auaaaaauucugaccaaaucuua

SEQ ID NO: 652325 - RNA, 24 nt, Human
auagaguuaaaauaauagcaucaa

SEQ ID NO: 652326 - RNA, 21 nt, Human
aucuccuaucugaaugaaaau

SEQ ID NO: 652327 - RNA, 26 nt, Human
augaacagaaauaaaaauucugacca

SEQ ID NO: 652328 - RNA, 19 nt, Human
augcagucaaaagcugugg

SEQ ID NO: 652329 - RNA, 19 nt, Human
auuauagucaaagccacug

SEQ ID NO: 652330 - RNA, 19 nt, Human
caaguaacucaugaaaggc

SEQ ID NO: 652331 - RNA, 23 nt, Human
cagcgugcuguuggggcacagag

SEQ ID NO: 652332 - RNA, 24 nt, Human
cagcucacaggcaagagaaaggac

SEQ ID NO: 652333 - RNA, 22 nt, Human
cagcuugcauggaguugccgca

SEQ ID NO: 652334 - RNA, 19 nt, Human
cucaagccccaugccccuc

SEQ ID NO: 652335 - RNA, 19 nt, Human
cucacaggcaagagaaagg

SEQ ID NO: 652336 - RNA, 18 nt, Human
cugagaauaacaagguaa

SEQ ID NO: 652337 - RNA, 18 nt, Human
cugcaccagcucacaggc

SEQ ID NO: 652338 - RNA, 18 nt, Human
cugugucuagggaagaug

SEQ ID NO: 652339 - RNA, 18 nt, Human
gaacacaaggaggacaag

SEQ ID NO: 652340 - RNA, 22 nt, Human
gaacuaccaauucccucaaacu

SEQ ID NO: 652341 - RNA, 22 nt, Human
gagggcuggacacaggggggug

SEQ ID NO: 652342 - RNA, 22 nt, Human
gaucgcuuauuuaauaagugau

SEQ ID NO: 652343 - RNA, 24 nt, Human
gcaaacaccaaauaacucugugcu

SEQ ID NO: 652344 - RNA, 19 nt, Human
gcagagaaaagcuuccaca

SEQ ID NO: 652345 - RNA, 24 nt, Human
gcccucaagaaacuuugguucuau

SEQ ID NO: 652346 - RNA, 19 nt, Human
gcuuccacaguguaugaac

SEQ ID NO: 652347 - RNA, 18 nt, Human
ggaagaaggaaugaagga

SEQ ID NO: 652348 - RNA, 21 nt, Human
gguguggggagagaugagaag

SEQ ID NO: 652349 - RNA, 27 nt, Human
guagaagacaugaacagaaauaaaaau

SEQ ID NO: 652350 - RNA, 25 nt, Human
uacuucaguagcucuggaguuucaa

SEQ ID NO: 652351 - RNA, 19 nt, Human
uagaagguccaauaggaag

SEQ ID NO: 652352 - RNA, 20 nt, Human
uagcaagagaaaugcugaag

SEQ ID NO: 652353 - RNA, 22 nt, Human
uccaugggauggaaagagaaac

SEQ ID NO: 652354 - RNA, 18 nt, Human
uccucaagccccaugccc

SEQ ID NO: 652355 - RNA, 18 nt, Human
ucucagaugucugcugug

SEQ ID NO: 652356 - RNA, 21 nt, Human
ucuccaacaguggaugagugu

SEQ ID NO: 652357 - RNA, 19 nt, Human
ugaauggaucucauuuggu

SEQ ID NO: 652358 - RNA, 22 nt, Human
ugagacacuuuucugaaucugu

SEQ ID NO: 652359 - RNA, 24 nt, Human
ugcaccagcucacaggcaagagaa

SEQ ID NO: 652360 - RNA, 18 nt, Human
ugccugagaauaacaagg

SEQ ID NO: 652361 - RNA, 21 nt, Human
uggaaagagaaacagagggcu

SEQ ID NO: 652362 - RNA, 18 nt, Human
ugggaagcacuccauggg

SEQ ID NO: 652363 - RNA, 20 nt, Human
ugggauggaaagagaaacag

SEQ ID NO: 652364 - RNA, 24 nt, Human
uuaacauaaauguaagacauugcc

SEQ ID NO: 652365 - RNA, 19 nt, Human
uucuggucucccggccacg

SEQ ID NO: 652366 - RNA, 18 nt, Human
uuuuuuuuuuuuuuuuug

SEQ ID NO: 652367 - RNA, 23 nt, Human
uuuuuuuuuuuuuuuuuuugagg

SEQ ID NO: 652368 - RNA, 21 nt, Human
aaacucccucuuuaugcagac

SEQ ID NO: 652369 - RNA, 24 nt, Human
aaagugcugggauuacaggcguga

SEQ ID NO: 652370 - RNA, 24 nt, Human
aaaguuuugggauuacaagaguga

SEQ ID NO: 652371 - RNA, 25 nt, Human
aagcgauccucccaccucaaccucc

SEQ ID NO: 652372 - RNA, 25 nt, Human
aagcgauccucccaccucaaccucc

SEQ ID NO: 652373 - RNA, 25 nt, Human
aagcgauccucccaccuuggccucc

SEQ ID NO: 652374 - RNA, 22 nt, Human
aagugcaguggcgugaucucgg

SEQ ID NO: 652375 - RNA, 19 nt, Human
aagugcugggauuacaggc

SEQ ID NO: 652376 - RNA, 19 nt, Human
aagugcugggauuacaggc

SEQ ID NO: 652377 - RNA, 26 nt, Human
aagugcugggauuacaggcgugagcc

SEQ ID NO: 652378 - RNA, 23 nt, Human
acaggguuuacuguguuggccag

SEQ ID NO: 652379 - RNA, 24 nt, Human
acaggguuuacuguguuggccagg

SEQ ID NO: 652380 - RNA, 18 nt, Human
acaggguuuuaccguguu

SEQ ID NO: 652381 - RNA, 19 nt, Human
acaggguuuuaccguguua

SEQ ID NO: 652382 - RNA, 20 nt, Human
acaggguuuuaccguguuag

SEQ ID NO: 652383 - RNA, 24 nt, Human
acaggguuuuaccguguuagccag

SEQ ID NO: 652384 - RNA, 22 nt, Human
acccaggcugaagugcaguggc

SEQ ID NO: 652385 - RNA, 23 nt, Human
accucaaccuccauaguagcugg

SEQ ID NO: 652386 - RNA, 24 nt, Human
accuugugauccgccugccucggc

SEQ ID NO: 652387 - RNA, 18 nt, Human
acugcaagcucugccucc

SEQ ID NO: 652388 - RNA, 18 nt, Human
acuguguuggccaggcug

SEQ ID NO: 652389 - RNA, 23 nt, Human
acuguguuggccaggcuggucuc

SEQ ID NO: 652390 - RNA, 27 nt, Human
agaaggucucuuucugucacccaggcu

SEQ ID NO: 652391 - RNA, 18 nt, Human
agacaggguuuuaccgug

SEQ ID NO: 652392 - RNA, 19 nt, Human
agagacaggguuuuaccgu

SEQ ID NO: 652393 - RNA, 18 nt, Human
agccuccagaguagcugg

SEQ ID NO: 652394 - RNA, 18 nt, Human
agcucugccuccuggguu

SEQ ID NO: 652395 - RNA, 24 nt, Human
aggcugaagugcaguggcacgauc

SEQ ID NO: 652396 - RNA, 19 nt, Human
aguagcugggacuacaggc

SEQ ID NO: 652397 - RNA, 19 nt, Human
aguagcugggacuacaggc

SEQ ID NO: 652398 - RNA, 25 nt, Human
aguagcugggacuacaggcgcuugc

SEQ ID NO: 652399 - RNA, 20 nt, Human
agugcaguggcacgaucuug

SEQ ID NO: 652400 - RNA, 23 nt, Human
agugcaguggcacgaucuuggcu

SEQ ID NO: 652401 - RNA, 24 nt, Human
agugcaguggcacgaucuuggcuc

SEQ ID NO: 652402 - RNA, 19 nt, Human
agugcaguggcgugaucuc

SEQ ID NO: 652403 - RNA, 20 nt, Human
agugcaguggcgugaucucg

SEQ ID NO: 652404 - RNA, 23 nt, Human
agugcaguggcgugaucucggcu

SEQ ID NO: 652405 - RNA, 24 nt, Human
agugcaguggcgugaucucggcuc

SEQ ID NO: 652406 - RNA, 18 nt, Human
agugcugggauuacaggc

SEQ ID NO: 652407 - RNA, 23 nt, Human
auaguagcugggacuacaggcac

SEQ ID NO: 652408 - RNA, 25 nt, Human
caaacuccugggcucaagcgauccu

SEQ ID NO: 652409 - RNA, 24 nt, Human
caaagugcugggauuacaggcgug

SEQ ID NO: 652410 - RNA, 19 nt, Human
caagcgauccucccaccuu

SEQ ID NO: 652411 - RNA, 27 nt, Human
caagcgauccucccaccuuggccuccu

SEQ ID NO: 652412 - RNA, 19 nt, Human
cacacaccaccaugcucag

SEQ ID NO: 652413 - RNA, 24 nt, Human
cacaccaccaugcucagcuaauuu

SEQ ID NO: 652414 - RNA, 22 nt, Human
cacgccauucuccugccucagc

SEQ ID NO: 652415 - RNA, 19 nt, Human
cacggcgcccagcccccaa

SEQ ID NO: 652416 - RNA, 23 nt, Human
cacugcaagcucugccuccuggg

SEQ ID NO: 652417 - RNA, 23 nt, Human
caggguuuacuguguuggccagg

SEQ ID NO: 652418 - RNA, 24 nt, Human
caggguuuuaccguguuagccagg

SEQ ID NO: 652419 - RNA, 19 nt, Human
caguggcacgaucuuggcu

SEQ ID NO: 652420 - RNA, 21 nt, Human
cauggaggguggugcccccga

SEQ ID NO: 652421 - RNA, 20 nt, Human
caugggcucaagcgauccuc

SEQ ID NO: 652422 - RNA, 22 nt, Human
ccaaagugcugggauuacaggc

SEQ ID NO: 652423 - RNA, 22 nt, Human
ccaaagugcugggauuacaggc

SEQ ID NO: 652424 - RNA, 24 nt, Human
ccaaagugcugggauuacaggcgu

SEQ ID NO: 652425 - RNA, 24 nt, Human
ccagaguagcugggacuacaggcg

SEQ ID NO: 652426 - RNA, 25 nt, Human
cccaaaacucccucuuuaugcagac

SEQ ID NO: 652427 - RNA, 18 nt, Human
cccagaagcugggcuugc

SEQ ID NO: 652428 - RNA, 22 nt, Human
cccagcccccaaaacucccucu

SEQ ID NO: 652429 - RNA, 18 nt, Human
ccccaaaacucccucuuu

SEQ ID NO: 652430 - RNA, 25 nt, Human
ccucccaccucaaccuccauaguag

SEQ ID NO: 652431 - RNA, 18 nt, Human
ccucccaccuuggccucc

SEQ ID NO: 652432 - RNA, 24 nt, Human
ccuccuggguucacgccauucucc

SEQ ID NO: 652433 - RNA, 24 nt, Human
ccugccucagccuccagaguagcu

SEQ ID NO: 652434 - RNA, 20 nt, Human
ccugggcucaagcgauccuc

SEQ ID NO: 652435 - RNA, 24 nt, Human
cgcugugucgcccaggcucaagug

SEQ ID NO: 652436 - RNA, 23 nt, Human
cggcgcccagcccccaaaacucc

SEQ ID NO: 652437 - RNA, 24 nt, Human
cuaaaguuuugggauuacaagagu

SEQ ID NO: 652438 - RNA, 24 nt, Human
cucaagcgauccucccaccucaac

SEQ ID NO: 652439 - RNA, 24 nt, Human
cucaagcgauccucccaccuuggc

SEQ ID NO: 652440 - RNA, 24 nt, Human
cucacugcaagcucugccuccugg

SEQ ID NO: 652441 - RNA, 24 nt, Human
cucagccuccagaguagcugggac

SEQ ID NO: 652442 - RNA, 24 nt, Human
cuccugaccuugugauccgccugc

SEQ ID NO: 652443 - RNA, 23 nt, Human
cuccugggcucaagcgauccucc

SEQ ID NO: 652444 - RNA, 21 nt, Human
cuccuggguucacgccauucu

SEQ ID NO: 652445 - RNA, 19 nt, Human
cucuuucugucacccaggc

SEQ ID NO: 652446 - RNA, 19 nt, Human
cugcaagcucugccuccug

SEQ ID NO: 652447 - RNA, 23 nt, Human
cugccucggccucccaaagugcu

SEQ ID NO: 652448 - RNA, 20 nt, Human
cuuuaugcagaccuccccuc

SEQ ID NO: 652449 - RNA, 22 nt, Human
gaccuugugauccgccugccuc

SEQ ID NO: 652450 - RNA, 24 nt, Human
gaccuugugauccgccugccucgg

SEQ ID NO: 652451 - RNA, 22 nt, Human
gacuacaggcacacaccaccau

SEQ ID NO: 652452 - RNA, 24 nt, Human
gacuacaggcgcuugccaccaugc

SEQ ID NO: 652453 - RNA, 19 nt, Human
gagacaggguuuacugugu

SEQ ID NO: 652454 - RNA, 18 nt, Human
gauuacaagagugagcca

SEQ ID NO: 652455 - RNA, 18 nt, Human
gauuacaggcgugagcca

SEQ ID NO: 652456 - RNA, 22 nt, Human
gauuacaggcgugagccacugc

SEQ ID NO: 652457 - RNA, 22 nt, Human
gauuacaggcgugagccacugc

SEQ ID NO: 652458 - RNA, 24 nt, Human
gcccaggcucaagugcaguggcgu

SEQ ID NO: 652459 - RNA, 24 nt, Human
gccuggcuaauuuuuuuguauuuu

SEQ ID NO: 652460 - RNA, 19 nt, Human
gcugaagugcaguggcacg

SEQ ID NO: 652461 - RNA, 20 nt, Human
ggagacaggguuuacugugu

SEQ ID NO: 652462 - RNA, 22 nt, Human
ggagucucgcugugucgcccag

SEQ ID NO: 652463 - RNA, 22 nt, Human
ggcucaagugcaguggcgugau

SEQ ID NO: 652464 - RNA, 21 nt, Human
ggguuuacuguguuggccagg

SEQ ID NO: 652465 - RNA, 21 nt, Human
gugaucucggcucacugcaag

SEQ ID NO: 652466 - RNA, 26 nt, Human
uaauuuuuuuguauuuuuaguagaga

SEQ ID NO: 652467 - RNA, 19 nt, Human
uacaggcgugagccacugc

SEQ ID NO: 652468 - RNA, 23 nt, Human
uacaggcgugagccacugcgccc

SEQ ID NO: 652469 - RNA, 24 nt, Human
uaccguguuagccaggauagucuu

SEQ ID NO: 652470 - RNA, 21 nt, Human
uaccugcaaaggcauggaggg

SEQ ID NO: 652471 - RNA, 21 nt, Human
uacuguguuggccaggcuggu

SEQ ID NO: 652472 - RNA, 22 nt, Human
uagagacaggguuuuaccgugu

SEQ ID NO: 652473 - RNA, 21 nt, Human
uaguagagacaggguuuuacc

SEQ ID NO: 652474 - RNA, 24 nt, Human
uaguagagacaggguuuuaccgug

SEQ ID NO: 652475 - RNA, 25 nt, Human
uaguagcugggacuacaggcacaca

SEQ ID NO: 652476 - RNA, 21 nt, Human
uaugcagaccuccccucucuc

SEQ ID NO: 652477 - RNA, 25 nt, Human
ucaagcgauccucccaccuuggccu

SEQ ID NO: 652478 - RNA, 24 nt, Human
ucaagugcaguggcgugaucucgg

SEQ ID NO: 652479 - RNA, 18 nt, Human
ucacugcaagcucugccu

SEQ ID NO: 652480 - RNA, 23 nt, Human
ucacugcaagcucugccuccugg

SEQ ID NO: 652481 - RNA, 24 nt, Human
ucacugcaagcucugccuccuggg

SEQ ID NO: 652482 - RNA, 24 nt, Human
ucacuguaaccugggccucauggg

SEQ ID NO: 652483 - RNA, 24 nt, Human
uccagaguagcugggacuacaggc

SEQ ID NO: 652484 - RNA, 24 nt, Human
uccauaguagcugggacuacaggc

SEQ ID NO: 652485 - RNA, 24 nt, Human
ucccaaagugcugggauuacaggc

SEQ ID NO: 652486 - RNA, 19 nt, Human
ucccagaagcugggcuugc

SEQ ID NO: 652487 - RNA, 21 nt, Human
ucccuucccagaagcugggcu

SEQ ID NO: 652488 - RNA, 18 nt, Human
uccuaaaguuuugggauu

SEQ ID NO: 652489 - RNA, 21 nt, Human
uccugggcucaagcgauccuc

SEQ ID NO: 652490 - RNA, 24 nt, Human
uccugggcucaagcgauccuccca

SEQ ID NO: 652491 - RNA, 24 nt, Human
uccuggguucacgccauucuccug

SEQ ID NO: 652492 - RNA, 22 nt, Human
ucucaaacuccugggcucaagc

SEQ ID NO: 652493 - RNA, 21 nt, Human
ucucccuucccagaagcuggg

SEQ ID NO: 652494 - RNA, 24 nt, Human
ucuccugccucagccuccagagua

SEQ ID NO: 652495 - RNA, 19 nt, Human
ucucgcugugucgcccagg

SEQ ID NO: 652496 - RNA, 24 nt, Human
ucucgcugugucgcccaggcucaa

SEQ ID NO: 652497 - RNA, 24 nt, Human
ucucuuucugucacccaggcugaa

SEQ ID NO: 652498 - RNA, 24 nt, Human
ucugucacccaggcugaagugcag

SEQ ID NO: 652499 - RNA, 22 nt, Human
ucuuucugucacccaggcugaa

SEQ ID NO: 652500 - RNA, 24 nt, Human
ucuuucugucacccaggcugaagu

SEQ ID NO: 652501 - RNA, 24 nt, Human
ugaagugcaguggcacgaucuugg

SEQ ID NO: 652502 - RNA, 22 nt, Human
ugcaguggcacgaucuuggcuc

SEQ ID NO: 652503 - RNA, 24 nt, Human
ugccucagccuccagaguagcugg

SEQ ID NO: 652504 - RNA, 19 nt, Human
ugccuccuggguucacgcc

SEQ ID NO: 652505 - RNA, 21 nt, Human
ugccucggccucccaaagugc

SEQ ID NO: 652506 - RNA, 24 nt, Human
ugccucggccucccaaagugcugg

SEQ ID NO: 652507 - RNA, 24 nt, Human
ugcugggauuacaggcgugagcca

SEQ ID NO: 652508 - RNA, 18 nt, Human
uggaggguggugcccccg

SEQ ID NO: 652509 - RNA, 24 nt, Human
uggagucucgcugugucgcccagg

SEQ ID NO: 652510 - RNA, 24 nt, Human
uggcacgaucuuggcucacuguaa

SEQ ID NO: 652511 - RNA, 24 nt, Human
uggccaggcuggucucaaacuccu

SEQ ID NO: 652512 - RNA, 20 nt, Human
uggcgugaucucggcucacu

SEQ ID NO: 652513 - RNA, 21 nt, Human
ugggacuacaggcacacacca

SEQ ID NO: 652514 - RNA, 22 nt, Human
ugggacuacaggcacacaccac

SEQ ID NO: 652515 - RNA, 24 nt, Human
ugggacuacaggcacacaccacca

SEQ ID NO: 652516 - RNA, 21 nt, Human
ugggacuacaggcgcuugcca

SEQ ID NO: 652517 - RNA, 22 nt, Human
ugggacuacaggcgcuugccac

SEQ ID NO: 652518 - RNA, 24 nt, Human
ugggacuacaggcgcuugccacca

SEQ ID NO: 652519 - RNA, 25 nt, Human
ugggacuacaggcgcuugccaccau

SEQ ID NO: 652520 - RNA, 21 nt, Human
ugggauuacaagagugagcca

SEQ ID NO: 652521 - RNA, 22 nt, Human
ugggauuacaagagugagccac

SEQ ID NO: 652522 - RNA, 18 nt, Human
ugggauuacaggcgugag

SEQ ID NO: 652523 - RNA, 19 nt, Human
ugggauuacaggcgugagc

SEQ ID NO: 652524 - RNA, 21 nt, Human
ugggauuacaggcgugagcca

SEQ ID NO: 652525 - RNA, 22 nt, Human
ugggauuacaggcgugagccac

SEQ ID NO: 652526 - RNA, 22 nt, Human
ugggauuacaggcgugagccac

SEQ ID NO: 652527 - RNA, 24 nt, Human
ugggauuacaggcgugagccacug

SEQ ID NO: 652528 - RNA, 26 nt, Human
ugggauuacaggcgugagccacugcg

SEQ ID NO: 652529 - RNA, 20 nt, Human
uggguucacgccauucuccu

SEQ ID NO: 652530 - RNA, 23 nt, Human
uguggagacaggguuuacugugu

SEQ ID NO: 652531 - RNA, 24 nt, Human
ugugucgcccaggcucaagugcag

SEQ ID NO: 652532 - RNA, 23 nt, Human
uguguuggccaggcuggucucaa

SEQ ID NO: 652533 - RNA, 24 nt, Human
uguguuggccaggcuggucucaaa

SEQ ID NO: 652534 - RNA, 22 nt, Human
uguuggccaggcuggucucaaa

SEQ ID NO: 652535 - RNA, 22 nt, Human
uguuuuguuuuguuuugagaug

SEQ ID NO: 652536 - RNA, 24 nt, Human
uuaccguguuagccaggauagucu

SEQ ID NO: 652537 - RNA, 22 nt, Human
uuaguagagacaggguuuuacc

SEQ ID NO: 652538 - RNA, 24 nt, Human
uuaguagagacaggguuuuaccgu

SEQ ID NO: 652539 - RNA, 22 nt, Human
uuuguggagacaggguuuacug

SEQ ID NO: 652540 - RNA, 23 nt, Human
uuuguggagacaggguuuacugu

SEQ ID NO: 652541 - RNA, 19 nt, Human
uuuguuuuguuuuguuuug

SEQ ID NO: 652542 - RNA, 21 nt, Human
uuuuuaguagagacaggguuu

SEQ ID NO: 652543 - RNA, 21 nt, Human
uuuuuguauuuuuaguagaga

SEQ ID NO: 652544 - RNA, 21 nt, Human
uuuuuuguauuuuuaguagag

SEQ ID NO: 652545 - RNA, 24 nt, Human
uuuuuuguauuuuuaguagagaca

SEQ ID NO: 652546 - RNA, 18 nt, Human
uuuuuuuuuuuuuuuuug

SEQ ID NO: 652547 - RNA, 21 nt, Human
aaaagcaaaacuggacucaac

SEQ ID NO: 652548 - RNA, 23 nt, Human
aaaccgaaucacugcagagacaa

SEQ ID NO: 652549 - RNA, 22 nt, Human
aacccaaaagugacuuaaaagu

SEQ ID NO: 652550 - RNA, 24 nt, Human
aagcggccccgggccggcgaaaaa

SEQ ID NO: 652551 - RNA, 19 nt, Human
acauuauuaaaaagcaaaa

SEQ ID NO: 652552 - RNA, 18 nt, Human
agaacauaacuucauuga

SEQ ID NO: 652553 - RNA, 20 nt, Human
agcaaagucaacaaagagua

SEQ ID NO: 652554 - RNA, 18 nt, Human
agcagagcugccuggguu

SEQ ID NO: 652555 - RNA, 21 nt, Human
agcaggugaaaggccuggaac

SEQ ID NO: 652556 - RNA, 21 nt, Human
agcugccuggguuggugucag

SEQ ID NO: 652557 - RNA, 20 nt, Human
aggagaagccacagcagagc

SEQ ID NO: 652558 - RNA, 23 nt, Human
aguaccuagucccugaaaauggc

SEQ ID NO: 652559 - RNA, 22 nt, Human
auaagcagcaaagucaacaaag

SEQ ID NO: 652560 - RNA, 22 nt, Human
aucacuucugguuaguccacuu

SEQ ID NO: 652561 - RNA, 23 nt, Human
augccagagcccaggagaagcca

SEQ ID NO: 652562 - RNA, 22 nt, Human
cacagcagccaccuguucugac

SEQ ID NO: 652563 - RNA, 23 nt, Human
cacagcagccaccuguucugaca

SEQ ID NO: 652564 - RNA, 24 nt, Human
cacagcagccaccuguucugacaa

SEQ ID NO: 652565 - RNA, 18 nt, Human
cacaggccaagccugggg

SEQ ID NO: 652566 - RNA, 18 nt, Human
cacauuauuaaaaagcaa

SEQ ID NO: 652567 - RNA, 18 nt, Human
caggucaccugccaggug

SEQ ID NO: 652568 - RNA, 24 nt, Human
ccaaaagugacuuaaaaguaaaaa

SEQ ID NO: 652569 - RNA, 20 nt, Human
ccaaauagccauuucaaggc

SEQ ID NO: 652570 - RNA, 18 nt, Human
ccaauaagcagcaaaguc

SEQ ID NO: 652571 - RNA, 24 nt, Human
ccaggacaaggggaaccagcaggg

SEQ ID NO: 652572 - RNA, 27 nt, Human
ccccgguccgcagcugagcggcugcgc

SEQ ID NO: 652573 - RNA, 22 nt, Human
ccgccucagggcccccagcugu

SEQ ID NO: 652574 - RNA, 19 nt, Human
ccucagggcccccagcugu

SEQ ID NO: 652575 - RNA, 22 nt, Human
ccucagggcccccagcugugag

SEQ ID NO: 652576 - RNA, 20 nt, Human
ccucccaggacaaggggaac

SEQ ID NO: 652577 - RNA, 18 nt, Human
cgaaaccgaaagcggccc

SEQ ID NO: 652578 - RNA, 20 nt, Human
cgacggaagcucgggagcuc

SEQ ID NO: 652579 - RNA, 19 nt, Human
cgagggcggcggcagcgcu

SEQ ID NO: 652580 - RNA, 23 nt, Human
cgcgccuucagucagagggagcc

SEQ ID NO: 652581 - RNA, 23 nt, Human
cggcgaaaaacagaaccugugcg

SEQ ID NO: 652582 - RNA, 19 nt, Human
cggcggcagcgcuggcgga

SEQ ID NO: 652583 - RNA, 20 nt, Human
cggcggcggacgcuggcugg

SEQ ID NO: 652584 - RNA, 19 nt, Human
cuaaugccgcgaugcucag

SEQ ID NO: 652585 - RNA, 20 nt, Human
cuccaggucaccugccaggu

SEQ ID NO: 652586 - RNA, 25 nt, Human
cucuuuugugacauguguggcacaa

SEQ ID NO: 652587 - RNA, 19 nt, Human
cuggcgggcggcucucgca

SEQ ID NO: 652588 - RNA, 25 nt, Human
gaaaaacagaaccugugcgcccucc

SEQ ID NO: 652589 - RNA, 18 nt, Human
gaagcuacuccuccaggu

SEQ ID NO: 652590 - RNA, 22 nt, Human
gagcccaggagaagccacagca

SEQ ID NO: 652591 - RNA, 19 nt, Human
gccacgcccccgguccgca

SEQ ID NO: 652592 - RNA, 18 nt, Human
gcgcccucgccacgcccc

SEQ ID NO: 652593 - RNA, 21 nt, Human
gcucagugucgcccaggccaa

SEQ ID NO: 652594 - RNA, 19 nt, Human
ggacucaacuacaaucacu

SEQ ID NO: 652595 - RNA, 18 nt, Human
ggcaccacacagcagcca

SEQ ID NO: 652596 - RNA, 19 nt, Human
ggcccggagcgcgggcugu

SEQ ID NO: 652597 - RNA, 19 nt, Human
ggcgggcggcucucgcagg

SEQ ID NO: 652598 - RNA, 21 nt, Human
ggcuguggcuguggcggcucg

SEQ ID NO: 652599 - RNA, 24 nt, Human
gggaaccagcagggacucgauggc

SEQ ID NO: 652600 - RNA, 23 nt, Human
gggcuguggcuguggcggcucgc

SEQ ID NO: 652601 - RNA, 22 nt, Human
ggggguccucggggaagcuacu

SEQ ID NO: 652602 - RNA, 24 nt, Human
guaccuagucccugaaaauggcuu

SEQ ID NO: 652603 - RNA, 21 nt, Human
guggcggcucgcgggggucag

SEQ ID NO: 652604 - RNA, 21 nt, Human
uaacuucauugagaggucaau

SEQ ID NO: 652605 - RNA, 23 nt, Human
ucaaucucacagggauguuaaaa

SEQ ID NO: 652606 - RNA, 24 nt, Human
ucaccugccagguggaugcacuuc

SEQ ID NO: 652607 - RNA, 24 nt, Human
ucagucagagggagccucgaggga

SEQ ID NO: 652608 - RNA, 18 nt, Human
uccagugugcuuaggaaa

SEQ ID NO: 652609 - RNA, 19 nt, Human
ucccaggacaaggggaacc

SEQ ID NO: 652610 - RNA, 18 nt, Human
ucgccacgcccccggucc

SEQ ID NO: 652611 - RNA, 21 nt, Human
ugaaaggccuggaacacuccu

SEQ ID NO: 652612 - RNA, 22 nt, Human
ugacaaugugacacagaccaac

SEQ ID NO: 652613 - RNA, 20 nt, Human
ugagaaaccgaaucacugca

SEQ ID NO: 652614 - RNA, 22 nt, Human
ugagaaaccgaaucacugcaga

SEQ ID NO: 652615 - RNA, 19 nt, Human
ugagaggucaauguuaaga

SEQ ID NO: 652616 - RNA, 18 nt, Human
ugcacuuccuugggcaau

SEQ ID NO: 652617 - RNA, 24 nt, Human
ugcagagacaaacucauaaaaauu

SEQ ID NO: 652618 - RNA, 21 nt, Human
ugccagguggaugcacuuccu

SEQ ID NO: 652619 - RNA, 18 nt, Human
ugccaugagacucugaga

SEQ ID NO: 652620 - RNA, 21 nt, Human
ugccuggguuggugucagagc

SEQ ID NO: 652621 - RNA, 23 nt, Human
ugcuuaggaaauguggguuugcg

SEQ ID NO: 652622 - RNA, 18 nt, Human
uggcaccacacagcagcc

SEQ ID NO: 652623 - RNA, 18 nt, Human
uggugccaauaagcagca

SEQ ID NO: 652624 - RNA, 23 nt, Human
ugugacacagaccaacuaaugcc

SEQ ID NO: 652625 - RNA, 20 nt, Human
uucaaggcagagcaggugaa

SEQ ID NO: 652626 - RNA, 23 nt, Human
uuuaaaaagaaaaggaaaggccc

SEQ ID NO: 652627 - RNA, 22 nt, Human
uuuuuuuuuuuuuuuuucggau

SEQ ID NO: 652628 - RNA, 25 nt, Human
uuuuuuuuuuuuuuuuuuuuuucgg

SEQ ID NO: 652629 - RNA, 19 nt, Human
aacagguugagaucuggag

SEQ ID NO: 652630 - RNA, 18 nt, Human
agaggacccagaggagga

SEQ ID NO: 652631 - RNA, 23 nt, Human
aguccuggaaggccuuccuggag

SEQ ID NO: 652632 - RNA, 22 nt, Human
auggagagcaggcccuacuucc

SEQ ID NO: 652633 - RNA, 22 nt, Human
cauccccaugcaucccucugcc

SEQ ID NO: 652634 - RNA, 18 nt, Human
ccagaggaggaaguccug

SEQ ID NO: 652635 - RNA, 24 nt, Human
ccuggaggaggggcugucagagcu

SEQ ID NO: 652636 - RNA, 18 nt, Human
gagcaggcccuacuucca

SEQ ID NO: 652637 - RNA, 19 nt, Human
gagucccuguagggucaga

SEQ ID NO: 652638 - RNA, 19 nt, Human
ggagcugcaagaggaaaag

SEQ ID NO: 652639 - RNA, 19 nt, Human
gucccuguagggucagagc

SEQ ID NO: 652640 - RNA, 18 nt, Human
uccaggagaaagcgaccc

SEQ ID NO: 652641 - RNA, 23 nt, Human
uccccaugcaucccucugcccau

SEQ ID NO: 652642 - RNA, 20 nt, Human
uccuggaaggccuuccugga

SEQ ID NO: 652643 - RNA, 25 nt, Human
ugcaagaggaaaagcugagagauac

SEQ ID NO: 652644 - RNA, 22 nt, Human
ugggauggagagcaggcccuac

SEQ ID NO: 652645 - RNA, 23 nt, Human
uuugcaauccaggagaaagcgac

SEQ ID NO: 652646 - RNA, 23 nt, Human
uuuuuuuuuuuuuuuuuuuuagg

SEQ ID NO: 652647 - RNA, 19 nt, Human
aaaauguuauaaaccauga

SEQ ID NO: 652648 - RNA, 21 nt, Human
aacugacgaaccuacauauca

SEQ ID NO: 652649 - RNA, 22 nt, Human
aauguaccaucuccuaaacaac

SEQ ID NO: 652650 - RNA, 21 nt, Human
accugcauucccuucuuguug

SEQ ID NO: 652651 - RNA, 28 nt, Human
acucccacacaugcacagccuuccccau

SEQ ID NO: 652652 - RNA, 20 nt, Human
agagaugucccauacaccuu

SEQ ID NO: 652653 - RNA, 22 nt, Human
agcccccaacagagggauacau

SEQ ID NO: 652654 - RNA, 22 nt, Human
agggauacauuuguuaacaacu

SEQ ID NO: 652655 - RNA, 20 nt, Human
aucauuaucacccaaagucc

SEQ ID NO: 652656 - RNA, 24 nt, Human
caacuagaaaaauucaguuuucaa

SEQ ID NO: 652657 - RNA, 18 nt, Human
cacaaggaagugaauguu

SEQ ID NO: 652658 - RNA, 23 nt, Human
cauaucauuaucacccaaagucc

SEQ ID NO: 652659 - RNA, 27 nt, Human
cccaaaguccacaguuuauauuauucc

SEQ ID NO: 652660 - RNA, 24 nt, Human
cccacacaugcacagccuucccca

SEQ ID NO: 652661 - RNA, 19 nt, Human
cccagcaggcccacagccg

SEQ ID NO: 652662 - RNA, 21 nt, Human
cccauacaccuccuacuccca

SEQ ID NO: 652663 - RNA, 19 nt, Human
ccccacccccagcaggccc

SEQ ID NO: 652664 - RNA, 20 nt, Human
cgcuucgggcccccaccccc

SEQ ID NO: 652665 - RNA, 23 nt, Human
cuagaaaaauucaguuuucaaaa

SEQ ID NO: 652666 - RNA, 24 nt, Human
cuagcaauuuccucucggcuuucu

SEQ ID NO: 652667 - RNA, 23 nt, Human
cucaacucuuuuauuuaguccaa

SEQ ID NO: 652668 - RNA, 18 nt, Human
gaagccucucacauucuu

SEQ ID NO: 652669 - RNA, 20 nt, Human
gagaauuuucaaauacagaa

SEQ ID NO: 652670 - RNA, 29 nt, Human
gcccccaacagagggauacauuuguuaac

SEQ ID NO: 652671 - RNA, 23 nt, Human
gcccccacccccagcaggcccac

SEQ ID NO: 652672 - RNA, 22 nt, Human
gcuucgggcccccacccccagc

SEQ ID NO: 652673 - RNA, 21 nt, Human
ggcccccacccccagcaggcc

SEQ ID NO: 652674 - RNA, 28 nt, Human
uaagggcaacagcgaagacuggagaccc

SEQ ID NO: 652675 - RNA, 24 nt, Human
uaccaggaauaaacuagcaauuuc

SEQ ID NO: 652676 - RNA, 24 nt, Human
uagcaaaauugauuagaagguaca

SEQ ID NO: 652677 - RNA, 22 nt, Human
uaguucugaucaucuguuuaau

SEQ ID NO: 652678 - RNA, 21 nt, Human
uccaaaagaaaaagaagaaaa

SEQ ID NO: 652679 - RNA, 23 nt, Human
uccaaaagaaaaagaagaaaaug

SEQ ID NO: 652680 - RNA, 26 nt, Human
uccacaguuuauauuauuccuucugg

SEQ ID NO: 652681 - RNA, 21 nt, Human
ucccacacaugcacagccuuc

SEQ ID NO: 652682 - RNA, 21 nt, Human
uccuucuggagaauuuucaaa

SEQ ID NO: 652683 - RNA, 21 nt, Human
ucgggcccccacccccagcag

SEQ ID NO: 652684 - RNA, 20 nt, Human
ugauaguucugaucaucugu

SEQ ID NO: 652685 - RNA, 24 nt, Human
ugucccauacaccuccuacuccca

SEQ ID NO: 652686 - RNA, 18 nt, Human
uguuauaaaccaugaaaa

SEQ ID NO: 652687 - RNA, 18 nt, Human
uuacauauaucagcuuca

SEQ ID NO: 652688 - RNA, 24 nt, Human
uuagagcaguuuuaaguucauagc

SEQ ID NO: 652689 - RNA, 23 nt, Human
uuaguccaaaagaaaaagaagaa

SEQ ID NO: 652690 - RNA, 22 nt, Human
uuaucacccaaaguccacaguu

SEQ ID NO: 652691 - RNA, 18 nt, Human
uucauagcaaaauugauu

SEQ ID NO: 652692 - RNA, 20 nt, Human
aaacaucuaaaauacacuga

SEQ ID NO: 652693 - RNA, 18 nt, Human
aaccauuuaauagccaaa

SEQ ID NO: 652694 - RNA, 26 nt, Human
acggggucagaaagcaucuccaccuc

SEQ ID NO: 652695 - RNA, 19 nt, Human
agaaagcaucuccaccucu

SEQ ID NO: 652696 - RNA, 31 nt, Human
cauuuucaucacaaaaaguaacauugggagg

SEQ ID NO: 652697 - RNA, 19 nt, Human
cucuuucuaugucugguuu

SEQ ID NO: 652698 - RNA, 22 nt, Human
guaaaccauuuaauagccaaaa

SEQ ID NO: 652699 - RNA, 18 nt, Human
uaaacucucuaaauucuu

SEQ ID NO: 652700 - RNA, 25 nt, Human
uaauagccaaaagucagaauuuaaa

SEQ ID NO: 652701 - RNA, 22 nt, Human
uaguagaugcuguauucaacac

SEQ ID NO: 652702 - RNA, 21 nt, Human
uccaacggucacuuugcugcc

SEQ ID NO: 652703 - RNA, 19 nt, Human
uccacgaagcaaucggaaa

SEQ ID NO: 652704 - RNA, 18 nt, Human
ucggaaagcuucaaguuc

SEQ ID NO: 652705 - RNA, 22 nt, Human
ucuccaccucucucccgccgug

SEQ ID NO: 652706 - RNA, 23 nt, Human
ucuuucucuuucuaugucugguu

SEQ ID NO: 652707 - RNA, 21 nt, Human
uggcuuauuguguaaaccauu

SEQ ID NO: 652708 - RNA, 21 nt, Human
uggcuuauuguguaaaccauu

SEQ ID NO: 652709 - RNA, 25 nt, Human
uggcuuauuguguaaaccauuuaau

SEQ ID NO: 652710 - RNA, 18 nt, Human
uuuucgggcuccuuugca

SEQ ID NO: 652711 - RNA, 26 nt, Human
uuuuuuuuuuuuuuuuucucauaaaa

SEQ ID NO: 652712 - RNA, 18 nt, Human
aaaaccuucagcugcagc

SEQ ID NO: 652713 - RNA, 19 nt, Human
aaagcccuagagccuagca

SEQ ID NO: 652714 - RNA, 18 nt, Human
aagacaaaaucacaagga

SEQ ID NO: 652715 - RNA, 21 nt, Human
aagagaagcucacaccagcuc

SEQ ID NO: 652716 - RNA, 21 nt, Human
aagcagaugagcaggaaagcc

SEQ ID NO: 652717 - RNA, 22 nt, Human
aagcagaugagcaggaaagccc

SEQ ID NO: 652718 - RNA, 23 nt, Human
aaggagagacucuuuccuuaagg

SEQ ID NO: 652719 - RNA, 18 nt, Human
aaggugaugagaagacag

SEQ ID NO: 652720 - RNA, 24 nt, Human
acaccagcucggguucagcagccu

SEQ ID NO: 652721 - RNA, 21 nt, Human
acccccaaggaagaggcuggc

SEQ ID NO: 652722 - RNA, 22 nt, Human
accuucauucuggccccggauu

SEQ ID NO: 652723 - RNA, 24 nt, Human
acucauuccagauacaaacaacuu

SEQ ID NO: 652724 - RNA, 25 nt, Human
agaaacaaaugagaagcagaugagc

SEQ ID NO: 652725 - RNA, 21 nt, Human
agaagcagaugagcaggaaag

SEQ ID NO: 652726 - RNA, 23 nt, Human
agagaagcucacaccagcucggg

SEQ ID NO: 652727 - RNA, 22 nt, Human
aggaagaggcuggcaagcagaa

SEQ ID NO: 652728 - RNA, 19 nt, Human
agugcagaaacaaaugaga

SEQ ID NO: 652729 - RNA, 23 nt, Human
auacaaacaacuuuaaagacaaa

SEQ ID NO: 652730 - RNA, 23 nt, Human
auguucaaccugauuuucuggcu

SEQ ID NO: 652731 - RNA, 24 nt, Human
auucaaggugaugagaagacaggu

SEQ ID NO: 652732 - RNA, 22 nt, Human
auugaaugaacauauauaaaug

SEQ ID NO: 652733 - RNA, 18 nt, Human
auuguccagggggaugag

SEQ ID NO: 652734 - RNA, 19 nt, Human
caagagaagcucacaccag

SEQ ID NO: 652735 - RNA, 28 nt, Human
cacacagcagcagcggagucacguaauc

SEQ ID NO: 652736 - RNA, 22 nt, Human
caccuuuagacuuugaacauuu

SEQ ID NO: 652737 - RNA, 19 nt, Human
cagaaacaaaugagaagca

SEQ ID NO: 652738 - RNA, 19 nt, Human
cagcagccucccucuccac

SEQ ID NO: 652739 - RNA, 22 nt, Human
cagcagcggagucacguaaucc

SEQ ID NO: 652740 - RNA, 20 nt, Human
cagcuggguuagugcaucuc

SEQ ID NO: 652741 - RNA, 22 nt, Human
caggugcaggugggcacccaua

SEQ ID NO: 652742 - RNA, 22 nt, Human
cauagugcagaaacaaaugaga

SEQ ID NO: 652743 - RNA, 18 nt, Human
ccacugggcucaggaagc

SEQ ID NO: 652744 - RNA, 19 nt, Human
ccagaagaacccaaguccu

SEQ ID NO: 652745 - RNA, 25 nt, Human
ccagaagaacccaaguccugcucca

SEQ ID NO: 652746 - RNA, 24 nt, Human
ccauagcugggcugcugaccugga

SEQ ID NO: 652747 - RNA, 24 nt, Human
cccacugggcucaggaagcuccag

SEQ ID NO: 652748 - RNA, 22 nt, Human
ccccccucagaugaacaacuaa

SEQ ID NO: 652749 - RNA, 18 nt, Human
ccccugggaccucuugcc

SEQ ID NO: 652750 - RNA, 22 nt, Human
ccgccugaaaaccuucagcugc

SEQ ID NO: 652751 - RNA, 20 nt, Human
ccucuccacacagcagcagc

SEQ ID NO: 652752 - RNA, 21 nt, Human
ccuucagcccgccugaaaacc

SEQ ID NO: 652753 - RNA, 22 nt, Human
cggcaaauaaacaaucauuccc

SEQ ID NO: 652754 - RNA, 23 nt, Human
cuaacacgugcuccuggccaccc

SEQ ID NO: 652755 - RNA, 22 nt, Human
cuaaguaaaaauuaaaaccaaa

SEQ ID NO: 652756 - RNA, 24 nt, Human
cuacuucugagcagagcucuuaac

SEQ ID NO: 652757 - RNA, 20 nt, Human
cuccuggguucugagguccu

SEQ ID NO: 652758 - RNA, 21 nt, Human
cuccuggguucugagguccuc

SEQ ID NO: 652759 - RNA, 22 nt, Human
cucggguucagcagccucccuc

SEQ ID NO: 652760 - RNA, 19 nt, Human
cuggcuuccaguauuuugg

SEQ ID NO: 652761 - RNA, 20 nt, Human
gaaauaaaaucaauacagau

SEQ ID NO: 652762 - RNA, 19 nt, Human
gaagaagcggcccagccuu

SEQ ID NO: 652763 - RNA, 23 nt, Human
gaagcagaugagcaggaaagccc

SEQ ID NO: 652764 - RNA, 21 nt, Human
gaaugaacauauauaaaugaa

SEQ ID NO: 652765 - RNA, 18 nt, Human
gacacuaauuaguguugu

SEQ ID NO: 652766 - RNA, 18 nt, Human
gauucugggucaguacuc

SEQ ID NO: 652767 - RNA, 21 nt, Human
gcccgccugaaaaccuucagc

SEQ ID NO: 652768 - RNA, 19 nt, Human
ggccagcaaguggcaaagg

SEQ ID NO: 652769 - RNA, 22 nt, Human
gggcuuuuccacgaagugccag

SEQ ID NO: 652770 - RNA, 20 nt, Human
guguguuggcuguguucucu

SEQ ID NO: 652771 - RNA, 22 nt, Human
uaaaggaaucugggagucaaaa

SEQ ID NO: 652772 - RNA, 22 nt, Human
uaacacgugcuccuggccaccc

SEQ ID NO: 652773 - RNA, 23 nt, Human
uaaggacacuguuguuuuuggag

SEQ ID NO: 652774 - RNA, 20 nt, Human
uacagauugugcauggggag

SEQ ID NO: 652775 - RNA, 21 nt, Human
uauuuuggcucauuaaacagg

SEQ ID NO: 652776 - RNA, 19 nt, Human
ucaagaguaaauagcaguc

SEQ ID NO: 652777 - RNA, 21 nt, Human
ucaauguuccucuuugguuug

SEQ ID NO: 652778 - RNA, 21 nt, Human
uccacacagcagcagcggagu

SEQ ID NO: 652779 - RNA, 19 nt, Human
ucccucuccacacagcagc

SEQ ID NO: 652780 - RNA, 20 nt, Human
uccuggguucugagguccuc

SEQ ID NO: 652781 - RNA, 18 nt, Human
ucuccacggaacaaaagc

SEQ ID NO: 652782 - RNA, 25 nt, Human
ucugaaaugaaugaagaagcggccc

SEQ ID NO: 652783 - RNA, 22 nt, Human
ucuucaucuucuucuuuuucuu

SEQ ID NO: 652784 - RNA, 25 nt, Human
ucuuugguuuguaacaagaaccacu

SEQ ID NO: 652785 - RNA, 21 nt, Human
ugaaagcuguuuucccgguug

SEQ ID NO: 652786 - RNA, 23 nt, Human
ugaaagcuguuuucccgguugag

SEQ ID NO: 652787 - RNA, 19 nt, Human
ugaaugaagaagcggccca

SEQ ID NO: 652788 - RNA, 21 nt, Human
ugaccagaucaaccaguccaa

SEQ ID NO: 652789 - RNA, 24 nt, Human
ugacggcaaauaaacaaucauucc

SEQ ID NO: 652790 - RNA, 23 nt, Human
ugagaagacaggugcaggugggc

SEQ ID NO: 652791 - RNA, 20 nt, Human
ugagaagcagaugagcagga

SEQ ID NO: 652792 - RNA, 21 nt, Human
ugagaagcagaugagcaggaa

SEQ ID NO: 652793 - RNA, 23 nt, Human
ugcagaaacaaaugagaagcaga

SEQ ID NO: 652794 - RNA, 21 nt, Human
ugcagaugaaggagacauucu

SEQ ID NO: 652795 - RNA, 19 nt, Human
ugcagcggcuacuucugag

SEQ ID NO: 652796 - RNA, 23 nt, Human
ugcaucuccacggaacaaaagca

SEQ ID NO: 652797 - RNA, 19 nt, Human
ugccugaggcugacaaaga

SEQ ID NO: 652798 - RNA, 20 nt, Human
uggcaagcagaaugguggcu

SEQ ID NO: 652799 - RNA, 23 nt, Human
uggcuccuggguucugagguccu

SEQ ID NO: 652800 - RNA, 21 nt, Human
uggcuuccaguauuuuggcuc

SEQ ID NO: 652801 - RNA, 24 nt, Human
ugugaacaaggccuaguuaccaaa

SEQ ID NO: 652802 - RNA, 19 nt, Human
uguggggcucccacugggc

SEQ ID NO: 652803 - RNA, 24 nt, Human
uguguagaaggcccacuguucaag

SEQ ID NO: 652804 - RNA, 18 nt, Human
uguguuuuagaaaaccac

SEQ ID NO: 652805 - RNA, 25 nt, Human
uuaaccagacuaacacgugcuccug

SEQ ID NO: 652806 - RNA, 22 nt, Human
uucaacacauccagcuggguua

SEQ ID NO: 652807 - RNA, 21 nt, Human
uucagaauuuaugauggucaa

SEQ ID NO: 652808 - RNA, 23 nt, Human
uucagcccgccugaaaaccuuca

SEQ ID NO: 652809 - RNA, 22 nt, Human
uucauguucaaccugauuuucu

SEQ ID NO: 652810 - RNA, 19 nt, Human
uuccucuggcuccuggguu

SEQ ID NO: 652811 - RNA, 23 nt, Human
uugaaugaacauauauaaaugaa

SEQ ID NO: 652812 - RNA, 24 nt, Human
uuggccagcaaguggcaaaggaga

SEQ ID NO: 652813 - RNA, 22 nt, Human
uuucuggcuuccaguauuuugg

SEQ ID NO: 652814 - RNA, 23 nt, Human
uuuuuuuuuuuuuuuuuuuuagg

SEQ ID NO: 652815 - RNA, 25 nt, Human
acacgguagccccugaguaugucug

SEQ ID NO: 652816 - RNA, 21 nt, Human
accacugccccuuacccccac

SEQ ID NO: 652817 - RNA, 19 nt, Human
agagcauccugccuucacc

SEQ ID NO: 652818 - RNA, 19 nt, Human
aggaaauaaauuugaccag

SEQ ID NO: 652819 - RNA, 20 nt, Human
agggaccugucugaggccuc

SEQ ID NO: 652820 - RNA, 23 nt, Human
agggagcaccugggccagccugu

SEQ ID NO: 652821 - RNA, 18 nt, Human
agggagggagcaccuggg

SEQ ID NO: 652822 - RNA, 23 nt, Human
agucauaucuagaaaagguccag

SEQ ID NO: 652823 - RNA, 23 nt, Human
caaccacacccucugcuggcagg

SEQ ID NO: 652824 - RNA, 19 nt, Human
caccuucauccuugggaca

SEQ ID NO: 652825 - RNA, 25 nt, Human
caccuucauccuugggacacagcuc

SEQ ID NO: 652826 - RNA, 20 nt, Human
cacugccccuuacccccacc

SEQ ID NO: 652827 - RNA, 27 nt, Human
ccaagcaccacccucccgcaaugcuaa

SEQ ID NO: 652828 - RNA, 20 nt, Human
ccacacccucugcuggcagg

SEQ ID NO: 652829 - RNA, 23 nt, Human
ccacaccuucauccuugggacac

SEQ ID NO: 652830 - RNA, 20 nt, Human
cccacagccacaccuucauc

SEQ ID NO: 652831 - RNA, 22 nt, Human
cccacagccacaccuucauccu

SEQ ID NO: 652832 - RNA, 20 nt, Human
cccccaccaacacaaacaca

SEQ ID NO: 652833 - RNA, 23 nt, Human
ccccuuacccccaccaacacaaa

SEQ ID NO: 652834 - RNA, 24 nt, Human
ccucagacuccuucagggaccugu

SEQ ID NO: 652835 - RNA, 20 nt, Human
ccuccaaccacacccucugc

SEQ ID NO: 652836 - RNA, 26 nt, Human
ccugcaggaagggagggagcaccugg

SEQ ID NO: 652837 - RNA, 20 nt, Human
ccugggccagccugugaucg

SEQ ID NO: 652838 - RNA, 25 nt, Human
cucuggagccucagacuccuucagg

SEQ ID NO: 652839 - RNA, 21 nt, Human
cugaggccuccaaccacaccc

SEQ ID NO: 652840 - RNA, 22 nt, Human
cugaggccuccaaccacacccu

SEQ ID NO: 652841 - RNA, 23 nt, Human
cugucugaggccuccaaccacac

SEQ ID NO: 652842 - RNA, 22 nt, Human
cuuacccccaccaacacaaaca

SEQ ID NO: 652843 - RNA, 21 nt, Human
gagccgcaucccaccccuuga

SEQ ID NO: 652844 - RNA, 21 nt, Human
gccugcaggaagggagggagc

SEQ ID NO: 652845 - RNA, 22 nt, Human
gggagggagcaccugggccagc

SEQ ID NO: 652846 - RNA, 26 nt, Human
ggugaccaagcaccacccucccgcaa

SEQ ID NO: 652847 - RNA, 21 nt, Human
gugaccaagcaccacccuccc

SEQ ID NO: 652848 - RNA, 18 nt, Human
uaaaacucccauaugaca

SEQ ID NO: 652849 - RNA, 23 nt, Human
uaaaacucccauaugacauccuc

SEQ ID NO: 652850 - RNA, 19 nt, Human
uacacucaaggguccugga

SEQ ID NO: 652851 - RNA, 18 nt, Human
uacccccaccaacacaaa

SEQ ID NO: 652852 - RNA, 19 nt, Human
uaugacauccucuggagcc

SEQ ID NO: 652853 - RNA, 19 nt, Human
ucauaucuagaaaaggucc

SEQ ID NO: 652854 - RNA, 22 nt, Human
ucuccugcaggagccgcauccc

SEQ ID NO: 652855 - RNA, 22 nt, Human
uggcgaauggccauuucuauaa

SEQ ID NO: 652856 - RNA, 21 nt, Human
uucuggguugacccauuaucc

SEQ ID NO: 652857 - RNA, 23 nt, Human
uucuucuuuuuuuguuuuuguug

SEQ ID NO: 652858 - RNA, 21 nt, Human
uuuucuucuuuuuuuguuuuu

SEQ ID NO: 652859 - RNA, 20 nt, Human
uuuuuguuuuuguuguuguu

SEQ ID NO: 652860 - RNA, 24 nt, Human
uuuuuuguuuuuguuguuguuuau

SEQ ID NO: 652861 - RNA, 25 nt, Human
uuuuuuuuuuuuuuuuuuuauuuuu

SEQ ID NO: 652862 - RNA, 21 nt, Human
aaaaaaaccagcuuuuuuggg

SEQ ID NO: 652863 - RNA, 22 nt, Human
aagcuuuauugguguguuugag

SEQ ID NO: 652864 - RNA, 22 nt, Human
aagugacaaaugccgagaggaa

SEQ ID NO: 652865 - RNA, 18 nt, Human
agcggggcccucucccca

SEQ ID NO: 652866 - RNA, 19 nt, Human
agcuggugggugcauuagc

SEQ ID NO: 652867 - RNA, 19 nt, Human
augcugggccccaagccgg

SEQ ID NO: 652868 - RNA, 19 nt, Human
cagcccagcggggcccucu

SEQ ID NO: 652869 - RNA, 25 nt, Human
cagcggggcccucuccccagggguc

SEQ ID NO: 652870 - RNA, 19 nt, Human
caggaggcuuccuggaauu

SEQ ID NO: 652871 - RNA, 23 nt, Human
cagggccagcccagcggggcccc

SEQ ID NO: 652872 - RNA, 21 nt, Human
cccagcggggcccucucccca

SEQ ID NO: 652873 - RNA, 19 nt, Human
ccccaagccggcucagcuu

SEQ ID NO: 652874 - RNA, 18 nt, Human
ccccagggguccuggggg

SEQ ID NO: 652875 - RNA, 22 nt, Human
cccucuccccagggguccuggg

SEQ ID NO: 652876 - RNA, 19 nt, Human
cccuuggagggacagaggu

SEQ ID NO: 652877 - RNA, 18 nt, Human
ccugcagggccagcccag

SEQ ID NO: 652878 - RNA, 23 nt, Human
cugggccccaagccggcucagga

SEQ ID NO: 652879 - RNA, 19 nt, Human
ggagggacagaggugggug

SEQ ID NO: 652880 - RNA, 27 nt, Human
ggcaccagagaaauucaccaggaaaaa

SEQ ID NO: 652881 - RNA, 19 nt, Human
gggguccugggggccugug

SEQ ID NO: 652882 - RNA, 21 nt, Human
gguguguuugagcuggugggu

SEQ ID NO: 652883 - RNA, 19 nt, Human
uccccagggguccuggggg

SEQ ID NO: 652884 - RNA, 24 nt, Human
uccccagggguccugggggccugu

SEQ ID NO: 652885 - RNA, 25 nt, Human
ugagggcaccagagaaauuggagac

SEQ ID NO: 652886 - RNA, 26 nt, Human
ugcccuuggagggacagaggugggug

SEQ ID NO: 652887 - RNA, 21 nt, Human
ugcugggccccaagccggcuc

SEQ ID NO: 652888 - RNA, 20 nt, Human
ugggccccaagccggcucag

SEQ ID NO: 652889 - RNA, 23 nt, Human
ugggccccaagccggcucagcuu

SEQ ID NO: 652890 - RNA, 23 nt, Human
ugggggccuguguaugcugggcc

SEQ ID NO: 652891 - RNA, 18 nt, Human
uuuuuuuuuuuuuuuuug

SEQ ID NO: 652892 - RNA, 18 nt, Human
aaacaggaggccagccuu

SEQ ID NO: 652893 - RNA, 19 nt, Human
aagccugacaagcuccccc

SEQ ID NO: 652894 - RNA, 19 nt, Human
agccuuggccaucuucagc

SEQ ID NO: 652895 - RNA, 19 nt, Human
agggccaggauguccacgu

SEQ ID NO: 652896 - RNA, 22 nt, Human
agucagccucagacgguuccag

SEQ ID NO: 652897 - RNA, 24 nt, Human
aguguggagagcugaagauuucuc

SEQ ID NO: 652898 - RNA, 19 nt, Human
auccugcccucgucgcccu

SEQ ID NO: 652899 - RNA, 24 nt, Human
caccaaacaggaggccagccuugg

SEQ ID NO: 652900 - RNA, 21 nt, Human
caccaggucaauguugcucau

SEQ ID NO: 652901 - RNA, 23 nt, Human
cagggccccgucguccccgaagg

SEQ ID NO: 652902 - RNA, 19 nt, Human
cauguccuccauguaacac

SEQ ID NO: 652903 - RNA, 20 nt, Human
ccagacccagguccaccagg

SEQ ID NO: 652904 - RNA, 20 nt, Human
ccccgucguccccgaaggcc

SEQ ID NO: 652905 - RNA, 24 nt, Human
ccccgucguccccgaaggcccccc

SEQ ID NO: 652906 - RNA, 19 nt, Human
ccggagccguuccaccuuc

SEQ ID NO: 652907 - RNA, 20 nt, Human
ccuccagggccccgucgucc

SEQ ID NO: 652908 - RNA, 19 nt, Human
ccuucuuguucucccggag

SEQ ID NO: 652909 - RNA, 22 nt, Human
cucagugcgaauguccuccagg

SEQ ID NO: 652910 - RNA, 21 nt, Human
cugaagauuucucaccaccaa

SEQ ID NO: 652911 - RNA, 23 nt, Human
gcaguaggggucgucauaggcac

SEQ ID NO: 652912 - RNA, 21 nt, Human
uagcaaggccuucuuuacuuu

SEQ ID NO: 652913 - RNA, 19 nt, Human
uccaccaggaucucucuug

SEQ ID NO: 652914 - RNA, 19 nt, Human
ugacaagcucccccaggua

SEQ ID NO: 652915 - RNA, 23 nt, Human
uuuuuuuuuuuuuuuuuuauugg

SEQ ID NO: 652916 - RNA, 23 nt, Human
aaacagaaucacagcauuucugc

SEQ ID NO: 652917 - RNA, 18 nt, Human
aaagcccucaaacucucc

SEQ ID NO: 652918 - RNA, 22 nt, Human
aaguuuuuaacugcaauaaguc

SEQ ID NO: 652919 - RNA, 19 nt, Human
acaauugcaggcccauuug

SEQ ID NO: 652920 - RNA, 24 nt, Human
aguuucuuuuucuucuucuuuuuu

SEQ ID NO: 652921 - RNA, 19 nt, Human
auaaugccauggcuucucc

SEQ ID NO: 652922 - RNA, 20 nt, Human
aucccugaguuucuuuuucu

SEQ ID NO: 652923 - RNA, 18 nt, Human
augcaaggauuuauuuua

SEQ ID NO: 652924 - RNA, 26 nt, Human
caaguuuuuaacugcaauaagucaca

SEQ ID NO: 652925 - RNA, 19 nt, Human
ccagugaucccugaguuuc

SEQ ID NO: 652926 - RNA, 23 nt, Human
ccagugaucccugaguuucuuuu

SEQ ID NO: 652927 - RNA, 19 nt, Human
gaguuucuuuuucuucuuc

SEQ ID NO: 652928 - RNA, 21 nt, Human
gccuuuuuagaugugcaagag

SEQ ID NO: 652929 - RNA, 24 nt, Human
uacauacugguuauaaacaaugua

SEQ ID NO: 652930 - RNA, 19 nt, Human
uauuauaacuacauauaca

SEQ ID NO: 652931 - RNA, 25 nt, Human
ucucccagugaucccugaguuucuu

SEQ ID NO: 652932 - RNA, 24 nt, Human
ucugcgaaagcccucaaacucucc

SEQ ID NO: 652933 - RNA, 23 nt, Human
ugaagauaaugccauggcuucuc

SEQ ID NO: 652934 - RNA, 21 nt, Human
ugacacacucacguaaggcac

SEQ ID NO: 652935 - RNA, 24 nt, Human
ugcaauaagucacaauugcaggcc

SEQ ID NO: 652936 - RNA, 23 nt, Human
uguucgagaaaaccaacauaagg

SEQ ID NO: 652937 - RNA, 21 nt, Human
uuaaaacagaaucacagcauu

SEQ ID NO: 652938 - RNA, 21 nt, Human
uuucuucuucuuuuuuuuucc

SEQ ID NO: 652939 - RNA, 26 nt, Human
uuugaaguacauacugguuauaaaca

SEQ ID NO: 652940 - RNA, 23 nt, Human
agcaaucucagcaacaggucuca

SEQ ID NO: 652941 - RNA, 21 nt, Human
ccuucuguuguuagccauuau

SEQ ID NO: 652942 - RNA, 21 nt, Human
guauaacaggacauauauguu

SEQ ID NO: 652943 - RNA, 25 nt, Human
uaacaggacauauauguuuagaaaa

SEQ ID NO: 652944 - RNA, 24 nt, Human
ucuuuuauuaauguaugcuuugac

SEQ ID NO: 652945 - RNA, 20 nt, Human
uguauaacaggacauauaug

SEQ ID NO: 652946 - RNA, 24 nt, Human
aaaaaaaaaaaaaauuugggcaag

SEQ ID NO: 652947 - RNA, 23 nt, Human
aaacugauuacuauauaaucuug

SEQ ID NO: 652948 - RNA, 30 nt, Human
aaauaacaacuccauaagccauucccuuaa

SEQ ID NO: 652949 - RNA, 20 nt, Human
aacauggugaaacccugucu

SEQ ID NO: 652950 - RNA, 21 nt, Human
aacauggugaaacccugucuc

SEQ ID NO: 652951 - RNA, 23 nt, Human
aacuuguaaucccagcacuuugg

SEQ ID NO: 652952 - RNA, 24 nt, Human
aagcauaaacacagaguuugcgcc

SEQ ID NO: 652953 - RNA, 24 nt, Human
aaucgcuugaaccugggaggugga

SEQ ID NO: 652954 - RNA, 19 nt, Human
aauuucaagacccauauau

SEQ ID NO: 652955 - RNA, 24 nt, Human
acagagugagacucagucucaaaa

SEQ ID NO: 652956 - RNA, 24 nt, Human
accaacauggugaaacccugucuc

SEQ ID NO: 652957 - RNA, 24 nt, Human
accacuguacuccagcccaggcga

SEQ ID NO: 652958 - RNA, 24 nt, Human
acccugucucuacuaaaaauacaa

SEQ ID NO: 652959 - RNA, 20 nt, Human
acccuuuauauaacaagcau

SEQ ID NO: 652960 - RNA, 20 nt, Human
accuucagggaaacaacuga

SEQ ID NO: 652961 - RNA, 23 nt, Human
acuaaacacuuuaugaaaauuau

SEQ ID NO: 652962 - RNA, 24 nt, Human
acuguacuccagcccaggcgacag

SEQ ID NO: 652963 - RNA, 20 nt, Human
acuuguuguccauuuuccuu

SEQ ID NO: 652964 - RNA, 21 nt, Human
agaaagaaacauuuaauagga

SEQ ID NO: 652965 - RNA, 24 nt, Human
agacugaggcauaagaaucgcuug

SEQ ID NO: 652966 - RNA, 23 nt, Human
agagcuauguggcagagauggaa

SEQ ID NO: 652967 - RNA, 24 nt, Human
agauuuuggaaauucuaaaagguu

SEQ ID NO: 652968 - RNA, 19 nt, Human
agccaggugcaguggcuca

SEQ ID NO: 652969 - RNA, 23 nt, Human
agccuggguauuaguuguggcuc

SEQ ID NO: 652970 - RNA, 18 nt, Human
agcugggugugguggcgu

SEQ ID NO: 652971 - RNA, 23 nt, Human
aggaguucgagacccgccugacc

SEQ ID NO: 652972 - RNA, 24 nt, Human
aggcagguggaucacgaggucagg

SEQ ID NO: 652973 - RNA, 22 nt, Human
aggcauaagaaucgcuugaacc

SEQ ID NO: 652974 - RNA, 24 nt, Human
aggcauaagaaucgcuugaaccug

SEQ ID NO: 652975 - RNA, 21 nt, Human
aggccgaggcagguggaucac

SEQ ID NO: 652976 - RNA, 26 nt, Human
agguagacgaacugcccaaggccaga

SEQ ID NO: 652977 - RNA, 24 nt, Human
aggugcaguggcucaaacuuguaa

SEQ ID NO: 652978 - RNA, 20 nt, Human
agguggaaguugcagugagc

SEQ ID NO: 652979 - RNA, 24 nt, Human
agguggaaguugcagugagcugag

SEQ ID NO: 652980 - RNA, 24 nt, Human
agguggaucacgaggucaggaguu

SEQ ID NO: 652981 - RNA, 24 nt, Human
aguggcucaaacuuguaaucccag

SEQ ID NO: 652982 - RNA, 20 nt, Human
auagagcugaggaaagaaac

SEQ ID NO: 652983 - RNA, 20 nt, Human
aucgcaccacuguacuccag

SEQ ID NO: 652984 - RNA, 18 nt, Human
augaccauuuuggaguuu

SEQ ID NO: 652985 - RNA, 21 nt, Human
auuucaagacccauauauucc

SEQ ID NO: 652986 - RNA, 22 nt, Human
caaaccaagguucaacaaaaaa

SEQ ID NO: 652987 - RNA, 24 nt, Human
caaacuuguaaucccagcacuuug

SEQ ID NO: 652988 - RNA, 24 nt, Human
caacauggugaaacccugucucua

SEQ ID NO: 652989 - RNA, 25 nt, Human
caaugcaacaggcuguuuuccuaca

SEQ ID NO: 652990 - RNA, 18 nt, Human
cacagaguuugcgccccu

SEQ ID NO: 652991 - RNA, 25 nt, Human
cacauuuaacaauccuucuuuuaca

SEQ ID NO: 652992 - RNA, 21 nt, Human
cacuaaauggcggcacucacc

SEQ ID NO: 652993 - RNA, 20 nt, Human
cacuaugugugagcuuaagu

SEQ ID NO: 652994 - RNA, 19 nt, Human
cacuguacuccagcccagg

SEQ ID NO: 652995 - RNA, 20 nt, Human
cacuguacuccagcccaggc

SEQ ID NO: 652996 - RNA, 22 nt, Human
cacuguacuccagcccaggcga

SEQ ID NO: 652997 - RNA, 23 nt, Human
cacuguacuccagcccaggcgac

SEQ ID NO: 652998 - RNA, 24 nt, Human
cacuguacuccagcccaggcgaca

SEQ ID NO: 652999 - RNA, 18 nt, Human
cacuuuggaaggccgagg

SEQ ID NO: 653000 - RNA, 21 nt, Human
cagaaaggaaagaaaucugcc

SEQ ID NO: 653001 - RNA, 20 nt, Human
cagaauaaguacccaacuga

SEQ ID NO: 653002 - RNA, 24 nt, Human
cagagcuauguggcagagauggaa

SEQ ID NO: 653003 - RNA, 24 nt, Human
cagcacuuuggaaggccgaggcag

SEQ ID NO: 653004 - RNA, 24 nt, Human
cagcacuuuggaaggccgaggcag

SEQ ID NO: 653005 - RNA, 27 nt, Human
caggagacugaggcauaagaaucgcuu

SEQ ID NO: 653006 - RNA, 18 nt, Human
cauaaccaaaugucaccc

SEQ ID NO: 653007 - RNA, 18 nt, Human
cauugcugcagaauaucu

SEQ ID NO: 653008 - RNA, 21 nt, Human
cauuguuuucaaugaguuucc

SEQ ID NO: 653009 - RNA, 18 nt, Human
ccaaauaugugguuaucu

SEQ ID NO: 653010 - RNA, 22 nt, Human
ccacaagagggagauuugcagg

SEQ ID NO: 653011 - RNA, 19 nt, Human
ccacuguacuccagcccag

SEQ ID NO: 653012 - RNA, 20 nt, Human
ccacuguacuccagcccagg

SEQ ID NO: 653013 - RNA, 20 nt, Human
ccacuguacuccagcccagg

SEQ ID NO: 653014 - RNA, 21 nt, Human
ccacuguacuccagcccaggc

SEQ ID NO: 653015 - RNA, 23 nt, Human
ccagaaaggaaagaaaucugcca

SEQ ID NO: 653016 - RNA, 27 nt, Human
ccauucuuuucucaaccucaaccugaa

SEQ ID NO: 653017 - RNA, 19 nt, Human
ccuacacucgaccccucga

SEQ ID NO: 653018 - RNA, 19 nt, Human
ccuauaaauaugggaagag

SEQ ID NO: 653019 - RNA, 22 nt, Human
ccugaccaacauggugaaaccc

SEQ ID NO: 653020 - RNA, 24 nt, Human
ccugaccaacauggugaaacccug

SEQ ID NO: 653021 - RNA, 21 nt, Human
ccuguaaucccagcugcucag

SEQ ID NO: 653022 - RNA, 22 nt, Human
ccuuaugucagauguagggaau

SEQ ID NO: 653023 - RNA, 24 nt, Human
cgaggcagguggaucacgagguca

SEQ ID NO: 653024 - RNA, 21 nt, Human
cgcaccacuguacuccagccc

SEQ ID NO: 653025 - RNA, 18 nt, Human
cucaaaaaaaaaaaaaaa

SEQ ID NO: 653026 - RNA, 24 nt, Human
cucaaacuuguaaucccagcacuu

SEQ ID NO: 653027 - RNA, 24 nt, Human
cucagucucaaaaaaaaaaaaaaa

SEQ ID NO: 653028 - RNA, 19 nt, Human
cuccaaccuugcucucccu

SEQ ID NO: 653029 - RNA, 21 nt, Human
cucuuacaaugcaacaggcug

SEQ ID NO: 653030 - RNA, 24 nt, Human
cugaccaacauggugaaacccugu

SEQ ID NO: 653031 - RNA, 19 nt, Human
cuugaaccugggaggugga

SEQ ID NO: 653032 - RNA, 19 nt, Human
gaaacccugucucuacuaa

SEQ ID NO: 653033 - RNA, 31 nt, Human
gaaauaacaacuccauaagccauucccuuaa

SEQ ID NO: 653034 - RNA, 26 nt, Human
gaagguagacgaacugcccaaggcca

SEQ ID NO: 653035 - RNA, 23 nt, Human
gaaguugcagugagcugagaucg

SEQ ID NO: 653036 - RNA, 24 nt, Human
gacagagugagacucagucucaaa

SEQ ID NO: 653037 - RNA, 23 nt, Human
gaccccucgaaaccaguccuuaa

SEQ ID NO: 653038 - RNA, 21 nt, Human
gagcugaggaaagaaacuugg

SEQ ID NO: 653039 - RNA, 21 nt, Human
gaucacgaggucaggaguucg

SEQ ID NO: 653040 - RNA, 20 nt, Human
gcaauggaaauggaaaacag

SEQ ID NO: 653041 - RNA, 20 nt, Human
gcaccacuguacuccagccc

SEQ ID NO: 653042 - RNA, 22 nt, Human
gccagcugcucuucaagaugac

SEQ ID NO: 653043 - RNA, 23 nt, Human
gccugaccaacauggugaaaccc

SEQ ID NO: 653044 - RNA, 18 nt, Human
ggaaguugcagugagcug

SEQ ID NO: 653045 - RNA, 24 nt, Human
ggaaguugcagugagcugagaucg

SEQ ID NO: 653046 - RNA, 18 nt, Human
ggaccuagagggagggug

SEQ ID NO: 653047 - RNA, 19 nt, Human
ggauagagcugaggaaaga

SEQ ID NO: 653048 - RNA, 24 nt, Human
gggaaaguauagcuuagagaaggu

SEQ ID NO: 653049 - RNA, 24 nt, Human
gggugugguggcguuugccuguaa

SEQ ID NO: 653050 - RNA, 20 nt, Human
ggugcaguggcucaaacuug

SEQ ID NO: 653051 - RNA, 24 nt, Human
gguggcguuugccuguaaucccag

SEQ ID NO: 653052 - RNA, 24 nt, Human
guaaaacaaugagaaauacauaac

SEQ ID NO: 653053 - RNA, 23 nt, Human
guacuccagcccaggcgacagag

SEQ ID NO: 653054 - RNA, 18 nt, Human
guauaaauaauagaauaa

SEQ ID NO: 653055 - RNA, 20 nt, Human
guggaaguugcagugagcug

SEQ ID NO: 653056 - RNA, 25 nt, Human
guuaucuuccuucugcuuacuuuua

SEQ ID NO: 653057 - RNA, 21 nt, Human
guugcagugagcugagaucgc

SEQ ID NO: 653058 - RNA, 18 nt, Human
uaaaacaaugagaaauac

SEQ ID NO: 653059 - RNA, 23 nt, Human
uacaugccgacaaguuaaaauga

SEQ ID NO: 653060 - RNA, 19 nt, Human
uacauugauguuaaaaucu

SEQ ID NO: 653061 - RNA, 28 nt, Human
uacuaaacacuuuaugaaaauuaucucu

SEQ ID NO: 653062 - RNA, 24 nt, Human
uacuccagcccaggcgacagagug

SEQ ID NO: 653063 - RNA, 22 nt, Human
uacugcaauuauucuguugcuc

SEQ ID NO: 653064 - RNA, 18 nt, Human
uagagggagggugcuuga

SEQ ID NO: 653065 - RNA, 22 nt, Human
uagauaagcaucuuuaugaggg

SEQ ID NO: 653066 - RNA, 21 nt, Human
ucaaugccuaugaaauaacaa

SEQ ID NO: 653067 - RNA, 18 nt, Human
ucacgaggucaggaguuc

SEQ ID NO: 653068 - RNA, 24 nt, Human
ucacgaggucaggaguucgagacc

SEQ ID NO: 653069 - RNA, 22 nt, Human
ucaggauucugagaagcugcug

SEQ ID NO: 653070 - RNA, 24 nt, Human
ucagucucaaaaaaaaaaaaaaaa

SEQ ID NO: 653071 - RNA, 24 nt, Human
ucaugaaacugauuacuauauaau

SEQ ID NO: 653072 - RNA, 21 nt, Human
ucauuguuuucaaugaguuuc

SEQ ID NO: 653073 - RNA, 24 nt, Human
uccagcccaggcgacagagugaga

SEQ ID NO: 653074 - RNA, 18 nt, Human
uccaguggaauuccacaa

SEQ ID NO: 653075 - RNA, 25 nt, Human
ucccaaacguuguucuaugcaauuc

SEQ ID NO: 653076 - RNA, 25 nt, Human
ucccaucuuuccccuuaggcuccaa

SEQ ID NO: 653077 - RNA, 18 nt, Human
uccuugcacagugcaucc

SEQ ID NO: 653078 - RNA, 26 nt, Human
ucgaagaagaauuuuuuggccuccug

SEQ ID NO: 653079 - RNA, 18 nt, Human
ucgcuugaaccugggagg

SEQ ID NO: 653080 - RNA, 21 nt, Human
ucuaucucuuuucugacagcc

SEQ ID NO: 653081 - RNA, 18 nt, Human
ucuccagaaaggaaagaa

SEQ ID NO: 653082 - RNA, 22 nt, Human
ucucuacuaaaaauacaaaaaa

SEQ ID NO: 653083 - RNA, 20 nt, Human
ucucuagcugcaaauuccug

SEQ ID NO: 653084 - RNA, 26 nt, Human
ucuguacuaccggcacuguuuaaaga

SEQ ID NO: 653085 - RNA, 23 nt, Human
ucuucauaaccaaaugucacccu

SEQ ID NO: 653086 - RNA, 20 nt, Human
ugaaagcauaaacacagagu

SEQ ID NO: 653087 - RNA, 18 nt, Human
ugaaccugggagguggaa

SEQ ID NO: 653088 - RNA, 24 nt, Human
ugaaccugggagguggaaguugca

SEQ ID NO: 653089 - RNA, 21 nt, Human
ugaauggaaucuuugagccug

SEQ ID NO: 653090 - RNA, 24 nt, Human
ugaccaacauggugaaacccuguc

SEQ ID NO: 653091 - RNA, 24 nt, Human
ugagaucgcaccacuguacuccag

SEQ ID NO: 653092 - RNA, 23 nt, Human
ugagccuggguauuaguugugac

SEQ ID NO: 653093 - RNA, 22 nt, Human
ugagcugagaucgcaccacugu

SEQ ID NO: 653094 - RNA, 24 nt, Human
ugaggcauaagaaucgcuugaacc

SEQ ID NO: 653095 - RNA, 24 nt, Human
ugaggggcauuccaagguuuaugu

SEQ ID NO: 653096 - RNA, 19 nt, Human
ugccugccaaauauguggu

SEQ ID NO: 653097 - RNA, 19 nt, Human
ugccugccaaauauguggu

SEQ ID NO: 653098 - RNA, 24 nt, Human
ugccuguaaucccagcugcucagg

SEQ ID NO: 653099 - RNA, 21 nt, Human
ugcugcacuggggaccauucu

SEQ ID NO: 653100 - RNA, 24 nt, Human
uggaaggccgaggcagguggauca

SEQ ID NO: 653101 - RNA, 21 nt, Human
uggaaucuuugagccugggua

SEQ ID NO: 653102 - RNA, 22 nt, Human
uggaucacgaggucaggaguuc

SEQ ID NO: 653103 - RNA, 24 nt, Human
uggaucacgaggucaggaguucga

SEQ ID NO: 653104 - RNA, 18 nt, Human
uggcaaaacguguagcua

SEQ ID NO: 653105 - RNA, 22 nt, Human
uggcagagauggaauucaaaug

SEQ ID NO: 653106 - RNA, 22 nt, Human
uggcguuugccuguaaucccag

SEQ ID NO: 653107 - RNA, 24 nt, Human
uggcguuugccuguaaucccagcu

SEQ ID NO: 653108 - RNA, 22 nt, Human
uggcucaaacuuguaaucccag

SEQ ID NO: 653109 - RNA, 24 nt, Human
uggcucaaacuuguaaucccagca

SEQ ID NO: 653110 - RNA, 27 nt, Human
uggcuugaagaugaacggaugguucag

SEQ ID NO: 653111 - RNA, 20 nt, Human
ugggaaaauguaaugaccac

SEQ ID NO: 653112 - RNA, 29 nt, Human
ugggagguggaaguugcagugacaacggu

SEQ ID NO: 653113 - RNA, 24 nt, Human
ugggagguggaaguugcagugagc

SEQ ID NO: 653114 - RNA, 22 nt, Human
uggggagguuagauaagcaucu

SEQ ID NO: 653115 - RNA, 24 nt, Human
ugguaugcaggagucaaacagcag

SEQ ID NO: 653116 - RNA, 24 nt, Human
ugguggcguuugccuguaauccca

SEQ ID NO: 653117 - RNA, 19 nt, Human
uguacagaggaaaagauua

SEQ ID NO: 653118 - RNA, 19 nt, Human
ugugaagcuucccacauuu

SEQ ID NO: 653119 - RNA, 21 nt, Human
uguggcagagauggaauucaa

SEQ ID NO: 653120 - RNA, 26 nt, Human
uuaacaauccuucuuuuacacuuccc

SEQ ID NO: 653121 - RNA, 19 nt, Human
uuacauugauguuaaaauc

SEQ ID NO: 653122 - RNA, 18 nt, Human
uuagcugggugugguggc

SEQ ID NO: 653123 - RNA, 19 nt, Human
uuagcugggugugguggcg

SEQ ID NO: 653124 - RNA, 20 nt, Human
uuagcugggugugguggcgu

SEQ ID NO: 653125 - RNA, 23 nt, Human
uucaaugauuuuuucacuuucuc

SEQ ID NO: 653126 - RNA, 19 nt, Human
uuccaagguuuauguacuc

SEQ ID NO: 653127 - RNA, 21 nt, Human
uucucugacucaggauucuga

SEQ ID NO: 653128 - RNA, 24 nt, Human
uugaaccugggagguggaaguugc

SEQ ID NO: 653129 - RNA, 22 nt, Human
uugcaauggaaauggaaaacag

SEQ ID NO: 653130 - RNA, 20 nt, Human
uugcacugucccagaauaag

SEQ ID NO: 653131 - RNA, 18 nt, Human
uugcagugagcugagauc

SEQ ID NO: 653132 - RNA, 19 nt, Human
uugcagugagcugagaucg

SEQ ID NO: 653133 - RNA, 22 nt, Human
uugcagugagcugagaucgcac

SEQ ID NO: 653134 - RNA, 25 nt, Human
uuggaaggccgaggcagguggauca

SEQ ID NO: 653135 - RNA, 20 nt, Human
uuguauggcuuuaguaguau

SEQ ID NO: 653136 - RNA, 26 nt, Human
uuuacacuucccaauuccaauugcau

SEQ ID NO: 653137 - RNA, 18 nt, Human
uuuagcuggguguggugg

SEQ ID NO: 653138 - RNA, 23 nt, Human
uuugggaaaauguaaugaccacc

SEQ ID NO: 653139 - RNA, 21 nt, Human
uuuugcaacuuauugaccugc

SEQ ID NO: 653140 - RNA, 18 nt, Human
aacuccuagcccaguccc

SEQ ID NO: 653141 - RNA, 19 nt, Human
aagcaagagguggcccugg

SEQ ID NO: 653142 - RNA, 24 nt, Human
aaguccccucccagaucugugacc

SEQ ID NO: 653143 - RNA, 22 nt, Human
acagcuucaccauuuugguuca

SEQ ID NO: 653144 - RNA, 20 nt, Human
acagucccagaagggcccag

SEQ ID NO: 653145 - RNA, 22 nt, Human
acccucccuguccucuccuggu

SEQ ID NO: 653146 - RNA, 19 nt, Human
acccugauguccccacuuc

SEQ ID NO: 653147 - RNA, 22 nt, Human
acugaguccuggagguggucgu

SEQ ID NO: 653148 - RNA, 18 nt, Human
acuugcaugacacuuccc

SEQ ID NO: 653149 - RNA, 20 nt, Human
acuugcaugacacuucccuc

SEQ ID NO: 653150 - RNA, 19 nt, Human
agaaagacaauaggcugcc

SEQ ID NO: 653151 - RNA, 20 nt, Human
agaacccucccuguccucuc

SEQ ID NO: 653152 - RNA, 22 nt, Human
agaacccucccuguccucuccu

SEQ ID NO: 653153 - RNA, 21 nt, Human
agaggccaguguguguggggu

SEQ ID NO: 653154 - RNA, 20 nt, Human
agagggaagccgggggaguu

SEQ ID NO: 653155 - RNA, 27 nt, Human
agagggagggggggugggaaucugagc

SEQ ID NO: 653156 - RNA, 20 nt, Human
agcaggcucacggaccuugg

SEQ ID NO: 653157 - RNA, 22 nt, Human
agccuccccugcuccugccugc

SEQ ID NO: 653158 - RNA, 19 nt, Human
aggagcagaggcgagucug

SEQ ID NO: 653159 - RNA, 20 nt, Human
aggcagccagggcuggcaga

SEQ ID NO: 653160 - RNA, 22 nt, Human
aggcagccagggcuggcagagc

SEQ ID NO: 653161 - RNA, 19 nt, Human
agggcuggcagagccugcc

SEQ ID NO: 653162 - RNA, 24 nt, Human
aucuuccuccccuuucccuuccaa

SEQ ID NO: 653163 - RNA, 25 nt, Human
caaggacacacagcccccuucccuc

SEQ ID NO: 653164 - RNA, 20 nt, Human
caauaggcugccucuccccc

SEQ ID NO: 653165 - RNA, 21 nt, Human
caccccgccugagggcucuac

SEQ ID NO: 653166 - RNA, 20 nt, Human
cacugaguccuggagguggu

SEQ ID NO: 653167 - RNA, 20 nt, Human
cagauguccuccuccaucuc

SEQ ID NO: 653168 - RNA, 22 nt, Human
cagcacacccaagcuccugggc

SEQ ID NO: 653169 - RNA, 19 nt, Human
cagcccccaggcacuaccu

SEQ ID NO: 653170 - RNA, 19 nt, Human
cagcccccuucccucccuc

SEQ ID NO: 653171 - RNA, 18 nt, Human
cagcggcugcugcuaaag

SEQ ID NO: 653172 - RNA, 18 nt, Human
cagcggcugcugcuaaag

SEQ ID NO: 653173 - RNA, 20 nt, Human
cagguaccaucacagcugcu

SEQ ID NO: 653174 - RNA, 23 nt, Human
cauccuccauuccguccaacucc

SEQ ID NO: 653175 - RNA, 23 nt, Human
caugacacuucccucuauuuuca

SEQ ID NO: 653176 - RNA, 21 nt, Human
caugcaaggacacacagcccc

SEQ ID NO: 653177 - RNA, 19 nt, Human
ccaaaaagaauggcaugca

SEQ ID NO: 653178 - RNA, 19 nt, Human
ccacuuccaaguccugacu

SEQ ID NO: 653179 - RNA, 22 nt, Human
ccacuuccaaguccugacuccu

SEQ ID NO: 653180 - RNA, 24 nt, Human
ccagcaggcucacggaccuuggcc

SEQ ID NO: 653181 - RNA, 23 nt, Human
ccagccccucuuuuccaggaacc

SEQ ID NO: 653182 - RNA, 20 nt, Human
ccagcucccagccugggagu

SEQ ID NO: 653183 - RNA, 21 nt, Human
ccaggaaccuugccacgccca

SEQ ID NO: 653184 - RNA, 23 nt, Human
ccagggucccuucaguggacccu

SEQ ID NO: 653185 - RNA, 18 nt, Human
ccaguguguguggggugg

SEQ ID NO: 653186 - RNA, 23 nt, Human
ccaucuuccuccccuuucccuuc

SEQ ID NO: 653187 - RNA, 18 nt, Human
cccaagcaagagguggcc

SEQ ID NO: 653188 - RNA, 20 nt, Human
ccccagggaucacugagucc

SEQ ID NO: 653189 - RNA, 20 nt, Human
ccccuuucccuuccagcccc

SEQ ID NO: 653190 - RNA, 23 nt, Human
cccgccugagggcucuacucacc

SEQ ID NO: 653191 - RNA, 19 nt, Human
cccggggcucccccgcggg

SEQ ID NO: 653192 - RNA, 24 nt, Human
cccuccaucuuccuccccuuuccc

SEQ ID NO: 653193 - RNA, 21 nt, Human
cccucuuuuccaggaaccuug

SEQ ID NO: 653194 - RNA, 21 nt, Human
cccugccuuccccaggguccc

SEQ ID NO: 653195 - RNA, 18 nt, Human
cccugggccaguggguug

SEQ ID NO: 653196 - RNA, 22 nt, Human
cccuuccagccccucuuuucca

SEQ ID NO: 653197 - RNA, 22 nt, Human
ccuccccuuucccuuccagccc

SEQ ID NO: 653198 - RNA, 24 nt, Human
ccucccugccuuccccaggguccc

SEQ ID NO: 653199 - RNA, 19 nt, Human
ccucccuguccucuccugg

SEQ ID NO: 653200 - RNA, 22 nt, Human
ccugcccucccugccuucccca

SEQ ID NO: 653201 - RNA, 19 nt, Human
ccugccugcccaccccgcc

SEQ ID NO: 653202 - RNA, 23 nt, Human
ccugcucacuguccagauguccu

SEQ ID NO: 653203 - RNA, 20 nt, Human
ccugcuccugccugcccacc

SEQ ID NO: 653204 - RNA, 21 nt, Human
ccuuucuucucgcuguccucc

SEQ ID NO: 653205 - RNA, 22 nt, Human
cgcggagaaagacaauaggcug

SEQ ID NO: 653206 - RNA, 24 nt, Human
cggcagcagcggcugcugcuaaag

SEQ ID NO: 653207 - RNA, 20 nt, Human
cggccacuggaccacaggag

SEQ ID NO: 653208 - RNA, 19 nt, Human
cggcucccggggcuccccc

SEQ ID NO: 653209 - RNA, 23 nt, Human
cuacugaagcacuacugccagcc

SEQ ID NO: 653210 - RNA, 19 nt, Human
cuaugcaaccugcagcccc

SEQ ID NO: 653211 - RNA, 27 nt, Human
cucacuguccagauguccuccuccauc

SEQ ID NO: 653212 - RNA, 21 nt, Human
cuccagccagccaucccuuac

SEQ ID NO: 653213 - RNA, 19 nt, Human
cucccuccaucuuccuccc

SEQ ID NO: 653214 - RNA, 21 nt, Human
cucccucuucugcuuuuccca

SEQ ID NO: 653215 - RNA, 22 nt, Human
cuccuagcccagucccgggggc

SEQ ID NO: 653216 - RNA, 20 nt, Human
cuccuccaucuccgugcggc

SEQ ID NO: 653217 - RNA, 23 nt, Human
cuccugggcuauuggggcuccua

SEQ ID NO: 653218 - RNA, 24 nt, Human
cucuuccuuucuucucgcuguccu

SEQ ID NO: 653219 - RNA, 27 nt, Human
cugcccacacuuugcauuucucuuccu

SEQ ID NO: 653220 - RNA, 19 nt, Human
cugccgccuucuguccagc

SEQ ID NO: 653221 - RNA, 23 nt, Human
cuggaccucgguguccccaucug

SEQ ID NO: 653222 - RNA, 24 nt, Human
cuggaucugcugugcagugggguu

SEQ ID NO: 653223 - RNA, 21 nt, Human
cuuaaguccccucccagaucu

SEQ ID NO: 653224 - RNA, 21 nt, Human
cuuccuuucuucucgcugucc

SEQ ID NO: 653225 - RNA, 20 nt, Human
cuuggcggcugcccacacuu

SEQ ID NO: 653226 - RNA, 23 nt, Human
cuuucccuuccagccccucuuuu

SEQ ID NO: 653227 - RNA, 18 nt, Human
gaagagggaagccggggg

SEQ ID NO: 653228 - RNA, 21 nt, Human
gacaauaggcugccucucccc

SEQ ID NO: 653229 - RNA, 18 nt, Human
gagccuccccugcuccug

SEQ ID NO: 653230 - RNA, 21 nt, Human
gaucuucagagagagggaggg

SEQ ID NO: 653231 - RNA, 24 nt, Human
gcaaggcagccagggcuggcagag

SEQ ID NO: 653232 - RNA, 20 nt, Human
gcccccuucccucccuccca

SEQ ID NO: 653233 - RNA, 20 nt, Human
gccugggugcuccuggggag

SEQ ID NO: 653234 - RNA, 22 nt, Human
gcggcucccggggcucccccgc

SEQ ID NO: 653235 - RNA, 18 nt, Human
gcugcccacacuuugcau

SEQ ID NO: 653236 - RNA, 20 nt, Human
gcuggcagagccugcccccc

SEQ ID NO: 653237 - RNA, 21 nt, Human
ggaaccuugccacgcccacac

SEQ ID NO: 653238 - RNA, 22 nt, Human
ggaagauggggugaccacagaa

SEQ ID NO: 653239 - RNA, 21 nt, Human
ggcagccagggcuggcagagc

SEQ ID NO: 653240 - RNA, 18 nt, Human
ggcggcggcagcagcggc

SEQ ID NO: 653241 - RNA, 22 nt, Human
ggcugggucccuggccagcacu

SEQ ID NO: 653242 - RNA, 21 nt, Human
gggaagccgggggaguugagc

SEQ ID NO: 653243 - RNA, 18 nt, Human
gggaaucugagcacagug

SEQ ID NO: 653244 - RNA, 19 nt, Human
gggcucgucccaccugccg

SEQ ID NO: 653245 - RNA, 22 nt, Human
ggggagguggaucuuccagucg

SEQ ID NO: 653246 - RNA, 21 nt, Human
ggggcuccuagagugggcuca

SEQ ID NO: 653247 - RNA, 20 nt, Human
gggucccuggccagcacuac

SEQ ID NO: 653248 - RNA, 19 nt, Human
ggguggggaggaccgccac

SEQ ID NO: 653249 - RNA, 23 nt, Human
ggucugaacuguggguggacugc

SEQ ID NO: 653250 - RNA, 22 nt, Human
gguggggaggaccgccacagcc

SEQ ID NO: 653251 - RNA, 23 nt, Human
gucuuuuccucuggaccucggug

SEQ ID NO: 653252 - RNA, 19 nt, Human
guucaagcaguguuccuuc

SEQ ID NO: 653253 - RNA, 19 nt, Human
uacaggaagcagcugcugg

SEQ ID NO: 653254 - RNA, 24 nt, Human
uagcuucucccuccaucuuccucc

SEQ ID NO: 653255 - RNA, 20 nt, Human
uaggauaaaagccugagagu

SEQ ID NO: 653256 - RNA, 25 nt, Human
uaggcugccucucccccggcggcgg

SEQ ID NO: 653257 - RNA, 22 nt, Human
ucagcaggguucugggcaaugg

SEQ ID NO: 653258 - RNA, 21 nt, Human
ucaguggacccugggcuuucu

SEQ ID NO: 653259 - RNA, 19 nt, Human
uccacgcuaucagugaggc

SEQ ID NO: 653260 - RNA, 27 nt, Human
uccagcgcacagucccagaagggcccc

SEQ ID NO: 653261 - RNA, 23 nt, Human
ucccccgcgggccgagccgagac

SEQ ID NO: 653262 - RNA, 22 nt, Human
ucccugccuuccccaggguccc

SEQ ID NO: 653263 - RNA, 19 nt, Human
uccggccacuggaccacag

SEQ ID NO: 653264 - RNA, 21 nt, Human
uccggccacuggaccacagga

SEQ ID NO: 653265 - RNA, 19 nt, Human
uccgugcggcucccggggc

SEQ ID NO: 653266 - RNA, 22 nt, Human
uccuagagugggcucaucagca

SEQ ID NO: 653267 - RNA, 18 nt, Human
ucuacucaccacccugcu

SEQ ID NO: 653268 - RNA, 26 nt, Human
ucuagcuucucccuccaucuuccucc

SEQ ID NO: 653269 - RNA, 21 nt, Human
ucucccucuucugcuuuuccc

SEQ ID NO: 653270 - RNA, 22 nt, Human
ucugcuuuucccagcaggaagg

SEQ ID NO: 653271 - RNA, 20 nt, Human
ucugucaggcuugguggcug

SEQ ID NO: 653272 - RNA, 21 nt, Human
ucugucaggcuugguggcugu

SEQ ID NO: 653273 - RNA, 22 nt, Human
ugaccacagaagagggaagccg

SEQ ID NO: 653274 - RNA, 20 nt, Human
ugacuccuuugagccauccc

SEQ ID NO: 653275 - RNA, 18 nt, Human
ugagaaaaggcagugggg

SEQ ID NO: 653276 - RNA, 20 nt, Human
ugagaaaaggcaguggggag

SEQ ID NO: 653277 - RNA, 21 nt, Human
ugagaaaaggcaguggggagg

SEQ ID NO: 653278 - RNA, 23 nt, Human
ugagaaaaggcaguggggaggug

SEQ ID NO: 653279 - RNA, 18 nt, Human
ugagagaggccagugugu

SEQ ID NO: 653280 - RNA, 22 nt, Human
ugccagggcagguauccagcuc

SEQ ID NO: 653281 - RNA, 20 nt, Human
ugcccagagaggggccucug

SEQ ID NO: 653282 - RNA, 23 nt, Human
ugccugggugcuccuggggaguc

SEQ ID NO: 653283 - RNA, 20 nt, Human
ugcuccugccugcccacccc

SEQ ID NO: 653284 - RNA, 26 nt, Human
uggauuuccuucagcuacccugaugu

SEQ ID NO: 653285 - RNA, 20 nt, Human
ugggcuuucugacugcccag

SEQ ID NO: 653286 - RNA, 19 nt, Human
uggggagaacccucccugu

SEQ ID NO: 653287 - RNA, 18 nt, Human
ugugcuauucagccaagg

SEQ ID NO: 653288 - RNA, 24 nt, Human
uuacagcuucaccauuuugguuca

SEQ ID NO: 653289 - RNA, 23 nt, Human
uucaguggacccugggcuuucug

SEQ ID NO: 653290 - RNA, 20 nt, Human
uuccguccaacuccuagccc

SEQ ID NO: 653291 - RNA, 19 nt, Human
uugaggagggggcuguggg

SEQ ID NO: 653292 - RNA, 20 nt, Human
uuggcggcugcccacacuuu

SEQ ID NO: 653293 - RNA, 18 nt, Human
uugguggcuguugggugg

SEQ ID NO: 653294 - RNA, 18 nt, Human
uugguucaagcaguguuc

SEQ ID NO: 653295 - RNA, 19 nt, Human
uuuugaggagggggcugug

SEQ ID NO: 653296 - RNA, 21 nt, Human
aaaaaaaaaaaaaaaaagucc

SEQ ID NO: 653297 - RNA, 24 nt, Human
aaaaaugaggacauuucuguauac

SEQ ID NO: 653298 - RNA, 23 nt, Human
aaaauucucuccaccuuucccuu

SEQ ID NO: 653299 - RNA, 22 nt, Human
aaaugugaaagccaaaacacuu

SEQ ID NO: 653300 - RNA, 23 nt, Human
aagccaaaacacuucugaucuua

SEQ ID NO: 653301 - RNA, 18 nt, Human
aagcugagaauuagaucu

SEQ ID NO: 653302 - RNA, 24 nt, Human
aaucaccugagcccaggagguuga

SEQ ID NO: 653303 - RNA, 23 nt, Human
accugagcccaggagguugaggc

SEQ ID NO: 653304 - RNA, 22 nt, Human
acuguacuccagccuuuuuuga

SEQ ID NO: 653305 - RNA, 23 nt, Human
acuguacuccagccuuuuuugag

SEQ ID NO: 653306 - RNA, 18 nt, Human
agaugggagaaucaccug

SEQ ID NO: 653307 - RNA, 20 nt, Human
agcacuuuaggaggcugagg

SEQ ID NO: 653308 - RNA, 22 nt, Human
aggaggcugaggcaggcagauc

SEQ ID NO: 653309 - RNA, 20 nt, Human
aggcaggcagaucacuugag

SEQ ID NO: 653310 - RNA, 24 nt, Human
aggcgcgauggcucaugccuguaa

SEQ ID NO: 653311 - RNA, 24 nt, Human
aggcugaggcaggcagaucacuug

SEQ ID NO: 653312 - RNA, 24 nt, Human
agggaggcugagaugggagaauca

SEQ ID NO: 653313 - RNA, 24 nt, Human
agguugaggcugcaguaagcugag

SEQ ID NO: 653314 - RNA, 19 nt, Human
aguaacguaacaccacaag

SEQ ID NO: 653315 - RNA, 20 nt, Human
auagcaccacuguacuacug

SEQ ID NO: 653316 - RNA, 24 nt, Human
auagcuuuugaaagucuuggguuu

SEQ ID NO: 653317 - RNA, 23 nt, Human
aucacuaauccaaaaauucaaaa

SEQ ID NO: 653318 - RNA, 19 nt, Human
auccuccuucccuucuccu

SEQ ID NO: 653319 - RNA, 23 nt, Human
auggcucaugccuguaaucgcag

SEQ ID NO: 653320 - RNA, 24 nt, Human
auuaucucugacaaaguuuacaug

SEQ ID NO: 653321 - RNA, 20 nt, Human
auucaaaauccagaaugcuc

SEQ ID NO: 653322 - RNA, 18 nt, Human
caaaaaaaugugaaagcc

SEQ ID NO: 653323 - RNA, 28 nt, Human
caacacaaaacuaauugaaaauucucuc

SEQ ID NO: 653324 - RNA, 23 nt, Human
caccccuggcucagaaacguugu

SEQ ID NO: 653325 - RNA, 20 nt, Human
caccuguagucccagcuacu

SEQ ID NO: 653326 - RNA, 24 nt, Human
caccuguagucccagcuacuaggg

SEQ ID NO: 653327 - RNA, 18 nt, Human
cagaaugcuccgagaucc

SEQ ID NO: 653328 - RNA, 24 nt, Human
cagaucacuugaguccaugaguuc

SEQ ID NO: 653329 - RNA, 18 nt, Human
cagcacuuuaggaggcug

SEQ ID NO: 653330 - RNA, 24 nt, Human
cagcacuuuaggaggcugaggcag

SEQ ID NO: 653331 - RNA, 22 nt, Human
caugcacaaaguuauuuaaaau

SEQ ID NO: 653332 - RNA, 21 nt, Human
ccaaaacacuucugaucuuaa

SEQ ID NO: 653333 - RNA, 25 nt, Human
ccaaaacacuucugaucuuaaucau

SEQ ID NO: 653334 - RNA, 19 nt, Human
cccugucucaaaaaaaaaa

SEQ ID NO: 653335 - RNA, 19 nt, Human
ccuccuucccuucuccuuu

SEQ ID NO: 653336 - RNA, 20 nt, Human
ccuccuucccuucuccuuuc

SEQ ID NO: 653337 - RNA, 19 nt, Human
ccucuauucucuuaaucua

SEQ ID NO: 653338 - RNA, 21 nt, Human
ccugggcaauauggaaaaccc

SEQ ID NO: 653339 - RNA, 19 nt, Human
ccuguaaucgcagcacuuu

SEQ ID NO: 653340 - RNA, 26 nt, Human
ccuguaaucgcagcacuuuaggaggc

SEQ ID NO: 653341 - RNA, 22 nt, Human
ccuguagucccagcuacuaggg

SEQ ID NO: 653342 - RNA, 23 nt, Human
ccugucucaaaaaaaaaaaaaaa

SEQ ID NO: 653343 - RNA, 25 nt, Human
ccugucucaaaaaaaaaaaaaaaaa

SEQ ID NO: 653344 - RNA, 19 nt, Human
ccuucccuucuccuuucuc

SEQ ID NO: 653345 - RNA, 19 nt, Human
cgcaccuguagucccagcu

SEQ ID NO: 653346 - RNA, 21 nt, Human
cgcagcacuuuaggaggcuga

SEQ ID NO: 653347 - RNA, 24 nt, Human
cgggaccagccugggcaauaugga

SEQ ID NO: 653348 - RNA, 23 nt, Human
cuaauugaaaauucucuccaccu

SEQ ID NO: 653349 - RNA, 27 nt, Human
cuacuguacuccagccuuuuuugagac

SEQ ID NO: 653350 - RNA, 18 nt, Human
cucaaaaaaaaaaaaaaa

SEQ ID NO: 653351 - RNA, 24 nt, Human
cucaugccuguaaucgcagcacuu

SEQ ID NO: 653352 - RNA, 19 nt, Human
cugugcccgcugacccacu

SEQ ID NO: 653353 - RNA, 20 nt, Human
cuugcaucccauccccaaga

SEQ ID NO: 653354 - RNA, 21 nt, Human
cuuggcauaguggcacgcacc

SEQ ID NO: 653355 - RNA, 20 nt, Human
cuuucccaaaucaaccacug

SEQ ID NO: 653356 - RNA, 23 nt, Human
gacuuccguuccuucucauccuc

SEQ ID NO: 653357 - RNA, 19 nt, Human
gagcaucacuaauccaaaa

SEQ ID NO: 653358 - RNA, 24 nt, Human
gauggcucaugccuguaaucgcag

SEQ ID NO: 653359 - RNA, 21 nt, Human
gccagguguucaaagugugua

SEQ ID NO: 653360 - RNA, 22 nt, Human
gcccaggagguugaggcugcag

SEQ ID NO: 653361 - RNA, 22 nt, Human
ggaaaacccccaucucuacuaa

SEQ ID NO: 653362 - RNA, 22 nt, Human
ggaggcugaggcaggcagauca

SEQ ID NO: 653363 - RNA, 22 nt, Human
ggcauaguggcacgcaccugua

SEQ ID NO: 653364 - RNA, 23 nt, Human
gggaggcugagaugggagaauca

SEQ ID NO: 653365 - RNA, 18 nt, Human
gucaaaauuguguuucau

SEQ ID NO: 653366 - RNA, 24 nt, Human
guccuuuaggcgcgauggcucaug

SEQ ID NO: 653367 - RNA, 19 nt, Human
uaaaaagguccuguccuuu

SEQ ID NO: 653368 - RNA, 24 nt, Human
uaacaccacaaguggaaaauucca

SEQ ID NO: 653369 - RNA, 22 nt, Human
uaagggguacucagccuuuaua

SEQ ID NO: 653370 - RNA, 20 nt, Human
uaaucuauaacaguucccuc

SEQ ID NO: 653371 - RNA, 20 nt, Human
uacaacgugcuuucuacgug

SEQ ID NO: 653372 - RNA, 22 nt, Human
uaccuucaggccagguguucaa

SEQ ID NO: 653373 - RNA, 23 nt, Human
uacuguacuccagccuuuuuuga

SEQ ID NO: 653374 - RNA, 24 nt, Human
uaggaggcugaggcaggcagauca

SEQ ID NO: 653375 - RNA, 24 nt, Human
uaguggcacgcaccuguaguccca

SEQ ID NO: 653376 - RNA, 25 nt, Human
uauaggcaaaauuccaaaauccaaa

SEQ ID NO: 653377 - RNA, 22 nt, Human
uaucagaccuaccaaaauuaac

SEQ ID NO: 653378 - RNA, 22 nt, Human
uaucucugacaaaguuuacaug

SEQ ID NO: 653379 - RNA, 23 nt, Human
uauugugugaaauuaccuucagg

SEQ ID NO: 653380 - RNA, 24 nt, Human
ucaaagaugacuuugaaaacaagu

SEQ ID NO: 653381 - RNA, 22 nt, Human
ucaaauuaauucaaacuacuga

SEQ ID NO: 653382 - RNA, 22 nt, Human
ucaugugaugaguugcagucaa

SEQ ID NO: 653383 - RNA, 19 nt, Human
uccaaaaaaaugugaaagc

SEQ ID NO: 653384 - RNA, 26 nt, Human
ucccaaaucaaccacugauaugagag

SEQ ID NO: 653385 - RNA, 23 nt, Human
ucuacacacagugaagagguaaa

SEQ ID NO: 653386 - RNA, 22 nt, Human
ucuccuuucucuacacacagug

SEQ ID NO: 653387 - RNA, 23 nt, Human
ucucuacuaaaaauacaaaaauu

SEQ ID NO: 653388 - RNA, 24 nt, Human
ugaaaauucucuccaccuuuccca

SEQ ID NO: 653389 - RNA, 18 nt, Human
ugaaagccaaaacacuuc

SEQ ID NO: 653390 - RNA, 20 nt, Human
ugaagagguaaaaaauuuga

SEQ ID NO: 653391 - RNA, 19 nt, Human
ugaaggguugauuuuuuaa

SEQ ID NO: 653392 - RNA, 18 nt, Human
ugacaaaguuuacaugug

SEQ ID NO: 653393 - RNA, 19 nt, Human
ugacccacuuuuuggauuu

SEQ ID NO: 653394 - RNA, 18 nt, Human
ugacuuccguuccuucuc

SEQ ID NO: 653395 - RNA, 20 nt, Human
ugagaugggagaaucaccug

SEQ ID NO: 653396 - RNA, 22 nt, Human
ugagcccaggagguugaggcug

SEQ ID NO: 653397 - RNA, 21 nt, Human
ugaggacauuucuguauacag

SEQ ID NO: 653398 - RNA, 21 nt, Human
ugaggcaggcagaucacuuga

SEQ ID NO: 653399 - RNA, 25 nt, Human
ugaggcaggcagaucacuugagucc

SEQ ID NO: 653400 - RNA, 24 nt, Human
ugcagucaaaauuguguuucaugc

SEQ ID NO: 653401 - RNA, 22 nt, Human
uggcacgcaccuguagucccag

SEQ ID NO: 653402 - RNA, 18 nt, Human
uggcucaugccuguaauc

SEQ ID NO: 653403 - RNA, 24 nt, Human
uggcucaugccuguaaucgcagca

SEQ ID NO: 653404 - RNA, 21 nt, Human
uguaaacauaggaaaauagga

SEQ ID NO: 653405 - RNA, 23 nt, Human
ugugaaagccaaaacacuucuga

SEQ ID NO: 653406 - RNA, 24 nt, Human
uguguuucaugcacaaaguuauuu

SEQ ID NO: 653407 - RNA, 24 nt, Human
uuaaagaaauacaauaaaaagguc

SEQ ID NO: 653408 - RNA, 23 nt, Human
uuaaucauuuuggauaaggggua

SEQ ID NO: 653409 - RNA, 22 nt, Human
uuaaugaauaauguaaacauag

SEQ ID NO: 653410 - RNA, 20 nt, Human
uucuucuacauacuccuccc

SEQ ID NO: 653411 - RNA, 23 nt, Human
uugagcaucacuaauccaaaaau

SEQ ID NO: 653412 - RNA, 22 nt, Human
aaaagaacagagcccgugcagg

SEQ ID NO: 653413 - RNA, 20 nt, Human
aaaaggccuuucugcaaaag

SEQ ID NO: 653414 - RNA, 19 nt, Human
aaagaccuaaccagauaau

SEQ ID NO: 653415 - RNA, 19 nt, Human
aaagugcuaggauuacagg

SEQ ID NO: 653416 - RNA, 24 nt, Human
aaagugcuaggauuacaggcguga

SEQ ID NO: 653417 - RNA, 24 nt, Human
aaagugcugagaugacaggcguga

SEQ ID NO: 653418 - RNA, 20 nt, Human
aacaaaaagaccuaaccaga

SEQ ID NO: 653419 - RNA, 23 nt, Human
aagauucuuuauugcaggacuuu

SEQ ID NO: 653420 - RNA, 19 nt, Human
aaguagcugggacuacagg

SEQ ID NO: 653421 - RNA, 20 nt, Human
aaguagcugggacuacaggc

SEQ ID NO: 653422 - RNA, 26 nt, Human
aaguagcugggacuacaggcgccugc

SEQ ID NO: 653423 - RNA, 24 nt, Human
aagugauccucccgccuuggccuc

SEQ ID NO: 653424 - RNA, 25 nt, Human
aagugauccucccgccuuggccucc

SEQ ID NO: 653425 - RNA, 25 nt, Human
aagugauccucccgccuuggccucc

SEQ ID NO: 653426 - RNA, 26 nt, Human
aagugcuaggauuacaggcgugagcc

SEQ ID NO: 653427 - RNA, 27 nt, Human
aagugcucaccuucuuaggaccuuugg

SEQ ID NO: 653428 - RNA, 19 nt, Human
aaucaccccucaggaaccc

SEQ ID NO: 653429 - RNA, 24 nt, Human
acacagaccuugcccuucccacag

SEQ ID NO: 653430 - RNA, 21 nt, Human
acaggcgugagccaccgcacc

SEQ ID NO: 653431 - RNA, 19 nt, Human
acaggguuucgccaugcug

SEQ ID NO: 653432 - RNA, 20 nt, Human
acaggguuucgccaugcugg

SEQ ID NO: 653433 - RNA, 24 nt, Human
acaggguuucgccaugcuggccag

SEQ ID NO: 653434 - RNA, 23 nt, Human
acccagguuggagugcaguggug

SEQ ID NO: 653435 - RNA, 27 nt, Human
acccugcccaccgccccaugcccccca

SEQ ID NO: 653436 - RNA, 20 nt, Human
accuaguagguucaugauac

SEQ ID NO: 653437 - RNA, 18 nt, Human
acucgucacccagguugg

SEQ ID NO: 653438 - RNA, 18 nt, Human
acugcaagcuccgccucc

SEQ ID NO: 653439 - RNA, 22 nt, Human
acuucauuccaccucucuccag

SEQ ID NO: 653440 - RNA, 18 nt, Human
agacaggguuucgccaug

SEQ ID NO: 653441 - RNA, 23 nt, Human
agacucacgcuucacguucagcu

SEQ ID NO: 653442 - RNA, 23 nt, Human
agauaaugaugcgaaaaaaaucc

SEQ ID NO: 653443 - RNA, 19 nt, Human
agaugacaggcgugagcca

SEQ ID NO: 653444 - RNA, 19 nt, Human
agccaccgcacccggccua

SEQ ID NO: 653445 - RNA, 19 nt, Human
agccaccgcaccuggcuua

SEQ ID NO: 653446 - RNA, 19 nt, Human
agcccgugcaggagccugg

SEQ ID NO: 653447 - RNA, 18 nt, Human
agcuccgccuccuggguu

SEQ ID NO: 653448 - RNA, 20 nt, Human
aggcggcgugaccagggcug

SEQ ID NO: 653449 - RNA, 25 nt, Human
aggcuggagugcaguggcgcgaucu

SEQ ID NO: 653450 - RNA, 18 nt, Human
aggugacacagaccuugc

SEQ ID NO: 653451 - RNA, 25 nt, Human
agguuggagugcaguggugcgaucu

SEQ ID NO: 653452 - RNA, 22 nt, Human
aguagagacaggguuucgccau

SEQ ID NO: 653453 - RNA, 18 nt, Human
aguagcugggauuacagg

SEQ ID NO: 653454 - RNA, 23 nt, Human
agugcaguggcgcgaucuuggcu

SEQ ID NO: 653455 - RNA, 24 nt, Human
agugcaguggcgcgaucuuggcuc

SEQ ID NO: 653456 - RNA, 21 nt, Human
agugcaguggugcgaucucag

SEQ ID NO: 653457 - RNA, 23 nt, Human
agugcaguggugcgaucucagcu

SEQ ID NO: 653458 - RNA, 24 nt, Human
agugcaguggugcgaucucagcuc

SEQ ID NO: 653459 - RNA, 24 nt, Human
aguggugcgaucucagcucacugc

SEQ ID NO: 653460 - RNA, 21 nt, Human
aguucaagugauccuccugcc

SEQ ID NO: 653461 - RNA, 18 nt, Human
augggguuucaccauguu

SEQ ID NO: 653462 - RNA, 20 nt, Human
augggguuucaccauguuag

SEQ ID NO: 653463 - RNA, 24 nt, Human
caaagugcuaggauuacaggcgug

SEQ ID NO: 653464 - RNA, 24 nt, Human
caaagugcugagaugacaggcgug

SEQ ID NO: 653465 - RNA, 21 nt, Human
caaaucaccccucaggaaccc

SEQ ID NO: 653466 - RNA, 23 nt, Human
caaggcggcgugaccagggcugg

SEQ ID NO: 653467 - RNA, 27 nt, Human
caagugauccucccgccuuggccuccc

SEQ ID NO: 653468 - RNA, 22 nt, Human
caagugauccuccugccucagc

SEQ ID NO: 653469 - RNA, 27 nt, Human
caagugauccuccugccucagccuccc

SEQ ID NO: 653470 - RNA, 23 nt, Human
cacagaccuugcccuucccacag

SEQ ID NO: 653471 - RNA, 18 nt, Human
caccagggcugacaaggc

SEQ ID NO: 653472 - RNA, 18 nt, Human
caccauguuagccaggau

SEQ ID NO: 653473 - RNA, 22 nt, Human
caccauguuagccaggaugguc

SEQ ID NO: 653474 - RNA, 24 nt, Human
caccauguuagccaggauggucuc

SEQ ID NO: 653475 - RNA, 24 nt, Human
cacccaggcuggagugcaguggcg

SEQ ID NO: 653476 - RNA, 21 nt, Human
cacccagguuggagugcagug

SEQ ID NO: 653477 - RNA, 19 nt, Human
caccgcacccggccuaagu

SEQ ID NO: 653478 - RNA, 19 nt, Human
caccuggcuuuagaugucc

SEQ ID NO: 653479 - RNA, 21 nt, Human
cacucgucacccagguuggag

SEQ ID NO: 653480 - RNA, 23 nt, Human
cagcaagcaggucagagugacuu

SEQ ID NO: 653481 - RNA, 26 nt, Human
cagcaagcaggucagagugacuuccu

SEQ ID NO: 653482 - RNA, 21 nt, Human
caggagccugggggacugaga

SEQ ID NO: 653483 - RNA, 23 nt, Human
caggcgccugccaucaugccugg

SEQ ID NO: 653484 - RNA, 24 nt, Human
caggguuucgccaugcuggccagg

SEQ ID NO: 653485 - RNA, 21 nt, Human
caggugcccaccaccacaccc

SEQ ID NO: 653486 - RNA, 23 nt, Human
caggugcccaccaccacacccag

SEQ ID NO: 653487 - RNA, 19 nt, Human
caguggcgcgaucuuggcu

SEQ ID NO: 653488 - RNA, 21 nt, Human
caugccccccauuggcagccg

SEQ ID NO: 653489 - RNA, 24 nt, Human
caugcuggccaggcuggucucgaa

SEQ ID NO: 653490 - RNA, 22 nt, Human
caugucauucuccugccuuggc

SEQ ID NO: 653491 - RNA, 22 nt, Human
ccaaagugcuaggauuacaggc

SEQ ID NO: 653492 - RNA, 22 nt, Human
ccaaagugcuaggauuacaggc

SEQ ID NO: 653493 - RNA, 24 nt, Human
ccaaagugcuaggauuacaggcgu

SEQ ID NO: 653494 - RNA, 22 nt, Human
ccaaagugcugagaugacaggc

SEQ ID NO: 653495 - RNA, 24 nt, Human
ccaaagugcugagaugacaggcgu

SEQ ID NO: 653496 - RNA, 22 nt, Human
ccaaaucaccccucaggaaccc

SEQ ID NO: 653497 - RNA, 20 nt, Human
ccaccgcaccuggcuuaagu

SEQ ID NO: 653498 - RNA, 20 nt, Human
ccaccucucuccaguccugc

SEQ ID NO: 653499 - RNA, 19 nt, Human
ccaugcuggccaggcuggu

SEQ ID NO: 653500 - RNA, 22 nt, Human
ccaugcuggccaggcuggucuc

SEQ ID NO: 653501 - RNA, 23 nt, Human
ccaugcuggccaggcuggucucg

SEQ ID NO: 653502 - RNA, 19 nt, Human
cccaaaucaccccucagga

SEQ ID NO: 653503 - RNA, 23 nt, Human
cccaaguagcugggacuacaggc

SEQ ID NO: 653504 - RNA, 23 nt, Human
cccaaguagcugggacuacaggc

SEQ ID NO: 653505 - RNA, 21 nt, Human
cccaccaccacacccagcuaa

SEQ ID NO: 653506 - RNA, 26 nt, Human
ccccccgccucggccuuccaaagugc

SEQ ID NO: 653507 - RNA, 23 nt, Human
cccgaguagcugggauuacaggu

SEQ ID NO: 653508 - RNA, 24 nt, Human
cccgaguagcugggauuacaggug

SEQ ID NO: 653509 - RNA, 24 nt, Human
cccucugucacccaggcuggagug

SEQ ID NO: 653510 - RNA, 23 nt, Human
cccugcccugggugcaugccccc

SEQ ID NO: 653511 - RNA, 21 nt, Human
ccgaguagcugggauuacagg

SEQ ID NO: 653512 - RNA, 21 nt, Human
ccgugcaggagccugggggac

SEQ ID NO: 653513 - RNA, 26 nt, Human
ccucccgccuuggccucccaaagugc

SEQ ID NO: 653514 - RNA, 24 nt, Human
ccuccugccucagccucccgagua

SEQ ID NO: 653515 - RNA, 24 nt, Human
ccuccuggguucaugucauucucc

SEQ ID NO: 653516 - RNA, 18 nt, Human
ccugaccucaagugaucc

SEQ ID NO: 653517 - RNA, 23 nt, Human
ccugccucagccucccgaguagc

SEQ ID NO: 653518 - RNA, 24 nt, Human
ccugccucagccucccgaguagcu

SEQ ID NO: 653519 - RNA, 21 nt, Human
ccugggacucuugaauuucug

SEQ ID NO: 653520 - RNA, 25 nt, Human
ccuuggccucccaaguagcugggac

SEQ ID NO: 653521 - RNA, 19 nt, Human
cgaaaaaaauccccaccaa

SEQ ID NO: 653522 - RNA, 21 nt, Human
cgaaaaaaauccccaccaaga

SEQ ID NO: 653523 - RNA, 24 nt, Human
cgccaugcuggccaggcuggucuc

SEQ ID NO: 653524 - RNA, 27 nt, Human
cgccaugcuggccaggcuggucucgaa

SEQ ID NO: 653525 - RNA, 24 nt, Human
cuaguagagacaggguuucgccau

SEQ ID NO: 653526 - RNA, 24 nt, Human
cucaagugauccucccgccuuggc

SEQ ID NO: 653527 - RNA, 24 nt, Human
cucacucgucacccagguuggagu

SEQ ID NO: 653528 - RNA, 23 nt, Human
cucagccucccgaguagcuggga

SEQ ID NO: 653529 - RNA, 27 nt, Human
cucauuggaacccccucuaggagccaa

SEQ ID NO: 653530 - RNA, 21 nt, Human
cuccaucacuccccucucucg

SEQ ID NO: 653531 - RNA, 24 nt, Human
cuccugaccuugugauccccccgc

SEQ ID NO: 653532 - RNA, 21 nt, Human
cuccuggguucaugucauucu

SEQ ID NO: 653533 - RNA, 19 nt, Human
cucgcuguaaccucuaccu

SEQ ID NO: 653534 - RNA, 23 nt, Human
cucgcuguaaccucuaccucccc

SEQ ID NO: 653535 - RNA, 24 nt, Human
cucgucacccagguuggagugcag

SEQ ID NO: 653536 - RNA, 23 nt, Human
cucugucacccaggcuggagugc

SEQ ID NO: 653537 - RNA, 24 nt, Human
cugcaaaagaacagagcccgugca

SEQ ID NO: 653538 - RNA, 22 nt, Human
cugcauccugaagcuggcaggu

SEQ ID NO: 653539 - RNA, 25 nt, Human
cugcccaccgccccaugccccccau

SEQ ID NO: 653540 - RNA, 23 nt, Human
cugccuuggccucccaaguagcu

SEQ ID NO: 653541 - RNA, 22 nt, Human
cuggcuccgcguggggcaagag

SEQ ID NO: 653542 - RNA, 19 nt, Human
cuucauuccaccucucucc

SEQ ID NO: 653543 - RNA, 19 nt, Human
cuucccccugcccugggug

SEQ ID NO: 653544 - RNA, 27 nt, Human
cuugugauccccccgccucggccuucc

SEQ ID NO: 653545 - RNA, 23 nt, Human
gaccucaagugauccucccgccu

SEQ ID NO: 653546 - RNA, 22 nt, Human
gaccuugugauccccccgccuc

SEQ ID NO: 653547 - RNA, 24 nt, Human
gaccuugugauccccccgccucgg

SEQ ID NO: 653548 - RNA, 24 nt, Human
gacuacaggcgccugccaucaugc

SEQ ID NO: 653549 - RNA, 20 nt, Human
gagauggaguuucccucugu

SEQ ID NO: 653550 - RNA, 18 nt, Human
gagaugggguuucaccau

SEQ ID NO: 653551 - RNA, 24 nt, Human
gagaugggguuucaccauguuagc

SEQ ID NO: 653552 - RNA, 22 nt, Human
gaggaugccgccgucugugcag

SEQ ID NO: 653553 - RNA, 18 nt, Human
gauccucccgccuuggcc

SEQ ID NO: 653554 - RNA, 18 nt, Human
gaugacaggcgugagcca

SEQ ID NO: 653555 - RNA, 18 nt, Human
gauuacaggcgugagcca

SEQ ID NO: 653556 - RNA, 22 nt, Human
gauuacaggcgugagccaccgc

SEQ ID NO: 653557 - RNA, 23 nt, Human
gauuacaggcgugagccaccgca

SEQ ID NO: 653558 - RNA, 23 nt, Human
gccuggcuaauuuuuuguauuuu

SEQ ID NO: 653559 - RNA, 22 nt, Human
gccuuggccucccaaagugcug

SEQ ID NO: 653560 - RNA, 20 nt, Human
gccuuggccucccaaguagc

SEQ ID NO: 653561 - RNA, 22 nt, Human
gcgaaaaaaauccccaccaaga

SEQ ID NO: 653562 - RNA, 19 nt, Human
gcucacugcugcacccugc

SEQ ID NO: 653563 - RNA, 21 nt, Human
gcucgcuguaaccucuaccuc

SEQ ID NO: 653564 - RNA, 19 nt, Human
gcuggagugcaguggcgcg

SEQ ID NO: 653565 - RNA, 23 nt, Human
gcuggcaggucacaaucuuccca

SEQ ID NO: 653566 - RNA, 23 nt, Human
gcuggucucgaacuccugaccuc

SEQ ID NO: 653567 - RNA, 20 nt, Human
gcuguaaccucuaccucccc

SEQ ID NO: 653568 - RNA, 21 nt, Human
gcuguaaccucuaccucccca

SEQ ID NO: 653569 - RNA, 24 nt, Human
ggacuacaggcgccugccaucaug

SEQ ID NO: 653570 - RNA, 22 nt, Human
ggauuacaggcgugagccaccg

SEQ ID NO: 653571 - RNA, 25 nt, Human
ggcuggggagaaggugacacagacc

SEQ ID NO: 653572 - RNA, 24 nt, Human
ggcuggucucgaacuccugaccuc

SEQ ID NO: 653573 - RNA, 22 nt, Human
gggguuucaccauguuagccag

SEQ ID NO: 653574 - RNA, 19 nt, Human
ggucucgaacuccugaccu

SEQ ID NO: 653575 - RNA, 19 nt, Human
ggucucgaucuccugaccu

SEQ ID NO: 653576 - RNA, 20 nt, Human
ggucucgaucuccugaccuu

SEQ ID NO: 653577 - RNA, 18 nt, Human
gguggaccauuuuauucu

SEQ ID NO: 653578 - RNA, 24 nt, Human
gguuucaccauguuagccaggaug

SEQ ID NO: 653579 - RNA, 18 nt, Human
guagcugggauuacaggu

SEQ ID NO: 653580 - RNA, 24 nt, Human
gucucacucgucacccagguugga

SEQ ID NO: 653581 - RNA, 24 nt, Human
gugauccccccgccucggccuucc

SEQ ID NO: 653582 - RNA, 24 nt, Human
gugauccuccugccucagccuccc

SEQ ID NO: 653583 - RNA, 20 nt, Human
gugcaugcccccugcggggc

SEQ ID NO: 653584 - RNA, 23 nt, Human
uaaccagauaauccccaauucau

SEQ ID NO: 653585 - RNA, 26 nt, Human
uaaccagauaauccccaauucauguc

SEQ ID NO: 653586 - RNA, 26 nt, Human
uaauuuuucuguauuucuaguagaga

SEQ ID NO: 653587 - RNA, 24 nt, Human
uaauuuuuuguauuuuuacuagag

SEQ ID NO: 653588 - RNA, 21 nt, Human
uacaccuggcuuuagaugucc

SEQ ID NO: 653589 - RNA, 23 nt, Human
uacaggcgugagccaccgcaccc

SEQ ID NO: 653590 - RNA, 24 nt, Human
uacaggugcccaccaccacaccca

SEQ ID NO: 653591 - RNA, 22 nt, Human
uacccauagcaggagaaauuca

SEQ ID NO: 653592 - RNA, 24 nt, Human
uacuagagaugggguuucaccaug

SEQ ID NO: 653593 - RNA, 20 nt, Human
uagagacaggguuucgccau

SEQ ID NO: 653594 - RNA, 22 nt, Human
uagagaugggguuucaccaugu

SEQ ID NO: 653595 - RNA, 18 nt, Human
uaggauuacaggcgugag

SEQ ID NO: 653596 - RNA, 19 nt, Human
uaggauuacaggcgugagc

SEQ ID NO: 653597 - RNA, 22 nt, Human
uaggauuacaggcgugagccac

SEQ ID NO: 653598 - RNA, 23 nt, Human
uaggauuacaggcgugagccacc

SEQ ID NO: 653599 - RNA, 24 nt, Human
uaggauuacaggcgugagccaccg

SEQ ID NO: 653600 - RNA, 24 nt, Human
uaguagagacaggguuucgccaug

SEQ ID NO: 653601 - RNA, 18 nt, Human
ucaagugauccuccugcc

SEQ ID NO: 653602 - RNA, 24 nt, Human
ucaccauguuagccaggauggucu

SEQ ID NO: 653603 - RNA, 24 nt, Human
ucacccaggcuggagugcaguggc

SEQ ID NO: 653604 - RNA, 22 nt, Human
ucacccagguuggagugcagug

SEQ ID NO: 653605 - RNA, 18 nt, Human
ucacugcaagcuccgccu

SEQ ID NO: 653606 - RNA, 23 nt, Human
ucacugcaagcuccgccuccugg

SEQ ID NO: 653607 - RNA, 24 nt, Human
ucacugcaagcuccgccuccuggg

SEQ ID NO: 653608 - RNA, 19 nt, Human
ucacugcagcgcuggcucc

SEQ ID NO: 653609 - RNA, 23 nt, Human
ucacugcagcgcuggcuccgcgu

SEQ ID NO: 653610 - RNA, 20 nt, Human
ucagccucccgaguagcugg

SEQ ID NO: 653611 - RNA, 19 nt, Human
ucagcucacugcaagcucc

SEQ ID NO: 653612 - RNA, 20 nt, Human
ucaggaaccccuugccacuu

SEQ ID NO: 653613 - RNA, 24 nt, Human
ucccaaagugcugagaugacaggc

SEQ ID NO: 653614 - RNA, 24 nt, Human
ucccaaguagcugggacuacaggc

SEQ ID NO: 653615 - RNA, 18 nt, Human
ucccacaggcaugccggg

SEQ ID NO: 653616 - RNA, 23 nt, Human
ucccgaguagcugggauuacagg

SEQ ID NO: 653617 - RNA, 24 nt, Human
ucccgaguagcugggauuacaggu

SEQ ID NO: 653618 - RNA, 20 nt, Human
ucccucugucacccaggcug

SEQ ID NO: 653619 - RNA, 21 nt, Human
ucccucugucacccaggcugg

SEQ ID NO: 653620 - RNA, 22 nt, Human
ucccucugucacccaggcugga

SEQ ID NO: 653621 - RNA, 24 nt, Human
ucccucugucacccaggcuggagu

SEQ ID NO: 653622 - RNA, 24 nt, Human
uccuggguucaugucauucuccug

SEQ ID NO: 653623 - RNA, 19 nt, Human
ucgcuguaaccucuaccuc

SEQ ID NO: 653624 - RNA, 18 nt, Human
ucggccuuccaaagugcu

SEQ ID NO: 653625 - RNA, 21 nt, Human
ucucacucgucacccagguug

SEQ ID NO: 653626 - RNA, 23 nt, Human
ucucacucgucacccagguugga

SEQ ID NO: 653627 - RNA, 23 nt, Human
ucuccaguccugcuuuguuuuuu

SEQ ID NO: 653628 - RNA, 21 nt, Human
ucucgaacuccugaccucaag

SEQ ID NO: 653629 - RNA, 29 nt, Human
ucuggagggagcuggauaugagguggaaa

SEQ ID NO: 653630 - RNA, 24 nt, Human
ucugucacccaggcuggagugcag

SEQ ID NO: 653631 - RNA, 18 nt, Human
ucugugcaggcuuccccc

SEQ ID NO: 653632 - RNA, 23 nt, Human
ucuugaauuucuggagggagcug

SEQ ID NO: 653633 - RNA, 20 nt, Human
ugaagacagacuugaugguc

SEQ ID NO: 653634 - RNA, 18 nt, Human
ugaccucaagugauccuc

SEQ ID NO: 653635 - RNA, 20 nt, Human
ugaccucaagugauccuccc

SEQ ID NO: 653636 - RNA, 21 nt, Human
ugaccucaagugauccucccg

SEQ ID NO: 653637 - RNA, 24 nt, Human
ugaccucaagugauccucccgccu

SEQ ID NO: 653638 - RNA, 18 nt, Human
ugaccuugugaucccccc

SEQ ID NO: 653639 - RNA, 23 nt, Human
ugagaugacaggcgugagccacc

SEQ ID NO: 653640 - RNA, 24 nt, Human
ugagaugacaggcgugagccaccg

SEQ ID NO: 653641 - RNA, 18 nt, Human
ugagguggaaaaggccuu

SEQ ID NO: 653642 - RNA, 19 nt, Human
ugcacccugcccaccgccc

SEQ ID NO: 653643 - RNA, 22 nt, Human
ugcaguggugcgaucucagcuc

SEQ ID NO: 653644 - RNA, 21 nt, Human
ugcccaccaccacacccagcu

SEQ ID NO: 653645 - RNA, 24 nt, Human
ugccucagccucccgaguagcugg

SEQ ID NO: 653646 - RNA, 23 nt, Human
ugcgaaaaaaauccccaccaaga

SEQ ID NO: 653647 - RNA, 24 nt, Human
ugcuaggauuacaggcgugagcca

SEQ ID NO: 653648 - RNA, 18 nt, Human
ugcuggccaggcuggucu

SEQ ID NO: 653649 - RNA, 23 nt, Human
uggagucucacucgucacccagg

SEQ ID NO: 653650 - RNA, 23 nt, Human
uggagugcaguggcgcgaucuug

SEQ ID NO: 653651 - RNA, 24 nt, Human
uggagugcaguggcgcgaucuugg

SEQ ID NO: 653652 - RNA, 23 nt, Human
uggagugcaguggugcgaucuca

SEQ ID NO: 653653 - RNA, 24 nt, Human
uggagugcaguggugcgaucucag

SEQ ID NO: 653654 - RNA, 24 nt, Human
uggccaggcuggucucgaacuccu

SEQ ID NO: 653655 - RNA, 23 nt, Human
uggcgcgaucuuggcucgcugua

SEQ ID NO: 653656 - RNA, 20 nt, Human
uggcucgcuguaaccucuac

SEQ ID NO: 653657 - RNA, 19 nt, Human
ugggacuacaggcgccugc

SEQ ID NO: 653658 - RNA, 21 nt, Human
ugggacuacaggcgccugcca

SEQ ID NO: 653659 - RNA, 22 nt, Human
ugggacuacaggcgccugccau

SEQ ID NO: 653660 - RNA, 24 nt, Human
ugggacuacaggcgccugccauca

SEQ ID NO: 653661 - RNA, 21 nt, Human
ugggauuacaggugcccacca

SEQ ID NO: 653662 - RNA, 24 nt, Human
ugggauuacaggugcccaccacca

SEQ ID NO: 653663 - RNA, 24 nt, Human
ugggguuucaccauguuagccagg

SEQ ID NO: 653664 - RNA, 24 nt, Human
uggugcgaucucagcucacugcaa

SEQ ID NO: 653665 - RNA, 21 nt, Human
uguccauacuucuuuggccau

SEQ ID NO: 653666 - RNA, 25 nt, Human
ugucccaaaucaccccucaggaacc

SEQ ID NO: 653667 - RNA, 20 nt, Human
uguuguauauuucuuuguua

SEQ ID NO: 653668 - RNA, 20 nt, Human
uguuguguuguuguuuuuuu

SEQ ID NO: 653669 - RNA, 23 nt, Human
uguuguuguuguuguguuguugu

SEQ ID NO: 653670 - RNA, 20 nt, Human
uguuuuuuugagauggaguu

SEQ ID NO: 653671 - RNA, 18 nt, Human
uuacuagagaugggguuu

SEQ ID NO: 653672 - RNA, 24 nt, Human
uuacuagagaugggguuucaccau

SEQ ID NO: 653673 - RNA, 21 nt, Human
uucaagugauccuccugccuc

SEQ ID NO: 653674 - RNA, 23 nt, Human
uucaagugauccuccugccucag

SEQ ID NO: 653675 - RNA, 24 nt, Human
uucaagugauccuccugccucagc

SEQ ID NO: 653676 - RNA, 22 nt, Human
uucccauggugacuccacugug

SEQ ID NO: 653677 - RNA, 24 nt, Human
uucccucugucacccaggcuggag

SEQ ID NO: 653678 - RNA, 18 nt, Human
uuggccucccaaagugcu

SEQ ID NO: 653679 - RNA, 24 nt, Human
uuguuguuguguuguuguuuuuuu

SEQ ID NO: 653680 - RNA, 19 nt, Human
uuucaccauguuagccagg

SEQ ID NO: 653681 - RNA, 20 nt, Human
uuucaccauguuagccagga

SEQ ID NO: 653682 - RNA, 24 nt, Human
uuucccucugucacccaggcugga

SEQ ID NO: 653683 - RNA, 21 nt, Human
uuucgccaugcuggccaggcu

SEQ ID NO: 653684 - RNA, 23 nt, Human
uuucuaguagagacaggguuucg

SEQ ID NO: 653685 - RNA, 24 nt, Human
uuucuaguagagacaggguuucgc

SEQ ID NO: 653686 - RNA, 25 nt, Human
uuucuggagggagcuggauaugagg

SEQ ID NO: 653687 - RNA, 21 nt, Human
uuucuguauuucuaguagaga

SEQ ID NO: 653688 - RNA, 26 nt, Human
uuuuccuaacacacauaucacuaccu

SEQ ID NO: 653689 - RNA, 21 nt, Human
uuuucuguauuucuaguagag

SEQ ID NO: 653690 - RNA, 24 nt, Human
uuuuuacuagagaugggguuucac

SEQ ID NO: 653691 - RNA, 21 nt, Human
uuuuuguauuuuuacuagaga

SEQ ID NO: 653692 - RNA, 24 nt, Human
uuuuuuguauuuuuacuagagaug

SEQ ID NO: 653693 - RNA, 26 nt, Human
uuuuuuuuuuuugagauggagucuca

SEQ ID NO: 653694 - RNA, 22 nt, Human
uuuuuuuuuuuuuugagaugga

SEQ ID NO: 653695 - RNA, 18 nt, Human
uuuuuuuuuuuuuuuuug

SEQ ID NO: 653696 - RNA, 27 nt, Human
aaaaaaaaaaaaaaaaaaggcucacaa

SEQ ID NO: 653697 - RNA, 26 nt, Human
aaaaaaaaaaaaaaaaggcucacaag

SEQ ID NO: 653698 - RNA, 18 nt, Human
aaaaaaaacaaagcaaca

SEQ ID NO: 653699 - RNA, 24 nt, Human
aaaaaaaacaaagcaacaaaugca

SEQ ID NO: 653700 - RNA, 25 nt, Human
aaaaaaacaaagcaacaaaugcaga

SEQ ID NO: 653701 - RNA, 23 nt, Human
aaaaaaaggcucacaaguucuaa

SEQ ID NO: 653702 - RNA, 23 nt, Human
aaaagaacaucucccauuaagcc

SEQ ID NO: 653703 - RNA, 24 nt, Human
aaaaggaaaaaaaaacgcagugag

SEQ ID NO: 653704 - RNA, 25 nt, Human
aaaaggaaaaaaaaacgcagugagg

SEQ ID NO: 653705 - RNA, 21 nt, Human
aaacaaagccaaauuauaauc

SEQ ID NO: 653706 - RNA, 20 nt, Human
aaagcuucccacccucccgg

SEQ ID NO: 653707 - RNA, 19 nt, Human
aaaggaaacccaauaaagg

SEQ ID NO: 653708 - RNA, 19 nt, Human
aacacuuuccacacagugc

SEQ ID NO: 653709 - RNA, 20 nt, Human
aagacaaaagaacaucuccc

SEQ ID NO: 653710 - RNA, 22 nt, Human
aagaguuauccacccuacagua

SEQ ID NO: 653711 - RNA, 25 nt, Human
aaguacuauagaccacaaauaaacu

SEQ ID NO: 653712 - RNA, 28 nt, Human
aaucauuccgagagccacaaacacucaa

SEQ ID NO: 653713 - RNA, 18 nt, Human
acaaaacuuauacagaag

SEQ ID NO: 653714 - RNA, 19 nt, Human
acaaagcaacaaaugcaga

SEQ ID NO: 653715 - RNA, 20 nt, Human
acaaagcaacaaaugcagag

SEQ ID NO: 653716 - RNA, 20 nt, Human
acaaagcaacaaaugcagag

SEQ ID NO: 653717 - RNA, 21 nt, Human
acaaagcaacaaaugcagagc

SEQ ID NO: 653718 - RNA, 19 nt, Human
acagaacaccgcacaccca

SEQ ID NO: 653719 - RNA, 22 nt, Human
accacuccgcacaccaaccccg

SEQ ID NO: 653720 - RNA, 20 nt, Human
acccaauaaaggacguacuu

SEQ ID NO: 653721 - RNA, 19 nt, Human
acucuaaaauaaauguagc

SEQ ID NO: 653722 - RNA, 18 nt, Human
acuucugcccugaguccc

SEQ ID NO: 653723 - RNA, 22 nt, Human
agaaaaaaaaaaaaaaaaaaag

SEQ ID NO: 653724 - RNA, 22 nt, Human
agaacaucucccauuaagccuu

SEQ ID NO: 653725 - RNA, 19 nt, Human
agaauauaaaaggaaaccc

SEQ ID NO: 653726 - RNA, 23 nt, Human
agccacaaacacucaaaaauuac

SEQ ID NO: 653727 - RNA, 24 nt, Human
agcccggacagcacugagccuaaa

SEQ ID NO: 653728 - RNA, 23 nt, Human
agcgaaacgggagcggagacaga

SEQ ID NO: 653729 - RNA, 23 nt, Human
aggaaaaaaaaacgcagugaggg

SEQ ID NO: 653730 - RNA, 19 nt, Human
aggaaagaaaaaaaaaaaa

SEQ ID NO: 653731 - RNA, 18 nt, Human
aggcagaggggcgaccuu

SEQ ID NO: 653732 - RNA, 22 nt, Human
aggcagaggggcgaccuugggc

SEQ ID NO: 653733 - RNA, 20 nt, Human
agugaggggacacuucugcc

SEQ ID NO: 653734 - RNA, 18 nt, Human
agugugaacaccauuucc

SEQ ID NO: 653735 - RNA, 20 nt, Human
augcacacucacuccucuca

SEQ ID NO: 653736 - RNA, 24 nt, Human
auguaccuguacccauauuacuau

SEQ ID NO: 653737 - RNA, 24 nt, Human
caaaagaacaucucccauuaagcc

SEQ ID NO: 653738 - RNA, 21 nt, Human
caaaaguacuauagaccacag

SEQ ID NO: 653739 - RNA, 20 nt, Human
caaagcaacaaaugcagagc

SEQ ID NO: 653740 - RNA, 21 nt, Human
caaaugcagagcuaaguaacc

SEQ ID NO: 653741 - RNA, 18 nt, Human
caacaaaugcagagcuaa

SEQ ID NO: 653742 - RNA, 24 nt, Human
caacaugcacacucacuccucuca

SEQ ID NO: 653743 - RNA, 20 nt, Human
caagacaaaagaacaucucc

SEQ ID NO: 653744 - RNA, 21 nt, Human
caagacaaaagaacaucuccc

SEQ ID NO: 653745 - RNA, 26 nt, Human
caagacaaaagaacaucucccauuaa

SEQ ID NO: 653746 - RNA, 19 nt, Human
caaggccccaguuuuaaau

SEQ ID NO: 653747 - RNA, 21 nt, Human
cacacagugccuaauacauag

SEQ ID NO: 653748 - RNA, 22 nt, Human
cacacagugccuaauacauagu

SEQ ID NO: 653749 - RNA, 21 nt, Human
caccgcacacccagcguccca

SEQ ID NO: 653750 - RNA, 18 nt, Human
cacuccgcacaccaaccc

SEQ ID NO: 653751 - RNA, 24 nt, Human
cacucugugccccuuuguucugcu

SEQ ID NO: 653752 - RNA, 23 nt, Human
cagggccagugugaacaccauuu

SEQ ID NO: 653753 - RNA, 25 nt, Human
cagggcggggucaaagcuucccacc

SEQ ID NO: 653754 - RNA, 21 nt, Human
caguaguuaagauguacuggc

SEQ ID NO: 653755 - RNA, 25 nt, Human
caugaaaugggugcagguuuuuuaa

SEQ ID NO: 653756 - RNA, 18 nt, Human
ccaaauguaccuguaccc

SEQ ID NO: 653757 - RNA, 19 nt, Human
ccagcgucccaaacagcga

SEQ ID NO: 653758 - RNA, 24 nt, Human
ccccaguuuuaaauuuuccuccaa

SEQ ID NO: 653759 - RNA, 19 nt, Human
ccccuuuguucugcugucc

SEQ ID NO: 653760 - RNA, 18 nt, Human
cccuacaguaaaaagggg

SEQ ID NO: 653761 - RNA, 19 nt, Human
cccugagucccgcucacuc

SEQ ID NO: 653762 - RNA, 23 nt, Human
ccgcacaccaaccccgcucccaa

SEQ ID NO: 653763 - RNA, 20 nt, Human
ccgggacaggggcgaaggca

SEQ ID NO: 653764 - RNA, 20 nt, Human
ccucccgggacaggggcgaa

SEQ ID NO: 653765 - RNA, 22 nt, Human
cgagcagcuuaacaguuuugcu

SEQ ID NO: 653766 - RNA, 22 nt, Human
cgcacacccagcgucccaaaca

SEQ ID NO: 653767 - RNA, 19 nt, Human
cgcccagccugucccgggc

SEQ ID NO: 653768 - RNA, 19 nt, Human
cgggaaggaacgggcugug

SEQ ID NO: 653769 - RNA, 22 nt, Human
cgggcgacaggaaggcaagcgu

SEQ ID NO: 653770 - RNA, 18 nt, Human
cgggcgcgcgcccagccu

SEQ ID NO: 653771 - RNA, 20 nt, Human
cuaaaaaaaggaaagaaaaa

SEQ ID NO: 653772 - RNA, 22 nt, Human
cuacaacaguaguuaagaugua

SEQ ID NO: 653773 - RNA, 24 nt, Human
cuccaauguaauccacaagguacc

SEQ ID NO: 653774 - RNA, 22 nt, Human
cuccacuguaagucauugaaag

SEQ ID NO: 653775 - RNA, 21 nt, Human
cucccccaaauuauacuucag

SEQ ID NO: 653776 - RNA, 19 nt, Human
cuccgggaaggaacgggcu

SEQ ID NO: 653777 - RNA, 24 nt, Human
cuugucuaccccuuaacacuuucc

SEQ ID NO: 653778 - RNA, 20 nt, Human
gcaagcguacuaacugcccc

SEQ ID NO: 653779 - RNA, 24 nt, Human
gcagggguggcgagagaaggggca

SEQ ID NO: 653780 - RNA, 22 nt, Human
gcgaaggcagaggggcgaccuu

SEQ ID NO: 653781 - RNA, 21 nt, Human
ggaaaaaaaaacgcagugagg

SEQ ID NO: 653782 - RNA, 23 nt, Human
ggacacuucugcccugagucccg

SEQ ID NO: 653783 - RNA, 22 nt, Human
ggauaaaaggaaaaaaaaacgc

SEQ ID NO: 653784 - RNA, 18 nt, Human
ggcaagcguacuaacugc

SEQ ID NO: 653785 - RNA, 21 nt, Human
ggcagggcggggucaaagcuu

SEQ ID NO: 653786 - RNA, 21 nt, Human
ggcgaccuugggcaggggugg

SEQ ID NO: 653787 - RNA, 20 nt, Human
gggacaggggcgaaggcaga

SEQ ID NO: 653788 - RNA, 18 nt, Human
gggcagggguggcgagag

SEQ ID NO: 653789 - RNA, 23 nt, Human
gggcagggguggcgagagaaggg

SEQ ID NO: 653790 - RNA, 23 nt, Human
gucuaccccuuaacacuuuccac

SEQ ID NO: 653791 - RNA, 19 nt, Human
uaaaaacuacacaugagua

SEQ ID NO: 653792 - RNA, 24 nt, Human
uaaaaauaaaugccccuacuuuuc

SEQ ID NO: 653793 - RNA, 23 nt, Human
uaaaaggaaaaaaaaacgcagug

SEQ ID NO: 653794 - RNA, 21 nt, Human
uaacuaggacuucagacugca

SEQ ID NO: 653795 - RNA, 20 nt, Human
uacccaggauuuucacucca

SEQ ID NO: 653796 - RNA, 19 nt, Human
uaccccuuaacacuuucca

SEQ ID NO: 653797 - RNA, 20 nt, Human
uagaggcuauaaagcugaug

SEQ ID NO: 653798 - RNA, 21 nt, Human
uagcauugacaaguucuugug

SEQ ID NO: 653799 - RNA, 28 nt, Human
uaucuugucuaccccuuaacacuuucca

SEQ ID NO: 653800 - RNA, 22 nt, Human
ucagaaacuuugacaacaugca

SEQ ID NO: 653801 - RNA, 20 nt, Human
ucaucuuuuaaaggcucucc

SEQ ID NO: 653802 - RNA, 19 nt, Human
uccaaauguaccuguaccc

SEQ ID NO: 653803 - RNA, 18 nt, Human
uccacaaaguugauaaua

SEQ ID NO: 653804 - RNA, 18 nt, Human
uccccggccauugcuucu

SEQ ID NO: 653805 - RNA, 20 nt, Human
ucccgggcuccgggaaggaa

SEQ ID NO: 653806 - RNA, 22 nt, Human
uccgcacaccaaccccgcuccc

SEQ ID NO: 653807 - RNA, 19 nt, Human
ugaaagggcaaaaauuacg

SEQ ID NO: 653808 - RNA, 20 nt, Human
ugaauaaaccauacaaaauc

SEQ ID NO: 653809 - RNA, 18 nt, Human
ugaggggacacuucugcc

SEQ ID NO: 653810 - RNA, 23 nt, Human
ugaggggacacuucugcccugag

SEQ ID NO: 653811 - RNA, 20 nt, Human
ugccccguucuuuggauaaa

SEQ ID NO: 653812 - RNA, 19 nt, Human
ugcccugagucccgcucac

SEQ ID NO: 653813 - RNA, 23 nt, Human
ugcccugagucccgcucacucac

SEQ ID NO: 653814 - RNA, 25 nt, Human
ugcuauggaguuuucagaaaacaaa

SEQ ID NO: 653815 - RNA, 23 nt, Human
uggaguuuucagaaaacaaaauc

SEQ ID NO: 653816 - RNA, 23 nt, Human
ugggcagggcggggucaaagcuu

SEQ ID NO: 653817 - RNA, 20 nt, Human
uguccucgauaaucuggguu

SEQ ID NO: 653818 - RNA, 19 nt, Human
ugugaaaacugguguuccc

SEQ ID NO: 653819 - RNA, 19 nt, Human
ugugaacaccauuucccac

SEQ ID NO: 653820 - RNA, 20 nt, Human
ugugacagcgaaacgggagc

SEQ ID NO: 653821 - RNA, 21 nt, Human
uuaaucacaaacaaagccaaa

SEQ ID NO: 653822 - RNA, 20 nt, Human
uucaagagauaauauucaaa

SEQ ID NO: 653823 - RNA, 21 nt, Human
uucuucuguucacucugugcc

SEQ ID NO: 653824 - RNA, 20 nt, Human
uuggauaaaaggaaaaaaaa

SEQ ID NO: 653825 - RNA, 23 nt, Human
uuuacucuaaaaauaaaugcccc

SEQ ID NO: 653826 - RNA, 22 nt, Human
uuuauaaguccccggccauugc

SEQ ID NO: 653827 - RNA, 19 nt, Human
uuuugcuauaaaaacaaac

SEQ ID NO: 653828 - RNA, 30 nt, Human
uuuuuuuuuuuuuuuuuuuuuucuuuuaaa

SEQ ID NO: 653829 - RNA, 24 nt, Human
aaaggcuacccaugaugguacauc

SEQ ID NO: 653830 - RNA, 24 nt, Human
aaaucauagagaauugaccaaaac

SEQ ID NO: 653831 - RNA, 20 nt, Human
accauauuugugugcuuaga

SEQ ID NO: 653832 - RNA, 21 nt, Human
accgagauaauaugaaauaac

SEQ ID NO: 653833 - RNA, 19 nt, Human
agaaguaaaucauagagaa

SEQ ID NO: 653834 - RNA, 21 nt, Human
agagaaguaaaucauagagaa

SEQ ID NO: 653835 - RNA, 21 nt, Human
aggcagcggccgccucccggc

SEQ ID NO: 653836 - RNA, 26 nt, Human
aggcuacccaugaugguacaucacuu

SEQ ID NO: 653837 - RNA, 22 nt, Human
agguuuccaacagucaaagaca

SEQ ID NO: 653838 - RNA, 24 nt, Human
aguaaaucauagagaauugaccaa

SEQ ID NO: 653839 - RNA, 25 nt, Human
auagaagacaaccucugugccgaca

SEQ ID NO: 653840 - RNA, 19 nt, Human
augauacacaguauaaaac

SEQ ID NO: 653841 - RNA, 28 nt, Human
caaauaggcaucaaaagauaauaccugu

SEQ ID NO: 653842 - RNA, 23 nt, Human
caauguacagcuccucggccuug

SEQ ID NO: 653843 - RNA, 24 nt, Human
cacagucauaaaucuugaaugucc

SEQ ID NO: 653844 - RNA, 22 nt, Human
caccgugacuccaauguacagc

SEQ ID NO: 653845 - RNA, 20 nt, Human
cagggccauggcgcucagug

SEQ ID NO: 653846 - RNA, 22 nt, Human
cauagagaauugaccaaaacug

SEQ ID NO: 653847 - RNA, 24 nt, Human
caucccaccagcaauuccugaauu

SEQ ID NO: 653848 - RNA, 23 nt, Human
ccggcaggcagcggccgccuccc

SEQ ID NO: 653849 - RNA, 18 nt, Human
cggaagaguaauccgaug

SEQ ID NO: 653850 - RNA, 23 nt, Human
cggcaggcagcggccgccucccu

SEQ ID NO: 653851 - RNA, 21 nt, Human
cugcuugagcucucuggauuu

SEQ ID NO: 653852 - RNA, 19 nt, Human
cuuccaucuccuuucccac

SEQ ID NO: 653853 - RNA, 22 nt, Human
gacuucuuuucaagaacauccc

SEQ ID NO: 653854 - RNA, 28 nt, Human
gcacuggauucuuucuccaaccggaggg

SEQ ID NO: 653855 - RNA, 20 nt, Human
gcggaagaguaauccgauga

SEQ ID NO: 653856 - RNA, 22 nt, Human
ggaauaggugauggcauaccaa

SEQ ID NO: 653857 - RNA, 22 nt, Human
ggcagagaaaaaugacuuauaa

SEQ ID NO: 653858 - RNA, 18 nt, Human
ggcccggcaggcagcggc

SEQ ID NO: 653859 - RNA, 23 nt, Human
ggguaauacauuuuuuuuuucuc

SEQ ID NO: 653860 - RNA, 25 nt, Human
ggucccagaagagagggcccggcag

SEQ ID NO: 653861 - RNA, 22 nt, Human
gguuacaaauucuugcucugca

SEQ ID NO: 653862 - RNA, 19 nt, Human
guagaaguagauuuuauag

SEQ ID NO: 653863 - RNA, 22 nt, Human
gugaaugcaucacagucauaaa

SEQ ID NO: 653864 - RNA, 21 nt, Human
uacacaguauaaaacugaucc

SEQ ID NO: 653865 - RNA, 18 nt, Human
uacuuaucuguauucugc

SEQ ID NO: 653866 - RNA, 21 nt, Human
ucaaaaagguccaguagucaa

SEQ ID NO: 653867 - RNA, 23 nt, Human
ucaccgugacuccaauguacagc

SEQ ID NO: 653868 - RNA, 25 nt, Human
uccagggucccagaagagagggccc

SEQ ID NO: 653869 - RNA, 23 nt, Human
ucccagaagagagggcccggcag

SEQ ID NO: 653870 - RNA, 19 nt, Human
ucuauagguucaaacacug

SEQ ID NO: 653871 - RNA, 24 nt, Human
ucucuggauuuuccuucuucuugc

SEQ ID NO: 653872 - RNA, 19 nt, Human
ucuggacauugcacugggg

SEQ ID NO: 653873 - RNA, 18 nt, Human
ucuggauuuuccuucuuc

SEQ ID NO: 653874 - RNA, 23 nt, Human
ugaaauaacaaacauccugucca

SEQ ID NO: 653875 - RNA, 19 nt, Human
ugagagaaguaaaucauag

SEQ ID NO: 653876 - RNA, 19 nt, Human
ugagagaaguaaaucauag

SEQ ID NO: 653877 - RNA, 21 nt, Human
ugagcucucuggauuuuccuu

SEQ ID NO: 653878 - RNA, 22 nt, Human
ugcgauuaagaaauccauaucu

SEQ ID NO: 653879 - RNA, 20 nt, Human
ugcuuagagucagcagcuuu

SEQ ID NO: 653880 - RNA, 21 nt, Human
uggcaaaaugagagaaguaaa

SEQ ID NO: 653881 - RNA, 22 nt, Human
uguagggcaaguuugagguuac

SEQ ID NO: 653882 - RNA, 23 nt, Human
uguccgaaaauccagggucccag

SEQ ID NO: 653883 - RNA, 23 nt, Human
uuagagucagcagcuuuaaauac

SEQ ID NO: 653884 - RNA, 20 nt, Human
uuauaauccaccauauuugu

SEQ ID NO: 653885 - RNA, 19 nt, Human
uucaaacacugaaauggug

SEQ ID NO: 653886 - RNA, 24 nt, Human
uucagggcagagaaaaaugacuua

SEQ ID NO: 653887 - RNA, 21 nt, Human
uugaauguccggccauagaag

SEQ ID NO: 653888 - RNA, 22 nt, Human
uuuaaagacuucuuguccaggc

SEQ ID NO: 653889 - RNA, 19 nt, Human
uuuuucaccucugguucau

SEQ ID NO: 653890 - RNA, 25 nt, Human
uuuuucacugucuucaaaccuugac

SEQ ID NO: 653891 - RNA, 24 nt, Human
uuuuuuuuuuuuuuuuuuuuaaug

SEQ ID NO: 653892 - RNA, 21 nt, Human
aaaggcgggcgggccagguca

SEQ ID NO: 653893 - RNA, 23 nt, Human
aaccacaagauuuuucccagccc

SEQ ID NO: 653894 - RNA, 24 nt, Human
aaggcagggggcaggaaaaggccu

SEQ ID NO: 653895 - RNA, 18 nt, Human
aggcccccgcccggccag

SEQ ID NO: 653896 - RNA, 21 nt, Human
aggcgggcgggccaggucagg

SEQ ID NO: 653897 - RNA, 22 nt, Human
aggcgggcgggccaggucaggc

SEQ ID NO: 653898 - RNA, 23 nt, Human
caccaucagugcuugauguagcc

SEQ ID NO: 653899 - RNA, 24 nt, Human
ccacaagauuuuucccagcccaaa

SEQ ID NO: 653900 - RNA, 23 nt, Human
ccccaguguagugacagacaguc

SEQ ID NO: 653901 - RNA, 21 nt, Human
cccccgcccggccagacugga

SEQ ID NO: 653902 - RNA, 20 nt, Human
ccccgcccggccagacugga

SEQ ID NO: 653903 - RNA, 21 nt, Human
cccgcccggccagacuggaaa

SEQ ID NO: 653904 - RNA, 22 nt, Human
ccgcccggccagacuggaaagg

SEQ ID NO: 653905 - RNA, 22 nt, Human
ccuggaaccccaggcccacuga

SEQ ID NO: 653906 - RNA, 18 nt, Human
cgccgugcuucaggcccc

SEQ ID NO: 653907 - RNA, 25 nt, Human
cuaccagcccugacaccaucagugc

SEQ ID NO: 653908 - RNA, 20 nt, Human
cugugugcugauuaaauguc

SEQ ID NO: 653909 - RNA, 19 nt, Human
gaacacggucccacggccc

SEQ ID NO: 653910 - RNA, 19 nt, Human
gaacacggucccacggccc

SEQ ID NO: 653911 - RNA, 26 nt, Human
gaaggcuggagccgucaacuagaugg

SEQ ID NO: 653912 - RNA, 20 nt, Human
gcaggaaaaggccuugugga

SEQ ID NO: 653913 - RNA, 20 nt, Human
gcagggggcaggaaaaggcc

SEQ ID NO: 653914 - RNA, 26 nt, Human
gcccgagccgccgugcuucaggcccc

SEQ ID NO: 653915 - RNA, 21 nt, Human
gcuucaggcccccgcccggcc

SEQ ID NO: 653916 - RNA, 20 nt, Human
ggaaacaaaggcaccaagga

SEQ ID NO: 653917 - RNA, 18 nt, Human
ggcaggaaaaggccuugu

SEQ ID NO: 653918 - RNA, 20 nt, Human
ggccuuguggaaacaaaggc

SEQ ID NO: 653919 - RNA, 19 nt, Human
gguucuggguugcaggagg

SEQ ID NO: 653920 - RNA, 23 nt, Human
gucaagugagauuagagcaguuu

SEQ ID NO: 653921 - RNA, 20 nt, Human
gucaugacugcugcugaguu

SEQ ID NO: 653922 - RNA, 21 nt, Human
uaaaguuuuguuccuuuuuaa

SEQ ID NO: 653923 - RNA, 22 nt, Human
uaaccacaagauuuuucccagc

SEQ ID NO: 653924 - RNA, 26 nt, Human
uaacuaccagcccugacaccaucagu

SEQ ID NO: 653925 - RNA, 18 nt, Human
ucccacggcccgagccgc

SEQ ID NO: 653926 - RNA, 18 nt, Human
ucucccagcuccugcucc

SEQ ID NO: 653927 - RNA, 21 nt, Human
ucuuuggcaaggcagggggcc

SEQ ID NO: 653928 - RNA, 24 nt, Human
ugacgcacugggcacggggcucug

SEQ ID NO: 653929 - RNA, 18 nt, Human
ugauuugguaacuaccag

SEQ ID NO: 653930 - RNA, 18 nt, Human
uggcaaggcagggggcag

SEQ ID NO: 653931 - RNA, 21 nt, Human
uggcaaggcagggggcaggaa

SEQ ID NO: 653932 - RNA, 27 nt, Human
uggcaaggcagggggcaggaaaaggcc

SEQ ID NO: 653933 - RNA, 21 nt, Human
uuaaaggaaauaaccacaaga

SEQ ID NO: 653934 - RNA, 23 nt, Human
uuagagcaguuuucuccaguucu

SEQ ID NO: 653935 - RNA, 21 nt, Human
uuccagcgccaauuuuaggcc

SEQ ID NO: 653936 - RNA, 18 nt, Human
uucccagcccaaauucca

SEQ ID NO: 653937 - RNA, 24 nt, Human
uuuuuuuuuuuuuuuuuuacauug

SEQ ID NO: 653938 - RNA, 18 nt, Human
aaacaaauauaucaaaca

SEQ ID NO: 653939 - RNA, 21 nt, Human
aaacaaauauaucaaacaauu

SEQ ID NO: 653940 - RNA, 23 nt, Human
aaacaaauauaucaaacaauuac

SEQ ID NO: 653941 - RNA, 20 nt, Human
aaagguucaggagagcagag

SEQ ID NO: 653942 - RNA, 18 nt, Human
acaggccaguggcucuua

SEQ ID NO: 653943 - RNA, 22 nt, Human
acauuauacaaagaguuuaaac

SEQ ID NO: 653944 - RNA, 19 nt, Human
caaaugggccgagacaagc

SEQ ID NO: 653945 - RNA, 24 nt, Human
caacucaucuuacacauaauaacu

SEQ ID NO: 653946 - RNA, 19 nt, Human
cagaaaaauagcaacucau

SEQ ID NO: 653947 - RNA, 20 nt, Human
caggagagcagagaaaaggc

SEQ ID NO: 653948 - RNA, 24 nt, Human
cccuggcgacugucccaaucgcgc

SEQ ID NO: 653949 - RNA, 20 nt, Human
cgccaccgucucucagcagc

SEQ ID NO: 653950 - RNA, 23 nt, Human
cucagccaucccuggcgacuguc

SEQ ID NO: 653951 - RNA, 22 nt, Human
cuggcgacugucccaaucgcgc

SEQ ID NO: 653952 - RNA, 20 nt, Human
cuuuaaaaaaugcucugagg

SEQ ID NO: 653953 - RNA, 19 nt, Human
ucaaaugggccgagacaag

SEQ ID NO: 653954 - RNA, 20 nt, Human
ucagcagccucgggauugau

SEQ ID NO: 653955 - RNA, 22 nt, Human
ucccaaucgcgccaccgucucu

SEQ ID NO: 653956 - RNA, 25 nt, Human
ugagucucugacauuauacaaagag

SEQ ID NO: 653957 - RNA, 20 nt, Human
ugucccaaucgcgccaccgu

SEQ ID NO: 653958 - RNA, 21 nt, Human
uuuuuuuuuuuuauaagaauc

SEQ ID NO: 653959 - RNA, 24 nt, Human
uuuuuuuuuuuuuuuuuuauaaga

SEQ ID NO: 653960 - RNA, 25 nt, Human
aagcuggaguccaacaaucauuaac

SEQ ID NO: 653961 - RNA, 21 nt, Human
acaagagcgcaggagcucgca

SEQ ID NO: 653962 - RNA, 22 nt, Human
acagaacacacuaaacagucac

SEQ ID NO: 653963 - RNA, 20 nt, Human
acauacccgcccccacaaca

SEQ ID NO: 653964 - RNA, 19 nt, Human
accccaccucgccccucag

SEQ ID NO: 653965 - RNA, 24 nt, Human
accuggaccuccagccgccggcgc

SEQ ID NO: 653966 - RNA, 24 nt, Human
acgcugccgggccccgagcugucc

SEQ ID NO: 653967 - RNA, 22 nt, Human
acgggauggggugggaucugcc

SEQ ID NO: 653968 - RNA, 20 nt, Human
agaaggaagccccccgccac

SEQ ID NO: 653969 - RNA, 22 nt, Human
agaccagagcucggccagggga

SEQ ID NO: 653970 - RNA, 21 nt, Human
agagaagcagcuuugccugga

SEQ ID NO: 653971 - RNA, 24 nt, Human
agcacaggcagguuuagccuuggg

SEQ ID NO: 653972 - RNA, 21 nt, Human
agccgccacaagcugcuuggu

SEQ ID NO: 653973 - RNA, 18 nt, Human
agccuuggggugggggac

SEQ ID NO: 653974 - RNA, 21 nt, Human
aggacguggguggccccagcc

SEQ ID NO: 653975 - RNA, 21 nt, Human
agggaggggagguccaugaug

SEQ ID NO: 653976 - RNA, 19 nt, Human
agugguggcuguugcuagc

SEQ ID NO: 653977 - RNA, 22 nt, Human
auacagacauacccgcccccac

SEQ ID NO: 653978 - RNA, 18 nt, Human
auagacaaauauacagau

SEQ ID NO: 653979 - RNA, 21 nt, Human
cacaaagacacccaggagucc

SEQ ID NO: 653980 - RNA, 21 nt, Human
cacacacacugaucacacacc

SEQ ID NO: 653981 - RNA, 23 nt, Human
cacacacacugaucacacaccac

SEQ ID NO: 653982 - RNA, 19 nt, Human
cacauucaagccugggccc

SEQ ID NO: 653983 - RNA, 19 nt, Human
cacauucacagaacacacu

SEQ ID NO: 653984 - RNA, 20 nt, Human
caccaucuuuggggccucgg

SEQ ID NO: 653985 - RNA, 21 nt, Human
caccgggcagccggaccggca

SEQ ID NO: 653986 - RNA, 22 nt, Human
caccuggaccuccagccgccgg

SEQ ID NO: 653987 - RNA, 19 nt, Human
cacgcuggggucugcgaga

SEQ ID NO: 653988 - RNA, 18 nt, Human
cacucuccuucccaccag

SEQ ID NO: 653989 - RNA, 22 nt, Human
cagaacacacuaaacagucaca

SEQ ID NO: 653990 - RNA, 24 nt, Human
cagaacacacuaaacagucacaaa

SEQ ID NO: 653991 - RNA, 21 nt, Human
cagagcucggccaggggacac

SEQ ID NO: 653992 - RNA, 24 nt, Human
cagcagcacccuggagcccgagga

SEQ ID NO: 653993 - RNA, 23 nt, Human
cagcgccgggacccccgcagcag

SEQ ID NO: 653994 - RNA, 21 nt, Human
cagggcagaaggaagcccccc

SEQ ID NO: 653995 - RNA, 18 nt, Human
caggugggaaaugcgugu

SEQ ID NO: 653996 - RNA, 22 nt, Human
caguccccucccuuccaguccc

SEQ ID NO: 653997 - RNA, 20 nt, Human
cauucuagcuccagcaaggg

SEQ ID NO: 653998 - RNA, 19 nt, Human
ccagccguccucaaucucc

SEQ ID NO: 653999 - RNA, 23 nt, Human
ccagcgcccuccuuagagacccc

SEQ ID NO: 654000 - RNA, 23 nt, Human
ccaggagucccuuuuccaucccc

SEQ ID NO: 654001 - RNA, 26 nt, Human
ccagugguggcuguugcuagcuucuu

SEQ ID NO: 654002 - RNA, 19 nt, Human
cccaccagcccuuauccuc

SEQ ID NO: 654003 - RNA, 18 nt, Human
ccccagccaggucaggcc

SEQ ID NO: 654004 - RNA, 20 nt, Human
ccccaucuagaucugcccuc

SEQ ID NO: 654005 - RNA, 18 nt, Human
cccccacaacaauacuca

SEQ ID NO: 654006 - RNA, 21 nt, Human
cccccacaacaauacucaaau

SEQ ID NO: 654007 - RNA, 25 nt, Human
cccccacaacaauacucaaauacau

SEQ ID NO: 654008 - RNA, 25 nt, Human
cccccgcagcagcacccuggagccc

SEQ ID NO: 654009 - RNA, 19 nt, Human
cccccuuuccuccuccucu

SEQ ID NO: 654010 - RNA, 23 nt, Human
ccccugcaucaccuggaccucca

SEQ ID NO: 654011 - RNA, 19 nt, Human
ccccuuuccuccuccucuc

SEQ ID NO: 654012 - RNA, 21 nt, Human
cccgcagcagcacccuggagc

SEQ ID NO: 654013 - RNA, 26 nt, Human
cccgcccccacaacaauacucaaaua

SEQ ID NO: 654014 - RNA, 21 nt, Human
cccguuccucuuccccagcca

SEQ ID NO: 654015 - RNA, 23 nt, Human
ccgaggacgacgacgaggacgag

SEQ ID NO: 654016 - RNA, 24 nt, Human
ccgccggcgcugcuccuucucgcu

SEQ ID NO: 654017 - RNA, 20 nt, Human
ccggacaagcgcggcugagc

SEQ ID NO: 654018 - RNA, 20 nt, Human
ccggcucagcgccgggaccc

SEQ ID NO: 654019 - RNA, 23 nt, Human
ccggcucagcgccgggacccccg

SEQ ID NO: 654020 - RNA, 22 nt, Human
ccuccuccucucuaaggcuccc

SEQ ID NO: 654021 - RNA, 21 nt, Human
ccuguccccacagugcccugg

SEQ ID NO: 654022 - RNA, 22 nt, Human
ccuguccccacagugcccuggg

SEQ ID NO: 654023 - RNA, 21 nt, Human
ccuuccaguccagcauggguc

SEQ ID NO: 654024 - RNA, 25 nt, Human
ccuuuaccgggcugcugugcucuuc

SEQ ID NO: 654025 - RNA, 22 nt, Human
cgccaaggcggccucccccuca

SEQ ID NO: 654026 - RNA, 19 nt, Human
cgccgggacccccgcagcg

SEQ ID NO: 654027 - RNA, 18 nt, Human
cgcucuucagcuccuccc

SEQ ID NO: 654028 - RNA, 24 nt, Human
cgggacccccgcagcagcacccug

SEQ ID NO: 654029 - RNA, 20 nt, Human
cgggacugggggaguagggg

SEQ ID NO: 654030 - RNA, 18 nt, Human
cguguggaugacgcgcgg

SEQ ID NO: 654031 - RNA, 18 nt, Human
cuaggagggggagcggug

SEQ ID NO: 654032 - RNA, 20 nt, Human
cucaggcagcgccuucagcu

SEQ ID NO: 654033 - RNA, 22 nt, Human
cuccccagcuugcagcuucagc

SEQ ID NO: 654034 - RNA, 22 nt, Human
cuccucucuaaggcucccgcca

SEQ ID NO: 654035 - RNA, 23 nt, Human
cuccuucccaccagcccuuaucc

SEQ ID NO: 654036 - RNA, 22 nt, Human
cucuuccucuuggcuuugcugg

SEQ ID NO: 654037 - RNA, 20 nt, Human
cuggcccacaggccucaggc

SEQ ID NO: 654038 - RNA, 19 nt, Human
cuggggaagagaagcagcu

SEQ ID NO: 654039 - RNA, 22 nt, Human
cuggggaagagaagcagcuuug

SEQ ID NO: 654040 - RNA, 23 nt, Human
cuuccccagccaccagccguccu

SEQ ID NO: 654041 - RNA, 20 nt, Human
cuucguccuugacacucucc

SEQ ID NO: 654042 - RNA, 27 nt, Human
gaacacacuaaacagucacaaagacac

SEQ ID NO: 654043 - RNA, 18 nt, Human
gacacucuccuucccacc

SEQ ID NO: 654044 - RNA, 22 nt, Human
gacacucuccuucccaccagcc

SEQ ID NO: 654045 - RNA, 20 nt, Human
gacgacgaggacgaggagga

SEQ ID NO: 654046 - RNA, 21 nt, Human
gacgaggacgaggaggacacg

SEQ ID NO: 654047 - RNA, 19 nt, Human
gagauaccacuuuccgugg

SEQ ID NO: 654048 - RNA, 19 nt, Human
gagcacaggcagguuuagc

SEQ ID NO: 654049 - RNA, 23 nt, Human
gaguccaacaaucauuaacccug

SEQ ID NO: 654050 - RNA, 18 nt, Human
gauuggggguggugggag

SEQ ID NO: 654051 - RNA, 23 nt, Human
gcagaaggaagccccccgccaca

SEQ ID NO: 654052 - RNA, 20 nt, Human
gccaccagccguccucaauc

SEQ ID NO: 654053 - RNA, 21 nt, Human
gccccggggcccggcucagcg

SEQ ID NO: 654054 - RNA, 24 nt, Human
gcccgcggccccggggcccggcuc

SEQ ID NO: 654055 - RNA, 18 nt, Human
gcccuggaaggaggggug

SEQ ID NO: 654056 - RNA, 23 nt, Human
gcucccagcugcccguuccucuu

SEQ ID NO: 654057 - RNA, 25 nt, Human
gcuuccucuccagcugcaccuccau

SEQ ID NO: 654058 - RNA, 18 nt, Human
ggaaggagggguggacag

SEQ ID NO: 654059 - RNA, 18 nt, Human
ggagacagggcagaagga

SEQ ID NO: 654060 - RNA, 18 nt, Human
ggagguccaugauggggg

SEQ ID NO: 654061 - RNA, 23 nt, Human
ggauguuuugggcaucaacuuuu

SEQ ID NO: 654062 - RNA, 30 nt, Human
ggcuguagcugaaguucacuuugcaccauu

SEQ ID NO: 654063 - RNA, 20 nt, Human
gggcgcagcggcuggaggag

SEQ ID NO: 654064 - RNA, 22 nt, Human
gggggccccguggagacagggc

SEQ ID NO: 654065 - RNA, 25 nt, Human
ggggguggugggaguacaaaguugu

SEQ ID NO: 654066 - RNA, 19 nt, Human
gggguggugggaguacaaa

SEQ ID NO: 654067 - RNA, 24 nt, Human
guacaaaguugucuggaaaaacuc

SEQ ID NO: 654068 - RNA, 20 nt, Human
gucuugggaggccgcugggg

SEQ ID NO: 654069 - RNA, 19 nt, Human
uaccaaggcuugggggccc

SEQ ID NO: 654070 - RNA, 19 nt, Human
uaccgggcugcugugcucu

SEQ ID NO: 654071 - RNA, 21 nt, Human
uaccugcccgcacauucacag

SEQ ID NO: 654072 - RNA, 22 nt, Human
uagagaccccaccucgccccuc

SEQ ID NO: 654073 - RNA, 22 nt, Human
ucaaauccugacgguuuugguu

SEQ ID NO: 654074 - RNA, 20 nt, Human
ucacaaagacacccaggagu

SEQ ID NO: 654075 - RNA, 23 nt, Human
ucacacaccacauugcaugcaca

SEQ ID NO: 654076 - RNA, 19 nt, Human
ucacagagggggccuuuac

SEQ ID NO: 654077 - RNA, 20 nt, Human
ucaccuggaccuccagccgc

SEQ ID NO: 654078 - RNA, 21 nt, Human
ucagcaucucgugggcgcccc

SEQ ID NO: 654079 - RNA, 21 nt, Human
ucagcuccagcgcccuccuua

SEQ ID NO: 654080 - RNA, 19 nt, Human
ucccagaugucggucagcu

SEQ ID NO: 654081 - RNA, 23 nt, Human
uccccacagugcccuggguucau

SEQ ID NO: 654082 - RNA, 22 nt, Human
uccccagccaccagccguccuc

SEQ ID NO: 654083 - RNA, 21 nt, Human
ucccccucauucuagcuccag

SEQ ID NO: 654084 - RNA, 19 nt, Human
ucccgagauaccacuuucc

SEQ ID NO: 654085 - RNA, 21 nt, Human
ucccgccaaggcggccucccc

SEQ ID NO: 654086 - RNA, 23 nt, Human
uccucaaucuccuuuaucauuuc

SEQ ID NO: 654087 - RNA, 23 nt, Human
uccuccuccucucuaaggcuccc

SEQ ID NO: 654088 - RNA, 24 nt, Human
uccucuccagcugcaccuccauca

SEQ ID NO: 654089 - RNA, 24 nt, Human
uccuuagagaccccaccucgcccc

SEQ ID NO: 654090 - RNA, 21 nt, Human
ucgggacugggggaguagggg

SEQ ID NO: 654091 - RNA, 26 nt, Human
ucuccaagacuccguuuacuugaucc

SEQ ID NO: 654092 - RNA, 22 nt, Human
ucuucagcuccucccagauguc

SEQ ID NO: 654093 - RNA, 21 nt, Human
ugaacccagucucgggacugg

SEQ ID NO: 654094 - RNA, 20 nt, Human
ugacgcgcggggucugggac

SEQ ID NO: 654095 - RNA, 23 nt, Human
ugacuagaccagagcucggccag

SEQ ID NO: 654096 - RNA, 21 nt, Human
ugacugaaggcaugucugggu

SEQ ID NO: 654097 - RNA, 22 nt, Human
ugagcuccagucggacgcccca

SEQ ID NO: 654098 - RNA, 20 nt, Human
ugcccgcacauucacagaac

SEQ ID NO: 654099 - RNA, 24 nt, Human
ugcccuggguucauacauuucucg

SEQ ID NO: 654100 - RNA, 23 nt, Human
ugccuggaaggggccuccuagga

SEQ ID NO: 654101 - RNA, 18 nt, Human
ugcgugugugagcacagg

SEQ ID NO: 654102 - RNA, 19 nt, Human
ugcuagcuucuugacugug

SEQ ID NO: 654103 - RNA, 19 nt, Human
uggaaggagggguggacag

SEQ ID NO: 654104 - RNA, 23 nt, Human
uggaccuccagccgccggcgcug

SEQ ID NO: 654105 - RNA, 23 nt, Human
uggccgggcccuggcucaaagcu

SEQ ID NO: 654106 - RNA, 18 nt, Human
uggcucaaagcuggaguc

SEQ ID NO: 654107 - RNA, 24 nt, Human
uggcucaaagcuggaguccaacaa

SEQ ID NO: 654108 - RNA, 23 nt, Human
uggcuguugcuagcuucuugacu

SEQ ID NO: 654109 - RNA, 22 nt, Human
ugggaaaugcgugugugagcaa

SEQ ID NO: 654110 - RNA, 22 nt, Human
ugggaucugccacaagccgcca

SEQ ID NO: 654111 - RNA, 22 nt, Human
uggggagggauguuuugggcau

SEQ ID NO: 654112 - RNA, 23 nt, Human
uggggugggggacgggauggggu

SEQ ID NO: 654113 - RNA, 22 nt, Human
uggguuaccaaggcuugggggc

SEQ ID NO: 654114 - RNA, 20 nt, Human
ugugagcacaggcagguuua

SEQ ID NO: 654115 - RNA, 20 nt, Human
uguggucuugggaggccgcu

SEQ ID NO: 654116 - RNA, 22 nt, Human
uguggucuugggaggccgcugg

SEQ ID NO: 654117 - RNA, 20 nt, Human
uucauacauuucucgcguuu

SEQ ID NO: 654118 - RNA, 19 nt, Human
uugcagcuucagcucgucc

SEQ ID NO: 654119 - RNA, 20 nt, Human
uugcugggcccagugguggc

SEQ ID NO: 654120 - RNA, 25 nt, Human
uuuccuccuccucucuaaggcuccc

SEQ ID NO: 654121 - RNA, 23 nt, Human
uuugcaccaucuuuggggccucg

SEQ ID NO: 654122 - RNA, 25 nt, Human
uuuuugguuccuuaauaggagcuga

SEQ ID NO: 654123 - RNA, 19 nt, Human
aaaagccggaguucuccca

SEQ ID NO: 654124 - RNA, 18 nt, Human
aacacgugccccuacgug

SEQ ID NO: 654125 - RNA, 21 nt, Human
aaccuucggcucuucuccagc

SEQ ID NO: 654126 - RNA, 23 nt, Human
aaccuucggcucuucuccagcuc

SEQ ID NO: 654127 - RNA, 23 nt, Human
aagaagcaaacagguuuauuuua

SEQ ID NO: 654128 - RNA, 23 nt, Human
aauacacucagaaagccccaccg

SEQ ID NO: 654129 - RNA, 22 nt, Human
acugacucccuccccugcgugc

SEQ ID NO: 654130 - RNA, 18 nt, Human
acuguugggcaugccugg

SEQ ID NO: 654131 - RNA, 18 nt, Human
agaaagccccaccguuuc

SEQ ID NO: 654132 - RNA, 23 nt, Human
agccggaguucucccagggccua

SEQ ID NO: 654133 - RNA, 19 nt, Human
agcucgaggcgggcggcgc

SEQ ID NO: 654134 - RNA, 18 nt, Human
aggccaagcgcgcacgcg

SEQ ID NO: 654135 - RNA, 21 nt, Human
aggccggcgcugggccgcggg

SEQ ID NO: 654136 - RNA, 23 nt, Human
aggccggcgcugggccgcgggcg

SEQ ID NO: 654137 - RNA, 22 nt, Human
aguccuaaugcccuuccuguug

SEQ ID NO: 654138 - RNA, 18 nt, Human
agugaugaagaggguugu

SEQ ID NO: 654139 - RNA, 21 nt, Human
agugcggcagcgccucuucuu

SEQ ID NO: 654140 - RNA, 21 nt, Human
caacgcugccaccgcuucgcc

SEQ ID NO: 654141 - RNA, 26 nt, Human
caaggugggacccgaaggccggcgcu

SEQ ID NO: 654142 - RNA, 23 nt, Human
cacaacaucacccgcaagguggg

SEQ ID NO: 654143 - RNA, 22 nt, Human
cacccuguccuaguccugaggg

SEQ ID NO: 654144 - RNA, 23 nt, Human
cacccuguccuaguccugagggc

SEQ ID NO: 654145 - RNA, 19 nt, Human
caccgccuccuggacgauc

SEQ ID NO: 654146 - RNA, 21 nt, Human
cacuggcucacccuguccuag

SEQ ID NO: 654147 - RNA, 18 nt, Human
cagcgaggccgcccagcc

SEQ ID NO: 654148 - RNA, 24 nt, Human
ccaggaccaaugugagcucgaggc

SEQ ID NO: 654149 - RNA, 18 nt, Human
ccaugugacuagggcauu

SEQ ID NO: 654150 - RNA, 23 nt, Human
ccccuacgugcacaacaucaccc

SEQ ID NO: 654151 - RNA, 24 nt, Human
cccuccccugcgugcgucuccgau

SEQ ID NO: 654152 - RNA, 21 nt, Human
ccgccccucucagccgggcuc

SEQ ID NO: 654153 - RNA, 18 nt, Human
ccgccuccuggacgaucu

SEQ ID NO: 654154 - RNA, 21 nt, Human
ccgcuucgccugcaacacguc

SEQ ID NO: 654155 - RNA, 18 nt, Human
ccgggaguuggagccugc

SEQ ID NO: 654156 - RNA, 19 nt, Human
ccgggggggguggggcggc

SEQ ID NO: 654157 - RNA, 24 nt, Human
ccuccagggccgccccucucagcc

SEQ ID NO: 654158 - RNA, 20 nt, Human
ccucgggcccacccgcggcc

SEQ ID NO: 654159 - RNA, 22 nt, Human
ccucgggcccacccgcggccuc

SEQ ID NO: 654160 - RNA, 19 nt, Human
ccugcagcagggccgggag

SEQ ID NO: 654161 - RNA, 18 nt, Human
cgaaggccggcgcugggc

SEQ ID NO: 654162 - RNA, 22 nt, Human
cgccuccuggacgaucucuccc

SEQ ID NO: 654163 - RNA, 19 nt, Human
cggcagugggagcugccgg

SEQ ID NO: 654164 - RNA, 20 nt, Human
cuccagggccgccccucuca

SEQ ID NO: 654165 - RNA, 19 nt, Human
cuccaucgccgccagcccc

SEQ ID NO: 654166 - RNA, 25 nt, Human
cucccagggccuaccagguuccgac

SEQ ID NO: 654167 - RNA, 23 nt, Human
cucgcgccccuuucuggucugca

SEQ ID NO: 654168 - RNA, 22 nt, Human
cucuuucucgcgccccuuucug

SEQ ID NO: 654169 - RNA, 18 nt, Human
cugagcggcagugggagc

SEQ ID NO: 654170 - RNA, 22 nt, Human
cugaggcacgcagguccgugcu

SEQ ID NO: 654171 - RNA, 21 nt, Human
cugcagcagaucugugggcuc

SEQ ID NO: 654172 - RNA, 22 nt, Human
cugcagcagaucugugggcucu

SEQ ID NO: 654173 - RNA, 19 nt, Human
cuucguccucaucuuccuc

SEQ ID NO: 654174 - RNA, 24 nt, Human
gagcugccgggaguuggagccugc

SEQ ID NO: 654175 - RNA, 18 nt, Human
gccaccagugaugaagag

SEQ ID NO: 654176 - RNA, 23 nt, Human
gccccaccguuucccaccgccuu

SEQ ID NO: 654177 - RNA, 20 nt, Human
gccccggcgucugccucugu

SEQ ID NO: 654178 - RNA, 22 nt, Human
gccccggcugcgggaacgggcu

SEQ ID NO: 654179 - RNA, 19 nt, Human
gcuguucugccccggcugc

SEQ ID NO: 654180 - RNA, 22 nt, Human
ggccaagcgcgcacgcgcagga

SEQ ID NO: 654181 - RNA, 21 nt, Human
ggcgggaaggcugccaggacc

SEQ ID NO: 654182 - RNA, 25 nt, Human
gucuccuccagggccgccccucuca

SEQ ID NO: 654183 - RNA, 23 nt, Human
uccagcucacgcagacgaaaagc

SEQ ID NO: 654184 - RNA, 18 nt, Human
uccuaguccugagggccc

SEQ ID NO: 654185 - RNA, 18 nt, Human
uccuccgacugcugcucc

SEQ ID NO: 654186 - RNA, 22 nt, Human
uccucuugcgccucgggcccac

SEQ ID NO: 654187 - RNA, 18 nt, Human
uccuggacgaucucuccc

SEQ ID NO: 654188 - RNA, 24 nt, Human
ucgcaggccuuccgcguccuccga

SEQ ID NO: 654189 - RNA, 21 nt, Human
ucugccucuguccgcucuuuc

SEQ ID NO: 654190 - RNA, 25 nt, Human
ugacucccuccccugcgugcgucuc

SEQ ID NO: 654191 - RNA, 23 nt, Human
ugagggcccccagguuuaugcug

SEQ ID NO: 654192 - RNA, 24 nt, Human
ugagggcccccagguuuaugcuga

SEQ ID NO: 654193 - RNA, 24 nt, Human
ugccuggggugaggccaccacaac

SEQ ID NO: 654194 - RNA, 21 nt, Human
ugggaaaaagcucagccacca

SEQ ID NO: 654195 - RNA, 22 nt, Human
ugggacccgaaggccggcgcug

SEQ ID NO: 654196 - RNA, 20 nt, Human
ugugacuagggcauuuggac

SEQ ID NO: 654197 - RNA, 18 nt, Human
uucacagcggcggccacg

SEQ ID NO: 654198 - RNA, 21 nt, Human
uucacagcggcggccacggug

SEQ ID NO: 654199 - RNA, 20 nt, Human
uuccugcugggaaaaagcuc

SEQ ID NO: 654200 - RNA, 19 nt, Human
uuccuguugcccuuugccg

SEQ ID NO: 654201 - RNA, 20 nt, Human
uuuuuuuuuuuuuaagaagc

SEQ ID NO: 654202 - RNA, 19 nt, Human
uuuuuuuuuuuuuuuuuaa

SEQ ID NO: 654203 - RNA, 20 nt, Human
aaacaaaugaaacacguaaa

SEQ ID NO: 654204 - RNA, 19 nt, Human
aagcagaauacaaaugucu

SEQ ID NO: 654205 - RNA, 24 nt, Human
aaggcacaaaaaaaugacagugca

SEQ ID NO: 654206 - RNA, 21 nt, Human
aauaaugauagcaccuacaag

SEQ ID NO: 654207 - RNA, 19 nt, Human
acccugugucugguaccug

SEQ ID NO: 654208 - RNA, 24 nt, Human
acggacaaggacgcgccgccggcg

SEQ ID NO: 654209 - RNA, 19 nt, Human
acuauguggcuauacaaau

SEQ ID NO: 654210 - RNA, 24 nt, Human
agaauaagaggaucugagaaagga

SEQ ID NO: 654211 - RNA, 18 nt, Human
agaccuggguaugggggg

SEQ ID NO: 654212 - RNA, 22 nt, Human
agcuguguaauguguaaucuug

SEQ ID NO: 654213 - RNA, 24 nt, Human
aggacagaccuggguauggggggu

SEQ ID NO: 654214 - RNA, 29 nt, Human
aggcaggggguaaauggaagggggacccc

SEQ ID NO: 654215 - RNA, 19 nt, Human
aggggguaaauggaaggag

SEQ ID NO: 654216 - RNA, 18 nt, Human
auaaaacauucuccaaga

SEQ ID NO: 654217 - RNA, 20 nt, Human
auaaaacauucuccaagaua

SEQ ID NO: 654218 - RNA, 21 nt, Human
aucacaugccacaagcuacag

SEQ ID NO: 654219 - RNA, 20 nt, Human
caccuacaaguccaaaucua

SEQ ID NO: 654220 - RNA, 24 nt, Human
caggagagacaugagaaauuggua

SEQ ID NO: 654221 - RNA, 22 nt, Human
caggcagcgcacgcagcacccc

SEQ ID NO: 654222 - RNA, 23 nt, Human
caguacagucuuuuucuugguuu

SEQ ID NO: 654223 - RNA, 21 nt, Human
ccacaaggguagcaaauggug

SEQ ID NO: 654224 - RNA, 20 nt, Human
cccucuguaccuuuugagug

SEQ ID NO: 654225 - RNA, 18 nt, Human
ccuggcacacuauacaca

SEQ ID NO: 654226 - RNA, 21 nt, Human
ccugugucugguaccuggcag

SEQ ID NO: 654227 - RNA, 20 nt, Human
ccuuuuaagagcaaaggcag

SEQ ID NO: 654228 - RNA, 25 nt, Human
cgcaaauaagcaauucucaaauuag

SEQ ID NO: 654229 - RNA, 24 nt, Human
cggagugggggccuucgucgcgcu

SEQ ID NO: 654230 - RNA, 19 nt, Human
cucacggacaaggacgcgc

SEQ ID NO: 654231 - RNA, 24 nt, Human
cugcaguacagucuuuuucuuggu

SEQ ID NO: 654232 - RNA, 22 nt, Human
cuggguucaaaucccaacauuu

SEQ ID NO: 654233 - RNA, 18 nt, Human
cuuucuugauguuucaag

SEQ ID NO: 654234 - RNA, 18 nt, Human
gacagugcagaaaggcag

SEQ ID NO: 654235 - RNA, 21 nt, Human
gcagaagugccuggcacacua

SEQ ID NO: 654236 - RNA, 23 nt, Human
gcaguguuuuccucaggcgggag

SEQ ID NO: 654237 - RNA, 24 nt, Human
gcccucuguaccuuuugaguguug

SEQ ID NO: 654238 - RNA, 21 nt, Human
ggcaguccacaguggcagggc

SEQ ID NO: 654239 - RNA, 20 nt, Human
gggaauccuugcacccaucc

SEQ ID NO: 654240 - RNA, 20 nt, Human
ggguucaaaucccaacauuu

SEQ ID NO: 654241 - RNA, 24 nt, Human
guaaagcagaauacaaaugucugu

SEQ ID NO: 654242 - RNA, 18 nt, Human
uaaagcagaauacaaaug

SEQ ID NO: 654243 - RNA, 24 nt, Human
uaaagcagaauacaaaugucuguu

SEQ ID NO: 654244 - RNA, 21 nt, Human
uaagaauaacaccuuucugac

SEQ ID NO: 654245 - RNA, 21 nt, Human
uaccaggcugccugcaaggac

SEQ ID NO: 654246 - RNA, 23 nt, Human
uacuacacagcccucuguaccuu

SEQ ID NO: 654247 - RNA, 21 nt, Human
uagggugguggagcugggcag

SEQ ID NO: 654248 - RNA, 19 nt, Human
uaucuguguacuauugagc

SEQ ID NO: 654249 - RNA, 20 nt, Human
uccucagugugcuagcugug

SEQ ID NO: 654250 - RNA, 24 nt, Human
ucucacggacaaggacgcgccgcc

SEQ ID NO: 654251 - RNA, 23 nt, Human
ucuccuuuuaagagcaaaggcug

SEQ ID NO: 654252 - RNA, 18 nt, Human
ugaaacacguaaaacuua

SEQ ID NO: 654253 - RNA, 22 nt, Human
ugaaacacguaaaacuuaaaau

SEQ ID NO: 654254 - RNA, 22 nt, Human
ugaauauauuaacauucaaaac

SEQ ID NO: 654255 - RNA, 19 nt, Human
ugagaaaggaaaggcacaa

SEQ ID NO: 654256 - RNA, 18 nt, Human
uggaaggagguuauccau

SEQ ID NO: 654257 - RNA, 21 nt, Human
uggauaaaacaucucaggaga

SEQ ID NO: 654258 - RNA, 21 nt, Human
ugggcaguccacaguggcagg

SEQ ID NO: 654259 - RNA, 21 nt, Human
uucaguaaagaugggcaguug

SEQ ID NO: 654260 - RNA, 23 nt, Human
uuuaagagcaaaggcagugacuc

SEQ ID NO: 654261 - RNA, 25 nt, Human
uuucuugauguuucaagcgcaaaua

SEQ ID NO: 654262 - RNA, 21 nt, Human
uuuuuuuuuuuuuuuuuauuu

SEQ ID NO: 654263 - RNA, 22 nt, Human
uccaccagaggagugccagaag

SEQ ID NO: 654264 - RNA, 22 nt, Human
aaaaaaaaaagaaagcaaguua

SEQ ID NO: 654265 - RNA, 20 nt, Human
aaaaagaaagcaaguuaaaa

SEQ ID NO: 654266 - RNA, 22 nt, Human
aaaagaaagcaaguuaaaugga

SEQ ID NO: 654267 - RNA, 24 nt, Human
aaagagcaagacucugucucaaaa

SEQ ID NO: 654268 - RNA, 19 nt, Human
aaagguacccaacaaauca

SEQ ID NO: 654269 - RNA, 18 nt, Human
aacacuccucugcaaaua

SEQ ID NO: 654270 - RNA, 19 nt, Human
aagaaauuacuuugccucc

SEQ ID NO: 654271 - RNA, 21 nt, Human
aagagcaaucugaaaacucua

SEQ ID NO: 654272 - RNA, 18 nt, Human
acaggguuucaccauguu

SEQ ID NO: 654273 - RNA, 19 nt, Human
acaggguuucaccauguug

SEQ ID NO: 654274 - RNA, 24 nt, Human
acaggguuucaccauguugcccag

SEQ ID NO: 654275 - RNA, 20 nt, Human
accauguugcccaggcgugg

SEQ ID NO: 654276 - RNA, 26 nt, Human
acucugucgcccaggcuagagugcug

SEQ ID NO: 654277 - RNA, 18 nt, Human
acugcacuccauccuggg

SEQ ID NO: 654278 - RNA, 23 nt, Human
acuuuuuuuuuuuuuuuuuuuug

SEQ ID NO: 654279 - RNA, 23 nt, Human
agacaggguuucaccauguugcc

SEQ ID NO: 654280 - RNA, 18 nt, Human
agagcaagacucugucuc

SEQ ID NO: 654281 - RNA, 18 nt, Human
agcaagacucugucucaa

SEQ ID NO: 654282 - RNA, 24 nt, Human
aggcaggagaacugcccgaacccg

SEQ ID NO: 654283 - RNA, 21 nt, Human
aggcggagguugcagugagcc

SEQ ID NO: 654284 - RNA, 24 nt, Human
aggcggagguugcagugagccgag

SEQ ID NO: 654285 - RNA, 24 nt, Human
aggcgugguggcacaugcccguaa

SEQ ID NO: 654286 - RNA, 20 nt, Human
aggcugaggcaggagaacug

SEQ ID NO: 654287 - RNA, 21 nt, Human
aguacaguggugcaaucucag

SEQ ID NO: 654288 - RNA, 21 nt, Human
agugcuggaguacaguggugc

SEQ ID NO: 654289 - RNA, 24 nt, Human
aucgcaccacugcacuccauccug

SEQ ID NO: 654290 - RNA, 21 nt, Human
auuuuguuuaucuugcuauca

SEQ ID NO: 654291 - RNA, 22 nt, Human
caacacuuuuuaauacaguuga

SEQ ID NO: 654292 - RNA, 23 nt, Human
caaccuccaccucccgaguucaa

SEQ ID NO: 654293 - RNA, 28 nt, Human
caagcaauucuccugccucugccuccca

SEQ ID NO: 654294 - RNA, 23 nt, Human
caaggaagcaguaucagcugucc

SEQ ID NO: 654295 - RNA, 18 nt, Human
caccauguugcccaggcg

SEQ ID NO: 654296 - RNA, 18 nt, Human
caccauguugcccaggcg

SEQ ID NO: 654297 - RNA, 19 nt, Human
caccauguugcccaggcgu

SEQ ID NO: 654298 - RNA, 25 nt, Human
caccauguugcccaggcgugguggc

SEQ ID NO: 654299 - RNA, 24 nt, Human
cacucugucgcccaggcuagagug

SEQ ID NO: 654300 - RNA, 21 nt, Human
cacugcaaccuccaccucccg

SEQ ID NO: 654301 - RNA, 21 nt, Human
cacugcacuccauccugggcg

SEQ ID NO: 654302 - RNA, 26 nt, Human
cacugcacuccauccugggcgaaaga

SEQ ID NO: 654303 - RNA, 24 nt, Human
cagcuacucaggaggcugaggcag

SEQ ID NO: 654304 - RNA, 24 nt, Human
caggguuucaccauguugcccagg

SEQ ID NO: 654305 - RNA, 24 nt, Human
caguagagacaggguuucaccaug

SEQ ID NO: 654306 - RNA, 26 nt, Human
caguagagacaggguuucaccauguu

SEQ ID NO: 654307 - RNA, 19 nt, Human
cauggauacaaacacaugg

SEQ ID NO: 654308 - RNA, 23 nt, Human
cauguugcccaggcgugguggca

SEQ ID NO: 654309 - RNA, 26 nt, Human
ccaccucccgaguucaagcaauucuu

SEQ ID NO: 654310 - RNA, 20 nt, Human
ccacugcacuccauccuggg

SEQ ID NO: 654311 - RNA, 21 nt, Human
ccacugcacuccauccugggc

SEQ ID NO: 654312 - RNA, 21 nt, Human
ccacugcacuccauccugggc

SEQ ID NO: 654313 - RNA, 23 nt, Human
ccacugcacuccauccugggcga

SEQ ID NO: 654314 - RNA, 21 nt, Human
ccaggcgugguggcacaugcc

SEQ ID NO: 654315 - RNA, 23 nt, Human
ccauccugggcgaaagagcaaga

SEQ ID NO: 654316 - RNA, 23 nt, Human
cccgaguucaagcaauucuccug

SEQ ID NO: 654317 - RNA, 22 nt, Human
cccguaaucccagcuacucagg

SEQ ID NO: 654318 - RNA, 24 nt, Human
ccucccgaguucaagcaauucucc

SEQ ID NO: 654319 - RNA, 22 nt, Human
ccugggcgaaagagcaagacuc

SEQ ID NO: 654320 - RNA, 24 nt, Human
cgggaggcggagguugcagugagc

SEQ ID NO: 654321 - RNA, 24 nt, Human
cgugaccacagggguaugccgcca

SEQ ID NO: 654322 - RNA, 24 nt, Human
cucacugcaaccuccaccucccga

SEQ ID NO: 654323 - RNA, 19 nt, Human
cucugucucaaaaaaaaaa

SEQ ID NO: 654324 - RNA, 23 nt, Human
cugcaaccuccaccucccgaguu

SEQ ID NO: 654325 - RNA, 24 nt, Human
cugcaaccuccaccucccgaguuc

SEQ ID NO: 654326 - RNA, 24 nt, Human
cugcccgaacccgggaggcggagg

SEQ ID NO: 654327 - RNA, 28 nt, Human
gagaaucaaugggaaacaaccgguaccc

SEQ ID NO: 654328 - RNA, 23 nt, Human
gagguugcagugagccgagaucg

SEQ ID NO: 654329 - RNA, 24 nt, Human
gcccguaaucccagcuacucagga

SEQ ID NO: 654330 - RNA, 20 nt, Human
gccgagaucgcaccacugca

SEQ ID NO: 654331 - RNA, 20 nt, Human
ggagguugcagugagccgag

SEQ ID NO: 654332 - RNA, 22 nt, Human
ggagguugcagugagccgagau

SEQ ID NO: 654333 - RNA, 24 nt, Human
ggagguugcagugagccgagaucg

SEQ ID NO: 654334 - RNA, 20 nt, Human
ggguaugccgccacaccugg

SEQ ID NO: 654335 - RNA, 18 nt, Human
gguagcucccucccuugg

SEQ ID NO: 654336 - RNA, 24 nt, Human
gguggcacaugcccguaaucccag

SEQ ID NO: 654337 - RNA, 25 nt, Human
guaaagccuucugcuagggcauaaa

SEQ ID NO: 654338 - RNA, 22 nt, Human
guagagacagagucucacucug

SEQ ID NO: 654339 - RNA, 19 nt, Human
gucucaaaaaaaaaaaaag

SEQ ID NO: 654340 - RNA, 21 nt, Human
gucucaaaaaaaaaaaaagaa

SEQ ID NO: 654341 - RNA, 19 nt, Human
guugcagugagccgagauc

SEQ ID NO: 654342 - RNA, 21 nt, Human
guugcagugagccgagaucgc

SEQ ID NO: 654343 - RNA, 19 nt, Human
uaacaaauguaaaguaaaa

SEQ ID NO: 654344 - RNA, 22 nt, Human
uacaguggugcaaucucagcuc

SEQ ID NO: 654345 - RNA, 22 nt, Human
uagagacagagucucacucugu

SEQ ID NO: 654346 - RNA, 21 nt, Human
uagagacaggguuucaccaug

SEQ ID NO: 654347 - RNA, 22 nt, Human
uagagacaggguuucaccaugu

SEQ ID NO: 654348 - RNA, 24 nt, Human
uagagugcuggaguacaguggugc

SEQ ID NO: 654349 - RNA, 23 nt, Human
uagggcauaaauaggaauccguc

SEQ ID NO: 654350 - RNA, 20 nt, Human
uagucuagggcuuagaaaaa

SEQ ID NO: 654351 - RNA, 22 nt, Human
ucaaaaaaaaaaaaagaaagca

SEQ ID NO: 654352 - RNA, 25 nt, Human
ucaaaaaaaaaaaaagaaagcaagu

SEQ ID NO: 654353 - RNA, 27 nt, Human
ucaagaaauuacuuugccuccugaucu

SEQ ID NO: 654354 - RNA, 18 nt, Human
ucacugcaaccuccaccu

SEQ ID NO: 654355 - RNA, 19 nt, Human
ucacugcaaccuccaccuc

SEQ ID NO: 654356 - RNA, 21 nt, Human
ucacugcaaccuccaccuccc

SEQ ID NO: 654357 - RNA, 22 nt, Human
ucacugcaaccuccaccucccg

SEQ ID NO: 654358 - RNA, 27 nt, Human
ucacugcaaccuccaccucccgaguuc

SEQ ID NO: 654359 - RNA, 24 nt, Human
ucaguagagacaggguuucaccau

SEQ ID NO: 654360 - RNA, 21 nt, Human
ucccgaguucaagcaauucuc

SEQ ID NO: 654361 - RNA, 24 nt, Human
ucccgaguucaagcaauucuccug

SEQ ID NO: 654362 - RNA, 23 nt, Human
ucgcaccacugcacuccauccug

SEQ ID NO: 654363 - RNA, 18 nt, Human
ucgcccaggcuagagugc

SEQ ID NO: 654364 - RNA, 20 nt, Human
ucuauaacgucucccuccca

SEQ ID NO: 654365 - RNA, 22 nt, Human
ucucaaaaaaaaaaaaagaaag

SEQ ID NO: 654366 - RNA, 18 nt, Human
ucucacucugucgcccag

SEQ ID NO: 654367 - RNA, 19 nt, Human
ucucacucugucgcccagg

SEQ ID NO: 654368 - RNA, 22 nt, Human
ucucacucugucgcccaggcua

SEQ ID NO: 654369 - RNA, 24 nt, Human
ucucacucugucgcccaggcuaga

SEQ ID NO: 654370 - RNA, 21 nt, Human
ucugucucaaaaaaaaaaaaa

SEQ ID NO: 654371 - RNA, 22 nt, Human
ucugucucaaaaaaaaaaaaag

SEQ ID NO: 654372 - RNA, 21 nt, Human
ucuuuuguauuucaguagaga

SEQ ID NO: 654373 - RNA, 22 nt, Human
ugagccgagaucgcaccacugc

SEQ ID NO: 654374 - RNA, 24 nt, Human
ugaggcaggagaacugcccgaacc

SEQ ID NO: 654375 - RNA, 24 nt, Human
ugcccguaaucccagcuacucagg

SEQ ID NO: 654376 - RNA, 20 nt, Human
ugccucugccucccaaguag

SEQ ID NO: 654377 - RNA, 23 nt, Human
ugccucugccucccaaguagccg

SEQ ID NO: 654378 - RNA, 21 nt, Human
ugcuagggcauaaauaggaau

SEQ ID NO: 654379 - RNA, 19 nt, Human
uggaguacaguggugcaau

SEQ ID NO: 654380 - RNA, 22 nt, Human
uggcacaugcccguaaucccag

SEQ ID NO: 654381 - RNA, 21 nt, Human
ugggaaacaacguaaagccuu

SEQ ID NO: 654382 - RNA, 24 nt, Human
uggguuacuuuuuuuuuuuuuuuu

SEQ ID NO: 654383 - RNA, 24 nt, Human
uggugcaaucucagcucacugcaa

SEQ ID NO: 654384 - RNA, 24 nt, Human
ugguggcacaugcccguaauccca

SEQ ID NO: 654385 - RNA, 21 nt, Human
uucaagcaauucuccugccuc

SEQ ID NO: 654386 - RNA, 23 nt, Human
uucaagcaauucuccugccucug

SEQ ID NO: 654387 - RNA, 24 nt, Human
uucaagcaauucuccugccucugc

SEQ ID NO: 654388 - RNA, 23 nt, Human
uugaauggauaaaaacauggaua

SEQ ID NO: 654389 - RNA, 18 nt, Human
uugcagugagccgagauc

SEQ ID NO: 654390 - RNA, 19 nt, Human
uugcagugagccgagaucg

SEQ ID NO: 654391 - RNA, 22 nt, Human
uugcagugagccgagaucgcac

SEQ ID NO: 654392 - RNA, 20 nt, Human
uuucaccauguugcccaggc

SEQ ID NO: 654393 - RNA, 21 nt, Human
uuuuguauuucaguagagaca

SEQ ID NO: 654394 - RNA, 19 nt, Human
uuuuuuuguagagacagag

SEQ ID NO: 654395 - RNA, 27 nt, Human
uuuuuuuuuuguagagacagagucuca

SEQ ID NO: 654396 - RNA, 18 nt, Human
uuuuuuuuuuuuuuccug

SEQ ID NO: 654397 - RNA, 18 nt, Human
uuuuuuuuuuuuuuuuug

SEQ ID NO: 654398 - RNA, 19 nt, Human
uuuuuuuuuuuuuuuuugu

SEQ ID NO: 654399 - RNA, 24 nt, Human
aaaaaaaaaaagaaaaagaaaaag

SEQ ID NO: 654400 - RNA, 19 nt, Human
aaaaaaaagaaaaagaaaa

SEQ ID NO: 654401 - RNA, 21 nt, Human
aaaaagaaaaagaaaaaaaag

SEQ ID NO: 654402 - RNA, 22 nt, Human
aaaagaaaaagaaaaaaaagaa

SEQ ID NO: 654403 - RNA, 23 nt, Human
aaaagaaaaagaaaaagaaaaaa

SEQ ID NO: 654404 - RNA, 22 nt, Human
aaaaggcacauugucguuuuca

SEQ ID NO: 654405 - RNA, 18 nt, Human
aaacaaacacucagccuc

SEQ ID NO: 654406 - RNA, 23 nt, Human
aaacaucugcuucacacagugca

SEQ ID NO: 654407 - RNA, 21 nt, Human
aaagaacuuguaucccaaagc

SEQ ID NO: 654408 - RNA, 20 nt, Human
aaagagccaggguuccucag

SEQ ID NO: 654409 - RNA, 22 nt, Human
aaauaagggcucuucagugagg

SEQ ID NO: 654410 - RNA, 20 nt, Human
aacauggugaaacccugucu

SEQ ID NO: 654411 - RNA, 21 nt, Human
aacauggugaaacccugucuc

SEQ ID NO: 654412 - RNA, 21 nt, Human
aaccggcuucucccuagagcc

SEQ ID NO: 654413 - RNA, 20 nt, Human
aagcaaaaguccacaguuac

SEQ ID NO: 654414 - RNA, 18 nt, Human
aagcagauaugugucaau

SEQ ID NO: 654415 - RNA, 20 nt, Human
aagccgcagcccuccuuugg

SEQ ID NO: 654416 - RNA, 21 nt, Human
aaggggcugggagguugggga

SEQ ID NO: 654417 - RNA, 19 nt, Human
aagggucacugggcaggaa

SEQ ID NO: 654418 - RNA, 22 nt, Human
aagucacaacccaggcauccaa

SEQ ID NO: 654419 - RNA, 19 nt, Human
aaugaggguguggggcugg

SEQ ID NO: 654420 - RNA, 20 nt, Human
aauugcuugagcccaggagg

SEQ ID NO: 654421 - RNA, 24 nt, Human
acaaaacaucccugugcgccagau

SEQ ID NO: 654422 - RNA, 24 nt, Human
acccugucucuacaaaaaauacaa

SEQ ID NO: 654423 - RNA, 22 nt, Human
acucugaauccagggcuugcug

SEQ ID NO: 654424 - RNA, 24 nt, Human
acugcacuccagccuaggcaacag

SEQ ID NO: 654425 - RNA, 20 nt, Human
acugcagauccacacacacc

SEQ ID NO: 654426 - RNA, 18 nt, Human
agaaaaaaaagaaaaagg

SEQ ID NO: 654427 - RNA, 22 nt, Human
agaaaaaaaagaaaaaggguaa

SEQ ID NO: 654428 - RNA, 23 nt, Human
agaaaaagaaaaaaaagaaaaag

SEQ ID NO: 654429 - RNA, 21 nt, Human
agaaaaagaaaaagaaaaaaa

SEQ ID NO: 654430 - RNA, 20 nt, Human
agaaacaaacacucagccuc

SEQ ID NO: 654431 - RNA, 21 nt, Human
agaagcuugaaauggcaagga

SEQ ID NO: 654432 - RNA, 19 nt, Human
agaauauucucuaaauuuc

SEQ ID NO: 654433 - RNA, 18 nt, Human
agaccaguccugcaugcg

SEQ ID NO: 654434 - RNA, 19 nt, Human
agagccaggguuccucagg

SEQ ID NO: 654435 - RNA, 18 nt, Human
agagggaagugggagggc

SEQ ID NO: 654436 - RNA, 22 nt, Human
agagguugcagugagccgagau

SEQ ID NO: 654437 - RNA, 24 nt, Human
agagguugcagugagccgagauug

SEQ ID NO: 654438 - RNA, 24 nt, Human
agcacuuugggaggccgaggcagg

SEQ ID NO: 654439 - RNA, 19 nt, Human
agcccaggagguugagacc

SEQ ID NO: 654440 - RNA, 19 nt, Human
agccugggcaacaugguga

SEQ ID NO: 654441 - RNA, 22 nt, Human
agccugggcaacauggugaaac

SEQ ID NO: 654442 - RNA, 24 nt, Human
agccugggcaacauggugaaaccc

SEQ ID NO: 654443 - RNA, 25 nt, Human
agccugggcaacauggugaaacccu

SEQ ID NO: 654444 - RNA, 24 nt, Human
agcuauuugggaggcugagguggg

SEQ ID NO: 654445 - RNA, 23 nt, Human
agcugggcauggugguuugugcc

SEQ ID NO: 654446 - RNA, 19 nt, Human
aggaaaaccuccugcuguu

SEQ ID NO: 654447 - RNA, 24 nt, Human
aggcagaauaacagcaccccaaag

SEQ ID NO: 654448 - RNA, 21 nt, Human
aggcagagguugcagugagcc

SEQ ID NO: 654449 - RNA, 24 nt, Human
aggcagagguugcagugagccgag

SEQ ID NO: 654450 - RNA, 23 nt, Human
aggcaggaggauugcuugagccc

SEQ ID NO: 654451 - RNA, 21 nt, Human
aggccgaggcaggaggauugc

SEQ ID NO: 654452 - RNA, 24 nt, Human
aggccgaggcaggaggauugcuug

SEQ ID NO: 654453 - RNA, 21 nt, Human
aggcggugcauuuccaaggug

SEQ ID NO: 654454 - RNA, 24 nt, Human
aggcugaggugggagaauugcuug

SEQ ID NO: 654455 - RNA, 21 nt, Human
agggaccucagguaggcuccu

SEQ ID NO: 654456 - RNA, 24 nt, Human
agggaccucagguaggcuccuugg

SEQ ID NO: 654457 - RNA, 19 nt, Human
aguucuguugaggguaggc

SEQ ID NO: 654458 - RNA, 19 nt, Human
auaagggcucuucagugag

SEQ ID NO: 654459 - RNA, 21 nt, Human
auaauaaaaaggcacauuguc

SEQ ID NO: 654460 - RNA, 24 nt, Human
augaccacagcauuagagaccagu

SEQ ID NO: 654461 - RNA, 19 nt, Human
auugcuugagcccaggagg

SEQ ID NO: 654462 - RNA, 19 nt, Human
caaaauuagcugggcaugg

SEQ ID NO: 654463 - RNA, 22 nt, Human
caacagaaugagauccugucuc

SEQ ID NO: 654464 - RNA, 22 nt, Human
caacauggugaaacccugucuc

SEQ ID NO: 654465 - RNA, 24 nt, Human
caacauggugaaacccugucucua

SEQ ID NO: 654466 - RNA, 22 nt, Human
caagcuaaacaaaacaucccug

SEQ ID NO: 654467 - RNA, 18 nt, Human
caaggaaccggcuucucc

SEQ ID NO: 654468 - RNA, 21 nt, Human
caaggaaccggcuucucccua

SEQ ID NO: 654469 - RNA, 24 nt, Human
cacaucuguaaucccagcacuuug

SEQ ID NO: 654470 - RNA, 21 nt, Human
caccuaaaaaguaucugcaau

SEQ ID NO: 654471 - RNA, 21 nt, Human
caccugggggacaggcacacg

SEQ ID NO: 654472 - RNA, 19 nt, Human
cacugcacuccagccuagg

SEQ ID NO: 654473 - RNA, 21 nt, Human
cacugcacuccagccuaggca

SEQ ID NO: 654474 - RNA, 22 nt, Human
cacugcacuccagccuaggcaa

SEQ ID NO: 654475 - RNA, 23 nt, Human
cacugcacuccagccuaggcaac

SEQ ID NO: 654476 - RNA, 24 nt, Human
cacugcacuccagccuaggcaaca

SEQ ID NO: 654477 - RNA, 23 nt, Human
cagaauaacagcaccccaaagau

SEQ ID NO: 654478 - RNA, 26 nt, Human
cagaauaacagcaccccaaagauguu

SEQ ID NO: 654479 - RNA, 23 nt, Human
cagaugaaaguucuguugagggu

SEQ ID NO: 654480 - RNA, 24 nt, Human
cagcacuuugggaggccgaggcag

SEQ ID NO: 654481 - RNA, 25 nt, Human
cagcacuuugggaggccgaggcagg

SEQ ID NO: 654482 - RNA, 24 nt, Human
cagcuauuugggaggcugaggugg

SEQ ID NO: 654483 - RNA, 19 nt, Human
caggaccaccaaauaaaua

SEQ ID NO: 654484 - RNA, 24 nt, Human
caggcgagggauggaaaacugcag

SEQ ID NO: 654485 - RNA, 19 nt, Human
cagggcaccuaguccugcu

SEQ ID NO: 654486 - RNA, 21 nt, Human
caguagaaacaaacacucaac

SEQ ID NO: 654487 - RNA, 21 nt, Human
caguagaaacaaacacucagc

SEQ ID NO: 654488 - RNA, 19 nt, Human
cagucugcuaaccuuuacc

SEQ ID NO: 654489 - RNA, 20 nt, Human
cagugccauugcugcagaag

SEQ ID NO: 654490 - RNA, 23 nt, Human
caguugacucuuccuugagaccu

SEQ ID NO: 654491 - RNA, 19 nt, Human
cauaaucccucuccuucca

SEQ ID NO: 654492 - RNA, 19 nt, Human
cauaggcaacgccaagggc

SEQ ID NO: 654493 - RNA, 18 nt, Human
cauggaaacuugaggaaa

SEQ ID NO: 654494 - RNA, 20 nt, Human
ccaaaaggacaugggccuga

SEQ ID NO: 654495 - RNA, 19 nt, Human
ccacugcacuccagccuag

SEQ ID NO: 654496 - RNA, 20 nt, Human
ccacugcacuccagccuagg

SEQ ID NO: 654497 - RNA, 20 nt, Human
ccacugcacuccagccuagg

SEQ ID NO: 654498 - RNA, 21 nt, Human
ccacugcacuccagccuaggc

SEQ ID NO: 654499 - RNA, 24 nt, Human
ccacugcacuccagccuaggcaac

SEQ ID NO: 654500 - RNA, 21 nt, Human
ccacuggagccugggaaugca

SEQ ID NO: 654501 - RNA, 21 nt, Human
ccagaucuucugaucuggguu

SEQ ID NO: 654502 - RNA, 22 nt, Human
ccaggaggcagagguugcagug

SEQ ID NO: 654503 - RNA, 24 nt, Human
ccaguccugcaugcgcuggccuuc

SEQ ID NO: 654504 - RNA, 26 nt, Human
ccauugcugcagaagguuccgauccu

SEQ ID NO: 654505 - RNA, 22 nt, Human
cccuuuaugcagggucagcauc

SEQ ID NO: 654506 - RNA, 18 nt, Human
ccugcuguuccuucugua

SEQ ID NO: 654507 - RNA, 22 nt, Human
ccugggcaacauggugaaaccc

SEQ ID NO: 654508 - RNA, 24 nt, Human
ccugggcaacauggugaaacccug

SEQ ID NO: 654509 - RNA, 23 nt, Human
cgaaccgaccuagagaaucagga

SEQ ID NO: 654510 - RNA, 25 nt, Human
cgaggcaggaggauugcuugagccc

SEQ ID NO: 654511 - RNA, 19 nt, Human
cgauccugaccacgguggc

SEQ ID NO: 654512 - RNA, 24 nt, Human
cgcacagccuaaguugaggagcac

SEQ ID NO: 654513 - RNA, 19 nt, Human
cgccacugcacuccagccu

SEQ ID NO: 654514 - RNA, 24 nt, Human
cgccacugcacuccagccuaggca

SEQ ID NO: 654515 - RNA, 24 nt, Human
cucacaucuguaaucccagcacuu

SEQ ID NO: 654516 - RNA, 19 nt, Human
cucaggcgagggauggaaa

SEQ ID NO: 654517 - RNA, 22 nt, Human
cuccccaaaaggacaugggccu

SEQ ID NO: 654518 - RNA, 22 nt, Human
cugggaaaccggggccucuacu

SEQ ID NO: 654519 - RNA, 24 nt, Human
cugggcaacauggugaaacccugu

SEQ ID NO: 654520 - RNA, 21 nt, Human
cuguaaucccagcacuuuggg

SEQ ID NO: 654521 - RNA, 20 nt, Human
cuuccuggugggcuuuguaa

SEQ ID NO: 654522 - RNA, 18 nt, Human
cuuuaugcagggucagca

SEQ ID NO: 654523 - RNA, 20 nt, Human
gaaaccggggccucuacuga

SEQ ID NO: 654524 - RNA, 20 nt, Human
gaacaaguugaggcggugca

SEQ ID NO: 654525 - RNA, 20 nt, Human
gaaccgaccuagagaaucag

SEQ ID NO: 654526 - RNA, 18 nt, Human
gaagcaaaaguccacagu

SEQ ID NO: 654527 - RNA, 19 nt, Human
gaagcugaaccuccccaaa

SEQ ID NO: 654528 - RNA, 21 nt, Human
gaaggaaguuuuugccgcaga

SEQ ID NO: 654529 - RNA, 19 nt, Human
gacaagcuauaacauaauc

SEQ ID NO: 654530 - RNA, 20 nt, Human
gacagcaucugcugagccca

SEQ ID NO: 654531 - RNA, 21 nt, Human
gaccacgguggcaucgauucg

SEQ ID NO: 654532 - RNA, 23 nt, Human
gagauugcgccacugcacuccag

SEQ ID NO: 654533 - RNA, 24 nt, Human
gaggugggagaauugcuugagccc

SEQ ID NO: 654534 - RNA, 19 nt, Human
gaguagggaccucagguag

SEQ ID NO: 654535 - RNA, 18 nt, Human
gagucaguggcaggaagg

SEQ ID NO: 654536 - RNA, 19 nt, Human
gcagggcaccuaguccugc

SEQ ID NO: 654537 - RNA, 18 nt, Human
gcugcagcuaggagaacc

SEQ ID NO: 654538 - RNA, 20 nt, Human
gcugcagcuaggagaaccgc

SEQ ID NO: 654539 - RNA, 19 nt, Human
gcuggaugcgguggcucac

SEQ ID NO: 654540 - RNA, 22 nt, Human
ggacagauuguaaauuauuccc

SEQ ID NO: 654541 - RNA, 22 nt, Human
ggaggcagagguugcagugagc

SEQ ID NO: 654542 - RNA, 24 nt, Human
ggaugcgguggcucacaucuguaa

SEQ ID NO: 654543 - RNA, 23 nt, Human
ggcaagccucuguuuaacacucu

SEQ ID NO: 654544 - RNA, 19 nt, Human
ggcgguguccaggaaaacc

SEQ ID NO: 654545 - RNA, 21 nt, Human
ggcucacaucuguaaucccag

SEQ ID NO: 654546 - RNA, 20 nt, Human
ggcugggagguuggggaaug

SEQ ID NO: 654547 - RNA, 22 nt, Human
ggcugggccccuucacugaggc

SEQ ID NO: 654548 - RNA, 18 nt, Human
gggacacagugccauugc

SEQ ID NO: 654549 - RNA, 19 nt, Human
gggacugugcugacaagcu

SEQ ID NO: 654550 - RNA, 20 nt, Human
gggauggaaaacugcagcuc

SEQ ID NO: 654551 - RNA, 19 nt, Human
gggcuugugcuuguuccag

SEQ ID NO: 654552 - RNA, 22 nt, Human
gggcuuuaaagaaaagagccag

SEQ ID NO: 654553 - RNA, 20 nt, Human
ggggcugggagguuggggaa

SEQ ID NO: 654554 - RNA, 20 nt, Human
gguaaugugagcacacauug

SEQ ID NO: 654555 - RNA, 20 nt, Human
gguggaaugcagggcaccua

SEQ ID NO: 654556 - RNA, 23 nt, Human
gguggcucacaucuguaauccca

SEQ ID NO: 654557 - RNA, 24 nt, Human
gguguggggcuggaugcgguggcu

SEQ ID NO: 654558 - RNA, 18 nt, Human
guaagucaaagagggaag

SEQ ID NO: 654559 - RNA, 21 nt, Human
gucagcaucucggcucacaag

SEQ ID NO: 654560 - RNA, 21 nt, Human
gugaaguuggcgguguccagg

SEQ ID NO: 654561 - RNA, 23 nt, Human
guggcucacaucuguaaucccag

SEQ ID NO: 654562 - RNA, 23 nt, Human
guggggcuggaugcgguggcuca

SEQ ID NO: 654563 - RNA, 19 nt, Human
guugcagugagccgagauu

SEQ ID NO: 654564 - RNA, 22 nt, Human
uaaacaaaacaucccugugcgc

SEQ ID NO: 654565 - RNA, 23 nt, Human
uaaauauccuauccucuggaaag

SEQ ID NO: 654566 - RNA, 21 nt, Human
uaacacucugaauccagggcu

SEQ ID NO: 654567 - RNA, 26 nt, Human
uaacagcaccccaaagauguucuggu

SEQ ID NO: 654568 - RNA, 20 nt, Human
uaagacagcaucugcugagc

SEQ ID NO: 654569 - RNA, 24 nt, Human
uaaggaaggccaaucccaccuugg

SEQ ID NO: 654570 - RNA, 20 nt, Human
uaccaaggccauguccggug

SEQ ID NO: 654571 - RNA, 18 nt, Human
uagaaacaaacacucagc

SEQ ID NO: 654572 - RNA, 20 nt, Human
uagccgaagcacuuaaacag

SEQ ID NO: 654573 - RNA, 19 nt, Human
ucaaaugaagaggaaagaa

SEQ ID NO: 654574 - RNA, 24 nt, Human
ucaaugcugcucaaacacacacau

SEQ ID NO: 654575 - RNA, 27 nt, Human
ucacauuaaaaaaaaaaagaaaaagaa

SEQ ID NO: 654576 - RNA, 18 nt, Human
ucacugaggcacagcucc

SEQ ID NO: 654577 - RNA, 18 nt, Human
ucacugggcaggaaccag

SEQ ID NO: 654578 - RNA, 20 nt, Human
ucagggacauccauuuugga

SEQ ID NO: 654579 - RNA, 20 nt, Human
ucaguagaagucacaaccca

SEQ ID NO: 654580 - RNA, 20 nt, Human
ucccaaagccuggcuuucug

SEQ ID NO: 654581 - RNA, 19 nt, Human
uccccaaaaggacaugggc

SEQ ID NO: 654582 - RNA, 20 nt, Human
uccccaggacuauaagcuaa

SEQ ID NO: 654583 - RNA, 18 nt, Human
ucccuagagccuucagaa

SEQ ID NO: 654584 - RNA, 23 nt, Human
ucccuucugugcaaugaccacag

SEQ ID NO: 654585 - RNA, 23 nt, Human
uccgauccugaccacgguggcau

SEQ ID NO: 654586 - RNA, 22 nt, Human
uccuggaucuuccuggugggcu

SEQ ID NO: 654587 - RNA, 19 nt, Human
uccuugagaccuuucccuu

SEQ ID NO: 654588 - RNA, 22 nt, Human
ucgagaauggagggcuagggcu

SEQ ID NO: 654589 - RNA, 21 nt, Human
ugaaaguucuguugaggguag

SEQ ID NO: 654590 - RNA, 20 nt, Human
ugaaauggcaaggaaccggc

SEQ ID NO: 654591 - RNA, 22 nt, Human
ugaaauggcaaggaaccggcuu

SEQ ID NO: 654592 - RNA, 19 nt, Human
ugaauccagggcuugcugc

SEQ ID NO: 654593 - RNA, 20 nt, Human
ugacucaggccucucuccuc

SEQ ID NO: 654594 - RNA, 22 nt, Human
ugagcaaugugaaguuggcggu

SEQ ID NO: 654595 - RNA, 21 nt, Human
ugagcagugggcuggcaugca

SEQ ID NO: 654596 - RNA, 23 nt, Human
ugagcccaggagguugagaccag

SEQ ID NO: 654597 - RNA, 19 nt, Human
ugagccccagcauggccag

SEQ ID NO: 654598 - RNA, 22 nt, Human
ugagccgagauugcgccacugc

SEQ ID NO: 654599 - RNA, 23 nt, Human
ugaggugggagaauugcuugagc

SEQ ID NO: 654600 - RNA, 24 nt, Human
ugaggugggagaauugcuugagcc

SEQ ID NO: 654601 - RNA, 19 nt, Human
ugcaaugaccacagcauua

SEQ ID NO: 654602 - RNA, 22 nt, Human
ugcaaugaccacagcauuagag

SEQ ID NO: 654603 - RNA, 23 nt, Human
ugcacggcaucaaaugaagagga

SEQ ID NO: 654604 - RNA, 21 nt, Human
ugcagggggccacuguuuggu

SEQ ID NO: 654605 - RNA, 24 nt, Human
ugccagugaucccagcuauuuggg

SEQ ID NO: 654606 - RNA, 18 nt, Human
uggaaaguguucaagagg

SEQ ID NO: 654607 - RNA, 23 nt, Human
uggaaggggcugggagguugggg

SEQ ID NO: 654608 - RNA, 21 nt, Human
uggaaugcagggcaccuaguc

SEQ ID NO: 654609 - RNA, 24 nt, Human
uggaaugcagggcaccuaguccug

SEQ ID NO: 654610 - RNA, 26 nt, Human
uggaaugcagggcaccuaguccugac

SEQ ID NO: 654611 - RNA, 22 nt, Human
uggaauucugauccccaggacu

SEQ ID NO: 654612 - RNA, 19 nt, Human
uggcaggaaggugugguag

SEQ ID NO: 654613 - RNA, 21 nt, Human
uggcucacaucuguaauccca

SEQ ID NO: 654614 - RNA, 22 nt, Human
uggcucacaucuguaaucccag

SEQ ID NO: 654615 - RNA, 24 nt, Human
uggcucacaucuguaaucccagca

SEQ ID NO: 654616 - RNA, 20 nt, Human
ugggaggccgaggcaggagg

SEQ ID NO: 654617 - RNA, 22 nt, Human
ugggaggccgaggcaggaggau

SEQ ID NO: 654618 - RNA, 22 nt, Human
ugggaggcugaggugggagaau

SEQ ID NO: 654619 - RNA, 24 nt, Human
ugggaggcugaggugggagaauug

SEQ ID NO: 654620 - RNA, 24 nt, Human
ugggcaacauggugaaacccuguc

SEQ ID NO: 654621 - RNA, 21 nt, Human
ugggcagcucucacccggacc

SEQ ID NO: 654622 - RNA, 21 nt, Human
ugggcuuuaaagaaaagagcc

SEQ ID NO: 654623 - RNA, 21 nt, Human
uggggaccccagugagaguag

SEQ ID NO: 654624 - RNA, 22 nt, Human
uggggcuggaugcgguggcuca

SEQ ID NO: 654625 - RNA, 20 nt, Human
uggugaccuggugaagugga

SEQ ID NO: 654626 - RNA, 22 nt, Human
ugguuugugccagugaucccag

SEQ ID NO: 654627 - RNA, 24 nt, Human
ugguuugugccagugaucccagcu

SEQ ID NO: 654628 - RNA, 21 nt, Human
uguaaauuauucccaccaccu

SEQ ID NO: 654629 - RNA, 20 nt, Human
uguagccucuccugugggag

SEQ ID NO: 654630 - RNA, 21 nt, Human
ugucaugacuguauccagauu

SEQ ID NO: 654631 - RNA, 24 nt, Human
ugugccagugaucccagcuauuug

SEQ ID NO: 654632 - RNA, 23 nt, Human
ugugggcuguggugaccugguga

SEQ ID NO: 654633 - RNA, 22 nt, Human
uguuguuuuuaagcuaccaagu

SEQ ID NO: 654634 - RNA, 24 nt, Human
uuaaagaaaagagccaggguuccu

SEQ ID NO: 654635 - RNA, 21 nt, Human
uuacaggcuggcuaaccgcac

SEQ ID NO: 654636 - RNA, 24 nt, Human
uuagcugggcauggugguuugugc

SEQ ID NO: 654637 - RNA, 24 nt, Human
uucaaauaagggcucuucagugag

SEQ ID NO: 654638 - RNA, 20 nt, Human
uucaacaaauggcacuucac

SEQ ID NO: 654639 - RNA, 24 nt, Human
uucucuuauugcuaggacuauagg

SEQ ID NO: 654640 - RNA, 19 nt, Human
uugauccgggacacagugc

SEQ ID NO: 654641 - RNA, 18 nt, Human
uugcagugagccgagauu

SEQ ID NO: 654642 - RNA, 20 nt, Human
uugcagugagccgagauugc

SEQ ID NO: 654643 - RNA, 22 nt, Human
uugcagugagccgagauugcgc

SEQ ID NO: 654644 - RNA, 18 nt, Human
uugcuugagcccaggagg

SEQ ID NO: 654645 - RNA, 24 nt, Human
uugcuugagcccaggaggcagagg

SEQ ID NO: 654646 - RNA, 20 nt, Human
uugggaggccgaggcaggag

SEQ ID NO: 654647 - RNA, 23 nt, Human
uugggaggcugaggugggagaau

SEQ ID NO: 654648 - RNA, 24 nt, Human
uugguacauuuguuuauuuaaagc

SEQ ID NO: 654649 - RNA, 19 nt, Human
uuuccagugaagcacugca

SEQ ID NO: 654650 - RNA, 19 nt, Human
aagcaaaaccagaaagugc

SEQ ID NO: 654651 - RNA, 23 nt, Human
aagcagaaaucuggagggacccc

SEQ ID NO: 654652 - RNA, 20 nt, Human
acaagcaaaaccagaaagug

SEQ ID NO: 654653 - RNA, 23 nt, Human
acaaugaagaaaccacuacuuua

SEQ ID NO: 654654 - RNA, 18 nt, Human
acuccagagcaauaaaau

SEQ ID NO: 654655 - RNA, 21 nt, Human
agaaaaacaagcaaaaccaga

SEQ ID NO: 654656 - RNA, 22 nt, Human
agaaaaacaagcaaaaccagaa

SEQ ID NO: 654657 - RNA, 18 nt, Human
agaaagugcuuggaaagu

SEQ ID NO: 654658 - RNA, 21 nt, Human
auucaggucauacaagggcca

SEQ ID NO: 654659 - RNA, 18 nt, Human
caaaaaugcuguauaaac

SEQ ID NO: 654660 - RNA, 25 nt, Human
caaaaccagaaagugcuuggaaagu

SEQ ID NO: 654661 - RNA, 20 nt, Human
cacacuguuuacuugcugcc

SEQ ID NO: 654662 - RNA, 20 nt, Human
cacuguaugggucacacaaa

SEQ ID NO: 654663 - RNA, 21 nt, Human
cagaacauaacaguauaccag

SEQ ID NO: 654664 - RNA, 19 nt, Human
caggucauacaagggccaa

SEQ ID NO: 654665 - RNA, 19 nt, Human
ccaacuaguccaaccuggc

SEQ ID NO: 654666 - RNA, 24 nt, Human
ccaccgcuugguccugcagacuga

SEQ ID NO: 654667 - RNA, 23 nt, Human
ccaguauaagaccuucguagggc

SEQ ID NO: 654668 - RNA, 18 nt, Human
ccccaacuaguccaaccu

SEQ ID NO: 654669 - RNA, 21 nt, Human
cgagcaaacaacuccaaauau

SEQ ID NO: 654670 - RNA, 23 nt, Human
cuaaauguuuuuuacaacacugu

SEQ ID NO: 654671 - RNA, 24 nt, Human
cuagaaaaacaagcaaaaccagaa

SEQ ID NO: 654672 - RNA, 30 nt, Human
gaaaaacaagcaaaaccagaaagugcuugg

SEQ ID NO: 654673 - RNA, 20 nt, Human
gagcaaacaacuccaaauau

SEQ ID NO: 654674 - RNA, 21 nt, Human
gcugaaauuugagaacuucau

SEQ ID NO: 654675 - RNA, 18 nt, Human
ggaaacaaugaagaaacc

SEQ ID NO: 654676 - RNA, 23 nt, Human
ggaaacaaugaagaaaccacuac

SEQ ID NO: 654677 - RNA, 20 nt, Human
ggugaggaaacaaugaagaa

SEQ ID NO: 654678 - RNA, 23 nt, Human
uaaaacccuacaaaaaugcuggu

SEQ ID NO: 654679 - RNA, 20 nt, Human
uaaaauaauccacaugcuga

SEQ ID NO: 654680 - RNA, 20 nt, Human
uaacaguauaccagagguug

SEQ ID NO: 654681 - RNA, 18 nt, Human
uaagggaaaaguggugag

SEQ ID NO: 654682 - RNA, 20 nt, Human
uaagggaaaaguggugagga

SEQ ID NO: 654683 - RNA, 22 nt, Human
uagaaaaacaagcaaaaccaga

SEQ ID NO: 654684 - RNA, 24 nt, Human
uagaauguuagugcaacucaagua

SEQ ID NO: 654685 - RNA, 22 nt, Human
uagccccauuuuuuagaauaau

SEQ ID NO: 654686 - RNA, 21 nt, Human
ucacacaaaacacauccauag

SEQ ID NO: 654687 - RNA, 25 nt, Human
ucagcaagcgguggcuuaugugagu

SEQ ID NO: 654688 - RNA, 23 nt, Human
uccacaugcugaaauuugagaac

SEQ ID NO: 654689 - RNA, 20 nt, Human
ucugaacuuuuucaauagca

SEQ ID NO: 654690 - RNA, 20 nt, Human
ucuggcuugauguagucuuu

SEQ ID NO: 654691 - RNA, 22 nt, Human
ucuuuauaacugcuuaccacuu

SEQ ID NO: 654692 - RNA, 20 nt, Human
ugaaugcaauuuaaaacccu

SEQ ID NO: 654693 - RNA, 21 nt, Human
ugaggaaacaaugaagaaacc

SEQ ID NO: 654694 - RNA, 23 nt, Human
ugccaggaaagaacaaaggccuc

SEQ ID NO: 654695 - RNA, 19 nt, Human
ugcugaaauuugagaacuu

SEQ ID NO: 654696 - RNA, 23 nt, Human
uggcaaaguggagagcacaaggc

SEQ ID NO: 654697 - RNA, 22 nt, Human
uggcagugguacuguggcaaag

SEQ ID NO: 654698 - RNA, 19 nt, Human
uggcuguaaauuucgagca

SEQ ID NO: 654699 - RNA, 24 nt, Human
ugguaacaaaauaaaaaaaugacu

SEQ ID NO: 654700 - RNA, 21 nt, Human
uuaaaacccuacaaaaaugcu

SEQ ID NO: 654701 - RNA, 23 nt, Human
uuaagggaaaaguggugaggaaa

SEQ ID NO: 654702 - RNA, 25 nt, Human
uucacaaucacacuguuuacuugcu

SEQ ID NO: 654703 - RNA, 21 nt, Human
uucaccuugauugaaaacaac

SEQ ID NO: 654704 - RNA, 30 nt, Human
uuucacaaucacacuguuuacuugcugccu

SEQ ID NO: 654705 - RNA, 23 nt, Human
uuuuuuuuuuuuuuuuuacuugg

SEQ ID NO: 654706 - RNA, 25 nt, Human
uuuuuuuuuuuuuuuuuuuacuugg

SEQ ID NO: 654707 - RNA, 20 nt, Human
aaaaacagcaagaaaauggc

SEQ ID NO: 654708 - RNA, 25 nt, Human
aaacacuaaucaccuaaaucauuua

SEQ ID NO: 654709 - RNA, 18 nt, Human
aacaaaaacagcaagaaa

SEQ ID NO: 654710 - RNA, 25 nt, Human
accuaaaucauuuaaccacuaacau

SEQ ID NO: 654711 - RNA, 23 nt, Human
caacuggcuucagauaauucuca

SEQ ID NO: 654712 - RNA, 18 nt, Human
caagaauacuucauacug

SEQ ID NO: 654713 - RNA, 27 nt, Human
cacagcccaaaauaauaccccuuuuuc

SEQ ID NO: 654714 - RNA, 21 nt, Human
cagcccaaaauaauaccccuu

SEQ ID NO: 654715 - RNA, 23 nt, Human
caggaaaacagcugaauacaaug

SEQ ID NO: 654716 - RNA, 23 nt, Human
caucucaauuuccuuagucacag

SEQ ID NO: 654717 - RNA, 22 nt, Human
ccaucucaauuuccuuagucac

SEQ ID NO: 654718 - RNA, 22 nt, Human
cuaaagcagagaaccaugugcc

SEQ ID NO: 654719 - RNA, 19 nt, Human
cucaagaaacgugaagagc

SEQ ID NO: 654720 - RNA, 22 nt, Human
gcuaacugugcaaaagacacca

SEQ ID NO: 654721 - RNA, 18 nt, Human
ggaaaacagcugaauaca

SEQ ID NO: 654722 - RNA, 26 nt, Human
uaaacacuaaucaccuaaaucauuua

SEQ ID NO: 654723 - RNA, 21 nt, Human
uaaagcagagaaccaugugcc

SEQ ID NO: 654724 - RNA, 23 nt, Human
uaguaaacacuaaucaccuaaau

SEQ ID NO: 654725 - RNA, 18 nt, Human
uaguuguacauccaucuc

SEQ ID NO: 654726 - RNA, 19 nt, Human
uauccagaagcaaaggcuc

SEQ ID NO: 654727 - RNA, 18 nt, Human
uccaucucaauuuccuua

SEQ ID NO: 654728 - RNA, 23 nt, Human
ugcaguaaaacacuuacauacau

SEQ ID NO: 654729 - RNA, 21 nt, Human
ugguaccaucagcuaauauaa

SEQ ID NO: 654730 - RNA, 23 nt, Human
ugugcaaaagacaccaauucaau

SEQ ID NO: 654731 - RNA, 23 nt, Human
uuguacauccaucucaauuuccu

SEQ ID NO: 654732 - RNA, 18 nt, Human
uuuuuuuuuuuuuuuuug

SEQ ID NO: 654733 - RNA, 24 nt, Human
uuuuuuuuuuuuuuuuugcaauuu

SEQ ID NO: 654734 - RNA, 28 nt, Human
uuuuuuuuuuuuuuuuuugcaauuuuaa

SEQ ID NO: 654735 - RNA, 24 nt, Human
aaagugcagggauuacaggcauga

SEQ ID NO: 654736 - RNA, 22 nt, Human
aacaucugaaccagcucuggcu

SEQ ID NO: 654737 - RNA, 22 nt, Human
aaguccccccacugccccgauu

SEQ ID NO: 654738 - RNA, 20 nt, Human
aaucaaauggccugagcccc

SEQ ID NO: 654739 - RNA, 18 nt, Human
acaggguuucaccauguu

SEQ ID NO: 654740 - RNA, 21 nt, Human
acaggguuucaccauguuggc

SEQ ID NO: 654741 - RNA, 24 nt, Human
acaggguuucaccauguuggccag

SEQ ID NO: 654742 - RNA, 22 nt, Human
accauguuggccaggcuggucu

SEQ ID NO: 654743 - RNA, 26 nt, Human
acccaucuuauguccucaagcagccu

SEQ ID NO: 654744 - RNA, 24 nt, Human
agcccugaagccucuucuguaccc

SEQ ID NO: 654745 - RNA, 24 nt, Human
agcgauucuccugccucagccucc

SEQ ID NO: 654746 - RNA, 20 nt, Human
agcggggcagccgggaccuc

SEQ ID NO: 654747 - RNA, 22 nt, Human
agcugucuggccucacaucccu

SEQ ID NO: 654748 - RNA, 19 nt, Human
aggcagaaucaaauggccu

SEQ ID NO: 654749 - RNA, 18 nt, Human
aggcaggauguacuggaa

SEQ ID NO: 654750 - RNA, 22 nt, Human
aggcaggauguacuggaaucua

SEQ ID NO: 654751 - RNA, 22 nt, Human
agggauuacaggcaugagccac

SEQ ID NO: 654752 - RNA, 24 nt, Human
agggauuacaggcaugagccaccg

SEQ ID NO: 654753 - RNA, 20 nt, Human
aggugcccaccaccacgccc

SEQ ID NO: 654754 - RNA, 22 nt, Human
aguagagacaggguuucaccau

SEQ ID NO: 654755 - RNA, 18 nt, Human
aguagcugggauuacagg

SEQ ID NO: 654756 - RNA, 20 nt, Human
agugcaauggugugaucucg

SEQ ID NO: 654757 - RNA, 24 nt, Human
agugcaauggugugaucucggcuc

SEQ ID NO: 654758 - RNA, 22 nt, Human
caaacuccaguuuggagacuga

SEQ ID NO: 654759 - RNA, 24 nt, Human
caaagugcagggauuacaggcaug

SEQ ID NO: 654760 - RNA, 20 nt, Human
caaccuccaccucccggguu

SEQ ID NO: 654761 - RNA, 23 nt, Human
caaccuccaccucccggguucaa

SEQ ID NO: 654762 - RNA, 22 nt, Human
caagcgauucuccugccucagc

SEQ ID NO: 654763 - RNA, 23 nt, Human
caagggaccuggacauguuauuu

SEQ ID NO: 654764 - RNA, 19 nt, Human
cacaacaucugcugagccc

SEQ ID NO: 654765 - RNA, 21 nt, Human
caccauguuggccaggcuggu

SEQ ID NO: 654766 - RNA, 23 nt, Human
caccauguuggccaggcuggucu

SEQ ID NO: 654767 - RNA, 24 nt, Human
caccauguuggccaggcuggucuu

SEQ ID NO: 654768 - RNA, 27 nt, Human
caccauguuggccaggcuggucuugaa

SEQ ID NO: 654769 - RNA, 20 nt, Human
caccgcauccggccuccagc

SEQ ID NO: 654770 - RNA, 21 nt, Human
cacugcaaccuccaccucccg

SEQ ID NO: 654771 - RNA, 23 nt, Human
cacugcaaccuccaccucccggg

SEQ ID NO: 654772 - RNA, 22 nt, Human
cagcucuggcuuccuuuagucc

SEQ ID NO: 654773 - RNA, 28 nt, Human
cagcugcagcauucuuaccaagggaccu

SEQ ID NO: 654774 - RNA, 20 nt, Human
caggcagcccugaacccacc

SEQ ID NO: 654775 - RNA, 24 nt, Human
caggguuucaccauguuggccagg

SEQ ID NO: 654776 - RNA, 19 nt, Human
caggugcccaccaccacgc

SEQ ID NO: 654777 - RNA, 21 nt, Human
caggugcccaccaccacgccc

SEQ ID NO: 654778 - RNA, 22 nt, Human
cauccaugugugaaauuggggg

SEQ ID NO: 654779 - RNA, 24 nt, Human
cauguuggccaggcuggucuugaa

SEQ ID NO: 654780 - RNA, 24 nt, Human
ccaaagugcagggauuacaggcau

SEQ ID NO: 654781 - RNA, 24 nt, Human
ccaccucccggguucaagcgauuc

SEQ ID NO: 654782 - RNA, 21 nt, Human
cccaccaccacgcccagcuaa

SEQ ID NO: 654783 - RNA, 26 nt, Human
cccagcugcagcauucuuaccaaggg

SEQ ID NO: 654784 - RNA, 20 nt, Human
cccaggcuggagugcaaugg

SEQ ID NO: 654785 - RNA, 18 nt, Human
ccccuggguuuggccggg

SEQ ID NO: 654786 - RNA, 23 nt, Human
cccgaguagcugggauuacaggu

SEQ ID NO: 654787 - RNA, 24 nt, Human
cccgaguagcugggauuacaggug

SEQ ID NO: 654788 - RNA, 20 nt, Human
cccggguucaagcgauucuc

SEQ ID NO: 654789 - RNA, 23 nt, Human
cccggguucaagcgauucuccug

SEQ ID NO: 654790 - RNA, 19 nt, Human
cccuggguuuggccgggcu

SEQ ID NO: 654791 - RNA, 21 nt, Human
ccgaguagcugggauuacagg

SEQ ID NO: 654792 - RNA, 20 nt, Human
ccucacaucccucagggucc

SEQ ID NO: 654793 - RNA, 24 nt, Human
ccucccggguucaagcgauucucc

SEQ ID NO: 654794 - RNA, 22 nt, Human
ccugaagccucuucuguaccca

SEQ ID NO: 654795 - RNA, 25 nt, Human
ccugaagccucuucuguacccaucu

SEQ ID NO: 654796 - RNA, 19 nt, Human
ccugaccucucagggcagu

SEQ ID NO: 654797 - RNA, 19 nt, Human
cggccaccaaggagcuguc

SEQ ID NO: 654798 - RNA, 24 nt, Human
cucacugcaaccuccaccucccgg

SEQ ID NO: 654799 - RNA, 23 nt, Human
cucagccucccgaguagcuggga

SEQ ID NO: 654800 - RNA, 22 nt, Human
cuccugccucagccucccgagu

SEQ ID NO: 654801 - RNA, 21 nt, Human
cugaagccucuucuguaccca

SEQ ID NO: 654802 - RNA, 24 nt, Human
cugaccucaggcaucccaaagugc

SEQ ID NO: 654803 - RNA, 18 nt, Human
cugcaaccuccaccuccc

SEQ ID NO: 654804 - RNA, 24 nt, Human
cugcaaccuccaccucccggguuc

SEQ ID NO: 654805 - RNA, 23 nt, Human
cugccucagccucccgaguagcu

SEQ ID NO: 654806 - RNA, 21 nt, Human
cuguacccaucuuauguccuc

SEQ ID NO: 654807 - RNA, 30 nt, Human
cuuccugcuaaaaucucuuuccuucuggaa

SEQ ID NO: 654808 - RNA, 24 nt, Human
cuugucgcccaggcuggagugcaa

SEQ ID NO: 654809 - RNA, 21 nt, Human
cuuguguuucuaaccaugaag

SEQ ID NO: 654810 - RNA, 18 nt, Human
gaacaggccagccguucu

SEQ ID NO: 654811 - RNA, 18 nt, Human
gaaguccccccacugccc

SEQ ID NO: 654812 - RNA, 23 nt, Human
gaaguccccccacugccccgauu

SEQ ID NO: 654813 - RNA, 20 nt, Human
gagaagaaaggagaugaugg

SEQ ID NO: 654814 - RNA, 23 nt, Human
gaguccaaggugggcccgggccc

SEQ ID NO: 654815 - RNA, 18 nt, Human
gauuacaggcaugagcca

SEQ ID NO: 654816 - RNA, 22 nt, Human
gauuacaggcaugagccaccgc

SEQ ID NO: 654817 - RNA, 23 nt, Human
gauuacaggcaugagccaccgca

SEQ ID NO: 654818 - RNA, 19 nt, Human
gcaugugugggccacggca

SEQ ID NO: 654819 - RNA, 20 nt, Human
gcccaggcuggagugcaaug

SEQ ID NO: 654820 - RNA, 19 nt, Human
gccccucccaggagcagcg

SEQ ID NO: 654821 - RNA, 28 nt, Human
gcccugaagccucuucuguacccaucuu

SEQ ID NO: 654822 - RNA, 19 nt, Human
gccgggaccucaguugucc

SEQ ID NO: 654823 - RNA, 20 nt, Human
gccucagccucccgaguagc

SEQ ID NO: 654824 - RNA, 24 nt, Human
gccugagccccucccaggagcagc

SEQ ID NO: 654825 - RNA, 18 nt, Human
gccugggcucacucccag

SEQ ID NO: 654826 - RNA, 24 nt, Human
gcgauucuccugccucagccuccc

SEQ ID NO: 654827 - RNA, 21 nt, Human
gcucuugucgcccaggcugga

SEQ ID NO: 654828 - RNA, 24 nt, Human
gcucuugucgcccaggcuggagug

SEQ ID NO: 654829 - RNA, 30 nt, Human
gcuggagugcaauggugugaucucggcucc

SEQ ID NO: 654830 - RNA, 23 nt, Human
gcuggucuugaacuccugaccuc

SEQ ID NO: 654831 - RNA, 22 nt, Human
ggauuacaggcaugagccaccg

SEQ ID NO: 654832 - RNA, 20 nt, Human
ggcguguugagcggggcagc

SEQ ID NO: 654833 - RNA, 22 nt, Human
ggcuggagugcaauggugugau

SEQ ID NO: 654834 - RNA, 24 nt, Human
ggcuggucuugaacuccugaccuc

SEQ ID NO: 654835 - RNA, 22 nt, Human
gggauuacaggcaugagccacc

SEQ ID NO: 654836 - RNA, 23 nt, Human
gggauuacaggcaugagccaccg

SEQ ID NO: 654837 - RNA, 22 nt, Human
ggguuucaccauguuggccagg

SEQ ID NO: 654838 - RNA, 19 nt, Human
ggucuugaacuccugaccu

SEQ ID NO: 654839 - RNA, 21 nt, Human
gguggcuagccaggcagcccu

SEQ ID NO: 654840 - RNA, 26 nt, Human
guacccaucuuauguccucaagcagc

SEQ ID NO: 654841 - RNA, 23 nt, Human
guaccgcucugccugaaaaacca

SEQ ID NO: 654842 - RNA, 24 nt, Human
guaguagagacaggguuucaccau

SEQ ID NO: 654843 - RNA, 21 nt, Human
guccuugccgggccacacccu

SEQ ID NO: 654844 - RNA, 21 nt, Human
gugacgggcaggggcuggcac

SEQ ID NO: 654845 - RNA, 18 nt, Human
gugcagagggacagguca

SEQ ID NO: 654846 - RNA, 24 nt, Human
gugggcccgggcccggguuaacuu

SEQ ID NO: 654847 - RNA, 19 nt, Human
uaacaggagaagaaaggag

SEQ ID NO: 654848 - RNA, 24 nt, Human
uaacaggagaagaaaggagaugau

SEQ ID NO: 654849 - RNA, 24 nt, Human
uaauuuucguauuuguaguagaga

SEQ ID NO: 654850 - RNA, 23 nt, Human
uacaggcaugagccaccgcaucc

SEQ ID NO: 654851 - RNA, 24 nt, Human
uacaggugcccaccaccacgccca

SEQ ID NO: 654852 - RNA, 22 nt, Human
uaccgcucugccugaaaaacca

SEQ ID NO: 654853 - RNA, 22 nt, Human
uagagacaggguuucaccaugu

SEQ ID NO: 654854 - RNA, 23 nt, Human
uaguagagacaggguuucaccau

SEQ ID NO: 654855 - RNA, 24 nt, Human
uaguagagacaggguuucaccaug

SEQ ID NO: 654856 - RNA, 26 nt, Human
uaguagagacaggguuucaccauguu

SEQ ID NO: 654857 - RNA, 23 nt, Human
ucacugcaaccuccaccucccgg

SEQ ID NO: 654858 - RNA, 24 nt, Human
ucacugcaaccuccaccucccggg

SEQ ID NO: 654859 - RNA, 25 nt, Human
ucacugcaaccuccaccucccgggu

SEQ ID NO: 654860 - RNA, 27 nt, Human
ucacugcaaccuccaccucccggguuc

SEQ ID NO: 654861 - RNA, 20 nt, Human
ucagccucccgaguagcugg

SEQ ID NO: 654862 - RNA, 19 nt, Human
ucaggcaucccaaagugca

SEQ ID NO: 654863 - RNA, 20 nt, Human
uccaaagggccacucagcuu

SEQ ID NO: 654864 - RNA, 21 nt, Human
uccaagagaaucuucccugcu

SEQ ID NO: 654865 - RNA, 23 nt, Human
uccagaacaaaccauacuuuugc

SEQ ID NO: 654866 - RNA, 24 nt, Human
ucccaaagugcagggauuacaggc

SEQ ID NO: 654867 - RNA, 22 nt, Human
uccccccacugccccgauucac

SEQ ID NO: 654868 - RNA, 23 nt, Human
ucccgaguagcugggauuacagg

SEQ ID NO: 654869 - RNA, 24 nt, Human
ucccgaguagcugggauuacaggu

SEQ ID NO: 654870 - RNA, 21 nt, Human
ucccggguucaagcgauucuc

SEQ ID NO: 654871 - RNA, 24 nt, Human
ucccggguucaagcgauucuccug

SEQ ID NO: 654872 - RNA, 19 nt, Human
ucccucaggguccuugccg

SEQ ID NO: 654873 - RNA, 23 nt, Human
ucccucaggguccuugccgggcc

SEQ ID NO: 654874 - RNA, 25 nt, Human
ucccucaggguccuugccgggcccc

SEQ ID NO: 654875 - RNA, 25 nt, Human
uccgaacagaaaagacguuucaaaa

SEQ ID NO: 654876 - RNA, 18 nt, Human
ucgcccaggcuggagugc

SEQ ID NO: 654877 - RNA, 23 nt, Human
ucuugaacuccugaccucaggca

SEQ ID NO: 654878 - RNA, 20 nt, Human
ugccccgauucacugcacag

SEQ ID NO: 654879 - RNA, 23 nt, Human
ugccccuggguuuggccgggcuu

SEQ ID NO: 654880 - RNA, 24 nt, Human
ugccucagccucccgaguagcugg

SEQ ID NO: 654881 - RNA, 19 nt, Human
ugccugggcucacucccag

SEQ ID NO: 654882 - RNA, 22 nt, Human
ugccugggcucacucccagcac

SEQ ID NO: 654883 - RNA, 24 nt, Human
ugcucuugucgcccaggcuggagu

SEQ ID NO: 654884 - RNA, 19 nt, Human
uggagugcaauggugugau

SEQ ID NO: 654885 - RNA, 23 nt, Human
uggagugcaauggugugaucucg

SEQ ID NO: 654886 - RNA, 24 nt, Human
uggagugcaauggugugaucucgg

SEQ ID NO: 654887 - RNA, 24 nt, Human
uggccaggcuggucuugaacuccu

SEQ ID NO: 654888 - RNA, 23 nt, Human
uggccugagccccucccaggagc

SEQ ID NO: 654889 - RNA, 24 nt, Human
uggccugggcuagaaggcgguguc

SEQ ID NO: 654890 - RNA, 21 nt, Human
ugggauuacaggugcccacca

SEQ ID NO: 654891 - RNA, 24 nt, Human
ugggauuacaggugcccaccacca

SEQ ID NO: 654892 - RNA, 20 nt, Human
ugucgcccaggcuggagugc

SEQ ID NO: 654893 - RNA, 19 nt, Human
ugugugaaauugggggcag

SEQ ID NO: 654894 - RNA, 19 nt, Human
uucaaaauggaggcagaac

SEQ ID NO: 654895 - RNA, 21 nt, Human
uucaagcgauucuccugccuc

SEQ ID NO: 654896 - RNA, 23 nt, Human
uucaagcgauucuccugccucag

SEQ ID NO: 654897 - RNA, 24 nt, Human
uucaagcgauucuccugccucagc

SEQ ID NO: 654898 - RNA, 20 nt, Human
uuccuugccugucucuuccu

SEQ ID NO: 654899 - RNA, 21 nt, Human
uuccuugccugucucuuccug

SEQ ID NO: 654900 - RNA, 20 nt, Human
uugccgggccacacccuauu

SEQ ID NO: 654901 - RNA, 22 nt, Human
uugcucuugucgcccaggcugg

SEQ ID NO: 654902 - RNA, 23 nt, Human
uugcucuugucgcccaggcugga

SEQ ID NO: 654903 - RNA, 20 nt, Human
uuggaaggaaggagaaagga

SEQ ID NO: 654904 - RNA, 18 nt, Human
uugugauaaugaaguugu

SEQ ID NO: 654905 - RNA, 21 nt, Human
uuuaaaaccugaccucucagg

SEQ ID NO: 654906 - RNA, 19 nt, Human
uuuagccaccaaacuccag

SEQ ID NO: 654907 - RNA, 24 nt, Human
uuucaccauguuggccaggcuggu

SEQ ID NO: 654908 - RNA, 21 nt, Human
uuugcucucccgugucuuggu

SEQ ID NO: 654909 - RNA, 24 nt, Human
uuugcucuugucgcccaggcugga

SEQ ID NO: 654910 - RNA, 21 nt, Human
uuuggaaggaaggagaaagga

SEQ ID NO: 654911 - RNA, 24 nt, Human
uuuguaguagagacaggguuucac

SEQ ID NO: 654912 - RNA, 26 nt, Human
uuuguaguagagacaggguuucacca

SEQ ID NO: 654913 - RNA, 19 nt, Human
uuuugcucaaaauguucuc

SEQ ID NO: 654914 - RNA, 24 nt, Human
uuuugcucuugucgcccaggcugg

SEQ ID NO: 654915 - RNA, 21 nt, Human
uuuuuuuuuuuuagacggagu

SEQ ID NO: 654916 - RNA, 21 nt, Human
uuuuuuuuuuuuuuagacgga

SEQ ID NO: 654917 - RNA, 20 nt, Human
aaaacccuuuccaucaucuu

SEQ ID NO: 654918 - RNA, 23 nt, Human
aaaacccuuuccaucaucuucaa

SEQ ID NO: 654919 - RNA, 23 nt, Human
aaacauaaaaauagaacaaugug

SEQ ID NO: 654920 - RNA, 19 nt, Human
aacaaugugacugggagag

SEQ ID NO: 654921 - RNA, 19 nt, Human
aacauggugaaaccccguc

SEQ ID NO: 654922 - RNA, 20 nt, Human
aacauggugaaaccccgucu

SEQ ID NO: 654923 - RNA, 21 nt, Human
aacauggugaaaccccgucuc

SEQ ID NO: 654924 - RNA, 18 nt, Human
aacuccccaagucuccag

SEQ ID NO: 654925 - RNA, 19 nt, Human
aagauggaacaacucccca

SEQ ID NO: 654926 - RNA, 23 nt, Human
aaggcaggcaaaucacuugaggc

SEQ ID NO: 654927 - RNA, 25 nt, Human
aaggcaggcaaaucacuugaggcca

SEQ ID NO: 654928 - RNA, 30 nt, Human
aauaaugaagaaaccggggcuuuuagagaa

SEQ ID NO: 654929 - RNA, 24 nt, Human
aaucacuugaggccaggaguucga

SEQ ID NO: 654930 - RNA, 24 nt, Human
aauugcuugaacccgggaggcaga

SEQ ID NO: 654931 - RNA, 24 nt, Human
acagagcaagacuccaucucaaaa

SEQ ID NO: 654932 - RNA, 23 nt, Human
acagagcaagucguaguucuaaa

SEQ ID NO: 654933 - RNA, 24 nt, Human
accccgucucuacuaaaaauacaa

SEQ ID NO: 654934 - RNA, 21 nt, Human
acucauucaacaagcauuuaa

SEQ ID NO: 654935 - RNA, 23 nt, Human
acucuagccugggagacagagca

SEQ ID NO: 654936 - RNA, 18 nt, Human
agacagaaucuuacugca

SEQ ID NO: 654937 - RNA, 20 nt, Human
agagguugcagugagcugag

SEQ ID NO: 654938 - RNA, 24 nt, Human
agagguugcagugagcugagguug

SEQ ID NO: 654939 - RNA, 23 nt, Human
agccagucgugguggcaugugcc

SEQ ID NO: 654940 - RNA, 22 nt, Human
agccuggccaacauggugaaac

SEQ ID NO: 654941 - RNA, 24 nt, Human
agccuggccaacauggugaaaccc

SEQ ID NO: 654942 - RNA, 24 nt, Human
agccugggagacagagcaagacuc

SEQ ID NO: 654943 - RNA, 21 nt, Human
aggaaaaaugaaugcugaaag

SEQ ID NO: 654944 - RNA, 20 nt, Human
aggcagagguugcagugagc

SEQ ID NO: 654945 - RNA, 24 nt, Human
aggcagagguugcagugagcugag

SEQ ID NO: 654946 - RNA, 24 nt, Human
aggcaggagaauugcuugaacccg

SEQ ID NO: 654947 - RNA, 21 nt, Human
aggcaggcaaaucacuugagg

SEQ ID NO: 654948 - RNA, 26 nt, Human
aggcaggcaaaucacuugaggccagg

SEQ ID NO: 654949 - RNA, 24 nt, Human
aggcuaaggcaggagaauugcuug

SEQ ID NO: 654950 - RNA, 21 nt, Human
agugagcugagguugugccau

SEQ ID NO: 654951 - RNA, 23 nt, Human
auaaaaauagaacaaugugacug

SEQ ID NO: 654952 - RNA, 18 nt, Human
aucacaaaacaaaccuca

SEQ ID NO: 654953 - RNA, 22 nt, Human
aucccagcacuuugggaggcca

SEQ ID NO: 654954 - RNA, 23 nt, Human
aucucacucauucaacaagcauu

SEQ ID NO: 654955 - RNA, 19 nt, Human
augccuguaaucccagcac

SEQ ID NO: 654956 - RNA, 18 nt, Human
auugcacucuagccuggg

SEQ ID NO: 654957 - RNA, 24 nt, Human
auugcacucuagccugggagacag

SEQ ID NO: 654958 - RNA, 27 nt, Human
caaaucacuugaggccaggaguucgag

SEQ ID NO: 654959 - RNA, 24 nt, Human
caacauggugaaaccccgucucua

SEQ ID NO: 654960 - RNA, 21 nt, Human
caagacuccaucucaaaaaaa

SEQ ID NO: 654961 - RNA, 22 nt, Human
cagagguugcagugagcugagg

SEQ ID NO: 654962 - RNA, 24 nt, Human
cagcacuuugggaggccaaggcag

SEQ ID NO: 654963 - RNA, 25 nt, Human
cagcacuuugggaggccaaggcagg

SEQ ID NO: 654964 - RNA, 24 nt, Human
caggcaaaucacuugaggccagga

SEQ ID NO: 654965 - RNA, 20 nt, Human
caugccuguaaucccagcac

SEQ ID NO: 654966 - RNA, 18 nt, Human
cauugcacucuagccugg

SEQ ID NO: 654967 - RNA, 19 nt, Human
cauugcacucuagccuggg

SEQ ID NO: 654968 - RNA, 22 nt, Human
cauugcacucuagccugggaga

SEQ ID NO: 654969 - RNA, 23 nt, Human
cauugcacucuagccugggagac

SEQ ID NO: 654970 - RNA, 24 nt, Human
cauugcacucuagccugggagaca

SEQ ID NO: 654971 - RNA, 25 nt, Human
cauugcacucuagccugggagacag

SEQ ID NO: 654972 - RNA, 20 nt, Human
ccaggaguucgagaccagcc

SEQ ID NO: 654973 - RNA, 19 nt, Human
ccauugcacucuagccugg

SEQ ID NO: 654974 - RNA, 20 nt, Human
ccauugcacucuagccuggg

SEQ ID NO: 654975 - RNA, 22 nt, Human
ccauugcacucuagccugggag

SEQ ID NO: 654976 - RNA, 24 nt, Human
ccauugcacucuagccugggagac

SEQ ID NO: 654977 - RNA, 21 nt, Human
ccuauaauuccagcuacucag

SEQ ID NO: 654978 - RNA, 23 nt, Human
ccuggccaacauggugaaacccc

SEQ ID NO: 654979 - RNA, 24 nt, Human
ccuggccaacauggugaaaccccg

SEQ ID NO: 654980 - RNA, 22 nt, Human
ccugggagacagagcaagacuc

SEQ ID NO: 654981 - RNA, 20 nt, Human
ccuguaaucccagcacuuug

SEQ ID NO: 654982 - RNA, 24 nt, Human
ccuuuguaaaaacccuuuccauca

SEQ ID NO: 654983 - RNA, 24 nt, Human
cgagaccagccuggccaacauggu

SEQ ID NO: 654984 - RNA, 24 nt, Human
cgggaggcagagguugcagugagc

SEQ ID NO: 654985 - RNA, 22 nt, Human
cuaaacaucucacucauucaac

SEQ ID NO: 654986 - RNA, 19 nt, Human
cucaaaaaaaaugaaaaca

SEQ ID NO: 654987 - RNA, 24 nt, Human
cucaugccuguaaucccagcacuu

SEQ ID NO: 654988 - RNA, 21 nt, Human
cuccccaagucuccagagagg

SEQ ID NO: 654989 - RNA, 25 nt, Human
cuucugcuacgaacuacuuuuacaa

SEQ ID NO: 654990 - RNA, 23 nt, Human
gagaauugcuugaacccgggagg

SEQ ID NO: 654991 - RNA, 23 nt, Human
gauaauaaugaagaaaccggggc

SEQ ID NO: 654992 - RNA, 24 nt, Human
gcacucuagccugggagacagagc

SEQ ID NO: 654993 - RNA, 22 nt, Human
gcaugugccuauaauuccagcu

SEQ ID NO: 654994 - RNA, 24 nt, Human
gccaacauggugaaaccccgucuc

SEQ ID NO: 654995 - RNA, 20 nt, Human
gccauugcacucuagccugg

SEQ ID NO: 654996 - RNA, 21 nt, Human
ggcaugugccuauaauuccag

SEQ ID NO: 654997 - RNA, 21 nt, Human
ggcucaugccuguaaucccag

SEQ ID NO: 654998 - RNA, 23 nt, Human
ggugagguggcucaugccuguaa

SEQ ID NO: 654999 - RNA, 23 nt, Human
gguggcucaugccuguaauccca

SEQ ID NO: 655000 - RNA, 23 nt, Human
guggcucaugccuguaaucccag

SEQ ID NO: 655001 - RNA, 24 nt, Human
guugcagugagcugagguugugcc

SEQ ID NO: 655002 - RNA, 19 nt, Human
uaaaaaggcuagaauaaug

SEQ ID NO: 655003 - RNA, 21 nt, Human
uaaaaauacaaaaauuagcca

SEQ ID NO: 655004 - RNA, 22 nt, Human
uaaacuggcugaagauggaaca

SEQ ID NO: 655005 - RNA, 24 nt, Human
uaaggcaggagaauugcuugaacc

SEQ ID NO: 655006 - RNA, 25 nt, Human
uaaggcaggagaauugcuugaaccc

SEQ ID NO: 655007 - RNA, 20 nt, Human
uaagggacuguaaaccagca

SEQ ID NO: 655008 - RNA, 18 nt, Human
uaaguccaguguggcacu

SEQ ID NO: 655009 - RNA, 24 nt, Human
uaaugauaauaaugaagaaaccgg

SEQ ID NO: 655010 - RNA, 22 nt, Human
uacagccaggaaauauuaaggg

SEQ ID NO: 655011 - RNA, 23 nt, Human
ucacuugaggccaggaguucgag

SEQ ID NO: 655012 - RNA, 20 nt, Human
ucagguauagcuguuauucu

SEQ ID NO: 655013 - RNA, 22 nt, Human
ucaugccuguaaucccagcacu

SEQ ID NO: 655014 - RNA, 22 nt, Human
uccaucucaaaaaaaaugaaaa

SEQ ID NO: 655015 - RNA, 26 nt, Human
uccaucucaaaaaaaaugaaaacaua

SEQ ID NO: 655016 - RNA, 21 nt, Human
uccccaagucuccagagaggc

SEQ ID NO: 655017 - RNA, 21 nt, Human
ucucuacuaaaaauacaaaaa

SEQ ID NO: 655018 - RNA, 23 nt, Human
ugaagauggaacaacuccccaag

SEQ ID NO: 655019 - RNA, 18 nt, Human
ugaaugcugaaagaacua

SEQ ID NO: 655020 - RNA, 23 nt, Human
ugaccuggccaagaucauacagg

SEQ ID NO: 655021 - RNA, 22 nt, Human
ugcacucuagccugggagacag

SEQ ID NO: 655022 - RNA, 18 nt, Human
ugccuauaauuccagcua

SEQ ID NO: 655023 - RNA, 24 nt, Human
ugccuauaauuccagcuacucagg

SEQ ID NO: 655024 - RNA, 23 nt, Human
ugccuguaaucccagcacuuugg

SEQ ID NO: 655025 - RNA, 24 nt, Human
ugccuguaaucccagcacuuuggg

SEQ ID NO: 655026 - RNA, 19 nt, Human
uggcaucaaagguuggacc

SEQ ID NO: 655027 - RNA, 22 nt, Human
uggcaugugccuauaauuccag

SEQ ID NO: 655028 - RNA, 24 nt, Human
uggccaacauggugaaaccccguc

SEQ ID NO: 655029 - RNA, 22 nt, Human
uggcucaugccuguaaucccag

SEQ ID NO: 655030 - RNA, 24 nt, Human
uggcucaugccuguaaucccagca

SEQ ID NO: 655031 - RNA, 24 nt, Human
ugggaggccaaggcaggcaaauca

SEQ ID NO: 655032 - RNA, 24 nt, Human
ugguggcaugugccuauaauucca

SEQ ID NO: 655033 - RNA, 21 nt, Human
uuaaggguaggaaugaggagu

SEQ ID NO: 655034 - RNA, 26 nt, Human
uuacaaagacagaaucuuacugcaua

SEQ ID NO: 655035 - RNA, 18 nt, Human
uuauucuccagucacugg

SEQ ID NO: 655036 - RNA, 24 nt, Human
uucuaaacaucucacucauucaac

SEQ ID NO: 655037 - RNA, 18 nt, Human
uucuagaccgucagagga

SEQ ID NO: 655038 - RNA, 24 nt, Human
uucugcuacgaacuacuuuuacaa

SEQ ID NO: 655039 - RNA, 22 nt, Human
uugaggccaggaguucgagacc

SEQ ID NO: 655040 - RNA, 22 nt, Human
uugcagugagcugagguugugc

SEQ ID NO: 655041 - RNA, 18 nt, Human
uugcuugaacccgggagg

SEQ ID NO: 655042 - RNA, 24 nt, Human
uugcuugaacccgggaggcagagg

SEQ ID NO: 655043 - RNA, 24 nt, Human
uuuuacaaagacagaaucuuacug

SEQ ID NO: 655044 - RNA, 24 nt, Human
uuuuuuuuuuuuuuuugggucuca

SEQ ID NO: 655045 - RNA, 18 nt, Human
uuuuuuuuuuuuuuuuug

SEQ ID NO: 655046 - RNA, 22 nt, Human
uuuuuuuuuuuuuuuuuuuggg

SEQ ID NO: 655047 - RNA, 24 nt, Human
uuuuuuuuuuuuuuuuuuuggguc

SEQ ID NO: 655048 - RNA, 18 nt, Human
aaauaccuauacccacaa

SEQ ID NO: 655049 - RNA, 24 nt, Human
aacaaggaaacacagcgaugugaa

SEQ ID NO: 655050 - RNA, 25 nt, Human
aaccagaguccggaucugcacauag

SEQ ID NO: 655051 - RNA, 22 nt, Human
aacuccugcuccacuggauccc

SEQ ID NO: 655052 - RNA, 20 nt, Human
aagcuuucauucuggucauc

SEQ ID NO: 655053 - RNA, 22 nt, Human
aaggaaacacagcgaugugaac

SEQ ID NO: 655054 - RNA, 23 nt, Human
aaggaaacacagcgaugugaacg

SEQ ID NO: 655055 - RNA, 22 nt, Human
acaggcccacaaaaguacagcu

SEQ ID NO: 655056 - RNA, 23 nt, Human
agaaaaaaccaaacauuuugccc

SEQ ID NO: 655057 - RNA, 22 nt, Human
aggcccacaaaaguacagcuga

SEQ ID NO: 655058 - RNA, 19 nt, Human
auaaagcagcaaaaacaua

SEQ ID NO: 655059 - RNA, 20 nt, Human
aucccccauccagcuucacc

SEQ ID NO: 655060 - RNA, 24 nt, Human
caauaggucugcaaaaucucccac

SEQ ID NO: 655061 - RNA, 23 nt, Human
cacaaaaguacagcugagacggg

SEQ ID NO: 655062 - RNA, 20 nt, Human
cacuggaucccccauccagc

SEQ ID NO: 655063 - RNA, 21 nt, Human
cacuggaucccccauccagcu

SEQ ID NO: 655064 - RNA, 22 nt, Human
cacuggaucccccauccagcuu

SEQ ID NO: 655065 - RNA, 26 nt, Human
cagaaagaaaaauguuaacaaggaaa

SEQ ID NO: 655066 - RNA, 24 nt, Human
cagacucuagaguuucccaacuuc

SEQ ID NO: 655067 - RNA, 18 nt, Human
cccacaaaaguacagcug

SEQ ID NO: 655068 - RNA, 23 nt, Human
cccaccuucacgcuguaucccca

SEQ ID NO: 655069 - RNA, 20 nt, Human
cccaggaagaaaauaccuau

SEQ ID NO: 655070 - RNA, 23 nt, Human
cccaggaagaaaauaccuauacc

SEQ ID NO: 655071 - RNA, 20 nt, Human
ccucucugcagaaagaaaaa

SEQ ID NO: 655072 - RNA, 25 nt, Human
ccuuuucuuuugguaaugggguguu

SEQ ID NO: 655073 - RNA, 21 nt, Human
cugcugugcaacuuccccacc

SEQ ID NO: 655074 - RNA, 19 nt, Human
cuggaucccccauccagcu

SEQ ID NO: 655075 - RNA, 21 nt, Human
cuggcaggaggcagagcaagc

SEQ ID NO: 655076 - RNA, 18 nt, Human
cuuuuuccguauuuucuc

SEQ ID NO: 655077 - RNA, 25 nt, Human
gaaaaaaccaaacauuuugcccaga

SEQ ID NO: 655078 - RNA, 18 nt, Human
gaacugaauucuucccca

SEQ ID NO: 655079 - RNA, 21 nt, Human
gagaaaaaaccaaacauuuug

SEQ ID NO: 655080 - RNA, 19 nt, Human
gcaaaaacauaucuuccuc

SEQ ID NO: 655081 - RNA, 18 nt, Human
gcaaaaucucccacaggc

SEQ ID NO: 655082 - RNA, 19 nt, Human
gcaaaaucucccacaggca

SEQ ID NO: 655083 - RNA, 21 nt, Human
ggaagaaaauaccuauaccca

SEQ ID NO: 655084 - RNA, 26 nt, Human
gguugccaccuuaccuuuucuuuugg

SEQ ID NO: 655085 - RNA, 22 nt, Human
uauauauauguguguuuauaua

SEQ ID NO: 655086 - RNA, 22 nt, Human
uauccccaagucccgccaccaa

SEQ ID NO: 655087 - RNA, 20 nt, Human
uauuaaaaauaagguugcca

SEQ ID NO: 655088 - RNA, 27 nt, Human
ucaacuccugcuccacuggauccccca

SEQ ID NO: 655089 - RNA, 22 nt, Human
ucacgcuguauccccaaguccc

SEQ ID NO: 655090 - RNA, 21 nt, Human
ucaucaagaugacaggcccac

SEQ ID NO: 655091 - RNA, 20 nt, Human
uccacuggaucccccaucca

SEQ ID NO: 655092 - RNA, 22 nt, Human
ucccacucuuuuccugggccag

SEQ ID NO: 655093 - RNA, 23 nt, Human
uccccaccuucacgcuguauccc

SEQ ID NO: 655094 - RNA, 18 nt, Human
ucccgccaccaauucugg

SEQ ID NO: 655095 - RNA, 20 nt, Human
uccgucaacuccugcuccac

SEQ ID NO: 655096 - RNA, 18 nt, Human
ucugcaaaaucucccaca

SEQ ID NO: 655097 - RNA, 22 nt, Human
ucugcaaaaucucccacaggca

SEQ ID NO: 655098 - RNA, 22 nt, Human
ugccuaaaagcaagauggcaaa

SEQ ID NO: 655099 - RNA, 22 nt, Human
ugcuccacuggaucccccaucc

SEQ ID NO: 655100 - RNA, 23 nt, Human
ugggccaggcgccggacugcugc

SEQ ID NO: 655101 - RNA, 18 nt, Human
uguguguuuauauauaua

SEQ ID NO: 655102 - RNA, 22 nt, Human
uguguuuauauauauauuuuua

SEQ ID NO: 655103 - RNA, 22 nt, Human
uuucuugugguuguuuguuaau

SEQ ID NO: 655104 - RNA, 27 nt, Human
uuuuuuuuuuuuuuuuuuuucuuuaga

SEQ ID NO: 655105 - RNA, 18 nt, Human
accaauggcgaucuuccc

SEQ ID NO: 655106 - RNA, 33 nt, Human
auaugugcauauauuuucacacauauauauggu

SEQ ID NO: 655107 - RNA, 20 nt, Human
ccaaaacuuagcaacaucaa

SEQ ID NO: 655108 - RNA, 24 nt, Human
guauaaccaauggcgaucuucccu

SEQ ID NO: 655109 - RNA, 19 nt, Human
uaaaacagcacuuaauggu

SEQ ID NO: 655110 - RNA, 21 nt, Human
uaaccaauggcgaucuucccu

SEQ ID NO: 655111 - RNA, 20 nt, Human
uacaaucagggucuuuaccc

SEQ ID NO: 655112 - RNA, 23 nt, Human
uauauuuucacacauauauaugu

SEQ ID NO: 655113 - RNA, 26 nt, Human
uaugugcauauauuuucacacauaua

SEQ ID NO: 655114 - RNA, 19 nt, Human
ugcauauauuuucacacau

SEQ ID NO: 655115 - RNA, 22 nt, Human
ugcauauauuuucacacauaua

SEQ ID NO: 655116 - RNA, 24 nt, Human
ugcauauauuuucacacauauaua

SEQ ID NO: 655117 - RNA, 18 nt, Human
uuaauggucauguucuuu

SEQ ID NO: 655118 - RNA, 26 nt, Human
uucacacauauauaugucuuauauac

SEQ ID NO: 655119 - RNA, 19 nt, Human
uucagaggaaaaaaaugaa

SEQ ID NO: 655120 - RNA, 21 nt, Human
uuuuuuuuuuuuuuuuugggu

SEQ ID NO: 655121 - RNA, 26 nt, Human
uuuuuuuuuuuuuuuuuuuuuuuggg

SEQ ID NO: 655122 - RNA, 24 nt, Human
aaagugcugggauuauaagcguga

SEQ ID NO: 655123 - RNA, 19 nt, Human
aagaacccccucaaacaaa

SEQ ID NO: 655124 - RNA, 22 nt, Human
aagaacccccucaaacaaaaag

SEQ ID NO: 655125 - RNA, 21 nt, Human
aagcgugagccacugcaccca

SEQ ID NO: 655126 - RNA, 19 nt, Human
aagugcugggauuauaagc

SEQ ID NO: 655127 - RNA, 19 nt, Human
aagugcugggauuauaagc

SEQ ID NO: 655128 - RNA, 26 nt, Human
aagugcugggauuauaagcgugagcc

SEQ ID NO: 655129 - RNA, 18 nt, Human
acaacauacauguauaua

SEQ ID NO: 655130 - RNA, 18 nt, Human
acaggguuucaucauguu

SEQ ID NO: 655131 - RNA, 23 nt, Human
acaggguuucaucauguuggcca

SEQ ID NO: 655132 - RNA, 24 nt, Human
acaggguuucaucauguuggccag

SEQ ID NO: 655133 - RNA, 24 nt, Human
accacugcacucuggcuuggguga

SEQ ID NO: 655134 - RNA, 22 nt, Human
acugcaaccuccgccucccagg

SEQ ID NO: 655135 - RNA, 18 nt, Human
acugcacucuggcuuggg

SEQ ID NO: 655136 - RNA, 26 nt, Human
acugcacucuggcuugggugauggag

SEQ ID NO: 655137 - RNA, 20 nt, Human
agacagagucuugcagucuu

SEQ ID NO: 655138 - RNA, 20 nt, Human
agacgaaggacugcuugagc

SEQ ID NO: 655139 - RNA, 22 nt, Human
agcaagaacccccucaaacaaa

SEQ ID NO: 655140 - RNA, 20 nt, Human
agcuggguguguugguaugu

SEQ ID NO: 655141 - RNA, 23 nt, Human
aggcaggaaaauugcuugagccc

SEQ ID NO: 655142 - RNA, 24 nt, Human
aggcaggaaaauugcuugagccca

SEQ ID NO: 655143 - RNA, 20 nt, Human
aggcaugcuggcucacaccu

SEQ ID NO: 655144 - RNA, 25 nt, Human
aggcuggagugcaguggcacaaucu

SEQ ID NO: 655145 - RNA, 19 nt, Human
agugcaguggcacaaucug

SEQ ID NO: 655146 - RNA, 24 nt, Human
agugcugggauuauaagcgugagc

SEQ ID NO: 655147 - RNA, 18 nt, Human
auccaccugccguggccu

SEQ ID NO: 655148 - RNA, 24 nt, Human
augauccaccugccguggccuccc

SEQ ID NO: 655149 - RNA, 24 nt, Human
auuucaccacugcacucuggcuug

SEQ ID NO: 655150 - RNA, 24 nt, Human
caaagugcugggauuauaagcgug

SEQ ID NO: 655151 - RNA, 22 nt, Human
caagcaauuuuccugccucagc

SEQ ID NO: 655152 - RNA, 22 nt, Human
caaugugguaagacccugucuc

SEQ ID NO: 655153 - RNA, 22 nt, Human
cacaccuauaauuccagcacug

SEQ ID NO: 655154 - RNA, 20 nt, Human
caccacugcacucuggcuug

SEQ ID NO: 655155 - RNA, 19 nt, Human
caccaugccuaauuuuugu

SEQ ID NO: 655156 - RNA, 20 nt, Human
cacccagccucaaaaugauc

SEQ ID NO: 655157 - RNA, 21 nt, Human
caccuauaauuccagcacugg

SEQ ID NO: 655158 - RNA, 23 nt, Human
caccugccguggccucccaaagu

SEQ ID NO: 655159 - RNA, 19 nt, Human
cacugcacucuggcuuggg

SEQ ID NO: 655160 - RNA, 19 nt, Human
cacugcacucuggcuuggg

SEQ ID NO: 655161 - RNA, 19 nt, Human
cacugcacucuggcuuggg

SEQ ID NO: 655162 - RNA, 22 nt, Human
cacugcacucuggcuuggguga

SEQ ID NO: 655163 - RNA, 25 nt, Human
cacugcacucuggcuugggugaugg

SEQ ID NO: 655164 - RNA, 24 nt, Human
caggguuucaucauguuggccagg

SEQ ID NO: 655165 - RNA, 19 nt, Human
caggugcccgccaccaugc

SEQ ID NO: 655166 - RNA, 24 nt, Human
caggugcccgccaccaugccuaau

SEQ ID NO: 655167 - RNA, 23 nt, Human
caguaaccgugacuacaggugcc

SEQ ID NO: 655168 - RNA, 19 nt, Human
caucaaaaguuuuccaggg

SEQ ID NO: 655169 - RNA, 24 nt, Human
caucauguuggccaggcuggucuc

SEQ ID NO: 655170 - RNA, 27 nt, Human
caucauguuggccaggcuggucucaaa

SEQ ID NO: 655171 - RNA, 21 nt, Human
caugccuaauuuuuguauuuu

SEQ ID NO: 655172 - RNA, 18 nt, Human
cauguuggccaggcuggu

SEQ ID NO: 655173 - RNA, 21 nt, Human
cauguuggccaggcuggucuc

SEQ ID NO: 655174 - RNA, 24 nt, Human
cauguuggccaggcuggucucaaa

SEQ ID NO: 655175 - RNA, 18 nt, Human
ccaaagugcugggauuau

SEQ ID NO: 655176 - RNA, 22 nt, Human
ccaaagugcugggauuauaagc

SEQ ID NO: 655177 - RNA, 24 nt, Human
ccaaagugcugggauuauaagcgu

SEQ ID NO: 655178 - RNA, 19 nt, Human
ccacugcacccagccucaa

SEQ ID NO: 655179 - RNA, 21 nt, Human
ccacugcacccagccucaaaa

SEQ ID NO: 655180 - RNA, 21 nt, Human
ccacugcacccagccucaaaa

SEQ ID NO: 655181 - RNA, 20 nt, Human
ccacugcacucuggcuuggg

SEQ ID NO: 655182 - RNA, 20 nt, Human
ccacugcacucuggcuuggg

SEQ ID NO: 655183 - RNA, 21 nt, Human
ccacugcacucuggcuugggu

SEQ ID NO: 655184 - RNA, 21 nt, Human
ccacugcacucuggcuugggu

SEQ ID NO: 655185 - RNA, 23 nt, Human
ccacugcacucuggcuuggguga

SEQ ID NO: 655186 - RNA, 24 nt, Human
ccacugcacucuggcuugggugau

SEQ ID NO: 655187 - RNA, 20 nt, Human
ccagcacugggaggcccaag

SEQ ID NO: 655188 - RNA, 23 nt, Human
cccagguucaagcaauuuuccug

SEQ ID NO: 655189 - RNA, 26 nt, Human
ccgccucccagguucaagcaauuuuu

SEQ ID NO: 655190 - RNA, 24 nt, Human
ccucccagguucaagcaauuuucc

SEQ ID NO: 655191 - RNA, 21 nt, Human
ccugaccucagaugauccacc

SEQ ID NO: 655192 - RNA, 23 nt, Human
ccugaccucagaugauccaccug

SEQ ID NO: 655193 - RNA, 23 nt, Human
ccugaccucagaugauccaccug

SEQ ID NO: 655194 - RNA, 23 nt, Human
ccugccucagccucugcaguaac

SEQ ID NO: 655195 - RNA, 23 nt, Human
cucuauugcccaggcuggagugc

SEQ ID NO: 655196 - RNA, 23 nt, Human
cucugcaguaaccgugacuacag

SEQ ID NO: 655197 - RNA, 23 nt, Human
cugcaaccuccgccucccagguu

SEQ ID NO: 655198 - RNA, 24 nt, Human
cugcaaccuccgccucccagguuc

SEQ ID NO: 655199 - RNA, 24 nt, Human
cugccguggccucccaaagugcug

SEQ ID NO: 655200 - RNA, 18 nt, Human
cugccucagccucugcag

SEQ ID NO: 655201 - RNA, 22 nt, Human
cuuaaaaugaaaaaucuuuuga

SEQ ID NO: 655202 - RNA, 21 nt, Human
cuugagcccagaaguuccaga

SEQ ID NO: 655203 - RNA, 18 nt, Human
gaccucagaugauccacc

SEQ ID NO: 655204 - RNA, 21 nt, Human
gacuacaggugcccgccacca

SEQ ID NO: 655205 - RNA, 24 nt, Human
gacuacaggugcccgccaccaugc

SEQ ID NO: 655206 - RNA, 18 nt, Human
gauuauaagcgugagcca

SEQ ID NO: 655207 - RNA, 22 nt, Human
gauuauaagcgugagccacugc

SEQ ID NO: 655208 - RNA, 23 nt, Human
gauuauaagcgugagccacugca

SEQ ID NO: 655209 - RNA, 22 nt, Human
gcaaccuccgccucccagguuc

SEQ ID NO: 655210 - RNA, 19 nt, Human
gcccaggcuggagugcagu

SEQ ID NO: 655211 - RNA, 20 nt, Human
gcccaggcuggagugcagug

SEQ ID NO: 655212 - RNA, 24 nt, Human
gcuggagugcaguggcacaaucug

SEQ ID NO: 655213 - RNA, 24 nt, Human
gcuggcucacaccuauaauuccag

SEQ ID NO: 655214 - RNA, 23 nt, Human
gcuggucucaaacuccugaccuc

SEQ ID NO: 655215 - RNA, 23 nt, Human
ggccaggcaugcuggcucacacc

SEQ ID NO: 655216 - RNA, 24 nt, Human
ggcuggucucaaacuccugaccuc

SEQ ID NO: 655217 - RNA, 22 nt, Human
ggguuucaucauguuggccagg

SEQ ID NO: 655218 - RNA, 24 nt, Human
gucuugcucuauugcccaggcugg

SEQ ID NO: 655219 - RNA, 24 nt, Human
guugguaugucccagcuacucagg

SEQ ID NO: 655220 - RNA, 24 nt, Human
uaauagagacaggguuucaucaug

SEQ ID NO: 655221 - RNA, 24 nt, Human
uaauuuuuguauuuuuaauagaga

SEQ ID NO: 655222 - RNA, 18 nt, Human
uacugcaaccuccgccuc

SEQ ID NO: 655223 - RNA, 21 nt, Human
uacugcaaccuccgccuccca

SEQ ID NO: 655224 - RNA, 21 nt, Human
uagagacaggguuucaucaug

SEQ ID NO: 655225 - RNA, 22 nt, Human
uagagacaggguuucaucaugu

SEQ ID NO: 655226 - RNA, 19 nt, Human
uauugcccaggcuggagug

SEQ ID NO: 655227 - RNA, 19 nt, Human
ucaccacugcacucuggcu

SEQ ID NO: 655228 - RNA, 24 nt, Human
ucccaaagugcugggauuauaagc

SEQ ID NO: 655229 - RNA, 18 nt, Human
ucccagguucaagcaauu

SEQ ID NO: 655230 - RNA, 24 nt, Human
ucccagguucaagcaauuuuccug

SEQ ID NO: 655231 - RNA, 24 nt, Human
ucuauugcccaggcuggagugcag

SEQ ID NO: 655232 - RNA, 24 nt, Human
ucuggcuugggugauggagcaaga

SEQ ID NO: 655233 - RNA, 19 nt, Human
ucuugcucuauugcccagg

SEQ ID NO: 655234 - RNA, 23 nt, Human
ucuugcucuauugcccaggcugg

SEQ ID NO: 655235 - RNA, 24 nt, Human
ucuugcucuauugcccaggcugga

SEQ ID NO: 655236 - RNA, 20 nt, Human
ucuuuaaggacacaccaaau

SEQ ID NO: 655237 - RNA, 24 nt, Human
ugaaacaaauuuaugaaaaaggua

SEQ ID NO: 655238 - RNA, 19 nt, Human
ugaccucagaugauccacc

SEQ ID NO: 655239 - RNA, 20 nt, Human
ugaccucagaugauccaccu

SEQ ID NO: 655240 - RNA, 24 nt, Human
ugagcaaugugguaagacccuguc

SEQ ID NO: 655241 - RNA, 19 nt, Human
ugagcccagaaguuccaga

SEQ ID NO: 655242 - RNA, 25 nt, Human
ugcacccagccucaaaaugaucaau

SEQ ID NO: 655243 - RNA, 18 nt, Human
ugcccaggcuggagugca

SEQ ID NO: 655244 - RNA, 21 nt, Human
ugcccaggcuggagugcagug

SEQ ID NO: 655245 - RNA, 22 nt, Human
ugcccaggcuggagugcagugg

SEQ ID NO: 655246 - RNA, 24 nt, Human
ugcccaggcuggagugcaguggca

SEQ ID NO: 655247 - RNA, 21 nt, Human
ugccucagccucugcaguaac

SEQ ID NO: 655248 - RNA, 24 nt, Human
ugcucuauugcccaggcuggagug

SEQ ID NO: 655249 - RNA, 24 nt, Human
ugcugggauuauaagcgugagcca

SEQ ID NO: 655250 - RNA, 23 nt, Human
uggagugcaguggcacaaucugg

SEQ ID NO: 655251 - RNA, 24 nt, Human
uggcacaaucugggcuuacugcaa

SEQ ID NO: 655252 - RNA, 24 nt, Human
uggccaggcuggucucaaacuccu

SEQ ID NO: 655253 - RNA, 22 nt, Human
uggcucacaccuauaauuccag

SEQ ID NO: 655254 - RNA, 24 nt, Human
uggcucacaccuauaauuccagca

SEQ ID NO: 655255 - RNA, 19 nt, Human
ugggauuauaagcgugagc

SEQ ID NO: 655256 - RNA, 21 nt, Human
ugggauuauaagcgugagcca

SEQ ID NO: 655257 - RNA, 22 nt, Human
ugggauuauaagcgugagccac

SEQ ID NO: 655258 - RNA, 22 nt, Human
ugggauuauaagcgugagccac

SEQ ID NO: 655259 - RNA, 24 nt, Human
ugggauuauaagcgugagccacug

SEQ ID NO: 655260 - RNA, 19 nt, Human
ugugagcuguaauuucacc

SEQ ID NO: 655261 - RNA, 21 nt, Human
uuaauagagacaggguuucau

SEQ ID NO: 655262 - RNA, 24 nt, Human
uuaauagagacaggguuucaucau

SEQ ID NO: 655263 - RNA, 19 nt, Human
uuacugcaaccuccgccuc

SEQ ID NO: 655264 - RNA, 24 nt, Human
uuacugcaaccuccgccucccagg

SEQ ID NO: 655265 - RNA, 25 nt, Human
uuacugcaaccuccgccucccaggu

SEQ ID NO: 655266 - RNA, 19 nt, Human
uuagcuggguguguuggua

SEQ ID NO: 655267 - RNA, 22 nt, Human
uuagcuggguguguugguaugu

SEQ ID NO: 655268 - RNA, 21 nt, Human
uucaagcaauuuuccugccuc

SEQ ID NO: 655269 - RNA, 24 nt, Human
uucaagcaauuuuccugccucagc

SEQ ID NO: 655270 - RNA, 24 nt, Human
uugcucuauugcccaggcuggagu

SEQ ID NO: 655271 - RNA, 24 nt, Human
uuucaucauguuggccaggcuggu

SEQ ID NO: 655272 - RNA, 22 nt, Human
uuuuguauuuuuaauagagaca

SEQ ID NO: 655273 - RNA, 24 nt, Human
uuuuuaauagagacaggguuucau

SEQ ID NO: 655274 - RNA, 20 nt, Human
uuuuuguauuuuuaauagag

SEQ ID NO: 655275 - RNA, 20 nt, Human
uuuuuuuuuuugagacagag

SEQ ID NO: 655276 - RNA, 24 nt, Human
uuuuuuuuuuuugagacagagucu

SEQ ID NO: 655277 - RNA, 18 nt, Human
uuuuuuuuuuuuuuuuug

SEQ ID NO: 655278 - RNA, 24 nt, Human
aaaaagcaaguaauaaaaguacug

SEQ ID NO: 655279 - RNA, 19 nt, Human
aaagugcuaggauuacagg

SEQ ID NO: 655280 - RNA, 24 nt, Human
aaagugcugggauuacaggcguga

SEQ ID NO: 655281 - RNA, 24 nt, Human
aaccacgcccagcuaaucuuuaau

SEQ ID NO: 655282 - RNA, 24 nt, Human
aaccucaggugauccgcccgccuc

SEQ ID NO: 655283 - RNA, 23 nt, Human
aacuccugggcucaagcgauccu

SEQ ID NO: 655284 - RNA, 25 nt, Human
aagcgauccucuugccucagccucc

SEQ ID NO: 655285 - RNA, 26 nt, Human
aagugcuaggauuacagguauaagcu

SEQ ID NO: 655286 - RNA, 19 nt, Human
aagugcugggauuacaggc

SEQ ID NO: 655287 - RNA, 19 nt, Human
aagugcugggauuacaggc

SEQ ID NO: 655288 - RNA, 26 nt, Human
aagugcugggauuacaggcgugagcc

SEQ ID NO: 655289 - RNA, 24 nt, Human
aaugcaguggugcgaucacaacuc

SEQ ID NO: 655290 - RNA, 29 nt, Human
aaugucaaggacagcucaucugaaaggaa

SEQ ID NO: 655291 - RNA, 18 nt, Human
acaggguuucacuguguu

SEQ ID NO: 655292 - RNA, 19 nt, Human
acaggguuucacuguguug

SEQ ID NO: 655293 - RNA, 23 nt, Human
acaggguuucacuguguugccua

SEQ ID NO: 655294 - RNA, 24 nt, Human
acaggguuucacuguguugccuag

SEQ ID NO: 655295 - RNA, 20 nt, Human
acaucagaaugucaaggaca

SEQ ID NO: 655296 - RNA, 18 nt, Human
acucagacccgccaaugg

SEQ ID NO: 655297 - RNA, 22 nt, Human
acucuuguugcccaggcuggag

SEQ ID NO: 655298 - RNA, 22 nt, Human
agaaaugcuggguccacagagc

SEQ ID NO: 655299 - RNA, 18 nt, Human
agacaggguuucacugug

SEQ ID NO: 655300 - RNA, 23 nt, Human
agacaggguuucacuguguugcc

SEQ ID NO: 655301 - RNA, 19 nt, Human
agagacaggguuucacugu

SEQ ID NO: 655302 - RNA, 21 nt, Human
agcaaaaagcaaguaauaaaa

SEQ ID NO: 655303 - RNA, 18 nt, Human
agccaccacaccuggccc

SEQ ID NO: 655304 - RNA, 25 nt, Human
agcucaucugaaaggaaaaagccuc

SEQ ID NO: 655305 - RNA, 18 nt, Human
aggagcggcccacacuca

SEQ ID NO: 655306 - RNA, 24 nt, Human
aggugauccgcccgccucggccuc

SEQ ID NO: 655307 - RNA, 21 nt, Human
aguagcugggauuacaggcau

SEQ ID NO: 655308 - RNA, 24 nt, Human
agugcaaugguaugaucuuggcuc

SEQ ID NO: 655309 - RNA, 19 nt, Human
aguuagcgaggagcggccc

SEQ ID NO: 655310 - RNA, 21 nt, Human
auccuccugcuuuagccuccc

SEQ ID NO: 655311 - RNA, 20 nt, Human
aucugaaaggaaaaagccuc

SEQ ID NO: 655312 - RNA, 20 nt, Human
augggguuucuccauguugg

SEQ ID NO: 655313 - RNA, 21 nt, Human
augggguuucuccauguuggu

SEQ ID NO: 655314 - RNA, 24 nt, Human
augggguuucuccauguuggucag

SEQ ID NO: 655315 - RNA, 22 nt, Human
caaaguccaugcugcuaaccau

SEQ ID NO: 655316 - RNA, 24 nt, Human
caaagugcuaggauuacagguaua

SEQ ID NO: 655317 - RNA, 24 nt, Human
caaagugcugggauuacaggcgug

SEQ ID NO: 655318 - RNA, 22 nt, Human
caagcgauccucuugccucagc

SEQ ID NO: 655319 - RNA, 27 nt, Human
caagcgauccucuugccucagccuccc

SEQ ID NO: 655320 - RNA, 20 nt, Human
caagugauucuccugccuca

SEQ ID NO: 655321 - RNA, 22 nt, Human
caagugauucuccugccucagc

SEQ ID NO: 655322 - RNA, 18 nt, Human
caccacaccuggcccggc

SEQ ID NO: 655323 - RNA, 24 nt, Human
cacucuuguugcccaggcuggagu

SEQ ID NO: 655324 - RNA, 21 nt, Human
cacuguguugccuaggcuggu

SEQ ID NO: 655325 - RNA, 24 nt, Human
cacuguguugccuaggcuggucuc

SEQ ID NO: 655326 - RNA, 20 nt, Human
cacuuuacagaugagaaaac

SEQ ID NO: 655327 - RNA, 23 nt, Human
cagagcccacugccaagugcuga

SEQ ID NO: 655328 - RNA, 24 nt, Human
cagcagcugggacuauaggcaugu

SEQ ID NO: 655329 - RNA, 24 nt, Human
cagccucaaacuccugggcuaaag

SEQ ID NO: 655330 - RNA, 20 nt, Human
cagccuccugaguagcuggg

SEQ ID NO: 655331 - RNA, 24 nt, Human
caggguuucacuguguugccuagg

SEQ ID NO: 655332 - RNA, 22 nt, Human
caugcugcuaaccauuucaccu

SEQ ID NO: 655333 - RNA, 20 nt, Human
ccaaagugcuaggauuacag

SEQ ID NO: 655334 - RNA, 21 nt, Human
ccaaagugcuaggauuacagg

SEQ ID NO: 655335 - RNA, 21 nt, Human
ccaaagugcuaggauuacagg

SEQ ID NO: 655336 - RNA, 24 nt, Human
ccaaagugcuaggauuacagguau

SEQ ID NO: 655337 - RNA, 22 nt, Human
ccaaagugcugggauuacaggc

SEQ ID NO: 655338 - RNA, 22 nt, Human
ccaaagugcugggauuacaggc

SEQ ID NO: 655339 - RNA, 24 nt, Human
ccaaagugcugggauuacaggcgu

SEQ ID NO: 655340 - RNA, 22 nt, Human
ccacugccaagugcugacuguc

SEQ ID NO: 655341 - RNA, 25 nt, Human
ccauccuccugcuuuagccucccca

SEQ ID NO: 655342 - RNA, 22 nt, Human
ccauguuggucaggcuggccuc

SEQ ID NO: 655343 - RNA, 20 nt, Human
cccaaccucaggugauccgc

SEQ ID NO: 655344 - RNA, 24 nt, Human
cccaaccucaggugauccgcccgc

SEQ ID NO: 655345 - RNA, 19 nt, Human
cccacacucagacccgcca

SEQ ID NO: 655346 - RNA, 23 nt, Human
cccagcagcugggacuauaggca

SEQ ID NO: 655347 - RNA, 19 nt, Human
cccaggcuggagugcaaug

SEQ ID NO: 655348 - RNA, 20 nt, Human
cccaggcuggagugcaaugg

SEQ ID NO: 655349 - RNA, 24 nt, Human
cccauggccauggcacauggaagc

SEQ ID NO: 655350 - RNA, 25 nt, Human
cccauggccauggcacauggaagcu

SEQ ID NO: 655351 - RNA, 21 nt, Human
ccccaagaccagccaaaucaa

SEQ ID NO: 655352 - RNA, 23 nt, Human
ccccaagaccagccaaaucaagc

SEQ ID NO: 655353 - RNA, 23 nt, Human
ccccagcagcugggacuauaggc

SEQ ID NO: 655354 - RNA, 21 nt, Human
ccgcaaccucugcguccuggg

SEQ ID NO: 655355 - RNA, 23 nt, Human
ccgcaaccucugcguccuggguu

SEQ ID NO: 655356 - RNA, 24 nt, Human
ccgcaaccucugcguccuggguuc

SEQ ID NO: 655357 - RNA, 23 nt, Human
ccgcagccucaaacuccugggcu

SEQ ID NO: 655358 - RNA, 18 nt, Human
ccguggugcugggugugc

SEQ ID NO: 655359 - RNA, 25 nt, Human
ccuccugcuuuagccuccccagcag

SEQ ID NO: 655360 - RNA, 26 nt, Human
ccucuugccucagccucccaaagugc

SEQ ID NO: 655361 - RNA, 23 nt, Human
ccugaguagcugggauuacaggc

SEQ ID NO: 655362 - RNA, 24 nt, Human
ccugaguagcugggauuacaggca

SEQ ID NO: 655363 - RNA, 23 nt, Human
ccugccuggccagagguggaaau

SEQ ID NO: 655364 - RNA, 19 nt, Human
ccugggcucaagcgauccu

SEQ ID NO: 655365 - RNA, 20 nt, Human
ccugggcucaagcgauccuc

SEQ ID NO: 655366 - RNA, 23 nt, Human
ccuggguucaagugauucuccuc

SEQ ID NO: 655367 - RNA, 23 nt, Human
ccuggguucaagugauucuccug

SEQ ID NO: 655368 - RNA, 24 nt, Human
cgccaauggccaugcccagcagcc

SEQ ID NO: 655369 - RNA, 24 nt, Human
cgccucggccucccaaagugcugg

SEQ ID NO: 655370 - RNA, 21 nt, Human
cguccuggguucaagugauuc

SEQ ID NO: 655371 - RNA, 24 nt, Human
cguccuggguucaagugauucucc

SEQ ID NO: 655372 - RNA, 24 nt, Human
cucagccuccugaguagcugggau

SEQ ID NO: 655373 - RNA, 23 nt, Human
cuccugggcucaagcgauccucu

SEQ ID NO: 655374 - RNA, 18 nt, Human
cucuuguugcccaggcug

SEQ ID NO: 655375 - RNA, 23 nt, Human
cugaguagcugggauuacaggca

SEQ ID NO: 655376 - RNA, 24 nt, Human
cugaguagcugggauuacaggcau

SEQ ID NO: 655377 - RNA, 23 nt, Human
cugccucagccuccugaguagcu

SEQ ID NO: 655378 - RNA, 23 nt, Human
cugcuuuagccuccccagcagcu

SEQ ID NO: 655379 - RNA, 19 nt, Human
cugucagccacggccuauu

SEQ ID NO: 655380 - RNA, 23 nt, Human
cuugaucuguugcucaggcugaa

SEQ ID NO: 655381 - RNA, 20 nt, Human
cuugauggaaauucucccca

SEQ ID NO: 655382 - RNA, 24 nt, Human
cuugccucagccucccaaagugcu

SEQ ID NO: 655383 - RNA, 21 nt, Human
cuuuuuguaucuuuaguagag

SEQ ID NO: 655384 - RNA, 24 nt, Human
gagaugggguuucuccauguuggu

SEQ ID NO: 655385 - RNA, 19 nt, Human
gagggaccacaugcugugu

SEQ ID NO: 655386 - RNA, 21 nt, Human
gagguggaaauccucuccgug

SEQ ID NO: 655387 - RNA, 22 nt, Human
gaguagcugggauuacaggcau

SEQ ID NO: 655388 - RNA, 24 nt, Human
gaguagcugggauuacaggcaugc

SEQ ID NO: 655389 - RNA, 18 nt, Human
gauuacaggcaugcgcca

SEQ ID NO: 655390 - RNA, 24 nt, Human
gauuacaggcaugcgccaccaugc

SEQ ID NO: 655391 - RNA, 18 nt, Human
gauuacaggcgugagcca

SEQ ID NO: 655392 - RNA, 21 nt, Human
gauuacaggcgugagccacca

SEQ ID NO: 655393 - RNA, 22 nt, Human
gauuacaggcgugagccaccac

SEQ ID NO: 655394 - RNA, 21 nt, Human
gauuacagguauaagcuacug

SEQ ID NO: 655395 - RNA, 24 nt, Human
gauuacagguauaagcuacugugc

SEQ ID NO: 655396 - RNA, 21 nt, Human
gauucuccugccucagccucc

SEQ ID NO: 655397 - RNA, 19 nt, Human
gccuauugagggaccacau

SEQ ID NO: 655398 - RNA, 20 nt, Human
gccucagccuccugaguagc

SEQ ID NO: 655399 - RNA, 24 nt, Human
gcgauccucuugccucagccuccc

SEQ ID NO: 655400 - RNA, 23 nt, Human
gcuggccucgaacucccaaccuc

SEQ ID NO: 655401 - RNA, 23 nt, Human
ggagcggcccacacucagacccg

SEQ ID NO: 655402 - RNA, 24 nt, Human
ggauuacaggcaugcgccaccaug

SEQ ID NO: 655403 - RNA, 19 nt, Human
ggauuacaggcgugagcca

SEQ ID NO: 655404 - RNA, 22 nt, Human
ggauuacagguauaagcuacug

SEQ ID NO: 655405 - RNA, 22 nt, Human
gggcucaagcgauccucuugcc

SEQ ID NO: 655406 - RNA, 22 nt, Human
ggguuucuccauguuggucagg

SEQ ID NO: 655407 - RNA, 18 nt, Human
guagagacaggguuucac

SEQ ID NO: 655408 - RNA, 21 nt, Human
guagagacaggguuucacugu

SEQ ID NO: 655409 - RNA, 20 nt, Human
guagcugggauuacaggcau

SEQ ID NO: 655410 - RNA, 24 nt, Human
gugauccgcccgccucggccuccc

SEQ ID NO: 655411 - RNA, 24 nt, Human
gugauucuccugccucagccuccu

SEQ ID NO: 655412 - RNA, 23 nt, Human
guggugcgaucacaacucaccgc

SEQ ID NO: 655413 - RNA, 22 nt, Human
guuguuuuguuuuuguuuuuug

SEQ ID NO: 655414 - RNA, 23 nt, Human
uaaagccauccuccugcuuuagc

SEQ ID NO: 655415 - RNA, 24 nt, Human
uacaggcaugcgccaccaugccca

SEQ ID NO: 655416 - RNA, 22 nt, Human
uacaggcgugagccaccacacc

SEQ ID NO: 655417 - RNA, 22 nt, Human
uacaggcgugagccaccacacc

SEQ ID NO: 655418 - RNA, 22 nt, Human
uagagacaggguuucacugugu

SEQ ID NO: 655419 - RNA, 19 nt, Human
uaggauuacagguauaagc

SEQ ID NO: 655420 - RNA, 22 nt, Human
uaggauuacagguauaagcuac

SEQ ID NO: 655421 - RNA, 22 nt, Human
uaggauuacagguauaagcuac

SEQ ID NO: 655422 - RNA, 24 nt, Human
uaggauuacagguauaagcuacug

SEQ ID NO: 655423 - RNA, 30 nt, Human
uaggauuacagguauaagcuacugugccaa

SEQ ID NO: 655424 - RNA, 24 nt, Human
uaguagagaugggguuucuccaug

SEQ ID NO: 655425 - RNA, 19 nt, Human
ucaagugauucuccugccu

SEQ ID NO: 655426 - RNA, 21 nt, Human
ucaccacaucagaaugucaag

SEQ ID NO: 655427 - RNA, 24 nt, Human
ucaccgcaaccucugcguccuggg

SEQ ID NO: 655428 - RNA, 24 nt, Human
ucaccgcagccucaaacuccuggg

SEQ ID NO: 655429 - RNA, 23 nt, Human
ucacucuuguugcccaggcugga

SEQ ID NO: 655430 - RNA, 21 nt, Human
ucacuguguugccuaggcugg

SEQ ID NO: 655431 - RNA, 22 nt, Human
ucacuguguugccuaggcuggu

SEQ ID NO: 655432 - RNA, 22 nt, Human
ucagacccgccaauggccaugc

SEQ ID NO: 655433 - RNA, 20 nt, Human
ucagccuccugaguagcugg

SEQ ID NO: 655434 - RNA, 19 nt, Human
ucaggcugaaugcaguggu

SEQ ID NO: 655435 - RNA, 18 nt, Human
uccacagagcccacugcc

SEQ ID NO: 655436 - RNA, 23 nt, Human
ucccaaagugcuaggauuacagg

SEQ ID NO: 655437 - RNA, 24 nt, Human
ucccaaagugcugggauuacaggc

SEQ ID NO: 655438 - RNA, 24 nt, Human
uccccagcagcugggacuauaggc

SEQ ID NO: 655439 - RNA, 24 nt, Human
uccugaguagcugggauuacaggc

SEQ ID NO: 655440 - RNA, 21 nt, Human
uccugggcucaagcgauccuc

SEQ ID NO: 655441 - RNA, 21 nt, Human
uccugggcucaagcgauccuc

SEQ ID NO: 655442 - RNA, 24 nt, Human
uccugggcucaagcgauccucuug

SEQ ID NO: 655443 - RNA, 21 nt, Human
uccuggguucaagugauucuc

SEQ ID NO: 655444 - RNA, 24 nt, Human
uccuggguucaagugauucuccug

SEQ ID NO: 655445 - RNA, 22 nt, Human
ucucaaacuccugggcucaagc

SEQ ID NO: 655446 - RNA, 24 nt, Human
ucuccugccucagccuccugagua

SEQ ID NO: 655447 - RNA, 18 nt, Human
ucuggcuguuccuucccg

SEQ ID NO: 655448 - RNA, 23 nt, Human
ucuguugcucaggcugaaugcag

SEQ ID NO: 655449 - RNA, 19 nt, Human
ucuugaucuguugcucagg

SEQ ID NO: 655450 - RNA, 23 nt, Human
ucuugaucuguugcucaggcuga

SEQ ID NO: 655451 - RNA, 24 nt, Human
ucuugaucuguugcucaggcugaa

SEQ ID NO: 655452 - RNA, 22 nt, Human
ucuuguugcccaggcuggagug

SEQ ID NO: 655453 - RNA, 22 nt, Human
ucuuuaguagagaugggguuuc

SEQ ID NO: 655454 - RNA, 18 nt, Human
ugaaugcaguggugcgau

SEQ ID NO: 655455 - RNA, 20 nt, Human
ugacgcuaugagaaaugcug

SEQ ID NO: 655456 - RNA, 19 nt, Human
ugagaaaacugaggcugag

SEQ ID NO: 655457 - RNA, 22 nt, Human
ugagacagugucuugaucuguu

SEQ ID NO: 655458 - RNA, 19 nt, Human
ugaggcugagggagggggu

SEQ ID NO: 655459 - RNA, 21 nt, Human
ugagggaggggguugcccaag

SEQ ID NO: 655460 - RNA, 20 nt, Human
ugauucuccugccucagccu

SEQ ID NO: 655461 - RNA, 23 nt, Human
ugcccaagcagacaugcgcagag

SEQ ID NO: 655462 - RNA, 18 nt, Human
ugcccaggcuggagugca

SEQ ID NO: 655463 - RNA, 21 nt, Human
ugcccaggcuggagugcaaug

SEQ ID NO: 655464 - RNA, 21 nt, Human
ugcccaggcuggagugcaaug

SEQ ID NO: 655465 - RNA, 24 nt, Human
ugccuaggcuggucucaaacuccu

SEQ ID NO: 655466 - RNA, 24 nt, Human
ugccucagccucccaaagugcuag

SEQ ID NO: 655467 - RNA, 24 nt, Human
ugccucagccuccugaguagcugg

SEQ ID NO: 655468 - RNA, 24 nt, Human
ugcuaggauuacagguauaagcua

SEQ ID NO: 655469 - RNA, 23 nt, Human
ugcucaggcugaaugcaguggug

SEQ ID NO: 655470 - RNA, 24 nt, Human
ugcugggauuacaggcgugagcca

SEQ ID NO: 655471 - RNA, 19 nt, Human
ugcuggguccacagagccc

SEQ ID NO: 655472 - RNA, 19 nt, Human
ugcugggugugcccauggc

SEQ ID NO: 655473 - RNA, 21 nt, Human
ugcuuuagccuccccagcagc

SEQ ID NO: 655474 - RNA, 18 nt, Human
uggaaauccucuccgugg

SEQ ID NO: 655475 - RNA, 19 nt, Human
uggagugcaaugguaugau

SEQ ID NO: 655476 - RNA, 23 nt, Human
uggagugcaaugguaugaucuug

SEQ ID NO: 655477 - RNA, 24 nt, Human
uggagugcaaugguaugaucuugg

SEQ ID NO: 655478 - RNA, 20 nt, Human
uggccucgaacucccaaccu

SEQ ID NO: 655479 - RNA, 21 nt, Human
uggccucgaacucccaaccuc

SEQ ID NO: 655480 - RNA, 18 nt, Human
ugggacuauaggcaugug

SEQ ID NO: 655481 - RNA, 24 nt, Human
ugggacuauaggcaugugcaacca

SEQ ID NO: 655482 - RNA, 18 nt, Human
ugggauuacaggcaugcg

SEQ ID NO: 655483 - RNA, 21 nt, Human
ugggauuacaggcaugcgcca

SEQ ID NO: 655484 - RNA, 22 nt, Human
ugggauuacaggcaugcgccac

SEQ ID NO: 655485 - RNA, 24 nt, Human
ugggauuacaggcaugcgccacca

SEQ ID NO: 655486 - RNA, 18 nt, Human
ugggauuacaggcgugag

SEQ ID NO: 655487 - RNA, 19 nt, Human
ugggauuacaggcgugagc

SEQ ID NO: 655488 - RNA, 22 nt, Human
ugggauuacaggcgugagccac

SEQ ID NO: 655489 - RNA, 23 nt, Human
ugggauuacaggcgugagccacc

SEQ ID NO: 655490 - RNA, 24 nt, Human
ugggauuacaggcgugagccacca

SEQ ID NO: 655491 - RNA, 19 nt, Human
ugggcucaagcgauccucu

SEQ ID NO: 655492 - RNA, 24 nt, Human
ugggcucaagcgauccucuugccu

SEQ ID NO: 655493 - RNA, 24 nt, Human
ugggguuucuccauguuggucagg

SEQ ID NO: 655494 - RNA, 23 nt, Human
uggguucaagugauucuccugcc

SEQ ID NO: 655495 - RNA, 24 nt, Human
uggguucaagugauucuccugccu

SEQ ID NO: 655496 - RNA, 21 nt, Human
uggucaggcuggccucgaacu

SEQ ID NO: 655497 - RNA, 18 nt, Human
uggugcugggugugccca

SEQ ID NO: 655498 - RNA, 24 nt, Human
uguagagacaggguuucacugugu

SEQ ID NO: 655499 - RNA, 24 nt, Human
uguguugccuaggcuggucucaaa

SEQ ID NO: 655500 - RNA, 20 nt, Human
uguugcccaggcuggagugc

SEQ ID NO: 655501 - RNA, 22 nt, Human
uguugcccaggcuggagugcaa

SEQ ID NO: 655502 - RNA, 23 nt, Human
uuagccuccccagcagcugggac

SEQ ID NO: 655503 - RNA, 23 nt, Human
uuagcgaggagcggcccacacuc

SEQ ID NO: 655504 - RNA, 24 nt, Human
uuagcgaggagcggcccacacuca

SEQ ID NO: 655505 - RNA, 18 nt, Human
uuaguagagaugggguuu

SEQ ID NO: 655506 - RNA, 24 nt, Human
uuaguagagaugggguuucuccau

SEQ ID NO: 655507 - RNA, 21 nt, Human
uucaagugauucuccugccuc

SEQ ID NO: 655508 - RNA, 23 nt, Human
uucaagugauucuccugccucag

SEQ ID NO: 655509 - RNA, 24 nt, Human
uucaagugauucuccugccucagc

SEQ ID NO: 655510 - RNA, 24 nt, Human
uucacucuuguugcccaggcugga

SEQ ID NO: 655511 - RNA, 24 nt, Human
uugccucagccucccaaagugcua

SEQ ID NO: 655512 - RNA, 24 nt, Human
uuguagagacaggguuucacugug

SEQ ID NO: 655513 - RNA, 19 nt, Human
uuguuguuguuuuguuuuu

SEQ ID NO: 655514 - RNA, 23 nt, Human
uuguuguuuuguuuuuguuuuuu

SEQ ID NO: 655515 - RNA, 18 nt, Human
uuuaagcaaaaagcaagu

SEQ ID NO: 655516 - RNA, 24 nt, Human
uuucacucuuguugcccaggcugg

SEQ ID NO: 655517 - RNA, 19 nt, Human
uuucacuguguugccuagg

SEQ ID NO: 655518 - RNA, 23 nt, Human
uuucacuguguugccuaggcugg

SEQ ID NO: 655519 - RNA, 21 nt, Human
uuucuccauguuggucaggcu

SEQ ID NO: 655520 - RNA, 23 nt, Human
uuuguagagacaggguuucacug

SEQ ID NO: 655521 - RNA, 24 nt, Human
uuuguagagacaggguuucacugu

SEQ ID NO: 655522 - RNA, 21 nt, Human
uuuuuguaucuuuaguagaga

SEQ ID NO: 655523 - RNA, 23 nt, Human
uuuuuguaucuuuaguagagaug

SEQ ID NO: 655524 - RNA, 22 nt, Human
uuuuuuguagagacaggguuuc

SEQ ID NO: 655525 - RNA, 24 nt, Human
uuuuuuguagagacaggguuucac

SEQ ID NO: 655526 - RNA, 24 nt, Human
aaaaaaagaaaaaaauacaaugaa

SEQ ID NO: 655527 - RNA, 29 nt, Human
aaagaaaaaaauacaaugaaauaauuuaa

SEQ ID NO: 655528 - RNA, 23 nt, Human
aaagcaguuuuacuguacacaga

SEQ ID NO: 655529 - RNA, 27 nt, Human
aaauauaaaaaauacgaguauauuuug

SEQ ID NO: 655530 - RNA, 22 nt, Human
aagcauggaagacuacagucau

SEQ ID NO: 655531 - RNA, 18 nt, Human
acauauauaaaucuauag

SEQ ID NO: 655532 - RNA, 21 nt, Human
agauccaauagauucuguaac

SEQ ID NO: 655533 - RNA, 21 nt, Human
agccaccuucccuuccagggu

SEQ ID NO: 655534 - RNA, 26 nt, Human
aggaggaggcagacccggauccucgc

SEQ ID NO: 655535 - RNA, 24 nt, Human
aggaggcagacccggauccucgca

SEQ ID NO: 655536 - RNA, 19 nt, Human
aggcacuagguauggaaac

SEQ ID NO: 655537 - RNA, 27 nt, Human
cagaaaaagcucaagaaugcacaguag

SEQ ID NO: 655538 - RNA, 22 nt, Human
cagcacugacuggcaagcugga

SEQ ID NO: 655539 - RNA, 23 nt, Human
cagggaacccacgauggcccaac

SEQ ID NO: 655540 - RNA, 21 nt, Human
cgagaaggcacugcuguggug

SEQ ID NO: 655541 - RNA, 24 nt, Human
cugucuucagcaggaggaggcaga

SEQ ID NO: 655542 - RNA, 24 nt, Human
gaagaagccaccuucccuuccagg

SEQ ID NO: 655543 - RNA, 19 nt, Human
gaagcacugugggaaaagg

SEQ ID NO: 655544 - RNA, 23 nt, Human
gaggucccaggcuggcugggcuc

SEQ ID NO: 655545 - RNA, 18 nt, Human
gcagagcaucccaucccc

SEQ ID NO: 655546 - RNA, 26 nt, Human
gcccgcugcugcaugucuggggagcc

SEQ ID NO: 655547 - RNA, 19 nt, Human
uaaauaaauauccuaauug

SEQ ID NO: 655548 - RNA, 22 nt, Human
uaaguaauguugucuacaucca

SEQ ID NO: 655549 - RNA, 21 nt, Human
uagguauggaaacgugaggug

SEQ ID NO: 655550 - RNA, 22 nt, Human
uauauaaaaguucugauucaaa

SEQ ID NO: 655551 - RNA, 18 nt, Human
uauauaacacauacauau

SEQ ID NO: 655552 - RNA, 26 nt, Human
uauuuuuuccacucacauuuuucucu

SEQ ID NO: 655553 - RNA, 21 nt, Human
uccagggucccaugaugaucu

SEQ ID NO: 655554 - RNA, 22 nt, Human
ugaguauauaacacauacauau

SEQ ID NO: 655555 - RNA, 22 nt, Human
ugauucaaaugagggaaaaaaa

SEQ ID NO: 655556 - RNA, 23 nt, Human
uggaauauagccagccacaugga

SEQ ID NO: 655557 - RNA, 26 nt, Human
uggcaagcuggaagaagccaccuucc

SEQ ID NO: 655558 - RNA, 23 nt, Human
ugguaagccacccacuuugggag

SEQ ID NO: 655559 - RNA, 21 nt, Human
uguaaacaucaguguuugggu

SEQ ID NO: 655560 - RNA, 24 nt, Human
uguacacagaagugcaaugcuaca

SEQ ID NO: 655561 - RNA, 22 nt, Human
uguauacauauauaaaucuaua

SEQ ID NO: 655562 - RNA, 21 nt, Human
uuuacuguacacagaagugca

SEQ ID NO: 655563 - RNA, 18 nt, Human
uuuuucagcacugacugg

SEQ ID NO: 655564 - RNA, 20 nt, Human
aaaaaaaagcaaaggcaacu

SEQ ID NO: 655565 - RNA, 24 nt, Human
aaaaaaacauuuuacaccagggag

SEQ ID NO: 655566 - RNA, 24 nt, Human
aaaaagcaaaggcaacugaaagua

SEQ ID NO: 655567 - RNA, 20 nt, Human
aacagagccagccuccaucu

SEQ ID NO: 655568 - RNA, 18 nt, Human
aagaaacaaggcaaaggu

SEQ ID NO: 655569 - RNA, 24 nt, Human
aaggaggaaaaaaggcuuuaaaaa

SEQ ID NO: 655570 - RNA, 21 nt, Human
aauaguuugguaccuuacagc

SEQ ID NO: 655571 - RNA, 28 nt, Human
acauaacuucagagaaggggggaacgcc

SEQ ID NO: 655572 - RNA, 18 nt, Human
acugaaucaugacauucc

SEQ ID NO: 655573 - RNA, 23 nt, Human
agaaacaggaacauuguugaugc

SEQ ID NO: 655574 - RNA, 20 nt, Human
agcaaaggcaacugaaagua

SEQ ID NO: 655575 - RNA, 24 nt, Human
agccaggaguucgagguuauagug

SEQ ID NO: 655576 - RNA, 27 nt, Human
aggcacuuaacuuuaaaauagaaaaau

SEQ ID NO: 655577 - RNA, 23 nt, Human
aggcugaagugggagaucacuug

SEQ ID NO: 655578 - RNA, 19 nt, Human
agugcaguggaaauugguu

SEQ ID NO: 655579 - RNA, 24 nt, Human
aguggcucuugcuuauaaucccag

SEQ ID NO: 655580 - RNA, 18 nt, Human
aguuugguaccuuacagc

SEQ ID NO: 655581 - RNA, 25 nt, Human
auacaggaaaaauguuaugacuauc

SEQ ID NO: 655582 - RNA, 20 nt, Human
aucacuugagccaggaguuc

SEQ ID NO: 655583 - RNA, 23 nt, Human
aucacuugagccaggaguucgag

SEQ ID NO: 655584 - RNA, 24 nt, Human
aucacuugagccaggaguucgagg

SEQ ID NO: 655585 - RNA, 23 nt, Human
caaaaaaaagcaaaggcaacuga

SEQ ID NO: 655586 - RNA, 26 nt, Human
caaaaaaaagcaaaggcaacugaaag

SEQ ID NO: 655587 - RNA, 18 nt, Human
caaauaccaugagcuggg

SEQ ID NO: 655588 - RNA, 22 nt, Human
caacaaauaccaugagcuggga

SEQ ID NO: 655589 - RNA, 20 nt, Human
caacaaaugccacguaccau

SEQ ID NO: 655590 - RNA, 24 nt, Human
caacagagccagccuccaucucuu

SEQ ID NO: 655591 - RNA, 22 nt, Human
caccaacagagccagccuccau

SEQ ID NO: 655592 - RNA, 23 nt, Human
caccagggagacuggcaaauuuc

SEQ ID NO: 655593 - RNA, 22 nt, Human
caggaacagaggagaugaacaa

SEQ ID NO: 655594 - RNA, 18 nt, Human
caggaguucgagguuaua

SEQ ID NO: 655595 - RNA, 18 nt, Human
caugacauuccagcagcu

SEQ ID NO: 655596 - RNA, 19 nt, Human
cccuccaaaaaaaagcaaa

SEQ ID NO: 655597 - RNA, 22 nt, Human
ccuccaaaaaaaagcaaaggca

SEQ ID NO: 655598 - RNA, 21 nt, Human
ccuucuguggaacuuuucuca

SEQ ID NO: 655599 - RNA, 23 nt, Human
cuccaaaaaaaagcaaaggcaac

SEQ ID NO: 655600 - RNA, 22 nt, Human
cuccaaaaaaaagcaaaggcag

SEQ ID NO: 655601 - RNA, 18 nt, Human
cuuauuuuucccugaagu

SEQ ID NO: 655602 - RNA, 23 nt, Human
gaacuaugaucauggcaccgcac

SEQ ID NO: 655603 - RNA, 23 nt, Human
gaggauuuuagcagaaaucuauu

SEQ ID NO: 655604 - RNA, 23 nt, Human
gaucacuugagccaggaguucga

SEQ ID NO: 655605 - RNA, 22 nt, Human
gcuaaguaaaaagcuaacaaaa

SEQ ID NO: 655606 - RNA, 20 nt, Human
gcugaguacuauuugugggc

SEQ ID NO: 655607 - RNA, 24 nt, Human
ggaaaaaaggcuuuaaaaaaacau

SEQ ID NO: 655608 - RNA, 19 nt, Human
ggagaggauuuuagcagaa

SEQ ID NO: 655609 - RNA, 19 nt, Human
ggagaucacuugagccagg

SEQ ID NO: 655610 - RNA, 19 nt, Human
gggagaggauuuuagcaga

SEQ ID NO: 655611 - RNA, 18 nt, Human
gggaggcugaagugggag

SEQ ID NO: 655612 - RNA, 22 nt, Human
gggaggcugaagugggagauca

SEQ ID NO: 655613 - RNA, 20 nt, Human
guacuagugcaguggaaauu

SEQ ID NO: 655614 - RNA, 23 nt, Human
guauuuauaaacugagaaaaaua

SEQ ID NO: 655615 - RNA, 26 nt, Human
guggaacuuuuucagguuagacaaaa

SEQ ID NO: 655616 - RNA, 18 nt, Human
uaaaaaagacaggaggga

SEQ ID NO: 655617 - RNA, 19 nt, Human
uaaaaagcuaacaaaauca

SEQ ID NO: 655618 - RNA, 27 nt, Human
uaaaaagucauucauauucgaccagua

SEQ ID NO: 655619 - RNA, 18 nt, Human
uaacuuaaaaaagacagg

SEQ ID NO: 655620 - RNA, 18 nt, Human
uaacuucagagaagggca

SEQ ID NO: 655621 - RNA, 19 nt, Human
uaaguggauaucugccucc

SEQ ID NO: 655622 - RNA, 20 nt, Human
uaaguggauaucugccuccc

SEQ ID NO: 655623 - RNA, 24 nt, Human
uaaguggauaucugccucccaaaa

SEQ ID NO: 655624 - RNA, 24 nt, Human
uaauuugcuuauagaaaggcuuuc

SEQ ID NO: 655625 - RNA, 18 nt, Human
uaguuugguaccuuacag

SEQ ID NO: 655626 - RNA, 18 nt, Human
uauauuugcuuuaucaaa

SEQ ID NO: 655627 - RNA, 19 nt, Human
uaugaucauggcaccgcac

SEQ ID NO: 655628 - RNA, 21 nt, Human
uauuugccaugagaguauuuc

SEQ ID NO: 655629 - RNA, 19 nt, Human
ucacuaugggacagagguc

SEQ ID NO: 655630 - RNA, 24 nt, Human
ucagaaaagauaauuagcacuauu

SEQ ID NO: 655631 - RNA, 24 nt, Human
ucauauucgaccaguaguauuacu

SEQ ID NO: 655632 - RNA, 18 nt, Human
uccuucugaaaguaagau

SEQ ID NO: 655633 - RNA, 18 nt, Human
uccuugacuccgaaagga

SEQ ID NO: 655634 - RNA, 25 nt, Human
ucuagaaucugaaaaauauaagaca

SEQ ID NO: 655635 - RNA, 24 nt, Human
ucuuguguugccuaaguaaacuug

SEQ ID NO: 655636 - RNA, 25 nt, Human
ugaaauauauaaguaaaaauaagca

SEQ ID NO: 655637 - RNA, 23 nt, Human
ugaagugggagaucacuugagcc

SEQ ID NO: 655638 - RNA, 24 nt, Human
ugaagugggagaucacuugagcca

SEQ ID NO: 655639 - RNA, 23 nt, Human
ugacuacaacagaauaauagaua

SEQ ID NO: 655640 - RNA, 21 nt, Human
ugagaggauaaauauuugcca

SEQ ID NO: 655641 - RNA, 20 nt, Human
ugagaguauuucaagugaau

SEQ ID NO: 655642 - RNA, 19 nt, Human
ugcagacauauauauauau

SEQ ID NO: 655643 - RNA, 23 nt, Human
ugcuuauaaucccagauacucgg

SEQ ID NO: 655644 - RNA, 22 nt, Human
ugcuuauagaaaggcuuuccuu

SEQ ID NO: 655645 - RNA, 23 nt, Human
uggcacaaaaaugcuuaccuaua

SEQ ID NO: 655646 - RNA, 22 nt, Human
uggcucuugcuuauaaucccag

SEQ ID NO: 655647 - RNA, 18 nt, Human
ugucuuccaaauguggaa

SEQ ID NO: 655648 - RNA, 19 nt, Human
uuaaauugucuuccaaaug

SEQ ID NO: 655649 - RNA, 21 nt, Human
uuaguuguguuuuuccauaac

SEQ ID NO: 655650 - RNA, 24 nt, Human
uucaauguuacacauguuucacua

SEQ ID NO: 655651 - RNA, 20 nt, Human
uucacugccuucuguggaac

SEQ ID NO: 655652 - RNA, 21 nt, Human
uucauauguuaaaacugaugc

SEQ ID NO: 655653 - RNA, 22 nt, Human
uucauauucgaccaguaguauu

SEQ ID NO: 655654 - RNA, 18 nt, Human
uucgaccaguaguauuac

SEQ ID NO: 655655 - RNA, 21 nt, Human
uugaagugaauggccacggac

SEQ ID NO: 655656 - RNA, 22 nt, Human
uugcagacauauauauauauau

SEQ ID NO: 655657 - RNA, 22 nt, Human
uugccaugagaguauuucaagu

SEQ ID NO: 655658 - RNA, 28 nt, Human
uuuaacaaguaaagugagguuuauuauu

SEQ ID NO: 655659 - RNA, 21 nt, Human
uuuaagaagacauucaaaauc

SEQ ID NO: 655660 - RNA, 22 nt, Human
uuuacauaacuucagagaaggg

SEQ ID NO: 655661 - RNA, 19 nt, Human
uuucccuccaaaaaaaagc

SEQ ID NO: 655662 - RNA, 23 nt, Human
caaaauggaaacaguaaugaaca

SEQ ID NO: 655663 - RNA, 22 nt, Human
caaauuuucagauuagucugua

SEQ ID NO: 655664 - RNA, 20 nt, Human
uacuuuucucaguuguuugc

SEQ ID NO: 655665 - RNA, 23 nt, Human
uagccuugaaacaucaaagacau

SEQ ID NO: 655666 - RNA, 22 nt, Human
uaggauagaaugucuucuuuaa

SEQ ID NO: 655667 - RNA, 22 nt, Human
uaguaaucaaaaucuccagcac

SEQ ID NO: 655668 - RNA, 22 nt, Human
ucaauauuaagugguucucucc

SEQ ID NO: 655669 - RNA, 22 nt, Human
uuucuuguugucaucauguuuu

SEQ ID NO: 655670 - RNA, 22 nt, Human
uuuucagauuagucuguacuuc

SEQ ID NO: 655671 - RNA, 18 nt, Human
uuuuuuuuuuuuuuuuug

SEQ ID NO: 655672 - RNA, 23 nt, Human
uuuuuuuuuuuuuuuuugaacuu

SEQ ID NO: 655673 - RNA, 23 nt, Human
aaaaaaaaaaaaaaaucggcuca

SEQ ID NO: 655674 - RNA, 19 nt, Human
aaaaaaaaaaaaaaucggc

SEQ ID NO: 655675 - RNA, 20 nt, Human
aaaaaauggagacacuuguu

SEQ ID NO: 655676 - RNA, 20 nt, Human
aaaaagaaaaugaacaaaga

SEQ ID NO: 655677 - RNA, 20 nt, Human
aaaacaucagcucgcaagag

SEQ ID NO: 655678 - RNA, 19 nt, Human
aaacacuguuaaauucaug

SEQ ID NO: 655679 - RNA, 23 nt, Human
aagaaagcauucacagcaaggcc

SEQ ID NO: 655680 - RNA, 24 nt, Human
aaugacaugaaccugggaggcgga

SEQ ID NO: 655681 - RNA, 24 nt, Human
acugagccacugcacuccagccug

SEQ ID NO: 655682 - RNA, 21 nt, Human
acugcacuccagccugggcaa

SEQ ID NO: 655683 - RNA, 24 nt, Human
acugcacuccagccugggcaauag

SEQ ID NO: 655684 - RNA, 26 nt, Human
acugcacuccagccugggcaauagag

SEQ ID NO: 655685 - RNA, 24 nt, Human
agccacugcacuccagccugggca

SEQ ID NO: 655686 - RNA, 24 nt, Human
agccugggcaauagagcaagacuc

SEQ ID NO: 655687 - RNA, 22 nt, Human
aggcaggagaaugacaugaacc

SEQ ID NO: 655688 - RNA, 24 nt, Human
aggcaggagaaugacaugaaccug

SEQ ID NO: 655689 - RNA, 24 nt, Human
aggcggagcuugcaguaagccgag

SEQ ID NO: 655690 - RNA, 19 nt, Human
aggcugaggcaggagaaug

SEQ ID NO: 655691 - RNA, 24 nt, Human
auagagcaagacuccaucucaaaa

SEQ ID NO: 655692 - RNA, 18 nt, Human
caaagcccgauucucugc

SEQ ID NO: 655693 - RNA, 21 nt, Human
caagacuccaucucaaaaaaa

SEQ ID NO: 655694 - RNA, 23 nt, Human
caauagagcaagacuccaucuca

SEQ ID NO: 655695 - RNA, 21 nt, Human
cacagcaaggccuauaaucag

SEQ ID NO: 655696 - RNA, 23 nt, Human
cacuccagccugggcaauagagc

SEQ ID NO: 655697 - RNA, 18 nt, Human
cacugcacuccagccugg

SEQ ID NO: 655698 - RNA, 19 nt, Human
cacugcacuccagccuggg

SEQ ID NO: 655699 - RNA, 21 nt, Human
cacugcacuccagccugggca

SEQ ID NO: 655700 - RNA, 23 nt, Human
cacugcacuccagccugggcaau

SEQ ID NO: 655701 - RNA, 24 nt, Human
cacugcacuccagccugggcaaua

SEQ ID NO: 655702 - RNA, 26 nt, Human
cacugcacuccagccugggcaauaga

SEQ ID NO: 655703 - RNA, 20 nt, Human
cacugcacuccagccugggg

SEQ ID NO: 655704 - RNA, 24 nt, Human
cagaugcuuccaucaucaguacuc

SEQ ID NO: 655705 - RNA, 23 nt, Human
cagcucgcaagaggcugaggcag

SEQ ID NO: 655706 - RNA, 18 nt, Human
caggagaaugacaugaac

SEQ ID NO: 655707 - RNA, 24 nt, Human
cauaacuggaugccuggauugucc

SEQ ID NO: 655708 - RNA, 21 nt, Human
caugaaccugggaggcggagc

SEQ ID NO: 655709 - RNA, 19 nt, Human
ccacccagcugccaccaau

SEQ ID NO: 655710 - RNA, 20 nt, Human
ccacugcacuccagccuggg

SEQ ID NO: 655711 - RNA, 21 nt, Human
ccacugcacuccagccugggc

SEQ ID NO: 655712 - RNA, 23 nt, Human
ccacugcacuccagccugggcaa

SEQ ID NO: 655713 - RNA, 23 nt, Human
ccacugcacuccagccugggcaa

SEQ ID NO: 655714 - RNA, 24 nt, Human
ccacugcacuccagccugggcaau

SEQ ID NO: 655715 - RNA, 21 nt, Human
ccagaaagccuuacuuauuuu

SEQ ID NO: 655716 - RNA, 22 nt, Human
ccagcugccaccaauaaaauca

SEQ ID NO: 655717 - RNA, 19 nt, Human
ccugccacccagcugccac

SEQ ID NO: 655718 - RNA, 22 nt, Human
ccugggcaauagagcaagacuc

SEQ ID NO: 655719 - RNA, 18 nt, Human
cgucuugacucugccagc

SEQ ID NO: 655720 - RNA, 21 nt, Human
cucaucuuuuauugcuguugg

SEQ ID NO: 655721 - RNA, 19 nt, Human
cuccaucucaaaaaaaaaa

SEQ ID NO: 655722 - RNA, 23 nt, Human
gaaucaaagaauuaugaaaguaa

SEQ ID NO: 655723 - RNA, 23 nt, Human
gagacugagccacugcacuccag

SEQ ID NO: 655724 - RNA, 24 nt, Human
gcacuccagccugggcaauagagc

SEQ ID NO: 655725 - RNA, 22 nt, Human
gccacugcacuccagccugggc

SEQ ID NO: 655726 - RNA, 24 nt, Human
gccacugcacuccagccugggcaa

SEQ ID NO: 655727 - RNA, 19 nt, Human
gcccuuuuaauugcaaagg

SEQ ID NO: 655728 - RNA, 24 nt, Human
gcuaaaaauggcagccaaaaaaaa

SEQ ID NO: 655729 - RNA, 21 nt, Human
guggaguguucugcaaagccc

SEQ ID NO: 655730 - RNA, 23 nt, Human
uaaacagcccuuuuaauugcaaa

SEQ ID NO: 655731 - RNA, 20 nt, Human
uaaggcuuucaaaacugugg

SEQ ID NO: 655732 - RNA, 23 nt, Human
uaauacaguauacauuaucuuuc

SEQ ID NO: 655733 - RNA, 19 nt, Human
uacuugaccaccaaagaca

SEQ ID NO: 655734 - RNA, 23 nt, Human
uagagcaagacuccaucucaaaa

SEQ ID NO: 655735 - RNA, 19 nt, Human
ucaggcauaacuggaugcc

SEQ ID NO: 655736 - RNA, 22 nt, Human
ucaguaagaugugugaaaaguu

SEQ ID NO: 655737 - RNA, 23 nt, Human
uccaucucaaaaaaaaaaaaaaa

SEQ ID NO: 655738 - RNA, 23 nt, Human
uccaucucaaaaaaaaaaaaaaa

SEQ ID NO: 655739 - RNA, 19 nt, Human
ugaaauauucacaggaauc

SEQ ID NO: 655740 - RNA, 24 nt, Human
ugacaccaugccaaacacuguuaa

SEQ ID NO: 655741 - RNA, 23 nt, Human
ugaggcaggagaaugacaugaac

SEQ ID NO: 655742 - RNA, 24 nt, Human
ugaggcaggagaaugacaugaacc

SEQ ID NO: 655743 - RNA, 25 nt, Human
ugaggcaggagaaugacaugaaccu

SEQ ID NO: 655744 - RNA, 24 nt, Human
ugagguagcuaaaaauggcagcca

SEQ ID NO: 655745 - RNA, 25 nt, Human
ugcaaaggagaaaaaaauggagaca

SEQ ID NO: 655746 - RNA, 22 nt, Human
ugcaguaagccgagacugagcc

SEQ ID NO: 655747 - RNA, 22 nt, Human
ugccuggauuguccugccaccc

SEQ ID NO: 655748 - RNA, 19 nt, Human
ugcuguugguugagaugaa

SEQ ID NO: 655749 - RNA, 29 nt, Human
ugggaggcggagcuugcaguaacaacggu

SEQ ID NO: 655750 - RNA, 23 nt, Human
uguauauaucaaacuucagaucu

SEQ ID NO: 655751 - RNA, 19 nt, Human
uguugaggcuuuucucaag

SEQ ID NO: 655752 - RNA, 25 nt, Human
uguuuugaggucaauguucuuuuaa

SEQ ID NO: 655753 - RNA, 22 nt, Human
uucugcaaagcccgauucucug

SEQ ID NO: 655754 - RNA, 20 nt, Human
uugaccaccaaagacaguau

SEQ ID NO: 655755 - RNA, 24 nt, Human
uugaccaccaaagacaguauuuuu

SEQ ID NO: 655756 - RNA, 25 nt, Human
uugcaguaagccgagacugagccac

SEQ ID NO: 655757 - RNA, 25 nt, Human
uuugcuuacauucagaauaaggcuu

SEQ ID NO: 655758 - RNA, 21 nt, Human
uuuucuguaagaagaggcuuu

SEQ ID NO: 655759 - RNA, 25 nt, Human
uuuuuuuuuuuuuuuuuuuauuuuu

SEQ ID NO: 655760 - RNA, 19 nt, Human
aaaugugacccaaccuagu

SEQ ID NO: 655761 - RNA, 28 nt, Human
aacaaaaugacuuaauuucaguacccac

SEQ ID NO: 655762 - RNA, 18 nt, Human
aagcauacaguauguuac

SEQ ID NO: 655763 - RNA, 23 nt, Human
aauauuaaaagcauaccgaaaaa

SEQ ID NO: 655764 - RNA, 25 nt, Human
acaaaacacaaugcaugcagggaaa

SEQ ID NO: 655765 - RNA, 21 nt, Human
acaaaguaaguguugaaaucc

SEQ ID NO: 655766 - RNA, 22 nt, Human
accacuaguccauacuggccug

SEQ ID NO: 655767 - RNA, 20 nt, Human
acuguucugcuuccccaucu

SEQ ID NO: 655768 - RNA, 19 nt, Human
agacauuucugagcaacau

SEQ ID NO: 655769 - RNA, 19 nt, Human
aguaacaaauauaaaaaag

SEQ ID NO: 655770 - RNA, 21 nt, Human
aguaaguguugaaaucugauu

SEQ ID NO: 655771 - RNA, 20 nt, Human
auaaguccaaucauaagcuu

SEQ ID NO: 655772 - RNA, 22 nt, Human
auacuguucugcuuccccaucu

SEQ ID NO: 655773 - RNA, 21 nt, Human
caaaacacaaugcaugcaggg

SEQ ID NO: 655774 - RNA, 23 nt, Human
cacagcuuagguguaaaaaaagu

SEQ ID NO: 655775 - RNA, 23 nt, Human
ccaaaugcugcaugccacauaac

SEQ ID NO: 655776 - RNA, 21 nt, Human
cccuccaccacuaguccauac

SEQ ID NO: 655777 - RNA, 27 nt, Human
cccugaaaguaagaaaacugagggguc

SEQ ID NO: 655778 - RNA, 25 nt, Human
ccugcgaccgugguaccuucgaggc

SEQ ID NO: 655779 - RNA, 19 nt, Human
cuagucagcaacuuuacaa

SEQ ID NO: 655780 - RNA, 18 nt, Human
cucaugaaagucaggaga

SEQ ID NO: 655781 - RNA, 18 nt, Human
gccaaagccagggcccca

SEQ ID NO: 655782 - RNA, 18 nt, Human
ggauuguuuuuuuuuuuu

SEQ ID NO: 655783 - RNA, 19 nt, Human
ggcaguguguugucagcag

SEQ ID NO: 655784 - RNA, 26 nt, Human
gggggauugccuugcaaagccuaggg

SEQ ID NO: 655785 - RNA, 18 nt, Human
uaaauucaaccacacaug

SEQ ID NO: 655786 - RNA, 23 nt, Human
uaaauucaaccacacauguuuaa

SEQ ID NO: 655787 - RNA, 18 nt, Human
uaacaaauauaaaaaagu

SEQ ID NO: 655788 - RNA, 21 nt, Human
uacaaguagaaagcauacagu

SEQ ID NO: 655789 - RNA, 22 nt, Human
uacauaaacuucacacauacug

SEQ ID NO: 655790 - RNA, 23 nt, Human
uaccuucccugaaaguaagaaaa

SEQ ID NO: 655791 - RNA, 19 nt, Human
uaggaggguuccuuuuuac

SEQ ID NO: 655792 - RNA, 22 nt, Human
uauaaaaacuggguacuuagag

SEQ ID NO: 655793 - RNA, 24 nt, Human
uauaaaaacuggguacuuagagua

SEQ ID NO: 655794 - RNA, 21 nt, Human
ucagacauuucugagcaacau

SEQ ID NO: 655795 - RNA, 21 nt, Human
ucauuugcucaaggauccaga

SEQ ID NO: 655796 - RNA, 21 nt, Human
uccaaucauaagcuuuccuua

SEQ ID NO: 655797 - RNA, 21 nt, Human
ucccaguugaaagucccugcu

SEQ ID NO: 655798 - RNA, 18 nt, Human
uccucccucggcccugcg

SEQ ID NO: 655799 - RNA, 19 nt, Human
ucugagcaacaucaaauac

SEQ ID NO: 655800 - RNA, 19 nt, Human
ugaaacaauacacauacgc

SEQ ID NO: 655801 - RNA, 23 nt, Human
ugaaaguaagaaaacuauucagc

SEQ ID NO: 655802 - RNA, 23 nt, Human
ugagaaaaauaugaauguuacau

SEQ ID NO: 655803 - RNA, 21 nt, Human
ugagcaacaucaaauacagaa

SEQ ID NO: 655804 - RNA, 18 nt, Human
ugccugggugcccacagg

SEQ ID NO: 655805 - RNA, 23 nt, Human
ugccuggugcugcugccugggug

SEQ ID NO: 655806 - RNA, 23 nt, Human
ugcugcugccugggugcccacag

SEQ ID NO: 655807 - RNA, 24 nt, Human
uggaaaauaaguccaaucauaagc

SEQ ID NO: 655808 - RNA, 25 nt, Human
ugucccagcuuugccuucuucauuu

SEQ ID NO: 655809 - RNA, 22 nt, Human
uguuacaaauaucaaaaugaga

SEQ ID NO: 655810 - RNA, 18 nt, Human
uuaagaguuguugugagu

SEQ ID NO: 655811 - RNA, 19 nt, Human
uuaagaguuguugugaguc

SEQ ID NO: 655812 - RNA, 24 nt, Human
uuaguugucccagcuuugccuucu

SEQ ID NO: 655813 - RNA, 23 nt, Human
uucaaaagguugucccaguugaa

SEQ ID NO: 655814 - RNA, 19 nt, Human
uuccaaaugcugcaugcca

SEQ ID NO: 655815 - RNA, 20 nt, Human
uugcugcugcuuuuucugga

SEQ ID NO: 655816 - RNA, 22 nt, Human
uuuaaaauauuaaaagcauacc

SEQ ID NO: 655817 - RNA, 23 nt, Human
uuuaaaauauuaaaagcauaccg

SEQ ID NO: 655818 - RNA, 20 nt, Human
uuuaaaguuuucccuccacc

SEQ ID NO: 655819 - RNA, 22 nt, Human
uuuacaaguagaaagcauacag

SEQ ID NO: 655820 - RNA, 19 nt, Human
uuucaaaugugacccaacc

SEQ ID NO: 655821 - RNA, 24 nt, Human
uuuuuuuuuuuuuuuuuuuauuuu

SEQ ID NO: 655822 - RNA, 27 nt, Human
aaaaaaccagggacaaagcggugggca

SEQ ID NO: 655823 - RNA, 20 nt, Human
aaaccagggacaaagcggaa

SEQ ID NO: 655824 - RNA, 24 nt, Human
aaauaaacuugaccgacuuucauc

SEQ ID NO: 655825 - RNA, 19 nt, Human
aaccuuuguguguuuuuuu

SEQ ID NO: 655826 - RNA, 18 nt, Human
aacuccaguggcucagca

SEQ ID NO: 655827 - RNA, 19 nt, Human
aagagaucagagggugccg

SEQ ID NO: 655828 - RNA, 21 nt, Human
aagcaggaccucguccaacca

SEQ ID NO: 655829 - RNA, 19 nt, Human
aagcccccagccuugagcc

SEQ ID NO: 655830 - RNA, 18 nt, Human
aaggggaccugggauugg

SEQ ID NO: 655831 - RNA, 22 nt, Human
accaccuccccagacaaccacc

SEQ ID NO: 655832 - RNA, 24 nt, Human
accagggacaaagcggaacccagc

SEQ ID NO: 655833 - RNA, 24 nt, Human
acccuccucggcccucucuggaac

SEQ ID NO: 655834 - RNA, 21 nt, Human
agacaaccaccgggaaugaaa

SEQ ID NO: 655835 - RNA, 19 nt, Human
agcagaggauccaaccucc

SEQ ID NO: 655836 - RNA, 21 nt, Human
agcggggggcuggaggcgggg

SEQ ID NO: 655837 - RNA, 19 nt, Human
aggaguguguggcccccca

SEQ ID NO: 655838 - RNA, 20 nt, Human
aggcucgggggugggagcgg

SEQ ID NO: 655839 - RNA, 26 nt, Human
aggggaggggugugaauucccuggaa

SEQ ID NO: 655840 - RNA, 22 nt, Human
augcacugaaagcaaauaaacu

SEQ ID NO: 655841 - RNA, 21 nt, Human
caacauaagcccccagccuug

SEQ ID NO: 655842 - RNA, 24 nt, Human
caaccuccguggcugcacccuccu

SEQ ID NO: 655843 - RNA, 22 nt, Human
caaguggcacagaaaaggccga

SEQ ID NO: 655844 - RNA, 20 nt, Human
cacacagaaaaaaaaaggaa

SEQ ID NO: 655845 - RNA, 21 nt, Human
cacagaaaaaaaaaggaaaaa

SEQ ID NO: 655846 - RNA, 22 nt, Human
cagaaaaaaaaaggaaaaaacc

SEQ ID NO: 655847 - RNA, 23 nt, Human
cagaaaaggccgagaaaccucca

SEQ ID NO: 655848 - RNA, 20 nt, Human
cagagcccucgaggggugcu

SEQ ID NO: 655849 - RNA, 18 nt, Human
cagcacugcuggccuggc

SEQ ID NO: 655850 - RNA, 22 nt, Human
cagccugucuguccuuggcugu

SEQ ID NO: 655851 - RNA, 21 nt, Human
caggccccaaugggcccgaga

SEQ ID NO: 655852 - RNA, 23 nt, Human
ccaaccaccuccccagacaacca

SEQ ID NO: 655853 - RNA, 18 nt, Human
ccaaccuccguggcugca

SEQ ID NO: 655854 - RNA, 20 nt, Human
ccaagagaucagagggugcc

SEQ ID NO: 655855 - RNA, 27 nt, Human
ccaccagcacccugcuucgaggccugu

SEQ ID NO: 655856 - RNA, 22 nt, Human
ccagcaggugagaaacaggccc

SEQ ID NO: 655857 - RNA, 21 nt, Human
cccaagagaucagagggugcc

SEQ ID NO: 655858 - RNA, 19 nt, Human
cccagcagaagcgggacga

SEQ ID NO: 655859 - RNA, 22 nt, Human
cccagccuugagccuccugggg

SEQ ID NO: 655860 - RNA, 18 nt, Human
cccaugcguuucugaggc

SEQ ID NO: 655861 - RNA, 18 nt, Human
ccccagccuugagccucc

SEQ ID NO: 655862 - RNA, 23 nt, Human
cccccgaccacaacauaagcccc

SEQ ID NO: 655863 - RNA, 23 nt, Human
cccgaccacaacauaagccccca

SEQ ID NO: 655864 - RNA, 19 nt, Human
cccugccccgagaugccuc

SEQ ID NO: 655865 - RNA, 23 nt, Human
cccugcuccaacacuucuuuucu

SEQ ID NO: 655866 - RNA, 21 nt, Human
ccugggauuggggugcagggc

SEQ ID NO: 655867 - RNA, 24 nt, Human
ccuguggugugggggacacagagc

SEQ ID NO: 655868 - RNA, 23 nt, Human
ccuugagccuccuggggagccuc

SEQ ID NO: 655869 - RNA, 19 nt, Human
cgggggugggagcgggggg

SEQ ID NO: 655870 - RNA, 22 nt, Human
cgucaagggucccaccugaccc

SEQ ID NO: 655871 - RNA, 19 nt, Human
cuccguggcugcacccucc

SEQ ID NO: 655872 - RNA, 18 nt, Human
cuccucggcccucucugg

SEQ ID NO: 655873 - RNA, 20 nt, Human
cucguccaaccaccucccca

SEQ ID NO: 655874 - RNA, 22 nt, Human
cugcccccugccccgagaugcc

SEQ ID NO: 655875 - RNA, 22 nt, Human
cugcccccugccccgagaugcc

SEQ ID NO: 655876 - RNA, 23 nt, Human
cugcccccugccccgagaugccu

SEQ ID NO: 655877 - RNA, 20 nt, Human
cuuacacggucgucccccca

SEQ ID NO: 655878 - RNA, 20 nt, Human
gaacuccaguggcucagcau

SEQ ID NO: 655879 - RNA, 18 nt, Human
gacaaagcggaacccagc

SEQ ID NO: 655880 - RNA, 20 nt, Human
gagccuccuggggagccucu

SEQ ID NO: 655881 - RNA, 23 nt, Human
gagccuccuggggagccucuggg

SEQ ID NO: 655882 - RNA, 24 nt, Human
gccagcaggugagaaacaggcccc

SEQ ID NO: 655883 - RNA, 19 nt, Human
gccccccaugcguuucuga

SEQ ID NO: 655884 - RNA, 22 nt, Human
gcccuucaggggguccagccag

SEQ ID NO: 655885 - RNA, 23 nt, Human
gccuguggugugggggacacaga

SEQ ID NO: 655886 - RNA, 20 nt, Human
gcugguggaaaagggggccc

SEQ ID NO: 655887 - RNA, 18 nt, Human
ggaacccagcugggcuga

SEQ ID NO: 655888 - RNA, 23 nt, Human
ggccaggauuugggcucaggugg

SEQ ID NO: 655889 - RNA, 18 nt, Human
gggccaggcagauuuggc

SEQ ID NO: 655890 - RNA, 19 nt, Human
ggggcaggcagaggggucc

SEQ ID NO: 655891 - RNA, 18 nt, Human
gggggcuggaggcgggga

SEQ ID NO: 655892 - RNA, 19 nt, Human
gggggugggagcggggggc

SEQ ID NO: 655893 - RNA, 20 nt, Human
gggguuggggcaggcagagg

SEQ ID NO: 655894 - RNA, 20 nt, Human
gggucccaccugacccuccc

SEQ ID NO: 655895 - RNA, 18 nt, Human
gguuggggcaggcagagg

SEQ ID NO: 655896 - RNA, 18 nt, Human
guggcugcacccuccucg

SEQ ID NO: 655897 - RNA, 18 nt, Human
gugugaauucccugggga

SEQ ID NO: 655898 - RNA, 24 nt, Human
guugggcucagguccaggcagccu

SEQ ID NO: 655899 - RNA, 19 nt, Human
uaaaaugccuuuacauaga

SEQ ID NO: 655900 - RNA, 19 nt, Human
uaagcccccagccuugagc

SEQ ID NO: 655901 - RNA, 24 nt, Human
uccagccagcaggugagaaacagg

SEQ ID NO: 655902 - RNA, 24 nt, Human
ucccaggugcccccguuggaaccc

SEQ ID NO: 655903 - RNA, 19 nt, Human
uccccaagggcagggccug

SEQ ID NO: 655904 - RNA, 21 nt, Human
uccccgagccucaagcaggac

SEQ ID NO: 655905 - RNA, 22 nt, Human
uccccgagccucaagcaggacc

SEQ ID NO: 655906 - RNA, 21 nt, Human
uccccuggccacagcacugcu

SEQ ID NO: 655907 - RNA, 23 nt, Human
uccccuggccacagcacugcugg

SEQ ID NO: 655908 - RNA, 18 nt, Human
ucugaggcugaaggcugu

SEQ ID NO: 655909 - RNA, 19 nt, Human
ucugccccaccaaguggca

SEQ ID NO: 655910 - RNA, 25 nt, Human
ucugcccccugccccgagaugccuc

SEQ ID NO: 655911 - RNA, 24 nt, Human
ugaaaaaaaauccaaccauccccu

SEQ ID NO: 655912 - RNA, 20 nt, Human
ugaaagcaaauaaacuugac

SEQ ID NO: 655913 - RNA, 24 nt, Human
ugagaaacaggccccaaugggccc

SEQ ID NO: 655914 - RNA, 18 nt, Human
ugagaacagugcauuucc

SEQ ID NO: 655915 - RNA, 22 nt, Human
ugaggcugaaggcuguugggcu

SEQ ID NO: 655916 - RNA, 21 nt, Human
uggcacagaaaaggccgagaa

SEQ ID NO: 655917 - RNA, 20 nt, Human
uggccucugcccccugcccc

SEQ ID NO: 655918 - RNA, 24 nt, Human
uggcugugggagaaggggaggggu

SEQ ID NO: 655919 - RNA, 21 nt, Human
ugggagcggggggcuggaggg

SEQ ID NO: 655920 - RNA, 25 nt, Human
uggggcagagcccucgaggggugcu

SEQ ID NO: 655921 - RNA, 26 nt, Human
uguguggccccccaugcguuucugag

SEQ ID NO: 655922 - RNA, 24 nt, Human
uguguuuuuuuguccauuuuguuu

SEQ ID NO: 655923 - RNA, 23 nt, Human
uucaggggguccagccagcaggu

SEQ ID NO: 655924 - RNA, 20 nt, Human
uuccccaagggcagggccug

SEQ ID NO: 655925 - RNA, 21 nt, Human
uugaaaaaaaauccaaccauc

SEQ ID NO: 655926 - RNA, 23 nt, Human
uuucugaggcugaaggcuguugg

SEQ ID NO: 655927 - RNA, 21 nt, Human
uuuggcugguggaaaaggggg

SEQ ID NO: 655928 - RNA, 22 nt, Human
uuuggcugguggaaaagggggc

SEQ ID NO: 655929 - RNA, 22 nt, Human
uuuguguguuuuuuuguccauu

SEQ ID NO: 655930 - RNA, 23 nt, Human
uuuucuucacuugacaucguucu

SEQ ID NO: 655931 - RNA, 22 nt, Human
aauacagcugccaaggagaccc

SEQ ID NO: 655932 - RNA, 23 nt, Human
acagagcuuucaucauggcaaaa

SEQ ID NO: 655933 - RNA, 19 nt, Human
agagcaacauccagacucc

SEQ ID NO: 655934 - RNA, 19 nt, Human
agcugccaaggagacccug

SEQ ID NO: 655935 - RNA, 23 nt, Human
agggaaacagagcuuucaucaug

SEQ ID NO: 655936 - RNA, 21 nt, Human
caacauccagacuccagaaua

SEQ ID NO: 655937 - RNA, 22 nt, Human
cagagcuuucaucauggcaaaa

SEQ ID NO: 655938 - RNA, 25 nt, Human
cccuucuguucugagaugggggugg

SEQ ID NO: 655939 - RNA, 22 nt, Human
ccuucuguucugagaugggggu

SEQ ID NO: 655940 - RNA, 19 nt, Human
cucuggcuucccacccuuc

SEQ ID NO: 655941 - RNA, 21 nt, Human
cucuggcuucccacccuucug

SEQ ID NO: 655942 - RNA, 20 nt, Human
gcggcucuggcuucccaccc

SEQ ID NO: 655943 - RNA, 22 nt, Human
gcucuguucaucuaaaagugga

SEQ ID NO: 655944 - RNA, 18 nt, Human
ggcaguaucucaucuuug

SEQ ID NO: 655945 - RNA, 22 nt, Human
uccagaauacagcugccaagga

SEQ ID NO: 655946 - RNA, 22 nt, Human
uccuuuaucuugcuggccauaa

SEQ ID NO: 655947 - RNA, 19 nt, Human
ucuuguguuucucugagag

SEQ ID NO: 655948 - RNA, 22 nt, Human
ucuuuagagagcaacauccaga

SEQ ID NO: 655949 - RNA, 18 nt, Human
ugagaugggggugguggg

SEQ ID NO: 655950 - RNA, 20 nt, Human
ugagauggggguggugggca

SEQ ID NO: 655951 - RNA, 22 nt, Human
uggcaggcggcucuggcuuccc

SEQ ID NO: 655952 - RNA, 21 nt, Human
uguuaugcuguggggacuggc

SEQ ID NO: 655953 - RNA, 18 nt, Human
uucaucuaaaaguggaau

SEQ ID NO: 655954 - RNA, 27 nt, Human
uuucuuguguuucucugagagauguuc

SEQ ID NO: 655955 - RNA, 20 nt, Human
uuuuuuuucuuuguacaaaa

SEQ ID NO: 655956 - RNA, 19 nt, Human
uuuuuuuuuuuuucuuugu

SEQ ID NO: 655957 - RNA, 27 nt, Human
uuuuuuuuuuuuuuuuuuucuuugggg

SEQ ID NO: 655958 - RNA, 25 nt, Human
aaacauuagauggugcugaaaagcc

SEQ ID NO: 655959 - RNA, 23 nt, Human
aaagaaggaaaugaggaagaaaa

SEQ ID NO: 655960 - RNA, 20 nt, Human
aaaggacuguuuugugaaga

SEQ ID NO: 655961 - RNA, 24 nt, Human
aaaugucagcagaauuuaugagcu

SEQ ID NO: 655962 - RNA, 22 nt, Human
aagaaggaaaugaggaagaaaa

SEQ ID NO: 655963 - RNA, 22 nt, Human
acaagggcagcagccguagcaa

SEQ ID NO: 655964 - RNA, 20 nt, Human
accaaaagcuuuaauuaacc

SEQ ID NO: 655965 - RNA, 18 nt, Human
accagcuuuguccuucug

SEQ ID NO: 655966 - RNA, 20 nt, Human
acuuuggcaaguuuucuuuc

SEQ ID NO: 655967 - RNA, 19 nt, Human
agaaugcuaaaagccaccu

SEQ ID NO: 655968 - RNA, 23 nt, Human
agaggaaaaaggaacuugggaag

SEQ ID NO: 655969 - RNA, 20 nt, Human
agcaaaaaagagguaauugg

SEQ ID NO: 655970 - RNA, 24 nt, Human
agcagccguagcaaugcucuggag

SEQ ID NO: 655971 - RNA, 20 nt, Human
agcauucugguuucucccca

SEQ ID NO: 655972 - RNA, 20 nt, Human
aggaaaaaggaacuugggaa

SEQ ID NO: 655973 - RNA, 19 nt, Human
aggaauaaaagaaggaaau

SEQ ID NO: 655974 - RNA, 20 nt, Human
aggguaacauuuggaugaaa

SEQ ID NO: 655975 - RNA, 22 nt, Human
aggugggaguuucagaagcauu

SEQ ID NO: 655976 - RNA, 23 nt, Human
caaaaaagagguaauugguccug

SEQ ID NO: 655977 - RNA, 24 nt, Human
cagaagcauucugguuucucccca

SEQ ID NO: 655978 - RNA, 22 nt, Human
cagcagccguagcaaugcucug

SEQ ID NO: 655979 - RNA, 20 nt, Human
cagcgcgguugcguaaggug

SEQ ID NO: 655980 - RNA, 20 nt, Human
cauucugguuucuccccacu

SEQ ID NO: 655981 - RNA, 24 nt, Human
ccacuguaaaaagggugaggaaga

SEQ ID NO: 655982 - RNA, 23 nt, Human
cccacauaagaucaugacggagc

SEQ ID NO: 655983 - RNA, 24 nt, Human
cccacuccucaccccugcagcgcg

SEQ ID NO: 655984 - RNA, 19 nt, Human
cccccagauuuagaacaga

SEQ ID NO: 655985 - RNA, 21 nt, Human
ccugggaacucuaauugacca

SEQ ID NO: 655986 - RNA, 19 nt, Human
ccuuuuuuuuuaagggguu

SEQ ID NO: 655987 - RNA, 24 nt, Human
cuagcucagcagaaaggcuccaaa

SEQ ID NO: 655988 - RNA, 20 nt, Human
gaacucuaauugaccaucua

SEQ ID NO: 655989 - RNA, 18 nt, Human
gaagaugaagggaggaag

SEQ ID NO: 655990 - RNA, 20 nt, Human
gaagggaguggggacaaggg

SEQ ID NO: 655991 - RNA, 18 nt, Human
gacuuagaagagcagcau

SEQ ID NO: 655992 - RNA, 23 nt, Human
gauucgugccgucaguuuuccuc

SEQ ID NO: 655993 - RNA, 18 nt, Human
gcucuauucugaggcgau

SEQ ID NO: 655994 - RNA, 24 nt, Human
gcuuuguccuucugaccuuuuuuu

SEQ ID NO: 655995 - RNA, 21 nt, Human
ggaaaaaggaacuugggaagg

SEQ ID NO: 655996 - RNA, 18 nt, Human
ggacuuagaagagcagca

SEQ ID NO: 655997 - RNA, 21 nt, Human
gggaagggaguggggacaagg

SEQ ID NO: 655998 - RNA, 21 nt, Human
gggaggaauaaaagaaggaaa

SEQ ID NO: 655999 - RNA, 22 nt, Human
gggaguggggacaagggacagg

SEQ ID NO: 656000 - RNA, 23 nt, Human
gggguggggaggaauaaaagaag

SEQ ID NO: 656001 - RNA, 19 nt, Human
ggugaggaagaugaaggga

SEQ ID NO: 656002 - RNA, 23 nt, Human
ggugaggaagaugaagggaggaa

SEQ ID NO: 656003 - RNA, 21 nt, Human
gguggggaggaauaaaagaag

SEQ ID NO: 656004 - RNA, 22 nt, Human
gguucuugcuuuacccccagau

SEQ ID NO: 656005 - RNA, 20 nt, Human
uaaaaagggugaggaagaug

SEQ ID NO: 656006 - RNA, 24 nt, Human
uaagaauuuuaaaugccaguauua

SEQ ID NO: 656007 - RNA, 27 nt, Human
uaauuuguaaucauuuuaacagccuuu

SEQ ID NO: 656008 - RNA, 20 nt, Human
uacaggcuucaaacccuggg

SEQ ID NO: 656009 - RNA, 19 nt, Human
uacugauguuuaaaugugu

SEQ ID NO: 656010 - RNA, 22 nt, Human
uagcucagcagaaaggcuccaa

SEQ ID NO: 656011 - RNA, 18 nt, Human
uaugccaaagccuggccc

SEQ ID NO: 656012 - RNA, 18 nt, Human
ucacauggcuuggugggg

SEQ ID NO: 656013 - RNA, 18 nt, Human
ucaguccauuucccaaac

SEQ ID NO: 656014 - RNA, 22 nt, Human
uccacgcauuagcaugcgcgug

SEQ ID NO: 656015 - RNA, 21 nt, Human
ucuagcucagcagaaaggcuc

SEQ ID NO: 656016 - RNA, 20 nt, Human
ucuccacuuacaagccacaa

SEQ ID NO: 656017 - RNA, 23 nt, Human
ucugcgcauacacuccacgcagu

SEQ ID NO: 656018 - RNA, 21 nt, Human
ugccaguauuacaggguaaca

SEQ ID NO: 656019 - RNA, 20 nt, Human
ugccgccacuaccagcaaga

SEQ ID NO: 656020 - RNA, 23 nt, Human
uggaaacacagaaugcuaaaagc

SEQ ID NO: 656021 - RNA, 22 nt, Human
uggagguaguaguacaagggca

SEQ ID NO: 656022 - RNA, 19 nt, Human
ugggaagggaguggggacc

SEQ ID NO: 656023 - RNA, 18 nt, Human
ugguuucuccccacuccu

SEQ ID NO: 656024 - RNA, 21 nt, Human
ugucagcagaauuuaugagcu

SEQ ID NO: 656025 - RNA, 23 nt, Human
uuggaaacacagaaugcuaaaag

SEQ ID NO: 656026 - RNA, 23 nt, Human
uuggaugaaauucuucuccacuu

SEQ ID NO: 656027 - RNA, 19 nt, Human
uugggaagggaguggggac

SEQ ID NO: 656028 - RNA, 18 nt, Human
uuucccaaacaaaccagc

SEQ ID NO: 656029 - RNA, 24 nt, Human
uuuggaugaaauucuucuccacuu

SEQ ID NO: 656030 - RNA, 19 nt, Human
uuuuaaauuauaccaaaag

SEQ ID NO: 656031 - RNA, 20 nt, Human
uuuuuuuuuuuuuuuugcua

SEQ ID NO: 656032 - RNA, 22 nt, Human
uuuuuuuuuuuuuuuugcuacu

SEQ ID NO: 656033 - RNA, 18 nt, Human
uuuuuuuuuuuuuuuuug

SEQ ID NO: 656034 - RNA, 20 nt, Human
uuuuuuuuuuuuuuuuugcu

SEQ ID NO: 656035 - RNA, 22 nt, Human
aacaggcaauuuucuaaggcuu

SEQ ID NO: 656036 - RNA, 24 nt, Human
aagcaaaucaauaauaccuuguua

SEQ ID NO: 656037 - RNA, 21 nt, Human
aaguugauaccucccuuccua

SEQ ID NO: 656038 - RNA, 23 nt, Human
aaucauccugaaaucagccagga

SEQ ID NO: 656039 - RNA, 22 nt, Human
acaaugaacacaauuacccaau

SEQ ID NO: 656040 - RNA, 21 nt, Human
accacaguauaccuagaagca

SEQ ID NO: 656041 - RNA, 18 nt, Human
acuugaaagacaggaaau

SEQ ID NO: 656042 - RNA, 23 nt, Human
acuugacgcuugaaaucuccaau

SEQ ID NO: 656043 - RNA, 21 nt, Human
agagacagagacugaaagaga

SEQ ID NO: 656044 - RNA, 24 nt, Human
agauuuauucagaaaggcaaaaug

SEQ ID NO: 656045 - RNA, 18 nt, Human
agguauccaaagccaccu

SEQ ID NO: 656046 - RNA, 24 nt, Human
agguggguuuggggcugcugugca

SEQ ID NO: 656047 - RNA, 18 nt, Human
augaacccccugggaguu

SEQ ID NO: 656048 - RNA, 21 nt, Human
auuccuuuucagcagcuaauu

SEQ ID NO: 656049 - RNA, 24 nt, Human
caaaaugccucaggugacacuuga

SEQ ID NO: 656050 - RNA, 22 nt, Human
cacacuuuaacuagagccaucu

SEQ ID NO: 656051 - RNA, 21 nt, Human
cacaguauaccuagaagcaaa

SEQ ID NO: 656052 - RNA, 19 nt, Human
ccagcacccacagcccuac

SEQ ID NO: 656053 - RNA, 23 nt, Human
cccacagcccuacuccuuaacuc

SEQ ID NO: 656054 - RNA, 18 nt, Human
cccccugggaguuggggg

SEQ ID NO: 656055 - RNA, 20 nt, Human
ccccuggaguggcauuccug

SEQ ID NO: 656056 - RNA, 26 nt, Human
ccccuggaguggcauuccugcccugg

SEQ ID NO: 656057 - RNA, 19 nt, Human
cccuucucuuucuaaaccc

SEQ ID NO: 656058 - RNA, 19 nt, Human
cccuucucuuucuaaaccc

SEQ ID NO: 656059 - RNA, 18 nt, Human
ccuauacccugauacaac

SEQ ID NO: 656060 - RNA, 19 nt, Human
ccucaggugacacuugacu

SEQ ID NO: 656061 - RNA, 20 nt, Human
ccuccuauacccugauacaa

SEQ ID NO: 656062 - RNA, 22 nt, Human
ccuggcccauguaaucauccug

SEQ ID NO: 656063 - RNA, 20 nt, Human
ccugggaguuggggguugcc

SEQ ID NO: 656064 - RNA, 21 nt, Human
cgcuugaaaucuccaauuaga

SEQ ID NO: 656065 - RNA, 21 nt, Human
cuacuugaagcauugccuccu

SEQ ID NO: 656066 - RNA, 20 nt, Human
cucaggccuuucuuguccuc

SEQ ID NO: 656067 - RNA, 21 nt, Human
cugcaucuagcaaugccaaaa

SEQ ID NO: 656068 - RNA, 21 nt, Human
cuggcuaaaaauuugaaaauc

SEQ ID NO: 656069 - RNA, 25 nt, Human
cuuuuccgauucaccaaauacuccc

SEQ ID NO: 656070 - RNA, 21 nt, Human
gaaaacaggcaauuuucuaag

SEQ ID NO: 656071 - RNA, 21 nt, Human
gaaaaugcucacaguguucuc

SEQ ID NO: 656072 - RNA, 18 nt, Human
gacaggcugauacacaug

SEQ ID NO: 656073 - RNA, 20 nt, Human
gagagaagauaaggaagggg

SEQ ID NO: 656074 - RNA, 19 nt, Human
gauucaccaaauacucccc

SEQ ID NO: 656075 - RNA, 18 nt, Human
gcagaguaccuggcuaaa

SEQ ID NO: 656076 - RNA, 18 nt, Human
gcccauguaaucauccug

SEQ ID NO: 656077 - RNA, 20 nt, Human
gcuauuagcuguccuugacu

SEQ ID NO: 656078 - RNA, 18 nt, Human
ggaaaugucugccacuug

SEQ ID NO: 656079 - RNA, 23 nt, Human
gguggguuuggggcugcugugca

SEQ ID NO: 656080 - RNA, 21 nt, Human
gugacuggggcucuguccaca

SEQ ID NO: 656081 - RNA, 24 nt, Human
guuaauuuccauuacauuacaguu

SEQ ID NO: 656082 - RNA, 24 nt, Human
uagaagcaaaucaauaauaccuug

SEQ ID NO: 656083 - RNA, 19 nt, Human
uagagugggcuccagcacc

SEQ ID NO: 656084 - RNA, 27 nt, Human
uagaucuuuaacaaauuuugcaaaccc

SEQ ID NO: 656085 - RNA, 22 nt, Human
uagcaaugccaaaaacuguacc

SEQ ID NO: 656086 - RNA, 23 nt, Human
uagcaaugccaaaaacuguaccc

SEQ ID NO: 656087 - RNA, 24 nt, Human
ucacaguguucucuugcaagcaug

SEQ ID NO: 656088 - RNA, 23 nt, Human
uccagcacccacagcccuacucc

SEQ ID NO: 656089 - RNA, 21 nt, Human
uccauagauaugagagaagau

SEQ ID NO: 656090 - RNA, 22 nt, Human
uccccaaauaggccacaauguu

SEQ ID NO: 656091 - RNA, 20 nt, Human
ucccuucucuuucuaaaccc

SEQ ID NO: 656092 - RNA, 27 nt, Human
ucuccgggcauuuaucuuccuccucuu

SEQ ID NO: 656093 - RNA, 22 nt, Human
ucugcaucuagcaaugccaaaa

SEQ ID NO: 656094 - RNA, 19 nt, Human
ucuuccuccucuugcuuuc

SEQ ID NO: 656095 - RNA, 20 nt, Human
ugacuggggcucuguccaca

SEQ ID NO: 656096 - RNA, 21 nt, Human
ugacuggggcucuguccacaa

SEQ ID NO: 656097 - RNA, 20 nt, Human
ugcuagguagguggguuugg

SEQ ID NO: 656098 - RNA, 19 nt, Human
uggcagagagggagaccug

SEQ ID NO: 656099 - RNA, 19 nt, Human
uggcagagagggagaccug

SEQ ID NO: 656100 - RNA, 22 nt, Human
ugggagagagagacagagacug

SEQ ID NO: 656101 - RNA, 20 nt, Human
ugggaguuggggguugccau

SEQ ID NO: 656102 - RNA, 22 nt, Human
ugggcuccagcacccacagccc

SEQ ID NO: 656103 - RNA, 25 nt, Human
ugucugcuuuuauuuuauucuuuga

SEQ ID NO: 656104 - RNA, 18 nt, Human
uucaucuagggauaagaa

SEQ ID NO: 656105 - RNA, 22 nt, Human
uugaagcauugccuccuauacc

SEQ ID NO: 656106 - RNA, 23 nt, Human
uugacgcuugaaaucuccaauug

SEQ ID NO: 656107 - RNA, 24 nt, Human
uuggagagggugggcagcucagug

SEQ ID NO: 656108 - RNA, 22 nt, Human
uuucccuucucuuucuaaaccc

SEQ ID NO: 656109 - RNA, 20 nt, Human
uuuuuuuuuuggagagggug

SEQ ID NO: 656110 - RNA, 21 nt, Human
uuuuuuuuuuuuggagagggu

SEQ ID NO: 656111 - RNA, 21 nt, Human
uuuuuuuuuuuuuuggagagg

SEQ ID NO: 656112 - RNA, 18 nt, Human
uuuuuuuuuuuuuuuuug

SEQ ID NO: 656113 - RNA, 25 nt, Human
uuuuuuuuuuuuuuuuuggagaggg

SEQ ID NO: 656114 - RNA, 26 nt, Human
aaaaaagcuuuucagacccgaaggcc

SEQ ID NO: 656115 - RNA, 24 nt, Human
aaacauuuuuuaaaauccacaucc

SEQ ID NO: 656116 - RNA, 20 nt, Human
aagaaaccacagcuaagagc

SEQ ID NO: 656117 - RNA, 20 nt, Human
aagcuaccgucagaaggcaa

SEQ ID NO: 656118 - RNA, 24 nt, Human
acaaugauuggguccccaaggcac

SEQ ID NO: 656119 - RNA, 21 nt, Human
acacccccaccccacccccac

SEQ ID NO: 656120 - RNA, 23 nt, Human
accgcaaaggauguuaaaaucua

SEQ ID NO: 656121 - RNA, 19 nt, Human
aguggucauggauuaggag

SEQ ID NO: 656122 - RNA, 22 nt, Human
augccgcugguccaagaaacca

SEQ ID NO: 656123 - RNA, 24 nt, Human
auuaugccacaaaacagggacacu

SEQ ID NO: 656124 - RNA, 23 nt, Human
caaaacagggacacuuaucuauu

SEQ ID NO: 656125 - RNA, 21 nt, Human
caaaggauguuaaaaucuauc

SEQ ID NO: 656126 - RNA, 19 nt, Human
cacccccaccccaccccca

SEQ ID NO: 656127 - RNA, 20 nt, Human
cacccccaccccacccccac

SEQ ID NO: 656128 - RNA, 24 nt, Human
cauugagcucucucuggcaugcuc

SEQ ID NO: 656129 - RNA, 24 nt, Human
cauuuuuuaaaauccacauccaac

SEQ ID NO: 656130 - RNA, 27 nt, Human
ccaaaccaucccccaaggaauacaccc

SEQ ID NO: 656131 - RNA, 20 nt, Human
ccaaggaauacacccccacc

SEQ ID NO: 656132 - RNA, 22 nt, Human
ccacagcuaagagccaugaggc

SEQ ID NO: 656133 - RNA, 18 nt, Human
cccaaaccaucccccaag

SEQ ID NO: 656134 - RNA, 19 nt, Human
cccaaggaauacaccccca

SEQ ID NO: 656135 - RNA, 21 nt, Human
cccaaggaauacacccccacc

SEQ ID NO: 656136 - RNA, 19 nt, Human
ccccaaggaauacaccccc

SEQ ID NO: 656137 - RNA, 22 nt, Human
ccccaaggaauacacccccacc

SEQ ID NO: 656138 - RNA, 21 nt, Human
ccccaccccacccccacauga

SEQ ID NO: 656139 - RNA, 21 nt, Human
cccccaaggaauacaccccca

SEQ ID NO: 656140 - RNA, 18 nt, Human
cccccaccccacccccac

SEQ ID NO: 656141 - RNA, 22 nt, Human
ccuagaauuuaaaacaggaaaa

SEQ ID NO: 656142 - RNA, 24 nt, Human
cuccaaaagcuaccgucagaaggc

SEQ ID NO: 656143 - RNA, 25 nt, Human
cucucuggcaugcuccccacucuag

SEQ ID NO: 656144 - RNA, 23 nt, Human
gaauaaaucuucucaugaaauuc

SEQ ID NO: 656145 - RNA, 23 nt, Human
gagcucucucuggcaugcucccc

SEQ ID NO: 656146 - RNA, 19 nt, Human
uaaaaaagcuuuucagacc

SEQ ID NO: 656147 - RNA, 25 nt, Human
uaacaaugaucacagaaaauguguc

SEQ ID NO: 656148 - RNA, 22 nt, Human
uacacagauuugguuucaaagc

SEQ ID NO: 656149 - RNA, 21 nt, Human
uacacccccaccccaccccca

SEQ ID NO: 656150 - RNA, 24 nt, Human
uacuuggguaguuuagcaaacauu

SEQ ID NO: 656151 - RNA, 26 nt, Human
uauaaauaggaaaaaaacagugguca

SEQ ID NO: 656152 - RNA, 22 nt, Human
uauccuagaauuuaaaacagga

SEQ ID NO: 656153 - RNA, 18 nt, Human
uaugacaccagccuaccu

SEQ ID NO: 656154 - RNA, 24 nt, Human
uauuccacuccccauucggcccaa

SEQ ID NO: 656155 - RNA, 19 nt, Human
ucaaagcugaaauaccccu

SEQ ID NO: 656156 - RNA, 21 nt, Human
ucagaaggcaaacugacaaau

SEQ ID NO: 656157 - RNA, 18 nt, Human
ucaguaggcuaccuggug

SEQ ID NO: 656158 - RNA, 21 nt, Human
uccaagaaaccacagcuaaga

SEQ ID NO: 656159 - RNA, 18 nt, Human
uccccacucuaguuagag

SEQ ID NO: 656160 - RNA, 19 nt, Human
ucggaucuugucacaauga

SEQ ID NO: 656161 - RNA, 22 nt, Human
ugaucacagaaaaugugucaua

SEQ ID NO: 656162 - RNA, 20 nt, Human
uggcugcaggaaucuuccuc

SEQ ID NO: 656163 - RNA, 23 nt, Human
uggugauauaaauaggaaaaaaa

SEQ ID NO: 656164 - RNA, 25 nt, Human
uuacuuggguaguuuagcaaacauu

SEQ ID NO: 656165 - RNA, 19 nt, Human
uucaaugucucggaucuug

SEQ ID NO: 656166 - RNA, 22 nt, Human
uuuaaaacaggaaaaaugucaa

SEQ ID NO: 656167 - RNA, 27 nt, Human
uuuuuuuuuuuuuaaaaaagcuuuuca

SEQ ID NO: 656168 - RNA, 20 nt, Human
aagugugaacaguuuccacc

SEQ ID NO: 656169 - RNA, 18 nt, Human
accccgcauccugcugca

SEQ ID NO: 656170 - RNA, 21 nt, Human
acugguguuucugaaggcggg

SEQ ID NO: 656171 - RNA, 24 nt, Human
agagaagcagagcuuucugaacua

SEQ ID NO: 656172 - RNA, 19 nt, Human
agcccgggcccuggaggag

SEQ ID NO: 656173 - RNA, 24 nt, Human
aggagucuggugccauggacaggc

SEQ ID NO: 656174 - RNA, 20 nt, Human
aggcaggaugggaggcaagu

SEQ ID NO: 656175 - RNA, 20 nt, Human
aggcuggaauuucuggcaga

SEQ ID NO: 656176 - RNA, 19 nt, Human
agugguggcuacacugagg

SEQ ID NO: 656177 - RNA, 18 nt, Human
auggagccgcuggaaccu

SEQ ID NO: 656178 - RNA, 22 nt, Human
caaccgacagccgcgcaggcgc

SEQ ID NO: 656179 - RNA, 20 nt, Human
cagccuuucccuuuugagcc

SEQ ID NO: 656180 - RNA, 23 nt, Human
ccagaccugaccuccccaucaac

SEQ ID NO: 656181 - RNA, 18 nt, Human
ccaguucaaguacugcuc

SEQ ID NO: 656182 - RNA, 23 nt, Human
cccacaguggcugcacucaccca

SEQ ID NO: 656183 - RNA, 21 nt, Human
cgagaggaauuugcgcccaca

SEQ ID NO: 656184 - RNA, 24 nt, Human
cgagaggaauuugcgcccacagug

SEQ ID NO: 656185 - RNA, 25 nt, Human
cgccugaggcccucgggcaccgcuc

SEQ ID NO: 656186 - RNA, 19 nt, Human
cugugcccuuagcccgggc

SEQ ID NO: 656187 - RNA, 21 nt, Human
cuuuugagccucuggauucua

SEQ ID NO: 656188 - RNA, 19 nt, Human
gaagagaagcagagcuuuc

SEQ ID NO: 656189 - RNA, 25 nt, Human
gaggagucuggugccauggacaggc

SEQ ID NO: 656190 - RNA, 22 nt, Human
gcaagaaaagagcuuuaaugga

SEQ ID NO: 656191 - RNA, 21 nt, Human
gcaagugugaacaguuuccac

SEQ ID NO: 656192 - RNA, 19 nt, Human
gccugaggcccucgggcac

SEQ ID NO: 656193 - RNA, 26 nt, Human
gcuccuggggaguauaauuuucugua

SEQ ID NO: 656194 - RNA, 21 nt, Human
ggcaauaacauaaagcauacc

SEQ ID NO: 656195 - RNA, 24 nt, Human
gugcccuuagcccgggcccuggag

SEQ ID NO: 656196 - RNA, 22 nt, Human
guugcuuuuauuaccuuuaacu

SEQ ID NO: 656197 - RNA, 20 nt, Human
uauccaaaaguuuccauugu

SEQ ID NO: 656198 - RNA, 25 nt, Human
ucaaguacugcucuaguucugugcc

SEQ ID NO: 656199 - RNA, 20 nt, Human
ucagggaaaaccccagggcc

SEQ ID NO: 656200 - RNA, 21 nt, Human
ucagggccuggacugacgccu

SEQ ID NO: 656201 - RNA, 22 nt, Human
ucaugcuucuaucuccaguugc

SEQ ID NO: 656202 - RNA, 19 nt, Human
uccugcucagggaaaaccc

SEQ ID NO: 656203 - RNA, 19 nt, Human
ucuacuaaauucuuccuca

SEQ ID NO: 656204 - RNA, 23 nt, Human
ucuauaaucagagaacuggaaug

SEQ ID NO: 656205 - RNA, 21 nt, Human
ucucuccucacagauuuuagc

SEQ ID NO: 656206 - RNA, 24 nt, Human
ucuuacacuugggaauguguugcu

SEQ ID NO: 656207 - RNA, 23 nt, Human
ugaaggcggggagaauuucucca

SEQ ID NO: 656208 - RNA, 22 nt, Human
ugaggacacugaaugcagucug

SEQ ID NO: 656209 - RNA, 19 nt, Human
ugcuggaccucucgagccu

SEQ ID NO: 656210 - RNA, 19 nt, Human
ugcuuuuauuaccuuuaac

SEQ ID NO: 656211 - RNA, 24 nt, Human
uggaaccugaggagucuggugcca

SEQ ID NO: 656212 - RNA, 19 nt, Human
uggaauggaacugaauuuu

SEQ ID NO: 656213 - RNA, 18 nt, Human
uggcugcacucacccagc

SEQ ID NO: 656214 - RNA, 24 nt, Human
ugggaauguguugcucagccaccu

SEQ ID NO: 656215 - RNA, 20 nt, Human
uggguuuucugcaggcagga

SEQ ID NO: 656216 - RNA, 24 nt, Human
ugucucuacuaaauucuuccucaa

SEQ ID NO: 656217 - RNA, 21 nt, Human
uuagcccgggcccuggaggag

SEQ ID NO: 656218 - RNA, 20 nt, Human
uuccaccuuuggcaguuacc

SEQ ID NO: 656219 - RNA, 21 nt, Human
uucccagaccugaccucccca

SEQ ID NO: 656220 - RNA, 23 nt, Human
uucccagaccugaccuccccauc

SEQ ID NO: 656221 - RNA, 21 nt, Human
uuucccagaccugaccucccc

SEQ ID NO: 656222 - RNA, 25 nt, Human
uuuuuuuuuuugcaagaaaagagcu

SEQ ID NO: 656223 - RNA, 18 nt, Human
uuuuuuuuuuuuuuuuug

SEQ ID NO: 656224 - RNA, 18 nt, Human
aaacaggacguccccagg

SEQ ID NO: 656225 - RNA, 22 nt, Human
aaagcccuuguccacccugccu

SEQ ID NO: 656226 - RNA, 18 nt, Human
aaagugcugggauuagac

SEQ ID NO: 656227 - RNA, 21 nt, Human
aaagugcugggauuagacucc

SEQ ID NO: 656228 - RNA, 22 nt, Human
aaagugcugggauuagacucca

SEQ ID NO: 656229 - RNA, 18 nt, Human
aagugcugggauuagacu

SEQ ID NO: 656230 - RNA, 26 nt, Human
acacaaucaacacucacuggacacgu

SEQ ID NO: 656231 - RNA, 24 nt, Human
acacugccagaaaaaucucaagag

SEQ ID NO: 656232 - RNA, 18 nt, Human
acagacgagguuucaaca

SEQ ID NO: 656233 - RNA, 20 nt, Human
acagacgagguuucaacaug

SEQ ID NO: 656234 - RNA, 22 nt, Human
accccuccauaucuggaaacuu

SEQ ID NO: 656235 - RNA, 25 nt, Human
acccgccucggccucccaaagugcu

SEQ ID NO: 656236 - RNA, 24 nt, Human
acgagguuucaacauguuggccag

SEQ ID NO: 656237 - RNA, 23 nt, Human
acuccauucuugccaacugcagu

SEQ ID NO: 656238 - RNA, 23 nt, Human
agaaaguaauaggagcgauuggc

SEQ ID NO: 656239 - RNA, 18 nt, Human
agaggaccgugcaggcuu

SEQ ID NO: 656240 - RNA, 24 nt, Human
agaggagaagaggaccgugcaggc

SEQ ID NO: 656241 - RNA, 22 nt, Human
agccaacuucccucuguuuacc

SEQ ID NO: 656242 - RNA, 23 nt, Human
aggauacugaucacuacuggcuc

SEQ ID NO: 656243 - RNA, 22 nt, Human
aggcucaggugaugccagcagg

SEQ ID NO: 656244 - RNA, 24 nt, Human
aggugauccacccgccucggccuc

SEQ ID NO: 656245 - RNA, 20 nt, Human
augccacucuccuccucuca

SEQ ID NO: 656246 - RNA, 21 nt, Human
caaaacaaaauguaugcuguu

SEQ ID NO: 656247 - RNA, 25 nt, Human
caaagugcugggauuagacuccagu

SEQ ID NO: 656248 - RNA, 25 nt, Human
caaauuccugaccucaggugaucca

SEQ ID NO: 656249 - RNA, 24 nt, Human
caacauguuggccagguuggucuc

SEQ ID NO: 656250 - RNA, 22 nt, Human
caagaccacccuacagagcuga

SEQ ID NO: 656251 - RNA, 21 nt, Human
caaucaacacucacuggacac

SEQ ID NO: 656252 - RNA, 18 nt, Human
cacacaaucaacacucac

SEQ ID NO: 656253 - RNA, 23 nt, Human
cacacuugccaaacccagugaau

SEQ ID NO: 656254 - RNA, 23 nt, Human
cacccgccucggccucccaaagu

SEQ ID NO: 656255 - RNA, 23 nt, Human
caccucagacuggaauuagagac

SEQ ID NO: 656256 - RNA, 19 nt, Human
cacgcacaggcacucugcc

SEQ ID NO: 656257 - RNA, 23 nt, Human
cacugccagaaaaaucucaagag

SEQ ID NO: 656258 - RNA, 23 nt, Human
cagcacacuugccaaacccagug

SEQ ID NO: 656259 - RNA, 20 nt, Human
caggacguccccagggcaga

SEQ ID NO: 656260 - RNA, 18 nt, Human
cauguuggccagguuggu

SEQ ID NO: 656261 - RNA, 20 nt, Human
ccaaagugcugggauuagac

SEQ ID NO: 656262 - RNA, 20 nt, Human
ccaaagugcugggauuagac

SEQ ID NO: 656263 - RNA, 23 nt, Human
ccaaagugcugggauuagacucc

SEQ ID NO: 656264 - RNA, 21 nt, Human
ccacacacaaucaacacucac

SEQ ID NO: 656265 - RNA, 21 nt, Human
ccagcacacuugccaaaccca

SEQ ID NO: 656266 - RNA, 21 nt, Human
ccagggcagaaaguaauagga

SEQ ID NO: 656267 - RNA, 20 nt, Human
ccauucuugccaacugcagu

SEQ ID NO: 656268 - RNA, 21 nt, Human
ccgugcaggcuugaagcagca

SEQ ID NO: 656269 - RNA, 18 nt, Human
ccucacgcacaggcacuc

SEQ ID NO: 656270 - RNA, 18 nt, Human
ccucgcccagcaccccag

SEQ ID NO: 656271 - RNA, 23 nt, Human
ccucucaccuuucucugugcaaa

SEQ ID NO: 656272 - RNA, 22 nt, Human
ccugaccucaggugauccaccc

SEQ ID NO: 656273 - RNA, 23 nt, Human
ccugaccucaggugauccacccg

SEQ ID NO: 656274 - RNA, 24 nt, Human
cgagguuucaacauguuggccagg

SEQ ID NO: 656275 - RNA, 24 nt, Human
cgccucggccucccaaagugcugg

SEQ ID NO: 656276 - RNA, 18 nt, Human
cuccuccagccaacuucc

SEQ ID NO: 656277 - RNA, 18 nt, Human
cucuguuuaccaggcccc

SEQ ID NO: 656278 - RNA, 18 nt, Human
gaagaagcugggguaaag

SEQ ID NO: 656279 - RNA, 24 nt, Human
gaccucaggugauccacccgccuc

SEQ ID NO: 656280 - RNA, 23 nt, Human
gagacuuuauccacgugggacag

SEQ ID NO: 656281 - RNA, 20 nt, Human
gagcagaggcguuacagggg

SEQ ID NO: 656282 - RNA, 23 nt, Human
gagcagaggcguuacagggguag

SEQ ID NO: 656283 - RNA, 21 nt, Human
gauacugaucacuacuggcuc

SEQ ID NO: 656284 - RNA, 20 nt, Human
gcaaggucugugccugcaga

SEQ ID NO: 656285 - RNA, 21 nt, Human
gccagguuggucucaaauucc

SEQ ID NO: 656286 - RNA, 20 nt, Human
gccucgcccagcaccccagc

SEQ ID NO: 656287 - RNA, 24 nt, Human
ggagcucccugcacaaagcccuuc

SEQ ID NO: 656288 - RNA, 20 nt, Human
ggcucaggugaugccagcag

SEQ ID NO: 656289 - RNA, 20 nt, Human
gggcauaucugcugaaaaua

SEQ ID NO: 656290 - RNA, 20 nt, Human
ggucucaaauuccugaccuc

SEQ ID NO: 656291 - RNA, 22 nt, Human
guacgcgggguucuugcacucc

SEQ ID NO: 656292 - RNA, 20 nt, Human
gugaaauaaugcuguguugc

SEQ ID NO: 656293 - RNA, 24 nt, Human
gugauccacccgccucggccuccc

SEQ ID NO: 656294 - RNA, 21 nt, Human
guuugacaggcaugcagaugu

SEQ ID NO: 656295 - RNA, 24 nt, Human
uaaagcaaacauuaaaugaaagca

SEQ ID NO: 656296 - RNA, 19 nt, Human
uaagaggcagaggguggcg

SEQ ID NO: 656297 - RNA, 20 nt, Human
uagaccuuacacugccagaa

SEQ ID NO: 656298 - RNA, 18 nt, Human
uagcacaagugugccugg

SEQ ID NO: 656299 - RNA, 23 nt, Human
uaguacagacgagguuucaacau

SEQ ID NO: 656300 - RNA, 24 nt, Human
uaguacagacgagguuucaacaug

SEQ ID NO: 656301 - RNA, 24 nt, Human
ucaaggccccuucccaguuucucu

SEQ ID NO: 656302 - RNA, 20 nt, Human
uccagccaacuucccucugu

SEQ ID NO: 656303 - RNA, 18 nt, Human
ucccaaagugcugggauu

SEQ ID NO: 656304 - RNA, 18 nt, Human
uccuccagccaacuuccc

SEQ ID NO: 656305 - RNA, 23 nt, Human
uccuccucucaccuuucucugug

SEQ ID NO: 656306 - RNA, 18 nt, Human
ucggccucccaaagugcu

SEQ ID NO: 656307 - RNA, 21 nt, Human
ucuccuccucucaccuuucuc

SEQ ID NO: 656308 - RNA, 25 nt, Human
ucucuugcuuucugccuucucugau

SEQ ID NO: 656309 - RNA, 21 nt, Human
ucugcugaaaauaccccucca

SEQ ID NO: 656310 - RNA, 22 nt, Human
ucugcuuugaggggucacgguc

SEQ ID NO: 656311 - RNA, 24 nt, Human
ucuucugaacggacagcccagccc

SEQ ID NO: 656312 - RNA, 22 nt, Human
ugaacggacagcccagcccuug

SEQ ID NO: 656313 - RNA, 23 nt, Human
ugaacggacagcccagcccuugu

SEQ ID NO: 656314 - RNA, 18 nt, Human
ugaagcagcaggauacug

SEQ ID NO: 656315 - RNA, 21 nt, Human
ugaagguauaucaauugcuau

SEQ ID NO: 656316 - RNA, 21 nt, Human
ugaccucaggugauccacccg

SEQ ID NO: 656317 - RNA, 24 nt, Human
ugaccucaggugauccacccgccu

SEQ ID NO: 656318 - RNA, 21 nt, Human
ugcaagaccacccuacagagc

SEQ ID NO: 656319 - RNA, 20 nt, Human
ugcagaugugcggagaggag

SEQ ID NO: 656320 - RNA, 24 nt, Human
uggccagguuggucucaaauuccu

SEQ ID NO: 656321 - RNA, 23 nt, Human
ugguguagaccuuacacugccag

SEQ ID NO: 656322 - RNA, 18 nt, Human
ugugcaaagaaaugcaau

SEQ ID NO: 656323 - RNA, 26 nt, Human
ugugccugcagagcugaugaauucac

SEQ ID NO: 656324 - RNA, 21 nt, Human
uucacaugguggcgggcagca

SEQ ID NO: 656325 - RNA, 22 nt, Human
uuccuagugcaaggucugugcc

SEQ ID NO: 656326 - RNA, 19 nt, Human
uuucaacauguuggccagg

SEQ ID NO: 656327 - RNA, 20 nt, Human
uuucaacauguuggccaggu

SEQ ID NO: 656328 - RNA, 23 nt, Human
uuucucuugcuuucugccuucuc

SEQ ID NO: 656329 - RNA, 25 nt, Human
uuuuuuuuuuuuuuuuuuuauuuuu

SEQ ID NO: 656330 - RNA, 21 nt, Human
aaaagggucaacaaacuucag

SEQ ID NO: 656331 - RNA, 21 nt, Human
aaacugaugggggaggccaga

SEQ ID NO: 656332 - RNA, 19 nt, Human
aaacugaugggggaggccg

SEQ ID NO: 656333 - RNA, 22 nt, Human
aaggagccccaaaggguaacuc

SEQ ID NO: 656334 - RNA, 18 nt, Human
acagccccccuccugccc

SEQ ID NO: 656335 - RNA, 20 nt, Human
acccgggaucccccaagggc

SEQ ID NO: 656336 - RNA, 19 nt, Human
aggaauguaaaggcuaagc

SEQ ID NO: 656337 - RNA, 21 nt, Human
auaugugugugcaugugugua

SEQ ID NO: 656338 - RNA, 22 nt, Human
aucccauacaaugugauuucac

SEQ ID NO: 656339 - RNA, 21 nt, Human
caacaaacuucagcuggagua

SEQ ID NO: 656340 - RNA, 25 nt, Human
cagaacaggauccugcaccccugcu

SEQ ID NO: 656341 - RNA, 18 nt, Human
cagaagccugacugcuga

SEQ ID NO: 656342 - RNA, 24 nt, Human
cagagaacccuggagccaccgcca

SEQ ID NO: 656343 - RNA, 18 nt, Human
cagcaaggaguucagggg

SEQ ID NO: 656344 - RNA, 22 nt, Human
caggauccugcaccccugcucc

SEQ ID NO: 656345 - RNA, 19 nt, Human
cauaugugugugcaugugu

SEQ ID NO: 656346 - RNA, 22 nt, Human
caugugugugcauaugugugug

SEQ ID NO: 656347 - RNA, 21 nt, Human
ccagaagccugacugcugaga

SEQ ID NO: 656348 - RNA, 18 nt, Human
ccaggcgaguaacuucuc

SEQ ID NO: 656349 - RNA, 20 nt, Human
cccuaccucaagugcuuccc

SEQ ID NO: 656350 - RNA, 22 nt, Human
ccuccugcccuaccucaagugc

SEQ ID NO: 656351 - RNA, 24 nt, Human
ccuccugcccuaccucaagugcuu

SEQ ID NO: 656352 - RNA, 23 nt, Human
ccugcauauccagcaaauacuaa

SEQ ID NO: 656353 - RNA, 19 nt, Human
ccuggagccaccgccaggc

SEQ ID NO: 656354 - RNA, 20 nt, Human
cgggccagccagcucugaug

SEQ ID NO: 656355 - RNA, 24 nt, Human
cguacuccgcuguacacgugugca

SEQ ID NO: 656356 - RNA, 19 nt, Human
cuauguuugcacaugugug

SEQ ID NO: 656357 - RNA, 20 nt, Human
cuccagagaaccagagaacc

SEQ ID NO: 656358 - RNA, 21 nt, Human
cuccagagaaccagagaaccc

SEQ ID NO: 656359 - RNA, 18 nt, Human
cugcaccccugcuccugc

SEQ ID NO: 656360 - RNA, 22 nt, Human
cugcaccccugcuccugcaaac

SEQ ID NO: 656361 - RNA, 22 nt, Human
gaccuggggauggcaggaaggc

SEQ ID NO: 656362 - RNA, 24 nt, Human
gagaccuucccgaacacagagaca

SEQ ID NO: 656363 - RNA, 24 nt, Human
gagccugaggucucuggcggggaa

SEQ ID NO: 656364 - RNA, 18 nt, Human
gcaaauacauaauuuggu

SEQ ID NO: 656365 - RNA, 21 nt, Human
gcaccccugcuccugcaaacu

SEQ ID NO: 656366 - RNA, 21 nt, Human
gccccgggccagccagcucug

SEQ ID NO: 656367 - RNA, 18 nt, Human
ggagccuguggaaugugc

SEQ ID NO: 656368 - RNA, 22 nt, Human
gggucaggcugcagccccgggc

SEQ ID NO: 656369 - RNA, 18 nt, Human
gugccucugggcuugcug

SEQ ID NO: 656370 - RNA, 19 nt, Human
guggaaugugcugagagcc

SEQ ID NO: 656371 - RNA, 19 nt, Human
guggaaugugcugagagcc

SEQ ID NO: 656372 - RNA, 31 nt, Human
gugugugcauguguguaaugcaugugcauag

SEQ ID NO: 656373 - RNA, 21 nt, Human
uaaggagccccaaaggguaac

SEQ ID NO: 656374 - RNA, 20 nt, Human
uaccucaagugcuucccagc

SEQ ID NO: 656375 - RNA, 23 nt, Human
uauaaacacaaggcccuuucuga

SEQ ID NO: 656376 - RNA, 24 nt, Human
ucaagugcuucccagcggagggcc

SEQ ID NO: 656377 - RNA, 22 nt, Human
ucacccgggaucccccaagggc

SEQ ID NO: 656378 - RNA, 22 nt, Human
uccauaaauccccuguggacaa

SEQ ID NO: 656379 - RNA, 23 nt, Human
ucccgaacacagagacaucugau

SEQ ID NO: 656380 - RNA, 25 nt, Human
ucucuggcggggaaagggcaggggu

SEQ ID NO: 656381 - RNA, 21 nt, Human
ugagaccuggggauggcagga

SEQ ID NO: 656382 - RNA, 23 nt, Human
ugaggucucuggcggggaaaggg

SEQ ID NO: 656383 - RNA, 22 nt, Human
ugaugggggaggccagaggagg

SEQ ID NO: 656384 - RNA, 18 nt, Human
ugcauguguguaaugcau

SEQ ID NO: 656385 - RNA, 22 nt, Human
ugcccaagcuggcccaggccuc

SEQ ID NO: 656386 - RNA, 28 nt, Human
ugcccaagcuggcccaggccucggggac

SEQ ID NO: 656387 - RNA, 20 nt, Human
ugcuuuguuugacccagcuc

SEQ ID NO: 656388 - RNA, 23 nt, Human
uggcuauguuugcacaugugugu

SEQ ID NO: 656389 - RNA, 27 nt, Human
uggcuauguuugcacaugugugugcaa

SEQ ID NO: 656390 - RNA, 22 nt, Human
uggggauggcaggaaggcccgg

SEQ ID NO: 656391 - RNA, 19 nt, Human
ugggggaggccagaggagg

SEQ ID NO: 656392 - RNA, 21 nt, Human
ugggggaugggguauucagag

SEQ ID NO: 656393 - RNA, 26 nt, Human
ugguuuaaggagccccaaaggguaac

SEQ ID NO: 656394 - RNA, 23 nt, Human
ugugcauaugugugugcaugugu

SEQ ID NO: 656395 - RNA, 21 nt, Human
ugugugcauaugugugugcau

SEQ ID NO: 656396 - RNA, 23 nt, Human
ugugugcauaugugugugcaugu

SEQ ID NO: 656397 - RNA, 29 nt, Human
ugugugcauaugugugugcauguguguaa

SEQ ID NO: 656398 - RNA, 29 nt, Human
ugugugcauaugugugugcauguguguag

SEQ ID NO: 656399 - RNA, 19 nt, Human
ugugugugcauaugugugu

SEQ ID NO: 656400 - RNA, 28 nt, Human
uguuugcacaugugugugcauaugugug

SEQ ID NO: 656401 - RNA, 21 nt, Human
uucacaaccagaagccugacu

SEQ ID NO: 656402 - RNA, 18 nt, Human
uucaggggagaacuccau

SEQ ID NO: 656403 - RNA, 23 nt, Human
uucuuagcagcaaggaguucagg

SEQ ID NO: 656404 - RNA, 25 nt, Human
uucuuagcagcaaggaguucagggg

SEQ ID NO: 656405 - RNA, 21 nt, Human
uugaagaaucuguuuauuuug

SEQ ID NO: 656406 - RNA, 24 nt, Human
uuugacccagcucagaacaggauc

SEQ ID NO: 656407 - RNA, 24 nt, Human
aaagugcugggauuggaggcauga

SEQ ID NO: 656408 - RNA, 19 nt, Human
aacagcuuuacugagaugu

SEQ ID NO: 656409 - RNA, 21 nt, Human
aagugauuggcucaaaacauc

SEQ ID NO: 656410 - RNA, 19 nt, Human
aagugcugggauuggaggc

SEQ ID NO: 656411 - RNA, 26 nt, Human
aagugcugggauuggaggcaugagcc

SEQ ID NO: 656412 - RNA, 21 nt, Human
acaaaggaaaaacuuucugga

SEQ ID NO: 656413 - RNA, 23 nt, Human
acagaaaagagaaagagaggccg

SEQ ID NO: 656414 - RNA, 20 nt, Human
acagagagagacagaaaaga

SEQ ID NO: 656415 - RNA, 20 nt, Human
acaggguuucacuguauuag

SEQ ID NO: 656416 - RNA, 19 nt, Human
acccaggcuggaguacagu

SEQ ID NO: 656417 - RNA, 25 nt, Human
acccgccucagccucccaaagugcu

SEQ ID NO: 656418 - RNA, 26 nt, Human
accuaggaguggaguugccaacuggu

SEQ ID NO: 656419 - RNA, 21 nt, Human
agacagaaaagagaaagagag

SEQ ID NO: 656420 - RNA, 18 nt, Human
agacaggguuucacugua

SEQ ID NO: 656421 - RNA, 19 nt, Human
agagacagaaaagagaaag

SEQ ID NO: 656422 - RNA, 19 nt, Human
agagacaggguuucacugu

SEQ ID NO: 656423 - RNA, 20 nt, Human
agauacuucaaucacaugau

SEQ ID NO: 656424 - RNA, 21 nt, Human
agcagauucaauaaucaugga

SEQ ID NO: 656425 - RNA, 24 nt, Human
aggacaagacaggccuucugccaa

SEQ ID NO: 656426 - RNA, 19 nt, Human
aggcaugagccaccaugcc

SEQ ID NO: 656427 - RNA, 22 nt, Human
aggugccugccaccaaguccag

SEQ ID NO: 656428 - RNA, 19 nt, Human
aguacaguggugcaguggu

SEQ ID NO: 656429 - RNA, 21 nt, Human
aguagcugggauuacaggugc

SEQ ID NO: 656430 - RNA, 23 nt, Human
aucaaagugauuggcucaaaaca

SEQ ID NO: 656431 - RNA, 20 nt, Human
aucuauaaacugaggcagca

SEQ ID NO: 656432 - RNA, 21 nt, Human
auguaacucacauaccauaca

SEQ ID NO: 656433 - RNA, 22 nt, Human
augugcgugcaugugugugugu

SEQ ID NO: 656434 - RNA, 22 nt, Human
augugugugugugugugugugu

SEQ ID NO: 656435 - RNA, 23 nt, Human
auguguguguguguguguguguu

SEQ ID NO: 656436 - RNA, 19 nt, Human
auuacaggugccugccacc

SEQ ID NO: 656437 - RNA, 19 nt, Human
caaagugauuggcucaaaa

SEQ ID NO: 656438 - RNA, 24 nt, Human
caaagugcugggauuggaggcaug

SEQ ID NO: 656439 - RNA, 21 nt, Human
caaccuuugacucccagguuc

SEQ ID NO: 656440 - RNA, 18 nt, Human
cacaaucaacuuuagaac

SEQ ID NO: 656441 - RNA, 21 nt, Human
caccaaguccagcuaauuuuu

SEQ ID NO: 656442 - RNA, 18 nt, Human
caccaugccugguccauu

SEQ ID NO: 656443 - RNA, 23 nt, Human
cacccgccucagccucccaaagu

SEQ ID NO: 656444 - RNA, 18 nt, Human
cacuguauuagccaggau

SEQ ID NO: 656445 - RNA, 24 nt, Human
cacuguauuagccaggauggucuc

SEQ ID NO: 656446 - RNA, 23 nt, Human
cagaaagacacacagagagagac

SEQ ID NO: 656447 - RNA, 23 nt, Human
cagagaauacugcagcgaagcac

SEQ ID NO: 656448 - RNA, 23 nt, Human
cagcaauucagggcugagguaaa

SEQ ID NO: 656449 - RNA, 24 nt, Human
caggguuucacuguauuagccagg

SEQ ID NO: 656450 - RNA, 18 nt, Human
caggugccugccaccaag

SEQ ID NO: 656451 - RNA, 20 nt, Human
cagucuccugaguagcuggg

SEQ ID NO: 656452 - RNA, 24 nt, Human
caugagccaccaugccugguccau

SEQ ID NO: 656453 - RNA, 24 nt, Human
caugugugugugugugugugugag

SEQ ID NO: 656454 - RNA, 23 nt, Human
caugugugugugugugugugugu

SEQ ID NO: 656455 - RNA, 24 nt, Human
ccaaagugcugggauuggaggcau

SEQ ID NO: 656456 - RNA, 22 nt, Human
ccaccaugccugguccauugua

SEQ ID NO: 656457 - RNA, 19 nt, Human
ccaccccuaagcaaccacu

SEQ ID NO: 656458 - RNA, 26 nt, Human
ccacccgccucagccucccaaagugc

SEQ ID NO: 656459 - RNA, 20 nt, Human
cccagguucaagcaauuccu

SEQ ID NO: 656460 - RNA, 20 nt, Human
cccagguucaagcaauuccu

SEQ ID NO: 656461 - RNA, 24 nt, Human
ccccuaagcaaccacuaaguguuu

SEQ ID NO: 656462 - RNA, 24 nt, Human
ccgccucagccucccaaagugcug

SEQ ID NO: 656463 - RNA, 20 nt, Human
ccugaccucgugauccaccc

SEQ ID NO: 656464 - RNA, 22 nt, Human
ccugaguagcugggauuacagg

SEQ ID NO: 656465 - RNA, 23 nt, Human
ccugaguagcugggauuacaggu

SEQ ID NO: 656466 - RNA, 24 nt, Human
ccugaguagcugggauuacaggug

SEQ ID NO: 656467 - RNA, 24 nt, Human
cgccucagccucccaaagugcugg

SEQ ID NO: 656468 - RNA, 20 nt, Human
cggaaucauacaguaugugg

SEQ ID NO: 656469 - RNA, 24 nt, Human
cgugauccacccgccucagccucc

SEQ ID NO: 656470 - RNA, 21 nt, Human
cuaaucaagcuagaauagcaa

SEQ ID NO: 656471 - RNA, 24 nt, Human
cucagucuccugaguagcugggau

SEQ ID NO: 656472 - RNA, 24 nt, Human
cuccugaccucgugauccacccgc

SEQ ID NO: 656473 - RNA, 21 nt, Human
cugaguagcugggauuacagg

SEQ ID NO: 656474 - RNA, 23 nt, Human
cugccucagucuccugaguagcu

SEQ ID NO: 656475 - RNA, 21 nt, Human
cuggaagucaguagcuuaaau

SEQ ID NO: 656476 - RNA, 20 nt, Human
cuggguuaacacuccuauau

SEQ ID NO: 656477 - RNA, 23 nt, Human
gaagcacccuguguuugcuuggg

SEQ ID NO: 656478 - RNA, 22 nt, Human
gaccucgugauccacccgccuc

SEQ ID NO: 656479 - RNA, 24 nt, Human
gaccucgugauccacccgccucag

SEQ ID NO: 656480 - RNA, 21 nt, Human
gagacagagucuuucuccguc

SEQ ID NO: 656481 - RNA, 23 nt, Human
gaguugccaacugguuccauuug

SEQ ID NO: 656482 - RNA, 18 nt, Human
gauuacaggugccugcca

SEQ ID NO: 656483 - RNA, 18 nt, Human
gauuggaggcaugagcca

SEQ ID NO: 656484 - RNA, 24 nt, Human
gauuggaggcaugagccaccaugc

SEQ ID NO: 656485 - RNA, 22 nt, Human
gcaaccuuugacucccagguuc

SEQ ID NO: 656486 - RNA, 19 nt, Human
gcaugcauagcagauucaa

SEQ ID NO: 656487 - RNA, 25 nt, Human
gcaugugugugugugugugugugug

SEQ ID NO: 656488 - RNA, 22 nt, Human
gcccuuguccuuaggagucuau

SEQ ID NO: 656489 - RNA, 24 nt, Human
gccucagucuccugaguagcuggg

SEQ ID NO: 656490 - RNA, 18 nt, Human
ggaguugaaaagauggca

SEQ ID NO: 656491 - RNA, 24 nt, Human
ggauuggaggcaugagccaccaug

SEQ ID NO: 656492 - RNA, 18 nt, Human
ggccuggugauugggcug

SEQ ID NO: 656493 - RNA, 24 nt, Human
ggcuggaguacaguggugcagugg

SEQ ID NO: 656494 - RNA, 21 nt, Human
gggcaaagauagccucugaga

SEQ ID NO: 656495 - RNA, 21 nt, Human
gggcaugaucacagcgaugac

SEQ ID NO: 656496 - RNA, 20 nt, Human
ggucucgaucuccugaccuc

SEQ ID NO: 656497 - RNA, 23 nt, Human
ggugcaguggugcgaucucggcu

SEQ ID NO: 656498 - RNA, 18 nt, Human
guagcugggauuacaggu

SEQ ID NO: 656499 - RNA, 24 nt, Human
guccagcuaauuuuuuuguauuuu

SEQ ID NO: 656500 - RNA, 24 nt, Human
gugauccacccgccucagccuccc

SEQ ID NO: 656501 - RNA, 19 nt, Human
gugcaguggugcgaucucg

SEQ ID NO: 656502 - RNA, 23 nt, Human
gugcaguggugcgaucucggcuc

SEQ ID NO: 656503 - RNA, 21 nt, Human
gugugugugugugugugugug

SEQ ID NO: 656504 - RNA, 18 nt, Human
uaacacuccuauauugug

SEQ ID NO: 656505 - RNA, 20 nt, Human
uacaggugccugccaccaag

SEQ ID NO: 656506 - RNA, 18 nt, Human
uaccauacacuucauuca

SEQ ID NO: 656507 - RNA, 24 nt, Human
uaccauacacuucauucauuuaaa

SEQ ID NO: 656508 - RNA, 19 nt, Human
uaccuaggaguggaguugc

SEQ ID NO: 656509 - RNA, 18 nt, Human
uagaauagcaaguuggag

SEQ ID NO: 656510 - RNA, 19 nt, Human
uagaauagcaaguuggagg

SEQ ID NO: 656511 - RNA, 20 nt, Human
uaguagagacaggguuucac

SEQ ID NO: 656512 - RNA, 22 nt, Human
uaguagagacaggguuucacug

SEQ ID NO: 656513 - RNA, 24 nt, Human
uaguagagacaggguuucacugua

SEQ ID NO: 656514 - RNA, 19 nt, Human
uauagcuuuaggggagcca

SEQ ID NO: 656515 - RNA, 20 nt, Human
uaugugcgugcaugugugug

SEQ ID NO: 656516 - RNA, 24 nt, Human
uaugugcgugcaugugugugugug

SEQ ID NO: 656517 - RNA, 22 nt, Human
ucaaaacauccuacaaaggaaa

SEQ ID NO: 656518 - RNA, 19 nt, Human
ucacugcaaccuuugacuc

SEQ ID NO: 656519 - RNA, 24 nt, Human
ucacugcaaccuuugacucccagg

SEQ ID NO: 656520 - RNA, 24 nt, Human
ucacuguauuagccaggauggucu

SEQ ID NO: 656521 - RNA, 23 nt, Human
ucagucuccugaguagcugggau

SEQ ID NO: 656522 - RNA, 22 nt, Human
ucauuuaaaguguacaauucaa

SEQ ID NO: 656523 - RNA, 21 nt, Human
uccacccgccucagccuccca

SEQ ID NO: 656524 - RNA, 24 nt, Human
uccaucuauaaacugaggcagcau

SEQ ID NO: 656525 - RNA, 24 nt, Human
ucccaaagugcugggauuggaggc

SEQ ID NO: 656526 - RNA, 19 nt, Human
ucccagaggcagagaauac

SEQ ID NO: 656527 - RNA, 21 nt, Human
ucccagaggcagagaauacug

SEQ ID NO: 656528 - RNA, 19 nt, Human
ucccagguucaagcaauuc

SEQ ID NO: 656529 - RNA, 24 nt, Human
ucccagguucaagcaauuccucug

SEQ ID NO: 656530 - RNA, 24 nt, Human
uccgucacccaggcuggaguacag

SEQ ID NO: 656531 - RNA, 20 nt, Human
uccugaacccccaccccuaa

SEQ ID NO: 656532 - RNA, 24 nt, Human
uccugaguagcugggauuacaggu

SEQ ID NO: 656533 - RNA, 21 nt, Human
ucuccgucacccaggcuggag

SEQ ID NO: 656534 - RNA, 25 nt, Human
ucuccgucacccaggcuggaguaca

SEQ ID NO: 656535 - RNA, 24 nt, Human
ucuuucuccgucacccaggcugga

SEQ ID NO: 656536 - RNA, 21 nt, Human
ugaacccccaccccuaagcaa

SEQ ID NO: 656537 - RNA, 25 nt, Human
ugaacccccaccccuaagcaaccac

SEQ ID NO: 656538 - RNA, 25 nt, Human
ugacucccagguucaagcaauuccu

SEQ ID NO: 656539 - RNA, 27 nt, Human
ugacucccagguucaagcaauuccuuu

SEQ ID NO: 656540 - RNA, 21 nt, Human
ugagauguaacucacauacca

SEQ ID NO: 656541 - RNA, 23 nt, Human
ugcaguggugcgaucucggcucc

SEQ ID NO: 656542 - RNA, 23 nt, Human
ugcaugcauagcagauucaauaa

SEQ ID NO: 656543 - RNA, 23 nt, Human
ugccucagucuccugaguagcug

SEQ ID NO: 656544 - RNA, 24 nt, Human
ugccucagucuccugaguagcugg

SEQ ID NO: 656545 - RNA, 19 nt, Human
ugcgugcaugugugugugu

SEQ ID NO: 656546 - RNA, 19 nt, Human
ugcgugcaugugugugugu

SEQ ID NO: 656547 - RNA, 28 nt, Human
uggaguacaguggugcaguggugcgauc

SEQ ID NO: 656548 - RNA, 20 nt, Human
uggcucaaaacauccuacaa

SEQ ID NO: 656549 - RNA, 19 nt, Human
uggcuucuuucauuuagua

SEQ ID NO: 656550 - RNA, 19 nt, Human
ugggaagucugggcaaaga

SEQ ID NO: 656551 - RNA, 21 nt, Human
ugggauuacaggugccugcca

SEQ ID NO: 656552 - RNA, 22 nt, Human
ugggauuacaggugccugccac

SEQ ID NO: 656553 - RNA, 24 nt, Human
ugggauuacaggugccugccacca

SEQ ID NO: 656554 - RNA, 18 nt, Human
ugggauuggaggcaugag

SEQ ID NO: 656555 - RNA, 23 nt, Human
ugggauuggaggcaugagccacc

SEQ ID NO: 656556 - RNA, 24 nt, Human
ugggauuggaggcaugagccacca

SEQ ID NO: 656557 - RNA, 21 nt, Human
ugugcgugcaugugugugugu

SEQ ID NO: 656558 - RNA, 31 nt, Human; identical to SEQ ID NO: 542246

SEQ ID NO: 656559 - RNA, 20 nt, Human
uguguguguguguguguaug

SEQ ID NO: 656560 - RNA, 18 nt, Human
ugugugugugugugugug

SEQ ID NO: 656561 - RNA, 18 nt, Human
ugugugugugugugugug

SEQ ID NO: 656562 - RNA, 18 nt, Human
ugugugugugugugugug

SEQ ID NO: 656563 - RNA, 18 nt, Human
ugugugugugugugugug

SEQ ID NO: 656564 - RNA, 18 nt, Human
ugugugugugugugugug

SEQ ID NO: 656565 - RNA, 18 nt, Human
ugugugugugugugugug

SEQ ID NO: 656566 - RNA, 18 nt, Human
ugugugugugugugugug

SEQ ID NO: 656567 - RNA, 18 nt, Human
ugugugugugugugugug

SEQ ID NO: 656568 - RNA, 18 nt, Human
ugugugugugugugugug

SEQ ID NO: 656569 - RNA, 18 nt, Human
ugugugugugugugugug

SEQ ID NO: 656570 - RNA, 18 nt, Human
ugugugugugugugugug

SEQ ID NO: 656571 - RNA, 21 nt, Human
ugugugugugugugugugugu

SEQ ID NO: 656572 - RNA, 21 nt, Human
ugugugugugugugugugugu

SEQ ID NO: 656573 - RNA, 21 nt, Human
ugugugugugugugugugugu

SEQ ID NO: 656574 - RNA, 21 nt, Human
ugugugugugugugugugugu

SEQ ID NO: 656575 - RNA, 21 nt, Human
ugugugugugugugugugugu

SEQ ID NO: 656576 - RNA, 21 nt, Human
ugugugugugugugugugugu

SEQ ID NO: 656577 - RNA, 21 nt, Human
ugugugugugugugugugugu

SEQ ID NO: 656578 - RNA, 21 nt, Human
ugugugugugugugugugugu

SEQ ID NO: 656579 - RNA, 21 nt, Human
ugugugugugugugugugugu

SEQ ID NO: 656580 - RNA, 21 nt, Human
ugugugugugugugugugugu

SEQ ID NO: 656581 - RNA, 21 nt, Human
ugugugugugugugugugugu

SEQ ID NO: 656582 - RNA, 21 nt, Human
ugugugugugugugugugugu

SEQ ID NO: 656583 - RNA, 21 nt, Human
ugugugugugugugugugugu

SEQ ID NO: 656584 - RNA, 21 nt, Human
ugugugugugugugugugugu

SEQ ID NO: 656585 - RNA, 21 nt, Human
ugugugugugugugugugugu

SEQ ID NO: 656586 - RNA, 21 nt, Human
ugugugugugugugugugugu

SEQ ID NO: 656587 - RNA, 22 nt, Human
ugugugugugugugugugugua

SEQ ID NO: 656588 - RNA, 22 nt, Human
ugugugugugugugugugugug

SEQ ID NO: 656589 - RNA, 22 nt, Human
ugugugugugugugugugugug

SEQ ID NO: 656590 - RNA, 22 nt, Human
ugugugugugugugugugugug

SEQ ID NO: 656591 - RNA, 22 nt, Human
ugugugugugugugugugugug

SEQ ID NO: 656592 - RNA, 22 nt, Human
ugugugugugugugugugugug

SEQ ID NO: 656593 - RNA, 22 nt, Human
ugugugugugugugugugugug

SEQ ID NO: 656594 - RNA, 22 nt, Human
ugugugugugugugugugugug

SEQ ID NO: 656595 - RNA, 19 nt, Human
uguguuuaugugcgugcau

SEQ ID NO: 656596 - RNA, 19 nt, Human
uguuuaugugcgugcaugu

SEQ ID NO: 656597 - RNA, 21 nt, Human
uuaguagagacaggguuucac

SEQ ID NO: 656598 - RNA, 24 nt, Human
uuaguagagacaggguuucacugu

SEQ ID NO: 656599 - RNA, 21 nt, Human
uuaucugaaauuuuugcaugc

SEQ ID NO: 656600 - RNA, 29 nt, Human
uuaugugcgugcaugugugugugugugug

SEQ ID NO: 656601 - RNA, 24 nt, Human
uucaagcaauuccucugccucagu

SEQ ID NO: 656602 - RNA, 18 nt, Human
uucaaugcuuuuuaguau

SEQ ID NO: 656603 - RNA, 19 nt, Human
uucagggcugagguaaagg

SEQ ID NO: 656604 - RNA, 19 nt, Human
uuccucugccucagucucc

SEQ ID NO: 656605 - RNA, 21 nt, Human
uugcaugcauagcagauucaa

SEQ ID NO: 656606 - RNA, 21 nt, Human
uuuaaaguguacaauucaaug

SEQ ID NO: 656607 - RNA, 22 nt, Human
uuuacagagcugugcaaucauc

SEQ ID NO: 656608 - RNA, 24 nt, Human
uuucuccgucacccaggcuggagu

SEQ ID NO: 656609 - RNA, 24 nt, Human
uuuuuaguagagacaggguuucac

SEQ ID NO: 656610 - RNA, 21 nt, Human
uuuuuguauuuuuaguagaga

SEQ ID NO: 656611 - RNA, 21 nt, Human
uuuuuuguauuuuuaguagag

SEQ ID NO: 656612 - RNA, 24 nt, Human
uuuuuuguauuuuuaguagagaca

SEQ ID NO: 656613 - RNA, 18 nt, Human
aaagaaaggcacaucauu

SEQ ID NO: 656614 - RNA, 18 nt, Human
accgcucuucuuggucaa

SEQ ID NO: 656615 - RNA, 19 nt, Human
acuucaaccgcucuucuug

SEQ ID NO: 656616 - RNA, 21 nt, Human
agcaucuuaaacucaaauggc

SEQ ID NO: 656617 - RNA, 23 nt, Human
caggcaguuaaagaucauuacaa

SEQ ID NO: 656618 - RNA, 23 nt, Human
ccacaccgcacucccugauccug

SEQ ID NO: 656619 - RNA, 25 nt, Human
ccagcgccgacggaacucauccagg

SEQ ID NO: 656620 - RNA, 18 nt, Human
ccgcggccggaagccgcu

SEQ ID NO: 656621 - RNA, 22 nt, Human
ccggccgccgagcccgccucuc

SEQ ID NO: 656622 - RNA, 18 nt, Human
ccugcgccagcuccuccu

SEQ ID NO: 656623 - RNA, 23 nt, Human
cgccagcuccuccugccagcgcc

SEQ ID NO: 656624 - RNA, 19 nt, Human
cgcggccggaagccgcugc

SEQ ID NO: 656625 - RNA, 22 nt, Human
cuccagcuucauggcugcuucc

SEQ ID NO: 656626 - RNA, 23 nt, Human
cuccucgguuccaccgggugcca

SEQ ID NO: 656627 - RNA, 22 nt, Human
cugagcagccagaguuuccagc

SEQ ID NO: 656628 - RNA, 21 nt, Human
cugcugauucaauucaucugu

SEQ ID NO: 656629 - RNA, 21 nt, Human
cuuuaacuucaaccgcucuuc

SEQ ID NO: 656630 - RNA, 23 nt, Human
cuuuugcauugccugcugcugau

SEQ ID NO: 656631 - RNA, 24 nt, Human
gacacuccuccacuuucgcuacuc

SEQ ID NO: 656632 - RNA, 20 nt, Human
uagagcaucuuaaacucaaa

SEQ ID NO: 656633 - RNA, 22 nt, Human
uagcuuucugaggaaaacuaac

SEQ ID NO: 656634 - RNA, 24 nt, Human
uaggcgcucagcuuccagcaauuu

SEQ ID NO: 656635 - RNA, 23 nt, Human
uauacauauccaggacuucaucc

SEQ ID NO: 656636 - RNA, 20 nt, Human
uaucaaagaaaggcacauca

SEQ ID NO: 656637 - RNA, 21 nt, Human
uaucaaagaaaggcacaucau

SEQ ID NO: 656638 - RNA, 23 nt, Human
uauuuuauuaaauauuuggaagc

SEQ ID NO: 656639 - RNA, 21 nt, Human
uccuaugcugucgaaacugau

SEQ ID NO: 656640 - RNA, 26 nt, Human
uccugagcagccagaguuuccagcuu

SEQ ID NO: 656641 - RNA, 19 nt, Human
uccuuuaacuucaaccgcu

SEQ ID NO: 656642 - RNA, 19 nt, Human
ucguguacgagguccuguu

SEQ ID NO: 656643 - RNA, 18 nt, Human
ugaguuugguucuuuuac

SEQ ID NO: 656644 - RNA, 20 nt, Human
ugcauugccugcugcugauu

SEQ ID NO: 656645 - RNA, 22 nt, Human
uggcuucaaauacuagcuuucu

SEQ ID NO: 656646 - RNA, 18 nt, Human
ugugugucaggagcuggg

SEQ ID NO: 656647 - RNA, 22 nt, Human
uucauuucauucuccggccgcc

SEQ ID NO: 656648 - RNA, 23 nt, Human
uuccugagcagccagaguuucca

SEQ ID NO: 656649 - RNA, 22 nt, Human
uugccacuucuuccacaccgca

SEQ ID NO: 656650 - RNA, 19 nt, Human
uugccugcugcugauucaa

SEQ ID NO: 656651 - RNA, 19 nt, Human
aacaacagaaguagcugga

SEQ ID NO: 656652 - RNA, 18 nt, Human
aacacauuccaggagccu

SEQ ID NO: 656653 - RNA, 23 nt, Human
aaccuguccaucacugucuccua

SEQ ID NO: 656654 - RNA, 25 nt, Human
aagcaaaacacauuccaggagccug

SEQ ID NO: 656655 - RNA, 18 nt, Human
aaucuccacccuguucuc

SEQ ID NO: 656656 - RNA, 18 nt, Human
acuguaguugccauacag

SEQ ID NO: 656657 - RNA, 27 nt, Human
agaggguccaaagugcugauaugaagg

SEQ ID NO: 656658 - RNA, 25 nt, Human
aggcauauuucucaguucauacaca

SEQ ID NO: 656659 - RNA, 23 nt, Human
aguauccauuauaucuccccggc

SEQ ID NO: 656660 - RNA, 21 nt, Human
caaaacacauuccaggagccu

SEQ ID NO: 656661 - RNA, 21 nt, Human
caaaaucugggguacaguaug

SEQ ID NO: 656662 - RNA, 24 nt, Human
caaaguauccauuauaucuccccg

SEQ ID NO: 656663 - RNA, 27 nt, Human
caacggcuaaaagguuaggugcuccaa

SEQ ID NO: 656664 - RNA, 19 nt, Human
caacgucguaaacaacaga

SEQ ID NO: 656665 - RNA, 18 nt, Human
caauugaaaaauccacag

SEQ ID NO: 656666 - RNA, 26 nt, Human
cagcaguaacuccauauggacucuga

SEQ ID NO: 656667 - RNA, 27 nt, Human
cagcaguaacuccauauggacucugau

SEQ ID NO: 656668 - RNA, 22 nt, Human
caggucccaaauguuuuugagg

SEQ ID NO: 656669 - RNA, 18 nt, Human
ccaggcaacgucguaaac

SEQ ID NO: 656670 - RNA, 21 nt, Human
ccaggcaacgucguaaacaac

SEQ ID NO: 656671 - RNA, 21 nt, Human
ccauacaggucccaaauguuu

SEQ ID NO: 656672 - RNA, 24 nt, Human
ccaucuccuguuguuccucgaucu

SEQ ID NO: 656673 - RNA, 21 nt, Human
cccaaaucuccacccuguucu

SEQ ID NO: 656674 - RNA, 19 nt, Human
cccaaucugcagaacagcu

SEQ ID NO: 656675 - RNA, 24 nt, Human
gauagccaacggcuaaaagguuag

SEQ ID NO: 656676 - RNA, 18 nt, Human
uaaaaauacaucaugaca

SEQ ID NO: 656677 - RNA, 24 nt, Human
uaauaacaccccaaucugcagaac

SEQ ID NO: 656678 - RNA, 18 nt, Human
uacaggucccaaauguuu

SEQ ID NO: 656679 - RNA, 23 nt, Human
uagcaguauucacaaucagaggg

SEQ ID NO: 656680 - RNA, 23 nt, Human
uaucuccccggccaguuuccaaa

SEQ ID NO: 656681 - RNA, 18 nt, Human
uccaggagccugucgaga

SEQ ID NO: 656682 - RNA, 23 nt, Human
uccucgaucuuguucuauccacu

SEQ ID NO: 656683 - RNA, 23 nt, Human
ucuuucuuuuccuuuuccccucc

SEQ ID NO: 656684 - RNA, 20 nt, Human
ucuuuuccuuuuccccuccu

SEQ ID NO: 656685 - RNA, 20 nt, Human
ugaaaaauccacagcaguaa

SEQ ID NO: 656686 - RNA, 23 nt, Human
ugaaaaauccacagcaguaacuc

SEQ ID NO: 656687 - RNA, 18 nt, Human
ugcaaauauauaggauga

SEQ ID NO: 656688 - RNA, 22 nt, Human
ugccauugugauagccaacgga

SEQ ID NO: 656689 - RNA, 20 nt, Human
ugggaugaaaagcaaaacac

SEQ ID NO: 656690 - RNA, 23 nt, Human
uuggagauucuuccaucugcuga

SEQ ID NO: 656691 - RNA, 20 nt, Human
uuuauacacuggacccuugg

SEQ ID NO: 656692 - RNA, 19 nt, Human
uuuccccuccuuuuuuguu

SEQ ID NO: 656693 - RNA, 25 nt, Human
aaaaaaaaaaaaaaaaacaaauuua

SEQ ID NO: 656694 - RNA, 22 nt, Human
aaaaagccaaaaauaauuauag

SEQ ID NO: 656695 - RNA, 24 nt, Human
aaaaagccaaaaauaauuauagug

SEQ ID NO: 656696 - RNA, 21 nt, Human
aaaaauaaccaugcuauaguc

SEQ ID NO: 656697 - RNA, 20 nt, Human
aaaaauaucugaaacagagg

SEQ ID NO: 656698 - RNA, 23 nt, Human
aaccagucugaagacucccagac

SEQ ID NO: 656699 - RNA, 20 nt, Human
aagaaacccuauucuaaaac

SEQ ID NO: 656700 - RNA, 18 nt, Human
aagacaaacgugauaaug

SEQ ID NO: 656701 - RNA, 26 nt, Human
aagacaaacgugauaaugugauaaaa

SEQ ID NO: 656702 - RNA, 20 nt, Human
aaucucauuuccccuccauu

SEQ ID NO: 656703 - RNA, 23 nt, Human
accacauauauggaagaaaguca

SEQ ID NO: 656704 - RNA, 21 nt, Human
accuugaugacaucaacauua

SEQ ID NO: 656705 - RNA, 18 nt, Human
agaaauucagagccagcc

SEQ ID NO: 656706 - RNA, 23 nt, Human
agacagcaacacaacugaaucac

SEQ ID NO: 656707 - RNA, 20 nt, Human
agacagccaggcuuugaaug

SEQ ID NO: 656708 - RNA, 23 nt, Human
aggcugcucccagugcaucugcu

SEQ ID NO: 656709 - RNA, 19 nt, Human
aguacaauucucaaaaacc

SEQ ID NO: 656710 - RNA, 21 nt, Human
aguguucaucuccaaugaaga

SEQ ID NO: 656711 - RNA, 21 nt, Human
aguuauaauguuaccucuagg

SEQ ID NO: 656712 - RNA, 19 nt, Human
aguuuguuuaagaagugga

SEQ ID NO: 656713 - RNA, 19 nt, Human
auaaagacaaacgugauaa

SEQ ID NO: 656714 - RNA, 26 nt, Human
augaagauaaaauauaaagacaaacg

SEQ ID NO: 656715 - RNA, 23 nt, Human
auggauucugaaaaaaaaaaaaa

SEQ ID NO: 656716 - RNA, 20 nt, Human
auuuccccuccauuuguagg

SEQ ID NO: 656717 - RNA, 27 nt, Human
caaaaaccaucaauucaccccaaccaa

SEQ ID NO: 656718 - RNA, 19 nt, Human
caaaggcugcucccagugc

SEQ ID NO: 656719 - RNA, 20 nt, Human
caacugaaucacauugaccu

SEQ ID NO: 656720 - RNA, 21 nt, Human
caaguuacguggcccagccaa

SEQ ID NO: 656721 - RNA, 24 nt, Human
cacaacuucuguuuuccuuugagg

SEQ ID NO: 656722 - RNA, 22 nt, Human
cacuauauugaccaguugaagu

SEQ ID NO: 656723 - RNA, 20 nt, Human
cagaaagaugaccaaaaucu

SEQ ID NO: 656724 - RNA, 23 nt, Human
cagauggugacugcucuguacuu

SEQ ID NO: 656725 - RNA, 21 nt, Human
caggauacagauuugcagaau

SEQ ID NO: 656726 - RNA, 19 nt, Human
caggcaaaccagucugaag

SEQ ID NO: 656727 - RNA, 22 nt, Human
cauauacaggcuuaaauaccac

SEQ ID NO: 656728 - RNA, 18 nt, Human
cccaaccaaauuuucagc

SEQ ID NO: 656729 - RNA, 26 nt, Human
ccucuagggcuaaaaaaaaaaaaaaa

SEQ ID NO: 656730 - RNA, 21 nt, Human
ccuuguggcaaaggcugcucc

SEQ ID NO: 656731 - RNA, 24 nt, Human
cuaacauucacauacgcauuccaa

SEQ ID NO: 656732 - RNA, 24 nt, Human
cucagcaucuugacuauccaucuc

SEQ ID NO: 656733 - RNA, 18 nt, Human
cucauuaccaguauucua

SEQ ID NO: 656734 - RNA, 21 nt, Human
cucccagacuuugcagaagaa

SEQ ID NO: 656735 - RNA, 22 nt, Human
cuguaaaaugucuagauucucc

SEQ ID NO: 656736 - RNA, 24 nt, Human
gcaguacuagaaaaauaaccaugc

SEQ ID NO: 656737 - RNA, 23 nt, Human
gccaaucacacacuugcuaucau

SEQ ID NO: 656738 - RNA, 19 nt, Human
gccaggcuuugaaugcucu

SEQ ID NO: 656739 - RNA, 24 nt, Human
ggccaaucacacacuugcuaucau

SEQ ID NO: 656740 - RNA, 18 nt, Human
gggcuaaaaaaaaaaaaa

SEQ ID NO: 656741 - RNA, 19 nt, Human
guaggcuuuucagaaauca

SEQ ID NO: 656742 - RNA, 18 nt, Human
uaaaaauaucugaaacag

SEQ ID NO: 656743 - RNA, 23 nt, Human
uaaaauacuuucugacauacauu

SEQ ID NO: 656744 - RNA, 23 nt, Human
uaaacccaagugaagccaacaaa

SEQ ID NO: 656745 - RNA, 25 nt, Human
uaagauacaauuuaguucagauaaa

SEQ ID NO: 656746 - RNA, 23 nt, Human
uaaugacagaaguaaauuuuuua

SEQ ID NO: 656747 - RNA, 20 nt, Human
uacagauuugcagaauaaaa

SEQ ID NO: 656748 - RNA, 24 nt, Human
uaccaaucucaggauaaacacucu

SEQ ID NO: 656749 - RNA, 26 nt, Human
uaccuugaugacaucaacauuagcac

SEQ ID NO: 656750 - RNA, 21 nt, Human
uagaaauucagagccagccug

SEQ ID NO: 656751 - RNA, 22 nt, Human
uagaauuacaaacacaguucug

SEQ ID NO: 656752 - RNA, 19 nt, Human
uagauucuccauucuuucc

SEQ ID NO: 656753 - RNA, 22 nt, Human
uaggcuugacuguaaaaaccaa

SEQ ID NO: 656754 - RNA, 23 nt, Human
uaguuauuagugaggucuacaua

SEQ ID NO: 656755 - RNA, 23 nt, Human
uaguuuaauacacagaagccacc

SEQ ID NO: 656756 - RNA, 21 nt, Human
uaugcaaaaauaguguacaau

SEQ ID NO: 656757 - RNA, 21 nt, Human
uauuuugcucagauacaccug

SEQ ID NO: 656758 - RNA, 18 nt, Human
ucaaccaaaucaggauca

SEQ ID NO: 656759 - RNA, 20 nt, Human
ucagacagcaacacaacuga

SEQ ID NO: 656760 - RNA, 19 nt, Human
uccacggaauuuccccuuu

SEQ ID NO: 656761 - RNA, 19 nt, Human
uccaguggcugaaaaagcc

SEQ ID NO: 656762 - RNA, 23 nt, Human
ucccagacuuugcagaagaacuc

SEQ ID NO: 656763 - RNA, 19 nt, Human
ucccuuaugaaucaacagg

SEQ ID NO: 656764 - RNA, 21 nt, Human
uccuuugaggaagaucagaug

SEQ ID NO: 656765 - RNA, 19 nt, Human
ucuaaacccaagugaagcc

SEQ ID NO: 656766 - RNA, 26 nt, Human
ucuagggcuaaaaaaaaaaaaaaaaa

SEQ ID NO: 656767 - RNA, 18 nt, Human
ucugaaaaaaaaaaaaaa

SEQ ID NO: 656768 - RNA, 24 nt, Human
ucugaagacucccagacuuugcag

SEQ ID NO: 656769 - RNA, 22 nt, Human
ucugcaagauuaaaaaaaaaaa

SEQ ID NO: 656770 - RNA, 24 nt, Human
ucugcaagauuaaaaaaaaaaaaa

SEQ ID NO: 656771 - RNA, 22 nt, Human
ugaauacacuaagcaaauaccc

SEQ ID NO: 656772 - RNA, 24 nt, Human
ugaauguguuuacguucauagaaa

SEQ ID NO: 656773 - RNA, 28 nt, Human
ugagguaagagaccauaugcaaaaguca

SEQ ID NO: 656774 - RNA, 23 nt, Human
ugcagaagaacucacaacuucug

SEQ ID NO: 656775 - RNA, 25 nt, Human
uggaaacacaaguuaaaguacuguc

SEQ ID NO: 656776 - RNA, 24 nt, Human
uggcagcaucuuguuuucuucaau

SEQ ID NO: 656777 - RNA, 19 nt, Human
uggcuguggcucagacagc

SEQ ID NO: 656778 - RNA, 21 nt, Human
uguauucaaauuuucaguacc

SEQ ID NO: 656779 - RNA, 23 nt, Human
ugugcaaacagagacagccaggc

SEQ ID NO: 656780 - RNA, 19 nt, Human
uguuagucaucucagcauc

SEQ ID NO: 656781 - RNA, 19 nt, Human
uuaaaagcuauggccaauc

SEQ ID NO: 656782 - RNA, 23 nt, Human
uuaguuauaauguuaccucuagg

SEQ ID NO: 656783 - RNA, 18 nt, Human
uucaaauucaacuuaauu

SEQ ID NO: 656784 - RNA, 18 nt, Human
uucaacacuaccuggacu

SEQ ID NO: 656785 - RNA, 18 nt, Human
uuccaguggcugaaaaag

SEQ ID NO: 656786 - RNA, 19 nt, Human
uuccuguauuuaaaucccc

SEQ ID NO: 656787 - RNA, 18 nt, Human
uucgcugggccucaacca

SEQ ID NO: 656788 - RNA, 18 nt, Human
uucguaguuuaauacaca

SEQ ID NO: 656789 - RNA, 19 nt, Human
uucuaaaacuucuuuguga

SEQ ID NO: 656790 - RNA, 21 nt, Human
uucuccauucuuuccuuauuu

SEQ ID NO: 656791 - RNA, 24 nt, Human
uugaggaagaucagauggugacug

SEQ ID NO: 656792 - RNA, 21 nt, Human
aagauaccacuugaauacuau

SEQ ID NO: 656793 - RNA, 20 nt, Human
aauaaauauaaauccaugcg

SEQ ID NO: 656794 - RNA, 26 nt, Human
acaaugagagagauuucagacccaga

SEQ ID NO: 656795 - RNA, 27 nt, Human
acccuaaaaaugcuagauaaucagagc

SEQ ID NO: 656796 - RNA, 22 nt, Human
aggagaaugacccuaaaaaugc

SEQ ID NO: 656797 - RNA, 26 nt, Human
aguaaacaaugagagagauuucagac

SEQ ID NO: 656798 - RNA, 23 nt, Human
auaaauauaaauccaugcgucau

SEQ ID NO: 656799 - RNA, 24 nt, Human
aucucccaaacaagcucuucuaaa

SEQ ID NO: 656800 - RNA, 27 nt, Human
caaauaccaaaauggacauucuaggaa

SEQ ID NO: 656801 - RNA, 21 nt, Human
caaguacaucaccugaaauaa

SEQ ID NO: 656802 - RNA, 20 nt, Human
caccuguaucccacgauaca

SEQ ID NO: 656803 - RNA, 19 nt, Human
cucauucuuguuucuguuu

SEQ ID NO: 656804 - RNA, 19 nt, Human
cuugguuguuauggaaagu

SEQ ID NO: 656805 - RNA, 20 nt, Human
gaacucaaaaauacuuagug

SEQ ID NO: 656806 - RNA, 24 nt, Human
gacccagaaacaguauauccuaag

SEQ ID NO: 656807 - RNA, 18 nt, Human
gacuaguaaauaugauaa

SEQ ID NO: 656808 - RNA, 20 nt, Human
gccuaaagcacaaacaacuu

SEQ ID NO: 656809 - RNA, 24 nt, Human
ggacauucuaggaacucaaaaaua

SEQ ID NO: 656810 - RNA, 20 nt, Human
ggcaaucuugguuguuaugg

SEQ ID NO: 656811 - RNA, 20 nt, Human
gguaaucuuuauguaaccua

SEQ ID NO: 656812 - RNA, 18 nt, Human
guauaaaguucauaaaag

SEQ ID NO: 656813 - RNA, 26 nt, Human
uaaccaaauaccaaaauggacauucu

SEQ ID NO: 656814 - RNA, 21 nt, Human
uaaggagaaugacccuaaaaa

SEQ ID NO: 656815 - RNA, 18 nt, Human
uaauagucaagauaccac

SEQ ID NO: 656816 - RNA, 19 nt, Human
uaauauuagcugaccauau

SEQ ID NO: 656817 - RNA, 26 nt, Human
uaccaaaauggacauucuaggaacuc

SEQ ID NO: 656818 - RNA, 20 nt, Human
uaccacuugagauauuuuuc

SEQ ID NO: 656819 - RNA, 20 nt, Human
uacuauggcuaaagaaaaua

SEQ ID NO: 656820 - RNA, 21 nt, Human
uagugacuaguaaauaugaua

SEQ ID NO: 656821 - RNA, 22 nt, Human
uauauccuaagguuuugguucu

SEQ ID NO: 656822 - RNA, 21 nt, Human
uauccaagaauaaucagaucu

SEQ ID NO: 656823 - RNA, 21 nt, Human
uaucuuauucucuaaucuccc

SEQ ID NO: 656824 - RNA, 22 nt, Human
uauugugacaaaaaguuacuau

SEQ ID NO: 656825 - RNA, 25 nt, Human
ucaccugaaauaacaccuguauccc

SEQ ID NO: 656826 - RNA, 21 nt, Human
ucucccaaacaagcucuucua

SEQ ID NO: 656827 - RNA, 19 nt, Human
ugacaaaaugauuugaggg

SEQ ID NO: 656828 - RNA, 18 nt, Human
ugauguaacugacaaaau

SEQ ID NO: 656829 - RNA, 21 nt, Human
ugauuugaggguacuacauaa

SEQ ID NO: 656830 - RNA, 25 nt, Human
uggcuaaagaaaauaaugcaaguac

SEQ ID NO: 656831 - RNA, 22 nt, Human
uuagagcugguuaauguuugcc

SEQ ID NO: 656832 - RNA, 21 nt, Human
uuaucuuauucucuaaucucc

SEQ ID NO: 656833 - RNA, 20 nt, Human
uuauugugacaaaaaguuac

SEQ ID NO: 656834 - RNA, 20 nt, Human
uucauugccacuaccucauu

SEQ ID NO: 656835 - RNA, 24 nt, Human
uuggauuuuucuuuuguuuauauu

SEQ ID NO: 656836 - RNA, 22 nt, Human
uuguuagagcugguuaauguuu

SEQ ID NO: 656837 - RNA, 20 nt, Human
uuguuucuguuuucacugag

SEQ ID NO: 656838 - RNA, 23 nt, Human
uuucuguuuucacugagugaaca

SEQ ID NO: 656839 - RNA, 20 nt, Human
uuuuuuuuuuauaaugaccc

SEQ ID NO: 656840 - RNA, 21 nt, Human
aaaaaugcacauaucuuaacc

SEQ ID NO: 656841 - RNA, 21 nt, Human
aauagcaaaagguuaggaaaa

SEQ ID NO: 656842 - RNA, 20 nt, Human
agaaacucuucauguaacga

SEQ ID NO: 656843 - RNA, 19 nt, Human
agagaagacaagcugaaga

SEQ ID NO: 656844 - RNA, 19 nt, Human
agagaagacaagcugaaga

SEQ ID NO: 656845 - RNA, 23 nt, Human
aggaaaagauaacacuuuuuggg

SEQ ID NO: 656846 - RNA, 24 nt, Human
agggauauuuaaggaaaagauaac

SEQ ID NO: 656847 - RNA, 23 nt, Human
augaguucuaaaggagggaagga

SEQ ID NO: 656848 - RNA, 19 nt, Human
cugcaauuauagaccaaga

SEQ ID NO: 656849 - RNA, 19 nt, Human
gaaaacaucccaauggaaa

SEQ ID NO: 656850 - RNA, 21 nt, Human
gggaaggagacuucacuguuu

SEQ ID NO: 656851 - RNA, 21 nt, Human
uaaauuuccagcuuacaguaa

SEQ ID NO: 656852 - RNA, 30 nt, Human
uacacagagaagacaagcugaagaacaguu

SEQ ID NO: 656853 - RNA, 21 nt, Human
uaggaaaaauaccucuagagg

SEQ ID NO: 656854 - RNA, 22 nt, Human
uauagauggcaacuugccaaua

SEQ ID NO: 656855 - RNA, 22 nt, Human
uauuaugguacauucauacaau

SEQ ID NO: 656856 - RNA, 19 nt, Human
ucguucugugucuuuugaa

SEQ ID NO: 656857 - RNA, 22 nt, Human
ucuagagggauauuuaaggaaa

SEQ ID NO: 656858 - RNA, 21 nt, Human
ugaguucuaaaggagggaagg

SEQ ID NO: 656859 - RNA, 21 nt, Human
uuugaauuuugaacaauuuug

SEQ ID NO: 656860 - RNA, 18 nt, Human
uuuuuuuuuuuuuuuuug

SEQ ID NO: 656861 - RNA, 20 nt, Human
aaaaaacaacaaaaaccuca

SEQ ID NO: 656862 - RNA, 19 nt, Human
aagaaaagcaaagucaagg

SEQ ID NO: 656863 - RNA, 23 nt, Human
aagaguacaaacagaaaaaaccc

SEQ ID NO: 656864 - RNA, 19 nt, Human
acggugcgcgccgcgggcc

SEQ ID NO: 656865 - RNA, 20 nt, Human
agagaaggaagcugcaauag

SEQ ID NO: 656866 - RNA, 20 nt, Human
agcuaccaagccaagcugcc

SEQ ID NO: 656867 - RNA, 21 nt, Human
aggaaucucuucccaccguac

SEQ ID NO: 656868 - RNA, 21 nt, Human
aggcaaaucccagagcuacca

SEQ ID NO: 656869 - RNA, 19 nt, Human
agggagagggcgcuuccaa

SEQ ID NO: 656870 - RNA, 19 nt, Human
aguacaaacagaaaaaacc

SEQ ID NO: 656871 - RNA, 26 nt, Human
auugugcuguuuuuccuuucacuuaa

SEQ ID NO: 656872 - RNA, 21 nt, Human
caaaaaacaacaaaaaccuca

SEQ ID NO: 656873 - RNA, 18 nt, Human
caccagcacagugcaagg

SEQ ID NO: 656874 - RNA, 23 nt, Human
cagaaaaaacccaaguauuccca

SEQ ID NO: 656875 - RNA, 26 nt, Human
cagaaaaaacccaaguauucccaaaa

SEQ ID NO: 656876 - RNA, 22 nt, Human
cauugcuaacagauggcaaaga

SEQ ID NO: 656877 - RNA, 22 nt, Human
ccaagaguacaaacagaaaaaa

SEQ ID NO: 656878 - RNA, 18 nt, Human
ccaggcugaggaggugcu

SEQ ID NO: 656879 - RNA, 22 nt, Human
cccaagaguacaaacagaaaaa

SEQ ID NO: 656880 - RNA, 23 nt, Human
cccauaacaaggaaacucuuuag

SEQ ID NO: 656881 - RNA, 23 nt, Human
ccccaagaguacaaacagaaaaa

SEQ ID NO: 656882 - RNA, 22 nt, Human
cuaaauggauucuccuucuuga

SEQ ID NO: 656883 - RNA, 22 nt, Human
cucuauagauacguauguaucc

SEQ ID NO: 656884 - RNA, 22 nt, Human
cucuccaguugacugcauugcu

SEQ ID NO: 656885 - RNA, 26 nt, Human
cuuaacucagcccuugagccgguucc

SEQ ID NO: 656886 - RNA, 22 nt, Human
cuuccaaaaaacaacaaaaacc

SEQ ID NO: 656887 - RNA, 25 nt, Human
gaaaaaaacuuuccuaacuguaccc

SEQ ID NO: 656888 - RNA, 22 nt, Human
gccaagcugcuuucggcaaagc

SEQ ID NO: 656889 - RNA, 21 nt, Human
gccacauaugaaucacugagc

SEQ ID NO: 656890 - RNA, 20 nt, Human
ggaaucacaaguguguagag

SEQ ID NO: 656891 - RNA, 18 nt, Human
ggaccugcacugauucuu

SEQ ID NO: 656892 - RNA, 18 nt, Human
gggcugaggaaucucuuc

SEQ ID NO: 656893 - RNA, 18 nt, Human
guacaaacagaaaaaacc

SEQ ID NO: 656894 - RNA, 21 nt, Human
guaggcugcaggaagauacca

SEQ ID NO: 656895 - RNA, 19 nt, Human
uaagcccuaacacguaggc

SEQ ID NO: 656896 - RNA, 23 nt, Human
uacaaacagaaaaaacccaagua

SEQ ID NO: 656897 - RNA, 22 nt, Human
uagaugaaaaauauugagcaau

SEQ ID NO: 656898 - RNA, 23 nt, Human
uauccaagacauggauacuuuua

SEQ ID NO: 656899 - RNA, 23 nt, Human
uauguuugccuuuacuuccaaaa

SEQ ID NO: 656900 - RNA, 24 nt, Human
uauuaagaaaagcaaagucaaggg

SEQ ID NO: 656901 - RNA, 26 nt, Human
ucaccauugugcuguuuuuccuuuca

SEQ ID NO: 656902 - RNA, 24 nt, Human
uccaaaaaacaacaaaaaccucau

SEQ ID NO: 656903 - RNA, 24 nt, Human
ucccaaagccacauaugaaucacu

SEQ ID NO: 656904 - RNA, 20 nt, Human
ucccagagcuaccaagccaa

SEQ ID NO: 656905 - RNA, 21 nt, Human
ucccagagcuaccaagccaag

SEQ ID NO: 656906 - RNA, 22 nt, Human
ucccagagcuaccaagccaagc

SEQ ID NO: 656907 - RNA, 19 nt, Human
uccccaagaguacaaacag

SEQ ID NO: 656908 - RNA, 25 nt, Human
ucguacauaauaucgaauaggaauc

SEQ ID NO: 656909 - RNA, 19 nt, Human
ucuccaucguacauaauau

SEQ ID NO: 656910 - RNA, 18 nt, Human
ugcacaaugcaagugaaa

SEQ ID NO: 656911 - RNA, 22 nt, Human
ugcaggaagauaccaucugaga

SEQ ID NO: 656912 - RNA, 20 nt, Human
ugcuguuuuuccuuucacuu

SEQ ID NO: 656913 - RNA, 23 nt, Human
uggaauauaaaauuuacaaagca

SEQ ID NO: 656914 - RNA, 20 nt, Human
uggcaaagaagugauucccc

SEQ ID NO: 656915 - RNA, 24 nt, Human
uggcaaagaagugauuccccaaga

SEQ ID NO: 656916 - RNA, 18 nt, Human
uguauuaagaaaagcaaa

SEQ ID NO: 656917 - RNA, 18 nt, Human
ugugaaaccacaaggcua

SEQ ID NO: 656918 - RNA, 18 nt, Human
uguguagaggacaugaag

SEQ ID NO: 656919 - RNA, 24 nt, Human
uuaggucaugcauguugcccauaa

SEQ ID NO: 656920 - RNA, 18 nt, Human
uucaugugacccacuucc

SEQ ID NO: 656921 - RNA, 18 nt, Human
uuccaguaugucagucaa

SEQ ID NO: 656922 - RNA, 23 nt, Human
uuuuuuuuuuacacuagaaauua

SEQ ID NO: 656923 - RNA, 25 nt, Human
uuuuuuuuuuuuuuuuuuacacuag

SEQ ID NO: 656924 - RNA, 23 nt, Human
acccccagcccuggaguuggcuc

SEQ ID NO: 656925 - RNA, 25 nt, Human
accuaauuucuccaaggguccccag

SEQ ID NO: 656926 - RNA, 19 nt, Human
agccuaggacuccugaccc

SEQ ID NO: 656927 - RNA, 20 nt, Human
agggcccagugacuuugggg

SEQ ID NO: 656928 - RNA, 26 nt, Human
aguaccccccauucccagggggugac

SEQ ID NO: 656929 - RNA, 18 nt, Human
auggagugggugagggca

SEQ ID NO: 656930 - RNA, 19 nt, Human
caauggcuuuucucagggc

SEQ ID NO: 656931 - RNA, 22 nt, Human
cagcaggugacaccuaauuucu

SEQ ID NO: 656932 - RNA, 18 nt, Human
cagcccuggaguuggcuc

SEQ ID NO: 656933 - RNA, 26 nt, Human
cagggucuuugcuuugcggggcuggg

SEQ ID NO: 656934 - RNA, 24 nt, Human
cauuuugccacagcaggugacacc

SEQ ID NO: 656935 - RNA, 18 nt, Human
ccacgggcaaagcacagc

SEQ ID NO: 656936 - RNA, 24 nt, Human
cccaggagccgcugcugagcuucu

SEQ ID NO: 656937 - RNA, 23 nt, Human
cccucauccacagucaucuccuu

SEQ ID NO: 656938 - RNA, 22 nt, Human
ccgcugcugagcuucuggccac

SEQ ID NO: 656939 - RNA, 19 nt, Human
ccugacccccagcccugga

SEQ ID NO: 656940 - RNA, 25 nt, Human
ccugacccccagcccuggaguuggc

SEQ ID NO: 656941 - RNA, 22 nt, Human
ccuucgguugguaauggagcag

SEQ ID NO: 656942 - RNA, 18 nt, Human
cugcuugagguccaugga

SEQ ID NO: 656943 - RNA, 19 nt, Human
cuguucccucauccuuucc

SEQ ID NO: 656944 - RNA, 21 nt, Human
gagccgcugcugagcuucugg

SEQ ID NO: 656945 - RNA, 23 nt, Human
ggaggccugcucuggggcucagg

SEQ ID NO: 656946 - RNA, 18 nt, Human
ggccucagaguauccaga

SEQ ID NO: 656947 - RNA, 19 nt, Human
gggcacucuguggugugcc

SEQ ID NO: 656948 - RNA, 21 nt, Human
gggcagcaggggcuccagcuc

SEQ ID NO: 656949 - RNA, 18 nt, Human
gggcucaggugagugugc

SEQ ID NO: 656950 - RNA, 22 nt, Human
gggggcucaagggcuuguugag

SEQ ID NO: 656951 - RNA, 23 nt, Human
uaaacccauuuugccacagcagg

SEQ ID NO: 656952 - RNA, 23 nt, Human
uagcggucuccuucugggggcuc

SEQ ID NO: 656953 - RNA, 19 nt, Human
ucagggcauccuggagaug

SEQ ID NO: 656954 - RNA, 23 nt, Human
ucagggcccagugacuuuggggg

SEQ ID NO: 656955 - RNA, 24 nt, Human
ucauccuuuccaggccuuucccag

SEQ ID NO: 656956 - RNA, 18 nt, Human
ucccagggggugaccugc

SEQ ID NO: 656957 - RNA, 28 nt, Human
uccccagcacacagggaaggaggccugc

SEQ ID NO: 656958 - RNA, 21 nt, Human
uccccuuagacagguggggga

SEQ ID NO: 656959 - RNA, 20 nt, Human
uccuuuccaggccuuuccca

SEQ ID NO: 656960 - RNA, 19 nt, Human
ucucagggcccagugacuc

SEQ ID NO: 656961 - RNA, 20 nt, Human
ucucagggcccagugacuuu

SEQ ID NO: 656962 - RNA, 18 nt, Human
ucugggggcucaagggcu

SEQ ID NO: 656963 - RNA, 18 nt, Human
ucuguggugugcaaagcg

SEQ ID NO: 656964 - RNA, 18 nt, Human
ugagcugggcagcagggg

SEQ ID NO: 656965 - RNA, 23 nt, Human
ugcaaagcggggugcgugaguac

SEQ ID NO: 656966 - RNA, 23 nt, Human
ugcaaagguugccuuuguuccuc

SEQ ID NO: 656967 - RNA, 18 nt, Human
ugcugagcuucuggccac

SEQ ID NO: 656968 - RNA, 23 nt, Human
uggccacgggcaaagcacagcug

SEQ ID NO: 656969 - RNA, 24 nt, Human
uggugugcaaagcggggugcguga

SEQ ID NO: 656970 - RNA, 21 nt, Human
ugucagggcauccuggagaug

SEQ ID NO: 656971 - RNA, 18 nt, Human
ugugcuaauuugagaauc

SEQ ID NO: 656972 - RNA, 19 nt, Human
uugggggugcgguggcuuc

SEQ ID NO: 656973 - RNA, 19 nt, Human
uugguaauggagcaggaau

SEQ ID NO: 656974 - RNA, 23 nt, Human
uuuccaggccuuucccaggagcc

SEQ ID NO: 656975 - RNA, 19 nt, Human
uuugcggggcugggcgguc

SEQ ID NO: 656976 - RNA, 18 nt, Human
uuuguuccucgccuguuc

SEQ ID NO: 656977 - RNA, 25 nt, Human
uuuucuguuccccuuagacaggugg

SEQ ID NO: 656978 - RNA, 22 nt, Human
uuuuuuuuuuuuuuuuucacag

SEQ ID NO: 656979 - RNA, 22 nt, Human
aaaaacacaaagccuccaugug

SEQ ID NO: 656980 - RNA, 24 nt, Human
aaacaaaaauaaaagaugcaugga

SEQ ID NO: 656981 - RNA, 21 nt, Human
aaaccagaagccacaaaaaga

SEQ ID NO: 656982 - RNA, 20 nt, Human
aaaggccaaggaauguagcu

SEQ ID NO: 656983 - RNA, 21 nt, Human
aacagcuucccaggucaaagc

SEQ ID NO: 656984 - RNA, 27 nt, Human
aaccuccuucacauauacaaggaaccu

SEQ ID NO: 656985 - RNA, 18 nt, Human
aaccugcccuuuccuccu

SEQ ID NO: 656986 - RNA, 25 nt, Human
aaccugcccuuuccuccuggucucu

SEQ ID NO: 656987 - RNA, 21 nt, Human
aacuuguccuccaguggccug

SEQ ID NO: 656988 - RNA, 22 nt, Human
aagaaaaacaggcaaaggaaaa

SEQ ID NO: 656989 - RNA, 20 nt, Human
aaggaaccaaccuccuucac

SEQ ID NO: 656990 - RNA, 25 nt, Human
aauccuuaccccaaaccuccaggga

SEQ ID NO: 656991 - RNA, 24 nt, Human
acaaaaagacuacucaacuacaga

SEQ ID NO: 656992 - RNA, 21 nt, Human
acaaggaaccaaccuccuuca

SEQ ID NO: 656993 - RNA, 18 nt, Human
acacaaagccuccaugug

SEQ ID NO: 656994 - RNA, 18 nt, Human
acaggcaaaggaaaaaca

SEQ ID NO: 656995 - RNA, 21 nt, Human
accaaccuccuucacauauac

SEQ ID NO: 656996 - RNA, 24 nt, Human
accucauccucuccaccugccuga

SEQ ID NO: 656997 - RNA, 18 nt, Human
acuacagaaaaacacaaa

SEQ ID NO: 656998 - RNA, 18 nt, Human
acuccuaucucucccagg

SEQ ID NO: 656999 - RNA, 25 nt, Human
acucuguugccaaggcuggagugca

SEQ ID NO: 657000 - RNA, 21 nt, Human
acugccugagaugcggcucca

SEQ ID NO: 657001 - RNA, 20 nt, Human
agaaaaacacaaagccucca

SEQ ID NO: 657002 - RNA, 20 nt, Human
agaaaaacaggcaaaggaaa

SEQ ID NO: 657003 - RNA, 24 nt, Human
agaggugggaggaucacuuggggc

SEQ ID NO: 657004 - RNA, 21 nt, Human
agcgcccacccccucagcagc

SEQ ID NO: 657005 - RNA, 18 nt, Human
aggcaaaggaaaaacaca

SEQ ID NO: 657006 - RNA, 19 nt, Human
aggcaguguuugaacagag

SEQ ID NO: 657007 - RNA, 18 nt, Human
aggugggaggaucacuug

SEQ ID NO: 657008 - RNA, 25 nt, Human
aggugugcaggcagcaggugggagu

SEQ ID NO: 657009 - RNA, 23 nt, Human
agugcagugucaugaacauagcu

SEQ ID NO: 657010 - RNA, 23 nt, Human
agugcagugucaugaacauagcu

SEQ ID NO: 657011 - RNA, 22 nt, Human
auaaacaaaaauaaaagaugca

SEQ ID NO: 657012 - RNA, 24 nt, Human
auagcucacugcagccucaaccuc

SEQ ID NO: 657013 - RNA, 24 nt, Human
auagcucacugcagccucgaccuc

SEQ ID NO: 657014 - RNA, 18 nt, Human
augaacauagcucacugc

SEQ ID NO: 657015 - RNA, 18 nt, Human
augaacauagcucacugc

SEQ ID NO: 657016 - RNA, 23 nt, Human
auuccauucaucucucugccuca

SEQ ID NO: 657017 - RNA, 27 nt, Human
caaaccucauccucuccaccugccuga

SEQ ID NO: 657018 - RNA, 24 nt, Human
caacuacagaaaaacacaaagccu

SEQ ID NO: 657019 - RNA, 22 nt, Human
caaggaauguagcugccccuga

SEQ ID NO: 657020 - RNA, 21 nt, Human
cacgaauccugacuuggccac

SEQ ID NO: 657021 - RNA, 24 nt, Human
cacucuguugccaaggcuggagug

SEQ ID NO: 657022 - RNA, 22 nt, Human
cagcagcgucgccuaugguacu

SEQ ID NO: 657023 - RNA, 27 nt, Human
cagcagcucuucccucugcuccucaaa

SEQ ID NO: 657024 - RNA, 22 nt, Human
cagcaggugggagugggcccag

SEQ ID NO: 657025 - RNA, 24 nt, Human
cagccucaaccucuagggcucaag

SEQ ID NO: 657026 - RNA, 24 nt, Human
cagccucgaccucuagggcucaag

SEQ ID NO: 657027 - RNA, 20 nt, Human
cagccuggggcaguccagcu

SEQ ID NO: 657028 - RNA, 22 nt, Human
cagcgcccacccccucagcagc

SEQ ID NO: 657029 - RNA, 19 nt, Human
cagcucuucccucugcucc

SEQ ID NO: 657030 - RNA, 23 nt, Human
cagcuucccaggucaaagcugga

SEQ ID NO: 657031 - RNA, 22 nt, Human
caggcaaaggaaaaacacagug

SEQ ID NO: 657032 - RNA, 23 nt, Human
cauuagacuuagaggcaggaagu

SEQ ID NO: 657033 - RNA, 23 nt, Human
ccacccccucagcagcucuuccc

SEQ ID NO: 657034 - RNA, 19 nt, Human
ccagguccuugcccuccuc

SEQ ID NO: 657035 - RNA, 20 nt, Human
ccccaaaccuccagggaccc

SEQ ID NO: 657036 - RNA, 21 nt, Human
ccccaaaccuccagggacccc

SEQ ID NO: 657037 - RNA, 20 nt, Human
cccgacugcccagcgcccac

SEQ ID NO: 657038 - RNA, 25 nt, Human
cccuccugaacucacuuuugugacc

SEQ ID NO: 657039 - RNA, 20 nt, Human
ccucaaaccucauccucucc

SEQ ID NO: 657040 - RNA, 20 nt, Human
ccuccacaccuggcccugau

SEQ ID NO: 657041 - RNA, 18 nt, Human
ccuccauguggcaaaagc

SEQ ID NO: 657042 - RNA, 21 nt, Human
ccucccagccuggggcagucc

SEQ ID NO: 657043 - RNA, 24 nt, Human
ccuccugcucccccauuagacuua

SEQ ID NO: 657044 - RNA, 18 nt, Human
ccucgaccucuagggcuc

SEQ ID NO: 657045 - RNA, 22 nt, Human
ccugccaggcgugccagcguga

SEQ ID NO: 657046 - RNA, 22 nt, Human
ccuugcccuccuccugcucccc

SEQ ID NO: 657047 - RNA, 20 nt, Human
cgaccucuagggcucaagcc

SEQ ID NO: 657048 - RNA, 20 nt, Human
cgacugcccagcgcccaccc

SEQ ID NO: 657049 - RNA, 23 nt, Human
cgcccacccccucagcagcucuu

SEQ ID NO: 657050 - RNA, 20 nt, Human
cucaaaccucauccucucca

SEQ ID NO: 657051 - RNA, 20 nt, Human
cucaaaccucauccucucca

SEQ ID NO: 657052 - RNA, 22 nt, Human
cucaaaccucauccucuccacc

SEQ ID NO: 657053 - RNA, 24 nt, Human
cucaacuacagaaaaacacaaagc

SEQ ID NO: 657054 - RNA, 19 nt, Human
cucacucuguugccaaggc

SEQ ID NO: 657055 - RNA, 24 nt, Human
cucacucuguugccaaggcuggag

SEQ ID NO: 657056 - RNA, 20 nt, Human
cucacugcagccucaaccuc

SEQ ID NO: 657057 - RNA, 20 nt, Human
cucacugcagccucgaccuc

SEQ ID NO: 657058 - RNA, 18 nt, Human
cucagcagcucuucccuc

SEQ ID NO: 657059 - RNA, 21 nt, Human
cuccacaccuggcccugauuc

SEQ ID NO: 657060 - RNA, 21 nt, Human
cucccaggcugccugccaggc

SEQ ID NO: 657061 - RNA, 21 nt, Human
cuccugaggcuugagaggugg

SEQ ID NO: 657062 - RNA, 21 nt, Human
cucucacugcccuccugaacu

SEQ ID NO: 657063 - RNA, 22 nt, Human
cucucugccucauccugccagg

SEQ ID NO: 657064 - RNA, 24 nt, Human
cugaacucacuuuugugacccagc

SEQ ID NO: 657065 - RNA, 22 nt, Human
cugcagccucaaccucuagggc

SEQ ID NO: 657066 - RNA, 23 nt, Human
cugcagccucaaccucuagggcu

SEQ ID NO: 657067 - RNA, 22 nt, Human
cugcagccucgaccucuagggc

SEQ ID NO: 657068 - RNA, 19 nt, Human
cugcccagcgcccaccccc

SEQ ID NO: 657069 - RNA, 21 nt, Human
cuuaccccaaaccuccaggga

SEQ ID NO: 657070 - RNA, 23 nt, Human
cuuaccccaaaccuccagggacc

SEQ ID NO: 657071 - RNA, 20 nt, Human
cuucacauauacaaggaacc

SEQ ID NO: 657072 - RNA, 18 nt, Human
cuuggggcacaccuccac

SEQ ID NO: 657073 - RNA, 21 nt, Human
cuuuguugccaaggcuggagu

SEQ ID NO: 657074 - RNA, 19 nt, Human
gaacauagcucacugcagc

SEQ ID NO: 657075 - RNA, 19 nt, Human
gaacauagcucacugcagc

SEQ ID NO: 657076 - RNA, 18 nt, Human
gagagcccacuagggagc

SEQ ID NO: 657077 - RNA, 23 nt, Human
gagcaggugccaaauucccccac

SEQ ID NO: 657078 - RNA, 22 nt, Human
gagccgggaccaggcaaggcca

SEQ ID NO: 657079 - RNA, 21 nt, Human
gagccucaguuuucuccucug

SEQ ID NO: 657080 - RNA, 23 nt, Human
gauaagaaaaacaggcaaaggaa

SEQ ID NO: 657081 - RNA, 18 nt, Human
gcccagcacgaauccuga

SEQ ID NO: 657082 - RNA, 21 nt, Human
gcccuccuccugcucccccau

SEQ ID NO: 657083 - RNA, 22 nt, Human
gcugaaggagcagcaggugggu

SEQ ID NO: 657084 - RNA, 18 nt, Human
ggaaaaacacaguguugc

SEQ ID NO: 657085 - RNA, 19 nt, Human
ggagagcccacuagggagc

SEQ ID NO: 657086 - RNA, 24 nt, Human
ggcaguccagcuuuuccagcugaa

SEQ ID NO: 657087 - RNA, 19 nt, Human
ggcccucugcgaugucucc

SEQ ID NO: 657088 - RNA, 25 nt, Human
gggcaguccagcuuuuccagcugaa

SEQ ID NO: 657089 - RNA, 18 nt, Human
ggugguggaggcagggga

SEQ ID NO: 657090 - RNA, 23 nt, Human
gugaccuugagugacucucacug

SEQ ID NO: 657091 - RNA, 18 nt, Human
guuccugugaacagccau

SEQ ID NO: 657092 - RNA, 21 nt, Human
uaaacugauaagaaaaacaac

SEQ ID NO: 657093 - RNA, 23 nt, Human
uacagaaaaacacaaagccucca

SEQ ID NO: 657094 - RNA, 26 nt, Human
uacagaguuccucccagccuggggca

SEQ ID NO: 657095 - RNA, 20 nt, Human
uaccccaaaccuccagggac

SEQ ID NO: 657096 - RNA, 24 nt, Human
uagcucacugcagccucaaccucu

SEQ ID NO: 657097 - RNA, 24 nt, Human
uagcucacugcagccucgaccucu

SEQ ID NO: 657098 - RNA, 21 nt, Human
uagggcucaagccauccuccu

SEQ ID NO: 657099 - RNA, 27 nt, Human
uagggcucaagccaucuccugccuucg

SEQ ID NO: 657100 - RNA, 18 nt, Human
uagugaguccuuacagag

SEQ ID NO: 657101 - RNA, 18 nt, Human
uaucucucccaggcugcc

SEQ ID NO: 657102 - RNA, 22 nt, Human
ucaagccauccuccugucuccu

SEQ ID NO: 657103 - RNA, 23 nt, Human
ucaauccuuaccccaaaccucca

SEQ ID NO: 657104 - RNA, 23 nt, Human
ucacugcagccucaaccucuagg

SEQ ID NO: 657105 - RNA, 24 nt, Human
ucacugcagccucaaccucuaggg

SEQ ID NO: 657106 - RNA, 23 nt, Human
ucacugcagccucgaccucuagg

SEQ ID NO: 657107 - RNA, 24 nt, Human
ucacugcagccucgaccucuaggg

SEQ ID NO: 657108 - RNA, 24 nt, Human
ucagcagcucuucccucugcuccu

SEQ ID NO: 657109 - RNA, 22 nt, Human
uccaaaccagaagccacaaaaa

SEQ ID NO: 657110 - RNA, 19 nt, Human
ucccccacggugguggagg

SEQ ID NO: 657111 - RNA, 20 nt, Human
ucccccacggugguggaggc

SEQ ID NO: 657112 - RNA, 23 nt, Human
ucccccauuagacuuagaggcug

SEQ ID NO: 657113 - RNA, 18 nt, Human
ucccgacugcccagcgcc

SEQ ID NO: 657114 - RNA, 24 nt, Human
ucccgacugcccagcgcccacccc

SEQ ID NO: 657115 - RNA, 19 nt, Human
uccuggaugcccaaggccc

SEQ ID NO: 657116 - RNA, 18 nt, Human
uccuggggaggagagccc

SEQ ID NO: 657117 - RNA, 18 nt, Human
uccuggucucuccccugg

SEQ ID NO: 657118 - RNA, 23 nt, Human
ucuagggcucaagccaucuccug

SEQ ID NO: 657119 - RNA, 27 nt, Human
ucuagggcucaagccaucuccugccuu

SEQ ID NO: 657120 - RNA, 25 nt, Human
ucuaugugcuuuccaaaccagaagc

SEQ ID NO: 657121 - RNA, 23 nt, Human
ucucacucuguugccaaggcugg

SEQ ID NO: 657122 - RNA, 24 nt, Human
ucucacucuguugccaaggcugga

SEQ ID NO: 657123 - RNA, 23 nt, Human
ucuccccuggccugcaggaauug

SEQ ID NO: 657124 - RNA, 19 nt, Human
ucuccugaggcuugagagg

SEQ ID NO: 657125 - RNA, 22 nt, Human
ucuccugccuucgccucccgac

SEQ ID NO: 657126 - RNA, 19 nt, Human
ucuguugccaaggcuggag

SEQ ID NO: 657127 - RNA, 23 nt, Human
ucuugcuuuguugccaaggcugg

SEQ ID NO: 657128 - RNA, 24 nt, Human
ucuugcuuuguugccaaggcugga

SEQ ID NO: 657129 - RNA, 18 nt, Human
ugaacauagcucacugca

SEQ ID NO: 657130 - RNA, 18 nt, Human
ugaacauagcucacugca

SEQ ID NO: 657131 - RNA, 22 nt, Human
ugaagacagggucucacucugu

SEQ ID NO: 657132 - RNA, 24 nt, Human
ugagaggugggaggaucacuuggg

SEQ ID NO: 657133 - RNA, 21 nt, Human
ugagccgcagugaaaggccaa

SEQ ID NO: 657134 - RNA, 20 nt, Human
ugagccucaguuuucuccuc

SEQ ID NO: 657135 - RNA, 25 nt, Human
ugagugacucucacugcccuccuga

SEQ ID NO: 657136 - RNA, 21 nt, Human
ugccaaggcuggagugcagug

SEQ ID NO: 657137 - RNA, 21 nt, Human
ugccaaggcuggagugcagug

SEQ ID NO: 657138 - RNA, 18 nt, Human
ugccagcgugaccuguga

SEQ ID NO: 657139 - RNA, 24 nt, Human
ugccccgagucuucuacccacuga

SEQ ID NO: 657140 - RNA, 21 nt, Human
ugcccuccuccugcuccccca

SEQ ID NO: 657141 - RNA, 18 nt, Human
ugcuccacacggccaggc

SEQ ID NO: 657142 - RNA, 22 nt, Human
ugcucugggcaagugacugagc

SEQ ID NO: 657143 - RNA, 22 nt, Human
uggagacagggucuugcuuugu

SEQ ID NO: 657144 - RNA, 20 nt, Human
uggaggcaggggaguggcag

SEQ ID NO: 657145 - RNA, 18 nt, Human
uggagugcagugucauga

SEQ ID NO: 657146 - RNA, 18 nt, Human
uggagugcagugucauga

SEQ ID NO: 657147 - RNA, 18 nt, Human
uggcagagacuaucugug

SEQ ID NO: 657148 - RNA, 21 nt, Human
ugggcaagugacugagccuca

SEQ ID NO: 657149 - RNA, 18 nt, Human
ugguacugccauccuccu

SEQ ID NO: 657150 - RNA, 19 nt, Human
uggucuucuccccugcccc

SEQ ID NO: 657151 - RNA, 18 nt, Human
ugguggaggcaggggagu

SEQ ID NO: 657152 - RNA, 23 nt, Human
uguacaauggggagaggacguac

SEQ ID NO: 657153 - RNA, 21 nt, Human
ugugaccuugagugacucuca

SEQ ID NO: 657154 - RNA, 23 nt, Human
uguggcaaaagcccauaaacaaa

SEQ ID NO: 657155 - RNA, 21 nt, Human
uguugccaaggcuggagugca

SEQ ID NO: 657156 - RNA, 18 nt, Human
uuccuaggagugcagugc

SEQ ID NO: 657157 - RNA, 24 nt, Human
uugccaaggcuggagugcaguguc

SEQ ID NO: 657158 - RNA, 24 nt, Human
uugccaaggcuggagugcaguguc

SEQ ID NO: 657159 - RNA, 24 nt, Human
uugcuuuguugccaaggcuggagu

SEQ ID NO: 657160 - RNA, 24 nt, Human
uuuguugccaaggcuggagugcag

SEQ ID NO: 657161 - RNA, 22 nt, Human
uuuuuguuuuuugaagacaggg

SEQ ID NO: 657162 - RNA, 25 nt, Human
uuuuuuuuuuuuggagacagggucu

SEQ ID NO: 657163 - RNA, 18 nt, Human
uuuuuuuuuuuuuuuuug

SEQ ID NO: 657164 - RNA, 28 nt, Human
uuuuuuuuuuuuuuuuuuggagacaggg

SEQ ID NO: 657165 - RNA, 18 nt, Human
aaaaacaaacagaauacc

SEQ ID NO: 657166 - RNA, 19 nt, Human
aaaacaaaacgaaacaaaa

SEQ ID NO: 657167 - RNA, 24 nt, Human
aaaacaaaacgaaacaaaacaaaa

SEQ ID NO: 657168 - RNA, 20 nt, Human
aaaacgaaacaaaacaaaaa

SEQ ID NO: 657169 - RNA, 22 nt, Human
aaacaaaacaaaaacaaacaga

SEQ ID NO: 657170 - RNA, 22 nt, Human
aaacaaaacgaaacaaaacaaa

SEQ ID NO: 657171 - RNA, 18 nt, Human
aaacagaauaccagugac

SEQ ID NO: 657172 - RNA, 21 nt, Human
aaacagaauaccagugaccuc

SEQ ID NO: 657173 - RNA, 25 nt, Human
aaacagaauaccagugaccuccaac

SEQ ID NO: 657174 - RNA, 23 nt, Human
aaacgaaacaaaacaaaaacaaa

SEQ ID NO: 657175 - RNA, 23 nt, Human
aaagaagacagugcaccucugca

SEQ ID NO: 657176 - RNA, 18 nt, Human
aaauacacuaagguucac

SEQ ID NO: 657177 - RNA, 22 nt, Human
aacaaaacaaucaguucccuca

SEQ ID NO: 657178 - RNA, 19 nt, Human
aacaaaacgaaacaaaaca

SEQ ID NO: 657179 - RNA, 22 nt, Human
aacagaauaccagugaccucca

SEQ ID NO: 657180 - RNA, 21 nt, Human
aaccacacugcugaggucuuc

SEQ ID NO: 657181 - RNA, 23 nt, Human
aacgaaacaaaacaaaaacaaac

SEQ ID NO: 657182 - RNA, 23 nt, Human
aacuagcuauauacauagauuuc

SEQ ID NO: 657183 - RNA, 24 nt, Human
aaguagcccagguggguggagugc

SEQ ID NO: 657184 - RNA, 20 nt, Human
aaucacaggaacaacgagga

SEQ ID NO: 657185 - RNA, 18 nt, Human
aauggugggggggaggag

SEQ ID NO: 657186 - RNA, 20 nt, Human
acaaaacaaaaacaaacaga

SEQ ID NO: 657187 - RNA, 21 nt, Human
acaaaacaaaaacaaacagaa

SEQ ID NO: 657188 - RNA, 22 nt, Human
acaaaacgaaacaaaacaaaaa

SEQ ID NO: 657189 - RNA, 24 nt, Human
acagaacgagacccugucucaaaa

SEQ ID NO: 657190 - RNA, 18 nt, Human
acagaauaccagugaccu

SEQ ID NO: 657191 - RNA, 19 nt, Human
acagcugcccuucacacug

SEQ ID NO: 657192 - RNA, 18 nt, Human
acagugggacauacccgc

SEQ ID NO: 657193 - RNA, 18 nt, Human
acccugucucaaaaaaca

SEQ ID NO: 657194 - RNA, 23 nt, Human
accgcacuccagcuaagcgacag

SEQ ID NO: 657195 - RNA, 23 nt, Human
acgccaccgcacuccagcuaagc

SEQ ID NO: 657196 - RNA, 22 nt, Human
acuaaaaugagacaaugaucua

SEQ ID NO: 657197 - RNA, 21 nt, Human
agaaaauaaagaggaagaaga

SEQ ID NO: 657198 - RNA, 23 nt, Human
agccaaugcguaauauccagagc

SEQ ID NO: 657199 - RNA, 21 nt, Human
agcuggcaaaagcuuccaaga

SEQ ID NO: 657200 - RNA, 27 nt, Human
aggaacaacgaggagcugccgguaccc

SEQ ID NO: 657201 - RNA, 24 nt, Human
aggaacaaucacuaaaaugagaca

SEQ ID NO: 657202 - RNA, 18 nt, Human
aggaagaagagaaaucca

SEQ ID NO: 657203 - RNA, 19 nt, Human
aggaagaagagaaauccac

SEQ ID NO: 657204 - RNA, 23 nt, Human
aggcagacacucuggcucgugcc

SEQ ID NO: 657205 - RNA, 24 nt, Human
aggcagacacucuggcucgugccc

SEQ ID NO: 657206 - RNA, 23 nt, Human
aucacgccaccgcacuccagcua

SEQ ID NO: 657207 - RNA, 26 nt, Human
augcagaaaauaaagaggagggaccc

SEQ ID NO: 657208 - RNA, 26 nt, Human
caaaaaacaaaacgaaacaaaacaaa

SEQ ID NO: 657209 - RNA, 22 nt, Human
caaaacagagugaauucccuuc

SEQ ID NO: 657210 - RNA, 22 nt, Human
caaaacgaaacaaaacaaaaac

SEQ ID NO: 657211 - RNA, 24 nt, Human
caaaauaaugaagaaacacauagc

SEQ ID NO: 657212 - RNA, 23 nt, Human
caaacagaauaccagugaccucc

SEQ ID NO: 657213 - RNA, 22 nt, Human
caacaaaacaaucaguucccuc

SEQ ID NO: 657214 - RNA, 21 nt, Human
caauacagcacaaaacucuuu

SEQ ID NO: 657215 - RNA, 18 nt, Human
cacaauacagcacaaaac

SEQ ID NO: 657216 - RNA, 19 nt, Human
cacagcugcccuucacacu

SEQ ID NO: 657217 - RNA, 23 nt, Human
cacauuauccagaguccuggguc

SEQ ID NO: 657218 - RNA, 22 nt, Human
cacuccagcuaagcgacagaac

SEQ ID NO: 657219 - RNA, 18 nt, Human
cagaauaccagugaccuc

SEQ ID NO: 657220 - RNA, 22 nt, Human
caggggcuuuccuuguuagccu

SEQ ID NO: 657221 - RNA, 25 nt, Human
cauugccugaagacacugaguccca

SEQ ID NO: 657222 - RNA, 18 nt, Human
ccaaugcguaauauccag

SEQ ID NO: 657223 - RNA, 23 nt, Human
ccacacugcugaggucuucuaaa

SEQ ID NO: 657224 - RNA, 19 nt, Human
ccaccgcacuccagcuaag

SEQ ID NO: 657225 - RNA, 19 nt, Human
ccaccgcacuccagcuaag

SEQ ID NO: 657226 - RNA, 20 nt, Human
ccaccgcacuccagcuaagc

SEQ ID NO: 657227 - RNA, 21 nt, Human
ccaccgcacuccagcuaagcg

SEQ ID NO: 657228 - RNA, 19 nt, Human
ccagagcagauauuaaaca

SEQ ID NO: 657229 - RNA, 20 nt, Human
cccaacaaaacaaucaguuc

SEQ ID NO: 657230 - RNA, 19 nt, Human
ccccaaauagcuggcaaaa

SEQ ID NO: 657231 - RNA, 22 nt, Human
cccccaaauagcuggcaaaagc

SEQ ID NO: 657232 - RNA, 18 nt, Human
cccgcacacagcugcccu

SEQ ID NO: 657233 - RNA, 20 nt, Human
cccgcacacagcugcccuuc

SEQ ID NO: 657234 - RNA, 20 nt, Human
cccgcacacagcugcccuuc

SEQ ID NO: 657235 - RNA, 23 nt, Human
ccuccaacagugggacauacccg

SEQ ID NO: 657236 - RNA, 23 nt, Human
cguaaccuggcugccugccucuc

SEQ ID NO: 657237 - RNA, 21 nt, Human
cucaaaaaacaaaacgaaaca

SEQ ID NO: 657238 - RNA, 19 nt, Human
cucugguguugcuggugcu

SEQ ID NO: 657239 - RNA, 20 nt, Human
cugaagacacugagucccac

SEQ ID NO: 657240 - RNA, 25 nt, Human
cugcaaaauaaugaagaaacacaua

SEQ ID NO: 657241 - RNA, 22 nt, Human
cugcacuaaagaaaaaguagcc

SEQ ID NO: 657242 - RNA, 21 nt, Human
cuggcuaagauacucagguac

SEQ ID NO: 657243 - RNA, 22 nt, Human
cuuagagccagacuguagaauc

SEQ ID NO: 657244 - RNA, 24 nt, Human
gaaacacauagcucccgucuguaa

SEQ ID NO: 657245 - RNA, 21 nt, Human
gacagaacgagacccugucuc

SEQ ID NO: 657246 - RNA, 23 nt, Human
gacagaacgagacccugucucaa

SEQ ID NO: 657247 - RNA, 19 nt, Human
gacccuaucgcccccaccc

SEQ ID NO: 657248 - RNA, 22 nt, Human
gcaaaacagagugaauucccuu

SEQ ID NO: 657249 - RNA, 21 nt, Human
gcacuaggcaacaaaaagcca

SEQ ID NO: 657250 - RNA, 20 nt, Human
gccaugaucacgccaccgca

SEQ ID NO: 657251 - RNA, 20 nt, Human
gcccccacccuagcuggcuu

SEQ ID NO: 657252 - RNA, 23 nt, Human
gcgacagaacgagacccugucuc

SEQ ID NO: 657253 - RNA, 23 nt, Human
gggagagaaaggagucuccaccc

SEQ ID NO: 657254 - RNA, 27 nt, Human
gggccagguccaugugccggcagggaa

SEQ ID NO: 657255 - RNA, 20 nt, Human
ggguugggccagguccaugu

SEQ ID NO: 657256 - RNA, 24 nt, Human
ggucauggaaguagacacagaacc

SEQ ID NO: 657257 - RNA, 19 nt, Human
ggugggggggaggaggaug

SEQ ID NO: 657258 - RNA, 25 nt, Human
uaaagaggaagaagagaaauccacu

SEQ ID NO: 657259 - RNA, 23 nt, Human
uaaauggagugacuauccaaagu

SEQ ID NO: 657260 - RNA, 23 nt, Human
uaacaugcagaaaauaaagagga

SEQ ID NO: 657261 - RNA, 21 nt, Human
uaaccuggcugccugccucuc

SEQ ID NO: 657262 - RNA, 18 nt, Human
uacacaaucauugccuga

SEQ ID NO: 657263 - RNA, 25 nt, Human
uagagccagacuguagaaucgggag

SEQ ID NO: 657264 - RNA, 21 nt, Human
uagcuggcuuccugccuuugu

SEQ ID NO: 657265 - RNA, 25 nt, Human
uaguuucacuaguuuaaggaacaau

SEQ ID NO: 657266 - RNA, 21 nt, Human
uauuguaaauguuuuuaaauc

SEQ ID NO: 657267 - RNA, 23 nt, Human
ucacagagacccauauuuccaaa

SEQ ID NO: 657268 - RNA, 21 nt, Human
ucauaaagaacucaagucaaa

SEQ ID NO: 657269 - RNA, 18 nt, Human
uccaaagaagggaagacc

SEQ ID NO: 657270 - RNA, 23 nt, Human
uccaccccucugguguugcuggu

SEQ ID NO: 657271 - RNA, 24 nt, Human
uccuccuaccccccaaauagcugg

SEQ ID NO: 657272 - RNA, 20 nt, Human
uccugggucauaaagaacuc

SEQ ID NO: 657273 - RNA, 21 nt, Human
ucguccaaagaagggaagacc

SEQ ID NO: 657274 - RNA, 26 nt, Human
ucuaaagugccuuccuuuucuucaca

SEQ ID NO: 657275 - RNA, 24 nt, Human
ucucuaauggaaguuuauaaaaau

SEQ ID NO: 657276 - RNA, 20 nt, Human
ugaagacacugagucccaca

SEQ ID NO: 657277 - RNA, 19 nt, Human
ugaagcagugcucgggagc

SEQ ID NO: 657278 - RNA, 21 nt, Human
ugacuucagugaauaauuggc

SEQ ID NO: 657279 - RNA, 25 nt, Human
ugauaguagugugcucaaaacucaa

SEQ ID NO: 657280 - RNA, 19 nt, Human
uggaaguagacacagaacc

SEQ ID NO: 657281 - RNA, 20 nt, Human
ugggacauacccgcugaccc

SEQ ID NO: 657282 - RNA, 18 nt, Human
ugggccagguccaugugc

SEQ ID NO: 657283 - RNA, 18 nt, Human
uggugggggggaggagga

SEQ ID NO: 657284 - RNA, 20 nt, Human
uucaagaauagcagugccau

SEQ ID NO: 657285 - RNA, 22 nt, Human
uugccugaagacacugaguccc

SEQ ID NO: 657286 - RNA, 19 nt, Human
aaaaaggcagcugaugaug

SEQ ID NO: 657287 - RNA, 22 nt, Human
aaacuuugaaagucucucagcu

SEQ ID NO: 657288 - RNA, 19 nt, Human
aagaggaaacaguaaauaa

SEQ ID NO: 657289 - RNA, 25 nt, Human
aauuaugaaaucucuugccacagaa

SEQ ID NO: 657290 - RNA, 19 nt, Human
acagaaaacagcauggggu

SEQ ID NO: 657291 - RNA, 22 nt, Human
acagaaccauacagaaaaaucc

SEQ ID NO: 657292 - RNA, 19 nt, Human
agacggaauacacuugaga

SEQ ID NO: 657293 - RNA, 21 nt, Human
aggaagggacugccagcagca

SEQ ID NO: 657294 - RNA, 22 nt, Human
aggagauuuuugguccaguucu

SEQ ID NO: 657295 - RNA, 23 nt, Human
caaaauauaaacauacagacaua

SEQ ID NO: 657296 - RNA, 22 nt, Human
cauccagauuguaaauaacaac

SEQ ID NO: 657297 - RNA, 23 nt, Human
ccacagaaccauacagaaaaauc

SEQ ID NO: 657298 - RNA, 22 nt, Human
cccacauugccccauuucuucc

SEQ ID NO: 657299 - RNA, 18 nt, Human
cccauauggaaauggaac

SEQ ID NO: 657300 - RNA, 22 nt, Human
cucagaauccaaaaagcugacu

SEQ ID NO: 657301 - RNA, 19 nt, Human
gagacaccaauuucuaugg

SEQ ID NO: 657302 - RNA, 20 nt, Human
gauugcccccaugaccuccc

SEQ ID NO: 657303 - RNA, 22 nt, Human
ggagauuuuugguccaguucuu

SEQ ID NO: 657304 - RNA, 24 nt, Human
guuucuguaaagagaaaaauuauc

SEQ ID NO: 657305 - RNA, 20 nt, Human
uaagagauucuuauauccaa

SEQ ID NO: 657306 - RNA, 19 nt, Human
uaagaggaaacaguaaaua

SEQ ID NO: 657307 - RNA, 24 nt, Human
uaagcauaaaauacucagaaucca

SEQ ID NO: 657308 - RNA, 18 nt, Human
uacucagaauccaaaaag

SEQ ID NO: 657309 - RNA, 19 nt, Human
uaggguagaagguggguau

SEQ ID NO: 657310 - RNA, 21 nt, Human
ucaaaacuuugaaagucucuc

SEQ ID NO: 657311 - RNA, 19 nt, Human
ucagaauccaaaaagcuga

SEQ ID NO: 657312 - RNA, 20 nt, Human
ucagaauccaaaaagcugac

SEQ ID NO: 657313 - RNA, 19 nt, Human
ucaggaaugaaaguucaug

SEQ ID NO: 657314 - RNA, 22 nt, Human
ucaggagcaaggauucugcaag

SEQ ID NO: 657315 - RNA, 21 nt, Human
ucagguauuaaaaaggcagcu

SEQ ID NO: 657316 - RNA, 21 nt, Human
uccucaggaaugaaaguucau

SEQ ID NO: 657317 - RNA, 21 nt, Human
uccuuacuauaauagugaauc

SEQ ID NO: 657318 - RNA, 20 nt, Human
ucuccaaguuuacuaccuuc

SEQ ID NO: 657319 - RNA, 25 nt, Human
ugaaaagagauuaguaauaugaaag

SEQ ID NO: 657320 - RNA, 23 nt, Human
ugaaucaucaaguguugaaugua

SEQ ID NO: 657321 - RNA, 21 nt, Human
ugcaaggaagggacugccagc

SEQ ID NO: 657322 - RNA, 20 nt, Human
ugccccauuucuuccucagg

SEQ ID NO: 657323 - RNA, 21 nt, Human
ugccuuuguguuucuaaaugg

SEQ ID NO: 657324 - RNA, 21 nt, Human
uggaugaagccauccagauug

SEQ ID NO: 657325 - RNA, 21 nt, Human
uguuacagaaaacagcauggg

SEQ ID NO: 657326 - RNA, 22 nt, Human
uguuuugagugucugcgaccuu

SEQ ID NO: 657327 - RNA, 22 nt, Human
uuaaaacuggucucugaugccu

SEQ ID NO: 657328 - RNA, 21 nt, Human
uuaaagauauucaggagcaag

SEQ ID NO: 657329 - RNA, 23 nt, Human
uuaaagauauucaggagcaagga

SEQ ID NO: 657330 - RNA, 21 nt, Human
uucauguaacuuuuugauaac

SEQ ID NO: 657331 - RNA, 25 nt, Human
uucuugugguucuggagacagaaac

SEQ ID NO: 657332 - RNA, 18 nt, Human
uugaaagucucucagcua

SEQ ID NO: 657333 - RNA, 24 nt, Human
uugaauguaagugcaguagaaauu

SEQ ID NO: 657334 - RNA, 22 nt, Human
uuuaagauugcccccaugaccu

SEQ ID NO: 657335 - RNA, 23 nt, Human
uuuacuaccuucuucugaagggu

SEQ ID NO: 657336 - RNA, 22 nt, Human
uuugaaagucucucagcuaaca

SEQ ID NO: 657337 - RNA, 21 nt, Human
uuuuuauuuaucaaaacuuug

SEQ ID NO: 657338 - RNA, 18 nt, Human
uuuuuuuuuuuuuuuuug

SEQ ID NO: 657339 - RNA, 24 nt, Human
uuuuuuuuuuuuuuuuugacuugg

SEQ ID NO: 657340 - RNA, 22 nt, Human
aaaaugccuugucccggaucug

SEQ ID NO: 657341 - RNA, 21 nt, Human
aaacaggagccacagcaggga

SEQ ID NO: 657342 - RNA, 26 nt, Human
aacaaacaagaauuuacaauagcaau

SEQ ID NO: 657343 - RNA, 21 nt, Human
aagaggcaguggggcuugguu

SEQ ID NO: 657344 - RNA, 20 nt, Human
acgaaucaugaaaaaaugcc

SEQ ID NO: 657345 - RNA, 25 nt, Human
agaagcccucuaucuuugacaccaa

SEQ ID NO: 657346 - RNA, 21 nt, Human
agagaggaaugauuugcauuu

SEQ ID NO: 657347 - RNA, 24 nt, Human
agaucaccugagccuuccccgcuc

SEQ ID NO: 657348 - RNA, 18 nt, Human
agccuggagggcggggac

SEQ ID NO: 657349 - RNA, 19 nt, Human
agcuccuggaggcucagcu

SEQ ID NO: 657350 - RNA, 18 nt, Human
aggcaguggggcuugguu

SEQ ID NO: 657351 - RNA, 23 nt, Human
aggcaguggggcuugguuuccag

SEQ ID NO: 657352 - RNA, 18 nt, Human
aggcgggcgagggcgggc

SEQ ID NO: 657353 - RNA, 21 nt, Human
agggagccgcgcggggcuggg

SEQ ID NO: 657354 - RNA, 20 nt, Human
agucaguuuauacuuaaagu

SEQ ID NO: 657355 - RNA, 18 nt, Human
aucugcugcuucugcugc

SEQ ID NO: 657356 - RNA, 18 nt, Human
auugucuucuucaaccac

SEQ ID NO: 657357 - RNA, 20 nt, Human
auugugcucuuuguugauga

SEQ ID NO: 657358 - RNA, 21 nt, Human
caauauaacugacuagagggc

SEQ ID NO: 657359 - RNA, 21 nt, Human
caauauacacacguugauauc

SEQ ID NO: 657360 - RNA, 28 nt, Human
caaucauagaaacacugacauuuaaaac

SEQ ID NO: 657361 - RNA, 19 nt, Human
cacacguugauauccuucc

SEQ ID NO: 657362 - RNA, 22 nt, Human
caccaaccggcaucagacacac

SEQ ID NO: 657363 - RNA, 18 nt, Human
cacucaguuuugcuucca

SEQ ID NO: 657364 - RNA, 20 nt, Human
cagcaaagaggcaguggggc

SEQ ID NO: 657365 - RNA, 19 nt, Human
cagcgccgagaagcggcgg

SEQ ID NO: 657366 - RNA, 23 nt, Human
cagcuccaucuggaauuacugac

SEQ ID NO: 657367 - RNA, 22 nt, Human
caggagccacagcaggcaccag

SEQ ID NO: 657368 - RNA, 21 nt, Human
caguggagcagcaccauccuu

SEQ ID NO: 657369 - RNA, 20 nt, Human
ccacguccccggacccugcc

SEQ ID NO: 657370 - RNA, 25 nt, Human
ccaucuggaauuacugacgaaucau

SEQ ID NO: 657371 - RNA, 26 nt, Human
ccucuaucuuugacaccaaccggcau

SEQ ID NO: 657372 - RNA, 20 nt, Human
ccuggaggcucagcuuccac

SEQ ID NO: 657373 - RNA, 25 nt, Human
cgaaucaugaaaaaaugccuugucc

SEQ ID NO: 657374 - RNA, 21 nt, Human
cgccggccgccgcuagucgca

SEQ ID NO: 657375 - RNA, 22 nt, Human
cgccggccgccgcuagucgcac

SEQ ID NO: 657376 - RNA, 19 nt, Human
cggcgcgcggucgccgaag

SEQ ID NO: 657377 - RNA, 21 nt, Human
cggcgggaggaugccgcagcg

SEQ ID NO: 657378 - RNA, 23 nt, Human
cggggcuggggaaucccggggca

SEQ ID NO: 657379 - RNA, 21 nt, Human
cucaagagguuccagaucacc

SEQ ID NO: 657380 - RNA, 23 nt, Human
cugcaucugaaaaaguuccucau

SEQ ID NO: 657381 - RNA, 21 nt, Human
cuggcgcgggcuucgccggcc

SEQ ID NO: 657382 - RNA, 21 nt, Human
cuguacuuuaauaggaaaaga

SEQ ID NO: 657383 - RNA, 22 nt, Human
cuugggucauaggguaacucag

SEQ ID NO: 657384 - RNA, 18 nt, Human
gaaauaguccacgucccc

SEQ ID NO: 657385 - RNA, 18 nt, Human
gaacaagucuccuucaag

SEQ ID NO: 657386 - RNA, 19 nt, Human
gagaagcggcgggaggucc

SEQ ID NO: 657387 - RNA, 27 nt, Human
gagcgugcgggggcugggcggcgggag

SEQ ID NO: 657388 - RNA, 21 nt, Human
gaucugcugcuucugcugcuc

SEQ ID NO: 657389 - RNA, 24 nt, Human
gcaaacuucaaaggcgggcgaggg

SEQ ID NO: 657390 - RNA, 24 nt, Human
gcaggcaccaguggagcagcacca

SEQ ID NO: 657391 - RNA, 23 nt, Human
gcaucagacacacacuagguacc

SEQ ID NO: 657392 - RNA, 20 nt, Human
gccgcagcgacccgcggggc

SEQ ID NO: 657393 - RNA, 22 nt, Human
gccuggagggcggggacggagg

SEQ ID NO: 657394 - RNA, 24 nt, Human
gcggucggcacagcaaacuucaaa

SEQ ID NO: 657395 - RNA, 20 nt, Human
gcugcuucugcugcucaaga

SEQ ID NO: 657396 - RNA, 23 nt, Human
ggaaaauagaaaaaaaucccucc

SEQ ID NO: 657397 - RNA, 20 nt, Human
ggcagcgccgagaagcggcg

SEQ ID NO: 657398 - RNA, 20 nt, Human
gggagccgcgcggggcuggg

SEQ ID NO: 657399 - RNA, 22 nt, Human
gggcugggcggcgggaggaugc

SEQ ID NO: 657400 - RNA, 24 nt, Human
ggggacggaggcagauaaaagaga

SEQ ID NO: 657401 - RNA, 19 nt, Human
gugugugcaaugaauggca

SEQ ID NO: 657402 - RNA, 19 nt, Human
uaaaccggauggggaacua

SEQ ID NO: 657403 - RNA, 19 nt, Human
uaacucagugccuuccuca

SEQ ID NO: 657404 - RNA, 25 nt, Human
uaacugcuaauuucagcuccaucug

SEQ ID NO: 657405 - RNA, 22 nt, Human
uaauuuagaagcaguucaugca

SEQ ID NO: 657406 - RNA, 24 nt, Human
uaauuucagcuccaucuggaauuc

SEQ ID NO: 657407 - RNA, 20 nt, Human
uagaagcaguucaugcagug

SEQ ID NO: 657408 - RNA, 24 nt, Human
uagaagcaguucaugcagugguca

SEQ ID NO: 657409 - RNA, 19 nt, Human
uaggagaauaacucagugc

SEQ ID NO: 657410 - RNA, 23 nt, Human
uauguacaugaauauaauguaug

SEQ ID NO: 657411 - RNA, 20 nt, Human
ucaaaggcgggcgagggcgg

SEQ ID NO: 657412 - RNA, 19 nt, Human
ucaauccgcugaagugucc

SEQ ID NO: 657413 - RNA, 18 nt, Human
ucauagaaacacugacau

SEQ ID NO: 657414 - RNA, 18 nt, Human
uccucuggcagcuccugg

SEQ ID NO: 657415 - RNA, 19 nt, Human
uccuggaggcucagcuucc

SEQ ID NO: 657416 - RNA, 23 nt, Human
ucgccggccgccgcuagucgcac

SEQ ID NO: 657417 - RNA, 23 nt, Human
ucuguacuuuaauaggaaaagaa

SEQ ID NO: 657418 - RNA, 19 nt, Human
ugaaaaaaugccuuguccc

SEQ ID NO: 657419 - RNA, 18 nt, Human
ugaaaaaguuccucaucc

SEQ ID NO: 657420 - RNA, 22 nt, Human
ugaaagaagauccaacugauua

SEQ ID NO: 657421 - RNA, 24 nt, Human
ugagcugaguggaaacaggagcca

SEQ ID NO: 657422 - RNA, 19 nt, Human
ugauauaaaccggaugggg

SEQ ID NO: 657423 - RNA, 23 nt, Human
ugcgggggcugggcggcgggagg

SEQ ID NO: 657424 - RNA, 22 nt, Human
uggagcagcaccauccuuaaaa

SEQ ID NO: 657425 - RNA, 23 nt, Human
uggcaaguuccuucaagaagccc

SEQ ID NO: 657426 - RNA, 22 nt, Human
uggucaaagcaaggaauggcaa

SEQ ID NO: 657427 - RNA, 25 nt, Human
ugguguggugugcgaaauagucccg

SEQ ID NO: 657428 - RNA, 19 nt, Human
uguacaugagauacauaua

SEQ ID NO: 657429 - RNA, 22 nt, Human
ugucccggaucugcaucugaaa

SEQ ID NO: 657430 - RNA, 18 nt, Human
uuaaugaucugcugcuuc

SEQ ID NO: 657431 - RNA, 21 nt, Human
uugacaccaaccggcaucaga

SEQ ID NO: 657432 - RNA, 18 nt, Human
uuuugaaauugugcucuu

SEQ ID NO: 657433 - RNA, 23 nt, Human
uuuuuuuuuuuuuuuuuuaacag

SEQ ID NO: 657434 - RNA, 18 nt, Human
agacagggucuugcuaug

SEQ ID NO: 657435 - RNA, 23 nt, Human
agacagggucuugcuauguugcc

SEQ ID NO: 657436 - RNA, 20 nt, Human
agcacuuugggagacuaagg

SEQ ID NO: 657437 - RNA, 21 nt, Human
agcacuuugggagacuaaggc

SEQ ID NO: 657438 - RNA, 22 nt, Human
agccuugucaaaccacccgcag

SEQ ID NO: 657439 - RNA, 18 nt, Human
augagccucugugcgggg

SEQ ID NO: 657440 - RNA, 19 nt, Human
auguugcccaggcuggucu

SEQ ID NO: 657441 - RNA, 22 nt, Human
caagugaucuugcugcuucagc

SEQ ID NO: 657442 - RNA, 24 nt, Human
cagggucuugcuauguugcccagg

SEQ ID NO: 657443 - RNA, 23 nt, Human
cagguccagaaggaaucugcuag

SEQ ID NO: 657444 - RNA, 24 nt, Human
ccagaguaguugggauuggccagg

SEQ ID NO: 657445 - RNA, 27 nt, Human
ccagaguaguugggauuggccaggugu

SEQ ID NO: 657446 - RNA, 19 nt, Human
ccagccuugucaaaccacc

SEQ ID NO: 657447 - RNA, 21 nt, Human
ccaggccuggucgcuggugug

SEQ ID NO: 657448 - RNA, 22 nt, Human
cccugcgugcuucgagcuccau

SEQ ID NO: 657449 - RNA, 23 nt, Human
cgcuguaauccuagcacuuuggg

SEQ ID NO: 657450 - RNA, 23 nt, Human
cggcacccuacagguccagaagg

SEQ ID NO: 657451 - RNA, 23 nt, Human
cuuccagaguaguugggauuggc

SEQ ID NO: 657452 - RNA, 25 nt, Human
cuuuuacuuuuuuuuuuucuuuaga

SEQ ID NO: 657453 - RNA, 21 nt, Human
gcggcugggcuagggcggcac

SEQ ID NO: 657454 - RNA, 22 nt, Human
gcuccaggccuggucgcuggug

SEQ ID NO: 657455 - RNA, 24 nt, Human
gucuugcuauguugcccaggcugg

SEQ ID NO: 657456 - RNA, 23 nt, Human
gugaucuugcugcuucagcuucc

SEQ ID NO: 657457 - RNA, 20 nt, Human
uacuuuuuuuuuuucuuuag

SEQ ID NO: 657458 - RNA, 22 nt, Human
uagagacagggucuugcuaugu

SEQ ID NO: 657459 - RNA, 24 nt, Human
uagcacuuugggagacuaaggcgg

SEQ ID NO: 657460 - RNA, 23 nt, Human
uauguugcccaggcuggucuuaa

SEQ ID NO: 657461 - RNA, 24 nt, Human
uauguugcccaggcuggucuuaaa

SEQ ID NO: 657462 - RNA, 22 nt, Human
ucacgcuguaauccuagcacuu

SEQ ID NO: 657463 - RNA, 24 nt, Human
ucacgcuguaauccuagcacuuug

SEQ ID NO: 657464 - RNA, 21 nt, Human
ucagaagugugagcuccagga

SEQ ID NO: 657465 - RNA, 27 nt, Human
ucagcagcugagccaagaccggggucc

SEQ ID NO: 657466 - RNA, 20 nt, Human
ucaguaacgugaaggcccuc

SEQ ID NO: 657467 - RNA, 20 nt, Human
uccugggcucaagugaucuu

SEQ ID NO: 657468 - RNA, 23 nt, Human
ucuuaaacuccugggcucaagug

SEQ ID NO: 657469 - RNA, 18 nt, Human
ucuugcuauguugcccag

SEQ ID NO: 657470 - RNA, 19 nt, Human
ucuugcuauguugcccagg

SEQ ID NO: 657471 - RNA, 23 nt, Human
ucuugcuauguugcccaggcugg

SEQ ID NO: 657472 - RNA, 24 nt, Human
ucuugcuauguugcccaggcuggu

SEQ ID NO: 657473 - RNA, 24 nt, Human
ugcccaggcuggucuuaaacuccu

SEQ ID NO: 657474 - RNA, 28 nt, Human
ugcccaggcuggucuuaaacuccugggc

SEQ ID NO: 657475 - RNA, 27 nt, Human
ugcuauguugcccaggcuggucuuaaa

SEQ ID NO: 657476 - RNA, 20 nt, Human
ugggcucaagugaucuugcu

SEQ ID NO: 657477 - RNA, 24 nt, Human
ugggcucaagugaucuugcugcuu

SEQ ID NO: 657478 - RNA, 24 nt, Human
uuacuuuuuuuuuuucuuuagaga

SEQ ID NO: 657479 - RNA, 25 nt, Human
uuuuuuuucuuuagagacagggucu

SEQ ID NO: 657480 - RNA, 25 nt, Human
uuuuuuuuuuucuuuagagacaggg

SEQ ID NO: 657481 - RNA, 24 nt, Human
aauuuccucuugccagacucccau

SEQ ID NO: 657482 - RNA, 19 nt, Human
cuugccagacucccaucca

SEQ ID NO: 657483 - RNA, 24 nt, Human
ucuuuauuucacuuauuauuuauu

SEQ ID NO: 657484 - RNA, 25 nt, Human
uugccagacucccauccaaagaguc

SEQ ID NO: 657485 - RNA, 21 nt, Human
uuuuuuuuuuuuucuuuauuu

SEQ ID NO: 657486 - RNA, 18 nt, Human
agcccagugggggugugu

SEQ ID NO: 657487 - RNA, 21 nt, Human
aguccaguggcgcgaucucag

SEQ ID NO: 657488 - RNA, 21 nt, Human
cacugcaaccuccgccuccca

SEQ ID NO: 657489 - RNA, 21 nt, Human
caggagcccagugggggugug

SEQ ID NO: 657490 - RNA, 21 nt, Human
ccaggcuggaguccaguggcg

SEQ ID NO: 657491 - RNA, 22 nt, Human
cccggcugcggcugcgaacccc

SEQ ID NO: 657492 - RNA, 20 nt, Human
cccuaccgugcccgcccgcc

SEQ ID NO: 657493 - RNA, 21 nt, Human
ccgccccugggugcccgaucc

SEQ ID NO: 657494 - RNA, 24 nt, Human
ccgccucccagguucaagcgauuc

SEQ ID NO: 657495 - RNA, 22 nt, Human
ccucccagguucaagcgauucu

SEQ ID NO: 657496 - RNA, 24 nt, Human
cucacugcaaccuccgccucccag

SEQ ID NO: 657497 - RNA, 23 nt, Human
cugcaaccuccgccucccagguu

SEQ ID NO: 657498 - RNA, 24 nt, Human
cugcaaccuccgccucccagguuc

SEQ ID NO: 657499 - RNA, 22 nt, Human
gcccgaucccggcugcggcugc

SEQ ID NO: 657500 - RNA, 19 nt, Human
guccaguggcgcgaucuca

SEQ ID NO: 657501 - RNA, 24 nt, Human
gucuugcucuguuguccaggcugg

SEQ ID NO: 657502 - RNA, 20 nt, Human
uaccgugcccgcccgccccu

SEQ ID NO: 657503 - RNA, 19 nt, Human
ucacugcaaccuccgccuc

SEQ ID NO: 657504 - RNA, 24 nt, Human
ucacugcaaccuccgccucccagg

SEQ ID NO: 657505 - RNA, 25 nt, Human
ucacugcaaccuccgccucccaggu

SEQ ID NO: 657506 - RNA, 27 nt, Human
ucacugcaaccuccgccucccagguuc

SEQ ID NO: 657507 - RNA, 27 nt, Human
ucagcucacugcaaccuccgccuccca

SEQ ID NO: 657508 - RNA, 19 nt, Human
ucccagguucaagcgauuc

SEQ ID NO: 657509 - RNA, 21 nt, Human
ucccagguucaagcgauucuc

SEQ ID NO: 657510 - RNA, 23 nt, Human
ucccggcugcggcugcgaacccc

SEQ ID NO: 657511 - RNA, 23 nt, Human
ucuugcucuguuguccaggcugg

SEQ ID NO: 657512 - RNA, 24 nt, Human
ucuugcucuguuguccaggcugga

SEQ ID NO: 657513 - RNA, 19 nt, Human
ugcccgaucccggcugcgg

SEQ ID NO: 657514 - RNA, 19 nt, Human
uggaguccaguggcgcgau

SEQ ID NO: 657515 - RNA, 24 nt, Human
uggcgcgaucucagcucacugcaa

SEQ ID NO: 657516 - RNA, 21 nt, Human
uguccaggcuggaguccagug

SEQ ID NO: 657517 - RNA, 24 nt, Human
uguccaggcuggaguccaguggcg

SEQ ID NO: 657518 - RNA, 24 nt, Human
uugcucuguuguccaggcuggagu

SEQ ID NO: 657519 - RNA, 24 nt, Human
uuguccaggcuggaguccaguggc

SEQ ID NO: 657520 - RNA, 19 nt, Human
uuuuuauuuauuuauuuuu

SEQ ID NO: 657521 - RNA, 21 nt, Human
uuuuuuuuuuuuuuuuuauuu

SEQ ID NO: 657522 - RNA, 21 nt, Human
aaacaaacacagguuccccca

SEQ ID NO: 657523 - RNA, 19 nt, Human
aacacagguucccccaccc

SEQ ID NO: 657524 - RNA, 23 nt, Human
aacacagguucccccacccaugg

SEQ ID NO: 657525 - RNA, 21 nt, Human
aagaagcaucuugcuuacuga

SEQ ID NO: 657526 - RNA, 21 nt, Human
acagggugaucgcuucugacc

SEQ ID NO: 657527 - RNA, 19 nt, Human
acccgccaugcgccagcgg

SEQ ID NO: 657528 - RNA, 18 nt, Human
accucccuccccacccuc

SEQ ID NO: 657529 - RNA, 19 nt, Human
acucugaauaaaggaugga

SEQ ID NO: 657530 - RNA, 24 nt, Human
aggagaagaagaggguguagacgg

SEQ ID NO: 657531 - RNA, 26 nt, Human
aggaggcccuuggagggccgguagac

SEQ ID NO: 657532 - RNA, 21 nt, Human
aggauggaggagaagaagagg

SEQ ID NO: 657533 - RNA, 21 nt, Human
aggauggaggagaagaagagg

SEQ ID NO: 657534 - RNA, 22 nt, Human
aggauggaggagaagaagaggg

SEQ ID NO: 657535 - RNA, 19 nt, Human
caaagcccagccugacggc

SEQ ID NO: 657536 - RNA, 23 nt, Human
caaagcccagccugacggcccuu

SEQ ID NO: 657537 - RNA, 19 nt, Human
caauguguaucaacagggu

SEQ ID NO: 657538 - RNA, 18 nt, Human
cagccucuggggugggcc

SEQ ID NO: 657539 - RNA, 21 nt, Human
cagcggcggccggcggcgucc

SEQ ID NO: 657540 - RNA, 19 nt, Human
cagguucccccacccaugg

SEQ ID NO: 657541 - RNA, 24 nt, Human
ccagaaccaauccuacaguaucuu

SEQ ID NO: 657542 - RNA, 24 nt, Human
ccagcggcggccggcggcgucccc

SEQ ID NO: 657543 - RNA, 20 nt, Human
ccaugcgccagcggcggccg

SEQ ID NO: 657544 - RNA, 19 nt, Human
cccaaagcccagccugacg

SEQ ID NO: 657545 - RNA, 18 nt, Human
cccacugaggcagacagc

SEQ ID NO: 657546 - RNA, 23 nt, Human
cccagcccaggccucugcugccc

SEQ ID NO: 657547 - RNA, 21 nt, Human
cccccaccucccuccccaccc

SEQ ID NO: 657548 - RNA, 23 nt, Human
cccucugagagaaaagacgguuu

SEQ ID NO: 657549 - RNA, 25 nt, Human
cccuuggaggcugggggugcugccc

SEQ ID NO: 657550 - RNA, 18 nt, Human
ccgaguccugggggcaag

SEQ ID NO: 657551 - RNA, 19 nt, Human
ccucagggcugggaauggg

SEQ ID NO: 657552 - RNA, 23 nt, Human
ccucuguccagccucuggggugg

SEQ ID NO: 657553 - RNA, 24 nt, Human
ccuuggagggcaggcacacggugc

SEQ ID NO: 657554 - RNA, 23 nt, Human
cgccagcggcggccggcggcguc

SEQ ID NO: 657555 - RNA, 19 nt, Human
cuagccagccaaggccaac

SEQ ID NO: 657556 - RNA, 20 nt, Human
cucaauggcccaaagcccag

SEQ ID NO: 657557 - RNA, 26 nt, Human
cugaggcagacagcuagaggugcugc

SEQ ID NO: 657558 - RNA, 20 nt, Human
gaauagaguggggcagaagg

SEQ ID NO: 657559 - RNA, 18 nt, Human
gagaagaagaggguguag

SEQ ID NO: 657560 - RNA, 22 nt, Human
gaggagaagaagaggguguaga

SEQ ID NO: 657561 - RNA, 20 nt, Human
gagggcaggcacacggugcc

SEQ ID NO: 657562 - RNA, 22 nt, Human
gcccuuggaggcugggggugcu

SEQ ID NO: 657563 - RNA, 20 nt, Human
gcgccacagcuccuacccgc

SEQ ID NO: 657564 - RNA, 24 nt, Human
gcugcccccaccucccuccccacc

SEQ ID NO: 657565 - RNA, 23 nt, Human
ggaaggccccgcgccacagcucc

SEQ ID NO: 657566 - RNA, 23 nt, Human
ggaggcccuuggagggccgguac

SEQ ID NO: 657567 - RNA, 18 nt, Human
ggauggaggagaagaaga

SEQ ID NO: 657568 - RNA, 20 nt, Human
ggcacccagcccaggccucu

SEQ ID NO: 657569 - RNA, 22 nt, Human
ggccucugcugcccccaccucc

SEQ ID NO: 657570 - RNA, 22 nt, Human
gggaagggcgagaugacucuga

SEQ ID NO: 657571 - RNA, 24 nt, Human
gggcacccagcccaggccucugcu

SEQ ID NO: 657572 - RNA, 21 nt, Human
gggggugcugcccuugccagc

SEQ ID NO: 657573 - RNA, 18 nt, Human
ggggugggccucagggcu

SEQ ID NO: 657574 - RNA, 19 nt, Human
gucccagggguagggcgga

SEQ ID NO: 657575 - RNA, 23 nt, Human
uagaggaggcccuuggagggcag

SEQ ID NO: 657576 - RNA, 18 nt, Human
uagaguggggcagaaggu

SEQ ID NO: 657577 - RNA, 25 nt, Human
uagaguggggcagaagguggguuau

SEQ ID NO: 657578 - RNA, 21 nt, Human
uagccagccaaggccaacguc

SEQ ID NO: 657579 - RNA, 18 nt, Human
uagggcggaaguggggug

SEQ ID NO: 657580 - RNA, 22 nt, Human
ucccagggguagggcggaagug

SEQ ID NO: 657581 - RNA, 18 nt, Human
ucccucuguccagccucu

SEQ ID NO: 657582 - RNA, 23 nt, Human
ugacggcccuuggaggcuggggg

SEQ ID NO: 657583 - RNA, 18 nt, Human
ugcacacaaacaaacaca

SEQ ID NO: 657584 - RNA, 21 nt, Human
ugcacacaaacaaacacaggu

SEQ ID NO: 657585 - RNA, 22 nt, Human
ugcaugggccagaaccaauccu

SEQ ID NO: 657586 - RNA, 22 nt, Human
ugcaugggccagaaccaauccu

SEQ ID NO: 657587 - RNA, 23 nt, Human
uggcccaaagcccagccugacgg

SEQ ID NO: 657588 - RNA, 19 nt, Human
uguagacggagggcccuug

SEQ ID NO: 657589 - RNA, 26 nt, Human
uuguggguuuccuucccgacuugaau

SEQ ID NO: 657590 - RNA, 21 nt, Human
uuuuuuuuuuuugaaagggcu

SEQ ID NO: 657591 - RNA, 23 nt, Human
uuuuuuuuuuuugaaagggcuca

SEQ ID NO: 657592 - RNA, 21 nt, Human
uuuuuuuuuuuuuugaaaggg

SEQ ID NO: 657593 - RNA, 24 nt, Human
uuuuuuuuuuuuuuuuugaaaggg

SEQ ID NO: 657594 - RNA, 18 nt, Human
aagaagaucuaacauuca

SEQ ID NO: 657595 - RNA, 21 nt, Human
acccuaaggccuuucuccauu

SEQ ID NO: 657596 - RNA, 23 nt, Human
agaagaucuaacauucacaagaa

SEQ ID NO: 657597 - RNA, 21 nt, Human
aggaaagggcccgggccaccc

SEQ ID NO: 657598 - RNA, 18 nt, Human
aggaauucucaucuugcc

SEQ ID NO: 657599 - RNA, 20 nt, Human
aguacauaaccugucacccu

SEQ ID NO: 657600 - RNA, 24 nt, Human
caaacucagcgagaucaaaacucc

SEQ ID NO: 657601 - RNA, 24 nt, Human
caagaauacagggcucccucucuc

SEQ ID NO: 657602 - RNA, 23 nt, Human
caagaccacuccuuuccuccccc

SEQ ID NO: 657603 - RNA, 19 nt, Human
cacuccuuuccucccccaa

SEQ ID NO: 657604 - RNA, 20 nt, Human
cauuugaaccaagaccacuc

SEQ ID NO: 657605 - RNA, 26 nt, Human
ccacuccuuuccucccccaacuccaa

SEQ ID NO: 657606 - RNA, 23 nt, Human
cccaacuccaaacucagcgagau

SEQ ID NO: 657607 - RNA, 21 nt, Human
cccucucucuggagcuccaag

SEQ ID NO: 657608 - RNA, 24 nt, Human
cccugggcgccgccaccgagccuc

SEQ ID NO: 657609 - RNA, 20 nt, Human
cgccaccgagccucagaccc

SEQ ID NO: 657610 - RNA, 21 nt, Human
cuccaaggcagagggcugucu

SEQ ID NO: 657611 - RNA, 19 nt, Human
cuggagcuccaaggcagag

SEQ ID NO: 657612 - RNA, 19 nt, Human
cugucacccuaaggccuuu

SEQ ID NO: 657613 - RNA, 18 nt, Human
cuuccggcgcuggucgcc

SEQ ID NO: 657614 - RNA, 19 nt, Human
gaacagcgugagucgccac

SEQ ID NO: 657615 - RNA, 20 nt, Human
gacccgccucugagcggcga

SEQ ID NO: 657616 - RNA, 18 nt, Human
gagaacagcgugagucgc

SEQ ID NO: 657617 - RNA, 20 nt, Human
gagaacagcgugagucgccc

SEQ ID NO: 657618 - RNA, 21 nt, Human
gggaaauaaauauuuauuaaa

SEQ ID NO: 657619 - RNA, 22 nt, Human
gguguggcuaacggauuuccau

SEQ ID NO: 657620 - RNA, 18 nt, Human
uaggccuuuggcugaaac

SEQ ID NO: 657621 - RNA, 21 nt, Human
ucaaaacuccauucgacgggu

SEQ ID NO: 657622 - RNA, 21 nt, Human
ucacaagaacagcaaaaguga

SEQ ID NO: 657623 - RNA, 25 nt, Human
ucagcgagaucaaaacuccauucga

SEQ ID NO: 657624 - RNA, 24 nt, Human
uccaaacucagcgagaucaaaacu

SEQ ID NO: 657625 - RNA, 22 nt, Human
uccacugugaacuuucuggugu

SEQ ID NO: 657626 - RNA, 21 nt, Human
uccauucgacggguacagcca

SEQ ID NO: 657627 - RNA, 21 nt, Human
uccucagaguuucuguuuuaa

SEQ ID NO: 657628 - RNA, 23 nt, Human
ugaggucauauugauucagagac

SEQ ID NO: 657629 - RNA, 19 nt, Human
ugccuccagugugcauauu

SEQ ID NO: 657630 - RNA, 21 nt, Human
uggagcuccaaggcagagggc

SEQ ID NO: 657631 - RNA, 22 nt, Human
uuaauggucauaaggguguaug

SEQ ID NO: 657632 - RNA, 26 nt, Human
uucaagauuuuuuccacugugaacuu

SEQ ID NO: 657633 - RNA, 20 nt, Human
uucacaagaacagcaaaagu

SEQ ID NO: 657634 - RNA, 22 nt, Human
uuuccaucuguuaccuucaaga

SEQ ID NO: 657635 - RNA, 19 nt, Human
uuuuuuuuuuuuaaugguc

SEQ ID NO: 657636 - RNA, 23 nt, Human
uuuuuuuuuuuuuuuuuuaaugg

SEQ ID NO: 657637 - RNA, 18 nt, Human
aaaacauccuggugcuaa

SEQ ID NO: 657638 - RNA, 25 nt, Human
aaacaaacauauaaauaaacaacca

SEQ ID NO: 657639 - RNA, 24 nt, Human
aaagugcugggauuacaggcauga

SEQ ID NO: 657640 - RNA, 20 nt, Human
aagggcucgguccaacuugc

SEQ ID NO: 657641 - RNA, 19 nt, Human
aagugcugggauuacaggc

SEQ ID NO: 657642 - RNA, 21 nt, Human
aagugcugggauuacaggcau

SEQ ID NO: 657643 - RNA, 26 nt, Human
aagugcugggauuacaggcaugagcc

SEQ ID NO: 657644 - RNA, 20 nt, Human
aaugcaguggcgugaucuug

SEQ ID NO: 657645 - RNA, 24 nt, Human
aaugcaguggcgugaucuugguuc

SEQ ID NO: 657646 - RNA, 18 nt, Human
acaggguuucaccauguu

SEQ ID NO: 657647 - RNA, 23 nt, Human
acaggguuucaccauguuggcca

SEQ ID NO: 657648 - RNA, 24 nt, Human
acaggguuucaccauguuggccag

SEQ ID NO: 657649 - RNA, 24 nt, Human
accauguuggccaggauggucucg

SEQ ID NO: 657650 - RNA, 20 nt, Human
agacagagucuugcucugca

SEQ ID NO: 657651 - RNA, 21 nt, Human
agguucaagugauucuccugc

SEQ ID NO: 657652 - RNA, 22 nt, Human
agguucaagugauucuccugcc

SEQ ID NO: 657653 - RNA, 22 nt, Human
aguagagacaggguuucaccau

SEQ ID NO: 657654 - RNA, 18 nt, Human
agugcugggauuacaggc

SEQ ID NO: 657655 - RNA, 20 nt, Human
auccucccaccucagaaucc

SEQ ID NO: 657656 - RNA, 23 nt, Human
auggagcgaaugaaugcucuuaa

SEQ ID NO: 657657 - RNA, 24 nt, Human
auuuuuguguuuuuaguagagaca

SEQ ID NO: 657658 - RNA, 26 nt, Human
caaacaaacauauaaauaaacaacca

SEQ ID NO: 657659 - RNA, 20 nt, Human
caaacucugccugccagguu

SEQ ID NO: 657660 - RNA, 24 nt, Human
caaagugcugggauuacaggcaug

SEQ ID NO: 657661 - RNA, 20 nt, Human
caagugauucuccugccuca

SEQ ID NO: 657662 - RNA, 22 nt, Human
caagugauucuccugccucagc

SEQ ID NO: 657663 - RNA, 23 nt, Human
caccacacccagcuaauuuuugu

SEQ ID NO: 657664 - RNA, 18 nt, Human
caccauguuggccaggau

SEQ ID NO: 657665 - RNA, 22 nt, Human
caccauguuggccaggaugguc

SEQ ID NO: 657666 - RNA, 24 nt, Human
caccauguuggccaggauggucuc

SEQ ID NO: 657667 - RNA, 19 nt, Human
cacugcaaacucugccugc

SEQ ID NO: 657668 - RNA, 22 nt, Human
cagccuccugaggagcugggac

SEQ ID NO: 657669 - RNA, 21 nt, Human
caggcgcgcaccaccacaccc

SEQ ID NO: 657670 - RNA, 24 nt, Human
caggguuucaccauguuggccagg

SEQ ID NO: 657671 - RNA, 19 nt, Human
cagucagcauuccuccugc

SEQ ID NO: 657672 - RNA, 23 nt, Human
ccaaagugcugggauuacaggca

SEQ ID NO: 657673 - RNA, 24 nt, Human
ccaaagugcugggauuacaggcau

SEQ ID NO: 657674 - RNA, 18 nt, Human
ccagguucaagugauucu

SEQ ID NO: 657675 - RNA, 19 nt, Human
ccagguucaagugauucuc

SEQ ID NO: 657676 - RNA, 24 nt, Human
cccaaagugcugggauuacaggca

SEQ ID NO: 657677 - RNA, 20 nt, Human
ccugaggagcugggacuaca

SEQ ID NO: 657678 - RNA, 23 nt, Human
ccugaggagcugggacuacaggc

SEQ ID NO: 657679 - RNA, 24 nt, Human
ccugccagguucaagugauucucc

SEQ ID NO: 657680 - RNA, 18 nt, Human
cgcgcaccaccacaccca

SEQ ID NO: 657681 - RNA, 23 nt, Human
cgcgcaccaccacacccagcuaa

SEQ ID NO: 657682 - RNA, 25 nt, Human
cugccagguucaagugauucuccug

SEQ ID NO: 657683 - RNA, 23 nt, Human
cugccucagccuccugaggagcu

SEQ ID NO: 657684 - RNA, 22 nt, Human
cugugcauccucagcuggacac

SEQ ID NO: 657685 - RNA, 18 nt, Human
cuucaaagggcucggucc

SEQ ID NO: 657686 - RNA, 22 nt, Human
gaccucaugauccucccaccuc

SEQ ID NO: 657687 - RNA, 23 nt, Human
gauagauuuuuuuuaagaagaga

SEQ ID NO: 657688 - RNA, 18 nt, Human
gauuacaggcaugagcca

SEQ ID NO: 657689 - RNA, 22 nt, Human
gauuacaggcaugagccacugc

SEQ ID NO: 657690 - RNA, 22 nt, Human
gauuacaggcaugagccacugc

SEQ ID NO: 657691 - RNA, 21 nt, Human
gauucuccugccucagccucc

SEQ ID NO: 657692 - RNA, 22 nt, Human
gcaaacucugccugccagguuc

SEQ ID NO: 657693 - RNA, 23 nt, Human
gccucuuugaauuuuuuuaaaaa

SEQ ID NO: 657694 - RNA, 19 nt, Human
gcgcgcaccaccacaccca

SEQ ID NO: 657695 - RNA, 22 nt, Human
ggauuacaggcaugagccacug

SEQ ID NO: 657696 - RNA, 22 nt, Human
ggcuguaaugcaguggcgugau

SEQ ID NO: 657697 - RNA, 22 nt, Human
ggguuucaccauguuggccagg

SEQ ID NO: 657698 - RNA, 24 nt, Human
gguuucaccauguuggccaggaug

SEQ ID NO: 657699 - RNA, 24 nt, Human
gugauucuccugccucagccuccu

SEQ ID NO: 657700 - RNA, 25 nt, Human
uaaauaaacaaccaggcccucuucc

SEQ ID NO: 657701 - RNA, 22 nt, Human
uaauuuuuguguuuuuaguaga

SEQ ID NO: 657702 - RNA, 24 nt, Human
uaauuuuuguguuuuuaguagaga

SEQ ID NO: 657703 - RNA, 22 nt, Human
uacaggcaugagccacugcgcc

SEQ ID NO: 657704 - RNA, 22 nt, Human
uagagacaggguuucaccaugu

SEQ ID NO: 657705 - RNA, 24 nt, Human
uaguagagacaggguuucaccaug

SEQ ID NO: 657706 - RNA, 25 nt, Human
uaguagagacaggguuucaccaugu

SEQ ID NO: 657707 - RNA, 19 nt, Human
ucaagugauucuccugccu

SEQ ID NO: 657708 - RNA, 24 nt, Human
ucaccauguuggccaggauggucu

SEQ ID NO: 657709 - RNA, 18 nt, Human
ucacugcaaacucugccu

SEQ ID NO: 657710 - RNA, 19 nt, Human
ucacugcaaacucugccug

SEQ ID NO: 657711 - RNA, 24 nt, Human
ucacugcaaacucugccugccagg

SEQ ID NO: 657712 - RNA, 19 nt, Human
ucaugguauguugcuuccu

SEQ ID NO: 657713 - RNA, 24 nt, Human
ucccaaagugcugggauuacaggc

SEQ ID NO: 657714 - RNA, 24 nt, Human
uccugaggagcugggacuacaggc

SEQ ID NO: 657715 - RNA, 24 nt, Human
ucuccugccucagccuccugagga

SEQ ID NO: 657716 - RNA, 21 nt, Human
ugacucauaauggcuucuugc

SEQ ID NO: 657717 - RNA, 18 nt, Human
ugagacagagucuugcuc

SEQ ID NO: 657718 - RNA, 22 nt, Human
ugagacagagucuugcucugca

SEQ ID NO: 657719 - RNA, 23 nt, Human
ugauagauuuuuuuuaagaagag

SEQ ID NO: 657720 - RNA, 20 nt, Human
ugauucuccugccucagccu

SEQ ID NO: 657721 - RNA, 18 nt, Human
ugcauaggaaacaauuau

SEQ ID NO: 657722 - RNA, 24 nt, Human
ugccagguucaagugauucuccug

SEQ ID NO: 657723 - RNA, 24 nt, Human
ugccucagccuccugaggagcugg

SEQ ID NO: 657724 - RNA, 23 nt, Human
uggccaggauggucucgaucccu

SEQ ID NO: 657725 - RNA, 19 nt, Human
uggcuucuugcaaacacuc

SEQ ID NO: 657726 - RNA, 24 nt, Human
ugggacuacaggcgcgcaccacca

SEQ ID NO: 657727 - RNA, 18 nt, Human
ugggauuacaggcaugag

SEQ ID NO: 657728 - RNA, 19 nt, Human
ugggauuacaggcaugagc

SEQ ID NO: 657729 - RNA, 21 nt, Human
ugggauuacaggcaugagcca

SEQ ID NO: 657730 - RNA, 22 nt, Human
ugggauuacaggcaugagccac

SEQ ID NO: 657731 - RNA, 22 nt, Human
ugggauuacaggcaugagccac

SEQ ID NO: 657732 - RNA, 23 nt, Human
ugggauuacaggcaugagccacu

SEQ ID NO: 657733 - RNA, 24 nt, Human
ugggauuacaggcaugagccacug

SEQ ID NO: 657734 - RNA, 24 nt, Human
ugggauuacaggcaugagccacug

SEQ ID NO: 657735 - RNA, 18 nt, Human
uggugcuaaaaggcagca

SEQ ID NO: 657736 - RNA, 24 nt, Human
uguaaugcaguggcgugaucuugg

SEQ ID NO: 657737 - RNA, 24 nt, Human
uuaguagagacaggguuucaccau

SEQ ID NO: 657738 - RNA, 21 nt, Human
uucaagugauucuccugccuc

SEQ ID NO: 657739 - RNA, 23 nt, Human
uucaagugauucuccugccucag

SEQ ID NO: 657740 - RNA, 24 nt, Human
uucaagugauucuccugccucagc

SEQ ID NO: 657741 - RNA, 18 nt, Human
uucaucaaccagucagca

SEQ ID NO: 657742 - RNA, 18 nt, Human
uuccaugacucauaaugg

SEQ ID NO: 657743 - RNA, 19 nt, Human
uucugaguauucuucaaag

SEQ ID NO: 657744 - RNA, 22 nt, Human
uugaucucacugaugcacugug

SEQ ID NO: 657745 - RNA, 19 nt, Human
uuucaccauguuggccagg

SEQ ID NO: 657746 - RNA, 20 nt, Human
uuucaccauguuggccagga

SEQ ID NO: 657747 - RNA, 24 nt, Human
uuuuuaguagagacaggguuucac

SEQ ID NO: 657748 - RNA, 20 nt, Human
uuuuuguguuuuuaguagag

SEQ ID NO: 657749 - RNA, 20 nt, Human
uuuuuuuuuuugagacagag

SEQ ID NO: 657750 - RNA, 24 nt, Human
uuuuuuuuuuuugagacagagucu

SEQ ID NO: 657751 - RNA, 27 nt, Human
uuuuuuuuuuuuuuuuuuuuuuugggg

SEQ ID NO: 657752 - RNA, 27 nt, Human
aaacaggcaagucacaggauuuucaaa

SEQ ID NO: 657753 - RNA, 27 nt, Human
aaacauaaugagaagaugccgguaccc

SEQ ID NO: 657754 - RNA, 18 nt, Human
aagaaaaagauuacagga

SEQ ID NO: 657755 - RNA, 20 nt, Human
aagaggcuuuaacaugagaa

SEQ ID NO: 657756 - RNA, 19 nt, Human
acccagcgccucacagaca

SEQ ID NO: 657757 - RNA, 19 nt, Human
agaagaugcuugccagcuc

SEQ ID NO: 657758 - RNA, 20 nt, Human
agcaaacauuugagaggaug

SEQ ID NO: 657759 - RNA, 19 nt, Human
aggcuuuaacaugagaaau

SEQ ID NO: 657760 - RNA, 21 nt, Human
auauaugauccacagguuaca

SEQ ID NO: 657761 - RNA, 23 nt, Human
aucagcaaacauuugagaggaug

SEQ ID NO: 657762 - RNA, 25 nt, Human
ccagagcccuggggacgugcaccca

SEQ ID NO: 657763 - RNA, 23 nt, Human
ccagcgccucacagacagacacg

SEQ ID NO: 657764 - RNA, 20 nt, Human
ccccacuccaaaaggccaaa

SEQ ID NO: 657765 - RNA, 21 nt, Human
cccccacuccaaaaggccaaa

SEQ ID NO: 657766 - RNA, 23 nt, Human
ccgccgccuucgccccacguugc

SEQ ID NO: 657767 - RNA, 26 nt, Human
ccgccgccuucgccccacguugcucc

SEQ ID NO: 657768 - RNA, 20 nt, Human
ccggccgccaacgcucccag

SEQ ID NO: 657769 - RNA, 19 nt, Human
ccgggccuucgccgccgcc

SEQ ID NO: 657770 - RNA, 19 nt, Human
ccgggccuucgccgccgcc

SEQ ID NO: 657771 - RNA, 23 nt, Human
ccggugcgucgcagacaucgcuc

SEQ ID NO: 657772 - RNA, 19 nt, Human
ccuagcccagagcccuggg

SEQ ID NO: 657773 - RNA, 18 nt, Human
ccuucgccgccgccuucg

SEQ ID NO: 657774 - RNA, 21 nt, Human
cgccgcugccuuccuagccca

SEQ ID NO: 657775 - RNA, 18 nt, Human
cuccgagacucccacagg

SEQ ID NO: 657776 - RNA, 24 nt, Human
gacacaagggauuacuggaaagaa

SEQ ID NO: 657777 - RNA, 22 nt, Human
gcccgggccuucgccgccgccu

SEQ ID NO: 657778 - RNA, 25 nt, Human
ggauuuucaaaaaguauaacaauuc

SEQ ID NO: 657779 - RNA, 19 nt, Human
ggccaaaacguuucaacag

SEQ ID NO: 657780 - RNA, 21 nt, Human
gggacgugcacccagcgccuc

SEQ ID NO: 657781 - RNA, 20 nt, Human
uagaaugaaacacauuuuag

SEQ ID NO: 657782 - RNA, 19 nt, Human
uagcccagagcccugggga

SEQ ID NO: 657783 - RNA, 24 nt, Human
ucacagacagacacgucuccgaga

SEQ ID NO: 657784 - RNA, 23 nt, Human
ucagauuuguccuucccccacuc

SEQ ID NO: 657785 - RNA, 20 nt, Human
ucccacaggccuuccucgga

SEQ ID NO: 657786 - RNA, 20 nt, Human
uccgagacucccacaggccu

SEQ ID NO: 657787 - RNA, 21 nt, Human
uccgagacucccacaggccuu

SEQ ID NO: 657788 - RNA, 19 nt, Human
uccucggagccgcuuccgg

SEQ ID NO: 657789 - RNA, 21 nt, Human
ucgccgccgccuucgccccac

SEQ ID NO: 657790 - RNA, 27 nt, Human
ugcaacagacacaagggauuacuggaa

SEQ ID NO: 657791 - RNA, 23 nt, Human
ugccuuguccuucucccuguauc

SEQ ID NO: 657792 - RNA, 18 nt, Human
ugggacuccggccgccaa

SEQ ID NO: 657793 - RNA, 26 nt, Human
uucaaaaaguauaacaauucagguaa

SEQ ID NO: 657794 - RNA, 18 nt, Human
uuccuagcccagagcccu

SEQ ID NO: 657795 - RNA, 22 nt, Human
uuucuuauagaaagcaauucca

SEQ ID NO: 657796 - RNA, 20 nt, Human
uuuuuuuuuuuuuuuuccau

SEQ ID NO: 657797 - RNA, 24 nt, Human
uuuuuuuuuuuuuuuuuuuccaug

SEQ ID NO: 657798 - RNA, 18 nt, Human
aaaugccauuuuuguuuc

SEQ ID NO: 657799 - RNA, 24 nt, Human
aagaagaaaagaagauucugucaa

SEQ ID NO: 657800 - RNA, 21 nt, Human
aagcaguugcaguaccaaaau

SEQ ID NO: 657801 - RNA, 18 nt, Human
aagguuuuaauuuauucu

SEQ ID NO: 657802 - RNA, 23 nt, Human
aaucacuuuuuacuaagauuuau

SEQ ID NO: 657803 - RNA, 24 nt, Human
aauuauauauccaaaacaaaucca

SEQ ID NO: 657804 - RNA, 21 nt, Human
auaaaaaccuacauagacuac

SEQ ID NO: 657805 - RNA, 24 nt, Human
caagaggaaagcaguugcaguacc

SEQ ID NO: 657806 - RNA, 22 nt, Human
caccagaauauaaaauaauaaa

SEQ ID NO: 657807 - RNA, 23 nt, Human
cauuuuuguuucauagacagaga

SEQ ID NO: 657808 - RNA, 25 nt, Human
ccaaaaucuaaacacuuuuggcaag

SEQ ID NO: 657809 - RNA, 28 nt, Human
cuuguaggaaaagaagaggcaaaacauu

SEQ ID NO: 657810 - RNA, 19 nt, Human
cuuuuggcaaggcuucuaa

SEQ ID NO: 657811 - RNA, 21 nt, Human
gauaaaaaccuacauagacua

SEQ ID NO: 657812 - RNA, 24 nt, Human
gcuuucuguuuucuaggauuucua

SEQ ID NO: 657813 - RNA, 21 nt, Human
ggaaaagaagaggcaaaacau

SEQ ID NO: 657814 - RNA, 22 nt, Human
guaauauauauauauauuuaca

SEQ ID NO: 657815 - RNA, 27 nt, Human
uaagaagaaaagaagauucugucaagc

SEQ ID NO: 657816 - RNA, 22 nt, Human
uacacacacacacacauacccc

SEQ ID NO: 657817 - RNA, 20 nt, Human
uacacacacacacacauagg

SEQ ID NO: 657818 - RNA, 24 nt, Human
uacauauauauguguauuauauau

SEQ ID NO: 657819 - RNA, 19 nt, Human
uauaguaauaguaaugaua

SEQ ID NO: 657820 - RNA, 26 nt, Human
uauaguaauaguaaugauacaugaaa

SEQ ID NO: 657821 - RNA, 24 nt, Human
uauauauauauuuacauauauaug

SEQ ID NO: 657822 - RNA, 21 nt, Human
uauauauauuuacauauauau

SEQ ID NO: 657823 - RNA, 23 nt, Human
uauauauguaauauauauauaua

SEQ ID NO: 657824 - RNA, 21 nt, Human
uauauauguauauuauauaua

SEQ ID NO: 657825 - RNA, 21 nt, Human
uauauguaauauauauauaua

SEQ ID NO: 657826 - RNA, 21 nt, Human
uauauguauauuacauauaua

SEQ ID NO: 657827 - RNA, 18 nt, Human
uauauguguauauaugua

SEQ ID NO: 657828 - RNA, 19 nt, Human
uauauguguauauauguau

SEQ ID NO: 657829 - RNA, 23 nt, Human
uauauuauauauauguguauaua

SEQ ID NO: 657830 - RNA, 21 nt, Human
uauguaauauauauauauauu

SEQ ID NO: 657831 - RNA, 25 nt, Human
uauguauauuacauauauauaugua

SEQ ID NO: 657832 - RNA, 23 nt, Human
uauguauauuauauauaugugua

SEQ ID NO: 657833 - RNA, 23 nt, Human
uauguguauauauguauauuaca

SEQ ID NO: 657834 - RNA, 19 nt, Human
uauguguauuauauaugua

SEQ ID NO: 657835 - RNA, 20 nt, Human
uauguguauuauauauguau

SEQ ID NO: 657836 - RNA, 21 nt, Human
uauguguauuauauauguaua

SEQ ID NO: 657837 - RNA, 20 nt, Human
ucagugacuaucauuacugu

SEQ ID NO: 657838 - RNA, 21 nt, Human
ugggaaaucaguuuacugaaa

SEQ ID NO: 657839 - RNA, 18 nt, Human
ugggcaagaggaaagcag

SEQ ID NO: 657840 - RNA, 18 nt, Human
uguaauauauauauauau

SEQ ID NO: 657841 - RNA, 27 nt, Human
uguauauauguauauuacauauauaua

SEQ ID NO: 657842 - RNA, 20 nt, Human
uguauauuacauauauauau

SEQ ID NO: 657843 - RNA, 30 nt, Human
uguauauuauauauauguguauauauguaa

SEQ ID NO: 657844 - RNA, 23 nt, Human
uguguauauauguauauuacaua

SEQ ID NO: 657845 - RNA, 19 nt, Human
uguguauuauauauguaua

SEQ ID NO: 657846 - RNA, 22 nt, Human
uuacauauauauauguaauaua

SEQ ID NO: 657847 - RNA, 19 nt, Human
aaaaaaaaaaaaaaaaaga

SEQ ID NO: 657848 - RNA, 25 nt, Human
aaaaaaaaaaaaaaaagaauaaagg

SEQ ID NO: 657849 - RNA, 24 nt, Human
aaaaaaaaaaaaaagaauaaagag

SEQ ID NO: 657850 - RNA, 23 nt, Human
aaaaaaaaaaagaauaaagagga

SEQ ID NO: 657851 - RNA, 24 nt, Human
aaaaaaaagaauaaagaggaaagg

SEQ ID NO: 657852 - RNA, 27 nt, Human
aaaaagaauaaagaggaaaggaccggu

SEQ ID NO: 657853 - RNA, 21 nt, Human
aaaagaaaaaaaacuuaaaaa

SEQ ID NO: 657854 - RNA, 27 nt, Human
aaagaaaaaaaacuuaaaaauuuaaag

SEQ ID NO: 657855 - RNA, 21 nt, Human
aaagagaaagggugaacccgg

SEQ ID NO: 657856 - RNA, 23 nt, Human
aauaucuuuuuuucuuaaauaac

SEQ ID NO: 657857 - RNA, 20 nt, Human
acagagugagacuccgucuc

SEQ ID NO: 657858 - RNA, 21 nt, Human
acagagugagacuccgucuca

SEQ ID NO: 657859 - RNA, 26 nt, Human
acagagugagacuccgucucaguaaa

SEQ ID NO: 657860 - RNA, 24 nt, Human
acuccagccugggcgacagaguga

SEQ ID NO: 657861 - RNA, 19 nt, Human
acuccgucucaguaaaaaa

SEQ ID NO: 657862 - RNA, 24 nt, Human
acugcacuccagccugggcgacag

SEQ ID NO: 657863 - RNA, 26 nt, Human
acugcacuccagccugggcgacagag

SEQ ID NO: 657864 - RNA, 18 nt, Human
agaaagggugaacccggg

SEQ ID NO: 657865 - RNA, 24 nt, Human
agccugggcgacagagugagacuc

SEQ ID NO: 657866 - RNA, 20 nt, Human
aggaaagaaggaaggaaaag

SEQ ID NO: 657867 - RNA, 24 nt, Human
aggagggggcgagucugaccggga

SEQ ID NO: 657868 - RNA, 20 nt, Human
aggauggaggcggggaggga

SEQ ID NO: 657869 - RNA, 24 nt, Human
aggcggaguuugcagugagccgag

SEQ ID NO: 657870 - RNA, 24 nt, Human
aucgcgccacugcacuccagccug

SEQ ID NO: 657871 - RNA, 22 nt, Human
cacuccagccugggcgacagag

SEQ ID NO: 657872 - RNA, 22 nt, Human
cacuccagccugggcgacagag

SEQ ID NO: 657873 - RNA, 24 nt, Human
cacuccagccugggcgacagagug

SEQ ID NO: 657874 - RNA, 19 nt, Human
cacugcacuccagccuggg

SEQ ID NO: 657875 - RNA, 20 nt, Human
cacugcacuccagccugggc

SEQ ID NO: 657876 - RNA, 20 nt, Human
cacugcacuccagccugggc

SEQ ID NO: 657877 - RNA, 22 nt, Human
cacugcacuccagccugggcga

SEQ ID NO: 657878 - RNA, 24 nt, Human
cacugcacuccagccugggcgaca

SEQ ID NO: 657879 - RNA, 18 nt, Human
ccaaagagaacuaaaauc

SEQ ID NO: 657880 - RNA, 20 nt, Human
ccacugcacuccagccuggg

SEQ ID NO: 657881 - RNA, 21 nt, Human
ccacugcacuccagccugggc

SEQ ID NO: 657882 - RNA, 21 nt, Human
ccacugcacuccagccugggc

SEQ ID NO: 657883 - RNA, 23 nt, Human
ccacugcacuccagccugggcga

SEQ ID NO: 657884 - RNA, 24 nt, Human
ccacugcacuccagccugggcgac

SEQ ID NO: 657885 - RNA, 19 nt, Human
ccagaaggcuggucucucc

SEQ ID NO: 657886 - RNA, 19 nt, Human
cccacagaacgaggaugga

SEQ ID NO: 657887 - RNA, 23 nt, Human
ccgcugaagagggaaggagcgau

SEQ ID NO: 657888 - RNA, 22 nt, Human
ccgucucaguaaaaaaaaaaaa

SEQ ID NO: 657889 - RNA, 22 nt, Human
ccugggcgacagagugagacuc

SEQ ID NO: 657890 - RNA, 24 nt, Human
cgagaucgcgccacugcacuccag

SEQ ID NO: 657891 - RNA, 26 nt, Human
cgccacugcacuccagccugggcgac

SEQ ID NO: 657892 - RNA, 18 nt, Human
cgucucaguaaaaaaaaa

SEQ ID NO: 657893 - RNA, 23 nt, Human
cucccacagaacgaggauggagg

SEQ ID NO: 657894 - RNA, 26 nt, Human
cucucccacagaacgaggauggaggc

SEQ ID NO: 657895 - RNA, 18 nt, Human
gaggauggaggcggggag

SEQ ID NO: 657896 - RNA, 23 nt, Human
gaguuugcagugagccgagaucg

SEQ ID NO: 657897 - RNA, 24 nt, Human
gcacuccagccugggcgacagagu

SEQ ID NO: 657898 - RNA, 22 nt, Human
gccacugcacuccagccugggc

SEQ ID NO: 657899 - RNA, 24 nt, Human
gccacugcacuccagccugggcga

SEQ ID NO: 657900 - RNA, 20 nt, Human
gccgagaucgcgccacugca

SEQ ID NO: 657901 - RNA, 23 nt, Human
ggaaaaagcagcuuucacuuaca

SEQ ID NO: 657902 - RNA, 21 nt, Human
ggaaagaaggaaggaaaaagc

SEQ ID NO: 657903 - RNA, 24 nt, Human
ggaguuugcagugagccgagaucg

SEQ ID NO: 657904 - RNA, 23 nt, Human
gggaaaggggacucucagggagu

SEQ ID NO: 657905 - RNA, 21 nt, Human
gggagggauccgcugaagagg

SEQ ID NO: 657906 - RNA, 18 nt, Human
gggauaagaauaaagaga

SEQ ID NO: 657907 - RNA, 23 nt, Human
ggggagggauccgcugaagaggg

SEQ ID NO: 657908 - RNA, 25 nt, Human
uaaaacagagagaugucuuggagga

SEQ ID NO: 657909 - RNA, 21 nt, Human
uaaaagacuacuguugccuuu

SEQ ID NO: 657910 - RNA, 23 nt, Human
uacacuuuuaacagugacguuaa

SEQ ID NO: 657911 - RNA, 19 nt, Human
uacuguugccuuucugaag

SEQ ID NO: 657912 - RNA, 28 nt, Human
ucaauuuuuucuuguucuacuuucccua

SEQ ID NO: 657913 - RNA, 24 nt, Human
ucaguaaaaaaaaaaaaaaaaaaa

SEQ ID NO: 657914 - RNA, 23 nt, Human
uccagccugggcgacagagugag

SEQ ID NO: 657915 - RNA, 24 nt, Human
uccagccugggcgacagagugaga

SEQ ID NO: 657916 - RNA, 23 nt, Human
ucgcgccacugcacuccagccug

SEQ ID NO: 657917 - RNA, 19 nt, Human
ucguguaaaaauaucuuuu

SEQ ID NO: 657918 - RNA, 22 nt, Human
ucucaguaaaaaaaaaaaaaaa

SEQ ID NO: 657919 - RNA, 21 nt, Human
ucucucccacagaacgaggau

SEQ ID NO: 657920 - RNA, 24 nt, Human
ucugaagacuaaaaagaaaaaaaa

SEQ ID NO: 657921 - RNA, 23 nt, Human
ugaagacuaaaaagaaaaaaaac

SEQ ID NO: 657922 - RNA, 22 nt, Human
ugagccgagaucgcgccacugc

SEQ ID NO: 657923 - RNA, 19 nt, Human
uggaggagggggcgagucu

SEQ ID NO: 657924 - RNA, 21 nt, Human
uggagguaaaaggaaagaagg

SEQ ID NO: 657925 - RNA, 23 nt, Human
uuccucuugggaaaguaauacaa

SEQ ID NO: 657926 - RNA, 22 nt, Human
uugcagugagccgagaucgcgc

SEQ ID NO: 657927 - RNA, 19 nt, Human
uuugcagugagccgagauc

SEQ ID NO: 657928 - RNA, 21 nt, Human
uuugcagugagccgagaucgc

SEQ ID NO: 657929 - RNA, 23 nt, Human
uuuuuuuuuuuuuuuuuuccuuu

SEQ ID NO: 657930 - RNA, 25 nt, Human
uuuuuuuuuuuuuuuuuuccuuuuu

SEQ ID NO: 657931 - RNA, 22 nt, Human
aaaauuggaaacauuuccuuca

SEQ ID NO: 657932 - RNA, 22 nt, Human
aaaguagaauaugaaucaaaga

SEQ ID NO: 657933 - RNA, 19 nt, Human
aacuuuauuccccucccac

SEQ ID NO: 657934 - RNA, 24 nt, Human
aagcaaaaagccucugaagucaaa

SEQ ID NO: 657935 - RNA, 22 nt, Human
acauaauaaauguucuccaucc

SEQ ID NO: 657936 - RNA, 18 nt, Human
accaagagacagacggcc

SEQ ID NO: 657937 - RNA, 19 nt, Human
accaccccccuuaaauaua

SEQ ID NO: 657938 - RNA, 24 nt, Human
acccaauaccaagagacagacggc

SEQ ID NO: 657939 - RNA, 26 nt, Human
acuuguuccgucuuuacuugcccccu

SEQ ID NO: 657940 - RNA, 20 nt, Human
agcaaggaaauauaacagaa

SEQ ID NO: 657941 - RNA, 24 nt, Human
auuacuuuucguucagagcagaau

SEQ ID NO: 657942 - RNA, 18 nt, Human
caaacuccucuuccccuc

SEQ ID NO: 657943 - RNA, 19 nt, Human
cacccaccaccccccuuaa

SEQ ID NO: 657944 - RNA, 18 nt, Human
cagcaaaaccggaagagg

SEQ ID NO: 657945 - RNA, 22 nt, Human
ccaaagcaaaaagccucugaag

SEQ ID NO: 657946 - RNA, 22 nt, Human
cccacccaccaccccccuuaaa

SEQ ID NO: 657947 - RNA, 21 nt, Human
ccccaaugggcuucgccaccu

SEQ ID NO: 657948 - RNA, 24 nt, Human
ccccaggaacgccucccgagccag

SEQ ID NO: 657949 - RNA, 18 nt, Human
cccccucccacccaccac

SEQ ID NO: 657950 - RNA, 21 nt, Human
cccccucccacccaccacccc

SEQ ID NO: 657951 - RNA, 21 nt, Human
cccucccacccaccacccccc

SEQ ID NO: 657952 - RNA, 24 nt, Human
cccucccacccaccaccccccuua

SEQ ID NO: 657953 - RNA, 22 nt, Human
ccgagccagaccgccgcagccg

SEQ ID NO: 657954 - RNA, 21 nt, Human
ccgccgccccaaugggcuucg

SEQ ID NO: 657955 - RNA, 24 nt, Human
ccgccgcggucugcaccgccgccc

SEQ ID NO: 657956 - RNA, 20 nt, Human
ccucccacccaccacccccc

SEQ ID NO: 657957 - RNA, 18 nt, Human
ccuucaggcagcuggcca

SEQ ID NO: 657958 - RNA, 18 nt, Human
cgccucccgagccagacc

SEQ ID NO: 657959 - RNA, 19 nt, Human
cggccgggcagguguaagg

SEQ ID NO: 657960 - RNA, 19 nt, Human
cucccacccaccacccccc

SEQ ID NO: 657961 - RNA, 21 nt, Human
cuccucuuccccucuggucau

SEQ ID NO: 657962 - RNA, 24 nt, Human
gaccuggcgcuccuucaggcagcu

SEQ ID NO: 657963 - RNA, 24 nt, Human
gcgcuccuucaggcagcuggccag

SEQ ID NO: 657964 - RNA, 19 nt, Human
ggugcccccuccuuuaccc

SEQ ID NO: 657965 - RNA, 21 nt, Human
uacuauuacugcuacuaaacu

SEQ ID NO: 657966 - RNA, 24 nt, Human
uagucagauuuuuuauuuucaaac

SEQ ID NO: 657967 - RNA, 21 nt, Human
uauguaaacaugauuuacuau

SEQ ID NO: 657968 - RNA, 19 nt, Human
ucccacccaccaccccccu

SEQ ID NO: 657969 - RNA, 21 nt, Human
ucccacccaccaccccccuua

SEQ ID NO: 657970 - RNA, 22 nt, Human
ucccacccaccaccccccuuaa

SEQ ID NO: 657971 - RNA, 18 nt, Human
ucugaagacacuuuucca

SEQ ID NO: 657972 - RNA, 21 nt, Human
ucugaagucaaaacaugagac

SEQ ID NO: 657973 - RNA, 19 nt, Human
ugccagguacauuucccac

SEQ ID NO: 657974 - RNA, 24 nt, Human
ugcccccuccuuuacccaauacca

SEQ ID NO: 657975 - RNA, 19 nt, Human
uguaaacaugauuuacuau

SEQ ID NO: 657976 - RNA, 27 nt, Human
uguuccgucuuuacuugcccccuccca

SEQ ID NO: 657977 - RNA, 19 nt, Human
uuaaugcccuaacauguca

SEQ ID NO: 657978 - RNA, 26 nt, Human
uucaagucugauguccaucagugcaa

SEQ ID NO: 657979 - RNA, 22 nt, Human
uuccacacuuaggacaaguucu

SEQ ID NO: 657980 - RNA, 20 nt, Human
aaaacaaacaaaaacaugag

SEQ ID NO: 657981 - RNA, 23 nt, Human
aaaacaaacaaaaacaugaggua

SEQ ID NO: 657982 - RNA, 28 nt, Human
aaugaugaaaauaaccaggaauacggga

SEQ ID NO: 657983 - RNA, 23 nt, Human
acgguccugcuuauuguccuaca

SEQ ID NO: 657984 - RNA, 21 nt, Human
augagguaaaaaaagaguuac

SEQ ID NO: 657985 - RNA, 21 nt, Human
caggggcuucaauaccugugg

SEQ ID NO: 657986 - RNA, 21 nt, Human
caucaaauuaucacccagggg

SEQ ID NO: 657987 - RNA, 18 nt, Human
ccggcccagacgguccug

SEQ ID NO: 657988 - RNA, 22 nt, Human
gaaaauaaccaggaauacggga

SEQ ID NO: 657989 - RNA, 22 nt, Human
gaaauaaaaagaugcuucucuc

SEQ ID NO: 657990 - RNA, 21 nt, Human
gacugccuuauguuuuccucc

SEQ ID NO: 657991 - RNA, 18 nt, Human
gagaaaaagguuaaaaau

SEQ ID NO: 657992 - RNA, 18 nt, Human
gaguuuguuacagacugc

SEQ ID NO: 657993 - RNA, 22 nt, Human
gcaaaacaaacaaaaacaugag

SEQ ID NO: 657994 - RNA, 21 nt, Human
gcaaugaugaaaauaaccagg

SEQ ID NO: 657995 - RNA, 22 nt, Human
gccugcuuugauagaguuuguu

SEQ ID NO: 657996 - RNA, 25 nt, Human
gguccugcuuauuguccuacaugug

SEQ ID NO: 657997 - RNA, 19 nt, Human
uacaauuccuaugagaugg

SEQ ID NO: 657998 - RNA, 19 nt, Human
ugagaaaugugcaaaacaa

SEQ ID NO: 657999 - RNA, 19 nt, Human
ugagauggaugugcaauuc

SEQ ID NO: 658000 - RNA, 19 nt, Human
ugcaaaacaaacaaaaaca

SEQ ID NO: 658001 - RNA, 19 nt, Human
uguauacagcauuuaugca

SEQ ID NO: 658002 - RNA, 19 nt, Human
ugugcaaaacaaacaaaaa

SEQ ID NO: 658003 - RNA, 20 nt, Human
ugugcaaaacaaacaaaaac

SEQ ID NO: 658004 - RNA, 25 nt, Human
uucagauagagaaaaagguuaaaaa

SEQ ID NO: 658005 - RNA, 18 nt, Human
uuuuuuuuuuuggagaug

SEQ ID NO: 658006 - RNA, 18 nt, Human
uuuuuuuuuuuuuuuuug

SEQ ID NO: 658007 - RNA, 23 nt, Human
uuuuuuuuuuuuuuuuuggagau

SEQ ID NO: 658008 - RNA, 18 nt, Human
acuauaucaucaaagcau

SEQ ID NO: 658009 - RNA, 24 nt, Human
auaaaauauucacaaacugaucaa

SEQ ID NO: 658010 - RNA, 24 nt, Human
cuauaucaucaaagcauaaaauau

SEQ ID NO: 658011 - RNA, 23 nt, Human
uaaaauauucacaaacugaucaa

SEQ ID NO: 658012 - RNA, 18 nt, Human
uuuuuuuuuuuuuuuuug

SEQ ID NO: 658013 - RNA, 26 nt, Human
uuuuuuuuuuuuuuuuuggcguuuuu

SEQ ID NO: 658014 - RNA, 23 nt, Human
aaacccuccuuucugcaucacuu

SEQ ID NO: 658015 - RNA, 22 nt, Human
aagcaaaacauccuaucuccaa

SEQ ID NO: 658016 - RNA, 19 nt, Human
aagggucccucccagagcc

SEQ ID NO: 658017 - RNA, 20 nt, Human
aaguauuuuaaacaaaaucc

SEQ ID NO: 658018 - RNA, 21 nt, Human
accacuugagaugauuacccc

SEQ ID NO: 658019 - RNA, 18 nt, Human
acccuggggagaaaaggc

SEQ ID NO: 658020 - RNA, 20 nt, Human
acccuggggagaaaaggcuc

SEQ ID NO: 658021 - RNA, 21 nt, Human
agcaggagccauacccugggg

SEQ ID NO: 658022 - RNA, 23 nt, Human
aggccagggggacccuuccccaa

SEQ ID NO: 658023 - RNA, 18 nt, Human
aggcccugcuggacaaga

SEQ ID NO: 658024 - RNA, 23 nt, Human
aggcucagaggggugggcagcag

SEQ ID NO: 658025 - RNA, 18 nt, Human
agggagccccgcugggag

SEQ ID NO: 658026 - RNA, 21 nt, Human
agggugggggaaaggcggagc

SEQ ID NO: 658027 - RNA, 23 nt, Human
auugcacuuuguccccuucugga

SEQ ID NO: 658028 - RNA, 18 nt, Human
caaaacauccuaucucca

SEQ ID NO: 658029 - RNA, 19 nt, Human
caaacccaaccugugcccc

SEQ ID NO: 658030 - RNA, 19 nt, Human
caagccccgcagaggcugg

SEQ ID NO: 658031 - RNA, 24 nt, Human
caagccccgcagaggcugguucug

SEQ ID NO: 658032 - RNA, 21 nt, Human
cacagccaagggaugcaggaa

SEQ ID NO: 658033 - RNA, 21 nt, Human
cacccugagagccaggguggg

SEQ ID NO: 658034 - RNA, 22 nt, Human
cacuggcccauguacuuuaagc

SEQ ID NO: 658035 - RNA, 23 nt, Human
cagagccccugggaaaucgggag

SEQ ID NO: 658036 - RNA, 22 nt, Human
cagcagcagagucuuugcagag

SEQ ID NO: 658037 - RNA, 18 nt, Human
cagccccagcagaagagc

SEQ ID NO: 658038 - RNA, 21 nt, Human
ccagggugggggaaaggcgga

SEQ ID NO: 658039 - RNA, 20 nt, Human
ccagucccacuggcccaugu

SEQ ID NO: 658040 - RNA, 22 nt, Human
ccagugauggcagcaucuccuu

SEQ ID NO: 658041 - RNA, 26 nt, Human
ccagugauggcagcaucuccuugaga

SEQ ID NO: 658042 - RNA, 21 nt, Human
cccaaccugugccccacuguc

SEQ ID NO: 658043 - RNA, 23 nt, Human
ccccacugucucacucacacccu

SEQ ID NO: 658044 - RNA, 21 nt, Human
ccccugugagagcugagugca

SEQ ID NO: 658045 - RNA, 19 nt, Human
ccccuucuggacaagucag

SEQ ID NO: 658046 - RNA, 22 nt, Human
cccuggauuccugucaaggccc

SEQ ID NO: 658047 - RNA, 20 nt, Human
ccggagagaaggguccaggg

SEQ ID NO: 658048 - RNA, 23 nt, Human
ccuaucuccaauuccagcagcca

SEQ ID NO: 658049 - RNA, 28 nt, Human
ccuccagaagccgucuccgaaggugggg

SEQ ID NO: 658050 - RNA, 19 nt, Human
ccucccagugauggcagca

SEQ ID NO: 658051 - RNA, 20 nt, Human
ccucuagagcugaaucccca

SEQ ID NO: 658052 - RNA, 20 nt, Human
ccugcuggaggccaggggga

SEQ ID NO: 658053 - RNA, 24 nt, Human
cgaaaacaggucauguucaugaaa

SEQ ID NO: 658054 - RNA, 21 nt, Human
cuccugcagugggaagcaaaa

SEQ ID NO: 658055 - RNA, 18 nt, Human
cuccugcuggaggccagg

SEQ ID NO: 658056 - RNA, 21 nt, Human
cugcuggaggccagggggacc

SEQ ID NO: 658057 - RNA, 21 nt, Human
cugggaaaucgggagaggggc

SEQ ID NO: 658058 - RNA, 23 nt, Human
cuuccagucccacuggcccaugu

SEQ ID NO: 658059 - RNA, 22 nt, Human
cuucuggccaagccguuccucc

SEQ ID NO: 658060 - RNA, 19 nt, Human
cuuguacaggucacuucca

SEQ ID NO: 658061 - RNA, 20 nt, Human
gagaaaaggcucagaggggu

SEQ ID NO: 658062 - RNA, 21 nt, Human
gagcacaagccccgcagaggc

SEQ ID NO: 658063 - RNA, 25 nt, Human
gaggauacugugaccucuagagcug

SEQ ID NO: 658064 - RNA, 21 nt, Human
gcagcucuccugcagugggaa

SEQ ID NO: 658065 - RNA, 22 nt, Human
gccaagccguuccuccagaagc

SEQ ID NO: 658066 - RNA, 18 nt, Human
gcccauguacuuuaagca

SEQ ID NO: 658067 - RNA, 24 nt, Human
gcggagcccggcagggacuuggag

SEQ ID NO: 658068 - RNA, 20 nt, Human
gcuuggauucaucucaagcc

SEQ ID NO: 658069 - RNA, 18 nt, Human
ggacccuuccccaacccc

SEQ ID NO: 658070 - RNA, 19 nt, Human
ggcaaacccaaccugugcc

SEQ ID NO: 658071 - RNA, 23 nt, Human
ggcagcucuccugcagugggaag

SEQ ID NO: 658072 - RNA, 19 nt, Human
uacccuggggagaaaaggc

SEQ ID NO: 658073 - RNA, 22 nt, Human
uacccuggggagaaaaggcuca

SEQ ID NO: 658074 - RNA, 23 nt, Human
uaugcacaaaaaagaaaauagcu

SEQ ID NO: 658075 - RNA, 27 nt, Human
uauugcacuuuguccccuucuggacaa

SEQ ID NO: 658076 - RNA, 23 nt, Human
uccucugagccucccagugaugg

SEQ ID NO: 658077 - RNA, 21 nt, Human
ucucaagccagaaacccaacu

SEQ ID NO: 658078 - RNA, 24 nt, Human
ucugcaucacuuguacaggucacu

SEQ ID NO: 658079 - RNA, 19 nt, Human
ugaaagggggcagcucucc

SEQ ID NO: 658080 - RNA, 21 nt, Human
ugaagagcuuuaauauucaga

SEQ ID NO: 658081 - RNA, 21 nt, Human
ugaccucuagagcugaauccc

SEQ ID NO: 658082 - RNA, 23 nt, Human
ugaccucuagagcugaaucccuu

SEQ ID NO: 658083 - RNA, 22 nt, Human
ugauuaccccugugagagcuga

SEQ ID NO: 658084 - RNA, 23 nt, Human
ugcacaaaaaagaaaauagcucc

SEQ ID NO: 658085 - RNA, 18 nt, Human
ugccccaucuccagaaau

SEQ ID NO: 658086 - RNA, 18 nt, Human
uggcaaacccaaccugug

SEQ ID NO: 658087 - RNA, 19 nt, Human
uggcaaacccaaccugugc

SEQ ID NO: 658088 - RNA, 24 nt, Human
uggcaaggcaguaauuacaggaga

SEQ ID NO: 658089 - RNA, 21 nt, Human
uggcagcaucuccuugagagc

SEQ ID NO: 658090 - RNA, 25 nt, Human
uggccaagccguuccuccagaagcc

SEQ ID NO: 658091 - RNA, 21 nt, Human
uggcccauguacuuuaagcau

SEQ ID NO: 658092 - RNA, 24 nt, Human
uggcuacaaauaccacuugagaug

SEQ ID NO: 658093 - RNA, 22 nt, Human
ugggaagcaaaacauccuaucu

SEQ ID NO: 658094 - RNA, 24 nt, Human
ugggaggcgucaggguagggaagg

SEQ ID NO: 658095 - RNA, 23 nt, Human
uggggagaaaaggcucagagggg

SEQ ID NO: 658096 - RNA, 21 nt, Human
ugggggaaaggcggagcccgg

SEQ ID NO: 658097 - RNA, 19 nt, Human
uguggguggcgucacccug

SEQ ID NO: 658098 - RNA, 20 nt, Human
uuccacucugugugucuagu

SEQ ID NO: 658099 - RNA, 20 nt, Human
uuggcaugcuuccuggccug

SEQ ID NO: 658100 - RNA, 20 nt, Human
uuucaaacgaggauacugug

SEQ ID NO: 658101 - RNA, 26 nt, Human
uuugaaacccuccuuucugcaucacu

SEQ ID NO: 658102 - RNA, 22 nt, Human
uuuuuuuuuuuuuuuuucauuu

SEQ ID NO: 658103 - RNA, 20 nt, Human
aaaaagaaagcuugcacagu

SEQ ID NO: 658104 - RNA, 22 nt, Human
aaaaagccaugagagguacugc

SEQ ID NO: 658105 - RNA, 18 nt, Human
aaaacaaaaagauaggcc

SEQ ID NO: 658106 - RNA, 23 nt, Human
aaaagaaccuacgaaaaccagag

SEQ ID NO: 658107 - RNA, 21 nt, Human
aaacaaaaagauaggcccagu

SEQ ID NO: 658108 - RNA, 21 nt, Human
aaacaauauucugaaccaaaa

SEQ ID NO: 658109 - RNA, 23 nt, Human
aaacaggcauagaaaaccaccuc

SEQ ID NO: 658110 - RNA, 22 nt, Human
aaaguccaggaagagcaaugau

SEQ ID NO: 658111 - RNA, 19 nt, Human
aaucauuaccucagugaau

SEQ ID NO: 658112 - RNA, 21 nt, Human
acagagcuuugugagcaaugg

SEQ ID NO: 658113 - RNA, 21 nt, Human
accauugaucucaccaaugcc

SEQ ID NO: 658114 - RNA, 21 nt, Human
acccuaaggcaauaugaaaac

SEQ ID NO: 658115 - RNA, 21 nt, Human
acugcuggaaccaaaaagcca

SEQ ID NO: 658116 - RNA, 23 nt, Human
acugugcucuuucuauucagaac

SEQ ID NO: 658117 - RNA, 22 nt, Human
agacagauccacagaccaccuu

SEQ ID NO: 658118 - RNA, 19 nt, Human
agacuccuaugaaacaaag

SEQ ID NO: 658119 - RNA, 22 nt, Human
agagagacaaagcacauuugag

SEQ ID NO: 658120 - RNA, 19 nt, Human
agaggaaaacaggcauaga

SEQ ID NO: 658121 - RNA, 18 nt, Human
agccaugagagguacugc

SEQ ID NO: 658122 - RNA, 19 nt, Human
aggaaaacaggcauagaaa

SEQ ID NO: 658123 - RNA, 21 nt, Human
aggcaauaugaaaacagucau

SEQ ID NO: 658124 - RNA, 21 nt, Human
aggcaggcaacgaggggcaug

SEQ ID NO: 658125 - RNA, 23 nt, Human
aggcaggcaacgaggggcaugau

SEQ ID NO: 658126 - RNA, 18 nt, Human
aggcauccuucccauaga

SEQ ID NO: 658127 - RNA, 19 nt, Human
agggagucacagauuaggc

SEQ ID NO: 658128 - RNA, 23 nt, Human
agggguaacagacauguuucaga

SEQ ID NO: 658129 - RNA, 18 nt, Human
agugcucugaggaaggaa

SEQ ID NO: 658130 - RNA, 21 nt, Human
agugcuuggcccugaaaagcg

SEQ ID NO: 658131 - RNA, 24 nt, Human
auaacacaagacuccuaugaaaca

SEQ ID NO: 658132 - RNA, 25 nt, Human
augaaggacuaaccuuguauaacac

SEQ ID NO: 658133 - RNA, 18 nt, Human
caaaaagauaggcccagu

SEQ ID NO: 658134 - RNA, 18 nt, Human
caacuugguaagauggag

SEQ ID NO: 658135 - RNA, 25 nt, Human
cacaaccucaagucucaggaaagcc

SEQ ID NO: 658136 - RNA, 24 nt, Human
cacacagagcuuugugagcaaugg

SEQ ID NO: 658137 - RNA, 21 nt, Human
cacccaagauaaaucuagcca

SEQ ID NO: 658138 - RNA, 21 nt, Human
caccuuacaagcuacauagcc

SEQ ID NO: 658139 - RNA, 21 nt, Human
cagacagauccacagaccacc

SEQ ID NO: 658140 - RNA, 19 nt, Human
cagcacaggguccaggccu

SEQ ID NO: 658141 - RNA, 18 nt, Human
cagcucagcacagggucc

SEQ ID NO: 658142 - RNA, 19 nt, Human
cagugagucaccagcucag

SEQ ID NO: 658143 - RNA, 22 nt, Human
cauagccaucuucaaaaugaaa

SEQ ID NO: 658144 - RNA, 18 nt, Human
caucacccaagauaaauc

SEQ ID NO: 658145 - RNA, 18 nt, Human
cauguacuggcacaaaca

SEQ ID NO: 658146 - RNA, 28 nt, Human
ccaccuacacguacaguggucucauucc

SEQ ID NO: 658147 - RNA, 19 nt, Human
ccagacagcacuaauaaac

SEQ ID NO: 658148 - RNA, 22 nt, Human
ccaguacaagccacaaccucaa

SEQ ID NO: 658149 - RNA, 22 nt, Human
cccaagauaaaucuagccaccc

SEQ ID NO: 658150 - RNA, 19 nt, Human
cccaccacucccagccuuc

SEQ ID NO: 658151 - RNA, 19 nt, Human
ccuccaucacccaagauaa

SEQ ID NO: 658152 - RNA, 27 nt, Human
cguuacaaacauccacguaacauaggg

SEQ ID NO: 658153 - RNA, 21 nt, Human
cuaauacaacaaaugguuuug

SEQ ID NO: 658154 - RNA, 18 nt, Human
cucauuaacaaugcucug

SEQ ID NO: 658155 - RNA, 19 nt, Human
cucauuaacaaugcucuga

SEQ ID NO: 658156 - RNA, 19 nt, Human
cucuugaagcacuugagac

SEQ ID NO: 658157 - RNA, 19 nt, Human
cugaaccaaaagaaccuac

SEQ ID NO: 658158 - RNA, 26 nt, Human
cugaaccaaaagaaccuacgaaaacc

SEQ ID NO: 658159 - RNA, 18 nt, Human
cugcgccacagcuaaacc

SEQ ID NO: 658160 - RNA, 20 nt, Human
cuggcauuuucaagugucaa

SEQ ID NO: 658161 - RNA, 21 nt, Human
gacagauccacagaccaccuu

SEQ ID NO: 658162 - RNA, 22 nt, Human
gcacaaacaauauucugaacca

SEQ ID NO: 658163 - RNA, 23 nt, Human
gccaaauauuccccuuuucaacu

SEQ ID NO: 658164 - RNA, 19 nt, Human
gcugaagugccaaaagacu

SEQ ID NO: 658165 - RNA, 19 nt, Human
gcugaugcaugugugagcc

SEQ ID NO: 658166 - RNA, 21 nt, Human
ggaaaacaaaaagauaggccc

SEQ ID NO: 658167 - RNA, 25 nt, Human
ggaaccaaaaagccaugagagguag

SEQ ID NO: 658168 - RNA, 23 nt, Human
ggagccagacucuugaagcacuu

SEQ ID NO: 658169 - RNA, 19 nt, Human
ggcagcuauugaaguggau

SEQ ID NO: 658170 - RNA, 24 nt, Human
ggcccugaaaagcguuaacccaga

SEQ ID NO: 658171 - RNA, 21 nt, Human
ggccucagcacagagagacaa

SEQ ID NO: 658172 - RNA, 19 nt, Human
gggcauguacuuagagcuc

SEQ ID NO: 658173 - RNA, 24 nt, Human
gguaacagacauguuucagaggaa

SEQ ID NO: 658174 - RNA, 18 nt, Human
guagcaggagccagacuc

SEQ ID NO: 658175 - RNA, 26 nt, Human
uaaaaagcacaucauacaaccuucag

SEQ ID NO: 658176 - RNA, 22 nt, Human
uaaaauucauugacuuacguua

SEQ ID NO: 658177 - RNA, 25 nt, Human
uaaauuggaaacaacuuuugucuca

SEQ ID NO: 658178 - RNA, 22 nt, Human
uaacacaagacuccuaugaaac

SEQ ID NO: 658179 - RNA, 22 nt, Human
uaaggcaauaugaaaacaguca

SEQ ID NO: 658180 - RNA, 22 nt, Human
uacuuuuucuccacaacuguga

SEQ ID NO: 658181 - RNA, 25 nt, Human
uagggagaaaccaugucacauggaa

SEQ ID NO: 658182 - RNA, 21 nt, Human
uaugcacacagagcuuuguga

SEQ ID NO: 658183 - RNA, 18 nt, Human
uauggcaaucacuuucca

SEQ ID NO: 658184 - RNA, 19 nt, Human
uauggcaaucacuuuccag

SEQ ID NO: 658185 - RNA, 19 nt, Human
uauggcaaucacuuuccag

SEQ ID NO: 658186 - RNA, 21 nt, Human
uauggcaaucacuuuccagug

SEQ ID NO: 658187 - RNA, 19 nt, Human
ucaaggacguuuucuccgg

SEQ ID NO: 658188 - RNA, 22 nt, Human
ucacagggaacacuaauuauau

SEQ ID NO: 658189 - RNA, 23 nt, Human
ucacccaagauaaaucuagccac

SEQ ID NO: 658190 - RNA, 21 nt, Human
ucagugcucugaggaaggaag

SEQ ID NO: 658191 - RNA, 19 nt, Human
uccaucacccaagauaaau

SEQ ID NO: 658192 - RNA, 28 nt, Human
uccaucacccaagauaaaucuagccacc

SEQ ID NO: 658193 - RNA, 21 nt, Human
ucccagccuuccuucuacccc

SEQ ID NO: 658194 - RNA, 22 nt, Human
ucuacaaaguccaggaagagca

SEQ ID NO: 658195 - RNA, 23 nt, Human
ucuaccccggaauagcccagaug

SEQ ID NO: 658196 - RNA, 25 nt, Human
ucugaaccaaaagaaccuacgaaaa

SEQ ID NO: 658197 - RNA, 23 nt, Human
ugaaacaaagaaaagagaauaaa

SEQ ID NO: 658198 - RNA, 25 nt, Human
ugaaccaaaagaaccuacgaaaacc

SEQ ID NO: 658199 - RNA, 18 nt, Human
ugaagaaacagcuugaca

SEQ ID NO: 658200 - RNA, 21 nt, Human
ugaagcacuugagacugauuu

SEQ ID NO: 658201 - RNA, 22 nt, Human
ugaaguggauuguuggcuuugu

SEQ ID NO: 658202 - RNA, 21 nt, Human
ugacaguguacaucuuucuug

SEQ ID NO: 658203 - RNA, 22 nt, Human
ugagacaagcagcuucaaggac

SEQ ID NO: 658204 - RNA, 26 nt, Human
ugcuugaaguccuuaugcacacagag

SEQ ID NO: 658205 - RNA, 23 nt, Human
uggaaaacaaaaagauaggccca

SEQ ID NO: 658206 - RNA, 19 nt, Human
uggaaccaaaaagccauga

SEQ ID NO: 658207 - RNA, 24 nt, Human
uggauaguaaguuacugagaaaaa

SEQ ID NO: 658208 - RNA, 21 nt, Human
uggcacaaacaauauucugaa

SEQ ID NO: 658209 - RNA, 21 nt, Human
uggcaguacccacaugugcug

SEQ ID NO: 658210 - RNA, 22 nt, Human
uggcaguacccacaugugcuga

SEQ ID NO: 658211 - RNA, 24 nt, Human
ugggcccaguuaguuuuuagggag

SEQ ID NO: 658212 - RNA, 20 nt, Human
ugguugcagccccaucuaca

SEQ ID NO: 658213 - RNA, 18 nt, Human
uguggccaaauauucccc

SEQ ID NO: 658214 - RNA, 23 nt, Human
uuaacccuaaggcaauaugaaaa

SEQ ID NO: 658215 - RNA, 18 nt, Human
uucaaaaugaaaaccacc

SEQ ID NO: 658216 - RNA, 24 nt, Human
uucaaaaugaaaaccaccuuuuaa

SEQ ID NO: 658217 - RNA, 21 nt, Human
uucaagugucaacaggccaug

SEQ ID NO: 658218 - RNA, 24 nt, Human
uuccaguacaagccacaagguacc

SEQ ID NO: 658219 - RNA, 19 nt, Human
uuuaaguccucaugcugcc

SEQ ID NO: 658220 - RNA, 24 nt, Human
uuuucaagugucaacaggccaugc

SEQ ID NO: 658221 - RNA, 18 nt, Human
uuuuuuuuuuuuuaaccc

SEQ ID NO: 658222 - RNA, 20 nt, Human
aaaaaauauagcuauacccc

SEQ ID NO: 658223 - RNA, 27 nt, Human
aaaaagauacacugcaacaacagauua

SEQ ID NO: 658224 - RNA, 24 nt, Human
aaaaauacaacauuauacaucaca

SEQ ID NO: 658225 - RNA, 26 nt, Human
aauauaugugugugugugugugugug

SEQ ID NO: 658226 - RNA, 21 nt, Human
aaugcuguguuaggcauguca

SEQ ID NO: 658227 - RNA, 25 nt, Human
acaacauuauacaucacacagcauu

SEQ ID NO: 658228 - RNA, 24 nt, Human
acacagcauuuucuuugugcaaaa

SEQ ID NO: 658229 - RNA, 19 nt, Human
acuaucugauuucacauug

SEQ ID NO: 658230 - RNA, 18 nt, Human
acugauuucugggccggu

SEQ ID NO: 658231 - RNA, 19 nt, Human
acugguauuuggacugauu

SEQ ID NO: 658232 - RNA, 18 nt, Human
agcuauaucauacaaccu

SEQ ID NO: 658233 - RNA, 18 nt, Human
aggauugaaagcuaaacu

SEQ ID NO: 658234 - RNA, 22 nt, Human
augaacuuucuugauaagaucc

SEQ ID NO: 658235 - RNA, 22 nt, Human
augugugugugugugugugugu

SEQ ID NO: 658236 - RNA, 22 nt, Human
augugugugugugugugugugu

SEQ ID NO: 658237 - RNA, 18 nt, Human
cacacagcauuuucuuug

SEQ ID NO: 658238 - RNA, 23 nt, Human
cacacagcauuuucuuugugcaa

SEQ ID NO: 658239 - RNA, 25 nt, Human
caucacacagcauuuucuuugugca

SEQ ID NO: 658240 - RNA, 18 nt, Human
cauuugaaagcugguuuu

SEQ ID NO: 658241 - RNA, 20 nt, Human
cccacguguggaaaagaggu

SEQ ID NO: 658242 - RNA, 22 nt, Human
ccuccaaaucagagggaguaaa

SEQ ID NO: 658243 - RNA, 18 nt, Human
ccucuguaacaugaacuu

SEQ ID NO: 658244 - RNA, 21 nt, Human
gaaaauuaaacuaagccaaca

SEQ ID NO: 658245 - RNA, 22 nt, Human
gagaacucucagcuuuguuggu

SEQ ID NO: 658246 - RNA, 18 nt, Human
ggaagggugcagaauucu

SEQ ID NO: 658247 - RNA, 20 nt, Human
ggccgguccauuugaaagcu

SEQ ID NO: 658248 - RNA, 19 nt, Human
ggugucgaguaaaguuugg

SEQ ID NO: 658249 - RNA, 21 nt, Human
gugugugugugugugugugug

SEQ ID NO: 658250 - RNA, 21 nt, Human
gugugugugugugugugugug

SEQ ID NO: 658251 - RNA, 25 nt, Human
uaauggauuuuucccccuagaaguu

SEQ ID NO: 658252 - RNA, 25 nt, Human
uacuuuuauuuuguaggauugaaag

SEQ ID NO: 658253 - RNA, 19 nt, Human
uauacaaauauaugugugu

SEQ ID NO: 658254 - RNA, 19 nt, Human
uauacaaauauaugugugu

SEQ ID NO: 658255 - RNA, 19 nt, Human
uauaugugugugugugugu

SEQ ID NO: 658256 - RNA, 18 nt, Human
uaugugugugugugugug

SEQ ID NO: 658257 - RNA, 23 nt, Human
uaugugugugugugugugugugu

SEQ ID NO: 658258 - RNA, 20 nt, Human
uccauuugaaagcugguuuu

SEQ ID NO: 658259 - RNA, 18 nt, Human
uccccaacguauuuacag

SEQ ID NO: 658260 - RNA, 25 nt, Human
ugaacaaauccccaacguauuuaca

SEQ ID NO: 658261 - RNA, 20 nt, Human
ugcaacaacagauuaaagaa

SEQ ID NO: 658262 - RNA, 22 nt, Human
ugcuuagagggaaguaaacuuu

SEQ ID NO: 658263 - RNA, 24 nt, Human
ugggaagggugcagaauucugaga

SEQ ID NO: 658264 - RNA, 18 nt, Human
uguauauauauauaugua

SEQ ID NO: 658265 - RNA, 18 nt, Human
uguguauauauauauaug

SEQ ID NO: 658266 - RNA, 22 nt, Human
uguguauauauauauauguaug

SEQ ID NO: 658267 - RNA, 21 nt, Human
uguguguauauauauauaugu

SEQ ID NO: 658268 - RNA, 23 nt, Human
uguguguauauauauauauguau

SEQ ID NO: 658269 - RNA, 18 nt, Human
uguguguguauauauaua

SEQ ID NO: 658270 - RNA, 25 nt, Human
uguguguguauauauauauauguaa

SEQ ID NO: 658271 - RNA, 23 nt, Human
uguguguguguguauauauauau

SEQ ID NO: 658272 - RNA, 18 nt, Human
uguguguguguguguaua

SEQ ID NO: 658273 - RNA, 20 nt, Human
uguguguguguguguauaua

SEQ ID NO: 658274 - RNA, 18 nt, Human
ugugugugugugugugug

SEQ ID NO: 658275 - RNA, 18 nt, Human
ugugugugugugugugug

SEQ ID NO: 658276 - RNA, 18 nt, Human
ugugugugugugugugug

SEQ ID NO: 658277 - RNA, 18 nt, Human
ugugugugugugugugug

SEQ ID NO: 658278 - RNA, 18 nt, Human
ugugugugugugugugug

SEQ ID NO: 658279 - RNA, 18 nt, Human
ugugugugugugugugug

SEQ ID NO: 658280 - RNA, 18 nt, Human
ugugugugugugugugug

SEQ ID NO: 658281 - RNA, 24 nt, Human
uguguguguguguguguguauaua

SEQ ID NO: 658282 - RNA, 21 nt, Human
ugugugugugugugugugugu

SEQ ID NO: 658283 - RNA, 21 nt, Human
ugugugugugugugugugugu

SEQ ID NO: 658284 - RNA, 21 nt, Human
ugugugugugugugugugugu

SEQ ID NO: 658285 - RNA, 21 nt, Human
ugugugugugugugugugugu

SEQ ID NO: 658286 - RNA, 21 nt, Human
ugugugugugugugugugugu

SEQ ID NO: 658287 - RNA, 21 nt, Human
ugugugugugugugugugugu

SEQ ID NO: 658288 - RNA, 21 nt, Human
ugugugugugugugugugugu

SEQ ID NO: 658289 - RNA, 21 nt, Human
ugugugugugugugugugugu

SEQ ID NO: 658290 - RNA, 22 nt, Human
ugugugugugugugugugugua

SEQ ID NO: 658291 - RNA, 22 nt, Human
ugugugugugugugugugugug

SEQ ID NO: 658292 - RNA, 22 nt, Human
ugugugugugugugugugugug

SEQ ID NO: 658293 - RNA, 22 nt, Human
ugugugugugugugugugugug

SEQ ID NO: 658294 - RNA, 19 nt, Human
uguucuccaaaucagucug

SEQ ID NO: 658295 - RNA, 20 nt, Human
uugaacaaauccccaacgua

SEQ ID NO: 658296 - RNA, 25 nt, Human
uuuggacugauuucugggccggucc

SEQ ID NO: 658297 - RNA, 25 nt, Human
uuuuuuuuuuuuuuuuuuuauuuuu

SEQ ID NO: 658298 - RNA, 19 nt, Human
acucaucuguuucucucca

SEQ ID NO: 658299 - RNA, 22 nt, Human
acuucaaaaaauguugaucaag

SEQ ID NO: 658300 - RNA, 19 nt, Human
ucagaaaguaguuucucuu

SEQ ID NO: 658301 - RNA, 22 nt, Human
ucaucuguuucucuccaauuau

SEQ ID NO: 658302 - RNA, 20 nt, Human
uuauauaacucccacuuaaa

SEQ ID NO: 658303 - RNA, 24 nt, Human
uuuuuuuuuuuuuuuuuuucacug

SEQ ID NO: 658304 - RNA, 18 nt, Human
aaaguugcuaagauggcu

SEQ ID NO: 658305 - RNA, 21 nt, Human
aaaugagacuaagacgccuga

SEQ ID NO: 658306 - RNA, 18 nt, Human
acggggacucccagcugg

SEQ ID NO: 658307 - RNA, 19 nt, Human
agacagaagggaguaggau

SEQ ID NO: 658308 - RNA, 19 nt, Human
agagaagagccagcuggaa

SEQ ID NO: 658309 - RNA, 27 nt, Human
agagggcagggagacagaagggaguag

SEQ ID NO: 658310 - RNA, 20 nt, Human
aggaagggcaaugaagaaga

SEQ ID NO: 658311 - RNA, 19 nt, Human
aggcaguguguggcaagug

SEQ ID NO: 658312 - RNA, 20 nt, Human
agucagggggugcaacuggg

SEQ ID NO: 658313 - RNA, 22 nt, Human
agugugagguugcggggaaaga

SEQ ID NO: 658314 - RNA, 22 nt, Human
aguguguggcaagugacacaga

SEQ ID NO: 658315 - RNA, 21 nt, Human
aucacugugauuaucuuaugc

SEQ ID NO: 658316 - RNA, 19 nt, Human
auggggcggggagguugag

SEQ ID NO: 658317 - RNA, 24 nt, Human
caaaugagacuaagacgccugaug

SEQ ID NO: 658318 - RNA, 19 nt, Human
cacaaaacuugaccaggca

SEQ ID NO: 658319 - RNA, 21 nt, Human
cacaaaacuugaccaggcagg

SEQ ID NO: 658320 - RNA, 20 nt, Human
cacaaacucuuaagaugcgg

SEQ ID NO: 658321 - RNA, 23 nt, Human
caccuggcagaggaugcccuucu

SEQ ID NO: 658322 - RNA, 18 nt, Human
caccuuacacauggugag

SEQ ID NO: 658323 - RNA, 22 nt, Human
cagaacugggcuggccuggggc

SEQ ID NO: 658324 - RNA, 23 nt, Human
cagagggcagggagacagaaggg

SEQ ID NO: 658325 - RNA, 19 nt, Human
cagcccgagacagcaggau

SEQ ID NO: 658326 - RNA, 20 nt, Human
cagcuccauugcagacaaac

SEQ ID NO: 658327 - RNA, 18 nt, Human
cagcuggaagaugaguca

SEQ ID NO: 658328 - RNA, 23 nt, Human
ccaccgcauccccgacuuucagc

SEQ ID NO: 658329 - RNA, 18 nt, Human
cccugcugaaaauggggc

SEQ ID NO: 658330 - RNA, 22 nt, Human
cccuucugcccccugacaggag

SEQ ID NO: 658331 - RNA, 20 nt, Human
ccugcugaaaauggggcggg

SEQ ID NO: 658332 - RNA, 21 nt, Human
cgcauccccgacuuucagccc

SEQ ID NO: 658333 - RNA, 20 nt, Human
cggggagguugaggcagugu

SEQ ID NO: 658334 - RNA, 19 nt, Human
cuaagcccaaacccugcug

SEQ ID NO: 658335 - RNA, 21 nt, Human
cuggccuggggcucagcgaca

SEQ ID NO: 658336 - RNA, 22 nt, Human
cuguccuaucgcugcucgagau

SEQ ID NO: 658337 - RNA, 24 nt, Human
gacggggcagaacugggcuggccu

SEQ ID NO: 658338 - RNA, 22 nt, Human
gagacagaagggaguaggaugg

SEQ ID NO: 658339 - RNA, 18 nt, Human
gagcacauaugggugcca

SEQ ID NO: 658340 - RNA, 21 nt, Human
gaggaagggcaaugaagaaga

SEQ ID NO: 658341 - RNA, 22 nt, Human
gaguaggaugggagagaagagc

SEQ ID NO: 658342 - RNA, 21 nt, Human
gcagaacugggcuggccuggg

SEQ ID NO: 658343 - RNA, 18 nt, Human
gcaguguguggcaaguga

SEQ ID NO: 658344 - RNA, 18 nt, Human
gcgggagugugagguugc

SEQ ID NO: 658345 - RNA, 23 nt, Human
gcgggagugugagguugcgggga

SEQ ID NO: 658346 - RNA, 24 nt, Human
gcucagcgacagcuccauugcaga

SEQ ID NO: 658347 - RNA, 18 nt, Human
ggaggccuggccacugug

SEQ ID NO: 658348 - RNA, 18 nt, Human
ggaggggcuuggaaggaa

SEQ ID NO: 658349 - RNA, 23 nt, Human
ggcaaugaagaagagacuaggaa

SEQ ID NO: 658350 - RNA, 22 nt, Human
gggaggccuggccacugugccc

SEQ ID NO: 658351 - RNA, 19 nt, Human
ggggacucccagcuggggg

SEQ ID NO: 658352 - RNA, 24 nt, Human
guguggcaagugacacagacgggg

SEQ ID NO: 658353 - RNA, 18 nt, Human
uaagcccaaacccugcug

SEQ ID NO: 658354 - RNA, 18 nt, Human
uaugaugauaagcagggc

SEQ ID NO: 658355 - RNA, 19 nt, Human
ucagcccucacgugccauc

SEQ ID NO: 658356 - RNA, 23 nt, Human
ucagccugcugggccuaugauga

SEQ ID NO: 658357 - RNA, 21 nt, Human
uccauugcagacaaacugggc

SEQ ID NO: 658358 - RNA, 19 nt, Human
ucgcugcucgagaucagcc

SEQ ID NO: 658359 - RNA, 18 nt, Human
ucuguagcuaagcccaaa

SEQ ID NO: 658360 - RNA, 19 nt, Human
ugacacagacggggacucc

SEQ ID NO: 658361 - RNA, 21 nt, Human
ugagaaaguugcuaagauggc

SEQ ID NO: 658362 - RNA, 21 nt, Human
ugagaaaguugcuaagauggc

SEQ ID NO: 658363 - RNA, 22 nt, Human
ugagaaaguugcuaagauggcu

SEQ ID NO: 658364 - RNA, 25 nt, Human
ugagucagggggugcaacuggggag

SEQ ID NO: 658365 - RNA, 24 nt, Human
ugauaagcagggcugacccucuuc

SEQ ID NO: 658366 - RNA, 24 nt, Human
ugcuggugaggaagggcaaugaag

SEQ ID NO: 658367 - RNA, 18 nt, Human
uggaagaugagucagggg

SEQ ID NO: 658368 - RNA, 21 nt, Human
uggaaggaagaggagcacuug

SEQ ID NO: 658369 - RNA, 23 nt, Human
uggcagagggcagggagacagaa

SEQ ID NO: 658370 - RNA, 18 nt, Human
ugggaaagugcagauugc

SEQ ID NO: 658371 - RNA, 18 nt, Human
ugggcuggggaaggcagc

SEQ ID NO: 658372 - RNA, 24 nt, Human
uggggagagcagcucugaauccug

SEQ ID NO: 658373 - RNA, 22 nt, Human
uggggcaacaaucccaccugcc

SEQ ID NO: 658374 - RNA, 28 nt, Human
ugggggucccuggaauuaccgguagacc

SEQ ID NO: 658375 - RNA, 19 nt, Human
uguggcaagugacacagac

SEQ ID NO: 658376 - RNA, 20 nt, Human
uugugguuguugaggauauc

SEQ ID NO: 658377 - RNA, 20 nt, Human
aaacaggcucaggcuaagca

SEQ ID NO: 658378 - RNA, 21 nt, Human
aaauagucaacgcagggaaga

SEQ ID NO: 658379 - RNA, 22 nt, Human
acaggaagcuugguagcaacaa

SEQ ID NO: 658380 - RNA, 24 nt, Human
acauaaaacaggcucaggcuaagc

SEQ ID NO: 658381 - RNA, 18 nt, Human
acaugccggagacugugc

SEQ ID NO: 658382 - RNA, 22 nt, Human
accaaguacaacugcaccaaau

SEQ ID NO: 658383 - RNA, 18 nt, Human
agaaacuuaagacuacua

SEQ ID NO: 658384 - RNA, 22 nt, Human
agcacuuugggauuacaggugu

SEQ ID NO: 658385 - RNA, 18 nt, Human
agccaccaugcccagccc

SEQ ID NO: 658386 - RNA, 21 nt, Human
aggaacacugaaggaaggaca

SEQ ID NO: 658387 - RNA, 28 nt, Human
aggaacacugaaggaaggaccgguaccc

SEQ ID NO: 658388 - RNA, 21 nt, Human
aggugagugaaaggugguccc

SEQ ID NO: 658389 - RNA, 18 nt, Human
auaaaacaggcucaggcu

SEQ ID NO: 658390 - RNA, 20 nt, Human
caaggcccguggcgagcccu

SEQ ID NO: 658391 - RNA, 22 nt, Human
cacacacacacagcagaacccc

SEQ ID NO: 658392 - RNA, 27 nt, Human
cacacacacagcagaaccccagcugag

SEQ ID NO: 658393 - RNA, 19 nt, Human
cacacagaagacuagaaca

SEQ ID NO: 658394 - RNA, 20 nt, Human
cacauggcucaggcaaggcc

SEQ ID NO: 658395 - RNA, 24 nt, Human
caccauucauggccaugaaacucc

SEQ ID NO: 658396 - RNA, 24 nt, Human
cacgccuguaaucccagcacuuug

SEQ ID NO: 658397 - RNA, 20 nt, Human
cagcagaaccccagcugaga

SEQ ID NO: 658398 - RNA, 22 nt, Human
caggaauggguuaucuauggug

SEQ ID NO: 658399 - RNA, 18 nt, Human
caugaucuugccauccaa

SEQ ID NO: 658400 - RNA, 24 nt, Human
ccaaacccaaaaacaaaugacccu

SEQ ID NO: 658401 - RNA, 24 nt, Human
ccagcacuuugggauuacaggugu

SEQ ID NO: 658402 - RNA, 19 nt, Human
ccuccagcaugaccgugag

SEQ ID NO: 658403 - RNA, 22 nt, Human
ccuguaaucccagcacuuuggg

SEQ ID NO: 658404 - RNA, 18 nt, Human
ccuucuuccuuccuucuc

SEQ ID NO: 658405 - RNA, 24 nt, Human
cuaggccgggcgcgguggcucacg

SEQ ID NO: 658406 - RNA, 27 nt, Human
cucacagugucagugauuacuauggua

SEQ ID NO: 658407 - RNA, 22 nt, Human
cucacgccuguaaucccagcac

SEQ ID NO: 658408 - RNA, 24 nt, Human
cucacgccuguaaucccagcacuu

SEQ ID NO: 658409 - RNA, 21 nt, Human
cuccaucaugucucuuguggu

SEQ ID NO: 658410 - RNA, 21 nt, Human
cugcaucccuccagcaugacc

SEQ ID NO: 658411 - RNA, 20 nt, Human
cugcuguuuuacucccucug

SEQ ID NO: 658412 - RNA, 20 nt, Human
gaaacuccaucaugucucuu

SEQ ID NO: 658413 - RNA, 22 nt, Human
gaauauaacagaccaaguacaa

SEQ ID NO: 658414 - RNA, 20 nt, Human
gaccgugaguagcacagccc

SEQ ID NO: 658415 - RNA, 20 nt, Human
gaccuaggccgggcgcggug

SEQ ID NO: 658416 - RNA, 19 nt, Human
gagccaccaugcccagccc

SEQ ID NO: 658417 - RNA, 22 nt, Human
gauuacaggugugcaugagcca

SEQ ID NO: 658418 - RNA, 20 nt, Human
gcaagaugaguaaguagcug

SEQ ID NO: 658419 - RNA, 19 nt, Human
gcaugagccaccaugccca

SEQ ID NO: 658420 - RNA, 26 nt, Human
ggcuguaaccauccacacuggcucca

SEQ ID NO: 658421 - RNA, 24 nt, Human
gggcgcgguggcucacgccuguaa

SEQ ID NO: 658422 - RNA, 23 nt, Human
gguggcucacgccuguaauccca

SEQ ID NO: 658423 - RNA, 24 nt, Human
gguggcucacgccuguaaucccag

SEQ ID NO: 658424 - RNA, 18 nt, Human
guaauggccccaguuucc

SEQ ID NO: 658425 - RNA, 19 nt, Human
guaggaaaguuucuucccu

SEQ ID NO: 658426 - RNA, 21 nt, Human
gugugcaugagccaccaugcc

SEQ ID NO: 658427 - RNA, 21 nt, Human
uaaaacaggcucaggcuaagc

SEQ ID NO: 658428 - RNA, 19 nt, Human
uaaaagagaaacuuaagac

SEQ ID NO: 658429 - RNA, 26 nt, Human
uaaaauacacacacacacagcagaac

SEQ ID NO: 658430 - RNA, 19 nt, Human
uaacugaaaagagcugaac

SEQ ID NO: 658431 - RNA, 20 nt, Human
uaagcaucuuccuccaaguu

SEQ ID NO: 658432 - RNA, 21 nt, Human
uaaggugaaccugccagaggc

SEQ ID NO: 658433 - RNA, 19 nt, Human
uacugaccauuucuacaug

SEQ ID NO: 658434 - RNA, 21 nt, Human
uagaacaaauucuagcucaug

SEQ ID NO: 658435 - RNA, 23 nt, Human
uauaaucaaagccugcugucuua

SEQ ID NO: 658436 - RNA, 23 nt, Human
uauaaucaaagccugcugucuua

SEQ ID NO: 658437 - RNA, 24 nt, Human
uauaaucaaagccugcugucuuau

SEQ ID NO: 658438 - RNA, 24 nt, Human
ucagagcucuauaaucaaagccug

SEQ ID NO: 658439 - RNA, 21 nt, Human
ucauggccaugaaacuccauc

SEQ ID NO: 658440 - RNA, 25 nt, Human
uccaaacccaaaaacaaaugaccua

SEQ ID NO: 658441 - RNA, 22 nt, Human
uccacaaacuagaaugacaggg

SEQ ID NO: 658442 - RNA, 23 nt, Human
ucccagcacuuugggauuacagg

SEQ ID NO: 658443 - RNA, 25 nt, Human
ucccagcacuuugggauuacaggug

SEQ ID NO: 658444 - RNA, 22 nt, Human
ucccugaagaacuuucugagga

SEQ ID NO: 658445 - RNA, 22 nt, Human
ucuauaaucaaagccugcuguc

SEQ ID NO: 658446 - RNA, 23 nt, Human
ucucuuguggucaggcuugagac

SEQ ID NO: 658447 - RNA, 21 nt, Human
ugaaaagagcugaacagaaac

SEQ ID NO: 658448 - RNA, 19 nt, Human
ugaaagguggucccagaac

SEQ ID NO: 658449 - RNA, 19 nt, Human
ugaacagaaaccauacaua

SEQ ID NO: 658450 - RNA, 18 nt, Human
ugaccuaggccgggcgcg

SEQ ID NO: 658451 - RNA, 21 nt, Human
ugaguaaguagcuguggauuc

SEQ ID NO: 658452 - RNA, 20 nt, Human
ugcuguuuuacucccucugg

SEQ ID NO: 658453 - RNA, 22 nt, Human
uggcucacgccuguaaucccag

SEQ ID NO: 658454 - RNA, 24 nt, Human
uggcucacgccuguaaucccagca

SEQ ID NO: 658455 - RNA, 20 nt, Human
ugggauuacaggugugcaug

SEQ ID NO: 658456 - RNA, 25 nt, Human
ugggauuacaggugugcaugagcca

SEQ ID NO: 658457 - RNA, 26 nt, Human
ugggauuacaggugugcaugagccac

SEQ ID NO: 658458 - RNA, 28 nt, Human
ugggauuacaggugugcaugagccacca

SEQ ID NO: 658459 - RNA, 23 nt, Human
ugggauuacaggugugcaugguc

SEQ ID NO: 658460 - RNA, 21 nt, Human
ugguggugggcuggaggauca

SEQ ID NO: 658461 - RNA, 19 nt, Human
uguaaaauacacacacaca

SEQ ID NO: 658462 - RNA, 20 nt, Human
uguuuuacucccucuggaca

SEQ ID NO: 658463 - RNA, 21 nt, Human
uuaaauguugacuuuccaaca

SEQ ID NO: 658464 - RNA, 22 nt, Human
uuacuccucacccaggaacacu

SEQ ID NO: 658465 - RNA, 21 nt, Human
uucacgaauuacacaaaaaac

SEQ ID NO: 658466 - RNA, 22 nt, Human
uucuaauaaccaggucccugaa

SEQ ID NO: 658467 - RNA, 22 nt, Human
uugcuuccucaagggcucuuug

SEQ ID NO: 658468 - RNA, 18 nt, Human
uuucaggaauggguuauc

SEQ ID NO: 658469 - RNA, 23 nt, Human
uuuuucauguuuucaaaaauauu

SEQ ID NO: 658470 - RNA, 23 nt, Human
uuuuuuuuuuuuuuucauguuuu

SEQ ID NO: 658471 - RNA, 19 nt, Human
cucucuggacuggcugcag

SEQ ID NO: 658472 - RNA, 24 nt, Human
ucucucuggacuggcugcagccug

SEQ ID NO: 658473 - RNA, 18 nt, Human
ucuggacuggcugcagcc

SEQ ID NO: 658474 - RNA, 21 nt, Human
aaaaaagaaauagcugaccca

SEQ ID NO: 658475 - RNA, 24 nt, Human
aaaaaugaaacauugugaaaaaaa

SEQ ID NO: 658476 - RNA, 20 nt, Human
aaacaaaggucucugcaagc

SEQ ID NO: 658477 - RNA, 25 nt, Human
aaacacuuggcuggugaaaaaaaug

SEQ ID NO: 658478 - RNA, 19 nt, Human
aagaaggagcuaagagccc

SEQ ID NO: 658479 - RNA, 22 nt, Human
aauuuuucaauuucauaugaaa

SEQ ID NO: 658480 - RNA, 19 nt, Human
agagaagaaggagcuaaga

SEQ ID NO: 658481 - RNA, 24 nt, Human
agcaaaacacuuggcuggugaaaa

SEQ ID NO: 658482 - RNA, 22 nt, Human
auacaauaguagcuaaggguga

SEQ ID NO: 658483 - RNA, 22 nt, Human
auguguaaaaaugaaacauugu

SEQ ID NO: 658484 - RNA, 19 nt, Human
caugaagagucugacggcg

SEQ ID NO: 658485 - RNA, 22 nt, Human
cuugcuugcucaaaaugagccg

SEQ ID NO: 658486 - RNA, 21 nt, Human
ggaaauagcaaaacacuuggc

SEQ ID NO: 658487 - RNA, 18 nt, Human
ggaugaggggugguccgg

SEQ ID NO: 658488 - RNA, 21 nt, Human
uaaaaaagaaauagcugaccc

SEQ ID NO: 658489 - RNA, 25 nt, Human
uacaauaguagcuaagggugauauu

SEQ ID NO: 658490 - RNA, 21 nt, Human
ucucugcaagcaauacugauu

SEQ ID NO: 658491 - RNA, 21 nt, Human
ugaaaaaaaugaaaaucuaaa

SEQ ID NO: 658492 - RNA, 24 nt, Human
ugaaaaagucuuuuuaacugugaa

SEQ ID NO: 658493 - RNA, 22 nt, Human
ugaguagagaagaaggagcuaa

SEQ ID NO: 658494 - RNA, 19 nt, Human
uggaauguaccuacauuug

SEQ ID NO: 658495 - RNA, 20 nt, Human
uuuuuuuuuuaaaaaaaggu

SEQ ID NO: 658496 - RNA, 23 nt, Human
uuuuuuuuuuuuaaaaaaagguu

SEQ ID NO: 658497 - RNA, 27 nt, Human
uuuuuuuuuuuuuuuggccaggaauua

SEQ ID NO: 658498 - RNA, 18 nt, Human
uuuuuuuuuuuuuuuuug

SEQ ID NO: 658499 - RNA, 24 nt, Human
uuuuuuuuuuuuuuuuuggccagg

SEQ ID NO: 658500 - RNA, 22 nt, Human
uuuuuuuuuuuuuuuuuuuggc

SEQ ID NO: 658501 - RNA, 23 nt, Human
aaaaaaaacaauaaaacacgaaa

SEQ ID NO: 658502 - RNA, 28 nt, Human
aaaaaaacaauaaaacacgaaacucagg

SEQ ID NO: 658503 - RNA, 23 nt, Human
aaaacuccaccaucagaguagaa

SEQ ID NO: 658504 - RNA, 23 nt, Human
aaacacgaaacucaggcaaaaaa

SEQ ID NO: 658505 - RNA, 21 nt, Human
aaacaggauccuuuuucugca

SEQ ID NO: 658506 - RNA, 21 nt, Human
aaagaaaaaaaaaaaaaaucu

SEQ ID NO: 658507 - RNA, 27 nt, Human
aacacgaaacucaggcaaaaaacucca

SEQ ID NO: 658508 - RNA, 20 nt, Human
aacguacauguggaugugga

SEQ ID NO: 658509 - RNA, 24 nt, Human
aagccauaaaaaaaacaauaaaac

SEQ ID NO: 658510 - RNA, 21 nt, Human
aaggaacagcaauuuagaaag

SEQ ID NO: 658511 - RNA, 18 nt, Human
aauugcuugaaccuggga

SEQ ID NO: 658512 - RNA, 24 nt, Human
aauugcuugaaccugggaggcaga

SEQ ID NO: 658513 - RNA, 22 nt, Human
aauuuccucccaagcgcaucuc

SEQ ID NO: 658514 - RNA, 23 nt, Human
acaacgaaccacauggcuaagcc

SEQ ID NO: 658515 - RNA, 23 nt, Human
acagagcaagaccgcaucucaaa

SEQ ID NO: 658516 - RNA, 20 nt, Human
acaucacugcacuccagccu

SEQ ID NO: 658517 - RNA, 24 nt, Human
acaucacugcacuccagccucagc

SEQ ID NO: 658518 - RNA, 24 nt, Human
accugggaggcagaggcugcagug

SEQ ID NO: 658519 - RNA, 27 nt, Human
acgaaacucaggcaaaaaacuccacca

SEQ ID NO: 658520 - RNA, 18 nt, Human
acugcacuccagccucag

SEQ ID NO: 658521 - RNA, 24 nt, Human
acugcacuccagccucagcaacag

SEQ ID NO: 658522 - RNA, 21 nt, Human
agaaagaaacacacuuuaaaa

SEQ ID NO: 658523 - RNA, 23 nt, Human
agaaagaaacacacuuuaaaaaa

SEQ ID NO: 658524 - RNA, 24 nt, Human
agagcaagaccgcaucucaaagaa

SEQ ID NO: 658525 - RNA, 20 nt, Human
agaggcugcagugagccaag

SEQ ID NO: 658526 - RNA, 23 nt, Human
agcacuuuggaggcugagguggg

SEQ ID NO: 658527 - RNA, 24 nt, Human
aggcagaggcugcagugagccaag

SEQ ID NO: 658528 - RNA, 25 nt, Human
aggcagaggcugcagugagccaaga

SEQ ID NO: 658529 - RNA, 24 nt, Human
aggcugaggugggagaauugcuug

SEQ ID NO: 658530 - RNA, 24 nt, Human
aggugggagaauugcuugaaccug

SEQ ID NO: 658531 - RNA, 24 nt, Human
aguggcucacgccuguaaucccag

SEQ ID NO: 658532 - RNA, 20 nt, Human
aucacaucacugcacuccag

SEQ ID NO: 658533 - RNA, 24 nt, Human
caacaaaaagugguuauuuuuacu

SEQ ID NO: 658534 - RNA, 23 nt, Human
caauaaaacacgaaacucaggca

SEQ ID NO: 658535 - RNA, 24 nt, Human
caauagauucccaagcagacgccc

SEQ ID NO: 658536 - RNA, 21 nt, Human
cacaucacugcacuccagccu

SEQ ID NO: 658537 - RNA, 18 nt, Human
cacgaaacucaggcaaaa

SEQ ID NO: 658538 - RNA, 24 nt, Human
cacgccuguaaucccagcacuuug

SEQ ID NO: 658539 - RNA, 23 nt, Human
cacuccagccucagcaacagagc

SEQ ID NO: 658540 - RNA, 19 nt, Human
cacugcacuccagccucag

SEQ ID NO: 658541 - RNA, 19 nt, Human
cacugcacuccagccucag

SEQ ID NO: 658542 - RNA, 20 nt, Human
cacugcacuccagccucagc

SEQ ID NO: 658543 - RNA, 21 nt, Human
cacugcacuccagccucagca

SEQ ID NO: 658544 - RNA, 22 nt, Human
cacugcacuccagccucagcaa

SEQ ID NO: 658545 - RNA, 24 nt, Human
cacugcacuccagccucagcaaca

SEQ ID NO: 658546 - RNA, 23 nt, Human
cagcaauuuagaaagaaacacac

SEQ ID NO: 658547 - RNA, 23 nt, Human
cagcacuuuggaggcugaggugg

SEQ ID NO: 658548 - RNA, 24 nt, Human
cagcucaggucuccauccagguac

SEQ ID NO: 658549 - RNA, 23 nt, Human
caucuccuucuccagcucagguc

SEQ ID NO: 658550 - RNA, 21 nt, Human
cauggcuaagccauaaaaaaa

SEQ ID NO: 658551 - RNA, 22 nt, Human
cauggcuaagccauaaaaaaaa

SEQ ID NO: 658552 - RNA, 24 nt, Human
ccagguaccuggucaguccauacu

SEQ ID NO: 658553 - RNA, 24 nt, Human
ccgcaucucaaagaaaaaaaaaaa

SEQ ID NO: 658554 - RNA, 22 nt, Human
ccucccaagcgcaucuccuucu

SEQ ID NO: 658555 - RNA, 21 nt, Human
ccucugcaauuuccucccaag

SEQ ID NO: 658556 - RNA, 22 nt, Human
ccucugcaauuuccucccaagc

SEQ ID NO: 658557 - RNA, 21 nt, Human
ccucugcggcuccugccaccc

SEQ ID NO: 658558 - RNA, 20 nt, Human
ccuucaucagcugguauuuu

SEQ ID NO: 658559 - RNA, 27 nt, Human
cgcaucucaaagaaaaaaaaaaaaaau

SEQ ID NO: 658560 - RNA, 21 nt, Human
cggccucugcaauuuccuccc

SEQ ID NO: 658561 - RNA, 23 nt, Human
cuaagccauaaaaaaaacaauaa

SEQ ID NO: 658562 - RNA, 21 nt, Human
cuacauacaaacguacaugug

SEQ ID NO: 658563 - RNA, 23 nt, Human
cucaaagaaaaaaaaaaaaaauc

SEQ ID NO: 658564 - RNA, 22 nt, Human
cucacgccuguaaucccagcac

SEQ ID NO: 658565 - RNA, 24 nt, Human
cucacgccuguaaucccagcacuu

SEQ ID NO: 658566 - RNA, 18 nt, Human
cugggaggcagaggcugc

SEQ ID NO: 658567 - RNA, 20 nt, Human
gaauguggccgggcgcagug

SEQ ID NO: 658568 - RNA, 18 nt, Human
gaggcugcagugagccaa

SEQ ID NO: 658569 - RNA, 23 nt, Human
gaggugggagaauugcuugaacc

SEQ ID NO: 658570 - RNA, 24 nt, Human
gcacuccagccucagcaacagagc

SEQ ID NO: 658571 - RNA, 20 nt, Human
gcgcaguggcucacgccugu

SEQ ID NO: 658572 - RNA, 20 nt, Human
ggaggcagaggcugcaguga

SEQ ID NO: 658573 - RNA, 22 nt, Human
ggcaaaaaacuccaccaucaga

SEQ ID NO: 658574 - RNA, 22 nt, Human
ggccgggcgcaguggcucacgg

SEQ ID NO: 658575 - RNA, 23 nt, Human
ggcgcaguggcucacgccuguaa

SEQ ID NO: 658576 - RNA, 21 nt, Human
gguuauuucuuugauaagaac

SEQ ID NO: 658577 - RNA, 19 nt, Human
uaaaacacgaaacucaggc

SEQ ID NO: 658578 - RNA, 26 nt, Human
uaagccauaaaaaaaacaauaaaaca

SEQ ID NO: 658579 - RNA, 19 nt, Human
uacucuaguuggcgcccag

SEQ ID NO: 658580 - RNA, 24 nt, Human
uagaaagaaacacacuuuaaaaaa

SEQ ID NO: 658581 - RNA, 26 nt, Human
uagauucccaagcagacgcccaguuu

SEQ ID NO: 658582 - RNA, 24 nt, Human
uauucuacuccuuuaaaaauuuca

SEQ ID NO: 658583 - RNA, 20 nt, Human
ucacugcacuccagccucag

SEQ ID NO: 658584 - RNA, 21 nt, Human
ucacugcacuccagccucagc

SEQ ID NO: 658585 - RNA, 22 nt, Human
ucagaugccuucaucagcuggu

SEQ ID NO: 658586 - RNA, 18 nt, Human
ucaggucuccauccaggu

SEQ ID NO: 658587 - RNA, 19 nt, Human
uccaccaucagaguagaau

SEQ ID NO: 658588 - RNA, 22 nt, Human
uccaccaucagaguagaaugcu

SEQ ID NO: 658589 - RNA, 26 nt, Human
uccauacucuaguuggcgcccaggga

SEQ ID NO: 658590 - RNA, 21 nt, Human
ucccaagcagacgcccaguuu

SEQ ID NO: 658591 - RNA, 19 nt, Human
uccugccaccccgggccag

SEQ ID NO: 658592 - RNA, 22 nt, Human
ucuccagcucaggucuccaucc

SEQ ID NO: 658593 - RNA, 24 nt, Human
ugaaccugggaggcagaggcugca

SEQ ID NO: 658594 - RNA, 21 nt, Human
ugacggccucugcaauuuccu

SEQ ID NO: 658595 - RNA, 23 nt, Human
ugaggugggagaauugcuugaac

SEQ ID NO: 658596 - RNA, 24 nt, Human
ugauaagaacugaauguggccggg

SEQ ID NO: 658597 - RNA, 20 nt, Human
ugcacuccagccucagcaac

SEQ ID NO: 658598 - RNA, 18 nt, Human
ugcaguccauucucagga

SEQ ID NO: 658599 - RNA, 19 nt, Human
uggauguggacaacgaacc

SEQ ID NO: 658600 - RNA, 24 nt, Human
uggcgcccagggacuggucgggaa

SEQ ID NO: 658601 - RNA, 24 nt, Human
uggcucacgccuguaaucccagca

SEQ ID NO: 658602 - RNA, 23 nt, Human
uucucaggauuacacagcaaaca

SEQ ID NO: 658603 - RNA, 22 nt, Human
uugacggccucugcaauuuccu

SEQ ID NO: 658604 - RNA, 24 nt, Human
uugacggccucugcaauuuccucc

SEQ ID NO: 658605 - RNA, 24 nt, Human
uugcuugaaccugggaggcagagg

SEQ ID NO: 658606 - RNA, 22 nt, Human
uuggaggcugaggugggagaau

SEQ ID NO: 658607 - RNA, 18 nt, Human
uuguauuuuuuacaucau

SEQ ID NO: 658608 - RNA, 25 nt, Human
uuuagaaagaaacacacuuuaaaaa

SEQ ID NO: 658609 - RNA, 18 nt, Human
uuuuuuuuuuuuuuuuug

SEQ ID NO: 658610 - RNA, 24 nt, Human
uuuuuuuuuuuuuuuuugguguug

SEQ ID NO: 658611 - RNA, 20 nt, Human
uuuuuuuuuuuuuuuuuugg

SEQ ID NO: 658612 - RNA, 24 nt, Human
aaaaaaaacagaaagcagcuuaga

SEQ ID NO: 658613 - RNA, 24 nt, Human
aaagugcugggaucacaggcauga

SEQ ID NO: 658614 - RNA, 22 nt, Human
aaagugcuuugaaagaccccag

SEQ ID NO: 658615 - RNA, 19 nt, Human
aagacgggguugcaccaug

SEQ ID NO: 658616 - RNA, 26 nt, Human
aagugcugggaucacaggcaugagcc

SEQ ID NO: 658617 - RNA, 23 nt, Human
aauuuuguauuuuuacuaagacg

SEQ ID NO: 658618 - RNA, 21 nt, Human
accauguggccaggcuggucu

SEQ ID NO: 658619 - RNA, 21 nt, Human
accccagcucccaguggccua

SEQ ID NO: 658620 - RNA, 21 nt, Human
acccgggcuggaguggguggc

SEQ ID NO: 658621 - RNA, 21 nt, Human
acgcagaaccuggcggggggc

SEQ ID NO: 658622 - RNA, 18 nt, Human
acgccacgaggcuggaac

SEQ ID NO: 658623 - RNA, 19 nt, Human
acgggguugcaccaugugg

SEQ ID NO: 658624 - RNA, 23 nt, Human
acgggguugcaccauguggccag

SEQ ID NO: 658625 - RNA, 26 nt, Human
acuacaggugcccgcucucacgccag

SEQ ID NO: 658626 - RNA, 27 nt, Human
agaaaacaaaacccaugaugcuccuuc

SEQ ID NO: 658627 - RNA, 20 nt, Human
agaaagcagcuuagagcaau

SEQ ID NO: 658628 - RNA, 21 nt, Human
agccagagucucgcucuguca

SEQ ID NO: 658629 - RNA, 20 nt, Human
agcgcuggagccagggugcc

SEQ ID NO: 658630 - RNA, 19 nt, Human
aggaagggcucccagccuc

SEQ ID NO: 658631 - RNA, 22 nt, Human
agggugcccagcaggagguggc

SEQ ID NO: 658632 - RNA, 18 nt, Human
aggugauccacccgccuc

SEQ ID NO: 658633 - RNA, 23 nt, Human
aggugcagagccggccagcgacc

SEQ ID NO: 658634 - RNA, 18 nt, Human
aguagcugggacuacagg

SEQ ID NO: 658635 - RNA, 19 nt, Human
aguggguggcgcgaucucg

SEQ ID NO: 658636 - RNA, 23 nt, Human
aguggguggcgcgaucucggcuc

SEQ ID NO: 658637 - RNA, 23 nt, Human
auauuaaaaaaaaacagaaagca

SEQ ID NO: 658638 - RNA, 25 nt, Human
auccccucugcugcguuuuuuguua

SEQ ID NO: 658639 - RNA, 19 nt, Human
augcuccuucacuugcucu

SEQ ID NO: 658640 - RNA, 24 nt, Human
caaagugcugggaucacaggcaug

SEQ ID NO: 658641 - RNA, 20 nt, Human
caacgugugacaggaaaggc

SEQ ID NO: 658642 - RNA, 20 nt, Human
caagcgauucuccugccuca

SEQ ID NO: 658643 - RNA, 22 nt, Human
caagcgauucuccugccucagc

SEQ ID NO: 658644 - RNA, 19 nt, Human
caagcgcaggcggggcucc

SEQ ID NO: 658645 - RNA, 25 nt, Human
cacagaaacagggccacggaccaca

SEQ ID NO: 658646 - RNA, 24 nt, Human
cacaggcaugagccaccgcaccca

SEQ ID NO: 658647 - RNA, 19 nt, Human
caccagaagcgagugacga

SEQ ID NO: 658648 - RNA, 23 nt, Human
caccagaagcgagugacgacaug

SEQ ID NO: 658649 - RNA, 18 nt, Human
caccaggccccucaggga

SEQ ID NO: 658650 - RNA, 20 nt, Human
caccauguggccaggcuggu

SEQ ID NO: 658651 - RNA, 22 nt, Human
caccauguggccaggcuggucu

SEQ ID NO: 658652 - RNA, 25 nt, Human
caccgcacccagccagaagacagcc

SEQ ID NO: 658653 - RNA, 28 nt, Human
cacggaccacagaaaugcaggacggagc

SEQ ID NO: 658654 - RNA, 18 nt, Human
cacugcaaccucugccuc

SEQ ID NO: 658655 - RNA, 21 nt, Human
cacugcaaccucugccuccca

SEQ ID NO: 658656 - RNA, 22 nt, Human
cagcaggagguggcuguccccg

SEQ ID NO: 658657 - RNA, 21 nt, Human
caggaaaacuagcuccuucca

SEQ ID NO: 658658 - RNA, 21 nt, Human
caggaagggcucccagccucg

SEQ ID NO: 658659 - RNA, 21 nt, Human
caucucaauccauaaucacuc

SEQ ID NO: 658660 - RNA, 23 nt, Human
cauguggccaggcuggucuugaa

SEQ ID NO: 658661 - RNA, 24 nt, Human
ccaaagugcugggaucacaggcau

SEQ ID NO: 658662 - RNA, 22 nt, Human
ccagggugcccagcaggaggug

SEQ ID NO: 658663 - RNA, 26 nt, Human
cccagccucgguccucacgucggugg

SEQ ID NO: 658664 - RNA, 20 nt, Human
cccagguucaagcgauucuc

SEQ ID NO: 658665 - RNA, 23 nt, Human
cccagguucaagcgauucuccug

SEQ ID NO: 658666 - RNA, 20 nt, Human
ccccucagggacaggcaggc

SEQ ID NO: 658667 - RNA, 23 nt, Human
cccgaguagcugggacuacaggu

SEQ ID NO: 658668 - RNA, 24 nt, Human
cccgaguagcugggacuacaggug

SEQ ID NO: 658669 - RNA, 23 nt, Human
ccgccgaguaacgagacccgcac

SEQ ID NO: 658670 - RNA, 20 nt, Human
ccgcggccgccccgcgccgc

SEQ ID NO: 658671 - RNA, 24 nt, Human
ccucccagguucaagcgauucucc

SEQ ID NO: 658672 - RNA, 23 nt, Human
ccucuaacuaaauuccucgguuu

SEQ ID NO: 658673 - RNA, 22 nt, Human
ccugaccuuaggugauccaccc

SEQ ID NO: 658674 - RNA, 23 nt, Human
ccugccucagccucccgaguagc

SEQ ID NO: 658675 - RNA, 24 nt, Human
ccugccucagccucccgaguagcu

SEQ ID NO: 658676 - RNA, 22 nt, Human
ccugggaccugcugcucccagg

SEQ ID NO: 658677 - RNA, 21 nt, Human
cgccaaugcugacucacgguc

SEQ ID NO: 658678 - RNA, 21 nt, Human
cgccgaguaacgagacccgca

SEQ ID NO: 658679 - RNA, 21 nt, Human
cgccgcguggaucccggaggc

SEQ ID NO: 658680 - RNA, 27 nt, Human
cgucuugcucuuccagguccuucucua

SEQ ID NO: 658681 - RNA, 22 nt, Human
cuaacgcagaaccuggcggggg

SEQ ID NO: 658682 - RNA, 18 nt, Human
cucacgguccgcggccgc

SEQ ID NO: 658683 - RNA, 24 nt, Human
cucacugcaaccucugccucccag

SEQ ID NO: 658684 - RNA, 24 nt, Human
cucacugcaaccucugccucccag

SEQ ID NO: 658685 - RNA, 24 nt, Human
cucagccucccgaguagcugggac

SEQ ID NO: 658686 - RNA, 22 nt, Human
cucaugauaacguguaacaggg

SEQ ID NO: 658687 - RNA, 24 nt, Human
cucgcucugucacccgggcuggag

SEQ ID NO: 658688 - RNA, 20 nt, Human
cucugucacccgggcuggag

SEQ ID NO: 658689 - RNA, 22 nt, Human
cugaccgccgaguaacgagacc

SEQ ID NO: 658690 - RNA, 24 nt, Human
cugacucacgguccgcggccgccc

SEQ ID NO: 658691 - RNA, 23 nt, Human
cugcaaccucugccucccagguu

SEQ ID NO: 658692 - RNA, 24 nt, Human
cugcaaccucugccucccagguuc

SEQ ID NO: 658693 - RNA, 18 nt, Human
cugcucccaggucguggc

SEQ ID NO: 658694 - RNA, 18 nt, Human
cugcugcucccaggucgu

SEQ ID NO: 658695 - RNA, 18 nt, Human
cuggaacaucagccccag

SEQ ID NO: 658696 - RNA, 24 nt, Human
cuggaguggguggcgcgaucucgg

SEQ ID NO: 658697 - RNA, 21 nt, Human
cuuccagguccuucucuaggg

SEQ ID NO: 658698 - RNA, 20 nt, Human
gaagggcucccagccucggu

SEQ ID NO: 658699 - RNA, 24 nt, Human
gaccuuaggugauccacccgccuc

SEQ ID NO: 658700 - RNA, 18 nt, Human
gaucacaggcaugagcca

SEQ ID NO: 658701 - RNA, 21 nt, Human
gauucuccugccucagccucc

SEQ ID NO: 658702 - RNA, 21 nt, Human
gcaccaggccccucagggaca

SEQ ID NO: 658703 - RNA, 22 nt, Human
gcauauuaaaaaaaaacagaaa

SEQ ID NO: 658704 - RNA, 24 nt, Human
gcgauucuccugccucagccuccc

SEQ ID NO: 658705 - RNA, 20 nt, Human
gcgccgcguggaucccggag

SEQ ID NO: 658706 - RNA, 19 nt, Human
gcuggagccagggugccca

SEQ ID NO: 658707 - RNA, 22 nt, Human
ggaucacaggcaugagccaccg

SEQ ID NO: 658708 - RNA, 23 nt, Human
ggcuggucuugaacuccugaccu

SEQ ID NO: 658709 - RNA, 20 nt, Human
gggcagggagccggggaugg

SEQ ID NO: 658710 - RNA, 20 nt, Human
ggggggcgcaccuaagggag

SEQ ID NO: 658711 - RNA, 21 nt, Human
gggugcccagcaggagguggc

SEQ ID NO: 658712 - RNA, 21 nt, Human
ggguugcaccauguggccagg

SEQ ID NO: 658713 - RNA, 19 nt, Human
ggucuugaacuccugaccu

SEQ ID NO: 658714 - RNA, 19 nt, Human
gucgguggcaccagaagcg

SEQ ID NO: 658715 - RNA, 18 nt, Human
gugauccacccgccuccc

SEQ ID NO: 658716 - RNA, 19 nt, Human
gugcccagcaggagguggc

SEQ ID NO: 658717 - RNA, 23 nt, Human
uaacaggaagggcucccagccuc

SEQ ID NO: 658718 - RNA, 20 nt, Human
uaaccucuaacuaaauuccu

SEQ ID NO: 658719 - RNA, 22 nt, Human
uaaccucuaacuaaauuccuuc

SEQ ID NO: 658720 - RNA, 18 nt, Human
uacaaagugcuuugaaag

SEQ ID NO: 658721 - RNA, 19 nt, Human
uacaaagugcuuugaaaga

SEQ ID NO: 658722 - RNA, 19 nt, Human
uagauaggugacaacgugu

SEQ ID NO: 658723 - RNA, 21 nt, Human
uaggugauccacccgccuccc

SEQ ID NO: 658724 - RNA, 27 nt, Human
uaggugauccacccgccuccccugaag

SEQ ID NO: 658725 - RNA, 20 nt, Human
ucacccgggcuggagugggu

SEQ ID NO: 658726 - RNA, 19 nt, Human
ucacugcaaccucugccuc

SEQ ID NO: 658727 - RNA, 24 nt, Human
ucacugcaaccucugccucccagg

SEQ ID NO: 658728 - RNA, 25 nt, Human
ucacugcaaccucugccucccaggu

SEQ ID NO: 658729 - RNA, 23 nt, Human
ucagccucccgaguagcugggac

SEQ ID NO: 658730 - RNA, 21 nt, Human
ucaggccaagcgcaggcgggg

SEQ ID NO: 658731 - RNA, 27 nt, Human
ucaggccaagcgcaggcggggcuccca

SEQ ID NO: 658732 - RNA, 27 nt, Human
ucagggacaggcaggcggguucugugg

SEQ ID NO: 658733 - RNA, 24 nt, Human
ucccaaagugcugggaucacaggc

SEQ ID NO: 658734 - RNA, 19 nt, Human
ucccacgccacgaggcugg

SEQ ID NO: 658735 - RNA, 20 nt, Human
ucccagccucgguccucacg

SEQ ID NO: 658736 - RNA, 21 nt, Human
ucccagguucaagcgauucuc

SEQ ID NO: 658737 - RNA, 24 nt, Human
ucccagguucaagcgauucuccug

SEQ ID NO: 658738 - RNA, 23 nt, Human
ucccgaguagcugggacuacagg

SEQ ID NO: 658739 - RNA, 24 nt, Human
ucccgaguagcugggacuacaggu

SEQ ID NO: 658740 - RNA, 26 nt, Human
uccguggucaggaggagcgcuggagc

SEQ ID NO: 658741 - RNA, 25 nt, Human
uccugcucccacgccacgaggcugg

SEQ ID NO: 658742 - RNA, 24 nt, Human
ucgcucugucacccgggcuggagu

SEQ ID NO: 658743 - RNA, 24 nt, Human
ucuccugccucagccucccgagua

SEQ ID NO: 658744 - RNA, 19 nt, Human
ucucgcucugucacccggg

SEQ ID NO: 658745 - RNA, 23 nt, Human
ucucgcucugucacccgggcugg

SEQ ID NO: 658746 - RNA, 24 nt, Human
ucucgcucugucacccgggcugga

SEQ ID NO: 658747 - RNA, 22 nt, Human
ucugucacccgggcuggagugg

SEQ ID NO: 658748 - RNA, 21 nt, Human
ucuuccagguccuucucuagg

SEQ ID NO: 658749 - RNA, 23 nt, Human
ucuugaacuccugaccuuaggug

SEQ ID NO: 658750 - RNA, 24 nt, Human
ugaccuuaggugauccacccgccu

SEQ ID NO: 658751 - RNA, 18 nt, Human
ugcaccauguggccaggc

SEQ ID NO: 658752 - RNA, 22 nt, Human
ugcagagccggccagcgaccug

SEQ ID NO: 658753 - RNA, 24 nt, Human
ugccucagccucccgaguagcugg

SEQ ID NO: 658754 - RNA, 19 nt, Human
ugcugggaucacaggcaug

SEQ ID NO: 658755 - RNA, 23 nt, Human
uggaguggguggcgcgaucucgg

SEQ ID NO: 658756 - RNA, 24 nt, Human
uggccaggcuggucuugaacuccu

SEQ ID NO: 658757 - RNA, 18 nt, Human
uggcggcgcacggcugcc

SEQ ID NO: 658758 - RNA, 19 nt, Human
ugggaccugcugcucccag

SEQ ID NO: 658759 - RNA, 18 nt, Human
ugggacuacaggugcccg

SEQ ID NO: 658760 - RNA, 19 nt, Human
ugggacuacaggugcccgc

SEQ ID NO: 658761 - RNA, 20 nt, Human
ugggaggggcugggacagcg

SEQ ID NO: 658762 - RNA, 21 nt, Human
ugggaucacaggcaugagcca

SEQ ID NO: 658763 - RNA, 22 nt, Human
ugggaucacaggcaugagccac

SEQ ID NO: 658764 - RNA, 23 nt, Human
ugggaucacaggcaugagccacc

SEQ ID NO: 658765 - RNA, 24 nt, Human
ugggaucacaggcaugagccaccg

SEQ ID NO: 658766 - RNA, 24 nt, Human
ugggaucacaggcaugagccaccg

SEQ ID NO: 658767 - RNA, 26 nt, Human
ugggaucacaggcaugagccaccgca

SEQ ID NO: 658768 - RNA, 23 nt, Human
uguaaaaauccuaggucuuacua

SEQ ID NO: 658769 - RNA, 18 nt, Human
ugucaggccaagcgcagg

SEQ ID NO: 658770 - RNA, 20 nt, Human
uuaagaacaucucaauccag

SEQ ID NO: 658771 - RNA, 22 nt, Human
uuaggugauccacccgccuccc

SEQ ID NO: 658772 - RNA, 21 nt, Human
uucaagcgauucuccugccuc

SEQ ID NO: 658773 - RNA, 23 nt, Human
uucaagcgauucuccugccucag

SEQ ID NO: 658774 - RNA, 24 nt, Human
uucaagcgauucuccugccucagc

SEQ ID NO: 658775 - RNA, 20 nt, Human
uucagaauaugaaaucuaau

SEQ ID NO: 658776 - RNA, 19 nt, Human
uugcaccauguggccaggc

SEQ ID NO: 658777 - RNA, 20 nt, Human
uuugaaagaccccagcuccc

SEQ ID NO: 658778 - RNA, 19 nt, Human
uuuuuuuuuugagccagag

SEQ ID NO: 658779 - RNA, 25 nt, Human
uuuuuuuuuuuugagccagagucuc

SEQ ID NO: 658780 - RNA, 18 nt, Human
uuuuuuuuuuuuuuuuug

SEQ ID NO: 658781 - RNA, 22 nt, Human
aaacacacugggccucagacac

SEQ ID NO: 658782 - RNA, 19 nt, Human
aaccccgcgaccacccuga

SEQ ID NO: 658783 - RNA, 22 nt, Human
aaccccgcgaccacccugagag

SEQ ID NO: 658784 - RNA, 24 nt, Human
aaccgaaacucugaacaccccucg

SEQ ID NO: 658785 - RNA, 22 nt, Human
aacucuuugccuccuuagggag

SEQ ID NO: 658786 - RNA, 19 nt, Human
aagcagagagcccacaauc

SEQ ID NO: 658787 - RNA, 20 nt, Human
aagcucacccaccaauccug

SEQ ID NO: 658788 - RNA, 25 nt, Human
aaggaauaaaggcauuauuuuugag

SEQ ID NO: 658789 - RNA, 20 nt, Human
acagaaaagagaaccgaaac

SEQ ID NO: 658790 - RNA, 20 nt, Human
acagaauuucucuaagucua

SEQ ID NO: 658791 - RNA, 23 nt, Human
accccgcgaccacccugagagcc

SEQ ID NO: 658792 - RNA, 23 nt, Human
acccugagagccagcacugcagc

SEQ ID NO: 658793 - RNA, 25 nt, Human
accuuugacagcugcugaauuccaa

SEQ ID NO: 658794 - RNA, 26 nt, Human
agauccucaaagguucccugccccuu

SEQ ID NO: 658795 - RNA, 24 nt, Human
agcacugcagccaugccgcccgcc

SEQ ID NO: 658796 - RNA, 22 nt, Human
agccagcacugcagccaugccg

SEQ ID NO: 658797 - RNA, 24 nt, Human
aggcugggcuucugcccagcugcc

SEQ ID NO: 658798 - RNA, 22 nt, Human
aguaauacgaucacagaaaaga

SEQ ID NO: 658799 - RNA, 22 nt, Human
agugcuccaagagcauggccac

SEQ ID NO: 658800 - RNA, 19 nt, Human
caaccccgcgaccacccug

SEQ ID NO: 658801 - RNA, 24 nt, Human
caaccucuacccuguggauguccu

SEQ ID NO: 658802 - RNA, 21 nt, Human
cacacccaaccucuacccugu

SEQ ID NO: 658803 - RNA, 23 nt, Human
caccugccccucucuggccgcgc

SEQ ID NO: 658804 - RNA, 19 nt, Human
cacugggccuagggugcug

SEQ ID NO: 658805 - RNA, 18 nt, Human
caggacuccaaacgagca

SEQ ID NO: 658806 - RNA, 19 nt, Human
ccaaagggaguacugugga

SEQ ID NO: 658807 - RNA, 24 nt, Human
ccaaccccgcgaccacccugagag

SEQ ID NO: 658808 - RNA, 26 nt, Human
ccaaccucuacccuguggauguccua

SEQ ID NO: 658809 - RNA, 21 nt, Human
ccaagcacagcgguaagugcu

SEQ ID NO: 658810 - RNA, 20 nt, Human
ccaguggugagacauggccu

SEQ ID NO: 658811 - RNA, 19 nt, Human
ccaugacucuugucuucuu

SEQ ID NO: 658812 - RNA, 18 nt, Human
cccaacuguuccuuuguu

SEQ ID NO: 658813 - RNA, 24 nt, Human
cccaccaauccuggcccuccaccu

SEQ ID NO: 658814 - RNA, 25 nt, Human
cccuguggauguccuagauaagggu

SEQ ID NO: 658815 - RNA, 21 nt, Human
ccgaaacucugaacaccccuc

SEQ ID NO: 658816 - RNA, 22 nt, Human
ccgaaacucugaacaccccucg

SEQ ID NO: 658817 - RNA, 18 nt, Human
ccgcccgcccgccggggc

SEQ ID NO: 658818 - RNA, 19 nt, Human
ccgccgcccagcaccugcc

SEQ ID NO: 658819 - RNA, 18 nt, Human
ccggcgccggaugcgggg

SEQ ID NO: 658820 - RNA, 21 nt, Human
ccugaaauugcaccuuugaca

SEQ ID NO: 658821 - RNA, 25 nt, Human
ccuggcccuccaccugguccccugg

SEQ ID NO: 658822 - RNA, 20 nt, Human
ccugggaacuaauaucucag

SEQ ID NO: 658823 - RNA, 19 nt, Human
ccuguugcuaggacgagag

SEQ ID NO: 658824 - RNA, 22 nt, Human
cgaucacagaaaagagaaccga

SEQ ID NO: 658825 - RNA, 22 nt, Human
cgccgcccagcaccugccccuc

SEQ ID NO: 658826 - RNA, 21 nt, Human
cgcgcggcgcucccgggagcc

SEQ ID NO: 658827 - RNA, 19 nt, Human
cggcagcggcgagggcugg

SEQ ID NO: 658828 - RNA, 21 nt, Human
cguccaggacuccaaacgagc

SEQ ID NO: 658829 - RNA, 24 nt, Human
cuaaaaaacacacugggccucaau

SEQ ID NO: 658830 - RNA, 18 nt, Human
cuaaagcucacccaccaa

SEQ ID NO: 658831 - RNA, 21 nt, Human
cuaaagcucacccaccaaucc

SEQ ID NO: 658832 - RNA, 21 nt, Human
cuaaggaagcagagagcccac

SEQ ID NO: 658833 - RNA, 24 nt, Human
cuaaggaagcagagagcccacaau

SEQ ID NO: 658834 - RNA, 20 nt, Human
cuacugggguagaggccugg

SEQ ID NO: 658835 - RNA, 21 nt, Human
cucccguacacacacccaacu

SEQ ID NO: 658836 - RNA, 24 nt, Human
cuccgggcccuggcgcagggugcg

SEQ ID NO: 658837 - RNA, 22 nt, Human
cucucuggccgcgcaagugacu

SEQ ID NO: 658838 - RNA, 18 nt, Human
cucuuugccuccuuaggg

SEQ ID NO: 658839 - RNA, 20 nt, Human
cugcgcccgucagccgccgc

SEQ ID NO: 658840 - RNA, 20 nt, Human
cugcucaggugaaugucgga

SEQ ID NO: 658841 - RNA, 24 nt, Human
cuugucuucuucagaauacccugg

SEQ ID NO: 658842 - RNA, 19 nt, Human
gaaacucugaacaccccuc

SEQ ID NO: 658843 - RNA, 22 nt, Human
gagcagcugcucccuaaagcuc

SEQ ID NO: 658844 - RNA, 21 nt, Human
gagcauggccaccagcgcugc

SEQ ID NO: 658845 - RNA, 20 nt, Human
gagcauggccaccagcgcuu

SEQ ID NO: 658846 - RNA, 19 nt, Human
gcaccugccccucucuggc

SEQ ID NO: 658847 - RNA, 22 nt, Human
gcaccugccccucucuggccgc

SEQ ID NO: 658848 - RNA, 22 nt, Human
gccgcccagcaccugccccucu

SEQ ID NO: 658849 - RNA, 19 nt, Human
gccugggcuacagacacag

SEQ ID NO: 658850 - RNA, 19 nt, Human
gcgcggcagcggcgagggc

SEQ ID NO: 658851 - RNA, 21 nt, Human
gcggcagcggcgagggcuggc

SEQ ID NO: 658852 - RNA, 23 nt, Human
gcugaucccgcgcaggaccgcgc

SEQ ID NO: 658853 - RNA, 25 nt, Human
ggacauaauggaaagagccgguacc

SEQ ID NO: 658854 - RNA, 22 nt, Human
ggccggcgccggaugcggggcu

SEQ ID NO: 658855 - RNA, 24 nt, Human
uaaaaaacacacugggccucagac

SEQ ID NO: 658856 - RNA, 23 nt, Human
uacagcagaauauuuccuguaau

SEQ ID NO: 658857 - RNA, 23 nt, Human
uacaguggcaucuacacagauga

SEQ ID NO: 658858 - RNA, 20 nt, Human
uacccuguggauguccuaga

SEQ ID NO: 658859 - RNA, 21 nt, Human
ucaggugaaugucggauaucu

SEQ ID NO: 658860 - RNA, 23 nt, Human
ucaugauuuccuuugauauccag

SEQ ID NO: 658861 - RNA, 24 nt, Human
uccaccugcuacugggguagaggc

SEQ ID NO: 658862 - RNA, 21 nt, Human
ucccuaaagcucacccaccaa

SEQ ID NO: 658863 - RNA, 24 nt, Human
ucccuccaacguccaggacuccaa

SEQ ID NO: 658864 - RNA, 21 nt, Human
ucgggcccagauccucaaagg

SEQ ID NO: 658865 - RNA, 23 nt, Human
ucuccuguugcuaggacgagagc

SEQ ID NO: 658866 - RNA, 20 nt, Human
ucucuggccgcgcaagugac

SEQ ID NO: 658867 - RNA, 24 nt, Human
ucugcaguccauucugcagguauc

SEQ ID NO: 658868 - RNA, 19 nt, Human
ugaaauugcaccuuugaca

SEQ ID NO: 658869 - RNA, 23 nt, Human
ugaaugcaucaugauuuccuuug

SEQ ID NO: 658870 - RNA, 24 nt, Human
ugaaugucggauaucugcaggccc

SEQ ID NO: 658871 - RNA, 19 nt, Human
ugagagccagcacugcagc

SEQ ID NO: 658872 - RNA, 23 nt, Human
ugcuguccagacuuggaauauug

SEQ ID NO: 658873 - RNA, 21 nt, Human
uggaaagagccaucucuacgu

SEQ ID NO: 658874 - RNA, 27 nt, Human
uggcgcagggugcggccuccugggggg

SEQ ID NO: 658875 - RNA, 25 nt, Human
ugggaacuaauaucucagggguagu

SEQ ID NO: 658876 - RNA, 19 nt, Human
ugucgcagggccagagcug

SEQ ID NO: 658877 - RNA, 19 nt, Human
uuauagggucucuuaggcc

SEQ ID NO: 658878 - RNA, 21 nt, Human
uuccaugacucuugucuucuu

SEQ ID NO: 658879 - RNA, 30 nt, Human
uucccugccccugaaauugcaccuuugacu

SEQ ID NO: 658880 - RNA, 20 nt, Human
uuccuuuguuuuggcaucug

SEQ ID NO: 658881 - RNA, 18 nt, Human
uugagacuuuucugcagu

SEQ ID NO: 658882 - RNA, 20 nt, Human
uugccaaagggaguacugug

SEQ ID NO: 658883 - RNA, 22 nt, Human
uugccaaagggaguacugugga

SEQ ID NO: 658884 - RNA, 19 nt, Human
uuugccuccuuagggaggg

SEQ ID NO: 658885 - RNA, 21 nt, Human
uuuuccaugacucuugucuuc

SEQ ID NO: 658886 - RNA, 22 nt, Human
uuuuugagacuuuucugcaguc

SEQ ID NO: 658887 - RNA, 20 nt, Human
aaaaaaaaaaaaaaaaggaa

SEQ ID NO: 658888 - RNA, 23 nt, Human
aaaaaaaaaaggaaucgcuugaa

SEQ ID NO: 658889 - RNA, 24 nt, Human
aaaaaaaggaaucgcuugaaccug

SEQ ID NO: 658890 - RNA, 24 nt, Human
aaaaaaggaaucgcuugaaccugg

SEQ ID NO: 658891 - RNA, 19 nt, Human
aaaaaauacaaaaaauuag

SEQ ID NO: 658892 - RNA, 22 nt, Human
aaaccccgucucuacuaaaaaa

SEQ ID NO: 658893 - RNA, 20 nt, Human
aacacggugaaaccccgucu

SEQ ID NO: 658894 - RNA, 21 nt, Human
aacacggugaaaccccgucuc

SEQ ID NO: 658895 - RNA, 19 nt, Human
aacacggugaaacccuguc

SEQ ID NO: 658896 - RNA, 20 nt, Human
aacacggugaaacccugucu

SEQ ID NO: 658897 - RNA, 21 nt, Human
aacacggugaaacccugucuc

SEQ ID NO: 658898 - RNA, 20 nt, Human
aacauggugaaacccugucu

SEQ ID NO: 658899 - RNA, 21 nt, Human
aacauggugaaacccugucuc

SEQ ID NO: 658900 - RNA, 20 nt, Human
aagcugauaccucacccacc

SEQ ID NO: 658901 - RNA, 21 nt, Human
aaggccaaggugggcagauca

SEQ ID NO: 658902 - RNA, 18 nt, Human
aaucgcuugaaccuggga

SEQ ID NO: 658903 - RNA, 24 nt, Human
aaucgcuugaaccugggaggcaga

SEQ ID NO: 658904 - RNA, 22 nt, Human
aaucgcuugaggccaggcacgg

SEQ ID NO: 658905 - RNA, 31 nt, Human
aaucgcuugaggccaggcacgguggcucaaa

SEQ ID NO: 658906 - RNA, 18 nt, Human
aauuagccaggcauggug

SEQ ID NO: 658907 - RNA, 21 nt, Human
acagagugagacucugucuca

SEQ ID NO: 658908 - RNA, 23 nt, Human
acagagugagacucugucucaaa

SEQ ID NO: 658909 - RNA, 23 nt, Human
acagagugagacucugucucaaa

SEQ ID NO: 658910 - RNA, 24 nt, Human
acagagugagacucugucucaaaa

SEQ ID NO: 658911 - RNA, 24 nt, Human
acagagugagacucugucucaaaa

SEQ ID NO: 658912 - RNA, 25 nt, Human
accccgucucuacuaaaaaauacaa

SEQ ID NO: 658913 - RNA, 18 nt, Human
acccugucucuacuaaaa

SEQ ID NO: 658914 - RNA, 24 nt, Human
acccugucucuacuaaaaauacag

SEQ ID NO: 658915 - RNA, 20 nt, Human
acucaaaaaaaaaaaaggca

SEQ ID NO: 658916 - RNA, 24 nt, Human
acuccagccugggggacagaguga

SEQ ID NO: 658917 - RNA, 24 nt, Human
acuccagucugggugacagaguga

SEQ ID NO: 658918 - RNA, 28 nt, Human
acucugucucaaaaaaaaaaaaaaaaaa

SEQ ID NO: 658919 - RNA, 18 nt, Human
acugcacuccagccucag

SEQ ID NO: 658920 - RNA, 24 nt, Human
acugcacuccagccucagugacag

SEQ ID NO: 658921 - RNA, 18 nt, Human
acugcacuccagccuggg

SEQ ID NO: 658922 - RNA, 24 nt, Human
acugcacuccagccugggggacag

SEQ ID NO: 658923 - RNA, 24 nt, Human
acugcacuccagucugggugacag

SEQ ID NO: 658924 - RNA, 26 nt, Human
acugcacuccagucugggugacagag

SEQ ID NO: 658925 - RNA, 18 nt, Human
agagguugcagugagcug

SEQ ID NO: 658926 - RNA, 22 nt, Human
agagguugcagugagcugaaau

SEQ ID NO: 658927 - RNA, 24 nt, Human
agagguugcagugagcugaaauug

SEQ ID NO: 658928 - RNA, 23 nt, Human
agaucaccuggggucaggaauuu

SEQ ID NO: 658929 - RNA, 24 nt, Human
agaugggcggaucacgaggucaga

SEQ ID NO: 658930 - RNA, 24 nt, Human
agcacuuugggaggcugaggcggg

SEQ ID NO: 658931 - RNA, 23 nt, Human
agccaggcauggugauaggcgcc

SEQ ID NO: 658932 - RNA, 22 nt, Human
agccuggccaacauggugaaac

SEQ ID NO: 658933 - RNA, 24 nt, Human
agccuggccaacauggugaaaccc

SEQ ID NO: 658934 - RNA, 24 nt, Human
agccugggggacagagugagacuc

SEQ ID NO: 658935 - RNA, 23 nt, Human
agccuguaaucccagcacuuugg

SEQ ID NO: 658936 - RNA, 24 nt, Human
agccuguaaucccagcacuuuggg

SEQ ID NO: 658937 - RNA, 20 nt, Human
agcugggcgugguggcgcgu

SEQ ID NO: 658938 - RNA, 20 nt, Human
aggaauuugagaccagccug

SEQ ID NO: 658939 - RNA, 24 nt, Human
aggcacgguggcucaagccuguaa

SEQ ID NO: 658940 - RNA, 20 nt, Human
aggcagagguugcagugagc

SEQ ID NO: 658941 - RNA, 22 nt, Human
aggcagagguugcagugagcug

SEQ ID NO: 658942 - RNA, 24 nt, Human
aggcauggugauaggcgccuguag

SEQ ID NO: 658943 - RNA, 21 nt, Human
aggccaaggugggcagaucac

SEQ ID NO: 658944 - RNA, 23 nt, Human
aggccaggcacgguggcucaagc

SEQ ID NO: 658945 - RNA, 21 nt, Human
aggcgggcguggugggccaag

SEQ ID NO: 658946 - RNA, 24 nt, Human
aggcggguggaucacgaggucagg

SEQ ID NO: 658947 - RNA, 24 nt, Human
aggcugagcuugcagugagccgag

SEQ ID NO: 658948 - RNA, 19 nt, Human
aggcugaggcaggagaaug

SEQ ID NO: 658949 - RNA, 21 nt, Human
aggcugaggcggguggaucac

SEQ ID NO: 658950 - RNA, 22 nt, Human
aggcugaggcggguggaucacg

SEQ ID NO: 658951 - RNA, 24 nt, Human
agucugggugacagagugagacuc

SEQ ID NO: 658952 - RNA, 26 nt, Human
agugacagagcaagacucaaaaaaaa

SEQ ID NO: 658953 - RNA, 24 nt, Human
aucgcgccacugcacuccagccug

SEQ ID NO: 658954 - RNA, 24 nt, Human
aucgcgccacugcacuccagucug

SEQ ID NO: 658955 - RNA, 19 nt, Human
augccuguaaucccagcac

SEQ ID NO: 658956 - RNA, 23 nt, Human
auugcgccacugcacuccagccu

SEQ ID NO: 658957 - RNA, 24 nt, Human
caacauggugaaacccugucucua

SEQ ID NO: 658958 - RNA, 24 nt, Human
caagaucgcgccacugcacuccag

SEQ ID NO: 658959 - RNA, 24 nt, Human
caagccuguaaucccagcacuuug

SEQ ID NO: 658960 - RNA, 24 nt, Human
caaggugggcagaucaccuggggu

SEQ ID NO: 658961 - RNA, 26 nt, Human
caaggugggcagaucaccugggguca

SEQ ID NO: 658962 - RNA, 18 nt, Human
caccuggggucaggaauu

SEQ ID NO: 658963 - RNA, 23 nt, Human
cacgccuuuaaucccagcacuuu

SEQ ID NO: 658964 - RNA, 22 nt, Human
cacuccagccugggggacagag

SEQ ID NO: 658965 - RNA, 22 nt, Human
cacuccagccugggggacagag

SEQ ID NO: 658966 - RNA, 24 nt, Human
cacuccagccugggggacagagug

SEQ ID NO: 658967 - RNA, 22 nt, Human
cacuccagucugggugacagag

SEQ ID NO: 658968 - RNA, 22 nt, Human
cacuccagucugggugacagag

SEQ ID NO: 658969 - RNA, 24 nt, Human
cacuccagucugggugacagagug

SEQ ID NO: 658970 - RNA, 19 nt, Human
cacugcacuccagccucag

SEQ ID NO: 658971 - RNA, 21 nt, Human
cacugcacuccagccucagug

SEQ ID NO: 658972 - RNA, 24 nt, Human
cacugcacuccagccucagugaca

SEQ ID NO: 658973 - RNA, 24 nt, Human
cacugcacuccagccucagugaca

SEQ ID NO: 658974 - RNA, 18 nt, Human
cacugcacuccagccugg

SEQ ID NO: 658975 - RNA, 19 nt, Human
cacugcacuccagccuggg

SEQ ID NO: 658976 - RNA, 22 nt, Human
cacugcacuccagccuggggga

SEQ ID NO: 658977 - RNA, 24 nt, Human
cacugcacuccagccugggggaca

SEQ ID NO: 658978 - RNA, 24 nt, Human
cacugcacuccagccugggggaca

SEQ ID NO: 658979 - RNA, 19 nt, Human
cacugcacuccagucuggg

SEQ ID NO: 658980 - RNA, 21 nt, Human
cacugcacuccagucugggug

SEQ ID NO: 658981 - RNA, 22 nt, Human
cacugcacuccagucuggguga

SEQ ID NO: 658982 - RNA, 23 nt, Human
cacugcacuccagucugggugac

SEQ ID NO: 658983 - RNA, 24 nt, Human
cacugcacuccagucugggugaca

SEQ ID NO: 658984 - RNA, 25 nt, Human
cacugcacuccagucugggugacag

SEQ ID NO: 658985 - RNA, 22 nt, Human
cagcacuuugggaggcugaggc

SEQ ID NO: 658986 - RNA, 24 nt, Human
cagcacuuugggaggcugaggcgg

SEQ ID NO: 658987 - RNA, 24 nt, Human
cagcacuuuuuaaggccaaggugg

SEQ ID NO: 658988 - RNA, 24 nt, Human
cagcuacucgggaggcugaggcag

SEQ ID NO: 658989 - RNA, 18 nt, Human
caggcacgguggcucaag

SEQ ID NO: 658990 - RNA, 20 nt, Human
caugccuguaaucccagcac

SEQ ID NO: 658991 - RNA, 20 nt, Human
ccacugcacuccagccucag

SEQ ID NO: 658992 - RNA, 20 nt, Human
ccacugcacuccagccucag

SEQ ID NO: 658993 - RNA, 21 nt, Human
ccacugcacuccagccucagu

SEQ ID NO: 658994 - RNA, 24 nt, Human
ccacugcacuccagccucagugac

SEQ ID NO: 658995 - RNA, 19 nt, Human
ccacugcacuccagccugg

SEQ ID NO: 658996 - RNA, 20 nt, Human
ccacugcacuccagccuggg

SEQ ID NO: 658997 - RNA, 22 nt, Human
ccacugcacuccagccuggggg

SEQ ID NO: 658998 - RNA, 23 nt, Human
ccacugcacuccagccuggggga

SEQ ID NO: 658999 - RNA, 24 nt, Human
ccacugcacuccagccugggggac

SEQ ID NO: 659000 - RNA, 20 nt, Human
ccacugcacuccagucuggg

SEQ ID NO: 659001 - RNA, 20 nt, Human
ccacugcacuccagucuggg

SEQ ID NO: 659002 - RNA, 21 nt, Human
ccacugcacuccagucugggu

SEQ ID NO: 659003 - RNA, 21 nt, Human
ccacugcacuccagucugggu

SEQ ID NO: 659004 - RNA, 23 nt, Human
ccacugcacuccagucuggguga

SEQ ID NO: 659005 - RNA, 24 nt, Human
ccacugcacuccagucugggugac

SEQ ID NO: 659006 - RNA, 22 nt, Human
ccucagugacagagcaagacuc

SEQ ID NO: 659007 - RNA, 23 nt, Human
ccugacuaacacggugaaacccc

SEQ ID NO: 659008 - RNA, 24 nt, Human
ccugacuaacacggugaaaccccg

SEQ ID NO: 659009 - RNA, 22 nt, Human
ccuggccaacauggugaaaccc

SEQ ID NO: 659010 - RNA, 24 nt, Human
ccuggccaacauggugaaacccug

SEQ ID NO: 659011 - RNA, 22 nt, Human
ccuggcuaacacggugaaaccc

SEQ ID NO: 659012 - RNA, 24 nt, Human
ccuggcuaacacggugaaacccug

SEQ ID NO: 659013 - RNA, 25 nt, Human
ccugggaggcagagguugcagugag

SEQ ID NO: 659014 - RNA, 22 nt, Human
ccuggggucaggaauuugagac

SEQ ID NO: 659015 - RNA, 20 nt, Human
ccuguaaucccagcacugcg

SEQ ID NO: 659016 - RNA, 21 nt, Human
ccuguaaucccagcacugcgg

SEQ ID NO: 659017 - RNA, 22 nt, Human
ccuguaaucccagcacugcggg

SEQ ID NO: 659018 - RNA, 22 nt, Human
ccuguaaucccagcuacucaag

SEQ ID NO: 659019 - RNA, 19 nt, Human
ccuguagucccagcuacuc

SEQ ID NO: 659020 - RNA, 21 nt, Human
ccuguagucccagcuacucgg

SEQ ID NO: 659021 - RNA, 22 nt, Human
ccuguagucccagcuacucggg

SEQ ID NO: 659022 - RNA, 24 nt, Human
cgagaccauccugacuaacacggu

SEQ ID NO: 659023 - RNA, 24 nt, Human
cgagaccauccuggcuaacacggu

SEQ ID NO: 659024 - RNA, 24 nt, Human
cgagaucgcgccacugcacuccag

SEQ ID NO: 659025 - RNA, 26 nt, Human
cgccacugcacuccagccucagugac

SEQ ID NO: 659026 - RNA, 21 nt, Human
cggagaaagcugauaccucac

SEQ ID NO: 659027 - RNA, 22 nt, Human
cggggaggcugagcuugcagug

SEQ ID NO: 659028 - RNA, 19 nt, Human
cuacuaaaaaauacaaaaa

SEQ ID NO: 659029 - RNA, 18 nt, Human
cucaaaaaaaaaaaaaaa

SEQ ID NO: 659030 - RNA, 24 nt, Human
cucaagccuguaaucccagcacuu

SEQ ID NO: 659031 - RNA, 22 nt, Human
cucacgccuuuaaucccagcac

SEQ ID NO: 659032 - RNA, 24 nt, Human
cucacgccuuuaaucccagcacuu

SEQ ID NO: 659033 - RNA, 23 nt, Human
cucaugccuguaaucccagcacu

SEQ ID NO: 659034 - RNA, 23 nt, Human
cucccucacgcauuccaggggcu

SEQ ID NO: 659035 - RNA, 22 nt, Human
cucuacuaaaaaauacaaaaaa

SEQ ID NO: 659036 - RNA, 19 nt, Human
cucugucucaaaaaaaaaa

SEQ ID NO: 659037 - RNA, 18 nt, Human
cugacuaacacggugaaa

SEQ ID NO: 659038 - RNA, 21 nt, Human
cugcgggagguggagaugggc

SEQ ID NO: 659039 - RNA, 24 nt, Human
cuggccaacauggugaaacccugu

SEQ ID NO: 659040 - RNA, 18 nt, Human
cuggcuaacacggugaaa

SEQ ID NO: 659041 - RNA, 24 nt, Human
cuggcuaacacggugaaacccugu

SEQ ID NO: 659042 - RNA, 21 nt, Human
cugggugacagagugagacuc

SEQ ID NO: 659043 - RNA, 25 nt, Human
cugucucuacuaaaaaucaaaaaaa

SEQ ID NO: 659044 - RNA, 19 nt, Human
cuugcagugagccgagauc

SEQ ID NO: 659045 - RNA, 21 nt, Human
cuugcagugagccgagaucgc

SEQ ID NO: 659046 - RNA, 23 nt, Human
gaaauugcgccacugcacuccag

SEQ ID NO: 659047 - RNA, 23 nt, Human
gaacuagcggagaaagcugauag

SEQ ID NO: 659048 - RNA, 23 nt, Human
gagaccagccuggccaacauggu

SEQ ID NO: 659049 - RNA, 18 nt, Human
gagcuugcagugagccga

SEQ ID NO: 659050 - RNA, 24 nt, Human
gaucaccuggggucaggaauuuga

SEQ ID NO: 659051 - RNA, 24 nt, Human
gcacuccagccucagugacagagc

SEQ ID NO: 659052 - RNA, 24 nt, Human
gcacuccagccugggggacagagu

SEQ ID NO: 659053 - RNA, 24 nt, Human
gcacuccagucugggugacagagu

SEQ ID NO: 659054 - RNA, 23 nt, Human
gcagcugggcgcgguggcucaug

SEQ ID NO: 659055 - RNA, 24 nt, Human
gccaacauggugaaacccugucuc

SEQ ID NO: 659056 - RNA, 20 nt, Human
gccaagaucgcgccacugca

SEQ ID NO: 659057 - RNA, 19 nt, Human
gccacugcacuccagucug

SEQ ID NO: 659058 - RNA, 24 nt, Human
gccacugcacuccagucuggguga

SEQ ID NO: 659059 - RNA, 20 nt, Human
gccgagaucgcgccacugca

SEQ ID NO: 659060 - RNA, 23 nt, Human
gccuguagucccagcuacucggg

SEQ ID NO: 659061 - RNA, 23 nt, Human
gccuuuauucuugucacccagca

SEQ ID NO: 659062 - RNA, 24 nt, Human
gcuaacacggugaaacccugucuc

SEQ ID NO: 659063 - RNA, 22 nt, Human
gcugaggcaggagaauggcgug

SEQ ID NO: 659064 - RNA, 19 nt, Human
gcugggcaugguggcucac

SEQ ID NO: 659065 - RNA, 20 nt, Human
ggaauuagcugggcguggug

SEQ ID NO: 659066 - RNA, 31 nt, Human
ggaggcugagcuugcagugagccgagaucgg

SEQ ID NO: 659067 - RNA, 20 nt, Human
ggcagagccuuuauucuugu

SEQ ID NO: 659068 - RNA, 23 nt, Human
ggcgcgguggcucaugccuguaa

SEQ ID NO: 659069 - RNA, 18 nt, Human
ggcggaucacgaggucag

SEQ ID NO: 659070 - RNA, 21 nt, Human
ggcucacgccuuuaaucccag

SEQ ID NO: 659071 - RNA, 20 nt, Human
gggagguggagaugggcgga

SEQ ID NO: 659072 - RNA, 24 nt, Human
gggcaugguggcucacgccuuuaa

SEQ ID NO: 659073 - RNA, 24 nt, Human
ggugauaggcgccuguagucccag

SEQ ID NO: 659074 - RNA, 21 nt, Human
gguggaucacgaggucaggag

SEQ ID NO: 659075 - RNA, 24 nt, Human
gguggcgcguuccuguaaucccag

SEQ ID NO: 659076 - RNA, 23 nt, Human
gguggcucaagccuguaauccca

SEQ ID NO: 659077 - RNA, 24 nt, Human
gguggcucaagccuguaaucccag

SEQ ID NO: 659078 - RNA, 23 nt, Human
gguggcucaugccuguaauccca

SEQ ID NO: 659079 - RNA, 24 nt, Human
gguggcucaugccuguaaucccag

SEQ ID NO: 659080 - RNA, 21 nt, Human
gugaaacccugucucuacuaa

SEQ ID NO: 659081 - RNA, 21 nt, Human
gugaaacccugucucuacuaa

SEQ ID NO: 659082 - RNA, 24 nt, Human
gugacagagugagacucugucuca

SEQ ID NO: 659083 - RNA, 23 nt, Human
guggcucaagccuguaaucccag

SEQ ID NO: 659084 - RNA, 23 nt, Human
guggcucacgccuuuaaucccag

SEQ ID NO: 659085 - RNA, 23 nt, Human
guggcucaugccuguaaucccag

SEQ ID NO: 659086 - RNA, 21 nt, Human
guugcagugagcugaaauugc

SEQ ID NO: 659087 - RNA, 22 nt, Human
uaacacggugaaaccccgucuc

SEQ ID NO: 659088 - RNA, 24 nt, Human
uaacacggugaaaccccgucucua

SEQ ID NO: 659089 - RNA, 22 nt, Human
uaacacggugaaacccugucuc

SEQ ID NO: 659090 - RNA, 24 nt, Human
uaacacggugaaacccugucucua

SEQ ID NO: 659091 - RNA, 19 nt, Human
uaccucacccaccaccgag

SEQ ID NO: 659092 - RNA, 19 nt, Human
uaggaggcugggcauggug

SEQ ID NO: 659093 - RNA, 21 nt, Human
ucaaaaaaaaaaaaaaaaaaa

SEQ ID NO: 659094 - RNA, 26 nt, Human
ucaaaaaaaaaaaaaaaaaaaggaau

SEQ ID NO: 659095 - RNA, 21 nt, Human
ucaaaaaaaauuagccaggca

SEQ ID NO: 659096 - RNA, 25 nt, Human
ucaaaaaaauaaaagauuaaaaaaa

SEQ ID NO: 659097 - RNA, 18 nt, Human
ucacgaggucaggagauc

SEQ ID NO: 659098 - RNA, 24 nt, Human
ucacgaggucaggagaucgagacc

SEQ ID NO: 659099 - RNA, 18 nt, Human
ucagaagaucgagaccau

SEQ ID NO: 659100 - RNA, 22 nt, Human
ucaugccuguaaucccagcacu

SEQ ID NO: 659101 - RNA, 23 nt, Human
uccagccugggggacagagugag

SEQ ID NO: 659102 - RNA, 24 nt, Human
uccagccugggggacagagugaga

SEQ ID NO: 659103 - RNA, 24 nt, Human
uccagucugggugacagagugaga

SEQ ID NO: 659104 - RNA, 23 nt, Human
ucgcgccacugcacuccagccug

SEQ ID NO: 659105 - RNA, 23 nt, Human
ucgcgccacugcacuccagucug

SEQ ID NO: 659106 - RNA, 18 nt, Human
ucgcuugaaccugggagg

SEQ ID NO: 659107 - RNA, 23 nt, Human
ucucuacuaaaaaauacaaaaaa

SEQ ID NO: 659108 - RNA, 21 nt, Human
ucucuacuaaaaaucaaaaaa

SEQ ID NO: 659109 - RNA, 23 nt, Human
ucugucucaaaaaaaaaaaaaaa

SEQ ID NO: 659110 - RNA, 24 nt, Human
ugaaccugggaggcagagguugca

SEQ ID NO: 659111 - RNA, 26 nt, Human
ugacagagcaagacucaaaaaaaaaa

SEQ ID NO: 659112 - RNA, 23 nt, Human
ugagaccagccuggccaacaugg

SEQ ID NO: 659113 - RNA, 22 nt, Human
ugagccgagaucgcgccacugc

SEQ ID NO: 659114 - RNA, 22 nt, Human
ugagcugaaauugcgccacugc

SEQ ID NO: 659115 - RNA, 22 nt, Human
ugaggcaggagaauggcgugaa

SEQ ID NO: 659116 - RNA, 23 nt, Human
ugaggcaggagaauggcgugaau

SEQ ID NO: 659117 - RNA, 24 nt, Human
ugaggcggguggaucacgagguca

SEQ ID NO: 659118 - RNA, 22 nt, Human
ugccccauaaaguccugcuuau

SEQ ID NO: 659119 - RNA, 23 nt, Human
ugccuguaaucccagcacugcgg

SEQ ID NO: 659120 - RNA, 22 nt, Human
ugcgggagguggagaugggcgg

SEQ ID NO: 659121 - RNA, 25 nt, Human
uggagaugggcggaucacgagguca

SEQ ID NO: 659122 - RNA, 24 nt, Human
uggccaacauggugaaacccuguc

SEQ ID NO: 659123 - RNA, 20 nt, Human
uggcgugaaucggggaggcu

SEQ ID NO: 659124 - RNA, 22 nt, Human
uggcucaagccuguaaucccag

SEQ ID NO: 659125 - RNA, 24 nt, Human
uggcucaagccuguaaucccagca

SEQ ID NO: 659126 - RNA, 21 nt, Human
uggcucacgccuuuaauccca

SEQ ID NO: 659127 - RNA, 22 nt, Human
uggcucacgccuuuaaucccag

SEQ ID NO: 659128 - RNA, 24 nt, Human
uggcucacgccuuuaaucccagca

SEQ ID NO: 659129 - RNA, 24 nt, Human
uggcucaugccuguaaucccagca

SEQ ID NO: 659130 - RNA, 22 nt, Human
ugggaacuagcggagaaagcug

SEQ ID NO: 659131 - RNA, 24 nt, Human
ugggaggcagagguugcagugagc

SEQ ID NO: 659132 - RNA, 20 nt, Human
ugggaggcugaggcgggugg

SEQ ID NO: 659133 - RNA, 23 nt, Human
ugggaggcugaggcggguggauc

SEQ ID NO: 659134 - RNA, 24 nt, Human
ugggaggcugaggcggguggauca

SEQ ID NO: 659135 - RNA, 18 nt, Human
ugggcagaucaccugggg

SEQ ID NO: 659136 - RNA, 24 nt, Human
ugggcagaucaccuggggucagga

SEQ ID NO: 659137 - RNA, 22 nt, Human
ugggccaagaucgcgccacugc

SEQ ID NO: 659138 - RNA, 21 nt, Human
ugggggacagagugagacucu

SEQ ID NO: 659139 - RNA, 21 nt, Human
ugggugacagagugagacucu

SEQ ID NO: 659140 - RNA, 24 nt, Human
uggugauaggcgccuguaguccca

SEQ ID NO: 659141 - RNA, 24 nt, Human
ugguggcgcguuccuguaauccca

SEQ ID NO: 659142 - RNA, 24 nt, Human
ugguggcucacgccuuuaauccca

SEQ ID NO: 659143 - RNA, 19 nt, Human
ugucagaagaucgagacca

SEQ ID NO: 659144 - RNA, 18 nt, Human
uuagcugggcgugguggc

SEQ ID NO: 659145 - RNA, 20 nt, Human
uuagcugggcgugguggcgc

SEQ ID NO: 659146 - RNA, 20 nt, Human
uuagcugggcgugguggcgc

SEQ ID NO: 659147 - RNA, 23 nt, Human
uucccagugcccuuggagagagc

SEQ ID NO: 659148 - RNA, 19 nt, Human
uuccuguaaucccagcuac

SEQ ID NO: 659149 - RNA, 24 nt, Human
uugaaccugggaggcagagguugc

SEQ ID NO: 659150 - RNA, 19 nt, Human
uugcagugagccgagaucg

SEQ ID NO: 659151 - RNA, 22 nt, Human
uugcagugagccgagaucgcgc

SEQ ID NO: 659152 - RNA, 22 nt, Human
uugcagugagcugaaauugcgc

SEQ ID NO: 659153 - RNA, 25 nt, Human
uugggaggcugaggcggguggauca

SEQ ID NO: 659154 - RNA, 20 nt, Human
uuuuuuuuuuucaaagaaau

SEQ ID NO: 659155 - RNA, 23 nt, Human
uuuuuuuuuuuuuuuuuucaaag

SEQ ID NO: 659156 - RNA, 23 nt, Human
aaaaaacaaaagggcuuuaaaaa

SEQ ID NO: 659157 - RNA, 23 nt, Human
aaaacccucgguggucgacauug

SEQ ID NO: 659158 - RNA, 23 nt, Human
acagaguauauaaaucaaaaaac

SEQ ID NO: 659159 - RNA, 24 nt, Human
caaaacccucgguggucgacauug

SEQ ID NO: 659160 - RNA, 22 nt, Human
caaaagggcuuuaaaaagggga

SEQ ID NO: 659161 - RNA, 26 nt, Human
caccaaaacacugacauuuuuuuucu

SEQ ID NO: 659162 - RNA, 20 nt, Human
cugacauuuuuuuucuagcu

SEQ ID NO: 659163 - RNA, 20 nt, Human
gccacuuuccgaugcaggaa

SEQ ID NO: 659164 - RNA, 26 nt, Human
uacccaaaacccucgguggucgacau

SEQ ID NO: 659165 - RNA, 22 nt, Human
uacucugagaccucacagccac

SEQ ID NO: 659166 - RNA, 21 nt, Human
ucacagccacuuuccgaugca

SEQ ID NO: 659167 - RNA, 24 nt, Human
ucgguggucgacauugaccuggug

SEQ ID NO: 659168 - RNA, 20 nt, Human
ugcucggaguuuguacaaag

SEQ ID NO: 659169 - RNA, 23 nt, Human
uguaaaacagaguauauaaauca

SEQ ID NO: 659170 - RNA, 22 nt, Human
aaacaaaccauuuccgucgaac

SEQ ID NO: 659171 - RNA, 24 nt, Human
agaaauggaguuacaaauaacauu

SEQ ID NO: 659172 - RNA, 21 nt, Human
agcaaguagcccugauuucag

SEQ ID NO: 659173 - RNA, 19 nt, Human
agguagcuuuuacugcaga

SEQ ID NO: 659174 - RNA, 19 nt, Human
agucucaucacagcagcuu

SEQ ID NO: 659175 - RNA, 24 nt, Human
caauuaguucccucucuuuugcuc

SEQ ID NO: 659176 - RNA, 18 nt, Human
cagagaaauggaguuaca

SEQ ID NO: 659177 - RNA, 18 nt, Human
cagcuccuuuugucuacc

SEQ ID NO: 659178 - RNA, 23 nt, Human
cagguaggagcugucugcccccu

SEQ ID NO: 659179 - RNA, 25 nt, Human
caucacagcagcuuccccagugggg

SEQ ID NO: 659180 - RNA, 19 nt, Human
ccaggaagugcacgggccc

SEQ ID NO: 659181 - RNA, 21 nt, Human
ccauuuccgucgaacuagaaa

SEQ ID NO: 659182 - RNA, 22 nt, Human
ccccuauugcuguugcauuuuc

SEQ ID NO: 659183 - RNA, 22 nt, Human
cuccaggaagugcacgggcccc

SEQ ID NO: 659184 - RNA, 21 nt, Human
cucuucuguuucucuuaggga

SEQ ID NO: 659185 - RNA, 21 nt, Human
cugaguguguugaaggcucau

SEQ ID NO: 659186 - RNA, 21 nt, Human
gacuaaaacauaaagcaagua

SEQ ID NO: 659187 - RNA, 20 nt, Human
gcuuagaaugaggcugaucc

SEQ ID NO: 659188 - RNA, 21 nt, Human
guugcauuuucugaguguguu

SEQ ID NO: 659189 - RNA, 24 nt, Human
uaaaugauuccuucacaugaucaa

SEQ ID NO: 659190 - RNA, 24 nt, Human
uaguucccucucuuuugccgggcc

SEQ ID NO: 659191 - RNA, 23 nt, Human
uaucagaagagaaacaaaccauu

SEQ ID NO: 659192 - RNA, 22 nt, Human
uaugagaauauugugcuuuuaa

SEQ ID NO: 659193 - RNA, 21 nt, Human
ucagaagagaaacaaaccauu

SEQ ID NO: 659194 - RNA, 18 nt, Human
ucagaaugcgagacacug

SEQ ID NO: 659195 - RNA, 22 nt, Human
ucuuucuuucugacuccucucc

SEQ ID NO: 659196 - RNA, 22 nt, Human
ugaggcugauccuuccacuggc

SEQ ID NO: 659197 - RNA, 18 nt, Human
ugcagucuguguucuaag

SEQ ID NO: 659198 - RNA, 24 nt, Human
ugucuaccuaucagaagagaaaca

SEQ ID NO: 659199 - RNA, 22 nt, Human
ugugcuuuuaaaaaaaauucaa

SEQ ID NO: 659200 - RNA, 23 nt, Human
uugccagguagcuuuuacugcag

SEQ ID NO: 659201 - RNA, 20 nt, Human
uugcuuagaaugaggcugau

SEQ ID NO: 659202 - RNA, 18 nt, Human
uuucaacagugccuuaac

SEQ ID NO: 659203 - RNA, 24 nt, Human
uuuuuuuuuuuuuuuuuuccuggg

SEQ ID NO: 659204 - RNA, 23 nt, Human
aaaaaaaaacaaauguuugcaga

SEQ ID NO: 659205 - RNA, 21 nt, Human
aaaaaaacaaauguuugcaga

SEQ ID NO: 659206 - RNA, 20 nt, Human
aaaaaaacggauauuucaau

SEQ ID NO: 659207 - RNA, 25 nt, Human
aaaggaugggaggggaggggaggaa

SEQ ID NO: 659208 - RNA, 19 nt, Human
aagaugcuuugcccaucca

SEQ ID NO: 659209 - RNA, 26 nt, Human
aagccugcuccaccuaccuuuccacc

SEQ ID NO: 659210 - RNA, 21 nt, Human
acaacagacuauuccaccaug

SEQ ID NO: 659211 - RNA, 23 nt, Human
acaucuguaaagcauuccugcuc

SEQ ID NO: 659212 - RNA, 22 nt, Human
accacugcacuccagccugggc

SEQ ID NO: 659213 - RNA, 22 nt, Human
accagcccagcauccccuaugc

SEQ ID NO: 659214 - RNA, 24 nt, Human
acugcacuccagccugggcaacag

SEQ ID NO: 659215 - RNA, 24 nt, Human
acugcacuccagccugggcaacag

SEQ ID NO: 659216 - RNA, 21 nt, Human
agacagacagacggacacgca

SEQ ID NO: 659217 - RNA, 24 nt, Human
agcugguucugcuucuccggcccc

SEQ ID NO: 659218 - RNA, 23 nt, Human
aggacaccugagcugggcccaac

SEQ ID NO: 659219 - RNA, 18 nt, Human
aggagaggggaggagagg

SEQ ID NO: 659220 - RNA, 22 nt, Human
aggaggagcagggagccuggug

SEQ ID NO: 659221 - RNA, 27 nt, Human
aggaugggaggggaggggaggagaggg

SEQ ID NO: 659222 - RNA, 24 nt, Human
aggauugcuugagcucaggaguuc

SEQ ID NO: 659223 - RNA, 22 nt, Human
aggcagcaggauugcuugagcu

SEQ ID NO: 659224 - RNA, 21 nt, Human
aggccuccaacugcagcccag

SEQ ID NO: 659225 - RNA, 21 nt, Human
agggaguaggagggcgauggg

SEQ ID NO: 659226 - RNA, 24 nt, Human
aucgcaccacugcacuccagccug

SEQ ID NO: 659227 - RNA, 24 nt, Human
auugcuugagcucaggaguucaag

SEQ ID NO: 659228 - RNA, 20 nt, Human
caaacccagacacuagacag

SEQ ID NO: 659229 - RNA, 23 nt, Human
caacaucuguaaagcauuccugc

SEQ ID NO: 659230 - RNA, 23 nt, Human
cacauguggucccagcuacucgg

SEQ ID NO: 659231 - RNA, 19 nt, Human
caccacucaggacaccuga

SEQ ID NO: 659232 - RNA, 19 nt, Human
caccaggcaccucugucau

SEQ ID NO: 659233 - RNA, 20 nt, Human
caccaggccuccaacugcag

SEQ ID NO: 659234 - RNA, 18 nt, Human
caccucugucaucuggga

SEQ ID NO: 659235 - RNA, 18 nt, Human
cacugcacuccagccugg

SEQ ID NO: 659236 - RNA, 19 nt, Human
cacugcacuccagccuggg

SEQ ID NO: 659237 - RNA, 21 nt, Human
cacugcacuccagccugggca

SEQ ID NO: 659238 - RNA, 23 nt, Human
cacugcacuccagccugggcaac

SEQ ID NO: 659239 - RNA, 24 nt, Human
cacugcacuccagccugggcaaca

SEQ ID NO: 659240 - RNA, 18 nt, Human
cagauucccaccacucag

SEQ ID NO: 659241 - RNA, 19 nt, Human
cagcaggauugcuugagcu

SEQ ID NO: 659242 - RNA, 22 nt, Human
cagccugggcaacagagggaga

SEQ ID NO: 659243 - RNA, 22 nt, Human
cagcuuaccugggacucuccaa

SEQ ID NO: 659244 - RNA, 20 nt, Human
caggaaaugcgccugggccc

SEQ ID NO: 659245 - RNA, 22 nt, Human
cauuccugcucccgggcaggaa

SEQ ID NO: 659246 - RNA, 21 nt, Human
cauuuuaaucaaugacuguuc

SEQ ID NO: 659247 - RNA, 19 nt, Human
ccaccacucaggacaccug

SEQ ID NO: 659248 - RNA, 20 nt, Human
ccacugcacuccagccuggg

SEQ ID NO: 659249 - RNA, 21 nt, Human
ccacugcacuccagccugggc

SEQ ID NO: 659250 - RNA, 22 nt, Human
ccacugcacuccagccugggca

SEQ ID NO: 659251 - RNA, 23 nt, Human
ccacugcacuccagccugggcaa

SEQ ID NO: 659252 - RNA, 24 nt, Human
ccacugcacuccagccugggcaac

SEQ ID NO: 659253 - RNA, 22 nt, Human
cccaggugacaagaguaagaau

SEQ ID NO: 659254 - RNA, 23 nt, Human
ccccuaugcagcugguucugcuu

SEQ ID NO: 659255 - RNA, 20 nt, Human
ccgcacggacccccaccagg

SEQ ID NO: 659256 - RNA, 20 nt, Human
ccgccuggcccagccuggaa

SEQ ID NO: 659257 - RNA, 19 nt, Human
ccgugccuguuguugcucu

SEQ ID NO: 659258 - RNA, 23 nt, Human
ccucuccccuccuugcuuacaaa

SEQ ID NO: 659259 - RNA, 19 nt, Human
ccugagcugggcccaacuu

SEQ ID NO: 659260 - RNA, 22 nt, Human
ccuggcccagccuggaaucagc

SEQ ID NO: 659261 - RNA, 24 nt, Human
cgaugggaaagaggggagggcugg

SEQ ID NO: 659262 - RNA, 21 nt, Human
cgcaccacugcacuccagccu

SEQ ID NO: 659263 - RNA, 25 nt, Human
cgcagcuuaccugggacucuccaag

SEQ ID NO: 659264 - RNA, 19 nt, Human
cucaggacaccugagcugg

SEQ ID NO: 659265 - RNA, 24 nt, Human
cucgaugggaaagaggggagggcu

SEQ ID NO: 659266 - RNA, 22 nt, Human
cugcagugagccaugaucgcac

SEQ ID NO: 659267 - RNA, 19 nt, Human
cuugagcucaggaguucaa

SEQ ID NO: 659268 - RNA, 23 nt, Human
cuugagcucaggaguucaaggcu

SEQ ID NO: 659269 - RNA, 23 nt, Human
gauugcuugagcucaggaguuca

SEQ ID NO: 659270 - RNA, 20 nt, Human
gcaccacugcacuccagccu

SEQ ID NO: 659271 - RNA, 19 nt, Human
gccaugaucgcaccacugc

SEQ ID NO: 659272 - RNA, 24 nt, Human
gcucaggaguucaaggcugcagug

SEQ ID NO: 659273 - RNA, 21 nt, Human
ggaaaaacaaaaaaaaacaaa

SEQ ID NO: 659274 - RNA, 20 nt, Human
ggaaagaggggagggcuggg

SEQ ID NO: 659275 - RNA, 22 nt, Human
ggacacgcauccaguaggccaa

SEQ ID NO: 659276 - RNA, 21 nt, Human
ggacccccaccaggccuccaa

SEQ ID NO: 659277 - RNA, 21 nt, Human
ggaggagagggaguaggaggg

SEQ ID NO: 659278 - RNA, 27 nt, Human
ggaggagagggaguaggagggcgaugg

SEQ ID NO: 659279 - RNA, 21 nt, Human
ggaggagaggggaggagaggg

SEQ ID NO: 659280 - RNA, 21 nt, Human
ggaggggaggggaggagaggg

SEQ ID NO: 659281 - RNA, 23 nt, Human
ggauugcuugagcucaggaguuc

SEQ ID NO: 659282 - RNA, 22 nt, Human
gggaaaccagcccucggccucc

SEQ ID NO: 659283 - RNA, 19 nt, Human
gggaaagaggggagggcug

SEQ ID NO: 659284 - RNA, 22 nt, Human
gggaggggaggggaggagaggg

SEQ ID NO: 659285 - RNA, 21 nt, Human
gggccaaacccagacacuaga

SEQ ID NO: 659286 - RNA, 18 nt, Human
gggcuucugagccauccc

SEQ ID NO: 659287 - RNA, 18 nt, Human
gggcuucugagccauccc

SEQ ID NO: 659288 - RNA, 23 nt, Human
ggggaggagaggggaggagaggg

SEQ ID NO: 659289 - RNA, 18 nt, Human
gguaggcaguccccagag

SEQ ID NO: 659290 - RNA, 21 nt, Human
gguggaguuccgugccuguug

SEQ ID NO: 659291 - RNA, 19 nt, Human
guaaagcauuccugcuccc

SEQ ID NO: 659292 - RNA, 23 nt, Human
uaagugaguuugccaaacaccag

SEQ ID NO: 659293 - RNA, 21 nt, Human
uaggagggcgaugggaggaag

SEQ ID NO: 659294 - RNA, 21 nt, Human
uaucagagaaaacccagagca

SEQ ID NO: 659295 - RNA, 27 nt, Human
uaucagagaaaacccagagcauuuaac

SEQ ID NO: 659296 - RNA, 20 nt, Human
uccaccuaccuuuccaccua

SEQ ID NO: 659297 - RNA, 20 nt, Human
uccauauguugacaggaugg

SEQ ID NO: 659298 - RNA, 25 nt, Human
uccccagaggucugcagcccagccc

SEQ ID NO: 659299 - RNA, 23 nt, Human
ucgcaccacugcacuccagccug

SEQ ID NO: 659300 - RNA, 31 nt, Human; identical to SEQ ID NO: 301436

SEQ ID NO: 659301 - RNA, 19 nt, Human
ucgccgcacggacccccac

SEQ ID NO: 659302 - RNA, 18 nt, Human
ucggagaacugaggcagc

SEQ ID NO: 659303 - RNA, 20 nt, Human
ucggccuccucuugucucuu

SEQ ID NO: 659304 - RNA, 21 nt, Human
ucuccggccccuccuggccau

SEQ ID NO: 659305 - RNA, 18 nt, Human
ucucuauuuucccaacau

SEQ ID NO: 659306 - RNA, 19 nt, Human
ucugcagcccagccccgcc

SEQ ID NO: 659307 - RNA, 21 nt, Human
ugaggcagcaggauugcuuga

SEQ ID NO: 659308 - RNA, 21 nt, Human
ugaguuugccaaacaccaggc

SEQ ID NO: 659309 - RNA, 19 nt, Human
ugcagaagcguuuuguuuu

SEQ ID NO: 659310 - RNA, 18 nt, Human
ugcagcccagccccgccu

SEQ ID NO: 659311 - RNA, 22 nt, Human
ugcagugagccaugaucgcacc

SEQ ID NO: 659312 - RNA, 18 nt, Human
ugcuccaccuaccuuucc

SEQ ID NO: 659313 - RNA, 23 nt, Human
ugcuccaccuaccuuuccaccua

SEQ ID NO: 659314 - RNA, 19 nt, Human
uggcccagccuggaaucag

SEQ ID NO: 659315 - RNA, 18 nt, Human
ugggacucuccaaggagg

SEQ ID NO: 659316 - RNA, 18 nt, Human
ugggaggaagccggggcg

SEQ ID NO: 659317 - RNA, 19 nt, Human
ugggccaaacccagacacu

SEQ ID NO: 659318 - RNA, 22 nt, Human
ugggccugaaggcagagaccag

SEQ ID NO: 659319 - RNA, 22 nt, Human
uuacaaaaggaugggaggggag

SEQ ID NO: 659320 - RNA, 23 nt, Human
uucuacaauggacaggcauugcu

SEQ ID NO: 659321 - RNA, 24 nt, Human
uucuacaauggacaggcauugcuu

SEQ ID NO: 659322 - RNA, 18 nt, Human
uucuccggccccuccugg

SEQ ID NO: 659323 - RNA, 18 nt, Human
uugaagccugcuccaccu

SEQ ID NO: 659324 - RNA, 20 nt, Human
uugaagccugcuccaccuac

SEQ ID NO: 659325 - RNA, 24 nt, Human
uugcuugagcucaggaguucaagg

SEQ ID NO: 659326 - RNA, 21 nt, Human
uuuaggcaccuuacaagugac

SEQ ID NO: 659327 - RNA, 24 nt, Human
uuuuuuuuuuuuuuuuuuaauuag

SEQ ID NO: 659328 - RNA, 22 nt, Human
aaaccagcccagauccuccugg

SEQ ID NO: 659329 - RNA, 19 nt, Human
aaaggagauguaacagaag

SEQ ID NO: 659330 - RNA, 26 nt, Human
aaccagcccagauccuccugggcccc

SEQ ID NO: 659331 - RNA, 19 nt, Human
acacagcaaacaacugugu

SEQ ID NO: 659332 - RNA, 24 nt, Human
acagcugggauuauagucaugagc

SEQ ID NO: 659333 - RNA, 22 nt, Human
accagguuccaccccagcucca

SEQ ID NO: 659334 - RNA, 21 nt, Human
acccuacaggccaccaggaaa

SEQ ID NO: 659335 - RNA, 27 nt, Human
agacaaaccagcccagauccuccuggg

SEQ ID NO: 659336 - RNA, 21 nt, Human
agaccagguuguagaccagga

SEQ ID NO: 659337 - RNA, 21 nt, Human
agacuccuggcccccaaccaa

SEQ ID NO: 659338 - RNA, 25 nt, Human
agccaaaugagaaccauuguucgga

SEQ ID NO: 659339 - RNA, 26 nt, Human
aggcagcaguucuagggaugggagca

SEQ ID NO: 659340 - RNA, 18 nt, Human
aggcugaucucgaacucc

SEQ ID NO: 659341 - RNA, 24 nt, Human
agggaugggagcaaggccagccag

SEQ ID NO: 659342 - RNA, 26 nt, Human
cacauagaccagguuguagaccagga

SEQ ID NO: 659343 - RNA, 18 nt, Human
caccgacucccuagguga

SEQ ID NO: 659344 - RNA, 22 nt, Human
cagagguggggucucgcuaugu

SEQ ID NO: 659345 - RNA, 19 nt, Human
cagcaccgucugucggaug

SEQ ID NO: 659346 - RNA, 21 nt, Human
cagcagaagcuggcguagccc

SEQ ID NO: 659347 - RNA, 22 nt, Human
cagcccagauccuccugggccc

SEQ ID NO: 659348 - RNA, 22 nt, Human
cagcugcccccgcccccaucuc

SEQ ID NO: 659349 - RNA, 20 nt, Human
caggaaacugaucuucucca

SEQ ID NO: 659350 - RNA, 22 nt, Human
ccacaacauccugucugucucc

SEQ ID NO: 659351 - RNA, 22 nt, Human
ccagacaaaccagcccagaucc

SEQ ID NO: 659352 - RNA, 21 nt, Human
cccccaaccaaaccuccugag

SEQ ID NO: 659353 - RNA, 23 nt, Human
cccccaaccaaaccuccugaguc

SEQ ID NO: 659354 - RNA, 19 nt, Human
cccccauauguggcacuaa

SEQ ID NO: 659355 - RNA, 21 nt, Human
ccuccauaccagguuccaccc

SEQ ID NO: 659356 - RNA, 19 nt, Human
ccugagcucaaccauccuc

SEQ ID NO: 659357 - RNA, 21 nt, Human
ccuggccuggacccacuuggc

SEQ ID NO: 659358 - RNA, 22 nt, Human
ccuugaggggccgguggaagag

SEQ ID NO: 659359 - RNA, 24 nt, Human
cgaacuccugagcucaaccauccu

SEQ ID NO: 659360 - RNA, 23 nt, Human
cgcccccaucuccuggccuggac

SEQ ID NO: 659361 - RNA, 27 nt, Human
cgcuauguuacccaggcugaucucgaa

SEQ ID NO: 659362 - RNA, 20 nt, Human
cucacccuccuucuugucca

SEQ ID NO: 659363 - RNA, 19 nt, Human
cuccuggccuggacccacu

SEQ ID NO: 659364 - RNA, 23 nt, Human
cuccugggccccagaaagaugac

SEQ ID NO: 659365 - RNA, 21 nt, Human
cuccuugggagagaacuccag

SEQ ID NO: 659366 - RNA, 20 nt, Human
cugcauuggccucucaaaca

SEQ ID NO: 659367 - RNA, 20 nt, Human
cuuuggcuugcucacccucc

SEQ ID NO: 659368 - RNA, 18 nt, Human
gauuauagucaugagcca

SEQ ID NO: 659369 - RNA, 22 nt, Human
gauuauagucaugagccacagc

SEQ ID NO: 659370 - RNA, 18 nt, Human
gcagagguggggucucgc

SEQ ID NO: 659371 - RNA, 18 nt, Human
gcccagauccuccugggc

SEQ ID NO: 659372 - RNA, 21 nt, Human
gcggaacuucuucaccuucuc

SEQ ID NO: 659373 - RNA, 19 nt, Human
gcuugcucacccuccuucu

SEQ ID NO: 659374 - RNA, 22 nt, Human
ggggucucgcuauguuacccag

SEQ ID NO: 659375 - RNA, 20 nt, Human
guagaccaggauggccagga

SEQ ID NO: 659376 - RNA, 21 nt, Human
gucggauguacaugguguaca

SEQ ID NO: 659377 - RNA, 24 nt, Human
guggggucucgcuauguuacccag

SEQ ID NO: 659378 - RNA, 19 nt, Human
uaaaacggccccaccccag

SEQ ID NO: 659379 - RNA, 19 nt, Human
uaacagaaggccagcuugg

SEQ ID NO: 659380 - RNA, 19 nt, Human
uaccuggaauauuuaggaa

SEQ ID NO: 659381 - RNA, 23 nt, Human
uagaccaggauggccaggaacuu

SEQ ID NO: 659382 - RNA, 20 nt, Human
uagaugcagguaaguccgua

SEQ ID NO: 659383 - RNA, 22 nt, Human
uauaacacagcaaacaacugug

SEQ ID NO: 659384 - RNA, 23 nt, Human
uauguuacccaggcugaucucga

SEQ ID NO: 659385 - RNA, 24 nt, Human
uauguuacccaggcugaucucgaa

SEQ ID NO: 659386 - RNA, 21 nt, Human
uauuuaggaacagacuccugg

SEQ ID NO: 659387 - RNA, 24 nt, Human
ucaaccauccuccugcauuggccu

SEQ ID NO: 659388 - RNA, 20 nt, Human
uccccagacaaaccagccca

SEQ ID NO: 659389 - RNA, 21 nt, Human
ucccgcacggaacggaaggag

SEQ ID NO: 659390 - RNA, 19 nt, Human
ucccuccauaccagguucc

SEQ ID NO: 659391 - RNA, 23 nt, Human
uccuccugcauuggccucucaaa

SEQ ID NO: 659392 - RNA, 18 nt, Human
uccuccugggccccagaa

SEQ ID NO: 659393 - RNA, 20 nt, Human
uccugucugucuccccagac

SEQ ID NO: 659394 - RNA, 23 nt, Human
uccuugggagagaacuccagaag

SEQ ID NO: 659395 - RNA, 20 nt, Human
ucuccgguuccgccagcacu

SEQ ID NO: 659396 - RNA, 19 nt, Human
ucucgaacuccugagcuca

SEQ ID NO: 659397 - RNA, 19 nt, Human
ucucgcuauguuacccagg

SEQ ID NO: 659398 - RNA, 26 nt, Human
ucucgcuauguuacccaggcugaucu

SEQ ID NO: 659399 - RNA, 27 nt, Human
ucucgcuauguuacccaggcugaucuc

SEQ ID NO: 659400 - RNA, 21 nt, Human
ugacacagcugcccccgcccc

SEQ ID NO: 659401 - RNA, 22 nt, Human
ugaccucugacgucuccacccu

SEQ ID NO: 659402 - RNA, 21 nt, Human
ugcacacaaaggagauguaac

SEQ ID NO: 659403 - RNA, 20 nt, Human
ugccagagacacaggugugg

SEQ ID NO: 659404 - RNA, 23 nt, Human
ugccagagacacaggugugguuu

SEQ ID NO: 659405 - RNA, 19 nt, Human
ugccaugacugaguuaauc

SEQ ID NO: 659406 - RNA, 25 nt, Human
ugcccccgcccccaucuccuggccu

SEQ ID NO: 659407 - RNA, 18 nt, Human
uggaagagccaguagagc

SEQ ID NO: 659408 - RNA, 19 nt, Human
uggcagagguggggucucg

SEQ ID NO: 659409 - RNA, 24 nt, Human
uggcagagguggggucucgcuaug

SEQ ID NO: 659410 - RNA, 19 nt, Human
uggcccccaaccaaaccuc

SEQ ID NO: 659411 - RNA, 21 nt, Human
uggcccccaaccaaaccuccu

SEQ ID NO: 659412 - RNA, 23 nt, Human
uggccuggacccacuuggcuucc

SEQ ID NO: 659413 - RNA, 27 nt, Human
uggcuugcucacccuccuucuugucca

SEQ ID NO: 659414 - RNA, 18 nt, Human
ugggauuauagucaugag

SEQ ID NO: 659415 - RNA, 22 nt, Human
ugggauuauagucaugagccac

SEQ ID NO: 659416 - RNA, 23 nt, Human
ugggccccagaaagaugacacag

SEQ ID NO: 659417 - RNA, 24 nt, Human
uggggucucgcuauguuacccagg

SEQ ID NO: 659418 - RNA, 21 nt, Human
uggugugguugcagcagaagc

SEQ ID NO: 659419 - RNA, 21 nt, Human
ugucucagggccacuuaccug

SEQ ID NO: 659420 - RNA, 20 nt, Human
ugucugucuccccagacaaa

SEQ ID NO: 659421 - RNA, 18 nt, Human
ugucuguguccucuccuu

SEQ ID NO: 659422 - RNA, 26 nt, Human
uguguccucuccuuggggagugcccc

SEQ ID NO: 659423 - RNA, 22 nt, Human
uucuagggaugggagcaaggcc

SEQ ID NO: 659424 - RNA, 18 nt, Human
uuggagaagaggugggcc

SEQ ID NO: 659425 - RNA, 24 nt, Human
uuggcagagguggggucucgcuau

SEQ ID NO: 659426 - RNA, 20 nt, Human
uuuguugcauggggaggggg

SEQ ID NO: 659427 - RNA, 24 nt, Human
uuuuuggcagagguggggucucgc

SEQ ID NO: 659428 - RNA, 24 nt, Human
uuuuuuggcagagguggggucucg

SEQ ID NO: 659429 - RNA, 24 nt, Human
uuuuuuuuuuuuuuuggcagaggu

SEQ ID NO: 659430 - RNA, 19 nt, Human
aaacucaggggcuccaaag

SEQ ID NO: 659431 - RNA, 23 nt, Human
aacccacuucccacaagucucca

SEQ ID NO: 659432 - RNA, 24 nt, Human
aacccacuucccacaagucuccag

SEQ ID NO: 659433 - RNA, 22 nt, Human
accccggggccccacuccccac

SEQ ID NO: 659434 - RNA, 19 nt, Human
acccugguucucuucuucc

SEQ ID NO: 659435 - RNA, 20 nt, Human
acccugguucucuucuucca

SEQ ID NO: 659436 - RNA, 21 nt, Human
agaggcccaggccccaccccu

SEQ ID NO: 659437 - RNA, 19 nt, Human
aggaagaagagggaggcug

SEQ ID NO: 659438 - RNA, 21 nt, Human
aggaagaagagggaggcuggg

SEQ ID NO: 659439 - RNA, 23 nt, Human
aggcugggguuugcacgcagagg

SEQ ID NO: 659440 - RNA, 25 nt, Human
caagccaggcacccaccaaggagcc

SEQ ID NO: 659441 - RNA, 20 nt, Human
cacaccucccaccccugcug

SEQ ID NO: 659442 - RNA, 22 nt, Human
caccccaccuaccuuuuacccg

SEQ ID NO: 659443 - RNA, 20 nt, Human
cacgcagaggcccaggcccc

SEQ ID NO: 659444 - RNA, 19 nt, Human
cacuccccaccccaccuac

SEQ ID NO: 659445 - RNA, 21 nt, Human
cagaggcccaggccccacccc

SEQ ID NO: 659446 - RNA, 25 nt, Human
caggcacccaccaaggagccgcggc

SEQ ID NO: 659447 - RNA, 18 nt, Human
caggccccaccccggggc

SEQ ID NO: 659448 - RNA, 28 nt, Human
caggccccaccccggggccccacucccu

SEQ ID NO: 659449 - RNA, 22 nt, Human
caggggcuccaaagccugagga

SEQ ID NO: 659450 - RNA, 20 nt, Human
ccacuccccaccccaccuaa

SEQ ID NO: 659451 - RNA, 19 nt, Human
ccagggccucccgcugccg

SEQ ID NO: 659452 - RNA, 18 nt, Human
cccacaccucccaccccu

SEQ ID NO: 659453 - RNA, 21 nt, Human
cccacggcaacgccucccgcu

SEQ ID NO: 659454 - RNA, 21 nt, Human
cccagcccgggcccccgaggc

SEQ ID NO: 659455 - RNA, 23 nt, Human
cccagggccucccgcugccggcc

SEQ ID NO: 659456 - RNA, 24 nt, Human
ccccaccccggggccccacucccc

SEQ ID NO: 659457 - RNA, 23 nt, Human
ccccacggcaacgccucccgcuc

SEQ ID NO: 659458 - RNA, 19 nt, Human
ccccggggccccacucccc

SEQ ID NO: 659459 - RNA, 21 nt, Human
ccccggggccccacuccccac

SEQ ID NO: 659460 - RNA, 23 nt, Human
ccccggggccccacuccccaccc

SEQ ID NO: 659461 - RNA, 20 nt, Human
ccccugcccuccccccuccc

SEQ ID NO: 659462 - RNA, 22 nt, Human
ccccuuaucuucugcccacacc

SEQ ID NO: 659463 - RNA, 20 nt, Human
cccgggcccccgaggccgga

SEQ ID NO: 659464 - RNA, 22 nt, Human
cccggggccccacuccccaccc

SEQ ID NO: 659465 - RNA, 21 nt, Human
cccugcccuccccccucccug

SEQ ID NO: 659466 - RNA, 22 nt, Human
cccuggccccuuaucuucugcc

SEQ ID NO: 659467 - RNA, 20 nt, Human
ccgcccaggggacucggcgg

SEQ ID NO: 659468 - RNA, 20 nt, Human
ccgcccgcucagcgccgccc

SEQ ID NO: 659469 - RNA, 23 nt, Human
ccuccauucuccugcggcuucuc

SEQ ID NO: 659470 - RNA, 19 nt, Human
ccucccgcuccauccccgc

SEQ ID NO: 659471 - RNA, 24 nt, Human
ccuggccccuuaucuucugcccac

SEQ ID NO: 659472 - RNA, 25 nt, Human
ccuggccucccuccaacccacuucc

SEQ ID NO: 659473 - RNA, 23 nt, Human
cgcccgcucagcgccgcccaggg

SEQ ID NO: 659474 - RNA, 21 nt, Human
cucagcgccgcccaggggacu

SEQ ID NO: 659475 - RNA, 21 nt, Human
cuccagggcaugucacuuccu

SEQ ID NO: 659476 - RNA, 21 nt, Human
cuccauucuccugcggcuucu

SEQ ID NO: 659477 - RNA, 19 nt, Human
cuccccccucccugcucua

SEQ ID NO: 659478 - RNA, 24 nt, Human
cucccuccaacccacuucccacaa

SEQ ID NO: 659479 - RNA, 24 nt, Human
cucuccauuucucccagggccucc

SEQ ID NO: 659480 - RNA, 21 nt, Human
cugaggaagaagagggaggcu

SEQ ID NO: 659481 - RNA, 21 nt, Human
cugcccacaccucccaccccu

SEQ ID NO: 659482 - RNA, 19 nt, Human
cugccggccuggccucccu

SEQ ID NO: 659483 - RNA, 23 nt, Human
cugguucucuucuuccagcaucc

SEQ ID NO: 659484 - RNA, 18 nt, Human
cuucccacaagucuccag

SEQ ID NO: 659485 - RNA, 19 nt, Human
cuugaccccgcgccucucc

SEQ ID NO: 659486 - RNA, 22 nt, Human
cuugaccccgcgccucuccagc

SEQ ID NO: 659487 - RNA, 22 nt, Human
gaggaagaagagggaggcuggg

SEQ ID NO: 659488 - RNA, 26 nt, Human
gaggaagaagagggaggcugggguuu

SEQ ID NO: 659489 - RNA, 21 nt, Human
gaucccgcgacccggccucgg

SEQ ID NO: 659490 - RNA, 20 nt, Human
gcagaggcccaggccccacc

SEQ ID NO: 659491 - RNA, 20 nt, Human
gcagcggcggcggcgauggc

SEQ ID NO: 659492 - RNA, 23 nt, Human
gcccaggccccaccccggggccc

SEQ ID NO: 659493 - RNA, 22 nt, Human
gccccuuaucuucugcccacac

SEQ ID NO: 659494 - RNA, 22 nt, Human
gccgaucccgcgacccggccuc

SEQ ID NO: 659495 - RNA, 27 nt, Human
gcggcggcggcgauggcggccgauccc

SEQ ID NO: 659496 - RNA, 18 nt, Human
gcuccaaagccugaggaa

SEQ ID NO: 659497 - RNA, 20 nt, Human
gcuccauccccgcgggcucc

SEQ ID NO: 659498 - RNA, 20 nt, Human
ggcucgaggccccacggcaa

SEQ ID NO: 659499 - RNA, 19 nt, Human
uagguaauccccugcccuc

SEQ ID NO: 659500 - RNA, 19 nt, Human
ucacuuccuccacccuggu

SEQ ID NO: 659501 - RNA, 20 nt, Human
uccagggcaugucacuuccu

SEQ ID NO: 659502 - RNA, 18 nt, Human
uccccugcccuccccccu

SEQ ID NO: 659503 - RNA, 22 nt, Human
ucccuaaagguuccucuagcuc

SEQ ID NO: 659504 - RNA, 24 nt, Human
ucuagcaguugccaagccaggcac

SEQ ID NO: 659505 - RNA, 18 nt, Human
ucuccagggcaugucacu

SEQ ID NO: 659506 - RNA, 19 nt, Human
ugaccucucuccauuucuc

SEQ ID NO: 659507 - RNA, 22 nt, Human
ugaccucucuccauuucuccca

SEQ ID NO: 659508 - RNA, 23 nt, Human
ugacucaacgagaguuucagcag

SEQ ID NO: 659509 - RNA, 18 nt, Human
ugaggaagaagagggagg

SEQ ID NO: 659510 - RNA, 19 nt, Human
ugaggaagaagagggaggc

SEQ ID NO: 659511 - RNA, 22 nt, Human
ugaggaagaagagggaggcugg

SEQ ID NO: 659512 - RNA, 26 nt, Human
ugcagcggcggcggcgauggcggccu

SEQ ID NO: 659513 - RNA, 22 nt, Human
ugccccgagccgcgggcccccg

SEQ ID NO: 659514 - RNA, 19 nt, Human
uuccucuagcucccuggcc

SEQ ID NO: 659515 - RNA, 21 nt, Human
aaauccuuggcaucacaauuu

SEQ ID NO: 659516 - RNA, 21 nt, Human
agaaagaaugaauagcagcug

SEQ ID NO: 659517 - RNA, 21 nt, Human
agcaggcagcggacccccagc

SEQ ID NO: 659518 - RNA, 19 nt, Human
agcggacccccagcauccc

SEQ ID NO: 659519 - RNA, 22 nt, Human
aggcccuccgcgggagcagccc

SEQ ID NO: 659520 - RNA, 21 nt, Human
agguuugugcuuggggaaggg

SEQ ID NO: 659521 - RNA, 25 nt, Human
agucauuggaugugauuauuggagu

SEQ ID NO: 659522 - RNA, 28 nt, Human
caacaauuacauauugaaaaggguuucc

SEQ ID NO: 659523 - RNA, 21 nt, Human
caacguaaaauacauuaucuc

SEQ ID NO: 659524 - RNA, 19 nt, Human
caaguugaaaaaguucucc

SEQ ID NO: 659525 - RNA, 21 nt, Human
cacuccagagccccucggcug

SEQ ID NO: 659526 - RNA, 24 nt, Human
cacucgcguucugagccccgagag

SEQ ID NO: 659527 - RNA, 26 nt, Human
cagcggcccuccuuucucagcugcuc

SEQ ID NO: 659528 - RNA, 19 nt, Human
caugcaggaacaagacuuc

SEQ ID NO: 659529 - RNA, 18 nt, Human
ccacagaacucccaaaag

SEQ ID NO: 659530 - RNA, 19 nt, Human
ccagagccccucggcugcg

SEQ ID NO: 659531 - RNA, 21 nt, Human
ccagaggaugccucucuuuau

SEQ ID NO: 659532 - RNA, 20 nt, Human
cccagcucuguccccacaga

SEQ ID NO: 659533 - RNA, 19 nt, Human
ccccagcaucccgcguccg

SEQ ID NO: 659534 - RNA, 21 nt, Human
ccccagcaucccgcguccgcc

SEQ ID NO: 659535 - RNA, 21 nt, Human
cccccagcaucccgcguccgc

SEQ ID NO: 659536 - RNA, 23 nt, Human
ccccucggcugcgcgcuuucucc

SEQ ID NO: 659537 - RNA, 19 nt, Human
ccgcagcaggcagcggacc

SEQ ID NO: 659538 - RNA, 24 nt, Human
ccgcagcaggcagcggacccccag

SEQ ID NO: 659539 - RNA, 18 nt, Human
ccgcggccgcagcucugc

SEQ ID NO: 659540 - RNA, 18 nt, Human
ccucagagucauuggaug

SEQ ID NO: 659541 - RNA, 18 nt, Human
ccuccgcgggagcagccc

SEQ ID NO: 659542 - RNA, 25 nt, Human
ccugcagcggcccuccuuucucagc

SEQ ID NO: 659543 - RNA, 18 nt, Human
ccuuccgcggccgcagcu

SEQ ID NO: 659544 - RNA, 23 nt, Human
ccuugcuauaaguaccucuucuu

SEQ ID NO: 659545 - RNA, 24 nt, Human
ccuugcuauaaguaccucuucuug

SEQ ID NO: 659546 - RNA, 18 nt, Human
cgccugcagcggcccucc

SEQ ID NO: 659547 - RNA, 24 nt, Human
cggaggaacagaagcgcacggacc

SEQ ID NO: 659548 - RNA, 18 nt, Human
cuccagaggaugccucuc

SEQ ID NO: 659549 - RNA, 21 nt, Human
cugcuguaugcacaaucaugu

SEQ ID NO: 659550 - RNA, 20 nt, Human
gaauccucaauauagaaccc

SEQ ID NO: 659551 - RNA, 18 nt, Human
gcugcgcgcuuucuccuu

SEQ ID NO: 659552 - RNA, 22 nt, Human
gcuuucuccuucaggacuccca

SEQ ID NO: 659553 - RNA, 22 nt, Human
ggacccccagcaucccgcgucc

SEQ ID NO: 659554 - RNA, 18 nt, Human
ggagcagcccagacccca

SEQ ID NO: 659555 - RNA, 24 nt, Human
uaagaaagcaggaacauugaagaa

SEQ ID NO: 659556 - RNA, 21 nt, Human
ucaugugcagugucucugccu

SEQ ID NO: 659557 - RNA, 20 nt, Human
uccacagaacucccaaaagu

SEQ ID NO: 659558 - RNA, 20 nt, Human
uccacauuuugccuuuugga

SEQ ID NO: 659559 - RNA, 20 nt, Human
ucccgcguccgcccaggccc

SEQ ID NO: 659560 - RNA, 27 nt, Human
uccgcggccgcagcucugcucuaaggc

SEQ ID NO: 659561 - RNA, 19 nt, Human
uccuuaaagaaagaaugaa

SEQ ID NO: 659562 - RNA, 23 nt, Human
uccuucaggacucccagcucugu

SEQ ID NO: 659563 - RNA, 19 nt, Human
uccuuggcaucacaauuuc

SEQ ID NO: 659564 - RNA, 19 nt, Human
ucgcagguacuccagagga

SEQ ID NO: 659565 - RNA, 19 nt, Human
ucugcaacaaccugaaggc

SEQ ID NO: 659566 - RNA, 21 nt, Human
ucugcaacaaccugaaggcuu

SEQ ID NO: 659567 - RNA, 21 nt, Human
ugagacuaauucaauuucuuc

SEQ ID NO: 659568 - RNA, 21 nt, Human
ugcaauguuuaaugaaguacu

SEQ ID NO: 659569 - RNA, 21 nt, Human
ugcuuggggaagggggcggag

SEQ ID NO: 659570 - RNA, 22 nt, Human
ugcuuggggaagggggcggagg

SEQ ID NO: 659571 - RNA, 18 nt, Human
uggcugaagguuugugcu

SEQ ID NO: 659572 - RNA, 20 nt, Human
uggcugaagguuugugcuug

SEQ ID NO: 659573 - RNA, 20 nt, Human
uguaugcacaaucaugugca

SEQ ID NO: 659574 - RNA, 18 nt, Human
ugucaaggccugaaucug

SEQ ID NO: 659575 - RNA, 24 nt, Human
ugugcuuggggaagggggcggagg

SEQ ID NO: 659576 - RNA, 23 nt, Human
uucaauuucuucauuucuuaauu

SEQ ID NO: 659577 - RNA, 21 nt, Human
uuccgcggccgcagcucugcu

SEQ ID NO: 659578 - RNA, 18 nt, Human
uucucacaaauuacacag

SEQ ID NO: 659579 - RNA, 22 nt, Human
uucugagccccgagagcguccc

SEQ ID NO: 659580 - RNA, 21 nt, Human
uugauggggaaauccuuggca

SEQ ID NO: 659581 - RNA, 22 nt, Human
uuucucagcugcuccccuuccg

SEQ ID NO: 659582 - RNA, 18 nt, Human
uuuuuuuuuuuuuuucug

SEQ ID NO: 659583 - RNA, 19 nt, Human
uuuuuuuuuuuuuuucugc

SEQ ID NO: 659584 - RNA, 23 nt, Human
aauaaaaacaaaucuauacugaa

SEQ ID NO: 659585 - RNA, 23 nt, Human
acagaguauuuuacugccaaaac

SEQ ID NO: 659586 - RNA, 21 nt, Human
ccaaaacuuuaaauaucucaa

SEQ ID NO: 659587 - RNA, 23 nt, Human
ggaguggugggcaauuagccugu

SEQ ID NO: 659588 - RNA, 18 nt, Human
uauacugaagucauuuuc

SEQ ID NO: 659589 - RNA, 20 nt, Human
uauuucaauauuccugggag

SEQ ID NO: 659590 - RNA, 24 nt, Human
ugaagucauuuuccuuugugagag

SEQ ID NO: 659591 - RNA, 19 nt, Human
ugagaggaaauaugaaugg

SEQ ID NO: 659592 - RNA, 27 nt, Human
ugccaaaacuuuaaauaucucaagagc

SEQ ID NO: 659593 - RNA, 24 nt, Human
uuuaaauaucucaagagcauacca

SEQ ID NO: 659594 - RNA, 24 nt, Human
aaacuucugggcucaagcgauccu

SEQ ID NO: 659595 - RNA, 24 nt, Human
aaagugcugggauuacaggcauga

SEQ ID NO: 659596 - RNA, 22 nt, Human
aagagacagggucuugcucugu

SEQ ID NO: 659597 - RNA, 21 nt, Human
aagcgauucuccugccuuggc

SEQ ID NO: 659598 - RNA, 19 nt, Human
aagugcugggauuacaggc

SEQ ID NO: 659599 - RNA, 21 nt, Human
aagugcugggauuacaggcau

SEQ ID NO: 659600 - RNA, 26 nt, Human
aagugcugggauuacaggcaugagcc

SEQ ID NO: 659601 - RNA, 23 nt, Human
aauagcugggacuacaggcaugu

SEQ ID NO: 659602 - RNA, 22 nt, Human
accucacccagccuccucauca

SEQ ID NO: 659603 - RNA, 21 nt, Human
agcagcgcaggggacaggccc

SEQ ID NO: 659604 - RNA, 18 nt, Human
agccaccucacccagccu

SEQ ID NO: 659605 - RNA, 18 nt, Human
agccuccugaauagcugg

SEQ ID NO: 659606 - RNA, 23 nt, Human
agggcaguggcccgaucacggcu

SEQ ID NO: 659607 - RNA, 23 nt, Human
agggucuugcuguguugccaggc

SEQ ID NO: 659608 - RNA, 18 nt, Human
agugcugggauuacaggc

SEQ ID NO: 659609 - RNA, 19 nt, Human
agugucgacucgggggcag

SEQ ID NO: 659610 - RNA, 24 nt, Human
caaagugcugggauuacaggcaug

SEQ ID NO: 659611 - RNA, 18 nt, Human
caacagcaggagcagcag

SEQ ID NO: 659612 - RNA, 20 nt, Human
caagcgauccuccugccuca

SEQ ID NO: 659613 - RNA, 22 nt, Human
caagcgauccuccugccucagc

SEQ ID NO: 659614 - RNA, 27 nt, Human
caagcgauccuccugccucagccuccu

SEQ ID NO: 659615 - RNA, 25 nt, Human
caccucacccagccuccucaucacc

SEQ ID NO: 659616 - RNA, 21 nt, Human
cagcaggcucggccacugggu

SEQ ID NO: 659617 - RNA, 23 nt, Human
cagggucuugcucuguugcccag

SEQ ID NO: 659618 - RNA, 18 nt, Human
caucagacuggaaacucc

SEQ ID NO: 659619 - RNA, 23 nt, Human
ccaaagugcugggauuacaggca

SEQ ID NO: 659620 - RNA, 24 nt, Human
ccaaagugcugggauuacaggcau

SEQ ID NO: 659621 - RNA, 23 nt, Human
ccaccucacccagccuccucauc

SEQ ID NO: 659622 - RNA, 24 nt, Human
cccaaagugcugggauuacaggca

SEQ ID NO: 659623 - RNA, 24 nt, Human
ccccaaagugcugggauuacaggc

SEQ ID NO: 659624 - RNA, 21 nt, Human
ccucacccagccuccucauca

SEQ ID NO: 659625 - RNA, 22 nt, Human
ccuccugccucagccuccugaa

SEQ ID NO: 659626 - RNA, 24 nt, Human
ccugaauagcugggacuacaggca

SEQ ID NO: 659627 - RNA, 24 nt, Human
ccugccucagccuccugaauagcu

SEQ ID NO: 659628 - RNA, 20 nt, Human
cgacucgggggcaggagcag

SEQ ID NO: 659629 - RNA, 19 nt, Human
cggccacugggugggccuc

SEQ ID NO: 659630 - RNA, 24 nt, Human
cucaagcgauccuccugccucagc

SEQ ID NO: 659631 - RNA, 24 nt, Human
cuccugaauagcugggacuacagg

SEQ ID NO: 659632 - RNA, 23 nt, Human
cugagucuucccccgcagaguga

SEQ ID NO: 659633 - RNA, 23 nt, Human
cuucugggcucaagcgauccucc

SEQ ID NO: 659634 - RNA, 25 nt, Human
gaauagcugggacuacaggcaugug

SEQ ID NO: 659635 - RNA, 21 nt, Human
gagacagggucuugcucuguu

SEQ ID NO: 659636 - RNA, 21 nt, Human
gagcucuggagggcagaaaug

SEQ ID NO: 659637 - RNA, 18 nt, Human
gauuacaggcaugagcca

SEQ ID NO: 659638 - RNA, 23 nt, Human
gauuacaggcaugagccaccuca

SEQ ID NO: 659639 - RNA, 24 nt, Human
gauuacaggcaugagccaccucac

SEQ ID NO: 659640 - RNA, 18 nt, Human
gccuaaagcgauucuccu

SEQ ID NO: 659641 - RNA, 23 nt, Human
gcgauccuccugccucagccucc

SEQ ID NO: 659642 - RNA, 19 nt, Human
ggacuacaggcaugugcca

SEQ ID NO: 659643 - RNA, 19 nt, Human
ggauuacaggcaugagcca

SEQ ID NO: 659644 - RNA, 21 nt, Human
ggcaacagcaggagcagcagc

SEQ ID NO: 659645 - RNA, 20 nt, Human
ggcugcaagcucucccccag

SEQ ID NO: 659646 - RNA, 20 nt, Human
gggcucaagcgauccuccug

SEQ ID NO: 659647 - RNA, 22 nt, Human
gggcucaagcgauccuccugcc

SEQ ID NO: 659648 - RNA, 23 nt, Human
guggaucucuugcaggugggcag

SEQ ID NO: 659649 - RNA, 20 nt, Human
uacaggcaugagccaccuca

SEQ ID NO: 659650 - RNA, 19 nt, Human
uacaggcaugugccaccac

SEQ ID NO: 659651 - RNA, 18 nt, Human
ucacccagccuccucauc

SEQ ID NO: 659652 - RNA, 24 nt, Human
ucauugcagccucaaacuucuggg

SEQ ID NO: 659653 - RNA, 20 nt, Human
uccacagugucgacucgggg

SEQ ID NO: 659654 - RNA, 25 nt, Human
uccaucagacuggaaacucccagag

SEQ ID NO: 659655 - RNA, 20 nt, Human
ucccagagcugggggaugau

SEQ ID NO: 659656 - RNA, 20 nt, Human
uccccaaagugcugggauua

SEQ ID NO: 659657 - RNA, 24 nt, Human
uccccaaagugcugggauuacagg

SEQ ID NO: 659658 - RNA, 18 nt, Human
ucccccaggugggggaag

SEQ ID NO: 659659 - RNA, 19 nt, Human
ucccccaucaguuugggag

SEQ ID NO: 659660 - RNA, 26 nt, Human
uccuccugccucagccuccugaauag

SEQ ID NO: 659661 - RNA, 24 nt, Human
uccugaauagcugggacuacaggc

SEQ ID NO: 659662 - RNA, 19 nt, Human
ucucuguggacagggacug

SEQ ID NO: 659663 - RNA, 18 nt, Human
ucuugcucuguugcccag

SEQ ID NO: 659664 - RNA, 22 nt, Human
ucuugcucuguugcccagucua

SEQ ID NO: 659665 - RNA, 24 nt, Human
ucuugcucuguugcccagucuaaa

SEQ ID NO: 659666 - RNA, 18 nt, Human
ucuugcuguguugccagg

SEQ ID NO: 659667 - RNA, 22 nt, Human
ucuugcuguguugccaggcugg

SEQ ID NO: 659668 - RNA, 23 nt, Human
ucuugcuguguugccaggcuggu

SEQ ID NO: 659669 - RNA, 26 nt, Human
ugccaccacgcuuggcuauguuuuuu

SEQ ID NO: 659670 - RNA, 27 nt, Human
ugccucagccuccugaauagcugggac

SEQ ID NO: 659671 - RNA, 19 nt, Human
ugccuuggcuccccaaagu

SEQ ID NO: 659672 - RNA, 23 nt, Human
ugcuguguugccaggcuggucuc

SEQ ID NO: 659673 - RNA, 19 nt, Human
uggagggcagaaaugugga

SEQ ID NO: 659674 - RNA, 18 nt, Human
ugggacuacaggcaugug

SEQ ID NO: 659675 - RNA, 21 nt, Human
ugggacuacaggcaugugcca

SEQ ID NO: 659676 - RNA, 22 nt, Human
ugggacuacaggcaugugccac

SEQ ID NO: 659677 - RNA, 24 nt, Human
ugggacuacaggcaugugccacca

SEQ ID NO: 659678 - RNA, 18 nt, Human
ugggauuacaggcaugag

SEQ ID NO: 659679 - RNA, 19 nt, Human
ugggauuacaggcaugagc

SEQ ID NO: 659680 - RNA, 21 nt, Human
ugggauuacaggcaugagcca

SEQ ID NO: 659681 - RNA, 22 nt, Human
ugggauuacaggcaugagccac

SEQ ID NO: 659682 - RNA, 23 nt, Human
ugggauuacaggcaugagccacc

SEQ ID NO: 659683 - RNA, 23 nt, Human
ugggauuacaggcaugagccacc

SEQ ID NO: 659684 - RNA, 25 nt, Human
ugggauuacaggcaugagccaccuc

SEQ ID NO: 659685 - RNA, 26 nt, Human
ugggauuacaggcaugagccaccuca

SEQ ID NO: 659686 - RNA, 27 nt, Human
ugggauuacaggcaugagccaccucac

SEQ ID NO: 659687 - RNA, 24 nt, Human
ugggcucaagcgauccuccugccu

SEQ ID NO: 659688 - RNA, 19 nt, Human
ugguagagauagggucuug

SEQ ID NO: 659689 - RNA, 24 nt, Human
ugguagagauagggucuugcugug

SEQ ID NO: 659690 - RNA, 22 nt, Human
uguguugccaggcuggucucaa

SEQ ID NO: 659691 - RNA, 23 nt, Human
uguguugccaggcuggucucaaa

SEQ ID NO: 659692 - RNA, 21 nt, Human
uguugccaggcuggucucaaa

SEQ ID NO: 659693 - RNA, 24 nt, Human
uucaucacuuuuuuuuucaagaga

SEQ ID NO: 659694 - RNA, 26 nt, Human
uucaucacuuuuuuuuucaagagaca

SEQ ID NO: 659695 - RNA, 24 nt, Human
uucugggcucaagcgauccuccug

SEQ ID NO: 659696 - RNA, 23 nt, Human
uugcagccucaaacuucugggcu

SEQ ID NO: 659697 - RNA, 24 nt, Human
uugguagagauagggucuugcugu

SEQ ID NO: 659698 - RNA, 24 nt, Human
uuuuugguagagauagggucuugc

SEQ ID NO: 659699 - RNA, 22 nt, Human
uuuuuugguagagauagggucu

SEQ ID NO: 659700 - RNA, 24 nt, Human
uuuuuuuuuuuuuuuuuccucuuu

SEQ ID NO: 659701 - RNA, 23 nt, Human
aaaaaaaaaaaaaaaugaaggag

SEQ ID NO: 659702 - RNA, 18 nt, Human
aaacagaacaaagaccaa

SEQ ID NO: 659703 - RNA, 19 nt, Human
aaacagaacaaagaccaaa

SEQ ID NO: 659704 - RNA, 19 nt, Human
aaagguuuagggcaggacg

SEQ ID NO: 659705 - RNA, 24 nt, Human
aacagaacaaagaccaaaaaaaaa

SEQ ID NO: 659706 - RNA, 21 nt, Human
aagaaucaugauauuugcugg

SEQ ID NO: 659707 - RNA, 26 nt, Human
acagggaaaaauauuuaguuuguuca

SEQ ID NO: 659708 - RNA, 20 nt, Human
accaaaacagaacaaagacc

SEQ ID NO: 659709 - RNA, 22 nt, Human
agaggcggggagggagcuggag

SEQ ID NO: 659710 - RNA, 27 nt, Human
agaggcggggagggagcuggagagggc

SEQ ID NO: 659711 - RNA, 20 nt, Human
aggacgagcaacaagcagag

SEQ ID NO: 659712 - RNA, 23 nt, Human
aggcggggagggagcuggagagg

SEQ ID NO: 659713 - RNA, 24 nt, Human
aggcggggagggagcuggagaggg

SEQ ID NO: 659714 - RNA, 25 nt, Human
aggcggggagggagcuggagagggc

SEQ ID NO: 659715 - RNA, 21 nt, Human
agggcagcuggggaauaacgu

SEQ ID NO: 659716 - RNA, 19 nt, Human
auuuuucuaaccaggaaag

SEQ ID NO: 659717 - RNA, 18 nt, Human
cacagacaggcagcuuau

SEQ ID NO: 659718 - RNA, 20 nt, Human
caccaaaacagaacaaagac

SEQ ID NO: 659719 - RNA, 22 nt, Human
caccaaaacagaacaaagacca

SEQ ID NO: 659720 - RNA, 23 nt, Human
caccaaaacagaacaaagaccaa

SEQ ID NO: 659721 - RNA, 20 nt, Human
caccaccaaaacagaacaaa

SEQ ID NO: 659722 - RNA, 22 nt, Human
caccaccaaaacagaacaaaga

SEQ ID NO: 659723 - RNA, 19 nt, Human
cagcuggggaauaacgugg

SEQ ID NO: 659724 - RNA, 24 nt, Human
cccacacgugaaaugcugcaaagg

SEQ ID NO: 659725 - RNA, 27 nt, Human
cccacacgugaaaugcugcaaagggcu

SEQ ID NO: 659726 - RNA, 28 nt, Human
cuggagccuuccacacccggaggugcca

SEQ ID NO: 659727 - RNA, 19 nt, Human
gcggggagggagcuggaga

SEQ ID NO: 659728 - RNA, 19 nt, Human
ggagcuggagagggcagcu

SEQ ID NO: 659729 - RNA, 20 nt, Human
ggggagggagcuggagaggg

SEQ ID NO: 659730 - RNA, 18 nt, Human
uaccaccaccaaaacaga

SEQ ID NO: 659731 - RNA, 20 nt, Human
uagggcaggacgagcaacaa

SEQ ID NO: 659732 - RNA, 18 nt, Human
ucaccagucaaauucaag

SEQ ID NO: 659733 - RNA, 26 nt, Human
ucacuggagccuuccacaaccggagg

SEQ ID NO: 659734 - RNA, 19 nt, Human
ugaggacagguggagucca

SEQ ID NO: 659735 - RNA, 22 nt, Human
ugaggacagguggaguccauag

SEQ ID NO: 659736 - RNA, 23 nt, Human
uggguaucaucaaaagaaauucu

SEQ ID NO: 659737 - RNA, 24 nt, Human
uuuuuuuuuuuuuuuuugggaggg

SEQ ID NO: 659738 - RNA, 24 nt, Human
uuuuuuuuuuuuuuuuuuuuuggg

SEQ ID NO: 659739 - RNA, 33 nt, Human
aaaaaaucaaccaaaaaaugaaaaguaucauua

SEQ ID NO: 659740 - RNA, 20 nt, Human
aaaaagcaucccuuuaauaa

SEQ ID NO: 659741 - RNA, 18 nt, Human
aaaaaucaggaaagaccc

SEQ ID NO: 659742 - RNA, 21 nt, Human
aaacgcuuugagagaaaaggc

SEQ ID NO: 659743 - RNA, 22 nt, Human
aaagcccauuaaauaagagucu

SEQ ID NO: 659744 - RNA, 19 nt, Human
aaaugggaacaguaacaau

SEQ ID NO: 659745 - RNA, 18 nt, Human
aaccuguuucuuagccua

SEQ ID NO: 659746 - RNA, 22 nt, Human
aagagucucaaacaaagguuuu

SEQ ID NO: 659747 - RNA, 21 nt, Human
aagcagcacaggaagccguac

SEQ ID NO: 659748 - RNA, 20 nt, Human
aagcuuucuuuucugaaauu

SEQ ID NO: 659749 - RNA, 19 nt, Human
aauaaaaacaagaacuugg

SEQ ID NO: 659750 - RNA, 20 nt, Human
accaaaaaaugaaaaguauc

SEQ ID NO: 659751 - RNA, 21 nt, Human
accacaauuuauaucugcuau

SEQ ID NO: 659752 - RNA, 21 nt, Human
agaaaacagaaacugcuuguc

SEQ ID NO: 659753 - RNA, 22 nt, Human
agacagagaugauacuccaaac

SEQ ID NO: 659754 - RNA, 23 nt, Human
agacagagaugauacuccaaaca

SEQ ID NO: 659755 - RNA, 25 nt, Human
agcaccaaaauguuuaguguauuug

SEQ ID NO: 659756 - RNA, 18 nt, Human
agcagaaggcaggcaugg

SEQ ID NO: 659757 - RNA, 19 nt, Human
agcaguuacaguuuccugc

SEQ ID NO: 659758 - RNA, 22 nt, Human
agcuggggagggagcagaaggc

SEQ ID NO: 659759 - RNA, 23 nt, Human
aggcagagggcuggguacugggg

SEQ ID NO: 659760 - RNA, 20 nt, Human
aggcggcggcagcccucugg

SEQ ID NO: 659761 - RNA, 21 nt, Human
agguaggccauggcuuguugg

SEQ ID NO: 659762 - RNA, 21 nt, Human
agugcuuagaggaguguuugg

SEQ ID NO: 659763 - RNA, 22 nt, Human
auacaaaaaggaauggccaccu

SEQ ID NO: 659764 - RNA, 23 nt, Human
auacaaauuauuucaagaaacca

SEQ ID NO: 659765 - RNA, 18 nt, Human
aucuaaucccuuccucca

SEQ ID NO: 659766 - RNA, 22 nt, Human
auuagcccacaugaaagauaaa

SEQ ID NO: 659767 - RNA, 23 nt, Human
auugcaauuaauuaacuugaaaa

SEQ ID NO: 659768 - RNA, 20 nt, Human
caaagcucaaaauauccccu

SEQ ID NO: 659769 - RNA, 28 nt, Human
caauacccuaacauaaacccuagucucc

SEQ ID NO: 659770 - RNA, 22 nt, Human
caaucacuguuuuggaauugau

SEQ ID NO: 659771 - RNA, 22 nt, Human
cacaggaagccguacacuuuug

SEQ ID NO: 659772 - RNA, 23 nt, Human
cacaggaagccguacacuuuuga

SEQ ID NO: 659773 - RNA, 18 nt, Human
caccuccaagucucaauu

SEQ ID NO: 659774 - RNA, 23 nt, Human
cacuuugugccaggcagagggcu

SEQ ID NO: 659775 - RNA, 24 nt, Human
cagaagccauaauuauuuugggaa

SEQ ID NO: 659776 - RNA, 20 nt, Human
cagaauuaacaggaaaugac

SEQ ID NO: 659777 - RNA, 23 nt, Human
cagcacaggaagccguacacuuu

SEQ ID NO: 659778 - RNA, 19 nt, Human
cagcccagagcccagacag

SEQ ID NO: 659779 - RNA, 24 nt, Human
cagcccagagcccagacagagaug

SEQ ID NO: 659780 - RNA, 22 nt, Human
cagcuaaaauccugaagaaaaa

SEQ ID NO: 659781 - RNA, 19 nt, Human
caggaaaugacugcaugac

SEQ ID NO: 659782 - RNA, 18 nt, Human
caugaaaagucaccucca

SEQ ID NO: 659783 - RNA, 25 nt, Human
caugaaagauaaaauaaagggcugg

SEQ ID NO: 659784 - RNA, 18 nt, Human
ccaaaccagcuggggagg

SEQ ID NO: 659785 - RNA, 20 nt, Human
ccaaagcucaaaauaucccc

SEQ ID NO: 659786 - RNA, 24 nt, Human
ccaaagcucaaaauauccccuaaa

SEQ ID NO: 659787 - RNA, 19 nt, Human
ccaauuuuggaaauagaau

SEQ ID NO: 659788 - RNA, 22 nt, Human
ccauaaaaaucaggaaagaccc

SEQ ID NO: 659789 - RNA, 19 nt, Human
cccacaugaaagauaaaau

SEQ ID NO: 659790 - RNA, 22 nt, Human
ccccuaaaauuccauaaaaauc

SEQ ID NO: 659791 - RNA, 25 nt, Human
cccuuaaaaagugcaauugccuucu

SEQ ID NO: 659792 - RNA, 21 nt, Human
ccuugguuaucuggggaaucu

SEQ ID NO: 659793 - RNA, 22 nt, Human
cgcaaguaaaggaaagaaagug

SEQ ID NO: 659794 - RNA, 21 nt, Human
cuaagcaccaaaauguuuagu

SEQ ID NO: 659795 - RNA, 20 nt, Human
cuccaaacaugaaaagucac

SEQ ID NO: 659796 - RNA, 21 nt, Human
cuccaaacaugaaaagucacc

SEQ ID NO: 659797 - RNA, 21 nt, Human
cuucacuuuuggaaauucuuc

SEQ ID NO: 659798 - RNA, 19 nt, Human
cuuccaagucugaccagag

SEQ ID NO: 659799 - RNA, 21 nt, Human
gaaagacccuagcuauugccc

SEQ ID NO: 659800 - RNA, 20 nt, Human
gaaauucuuccaagucugac

SEQ ID NO: 659801 - RNA, 21 nt, Human
gaaauucuuccaagucugacc

SEQ ID NO: 659802 - RNA, 19 nt, Human
gaacuuggagaggcggcgg

SEQ ID NO: 659803 - RNA, 22 nt, Human
gaaguuuaagggauaugaugga

SEQ ID NO: 659804 - RNA, 21 nt, Human
gaccuuggggugaguuacuag

SEQ ID NO: 659805 - RNA, 20 nt, Human
gagauauuuuucucgggaga

SEQ ID NO: 659806 - RNA, 19 nt, Human
gagaugacagaagccauaa

SEQ ID NO: 659807 - RNA, 21 nt, Human
gcaccgcgggggccacaagaa

SEQ ID NO: 659808 - RNA, 18 nt, Human
gcaggcauggggagaaag

SEQ ID NO: 659809 - RNA, 20 nt, Human
gccgugugaccuugggguga

SEQ ID NO: 659810 - RNA, 22 nt, Human
gccuucuuugucauuucuuugu

SEQ ID NO: 659811 - RNA, 18 nt, Human
ggacugaaugagcuaaua

SEQ ID NO: 659812 - RNA, 20 nt, Human
ggagaaaggaaccaggugcu

SEQ ID NO: 659813 - RNA, 20 nt, Human
gggagggagcagaaggcagg

SEQ ID NO: 659814 - RNA, 21 nt, Human
ggucucuuuuagcuccaaacu

SEQ ID NO: 659815 - RNA, 22 nt, Human
uaaaaaaggacauaccaagaua

SEQ ID NO: 659816 - RNA, 18 nt, Human
uaaaaagaaauccacuaa

SEQ ID NO: 659817 - RNA, 20 nt, Human
uaaaaagaaauccacuaagc

SEQ ID NO: 659818 - RNA, 21 nt, Human
uaaaaagaaauccacuaagca

SEQ ID NO: 659819 - RNA, 19 nt, Human
uaaacccugucccagauau

SEQ ID NO: 659820 - RNA, 20 nt, Human
uaaagggcugagaugggggg

SEQ ID NO: 659821 - RNA, 20 nt, Human
uaacuacaccccacuccagc

SEQ ID NO: 659822 - RNA, 18 nt, Human
uaacuacaccccacuccc

SEQ ID NO: 659823 - RNA, 19 nt, Human
uaaguguugaagcauauuu

SEQ ID NO: 659824 - RNA, 21 nt, Human
uaauaacuacaccccacucca

SEQ ID NO: 659825 - RNA, 22 nt, Human
uaaucccuuccuccaaaaaccc

SEQ ID NO: 659826 - RNA, 21 nt, Human
uacaagacaaaaauagcuuag

SEQ ID NO: 659827 - RNA, 25 nt, Human
uacuucugucuuugugcuuuuagau

SEQ ID NO: 659828 - RNA, 19 nt, Human
uagaaaacagaaacugcuu

SEQ ID NO: 659829 - RNA, 20 nt, Human
uagcauaaagcuuuacuucu

SEQ ID NO: 659830 - RNA, 23 nt, Human
uaggagaagcaaaacuguagaga

SEQ ID NO: 659831 - RNA, 27 nt, Human
uaucaauacccuaacauaaacccuagu

SEQ ID NO: 659832 - RNA, 19 nt, Human
uaugcuacuuaaguguuga

SEQ ID NO: 659833 - RNA, 20 nt, Human
uccaaacaugaaaagucacc

SEQ ID NO: 659834 - RNA, 22 nt, Human
uccccaggcuucaaaucucuca

SEQ ID NO: 659835 - RNA, 21 nt, Human
uccgcaccgcgggggccacaa

SEQ ID NO: 659836 - RNA, 24 nt, Human
uccgcaccgcgggggccacaagaa

SEQ ID NO: 659837 - RNA, 24 nt, Human
ucuaaucuaucaauacccuaacau

SEQ ID NO: 659838 - RNA, 18 nt, Human
ucuagauauauuuuauau

SEQ ID NO: 659839 - RNA, 19 nt, Human
ucucgggagaugcuuaggu

SEQ ID NO: 659840 - RNA, 22 nt, Human
ucugcacaaggcaccgugcuaa

SEQ ID NO: 659841 - RNA, 24 nt, Human
ucuggcucuauuaccaauuuugga

SEQ ID NO: 659842 - RNA, 18 nt, Human
ugaaaaguaucauuucag

SEQ ID NO: 659843 - RNA, 23 nt, Human
ugaaauuagauuaugggguaaac

SEQ ID NO: 659844 - RNA, 20 nt, Human
ugagaacccaaagcucaaaa

SEQ ID NO: 659845 - RNA, 21 nt, Human
ugagaacccaaagcucaaaau

SEQ ID NO: 659846 - RNA, 19 nt, Human
ugagucucagucccaccau

SEQ ID NO: 659847 - RNA, 21 nt, Human
ugaguguuaaaauaaagcuuu

SEQ ID NO: 659848 - RNA, 22 nt, Human
ugaugugugacuaugcaacuac

SEQ ID NO: 659849 - RNA, 22 nt, Human
ugcaacagugcuauucuagugc

SEQ ID NO: 659850 - RNA, 20 nt, Human
ugcaauuaauuaacuugaaa

SEQ ID NO: 659851 - RNA, 18 nt, Human
ugcacuggaauuuccaac

SEQ ID NO: 659852 - RNA, 23 nt, Human
uggaaauagaauuuaguagagaa

SEQ ID NO: 659853 - RNA, 18 nt, Human
uggaacauccaacuuauc

SEQ ID NO: 659854 - RNA, 18 nt, Human
uggaauuuuguguuccuc

SEQ ID NO: 659855 - RNA, 22 nt, Human
uggggaaaagugcucucugagg

SEQ ID NO: 659856 - RNA, 19 nt, Human
uggggagggagcagaaggc

SEQ ID NO: 659857 - RNA, 24 nt, Human
uggggggugcuuaaauacuuugcc

SEQ ID NO: 659858 - RNA, 22 nt, Human
ugguaucuguguagagucauga

SEQ ID NO: 659859 - RNA, 24 nt, Human
ugugaaaucauugucucccagaau

SEQ ID NO: 659860 - RNA, 22 nt, Human
uguguaaagugcuuagaggagu

SEQ ID NO: 659861 - RNA, 20 nt, Human
uguguuccucuauguaaugg

SEQ ID NO: 659862 - RNA, 18 nt, Human
uguugugguccucaacaa

SEQ ID NO: 659863 - RNA, 22 nt, Human
uuaaaauaaagcuuucuuuucu

SEQ ID NO: 659864 - RNA, 22 nt, Human
uuagagggcagguuccauuuga

SEQ ID NO: 659865 - RNA, 21 nt, Human
uucaaaaauaaaaacaagaac

SEQ ID NO: 659866 - RNA, 19 nt, Human
uucaaucacuguuuuggaa

SEQ ID NO: 659867 - RNA, 22 nt, Human
uucuuagccuauacaaaaagga

SEQ ID NO: 659868 - RNA, 19 nt, Human
uugaaagauaaagguacaa

SEQ ID NO: 659869 - RNA, 19 nt, Human
uuggcaacuguggucaauc

SEQ ID NO: 659870 - RNA, 22 nt, Human
uuggcaguaguaggggcccuau

SEQ ID NO: 659871 - RNA, 22 nt, Human
uuuauucaggggugggucaaag

SEQ ID NO: 659872 - RNA, 20 nt, Human
uuucucgggagaugcuuagg

SEQ ID NO: 659873 - RNA, 20 nt, Human
aaaguguuagugccagguga

SEQ ID NO: 659874 - RNA, 18 nt, Human
aagcccauuaucuguguu

SEQ ID NO: 659875 - RNA, 25 nt, Human
aguaguuuuauuuccccuaugagaa

SEQ ID NO: 659876 - RNA, 19 nt, Human
augaagccugaagauugaa

SEQ ID NO: 659877 - RNA, 22 nt, Human
cagucuugccuuggauguuccc

SEQ ID NO: 659878 - RNA, 24 nt, Human
ccccucuucugucuuuaguauccc

SEQ ID NO: 659879 - RNA, 18 nt, Human
cccugcccuagccccuuc

SEQ ID NO: 659880 - RNA, 21 nt, Human
cccugcccuagccccuucuuc

SEQ ID NO: 659881 - RNA, 27 nt, Human
ccucaccccucagcauugcuccuucuc

SEQ ID NO: 659882 - RNA, 18 nt, Human
cuccccugcccuagcccc

SEQ ID NO: 659883 - RNA, 23 nt, Human
cucuaagggccaccuuccccucu

SEQ ID NO: 659884 - RNA, 18 nt, Human
cuggucucagagucaaaa

SEQ ID NO: 659885 - RNA, 24 nt, Human
cuguuuccuguccuggggcuggag

SEQ ID NO: 659886 - RNA, 19 nt, Human
gagagugggguaugugguc

SEQ ID NO: 659887 - RNA, 18 nt, Human
ggaaggaaugaagccuga

SEQ ID NO: 659888 - RNA, 21 nt, Human
ggagagugggguaugugguca

SEQ ID NO: 659889 - RNA, 24 nt, Human
ggcuggucucagagucaaaagcac

SEQ ID NO: 659890 - RNA, 19 nt, Human
gggaaggaaugaagccuga

SEQ ID NO: 659891 - RNA, 24 nt, Human
gggcuggagugggagagaggccuc

SEQ ID NO: 659892 - RNA, 21 nt, Human
gggggugggcuggucucagag

SEQ ID NO: 659893 - RNA, 20 nt, Human
ggggugggcuggucucagag

SEQ ID NO: 659894 - RNA, 27 nt, Human
gggguucucugggcugugccuccuuuc

SEQ ID NO: 659895 - RNA, 18 nt, Human
guggaaugugcuaggcuc

SEQ ID NO: 659896 - RNA, 22 nt, Human
uaguuuuauuuccccuaugaga

SEQ ID NO: 659897 - RNA, 18 nt, Human
uccacuagcuguuugggg

SEQ ID NO: 659898 - RNA, 20 nt, Human
uccccugcccuagccccuuc

SEQ ID NO: 659899 - RNA, 23 nt, Human
ucccuuaugggagaaauagagau

SEQ ID NO: 659900 - RNA, 22 nt, Human
uccuggagagugggguaugugg

SEQ ID NO: 659901 - RNA, 20 nt, Human
uccuguccuggggcuggagu

SEQ ID NO: 659902 - RNA, 24 nt, Human
uccuugguucacaugggagggggc

SEQ ID NO: 659903 - RNA, 23 nt, Human
ucuggcaucuguccaagcucugu

SEQ ID NO: 659904 - RNA, 21 nt, Human
ucugucuuuaguauccccaaa

SEQ ID NO: 659905 - RNA, 20 nt, Human
ugcccuagccccuucuuccu

SEQ ID NO: 659906 - RNA, 21 nt, Human
ugcccuagccccuucuuccug

SEQ ID NO: 659907 - RNA, 25 nt, Human
uggaacagagccucuggcaucuguc

SEQ ID NO: 659908 - RNA, 22 nt, Human
uggaaugugcuaggcucagggc

SEQ ID NO: 659909 - RNA, 18 nt, Human
ugggaaggaaugaagccu

SEQ ID NO: 659910 - RNA, 23 nt, Human
ugggaaggaaugaagccugaaga

SEQ ID NO: 659911 - RNA, 21 nt, Human
ugggcugugccuccuuuccuu

SEQ ID NO: 659912 - RNA, 25 nt, Human
uucaccuuuuucaggcaguucuguu

SEQ ID NO: 659913 - RNA, 24 nt, Human
uuuuuucauauuuuaguaguuuua

SEQ ID NO: 659914 - RNA, 25 nt, Human
uuuuuuuuuuuuuuuuucauauuuu

SEQ ID NO: 659915 - RNA, 21 nt, Human
aacuauuggacaaacugaugc

SEQ ID NO: 659916 - RNA, 19 nt, Human
aagauauuaaccagaaaag

SEQ ID NO: 659917 - RNA, 21 nt, Human
aaugucagaaguaucugagcc

SEQ ID NO: 659918 - RNA, 23 nt, Human
augggccugagcuuucuuccugg

SEQ ID NO: 659919 - RNA, 22 nt, Human
cagcugguuucucugaaaguuc

SEQ ID NO: 659920 - RNA, 25 nt, Human
cuauugccaaguucucuuuuucaac

SEQ ID NO: 659921 - RNA, 18 nt, Human
cugaagacgcugugguuc

SEQ ID NO: 659922 - RNA, 20 nt, Human
cugagcuuucuuccuggcuu

SEQ ID NO: 659923 - RNA, 20 nt, Human
cugggcacuaagggguccug

SEQ ID NO: 659924 - RNA, 22 nt, Human
cugugcuauguaaaggaggauc

SEQ ID NO: 659925 - RNA, 23 nt, Human
cuuuuugcuucuuuuccuggagg

SEQ ID NO: 659926 - RNA, 22 nt, Human
gcuucuuuuccuggaggaguug

SEQ ID NO: 659927 - RNA, 22 nt, Human
guguacuuauuuucucugcuga

SEQ ID NO: 659928 - RNA, 21 nt, Human
uaaggugucaacauuuuaaaa

SEQ ID NO: 659929 - RNA, 18 nt, Human
uauagcucauaccuggga

SEQ ID NO: 659930 - RNA, 21 nt, Human
ucaaugcuuucagagucauca

SEQ ID NO: 659931 - RNA, 18 nt, Human
ucacagccauuuaauuug

SEQ ID NO: 659932 - RNA, 22 nt, Human
ucacuugcuucauuuccagaag

SEQ ID NO: 659933 - RNA, 22 nt, Human
ucucugcugauuuaacuuuucu

SEQ ID NO: 659934 - RNA, 18 nt, Human
ugagcuuucuuccuggcu

SEQ ID NO: 659935 - RNA, 19 nt, Human
ugcuauguaaaggaggauc

SEQ ID NO: 659936 - RNA, 18 nt, Human
ugcuucauuuccagaagu

SEQ ID NO: 659937 - RNA, 24 nt, Human
uggaggaguugaagagagagacag

SEQ ID NO: 659938 - RNA, 19 nt, Human
uucucauuuucacccagcc

SEQ ID NO: 659939 - RNA, 19 nt, Human
uucucuuuuucaacagagg

SEQ ID NO: 659940 - RNA, 20 nt, Human
uucuuccuuuugucaugaga

SEQ ID NO: 659941 - RNA, 24 nt, Human
uucuugauuucuuccuuuugucau

SEQ ID NO: 659942 - RNA, 21 nt, Human
uugaagagagagacaguccac

SEQ ID NO: 659943 - RNA, 19 nt, Human
uugcuucauuuccagaagu

SEQ ID NO: 659944 - RNA, 24 nt, Human
uuuaacauuguucacagccauuua

SEQ ID NO: 659945 - RNA, 20 nt, Human
uuuuuuuuaauuuuacaagu

SEQ ID NO: 659946 - RNA, 24 nt, Human
uuuuuuuuuuuuuuuuuuaauuuu

SEQ ID NO: 659947 - RNA, 19 nt, Human
aaguggcccggggccgagc

SEQ ID NO: 659948 - RNA, 21 nt, Human
aggcagcacccugcccccccc

SEQ ID NO: 659949 - RNA, 24 nt, Human
aggugccggguucgagcccggaac

SEQ ID NO: 659950 - RNA, 18 nt, Human
cacccaguuuccaggagu

SEQ ID NO: 659951 - RNA, 21 nt, Human
caucuuggcucagccaauucc

SEQ ID NO: 659952 - RNA, 22 nt, Human
ccaauucccacccaguuuccag

SEQ ID NO: 659953 - RNA, 27 nt, Human
ccgggugacaggaggguggucuucccu

SEQ ID NO: 659954 - RNA, 22 nt, Human
ccucugcaggugaggcgggggc

SEQ ID NO: 659955 - RNA, 22 nt, Human
cuccccuucccgccccgugaag

SEQ ID NO: 659956 - RNA, 22 nt, Human
gaacgggcuuccacugaggucc

SEQ ID NO: 659957 - RNA, 25 nt, Human
gaaggcagcacccugccccccccca

SEQ ID NO: 659958 - RNA, 19 nt, Human
gacucuucuuccccucccc

SEQ ID NO: 659959 - RNA, 19 nt, Human
gagcagcuguccaauggga

SEQ ID NO: 659960 - RNA, 18 nt, Human
gcagcacccugccccccc

SEQ ID NO: 659961 - RNA, 22 nt, Human
ggggccgagccccgccuccauc

SEQ ID NO: 659962 - RNA, 21 nt, Human
gggggcggcacuccuggugga

SEQ ID NO: 659963 - RNA, 22 nt, Human
gggugacaggaggguggucuuc

SEQ ID NO: 659964 - RNA, 21 nt, Human
guccgggugacaggagggugg

SEQ ID NO: 659965 - RNA, 18 nt, Human
ucaaggcaggguuggagu

SEQ ID NO: 659966 - RNA, 19 nt, Human
uccagggauggggggaacg

SEQ ID NO: 659967 - RNA, 22 nt, Human
ucccucaaggcaggguuggagu

SEQ ID NO: 659968 - RNA, 25 nt, Human
ucucggacggccaccgcugaggccu

SEQ ID NO: 659969 - RNA, 26 nt, Human
ucucggacggccaccgcugaggccuc

SEQ ID NO: 659970 - RNA, 26 nt, Human
ugagacucuucuuccccuccccuucc

SEQ ID NO: 659971 - RNA, 23 nt, Human
ugagguccgggugacaggagggu

SEQ ID NO: 659972 - RNA, 18 nt, Human
ugcgaguccgugucccac

SEQ ID NO: 659973 - RNA, 20 nt, Human
uggcccggggccgagccccg

SEQ ID NO: 659974 - RNA, 22 nt, Human
uucccacccaguuuccaggagu

SEQ ID NO: 659975 - RNA, 23 nt, Human
uucuuccccuccccuucccgccc

SEQ ID NO: 659976 - RNA, 20 nt, Human
uuuuuuuuuuuuuuuugcca

SEQ ID NO: 659977 - RNA, 18 nt, Human
uuuuuuuuuuuuuuuuug

SEQ ID NO: 659978 - RNA, 23 nt, Human
uuuuuuuuuuuuuuuuugccaca

SEQ ID NO: 659979 - RNA, 22 nt, Human
aagcccauggccccgaguccaa

SEQ ID NO: 659980 - RNA, 24 nt, Human
agacgcugggaccgcuacggaacc

SEQ ID NO: 659981 - RNA, 23 nt, Human
cacggccccgaguacaaguccgg

SEQ ID NO: 659982 - RNA, 24 nt, Human
caggaggcccuucccgaguccaag

SEQ ID NO: 659983 - RNA, 22 nt, Human
ccagguccgggccgagcccacg

SEQ ID NO: 659984 - RNA, 19 nt, Human
cccacggcccuacuggcuu

SEQ ID NO: 659985 - RNA, 18 nt, Human
cccacggcgcccagcccc

SEQ ID NO: 659986 - RNA, 23 nt, Human
ccccuuguagggacaggaggcug

SEQ ID NO: 659987 - RNA, 21 nt, Human
cccgcggcugugccgcgaccg

SEQ ID NO: 659988 - RNA, 18 nt, Human
ccgcccggccggcgggac

SEQ ID NO: 659989 - RNA, 22 nt, Human
ccgcuacggaaccgccagaccc

SEQ ID NO: 659990 - RNA, 20 nt, Human
cgcaggucccugcuguccac

SEQ ID NO: 659991 - RNA, 25 nt, Human
cgcccagccccagcugagccggacu

SEQ ID NO: 659992 - RNA, 19 nt, Human
cuucccgaguccaaguccg

SEQ ID NO: 659993 - RNA, 24 nt, Human
gaaccgccagacccacggcgccca

SEQ ID NO: 659994 - RNA, 26 nt, Human
gaaccgccagacccacggcgcccagc

SEQ ID NO: 659995 - RNA, 18 nt, Human
gccccuuguagggacagg

SEQ ID NO: 659996 - RNA, 21 nt, Human
gcgcaggucccugcuguccac

SEQ ID NO: 659997 - RNA, 20 nt, Human
gguagcgcaggucccugcug

SEQ ID NO: 659998 - RNA, 24 nt, Human
ucccgcggcugugccgcgaccgcc

SEQ ID NO: 659999 - RNA, 19 nt, Human
uggccccgaguccaaaucc

SEQ ID NO: 660000 - RNA, 22 nt, Human
ugggaccgcuacggaaccgcca

SEQ ID NO: 660001 - RNA, 20 nt, Human
uuuuuuuuuuuuuuuuccau

SEQ ID NO: 660002 - RNA, 23 nt, Human
uuuuuuuuuuuuuuuuuuccaug

SEQ ID NO: 660003 - RNA, 18 nt, Human
aaaaacaaaacagacaga

SEQ ID NO: 660004 - RNA, 22 nt, Human
aaaaagucccuggcuauaaagg

SEQ ID NO: 660005 - RNA, 20 nt, Human
aaaagucaggcuagugcccu

SEQ ID NO: 660006 - RNA, 21 nt, Human
aaauaagaaaaaagucccugg

SEQ ID NO: 660007 - RNA, 23 nt, Human
aacaaaguucaaaugcccaauaa

SEQ ID NO: 660008 - RNA, 22 nt, Human
aauguugggauuacaggcauga

SEQ ID NO: 660009 - RNA, 18 nt, Human
acacuugguacacauaua

SEQ ID NO: 660010 - RNA, 18 nt, Human
acagucgucaguggacag

SEQ ID NO: 660011 - RNA, 18 nt, Human
acagugcucagaaagaca

SEQ ID NO: 660012 - RNA, 22 nt, Human
acagugcucagaaagacacacu

SEQ ID NO: 660013 - RNA, 19 nt, Human
acgcagccaccugagacuu

SEQ ID NO: 660014 - RNA, 22 nt, Human
acggaguauugcuauguugccc

SEQ ID NO: 660015 - RNA, 20 nt, Human
agccaccacacgcagccacc

SEQ ID NO: 660016 - RNA, 18 nt, Human
auugcuauguugcccagg

SEQ ID NO: 660017 - RNA, 19 nt, Human
caaaaggcugcggagaaca

SEQ ID NO: 660018 - RNA, 27 nt, Human
caagcaguucucccgccugggccuccc

SEQ ID NO: 660019 - RNA, 22 nt, Human
caccacuaggcccaauggcuca

SEQ ID NO: 660020 - RNA, 19 nt, Human
cacugccuuaaaagucagg

SEQ ID NO: 660021 - RNA, 24 nt, Human
cagaaagacacacugccuuaaaag

SEQ ID NO: 660022 - RNA, 21 nt, Human
cagcacuucuggcugguuuga

SEQ ID NO: 660023 - RNA, 26 nt, Human
caggagccuuuggucaccugagacuu

SEQ ID NO: 660024 - RNA, 21 nt, Human
caguaggucuuucaggagccc

SEQ ID NO: 660025 - RNA, 19 nt, Human
caugacaccacuaggccca

SEQ ID NO: 660026 - RNA, 18 nt, Human
ccaaaaagacugcucucc

SEQ ID NO: 660027 - RNA, 21 nt, Human
ccaccacacgcagccaccuga

SEQ ID NO: 660028 - RNA, 23 nt, Human
ccagaauguugggauuacaggca

SEQ ID NO: 660029 - RNA, 24 nt, Human
ccagaauguugggauuacaggcau

SEQ ID NO: 660030 - RNA, 24 nt, Human
cccagaauguugggauuacaggca

SEQ ID NO: 660031 - RNA, 23 nt, Human
ccccaggugcaaggcuaaaccag

SEQ ID NO: 660032 - RNA, 23 nt, Human
ccugccaacuaagcagacauccc

SEQ ID NO: 660033 - RNA, 24 nt, Human
cggaguauugcuauguugcccagg

SEQ ID NO: 660034 - RNA, 19 nt, Human
cuagcuucaggagccuuug

SEQ ID NO: 660035 - RNA, 21 nt, Human
cuaggcccaauggcucagagg

SEQ ID NO: 660036 - RNA, 21 nt, Human
cuccugggcucaagcaguucu

SEQ ID NO: 660037 - RNA, 20 nt, Human
cugguccuggcaguaggucu

SEQ ID NO: 660038 - RNA, 21 nt, Human
cuuaaaugccaccacccacca

SEQ ID NO: 660039 - RNA, 19 nt, Human
cuugacagucgucagugga

SEQ ID NO: 660040 - RNA, 23 nt, Human
gaaaaacaaaacagacagaagaa

SEQ ID NO: 660041 - RNA, 21 nt, Human
gacacauaguauccagcacca

SEQ ID NO: 660042 - RNA, 23 nt, Human
gagccaccacacgcagccaccug

SEQ ID NO: 660043 - RNA, 23 nt, Human
gagccccucagguacucucacac

SEQ ID NO: 660044 - RNA, 18 nt, Human
gauuacaggcaugagcca

SEQ ID NO: 660045 - RNA, 21 nt, Human
gauuacaggcaugagccacca

SEQ ID NO: 660046 - RNA, 22 nt, Human
gauuacaggcaugagccaccac

SEQ ID NO: 660047 - RNA, 20 nt, Human
gauucugaacuccugggcuc

SEQ ID NO: 660048 - RNA, 23 nt, Human
gcuucaggagccuuuggucaccu

SEQ ID NO: 660049 - RNA, 18 nt, Human
ggacugaaccccugccaa

SEQ ID NO: 660050 - RNA, 19 nt, Human
ggauuacaggcaugagcca

SEQ ID NO: 660051 - RNA, 21 nt, Human
guguuauggguauaauuaacu

SEQ ID NO: 660052 - RNA, 21 nt, Human
uaaaccagcagcuccaagggc

SEQ ID NO: 660053 - RNA, 24 nt, Human
uacaauacaugacaccacuaggcc

SEQ ID NO: 660054 - RNA, 21 nt, Human
uacaggcaugagccaccacac

SEQ ID NO: 660055 - RNA, 23 nt, Human
uauguugcccaggcugauucuga

SEQ ID NO: 660056 - RNA, 24 nt, Human
uauguugcccaggcugauucugaa

SEQ ID NO: 660057 - RNA, 23 nt, Human
uauuacaccaaaaagacugcucu

SEQ ID NO: 660058 - RNA, 19 nt, Human
uauugcuauguugcccagg

SEQ ID NO: 660059 - RNA, 23 nt, Human
uauugcuauguugcccaggcuga

SEQ ID NO: 660060 - RNA, 26 nt, Human
ucaaucuuuauccaaaccugguucua

SEQ ID NO: 660061 - RNA, 18 nt, Human
uccaagggcuuggucuac

SEQ ID NO: 660062 - RNA, 24 nt, Human
ucccagaauguugggauuacaggc

SEQ ID NO: 660063 - RNA, 19 nt, Human
uccugggcucaagcaguuc

SEQ ID NO: 660064 - RNA, 21 nt, Human
uccugggcucaagcaguucuc

SEQ ID NO: 660065 - RNA, 22 nt, Human
uccugggcucaagcaguucucc

SEQ ID NO: 660066 - RNA, 23 nt, Human
uccugggcucaagcaguucuccc

SEQ ID NO: 660067 - RNA, 24 nt, Human
uccugggcucaagcaguucucccg

SEQ ID NO: 660068 - RNA, 24 nt, Human
ucugaacuccugggcucaagcagg

SEQ ID NO: 660069 - RNA, 24 nt, Human
ugaacuccugggcucaagcaguuc

SEQ ID NO: 660070 - RNA, 21 nt, Human
ugagacggaguauugcuaugu

SEQ ID NO: 660071 - RNA, 21 nt, Human
ugccaacuaagcagacauccc

SEQ ID NO: 660072 - RNA, 25 nt, Human
ugcccaauaauaauuauguuuaaca

SEQ ID NO: 660073 - RNA, 24 nt, Human
ugcccaggcugauucugaacuccu

SEQ ID NO: 660074 - RNA, 23 nt, Human
ugcuauguugcccaggcugauuc

SEQ ID NO: 660075 - RNA, 31 nt, Human
ugcuauguugcccaggcugauucugaacucc

SEQ ID NO: 660076 - RNA, 27 nt, Human
uggacagacacauaguauccagcacca

SEQ ID NO: 660077 - RNA, 20 nt, Human
uggccuguggcucuucaauc

SEQ ID NO: 660078 - RNA, 18 nt, Human
ugggauuacaggcaugag

SEQ ID NO: 660079 - RNA, 19 nt, Human
ugggauuacaggcaugagc

SEQ ID NO: 660080 - RNA, 22 nt, Human
ugggauuacaggcaugagccac

SEQ ID NO: 660081 - RNA, 23 nt, Human
ugggauuacaggcaugagccacc

SEQ ID NO: 660082 - RNA, 24 nt, Human
ugggauuacaggcaugagccacca

SEQ ID NO: 660083 - RNA, 24 nt, Human
ugggauuacaggcaugagccacca

SEQ ID NO: 660084 - RNA, 24 nt, Human
ugggcucaagcaguucucccgccu

SEQ ID NO: 660085 - RNA, 24 nt, Human
uuacuuuucaauugaaaaacaaaa

SEQ ID NO: 660086 - RNA, 26 nt, Human
uugaaaaacaaaacagacagaagaaa

SEQ ID NO: 660087 - RNA, 22 nt, Human
uuuaacacuugguacacauaua

SEQ ID NO: 660088 - RNA, 22 nt, Human
uuuuuuuuuuuuuuuuccauuu

SEQ ID NO: 660089 - RNA, 20 nt, Human
aaaaaaagaaacuuccucac

SEQ ID NO: 660090 - RNA, 24 nt, Human
aaaauaucuccuugcuuacgagga

SEQ ID NO: 660091 - RNA, 24 nt, Human
aaagugcugggauuacaggcauga

SEQ ID NO: 660092 - RNA, 24 nt, Human
aaagugcugggauuacaggcauga

SEQ ID NO: 660093 - RNA, 22 nt, Human
aaagugcugggauuagguguga

SEQ ID NO: 660094 - RNA, 23 nt, Human
aaauaccuuacucuaacauccuc

SEQ ID NO: 660095 - RNA, 19 nt, Human
aacaacaacaaaaaaaggg

SEQ ID NO: 660096 - RNA, 20 nt, Human
aacaacauaaacuggaucua

SEQ ID NO: 660097 - RNA, 23 nt, Human
aagcuauucacaacccuuucuca

SEQ ID NO: 660098 - RNA, 24 nt, Human
aagcuauucacaacccuuucucag

SEQ ID NO: 660099 - RNA, 19 nt, Human
aaguagcugggauuacagg

SEQ ID NO: 660100 - RNA, 25 nt, Human
aaguagcugggauuacaggcgcccg

SEQ ID NO: 660101 - RNA, 19 nt, Human
aagugcugggauuacaggc

SEQ ID NO: 660102 - RNA, 19 nt, Human
aagugcugggauuacaggc

SEQ ID NO: 660103 - RNA, 21 nt, Human
aagugcugggauuacaggcau

SEQ ID NO: 660104 - RNA, 21 nt, Human
aagugcugggauuacaggcau

SEQ ID NO: 660105 - RNA, 26 nt, Human
aagugcugggauuacaggcaugagcc

SEQ ID NO: 660106 - RNA, 26 nt, Human
aagugcugggauuacaggcaugagcc

SEQ ID NO: 660107 - RNA, 24 nt, Human
aagugcugggauuaggugugagcc

SEQ ID NO: 660108 - RNA, 19 nt, Human
aaugauacaugggaguuca

SEQ ID NO: 660109 - RNA, 21 nt, Human
aauggcaccgucucagcucac

SEQ ID NO: 660110 - RNA, 23 nt, Human
aauucuuuuuaaggcccuucuac

SEQ ID NO: 660111 - RNA, 25 nt, Human
acaacaacaaaaaaagggauaaaga

SEQ ID NO: 660112 - RNA, 21 nt, Human
acaacaccccaaauguagaac

SEQ ID NO: 660113 - RNA, 24 nt, Human
acaguguuucaccauguuggucag

SEQ ID NO: 660114 - RNA, 20 nt, Human
acauuggccaggcuggucuu

SEQ ID NO: 660115 - RNA, 20 nt, Human
accacaaccuccacuucuca

SEQ ID NO: 660116 - RNA, 24 nt, Human
accauguuggucaggcuggucucg

SEQ ID NO: 660117 - RNA, 24 nt, Human
acccaggcuaaagugcaguggcau

SEQ ID NO: 660118 - RNA, 19 nt, Human
accugaaaucuuuaaaaaa

SEQ ID NO: 660119 - RNA, 18 nt, Human
agaaggaagggaagacca

SEQ ID NO: 660120 - RNA, 24 nt, Human
agcgauuccccugccucagccucc

SEQ ID NO: 660121 - RNA, 20 nt, Human
aggcaugagccaccgugccu

SEQ ID NO: 660122 - RNA, 23 nt, Human
aggcaugagccaccgugccuggc

SEQ ID NO: 660123 - RNA, 24 nt, Human
aggcuaaagugcaguggcaugauc

SEQ ID NO: 660124 - RNA, 23 nt, Human
aggggauguucacuaaggucaca

SEQ ID NO: 660125 - RNA, 24 nt, Human
aggugauccacccaccucagccuc

SEQ ID NO: 660126 - RNA, 21 nt, Human
aggugugagccacugugccca

SEQ ID NO: 660127 - RNA, 19 nt, Human
aguagcugggauuacaggc

SEQ ID NO: 660128 - RNA, 19 nt, Human
agugcaguggcaugaucuc

SEQ ID NO: 660129 - RNA, 21 nt, Human
agugcaguggcaugaucucag

SEQ ID NO: 660130 - RNA, 23 nt, Human
agugcaguggcaugaucucagcu

SEQ ID NO: 660131 - RNA, 18 nt, Human
agugcugggauuacaggc

SEQ ID NO: 660132 - RNA, 18 nt, Human
agugcugggauuacaggc

SEQ ID NO: 660133 - RNA, 23 nt, Human
aguguuucaccauguuggucagg

SEQ ID NO: 660134 - RNA, 19 nt, Human
auccaccugccucggccuc

SEQ ID NO: 660135 - RNA, 21 nt, Human
auccuccugccucagccuccc

SEQ ID NO: 660136 - RNA, 20 nt, Human
aucuuauacacauccugagu

SEQ ID NO: 660137 - RNA, 22 nt, Human
augagccaccguacccagccca

SEQ ID NO: 660138 - RNA, 20 nt, Human
auggaguuucaccacauugg

SEQ ID NO: 660139 - RNA, 24 nt, Human
auggaguuucaccacauuggccag

SEQ ID NO: 660140 - RNA, 24 nt, Human
auuuuuguguuuuuaguagagaca

SEQ ID NO: 660141 - RNA, 24 nt, Human
caaagugcugggauuacaggcaug

SEQ ID NO: 660142 - RNA, 24 nt, Human
caaagugcugggauuacaggcaug

SEQ ID NO: 660143 - RNA, 24 nt, Human
caacaccccaaauguagaacugag

SEQ ID NO: 660144 - RNA, 22 nt, Human
caacagguuuccuuagugaccu

SEQ ID NO: 660145 - RNA, 22 nt, Human
caagcaauucuccugccucagc

SEQ ID NO: 660146 - RNA, 27 nt, Human
caagcaauucuccugccucagccuccc

SEQ ID NO: 660147 - RNA, 22 nt, Human
caagcuauccuccugccucagc

SEQ ID NO: 660148 - RNA, 21 nt, Human
caauaaaaauggcauugaaua

SEQ ID NO: 660149 - RNA, 23 nt, Human
cacauuggccaggcuggucuugg

SEQ ID NO: 660150 - RNA, 24 nt, Human
caccaagaccagcuaauuuuugua

SEQ ID NO: 660151 - RNA, 21 nt, Human
caccacauuggccaggcuggu

SEQ ID NO: 660152 - RNA, 24 nt, Human
caccacauuggccaggcuggucuu

SEQ ID NO: 660153 - RNA, 31 nt, Human
caccacauuggccaggcuggucuuggacucc

SEQ ID NO: 660154 - RNA, 23 nt, Human
caccaugcucagcuaauuuuugu

SEQ ID NO: 660155 - RNA, 21 nt, Human
caccauguuggucaggcuggu

SEQ ID NO: 660156 - RNA, 24 nt, Human
caccauguuggucaggcuggucuc

SEQ ID NO: 660157 - RNA, 22 nt, Human
cacccaccucagccucccaaag

SEQ ID NO: 660158 - RNA, 23 nt, Human
cacccaccucagccucccaaagu

SEQ ID NO: 660159 - RNA, 23 nt, Human
cacccaggcuaaagugcaguggc

SEQ ID NO: 660160 - RNA, 24 nt, Human
caccucagccucccaaagugcugg

SEQ ID NO: 660161 - RNA, 23 nt, Human
caccugccucggccucccaaagu

SEQ ID NO: 660162 - RNA, 20 nt, Human
cacuaaggucacagcaaagu

SEQ ID NO: 660163 - RNA, 19 nt, Human
cacucuggaaaagugaagu

SEQ ID NO: 660164 - RNA, 20 nt, Human
cacucuggaaaagugaagua

SEQ ID NO: 660165 - RNA, 23 nt, Human
cacugcaaccucugcuuccuggg

SEQ ID NO: 660166 - RNA, 22 nt, Human
cagagagugaaacuguguuaca

SEQ ID NO: 660167 - RNA, 20 nt, Human
cagccucaagcuauccuccu

SEQ ID NO: 660168 - RNA, 20 nt, Human
cagccuccugaguagcuggg

SEQ ID NO: 660169 - RNA, 21 nt, Human
cagguucaagcgauuccccug

SEQ ID NO: 660170 - RNA, 18 nt, Human
cagugguuguagacuuca

SEQ ID NO: 660171 - RNA, 24 nt, Human
caguguuucaccauguuggucagg

SEQ ID NO: 660172 - RNA, 23 nt, Human
caguuggacccuuaucucaaauc

SEQ ID NO: 660173 - RNA, 23 nt, Human
ccaaaccuaagcuauucacaacc

SEQ ID NO: 660174 - RNA, 23 nt, Human
ccaaagugcugggauuacaggca

SEQ ID NO: 660175 - RNA, 23 nt, Human
ccaaagugcugggauuacaggca

SEQ ID NO: 660176 - RNA, 24 nt, Human
ccaaagugcugggauuacaggcau

SEQ ID NO: 660177 - RNA, 24 nt, Human
ccaaagugcugggauuacaggcau

SEQ ID NO: 660178 - RNA, 19 nt, Human
ccaaagugcugggauuagg

SEQ ID NO: 660179 - RNA, 21 nt, Human
ccaaagugcugggauuaggug

SEQ ID NO: 660180 - RNA, 22 nt, Human
ccaaagugcugggauuaggugu

SEQ ID NO: 660181 - RNA, 22 nt, Human
ccaaguagcugggauuacaggc

SEQ ID NO: 660182 - RNA, 18 nt, Human
ccacaaccuccacuucuc

SEQ ID NO: 660183 - RNA, 24 nt, Human
ccacaaccuccacuucucagguuc

SEQ ID NO: 660184 - RNA, 26 nt, Human
ccacccaccucagccucccaaagugc

SEQ ID NO: 660185 - RNA, 24 nt, Human
ccagaaagcaucuagccaaaccua

SEQ ID NO: 660186 - RNA, 21 nt, Human
ccauuuaaaaaaaaaaaagaa

SEQ ID NO: 660187 - RNA, 22 nt, Human
ccauuuaaaaaaaaaaaagaaa

SEQ ID NO: 660188 - RNA, 24 nt, Human
cccaaagugcugggauuacaggca

SEQ ID NO: 660189 - RNA, 24 nt, Human
cccaaagugcugggauuacaggca

SEQ ID NO: 660190 - RNA, 23 nt, Human
cccaaguagcugggauuacaggc

SEQ ID NO: 660191 - RNA, 23 nt, Human
cccaaguagcugggauuacaggc

SEQ ID NO: 660192 - RNA, 22 nt, Human
cccuucuacaacaccccaaaug

SEQ ID NO: 660193 - RNA, 18 nt, Human
ccucaagaggggauguuc

SEQ ID NO: 660194 - RNA, 19 nt, Human
ccugaaaucuuuaaaaaaa

SEQ ID NO: 660195 - RNA, 21 nt, Human
ccugaccucacgugauccacc

SEQ ID NO: 660196 - RNA, 23 nt, Human
ccugaccucacgugauccaccug

SEQ ID NO: 660197 - RNA, 24 nt, Human
ccugaccucaggugauccacccac

SEQ ID NO: 660198 - RNA, 23 nt, Human
ccugaguagcugggauuacaggc

SEQ ID NO: 660199 - RNA, 24 nt, Human
ccugaguagcugggauuacaggcg

SEQ ID NO: 660200 - RNA, 23 nt, Human
ccuggguucaagcaauucuccug

SEQ ID NO: 660201 - RNA, 18 nt, Human
ccuugcuuacgaggacaa

SEQ ID NO: 660202 - RNA, 21 nt, Human
cgacagaaggaagggaagacc

SEQ ID NO: 660203 - RNA, 22 nt, Human
cgcccaggcuggagagcaaugg

SEQ ID NO: 660204 - RNA, 24 nt, Human
cgcucugucacccaggcuaaagug

SEQ ID NO: 660205 - RNA, 25 nt, Human
cuaagcuauucacaacccuuucuca

SEQ ID NO: 660206 - RNA, 21 nt, Human
cucaagcuauccuccugccuc

SEQ ID NO: 660207 - RNA, 24 nt, Human
cucaccacaaccuccacuucucag

SEQ ID NO: 660208 - RNA, 24 nt, Human
cucacugcaaccucugcuuccugg

SEQ ID NO: 660209 - RNA, 24 nt, Human
cucagccucccaaguagcugggau

SEQ ID NO: 660210 - RNA, 24 nt, Human
cucagccuccugaguagcugggau

SEQ ID NO: 660211 - RNA, 20 nt, Human
cucagguucaagcgauuccc

SEQ ID NO: 660212 - RNA, 24 nt, Human
cuccaaaauuaauucaauaagaca

SEQ ID NO: 660213 - RNA, 20 nt, Human
cucccuccuacauuucacuc

SEQ ID NO: 660214 - RNA, 19 nt, Human
cucuugucgcccaggcugg

SEQ ID NO: 660215 - RNA, 22 nt, Human
cugaguagcugggauuacaggc

SEQ ID NO: 660216 - RNA, 24 nt, Human
cugaguagcugggauuacaggcgu

SEQ ID NO: 660217 - RNA, 23 nt, Human
cugcaaccucugcuuccuggguu

SEQ ID NO: 660218 - RNA, 24 nt, Human
cugcaaccucugcuuccuggguuc

SEQ ID NO: 660219 - RNA, 23 nt, Human
cugccucagccucccaaagugcu

SEQ ID NO: 660220 - RNA, 24 nt, Human
cugccucagccucccaaagugcug

SEQ ID NO: 660221 - RNA, 23 nt, Human
cugccucagccucccaaguagcu

SEQ ID NO: 660222 - RNA, 23 nt, Human
cugccucagccuccugaguagcu

SEQ ID NO: 660223 - RNA, 23 nt, Human
cugccucggccucccaaagugcu

SEQ ID NO: 660224 - RNA, 24 nt, Human
cuuccuggguucaagcaauucucc

SEQ ID NO: 660225 - RNA, 22 nt, Human
cuucucagguucaagcgauucc

SEQ ID NO: 660226 - RNA, 18 nt, Human
cuugguuaaaacaacaac

SEQ ID NO: 660227 - RNA, 20 nt, Human
cuugucgcccaggcuggaga

SEQ ID NO: 660228 - RNA, 18 nt, Human
cuuucucagucucuacua

SEQ ID NO: 660229 - RNA, 24 nt, Human
gaccucacgugauccaccugccuc

SEQ ID NO: 660230 - RNA, 24 nt, Human
gaccucacgugauccaccugccuc

SEQ ID NO: 660231 - RNA, 26 nt, Human
gaccucacgugauccaccugccucgg

SEQ ID NO: 660232 - RNA, 24 nt, Human
gaccucaggugauccacccaccuc

SEQ ID NO: 660233 - RNA, 20 nt, Human
gaguagcugggauuacaggc

SEQ ID NO: 660234 - RNA, 24 nt, Human
gaguagcugggauuacaggcguga

SEQ ID NO: 660235 - RNA, 27 nt, Human
gaguagcugggauuacaggcgugagcc

SEQ ID NO: 660236 - RNA, 18 nt, Human
gauuacaggcaugagcca

SEQ ID NO: 660237 - RNA, 18 nt, Human
gauuacaggcaugagcca

SEQ ID NO: 660238 - RNA, 21 nt, Human
gauuacaggcaugagccaccg

SEQ ID NO: 660239 - RNA, 21 nt, Human
gauuacaggcaugagccaccg

SEQ ID NO: 660240 - RNA, 24 nt, Human
gauuacaggcaugagccaccguac

SEQ ID NO: 660241 - RNA, 24 nt, Human
gauuacaggcaugagccaccgugc

SEQ ID NO: 660242 - RNA, 18 nt, Human
gauuacaggcgcccgcca

SEQ ID NO: 660243 - RNA, 18 nt, Human
gauuacaggcgugagcca

SEQ ID NO: 660244 - RNA, 21 nt, Human
gauuacaggcgugagccacca

SEQ ID NO: 660245 - RNA, 24 nt, Human
gauuacaggcgugagccaccaugc

SEQ ID NO: 660246 - RNA, 19 nt, Human
gauuaggugugagccacug

SEQ ID NO: 660247 - RNA, 23 nt, Human
gccuaaguuaugcuagauucuga

SEQ ID NO: 660248 - RNA, 20 nt, Human
gccucagccucccaaguagc

SEQ ID NO: 660249 - RNA, 23 nt, Human
gcgauuccccugccucagccucc

SEQ ID NO: 660250 - RNA, 18 nt, Human
gcgcccgccaccaagacc

SEQ ID NO: 660251 - RNA, 19 nt, Human
gcuaaagugcaguggcaug

SEQ ID NO: 660252 - RNA, 18 nt, Human
gcuacacuacaauagguu

SEQ ID NO: 660253 - RNA, 25 nt, Human
gcucugucacccaggcuaaagugca

SEQ ID NO: 660254 - RNA, 23 nt, Human
gcuggucucgaacuccugaccuc

SEQ ID NO: 660255 - RNA, 23 nt, Human
gcuggucuuggacuccugaccuc

SEQ ID NO: 660256 - RNA, 23 nt, Human
gcugguuuugaacucccagccuc

SEQ ID NO: 660257 - RNA, 22 nt, Human
ggaguuucaccacauuggccag

SEQ ID NO: 660258 - RNA, 22 nt, Human
ggauuacaggcaugagccaccg

SEQ ID NO: 660259 - RNA, 24 nt, Human
ggauuacaggcaugagccaccgug

SEQ ID NO: 660260 - RNA, 24 nt, Human
ggauuacaggcgugagccaccaug

SEQ ID NO: 660261 - RNA, 24 nt, Human
ggcuggucucgaacuccugaccuc

SEQ ID NO: 660262 - RNA, 24 nt, Human
ggcuggucuuggacuccugaccuc

SEQ ID NO: 660263 - RNA, 24 nt, Human
ggcugguuuugaacucccagccuc

SEQ ID NO: 660264 - RNA, 21 nt, Human
gggauaaagaauauuuacugu

SEQ ID NO: 660265 - RNA, 18 nt, Human
gggauuaggugugagcca

SEQ ID NO: 660266 - RNA, 22 nt, Human
gggucuugcuauguugcccagg

SEQ ID NO: 660267 - RNA, 19 nt, Human
ggucucgaacuccugaccu

SEQ ID NO: 660268 - RNA, 18 nt, Human
guagagauggggucuugc

SEQ ID NO: 660269 - RNA, 18 nt, Human
guagcugggauuacaggc

SEQ ID NO: 660270 - RNA, 18 nt, Human
guagcugggauuacaggc

SEQ ID NO: 660271 - RNA, 24 nt, Human
guagcugggauuacaggcgugagc

SEQ ID NO: 660272 - RNA, 20 nt, Human
guauuuuuagaagagaugga

SEQ ID NO: 660273 - RNA, 24 nt, Human
gugauccacccaccucagccuccc

SEQ ID NO: 660274 - RNA, 24 nt, Human
gugauccaccugccucggccuccc

SEQ ID NO: 660275 - RNA, 25 nt, Human
uaaaaaaaaaaaagaaacuuccuca

SEQ ID NO: 660276 - RNA, 23 nt, Human
uaaaaaaauaggaaauacuaauc

SEQ ID NO: 660277 - RNA, 18 nt, Human
uaaaccaguuggacccuu

SEQ ID NO: 660278 - RNA, 22 nt, Human
uaaagaauauuuacuguguuuu

SEQ ID NO: 660279 - RNA, 23 nt, Human
uaaaguaacaaagguuugaaagg

SEQ ID NO: 660280 - RNA, 19 nt, Human
uaaagugcaguggcaugau

SEQ ID NO: 660281 - RNA, 23 nt, Human
uaaagugcaguggcaugaucuca

SEQ ID NO: 660282 - RNA, 20 nt, Human
uaaauuuuuagcuguacuua

SEQ ID NO: 660283 - RNA, 24 nt, Human
uaauuuuuguauuuuuagaagaga

SEQ ID NO: 660284 - RNA, 24 nt, Human
uaauuuuuguguuuuuaguagaga

SEQ ID NO: 660285 - RNA, 23 nt, Human
uacaacaccccaaauguagaacu

SEQ ID NO: 660286 - RNA, 24 nt, Human
uacaggcaugagccaccguaccca

SEQ ID NO: 660287 - RNA, 22 nt, Human
uacaggcaugagccaccgugcc

SEQ ID NO: 660288 - RNA, 20 nt, Human
uacaggcgcccgccaccaag

SEQ ID NO: 660289 - RNA, 18 nt, Human
uacaggcgugagccacca

SEQ ID NO: 660290 - RNA, 22 nt, Human
uacaggcgugagccaccaugcu

SEQ ID NO: 660291 - RNA, 19 nt, Human
uacauuucacucuggaaaa

SEQ ID NO: 660292 - RNA, 24 nt, Human
uagaagagauggaguuucaccaca

SEQ ID NO: 660293 - RNA, 20 nt, Human
uagaaugugcucccuccuac

SEQ ID NO: 660294 - RNA, 22 nt, Human
uagagacaguguuucaccaugu

SEQ ID NO: 660295 - RNA, 22 nt, Human
uagagauggggucuugcuaugu

SEQ ID NO: 660296 - RNA, 26 nt, Human
uaggaaauacuaaucaguuuaaccau

SEQ ID NO: 660297 - RNA, 24 nt, Human
uaguagagacaguguuucaccaug

SEQ ID NO: 660298 - RNA, 23 nt, Human
uauguugcccaggcugguuuuga

SEQ ID NO: 660299 - RNA, 24 nt, Human
uauguugcccaggcugguuuugaa

SEQ ID NO: 660300 - RNA, 23 nt, Human
uauuuuuagaagagauggaguuu

SEQ ID NO: 660301 - RNA, 19 nt, Human
ucaagcaauucuccugccu

SEQ ID NO: 660302 - RNA, 24 nt, Human
ucaccacaaccuccacuucucagg

SEQ ID NO: 660303 - RNA, 26 nt, Human
ucacuaaggucacagcaaaguugcac

SEQ ID NO: 660304 - RNA, 24 nt, Human
ucacugcaaccucugcuuccuggg

SEQ ID NO: 660305 - RNA, 18 nt, Human
ucagccucccaaagugcu

SEQ ID NO: 660306 - RNA, 20 nt, Human
ucagccucccaaguagcugg

SEQ ID NO: 660307 - RNA, 20 nt, Human
ucagccuccugaguagcugg

SEQ ID NO: 660308 - RNA, 27 nt, Human
ucagcucaccacaaccuccacuucuca

SEQ ID NO: 660309 - RNA, 20 nt, Human
ucaggugauccacccaccuc

SEQ ID NO: 660310 - RNA, 21 nt, Human
uccacccaccucagccuccca

SEQ ID NO: 660311 - RNA, 24 nt, Human
ucccaaagugcugggauuacaggc

SEQ ID NO: 660312 - RNA, 24 nt, Human
ucccaaagugcugggauuacaggc

SEQ ID NO: 660313 - RNA, 21 nt, Human
ucccaaagugcugggauuagg

SEQ ID NO: 660314 - RNA, 24 nt, Human
ucccaaguagcugggauuacaggc

SEQ ID NO: 660315 - RNA, 24 nt, Human
uccccugccucagccuccugagua

SEQ ID NO: 660316 - RNA, 18 nt, Human
uccuaaguuuaccaaacc

SEQ ID NO: 660317 - RNA, 27 nt, Human
uccuccugccucagccucccaaagugc

SEQ ID NO: 660318 - RNA, 24 nt, Human
uccugaguagcugggauuacaggc

SEQ ID NO: 660319 - RNA, 20 nt, Human
uccuggguucaagcaauucu

SEQ ID NO: 660320 - RNA, 21 nt, Human
uccuggguucaagcaauucuc

SEQ ID NO: 660321 - RNA, 24 nt, Human
uccuggguucaagcaauucuccug

SEQ ID NO: 660322 - RNA, 18 nt, Human
ucgcccaggcuggagagc

SEQ ID NO: 660323 - RNA, 22 nt, Human
ucgcucuugucgcccaggcugg

SEQ ID NO: 660324 - RNA, 23 nt, Human
ucgcucuugucgcccaggcugga

SEQ ID NO: 660325 - RNA, 18 nt, Human
ucggccucccaaagugcu

SEQ ID NO: 660326 - RNA, 19 nt, Human
ucucagguucaagcgauuc

SEQ ID NO: 660327 - RNA, 24 nt, Human
ucucagguucaagcgauuccccug

SEQ ID NO: 660328 - RNA, 26 nt, Human
ucuccugccucagccucccaaguagc

SEQ ID NO: 660329 - RNA, 21 nt, Human
ucucgaacuccugaccucacg

SEQ ID NO: 660330 - RNA, 19 nt, Human
ucucgcucugucacccagg

SEQ ID NO: 660331 - RNA, 23 nt, Human
ucucgcucugucacccaggcuaa

SEQ ID NO: 660332 - RNA, 26 nt, Human
ucucgcucugucacccaggcuaaagu

SEQ ID NO: 660333 - RNA, 27 nt, Human
ucucgcucugucacccaggcuaaagug

SEQ ID NO: 660334 - RNA, 18 nt, Human
ucuggcuuauacccagaa

SEQ ID NO: 660335 - RNA, 24 nt, Human
ucugucacccaggcuaaagugcag

SEQ ID NO: 660336 - RNA, 18 nt, Human
ucuugcuauguugcccag

SEQ ID NO: 660337 - RNA, 19 nt, Human
ucuugcuauguugcccagg

SEQ ID NO: 660338 - RNA, 23 nt, Human
ucuugcuauguugcccaggcugg

SEQ ID NO: 660339 - RNA, 24 nt, Human
ucuugcuauguugcccaggcuggu

SEQ ID NO: 660340 - RNA, 23 nt, Human
ucuuggacuccugaccucaggug

SEQ ID NO: 660341 - RNA, 19 nt, Human
ucuugguuaaaacaacaac

SEQ ID NO: 660342 - RNA, 24 nt, Human
ugaccucacgugauccaccugccu

SEQ ID NO: 660343 - RNA, 21 nt, Human
ugaccucaggugauccaccca

SEQ ID NO: 660344 - RNA, 24 nt, Human
ugaccucaggugauccacccaccu

SEQ ID NO: 660345 - RNA, 18 nt, Human
ugagacagagucucgcuc

SEQ ID NO: 660346 - RNA, 22 nt, Human
ugagacagagucucgcucuguc

SEQ ID NO: 660347 - RNA, 24 nt, Human
ugauccacccaccucagccuccca

SEQ ID NO: 660348 - RNA, 19 nt, Human
ugcaaccucugcuuccugg

SEQ ID NO: 660349 - RNA, 22 nt, Human
ugcaguggcaugaucucagcuc

SEQ ID NO: 660350 - RNA, 21 nt, Human
ugcccaggcugguuuugaacu

SEQ ID NO: 660351 - RNA, 24 nt, Human
ugccucagccucccaaagugcugg

SEQ ID NO: 660352 - RNA, 24 nt, Human
ugccucagccucccaaguagcugg

SEQ ID NO: 660353 - RNA, 24 nt, Human
ugccucagccuccugaguagcugg

SEQ ID NO: 660354 - RNA, 21 nt, Human
ugccucggccucccaaagugc

SEQ ID NO: 660355 - RNA, 24 nt, Human
ugccucggccucccaaagugcugg

SEQ ID NO: 660356 - RNA, 31 nt, Human
ugcuauguugcccaggcugguuuugaacucc

SEQ ID NO: 660357 - RNA, 24 nt, Human
uggaguuucaccacauuggccagg

SEQ ID NO: 660358 - RNA, 21 nt, Human
uggaucuauaucucgaaacua

SEQ ID NO: 660359 - RNA, 24 nt, Human
uggcaccgucucagcucacugcaa

SEQ ID NO: 660360 - RNA, 24 nt, Human
uggcaugaucucagcucaccacaa

SEQ ID NO: 660361 - RNA, 24 nt, Human
uggccaggcuggucuuggacuccu

SEQ ID NO: 660362 - RNA, 18 nt, Human
ugggauuacaggcaugag

SEQ ID NO: 660363 - RNA, 18 nt, Human
ugggauuacaggcaugag

SEQ ID NO: 660364 - RNA, 21 nt, Human
ugggauuacaggcaugagcca

SEQ ID NO: 660365 - RNA, 21 nt, Human
ugggauuacaggcaugagcca

SEQ ID NO: 660366 - RNA, 22 nt, Human
ugggauuacaggcaugagccac

SEQ ID NO: 660367 - RNA, 22 nt, Human
ugggauuacaggcaugagccac

SEQ ID NO: 660368 - RNA, 23 nt, Human
ugggauuacaggcaugagccacc

SEQ ID NO: 660369 - RNA, 23 nt, Human
ugggauuacaggcaugagccacc

SEQ ID NO: 660370 - RNA, 23 nt, Human
ugggauuacaggcaugagccacc

SEQ ID NO: 660371 - RNA, 23 nt, Human
ugggauuacaggcaugagccacc

SEQ ID NO: 660372 - RNA, 24 nt, Human
ugggauuacaggcaugagccaccg

SEQ ID NO: 660373 - RNA, 24 nt, Human
ugggauuacaggcaugagccaccg

SEQ ID NO: 660374 - RNA, 26 nt, Human
ugggauuacaggcaugagccaccgua

SEQ ID NO: 660375 - RNA, 21 nt, Human
ugggauuacaggcgcccgcca

SEQ ID NO: 660376 - RNA, 22 nt, Human
ugggauuacaggcgcccgccac

SEQ ID NO: 660377 - RNA, 24 nt, Human
ugggauuacaggcgcccgccacca

SEQ ID NO: 660378 - RNA, 18 nt, Human
ugggauuacaggcgugag

SEQ ID NO: 660379 - RNA, 22 nt, Human
ugggauuacaggcgugagccac

SEQ ID NO: 660380 - RNA, 23 nt, Human
ugggauuacaggcgugagccacc

SEQ ID NO: 660381 - RNA, 24 nt, Human
ugggauuacaggcgugagccacca

SEQ ID NO: 660382 - RNA, 25 nt, Human
ugggauuacaggcgugagccaccau

SEQ ID NO: 660383 - RNA, 20 nt, Human
ugggauuaggugugagccac

SEQ ID NO: 660384 - RNA, 20 nt, Human
ugggauuaggugugagccac

SEQ ID NO: 660385 - RNA, 22 nt, Human
ugggauuaggugugagccacug

SEQ ID NO: 660386 - RNA, 24 nt, Human
uggggucuugcuauguugcccagg

SEQ ID NO: 660387 - RNA, 21 nt, Human
uggguucaagcaauucuccug

SEQ ID NO: 660388 - RNA, 23 nt, Human
uggguucaagcaauucuccugcc

SEQ ID NO: 660389 - RNA, 24 nt, Human
uggguucaagcaauucuccugccu

SEQ ID NO: 660390 - RNA, 24 nt, Human
ugguagagauggggucuugcuaug

SEQ ID NO: 660391 - RNA, 24 nt, Human
uggucaggcuggucucgaacuccu

SEQ ID NO: 660392 - RNA, 18 nt, Human
uuagaagagauggaguuu

SEQ ID NO: 660393 - RNA, 24 nt, Human
uuaguagagacaguguuucaccau

SEQ ID NO: 660394 - RNA, 20 nt, Human
uuauggucuuuucaauaacu

SEQ ID NO: 660395 - RNA, 21 nt, Human
uucaagcaauucuccugccuc

SEQ ID NO: 660396 - RNA, 24 nt, Human
uucaagcaauucuccugccucagc

SEQ ID NO: 660397 - RNA, 21 nt, Human
uucaagcgauuccccugccuc

SEQ ID NO: 660398 - RNA, 23 nt, Human
uucaagcgauuccccugccucag

SEQ ID NO: 660399 - RNA, 24 nt, Human
uucaagcgauuccccugccucagc

SEQ ID NO: 660400 - RNA, 19 nt, Human
uuccccugccucagccucc

SEQ ID NO: 660401 - RNA, 24 nt, Human
uucgcucuugucgcccaggcugga

SEQ ID NO: 660402 - RNA, 20 nt, Human
uugcacuauacgacucuggc

SEQ ID NO: 660403 - RNA, 24 nt, Human
uugguagagauggggucuugcuau

SEQ ID NO: 660404 - RNA, 24 nt, Human
uuucaccauguuggucaggcuggu

SEQ ID NO: 660405 - RNA, 24 nt, Human
uuucgcucuugucgcccaggcugg

SEQ ID NO: 660406 - RNA, 18 nt, Human
uuuucuuuuuuuuuuuug

SEQ ID NO: 660407 - RNA, 24 nt, Human
uuuuuagaagagauggaguuucac

SEQ ID NO: 660408 - RNA, 24 nt, Human
uuuuuaguagagacaguguuucac

SEQ ID NO: 660409 - RNA, 24 nt, Human
uuuuugguagagauggggucuugc

SEQ ID NO: 660410 - RNA, 20 nt, Human
uuuuuguauuuuuagaagag

SEQ ID NO: 660411 - RNA, 23 nt, Human
uuuuuguauuuuuagaagagaug

SEQ ID NO: 660412 - RNA, 20 nt, Human
uuuuuguguuuuuaguagag

SEQ ID NO: 660413 - RNA, 22 nt, Human
uuuuuugguagagauggggucu

SEQ ID NO: 660414 - RNA, 25 nt, Human
uuuuuuuuuuuugagacagagucuc

SEQ ID NO: 660415 - RNA, 25 nt, Human
uuuuuuuuuuuugagacggaguuuc

SEQ ID NO: 660416 - RNA, 18 nt, Human
uuuuuuuuuuuuuuuuug

SEQ ID NO: 660417 - RNA, 21 nt, Human
uuuuuuuuuuuuuuuuuuaca

SEQ ID NO: 660418 - RNA, 24 nt, Human
acagcugcugaaagcaucucacau

SEQ ID NO: 660419 - RNA, 19 nt, Human
acuggggagagaagagagg

SEQ ID NO: 660420 - RNA, 21 nt, Human
agaggaaauuaagaccccuag

SEQ ID NO: 660421 - RNA, 22 nt, Human
agcuguugggcugaacagagac

SEQ ID NO: 660422 - RNA, 19 nt, Human
aggaaauuaagaccccuag

SEQ ID NO: 660423 - RNA, 19 nt, Human
aggcaguuccagagcuggg

SEQ ID NO: 660424 - RNA, 19 nt, Human
agggacuggggagagaaga

SEQ ID NO: 660425 - RNA, 19 nt, Human
caacacagcugcugaaagc

SEQ ID NO: 660426 - RNA, 18 nt, Human
cacauugcuuagacugcu

SEQ ID NO: 660427 - RNA, 18 nt, Human
caccuccaccugcggccc

SEQ ID NO: 660428 - RNA, 20 nt, Human
cagaauccuucuguguccuc

SEQ ID NO: 660429 - RNA, 27 nt, Human
caucaaaagagaggaaauuaagacccc

SEQ ID NO: 660430 - RNA, 23 nt, Human
ccaacaccuccaccugcggccca

SEQ ID NO: 660431 - RNA, 25 nt, Human
ccaacaccuccaccugcggcccaca

SEQ ID NO: 660432 - RNA, 25 nt, Human
cccaacaccuccaccugcggcccac

SEQ ID NO: 660433 - RNA, 21 nt, Human
ccuccaccugcggcccacaca

SEQ ID NO: 660434 - RNA, 22 nt, Human
cguuacagaaccccggccaggg

SEQ ID NO: 660435 - RNA, 19 nt, Human
cucacagggaaucucccca

SEQ ID NO: 660436 - RNA, 20 nt, Human
cuccgcgcuuucccaacacc

SEQ ID NO: 660437 - RNA, 19 nt, Human
cuccugccccagcaaaggc

SEQ ID NO: 660438 - RNA, 19 nt, Human
cuuucccaacaccuccacc

SEQ ID NO: 660439 - RNA, 22 nt, Human
gcggguaagguucagccuccag

SEQ ID NO: 660440 - RNA, 19 nt, Human
gcuccugccccagcaaagg

SEQ ID NO: 660441 - RNA, 18 nt, Human
gggcauuggccuaagacu

SEQ ID NO: 660442 - RNA, 21 nt, Human
gggcauuggccuaagacuuuu

SEQ ID NO: 660443 - RNA, 19 nt, Human
uaaaugguaaacgcaguau

SEQ ID NO: 660444 - RNA, 21 nt, Human
uaaaugguaaacgcaguauga

SEQ ID NO: 660445 - RNA, 18 nt, Human
uaggagcagauggcuccu

SEQ ID NO: 660446 - RNA, 24 nt, Human
uauaguaagucgggggcauuggcc

SEQ ID NO: 660447 - RNA, 20 nt, Human
ucagccuccaggggaaggcu

SEQ ID NO: 660448 - RNA, 19 nt, Human
uccaccugcggcccacaca

SEQ ID NO: 660449 - RNA, 23 nt, Human
ucccaacaccuccaccugcggcc

SEQ ID NO: 660450 - RNA, 22 nt, Human
ucccaauggcugcucccagagu

SEQ ID NO: 660451 - RNA, 23 nt, Human
ucccagaguuccacucuagggug

SEQ ID NO: 660452 - RNA, 21 nt, Human
ugaaagcaucucacauacuug

SEQ ID NO: 660453 - RNA, 23 nt, Human
ugaaagcaucucacauacuuggc

SEQ ID NO: 660454 - RNA, 22 nt, Human
ugagaccacucacaacaccuuu

SEQ ID NO: 660455 - RNA, 22 nt, Human
ugcaacacagcugcugaaagca

SEQ ID NO: 660456 - RNA, 21 nt, Human
ugccagaugguaggagcagau

SEQ ID NO: 660457 - RNA, 27 nt, Human
ugcuaguuccccaccauuaccaagugg

SEQ ID NO: 660458 - RNA, 19 nt, Human
uggcugcucccagaguucc

SEQ ID NO: 660459 - RNA, 30 nt, Human
uggggagagaagagaggucugcccgucacc

SEQ ID NO: 660460 - RNA, 28 nt, Human
uucacuucuuacugaugguuccggaucg

SEQ ID NO: 660461 - RNA, 21 nt, Human
uuccacucuagggugagcugu

SEQ ID NO: 660462 - RNA, 18 nt, Human
uuuuuuuuuuuuuuuuug

SEQ ID NO: 660463 - RNA, 19 nt, Human
uuuuuuuuuuuuuuuuugg

SEQ ID NO: 660464 - RNA, 23 nt, Human
aagaagaaaggaagucaaaugga

SEQ ID NO: 660465 - RNA, 25 nt, Human
aagaagaaaggaagucaaaugggaa

SEQ ID NO: 660466 - RNA, 23 nt, Human
aagaaucaaugaauaauggauaa

SEQ ID NO: 660467 - RNA, 20 nt, Human
aagguaaagaaagccugaaa

SEQ ID NO: 660468 - RNA, 19 nt, Human
aaucggcuuccaugauguc

SEQ ID NO: 660469 - RNA, 19 nt, Human
aauggauaaacagugggag

SEQ ID NO: 660470 - RNA, 24 nt, Human
acuuacuccucccucuaucccuac

SEQ ID NO: 660471 - RNA, 18 nt, Human
acuucccuauccaccaac

SEQ ID NO: 660472 - RNA, 24 nt, Human
agcacaaaggaguuacagaaagaa

SEQ ID NO: 660473 - RNA, 22 nt, Human
agcacccagcuuguaaaguggc

SEQ ID NO: 660474 - RNA, 23 nt, Human
agcacuguuguggaaugccauuu

SEQ ID NO: 660475 - RNA, 21 nt, Human
agccagccccuuccgccuugg

SEQ ID NO: 660476 - RNA, 21 nt, Human
agccccuuccgccuuggcuuc

SEQ ID NO: 660477 - RNA, 19 nt, Human
aggagaaaagaaggaacua

SEQ ID NO: 660478 - RNA, 18 nt, Human
aggaugaagacaggaugg

SEQ ID NO: 660479 - RNA, 24 nt, Human
agguaaagaaagccugaaagaaga

SEQ ID NO: 660480 - RNA, 22 nt, Human
agucccuggggacagagcagcu

SEQ ID NO: 660481 - RNA, 19 nt, Human
augaaugaaugcuuacuga

SEQ ID NO: 660482 - RNA, 23 nt, Human
augacaugaagguaaagaaagcc

SEQ ID NO: 660483 - RNA, 23 nt, Human
auuuuaaaaauacauacaucuua

SEQ ID NO: 660484 - RNA, 22 nt, Human
caacgcucguucuaaagggaag

SEQ ID NO: 660485 - RNA, 22 nt, Human
caagaacaccaucugguagcuc

SEQ ID NO: 660486 - RNA, 24 nt, Human
caagccgagucuaucucuaaacuu

SEQ ID NO: 660487 - RNA, 25 nt, Human
cacugaacugugagucccuggggac

SEQ ID NO: 660488 - RNA, 20 nt, Human
cacuguaaucaaaacaaagc

SEQ ID NO: 660489 - RNA, 21 nt, Human
cagaacaugauuauaguagca

SEQ ID NO: 660490 - RNA, 20 nt, Human
cagagguguugguacuuucu

SEQ ID NO: 660491 - RNA, 18 nt, Human
cagauucaagaacaccau

SEQ ID NO: 660492 - RNA, 20 nt, Human
cagcauacaccauuccaccu

SEQ ID NO: 660493 - RNA, 20 nt, Human
cagugggagccuuggccaca

SEQ ID NO: 660494 - RNA, 30 nt, Human
ccacagaaucugucagccuuugcagagacc

SEQ ID NO: 660495 - RNA, 21 nt, Human
ccacucugcuuucuggcugaa

SEQ ID NO: 660496 - RNA, 19 nt, Human
ccacugcacauuagccagc

SEQ ID NO: 660497 - RNA, 20 nt, Human
ccagccccuuccgccuuggc

SEQ ID NO: 660498 - RNA, 19 nt, Human
ccaguaaguggcaggcagc

SEQ ID NO: 660499 - RNA, 20 nt, Human
cccacauuugaucaaacacc

SEQ ID NO: 660500 - RNA, 18 nt, Human
ccccagguacuccguggu

SEQ ID NO: 660501 - RNA, 18 nt, Human
cccuacuacaucuuucuu

SEQ ID NO: 660502 - RNA, 28 nt, Human
ccgaggccagugggacaccaaagugucc

SEQ ID NO: 660503 - RNA, 22 nt, Human
ccgcuuccuuuagcccugacuu

SEQ ID NO: 660504 - RNA, 25 nt, Human
ccuaaucacaaccauuucagucacu

SEQ ID NO: 660505 - RNA, 24 nt, Human
ccuauccaccaacagcauacacca

SEQ ID NO: 660506 - RNA, 21 nt, Human
ccuuuagcccugacuuacacu

SEQ ID NO: 660507 - RNA, 27 nt, Human
cgaggccagugggacaccaaagugucc

SEQ ID NO: 660508 - RNA, 20 nt, Human
cuauaaagaaaaaaagaauc

SEQ ID NO: 660509 - RNA, 19 nt, Human
cucagcagccaucucuucc

SEQ ID NO: 660510 - RNA, 19 nt, Human
cuccugagaguucuccgag

SEQ ID NO: 660511 - RNA, 19 nt, Human
cugagaguucuccgagcug

SEQ ID NO: 660512 - RNA, 21 nt, Human
cuggaaaaauugugcuagaag

SEQ ID NO: 660513 - RNA, 21 nt, Human
cuggaccgaggccagugggac

SEQ ID NO: 660514 - RNA, 26 nt, Human
cuguaaucaaaacaaagccggggucc

SEQ ID NO: 660515 - RNA, 21 nt, Human
cuuguaaaguggcaggcaggg

SEQ ID NO: 660516 - RNA, 20 nt, Human
gaaaccaauaaucuaaauaa

SEQ ID NO: 660517 - RNA, 18 nt, Human
gaacaugauuauaguagc

SEQ ID NO: 660518 - RNA, 22 nt, Human
gaaguaggagaaaagaaggaac

SEQ ID NO: 660519 - RNA, 25 nt, Human
gaauggggguuguaccagccacuuc

SEQ ID NO: 660520 - RNA, 22 nt, Human
gauaaacagugggagccuuggc

SEQ ID NO: 660521 - RNA, 25 nt, Human
gcuggggcuggaucaguucgucuuu

SEQ ID NO: 660522 - RNA, 18 nt, Human
ggaccgaggccaguggga

SEQ ID NO: 660523 - RNA, 21 nt, Human
ggccagugggacaccaaagug

SEQ ID NO: 660524 - RNA, 22 nt, Human
ggcucugugguucaucgcuagg

SEQ ID NO: 660525 - RNA, 24 nt, Human
gggaaguaggagaaaagaaggaac

SEQ ID NO: 660526 - RNA, 23 nt, Human
gggacaaaucucucugcuguugc

SEQ ID NO: 660527 - RNA, 24 nt, Human
gguaaagaaagccugaaagaagaa

SEQ ID NO: 660528 - RNA, 22 nt, Human
gucccuggggacagagcagcug

SEQ ID NO: 660529 - RNA, 19 nt, Human
gugagucccuggggacaga

SEQ ID NO: 660530 - RNA, 23 nt, Human
gugaugccacucugcuuucuggc

SEQ ID NO: 660531 - RNA, 25 nt, Human
uaaaaauacauacaucuuacacugu

SEQ ID NO: 660532 - RNA, 23 nt, Human
uaaagaaagccugaaagaagaaa

SEQ ID NO: 660533 - RNA, 20 nt, Human
uacugugcaggcaugaagau

SEQ ID NO: 660534 - RNA, 21 nt, Human
uacuugaggagagcacccagc

SEQ ID NO: 660535 - RNA, 25 nt, Human
uagaaacccauguucucaacccaac

SEQ ID NO: 660536 - RNA, 20 nt, Human
uagaacuccugacaguucac

SEQ ID NO: 660537 - RNA, 21 nt, Human
uagccagccccuuccgccuug

SEQ ID NO: 660538 - RNA, 18 nt, Human
uaguagcauggggaaaau

SEQ ID NO: 660539 - RNA, 18 nt, Human
ucaaaagcuucucuccug

SEQ ID NO: 660540 - RNA, 22 nt, Human
ucacugaggcuugcaugcccca

SEQ ID NO: 660541 - RNA, 21 nt, Human
ucagcagccaucucuuccucc

SEQ ID NO: 660542 - RNA, 22 nt, Human
ucauccccgcuccacugcacau

SEQ ID NO: 660543 - RNA, 20 nt, Human
ucauccuaagcaauuuuaaa

SEQ ID NO: 660544 - RNA, 20 nt, Human
uccaugaugucaugguccuc

SEQ ID NO: 660545 - RNA, 22 nt, Human
uccaugauuuuuccacgggcgg

SEQ ID NO: 660546 - RNA, 19 nt, Human
ucccccauuuuacagagag

SEQ ID NO: 660547 - RNA, 22 nt, Human
uccgagcuggggcuggaucagu

SEQ ID NO: 660548 - RNA, 21 nt, Human
uccuggguuucacuuugauuu

SEQ ID NO: 660549 - RNA, 22 nt, Human
ucucucugcuguugcuguuggc

SEQ ID NO: 660550 - RNA, 18 nt, Human
ucugucagccuuugcaga

SEQ ID NO: 660551 - RNA, 21 nt, Human
ucuguggccgccgggggugac

SEQ ID NO: 660552 - RNA, 21 nt, Human
ugaacaaaugacaugaaggua

SEQ ID NO: 660553 - RNA, 21 nt, Human
ugaagaugugaugccacucug

SEQ ID NO: 660554 - RNA, 21 nt, Human
ugcacugaacugugagucccu

SEQ ID NO: 660555 - RNA, 23 nt, Human
uggaaugccauuuagucuagaaa

SEQ ID NO: 660556 - RNA, 22 nt, Human
uggaggcucuccuccuggguuu

SEQ ID NO: 660557 - RNA, 23 nt, Human
uggcagguaggguuccugaaggc

SEQ ID NO: 660558 - RNA, 27 nt, Human
uggccacagaaucugucagccuuugca

SEQ ID NO: 660559 - RNA, 20 nt, Human
ugggacaccaaagugucccc

SEQ ID NO: 660560 - RNA, 22 nt, Human
ugucaccagcuggaauuuuccu

SEQ ID NO: 660561 - RNA, 19 nt, Human
ugugcuagaagacugugau

SEQ ID NO: 660562 - RNA, 22 nt, Human
ugugguccaggcccaagccagg

SEQ ID NO: 660563 - RNA, 23 nt, Human
uuaauccuuacaaauauguuguu

SEQ ID NO: 660564 - RNA, 25 nt, Human
uuacugaaauagaacaaggaaacca

SEQ ID NO: 660565 - RNA, 23 nt, Human
uuaggucgcuaaaauauacuuga

SEQ ID NO: 660566 - RNA, 24 nt, Human
uucaagaacaccaucugguagcuc

SEQ ID NO: 660567 - RNA, 18 nt, Human
uucuaaagggaaggacuc

SEQ ID NO: 660568 - RNA, 23 nt, Human
uugaugcuggugauggauguccc

SEQ ID NO: 660569 - RNA, 20 nt, Human
uuuaaaaauacauacaucuu

SEQ ID NO: 660570 - RNA, 20 nt, Human
uuugcagagacauaaacacc

SEQ ID NO: 660571 - RNA, 25 nt, Human
uuuucaaguuuacugaaauagaaca

SEQ ID NO: 660572 - RNA, 20 nt, Human
uuuuuuuuuuuuuugcuuuu

SEQ ID NO: 660573 - RNA, 27 nt, Human
uuuuuuuuuuuuuuuuuuuuuuugggg

SEQ ID NO: 660574 - RNA, 21 nt, Human
aaaaacaaaauuaaacaaaaa

SEQ ID NO: 660575 - RNA, 20 nt, Human
aaaacaaaauuaaacaaaaa

SEQ ID NO: 660576 - RNA, 19 nt, Human
aagaaguaugagcugaaau

SEQ ID NO: 660577 - RNA, 24 nt, Human
aauaaacaaaaagguaaaacuaag

SEQ ID NO: 660578 - RNA, 20 nt, Human
acagugggguaauuggauug

SEQ ID NO: 660579 - RNA, 21 nt, Human
acuuugggaaugaaugaggag

SEQ ID NO: 660580 - RNA, 20 nt, Human
agggauacuaaagguauaau

SEQ ID NO: 660581 - RNA, 24 nt, Human
auucaaaacagugcaagauuuaau

SEQ ID NO: 660582 - RNA, 22 nt, Human
caaaaacugaaacuaccauuua

SEQ ID NO: 660583 - RNA, 19 nt, Human
caaaagugcauauacucau

SEQ ID NO: 660584 - RNA, 25 nt, Human
caauucccaagcguuuucucucagc

SEQ ID NO: 660585 - RNA, 24 nt, Human
caccaauacaacaacuguggaaau

SEQ ID NO: 660586 - RNA, 20 nt, Human
caugacacucuagaggggga

SEQ ID NO: 660587 - RNA, 26 nt, Human
cauuacuagaagaucucuauaaaagg

SEQ ID NO: 660588 - RNA, 26 nt, Human
cauuuuccuucaaaaguucaugagaa

SEQ ID NO: 660589 - RNA, 21 nt, Human
ccaauacaacaacuguggaaa

SEQ ID NO: 660590 - RNA, 22 nt, Human
cccacggucucuggaauccauu

SEQ ID NO: 660591 - RNA, 24 nt, Human
ccccaaauaaauacugauguaaau

SEQ ID NO: 660592 - RNA, 18 nt, Human
ccuuguuuuucucuuucu

SEQ ID NO: 660593 - RNA, 21 nt, Human
cuacuuuuguuuuaaaaaaag

SEQ ID NO: 660594 - RNA, 22 nt, Human
cuauaaaaggucaccaagacua

SEQ ID NO: 660595 - RNA, 18 nt, Human
cuaugccuuguuuuucuc

SEQ ID NO: 660596 - RNA, 21 nt, Human
cuggaauccauuacccaacca

SEQ ID NO: 660597 - RNA, 24 nt, Human
gaaaagcaaaaccuagcaucaaaa

SEQ ID NO: 660598 - RNA, 18 nt, Human
gacagugggguaauugga

SEQ ID NO: 660599 - RNA, 23 nt, Human
gugcuaugccuuguuuuucucuu

SEQ ID NO: 660600 - RNA, 21 nt, Human
guuuuuguaaaaccauggcuu

SEQ ID NO: 660601 - RNA, 25 nt, Human
uaaaccucuaauauguaaucagcuu

SEQ ID NO: 660602 - RNA, 22 nt, Human
uaagaaagcucuaagaagagaa

SEQ ID NO: 660603 - RNA, 22 nt, Human
uacccaaccaacaugacacucu

SEQ ID NO: 660604 - RNA, 18 nt, Human
uaggaucuuguaaccuag

SEQ ID NO: 660605 - RNA, 24 nt, Human
uauagaaucauaaaaauaaaccuc

SEQ ID NO: 660606 - RNA, 24 nt, Human
uauccuuguuugugaaaucaggga

SEQ ID NO: 660607 - RNA, 19 nt, Human
ucaugagaaggaugcugga

SEQ ID NO: 660608 - RNA, 21 nt, Human
ucuaagaagagaauacaacau

SEQ ID NO: 660609 - RNA, 21 nt, Human
ucucacaaaaacugaaacuac

SEQ ID NO: 660610 - RNA, 19 nt, Human
ucuucgacgauacuugugg

SEQ ID NO: 660611 - RNA, 19 nt, Human
ucuuucuuuuucuucuuuc

SEQ ID NO: 660612 - RNA, 24 nt, Human
ugaaaaagaaaucugagaucaaaa

SEQ ID NO: 660613 - RNA, 23 nt, Human
ugaaacuaccauuuacaucaggu

SEQ ID NO: 660614 - RNA, 20 nt, Human
ugagaccacaggacacaggc

SEQ ID NO: 660615 - RNA, 23 nt, Human
ugagauaugacuggggggagaaa

SEQ ID NO: 660616 - RNA, 22 nt, Human
uggaaaucaugagauaugacug

SEQ ID NO: 660617 - RNA, 18 nt, Human
uggguaaagccauuuucc

SEQ ID NO: 660618 - RNA, 20 nt, Human
uggguaaagccauuuuccuu

SEQ ID NO: 660619 - RNA, 20 nt, Human
uguauaaauagcagaugcag

SEQ ID NO: 660620 - RNA, 21 nt, Human
uguuggguaaagccauuuucc

SEQ ID NO: 660621 - RNA, 23 nt, Human
uguuggguaaagccauuuuccuu

SEQ ID NO: 660622 - RNA, 19 nt, Human
uuccuggcccacggucucu

SEQ ID NO: 660623 - RNA, 20 nt, Human
uugacagugggguaauuggg

SEQ ID NO: 660624 - RNA, 23 nt, Human
uuguggauucuuuaagaaagcuc

SEQ ID NO: 660625 - RNA, 22 nt, Human
uuuagaauuuaucuuguuagaa

SEQ ID NO: 660626 - RNA, 24 nt, Human
uuucaccauuucuugagaccacag

SEQ ID NO: 660627 - RNA, 23 nt, Human
uuuccuucaaaaguucaugagaa

SEQ ID NO: 660628 - RNA, 27 nt, Human
uuuucagaauaagugcuucgggucacc

SEQ ID NO: 660629 - RNA, 22 nt, Human
uuuuuuuuuuuuuuuuuuucag

SEQ ID NO: 660630 - RNA, 23 nt, Human
aaauaauugggggugggaggaaa

SEQ ID NO: 660631 - RNA, 25 nt, Human
aagcaaucuaaugaaagcaccaaac

SEQ ID NO: 660632 - RNA, 21 nt, Human
aagcuggaucccauucccagc

SEQ ID NO: 660633 - RNA, 21 nt, Human
aauaauugggggugggaggaa

SEQ ID NO: 660634 - RNA, 24 nt, Human
acagcaacagagcaagguuacauc

SEQ ID NO: 660635 - RNA, 24 nt, Human
acgcaagcacacugcugggccacu

SEQ ID NO: 660636 - RNA, 23 nt, Human
acuuccucaaggccucucugcua

SEQ ID NO: 660637 - RNA, 21 nt, Human
agaaacuaguauaggaaauaa

SEQ ID NO: 660638 - RNA, 22 nt, Human
agcagccauaaugaagcuggau

SEQ ID NO: 660639 - RNA, 23 nt, Human
aggaaauaauugggggugggagg

SEQ ID NO: 660640 - RNA, 26 nt, Human
agguaaaaauacgcaguuucgcaauc

SEQ ID NO: 660641 - RNA, 22 nt, Human
caaauuaaaaacugcaggcuca

SEQ ID NO: 660642 - RNA, 22 nt, Human
caacaccgaguccacagugccc

SEQ ID NO: 660643 - RNA, 19 nt, Human
caagcaaucuaaugaaagc

SEQ ID NO: 660644 - RNA, 22 nt, Human
caagcaaucuaaugaaagcacc

SEQ ID NO: 660645 - RNA, 23 nt, Human
caagcaaucuaaugaaagcacca

SEQ ID NO: 660646 - RNA, 26 nt, Human
caaugauuuuuuucucugagguaaaa

SEQ ID NO: 660647 - RNA, 23 nt, Human
cagagcuuaaauccaaaagaaau

SEQ ID NO: 660648 - RNA, 21 nt, Human
cagcagcaccccagcagccau

SEQ ID NO: 660649 - RNA, 24 nt, Human
cagcagcaccccagcagccauaau

SEQ ID NO: 660650 - RNA, 20 nt, Human
cagcagcagggcugggucag

SEQ ID NO: 660651 - RNA, 23 nt, Human
cauucagacaccuucacugccau

SEQ ID NO: 660652 - RNA, 25 nt, Human
cccccaaacauguaaaagauaaaaa

SEQ ID NO: 660653 - RNA, 18 nt, Human
cuagcccucaggaccauu

SEQ ID NO: 660654 - RNA, 21 nt, Human
cuuuucuuguuguuguuuauu

SEQ ID NO: 660655 - RNA, 18 nt, Human
gagcagcagcagggcugg

SEQ ID NO: 660656 - RNA, 18 nt, Human
gagcagcagcagggcugg

SEQ ID NO: 660657 - RNA, 25 nt, Human
gagcagcagcagggcugggucagca

SEQ ID NO: 660658 - RNA, 20 nt, Human
gcuauaguccagagcuuaaa

SEQ ID NO: 660659 - RNA, 20 nt, Human
ggaaauaauugggggugggg

SEQ ID NO: 660660 - RNA, 24 nt, Human
ggaggaaagcaggagugaauucaa

SEQ ID NO: 660661 - RNA, 18 nt, Human
gggggugggaggaaagca

SEQ ID NO: 660662 - RNA, 24 nt, Human
gggggugggaggaaagcaggagug

SEQ ID NO: 660663 - RNA, 23 nt, Human
uaaaaauacgcaguuucgcaauc

SEQ ID NO: 660664 - RNA, 27 nt, Human
uaaaaauacgcaguuucgcaaucaccc

SEQ ID NO: 660665 - RNA, 23 nt, Human
uaacaagcaaucuaaugaaagca

SEQ ID NO: 660666 - RNA, 26 nt, Human
uaacaagcaaucuaaugaaagcacca

SEQ ID NO: 660667 - RNA, 19 nt, Human
uaggcugagguccaggacu

SEQ ID NO: 660668 - RNA, 23 nt, Human
uauaguccagagcuuaaauccaa

SEQ ID NO: 660669 - RNA, 19 nt, Human
ucacugccaucagaaacua

SEQ ID NO: 660670 - RNA, 20 nt, Human
uccacagugccaggccucua

SEQ ID NO: 660671 - RNA, 23 nt, Human
ucccagccccugugcagcagguu

SEQ ID NO: 660672 - RNA, 19 nt, Human
uccuuggaaacgcaagcac

SEQ ID NO: 660673 - RNA, 19 nt, Human
ucuaggcugagguccagga

SEQ ID NO: 660674 - RNA, 26 nt, Human
ugaaaaaaguuuuguacacaaaguca

SEQ ID NO: 660675 - RNA, 20 nt, Human
ugaaagcaccaaaccuaaac

SEQ ID NO: 660676 - RNA, 21 nt, Human
ugagguaaaaauacgcaguuu

SEQ ID NO: 660677 - RNA, 25 nt, Human
ugcugggccacuuccucaaggccuc

SEQ ID NO: 660678 - RNA, 21 nt, Human
uguaaaagauaaaaacuuucc

SEQ ID NO: 660679 - RNA, 19 nt, Human
uuuuuuuuuuuucaggcgc

SEQ ID NO: 660680 - RNA, 25 nt, Human
uuuuuuuuuuuuuuuuuuuuucagg

SEQ ID NO: 660681 - RNA, 23 nt, Human
aaaaacccugacacauguagccc

SEQ ID NO: 660682 - RNA, 19 nt, Human
aaacaguaugaugauucau

SEQ ID NO: 660683 - RNA, 18 nt, Human
aagcaccuggagaaaaac

SEQ ID NO: 660684 - RNA, 24 nt, Human
acauucagccuaauuuuaaaaaua

SEQ ID NO: 660685 - RNA, 18 nt, Human
agaaaaaguaaaaaugaa

SEQ ID NO: 660686 - RNA, 19 nt, Human
agcgccccuggcacgcgcc

SEQ ID NO: 660687 - RNA, 24 nt, Human
aguguuacuuacucugucauuagc

SEQ ID NO: 660688 - RNA, 22 nt, Human
caaaauucuaaaacaaaagcca

SEQ ID NO: 660689 - RNA, 25 nt, Human
caaaauucuaaaacaaaagccacac

SEQ ID NO: 660690 - RNA, 26 nt, Human
caaaucacaugaaguacauucagccu

SEQ ID NO: 660691 - RNA, 19 nt, Human
caagaaugcaaugguuuca

SEQ ID NO: 660692 - RNA, 22 nt, Human
ccagguggggaaggaauggagu

SEQ ID NO: 660693 - RNA, 21 nt, Human
ccccccuucuuuuucaaacac

SEQ ID NO: 660694 - RNA, 18 nt, Human
cccuccuagcgcuuggca

SEQ ID NO: 660695 - RNA, 21 nt, Human
ccuggaauucucccccccuuc

SEQ ID NO: 660696 - RNA, 27 nt, Human
cucccccccuucuuuuucaaacaccag

SEQ ID NO: 660697 - RNA, 24 nt, Human
gaaaaacccugacacauguagccc

SEQ ID NO: 660698 - RNA, 26 nt, Human
gaaaaacccugacacauguagcccaa

SEQ ID NO: 660699 - RNA, 21 nt, Human
gaaguacauucagccuaauuu

SEQ ID NO: 660700 - RNA, 22 nt, Human
gcaccuggagaaaaacccugac

SEQ ID NO: 660701 - RNA, 20 nt, Human
gcaguucccuagcgccccug

SEQ ID NO: 660702 - RNA, 23 nt, Human
gccacacagaguacaaauaaagu

SEQ ID NO: 660703 - RNA, 19 nt, Human
gccccuggcacgcgcccuc

SEQ ID NO: 660704 - RNA, 22 nt, Human
ggaaggaauggagugagacugg

SEQ ID NO: 660705 - RNA, 19 nt, Human
ggacccuggucuugagcag

SEQ ID NO: 660706 - RNA, 18 nt, Human
gguggggaaggaauggag

SEQ ID NO: 660707 - RNA, 18 nt, Human
uaaagagaaucaauacaa

SEQ ID NO: 660708 - RNA, 19 nt, Human
uaauagaaacuaggcccug

SEQ ID NO: 660709 - RNA, 22 nt, Human
uaauuuuagcccauuuaggucc

SEQ ID NO: 660710 - RNA, 21 nt, Human
uacaagaaugcaaugguuuca

SEQ ID NO: 660711 - RNA, 22 nt, Human
uacacaguauuuuuguaaggaa

SEQ ID NO: 660712 - RNA, 19 nt, Human
uacagcauuucaaaucagu

SEQ ID NO: 660713 - RNA, 22 nt, Human
uacauuuuauauuuaaagagaa

SEQ ID NO: 660714 - RNA, 26 nt, Human
uacuuacucugucauuagcaauuuca

SEQ ID NO: 660715 - RNA, 21 nt, Human
uagcgccccuggcacgcgccc

SEQ ID NO: 660716 - RNA, 18 nt, Human
uaggcccugauuggcagu

SEQ ID NO: 660717 - RNA, 20 nt, Human
ucaaguugaugucacuaaua

SEQ ID NO: 660718 - RNA, 22 nt, Human
ucaaugaccaauauuaguguua

SEQ ID NO: 660719 - RNA, 18 nt, Human
ucauccauucagcaaaca

SEQ ID NO: 660720 - RNA, 19 nt, Human
ucaugaacgaagaucaaug

SEQ ID NO: 660721 - RNA, 19 nt, Human
ucccuagcgccccuggcac

SEQ ID NO: 660722 - RNA, 20 nt, Human
ugaacaaaauucuaaaacaa

SEQ ID NO: 660723 - RNA, 19 nt, Human
ugaacgaagaucaaugacc

SEQ ID NO: 660724 - RNA, 19 nt, Human
ugacuucuugaagacaguu

SEQ ID NO: 660725 - RNA, 18 nt, Human
ugagacuggggagcugcg

SEQ ID NO: 660726 - RNA, 24 nt, Human
ugagaggaaacuugccuaugaaaa

SEQ ID NO: 660727 - RNA, 21 nt, Human
ugagcaggugcgcgccaggug

SEQ ID NO: 660728 - RNA, 22 nt, Human
ugagcuuuugaaaaaucccaca

SEQ ID NO: 660729 - RNA, 24 nt, Human
ugaugucacuaauauaccaaucaa

SEQ ID NO: 660730 - RNA, 23 nt, Human
ugccgcagaugcagcuccucgga

SEQ ID NO: 660731 - RNA, 24 nt, Human
ugccgcagaugcagcuccucggag

SEQ ID NO: 660732 - RNA, 20 nt, Human
uggaaaaaaguuaacagguu

SEQ ID NO: 660733 - RNA, 21 nt, Human
uggaaaaaaguuaacagguua

SEQ ID NO: 660734 - RNA, 18 nt, Human
uggggagcugcgagcuac

SEQ ID NO: 660735 - RNA, 22 nt, Human
ugucaaguugaugucacuaaua

SEQ ID NO: 660736 - RNA, 22 nt, Human
uucaacagacuaauuuuacaga

SEQ ID NO: 660737 - RNA, 20 nt, Human
uuccagaucaauauaagcac

SEQ ID NO: 660738 - RNA, 23 nt, Human
uucucccccccuucuuuuucaaa

SEQ ID NO: 660739 - RNA, 21 nt, Human
uugaaaaaucccacaaguuug

SEQ ID NO: 660740 - RNA, 18 nt, Human
uugacaaaucacaugaag

SEQ ID NO: 660741 - RNA, 18 nt, Human
uuucauuaagauacuauc

SEQ ID NO: 660742 - RNA, 24 nt, Human
uuuuuacauuacaauuccagauca

SEQ ID NO: 660743 - RNA, 28 nt, Human
aaaaaagcauuccucuacuuagaauaga

SEQ ID NO: 660744 - RNA, 21 nt, Human
aaagagaaacuuucaagaaaa

SEQ ID NO: 660745 - RNA, 24 nt, Human
aaagcgccuccaccucugccuccg

SEQ ID NO: 660746 - RNA, 27 nt, Human
aaagcgccuccaccucugccuccgccu

SEQ ID NO: 660747 - RNA, 19 nt, Human
aagaaaaggaaaaaagcau

SEQ ID NO: 660748 - RNA, 25 nt, Human
aagaauaaacagaucuggccaggaa

SEQ ID NO: 660749 - RNA, 21 nt, Human
aagcaaugcagauaccaaaau

SEQ ID NO: 660750 - RNA, 20 nt, Human
aaucaugaucuucacauuua

SEQ ID NO: 660751 - RNA, 22 nt, Human
aaugauauaugagguuucuucc

SEQ ID NO: 660752 - RNA, 23 nt, Human
acagaaaaacaagaaucaugauc

SEQ ID NO: 660753 - RNA, 22 nt, Human
acuuucaagaaaaggaaaaaag

SEQ ID NO: 660754 - RNA, 21 nt, Human
aggaaaaaagcauuccucuac

SEQ ID NO: 660755 - RNA, 22 nt, Human
aggaaaaaagcauuccucuacu

SEQ ID NO: 660756 - RNA, 21 nt, Human
agugacagagcagggauuaga

SEQ ID NO: 660757 - RNA, 26 nt, Human
auggauaaaaauaaauaaaauacauc

SEQ ID NO: 660758 - RNA, 19 nt, Human
caagaaaaggaaaaaagca

SEQ ID NO: 660759 - RNA, 18 nt, Human
cacaugauacagaaaaac

SEQ ID NO: 660760 - RNA, 22 nt, Human
caccucugccuccgccuccgcc

SEQ ID NO: 660761 - RNA, 22 nt, Human
cagauaccaaaauaugcuuucc

SEQ ID NO: 660762 - RNA, 24 nt, Human
cauaaaauuauuccugaaugugag

SEQ ID NO: 660763 - RNA, 22 nt, Human
ccgaagaucacgcagcuuguua

SEQ ID NO: 660764 - RNA, 28 nt, Human
ccucugcaaccauuuuacuuuauuacuu

SEQ ID NO: 660765 - RNA, 24 nt, Human
cgccccugccccggcaaccagccu

SEQ ID NO: 660766 - RNA, 21 nt, Human
cugauucugaagcaaugggau

SEQ ID NO: 660767 - RNA, 19 nt, Human
gcaaagcaaugcagauacc

SEQ ID NO: 660768 - RNA, 19 nt, Human
uaaaaaaucuucucugaug

SEQ ID NO: 660769 - RNA, 24 nt, Human
uaaaagaauaaacagaucuggcca

SEQ ID NO: 660770 - RNA, 18 nt, Human
uaaacagaucuggccagg

SEQ ID NO: 660771 - RNA, 19 nt, Human
uauauuuacagacuuaaaa

SEQ ID NO: 660772 - RNA, 20 nt, Human
uauauuuacagacuuaaaaa

SEQ ID NO: 660773 - RNA, 21 nt, Human
uauggaaaaagcuauggauaa

SEQ ID NO: 660774 - RNA, 23 nt, Human
uauuugaaagagaaacuuucaag

SEQ ID NO: 660775 - RNA, 24 nt, Human
ucuaaauacauuuuuaagauacaa

SEQ ID NO: 660776 - RNA, 18 nt, Human
ucugccuccgccuccgcc

SEQ ID NO: 660777 - RNA, 19 nt, Human
ugaaagacucuagaggccu

SEQ ID NO: 660778 - RNA, 19 nt, Human
ugaaagagaaacuuucaag

SEQ ID NO: 660779 - RNA, 21 nt, Human
ugacagagcagggauuagaaa

SEQ ID NO: 660780 - RNA, 24 nt, Human
ugaguuugucucuuucagcaguuc

SEQ ID NO: 660781 - RNA, 24 nt, Human
ugcaaagcaaugcagauaccaaaa

SEQ ID NO: 660782 - RNA, 20 nt, Human
ugccacacaaugacggcuuu

SEQ ID NO: 660783 - RNA, 19 nt, Human
ugccuccgccuccgccccu

SEQ ID NO: 660784 - RNA, 23 nt, Human
ugccuccgccuccgccccugccc

SEQ ID NO: 660785 - RNA, 25 nt, Human
uuaaaauauauuuacagacuuaaaa

SEQ ID NO: 660786 - RNA, 20 nt, Human
uucaaagcgccuccaccucc

SEQ ID NO: 660787 - RNA, 22 nt, Human
uucaaagcgccuccaccucugc

SEQ ID NO: 660788 - RNA, 22 nt, Human
uuccaagaggauuacuuuuuuc

SEQ ID NO: 660789 - RNA, 18 nt, Human
uucuuuuuuuuuccucug

SEQ ID NO: 660790 - RNA, 25 nt, Human
uuucaagaaaaggaaaaaagcauuc

SEQ ID NO: 660791 - RNA, 22 nt, Human
aaaagggcagggcggaaaagca

SEQ ID NO: 660792 - RNA, 24 nt, Human
aaaccaccagacaagccccaacag

SEQ ID NO: 660793 - RNA, 19 nt, Human
aaaguggucaggcagagac

SEQ ID NO: 660794 - RNA, 18 nt, Human
aacaaggcguuccagagc

SEQ ID NO: 660795 - RNA, 19 nt, Human
aacacggugaaaccccauc

SEQ ID NO: 660796 - RNA, 20 nt, Human
aacacggugaaaccccaucu

SEQ ID NO: 660797 - RNA, 20 nt, Human
aacacggugaaaccccaucu

SEQ ID NO: 660798 - RNA, 21 nt, Human
aacacggugaaaccccaucuc

SEQ ID NO: 660799 - RNA, 22 nt, Human
aaccacaagaaaccaccagaca

SEQ ID NO: 660800 - RNA, 18 nt, Human
aacccagagagacgaggg

SEQ ID NO: 660801 - RNA, 18 nt, Human
aagaaaccaccagacaag

SEQ ID NO: 660802 - RNA, 21 nt, Human
aagagccucaggagaugaccc

SEQ ID NO: 660803 - RNA, 21 nt, Human
aagcagacccugccuggaggu

SEQ ID NO: 660804 - RNA, 24 nt, Human
aauggcaugaacuugggaggcgga

SEQ ID NO: 660805 - RNA, 21 nt, Human
acaaacaaggcguuccagagc

SEQ ID NO: 660806 - RNA, 19 nt, Human
acaaagccagagaccuccc

SEQ ID NO: 660807 - RNA, 21 nt, Human
acaaagccagagaccucccag

SEQ ID NO: 660808 - RNA, 23 nt, Human
acaagaaaccaccagacaagccc

SEQ ID NO: 660809 - RNA, 22 nt, Human
acaggccggagauuuugcaugc

SEQ ID NO: 660810 - RNA, 19 nt, Human
accacugcacuccagccug

SEQ ID NO: 660811 - RNA, 24 nt, Human
accacugcacuccagccuggguga

SEQ ID NO: 660812 - RNA, 21 nt, Human
accagacaagccccaacagag

SEQ ID NO: 660813 - RNA, 22 nt, Human
acccacccccagaaaggccacc

SEQ ID NO: 660814 - RNA, 24 nt, Human
accccaucucuacuaaaaguacaa

SEQ ID NO: 660815 - RNA, 21 nt, Human
acccccagaaaggccaccaug

SEQ ID NO: 660816 - RNA, 20 nt, Human
acccugaagccuccccaggc

SEQ ID NO: 660817 - RNA, 20 nt, Human
acccugaagccuccccaggc

SEQ ID NO: 660818 - RNA, 22 nt, Human
acccugaagccuccccaggcac

SEQ ID NO: 660819 - RNA, 22 nt, Human
acccugaagccuccccaggcac

SEQ ID NO: 660820 - RNA, 18 nt, Human
acccugccuggaggugcu

SEQ ID NO: 660821 - RNA, 21 nt, Human
accggagccagagacccacug

SEQ ID NO: 660822 - RNA, 22 nt, Human
accucggcccacccaccucagc

SEQ ID NO: 660823 - RNA, 20 nt, Human
acuagcccagaggcugggcu

SEQ ID NO: 660824 - RNA, 20 nt, Human
acuagcccagaggcugggcu

SEQ ID NO: 660825 - RNA, 24 nt, Human
acugcacuccagccugggugacag

SEQ ID NO: 660826 - RNA, 26 nt, Human
acugcacuccagccugggugacagag

SEQ ID NO: 660827 - RNA, 18 nt, Human
agaaauaagcggaucuga

SEQ ID NO: 660828 - RNA, 19 nt, Human
agacaagccccaacagagg

SEQ ID NO: 660829 - RNA, 19 nt, Human
agacagagggcugagggcc

SEQ ID NO: 660830 - RNA, 21 nt, Human
agacaggagaauggcaugaac

SEQ ID NO: 660831 - RNA, 24 nt, Human
agacaggagaauggcaugaacuug

SEQ ID NO: 660832 - RNA, 18 nt, Human
agaccaccaagaacccag

SEQ ID NO: 660833 - RNA, 22 nt, Human
agaggccccugguaccaacugg

SEQ ID NO: 660834 - RNA, 24 nt, Human
agcagggcaggaaccuggagagga

SEQ ID NO: 660835 - RNA, 24 nt, Human
agcagggcaggaaccuggagagga

SEQ ID NO: 660836 - RNA, 19 nt, Human
agccugccccaccagcacc

SEQ ID NO: 660837 - RNA, 21 nt, Human
agcuuggguaaugcagaugcc

SEQ ID NO: 660838 - RNA, 24 nt, Human
aggacaggcagacugugcgggcca

SEQ ID NO: 660839 - RNA, 21 nt, Human
aggaggcuuggauggccagga

SEQ ID NO: 660840 - RNA, 21 nt, Human
aggaggcuuggauggccagga

SEQ ID NO: 660841 - RNA, 21 nt, Human
aggcacugaucagucacagga

SEQ ID NO: 660842 - RNA, 18 nt, Human
aggcagagacagccaccc

SEQ ID NO: 660843 - RNA, 18 nt, Human
aggcagagacagccaccc

SEQ ID NO: 660844 - RNA, 18 nt, Human
aggcagagggaagaggac

SEQ ID NO: 660845 - RNA, 20 nt, Human
aggcaggcggaucacgaggu

SEQ ID NO: 660846 - RNA, 24 nt, Human
aggcaggcggaucacgaggucagg

SEQ ID NO: 660847 - RNA, 24 nt, Human
aggcaggcugcccacaaagccaga

SEQ ID NO: 660848 - RNA, 19 nt, Human
aggcaguggcgucacagug

SEQ ID NO: 660849 - RNA, 22 nt, Human
aggccaggcgugguggcucacg

SEQ ID NO: 660850 - RNA, 24 nt, Human
aggccaggcgugguggcucacgcc

SEQ ID NO: 660851 - RNA, 21 nt, Human
aggccgaggcaggcggaucac

SEQ ID NO: 660852 - RNA, 23 nt, Human
aggccgaggcaggcggaucacga

SEQ ID NO: 660853 - RNA, 24 nt, Human
aggcggagcuugcagugagccaag

SEQ ID NO: 660854 - RNA, 22 nt, Human
aggcggaucacgaggucaggau

SEQ ID NO: 660855 - RNA, 24 nt, Human
aggcgugguggcucacgccuguaa

SEQ ID NO: 660856 - RNA, 20 nt, Human
aggcucccuggaagcagcag

SEQ ID NO: 660857 - RNA, 20 nt, Human
aggcucccuggaagcagcag

SEQ ID NO: 660858 - RNA, 18 nt, Human
agggaccagcacccaccc

SEQ ID NO: 660859 - RNA, 19 nt, Human
agggagggagaggagcuga

SEQ ID NO: 660860 - RNA, 18 nt, Human
agggcuaaggagacagag

SEQ ID NO: 660861 - RNA, 19 nt, Human
agggguggguggggugggg

SEQ ID NO: 660862 - RNA, 21 nt, Human
aucagggguggggcagggggc

SEQ ID NO: 660863 - RNA, 24 nt, Human
aucgcaccacugcacuccagccug

SEQ ID NO: 660864 - RNA, 20 nt, Human
augcaaccccagcugcccuu

SEQ ID NO: 660865 - RNA, 19 nt, Human
augcggggagggguggguc

SEQ ID NO: 660866 - RNA, 19 nt, Human
augcggggagggguggguc

SEQ ID NO: 660867 - RNA, 25 nt, Human
caaaaagaaacacaagaaucacauc

SEQ ID NO: 660868 - RNA, 19 nt, Human
caaaauauacuggcagaaa

SEQ ID NO: 660869 - RNA, 22 nt, Human
caaaccugacacuacuugaaau

SEQ ID NO: 660870 - RNA, 21 nt, Human
caaagccagagaccucccagg

SEQ ID NO: 660871 - RNA, 23 nt, Human
caacaggaccgcuugagaggcuc

SEQ ID NO: 660872 - RNA, 19 nt, Human
caaccgacccgaagcacgu

SEQ ID NO: 660873 - RNA, 27 nt, Human
caagaaaccaccagacaagccccaaca

SEQ ID NO: 660874 - RNA, 20 nt, Human
caagaggccccugguaccaa

SEQ ID NO: 660875 - RNA, 20 nt, Human
cacaaacaaggcguuccaga

SEQ ID NO: 660876 - RNA, 24 nt, Human
cacaaacaaggcguuccagagcaa

SEQ ID NO: 660877 - RNA, 22 nt, Human
cacaaagccagagaccucccag

SEQ ID NO: 660878 - RNA, 24 nt, Human
cacaagaaaccaccagacaagccc

SEQ ID NO: 660879 - RNA, 20 nt, Human
cacaguguccgaagcaagac

SEQ ID NO: 660880 - RNA, 20 nt, Human
cacaguuucacaggccggag

SEQ ID NO: 660881 - RNA, 28 nt, Human
caccacccagccucugugggcaccuccu

SEQ ID NO: 660882 - RNA, 26 nt, Human
caccacugcacuccagccugggugac

SEQ ID NO: 660883 - RNA, 22 nt, Human
caccagcaccccaaggccaccc

SEQ ID NO: 660884 - RNA, 25 nt, Human
caccagcaccccaaggccaccccga

SEQ ID NO: 660885 - RNA, 21 nt, Human
cacccugaagccuccccaggc

SEQ ID NO: 660886 - RNA, 20 nt, Human
caccucggcccacccaccuc

SEQ ID NO: 660887 - RNA, 18 nt, Human
caccugccaagcacuggc

SEQ ID NO: 660888 - RNA, 18 nt, Human
caccugccaagcacuggc

SEQ ID NO: 660889 - RNA, 22 nt, Human
caccugccaagcacuggccugg

SEQ ID NO: 660890 - RNA, 22 nt, Human
caccugccaagcacuggccugg

SEQ ID NO: 660891 - RNA, 19 nt, Human
cacgccuguaaucccagca

SEQ ID NO: 660892 - RNA, 22 nt, Human
cacuccagccugggugacagag

SEQ ID NO: 660893 - RNA, 19 nt, Human
cacugcacuccagccuggg

SEQ ID NO: 660894 - RNA, 19 nt, Human
cacugcacuccagccuggg

SEQ ID NO: 660895 - RNA, 19 nt, Human
cacugcacuccagccuggg

SEQ ID NO: 660896 - RNA, 22 nt, Human
cacugcacuccagccuggguga

SEQ ID NO: 660897 - RNA, 24 nt, Human
cacugcacuccagccugggugaca

SEQ ID NO: 660898 - RNA, 25 nt, Human
cacugcacuccagccugggugacag

SEQ ID NO: 660899 - RNA, 22 nt, Human
cagaccaccaagaacccagaga

SEQ ID NO: 660900 - RNA, 21 nt, Human
cagagggagccgccacccgcc

SEQ ID NO: 660901 - RNA, 20 nt, Human
cagagggcugagggccacgc

SEQ ID NO: 660902 - RNA, 24 nt, Human
cagcaauuuaggaggccgaggcag

SEQ ID NO: 660903 - RNA, 24 nt, Human
cagcaccccaaggccaccccgaga

SEQ ID NO: 660904 - RNA, 22 nt, Human
cagcacccuccccaccuuuguc

SEQ ID NO: 660905 - RNA, 24 nt, Human
cagcccgggaagccccugccucuc

SEQ ID NO: 660906 - RNA, 21 nt, Human
cagccucugugggcaccuccu

SEQ ID NO: 660907 - RNA, 24 nt, Human
cagccucugugggcaccuccuccu

SEQ ID NO: 660908 - RNA, 22 nt, Human
cagccugggaugggcacagcug

SEQ ID NO: 660909 - RNA, 23 nt, Human
cagcuuccugagucugugugccu

SEQ ID NO: 660910 - RNA, 20 nt, Human
cagcuuggcagggacaagca

SEQ ID NO: 660911 - RNA, 18 nt, Human
caggaagagccucaggag

SEQ ID NO: 660912 - RNA, 21 nt, Human
caggcugcccacaaagccaga

SEQ ID NO: 660913 - RNA, 23 nt, Human
caggcugcccacaaagccagaga

SEQ ID NO: 660914 - RNA, 18 nt, Human
cagggcaggaaccuggag

SEQ ID NO: 660915 - RNA, 18 nt, Human
cagggcaggaaccuggag

SEQ ID NO: 660916 - RNA, 21 nt, Human
caggggcuggugggccccagg

SEQ ID NO: 660917 - RNA, 19 nt, Human
cagguacacaggaccaccu

SEQ ID NO: 660918 - RNA, 21 nt, Human
cagguacacaggaccaccuca

SEQ ID NO: 660919 - RNA, 22 nt, Human
caguggcaaaggguggugacau

SEQ ID NO: 660920 - RNA, 21 nt, Human
caguggccgcccaccucggcc

SEQ ID NO: 660921 - RNA, 21 nt, Human
cauccagaagccccagaaagu

SEQ ID NO: 660922 - RNA, 19 nt, Human
caugggcagcagagcuugg

SEQ ID NO: 660923 - RNA, 19 nt, Human
ccacaagaaaccaccagac

SEQ ID NO: 660924 - RNA, 20 nt, Human
ccacugcacuccagccuggg

SEQ ID NO: 660925 - RNA, 20 nt, Human
ccacugcacuccagccuggg

SEQ ID NO: 660926 - RNA, 20 nt, Human
ccacugcacuccagccuggg

SEQ ID NO: 660927 - RNA, 20 nt, Human
ccacugcacuccagccuggg

SEQ ID NO: 660928 - RNA, 21 nt, Human
ccacugcacuccagccugggu

SEQ ID NO: 660929 - RNA, 21 nt, Human
ccacugcacuccagccugggu

SEQ ID NO: 660930 - RNA, 24 nt, Human
ccacugcacuccagccugggugac

SEQ ID NO: 660931 - RNA, 25 nt, Human
ccacugcacuccagccugggugaca

SEQ ID NO: 660932 - RNA, 23 nt, Human
ccacuggccaguggccgcccacc

SEQ ID NO: 660933 - RNA, 23 nt, Human
ccagaaaggccaccaugggcagc

SEQ ID NO: 660934 - RNA, 24 nt, Human
ccaggcacucguguccugcuugug

SEQ ID NO: 660935 - RNA, 24 nt, Human
ccaggcaggcugcccacaaagcca

SEQ ID NO: 660936 - RNA, 22 nt, Human
ccagugaggaagacgaaaaggg

SEQ ID NO: 660937 - RNA, 24 nt, Human
ccaguggccgcccaccucggccca

SEQ ID NO: 660938 - RNA, 24 nt, Human
cccacccaccucagcccaugcugc

SEQ ID NO: 660939 - RNA, 20 nt, Human
cccaccucggcccacccacc

SEQ ID NO: 660940 - RNA, 23 nt, Human
cccacggcacacuagcccagagg

SEQ ID NO: 660941 - RNA, 23 nt, Human
cccacggcacacuagcccagagg

SEQ ID NO: 660942 - RNA, 18 nt, Human
cccacggcacacuagccu

SEQ ID NO: 660943 - RNA, 21 nt, Human
cccagccucugugggcaccuc

SEQ ID NO: 660944 - RNA, 20 nt, Human
ccccaccagcaccccaaggc

SEQ ID NO: 660945 - RNA, 22 nt, Human
ccccacggcacacuagcccaga

SEQ ID NO: 660946 - RNA, 22 nt, Human
ccccacggcacacuagcccaga

SEQ ID NO: 660947 - RNA, 18 nt, Human
ccccagaaaggccaccau

SEQ ID NO: 660948 - RNA, 19 nt, Human
ccccagaaaggccaccaug

SEQ ID NO: 660949 - RNA, 21 nt, Human
cccccagcuuccugagucugu

SEQ ID NO: 660950 - RNA, 25 nt, Human
cccccagcuuccugagucugugugc

SEQ ID NO: 660951 - RNA, 19 nt, Human
cccgccagccugccccacc

SEQ ID NO: 660952 - RNA, 20 nt, Human
cccggccacaguguccgaag

SEQ ID NO: 660953 - RNA, 21 nt, Human
cccucagaccaccaagaaccc

SEQ ID NO: 660954 - RNA, 23 nt, Human
cccucagaccaccaagaacccag

SEQ ID NO: 660955 - RNA, 19 nt, Human
cccugaagccuccccaggc

SEQ ID NO: 660956 - RNA, 20 nt, Human
cccugagagcacagcucagg

SEQ ID NO: 660957 - RNA, 20 nt, Human
cccugagagcacagcucagg

SEQ ID NO: 660958 - RNA, 24 nt, Human
cccuucagaaagacggccaacagg

SEQ ID NO: 660959 - RNA, 21 nt, Human
ccgaagcaagacagagcaggg

SEQ ID NO: 660960 - RNA, 25 nt, Human
ccgccacccgccagccugccccacc

SEQ ID NO: 660961 - RNA, 26 nt, Human
ccuccgcaaaccugacacuacuuuuc

SEQ ID NO: 660962 - RNA, 19 nt, Human
ccuccugccccacagaggg

SEQ ID NO: 660963 - RNA, 21 nt, Human
ccugcaggagccuggccaggg

SEQ ID NO: 660964 - RNA, 21 nt, Human
ccugccaagcacuggccuggg

SEQ ID NO: 660965 - RNA, 21 nt, Human
ccugccaagcacuggccuggg

SEQ ID NO: 660966 - RNA, 28 nt, Human
ccugccccacggcacacuagcccagagg

SEQ ID NO: 660967 - RNA, 28 nt, Human
ccugccccacggcacacuagcccagagg

SEQ ID NO: 660968 - RNA, 19 nt, Human
ccugcccucgugucuccaa

SEQ ID NO: 660969 - RNA, 24 nt, Human
ccugcuugugaagcugcuggguuu

SEQ ID NO: 660970 - RNA, 19 nt, Human
ccuguggucccagcuacuc

SEQ ID NO: 660971 - RNA, 21 nt, Human
ccuguggucccagcuacucgg

SEQ ID NO: 660972 - RNA, 22 nt, Human
ccuguggucccagcuacucggg

SEQ ID NO: 660973 - RNA, 22 nt, Human
cgaagcacgugagcaaaaccga

SEQ ID NO: 660974 - RNA, 24 nt, Human
cgaggcaggcggaucacgagguca

SEQ ID NO: 660975 - RNA, 21 nt, Human
cgcaccacugcacuccagccu

SEQ ID NO: 660976 - RNA, 24 nt, Human
cgccuguggucccagcuacucggg

SEQ ID NO: 660977 - RNA, 19 nt, Human
cggagccagagacccacug

SEQ ID NO: 660978 - RNA, 27 nt, Human
cggaggggacccaagcuguguccugcc

SEQ ID NO: 660979 - RNA, 22 nt, Human
cgggacagcagcagcccgggaa

SEQ ID NO: 660980 - RNA, 21 nt, Human
cucacgccuguaaucccagca

SEQ ID NO: 660981 - RNA, 21 nt, Human
cucacgccuguaaucccagca

SEQ ID NO: 660982 - RNA, 18 nt, Human
cucagaccaccaagaacc

SEQ ID NO: 660983 - RNA, 24 nt, Human
cuccccaggcacaggcccugaaua

SEQ ID NO: 660984 - RNA, 24 nt, Human
cuccccaggcacaggcccugaaua

SEQ ID NO: 660985 - RNA, 24 nt, Human
cuccucacacuggauguccaggcu

SEQ ID NO: 660986 - RNA, 22 nt, Human
cuccuggcuaucaccacccagc

SEQ ID NO: 660987 - RNA, 25 nt, Human
cucggcccaucuagcgucgcucagc

SEQ ID NO: 660988 - RNA, 28 nt, Human
cucugcaccaggcuacagcacauccccc

SEQ ID NO: 660989 - RNA, 18 nt, Human
cugccccaccagcacccc

SEQ ID NO: 660990 - RNA, 18 nt, Human
cuggaauggguuuuacau

SEQ ID NO: 660991 - RNA, 18 nt, Human
cuggagcagagggaggag

SEQ ID NO: 660992 - RNA, 23 nt, Human
cuggcuaacacggugaaacccca

SEQ ID NO: 660993 - RNA, 18 nt, Human
cugggcagacacuuccuc

SEQ ID NO: 660994 - RNA, 20 nt, Human
cugugugccuggcacuccuc

SEQ ID NO: 660995 - RNA, 19 nt, Human
cuucagaggcggcuggucc

SEQ ID NO: 660996 - RNA, 22 nt, Human
gaaaccaccagacaagccccaa

SEQ ID NO: 660997 - RNA, 24 nt, Human
gacaggcagacugugcgggccagg

SEQ ID NO: 660998 - RNA, 20 nt, Human
gacaggguaggguggggugg

SEQ ID NO: 660999 - RNA, 23 nt, Human
gaccacuuggcacugcuggagca

SEQ ID NO: 661000 - RNA, 20 nt, Human
gacccgaagcacgugagcaa

SEQ ID NO: 661001 - RNA, 21 nt, Human
gacgaaaagggcagggcggaa

SEQ ID NO: 661002 - RNA, 22 nt, Human
gagccgccacccgccagccugc

SEQ ID NO: 661003 - RNA, 24 nt, Human
gagccuggaggccccagcagggga

SEQ ID NO: 661004 - RNA, 18 nt, Human
gagcuugcagugagccaa

SEQ ID NO: 661005 - RNA, 23 nt, Human
gagcuugcagugagccaagaucg

SEQ ID NO: 661006 - RNA, 23 nt, Human
gaggaagacgaaaagggcagggc

SEQ ID NO: 661007 - RNA, 22 nt, Human
gaggaccucgagggccgaggac

SEQ ID NO: 661008 - RNA, 21 nt, Human
gaggagcucggcccaucuagc

SEQ ID NO: 661009 - RNA, 19 nt, Human
gaggcagaggcaagaggac

SEQ ID NO: 661010 - RNA, 22 nt, Human
gcaaugcacccuucagagggag

SEQ ID NO: 661011 - RNA, 20 nt, Human
gcaccacugcacuccagccu

SEQ ID NO: 661012 - RNA, 23 nt, Human
gcacccacccccagaaaggccac

SEQ ID NO: 661013 - RNA, 26 nt, Human
gcaccccaaggccaccccgagagcaa

SEQ ID NO: 661014 - RNA, 24 nt, Human
gcacuccagccugggugacagagc

SEQ ID NO: 661015 - RNA, 20 nt, Human
gcagggacaagcagcgcccc

SEQ ID NO: 661016 - RNA, 20 nt, Human
gccaagaucgcaccacugca

SEQ ID NO: 661017 - RNA, 21 nt, Human
gccagacccucagaccaccaa

SEQ ID NO: 661018 - RNA, 23 nt, Human
gccccacagagggcgggacagca

SEQ ID NO: 661019 - RNA, 19 nt, Human
gcccugaauauggaaggag

SEQ ID NO: 661020 - RNA, 20 nt, Human
gcccugaauauggaaggagg

SEQ ID NO: 661021 - RNA, 19 nt, Human
gcccugacacccccagcuu

SEQ ID NO: 661022 - RNA, 18 nt, Human
gccgaggacucccagccc

SEQ ID NO: 661023 - RNA, 18 nt, Human
gccgcccaccucggccca

SEQ ID NO: 661024 - RNA, 20 nt, Human
gccuccccaggcacaggccc

SEQ ID NO: 661025 - RNA, 20 nt, Human
gccuccccaggcacaggccc

SEQ ID NO: 661026 - RNA, 20 nt, Human
gccugggaugggcacagcug

SEQ ID NO: 661027 - RNA, 23 nt, Human
gcgggacagcagcagcccgggaa

SEQ ID NO: 661028 - RNA, 24 nt, Human
gcuaacacggugaaaccccaucuc

SEQ ID NO: 661029 - RNA, 18 nt, Human
gcuacagcacauccccug

SEQ ID NO: 661030 - RNA, 20 nt, Human
gcugggugggucagccuggg

SEQ ID NO: 661031 - RNA, 20 nt, Human
gcugggugggucagccuggg

SEQ ID NO: 661032 - RNA, 18 nt, Human
ggaccagcacccaccccc

SEQ ID NO: 661033 - RNA, 21 nt, Human
ggagacagagggcugagggcc

SEQ ID NO: 661034 - RNA, 24 nt, Human
ggagagggcucucauccagaagcc

SEQ ID NO: 661035 - RNA, 24 nt, Human
ggagcuugcagugagccaagaucg

SEQ ID NO: 661036 - RNA, 20 nt, Human
ggaggcagaggcaagaggac

SEQ ID NO: 661037 - RNA, 18 nt, Human
ggaggcagagggaagagg

SEQ ID NO: 661038 - RNA, 24 nt, Human
ggagguuccugaggcccugagagc

SEQ ID NO: 661039 - RNA, 24 nt, Human
ggagguuccugaggcccugagagc

SEQ ID NO: 661040 - RNA, 23 nt, Human
ggcacugcuggagcagagggagg

SEQ ID NO: 661041 - RNA, 20 nt, Human
ggcagaaauaagcggaucug

SEQ ID NO: 661042 - RNA, 24 nt, Human
ggcaggggcuggugggccccaggg

SEQ ID NO: 661043 - RNA, 22 nt, Human
ggccgcccaccucggcccaccc

SEQ ID NO: 661044 - RNA, 22 nt, Human
ggcuacagcacauccccugccc

SEQ ID NO: 661045 - RNA, 20 nt, Human
gggaaaguggucaggcagag

SEQ ID NO: 661046 - RNA, 20 nt, Human
gggaaaguggucaggcagag

SEQ ID NO: 661047 - RNA, 24 nt, Human
gggacccaagcuguguccugcccu

SEQ ID NO: 661048 - RNA, 20 nt, Human
gggaggcagaggcaagagga

SEQ ID NO: 661049 - RNA, 19 nt, Human
gggaggcagagggaagagg

SEQ ID NO: 661050 - RNA, 21 nt, Human
gggaggcagagggaagaggac

SEQ ID NO: 661051 - RNA, 24 nt, Human
gggcaaggacaggguagggugggg

SEQ ID NO: 661052 - RNA, 28 nt, Human
gggcaggaaccuggagaggaggcuugga

SEQ ID NO: 661053 - RNA, 28 nt, Human
gggcaggaaccuggagaggaggcuugga

SEQ ID NO: 661054 - RNA, 18 nt, Human
gggcuggugggccccagg

SEQ ID NO: 661055 - RNA, 22 nt, Human
ggggaggggugggugggguggg

SEQ ID NO: 661056 - RNA, 21 nt, Human
ggggcagggggcagggaccag

SEQ ID NO: 661057 - RNA, 18 nt, Human
gggguggggcagggggca

SEQ ID NO: 661058 - RNA, 18 nt, Human
ggguggguggggugggga

SEQ ID NO: 661059 - RNA, 24 nt, Human
gguggcucacgccuguaaucccag

SEQ ID NO: 661060 - RNA, 18 nt, Human
ggugggaggcagagggaa

SEQ ID NO: 661061 - RNA, 20 nt, Human
ggugggguggucugugagcc

SEQ ID NO: 661062 - RNA, 22 nt, Human
gucacaguggagaggguggcag

SEQ ID NO: 661063 - RNA, 19 nt, Human
gucuuguccgaauccccuc

SEQ ID NO: 661064 - RNA, 23 nt, Human
guggcucacgccuguaaucccag

SEQ ID NO: 661065 - RNA, 21 nt, Human
gugggguggggagagggcucu

SEQ ID NO: 661066 - RNA, 18 nt, Human
uaaaguaucucucgaagg

SEQ ID NO: 661067 - RNA, 19 nt, Human
uaaauugucaaaaagaaac

SEQ ID NO: 661068 - RNA, 22 nt, Human
uaacacggugaaaccccaucuc

SEQ ID NO: 661069 - RNA, 24 nt, Human
uaacacggugaaaccccaucucua

SEQ ID NO: 661070 - RNA, 23 nt, Human
uaacuccuccgcaaaccugacac

SEQ ID NO: 661071 - RNA, 24 nt, Human
uaggaggccgaggcaggcggauca

SEQ ID NO: 661072 - RNA, 21 nt, Human
uaggccaggcgugguggcuca

SEQ ID NO: 661073 - RNA, 24 nt, Human
uauggaaggagguuccugaggccc

SEQ ID NO: 661074 - RNA, 22 nt, Human
ucaaaaagaaacacaagaauca

SEQ ID NO: 661075 - RNA, 24 nt, Human
ucacgaggucaggauaucaagacc

SEQ ID NO: 661076 - RNA, 21 nt, Human
ucacggaggggacccaagcug

SEQ ID NO: 661077 - RNA, 20 nt, Human
ucaugguggaggugaagagu

SEQ ID NO: 661078 - RNA, 20 nt, Human
uccacacgccugggcgcccg

SEQ ID NO: 661079 - RNA, 18 nt, Human
uccagccugggugacaga

SEQ ID NO: 661080 - RNA, 25 nt, Human
ucccacggccccacauggaggaacu

SEQ ID NO: 661081 - RNA, 18 nt, Human
uccccaggcacaggcccu

SEQ ID NO: 661082 - RNA, 19 nt, Human
uccccaggcacaggcccug

SEQ ID NO: 661083 - RNA, 21 nt, Human
uccccaggcacaggcccugaa

SEQ ID NO: 661084 - RNA, 21 nt, Human
uccccaggcacaggcccugaa

SEQ ID NO: 661085 - RNA, 18 nt, Human
ucccugagcaccugccaa

SEQ ID NO: 661086 - RNA, 18 nt, Human
ucccugagcaccugccaa

SEQ ID NO: 661087 - RNA, 19 nt, Human
uccgcaaaccugacacuac

SEQ ID NO: 661088 - RNA, 23 nt, Human
ucgcaccacugcacuccagccug

SEQ ID NO: 661089 - RNA, 26 nt, Human
ucggcccacccaccucagcccaugcu

SEQ ID NO: 661090 - RNA, 22 nt, Human
ucucuacuaaaaguacaaaaaa

SEQ ID NO: 661091 - RNA, 19 nt, Human
ugaaaccccaucucuacua

SEQ ID NO: 661092 - RNA, 24 nt, Human
ugacgggcgccuguggucccagcu

SEQ ID NO: 661093 - RNA, 20 nt, Human
ugagacaccggagccagaga

SEQ ID NO: 661094 - RNA, 23 nt, Human
ugagacaggagaauggcaugaac

SEQ ID NO: 661095 - RNA, 24 nt, Human
ugagacaggagaauggcaugaacu

SEQ ID NO: 661096 - RNA, 21 nt, Human
ugagcaaaaccgaccagggug

SEQ ID NO: 661097 - RNA, 20 nt, Human
ugaggaagacgaaaagggca

SEQ ID NO: 661098 - RNA, 20 nt, Human
ugaggaagacgaaaagggca

SEQ ID NO: 661099 - RNA, 22 nt, Human
ugaggaagacgaaaagggcagg

SEQ ID NO: 661100 - RNA, 22 nt, Human
ugaggcccugagagcacagcuc

SEQ ID NO: 661101 - RNA, 22 nt, Human
ugaggcccugagagcacagcuc

SEQ ID NO: 661102 - RNA, 18 nt, Human
ugaguggaggcaagaggc

SEQ ID NO: 661103 - RNA, 20 nt, Human
ugcaaccccagcugcccuuc

SEQ ID NO: 661104 - RNA, 22 nt, Human
ugcagaugccagcccaucuccu

SEQ ID NO: 661105 - RNA, 18 nt, Human
ugccaagcacuggccugg

SEQ ID NO: 661106 - RNA, 18 nt, Human
ugccaagcacuggccugg

SEQ ID NO: 661107 - RNA, 25 nt, Human
ugccagcccaucuccuggcuaucac

SEQ ID NO: 661108 - RNA, 18 nt, Human
ugccccacagagggcggg

SEQ ID NO: 661109 - RNA, 24 nt, Human
ugccccaccagcaccccaaggcca

SEQ ID NO: 661110 - RNA, 18 nt, Human
ugcccugacacccccagc

SEQ ID NO: 661111 - RNA, 23 nt, Human
ugcccugacacccccagcuuccu

SEQ ID NO: 661112 - RNA, 20 nt, Human
uggaagcagcagcacugaug

SEQ ID NO: 661113 - RNA, 20 nt, Human
uggaagcagcagcacugaug

SEQ ID NO: 661114 - RNA, 22 nt, Human
uggaggccccagcaggggagca

SEQ ID NO: 661115 - RNA, 18 nt, Human
uggaggugcugggccaga

SEQ ID NO: 661116 - RNA, 18 nt, Human
uggauggccaggaaggcu

SEQ ID NO: 661117 - RNA, 18 nt, Human
uggauggccaggaaggcu

SEQ ID NO: 661118 - RNA, 18 nt, Human
uggcaugaacuugggagg

SEQ ID NO: 661119 - RNA, 24 nt, Human
uggcucacgccuguaaucccagca

SEQ ID NO: 661120 - RNA, 23 nt, Human
ugggaggaaagacgcaaggcugg

SEQ ID NO: 661121 - RNA, 19 nt, Human
ugggaggcagaggcaagag

SEQ ID NO: 661122 - RNA, 20 nt, Human
ugggaggcagaggcaagagg

SEQ ID NO: 661123 - RNA, 29 nt, Human
ugggaggcggagcuugcagugacaacggu

SEQ ID NO: 661124 - RNA, 24 nt, Human
ugggaggcggagcuugcagugagc

SEQ ID NO: 661125 - RNA, 21 nt, Human
ugggcaaggacaggguagggu

SEQ ID NO: 661126 - RNA, 19 nt, Human
ugggcaccuccuccugccc

SEQ ID NO: 661127 - RNA, 22 nt, Human
ugggcucggguccacacgccug

SEQ ID NO: 661128 - RNA, 24 nt, Human
uggggaaaguggucaggcagagac

SEQ ID NO: 661129 - RNA, 19 nt, Human
uggggcagggggcagggac

SEQ ID NO: 661130 - RNA, 19 nt, Human
ugggugggguggggagagg

SEQ ID NO: 661131 - RNA, 24 nt, Human
ugguggcucacgccuguaauccca

SEQ ID NO: 661132 - RNA, 19 nt, Human
uguccugcccucgugucuc

SEQ ID NO: 661133 - RNA, 20 nt, Human
uguccugcccucgugucucc

SEQ ID NO: 661134 - RNA, 21 nt, Human
ugucuguggagcagacaucag

SEQ ID NO: 661135 - RNA, 23 nt, Human
ugucuguggagcagacaucaggg

SEQ ID NO: 661136 - RNA, 21 nt, Human
uuaaugauuauaaagugucca

SEQ ID NO: 661137 - RNA, 27 nt, Human
uuccauggcccccuucugggguugggg

SEQ ID NO: 661138 - RNA, 22 nt, Human
uugaaaucaccagguaaaagga

SEQ ID NO: 661139 - RNA, 23 nt, Human
uugagacaggagaauggcaugaa

SEQ ID NO: 661140 - RNA, 22 nt, Human
uugcagugagccaagaucgcac

SEQ ID NO: 661141 - RNA, 21 nt, Human
uuuaaaguaucucucgaaggc

SEQ ID NO: 661142 - RNA, 23 nt, Human
uuuuuuuuuuuuaaaauuaggcc

SEQ ID NO: 661143 - RNA, 22 nt, Human
cuuuauuuuaaggucauaagag

SEQ ID NO: 661144 - RNA, 22 nt, Human
gucacaauacguuuaagucaaa

SEQ ID NO: 661145 - RNA, 24 nt, Human
ucucuggccugguucuuuuucagg

SEQ ID NO: 661146 - RNA, 24 nt, Human
uuucagggcugagguggcaccuuu

SEQ ID NO: 661147 - RNA, 21 nt, Human
uuuuucagggcugaggugggg

SEQ ID NO: 661148 - RNA, 24 nt, Human
aaaagaacacuucgaggaguaaga

SEQ ID NO: 661149 - RNA, 20 nt, Human
aaacaaccagaucucacgag

SEQ ID NO: 661150 - RNA, 23 nt, Human
aaacaaccagaucucacgagaac

SEQ ID NO: 661151 - RNA, 24 nt, Human
aaacaguagauccaaaagggcaac

SEQ ID NO: 661152 - RNA, 18 nt, Human
aaagaaauccccaagacc

SEQ ID NO: 661153 - RNA, 21 nt, Human
aaagaaauccccaagaccagg

SEQ ID NO: 661154 - RNA, 25 nt, Human
aaagaauuuuauuccuuuggccuuc

SEQ ID NO: 661155 - RNA, 24 nt, Human
aaaggguuggaauuauaggcauga

SEQ ID NO: 661156 - RNA, 22 nt, Human
aacaagauacuuauugaaucca

SEQ ID NO: 661157 - RNA, 24 nt, Human
aacaagauacuuauugaauccaaa

SEQ ID NO: 661158 - RNA, 23 nt, Human
aacaguagauccaaaagggcaac

SEQ ID NO: 661159 - RNA, 18 nt, Human
aaccagaucucacgagaa

SEQ ID NO: 661160 - RNA, 19 nt, Human
aacuuccgccucccgguuc

SEQ ID NO: 661161 - RNA, 19 nt, Human
aaggagguguugggaagga

SEQ ID NO: 661162 - RNA, 22 nt, Human
aaguagcugggauugcaggcau

SEQ ID NO: 661163 - RNA, 24 nt, Human
aaguagcugggauugcaggcaugu

SEQ ID NO: 661164 - RNA, 18 nt, Human
acacagauccaaaccgua

SEQ ID NO: 661165 - RNA, 24 nt, Human
acaggguuucuccauguuggucag

SEQ ID NO: 661166 - RNA, 18 nt, Human
acaguucugcaggcugua

SEQ ID NO: 661167 - RNA, 23 nt, Human
acaugaaggacugacccaaucug

SEQ ID NO: 661168 - RNA, 22 nt, Human
acaugacccucuuaacaucucu

SEQ ID NO: 661169 - RNA, 22 nt, Human
acaugacccucuuagcaucucu

SEQ ID NO: 661170 - RNA, 19 nt, Human
acccccaugaccucacgau

SEQ ID NO: 661171 - RNA, 20 nt, Human
accucacgauccagcugccu

SEQ ID NO: 661172 - RNA, 24 nt, Human
acucuaaaagaacacuucgaggag

SEQ ID NO: 661173 - RNA, 18 nt, Human
agacaggguuucuccaug

SEQ ID NO: 661174 - RNA, 18 nt, Human
agacaggguuucuccaug

SEQ ID NO: 661175 - RNA, 24 nt, Human
agaccagguaauuuauaagaaaag

SEQ ID NO: 661176 - RNA, 20 nt, Human
agaccucaggugauccaccu

SEQ ID NO: 661177 - RNA, 21 nt, Human
agagcaagcugaucuuggcug

SEQ ID NO: 661178 - RNA, 21 nt, Human
agccugaucagcuaucacauc

SEQ ID NO: 661179 - RNA, 24 nt, Human
agcucucugccuuuguuuuccuau

SEQ ID NO: 661180 - RNA, 19 nt, Human
aggaagcguggcagcaucu

SEQ ID NO: 661181 - RNA, 23 nt, Human
aggaaguguuggggaaggaggug

SEQ ID NO: 661182 - RNA, 22 nt, Human
aggagguguugggaaggcggug

SEQ ID NO: 661183 - RNA, 21 nt, Human
aggcaugaaccaccacgucca

SEQ ID NO: 661184 - RNA, 20 nt, Human
aggcaugugccacaaugccc

SEQ ID NO: 661185 - RNA, 19 nt, Human
agggacacagauccaaacc

SEQ ID NO: 661186 - RNA, 24 nt, Human
aggugauccaccugucccggccuc

SEQ ID NO: 661187 - RNA, 23 nt, Human
agugauucuccugccccagccuc

SEQ ID NO: 661188 - RNA, 24 nt, Human
agugcaauggcaugaucuuggcuc

SEQ ID NO: 661189 - RNA, 24 nt, Human
aguuuuguauuuuuaguagagaca

SEQ ID NO: 661190 - RNA, 24 nt, Human
auacuuauugaauccaaaaggcca

SEQ ID NO: 661191 - RNA, 22 nt, Human
auggcagcagcagggggcagag

SEQ ID NO: 661192 - RNA, 22 nt, Human
caaguagcugggauugcaggca

SEQ ID NO: 661193 - RNA, 23 nt, Human
caaguagcugggauugcaggcau

SEQ ID NO: 661194 - RNA, 18 nt, Human
caaucugugucuguggug

SEQ ID NO: 661195 - RNA, 18 nt, Human
caaugcccagcuaguuuu

SEQ ID NO: 661196 - RNA, 19 nt, Human
caauggauucaccagaauc

SEQ ID NO: 661197 - RNA, 18 nt, Human
cacacaaacaccaaacau

SEQ ID NO: 661198 - RNA, 24 nt, Human
caccagaaucacuggaagcaauga

SEQ ID NO: 661199 - RNA, 20 nt, Human
cacucugucucagcacucug

SEQ ID NO: 661200 - RNA, 21 nt, Human
cacugcaacuuccgccucccg

SEQ ID NO: 661201 - RNA, 22 nt, Human
cagcagcagggggcagagcugg

SEQ ID NO: 661202 - RNA, 26 nt, Human
cagcagcagggggcagagcuggacag

SEQ ID NO: 661203 - RNA, 22 nt, Human
cagcugccucccaccaggcucc

SEQ ID NO: 661204 - RNA, 18 nt, Human
caggaagcuuucacuugc

SEQ ID NO: 661205 - RNA, 24 nt, Human
caggguuucuccauguuggucagg

SEQ ID NO: 661206 - RNA, 20 nt, Human
caggugauccaccugucccc

SEQ ID NO: 661207 - RNA, 19 nt, Human
cauccugguucugcugcca

SEQ ID NO: 661208 - RNA, 21 nt, Human
cauuuguuucccagagcuggu

SEQ ID NO: 661209 - RNA, 24 nt, Human
ccaaaggguuggaauuauaggcau

SEQ ID NO: 661210 - RNA, 21 nt, Human
ccaccaggcuccaucuccaac

SEQ ID NO: 661211 - RNA, 20 nt, Human
ccauguuggucagguuguuc

SEQ ID NO: 661212 - RNA, 22 nt, Human
ccauguuggucagguuguucuc

SEQ ID NO: 661213 - RNA, 22 nt, Human
cccccagguucuccaaucaugc

SEQ ID NO: 661214 - RNA, 22 nt, Human
ccucccaccaggcuccaucucc

SEQ ID NO: 661215 - RNA, 24 nt, Human
ccucuuguugcccaggcuggagug

SEQ ID NO: 661216 - RNA, 20 nt, Human
ccugguucugcugccauggg

SEQ ID NO: 661217 - RNA, 19 nt, Human
ccuucacaucuugaguggc

SEQ ID NO: 661218 - RNA, 24 nt, Human
cuaguuuuguauuuuuaguagaga

SEQ ID NO: 661219 - RNA, 23 nt, Human
cucaaguagcugggauugcaggc

SEQ ID NO: 661220 - RNA, 24 nt, Human
cucacugcaacuuccgccucccgg

SEQ ID NO: 661221 - RNA, 21 nt, Human
cuccaacaccggggaccacag

SEQ ID NO: 661222 - RNA, 19 nt, Human
cucucugccuuuguuuucc

SEQ ID NO: 661223 - RNA, 21 nt, Human
cugcugaacauuuuaauaucu

SEQ ID NO: 661224 - RNA, 24 nt, Human
cuggagugcaauggcaugaucuug

SEQ ID NO: 661225 - RNA, 25 nt, Human
cuuaacaaagaaggaauugugugga

SEQ ID NO: 661226 - RNA, 30 nt, Human
cuuaacaucucugauacaauaaccagagaa

SEQ ID NO: 661227 - RNA, 22 nt, Human
cuuccaauucccccagguucuc

SEQ ID NO: 661228 - RNA, 26 nt, Human
cuuccagagaccuggucuggaccauc

SEQ ID NO: 661229 - RNA, 24 nt, Human
cuuguugcccaggcuggagugcaa

SEQ ID NO: 661230 - RNA, 22 nt, Human
cuuuuaaacaaccagaucucac

SEQ ID NO: 661231 - RNA, 22 nt, Human
gaccucacgauccagcugccuc

SEQ ID NO: 661232 - RNA, 18 nt, Human
gaccucaggugauccacc

SEQ ID NO: 661233 - RNA, 18 nt, Human
gaccucaggugauccacc

SEQ ID NO: 661234 - RNA, 22 nt, Human
gaccucaggugauccaccuguc

SEQ ID NO: 661235 - RNA, 20 nt, Human
gagacaggguuucuccaugu

SEQ ID NO: 661236 - RNA, 18 nt, Human
gagagugagcggagaggu

SEQ ID NO: 661237 - RNA, 23 nt, Human
gagcugguuuuagauucuugggg

SEQ ID NO: 661238 - RNA, 22 nt, Human
gaggaagagagugagcggagag

SEQ ID NO: 661239 - RNA, 18 nt, Human
gauugcaggcaugugcca

SEQ ID NO: 661240 - RNA, 24 nt, Human
gauugcaggcaugugccacaaugc

SEQ ID NO: 661241 - RNA, 21 nt, Human
gcagcagcagggggcagagcu

SEQ ID NO: 661242 - RNA, 24 nt, Human
gcccaggcuggagugcaauggcau

SEQ ID NO: 661243 - RNA, 24 nt, Human
gccucccgguucuagugauucucc

SEQ ID NO: 661244 - RNA, 19 nt, Human
gcuggagugcaauggcaug

SEQ ID NO: 661245 - RNA, 20 nt, Human
gcuuuagcucucugccuuug

SEQ ID NO: 661246 - RNA, 21 nt, Human
ggaaggagguguugggaagga

SEQ ID NO: 661247 - RNA, 21 nt, Human
ggaaggagguguugggaagga

SEQ ID NO: 661248 - RNA, 21 nt, Human
ggaaggagguguugggaagga

SEQ ID NO: 661249 - RNA, 21 nt, Human
ggaaggagguguugggaagga

SEQ ID NO: 661250 - RNA, 22 nt, Human
ggaaggagguguuugggaagga

SEQ ID NO: 661251 - RNA, 20 nt, Human
ggaaggcgguguugggaagg

SEQ ID NO: 661252 - RNA, 20 nt, Human
ggaaucuugccuucuugcag

SEQ ID NO: 661253 - RNA, 20 nt, Human
gggaaggaaguguuggggaa

SEQ ID NO: 661254 - RNA, 24 nt, Human
gggaaggagggguuugggaaggag

SEQ ID NO: 661255 - RNA, 22 nt, Human
gggaaggagguguugggaagga

SEQ ID NO: 661256 - RNA, 22 nt, Human
gggaaggagguguugggaagga

SEQ ID NO: 661257 - RNA, 22 nt, Human
gggaaggagguguugggaagga

SEQ ID NO: 661258 - RNA, 22 nt, Human
gggaaggagguguugggaagga

SEQ ID NO: 661259 - RNA, 23 nt, Human
gggaaggagguguugggaaggag

SEQ ID NO: 661260 - RNA, 23 nt, Human
gggaaggagguguugggaaggag

SEQ ID NO: 661261 - RNA, 23 nt, Human
gggaaggagguguugggaaggau

SEQ ID NO: 661262 - RNA, 24 nt, Human
gggaaggagguguuggggaaggag

SEQ ID NO: 661263 - RNA, 24 nt, Human
gggaaggagguguuggggaaggag

SEQ ID NO: 661264 - RNA, 21 nt, Human
ggggaaggagguguuggggaa

SEQ ID NO: 661265 - RNA, 21 nt, Human
ggggaaggagguguuggggaa

SEQ ID NO: 661266 - RNA, 24 nt, Human
gguguuugggaaggagauguuugg

SEQ ID NO: 661267 - RNA, 19 nt, Human
guaagauaaugauucucuu

SEQ ID NO: 661268 - RNA, 21 nt, Human
gucucagcacucuggccugug

SEQ ID NO: 661269 - RNA, 18 nt, Human
gugaagcgugguaaaaua

SEQ ID NO: 661270 - RNA, 24 nt, Human
gugauccaccugucccggccuccc

SEQ ID NO: 661271 - RNA, 22 nt, Human
gugauucuccugccccagccuc

SEQ ID NO: 661272 - RNA, 23 nt, Human
guguuggggaaggagguguuggg

SEQ ID NO: 661273 - RNA, 23 nt, Human
uaaaacugcugcgaccuucuaaa

SEQ ID NO: 661274 - RNA, 22 nt, Human
uaaaagaacacuucgaggagua

SEQ ID NO: 661275 - RNA, 27 nt, Human
uaaaauacucuuucugaagccuguuuu

SEQ ID NO: 661276 - RNA, 18 nt, Human
uaaacaaccagaucucac

SEQ ID NO: 661277 - RNA, 19 nt, Human
uaaagaaauccccaagacc

SEQ ID NO: 661278 - RNA, 28 nt, Human
uaacuccuucgugagaacuccacccccu

SEQ ID NO: 661279 - RNA, 18 nt, Human
uaagaaaagagguuugau

SEQ ID NO: 661280 - RNA, 23 nt, Human
uaagauaaugauucucuuccuuc

SEQ ID NO: 661281 - RNA, 19 nt, Human
uacaaacaguacugcagua

SEQ ID NO: 661282 - RNA, 22 nt, Human
uagagacaggguuucuccaugu

SEQ ID NO: 661283 - RNA, 21 nt, Human
uaggcaugaaccaccacgucc

SEQ ID NO: 661284 - RNA, 24 nt, Human
uaguagagacaggguuucuccaug

SEQ ID NO: 661285 - RNA, 23 nt, Human
uauuugcaacuguaugucccuua

SEQ ID NO: 661286 - RNA, 18 nt, Human
ucaaauccaaguucaacu

SEQ ID NO: 661287 - RNA, 24 nt, Human
ucaaguagcugggauugcaggcau

SEQ ID NO: 661288 - RNA, 19 nt, Human
ucacugcaacuuccgccuc

SEQ ID NO: 661289 - RNA, 23 nt, Human
ucacugcaacuuccgccucccgg

SEQ ID NO: 661290 - RNA, 24 nt, Human
ucacugcaacuuccgccucccggu

SEQ ID NO: 661291 - RNA, 26 nt, Human
ucacugcaacuuccgccucccgguuc

SEQ ID NO: 661292 - RNA, 19 nt, Human
ucagugauaugaaaucaga

SEQ ID NO: 661293 - RNA, 19 nt, Human
ucaugccacaugacccucu

SEQ ID NO: 661294 - RNA, 19 nt, Human
uccacaguucugcaggcuu

SEQ ID NO: 661295 - RNA, 24 nt, Human
uccauccugguucugcugccaugg

SEQ ID NO: 661296 - RNA, 24 nt, Human
ucccaaaggguuggaauuauaggc

SEQ ID NO: 661297 - RNA, 23 nt, Human
ucccgguucuagugauucuccug

SEQ ID NO: 661298 - RNA, 22 nt, Human
ucccuugggaaucuugccuuca

SEQ ID NO: 661299 - RNA, 20 nt, Human
uccucuuguugcccaggcug

SEQ ID NO: 661300 - RNA, 21 nt, Human
uccucuuguugcccaggcugg

SEQ ID NO: 661301 - RNA, 22 nt, Human
uccucuuguugcccaggcugga

SEQ ID NO: 661302 - RNA, 24 nt, Human
uccucuuguugcccaggcuggagu

SEQ ID NO: 661303 - RNA, 21 nt, Human
ucgaggaguaagauaaugauu

SEQ ID NO: 661304 - RNA, 23 nt, Human
ucuagugauucuccugccccagc

SEQ ID NO: 661305 - RNA, 24 nt, Human
ucucaaguagcugggauugcaggc

SEQ ID NO: 661306 - RNA, 30 nt, Human
ucucacauuaaauaaagaaauccccaagaa

SEQ ID NO: 661307 - RNA, 26 nt, Human
ucuccugccccagccucucaaguagc

SEQ ID NO: 661308 - RNA, 19 nt, Human
ucuggaccaucaguuucaa

SEQ ID NO: 661309 - RNA, 22 nt, Human
ucuuguugcccaggcuggagug

SEQ ID NO: 661310 - RNA, 24 nt, Human
ugaaacuuggagaaacaaagaaaa

SEQ ID NO: 661311 - RNA, 20 nt, Human
ugaagagaggcagguguuug

SEQ ID NO: 661312 - RNA, 23 nt, Human
ugaagagaggcagguguuuggga

SEQ ID NO: 661313 - RNA, 21 nt, Human
ugacccaaucugugucugugg

SEQ ID NO: 661314 - RNA, 21 nt, Human
ugagauaauaaggccuuccaa

SEQ ID NO: 661315 - RNA, 21 nt, Human
ugaguauuugcaacuguaugu

SEQ ID NO: 661316 - RNA, 20 nt, Human
ugauucuccugccccagccu

SEQ ID NO: 661317 - RNA, 18 nt, Human
ugcccaggcuggagugca

SEQ ID NO: 661318 - RNA, 21 nt, Human
ugcccaggcuggagugcaaug

SEQ ID NO: 661319 - RNA, 24 nt, Human
ugcccaggcuggagugcaauggca

SEQ ID NO: 661320 - RNA, 24 nt, Human
ugccccagccucucaaguagcugg

SEQ ID NO: 661321 - RNA, 23 nt, Human
ugccucccaccaggcuccaucuc

SEQ ID NO: 661322 - RNA, 22 nt, Human
ugccugcugaacauuuuaauau

SEQ ID NO: 661323 - RNA, 24 nt, Human
ugcuuuagcucucugccuuuguuu

SEQ ID NO: 661324 - RNA, 24 nt, Human
uggaauuauaggcaugaaccacca

SEQ ID NO: 661325 - RNA, 19 nt, Human
uggagugcaauggcaugau

SEQ ID NO: 661326 - RNA, 24 nt, Human
uggagugcaauggcaugaucuugg

SEQ ID NO: 661327 - RNA, 18 nt, Human
uggcagcagcagggggca

SEQ ID NO: 661328 - RNA, 18 nt, Human
uggcagcagcagggggca

SEQ ID NO: 661329 - RNA, 19 nt, Human
uggcagcagcagggggcag

SEQ ID NO: 661330 - RNA, 21 nt, Human
uggcagcagcagggggcagag

SEQ ID NO: 661331 - RNA, 23 nt, Human
uggcagcagcagggggcagagcu

SEQ ID NO: 661332 - RNA, 19 nt, Human
uggcagcaucugcuuccgg

SEQ ID NO: 661333 - RNA, 19 nt, Human
uggcaugaucuuggcucac

SEQ ID NO: 661334 - RNA, 21 nt, Human
uggcaugaucuuggcucacug

SEQ ID NO: 661335 - RNA, 18 nt, Human
ugggaaagagguguuugg

SEQ ID NO: 661336 - RNA, 25 nt, Human
ugggaaggaaguguuggggaaggag

SEQ ID NO: 661337 - RNA, 26 nt, Human
ugggaaggagauguuugggaaagggg

SEQ ID NO: 661338 - RNA, 25 nt, Human
ugggaaggaggugucugggaaggag

SEQ ID NO: 661339 - RNA, 24 nt, Human
ugggaaggagguguugggaaggaa

SEQ ID NO: 661340 - RNA, 25 nt, Human
ugggaaggagguguugggaaggcgg

SEQ ID NO: 661341 - RNA, 25 nt, Human
ugggaaggagguguuggggaaggag

SEQ ID NO: 661342 - RNA, 18 nt, Human
ugggaaggagguguuugg

SEQ ID NO: 661343 - RNA, 18 nt, Human
ugggaaggagguguuugg

SEQ ID NO: 661344 - RNA, 18 nt, Human
ugggaaggagguguuugg

SEQ ID NO: 661345 - RNA, 18 nt, Human
ugggaaggagguguuugg

SEQ ID NO: 661346 - RNA, 18 nt, Human
ugggaaggagguguuugg

SEQ ID NO: 661347 - RNA, 25 nt, Human
ugggaaggagguguuugggaaggag

SEQ ID NO: 661348 - RNA, 25 nt, Human
ugggaaggagguguuugggaaggag

SEQ ID NO: 661349 - RNA, 25 nt, Human
ugggaaggagguguuugggaaggag

SEQ ID NO: 661350 - RNA, 19 nt, Human
ugggaaggauguuggggaa

SEQ ID NO: 661351 - RNA, 18 nt, Human
ugggauugcaggcaugug

SEQ ID NO: 661352 - RNA, 21 nt, Human
ugggauugcaggcaugugcca

SEQ ID NO: 661353 - RNA, 24 nt, Human
uggguuuuccucuuguugcccagg

SEQ ID NO: 661354 - RNA, 19 nt, Human
ugucugggaagccugauca

SEQ ID NO: 661355 - RNA, 21 nt, Human
uguuaagaugcagaugcagaa

SEQ ID NO: 661356 - RNA, 20 nt, Human
uguugcccaggcuggagugc

SEQ ID NO: 661357 - RNA, 21 nt, Human
uguugggaaggaggugucugg

SEQ ID NO: 661358 - RNA, 21 nt, Human
uguugggaaggagguguuugg

SEQ ID NO: 661359 - RNA, 21 nt, Human
uguugggaaggagguguuugg

SEQ ID NO: 661360 - RNA, 19 nt, Human
uguugggaaggauguuggg

SEQ ID NO: 661361 - RNA, 18 nt, Human
uguuggggaaggaggggu

SEQ ID NO: 661362 - RNA, 24 nt, Human
uguuggggaaggagggguuuggga

SEQ ID NO: 661363 - RNA, 20 nt, Human
uguuggggaaggagguguug

SEQ ID NO: 661364 - RNA, 20 nt, Human
uguuugggaaagagguguuu

SEQ ID NO: 661365 - RNA, 20 nt, Human
uguuugggaaggagguguug

SEQ ID NO: 661366 - RNA, 24 nt, Human
uuaguagagacaggguuucuccau

SEQ ID NO: 661367 - RNA, 18 nt, Human
uucaucucuccggggcuc

SEQ ID NO: 661368 - RNA, 23 nt, Human
uuccucuuguugcccaggcugga

SEQ ID NO: 661369 - RNA, 24 nt, Human
uuccucuuguugcccaggcuggag

SEQ ID NO: 661370 - RNA, 18 nt, Human
uucuagugauucuccugc

SEQ ID NO: 661371 - RNA, 22 nt, Human
uucucacauuaaauaaagaaau

SEQ ID NO: 661372 - RNA, 22 nt, Human
uucuuccagagaccuggucugg

SEQ ID NO: 661373 - RNA, 18 nt, Human
uugcccaggcuggagugc

SEQ ID NO: 661374 - RNA, 24 nt, Human
uuuccucuuguugcccaggcugga

SEQ ID NO: 661375 - RNA, 21 nt, Human
uuuccuguuccugcuccauau

SEQ ID NO: 661376 - RNA, 19 nt, Human
uuucuccauguuggucagg

SEQ ID NO: 661377 - RNA, 20 nt, Human
uuucuccauguuggucaggu

SEQ ID NO: 661378 - RNA, 22 nt, Human
uuugcucuaacaccccccgauu

SEQ ID NO: 661379 - RNA, 19 nt, Human
uuuguuagggacacagauc

SEQ ID NO: 661380 - RNA, 20 nt, Human
uuuuacacacaaacaccaaa

SEQ ID NO: 661381 - RNA, 24 nt, Human
uuuuccucuuguugcccaggcugg

SEQ ID NO: 661382 - RNA, 21 nt, Human
uuuugagacuggguuuuccuu

SEQ ID NO: 661383 - RNA, 19 nt, Human
uuuuguauuuuuaguagag

SEQ ID NO: 661384 - RNA, 20 nt, Human
uuuuguauuuuuaguagaga

SEQ ID NO: 661385 - RNA, 18 nt, Human
aaaauucuucuaauggua

SEQ ID NO: 661386 - RNA, 21 nt, Human
aaauaaacaucuccacucucu

SEQ ID NO: 661387 - RNA, 24 nt, Human
acagcaugaaaacaagccugacgc

SEQ ID NO: 661388 - RNA, 23 nt, Human
acuguaauuuaucaaagguaguu

SEQ ID NO: 661389 - RNA, 21 nt, Human
agaaaaacagcuuuucacagg

SEQ ID NO: 661390 - RNA, 22 nt, Human
agaaaauauauucuucaaggcc

SEQ ID NO: 661391 - RNA, 21 nt, Human
aggugacacaaucuuugacug

SEQ ID NO: 661392 - RNA, 24 nt, Human
aguguggcggccagguggcagaag

SEQ ID NO: 661393 - RNA, 21 nt, Human
caagccugacgcuuaggccag

SEQ ID NO: 661394 - RNA, 24 nt, Human
cacacaguauuacauuaauuuaua

SEQ ID NO: 661395 - RNA, 20 nt, Human
cacagcaugaaaacaagccu

SEQ ID NO: 661396 - RNA, 21 nt, Human
cacaguaaauuuucuagugcc

SEQ ID NO: 661397 - RNA, 19 nt, Human
cagaaaagccacaguaaau

SEQ ID NO: 661398 - RNA, 22 nt, Human
cagcaugaaaacaagccugacg

SEQ ID NO: 661399 - RNA, 19 nt, Human
caguaaauuuucuagugcc

SEQ ID NO: 661400 - RNA, 22 nt, Human
ccaagugucauaugacagacau

SEQ ID NO: 661401 - RNA, 19 nt, Human
ccacucucucuaagugugg

SEQ ID NO: 661402 - RNA, 27 nt, Human
ccagauaucauagccaucuaguugaau

SEQ ID NO: 661403 - RNA, 18 nt, Human
cugaagcacagcagugga

SEQ ID NO: 661404 - RNA, 24 nt, Human
cuuggcacugagcaggacaguuuu

SEQ ID NO: 661405 - RNA, 23 nt, Human
gaaauaaacaucuccacucucuc

SEQ ID NO: 661406 - RNA, 22 nt, Human
ggcagugugcucaaacauucuu

SEQ ID NO: 661407 - RNA, 19 nt, Human
gggguaccagucagugaug

SEQ ID NO: 661408 - RNA, 21 nt, Human
uaaaaugaggugcaagcuguu

SEQ ID NO: 661409 - RNA, 19 nt, Human
uaauagucugaauucacac

SEQ ID NO: 661410 - RNA, 22 nt, Human
uaauuuaucaaagguaguuuua

SEQ ID NO: 661411 - RNA, 21 nt, Human
uacagugcuugauaauuugaa

SEQ ID NO: 661412 - RNA, 20 nt, Human
uagcaccuuggcacugagca

SEQ ID NO: 661413 - RNA, 21 nt, Human
uaggaaacagaugaaagauaa

SEQ ID NO: 661414 - RNA, 22 nt, Human
uaugacagacauacaaaaauuc

SEQ ID NO: 661415 - RNA, 23 nt, Human
ucaccacguuuucuaaaggagcg

SEQ ID NO: 661416 - RNA, 23 nt, Human
ucagugaugugcacaaguuccuu

SEQ ID NO: 661417 - RNA, 20 nt, Human
ucaguguggcggccaggugg

SEQ ID NO: 661418 - RNA, 23 nt, Human
uccuuacacacuccaguaggcca

SEQ ID NO: 661419 - RNA, 22 nt, Human
ugaaaacaagccugacgcuuag

SEQ ID NO: 661420 - RNA, 23 nt, Human
ugaggugcaagcuguucacaugu

SEQ ID NO: 661421 - RNA, 19 nt, Human
ugccuugguguauaugggg

SEQ ID NO: 661422 - RNA, 19 nt, Human
uggcagaagucucuggagu

SEQ ID NO: 661423 - RNA, 23 nt, Human
uguccucaucaaucucuccuuca

SEQ ID NO: 661424 - RNA, 24 nt, Human
ugugcucaaacauucuuauuugcc

SEQ ID NO: 661425 - RNA, 20 nt, Human
uucacaggaaaagaaacaua

SEQ ID NO: 661426 - RNA, 21 nt, Human
uuuauaaaaacaacaaaauau

SEQ ID NO: 661427 - RNA, 20 nt, Human
uuuauacugaaauguucuuc

SEQ ID NO: 661428 - RNA, 24 nt, Human
uuuauacugaaauguucuucuagu

SEQ ID NO: 661429 - RNA, 21 nt, Human
uuuuuuuuuuuuuuuuugccu

SEQ ID NO: 661430 - RNA, 26 nt, Human
uuuuuuuuuuuuuuuuugccuauuag

SEQ ID NO: 661431 - RNA, 27 nt, Human
uuuuuuuuuuuuuuuuuuuuuuugggg

SEQ ID NO: 661432 - RNA, 19 nt, Human
aaguagugaacccaaacuc

SEQ ID NO: 661433 - RNA, 23 nt, Human
acaccccuagaaacagagaaaaa

SEQ ID NO: 661434 - RNA, 23 nt, Human
acagagaaaaaccaacugcuggg

SEQ ID NO: 661435 - RNA, 21 nt, Human
accuucuaggaccuucuacug

SEQ ID NO: 661436 - RNA, 21 nt, Human
agaaaaaccaacugcuggggg

SEQ ID NO: 661437 - RNA, 20 nt, Human
agaaacagagaaaaaccaac

SEQ ID NO: 661438 - RNA, 20 nt, Human
caaaaguacugccuagaucc

SEQ ID NO: 661439 - RNA, 27 nt, Human
caaauaucuuucaugaucuuaagucuu

SEQ ID NO: 661440 - RNA, 18 nt, Human
cacaccucuccccauccg

SEQ ID NO: 661441 - RNA, 19 nt, Human
cagccaguuccuuucuccu

SEQ ID NO: 661442 - RNA, 21 nt, Human
cauaacccagaucuaacucca

SEQ ID NO: 661443 - RNA, 18 nt, Human
cccuagaaacagagaaaa

SEQ ID NO: 661444 - RNA, 26 nt, Human
cuaguaaugauauuuguaacuucucu

SEQ ID NO: 661445 - RNA, 21 nt, Human
cucuccccauccgacuucaaa

SEQ ID NO: 661446 - RNA, 18 nt, Human
gaucuaacuccacaccuc

SEQ ID NO: 661447 - RNA, 20 nt, Human
ggaaagcugaagggacaacu

SEQ ID NO: 661448 - RNA, 21 nt, Human
gggaaagcugaagggacaacu

SEQ ID NO: 661449 - RNA, 21 nt, Human
gggacaacucuuccauaaccc

SEQ ID NO: 661450 - RNA, 24 nt, Human
uagugaacccaaacucuagaaauu

SEQ ID NO: 661451 - RNA, 22 nt, Human
uauacuuuaacaaucaugcaga

SEQ ID NO: 661452 - RNA, 24 nt, Human
ucacaccccuagaaacagagaaaa

SEQ ID NO: 661453 - RNA, 23 nt, Human
uccauaacccagaucuaacucca

SEQ ID NO: 661454 - RNA, 18 nt, Human
ucuguaaucacggugaga

SEQ ID NO: 661455 - RNA, 24 nt, Human
ucuuucaugaucuuaagucuuggu

SEQ ID NO: 661456 - RNA, 23 nt, Human
ugagaacacagcuguucacaguc

SEQ ID NO: 661457 - RNA, 24 nt, Human
ugagacaaaguagugaacccaaac

SEQ ID NO: 661458 - RNA, 22 nt, Human
ugccuagaucccagauguuaac

SEQ ID NO: 661459 - RNA, 21 nt, Human
uggguaagaaaaggaaaugag

SEQ ID NO: 661460 - RNA, 23 nt, Human
uuaauacgaugacagugucuucu

SEQ ID NO: 661461 - RNA, 22 nt, Human
uuaguuuuuguacaaauucaca

SEQ ID NO: 661462 - RNA, 22 nt, Human
uucagagggagagauacgagaa

SEQ ID NO: 661463 - RNA, 25 nt, Human
uuuuuuuuuuuuuuuuuuuuucagg

SEQ ID NO: 661464 - RNA, 24 nt, Human
aaaccaaaagcuuuauucucuagu

SEQ ID NO: 661465 - RNA, 18 nt, Human
agaaaguaaaauauggca

SEQ ID NO: 661466 - RNA, 20 nt, Human
cauuacucucaacgcagaga

SEQ ID NO: 661467 - RNA, 19 nt, Human
cucuugcgugaggcuuucu

SEQ ID NO: 661468 - RNA, 21 nt, Human
uauggcaccauaauccaauug

SEQ ID NO: 661469 - RNA, 19 nt, Human
ucaaauaaaaccaaaagcu

SEQ ID NO: 661470 - RNA, 19 nt, Human
aaaaagcucuuccaccucc

SEQ ID NO: 661471 - RNA, 20 nt, Human
aaaccaaaaacuaguuuaca

SEQ ID NO: 661472 - RNA, 27 nt, Human
aaacuccaucucaaaagaaauaaaaaa

SEQ ID NO: 661473 - RNA, 24 nt, Human
aaacuucugggcucaagugauccu

SEQ ID NO: 661474 - RNA, 29 nt, Human
aaagaccuuuuuuuuuuuuuuuuuuuuuu

SEQ ID NO: 661475 - RNA, 20 nt, Human
aaagcucuuccaccucccuu

SEQ ID NO: 661476 - RNA, 22 nt, Human
aaauaaaaacuucucauauucc

SEQ ID NO: 661477 - RNA, 19 nt, Human
aaauacaaaaauuagcugg

SEQ ID NO: 661478 - RNA, 19 nt, Human
aacacggugaaaccccguc

SEQ ID NO: 661479 - RNA, 20 nt, Human
aacacggugaaaccccgucu

SEQ ID NO: 661480 - RNA, 21 nt, Human
aacacggugaaaccccgucuc

SEQ ID NO: 661481 - RNA, 23 nt, Human
aacacuuuggugaucaugaaaau

SEQ ID NO: 661482 - RNA, 25 nt, Human
aaccaauacacaacagcccgaguca

SEQ ID NO: 661483 - RNA, 20 nt, Human
aaccauggucuucacauuuu

SEQ ID NO: 661484 - RNA, 24 nt, Human
aagaaauaaaaaauaaaggccagg

SEQ ID NO: 661485 - RNA, 19 nt, Human
aagaccuuuuuuuuuuuuu

SEQ ID NO: 661486 - RNA, 26 nt, Human
aagcaagagaacagugaguuccagaa

SEQ ID NO: 661487 - RNA, 20 nt, Human
aagcaugcacaagauuuugg

SEQ ID NO: 661488 - RNA, 22 nt, Human
aagcaugcacaagauuuugggu

SEQ ID NO: 661489 - RNA, 25 nt, Human
aagcgauccucccgccucagccucc

SEQ ID NO: 661490 - RNA, 25 nt, Human
aagugauccuucugccucagccucc

SEQ ID NO: 661491 - RNA, 25 nt, Human
aagugccggaauuacggagugagcc

SEQ ID NO: 661492 - RNA, 18 nt, Human
aauaaaaaauaaaggcca

SEQ ID NO: 661493 - RNA, 22 nt, Human
aaucaugauguauggagacucg

SEQ ID NO: 661494 - RNA, 18 nt, Human
aaucgcuugaacccggga

SEQ ID NO: 661495 - RNA, 23 nt, Human
acacacacacacacacacacaca

SEQ ID NO: 661496 - RNA, 23 nt, Human
acacacacacacacacacacaca

SEQ ID NO: 661497 - RNA, 23 nt, Human
acacacacacacacacacacaca

SEQ ID NO: 661498 - RNA, 23 nt, Human
acacacacacacacacacacaca

SEQ ID NO: 661499 - RNA, 23 nt, Human
acacacacacacacacacacaca

SEQ ID NO: 661500 - RNA, 23 nt, Human
acacacacacacacacacacaca

SEQ ID NO: 661501 - RNA, 23 nt, Human
acacacacacacacacacacaca

SEQ ID NO: 661502 - RNA, 28 nt, Human
acacacacacacacacacacacaggacc

SEQ ID NO: 661503 - RNA, 20 nt, Human
acacacacacacacacagga

SEQ ID NO: 661504 - RNA, 19 nt, Human
acagagcaaaacuccaucu

SEQ ID NO: 661505 - RNA, 20 nt, Human
acagagcaaaacuccaucuc

SEQ ID NO: 661506 - RNA, 24 nt, Human
acagagcaaaacuccaucucaaaa

SEQ ID NO: 661507 - RNA, 20 nt, Human
acagagcaagacuccgucuc

SEQ ID NO: 661508 - RNA, 24 nt, Human
acagagcaagacuccgucucaaaa

SEQ ID NO: 661509 - RNA, 19 nt, Human
acagcucacugcagccgca

SEQ ID NO: 661510 - RNA, 24 nt, Human
acagucgcccaggcuggagugcag

SEQ ID NO: 661511 - RNA, 20 nt, Human
acauggugaagcccggucuc

SEQ ID NO: 661512 - RNA, 19 nt, Human
accaccgguacuccagccu

SEQ ID NO: 661513 - RNA, 24 nt, Human
accccgucucugcuaaaaauacaa

SEQ ID NO: 661514 - RNA, 24 nt, Human
accugaggucaggaguucgagacc

SEQ ID NO: 661515 - RNA, 24 nt, Human
acgcucaccugaggucaggaguuc

SEQ ID NO: 661516 - RNA, 24 nt, Human
acugcacuccagccugggcgacag

SEQ ID NO: 661517 - RNA, 26 nt, Human
acugcacuccagccugggcgacagag

SEQ ID NO: 661518 - RNA, 19 nt, Human
agaaaccucaaaaccaugg

SEQ ID NO: 661519 - RNA, 22 nt, Human
agaccuuuuuuuuuuuuuuuuu

SEQ ID NO: 661520 - RNA, 23 nt, Human
agaggugcagugagccgagaucg

SEQ ID NO: 661521 - RNA, 22 nt, Human
agcacaccaccacccccagcua

SEQ ID NO: 661522 - RNA, 22 nt, Human
agcagaaaaggucucaggccca

SEQ ID NO: 661523 - RNA, 24 nt, Human
agccuggccaacauggugaagccc

SEQ ID NO: 661524 - RNA, 24 nt, Human
agccugggcgacagagcaagacuc

SEQ ID NO: 661525 - RNA, 22 nt, Human
agccugggugacagagcaaaac

SEQ ID NO: 661526 - RNA, 24 nt, Human
agccugggugacagagcaaaacuc

SEQ ID NO: 661527 - RNA, 18 nt, Human
aggacagggaacagagcu

SEQ ID NO: 661528 - RNA, 19 nt, Human
aggaggcugaggcuggaga

SEQ ID NO: 661529 - RNA, 24 nt, Human
aggcaagaaccaauacacaacagc

SEQ ID NO: 661530 - RNA, 20 nt, Human
aggcagaggugcagugagcc

SEQ ID NO: 661531 - RNA, 23 nt, Human
aggcagaggugcagugagccgag

SEQ ID NO: 661532 - RNA, 18 nt, Human
aggcaggagaauggugug

SEQ ID NO: 661533 - RNA, 20 nt, Human
aggcaggagaauggugugaa

SEQ ID NO: 661534 - RNA, 24 nt, Human
aggcaggagaauggugugaaucca

SEQ ID NO: 661535 - RNA, 19 nt, Human
aggcaggguggaaggaagc

SEQ ID NO: 661536 - RNA, 22 nt, Human
aggccaggcgcggugacucacg

SEQ ID NO: 661537 - RNA, 19 nt, Human
aggcgcaaguugcagugag

SEQ ID NO: 661538 - RNA, 21 nt, Human
aggcgcggugacucacgccag

SEQ ID NO: 661539 - RNA, 20 nt, Human
aggcgggaggaucacaaggu

SEQ ID NO: 661540 - RNA, 24 nt, Human
aggcgggaggaucacaaggucagg

SEQ ID NO: 661541 - RNA, 22 nt, Human
aggcgguggcacacgccuguaa

SEQ ID NO: 661542 - RNA, 19 nt, Human
aggcugaggcaggagaaug

SEQ ID NO: 661543 - RNA, 19 nt, Human
aggcugaggcgggaggauc

SEQ ID NO: 661544 - RNA, 24 nt, Human
aggcugaggcuggagaaucgcuug

SEQ ID NO: 661545 - RNA, 24 nt, Human
aggcuggagaaucgcuugaacccg

SEQ ID NO: 661546 - RNA, 21 nt, Human
agugcaguggugcaaucacag

SEQ ID NO: 661547 - RNA, 24 nt, Human
agugcaguggugcaaucacagcuc

SEQ ID NO: 661548 - RNA, 24 nt, Human
aguggcucacgccuguaaucccag

SEQ ID NO: 661549 - RNA, 22 nt, Human
aucccagcacuuugggaggcca

SEQ ID NO: 661550 - RNA, 24 nt, Human
aucgugccacugcacuccagccug

SEQ ID NO: 661551 - RNA, 22 nt, Human
caaaacuccaucucaaaagaaa

SEQ ID NO: 661552 - RNA, 21 nt, Human
caaaaggcaggcaagaaacaa

SEQ ID NO: 661553 - RNA, 22 nt, Human
caaaaggcaggcaagaaacaac

SEQ ID NO: 661554 - RNA, 20 nt, Human
caaaccaaaaacuaguuuac

SEQ ID NO: 661555 - RNA, 25 nt, Human
caaaccccugggcucaagcgauccu

SEQ ID NO: 661556 - RNA, 23 nt, Human
caaagugccggaauuacggagug

SEQ ID NO: 661557 - RNA, 24 nt, Human
caacauggugaagcccggucucua

SEQ ID NO: 661558 - RNA, 23 nt, Human
caagagaacagugaguuccagaa

SEQ ID NO: 661559 - RNA, 20 nt, Human
caagcgauccucccgccuca

SEQ ID NO: 661560 - RNA, 27 nt, Human
caagcgauccucccgccucagccuccu

SEQ ID NO: 661561 - RNA, 24 nt, Human
caaggcaggacgcucaccugaggu

SEQ ID NO: 661562 - RNA, 22 nt, Human
caagugauccuucugccucagc

SEQ ID NO: 661563 - RNA, 27 nt, Human
caagugauccuucugccucagccuccc

SEQ ID NO: 661564 - RNA, 20 nt, Human
cacacacacacacacacaca

SEQ ID NO: 661565 - RNA, 20 nt, Human
cacacacacacacacacaca

SEQ ID NO: 661566 - RNA, 20 nt, Human
cacacacacacacacacaca

SEQ ID NO: 661567 - RNA, 20 nt, Human
cacacacacacacacacaca

SEQ ID NO: 661568 - RNA, 20 nt, Human
cacacacacacacacacaca

SEQ ID NO: 661569 - RNA, 20 nt, Human
cacacacacacacacacaca

SEQ ID NO: 661570 - RNA, 20 nt, Human
cacacacacacacacacaca

SEQ ID NO: 661571 - RNA, 20 nt, Human
cacacacacacacacacaca

SEQ ID NO: 661572 - RNA, 20 nt, Human
cacacacacacacacacaca

SEQ ID NO: 661573 - RNA, 20 nt, Human
cacacacacacacacacaca

SEQ ID NO: 661574 - RNA, 20 nt, Human
cacacacacacacacacaca

SEQ ID NO: 661575 - RNA, 20 nt, Human
cacacacacacacacacaca

SEQ ID NO: 661576 - RNA, 22 nt, Human
cacacacacacacacacacaca

SEQ ID NO: 661577 - RNA, 22 nt, Human
cacacacacacacacacacaca

SEQ ID NO: 661578 - RNA, 22 nt, Human
cacacacacacacacacacaca

SEQ ID NO: 661579 - RNA, 22 nt, Human
cacacacacacacacacacaca

SEQ ID NO: 661580 - RNA, 26 nt, Human
cacacacacacacacacacacacaca

SEQ ID NO: 661581 - RNA, 26 nt, Human
cacacacacacacacacacacacaca

SEQ ID NO: 661582 - RNA, 26 nt, Human
cacacacacacacacacacacacaca

SEQ ID NO: 661583 - RNA, 26 nt, Human
cacacacacacacacacacacacaca

SEQ ID NO: 661584 - RNA, 26 nt, Human
cacacacacacacacacacacacaca

SEQ ID NO: 661585 - RNA, 26 nt, Human
cacacacacacacacacacacacaca

SEQ ID NO: 661586 - RNA, 26 nt, Human
cacacacacacacacacacacacaca

SEQ ID NO: 661587 - RNA, 20 nt, Human
cacaggaccuggcccugccc

SEQ ID NO: 661588 - RNA, 23 nt, Human
cacaggaccuggcccugcccuag

SEQ ID NO: 661589 - RNA, 20 nt, Human
cacagucgcccaggcuggag

SEQ ID NO: 661590 - RNA, 23 nt, Human
cacagucgcccaggcuggagugc

SEQ ID NO: 661591 - RNA, 24 nt, Human
caccgguacuccagccugggugac

SEQ ID NO: 661592 - RNA, 21 nt, Human
caccugaauuuauuaagaaac

SEQ ID NO: 661593 - RNA, 23 nt, Human
caccugaggucaggaguucgaga

SEQ ID NO: 661594 - RNA, 23 nt, Human
cacgccaguaaucccucccuuug

SEQ ID NO: 661595 - RNA, 18 nt, Human
cacgccuguaaucccagc

SEQ ID NO: 661596 - RNA, 24 nt, Human
cacgccuguaaucccagcacuuug

SEQ ID NO: 661597 - RNA, 19 nt, Human
cacgccuguaaucccagcu

SEQ ID NO: 661598 - RNA, 23 nt, Human
cacuccagccugggcgacagagc

SEQ ID NO: 661599 - RNA, 19 nt, Human
cacugcacuccagccuggg

SEQ ID NO: 661600 - RNA, 20 nt, Human
cacugcacuccagccugggc

SEQ ID NO: 661601 - RNA, 22 nt, Human
cacugcacuccagccugggcga

SEQ ID NO: 661602 - RNA, 23 nt, Human
cacugcacuccagccugggcgac

SEQ ID NO: 661603 - RNA, 24 nt, Human
cacugcacuccagccugggcgaca

SEQ ID NO: 661604 - RNA, 26 nt, Human
cacugcacuccagccugggcgacaga

SEQ ID NO: 661605 - RNA, 19 nt, Human
cagaucgaggcaagaacca

SEQ ID NO: 661606 - RNA, 24 nt, Human
cagcacuuugggaggccaaggcag

SEQ ID NO: 661607 - RNA, 25 nt, Human
cagcacuuugggaggccaaggcagg

SEQ ID NO: 661608 - RNA, 21 nt, Human
cagccuccugaguagcuggag

SEQ ID NO: 661609 - RNA, 24 nt, Human
caggacgcucaccugaggucagga

SEQ ID NO: 661610 - RNA, 20 nt, Human
cagugaggcgagaucccacc

SEQ ID NO: 661611 - RNA, 23 nt, Human
cagugaguuccagaaggccaagc

SEQ ID NO: 661612 - RNA, 23 nt, Human
cauggugaagcccggucucuacu

SEQ ID NO: 661613 - RNA, 19 nt, Human
ccaaagugccggaauuacg

SEQ ID NO: 661614 - RNA, 23 nt, Human
ccaaagugccggaauuacggagu

SEQ ID NO: 661615 - RNA, 20 nt, Human
ccaauacacaacagcccgag

SEQ ID NO: 661616 - RNA, 25 nt, Human
ccaccagcaccuaacuaggguccac

SEQ ID NO: 661617 - RNA, 24 nt, Human
ccaccgguacuccagccuggguga

SEQ ID NO: 661618 - RNA, 20 nt, Human
ccacugcacuccagccuggg

SEQ ID NO: 661619 - RNA, 21 nt, Human
ccacugcacuccagccugggc

SEQ ID NO: 661620 - RNA, 21 nt, Human
ccacugcacuccagccugggc

SEQ ID NO: 661621 - RNA, 24 nt, Human
ccacugcacuccagccugggcgac

SEQ ID NO: 661622 - RNA, 21 nt, Human
cccacaauuccacuuacucca

SEQ ID NO: 661623 - RNA, 24 nt, Human
ccccugggcucaagcgauccuccc

SEQ ID NO: 661624 - RNA, 23 nt, Human
cccgccucagccuccugaguagc

SEQ ID NO: 661625 - RNA, 24 nt, Human
cccgccucagccuccugaguagcu

SEQ ID NO: 661626 - RNA, 23 nt, Human
cccggucucuacuaaaaauacaa

SEQ ID NO: 661627 - RNA, 22 nt, Human
ccgguacuccagccugggugac

SEQ ID NO: 661628 - RNA, 24 nt, Human
ccgguacuccagccugggugacag

SEQ ID NO: 661629 - RNA, 26 nt, Human
ccuccauugacagggucucuauugug

SEQ ID NO: 661630 - RNA, 22 nt, Human
ccugaggucaggaguucgagac

SEQ ID NO: 661631 - RNA, 22 nt, Human
ccuggccaacauggugaagccc

SEQ ID NO: 661632 - RNA, 23 nt, Human
ccuggccaacauggugaagcccg

SEQ ID NO: 661633 - RNA, 23 nt, Human
ccuggcuaacacggugaaacccc

SEQ ID NO: 661634 - RNA, 24 nt, Human
ccuggcuaacacggugaaaccccg

SEQ ID NO: 661635 - RNA, 22 nt, Human
ccugggcgacagagcaagacuc

SEQ ID NO: 661636 - RNA, 20 nt, Human
ccugggcucaagcgauccuc

SEQ ID NO: 661637 - RNA, 22 nt, Human
ccugggugacagagcaaaacuc

SEQ ID NO: 661638 - RNA, 24 nt, Human
ccugggugacagagcaaaacucca

SEQ ID NO: 661639 - RNA, 19 nt, Human
ccuguaaucccagcuacuc

SEQ ID NO: 661640 - RNA, 21 nt, Human
ccuguaaucccagcuacucag

SEQ ID NO: 661641 - RNA, 22 nt, Human
ccuguaaucccagcuacucagg

SEQ ID NO: 661642 - RNA, 19 nt, Human
ccuguagucccagcuacuc

SEQ ID NO: 661643 - RNA, 22 nt, Human
ccuguagucccagcuacucugg

SEQ ID NO: 661644 - RNA, 23 nt, Human
ccuguagucccagcuacucugga

SEQ ID NO: 661645 - RNA, 26 nt, Human
ccuucugccucagccucccaaagugc

SEQ ID NO: 661646 - RNA, 18 nt, Human
ccuuggagaguacugcug

SEQ ID NO: 661647 - RNA, 24 nt, Human
cgagaccagccuggccaacauggu

SEQ ID NO: 661648 - RNA, 23 nt, Human
cgagaucccaccaccgguacucc

SEQ ID NO: 661649 - RNA, 24 nt, Human
cgcccaggcuggagugcaguggug

SEQ ID NO: 661650 - RNA, 24 nt, Human
cgccucagccuccugaguagcugg

SEQ ID NO: 661651 - RNA, 24 nt, Human
cgccuguaaucccagcacuuuggg

SEQ ID NO: 661652 - RNA, 22 nt, Human
cggggucucacagucgcccagg

SEQ ID NO: 661653 - RNA, 18 nt, Human
cucaaaaccauggucuuc

SEQ ID NO: 661654 - RNA, 24 nt, Human
cucaagcgauccucccgccucagc

SEQ ID NO: 661655 - RNA, 24 nt, Human
cucaagugauccuucugccucagc

SEQ ID NO: 661656 - RNA, 21 nt, Human
cucacacacacacacacacac

SEQ ID NO: 661657 - RNA, 21 nt, Human
cucacagucgcccaggcugga

SEQ ID NO: 661658 - RNA, 27 nt, Human
cucacgccaguaaucccucccuuugga

SEQ ID NO: 661659 - RNA, 22 nt, Human
cucacgccuguaaucccagcac

SEQ ID NO: 661660 - RNA, 24 nt, Human
cucacgccuguaaucccagcacuu

SEQ ID NO: 661661 - RNA, 31 nt, Human
cucucucacacacacacacacacacacacag

SEQ ID NO: 661662 - RNA, 31 nt, Human
cucucucucacacacacacacacacacacag

SEQ ID NO: 661663 - RNA, 21 nt, Human
cucugcuaaaaauacaaaaaa

SEQ ID NO: 661664 - RNA, 24 nt, Human
cugagcuaagauuccaucaaaaac

SEQ ID NO: 661665 - RNA, 23 nt, Human
cuggcccugcccuagguacacau

SEQ ID NO: 661666 - RNA, 18 nt, Human
cuggcuaacacggugaaa

SEQ ID NO: 661667 - RNA, 18 nt, Human
cugggcucaagugauccu

SEQ ID NO: 661668 - RNA, 24 nt, Human
gacagagcaagacuccgucucaaa

SEQ ID NO: 661669 - RNA, 25 nt, Human
gaccuggcccugcccuagguacaca

SEQ ID NO: 661670 - RNA, 20 nt, Human
gaccuuuuuuuuuuuuuuuu

SEQ ID NO: 661671 - RNA, 23 nt, Human
gagaucgugccacugcacuccag

SEQ ID NO: 661672 - RNA, 18 nt, Human
gaggcugaggcuggagaa

SEQ ID NO: 661673 - RNA, 20 nt, Human
gagugcacccacaauuccac

SEQ ID NO: 661674 - RNA, 24 nt, Human
gagugcaguggugcaaucacagcu

SEQ ID NO: 661675 - RNA, 22 nt, Human
gaucaccuuuauguuucucucu

SEQ ID NO: 661676 - RNA, 24 nt, Human
gcacuccagccugggcgacagagc

SEQ ID NO: 661677 - RNA, 24 nt, Human
gccaacauggugaagcccggucuc

SEQ ID NO: 661678 - RNA, 22 nt, Human
gccacugcacuccagccugggc

SEQ ID NO: 661679 - RNA, 24 nt, Human
gccacugcacuccagccugggcga

SEQ ID NO: 661680 - RNA, 24 nt, Human
gccaucacaaucaugauguaugga

SEQ ID NO: 661681 - RNA, 19 nt, Human
gcccaggcuggagugcagu

SEQ ID NO: 661682 - RNA, 20 nt, Human
gcccaggcuggagugcagug

SEQ ID NO: 661683 - RNA, 23 nt, Human
gcccaggcuggagugcaguggug

SEQ ID NO: 661684 - RNA, 20 nt, Human
gccgagaucgugccacugca

SEQ ID NO: 661685 - RNA, 23 nt, Human
gccuguaaucccagcuacucagg

SEQ ID NO: 661686 - RNA, 24 nt, Human
gcgauccucccgccucagccuccu

SEQ ID NO: 661687 - RNA, 24 nt, Human
gcuaacacggugaaaccccgucuc

SEQ ID NO: 661688 - RNA, 24 nt, Human
gcucaccugaggucaggaguucga

SEQ ID NO: 661689 - RNA, 21 nt, Human
gcuggguguaguggcucacgc

SEQ ID NO: 661690 - RNA, 21 nt, Human
ggaaggaagcaagagaacagu

SEQ ID NO: 661691 - RNA, 22 nt, Human
ggacagggaacagagcuuauga

SEQ ID NO: 661692 - RNA, 21 nt, Human
ggacccaagcaggacagggaa

SEQ ID NO: 661693 - RNA, 20 nt, Human
ggaggacccaagcaggacag

SEQ ID NO: 661694 - RNA, 18 nt, Human
ggaggaucacaaggucag

SEQ ID NO: 661695 - RNA, 23 nt, Human
ggaguccuccaaggaucugcacu

SEQ ID NO: 661696 - RNA, 18 nt, Human
ggcaagaaccaauacaca

SEQ ID NO: 661697 - RNA, 18 nt, Human
ggcugggagcaucacuug

SEQ ID NO: 661698 - RNA, 19 nt, Human
ggcuggguguaguggcuca

SEQ ID NO: 661699 - RNA, 21 nt, Human
gggcucaagugauccuucugc

SEQ ID NO: 661700 - RNA, 22 nt, Human
gggcucaagugauccuucugcc

SEQ ID NO: 661701 - RNA, 20 nt, Human
gggguuucuacauucugucu

SEQ ID NO: 661702 - RNA, 25 nt, Human
gguagggaggcaggguggaaggaag

SEQ ID NO: 661703 - RNA, 23 nt, Human
gguggcacacgccuguaauccca

SEQ ID NO: 661704 - RNA, 24 nt, Human
gguggcacacgccuguaaucccag

SEQ ID NO: 661705 - RNA, 23 nt, Human
gguguaguggcucacgccuguaa

SEQ ID NO: 661706 - RNA, 24 nt, Human
guacuccagccugggugacagagc

SEQ ID NO: 661707 - RNA, 19 nt, Human
guauggagacucgugcugc

SEQ ID NO: 661708 - RNA, 23 nt, Human
gucucacagucgcccaggcugga

SEQ ID NO: 661709 - RNA, 21 nt, Human
gugaaaccccgucucugcuaa

SEQ ID NO: 661710 - RNA, 24 nt, Human
gugauccuucugccucagccuccc

SEQ ID NO: 661711 - RNA, 19 nt, Human
gugcaccacaaauaaaaac

SEQ ID NO: 661712 - RNA, 22 nt, Human
gugcagugagccgagaucgugc

SEQ ID NO: 661713 - RNA, 23 nt, Human
guggcacacgccuguaaucccag

SEQ ID NO: 661714 - RNA, 23 nt, Human
guggugcaaucacagcucacugc

SEQ ID NO: 661715 - RNA, 21 nt, Human
uaaaaagcucuuccaccuccc

SEQ ID NO: 661716 - RNA, 22 nt, Human
uaacacggugaaaccccgucuc

SEQ ID NO: 661717 - RNA, 23 nt, Human
uaacacggugaaaccccgucucu

SEQ ID NO: 661718 - RNA, 22 nt, Human
uacuccagccugggugacagag

SEQ ID NO: 661719 - RNA, 19 nt, Human
uacucuggaggcugaggca

SEQ ID NO: 661720 - RNA, 21 nt, Human
uagcaaagcggguagggaggc

SEQ ID NO: 661721 - RNA, 19 nt, Human
uagcuggagcuauaggagc

SEQ ID NO: 661722 - RNA, 24 nt, Human
uaguggcucacgccuguaauccca

SEQ ID NO: 661723 - RNA, 18 nt, Human
ucacaaggucaggagauc

SEQ ID NO: 661724 - RNA, 21 nt, Human
ucacagcucacugcagccgca

SEQ ID NO: 661725 - RNA, 20 nt, Human
ucaccugaggucaggaguuc

SEQ ID NO: 661726 - RNA, 20 nt, Human
ucaccugaggucaggaguuc

SEQ ID NO: 661727 - RNA, 22 nt, Human
ucaccugaggucaggaguucga

SEQ ID NO: 661728 - RNA, 22 nt, Human
ucacugcagccgcaaaccccug

SEQ ID NO: 661729 - RNA, 23 nt, Human
ucacugcagccgcaaaccccugg

SEQ ID NO: 661730 - RNA, 24 nt, Human
ucacugcagccgcaaaccccuggg

SEQ ID NO: 661731 - RNA, 23 nt, Human
ucagccuccugaguagcuggagc

SEQ ID NO: 661732 - RNA, 24 nt, Human
uccagccugggcgacagagcaaga

SEQ ID NO: 661733 - RNA, 18 nt, Human
uccagccugggugacaga

SEQ ID NO: 661734 - RNA, 27 nt, Human
ucccaccaccgguacuccagccugggu

SEQ ID NO: 661735 - RNA, 24 nt, Human
ucccagccagccccugaccuggag

SEQ ID NO: 661736 - RNA, 20 nt, Human
ucccuuuggaaggcugaggc

SEQ ID NO: 661737 - RNA, 26 nt, Human
uccucccgccucagccuccugaguag

SEQ ID NO: 661738 - RNA, 18 nt, Human
uccuggggacaugaacag

SEQ ID NO: 661739 - RNA, 24 nt, Human
ucgcccaggcuggagugcaguggu

SEQ ID NO: 661740 - RNA, 18 nt, Human
ucgcuugaacccgggagg

SEQ ID NO: 661741 - RNA, 23 nt, Human
ucgugccacugcacuccagccug

SEQ ID NO: 661742 - RNA, 20 nt, Human
ucuauugugcuaggccuaug

SEQ ID NO: 661743 - RNA, 21 nt, Human
ucucacacacacacacacaca

SEQ ID NO: 661744 - RNA, 19 nt, Human
ucucacagucgcccaggcu

SEQ ID NO: 661745 - RNA, 22 nt, Human
ucucacagucgcccaggcugga

SEQ ID NO: 661746 - RNA, 24 nt, Human
ucucacagucgcccaggcuggagu

SEQ ID NO: 661747 - RNA, 21 nt, Human
ucucuacuaaaaauacaaaaa

SEQ ID NO: 661748 - RNA, 21 nt, Human
ucucucucucucucucucaca

SEQ ID NO: 661749 - RNA, 21 nt, Human
ucucucucucucucucucuca

SEQ ID NO: 661750 - RNA, 24 nt, Human
ucucugcuaaaaauacaaaaaauu

SEQ ID NO: 661751 - RNA, 20 nt, Human
ucugggcucaagugauccuu

SEQ ID NO: 661752 - RNA, 22 nt, Human
ucugggcucaagugauccuucu

SEQ ID NO: 661753 - RNA, 18 nt, Human
ucugucucucucucucuc

SEQ ID NO: 661754 - RNA, 18 nt, Human
ucuugcuuuguugcccag

SEQ ID NO: 661755 - RNA, 22 nt, Human
ucuugcuuuguugcccagccua

SEQ ID NO: 661756 - RNA, 23 nt, Human
ucuuguagcaaagcggguaggga

SEQ ID NO: 661757 - RNA, 19 nt, Human
ucuuuuuucauuucuuccc

SEQ ID NO: 661758 - RNA, 22 nt, Human
ugagccgagaucgugccacugc

SEQ ID NO: 661759 - RNA, 22 nt, Human
ugaggcaggagaauggugugaa

SEQ ID NO: 661760 - RNA, 25 nt, Human
ugaggcaggagaauggugugaaucc

SEQ ID NO: 661761 - RNA, 20 nt, Human
ugaggcgagaucccaccacc

SEQ ID NO: 661762 - RNA, 21 nt, Human
ugaggcgggaggaucacaagg

SEQ ID NO: 661763 - RNA, 24 nt, Human
ugaggcgggaggaucacaagguca

SEQ ID NO: 661764 - RNA, 24 nt, Human
ugaggcuggagaaucgcuugaacc

SEQ ID NO: 661765 - RNA, 22 nt, Human
ugccgaucaccuuuauguuucu

SEQ ID NO: 661766 - RNA, 24 nt, Human
ugccucagccucccaaagugccgg

SEQ ID NO: 661767 - RNA, 24 nt, Human
ugccuguagucccagcuacucugg

SEQ ID NO: 661768 - RNA, 23 nt, Human
uggaaggaagcaagagaacagug

SEQ ID NO: 661769 - RNA, 20 nt, Human
uggaaggaagcaagagaacu

SEQ ID NO: 661770 - RNA, 24 nt, Human
uggaaggcugaggcgggaggauca

SEQ ID NO: 661771 - RNA, 18 nt, Human
uggagugcaguggugcaa

SEQ ID NO: 661772 - RNA, 19 nt, Human
uggagugcaguggugcaau

SEQ ID NO: 661773 - RNA, 21 nt, Human
uggagugcaguggugcaauca

SEQ ID NO: 661774 - RNA, 21 nt, Human
uggcacacgccuguaauccca

SEQ ID NO: 661775 - RNA, 22 nt, Human
uggcacacgccuguaaucccag

SEQ ID NO: 661776 - RNA, 24 nt, Human
uggccaacauggugaagcccgguc

SEQ ID NO: 661777 - RNA, 24 nt, Human
uggcgggugccuguagucccagcu

SEQ ID NO: 661778 - RNA, 22 nt, Human
uggcucacgccuguaaucccag

SEQ ID NO: 661779 - RNA, 24 nt, Human
uggcucacgccuguaaucccagca

SEQ ID NO: 661780 - RNA, 19 nt, Human
uggcuggguguaguggcuc

SEQ ID NO: 661781 - RNA, 24 nt, Human
ugggcucaagcgauccucccgccu

SEQ ID NO: 661782 - RNA, 20 nt, Human
ugggcucaagugauccuucu

SEQ ID NO: 661783 - RNA, 24 nt, Human
ugggcucaagugauccuucugccu

SEQ ID NO: 661784 - RNA, 24 nt, Human
uggugcaaucacagcucacugcag

SEQ ID NO: 661785 - RNA, 24 nt, Human
ugguggcgggugccuguaguccca

SEQ ID NO: 661786 - RNA, 21 nt, Human
uguauggagacucgugcugcu

SEQ ID NO: 661787 - RNA, 19 nt, Human
uguugcccagccuagucug

SEQ ID NO: 661788 - RNA, 24 nt, Human
uuagucgggcgugguggcgggugc

SEQ ID NO: 661789 - RNA, 20 nt, Human
uucacauuuuuaccuggaca

SEQ ID NO: 661790 - RNA, 20 nt, Human
uucccaaaaggcaggcaaga

SEQ ID NO: 661791 - RNA, 24 nt, Human
uucugggcucaagugauccuucug

SEQ ID NO: 661792 - RNA, 21 nt, Human
uucuucccaaaaggcaggcaa

SEQ ID NO: 661793 - RNA, 22 nt, Human
uugcagugaggcgagaucccac

SEQ ID NO: 661794 - RNA, 25 nt, Human
uuggaaggcugaggcgggaggauca

SEQ ID NO: 661795 - RNA, 23 nt, Human
uuggcuggguguaguggcucacg

SEQ ID NO: 661796 - RNA, 23 nt, Human
uuuucauuucuucccaaaaggca

SEQ ID NO: 661797 - RNA, 27 nt, Human
uuuuuuuuucuuaaagacggggucuca

SEQ ID NO: 661798 - RNA, 22 nt, Human
uuuuuuuuuugggagagaccgg

SEQ ID NO: 661799 - RNA, 25 nt, Human
uuuuuuuuuuuuugggagagaccgg

SEQ ID NO: 661800 - RNA, 31 nt, Human
uuuuuuuuuuuuuuuuucuuaaagacggggg

SEQ ID NO: 661801 - RNA, 18 nt, Human
uuuuuuuuuuuuuuuuug

SEQ ID NO: 661802 - RNA, 21 nt, Human
uuuuuuuuuuuuuuuuugcaa

SEQ ID NO: 661803 - RNA, 24 nt, Human
uuuuuuuuuuuuuuuuuuuuuggg

SEQ ID NO: 661804 - RNA, 24 nt, Human
aaaaaacagacacacuuagccaaa

SEQ ID NO: 661805 - RNA, 21 nt, Human
aaaaaggagcuauaaagaaaa

SEQ ID NO: 661806 - RNA, 23 nt, Human
aaacagaaauaaacauuagaaau

SEQ ID NO: 661807 - RNA, 20 nt, Human
aacacuguuuuauucaacaa

SEQ ID NO: 661808 - RNA, 21 nt, Human
aagaaaaaccaguaaauacau

SEQ ID NO: 661809 - RNA, 18 nt, Human
aagcaguggaauuguucu

SEQ ID NO: 661810 - RNA, 23 nt, Human
aaggagggcuggagugaaaaaga

SEQ ID NO: 661811 - RNA, 28 nt, Human
aauuaaagauaacacuguuuuauucaac

SEQ ID NO: 661812 - RNA, 19 nt, Human
aauuagaauaagcccaccc

SEQ ID NO: 661813 - RNA, 19 nt, Human
accagauacaagaaaaacc

SEQ ID NO: 661814 - RNA, 18 nt, Human
acgaugaaggagggcugg

SEQ ID NO: 661815 - RNA, 22 nt, Human
agaaucuguugaauaaguaaac

SEQ ID NO: 661816 - RNA, 23 nt, Human
agaaucuguugaauaaguaaacu

SEQ ID NO: 661817 - RNA, 18 nt, Human
agcugagacacagaggca

SEQ ID NO: 661818 - RNA, 22 nt, Human
aggagggcuggagugaaaaaga

SEQ ID NO: 661819 - RNA, 19 nt, Human
agguagaaaacacuguccu

SEQ ID NO: 661820 - RNA, 24 nt, Human
aguaaaaaggagcuauaaagaaaa

SEQ ID NO: 661821 - RNA, 25 nt, Human
aguaaaaaggagcuauaaagaaaaa

SEQ ID NO: 661822 - RNA, 20 nt, Human
agugaaaaagauacaggaga

SEQ ID NO: 661823 - RNA, 27 nt, Human
auuaaagauaacacuguuuuauucaac

SEQ ID NO: 661824 - RNA, 22 nt, Human
caaugcacauguuauauuucag

SEQ ID NO: 661825 - RNA, 23 nt, Human
cagacacacuuagccaaaucuug

SEQ ID NO: 661826 - RNA, 22 nt, Human
ccccuaaacacauaggcuaaca

SEQ ID NO: 661827 - RNA, 20 nt, Human
cuccccuaaacacauaggcu

SEQ ID NO: 661828 - RNA, 21 nt, Human
cuuccccucuagauuuguucc

SEQ ID NO: 661829 - RNA, 23 nt, Human
cuucugaauacuuggaguaaaua

SEQ ID NO: 661830 - RNA, 26 nt, Human
gaaaaaacagacacacuuagccaaag

SEQ ID NO: 661831 - RNA, 18 nt, Human
gaauuaaagauaacacug

SEQ ID NO: 661832 - RNA, 21 nt, Human
gauacaggagaguaaaaagga

SEQ ID NO: 661833 - RNA, 20 nt, Human
gggaaaaaacagacacacuu

SEQ ID NO: 661834 - RNA, 22 nt, Human
uaaaaacaauuagaauaagccc

SEQ ID NO: 661835 - RNA, 23 nt, Human
uaaaguuacgcuauuuuccuaag

SEQ ID NO: 661836 - RNA, 23 nt, Human
uaacacagagcugagacacagag

SEQ ID NO: 661837 - RNA, 21 nt, Human
uaagcccacccaaaucagaga

SEQ ID NO: 661838 - RNA, 20 nt, Human
uaauugcauauccuuucuag

SEQ ID NO: 661839 - RNA, 20 nt, Human
uacagcacuguuuuggguau

SEQ ID NO: 661840 - RNA, 21 nt, Human
uacuuggcuugaguuagauga

SEQ ID NO: 661841 - RNA, 23 nt, Human
uagaaaacacuguccuuguccau

SEQ ID NO: 661842 - RNA, 23 nt, Human
uagaauaagcccacccaaaucag

SEQ ID NO: 661843 - RNA, 20 nt, Human
uagccaaaucuuggcuuccc

SEQ ID NO: 661844 - RNA, 18 nt, Human
uaggcuaacacagagcug

SEQ ID NO: 661845 - RNA, 24 nt, Human
ucaacacuuauucaacuauaauua

SEQ ID NO: 661846 - RNA, 22 nt, Human
ucuaguaauauuugugaccugu

SEQ ID NO: 661847 - RNA, 21 nt, Human
ucuuggggucaggagaaaauc

SEQ ID NO: 661848 - RNA, 18 nt, Human
ugaaguggcaguaaacca

SEQ ID NO: 661849 - RNA, 23 nt, Human
ugaccacauaaaaguaaaaauua

SEQ ID NO: 661850 - RNA, 18 nt, Human
ugagccuuuuacucagcu

SEQ ID NO: 661851 - RNA, 20 nt, Human
uggggucaggagaaaaucaa

SEQ ID NO: 661852 - RNA, 19 nt, Human
ugucagcguuucaacuguu

SEQ ID NO: 661853 - RNA, 22 nt, Human
uuaaaauacauuagucaacacu

SEQ ID NO: 661854 - RNA, 18 nt, Human
uuacucagcuuuacaaag

SEQ ID NO: 661855 - RNA, 24 nt, Human
uucacagaaacaaaauaaugcauc

SEQ ID NO: 661856 - RNA, 21 nt, Human
uuuuuuuuuuuuuuuuucauu

SEQ ID NO: 661857 - RNA, 18 nt, Human
aaaaaaaauagggaaaaa

SEQ ID NO: 661858 - RNA, 24 nt, Human
aaaaaacaaaaacaaaaacaaaaa

SEQ ID NO: 661859 - RNA, 24 nt, Human
aaaaacaaaaacaaaaacaaaaac

SEQ ID NO: 661860 - RNA, 22 nt, Human
aaaacaaaaacaaaaacaaaaa

SEQ ID NO: 661861 - RNA, 19 nt, Human
aaaagaagaaaaaaaauag

SEQ ID NO: 661862 - RNA, 26 nt, Human
aaaagaagaaaaaaaauagggaaaaa

SEQ ID NO: 661863 - RNA, 19 nt, Human
aaacaaaaacaaaaacaaa

SEQ ID NO: 661864 - RNA, 25 nt, Human
aaacaaaaacaaaaacaaauucugg

SEQ ID NO: 661865 - RNA, 22 nt, Human
aaacaaacucaaacuuugacaa

SEQ ID NO: 661866 - RNA, 21 nt, Human
aaagaagaaaaaaaauaggga

SEQ ID NO: 661867 - RNA, 22 nt, Human
aaagcagcuaaaaaaacaaaaa

SEQ ID NO: 661868 - RNA, 33 nt, Human
aaagcagcuaaaaaaacaaaaacaaaaacaaag

SEQ ID NO: 661869 - RNA, 18 nt, Human
aaaggcaaauaaccuuau

SEQ ID NO: 661870 - RNA, 25 nt, Human
aaauaaccuuaugaaucugguaagu

SEQ ID NO: 661871 - RNA, 23 nt, Human
aaauaucagacaucccaauaacu

SEQ ID NO: 661872 - RNA, 19 nt, Human
aagaaaauguaaaaauaac

SEQ ID NO: 661873 - RNA, 20 nt, Human
aagacuacagggagguuagg

SEQ ID NO: 661874 - RNA, 20 nt, Human
aagcaaacccaaacaaauua

SEQ ID NO: 661875 - RNA, 21 nt, Human
aagcaaacccaaacaaauuaa

SEQ ID NO: 661876 - RNA, 24 nt, Human
aaucacuugaaccugggaggcaga

SEQ ID NO: 661877 - RNA, 22 nt, Human
acaaagccagggccuacaggug

SEQ ID NO: 661878 - RNA, 21 nt, Human
acaaaguuaauuguaaaacag

SEQ ID NO: 661879 - RNA, 23 nt, Human
acaggagaaucacuugaaccugg

SEQ ID NO: 661880 - RNA, 18 nt, Human
acagggaaaaacaaacuc

SEQ ID NO: 661881 - RNA, 21 nt, Human
accccagccagacaucacaaa

SEQ ID NO: 661882 - RNA, 24 nt, Human
acccugucucuacuaaaaauacaa

SEQ ID NO: 661883 - RNA, 22 nt, Human
acucauaacacauauacacaga

SEQ ID NO: 661884 - RNA, 21 nt, Human
acucuaacucauaucuggaaa

SEQ ID NO: 661885 - RNA, 22 nt, Human
agaaaagaguacuaugaaaaaa

SEQ ID NO: 661886 - RNA, 24 nt, Human
agaacuuugggaggccgagguggg

SEQ ID NO: 661887 - RNA, 22 nt, Human
agaagaaaaaaaauagggaaaa

SEQ ID NO: 661888 - RNA, 22 nt, Human
agacaggagaaucacuugaacc

SEQ ID NO: 661889 - RNA, 24 nt, Human
agacaggagaaucacuugaaccug

SEQ ID NO: 661890 - RNA, 18 nt, Human
agacuguuaucuggaagc

SEQ ID NO: 661891 - RNA, 23 nt, Human
agagcaaauauaguaucuucuga

SEQ ID NO: 661892 - RNA, 22 nt, Human
agagguugcagugaaccgagau

SEQ ID NO: 661893 - RNA, 24 nt, Human
agagguugcagugaaccgagauug

SEQ ID NO: 661894 - RNA, 22 nt, Human
agagguuguaugaugaaggucg

SEQ ID NO: 661895 - RNA, 23 nt, Human
agcaugguggcgggcaccuguaa

SEQ ID NO: 661896 - RNA, 18 nt, Human
agccagggccuacaggug

SEQ ID NO: 661897 - RNA, 24 nt, Human
aggagcucgagaccagccuggcca

SEQ ID NO: 661898 - RNA, 19 nt, Human
aggaucaccugaggucagg

SEQ ID NO: 661899 - RNA, 24 nt, Human
aggaucaccugaggucaggagcuc

SEQ ID NO: 661900 - RNA, 21 nt, Human
aggcagagguugcagugaacc

SEQ ID NO: 661901 - RNA, 24 nt, Human
aggcagagguugcagugaaccgag

SEQ ID NO: 661902 - RNA, 24 nt, Human
aggccgaggugggaggaucaccug

SEQ ID NO: 661903 - RNA, 24 nt, Human
aggcugagacaggagaaucacuug

SEQ ID NO: 661904 - RNA, 18 nt, Human
aggugggaggaucaccug

SEQ ID NO: 661905 - RNA, 22 nt, Human
aggugggaggaucaccugaggu

SEQ ID NO: 661906 - RNA, 23 nt, Human
aggugggaggaucaccugagguc

SEQ ID NO: 661907 - RNA, 24 nt, Human
aguggcucaccccuguaaucccag

SEQ ID NO: 661908 - RNA, 24 nt, Human
auauacacagaaaagaguacuaug

SEQ ID NO: 661909 - RNA, 20 nt, Human
augaugaaggucggaaagua

SEQ ID NO: 661910 - RNA, 24 nt, Human
auugcacucuagccugggcaacaa

SEQ ID NO: 661911 - RNA, 25 nt, Human
auugcacucuagccugggcaacaag

SEQ ID NO: 661912 - RNA, 19 nt, Human
auuggacuucuuugaagag

SEQ ID NO: 661913 - RNA, 20 nt, Human
caaacccaaacaaauuaagu

SEQ ID NO: 661914 - RNA, 20 nt, Human
caaaccuggaaaacaguuaa

SEQ ID NO: 661915 - RNA, 24 nt, Human
caaaguauucauuaacccauuaaa

SEQ ID NO: 661916 - RNA, 24 nt, Human
caaaguguaugccaaacgaauuuc

SEQ ID NO: 661917 - RNA, 24 nt, Human
caccccuguaaucccagaacuuug

SEQ ID NO: 661918 - RNA, 23 nt, Human
caccuguaaucccagcuacuugg

SEQ ID NO: 661919 - RNA, 24 nt, Human
caccuguaaucccagcuacuuggg

SEQ ID NO: 661920 - RNA, 24 nt, Human
cagaacuuugggaggccgaggugg

SEQ ID NO: 661921 - RNA, 20 nt, Human
cagcuaaaaaaacaaaaaca

SEQ ID NO: 661922 - RNA, 20 nt, Human
cauugacaaauucaccucuu

SEQ ID NO: 661923 - RNA, 19 nt, Human
cauugcacucuagccuggg

SEQ ID NO: 661924 - RNA, 21 nt, Human
cauugcacucuagccugggca

SEQ ID NO: 661925 - RNA, 22 nt, Human
cauugcacucuagccugggcaa

SEQ ID NO: 661926 - RNA, 24 nt, Human
cauugcacucuagccugggcaaca

SEQ ID NO: 661927 - RNA, 23 nt, Human
cauuuaucaaccuuuaccuucuc

SEQ ID NO: 661928 - RNA, 22 nt, Human
ccauacaaauuccauauccagu

SEQ ID NO: 661929 - RNA, 20 nt, Human
ccaugacaauguaagaaagu

SEQ ID NO: 661930 - RNA, 20 nt, Human
ccauugcacucuagccuggg

SEQ ID NO: 661931 - RNA, 21 nt, Human
ccauugcacucuagccugggc

SEQ ID NO: 661932 - RNA, 23 nt, Human
ccauugcacucuagccugggcaa

SEQ ID NO: 661933 - RNA, 24 nt, Human
ccauugcacucuagccugggcaac

SEQ ID NO: 661934 - RNA, 25 nt, Human
cccagccagacaucacaaacucaua

SEQ ID NO: 661935 - RNA, 20 nt, Human
ccccuguaaucccagaacuu

SEQ ID NO: 661936 - RNA, 23 nt, Human
ccccuguaaucccagaacuuugg

SEQ ID NO: 661937 - RNA, 21 nt, Human
ccuacaaacauaaacagugcu

SEQ ID NO: 661938 - RNA, 22 nt, Human
ccugaggucaggagcucgagac

SEQ ID NO: 661939 - RNA, 25 nt, Human
ccugggaggcagagguugcagugaa

SEQ ID NO: 661940 - RNA, 22 nt, Human
ccuguaaucccagaacuuuggg

SEQ ID NO: 661941 - RNA, 21 nt, Human
ccuguaaucccagcuacuugg

SEQ ID NO: 661942 - RNA, 22 nt, Human
cgagaccagccuggccaacccu

SEQ ID NO: 661943 - RNA, 20 nt, Human
cgaggugggaggaucaccug

SEQ ID NO: 661944 - RNA, 24 nt, Human
cgaggugggaggaucaccugaggu

SEQ ID NO: 661945 - RNA, 26 nt, Human
cgaggugggaggaucaccugagguca

SEQ ID NO: 661946 - RNA, 18 nt, Human
cgcagaacaaaaaagauc

SEQ ID NO: 661947 - RNA, 31 nt, Human
cuaaaaaaacaaaaacaaaaacaaaaacaaa

SEQ ID NO: 661948 - RNA, 22 nt, Human
cuacaggugguuuccagacuuu

SEQ ID NO: 661949 - RNA, 20 nt, Human
cuagagcaaauauaguaucc

SEQ ID NO: 661950 - RNA, 24 nt, Human
cucaccccuguaaucccagaacuu

SEQ ID NO: 661951 - RNA, 21 nt, Human
cucuaugugaccacacagaac

SEQ ID NO: 661952 - RNA, 21 nt, Human
cuguaaucccagcuacuuggg

SEQ ID NO: 661953 - RNA, 18 nt, Human
cuugcgcagaacaaaaaa

SEQ ID NO: 661954 - RNA, 23 nt, Human
gagaaucacuugaaccugggagg

SEQ ID NO: 661955 - RNA, 21 nt, Human
gagccaaucuucaacucuugg

SEQ ID NO: 661956 - RNA, 22 nt, Human
gaggugggaggaucaccugagg

SEQ ID NO: 661957 - RNA, 23 nt, Human
gaggugggaggaucaccugaggu

SEQ ID NO: 661958 - RNA, 18 nt, Human
gaucaccugaggucagga

SEQ ID NO: 661959 - RNA, 24 nt, Human
gaucaccugaggucaggagcucga

SEQ ID NO: 661960 - RNA, 19 nt, Human
gaucacuuaaaggcaaaua

SEQ ID NO: 661961 - RNA, 24 nt, Human
gcaaaguauucauuaacccauuaa

SEQ ID NO: 661962 - RNA, 24 nt, Human
gccauugcacucuagccugggcaa

SEQ ID NO: 661963 - RNA, 20 nt, Human
gcgggcaccuguaaucccag

SEQ ID NO: 661964 - RNA, 24 nt, Human
ggaaauggugugauuucuaacagc

SEQ ID NO: 661965 - RNA, 23 nt, Human
ggaggaugguuuguggcagaggc

SEQ ID NO: 661966 - RNA, 18 nt, Human
ggaucaccugaggucagg

SEQ ID NO: 661967 - RNA, 19 nt, Human
ggaucaccugaggucagga

SEQ ID NO: 661968 - RNA, 19 nt, Human
ggauuagguuuaaaagcag

SEQ ID NO: 661969 - RNA, 22 nt, Human
ggauugcuacuuugaaacaguu

SEQ ID NO: 661970 - RNA, 24 nt, Human
ggcaccuguaaucccagcuacuug

SEQ ID NO: 661971 - RNA, 24 nt, Human
gggcacaguggcucaccccuguaa

SEQ ID NO: 661972 - RNA, 24 nt, Human
gguggcgggcaccuguaaucccag

SEQ ID NO: 661973 - RNA, 18 nt, Human
guaaaacucugcuucaga

SEQ ID NO: 661974 - RNA, 22 nt, Human
guaaaacucugcuucagaaaaa

SEQ ID NO: 661975 - RNA, 23 nt, Human
uaaaacaaaucaccuuguuuuga

SEQ ID NO: 661976 - RNA, 23 nt, Human
uaacacauauacacagaaaagaa

SEQ ID NO: 661977 - RNA, 18 nt, Human
uaacagcaccuagcauac

SEQ ID NO: 661978 - RNA, 21 nt, Human
uacaaauuccauauccaguga

SEQ ID NO: 661979 - RNA, 19 nt, Human
uaccccagccagacaucac

SEQ ID NO: 661980 - RNA, 19 nt, Human
uacgugccauccucaaagc

SEQ ID NO: 661981 - RNA, 24 nt, Human
uagaacagcccuugcuuacauaau

SEQ ID NO: 661982 - RNA, 20 nt, Human
uagauaugaagagccaaacc

SEQ ID NO: 661983 - RNA, 22 nt, Human
uagcagaaauaaaggguaaugg

SEQ ID NO: 661984 - RNA, 19 nt, Human
uagcagcugugauuucuuu

SEQ ID NO: 661985 - RNA, 20 nt, Human
uaggaggaugguuuguggca

SEQ ID NO: 661986 - RNA, 25 nt, Human
uagggaaaaauucacaaauguccaa

SEQ ID NO: 661987 - RNA, 19 nt, Human
uagugugcuaauaauauga

SEQ ID NO: 661988 - RNA, 22 nt, Human
uauaaaauuauggccgggcaca

SEQ ID NO: 661989 - RNA, 20 nt, Human
uaucagaagacuguuaucuu

SEQ ID NO: 661990 - RNA, 21 nt, Human
uaucagacaucccaauaacuu

SEQ ID NO: 661991 - RNA, 22 nt, Human
uaugccaaacgaauuucagucc

SEQ ID NO: 661992 - RNA, 25 nt, Human
uauugcuucauaucuuuuuuucacu

SEQ ID NO: 661993 - RNA, 19 nt, Human
ucaccugaggucaggagcu

SEQ ID NO: 661994 - RNA, 25 nt, Human
ucacuugaaccugggaggcagaggu

SEQ ID NO: 661995 - RNA, 22 nt, Human
ucgagaccagccuggccaaccc

SEQ ID NO: 661996 - RNA, 18 nt, Human
ucuccuguuucaucucuu

SEQ ID NO: 661997 - RNA, 21 nt, Human
ucucuacuaaaaauacaaaaa

SEQ ID NO: 661998 - RNA, 18 nt, Human
ucugucugucucucucuc

SEQ ID NO: 661999 - RNA, 23 nt, Human
ucugugccacaauuugccucuag

SEQ ID NO: 662000 - RNA, 19 nt, Human
ucuugaguucaaagggcuu

SEQ ID NO: 662001 - RNA, 22 nt, Human
ugaaccgagauugugccauugc

SEQ ID NO: 662002 - RNA, 24 nt, Human
ugaaccugggaggcagagguugca

SEQ ID NO: 662003 - RNA, 21 nt, Human
ugacaaagccagggccuacag

SEQ ID NO: 662004 - RNA, 26 nt, Human
ugacaacauccacagaauguuccagu

SEQ ID NO: 662005 - RNA, 22 nt, Human
ugaccacacagaacucuuuuaa

SEQ ID NO: 662006 - RNA, 20 nt, Human
ugagacaggagaaucacuug

SEQ ID NO: 662007 - RNA, 24 nt, Human
ugagacaggagaaucacuugaacc

SEQ ID NO: 662008 - RNA, 27 nt, Human
ugaguauaaauaaaagaagaaaaaaaa

SEQ ID NO: 662009 - RNA, 19 nt, Human
ugcacucuagccugggcaa

SEQ ID NO: 662010 - RNA, 23 nt, Human
ugcgcagaacaaaaaagaucgua

SEQ ID NO: 662011 - RNA, 18 nt, Human
uggaaaacaguuaaggag

SEQ ID NO: 662012 - RNA, 18 nt, Human
uggaacuauuuauuuugu

SEQ ID NO: 662013 - RNA, 19 nt, Human
uggacaaaacucuacugac

SEQ ID NO: 662014 - RNA, 19 nt, Human
uggagaaguaauaaagcca

SEQ ID NO: 662015 - RNA, 20 nt, Human
uggagaaguaauaaagccag

SEQ ID NO: 662016 - RNA, 21 nt, Human
uggcucaccccuguaauccca

SEQ ID NO: 662017 - RNA, 22 nt, Human
uggcucaccccuguaaucccag

SEQ ID NO: 662018 - RNA, 19 nt, Human
ugggaggccgaggugggag

SEQ ID NO: 662019 - RNA, 24 nt, Human
ugggaggccgaggugggaggauca

SEQ ID NO: 662020 - RNA, 24 nt, Human
ugggaggcugagacaggagaauca

SEQ ID NO: 662021 - RNA, 23 nt, Human
ugggaugaaaucccaaaggaacu

SEQ ID NO: 662022 - RNA, 18 nt, Human
uggguucuuuggaaaugg

SEQ ID NO: 662023 - RNA, 24 nt, Human
ugguggcgggcaccuguaauccca

SEQ ID NO: 662024 - RNA, 19 nt, Human
ugugcuaauaauaugaaca

SEQ ID NO: 662025 - RNA, 21 nt, Human
uuaaaagcagcuaaaaaaaca

SEQ ID NO: 662026 - RNA, 18 nt, Human
uuagcugagcaugguggc

SEQ ID NO: 662027 - RNA, 18 nt, Human
uucacagccacucuaacu

SEQ ID NO: 662028 - RNA, 24 nt, Human
uugaaccugggaggcagagguugc

SEQ ID NO: 662029 - RNA, 22 nt, Human
uugcagugaaccgagauugugc

SEQ ID NO: 662030 - RNA, 25 nt, Human
uugggaggccgaggugggaggauca

SEQ ID NO: 662031 - RNA, 25 nt, Human
uugggaggcugagacaggagaauca

SEQ ID NO: 662032 - RNA, 23 nt, Human
uuggucccaaggaagugacaaaa

SEQ ID NO: 662033 - RNA, 26 nt, Human
uuuaaaccaugacaauguaagaaagu

SEQ ID NO: 662034 - RNA, 18 nt, Human
uuuguggcagaggcgagg

SEQ ID NO: 662035 - RNA, 19 nt, Human
uuuguuguuguuguugcuu

SEQ ID NO: 662036 - RNA, 18 nt, Human
cagaauuaaaaaaaucac

SEQ ID NO: 662037 - RNA, 25 nt, Human
uuuuuuuuuuuuuuuuuuaauuuuu

SEQ ID NO: 662038 - RNA, 23 nt, Human
aagagaaaaaaauucagaugcuu

SEQ ID NO: 662039 - RNA, 19 nt, Human
acagcauccucuccucuga

SEQ ID NO: 662040 - RNA, 23 nt, Human
accgcagaguggagccucccuuu

SEQ ID NO: 662041 - RNA, 20 nt, Human
acuccgcugccggccugggg

SEQ ID NO: 662042 - RNA, 22 nt, Human
acuuugggaggcagaguagaau

SEQ ID NO: 662043 - RNA, 19 nt, Human
agccagugaaggcuggagg

SEQ ID NO: 662044 - RNA, 18 nt, Human
agcugggagacccuugac

SEQ ID NO: 662045 - RNA, 19 nt, Human
aggaaggcugcugcccagc

SEQ ID NO: 662046 - RNA, 22 nt, Human
aggaaggcugcugcccagcccc

SEQ ID NO: 662047 - RNA, 23 nt, Human
aggaaggcugcugcccagccccu

SEQ ID NO: 662048 - RNA, 18 nt, Human
aggacaucuuggccagaa

SEQ ID NO: 662049 - RNA, 21 nt, Human
agugaaggcuggaggccaugg

SEQ ID NO: 662050 - RNA, 21 nt, Human
agugaccuugcagcugaagau

SEQ ID NO: 662051 - RNA, 18 nt, Human
cacuuugggaggcagagu

SEQ ID NO: 662052 - RNA, 25 nt, Human
cagcagugaccuugcagcugaagau

SEQ ID NO: 662053 - RNA, 18 nt, Human
cagccacugccuguuccu

SEQ ID NO: 662054 - RNA, 25 nt, Human
cagcuccuggacuccgcugccggcc

SEQ ID NO: 662055 - RNA, 24 nt, Human
ccagugggcguggucugcccuaga

SEQ ID NO: 662056 - RNA, 19 nt, Human
cccccugguggccugacuc

SEQ ID NO: 662057 - RNA, 19 nt, Human
ccuagagaaugaaguccuc

SEQ ID NO: 662058 - RNA, 22 nt, Human
ccucccuuugaagcugacagga

SEQ ID NO: 662059 - RNA, 20 nt, Human
ccuuguaccuggaucucuuc

SEQ ID NO: 662060 - RNA, 22 nt, Human
cgacccuuugugggccacacca

SEQ ID NO: 662061 - RNA, 22 nt, Human
cgaggaucacccacuuugggag

SEQ ID NO: 662062 - RNA, 19 nt, Human
cuccagugggcguggucug

SEQ ID NO: 662063 - RNA, 19 nt, Human
cucguguauucuguggagc

SEQ ID NO: 662064 - RNA, 19 nt, Human
cuggaggccaugguaggcu

SEQ ID NO: 662065 - RNA, 20 nt, Human
cuggggacucucugucuuag

SEQ ID NO: 662066 - RNA, 21 nt, Human
cuuggagacugucccucacag

SEQ ID NO: 662067 - RNA, 23 nt, Human
gagaaugaaguccucacucugcu

SEQ ID NO: 662068 - RNA, 23 nt, Human
gaucacccacuuugggaggcaga

SEQ ID NO: 662069 - RNA, 19 nt, Human
gcagaguggagccucccuu

SEQ ID NO: 662070 - RNA, 22 nt, Human
gcgcccccugguggccugacuc

SEQ ID NO: 662071 - RNA, 19 nt, Human
gcucuccaacauccucauc

SEQ ID NO: 662072 - RNA, 19 nt, Human
ggagcccucucugccagcu

SEQ ID NO: 662073 - RNA, 22 nt, Human
ggcaggaaggcugcugcccagc

SEQ ID NO: 662074 - RNA, 22 nt, Human
ggccacaccagcuccuggacuc

SEQ ID NO: 662075 - RNA, 24 nt, Human
ggccugagucuacuuuuuaaagcc

SEQ ID NO: 662076 - RNA, 18 nt, Human
ggccuggggguccuggga

SEQ ID NO: 662077 - RNA, 20 nt, Human
ggcuggaggccaugguaggc

SEQ ID NO: 662078 - RNA, 18 nt, Human
gggguccugggagcuggg

SEQ ID NO: 662079 - RNA, 20 nt, Human
guggccccaguacagcaguc

SEQ ID NO: 662080 - RNA, 19 nt, Human
guggccugacucuccuggc

SEQ ID NO: 662081 - RNA, 22 nt, Human
ucaggcccagcuuugccaccgc

SEQ ID NO: 662082 - RNA, 20 nt, Human
uccaggcuuccucuucucca

SEQ ID NO: 662083 - RNA, 18 nt, Human
uccagugggcguggucug

SEQ ID NO: 662084 - RNA, 24 nt, Human
uccauagccagugaaggccggggc

SEQ ID NO: 662085 - RNA, 21 nt, Human
ucccaggauguacauuccuuc

SEQ ID NO: 662086 - RNA, 20 nt, Human
ucccaggugccuccuggccc

SEQ ID NO: 662087 - RNA, 23 nt, Human
ucccaggugccuccuggcccugg

SEQ ID NO: 662088 - RNA, 18 nt, Human
uccgcugccggccugggg

SEQ ID NO: 662089 - RNA, 20 nt, Human
uccuggaucuccugugguuc

SEQ ID NO: 662090 - RNA, 21 nt, Human
uccuggaucuccugugguucu

SEQ ID NO: 662091 - RNA, 22 nt, Human
uccuggaucuccugugguucuc

SEQ ID NO: 662092 - RNA, 18 nt, Human
uccuggcccuggggacuc

SEQ ID NO: 662093 - RNA, 24 nt, Human
ucgaggcucuccaacauccucauc

SEQ ID NO: 662094 - RNA, 19 nt, Human
ucuccaguaugugagcugc

SEQ ID NO: 662095 - RNA, 19 nt, Human
ucuccugcaggagccuggg

SEQ ID NO: 662096 - RNA, 23 nt, Human
ucugcugggagcccucucugcca

SEQ ID NO: 662097 - RNA, 21 nt, Human
ugagucuggggagcuuagagg

SEQ ID NO: 662098 - RNA, 21 nt, Human
ugcccagccccucugcacccu

SEQ ID NO: 662099 - RNA, 21 nt, Human
ugccugugggccucucacucc

SEQ ID NO: 662100 - RNA, 19 nt, Human
ugcugggagcccucucugc

SEQ ID NO: 662101 - RNA, 20 nt, Human
uggaguucugcaacauccuc

SEQ ID NO: 662102 - RNA, 18 nt, Human
uggccagaagggucaggc

SEQ ID NO: 662103 - RNA, 20 nt, Human
ugggagcccucucugccagc

SEQ ID NO: 662104 - RNA, 19 nt, Human
ugggaggcagaguagaauc

SEQ ID NO: 662105 - RNA, 18 nt, Human
ugggccucucacucccag

SEQ ID NO: 662106 - RNA, 24 nt, Human
ugucccuggucaucuccugcagga

SEQ ID NO: 662107 - RNA, 19 nt, Human
uguccugaggacucugggc

SEQ ID NO: 662108 - RNA, 21 nt, Human
ugugagcugcuggcauuugag

SEQ ID NO: 662109 - RNA, 23 nt, Human
uuccuggaucuccugugguucuc

SEQ ID NO: 662110 - RNA, 23 nt, Human
uuccuggaucuccugugguucuc

SEQ ID NO: 662111 - RNA, 18 nt, Human
uucucuggcgcccccugg

SEQ ID NO: 662112 - RNA, 20 nt, Human
uuggagacugucccucacag

SEQ ID NO: 662113 - RNA, 23 nt, Human
uuuccugccccuacuguucucac

SEQ ID NO: 662114 - RNA, 19 nt, Human
cccgcugggcacacagcag

SEQ ID NO: 662115 - RNA, 23 nt, Human
cugguaaguaaugugcccuuuuc

SEQ ID NO: 662116 - RNA, 21 nt, Human
gucccggcgucgaagaaugcc

SEQ ID NO: 662117 - RNA, 19 nt, Human
uaaugugcccuuuucccuc

SEQ ID NO: 662118 - RNA, 23 nt, Human
uaucuugcccaaagcuuuucaaa

SEQ ID NO: 662119 - RNA, 22 nt, Human
ucccucggugucguaucuugcc

SEQ ID NO: 662120 - RNA, 23 nt, Human
ugcccuuuucccucggugucgua

SEQ ID NO: 662121 - RNA, 24 nt, Human
uggugugaggggaauaucaaaacc

SEQ ID NO: 662122 - RNA, 22 nt, Human
uguggcugucgucccgcugggc

SEQ ID NO: 662123 - RNA, 22 nt, Human
uuucuagaaaauucuuagacaa

SEQ ID NO: 662124 - RNA, 23 nt, Human
uuuuuuuuuuuuuuuuuccaaau

SEQ ID NO: 662125 - RNA, 23 nt, Human
uuuuuuuuuuuuuuuuuuuucca

SEQ ID NO: 662126 - RNA, 24 nt, Human
uuuuuuuuuuuuuuuuuuuuuccu

SEQ ID NO: 662127 - RNA, 23 nt, Human
aacagggagucaacagguaaugu

SEQ ID NO: 662128 - RNA, 19 nt, Human
aacccgcccaguucucccu

SEQ ID NO: 662129 - RNA, 23 nt, Human
aaugaacuggaagugacugcugg

SEQ ID NO: 662130 - RNA, 23 nt, Human
acacugcugcaugaggagugggc

SEQ ID NO: 662131 - RNA, 19 nt, Human
accuugaagaaggcccggg

SEQ ID NO: 662132 - RNA, 19 nt, Human
acguaggcgcagcagguau

SEQ ID NO: 662133 - RNA, 19 nt, Human
acuguguaauuccacauua

SEQ ID NO: 662134 - RNA, 18 nt, Human
agcagccccaggacagga

SEQ ID NO: 662135 - RNA, 22 nt, Human
agcagcucaggucucaggcggc

SEQ ID NO: 662136 - RNA, 24 nt, Human
aggaagcagaccagcagccccagg

SEQ ID NO: 662137 - RNA, 22 nt, Human
aggaagcgggugcuuaagagag

SEQ ID NO: 662138 - RNA, 24 nt, Human
aggcggccgccagccccucgcucc

SEQ ID NO: 662139 - RNA, 21 nt, Human
aguacuagagaaugggagaga

SEQ ID NO: 662140 - RNA, 23 nt, Human
auagcuaugacaagaaaggcccc

SEQ ID NO: 662141 - RNA, 19 nt, Human
auaguaauagaaauaguaa

SEQ ID NO: 662142 - RNA, 19 nt, Human
augaacacuuacuguccuc

SEQ ID NO: 662143 - RNA, 22 nt, Human
caaaagagagcuaaagccucau

SEQ ID NO: 662144 - RNA, 18 nt, Human
caacagggagucaacagg

SEQ ID NO: 662145 - RNA, 19 nt, Human
caagaaaggccccgccuuu

SEQ ID NO: 662146 - RNA, 20 nt, Human
caagcaagagucauauaagc

SEQ ID NO: 662147 - RNA, 23 nt, Human
caccaauucuccuuguccuuaau

SEQ ID NO: 662148 - RNA, 25 nt, Human
cagcagccccaggacaggacggguu

SEQ ID NO: 662149 - RNA, 19 nt, Human
cagcagccccaggacaggg

SEQ ID NO: 662150 - RNA, 20 nt, Human
cauguugacgugggcacuca

SEQ ID NO: 662151 - RNA, 25 nt, Human
ccaaggcccugaaccacggcgugca

SEQ ID NO: 662152 - RNA, 19 nt, Human
ccacuaaacccgcccaguu

SEQ ID NO: 662153 - RNA, 20 nt, Human
ccagcaccuugaugaugucu

SEQ ID NO: 662154 - RNA, 18 nt, Human
ccagccccucgcucccag

SEQ ID NO: 662155 - RNA, 19 nt, Human
cccagcacacugcugcaug

SEQ ID NO: 662156 - RNA, 26 nt, Human
cccagcacacugcugcaugaggagug

SEQ ID NO: 662157 - RNA, 19 nt, Human
ccccuggcaccagcaaggg

SEQ ID NO: 662158 - RNA, 24 nt, Human
ccucccgcucucgcagugucugau

SEQ ID NO: 662159 - RNA, 20 nt, Human
ccugaaccacggcgugcagc

SEQ ID NO: 662160 - RNA, 25 nt, Human
ccugaaccacggcgugcagcuugag

SEQ ID NO: 662161 - RNA, 21 nt, Human
ccuggcaccagcaaggguacc

SEQ ID NO: 662162 - RNA, 20 nt, Human
cgaagcaccagcaccuugau

SEQ ID NO: 662163 - RNA, 24 nt, Human
cguuguacaggaagcagaccagca

SEQ ID NO: 662164 - RNA, 22 nt, Human
cugcacuguuucuugcuucaug

SEQ ID NO: 662165 - RNA, 20 nt, Human
cugcugcaugaggagugggc

SEQ ID NO: 662166 - RNA, 23 nt, Human
cugggaacuucccacccacauga

SEQ ID NO: 662167 - RNA, 27 nt, Human
cugggcauaugucucccauuucauccu

SEQ ID NO: 662168 - RNA, 21 nt, Human
cuucccacccacaugacuuga

SEQ ID NO: 662169 - RNA, 22 nt, Human
cuucucgaagcaccagcaccuu

SEQ ID NO: 662170 - RNA, 24 nt, Human
gaaaggccccgccuuuccugcuaa

SEQ ID NO: 662171 - RNA, 18 nt, Human
ggaacuucccacccacau

SEQ ID NO: 662172 - RNA, 22 nt, Human
ggcacucagcaggggugcacuu

SEQ ID NO: 662173 - RNA, 18 nt, Human
ggcagggaauagagcgcc

SEQ ID NO: 662174 - RNA, 22 nt, Human
gggccugcagguaggcgcgggc

SEQ ID NO: 662175 - RNA, 23 nt, Human
ggggagacgagcugucgccccag

SEQ ID NO: 662176 - RNA, 18 nt, Human
ggguuggugcugugggag

SEQ ID NO: 662177 - RNA, 18 nt, Human
ggugaggaagcgggugcu

SEQ ID NO: 662178 - RNA, 22 nt, Human
ggugcuuaagagaggggagacg

SEQ ID NO: 662179 - RNA, 25 nt, Human
guugagguguucugcaggugaagug

SEQ ID NO: 662180 - RNA, 21 nt, Human
uaaaaauagcugaaugaacug

SEQ ID NO: 662181 - RNA, 23 nt, Human
uaccuugaagaaggcccggggca

SEQ ID NO: 662182 - RNA, 21 nt, Human
uacuauaggcccaacaguggg

SEQ ID NO: 662183 - RNA, 22 nt, Human
uacuauaggcccaacagugggg

SEQ ID NO: 662184 - RNA, 23 nt, Human
uagaaagacaccaauucuccuug

SEQ ID NO: 662185 - RNA, 23 nt, Human
uaguaaguggguauguguuuuua

SEQ ID NO: 662186 - RNA, 25 nt, Human
uauaggcccaacaguggggguggug

SEQ ID NO: 662187 - RNA, 21 nt, Human
ucaagcaagagucauauaagc

SEQ ID NO: 662188 - RNA, 22 nt, Human
ucacaauuucucucuagugugu

SEQ ID NO: 662189 - RNA, 21 nt, Human
ucucaggcggccgccagcccc

SEQ ID NO: 662190 - RNA, 22 nt, Human
ucugagaugcccuuguuacuga

SEQ ID NO: 662191 - RNA, 22 nt, Human
ugaaugaacuggaagugacugc

SEQ ID NO: 662192 - RNA, 20 nt, Human
ugacaacagggagucaacag

SEQ ID NO: 662193 - RNA, 19 nt, Human
ugacaagaaaggccccgcc

SEQ ID NO: 662194 - RNA, 21 nt, Human
ugagcuuaaagguggggccaa

SEQ ID NO: 662195 - RNA, 18 nt, Human
ugaggagugggccugggg

SEQ ID NO: 662196 - RNA, 21 nt, Human
ugcaugaggagugggccuggg

SEQ ID NO: 662197 - RNA, 19 nt, Human
ugcccugggaacuucccac

SEQ ID NO: 662198 - RNA, 25 nt, Human
ugcuuuaugaacacuuacuguccuc

SEQ ID NO: 662199 - RNA, 19 nt, Human
uggacucgagggccugcag

SEQ ID NO: 662200 - RNA, 19 nt, Human
ugggcacccugcacuguuu

SEQ ID NO: 662201 - RNA, 18 nt, Human
ugggggaggguugcugac

SEQ ID NO: 662202 - RNA, 23 nt, Human
ugggggaggguugcugacaaaag

SEQ ID NO: 662203 - RNA, 21 nt, Human
uggggguggugaggaagcggg

SEQ ID NO: 662204 - RNA, 21 nt, Human
ugugaccacugcccugggaac

SEQ ID NO: 662205 - RNA, 23 nt, Human
ugugcaggggcuuucacagcagc

SEQ ID NO: 662206 - RNA, 19 nt, Human
uuagugguagguacauaau

SEQ ID NO: 662207 - RNA, 18 nt, Human
uucacaauuucucucuag

SEQ ID NO: 662208 - RNA, 21 nt, Human
uuucacgaugugaccacugcc

SEQ ID NO: 662209 - RNA, 23 nt, Human
uuuuuuuuuuuuacaaggaaggu

SEQ ID NO: 662210 - RNA, 23 nt, Human
uuuuuuuuuuuuuuuuacaagga

SEQ ID NO: 662211 - RNA, 26 nt, Human
uuuuuuuuuuuuuuuuuuuuacaagg

SEQ ID NO: 662212 - RNA, 21 nt, Human
aaaauuauaagugucuuuuug

SEQ ID NO: 662213 - RNA, 24 nt, Human
aaacuaaacuuaaauaugaagcaa

SEQ ID NO: 662214 - RNA, 22 nt, Human
aaagaaauauucacauaaccac

SEQ ID NO: 662215 - RNA, 24 nt, Human
aaauuagaagaagugaagaagccc

SEQ ID NO: 662216 - RNA, 22 nt, Human
aaccacaauuuccuaauuuucu

SEQ ID NO: 662217 - RNA, 21 nt, Human
aagaaaaggauauggaaaugu

SEQ ID NO: 662218 - RNA, 22 nt, Human
accacagcuuaauuuuggccug

SEQ ID NO: 662219 - RNA, 21 nt, Human
accacauagacaacacguaca

SEQ ID NO: 662220 - RNA, 19 nt, Human
agaagaagugaagaagccc

SEQ ID NO: 662221 - RNA, 21 nt, Human
agaagaagugaagaagcccau

SEQ ID NO: 662222 - RNA, 22 nt, Human
augccuuuccaugauuuuacug

SEQ ID NO: 662223 - RNA, 20 nt, Human
cacaauuuccuaauuuucuc

SEQ ID NO: 662224 - RNA, 28 nt, Human
cacuucuguuuuauacaaagauuagaaa

SEQ ID NO: 662225 - RNA, 25 nt, Human
cauccccaccacauagacaacacgu

SEQ ID NO: 662226 - RNA, 21 nt, Human
ccagauaaaagucaaaagucc

SEQ ID NO: 662227 - RNA, 18 nt, Human
cuuacaaguugccuucag

SEQ ID NO: 662228 - RNA, 25 nt, Human
gagggggagaugaguaaaaccagua

SEQ ID NO: 662229 - RNA, 20 nt, Human
uaaaauuauauaagaaaugu

SEQ ID NO: 662230 - RNA, 21 nt, Human
uaagugucuuuuuguucaaaa

SEQ ID NO: 662231 - RNA, 25 nt, Human
uacaaaacaccuuuuuucugauuca

SEQ ID NO: 662232 - RNA, 21 nt, Human
uagguauggaaaauuauaagu

SEQ ID NO: 662233 - RNA, 24 nt, Human
uagguauggaaaauuauaaguguc

SEQ ID NO: 662234 - RNA, 22 nt, Human
uauccagauaaaagucaaaagu

SEQ ID NO: 662235 - RNA, 21 nt, Human
ucaaaaguccuuuuaguuucu

SEQ ID NO: 662236 - RNA, 23 nt, Human
ucaaucaccugguuaucuguuac

SEQ ID NO: 662237 - RNA, 19 nt, Human
ucaguugaaaauagguaug

SEQ ID NO: 662238 - RNA, 21 nt, Human
uccaugauuuuacuguagaaa

SEQ ID NO: 662239 - RNA, 21 nt, Human
ucuguuaccuuuaaaauacaa

SEQ ID NO: 662240 - RNA, 19 nt, Human
ugacugaguuaaaucuuac

SEQ ID NO: 662241 - RNA, 21 nt, Human
uggaaaugucuuuaaggcccu

SEQ ID NO: 662242 - RNA, 26 nt, Human
ugucuuagauucaaucaccugguuag

SEQ ID NO: 662243 - RNA, 23 nt, Human
uuaauuuuggccugauuucuacc

SEQ ID NO: 662244 - RNA, 21 nt, Human
uucacauaaccacaauuuccu

SEQ ID NO: 662245 - RNA, 21 nt, Human
uucaucuugcucacuucuguu

SEQ ID NO: 662246 - RNA, 22 nt, Human
uucaucuugcucacuucuguuu

SEQ ID NO: 662247 - RNA, 21 nt, Human
uugcaaugcugaugccuuucc

SEQ ID NO: 662248 - RNA, 21 nt, Human
uuucuuauuaaugacccagcg

SEQ ID NO: 662249 - RNA, 21 nt, Human
aaaaacugccaauaccucccc

SEQ ID NO: 662250 - RNA, 21 nt, Human
aaaaguccagaagggugucac

SEQ ID NO: 662251 - RNA, 24 nt, Human
aaggugcuggccccaugcuucccu

SEQ ID NO: 662252 - RNA, 27 nt, Human
aauuacaaaaccucauugaacauaagg

SEQ ID NO: 662253 - RNA, 21 nt, Human
acaaagccacaagaggacaag

SEQ ID NO: 662254 - RNA, 19 nt, Human
acagcuuucuuugcagcug

SEQ ID NO: 662255 - RNA, 22 nt, Human
accgucacuagaaagcuuugac

SEQ ID NO: 662256 - RNA, 22 nt, Human
acuuaaguacagaggccaagca

SEQ ID NO: 662257 - RNA, 23 nt, Human
agaagggugucacagacaugaua

SEQ ID NO: 662258 - RNA, 26 nt, Human
agaccacagcuuucuuugcagcugcc

SEQ ID NO: 662259 - RNA, 21 nt, Human
agcagcacggauggcugcggc

SEQ ID NO: 662260 - RNA, 21 nt, Human
aggagccauuacuuucuccag

SEQ ID NO: 662261 - RNA, 20 nt, Human
aggguaggagcggggaagga

SEQ ID NO: 662262 - RNA, 21 nt, Human
aggucaggggguugggaaagu

SEQ ID NO: 662263 - RNA, 19 nt, Human
aggugcaucugagacaggg

SEQ ID NO: 662264 - RNA, 22 nt, Human
augaagugcuuguguggcacag

SEQ ID NO: 662265 - RNA, 25 nt, Human
auugauggguccaggggggugucuu

SEQ ID NO: 662266 - RNA, 26 nt, Human
auugauggguccaggggggugucuuu

SEQ ID NO: 662267 - RNA, 23 nt, Human
auuucauuuccuucucuccucca

SEQ ID NO: 662268 - RNA, 24 nt, Human
auuucauuuccuucucuccuccag

SEQ ID NO: 662269 - RNA, 22 nt, Human
caaacccugcccaauuuccaaa

SEQ ID NO: 662270 - RNA, 23 nt, Human
caacccagcuucuccucagcuaa

SEQ ID NO: 662271 - RNA, 19 nt, Human
cacaacacaguauaccaca

SEQ ID NO: 662272 - RNA, 18 nt, Human
cacagcccaggcucaccu

SEQ ID NO: 662273 - RNA, 19 nt, Human
cacaguguaaguacaaagu

SEQ ID NO: 662274 - RNA, 22 nt, Human
cacuuaaguacagaggccaagc

SEQ ID NO: 662275 - RNA, 21 nt, Human
cagcacggauggcugcggcag

SEQ ID NO: 662276 - RNA, 18 nt, Human
caggagggcagagcgaug

SEQ ID NO: 662277 - RNA, 18 nt, Human
caggcggccaccgcacuu

SEQ ID NO: 662278 - RNA, 21 nt, Human
caugaagugugccaugagaac

SEQ ID NO: 662279 - RNA, 19 nt, Human
ccaaagguagacuccaugg

SEQ ID NO: 662280 - RNA, 20 nt, Human
ccaggagggcagagcgaugg

SEQ ID NO: 662281 - RNA, 19 nt, Human
ccaugcuucccuuucccug

SEQ ID NO: 662282 - RNA, 20 nt, Human
cccacaguguaaguacaaag

SEQ ID NO: 662283 - RNA, 18 nt, Human
cccaggagggcagagcga

SEQ ID NO: 662284 - RNA, 21 nt, Human
ccccauuauaaaaugugucua

SEQ ID NO: 662285 - RNA, 22 nt, Human
cccccagcucccucuugacuuc

SEQ ID NO: 662286 - RNA, 22 nt, Human
cccccgaugaagugcuugugug

SEQ ID NO: 662287 - RNA, 18 nt, Human
ccccgggcgccccccagc

SEQ ID NO: 662288 - RNA, 20 nt, Human
ccccgggcgccccccagcuc

SEQ ID NO: 662289 - RNA, 20 nt, Human
ccgccauggcagcacagccu

SEQ ID NO: 662290 - RNA, 20 nt, Human
ccguguuguucuuguaguac

SEQ ID NO: 662291 - RNA, 21 nt, Human
ccuucgcgccccggcccgucc

SEQ ID NO: 662292 - RNA, 24 nt, Human
cgccccccagcucccucuugacuu

SEQ ID NO: 662293 - RNA, 23 nt, Human
cgccuucgcgccccggcccgucc

SEQ ID NO: 662294 - RNA, 23 nt, Human
cuaggcuccugcauaaaguuugg

SEQ ID NO: 662295 - RNA, 18 nt, Human
cuccccgggcgcccccca

SEQ ID NO: 662296 - RNA, 22 nt, Human
cucgcugcacccgcccgccacc

SEQ ID NO: 662297 - RNA, 21 nt, Human
cucucuuuguggcaggauauc

SEQ ID NO: 662298 - RNA, 22 nt, Human
cucuucuauuuaaauuugucuc

SEQ ID NO: 662299 - RNA, 20 nt, Human
cugcccaucauccguguugu

SEQ ID NO: 662300 - RNA, 23 nt, Human
cugcuaggcuccugcauaaaguu

SEQ ID NO: 662301 - RNA, 22 nt, Human
cuggccccaugcuucccuuucc

SEQ ID NO: 662302 - RNA, 24 nt, Human
cuucagaaaacccugccaacccag

SEQ ID NO: 662303 - RNA, 18 nt, Human
gaaagaaauggguauggg

SEQ ID NO: 662304 - RNA, 21 nt, Human
gaccgccuucgcgccccggcc

SEQ ID NO: 662305 - RNA, 18 nt, Human
gagacaguagaagggcug

SEQ ID NO: 662306 - RNA, 19 nt, Human
gagacaguagaagggcugc

SEQ ID NO: 662307 - RNA, 22 nt, Human
gaucacaaaaguccagaagggu

SEQ ID NO: 662308 - RNA, 19 nt, Human
gcacuuaaguacagaggcc

SEQ ID NO: 662309 - RNA, 18 nt, Human
gcgaccgccuucgcgccc

SEQ ID NO: 662310 - RNA, 18 nt, Human
ggucaggggguugggaaa

SEQ ID NO: 662311 - RNA, 24 nt, Human
gugaaagaaauggguaugggagca

SEQ ID NO: 662312 - RNA, 22 nt, Human
gugcaaagaagcaaguguccug

SEQ ID NO: 662313 - RNA, 24 nt, Human
gugucacagacaugauaaccuaag

SEQ ID NO: 662314 - RNA, 25 nt, Human
uaaaaaaauuacaaaaccucauuga

SEQ ID NO: 662315 - RNA, 21 nt, Human
uaaauuugucucauuuaaccu

SEQ ID NO: 662316 - RNA, 19 nt, Human
uaaguacaaaguguaaggu

SEQ ID NO: 662317 - RNA, 21 nt, Human
uacccaggguggacccgccaa

SEQ ID NO: 662318 - RNA, 19 nt, Human
uaccuggagcuggcucuug

SEQ ID NO: 662319 - RNA, 23 nt, Human
ucagaggaaccuggucuggggca

SEQ ID NO: 662320 - RNA, 24 nt, Human
ucagccuaaaaaaauuacaaaacc

SEQ ID NO: 662321 - RNA, 21 nt, Human
uccccgggcgccccccagcuc

SEQ ID NO: 662322 - RNA, 26 nt, Human
ucgaugguaaagugggugucucuuuu

SEQ ID NO: 662323 - RNA, 24 nt, Human
ucgcgccccggcccgucccaagca

SEQ ID NO: 662324 - RNA, 23 nt, Human
ucgguaggugccgauggaaaaag

SEQ ID NO: 662325 - RNA, 24 nt, Human
ucuuugcagcugccucuugagggg

SEQ ID NO: 662326 - RNA, 19 nt, Human
ugaaagaaauggguauggg

SEQ ID NO: 662327 - RNA, 19 nt, Human
ugaagugcuuguguggcac

SEQ ID NO: 662328 - RNA, 24 nt, Human
ugacuucagaaaacccugccaacc

SEQ ID NO: 662329 - RNA, 20 nt, Human
ugagaaaggagaugcucgcc

SEQ ID NO: 662330 - RNA, 22 nt, Human
ugagguauaucugugcugccau

SEQ ID NO: 662331 - RNA, 22 nt, Human
ugccaugaagugugccaugaga

SEQ ID NO: 662332 - RNA, 27 nt, Human
ugcuggccccaugcuucccuuucccug

SEQ ID NO: 662333 - RNA, 23 nt, Human
uggaaaaaggucaggggguuggg

SEQ ID NO: 662334 - RNA, 22 nt, Human
uggaugcgaccgccuucgcgcc

SEQ ID NO: 662335 - RNA, 22 nt, Human
uggcuggaguuuaugguucucu

SEQ ID NO: 662336 - RNA, 22 nt, Human
ugggaauaccucauugugagcu

SEQ ID NO: 662337 - RNA, 18 nt, Human
ugggauggguuggugaug

SEQ ID NO: 662338 - RNA, 19 nt, Human
ugggauggguuggugaugg

SEQ ID NO: 662339 - RNA, 21 nt, Human
ugggauggguuggugaugggg

SEQ ID NO: 662340 - RNA, 20 nt, Human
ugggauggguuggugauggu

SEQ ID NO: 662341 - RNA, 24 nt, Human
uggucacgccgaggccagaggugc

SEQ ID NO: 662342 - RNA, 22 nt, Human
uggucuggggcagguggugagg

SEQ ID NO: 662343 - RNA, 23 nt, Human
uggucuggggcagguggugaggg

SEQ ID NO: 662344 - RNA, 21 nt, Human
uguauguauauggguagaagu

SEQ ID NO: 662345 - RNA, 26 nt, Human
uguggcaggauaucugcuccuaggcc

SEQ ID NO: 662346 - RNA, 20 nt, Human
uucccuuucccugagaaagg

SEQ ID NO: 662347 - RNA, 19 nt, Human
uuccugcuaggcuccugca

SEQ ID NO: 662348 - RNA, 20 nt, Human
uucuccagggugaacucugg

SEQ ID NO: 662349 - RNA, 22 nt, Human
uucugcauucucccuuuauucu

SEQ ID NO: 662350 - RNA, 18 nt, Human
uugaccacaugcccacag

SEQ ID NO: 662351 - RNA, 20 nt, Human
uuuccugcuaggcuccugca

SEQ ID NO: 662352 - RNA, 22 nt, Human
aaacaugaauuccauagaucug

SEQ ID NO: 662353 - RNA, 19 nt, Human
aaagccgcagaguuacuga

SEQ ID NO: 662354 - RNA, 19 nt, Human
aaaggaaagaaucauucaa

SEQ ID NO: 662355 - RNA, 19 nt, Human
aagaacauuuuuugugaac

SEQ ID NO: 662356 - RNA, 23 nt, Human
aagccguucuuucucagagccaa

SEQ ID NO: 662357 - RNA, 25 nt, Human
aaucauucaaguucagccaaucuga

SEQ ID NO: 662358 - RNA, 23 nt, Human
aaugcaaacaugaauuccauaga

SEQ ID NO: 662359 - RNA, 19 nt, Human
acaagaaaggcuauuggug

SEQ ID NO: 662360 - RNA, 18 nt, Human
accaucuagaguuuggcc

SEQ ID NO: 662361 - RNA, 25 nt, Human
acccacagcugucucugcagugucc

SEQ ID NO: 662362 - RNA, 26 nt, Human
agacugaaaucuuccccaaccggagg

SEQ ID NO: 662363 - RNA, 25 nt, Human
agagaaaagugcagaguuagaacuc

SEQ ID NO: 662364 - RNA, 23 nt, Human
agagauuuaaugagguuuaauaa

SEQ ID NO: 662365 - RNA, 27 nt, Human
agccaauuuccucccaaauugauuggu

SEQ ID NO: 662366 - RNA, 18 nt, Human
aggaggcacugcagaagg

SEQ ID NO: 662367 - RNA, 21 nt, Human
agugguggaggagcagcucag

SEQ ID NO: 662368 - RNA, 25 nt, Human
auagcaagcaaaggacaaauauauc

SEQ ID NO: 662369 - RNA, 21 nt, Human
augauuugguuguauugucuu

SEQ ID NO: 662370 - RNA, 22 nt, Human
auucaaguucagccaaucugau

SEQ ID NO: 662371 - RNA, 19 nt, Human
caaaauaaaugccauagua

SEQ ID NO: 662372 - RNA, 21 nt, Human
caacuccauaaauacauuccu

SEQ ID NO: 662373 - RNA, 18 nt, Human
caaguucagccaaucuga

SEQ ID NO: 662374 - RNA, 18 nt, Human
cacacagccucacauuuc

SEQ ID NO: 662375 - RNA, 19 nt, Human
cagaaggagcuguccucuu

SEQ ID NO: 662376 - RNA, 21 nt, Human
cagacuaguagcaaguaugaa

SEQ ID NO: 662377 - RNA, 19 nt, Human
cagaguuagaacucgaugc

SEQ ID NO: 662378 - RNA, 24 nt, Human
cagcaagaaaacaacugagacuga

SEQ ID NO: 662379 - RNA, 24 nt, Human
caguccagcacauuaauucacauu

SEQ ID NO: 662380 - RNA, 20 nt, Human
cauagcaagcaaaggacaaa

SEQ ID NO: 662381 - RNA, 20 nt, Human
cauccagaugauuugguugu

SEQ ID NO: 662382 - RNA, 21 nt, Human
cauggccugauucaaaacagg

SEQ ID NO: 662383 - RNA, 23 nt, Human
cauuucaugaggagagcuaaagg

SEQ ID NO: 662384 - RNA, 22 nt, Human
ccaccaagccguucuuucucag

SEQ ID NO: 662385 - RNA, 21 nt, Human
ccagugguccucuguagucag

SEQ ID NO: 662386 - RNA, 19 nt, Human
cucugggccaguccagcac

SEQ ID NO: 662387 - RNA, 19 nt, Human
cucuuguguggcucugucc

SEQ ID NO: 662388 - RNA, 23 nt, Human
cugagacugaaaucuuccccagu

SEQ ID NO: 662389 - RNA, 23 nt, Human
cugguagucagcuaaugucccca

SEQ ID NO: 662390 - RNA, 21 nt, Human
cuuucugccaauaaauucaug

SEQ ID NO: 662391 - RNA, 18 nt, Human
gaggcccaccucccugcu

SEQ ID NO: 662392 - RNA, 21 nt, Human
gcagagagggcacacagccuc

SEQ ID NO: 662393 - RNA, 19 nt, Human
ggagcagcucagacaaguu

SEQ ID NO: 662394 - RNA, 20 nt, Human
ggaggcccaccucccugcuu

SEQ ID NO: 662395 - RNA, 23 nt, Human
ggauaggggaggggugcaugggc

SEQ ID NO: 662396 - RNA, 19 nt, Human
gggaggggugcaugggcug

SEQ ID NO: 662397 - RNA, 21 nt, Human
ggggaggggugcaugggcugg

SEQ ID NO: 662398 - RNA, 21 nt, Human
uaaagggcccaucuugcugug

SEQ ID NO: 662399 - RNA, 24 nt, Human
uaaggaaggcuuugaaaaaauuaa

SEQ ID NO: 662400 - RNA, 20 nt, Human
uagaauugaggugacaugua

SEQ ID NO: 662401 - RNA, 24 nt, Human
uagcucugaggcugucuccuuuca

SEQ ID NO: 662402 - RNA, 18 nt, Human
uauagaagauaaacuaca

SEQ ID NO: 662403 - RNA, 19 nt, Human
uaugaucaggcuguacugc

SEQ ID NO: 662404 - RNA, 23 nt, Human
uccagguguaagaacuguaaaaa

SEQ ID NO: 662405 - RNA, 22 nt, Human
ucucugcaguguccuuagggca

SEQ ID NO: 662406 - RNA, 22 nt, Human
ucugcaguguccuuagggcauc

SEQ ID NO: 662407 - RNA, 18 nt, Human
ucuguagucagaggaagg

SEQ ID NO: 662408 - RNA, 23 nt, Human
ugaaaacagucaguguugcaaga

SEQ ID NO: 662409 - RNA, 23 nt, Human
ugaaaguucagaaucuuucucca

SEQ ID NO: 662410 - RNA, 21 nt, Human
ugaacucaggucuuucugccc

SEQ ID NO: 662411 - RNA, 24 nt, Human
ugacauguacaaagucagagagaa

SEQ ID NO: 662412 - RNA, 22 nt, Human
ugaccagcaagaaaacaacuga

SEQ ID NO: 662413 - RNA, 23 nt, Human
ugacuuguacaagauuuacaucu

SEQ ID NO: 662414 - RNA, 19 nt, Human
ugaggagagcuaaagggcc

SEQ ID NO: 662415 - RNA, 22 nt, Human
ugaggugacauguacaaaguca

SEQ ID NO: 662416 - RNA, 22 nt, Human
ugcaaaauaaaugccauaguaa

SEQ ID NO: 662417 - RNA, 21 nt, Human
ugcacugggagaugcaugauu

SEQ ID NO: 662418 - RNA, 21 nt, Human
ugcaugauuuauauauuuuga

SEQ ID NO: 662419 - RNA, 19 nt, Human
uggaaaguugguacuacug

SEQ ID NO: 662420 - RNA, 22 nt, Human
uggaggcccaccucccugcuuu

SEQ ID NO: 662421 - RNA, 22 nt, Human
uggccugauucaaaacaggggg

SEQ ID NO: 662422 - RNA, 26 nt, Human
uggcucuguccuucuuuuggaagacc

SEQ ID NO: 662423 - RNA, 25 nt, Human
ugguggaggagcagcucagacaagu

SEQ ID NO: 662424 - RNA, 19 nt, Human
uuacagaugugccaagaac

SEQ ID NO: 662425 - RNA, 20 nt, Human
uuacuccaaguuugcacuuu

SEQ ID NO: 662426 - RNA, 24 nt, Human
uucaccaucuagaguuuggccauu

SEQ ID NO: 662427 - RNA, 24 nt, Human
uucaugaggagagcuaaagggccc

SEQ ID NO: 662428 - RNA, 21 nt, Human
uucauuguacccacagcuguc

SEQ ID NO: 662429 - RNA, 21 nt, Human
uucccuagaaccugaagccca

SEQ ID NO: 662430 - RNA, 20 nt, Human
uugguuguauugucuuggcc

SEQ ID NO: 662431 - RNA, 21 nt, Human
uugguuguauugucuuggccu

SEQ ID NO: 662432 - RNA, 23 nt, Human
uuuuacagagcuuucagguggaa

SEQ ID NO: 662433 - RNA, 24 nt, Human
uuuucauuguacccacagcugucu

SEQ ID NO: 662434 - RNA, 24 nt, Human
uuuuuuuuuuuuuuuuuuuuucag

SEQ ID NO: 662435 - RNA, 24 nt, Human
aagcaagaauugcacugcagcagc

SEQ ID NO: 662436 - RNA, 18 nt, Human
agaaagaaaaaaggcaga

SEQ ID NO: 662437 - RNA, 22 nt, Human
agauauugguacauccagauaa

SEQ ID NO: 662438 - RNA, 22 nt, Human
agugauccagagaguugagggc

SEQ ID NO: 662439 - RNA, 20 nt, Human
caccacgccucuauggcaau

SEQ ID NO: 662440 - RNA, 24 nt, Human
cagcagcaggaugcuuuuuagugg

SEQ ID NO: 662441 - RNA, 20 nt, Human
cagcaggaugcuuuuuagug

SEQ ID NO: 662442 - RNA, 24 nt, Human
gccagccugcaccacccaccacgc

SEQ ID NO: 662443 - RNA, 24 nt, Human
uaaauaaauccuuuguuauacaaa

SEQ ID NO: 662444 - RNA, 18 nt, Human
ugcaccacccaccacgcc

SEQ ID NO: 662445 - RNA, 18 nt, Human
ugcacugcagcagcagga

SEQ ID NO: 662446 - RNA, 21 nt, Human
ugcuuuuuaguggcugacacu

SEQ ID NO: 662447 - RNA, 20 nt, Human
uggcaauuuccacuggcuuu

SEQ ID NO: 662448 - RNA, 22 nt, Human
uggcugacacuauaaagcuaac

SEQ ID NO: 662449 - RNA, 18 nt, Human
uucaagagguggaacugc

SEQ ID NO: 662450 - RNA, 19 nt, Human
uucaagagguggaacugcu

SEQ ID NO: 662451 - RNA, 24 nt, Human
aaaaaaaaucccuuuauauugcaa

SEQ ID NO: 662452 - RNA, 22 nt, Human
accuggaggucugauccgggcu

SEQ ID NO: 662453 - RNA, 21 nt, Human
acgcacggggcgggagacgau

SEQ ID NO: 662454 - RNA, 21 nt, Human
agccagggcaauagagggccu

SEQ ID NO: 662455 - RNA, 19 nt, Human
auuuuguccauuccgcucc

SEQ ID NO: 662456 - RNA, 24 nt, Human
cacgccagggcggccgccaaugcc

SEQ ID NO: 662457 - RNA, 21 nt, Human
cagcugcugccaccccuaacg

SEQ ID NO: 662458 - RNA, 20 nt, Human
caggcagcgguagcugcccu

SEQ ID NO: 662459 - RNA, 20 nt, Human
caggccuugggcagcugcag

SEQ ID NO: 662460 - RNA, 21 nt, Human
caggcgugguaggagguaccg

SEQ ID NO: 662461 - RNA, 18 nt, Human
cagggcggccgccaaugc

SEQ ID NO: 662462 - RNA, 24 nt, Human
ccagggcggccgccaaugcccucu

SEQ ID NO: 662463 - RNA, 24 nt, Human
ccaggugcccugugucccuguccc

SEQ ID NO: 662464 - RNA, 20 nt, Human
ccaggugcccugugucccuu

SEQ ID NO: 662465 - RNA, 27 nt, Human
cccaagggccgcccuggacgccucccu

SEQ ID NO: 662466 - RNA, 19 nt, Human
cccuggagguuguggcacu

SEQ ID NO: 662467 - RNA, 23 nt, Human
ccgcagccagggcaauagagggc

SEQ ID NO: 662468 - RNA, 19 nt, Human
ccgccaaugcccucucccg

SEQ ID NO: 662469 - RNA, 22 nt, Human
ccuaacgcggggucugcccccu

SEQ ID NO: 662470 - RNA, 18 nt, Human
ccucgguggcugacggug

SEQ ID NO: 662471 - RNA, 22 nt, Human
cgaggcccagggccgcagccag

SEQ ID NO: 662472 - RNA, 22 nt, Human
cgccagggcggccgccaaugcc

SEQ ID NO: 662473 - RNA, 20 nt, Human
cguccaggugcccugugucc

SEQ ID NO: 662474 - RNA, 23 nt, Human
cuaacgcggggucugcccccucu

SEQ ID NO: 662475 - RNA, 18 nt, Human
cugcccccucucccgcgc

SEQ ID NO: 662476 - RNA, 21 nt, Human
cugcccccucucccgcgcguc

SEQ ID NO: 662477 - RNA, 19 nt, Human
cugcugccaccccuaacgc

SEQ ID NO: 662478 - RNA, 21 nt, Human
cuggggggcacaggcagcggu

SEQ ID NO: 662479 - RNA, 20 nt, Human
cugucgggggucaaggcugu

SEQ ID NO: 662480 - RNA, 20 nt, Human
cuuuauauugcaacaggguu

SEQ ID NO: 662481 - RNA, 24 nt, Human
gacccaggcgugguaggagguacc

SEQ ID NO: 662482 - RNA, 19 nt, Human
gaccuggaggucugauccg

SEQ ID NO: 662483 - RNA, 25 nt, Human
gcccuggacgccucccucugugagg

SEQ ID NO: 662484 - RNA, 24 nt, Human
gcgacagcugcugccaccccuaac

SEQ ID NO: 662485 - RNA, 18 nt, Human
gcuuccccgggcccugcc

SEQ ID NO: 662486 - RNA, 22 nt, Human
ggagagagacccaggcguggua

SEQ ID NO: 662487 - RNA, 23 nt, Human
gggcggaucagaccuggaggucu

SEQ ID NO: 662488 - RNA, 20 nt, Human
gggcuuccccgggcccugcc

SEQ ID NO: 662489 - RNA, 20 nt, Human
ggucaaggcugugcgcaggg

SEQ ID NO: 662490 - RNA, 20 nt, Human
uaacgcggggucugcccccu

SEQ ID NO: 662491 - RNA, 23 nt, Human
ucagaccuggaggucugauccgg

SEQ ID NO: 662492 - RNA, 23 nt, Human
ucgcugucgggggucaaggcugu

SEQ ID NO: 662493 - RNA, 26 nt, Human
ucgguggcugacgguggucacauuuu

SEQ ID NO: 662494 - RNA, 24 nt, Human
ugacccaaggucucgcugacgcac

SEQ ID NO: 662495 - RNA, 20 nt, Human
ugaggggcggaucagaccug

SEQ ID NO: 662496 - RNA, 21 nt, Human
ugaggucagguccucgcuguc

SEQ ID NO: 662497 - RNA, 20 nt, Human
ugaggugcaggccuugccgu

SEQ ID NO: 662498 - RNA, 20 nt, Human
ugcccuggagguuguggcac

SEQ ID NO: 662499 - RNA, 21 nt, Human
ugccugcgggacuggccaccc

SEQ ID NO: 662500 - RNA, 21 nt, Human
uggagguuguggcacugguag

SEQ ID NO: 662501 - RNA, 19 nt, Human
uggggggcacaggcagcgg

SEQ ID NO: 662502 - RNA, 20 nt, Human
uggggggcacaggcagcggu

SEQ ID NO: 662503 - RNA, 18 nt, Human
ugucgggggucaaggcug

SEQ ID NO: 662504 - RNA, 22 nt, Human
cccucccucgagcccacucacu

SEQ ID NO: 662505 - RNA, 20 nt, Human
cccucgagcccacucacuag

SEQ ID NO: 662506 - RNA, 23 nt, Human
uauuuucgaauuuaaaacucagg

SEQ ID NO: 662507 - RNA, 18 nt, Human
ucgaauuuaaaacucagg

SEQ ID NO: 662508 - RNA, 24 nt, Human
uuaaaacucagggucaauuccugg

SEQ ID NO: 662509 - RNA, 22 nt, Human
uuuucgugugucccagccccac

SEQ ID NO: 662510 - RNA, 20 nt, Human
uuuuuuuuuuuuuuuuucgu

SEQ ID NO: 662511 - RNA, 24 nt, Human
uuuuuuuuuuuuuuuuuuuuucgu

SEQ ID NO: 662512 - RNA, 27 nt, Human
uuuuuuuuuuuuuuuuuuuuuucgggg

SEQ ID NO: 662513 - RNA, 19 nt, Human
aaaagaaaccaaaaucacc

SEQ ID NO: 662514 - RNA, 18 nt, Human
aaagugcugggauuacaa

SEQ ID NO: 662515 - RNA, 24 nt, Human
aaagugcugggauuacaagcguga

SEQ ID NO: 662516 - RNA, 18 nt, Human
aaccaaaaucaccugucu

SEQ ID NO: 662517 - RNA, 21 nt, Human
aacuuccuuccuuagcacccc

SEQ ID NO: 662518 - RNA, 19 nt, Human
aagugcugggauuacaagc

SEQ ID NO: 662519 - RNA, 19 nt, Human
aagugcugggauuacaagc

SEQ ID NO: 662520 - RNA, 26 nt, Human
aagugcugggauuacaagcgugagcc

SEQ ID NO: 662521 - RNA, 24 nt, Human
acaugacacucccucuaagccccc

SEQ ID NO: 662522 - RNA, 22 nt, Human
accaaaagaaaccaaaaucacc

SEQ ID NO: 662523 - RNA, 21 nt, Human
acccaauaaagccagcaguuc

SEQ ID NO: 662524 - RNA, 31 nt, Human
acccaauaaagccagcaguucagccuugccc

SEQ ID NO: 662525 - RNA, 28 nt, Human
acccaggcuggauggagugcaguggcgu

SEQ ID NO: 662526 - RNA, 18 nt, Human
accuugcagcucgguggg

SEQ ID NO: 662527 - RNA, 18 nt, Human
acgggguuucaccauggu

SEQ ID NO: 662528 - RNA, 20 nt, Human
acgggguuucaccauggucu

SEQ ID NO: 662529 - RNA, 22 nt, Human
acgggguuucaccauggucucg

SEQ ID NO: 662530 - RNA, 18 nt, Human
acucccucuaagccccca

SEQ ID NO: 662531 - RNA, 21 nt, Human
acugcaagcuccgccuuccgg

SEQ ID NO: 662532 - RNA, 21 nt, Human
agcugggauuacaggggcccg

SEQ ID NO: 662533 - RNA, 25 nt, Human
agggguuccaggauuccucacugcu

SEQ ID NO: 662534 - RNA, 22 nt, Human
aguagagacgggguuucaccau

SEQ ID NO: 662535 - RNA, 18 nt, Human
aguagcugggauuacagg

SEQ ID NO: 662536 - RNA, 25 nt, Human
aguagcugggauuacaggggcccgc

SEQ ID NO: 662537 - RNA, 19 nt, Human
agugcaguggcgugaucuc

SEQ ID NO: 662538 - RNA, 20 nt, Human
agugcaguggcgugaucucg

SEQ ID NO: 662539 - RNA, 23 nt, Human
agugcaguggcgugaucucggcu

SEQ ID NO: 662540 - RNA, 24 nt, Human
agugcaguggcgugaucucggcuc

SEQ ID NO: 662541 - RNA, 24 nt, Human
agugcugggauuacaagcgugagc

SEQ ID NO: 662542 - RNA, 20 nt, Human
aucauuuucacaccaaaaga

SEQ ID NO: 662543 - RNA, 21 nt, Human
auucuccugccucagccuccc

SEQ ID NO: 662544 - RNA, 24 nt, Human
caaagugcugggauuacaagcgug

SEQ ID NO: 662545 - RNA, 21 nt, Human
caacucccuaagucccggccu

SEQ ID NO: 662546 - RNA, 22 nt, Human
caagccauucuccugccucagc

SEQ ID NO: 662547 - RNA, 24 nt, Human
cacaccaaaagaaaccaaaaucac

SEQ ID NO: 662548 - RNA, 23 nt, Human
cacagcucugagcgcagccaccu

SEQ ID NO: 662549 - RNA, 19 nt, Human
caccaucauuuucacacca

SEQ ID NO: 662550 - RNA, 22 nt, Human
caccauggucucgaucuccuga

SEQ ID NO: 662551 - RNA, 20 nt, Human
caccuugcagcucggugggu

SEQ ID NO: 662552 - RNA, 23 nt, Human
cagccaacccuccuuagugacgc

SEQ ID NO: 662553 - RNA, 20 nt, Human
cagcuccccagagaagauga

SEQ ID NO: 662554 - RNA, 21 nt, Human
ccaaaagaaaccaaaaucacc

SEQ ID NO: 662555 - RNA, 22 nt, Human
ccaaagugcugggauuacaagc

SEQ ID NO: 662556 - RNA, 24 nt, Human
ccaaagugcugggauuacaagcgu

SEQ ID NO: 662557 - RNA, 24 nt, Human
ccagccaacccuccuuagugacgc

SEQ ID NO: 662558 - RNA, 21 nt, Human
ccccagagagcagggcaaacc

SEQ ID NO: 662559 - RNA, 24 nt, Human
cccccugcagccuuuagugggagc

SEQ ID NO: 662560 - RNA, 23 nt, Human
cccgaguagcugggauuacaggg

SEQ ID NO: 662561 - RNA, 24 nt, Human
ccgccucagccucccaaagugcug

SEQ ID NO: 662562 - RNA, 19 nt, Human
ccggguucaagccauucuc

SEQ ID NO: 662563 - RNA, 22 nt, Human
ccggguucaagccauucuccug

SEQ ID NO: 662564 - RNA, 19 nt, Human
ccuaccuucuggcccaacu

SEQ ID NO: 662565 - RNA, 20 nt, Human
ccugcagccuuuagugggag

SEQ ID NO: 662566 - RNA, 23 nt, Human
ccugccucagccucccgaguagc

SEQ ID NO: 662567 - RNA, 25 nt, Human
ccuggccccuacccuaccuucuggc

SEQ ID NO: 662568 - RNA, 28 nt, Human
ccugucacccaggcuggauggagugcag

SEQ ID NO: 662569 - RNA, 23 nt, Human
ccuuggaugauagccuuggugac

SEQ ID NO: 662570 - RNA, 23 nt, Human
ccuuuagugggagcuccagggac

SEQ ID NO: 662571 - RNA, 22 nt, Human
cgcccugucacccaggcuggau

SEQ ID NO: 662572 - RNA, 24 nt, Human
cgccucagccucccaaagugcugg

SEQ ID NO: 662573 - RNA, 19 nt, Human
cgccuuccggguucaagcc

SEQ ID NO: 662574 - RNA, 20 nt, Human
cuaagucccggccuggauuu

SEQ ID NO: 662575 - RNA, 23 nt, Human
cucacagcucugagcgcagccac

SEQ ID NO: 662576 - RNA, 24 nt, Human
cucagccucccgaguagcugggau

SEQ ID NO: 662577 - RNA, 24 nt, Human
cuccugaccucgugaucugcccgc

SEQ ID NO: 662578 - RNA, 23 nt, Human
cugccucagccucccgaguagcu

SEQ ID NO: 662579 - RNA, 20 nt, Human
cuggauggagugcaguggcg

SEQ ID NO: 662580 - RNA, 20 nt, Human
cugggccucucaucccugcc

SEQ ID NO: 662581 - RNA, 22 nt, Human
cuuccggguucaagccauucuc

SEQ ID NO: 662582 - RNA, 26 nt, Human
cuuucaugagcguggguuggggugag

SEQ ID NO: 662583 - RNA, 24 nt, Human
gaccucgugaucugcccgccucag

SEQ ID NO: 662584 - RNA, 18 nt, Human
gaccuggccccuacccua

SEQ ID NO: 662585 - RNA, 21 nt, Human
gacgggguuucaccauggucu

SEQ ID NO: 662586 - RNA, 19 nt, Human
gagacgggguuucaccaug

SEQ ID NO: 662587 - RNA, 25 nt, Human
gagccuuuuaguucugcaacaguuu

SEQ ID NO: 662588 - RNA, 24 nt, Human
gagcuccagggacaccaaaugguu

SEQ ID NO: 662589 - RNA, 26 nt, Human
gaggagacugaggcaccucccuacca

SEQ ID NO: 662590 - RNA, 18 nt, Human
gauuacaagcgugagcca

SEQ ID NO: 662591 - RNA, 24 nt, Human
gcccggcuaauuuuuuuguauuuu

SEQ ID NO: 662592 - RNA, 25 nt, Human
gccuuccggguucaagccauucucc

SEQ ID NO: 662593 - RNA, 18 nt, Human
gguuggggugaggagacu

SEQ ID NO: 662594 - RNA, 20 nt, Human
guagcugggauuacaggggc

SEQ ID NO: 662595 - RNA, 21 nt, Human
gugaucucggcucacugcaag

SEQ ID NO: 662596 - RNA, 24 nt, Human
gugaucugcccgccucagccuccc

SEQ ID NO: 662597 - RNA, 21 nt, Human
uaagucccggccuggauuuca

SEQ ID NO: 662598 - RNA, 19 nt, Human
uaaucuguccccagagagc

SEQ ID NO: 662599 - RNA, 26 nt, Human
uaauuuuuuuguauuuuuaguagaga

SEQ ID NO: 662600 - RNA, 24 nt, Human
uacaagcgugagccaccgcgccca

SEQ ID NO: 662601 - RNA, 23 nt, Human
uacaggggcccgccaccacgccc

SEQ ID NO: 662602 - RNA, 24 nt, Human
uaguagagacgggguuucaccaug

SEQ ID NO: 662603 - RNA, 25 nt, Human
ucaagccauucuccugccucagccu

SEQ ID NO: 662604 - RNA, 23 nt, Human
ucacaccaaaagaaaccaaaauc

SEQ ID NO: 662605 - RNA, 18 nt, Human
ucacugcaagcuccgccu

SEQ ID NO: 662606 - RNA, 19 nt, Human
ucacugcaagcuccgccuu

SEQ ID NO: 662607 - RNA, 24 nt, Human
ucacugcaagcuccgccuuccggg

SEQ ID NO: 662608 - RNA, 22 nt, Human
ucacugcuggcugcuucugacc

SEQ ID NO: 662609 - RNA, 20 nt, Human
ucagccucccgaguagcugg

SEQ ID NO: 662610 - RNA, 20 nt, Human
uccaggauuccucacugcug

SEQ ID NO: 662611 - RNA, 18 nt, Human
ucccaaagugcugggauu

SEQ ID NO: 662612 - RNA, 24 nt, Human
ucccaaagugcugggauuacaagc

SEQ ID NO: 662613 - RNA, 23 nt, Human
ucccgaguagcugggauuacagg

SEQ ID NO: 662614 - RNA, 25 nt, Human
ucccgaguagcugggauuacagggg

SEQ ID NO: 662615 - RNA, 22 nt, Human
uccgccuuccggguucaagccg

SEQ ID NO: 662616 - RNA, 19 nt, Human
uccugggggccuggcuggg

SEQ ID NO: 662617 - RNA, 18 nt, Human
uccuuagcacccccugca

SEQ ID NO: 662618 - RNA, 25 nt, Human
ucucacagcucugagcgcagccacc

SEQ ID NO: 662619 - RNA, 24 nt, Human
ucuccugccucagccucccgagua

SEQ ID NO: 662620 - RNA, 23 nt, Human
ucucgcccugucacccaggcugg

SEQ ID NO: 662621 - RNA, 24 nt, Human
ucucgcccugucacccaggcugga

SEQ ID NO: 662622 - RNA, 25 nt, Human
ucucgcccugucacccaggcuggau

SEQ ID NO: 662623 - RNA, 26 nt, Human
ucucgcccugucacccaggcuggaug

SEQ ID NO: 662624 - RNA, 21 nt, Human
ucugcccgccucagccuccca

SEQ ID NO: 662625 - RNA, 19 nt, Human
ucuggccacagaugcaggg

SEQ ID NO: 662626 - RNA, 22 nt, Human
ucuguccccagagagcagggca

SEQ ID NO: 662627 - RNA, 21 nt, Human
ugaccuggccccuacccuacc

SEQ ID NO: 662628 - RNA, 18 nt, Human
ugagacagagucucgccc

SEQ ID NO: 662629 - RNA, 22 nt, Human
ugagacagagucucgcccuguc

SEQ ID NO: 662630 - RNA, 23 nt, Human
ugaguugaaauguaagccacaga

SEQ ID NO: 662631 - RNA, 24 nt, Human
ugccucagccucccgaguagcugg

SEQ ID NO: 662632 - RNA, 24 nt, Human
ugcugggauuacaagcgugagcca

SEQ ID NO: 662633 - RNA, 19 nt, Human
uggagugcaguggcgugau

SEQ ID NO: 662634 - RNA, 23 nt, Human
uggagugcaguggcgugaucucg

SEQ ID NO: 662635 - RNA, 24 nt, Human
uggagugcaguggcgugaucucgg

SEQ ID NO: 662636 - RNA, 23 nt, Human
uggauggagugcaguggcgugau

SEQ ID NO: 662637 - RNA, 20 nt, Human
uggcgugaucucggcucacu

SEQ ID NO: 662638 - RNA, 21 nt, Human
uggcugggccucucaucccug

SEQ ID NO: 662639 - RNA, 23 nt, Human
uggcugggccucucaucccugcc

SEQ ID NO: 662640 - RNA, 19 nt, Human
ugggauuacaagcgugagc

SEQ ID NO: 662641 - RNA, 21 nt, Human
ugggauuacaagcgugagcca

SEQ ID NO: 662642 - RNA, 22 nt, Human
ugggauuacaagcgugagccac

SEQ ID NO: 662643 - RNA, 23 nt, Human
ugggauuacaagcgugagccacc

SEQ ID NO: 662644 - RNA, 24 nt, Human
ugggauuacaagcgugagccaccg

SEQ ID NO: 662645 - RNA, 22 nt, Human
ugggauuacaggggcccgccac

SEQ ID NO: 662646 - RNA, 24 nt, Human
ugggauuacaggggcccgccacca

SEQ ID NO: 662647 - RNA, 21 nt, Human
uguauuuuuaguagagacggg

SEQ ID NO: 662648 - RNA, 19 nt, Human
uguccagcucuggccacag

SEQ ID NO: 662649 - RNA, 18 nt, Human
uuaguagagacgggguuu

SEQ ID NO: 662650 - RNA, 22 nt, Human
uuaguagagacgggguuucacc

SEQ ID NO: 662651 - RNA, 24 nt, Human
uuaguagagacgggguuucaccau

SEQ ID NO: 662652 - RNA, 18 nt, Human
uucaagccauucuccugc

SEQ ID NO: 662653 - RNA, 21 nt, Human
uucaagccauucuccugccuc

SEQ ID NO: 662654 - RNA, 24 nt, Human
uuccggguucaagccauucuccug

SEQ ID NO: 662655 - RNA, 25 nt, Human
uuccucacugcuggcugcuucugac

SEQ ID NO: 662656 - RNA, 21 nt, Human
uuccucugcauauucuguguc

SEQ ID NO: 662657 - RNA, 23 nt, Human
uuguauuuuuaguagagacgggg

SEQ ID NO: 662658 - RNA, 24 nt, Human
uuuuuaguagagacgggguuucac

SEQ ID NO: 662659 - RNA, 21 nt, Human
uuuuuguauuuuuaguagaga

SEQ ID NO: 662660 - RNA, 21 nt, Human
uuuuuuguauuuuuaguagag

SEQ ID NO: 662661 - RNA, 24 nt, Human
uuuuuuguauuuuuaguagagacg

SEQ ID NO: 662662 - RNA, 20 nt, Human
uuuuuuuuuuugagacagag

SEQ ID NO: 662663 - RNA, 25 nt, Human
uuuuuuuuuuuugagacagagucuc

SEQ ID NO: 662664 - RNA, 18 nt, Human
uuuuuuuuuuuuuuuuug

SEQ ID NO: 662665 - RNA, 21 nt, Human
aaaaggaagacagaaccaaga

SEQ ID NO: 662666 - RNA, 22 nt, Human
aaaauacauaaacacuugcuga

SEQ ID NO: 662667 - RNA, 20 nt, Human
aaccaaacagcaauucagga

SEQ ID NO: 662668 - RNA, 20 nt, Human
aaccuccaucuccugggccc

SEQ ID NO: 662669 - RNA, 18 nt, Human
aagcaauucuucccccuc

SEQ ID NO: 662670 - RNA, 19 nt, Human
aagcauaacuggguccaga

SEQ ID NO: 662671 - RNA, 19 nt, Human
aaguagaaaaggaagacag

SEQ ID NO: 662672 - RNA, 24 nt, Human
acucuguugcucaggcuggaugca

SEQ ID NO: 662673 - RNA, 18 nt, Human
agaaaaauacaaucagcu

SEQ ID NO: 662674 - RNA, 22 nt, Human
agaccacaaauugggcucuaaa

SEQ ID NO: 662675 - RNA, 21 nt, Human
agcauacaaaauacauaaaca

SEQ ID NO: 662676 - RNA, 22 nt, Human
aggaaaagcauaacugggucca

SEQ ID NO: 662677 - RNA, 23 nt, Human
aggaaaauaaaaguagaaaagga

SEQ ID NO: 662678 - RNA, 23 nt, Human
caaacagcaauucaggaaaagca

SEQ ID NO: 662679 - RNA, 23 nt, Human
caaccuccaucuccugggcccaa

SEQ ID NO: 662680 - RNA, 24 nt, Human
caaccuccaucuccugggcccaag

SEQ ID NO: 662681 - RNA, 24 nt, Human
caagaucucacucuguugcucagg

SEQ ID NO: 662682 - RNA, 21 nt, Human
cacucuguugcucaggcugga

SEQ ID NO: 662683 - RNA, 27 nt, Human
caggaaaagcauaacuggguccagaga

SEQ ID NO: 662684 - RNA, 23 nt, Human
ccaagcaauucuucccccucagc

SEQ ID NO: 662685 - RNA, 23 nt, Human
cccccucagccucccgaguagcu

SEQ ID NO: 662686 - RNA, 24 nt, Human
ccccucagccucccgaguagcugg

SEQ ID NO: 662687 - RNA, 22 nt, Human
ccgcaaccuccaucuccugggc

SEQ ID NO: 662688 - RNA, 23 nt, Human
ccgcaaccuccaucuccugggcc

SEQ ID NO: 662689 - RNA, 24 nt, Human
cucagccucccgaguagcugggac

SEQ ID NO: 662690 - RNA, 21 nt, Human
cuccugggcccaagcaauucu

SEQ ID NO: 662691 - RNA, 24 nt, Human
cuccugggcccaagcaauucuucc

SEQ ID NO: 662692 - RNA, 23 nt, Human
cuuuacaguauccacagcaauua

SEQ ID NO: 662693 - RNA, 23 nt, Human
gaguagcugggaccacagugugc

SEQ ID NO: 662694 - RNA, 22 nt, Human
gauccccacucaccgcaaccuc

SEQ ID NO: 662695 - RNA, 26 nt, Human
guagaaaaggaagacagaaccaagaa

SEQ ID NO: 662696 - RNA, 21 nt, Human
uaacuggguccagagaaaauu

SEQ ID NO: 662697 - RNA, 24 nt, Human
uaagguaaaaaccaaacagcaauu

SEQ ID NO: 662698 - RNA, 24 nt, Human
uacaaaaaggcuuacaagaugcag

SEQ ID NO: 662699 - RNA, 21 nt, Human
uacaaucagcugaauauuuag

SEQ ID NO: 662700 - RNA, 24 nt, Human
ucaccgcaaccuccaucuccuggg

SEQ ID NO: 662701 - RNA, 26 nt, Human
ucaccgcaaccuccaucuccugggcc

SEQ ID NO: 662702 - RNA, 23 nt, Human
ucagccucccgaguagcugggac

SEQ ID NO: 662703 - RNA, 22 nt, Human
ucaggcuggaugcagcggcacg

SEQ ID NO: 662704 - RNA, 21 nt, Human
uccagagaaaauuucucccac

SEQ ID NO: 662705 - RNA, 24 nt, Human
uccaucuccugggcccaagcaauu

SEQ ID NO: 662706 - RNA, 21 nt, Human
ucccagccucugccuccucuc

SEQ ID NO: 662707 - RNA, 22 nt, Human
ucccgaguagcugggaccacag

SEQ ID NO: 662708 - RNA, 23 nt, Human
ucccgaguagcugggaccacagu

SEQ ID NO: 662709 - RNA, 21 nt, Human
uccugggcccaagcaauucuu

SEQ ID NO: 662710 - RNA, 19 nt, Human
ucucacucuguugcucagg

SEQ ID NO: 662711 - RNA, 23 nt, Human
ucucacucuguugcucaggcugg

SEQ ID NO: 662712 - RNA, 24 nt, Human
ucucacucuguugcucaggcugga

SEQ ID NO: 662713 - RNA, 23 nt, Human
ucuguugcucaggcuggaugcag

SEQ ID NO: 662714 - RNA, 22 nt, Human
ugagacaagaucucacucuguu

SEQ ID NO: 662715 - RNA, 24 nt, Human
uuaagguaaaaaccaaacagcaau

SEQ ID NO: 662716 - RNA, 21 nt, Human
aaaguacuggauuacaggcau

SEQ ID NO: 662717 - RNA, 23 nt, Human
aaaguacuggauuacaggcauga

SEQ ID NO: 662718 - RNA, 24 nt, Human
aaagugcugggauuacaggcguga

SEQ ID NO: 662719 - RNA, 19 nt, Human
aagugcugggauuacaggc

SEQ ID NO: 662720 - RNA, 19 nt, Human
aagugcugggauuacaggc

SEQ ID NO: 662721 - RNA, 26 nt, Human
aagugcugggauuacaggcgugagcc

SEQ ID NO: 662722 - RNA, 25 nt, Human
accauguugcccaggcuagucucaa

SEQ ID NO: 662723 - RNA, 18 nt, Human
acucugccacccaggcug

SEQ ID NO: 662724 - RNA, 24 nt, Human
acucugccacccaggcugcaguga

SEQ ID NO: 662725 - RNA, 18 nt, Human
acuggcuaauuuuuguau

SEQ ID NO: 662726 - RNA, 24 nt, Human
agagauuugccugcuuuggccucc

SEQ ID NO: 662727 - RNA, 18 nt, Human
agaguuccuuuuucuuuu

SEQ ID NO: 662728 - RNA, 18 nt, Human
aggaucuuuuucuugaga

SEQ ID NO: 662729 - RNA, 23 nt, Human
aggcugcagugaaguggcgccau

SEQ ID NO: 662730 - RNA, 18 nt, Human
aguagagaugggguuuca

SEQ ID NO: 662731 - RNA, 22 nt, Human
aguagagaugggguuucaccau

SEQ ID NO: 662732 - RNA, 23 nt, Human
aguagagaugggguuucaccaug

SEQ ID NO: 662733 - RNA, 23 nt, Human
aguagcugggaccauagguaugu

SEQ ID NO: 662734 - RNA, 21 nt, Human
agugcaguggcucaaucacag

SEQ ID NO: 662735 - RNA, 18 nt, Human
agugcugggauuacaggc

SEQ ID NO: 662736 - RNA, 25 nt, Human
aguuccuuuuucuuuuuucagggaa

SEQ ID NO: 662737 - RNA, 24 nt, Human
augauccaccugccucggccuccc

SEQ ID NO: 662738 - RNA, 19 nt, Human
augggguuucaccauguua

SEQ ID NO: 662739 - RNA, 24 nt, Human
augggguuucaccauguuagccag

SEQ ID NO: 662740 - RNA, 19 nt, Human
augggguuucaccauguug

SEQ ID NO: 662741 - RNA, 24 nt, Human
caaagugcugggauuacaggcgug

SEQ ID NO: 662742 - RNA, 24 nt, Human
caccaugacuggcuaauuuuugua

SEQ ID NO: 662743 - RNA, 21 nt, Human
caccauguuagccagcauggu

SEQ ID NO: 662744 - RNA, 24 nt, Human
caccauguuagccagcauggucuc

SEQ ID NO: 662745 - RNA, 24 nt, Human
caccauguugcccaggcuagucuc

SEQ ID NO: 662746 - RNA, 27 nt, Human
caccauguugcccaggcuagucucaaa

SEQ ID NO: 662747 - RNA, 23 nt, Human
caccugccucggccucccaaagu

SEQ ID NO: 662748 - RNA, 18 nt, Human
cacucugccacccaggcu

SEQ ID NO: 662749 - RNA, 22 nt, Human
cagccuugaccuccuugggcuc

SEQ ID NO: 662750 - RNA, 24 nt, Human
cagcucacuacagccuugaccucc

SEQ ID NO: 662751 - RNA, 24 nt, Human
cauguugcccaggcuagucucaaa

SEQ ID NO: 662752 - RNA, 22 nt, Human
ccaaagugcugggauuacaggc

SEQ ID NO: 662753 - RNA, 22 nt, Human
ccaaagugcugggauuacaggc

SEQ ID NO: 662754 - RNA, 24 nt, Human
ccaaagugcugggauuacaggcgu

SEQ ID NO: 662755 - RNA, 24 nt, Human
ccuaaaguacuggauuacaggcau

SEQ ID NO: 662756 - RNA, 20 nt, Human
ccucuuuuuuucauuugaga

SEQ ID NO: 662757 - RNA, 19 nt, Human
ccugaccucaugauccacc

SEQ ID NO: 662758 - RNA, 22 nt, Human
ccugggcucaagagauuugccu

SEQ ID NO: 662759 - RNA, 23 nt, Human
ccuugaccuccuugggcucaggu

SEQ ID NO: 662760 - RNA, 24 nt, Human
ccuugggcucaggugauccuccca

SEQ ID NO: 662761 - RNA, 23 nt, Human
cuaaaguacuggauuacaggcau

SEQ ID NO: 662762 - RNA, 24 nt, Human
cucagccuguugaguagcugggac

SEQ ID NO: 662763 - RNA, 24 nt, Human
cuccugaccucaugauccaccugc

SEQ ID NO: 662764 - RNA, 19 nt, Human
cuccugggcucaagagauu

SEQ ID NO: 662765 - RNA, 23 nt, Human
cugccucggccucccaaagugcu

SEQ ID NO: 662766 - RNA, 19 nt, Human
cugcgccuggccccccacu

SEQ ID NO: 662767 - RNA, 22 nt, Human
cuuuuuuuuuuuugagacgggg

SEQ ID NO: 662768 - RNA, 24 nt, Human
gaagaggaucuuuuucuugagaga

SEQ ID NO: 662769 - RNA, 22 nt, Human
gaccucaugauccaccugccuc

SEQ ID NO: 662770 - RNA, 22 nt, Human
gaccucaugauccaccugccuc

SEQ ID NO: 662771 - RNA, 24 nt, Human
gaccucaugauccaccugccucgg

SEQ ID NO: 662772 - RNA, 18 nt, Human
gagaugggguuucaccau

SEQ ID NO: 662773 - RNA, 20 nt, Human
gagaugggguuucaccaugu

SEQ ID NO: 662774 - RNA, 24 nt, Human
gagaugggguuucaccauguuagc

SEQ ID NO: 662775 - RNA, 23 nt, Human
gagaugggguuucaccauguugc

SEQ ID NO: 662776 - RNA, 19 nt, Human
gaguagcugggaccauagg

SEQ ID NO: 662777 - RNA, 24 nt, Human
gagugcaguggcucaaucacagcu

SEQ ID NO: 662778 - RNA, 22 nt, Human
gaugggguuucaccauguugcc

SEQ ID NO: 662779 - RNA, 18 nt, Human
gauuacaggcaugagcca

SEQ ID NO: 662780 - RNA, 18 nt, Human
gauuacaggcaugagcca

SEQ ID NO: 662781 - RNA, 22 nt, Human
gauuacaggcaugagccaucac

SEQ ID NO: 662782 - RNA, 18 nt, Human
gauuacaggcgugagcca

SEQ ID NO: 662783 - RNA, 19 nt, Human
gauuacaggcgugagccac

SEQ ID NO: 662784 - RNA, 22 nt, Human
gauuacaggcgugagccacugc

SEQ ID NO: 662785 - RNA, 19 nt, Human
gcuagucucaaacuccugg

SEQ ID NO: 662786 - RNA, 21 nt, Human
ggauuacaggcaugagccauc

SEQ ID NO: 662787 - RNA, 22 nt, Human
ggauuacaggcaugagccauca

SEQ ID NO: 662788 - RNA, 23 nt, Human
ggauuacaggcaugagccaucac

SEQ ID NO: 662789 - RNA, 23 nt, Human
gggcucaggugauccucccaacc

SEQ ID NO: 662790 - RNA, 18 nt, Human
gggguuucaccauguuag

SEQ ID NO: 662791 - RNA, 22 nt, Human
gggguuucaccauguuagccag

SEQ ID NO: 662792 - RNA, 22 nt, Human
gggguuucaccauguugcccag

SEQ ID NO: 662793 - RNA, 23 nt, Human
gggguuucaccauguugcccagg

SEQ ID NO: 662794 - RNA, 19 nt, Human
guagagaugggguuucacc

SEQ ID NO: 662795 - RNA, 21 nt, Human
guagagaugggguuucaccau

SEQ ID NO: 662796 - RNA, 21 nt, Human
guagagaugggguuucaccau

SEQ ID NO: 662797 - RNA, 22 nt, Human
guagagaugggguuucaccaug

SEQ ID NO: 662798 - RNA, 23 nt, Human
guagagaugggguuucaccaugu

SEQ ID NO: 662799 - RNA, 19 nt, Human
guauuuuuuguagagaugg

SEQ ID NO: 662800 - RNA, 24 nt, Human
uaaaguacuggauuacaggcauga

SEQ ID NO: 662801 - RNA, 24 nt, Human
uaauuuuuguauuuuuuguagaga

SEQ ID NO: 662802 - RNA, 22 nt, Human
uacaggcaugagccaucacacc

SEQ ID NO: 662803 - RNA, 22 nt, Human
uacaggcgugagccacugcgcc

SEQ ID NO: 662804 - RNA, 22 nt, Human
uacaggcgugagccacugcgcc

SEQ ID NO: 662805 - RNA, 23 nt, Human
uacaggcgugagccacugcgccu

SEQ ID NO: 662806 - RNA, 22 nt, Human
uagagaugggguuucaccaugu

SEQ ID NO: 662807 - RNA, 22 nt, Human
uagagaugggguuucaccaugu

SEQ ID NO: 662808 - RNA, 21 nt, Human
uagguucccaugaaucagaag

SEQ ID NO: 662809 - RNA, 25 nt, Human
ucacuacagccuugaccuccuuggg

SEQ ID NO: 662810 - RNA, 23 nt, Human
ucagccuguugaguagcugggac

SEQ ID NO: 662811 - RNA, 24 nt, Human
ucccaaagugcugggauuacaggc

SEQ ID NO: 662812 - RNA, 18 nt, Human
ucccaaccucagccuguu

SEQ ID NO: 662813 - RNA, 23 nt, Human
uccuaaaguacuggauuacaggc

SEQ ID NO: 662814 - RNA, 19 nt, Human
uccugggcucaagagauuu

SEQ ID NO: 662815 - RNA, 24 nt, Human
uccuugggcucaggugauccuccc

SEQ ID NO: 662816 - RNA, 18 nt, Human
ucggccucccaaagugcu

SEQ ID NO: 662817 - RNA, 23 nt, Human
ucucaaacuccugggcucaagag

SEQ ID NO: 662818 - RNA, 26 nt, Human
ucucacucugccacccaggcugcagu

SEQ ID NO: 662819 - RNA, 19 nt, Human
ucugucacccagauuggag

SEQ ID NO: 662820 - RNA, 24 nt, Human
ucugucacccagauuggagugcag

SEQ ID NO: 662821 - RNA, 24 nt, Human
ucuuauucugucacccagauugga

SEQ ID NO: 662822 - RNA, 22 nt, Human
ugagacggggucuuauucuguc

SEQ ID NO: 662823 - RNA, 20 nt, Human
ugaguagcugggaccauagg

SEQ ID NO: 662824 - RNA, 21 nt, Human
ugccacccaggcugcagugaa

SEQ ID NO: 662825 - RNA, 28 nt, Human
ugcccaggcuagucucaaacuccugggc

SEQ ID NO: 662826 - RNA, 21 nt, Human
ugccucggccucccaaagugc

SEQ ID NO: 662827 - RNA, 24 nt, Human
ugccucggccucccaaagugcugg

SEQ ID NO: 662828 - RNA, 24 nt, Human
ugcugggauuacaggcgugagcca

SEQ ID NO: 662829 - RNA, 20 nt, Human
ugcuuuggccuccuaaagua

SEQ ID NO: 662830 - RNA, 19 nt, Human
uggagugcaguggcucaau

SEQ ID NO: 662831 - RNA, 20 nt, Human
uggauuacaggcaugagcca

SEQ ID NO: 662832 - RNA, 21 nt, Human
uggauuacaggcaugagccau

SEQ ID NO: 662833 - RNA, 23 nt, Human
uggauuacaggcaugagccauca

SEQ ID NO: 662834 - RNA, 25 nt, Human
uggauuacaggcaugagccaucaca

SEQ ID NO: 662835 - RNA, 23 nt, Human
uggcucaaucacagcucacuaca

SEQ ID NO: 662836 - RNA, 24 nt, Human
ugggaccauagguauguggcacca

SEQ ID NO: 662837 - RNA, 18 nt, Human
ugggauuacaggcgugag

SEQ ID NO: 662838 - RNA, 19 nt, Human
ugggauuacaggcgugagc

SEQ ID NO: 662839 - RNA, 21 nt, Human
ugggauuacaggcgugagcca

SEQ ID NO: 662840 - RNA, 22 nt, Human
ugggauuacaggcgugagccac

SEQ ID NO: 662841 - RNA, 22 nt, Human
ugggauuacaggcgugagccac

SEQ ID NO: 662842 - RNA, 24 nt, Human
ugggauuacaggcgugagccacug

SEQ ID NO: 662843 - RNA, 24 nt, Human
ugggauuacaggcgugagccacug

SEQ ID NO: 662844 - RNA, 20 nt, Human
ugggcucaagagauuugccu

SEQ ID NO: 662845 - RNA, 19 nt, Human
ugggcucaggugauccucc

SEQ ID NO: 662846 - RNA, 21 nt, Human
ugggcucaggugauccuccca

SEQ ID NO: 662847 - RNA, 25 nt, Human
ugggcucaggugauccucccaaccu

SEQ ID NO: 662848 - RNA, 19 nt, Human
ugggguuucaccauguuag

SEQ ID NO: 662849 - RNA, 24 nt, Human
ugggguuucaccauguugcccagg

SEQ ID NO: 662850 - RNA, 23 nt, Human
ugggucucacucugccacccagg

SEQ ID NO: 662851 - RNA, 24 nt, Human
uguagagaugggguuucaccaugu

SEQ ID NO: 662852 - RNA, 24 nt, Human
uguugaguagcugggaccauaggu

SEQ ID NO: 662853 - RNA, 19 nt, Human
uuauucugcuuagagccug

SEQ ID NO: 662854 - RNA, 22 nt, Human
uuccuuuuucuuuuuucaggga

SEQ ID NO: 662855 - RNA, 24 nt, Human
uuguagagaugggguuucaccaug

SEQ ID NO: 662856 - RNA, 18 nt, Human
uuucaccauguuagccag

SEQ ID NO: 662857 - RNA, 24 nt, Human
uuucaccauguugcccaggcuagu

SEQ ID NO: 662858 - RNA, 24 nt, Human
uuuguagagaugggguuucaccau

SEQ ID NO: 662859 - RNA, 20 nt, Human
uuuuguauuuuuuguagaga

SEQ ID NO: 662860 - RNA, 20 nt, Human
uuuuuguauuuuuuguagag

SEQ ID NO: 662861 - RNA, 22 nt, Human
uuuuuuguagagaugggguuuc

SEQ ID NO: 662862 - RNA, 24 nt, Human
uuuuuuguagagaugggguuucac

SEQ ID NO: 662863 - RNA, 20 nt, Human
uuuuuuuugagacggggucu

SEQ ID NO: 662864 - RNA, 19 nt, Human
uuuuuuuuuuugagacggg

SEQ ID NO: 662865 - RNA, 24 nt, Human
uuuuuuuuuuuugagacggggucu

SEQ ID NO: 662866 - RNA, 24 nt, Human
aacccuggagacccucaaccggga

SEQ ID NO: 662867 - RNA, 22 nt, Human
agaauacccaaagucacaagaa

SEQ ID NO: 662868 - RNA, 18 nt, Human
caaccgggacacaggugg

SEQ ID NO: 662869 - RNA, 23 nt, Human
caagucaaaagaauaaaugcuua

SEQ ID NO: 662870 - RNA, 21 nt, Human
caccugggccccgccgaaguc

SEQ ID NO: 662871 - RNA, 26 nt, Human
caggugggccuuucucaccugggccc

SEQ ID NO: 662872 - RNA, 21 nt, Human
ccccaaagaacccuggagacc

SEQ ID NO: 662873 - RNA, 23 nt, Human
ccccaaagaacccuggagacccu

SEQ ID NO: 662874 - RNA, 27 nt, Human
ccccaaagaacccuggagacccucuuc

SEQ ID NO: 662875 - RNA, 24 nt, Human
cccucaaccgggacacaggugggc

SEQ ID NO: 662876 - RNA, 18 nt, Human
ccucgggccccaaagaac

SEQ ID NO: 662877 - RNA, 23 nt, Human
cgggccccaaagaacccuggaga

SEQ ID NO: 662878 - RNA, 21 nt, Human
gccuuucucaccugggccccg

SEQ ID NO: 662879 - RNA, 25 nt, Human
uaaauucacaugaaaaggagacaau

SEQ ID NO: 662880 - RNA, 21 nt, Human
ucgggccccaaagaacccugg

SEQ ID NO: 662881 - RNA, 25 nt, Human
uuccucgggccccaaagaacccugg

SEQ ID NO: 662882 - RNA, 18 nt, Human
aaaaaagagaacauggga

SEQ ID NO: 662883 - RNA, 23 nt, Human
aaaaagagaacaugggaaaccaa

SEQ ID NO: 662884 - RNA, 22 nt, Human
aaaaagcaauaaacacaucaau

SEQ ID NO: 662885 - RNA, 22 nt, Human
aagaugaagaagauuccaaaga

SEQ ID NO: 662886 - RNA, 22 nt, Human
acaggaucugacacccuuccca

SEQ ID NO: 662887 - RNA, 22 nt, Human
agaacaugggaaaccaaauccu

SEQ ID NO: 662888 - RNA, 22 nt, Human
agaugaagaagauuccaaagag

SEQ ID NO: 662889 - RNA, 23 nt, Human
caagcuccccucuccucagccuc

SEQ ID NO: 662890 - RNA, 25 nt, Human
caagcuccccucuccucagccuccu

SEQ ID NO: 662891 - RNA, 23 nt, Human
caauaaacacaucaauagaauaa

SEQ ID NO: 662892 - RNA, 22 nt, Human
cagaaagaucauuuuaaagcua

SEQ ID NO: 662893 - RNA, 21 nt, Human
cagcaggcgccccccaagcuc

SEQ ID NO: 662894 - RNA, 18 nt, Human
cagccucagcucccgcuc

SEQ ID NO: 662895 - RNA, 24 nt, Human
caggaucugacacccuucccacag

SEQ ID NO: 662896 - RNA, 18 nt, Human
caggcgccccccaagcuc

SEQ ID NO: 662897 - RNA, 18 nt, Human
caggcgccccccaagcuc

SEQ ID NO: 662898 - RNA, 24 nt, Human
ccaagaugaagaagauuccaaaga

SEQ ID NO: 662899 - RNA, 22 nt, Human
ccaagcuccccucuccucagcc

SEQ ID NO: 662900 - RNA, 21 nt, Human
ccaggauaaagugugcaagaa

SEQ ID NO: 662901 - RNA, 23 nt, Human
cccaagcuccccucuccucagcc

SEQ ID NO: 662902 - RNA, 21 nt, Human
cccacagccuucacugcagcu

SEQ ID NO: 662903 - RNA, 23 nt, Human
cccacagccuucacugcagcuag

SEQ ID NO: 662904 - RNA, 24 nt, Human
cccccaagcuccccucuccucagc

SEQ ID NO: 662905 - RNA, 18 nt, Human
ccccccaagcuccccucu

SEQ ID NO: 662906 - RNA, 18 nt, Human
ccccccaagcuccccucu

SEQ ID NO: 662907 - RNA, 19 nt, Human
ccccccaagcuccccucuc

SEQ ID NO: 662908 - RNA, 20 nt, Human
ccuucccacagccuucacug

SEQ ID NO: 662909 - RNA, 23 nt, Human
cgccccccaagcuccccucuccu

SEQ ID NO: 662910 - RNA, 20 nt, Human
cuccccucuccucagccuca

SEQ ID NO: 662911 - RNA, 21 nt, Human
cuccccucuccucagccucag

SEQ ID NO: 662912 - RNA, 18 nt, Human
cuccucagccucagcucc

SEQ ID NO: 662913 - RNA, 19 nt, Human
cuucccacagccuucacug

SEQ ID NO: 662914 - RNA, 26 nt, Human
cuuuucauuauugcugguuuugaaaa

SEQ ID NO: 662915 - RNA, 18 nt, Human
gggcagccaagaugaaga

SEQ ID NO: 662916 - RNA, 22 nt, Human
uaaaaagcaauaaacacaucaa

SEQ ID NO: 662917 - RNA, 20 nt, Human
uaugguaguacaaaaagagu

SEQ ID NO: 662918 - RNA, 18 nt, Human
ucaaaaaaagagaacaug

SEQ ID NO: 662919 - RNA, 19 nt, Human
uccucagccucagcucccg

SEQ ID NO: 662920 - RNA, 22 nt, Human
ucuaggaaaaggacagaaagau

SEQ ID NO: 662921 - RNA, 20 nt, Human
ucuccucagccucagcuccc

SEQ ID NO: 662922 - RNA, 21 nt, Human
ucuucacaggaucugacaccc

SEQ ID NO: 662923 - RNA, 20 nt, Human
ugccauucuucacaggaucu

SEQ ID NO: 662924 - RNA, 18 nt, Human
uggcagcaggcgcccccc

SEQ ID NO: 662925 - RNA, 22 nt, Human
uucaaaaaaagagaacauggga

SEQ ID NO: 662926 - RNA, 23 nt, Human
auccaugcugauuccagggucca

SEQ ID NO: 662927 - RNA, 19 nt, Human
cacccccgcccaccacagc

SEQ ID NO: 662928 - RNA, 21 nt, Human
cauaaugucaggugaagcccu

SEQ ID NO: 662929 - RNA, 18 nt, Human
cccacacucugucgcaac

SEQ ID NO: 662930 - RNA, 21 nt, Human
ccugagggcacacagugaggc

SEQ ID NO: 662931 - RNA, 24 nt, Human
gaagcccugcccauaccauugccu

SEQ ID NO: 662932 - RNA, 19 nt, Human
gccaacacccccgcccacc

SEQ ID NO: 662933 - RNA, 21 nt, Human
gccaacacccccgcccaccac

SEQ ID NO: 662934 - RNA, 23 nt, Human
gccaacacccccgcccaccacag

SEQ ID NO: 662935 - RNA, 21 nt, Human
gccuaguggccaacacccccg

SEQ ID NO: 662936 - RNA, 23 nt, Human
uaguggccaacacccccgcccac

SEQ ID NO: 662937 - RNA, 21 nt, Human
uccauaccuccucuggucuca

SEQ ID NO: 662938 - RNA, 18 nt, Human
ugccucaugcuuuauuuu

SEQ ID NO: 662939 - RNA, 18 nt, Human
uguuuccauccauaccuc

SEQ ID NO: 662940 - RNA, 20 nt, Human
uguuuccauccauaccuccu

SEQ ID NO: 662941 - RNA, 20 nt, Human
uuccauagagcuuguuucca

SEQ ID NO: 662942 - RNA, 21 nt, Human
agcgcgcggcccgguggccuc

SEQ ID NO: 662943 - RNA, 18 nt, Human
agcugggagcgcgcggcc

SEQ ID NO: 662944 - RNA, 23 nt, Human
agggagcggcgcggcugccggag

SEQ ID NO: 662945 - RNA, 25 nt, Human
ccgaagccgcguccgagcgaagcug

SEQ ID NO: 662946 - RNA, 18 nt, Human
ccugggcccagcucucgc

SEQ ID NO: 662947 - RNA, 18 nt, Human
ccugggcccagcucucgc

SEQ ID NO: 662948 - RNA, 19 nt, Human
cucugcgucuccgcccucc

SEQ ID NO: 662949 - RNA, 20 nt, Human
cugcgucuccgcccuccccg

SEQ ID NO: 662950 - RNA, 18 nt, Human
cugggcgugcagcggagg

SEQ ID NO: 662951 - RNA, 20 nt, Human
gagcggcgcggcugccggag

SEQ ID NO: 662952 - RNA, 22 nt, Human
gagggcgcccggccgggccguc

SEQ ID NO: 662953 - RNA, 21 nt, Human
ggcccagcucucgccgcgucc

SEQ ID NO: 662954 - RNA, 22 nt, Human
ucacauuuuggggaccgggagg

SEQ ID NO: 662955 - RNA, 22 nt, Human
uccccgcuucacauuuugggga

SEQ ID NO: 662956 - RNA, 21 nt, Human
ucucugcgucuccgcccuccc

SEQ ID NO: 662957 - RNA, 21 nt, Human
ugcgggccgaagccgcguccg

SEQ ID NO: 662958 - RNA, 21 nt, Human
uggugcgagcagccgcgggcg

SEQ ID NO: 662959 - RNA, 18 nt, Human
aaaaguccagagcgggca

SEQ ID NO: 662960 - RNA, 22 nt, Human
aaagugcugggauuacaggcau

SEQ ID NO: 662961 - RNA, 24 nt, Human
aaagugcugggauuacaggcauga

SEQ ID NO: 662962 - RNA, 24 nt, Human
aagcaauccuccugccuuggccuc

SEQ ID NO: 662963 - RNA, 25 nt, Human
aagcaauccuccugccuuggccucc

SEQ ID NO: 662964 - RNA, 18 nt, Human
aaggacuucggcuuucuu

SEQ ID NO: 662965 - RNA, 19 nt, Human
aagugcugggauuacaggc

SEQ ID NO: 662966 - RNA, 21 nt, Human
aagugcugggauuacaggcau

SEQ ID NO: 662967 - RNA, 26 nt, Human
aagugcugggauuacaggcaugagcc

SEQ ID NO: 662968 - RNA, 21 nt, Human
acacaguuacaaaugcauaau

SEQ ID NO: 662969 - RNA, 20 nt, Human
acuguauuuggagacagggc

SEQ ID NO: 662970 - RNA, 25 nt, Human
agauaauuuaaaagaaccuggauaa

SEQ ID NO: 662971 - RNA, 21 nt, Human
agcaauccuccugccuuggcc

SEQ ID NO: 662972 - RNA, 19 nt, Human
agccaccacaccuggcuuc

SEQ ID NO: 662973 - RNA, 20 nt, Human
agccaccacaccuggcuucc

SEQ ID NO: 662974 - RNA, 22 nt, Human
agcuccugggcucaagcaaucc

SEQ ID NO: 662975 - RNA, 18 nt, Human
agugcugggauuacaggc

SEQ ID NO: 662976 - RNA, 19 nt, Human
agugcugggauuacaggca

SEQ ID NO: 662977 - RNA, 19 nt, Human
caaaaguccagagcgggca

SEQ ID NO: 662978 - RNA, 22 nt, Human
caagcaauccuccugccuuggc

SEQ ID NO: 662979 - RNA, 20 nt, Human
cacauuacugcuagaaugau

SEQ ID NO: 662980 - RNA, 28 nt, Human
cagcuccugggcucaagcaauccuccuu

SEQ ID NO: 662981 - RNA, 19 nt, Human
caggcugaucuccagcucc

SEQ ID NO: 662982 - RNA, 22 nt, Human
cauugggcaggguauccugcug

SEQ ID NO: 662983 - RNA, 19 nt, Human
ccacaccuggcuuccaaau

SEQ ID NO: 662984 - RNA, 24 nt, Human
ccacagaguccacuaugcugucau

SEQ ID NO: 662985 - RNA, 19 nt, Human
ccagagcgggcacaacugg

SEQ ID NO: 662986 - RNA, 21 nt, Human
cccccaaugugacuguauuug

SEQ ID NO: 662987 - RNA, 23 nt, Human
ccgaaagugcugggauuacaggc

SEQ ID NO: 662988 - RNA, 18 nt, Human
ccuccugccuuggccucc

SEQ ID NO: 662989 - RNA, 23 nt, Human
ccugggcucaagcaauccuccug

SEQ ID NO: 662990 - RNA, 18 nt, Human
ccuguguugcccaggcug

SEQ ID NO: 662991 - RNA, 24 nt, Human
cgaaagugcugggauuacaggcau

SEQ ID NO: 662992 - RNA, 24 nt, Human
cucaagcaauccuccugccuuggc

SEQ ID NO: 662993 - RNA, 25 nt, Human
cuccugggcucaagcaauccuccug

SEQ ID NO: 662994 - RNA, 21 nt, Human
cuuggccuccgaaagugcugg

SEQ ID NO: 662995 - RNA, 24 nt, Human
gaaagugcugggauuacaggcaug

SEQ ID NO: 662996 - RNA, 19 nt, Human
gaacacaguuacaaaugca

SEQ ID NO: 662997 - RNA, 18 nt, Human
gauuacaggcaugagcca

SEQ ID NO: 662998 - RNA, 21 nt, Human
gauuacaggcaugagccacca

SEQ ID NO: 662999 - RNA, 22 nt, Human
gauuacaggcaugagccaccac

SEQ ID NO: 663000 - RNA, 22 nt, Human
gccuuggccuccgaaagugcug

SEQ ID NO: 663001 - RNA, 19 nt, Human
ggauuacaggcaugagcca

SEQ ID NO: 663002 - RNA, 22 nt, Human
gggcucaagcaauccuccugcc

SEQ ID NO: 663003 - RNA, 19 nt, Human
gugcugggauuacaggcau

SEQ ID NO: 663004 - RNA, 25 nt, Human
uaaaagaaccuggauaacuguagca

SEQ ID NO: 663005 - RNA, 23 nt, Human
uaaaugcuucugucuugaaaggg

SEQ ID NO: 663006 - RNA, 22 nt, Human
uacaggcaugagccaccacacc

SEQ ID NO: 663007 - RNA, 23 nt, Human
uaugcugucauuguucauggacc

SEQ ID NO: 663008 - RNA, 22 nt, Human
uauuuauauuuuuuuguagaga

SEQ ID NO: 663009 - RNA, 19 nt, Human
ucagaagaggaagaacaca

SEQ ID NO: 663010 - RNA, 22 nt, Human
ucagaagaggaagaacacaguu

SEQ ID NO: 663011 - RNA, 21 nt, Human
ucccuguguugcccaggcuga

SEQ ID NO: 663012 - RNA, 24 nt, Human
uccgaaagugcugggauuacaggc

SEQ ID NO: 663013 - RNA, 18 nt, Human
uccugggcucaagcaauc

SEQ ID NO: 663014 - RNA, 21 nt, Human
uccugggcucaagcaauccuc

SEQ ID NO: 663015 - RNA, 22 nt, Human
uccugggcucaagcaauccucc

SEQ ID NO: 663016 - RNA, 24 nt, Human
uccugggcucaagcaauccuccug

SEQ ID NO: 663017 - RNA, 21 nt, Human
ucggcuuucuucuucuccacc

SEQ ID NO: 663018 - RNA, 18 nt, Human
ucuccaccccauucuuca

SEQ ID NO: 663019 - RNA, 20 nt, Human
ucuccaccccauucuucaca

SEQ ID NO: 663020 - RNA, 23 nt, Human
ucuccagcuccugggcucaagca

SEQ ID NO: 663021 - RNA, 19 nt, Human
ucucccuguguugcccagg

SEQ ID NO: 663022 - RNA, 25 nt, Human
ugaaaugcagccauaaggguggcua

SEQ ID NO: 663023 - RNA, 24 nt, Human
ugacugaugucuucagaagaggaa

SEQ ID NO: 663024 - RNA, 24 nt, Human
ugaugucuucagaagaggaagaac

SEQ ID NO: 663025 - RNA, 19 nt, Human
ugcuucugucuugaaaggg

SEQ ID NO: 663026 - RNA, 18 nt, Human
ugggauuacaggcaugag

SEQ ID NO: 663027 - RNA, 19 nt, Human
ugggauuacaggcaugagc

SEQ ID NO: 663028 - RNA, 22 nt, Human
ugggauuacaggcaugagccac

SEQ ID NO: 663029 - RNA, 23 nt, Human
ugggauuacaggcaugagccacc

SEQ ID NO: 663030 - RNA, 24 nt, Human
ugggauuacaggcaugagccacca

SEQ ID NO: 663031 - RNA, 24 nt, Human
ugggauuacaggcaugagccacca

SEQ ID NO: 663032 - RNA, 24 nt, Human
ugggcucaagcaauccuccugccu

SEQ ID NO: 663033 - RNA, 19 nt, Human
uguguugcccaggcugauc

SEQ ID NO: 663034 - RNA, 24 nt, Human
uguguugcccaggcugaucuccag

SEQ ID NO: 663035 - RNA, 21 nt, Human
uguugcccaggcugaucucca

SEQ ID NO: 663036 - RNA, 22 nt, Human
uuuguagagaugagucucccug

SEQ ID NO: 663037 - RNA, 18 nt, Human
aacauacccacaugugca

SEQ ID NO: 663038 - RNA, 18 nt, Human
aagcagagagugggcagg

SEQ ID NO: 663039 - RNA, 19 nt, Human
aagcgcccccgcccgcccc

SEQ ID NO: 663040 - RNA, 19 nt, Human
aagcgcccccgcccgcccc

SEQ ID NO: 663041 - RNA, 18 nt, Human
accccauggauccacacc

SEQ ID NO: 663042 - RNA, 23 nt, Human
acguggcccaugagcuggcuggg

SEQ ID NO: 663043 - RNA, 18 nt, Human
acuccacucagcaaccag

SEQ ID NO: 663044 - RNA, 23 nt, Human
acugccgaggggcccaggccggc

SEQ ID NO: 663045 - RNA, 23 nt, Human
agauauauacccacaaauauaua

SEQ ID NO: 663046 - RNA, 19 nt, Human
agccugaagcagagagugg

SEQ ID NO: 663047 - RNA, 22 nt, Human
agcugaacccgcugcuggccug

SEQ ID NO: 663048 - RNA, 18 nt, Human
augaagacaaaagggugg

SEQ ID NO: 663049 - RNA, 23 nt, Human
augagcuggcugggguggagggg

SEQ ID NO: 663050 - RNA, 19 nt, Human
caaccagaagagguaccca

SEQ ID NO: 663051 - RNA, 20 nt, Human
cacagcgcuuccaacagggc

SEQ ID NO: 663052 - RNA, 20 nt, Human
caggauggggucugucagua

SEQ ID NO: 663053 - RNA, 18 nt, Human
ccacccagcccagccuag

SEQ ID NO: 663054 - RNA, 20 nt, Human
ccacugugcccacccagccc

SEQ ID NO: 663055 - RNA, 23 nt, Human
cccacagcgcuuccaacagggcu

SEQ ID NO: 663056 - RNA, 19 nt, Human
cccagcccagccuagggga

SEQ ID NO: 663057 - RNA, 21 nt, Human
cccccagcuccagccugaagc

SEQ ID NO: 663058 - RNA, 19 nt, Human
cccccgucgccgggucccg

SEQ ID NO: 663059 - RNA, 19 nt, Human
ccccugaggcauaagcagg

SEQ ID NO: 663060 - RNA, 23 nt, Human
cccugggugcugaggcugggcca

SEQ ID NO: 663061 - RNA, 23 nt, Human
ccgcccccgucgccggguccccc

SEQ ID NO: 663062 - RNA, 19 nt, Human
ccgcccgcccccgucgccg

SEQ ID NO: 663063 - RNA, 24 nt, Human
ccgcccgcccccgucgccgggucc

SEQ ID NO: 663064 - RNA, 20 nt, Human
ccuuaugguguccacucccc

SEQ ID NO: 663065 - RNA, 19 nt, Human
cuaggggacuaggagacca

SEQ ID NO: 663066 - RNA, 20 nt, Human
cuccagccagggcucuguuc

SEQ ID NO: 663067 - RNA, 18 nt, Human
cuccagccugaagcagag

SEQ ID NO: 663068 - RNA, 19 nt, Human
cuggcacuccuccccuucc

SEQ ID NO: 663069 - RNA, 22 nt, Human
cuggcccccagcuccagccuga

SEQ ID NO: 663070 - RNA, 22 nt, Human
cuguacacucaacaguaaacac

SEQ ID NO: 663071 - RNA, 20 nt, Human
gaagacaaaaggguggagga

SEQ ID NO: 663072 - RNA, 19 nt, Human
gaauuauacacauggcuga

SEQ ID NO: 663073 - RNA, 20 nt, Human
gagcuggcugggguggaggg

SEQ ID NO: 663074 - RNA, 22 nt, Human
gcaggauggggucugucaguac

SEQ ID NO: 663075 - RNA, 19 nt, Human
gccaggccacguggcccau

SEQ ID NO: 663076 - RNA, 20 nt, Human
gccuaggggacuaggagacc

SEQ ID NO: 663077 - RNA, 23 nt, Human
gcugggccaggccacguggccca

SEQ ID NO: 663078 - RNA, 18 nt, Human
gcugggguggaggggcag

SEQ ID NO: 663079 - RNA, 18 nt, Human
ggaggagccccugaggca

SEQ ID NO: 663080 - RNA, 19 nt, Human
ggcccccagcuccagccug

SEQ ID NO: 663081 - RNA, 20 nt, Human
ggcccccagcuccagccuga

SEQ ID NO: 663082 - RNA, 20 nt, Human
gguggaggagccccugaggc

SEQ ID NO: 663083 - RNA, 21 nt, Human
gguggggcugcuggugcacuc

SEQ ID NO: 663084 - RNA, 21 nt, Human
uacacagguugggggcuaugu

SEQ ID NO: 663085 - RNA, 22 nt, Human
uacacauggcugagaacauacc

SEQ ID NO: 663086 - RNA, 24 nt, Human
uacccacaugugcacauucauaua

SEQ ID NO: 663087 - RNA, 27 nt, Human
uauacacauggcugagaacauacccac

SEQ ID NO: 663088 - RNA, 25 nt, Human
uauauaucaaucacacauaugcaua

SEQ ID NO: 663089 - RNA, 22 nt, Human
uauaucuacauacuuuccccac

SEQ ID NO: 663090 - RNA, 20 nt, Human
ucaggcacacccacugugcc

SEQ ID NO: 663091 - RNA, 20 nt, Human
uccagccagggcucuguuca

SEQ ID NO: 663092 - RNA, 19 nt, Human
ucuacauacuuuccccaca

SEQ ID NO: 663093 - RNA, 25 nt, Human
ucucugggguggggcugcuggugca

SEQ ID NO: 663094 - RNA, 19 nt, Human
ugagcuggcugggguggag

SEQ ID NO: 663095 - RNA, 21 nt, Human
ugcaguaugaagacaaaaggg

SEQ ID NO: 663096 - RNA, 23 nt, Human
uggagcuggcacuccuccccuuc

SEQ ID NO: 663097 - RNA, 20 nt, Human
uggcccaugagcuggcuggg

SEQ ID NO: 663098 - RNA, 19 nt, Human
uggcccccagcuccagccu

SEQ ID NO: 663099 - RNA, 18 nt, Human
ugggcuagggcugcccag

SEQ ID NO: 663100 - RNA, 19 nt, Human
uggguuggggcaagucagg

SEQ ID NO: 663101 - RNA, 21 nt, Human
uggguuggggcaagucaggua

SEQ ID NO: 663102 - RNA, 19 nt, Human
uggugcacuccacucagca

SEQ ID NO: 663103 - RNA, 18 nt, Human
uucacugacacauucaga

SEQ ID NO: 663104 - RNA, 24 nt, Human
uucucugggguggggcugcuggug

SEQ ID NO: 663105 - RNA, 21 nt, Human
uucuggcccccagcuccagcc

SEQ ID NO: 663106 - RNA, 19 nt, Human
caacacauacaggcauaug

SEQ ID NO: 663107 - RNA, 22 nt, Human
cauaauaucuaaaaccagaaug

SEQ ID NO: 663108 - RNA, 21 nt, Human
ccaaaaucuaauuuauuagca

SEQ ID NO: 663109 - RNA, 21 nt, Human
uaucuaaaaccagaauggauu

SEQ ID NO: 663110 - RNA, 21 nt, Human
ucaaauagcugguccaggagc

SEQ ID NO: 663111 - RNA, 18 nt, Human
ugaaugaaguccaaaaau

SEQ ID NO: 663112 - RNA, 21 nt, Human
uuauuagcaacacauacaggc

SEQ ID NO: 663113 - RNA, 18 nt, Human
uuuccaguuaagaaaauu

SEQ ID NO: 663114 - RNA, 19 nt, Human
uuugcgaauuccagauagu

SEQ ID NO: 663115 - RNA, 27 nt, Human
agggcagguggguagggcugaccaucc

SEQ ID NO: 663116 - RNA, 24 nt, Human
cagucccaccucucucuggaacag

SEQ ID NO: 663117 - RNA, 21 nt, Human
cauccucuccuugcaguccca

SEQ ID NO: 663118 - RNA, 20 nt, Human
ccuugcagucccaccucucu

SEQ ID NO: 663119 - RNA, 20 nt, Human
cugaccauccucuccuugca

SEQ ID NO: 663120 - RNA, 19 nt, Human
gagggcaucaaaaccccug

SEQ ID NO: 663121 - RNA, 18 nt, Human
gcagggccugugggcugc

SEQ ID NO: 663122 - RNA, 22 nt, Human
gcugaccauccucuccuugcag

SEQ ID NO: 663123 - RNA, 20 nt, Human
ggcagggccugugggcugca

SEQ ID NO: 663124 - RNA, 22 nt, Human
gggcagguggguagggcugacc

SEQ ID NO: 663125 - RNA, 20 nt, Human
ugagggcaucaaaaccccug

SEQ ID NO: 663126 - RNA, 24 nt, Human
ugaugcgaugggcagggccugugg

SEQ ID NO: 663127 - RNA, 22 nt, Human
ugcgaugggcagggccuguggg

SEQ ID NO: 663128 - RNA, 21 nt, Human
uggguagggcugaccauccuc

SEQ ID NO: 663129 - RNA, 24 nt, Human
ugguggucaugcugccccguggug

SEQ ID NO: 663130 - RNA, 19 nt, Human
aaagcccuuuugcccacca

SEQ ID NO: 663131 - RNA, 19 nt, Human
acaagcaaccguuccaaag

SEQ ID NO: 663132 - RNA, 26 nt, Human
agaaaagacaagcaaccguuccaaag

SEQ ID NO: 663133 - RNA, 25 nt, Human
agacaagcaaccguuccagcuucca

SEQ ID NO: 663134 - RNA, 20 nt, Human
caaagcccuuuugcccacca

SEQ ID NO: 663135 - RNA, 19 nt, Human
caagcaaccguuccaaagc

SEQ ID NO: 663136 - RNA, 23 nt, Human
cagaccaguggggggaaaauccc

SEQ ID NO: 663137 - RNA, 22 nt, Human
cccaccacaggcguguuuacag

SEQ ID NO: 663138 - RNA, 22 nt, Human
cccccuuuucuucuuaugggcc

SEQ ID NO: 663139 - RNA, 21 nt, Human
cgccuucugagccugaagccu

SEQ ID NO: 663140 - RNA, 21 nt, Human
cguuccaaagcccuuuugccc

SEQ ID NO: 663141 - RNA, 25 nt, Human
cucccccuuuucuucuuaugggcca

SEQ ID NO: 663142 - RNA, 21 nt, Human
gaaaagacaagcaaccguucc

SEQ ID NO: 663143 - RNA, 21 nt, Human
ugacagggggagcuugccuug

SEQ ID NO: 663144 - RNA, 20 nt, Human
ugcuuugacagggggagcuu

SEQ ID NO: 663145 - RNA, 23 nt, Human
uggccucugaguuacaggagagc

SEQ ID NO: 663146 - RNA, 24 nt, Human
ugggggcgccuucugaaggacacc

SEQ ID NO: 663147 - RNA, 19 nt, Human
uuugacagggggagcuugc

SEQ ID NO: 663148 - RNA, 18 nt, Human
auuuauuggcucuccuua

SEQ ID NO: 663149 - RNA, 23 nt, Human
acagucuuaucugggagguccuu

SEQ ID NO: 663150 - RNA, 19 nt, Human
accuccucggccgggcucc

SEQ ID NO: 663151 - RNA, 20 nt, Human
agcuccuucccgggaccccc

SEQ ID NO: 663152 - RNA, 23 nt, Human
caaaggacugccccacgggcuaa

SEQ ID NO: 663153 - RNA, 18 nt, Human
cagcuccuucccgggacc

SEQ ID NO: 663154 - RNA, 22 nt, Human
cccacaucaccuggaaugguua

SEQ ID NO: 663155 - RNA, 21 nt, Human
ccuucccgggacccccaagcu

SEQ ID NO: 663156 - RNA, 18 nt, Human
cgccuagguccucccagc

SEQ ID NO: 663157 - RNA, 21 nt, Human
cucaaguaguuaacauaggga

SEQ ID NO: 663158 - RNA, 18 nt, Human
cuccuucccgggaccccc

SEQ ID NO: 663159 - RNA, 20 nt, Human
ggccggaagcugaagagagu

SEQ ID NO: 663160 - RNA, 21 nt, Human
gggccggaagcugaagagagu

SEQ ID NO: 663161 - RNA, 21 nt, Human
ggugacaaugguacagaggaa

SEQ ID NO: 663162 - RNA, 23 nt, Human
uagggaccuccucggccgggcuc

SEQ ID NO: 663163 - RNA, 23 nt, Human
uccucggccgggcuccgcggaac

SEQ ID NO: 663164 - RNA, 23 nt, Human
ucuaaguggucugaacuuggucu

SEQ ID NO: 663165 - RNA, 23 nt, Human
ugaguggggugacaaugguacag

SEQ ID NO: 663166 - RNA, 23 nt, Human
ugccccacgggcuaaacagcuga

SEQ ID NO: 663167 - RNA, 21 nt, Human
ugguacagaggaaaugggacu

SEQ ID NO: 663168 - RNA, 19 nt, Human
ugucuuauuuaaaugggaa

SEQ ID NO: 663169 - RNA, 22 nt, Human
uucuaaguggucugaacuuggu

SEQ ID NO: 663170 - RNA, 24 nt, Human
uuuacagaugccacuguugagggc

SEQ ID NO: 663171 - RNA, 19 nt, Human
aagcccagcagccccggga

SEQ ID NO: 663172 - RNA, 20 nt, Human
aaggguucgagaugccuggu

SEQ ID NO: 663173 - RNA, 18 nt, Human
aggagcugccuuguccug

SEQ ID NO: 663174 - RNA, 23 nt, Human
cacagcuuuucauaaaaagcaag

SEQ ID NO: 663175 - RNA, 20 nt, Human
cagcagccccgggauccgcc

SEQ ID NO: 663176 - RNA, 19 nt, Human
gacucaggaagcccagcag

SEQ ID NO: 663177 - RNA, 23 nt, Human
gagcugccuuguccuggcagggc

SEQ ID NO: 663178 - RNA, 22 nt, Human
uagguguguguugagagccgcu

SEQ ID NO: 663179 - RNA, 20 nt, Human
uggacguggguccuggugga

SEQ ID NO: 663180 - RNA, 20 nt, Human
aagcugcacgaaccucuucu

SEQ ID NO: 663181 - RNA, 22 nt, Human
aaguagccaagagcagaggaac

SEQ ID NO: 663182 - RNA, 24 nt, Human
aaguagccaagagcagaggaacaa

SEQ ID NO: 663183 - RNA, 24 nt, Human
aggaaggaagucccaccaguguuu

SEQ ID NO: 663184 - RNA, 18 nt, Human
aggagguaauaaagucaa

SEQ ID NO: 663185 - RNA, 19 nt, Human
auacauuugugauaucuga

SEQ ID NO: 663186 - RNA, 23 nt, Human
auaguaacaccucuugcagacaa

SEQ ID NO: 663187 - RNA, 21 nt, Human
augcuggguuaauacuugcau

SEQ ID NO: 663188 - RNA, 19 nt, Human
auggucauuauuccacuuu

SEQ ID NO: 663189 - RNA, 19 nt, Human
augguccauaucucuaaug

SEQ ID NO: 663190 - RNA, 23 nt, Human
caacuaaaauaguaacaccucuu

SEQ ID NO: 663191 - RNA, 24 nt, Human
caagacaauaguagaagucugaac

SEQ ID NO: 663192 - RNA, 22 nt, Human
cauucuucuccagacuuaagga

SEQ ID NO: 663193 - RNA, 20 nt, Human
ccagcucuagaaugagccag

SEQ ID NO: 663194 - RNA, 20 nt, Human
ccaugaaguuaguuacagga

SEQ ID NO: 663195 - RNA, 25 nt, Human
ccucuugcagacaaaguaauauggu

SEQ ID NO: 663196 - RNA, 22 nt, Human
cuaaaauaguaacaccucuugc

SEQ ID NO: 663197 - RNA, 23 nt, Human
cucuagaaugagccaggcuugcu

SEQ ID NO: 663198 - RNA, 24 nt, Human
gagcagaggaacaagcugcacgaa

SEQ ID NO: 663199 - RNA, 19 nt, Human
gauuccauuauauuuggca

SEQ ID NO: 663200 - RNA, 20 nt, Human
gcuccuucccucuuuuaaag

SEQ ID NO: 663201 - RNA, 18 nt, Human
gggaauccuuggucuuuu

SEQ ID NO: 663202 - RNA, 24 nt, Human
uaaaauaguaacaccucuugcaga

SEQ ID NO: 663203 - RNA, 24 nt, Human
uacaggagguaauaaagucaaaga

SEQ ID NO: 663204 - RNA, 21 nt, Human
uagagauggaaugccucccuc

SEQ ID NO: 663205 - RNA, 20 nt, Human
uagccaagagcagaggaaca

SEQ ID NO: 663206 - RNA, 21 nt, Human
uagccaagagcagaggaacaa

SEQ ID NO: 663207 - RNA, 18 nt, Human
uagccaguacaacaaucu

SEQ ID NO: 663208 - RNA, 25 nt, Human
uagguuuuaauuuucuucggugcuc

SEQ ID NO: 663209 - RNA, 19 nt, Human
uaguaacaccucuugcaga

SEQ ID NO: 663210 - RNA, 21 nt, Human
uccagacuuaaggaaggaagu

SEQ ID NO: 663211 - RNA, 21 nt, Human
ucccaugaaguuaguuacagg

SEQ ID NO: 663212 - RNA, 22 nt, Human
ucccucuuuuaaagauaggaau

SEQ ID NO: 663213 - RNA, 19 nt, Human
ucugcaggcucuggguugg

SEQ ID NO: 663214 - RNA, 21 nt, Human
ucugcaggcucuggguuggcu

SEQ ID NO: 663215 - RNA, 24 nt, Human
ugaaaaagaaaaaauauuauggga

SEQ ID NO: 663216 - RNA, 19 nt, Human
ugaaaugcugccauugccu

SEQ ID NO: 663217 - RNA, 19 nt, Human
ugacagcacagcgagagug

SEQ ID NO: 663218 - RNA, 24 nt, Human
ugacuuuagccaguacaacaaucu

SEQ ID NO: 663219 - RNA, 23 nt, Human
ugcuucugggauaccagcucuag

SEQ ID NO: 663220 - RNA, 18 nt, Human
uggaaugccucccgcuuc

SEQ ID NO: 663221 - RNA, 20 nt, Human
uggaugguccuccauucuuc

SEQ ID NO: 663222 - RNA, 22 nt, Human
uggcuuucuggacauguuuccc

SEQ ID NO: 663223 - RNA, 24 nt, Human
ugggaauccuuggucuuuuuuguu

SEQ ID NO: 663224 - RNA, 22 nt, Human
ugggauuccauuauauuuggca

SEQ ID NO: 663225 - RNA, 24 nt, Human
ugugguaaaugcuucugggauacc

SEQ ID NO: 663226 - RNA, 19 nt, Human
uguuucccaaguugguuca

SEQ ID NO: 663227 - RNA, 20 nt, Human
uucccgaguacaaaugauag

SEQ ID NO: 663228 - RNA, 19 nt, Human
uucuuggucuugauacauu

SEQ ID NO: 663229 - RNA, 24 nt, Human
uucuuggucuugauacauuuguga

SEQ ID NO: 663230 - RNA, 24 nt, Human
uuuaauuuucuucggugcuccuuc

SEQ ID NO: 663231 - RNA, 22 nt, Human
aacaagagcaaaacuccaucug

SEQ ID NO: 663232 - RNA, 21 nt, Human
aacacaguaagggacccccau

SEQ ID NO: 663233 - RNA, 19 nt, Human
aacauggugaaaccccauc

SEQ ID NO: 663234 - RNA, 20 nt, Human
aacauggugaaaccccaucu

SEQ ID NO: 663235 - RNA, 21 nt, Human
aacauggugaaaccccaucuc

SEQ ID NO: 663236 - RNA, 21 nt, Human
aacauggugaaaccccaucuc

SEQ ID NO: 663237 - RNA, 19 nt, Human
aagaggcacuuccagugac

SEQ ID NO: 663238 - RNA, 20 nt, Human
aaggcaggaggaucaaggcc

SEQ ID NO: 663239 - RNA, 22 nt, Human
aaguagcugagcaugguggggg

SEQ ID NO: 663240 - RNA, 24 nt, Human
aauugcuugaaccuaggaugcgga

SEQ ID NO: 663241 - RNA, 20 nt, Human
acaagagcaaaacuccaucu

SEQ ID NO: 663242 - RNA, 21 nt, Human
accccaucuccacuaaauaca

SEQ ID NO: 663243 - RNA, 20 nt, Human
acccccauuuuacaacacag

SEQ ID NO: 663244 - RNA, 20 nt, Human
acuggucuguacucgugggc

SEQ ID NO: 663245 - RNA, 23 nt, Human
agaggauaguucuuugcugcugc

SEQ ID NO: 663246 - RNA, 19 nt, Human
agaggcacuuccagugacc

SEQ ID NO: 663247 - RNA, 19 nt, Human
agccacagauuuuggaccc

SEQ ID NO: 663248 - RNA, 22 nt, Human
agccuggccaacauggugaaac

SEQ ID NO: 663249 - RNA, 24 nt, Human
agccuggccaacauggugaaaccc

SEQ ID NO: 663250 - RNA, 19 nt, Human
agccuuugucuuuucuggc

SEQ ID NO: 663251 - RNA, 23 nt, Human
agcugagcaugguggggggugcc

SEQ ID NO: 663252 - RNA, 19 nt, Human
aggcaggaggaucaaggcc

SEQ ID NO: 663253 - RNA, 20 nt, Human
aggcuaaggcaggaggauca

SEQ ID NO: 663254 - RNA, 24 nt, Human
aggcugcggcaggagaauugcuug

SEQ ID NO: 663255 - RNA, 19 nt, Human
agggaguuugagaccagcc

SEQ ID NO: 663256 - RNA, 24 nt, Human
augaugccauggcacuccagccug

SEQ ID NO: 663257 - RNA, 24 nt, Human
augcggagguugcagugagccgag

SEQ ID NO: 663258 - RNA, 24 nt, Human
auggcacuccagccugggugacag

SEQ ID NO: 663259 - RNA, 25 nt, Human
auggcacuucagccugggcaacaag

SEQ ID NO: 663260 - RNA, 24 nt, Human
auugcaccauggcacuucagccug

SEQ ID NO: 663261 - RNA, 21 nt, Human
caacaagagcaaaacuccauc

SEQ ID NO: 663262 - RNA, 18 nt, Human
caacauggugaaacccca

SEQ ID NO: 663263 - RNA, 22 nt, Human
cacuccagccugggugacagag

SEQ ID NO: 663264 - RNA, 24 nt, Human
cacuucagccugggcaacaagagc

SEQ ID NO: 663265 - RNA, 24 nt, Human
caggggagauucaccacuuucuug

SEQ ID NO: 663266 - RNA, 19 nt, Human
cauggcacuccagccuggg

SEQ ID NO: 663267 - RNA, 19 nt, Human
cauggcacuccagccuggg

SEQ ID NO: 663268 - RNA, 23 nt, Human
cauggcacuccagccugggugac

SEQ ID NO: 663269 - RNA, 24 nt, Human
cauggcacuccagccugggugaca

SEQ ID NO: 663270 - RNA, 25 nt, Human
cauggcacuccagccugggugacag

SEQ ID NO: 663271 - RNA, 19 nt, Human
cauggcacuucagccuggg

SEQ ID NO: 663272 - RNA, 19 nt, Human
cauggcacuucagccuggg

SEQ ID NO: 663273 - RNA, 22 nt, Human
cauggcacuucagccugggcaa

SEQ ID NO: 663274 - RNA, 23 nt, Human
cauggcacuucagccugggcaac

SEQ ID NO: 663275 - RNA, 24 nt, Human
cauggcacuucagccugggcaaca

SEQ ID NO: 663276 - RNA, 20 nt, Human
ccauggcacuccagccuggg

SEQ ID NO: 663277 - RNA, 21 nt, Human
ccauggcacuccagccugggu

SEQ ID NO: 663278 - RNA, 21 nt, Human
ccauggcacuccagccugggu

SEQ ID NO: 663279 - RNA, 23 nt, Human
ccauggcacuccagccuggguga

SEQ ID NO: 663280 - RNA, 24 nt, Human
ccauggcacuccagccugggugac

SEQ ID NO: 663281 - RNA, 20 nt, Human
ccauggcacuucagccuggg

SEQ ID NO: 663282 - RNA, 21 nt, Human
ccauggcacuucagccugggc

SEQ ID NO: 663283 - RNA, 24 nt, Human
ccauggcacuucagccugggcaac

SEQ ID NO: 663284 - RNA, 23 nt, Human
cccccauuuuacaacacagggcu

SEQ ID NO: 663285 - RNA, 26 nt, Human
ccggcagccuuccaaucgaaucuccc

SEQ ID NO: 663286 - RNA, 23 nt, Human
ccuggccaacauggugaaacccc

SEQ ID NO: 663287 - RNA, 24 nt, Human
ccuggccaacauggugaaacccca

SEQ ID NO: 663288 - RNA, 20 nt, Human
ccugggugacagagcaagac

SEQ ID NO: 663289 - RNA, 21 nt, Human
ccuguaaucccagcuacucag

SEQ ID NO: 663290 - RNA, 22 nt, Human
ccuguaaucccagcuacucagg

SEQ ID NO: 663291 - RNA, 23 nt, Human
cggcaggagaauugcuugaaccu

SEQ ID NO: 663292 - RNA, 18 nt, Human
cggccgaacucaguagca

SEQ ID NO: 663293 - RNA, 18 nt, Human
cuacucaggaggcugcgg

SEQ ID NO: 663294 - RNA, 21 nt, Human
cuacucaggaggcugcggcag

SEQ ID NO: 663295 - RNA, 23 nt, Human
cuggccaacauggugaaacccca

SEQ ID NO: 663296 - RNA, 24 nt, Human
cugggcaacaagagcaaaacucca

SEQ ID NO: 663297 - RNA, 21 nt, Human
cuggguaaacugguuaaucac

SEQ ID NO: 663298 - RNA, 21 nt, Human
gaacucaguagcacgccggca

SEQ ID NO: 663299 - RNA, 24 nt, Human
gagcaugguggggggugccuguaa

SEQ ID NO: 663300 - RNA, 21 nt, Human
gagguugcagugagccgagau

SEQ ID NO: 663301 - RNA, 23 nt, Human
gagguugcagugagccgagauug

SEQ ID NO: 663302 - RNA, 21 nt, Human
gcacuccagccugggugacag

SEQ ID NO: 663303 - RNA, 23 nt, Human
gcacuccagccugggugacagag

SEQ ID NO: 663304 - RNA, 24 nt, Human
gcacuccagccugggugacagagc

SEQ ID NO: 663305 - RNA, 18 nt, Human
gcaggaggaucaaggcca

SEQ ID NO: 663306 - RNA, 24 nt, Human
gccaacauggugaaaccccaucuc

SEQ ID NO: 663307 - RNA, 19 nt, Human
gccauggcacuccagccug

SEQ ID NO: 663308 - RNA, 19 nt, Human
gcggagguugcagugagcc

SEQ ID NO: 663309 - RNA, 22 nt, Human
ggagguugcagugagccgagau

SEQ ID NO: 663310 - RNA, 24 nt, Human
ggagguugcagugagccgagauug

SEQ ID NO: 663311 - RNA, 19 nt, Human
ggaguuugagaccagccug

SEQ ID NO: 663312 - RNA, 23 nt, Human
ggauguccuguccagugcuaaaa

SEQ ID NO: 663313 - RNA, 21 nt, Human
ggcaggagaauugcuugaacc

SEQ ID NO: 663314 - RNA, 20 nt, Human
ggccccagccaucuucuucc

SEQ ID NO: 663315 - RNA, 19 nt, Human
ggggugccuguaaucccag

SEQ ID NO: 663316 - RNA, 23 nt, Human
gggugacagagcaagacccuggg

SEQ ID NO: 663317 - RNA, 19 nt, Human
gguagggaguuugagacca

SEQ ID NO: 663318 - RNA, 24 nt, Human
gguggggggugccuguaaucccag

SEQ ID NO: 663319 - RNA, 22 nt, Human
guagcacgccggcagccuucca

SEQ ID NO: 663320 - RNA, 21 nt, Human
guccuuuuccgccggaaguaa

SEQ ID NO: 663321 - RNA, 21 nt, Human
guugcagugagccgagauugc

SEQ ID NO: 663322 - RNA, 18 nt, Human
uaaggcaggaggaucaag

SEQ ID NO: 663323 - RNA, 21 nt, Human
uaaggcaggaggaucaaggcc

SEQ ID NO: 663324 - RNA, 22 nt, Human
uaaggcaggaggaucaaggcca

SEQ ID NO: 663325 - RNA, 21 nt, Human
uacaacacagggcuggcagga

SEQ ID NO: 663326 - RNA, 23 nt, Human
uacaacacagggcuggcaggaag

SEQ ID NO: 663327 - RNA, 24 nt, Human
uaggaugcggagguugcagugagc

SEQ ID NO: 663328 - RNA, 22 nt, Human
ucacaccguggucugagguagg

SEQ ID NO: 663329 - RNA, 18 nt, Human
ucauuguaauugauccug

SEQ ID NO: 663330 - RNA, 20 nt, Human
uccacuaaauacaaaaagua

SEQ ID NO: 663331 - RNA, 24 nt, Human
uccagccugggugacagagcaaga

SEQ ID NO: 663332 - RNA, 21 nt, Human
ucccaaaguuuagcuaaagcu

SEQ ID NO: 663333 - RNA, 23 nt, Human
uccccauugaugguggaucucau

SEQ ID NO: 663334 - RNA, 21 nt, Human
ucccgcguccuuuuccgccgg

SEQ ID NO: 663335 - RNA, 24 nt, Human
ucuucaugacagcaggggcccuuc

SEQ ID NO: 663336 - RNA, 20 nt, Human
ucuucaugacagcaggggcu

SEQ ID NO: 663337 - RNA, 26 nt, Human
ucuugcuuugucacuggaggucggac

SEQ ID NO: 663338 - RNA, 25 nt, Human
ucuugcuuugucacuggaggucggc

SEQ ID NO: 663339 - RNA, 21 nt, Human
ucuuugauaacacaguaaggg

SEQ ID NO: 663340 - RNA, 19 nt, Human
ugaaaccccaucuccacua

SEQ ID NO: 663341 - RNA, 22 nt, Human
ugaaggugacaaugaugcaggu

SEQ ID NO: 663342 - RNA, 21 nt, Human
ugacagagcaagacccugggg

SEQ ID NO: 663343 - RNA, 23 nt, Human
ugacagagcaagacccuggggga

SEQ ID NO: 663344 - RNA, 21 nt, Human
ugaccuacagaggauaguucu

SEQ ID NO: 663345 - RNA, 23 nt, Human
ugagaccagccuggccaacaugg

SEQ ID NO: 663346 - RNA, 24 nt, Human
ugagaccagccuggccaacauggu

SEQ ID NO: 663347 - RNA, 23 nt, Human
ugccauggcacuccagccugggu

SEQ ID NO: 663348 - RNA, 24 nt, Human
ugccuguaaucccagcuacucagg

SEQ ID NO: 663349 - RNA, 21 nt, Human
ugcggagguugcagugagccg

SEQ ID NO: 663350 - RNA, 24 nt, Human
ugcggcaggagaauugcuugaacc

SEQ ID NO: 663351 - RNA, 28 nt, Human
uggauguccuguccagugcuaaaauucu

SEQ ID NO: 663352 - RNA, 24 nt, Human
uggccaacauggugaaaccccauc

SEQ ID NO: 663353 - RNA, 24 nt, Human
ugggaggcuaaggcaggaggauca

SEQ ID NO: 663354 - RNA, 21 nt, Human
ugggccaacaauuccugcuuc

SEQ ID NO: 663355 - RNA, 18 nt, Human
uggggaugucuccauugc

SEQ ID NO: 663356 - RNA, 21 nt, Human
ugggguggauguccuguccag

SEQ ID NO: 663357 - RNA, 24 nt, Human
ugguggggggugccuguaauccca

SEQ ID NO: 663358 - RNA, 18 nt, Human
uguacagaaaacucaaca

SEQ ID NO: 663359 - RNA, 23 nt, Human
uuaaccccugcuugaaggacagg

SEQ ID NO: 663360 - RNA, 22 nt, Human
uucuuugcugcugcaaccuaau

SEQ ID NO: 663361 - RNA, 23 nt, Human
uucuuugcugcugcaaccuaaua

SEQ ID NO: 663362 - RNA, 22 nt, Human
uugauccugaagcucccaaagu

SEQ ID NO: 663363 - RNA, 18 nt, Human
uugcagugagccgagauu

SEQ ID NO: 663364 - RNA, 22 nt, Human
uugcagugagccgagauugcac

SEQ ID NO: 663365 - RNA, 24 nt, Human
uugcuugaaccuaggaugcggagg

SEQ ID NO: 663366 - RNA, 25 nt, Human
uugggaggcuaaggcaggaggauca

SEQ ID NO: 663367 - RNA, 20 nt, Human
uuuauuaucuuucuguacag

SEQ ID NO: 663368 - RNA, 20 nt, Human
uuuuuuagccuuugucuuuu

SEQ ID NO: 663369 - RNA, 23 nt, Human
aaaacaaauugaaacuaaaccuc

SEQ ID NO: 663370 - RNA, 22 nt, Human
aaacacaacuuaauuccuucau

SEQ ID NO: 663371 - RNA, 24 nt, Human
aagcaacuuagucuccaugaaaac

SEQ ID NO: 663372 - RNA, 20 nt, Human
aagcuuuuuccagucaugau

SEQ ID NO: 663373 - RNA, 24 nt, Human
aauaauacagacacaaagaaaaga

SEQ ID NO: 663374 - RNA, 18 nt, Human
acaaagaaaagaaaaagu

SEQ ID NO: 663375 - RNA, 19 nt, Human
acaugaaauccaaugccuc

SEQ ID NO: 663376 - RNA, 23 nt, Human
cacccagaaauacauagauucau

SEQ ID NO: 663377 - RNA, 24 nt, Human
ccagaaauacauagauucaugcag

SEQ ID NO: 663378 - RNA, 21 nt, Human
cccagaaauacauagauucau

SEQ ID NO: 663379 - RNA, 23 nt, Human
ccuuuuggcgacaugaaauccaa

SEQ ID NO: 663380 - RNA, 23 nt, Human
ccuuuuggcgacaugaaauccaa

SEQ ID NO: 663381 - RNA, 18 nt, Human
gacaugaaauccaaugcc

SEQ ID NO: 663382 - RNA, 18 nt, Human
gcagaucuugucuuugca

SEQ ID NO: 663383 - RNA, 20 nt, Human
uaaaaacacaacuuaauucc

SEQ ID NO: 663384 - RNA, 23 nt, Human
uaaaaacacaacuuaauuccuuc

SEQ ID NO: 663385 - RNA, 27 nt, Human
uaaauaaucaccaauguuacuucuccu

SEQ ID NO: 663386 - RNA, 20 nt, Human
uaauacagacacaaagaaaa

SEQ ID NO: 663387 - RNA, 19 nt, Human
uacagacacaaagaaaaga

SEQ ID NO: 663388 - RNA, 18 nt, Human
uacauagauucaugcaga

SEQ ID NO: 663389 - RNA, 20 nt, Human
uagauucaugcagaucuugg

SEQ ID NO: 663390 - RNA, 22 nt, Human
uauacuccucuacuaaacuucc

SEQ ID NO: 663391 - RNA, 30 nt, Human
ucaccuaaaguggccuucaccagacacccc

SEQ ID NO: 663392 - RNA, 18 nt, Human
uccuagcaguauggcugu

SEQ ID NO: 663393 - RNA, 20 nt, Human
ucuccaugaaaacuauacuu

SEQ ID NO: 663394 - RNA, 26 nt, Human
ucucuggccagucaccuaaaguggcc

SEQ ID NO: 663395 - RNA, 20 nt, Human
uuuuuccagucaugauucuu

SEQ ID NO: 663396 - RNA, 21 nt, Human
acauaagugauauuuauacaa

SEQ ID NO: 663397 - RNA, 23 nt, Human
uaaaaagaaagcccuuaaaauca

SEQ ID NO: 663398 - RNA, 24 nt, Human
uaaaaagaaagcccuuaaaaucau

SEQ ID NO: 663399 - RNA, 23 nt, Human
ugcuagacauaagugauauuuau

SEQ ID NO: 663400 - RNA, 22 nt, Human
uuucuggcauuuuguaugcuag

SEQ ID NO: 663401 - RNA, 18 nt, Human
aaauacaacaggcaaaua

SEQ ID NO: 663402 - RNA, 20 nt, Human
acaacucuuugcaaggcacu

SEQ ID NO: 663403 - RNA, 21 nt, Human
agaagaggguggacagccugc

SEQ ID NO: 663404 - RNA, 22 nt, Human
caaccuccaguaacuucuccug

SEQ ID NO: 663405 - RNA, 30 nt, Human
cacagcaugauccggugggcuaaagcaagg

SEQ ID NO: 663406 - RNA, 23 nt, Human
cagugaccuuucuuuggagauuu

SEQ ID NO: 663407 - RNA, 20 nt, Human
ccaccuggaggcucccacug

SEQ ID NO: 663408 - RNA, 21 nt, Human
ccucccaccuggaggcuccca

SEQ ID NO: 663409 - RNA, 22 nt, Human
ccugccacaaucacagcaugau

SEQ ID NO: 663410 - RNA, 21 nt, Human
cggaaggagagauagaagagg

SEQ ID NO: 663411 - RNA, 24 nt, Human
cuaaagcaagccugcaucuaagcc

SEQ ID NO: 663412 - RNA, 18 nt, Human
cuccucccaccuggaggc

SEQ ID NO: 663413 - RNA, 24 nt, Human
cucucauccucaaucacacauccc

SEQ ID NO: 663414 - RNA, 24 nt, Human
cuggaggcucccacugacaucuga

SEQ ID NO: 663415 - RNA, 19 nt, Human
cuucaagauauuuuugggc

SEQ ID NO: 663416 - RNA, 23 nt, Human
cuucuucuucuucuuguuguucu

SEQ ID NO: 663417 - RNA, 20 nt, Human
ggaaggagagauagaagagg

SEQ ID NO: 663418 - RNA, 20 nt, Human
ggaaggagagauagaagagg

SEQ ID NO: 663419 - RNA, 18 nt, Human
uaaacaacucuuugcaag

SEQ ID NO: 663420 - RNA, 21 nt, Human
uagaagaggguggacagccug

SEQ ID NO: 663421 - RNA, 22 nt, Human
uagaagaggguggacagccugc

SEQ ID NO: 663422 - RNA, 23 nt, Human
uccuuaguacagaacaauggcca

SEQ ID NO: 663423 - RNA, 21 nt, Human
ucuaagccucucauccucaau

SEQ ID NO: 663424 - RNA, 24 nt, Human
ucucuuauagacggaaggagagau

SEQ ID NO: 663425 - RNA, 23 nt, Human
ucuucuucuucuuuuacuucucu

SEQ ID NO: 663426 - RNA, 24 nt, Human
ucuucuuuccacagguugccuugg

SEQ ID NO: 663427 - RNA, 18 nt, Human
ucuuguuguucuucuucu

SEQ ID NO: 663428 - RNA, 21 nt, Human
ucuuucucuucuuuagacucc

SEQ ID NO: 663429 - RNA, 24 nt, Human
ucuuucucuucuuuagacuccuuu

SEQ ID NO: 663430 - RNA, 22 nt, Human
ugaccugacuucuucuucuucu

SEQ ID NO: 663431 - RNA, 18 nt, Human
ugaugaaguuucucauau

SEQ ID NO: 663432 - RNA, 24 nt, Human
ugggcuaaagcaagccugcaucua

SEQ ID NO: 663433 - RNA, 24 nt, Human
uucaucuugauuuucuuucucuuc

SEQ ID NO: 663434 - RNA, 23 nt, Human
uugcuuagcugacucucucuuau

SEQ ID NO: 663435 - RNA, 25 nt, Human
aagguugucuuuauuguuggcuauc

SEQ ID NO: 663436 - RNA, 19 nt, Human
auggcuucucuucuccauc

SEQ ID NO: 663437 - RNA, 20 nt, Human
caauuugauaacagaagacc

SEQ ID NO: 663438 - RNA, 18 nt, Human
ccgcagcccagguccggc

SEQ ID NO: 663439 - RNA, 25 nt, Human
ccuccauacacugcccucugucaug

SEQ ID NO: 663440 - RNA, 23 nt, Human
ccucgguccgggcgccaaagcgg

SEQ ID NO: 663441 - RNA, 19 nt, Human
uccgcagcccagguccggc

SEQ ID NO: 663442 - RNA, 18 nt, Human
uucaauuugauaacagaa

SEQ ID NO: 663443 - RNA, 19 nt, Human
uucugugccuuuguaugua

SEQ ID NO: 663444 - RNA, 21 nt, Human
aaaacaaacaaauuccacaag

SEQ ID NO: 663445 - RNA, 28 nt, Human
aaaacaaacaaauuccacaagccaccga

SEQ ID NO: 663446 - RNA, 20 nt, Human
aaacaaauuccacaagccaa

SEQ ID NO: 663447 - RNA, 24 nt, Human
aaacacuggauuuagaacagucac

SEQ ID NO: 663448 - RNA, 18 nt, Human
aaauauuagaagcaaccu

SEQ ID NO: 663449 - RNA, 18 nt, Human
aaccaggcucgcugcagc

SEQ ID NO: 663450 - RNA, 19 nt, Human
aagcaacccagagacaaag

SEQ ID NO: 663451 - RNA, 21 nt, Human
aagcaacccagagacaaagaa

SEQ ID NO: 663452 - RNA, 22 nt, Human
aauauuagaagcaacccagaga

SEQ ID NO: 663453 - RNA, 24 nt, Human
acacuggauuuagaacagucacau

SEQ ID NO: 663454 - RNA, 18 nt, Human
acagucacaugacaaaaa

SEQ ID NO: 663455 - RNA, 21 nt, Human
caaaacaaacaaauuccacaa

SEQ ID NO: 663456 - RNA, 22 nt, Human
caaauuccacaagccaccgaaa

SEQ ID NO: 663457 - RNA, 23 nt, Human
cacccccuuccccaggggaggcc

SEQ ID NO: 663458 - RNA, 19 nt, Human
cacggaccaacgaaccaac

SEQ ID NO: 663459 - RNA, 21 nt, Human
cagcgaguccgcccccagccc

SEQ ID NO: 663460 - RNA, 18 nt, Human
caggacuggccucuaaac

SEQ ID NO: 663461 - RNA, 21 nt, Human
cagucaaaacaaacaaauucc

SEQ ID NO: 663462 - RNA, 27 nt, Human
caugacaaaaaacaucaacuggaaaag

SEQ ID NO: 663463 - RNA, 23 nt, Human
ccaccgaaagucaggagggcagg

SEQ ID NO: 663464 - RNA, 21 nt, Human
cccacccccuuccccagggga

SEQ ID NO: 663465 - RNA, 19 nt, Human
cccagagacaaagaaaguc

SEQ ID NO: 663466 - RNA, 20 nt, Human
ccccagcgaguccgccccca

SEQ ID NO: 663467 - RNA, 18 nt, Human
ccccaggggaggcccggg

SEQ ID NO: 663468 - RNA, 23 nt, Human
cccucguaagaaagguaucaguc

SEQ ID NO: 663469 - RNA, 19 nt, Human
ccgcccccagcccgaacca

SEQ ID NO: 663470 - RNA, 25 nt, Human
cgaaccaggcucgcugcagccccca

SEQ ID NO: 663471 - RNA, 23 nt, Human
cgcccccagcccgaaccaggcuc

SEQ ID NO: 663472 - RNA, 24 nt, Human
gccagagugcagucagcacauguu

SEQ ID NO: 663473 - RNA, 18 nt, Human
gcccgggucugugcucag

SEQ ID NO: 663474 - RNA, 21 nt, Human
ggaccaacgaaccaacuggca

SEQ ID NO: 663475 - RNA, 21 nt, Human
ggagccuuacucccuccaccu

SEQ ID NO: 663476 - RNA, 21 nt, Human
ggugcuccuucuuuuccaccu

SEQ ID NO: 663477 - RNA, 18 nt, Human
uaagaaagguaucaguca

SEQ ID NO: 663478 - RNA, 21 nt, Human
ucaaaacaaacaaauuccaca

SEQ ID NO: 663479 - RNA, 24 nt, Human
ucaaaacaaacaaauuccacaagc

SEQ ID NO: 663480 - RNA, 21 nt, Human
ucagaggccuccacggaccaa

SEQ ID NO: 663481 - RNA, 23 nt, Human
ucagucaaaacaaacaaauucca

SEQ ID NO: 663482 - RNA, 19 nt, Human
uccaccucggggucuuccc

SEQ ID NO: 663483 - RNA, 21 nt, Human
uccagcucaaggugcuccuuc

SEQ ID NO: 663484 - RNA, 18 nt, Human
uccccaggggaggcccgg

SEQ ID NO: 663485 - RNA, 25 nt, Human
ucccucguaagaaagguaucaguca

SEQ ID NO: 663486 - RNA, 24 nt, Human
ucugugcucagaggccuccacgga

SEQ ID NO: 663487 - RNA, 20 nt, Human
ugcuccuucuuuuccaccuc

SEQ ID NO: 663488 - RNA, 22 nt, Human
uggaaaagggucgccagagugc

SEQ ID NO: 663489 - RNA, 20 nt, Human
auggugaugauagcgauggu

SEQ ID NO: 663490 - RNA, 20 nt, Human
gguggagguagaggugaaug

SEQ ID NO: 663491 - RNA, 18 nt, Human
guagaggugaaugugaug

SEQ ID NO: 663492 - RNA, 24 nt, Human
guagugauggugaugguggagguu

SEQ ID NO: 663493 - RNA, 20 nt, Human
guaguggugauggugaugau

SEQ ID NO: 663494 - RNA, 20 nt, Human
gugauggugaugauagcgau

SEQ ID NO: 663495 - RNA, 22 nt, Human
uauccccuuccccuggccucua

SEQ ID NO: 663496 - RNA, 18 nt, Human
ugaugguagagccccgcu

SEQ ID NO: 663497 - RNA, 21 nt, Human
uggcuguggcagaaguagugg

SEQ ID NO: 663498 - RNA, 24 nt, Human
ugggaaagaacuugccuuuucuca

SEQ ID NO: 663499 - RNA, 22 nt, Human
uuauuuaugaugcuuagccaua

SEQ ID NO: 663500 - RNA, 20 nt, Human
uucgaaaugggaaagaacuu

SEQ ID NO: 663501 - RNA, 21 nt, Human
uucuuuuuuuuuuaaaaguug

SEQ ID NO: 663502 - RNA, 24 nt, Human
uugaguagugauggugaugguuuu

SEQ ID NO: 663503 - RNA, 23 nt, Human
uuuucuuugcccucccuuuaucc

SEQ ID NO: 663504 - RNA, 19 nt, Human
uuuuuuucuuuuuuuuuua

SEQ ID NO: 663505 - RNA, 23 nt, Human
uuuuuuucuuuuuuuuuuaaaag

SEQ ID NO: 663506 - RNA, 22 nt, Human
uuuuuuuuuuuuuuuucuuuuu

SEQ ID NO: 663507 - RNA, 23 nt, Human
aaccaaaacacagcucuuuccaa

SEQ ID NO: 663508 - RNA, 22 nt, Human
aaggcaacagguucaccaccga

SEQ ID NO: 663509 - RNA, 22 nt, Human
aaugauggauacuuuggccuuc

SEQ ID NO: 663510 - RNA, 21 nt, Human
acaggauuugucuuccacauc

SEQ ID NO: 663511 - RNA, 18 nt, Human
accuuaucugcuugaggc

SEQ ID NO: 663512 - RNA, 19 nt, Human
caaaaggacuuucucccac

SEQ ID NO: 663513 - RNA, 19 nt, Human
caaaaggacuuucucccac

SEQ ID NO: 663514 - RNA, 20 nt, Human
caacagguucaccaccgauc

SEQ ID NO: 663515 - RNA, 18 nt, Human
cacacauaauuaugaggu

SEQ ID NO: 663516 - RNA, 21 nt, Human
caccgauccacucccaguggc

SEQ ID NO: 663517 - RNA, 21 nt, Human
cccccuguagggucuguuaua

SEQ ID NO: 663518 - RNA, 19 nt, Human
ccuuccuuuugugaguugg

SEQ ID NO: 663519 - RNA, 25 nt, Human
cuuaucugcuugaggcaguucugcc

SEQ ID NO: 663520 - RNA, 22 nt, Human
gucuugguuuggggacuccagg

SEQ ID NO: 663521 - RNA, 18 nt, Human
uacaguuacaagguugcc

SEQ ID NO: 663522 - RNA, 21 nt, Human
uagaugaugucuguuccauuu

SEQ ID NO: 663523 - RNA, 19 nt, Human
ucaaggaaacuaucccaug

SEQ ID NO: 663524 - RNA, 22 nt, Human
uccaaaaggacuuucucccacc

SEQ ID NO: 663525 - RNA, 24 nt, Human
uccaccuuaucugcuugaggcagu

SEQ ID NO: 663526 - RNA, 19 nt, Human
uccagagugcaguucuuug

SEQ ID NO: 663527 - RNA, 22 nt, Human
ucguucaaaccuauccaaaagg

SEQ ID NO: 663528 - RNA, 21 nt, Human
ugaaaaacaguugucuugguu

SEQ ID NO: 663529 - RNA, 22 nt, Human
ugacaguagccugagugcuggu

SEQ ID NO: 663530 - RNA, 18 nt, Human
ugacuaaugauggauacu

SEQ ID NO: 663531 - RNA, 20 nt, Human
ugccauuucccuugucuuug

SEQ ID NO: 663532 - RNA, 25 nt, Human
ugcuggugccacccggcuggacagg

SEQ ID NO: 663533 - RNA, 23 nt, Human
uggacaggauuugucuuccacag

SEQ ID NO: 663534 - RNA, 24 nt, Human
uggugaaggcaacagguucaccac

SEQ ID NO: 663535 - RNA, 20 nt, Human
uguuugccauuucccuuguc

SEQ ID NO: 663536 - RNA, 21 nt, Human
uuccaggugccuuucugcucu

SEQ ID NO: 663537 - RNA, 24 nt, Human
uucuuuggaaaugagggcaacugg

SEQ ID NO: 663538 - RNA, 19 nt, Human
uugaaccaaaacacagcuc

SEQ ID NO: 663539 - RNA, 20 nt, Human
uuguggcugacuaaugaugg

SEQ ID NO: 663540 - RNA, 24 nt, Human
uuucaaggaaacuaucccaugaua

SEQ ID NO: 663541 - RNA, 21 nt, Human
uuuccaggcgaucccauugca

SEQ ID NO: 663542 - RNA, 21 nt, Human
agaagaaggcagguguuggca

SEQ ID NO: 663543 - RNA, 20 nt, Human
aggcagguguuggcaggcuu

SEQ ID NO: 663544 - RNA, 21 nt, Human
augcugcgggggugggggugg

SEQ ID NO: 663545 - RNA, 20 nt, Human
caccacaagggcagguaugc

SEQ ID NO: 663546 - RNA, 19 nt, Human
cagcggucucucuccacuu

SEQ ID NO: 663547 - RNA, 24 nt, Human
ccagcggucucucuccacuucucc

SEQ ID NO: 663548 - RNA, 24 nt, Human
ccugacccagagcaagcagugugg

SEQ ID NO: 663549 - RNA, 18 nt, Human
ccugccagcggucucucu

SEQ ID NO: 663550 - RNA, 21 nt, Human
ccugccagcggucucucucca

SEQ ID NO: 663551 - RNA, 25 nt, Human
cggggguggggguggcaggggaagc

SEQ ID NO: 663552 - RNA, 21 nt, Human
cuagagcugggcaggcaccac

SEQ ID NO: 663553 - RNA, 20 nt, Human
cucucuccacuucucccuuc

SEQ ID NO: 663554 - RNA, 21 nt, Human
cugcggggguggggguggcag

SEQ ID NO: 663555 - RNA, 19 nt, Human
gacucugcccaccaaaugg

SEQ ID NO: 663556 - RNA, 19 nt, Human
gcggcuaggucaccuccuc

SEQ ID NO: 663557 - RNA, 22 nt, Human
gcugcggggguggggguggcag

SEQ ID NO: 663558 - RNA, 18 nt, Human
ggcucagguagccagcga

SEQ ID NO: 663559 - RNA, 21 nt, Human
ggcuggugggaggaaggacug

SEQ ID NO: 663560 - RNA, 23 nt, Human
uaaggggagacccaggaucuacu

SEQ ID NO: 663561 - RNA, 18 nt, Human
uagcagagaagaaggcag

SEQ ID NO: 663562 - RNA, 19 nt, Human
ugacccagagcaagcagug

SEQ ID NO: 663563 - RNA, 18 nt, Human
ugccagcggucucucucc

SEQ ID NO: 663564 - RNA, 19 nt, Human
uggacagugcuguccuccu

SEQ ID NO: 663565 - RNA, 21 nt, Human
uggcaggcucagguagccagc

SEQ ID NO: 663566 - RNA, 18 nt, Human
uggggcacaaguagugca

SEQ ID NO: 663567 - RNA, 18 nt, Human
uggguggacagugcuguc

SEQ ID NO: 663568 - RNA, 18 nt, Human
uggugggaggaaggacug

SEQ ID NO: 663569 - RNA, 24 nt, Human
aagccugucuucaggagaccccga

SEQ ID NO: 663570 - RNA, 21 nt, Human
aagggcuuuccggagggaggc

SEQ ID NO: 663571 - RNA, 25 nt, Human
aggcaccgaagggucucugagagcc

SEQ ID NO: 663572 - RNA, 22 nt, Human
cagagccagaugcucguuggcc

SEQ ID NO: 663573 - RNA, 22 nt, Human
ccugucuucaggagaccccgag

SEQ ID NO: 663574 - RNA, 22 nt, Human
cgaagggucucugagagccugg

SEQ ID NO: 663575 - RNA, 22 nt, Human
cgcuccgagcucccguaaacgu

SEQ ID NO: 663576 - RNA, 24 nt, Human
cggagggaggccaaggaaagccug

SEQ ID NO: 663577 - RNA, 20 nt, Human
gaaguccuaaaugucucuuc

SEQ ID NO: 663578 - RNA, 24 nt, Human
gaggcaccgaagggucucugagag

SEQ ID NO: 663579 - RNA, 18 nt, Human
gcaauaagggcuuuccgg

SEQ ID NO: 663580 - RNA, 24 nt, Human
ggagaccccgaggcaccgaagggu

SEQ ID NO: 663581 - RNA, 23 nt, Human
ggaggccaaggaaagccugucuu

SEQ ID NO: 663582 - RNA, 24 nt, Human
ggcaauaagggcuuuccggaggga

SEQ ID NO: 663583 - RNA, 24 nt, Human
uacaaguuaaaaguucugaagucc

SEQ ID NO: 663584 - RNA, 22 nt, Human
uaugaucaaacacuucauaugc

SEQ ID NO: 663585 - RNA, 22 nt, Human
uccccggccaggaaacaggggc

SEQ ID NO: 663586 - RNA, 21 nt, Human
uccggagggaggccaaggaaa

SEQ ID NO: 663587 - RNA, 23 nt, Human
ucuccugcuccugucgcgcgcac

SEQ ID NO: 663588 - RNA, 19 nt, Human
ucucugagagccugggauu

SEQ ID NO: 663589 - RNA, 22 nt, Human
aaaaaggaaacacagauaaaga

SEQ ID NO: 663590 - RNA, 27 nt, Human
aaaaaggaaacacagauaaagagaccu

SEQ ID NO: 663591 - RNA, 29 nt, Human
aaaaaggaaacacagauaaagagaccuca

SEQ ID NO: 663592 - RNA, 18 nt, Human
aaaauaccaaaaccuuag

SEQ ID NO: 663593 - RNA, 22 nt, Human
aacuaaaaaggaaacacagaua

SEQ ID NO: 663594 - RNA, 24 nt, Human
aagggcgaggcggaggcagaaccc

SEQ ID NO: 663595 - RNA, 18 nt, Human
acagauaaagagaccuca

SEQ ID NO: 663596 - RNA, 21 nt, Human
aggcacgugcggcuggaaggg

SEQ ID NO: 663597 - RNA, 21 nt, Human
aggcggaggcagaacccaggg

SEQ ID NO: 663598 - RNA, 19 nt, Human
caaaacaagugguucuaac

SEQ ID NO: 663599 - RNA, 27 nt, Human
caaaacaagugguucuaacucagacca

SEQ ID NO: 663600 - RNA, 21 nt, Human
caaaggaccucacucgaggcu

SEQ ID NO: 663601 - RNA, 22 nt, Human
caaaggaccucacucgaggcuc

SEQ ID NO: 663602 - RNA, 19 nt, Human
cacgugcggcuggaagggc

SEQ ID NO: 663603 - RNA, 22 nt, Human
cagggaagacugaacaauggcg

SEQ ID NO: 663604 - RNA, 19 nt, Human
ccaaaggaccucacucgag

SEQ ID NO: 663605 - RNA, 24 nt, Human
cccaugaauacuuccccaaaacaa

SEQ ID NO: 663606 - RNA, 24 nt, Human
cccccgcagggauccccccaggcu

SEQ ID NO: 663607 - RNA, 18 nt, Human
cccgcagggaucccccca

SEQ ID NO: 663608 - RNA, 22 nt, Human
cgcccugcuccucggagcuggc

SEQ ID NO: 663609 - RNA, 19 nt, Human
cggaaagggcuguaaggca

SEQ ID NO: 663610 - RNA, 18 nt, Human
cgugcggcuggaagggcg

SEQ ID NO: 663611 - RNA, 19 nt, Human
cugagcuuucggagguuca

SEQ ID NO: 663612 - RNA, 22 nt, Human
gcaacuaaaaaggaaacacaga

SEQ ID NO: 663613 - RNA, 23 nt, Human
gcgcaacuaaaaaggaaacacag

SEQ ID NO: 663614 - RNA, 20 nt, Human
ggcgaggcggaggcagaacc

SEQ ID NO: 663615 - RNA, 21 nt, Human
ggcgaggcggaggcagaaccc

SEQ ID NO: 663616 - RNA, 24 nt, Human
ggcgaggcggaggcagaacccagg

SEQ ID NO: 663617 - RNA, 23 nt, Human
uaaaaaggaaacacagauaaaga

SEQ ID NO: 663618 - RNA, 23 nt, Human
ucacucgaggcucccccgcaggg

SEQ ID NO: 663619 - RNA, 23 nt, Human
uccccccaggcuggcggggagga

SEQ ID NO: 663620 - RNA, 19 nt, Human
ugaauacuuccccaaaaca

SEQ ID NO: 663621 - RNA, 21 nt, Human
ugccaaaggaccucacucgag

SEQ ID NO: 663622 - RNA, 31 nt, Human
ugccaaaggaccucacucgaggcucccccgg

SEQ ID NO: 663623 - RNA, 22 nt, Human
ugcgcaacuaaaaaggaaacac

SEQ ID NO: 663624 - RNA, 20 nt, Human
ugcggcuggaagggcgaggc

SEQ ID NO: 663625 - RNA, 23 nt, Human
ugggacggucuucagugccaaag

SEQ ID NO: 663626 - RNA, 19 nt, Human
aaaaagaaauaggcacaaa

SEQ ID NO: 663627 - RNA, 25 nt, Human
aaaauacagaacauguaauggaaag

SEQ ID NO: 663628 - RNA, 18 nt, Human
aaaaugaaaaagacagga

SEQ ID NO: 663629 - RNA, 26 nt, Human
aaacaaugcaguaaauauauuaagac

SEQ ID NO: 663630 - RNA, 26 nt, Human
aaguauugaaaaucaauucgagucac

SEQ ID NO: 663631 - RNA, 27 nt, Human
acaguaacaaauauuaaguuauaugcc

SEQ ID NO: 663632 - RNA, 19 nt, Human
agagcuaaaaaaauaguac

SEQ ID NO: 663633 - RNA, 21 nt, Human
agcuagguaacacaacccuca

SEQ ID NO: 663634 - RNA, 21 nt, Human
auggcacaaaauuuaaguugu

SEQ ID NO: 663635 - RNA, 23 nt, Human
caacccucauuuuuacuucuuuc

SEQ ID NO: 663636 - RNA, 19 nt, Human
ccaauucugaaguacucag

SEQ ID NO: 663637 - RNA, 22 nt, Human
ccagccagcuagguaacacaac

SEQ ID NO: 663638 - RNA, 25 nt, Human
ccuguaaacuauaaaaaaguaaauu

SEQ ID NO: 663639 - RNA, 25 nt, Human
cuaaaaaaauaguaccuuaccacaa

SEQ ID NO: 663640 - RNA, 23 nt, Human
gaaauaggcacaaaaaauaaaau

SEQ ID NO: 663641 - RNA, 19 nt, Human
gauauaucccuagagcuaa

SEQ ID NO: 663642 - RNA, 20 nt, Human
ggcacaaaaaauaaaauucc

SEQ ID NO: 663643 - RNA, 22 nt, Human
gggacugaguggggagccccug

SEQ ID NO: 663644 - RNA, 18 nt, Human
gggagccccuggaagugu

SEQ ID NO: 663645 - RNA, 24 nt, Human
guaauggaaagauguuuagaacac

SEQ ID NO: 663646 - RNA, 21 nt, Human
uaaaaaacucauauggcaaag

SEQ ID NO: 663647 - RNA, 23 nt, Human
uaaauaugaaacccauguaugac

SEQ ID NO: 663648 - RNA, 20 nt, Human
uaagacacaaaagggaaaga

SEQ ID NO: 663649 - RNA, 27 nt, Human
uaugacaauaaauuaaaaaugaaaaag

SEQ ID NO: 663650 - RNA, 21 nt, Human
ucacaauacugcaaccauggg

SEQ ID NO: 663651 - RNA, 18 nt, Human
ucccuagagcuaaaaaaa

SEQ ID NO: 663652 - RNA, 22 nt, Human
ucuacaaaaacuuccuagaucu

SEQ ID NO: 663653 - RNA, 20 nt, Human
ugaaauagagucuuuauuuc

SEQ ID NO: 663654 - RNA, 21 nt, Human
ugauacaucuuaauucucuca

SEQ ID NO: 663655 - RNA, 19 nt, Human
ugcaaugagcucaugaugc

SEQ ID NO: 663656 - RNA, 19 nt, Human
ugcauucauuuccagaagc

SEQ ID NO: 663657 - RNA, 21 nt, Human
uggcacaaaauuuaaguuguu

SEQ ID NO: 663658 - RNA, 18 nt, Human
uggggacugaguggggag

SEQ ID NO: 663659 - RNA, 19 nt, Human
uggguuugagaauguugca

SEQ ID NO: 663660 - RNA, 18 nt, Human
uguauuaaaauacagaac

SEQ ID NO: 663661 - RNA, 19 nt, Human
uuaaaaaacucauauggca

SEQ ID NO: 663662 - RNA, 19 nt, Human
uuaguauugcuuuauuuga

SEQ ID NO: 663663 - RNA, 24 nt, Human
uuaguauugcuuuauuugagguuu

SEQ ID NO: 663664 - RNA, 25 nt, Human
uucaaauuauguugugcucauucaa

SEQ ID NO: 663665 - RNA, 24 nt, Human
uucugcugucugguuaucuccuug

SEQ ID NO: 663666 - RNA, 25 nt, Human
uuuuacuucuuucccauuuuucaag

SEQ ID NO: 663667 - RNA, 24 nt, Human
aacuccuucuuaccuucagaucuu

SEQ ID NO: 663668 - RNA, 25 nt, Human
aacucguucaccaggaccucuucca

SEQ ID NO: 663669 - RNA, 23 nt, Human
aagccaagaucagggguaaaaga

SEQ ID NO: 663670 - RNA, 19 nt, Human
accagagcaugucccacaa

SEQ ID NO: 663671 - RNA, 21 nt, Human
agaaagccaagaucaggggua

SEQ ID NO: 663672 - RNA, 20 nt, Human
agaagagaccaagcaucccc

SEQ ID NO: 663673 - RNA, 19 nt, Human
agagaaaggcaagguagca

SEQ ID NO: 663674 - RNA, 24 nt, Human
aggaaagucagggaaaucaugcaa

SEQ ID NO: 663675 - RNA, 22 nt, Human
aggcaagguagcaccggggagc

SEQ ID NO: 663676 - RNA, 19 nt, Human
agggccuuuccaacugagc

SEQ ID NO: 663677 - RNA, 21 nt, Human
agggguaaaagagaaaggcaa

SEQ ID NO: 663678 - RNA, 21 nt, Human
augacacagaaacaucucugc

SEQ ID NO: 663679 - RNA, 26 nt, Human
caaaucuuugagcucagcaguuguua

SEQ ID NO: 663680 - RNA, 18 nt, Human
cacccuuuuccccugucu

SEQ ID NO: 663681 - RNA, 20 nt, Human
caccuuauagaaggaaaaac

SEQ ID NO: 663682 - RNA, 25 nt, Human
cagaagagaccaagcauccccagug

SEQ ID NO: 663683 - RNA, 26 nt, Human
cagcagaagagaccaagcauccccag

SEQ ID NO: 663684 - RNA, 24 nt, Human
caucucugcuuuuaccagcagaag

SEQ ID NO: 663685 - RNA, 21 nt, Human
cauuggucugaauaauuugga

SEQ ID NO: 663686 - RNA, 19 nt, Human
cauuuguaaucaagugacu

SEQ ID NO: 663687 - RNA, 18 nt, Human
ccaggaccucuuccaggc

SEQ ID NO: 663688 - RNA, 19 nt, Human
ccucaauacaauacagucu

SEQ ID NO: 663689 - RNA, 24 nt, Human
ccuuuuccccugucuggcaccuua

SEQ ID NO: 663690 - RNA, 18 nt, Human
cugagcaaaacuguacag

SEQ ID NO: 663691 - RNA, 24 nt, Human
gaccaagcauccccagugaagggg

SEQ ID NO: 663692 - RNA, 20 nt, Human
gagguucccugggaaaggug

SEQ ID NO: 663693 - RNA, 20 nt, Human
gccucuugagggccuuucca

SEQ ID NO: 663694 - RNA, 21 nt, Human
ggguaaaagagaaaggcaagg

SEQ ID NO: 663695 - RNA, 20 nt, Human
guucaccaggaccucuucca

SEQ ID NO: 663696 - RNA, 19 nt, Human
uaacuuuggaucccagaaa

SEQ ID NO: 663697 - RNA, 21 nt, Human
uaacuuuggaucccagaaaca

SEQ ID NO: 663698 - RNA, 18 nt, Human
uaccagagcaugucccac

SEQ ID NO: 663699 - RNA, 23 nt, Human
uaccuucagaucuuuaccuucaa

SEQ ID NO: 663700 - RNA, 21 nt, Human
uaugcaacccauaucugugug

SEQ ID NO: 663701 - RNA, 24 nt, Human
ucaacucucuccuuaauguuuccu

SEQ ID NO: 663702 - RNA, 18 nt, Human
ucaagugacuuuaccuac

SEQ ID NO: 663703 - RNA, 19 nt, Human
ugaaggggcuggcagugug

SEQ ID NO: 663704 - RNA, 22 nt, Human
ugacaucccagauguaccccca

SEQ ID NO: 663705 - RNA, 23 nt, Human
ugagguucccugggaaagguguu

SEQ ID NO: 663706 - RNA, 18 nt, Human
ugagguuucccuguuggc

SEQ ID NO: 663707 - RNA, 26 nt, Human
ugcggcggguaaacucguucaccaac

SEQ ID NO: 663708 - RNA, 22 nt, Human
ugcugcguggacacggcuaugg

SEQ ID NO: 663709 - RNA, 23 nt, Human
uggagggggaaauccuaaggugg

SEQ ID NO: 663710 - RNA, 19 nt, Human
uggaguugcugcguggaca

SEQ ID NO: 663711 - RNA, 19 nt, Human
ugggagaggccauuuggca

SEQ ID NO: 663712 - RNA, 19 nt, Human
uguaaucaagugacuuuac

SEQ ID NO: 663713 - RNA, 20 nt, Human
uguacccccacccuuuuccc

SEQ ID NO: 663714 - RNA, 19 nt, Human
ugucaguaggcugaccuaa

SEQ ID NO: 663715 - RNA, 21 nt, Human
uguuuggaauucucauccuga

SEQ ID NO: 663716 - RNA, 21 nt, Human
uguuugucagcugucaguagg

SEQ ID NO: 663717 - RNA, 24 nt, Human
uuaaaugccagagaaguuuuaaca

SEQ ID NO: 663718 - RNA, 22 nt, Human
uuaccagcagaagagaccaagc

SEQ ID NO: 663719 - RNA, 22 nt, Human
uucauuuuauggaccuuagcag

SEQ ID NO: 663720 - RNA, 19 nt, Human
uuggaucccagaaacacua

SEQ ID NO: 663721 - RNA, 18 nt, Human
uuuccccugucuggcacc

SEQ ID NO: 663722 - RNA, 24 nt, Human
aaagugcugggauuacagguguga

SEQ ID NO: 663723 - RNA, 18 nt, Human
aagugcugggauuacagg

SEQ ID NO: 663724 - RNA, 19 nt, Human
aagugcugggauuacaggu

SEQ ID NO: 663725 - RNA, 26 nt, Human
aagugcugggauuacaggugugagcc

SEQ ID NO: 663726 - RNA, 23 nt, Human
acagauaugcccaccaugacuag

SEQ ID NO: 663727 - RNA, 23 nt, Human
accuuagccucccacauagcugg

SEQ ID NO: 663728 - RNA, 24 nt, Human
acucacucuguugcccaggcugga

SEQ ID NO: 663729 - RNA, 27 nt, Human
acucuguugcccaggcuggagaacacu

SEQ ID NO: 663730 - RNA, 18 nt, Human
agacagggucucgccaug

SEQ ID NO: 663731 - RNA, 23 nt, Human
agacagggucucgccauguugcc

SEQ ID NO: 663732 - RNA, 23 nt, Human
agcauuuuugcuuugugucuucg

SEQ ID NO: 663733 - RNA, 18 nt, Human
agccuugaccucccaggc

SEQ ID NO: 663734 - RNA, 20 nt, Human
aggaagugaggugugaauag

SEQ ID NO: 663735 - RNA, 25 nt, Human
agguaauccuccuuccucggccucc

SEQ ID NO: 663736 - RNA, 20 nt, Human
aggugguguggucugaaggc

SEQ ID NO: 663737 - RNA, 19 nt, Human
aucauccauucaucaagga

SEQ ID NO: 663738 - RNA, 18 nt, Human
auccauucaucaaggaca

SEQ ID NO: 663739 - RNA, 24 nt, Human
caaagugcugggauuacaggugug

SEQ ID NO: 663740 - RNA, 22 nt, Human
cacucuguugcccaggcuggag

SEQ ID NO: 663741 - RNA, 22 nt, Human
cacugcagccuugaccucccag

SEQ ID NO: 663742 - RNA, 20 nt, Human
cagccuugaccucccaggcu

SEQ ID NO: 663743 - RNA, 24 nt, Human
cagccuugaccucccaggcugaaa

SEQ ID NO: 663744 - RNA, 24 nt, Human
cagcucacugcagccuugaccucc

SEQ ID NO: 663745 - RNA, 18 nt, Human
caggcuggagaacacuga

SEQ ID NO: 663746 - RNA, 24 nt, Human
cagggacucacucuguugcccagg

SEQ ID NO: 663747 - RNA, 24 nt, Human
cagggucucgccauguugcccagg

SEQ ID NO: 663748 - RNA, 23 nt, Human
cauagcugggacuacagauaugc

SEQ ID NO: 663749 - RNA, 19 nt, Human
cauguugcccaggcugguc

SEQ ID NO: 663750 - RNA, 21 nt, Human
cauguugcccaggcuggucuc

SEQ ID NO: 663751 - RNA, 23 nt, Human
cauguugcccaggcuggucucga

SEQ ID NO: 663752 - RNA, 24 nt, Human
cauguugcccaggcuggucucgaa

SEQ ID NO: 663753 - RNA, 21 nt, Human
ccaaagugcugggauuacagg

SEQ ID NO: 663754 - RNA, 21 nt, Human
ccaaagugcugggauuacagg

SEQ ID NO: 663755 - RNA, 24 nt, Human
ccaaagugcugggauuacaggugu

SEQ ID NO: 663756 - RNA, 19 nt, Human
ccacauagcugggacuaca

SEQ ID NO: 663757 - RNA, 23 nt, Human
ccacgcccagccuauuucuuuga

SEQ ID NO: 663758 - RNA, 25 nt, Human
ccagccuauuucuuugauuuguguc

SEQ ID NO: 663759 - RNA, 22 nt, Human
ccauguugcccaggcuggucuc

SEQ ID NO: 663760 - RNA, 23 nt, Human
cccaccuuagccucccacauagc

SEQ ID NO: 663761 - RNA, 22 nt, Human
cccaggcuggagaacacugacg

SEQ ID NO: 663762 - RNA, 26 nt, Human
ccucccaccuuagccucccacauagc

SEQ ID NO: 663763 - RNA, 20 nt, Human
ccuccuuccucggccuccca

SEQ ID NO: 663764 - RNA, 18 nt, Human
ccugggcucagguaaucc

SEQ ID NO: 663765 - RNA, 25 nt, Human
cgaacuccugggcucagguaauccu

SEQ ID NO: 663766 - RNA, 24 nt, Human
cgccauguugcccaggcuggucuc

SEQ ID NO: 663767 - RNA, 27 nt, Human
cgccauguugcccaggcuggucucgaa

SEQ ID NO: 663768 - RNA, 23 nt, Human
cucacucuguugcccaggcugga

SEQ ID NO: 663769 - RNA, 24 nt, Human
cucacucuguugcccaggcuggag

SEQ ID NO: 663770 - RNA, 23 nt, Human
cucccacauagcugggacuacag

SEQ ID NO: 663771 - RNA, 24 nt, Human
cugaaacgauccucccaccuuagc

SEQ ID NO: 663772 - RNA, 23 nt, Human
cugagucccugaggaaagcucag

SEQ ID NO: 663773 - RNA, 24 nt, Human
cugagucccugaggaaagcucagg

SEQ ID NO: 663774 - RNA, 22 nt, Human
cugggcucagguaauccuccuu

SEQ ID NO: 663775 - RNA, 24 nt, Human
cuuagccucccacauagcugggac

SEQ ID NO: 663776 - RNA, 20 nt, Human
gagacagggacucacucugu

SEQ ID NO: 663777 - RNA, 21 nt, Human
gauuacaggugugagccccac

SEQ ID NO: 663778 - RNA, 24 nt, Human
gccauguugcccaggcuggucucg

SEQ ID NO: 663779 - RNA, 23 nt, Human
ggacuuuucccugggaacuuggg

SEQ ID NO: 663780 - RNA, 23 nt, Human
ggauuacaggugugagccccacg

SEQ ID NO: 663781 - RNA, 19 nt, Human
ggggacuuuucccugggaa

SEQ ID NO: 663782 - RNA, 22 nt, Human
uagagacagggucucgccaugu

SEQ ID NO: 663783 - RNA, 19 nt, Human
uagauauaaugcaggaaca

SEQ ID NO: 663784 - RNA, 19 nt, Human
uauaaugcaggaacaguuu

SEQ ID NO: 663785 - RNA, 24 nt, Human
ucaaggacaauggggacuuuuccc

SEQ ID NO: 663786 - RNA, 19 nt, Human
ucacugcagccuugaccuc

SEQ ID NO: 663787 - RNA, 23 nt, Human
ucacugcagccuugaccucccag

SEQ ID NO: 663788 - RNA, 24 nt, Human
ucacugcagccuugaccucccagg

SEQ ID NO: 663789 - RNA, 23 nt, Human
ucccaaagugcugggauuacagg

SEQ ID NO: 663790 - RNA, 20 nt, Human
ucccugaggaaagcucaggc

SEQ ID NO: 663791 - RNA, 21 nt, Human
uccuccuuccucggccuccca

SEQ ID NO: 663792 - RNA, 22 nt, Human
uccugggcucagguaauccucc

SEQ ID NO: 663793 - RNA, 19 nt, Human
uccuuccucggccucccaa

SEQ ID NO: 663794 - RNA, 23 nt, Human
ucucgaacuccugggcucaggua

SEQ ID NO: 663795 - RNA, 23 nt, Human
ucucgccauguugcccaggcugg

SEQ ID NO: 663796 - RNA, 24 nt, Human
ucucgccauguugcccaggcuggu

SEQ ID NO: 663797 - RNA, 26 nt, Human
ucucgccauguugcccaggcuggucu

SEQ ID NO: 663798 - RNA, 27 nt, Human
ucucgccauguugcccaggcuggucuc

SEQ ID NO: 663799 - RNA, 22 nt, Human
ucugagucccugaggaaagcuc

SEQ ID NO: 663800 - RNA, 18 nt, Human
ucuguugcccaggcugga

SEQ ID NO: 663801 - RNA, 24 nt, Human
ucuuugauuugugucuguaugacc

SEQ ID NO: 663802 - RNA, 19 nt, Human
ugacagccucaguauauau

SEQ ID NO: 663803 - RNA, 24 nt, Human
ugacgccaucacagcucacugcag

SEQ ID NO: 663804 - RNA, 24 nt, Human
ugcccaggcuggucucgaacuccu

SEQ ID NO: 663805 - RNA, 28 nt, Human
ugcccaggcuggucucgaacuccugggc

SEQ ID NO: 663806 - RNA, 25 nt, Human
ugcugggauuacaggugugagcccc

SEQ ID NO: 663807 - RNA, 24 nt, Human
ugggaaucuggguaugacagccuc

SEQ ID NO: 663808 - RNA, 23 nt, Human
ugggacuacagauaugcccacca

SEQ ID NO: 663809 - RNA, 18 nt, Human
ugggauuacaggugugag

SEQ ID NO: 663810 - RNA, 19 nt, Human
ugggauuacaggugugagc

SEQ ID NO: 663811 - RNA, 23 nt, Human
ugggauuacaggugugagcccca

SEQ ID NO: 663812 - RNA, 23 nt, Human
ugggauuacaggugugagcccca

SEQ ID NO: 663813 - RNA, 24 nt, Human
uguagagacagggucucgccaugu

SEQ ID NO: 663814 - RNA, 23 nt, Human
uuccucggccucccaaagugcug

SEQ ID NO: 663815 - RNA, 24 nt, Human
uugcuuugugucuucgucccugau

SEQ ID NO: 663816 - RNA, 24 nt, Human
uuguagagacagggucucgccaug

SEQ ID NO: 663817 - RNA, 18 nt, Human
uuuguagagacagggucu

SEQ ID NO: 663818 - RNA, 24 nt, Human
uuuguagagacagggucucgccau

SEQ ID NO: 663819 - RNA, 23 nt, Human
uuuuuuguagagacagggucucg

SEQ ID NO: 663820 - RNA, 26 nt, Human
aagugccucuucagugccaagauaaa

SEQ ID NO: 663821 - RNA, 22 nt, Human
aaguguuggggggcugcccggc

SEQ ID NO: 663822 - RNA, 19 nt, Human
aauggcaaaaguuagauac

SEQ ID NO: 663823 - RNA, 23 nt, Human
accccacccaauggcaaaaguua

SEQ ID NO: 663824 - RNA, 23 nt, Human
acuggggcugcaaagcuggccag

SEQ ID NO: 663825 - RNA, 24 nt, Human
agcugcugggggggcagagguugu

SEQ ID NO: 663826 - RNA, 24 nt, Human
aggagcagugacugggccucagag

SEQ ID NO: 663827 - RNA, 19 nt, Human
aggcaggggagggguuggu

SEQ ID NO: 663828 - RNA, 23 nt, Human
agggccguggggagggaggggca

SEQ ID NO: 663829 - RNA, 21 nt, Human
aggggagggguugguuggagc

SEQ ID NO: 663830 - RNA, 22 nt, Human
agugaaauggaaaacccuuuga

SEQ ID NO: 663831 - RNA, 18 nt, Human
caccccugggguaccccc

SEQ ID NO: 663832 - RNA, 20 nt, Human
caccuugaggucugcuccag

SEQ ID NO: 663833 - RNA, 19 nt, Human
cacucuucucucuucucuu

SEQ ID NO: 663834 - RNA, 18 nt, Human
cagcggagcagguuggcu

SEQ ID NO: 663835 - RNA, 18 nt, Human
cagcugcugggggggcag

SEQ ID NO: 663836 - RNA, 23 nt, Human
cagggcaggagaaguguuggggg

SEQ ID NO: 663837 - RNA, 19 nt, Human
cagugccaagauaaacuaa

SEQ ID NO: 663838 - RNA, 18 nt, Human
ccaagauaaacuaacaag

SEQ ID NO: 663839 - RNA, 18 nt, Human
ccaccccacccaauggca

SEQ ID NO: 663840 - RNA, 19 nt, Human
ccacgggaaagacuggccc

SEQ ID NO: 663841 - RNA, 24 nt, Human
ccacuccugagccuuaacaccccu

SEQ ID NO: 663842 - RNA, 18 nt, Human
cccacaauccucucugcc

SEQ ID NO: 663843 - RNA, 24 nt, Human
cccauaaagacugcuuacucugga

SEQ ID NO: 663844 - RNA, 28 nt, Human
ccccagaccccuguucuaaagggugccc

SEQ ID NO: 663845 - RNA, 21 nt, Human
cccggccagggcccccccaga

SEQ ID NO: 663846 - RNA, 20 nt, Human
cccugacugcugcccacucc

SEQ ID NO: 663847 - RNA, 22 nt, Human
cccugggguacccccagacccc

SEQ ID NO: 663848 - RNA, 19 nt, Human
cccuggugggcuggagggg

SEQ ID NO: 663849 - RNA, 26 nt, Human
ccggccagggcccccccagacgagaa

SEQ ID NO: 663850 - RNA, 19 nt, Human
ccucagagacucuggucuc

SEQ ID NO: 663851 - RNA, 22 nt, Human
ccucagagacucuggucuccug

SEQ ID NO: 663852 - RNA, 21 nt, Human
ccugagucuaugcccugccau

SEQ ID NO: 663853 - RNA, 18 nt, Human
cgccgugcagcccccgca

SEQ ID NO: 663854 - RNA, 23 nt, Human
cgggaaagacuggccccguagca

SEQ ID NO: 663855 - RNA, 24 nt, Human
cucacucuucucucuucucuuucc

SEQ ID NO: 663856 - RNA, 18 nt, Human
cucccacaauccucucug

SEQ ID NO: 663857 - RNA, 24 nt, Human
cuccgucuaucucucucucucucu

SEQ ID NO: 663858 - RNA, 20 nt, Human
cuccugagccuuaacacccc

SEQ ID NO: 663859 - RNA, 22 nt, Human
cucucuucucuuuccgcuccuu

SEQ ID NO: 663860 - RNA, 18 nt, Human
cugagccuuaacaccccu

SEQ ID NO: 663861 - RNA, 20 nt, Human
cugcucacucuucucucuuc

SEQ ID NO: 663862 - RNA, 19 nt, Human
cugcugcccacuccugagc

SEQ ID NO: 663863 - RNA, 20 nt, Human
cuguccccaccccacccaau

SEQ ID NO: 663864 - RNA, 24 nt, Human
cuugggaacagaaagacccacaac

SEQ ID NO: 663865 - RNA, 23 nt, Human
cuuuccgcuccuucaauugggaa

SEQ ID NO: 663866 - RNA, 23 nt, Human
gagcaaaaacggauuccucccac

SEQ ID NO: 663867 - RNA, 19 nt, Human
gagcagcuguccccacccc

SEQ ID NO: 663868 - RNA, 19 nt, Human
gaggcaggggagggguugg

SEQ ID NO: 663869 - RNA, 20 nt, Human
gaggcaggggagggguuggu

SEQ ID NO: 663870 - RNA, 22 nt, Human
gcagcggagcagguuggcuaga

SEQ ID NO: 663871 - RNA, 20 nt, Human
gccagggcccccccagacga

SEQ ID NO: 663872 - RNA, 22 nt, Human
gcccuggugggcuggaggggcu

SEQ ID NO: 663873 - RNA, 22 nt, Human
ggagaaguguuggggggcugcc

SEQ ID NO: 663874 - RNA, 18 nt, Human
ggaggggcuggcgccgug

SEQ ID NO: 663875 - RNA, 27 nt, Human
ggauuccucccacaauccucucugccu

SEQ ID NO: 663876 - RNA, 22 nt, Human
gggaugggggugggugggggga

SEQ ID NO: 663877 - RNA, 19 nt, Human
ggggacugggucccaggag

SEQ ID NO: 663878 - RNA, 19 nt, Human
ggggagggguugguuggag

SEQ ID NO: 663879 - RNA, 18 nt, Human
ggggaggguaguuggggg

SEQ ID NO: 663880 - RNA, 20 nt, Human
ggggaugggggugggugggg

SEQ ID NO: 663881 - RNA, 23 nt, Human
ggggaugggggugggugggggga

SEQ ID NO: 663882 - RNA, 19 nt, Human
ggggguggguggggggagg

SEQ ID NO: 663883 - RNA, 19 nt, Human
gggguggguggggggaggg

SEQ ID NO: 663884 - RNA, 19 nt, Human
gggguggguggggggaggg

SEQ ID NO: 663885 - RNA, 20 nt, Human
ggguggggggaggguaguug

SEQ ID NO: 663886 - RNA, 21 nt, Human
ggguggggggaggguaguugg

SEQ ID NO: 663887 - RNA, 20 nt, Human
gguggguggggggaggguag

SEQ ID NO: 663888 - RNA, 23 nt, Human
guggagcaaaaacggauuccucc

SEQ ID NO: 663889 - RNA, 18 nt, Human
guggauaugguggaggca

SEQ ID NO: 663890 - RNA, 20 nt, Human
guuucauucgcugguggcag

SEQ ID NO: 663891 - RNA, 22 nt, Human
uagcacugauuuuccaccuccc

SEQ ID NO: 663892 - RNA, 23 nt, Human
uaucucucucucucucucucaaa

SEQ ID NO: 663893 - RNA, 19 nt, Human
ucacucuucucucuucucu

SEQ ID NO: 663894 - RNA, 23 nt, Human
uccaccuccccuccaggggacug

SEQ ID NO: 663895 - RNA, 20 nt, Human
uccagagaucuccgucuauc

SEQ ID NO: 663896 - RNA, 22 nt, Human
uccagagaucuccgucuaucuc

SEQ ID NO: 663897 - RNA, 20 nt, Human
uccauguucaggaucuuggg

SEQ ID NO: 663898 - RNA, 19 nt, Human
ucccuacaaauagggguag

SEQ ID NO: 663899 - RNA, 20 nt, Human
ucccuacaaauagggguagg

SEQ ID NO: 663900 - RNA, 24 nt, Human
ucccuacaaauagggguaggaaac

SEQ ID NO: 663901 - RNA, 23 nt, Human
uccgcgagcagcuguccccaccc

SEQ ID NO: 663902 - RNA, 22 nt, Human
ucucucucucucucucucaauc

SEQ ID NO: 663903 - RNA, 24 nt, Human
ucucucuucucuuuccgcuccuuc

SEQ ID NO: 663904 - RNA, 23 nt, Human
ucugccugagucuaugcccugcc

SEQ ID NO: 663905 - RNA, 21 nt, Human
ucugcuguucugugguccaug

SEQ ID NO: 663906 - RNA, 20 nt, Human
ucuucucuuuccgcuccuuc

SEQ ID NO: 663907 - RNA, 20 nt, Human
ucuugggaacagaaagaccc

SEQ ID NO: 663908 - RNA, 19 nt, Human
ugaaauggaaaacccuuug

SEQ ID NO: 663909 - RNA, 18 nt, Human
ugacugcugcccacuccu

SEQ ID NO: 663910 - RNA, 22 nt, Human
ugacugggccucagagaaagcc

SEQ ID NO: 663911 - RNA, 23 nt, Human
ugcaaagcuggccagcugcuggg

SEQ ID NO: 663912 - RNA, 23 nt, Human
ugccaagauaaacuaacaagugg

SEQ ID NO: 663913 - RNA, 22 nt, Human
ugcccggccagggcccccccag

SEQ ID NO: 663914 - RNA, 19 nt, Human
uggaggggcuggcgccgug

SEQ ID NO: 663915 - RNA, 28 nt, Human
uggcaaaaguuagauacucgaaagugcc

SEQ ID NO: 663916 - RNA, 21 nt, Human
uggcagggccguggggaggga

SEQ ID NO: 663917 - RNA, 20 nt, Human
ugggauuugaguuuucccuu

SEQ ID NO: 663918 - RNA, 20 nt, Human
uggggagggaggggcaugcg

SEQ ID NO: 663919 - RNA, 20 nt, Human
uggggggaggguaguugggg

SEQ ID NO: 663920 - RNA, 19 nt, Human
uggggguggguggggggag

SEQ ID NO: 663921 - RNA, 18 nt, Human
ugggguacccccagaccc

SEQ ID NO: 663922 - RNA, 22 nt, Human
uggguggggggaggguaguugg

SEQ ID NO: 663923 - RNA, 24 nt, Human
ugguggaggcaggggagggguugg

SEQ ID NO: 663924 - RNA, 22 nt, Human
ugucucucccugacugcugccc

SEQ ID NO: 663925 - RNA, 22 nt, Human
uucagugccaagauaaacuaac

SEQ ID NO: 663926 - RNA, 19 nt, Human
uugcuuuuucccuuuuuau

SEQ ID NO: 663927 - RNA, 19 nt, Human
uuucauucgcugguggcag

SEQ ID NO: 663928 - RNA, 19 nt, Human
aaagcaagauaaguacaug

SEQ ID NO: 663929 - RNA, 22 nt, Human
aagaacccuucauggugaaaag

SEQ ID NO: 663930 - RNA, 18 nt, Human
aagcaagauaaguacaug

SEQ ID NO: 663931 - RNA, 20 nt, Human
aaucuaucgagauuuucccc

SEQ ID NO: 663932 - RNA, 22 nt, Human
aauguaguuuaaaguuuaugua

SEQ ID NO: 663933 - RNA, 18 nt, Human
agaaacaaaauaaauucu

SEQ ID NO: 663934 - RNA, 21 nt, Human
agaagaacccuucauggugaa

SEQ ID NO: 663935 - RNA, 22 nt, Human
agacaagauagaggcuugcugg

SEQ ID NO: 663936 - RNA, 22 nt, Human
agagauucuaggaccuucuuac

SEQ ID NO: 663937 - RNA, 25 nt, Human
agccagcaccggccacgcacccgcg

SEQ ID NO: 663938 - RNA, 24 nt, Human
auaucuaaaaaauauuaaaaucac

SEQ ID NO: 663939 - RNA, 22 nt, Human
cacaaucccauuaaaccaacac

SEQ ID NO: 663940 - RNA, 21 nt, Human
ccagaagaacccuucauggug

SEQ ID NO: 663941 - RNA, 22 nt, Human
ccccaccuugccugagaccaga

SEQ ID NO: 663942 - RNA, 19 nt, Human
ccuccagaagaacccuuca

SEQ ID NO: 663943 - RNA, 25 nt, Human
cugaaugauagcaauauaauuuuua

SEQ ID NO: 663944 - RNA, 19 nt, Human
cuguuggugaaaaagcaag

SEQ ID NO: 663945 - RNA, 19 nt, Human
gaagggguacggagacagg

SEQ ID NO: 663946 - RNA, 20 nt, Human
gaaguacguugaaaguuuau

SEQ ID NO: 663947 - RNA, 26 nt, Human
gaaugccaaggagacuuuaagccaaa

SEQ ID NO: 663948 - RNA, 23 nt, Human
gcaguucuuggacgguggcugau

SEQ ID NO: 663949 - RNA, 22 nt, Human
gccaaggagacuuuaagccaaa

SEQ ID NO: 663950 - RNA, 23 nt, Human
gcccaguccccaccuugccugag

SEQ ID NO: 663951 - RNA, 26 nt, Human
gggcaagaaacaaaauaaagggaccc

SEQ ID NO: 663952 - RNA, 21 nt, Human
uaauaaagcagggcuauuaua

SEQ ID NO: 663953 - RNA, 18 nt, Human
uagaggcuugcugguguc

SEQ ID NO: 663954 - RNA, 22 nt, Human
uauguggauauuaucugugugg

SEQ ID NO: 663955 - RNA, 21 nt, Human
uccuugacagcacuuagacaa

SEQ ID NO: 663956 - RNA, 21 nt, Human
ugaaaaagcaagauaaguaca

SEQ ID NO: 663957 - RNA, 21 nt, Human
ugaaacaaaauggaaaaaaag

SEQ ID NO: 663958 - RNA, 21 nt, Human
ugccugagaccagaacuccca

SEQ ID NO: 663959 - RNA, 23 nt, Human
ugcuggugucuggagagauucua

SEQ ID NO: 663960 - RNA, 21 nt, Human
uguauguggauauuaucugug

SEQ ID NO: 663961 - RNA, 19 nt, Human
ugugcaguucuuggacggu

SEQ ID NO: 663962 - RNA, 22 nt, Human
acccccugcaggccuuagagac

SEQ ID NO: 663963 - RNA, 23 nt, Human
agagggagaagaggcagggcuug

SEQ ID NO: 663964 - RNA, 25 nt, Human
aggaccugggcucggcgcgggccug

SEQ ID NO: 663965 - RNA, 19 nt, Human
aggagcacagauggggagc

SEQ ID NO: 663966 - RNA, 20 nt, Human
aggcagggcuuguccugccc

SEQ ID NO: 663967 - RNA, 21 nt, Human
aggcagggcuuguccugccuc

SEQ ID NO: 663968 - RNA, 22 nt, Human
aggccuuagagacgcuggagcc

SEQ ID NO: 663969 - RNA, 22 nt, Human
cccaggaggggagccagguggc

SEQ ID NO: 663970 - RNA, 20 nt, Human
ccccauggggcuggaccccc

SEQ ID NO: 663971 - RNA, 19 nt, Human
cccccugcaggccuuagag

SEQ ID NO: 663972 - RNA, 21 nt, Human
ccucccaggaggggagccagg

SEQ ID NO: 663973 - RNA, 24 nt, Human
ccugcccccaaggcuuggccugug

SEQ ID NO: 663974 - RNA, 19 nt, Human
ccugggcucggcgcgggcc

SEQ ID NO: 663975 - RNA, 24 nt, Human
ccuuagagacgcuggagccgccau

SEQ ID NO: 663976 - RNA, 26 nt, Human
gaccugggcucggcgcgggccugggc

SEQ ID NO: 663977 - RNA, 21 nt, Human
gagccagguggcugaaggcaa

SEQ ID NO: 663978 - RNA, 20 nt, Human
gagccgccauccugcuggag

SEQ ID NO: 663979 - RNA, 21 nt, Human
gagccgccauccugcuggagc

SEQ ID NO: 663980 - RNA, 20 nt, Human
ggccgcgggcgcgggggggc

SEQ ID NO: 663981 - RNA, 18 nt, Human
ggccugggcucgggaacc

SEQ ID NO: 663982 - RNA, 19 nt, Human
ggcuuggccugugcccuug

SEQ ID NO: 663983 - RNA, 19 nt, Human
ggggccgcgggcgcggggg

SEQ ID NO: 663984 - RNA, 22 nt, Human
gguaaugucuaacauguugcag

SEQ ID NO: 663985 - RNA, 19 nt, Human
gguggcugaaggcaagcac

SEQ ID NO: 663986 - RNA, 22 nt, Human
guucugcccugggggauccugg

SEQ ID NO: 663987 - RNA, 18 nt, Human
ucuucuggauccagcaga

SEQ ID NO: 663988 - RNA, 18 nt, Human
ugcccccuuugccugccc

SEQ ID NO: 663989 - RNA, 24 nt, Human
ugcccuuggugcccccuuugccug

SEQ ID NO: 663990 - RNA, 22 nt, Human
ugccugcccaagucuacugguc

SEQ ID NO: 663991 - RNA, 18 nt, Human
uggcugaaggcaagcacu

SEQ ID NO: 663992 - RNA, 19 nt, Human
uggcugaaggcaagcacug

SEQ ID NO: 663993 - RNA, 23 nt, Human
ugggcucggcgcgggccugggcu

SEQ ID NO: 663994 - RNA, 24 nt, Human
uggggccgcgggcgcgggggggcg

SEQ ID NO: 663995 - RNA, 20 nt, Human
aaaaaguccaaaaucaaagg

SEQ ID NO: 663996 - RNA, 24 nt, Human
aaaacaaaaaaguccaaaaucaaa

SEQ ID NO: 663997 - RNA, 18 nt, Human
aaacaaaaaaguccaaaa

SEQ ID NO: 663998 - RNA, 23 nt, Human
aaacaaaaaaguccaaaaucaaa

SEQ ID NO: 663999 - RNA, 24 nt, Human
aaaggaaagcacccguuuuaaacc

SEQ ID NO: 664000 - RNA, 19 nt, Human
acccugaaauuucaggaaa

SEQ ID NO: 664001 - RNA, 30 nt, Human
agcuccgucccucuaggcucucaguuccaa

SEQ ID NO: 664002 - RNA, 26 nt, Human
aggaaagcacccguuuuaaacccuca

SEQ ID NO: 664003 - RNA, 23 nt, Human
caaaaaaaacuaaauucuaagug

SEQ ID NO: 664004 - RNA, 23 nt, Human
cauccaacuucuuuauucuugag

SEQ ID NO: 664005 - RNA, 22 nt, Human
cccccaacuccgagcgcguccg

SEQ ID NO: 664006 - RNA, 22 nt, Human
cccugaaauuucaggaaauaaa

SEQ ID NO: 664007 - RNA, 20 nt, Human
ccgcagaccgcgagccggaa

SEQ ID NO: 664008 - RNA, 24 nt, Human
ccucuuccgaaccuuggcgaggac

SEQ ID NO: 664009 - RNA, 19 nt, Human
ccuugggccccgggagccu

SEQ ID NO: 664010 - RNA, 20 nt, Human
ccuugggccccgggagccuc

SEQ ID NO: 664011 - RNA, 20 nt, Human
cgagccggaaggcggcuugg

SEQ ID NO: 664012 - RNA, 22 nt, Human
cgcuguggcgcaugcccagaag

SEQ ID NO: 664013 - RNA, 22 nt, Human
cggccuugggccccgggagccu

SEQ ID NO: 664014 - RNA, 23 nt, Human
cucagggcucacugcagucuggc

SEQ ID NO: 664015 - RNA, 23 nt, Human
cucccgaggcguggcaaaggccu

SEQ ID NO: 664016 - RNA, 23 nt, Human
gagcuccgucccucuaggcucuc

SEQ ID NO: 664017 - RNA, 22 nt, Human
gaggcguggcaaaggccuaaaa

SEQ ID NO: 664018 - RNA, 22 nt, Human
gcccccaacuccgagcgcgucc

SEQ ID NO: 664019 - RNA, 18 nt, Human
gccuugggccccgggagc

SEQ ID NO: 664020 - RNA, 18 nt, Human
gcucacugcagucuggcc

SEQ ID NO: 664021 - RNA, 22 nt, Human
gcugagacccugaaauuucagg

SEQ ID NO: 664022 - RNA, 22 nt, Human
ggaaagcacccguuuuaaaccc

SEQ ID NO: 664023 - RNA, 20 nt, Human
gggcggcuguugaguucgug

SEQ ID NO: 664024 - RNA, 20 nt, Human
guccaaaaucaaaggaaagc

SEQ ID NO: 664025 - RNA, 19 nt, Human
guccaauggcuuggaacau

SEQ ID NO: 664026 - RNA, 18 nt, Human
uccaaaaucaaaggaaag

SEQ ID NO: 664027 - RNA, 21 nt, Human
ucccucuaggcucucaguucc

SEQ ID NO: 664028 - RNA, 21 nt, Human
uccgaaccuuggcgaggaccc

SEQ ID NO: 664029 - RNA, 21 nt, Human
uccgcagaccgcgagccggaa

SEQ ID NO: 664030 - RNA, 22 nt, Human
ugaaauuucaggaaauaaacau

SEQ ID NO: 664031 - RNA, 22 nt, Human
ugagagaaucagcacugacuca

SEQ ID NO: 664032 - RNA, 22 nt, Human
uucaagguccucuuccgaaccu

SEQ ID NO: 664033 - RNA, 21 nt, Human
uuggcgaaggcccccaacucc

SEQ ID NO: 664034 - RNA, 22 nt, Human
uuguugaaacaaaaaugaagau

SEQ ID NO: 664035 - RNA, 21 nt, Human
aaaaaaaacuuuguuaaggca

SEQ ID NO: 664036 - RNA, 25 nt, Human
aaaaaaaagggaguuuccaaggaaa

SEQ ID NO: 664037 - RNA, 18 nt, Human
aacacuuugggaggcuga

SEQ ID NO: 664038 - RNA, 24 nt, Human
aacacuuugggaggcugaggcggg

SEQ ID NO: 664039 - RNA, 20 nt, Human
aacauagugaaauccugucu

SEQ ID NO: 664040 - RNA, 19 nt, Human
aaccuggccaacauaguga

SEQ ID NO: 664041 - RNA, 24 nt, Human
aaucgcuugaacccaggaggcaga

SEQ ID NO: 664042 - RNA, 19 nt, Human
acaaauaaaaaccagggag

SEQ ID NO: 664043 - RNA, 19 nt, Human
acaagagcgaaacuccauc

SEQ ID NO: 664044 - RNA, 20 nt, Human
acaagagcgaaacuccaucu

SEQ ID NO: 664045 - RNA, 21 nt, Human
acaagagcgaaacuccaucuc

SEQ ID NO: 664046 - RNA, 20 nt, Human
acagggcucaauacauaaaa

SEQ ID NO: 664047 - RNA, 19 nt, Human
acaguggcucacaccugaa

SEQ ID NO: 664048 - RNA, 22 nt, Human
accacuguacuccagccugggc

SEQ ID NO: 664049 - RNA, 24 nt, Human
accacuguacuccagccugggcaa

SEQ ID NO: 664050 - RNA, 24 nt, Human
accagcugggcgcggugacucacg

SEQ ID NO: 664051 - RNA, 24 nt, Human
acccaggaggcagaggcugcagug

SEQ ID NO: 664052 - RNA, 25 nt, Human
acuguacuccagccugggcaacaag

SEQ ID NO: 664053 - RNA, 23 nt, Human
acuguagcauguauguccaaagg

SEQ ID NO: 664054 - RNA, 22 nt, Human
agaaucgcuugaacccaggagg

SEQ ID NO: 664055 - RNA, 20 nt, Human
agaggcugcagugagccaag

SEQ ID NO: 664056 - RNA, 20 nt, Human
agcaauaccagcugggcgcg

SEQ ID NO: 664057 - RNA, 23 nt, Human
agcugggcaugguggugggugcc

SEQ ID NO: 664058 - RNA, 18 nt, Human
aggaggcagaggcugcag

SEQ ID NO: 664059 - RNA, 21 nt, Human
aggaggcagaggcugcaguga

SEQ ID NO: 664060 - RNA, 24 nt, Human
aggcagaggcaggagaaucgcuug

SEQ ID NO: 664061 - RNA, 24 nt, Human
aggcagaggcugcagugagccaag

SEQ ID NO: 664062 - RNA, 25 nt, Human
aggcagaggcugcagugagccaaga

SEQ ID NO: 664063 - RNA, 23 nt, Human
aggcaggagaaucgcuugaaccc

SEQ ID NO: 664064 - RNA, 24 nt, Human
aggcaggagaaucgcuugaaccca

SEQ ID NO: 664065 - RNA, 20 nt, Human
aggccgaggcugguagauca

SEQ ID NO: 664066 - RNA, 23 nt, Human
aggcugcagugagccaagaucau

SEQ ID NO: 664067 - RNA, 26 nt, Human
aggcugguagaucaucugaggucagg

SEQ ID NO: 664068 - RNA, 24 nt, Human
auaccacuguacuccagccugggc

SEQ ID NO: 664069 - RNA, 22 nt, Human
auacuaacagaaauaaaacauu

SEQ ID NO: 664070 - RNA, 24 nt, Human
aucauaccacuguacuccagccug

SEQ ID NO: 664071 - RNA, 21 nt, Human
aucucaaaaaaaaaaaaaaag

SEQ ID NO: 664072 - RNA, 24 nt, Human
auggaauuaaaauauuaacaauga

SEQ ID NO: 664073 - RNA, 19 nt, Human
caaaaaaaaaaaaaaaggg

SEQ ID NO: 664074 - RNA, 24 nt, Human
caacacuuugggaggcugaggcgg

SEQ ID NO: 664075 - RNA, 21 nt, Human
caacauagugaaauccugucu

SEQ ID NO: 664076 - RNA, 24 nt, Human
caacauagugaaauccugucucua

SEQ ID NO: 664077 - RNA, 23 nt, Human
caagauaauucuuagaaagauga

SEQ ID NO: 664078 - RNA, 18 nt, Human
cacaccugaaucccagca

SEQ ID NO: 664079 - RNA, 20 nt, Human
cacagcacagccuacaaagc

SEQ ID NO: 664080 - RNA, 24 nt, Human
cacgccuguaaucccaacacuuug

SEQ ID NO: 664081 - RNA, 21 nt, Human
cacgcugcccaggacucugaa

SEQ ID NO: 664082 - RNA, 18 nt, Human
cacuguacuccagccugg

SEQ ID NO: 664083 - RNA, 19 nt, Human
cacuguacuccagccuggg

SEQ ID NO: 664084 - RNA, 20 nt, Human
cacuguacuccagccugggc

SEQ ID NO: 664085 - RNA, 21 nt, Human
cacuguacuccagccugggca

SEQ ID NO: 664086 - RNA, 23 nt, Human
cacuguacuccagccugggcaac

SEQ ID NO: 664087 - RNA, 24 nt, Human
cacuguacuccagccugggcaaca

SEQ ID NO: 664088 - RNA, 22 nt, Human
cagacacagcacagccuacaaa

SEQ ID NO: 664089 - RNA, 25 nt, Human
cagaggcaggagaaucgcuugaacc

SEQ ID NO: 664090 - RNA, 22 nt, Human
caugguggugggugccuguaau

SEQ ID NO: 664091 - RNA, 21 nt, Human
cauucagugaccacaacuuuc

SEQ ID NO: 664092 - RNA, 20 nt, Human
ccacuguacuccagccuggg

SEQ ID NO: 664093 - RNA, 20 nt, Human
ccacuguacuccagccuggg

SEQ ID NO: 664094 - RNA, 21 nt, Human
ccacuguacuccagccugggc

SEQ ID NO: 664095 - RNA, 22 nt, Human
ccacuguacuccagccugggca

SEQ ID NO: 664096 - RNA, 23 nt, Human
ccacuguacuccagccugggcaa

SEQ ID NO: 664097 - RNA, 24 nt, Human
ccacuguacuccagccugggcaac

SEQ ID NO: 664098 - RNA, 24 nt, Human
cccugcugggcacaguggcucaca

SEQ ID NO: 664099 - RNA, 22 nt, Human
ccuggccaacauagugaaaucc

SEQ ID NO: 664100 - RNA, 24 nt, Human
ccuggccaacauagugaaauccug

SEQ ID NO: 664101 - RNA, 22 nt, Human
ccuguaaucccaacacuuuggg

SEQ ID NO: 664102 - RNA, 18 nt, Human
ccuguaaucccagcuacu

SEQ ID NO: 664103 - RNA, 21 nt, Human
ccuguaaucccagcuacuugg

SEQ ID NO: 664104 - RNA, 22 nt, Human
ccugucucuacuaaaaauacaa

SEQ ID NO: 664105 - RNA, 23 nt, Human
cgaaacuccaucucaaaaaaaaa

SEQ ID NO: 664106 - RNA, 19 nt, Human
cgcacgcugcccaggacuc

SEQ ID NO: 664107 - RNA, 26 nt, Human
cucaaaaaaaaaaaaaaagggaguuu

SEQ ID NO: 664108 - RNA, 23 nt, Human
cucacaccugaaucccagcacuu

SEQ ID NO: 664109 - RNA, 23 nt, Human
cucacaccugaaucccagcacuu

SEQ ID NO: 664110 - RNA, 22 nt, Human
cucacgccuguaaucccaacac

SEQ ID NO: 664111 - RNA, 24 nt, Human
cucacgccuguaaucccaacacuu

SEQ ID NO: 664112 - RNA, 19 nt, Human
cuccaucucaaaaaaaaaa

SEQ ID NO: 664113 - RNA, 20 nt, Human
cuuagaaagaugaagcaucc

SEQ ID NO: 664114 - RNA, 23 nt, Human
gagaccaaccuggccaacauagu

SEQ ID NO: 664115 - RNA, 18 nt, Human
gaggcugcagugagccaa

SEQ ID NO: 664116 - RNA, 25 nt, Human
gaggcugguagaucaucugagguca

SEQ ID NO: 664117 - RNA, 24 nt, Human
gaucaucugaggucaggagcuuga

SEQ ID NO: 664118 - RNA, 22 nt, Human
gcaggagaaucgcuugaaccca

SEQ ID NO: 664119 - RNA, 20 nt, Human
gcauaaagauuucacugaca

SEQ ID NO: 664120 - RNA, 24 nt, Human
gccaacauagugaaauccugucuc

SEQ ID NO: 664121 - RNA, 28 nt, Human
gcgcagccgccaggaagaggggaacgcc

SEQ ID NO: 664122 - RNA, 20 nt, Human
ggcacaguggcucacaccug

SEQ ID NO: 664123 - RNA, 23 nt, Human
ggcaugguggugggugccuguaa

SEQ ID NO: 664124 - RNA, 23 nt, Human
ggcgcggugacucacgccuguaa

SEQ ID NO: 664125 - RNA, 19 nt, Human
ggugacucacgccuguaau

SEQ ID NO: 664126 - RNA, 24 nt, Human
ggugccuguaaucccagcuacuug

SEQ ID NO: 664127 - RNA, 21 nt, Human
ggugggugccuguaaucccag

SEQ ID NO: 664128 - RNA, 24 nt, Human
gguggugggugccuguaaucccag

SEQ ID NO: 664129 - RNA, 25 nt, Human
guacuccagccugggcaacaagagc

SEQ ID NO: 664130 - RNA, 23 nt, Human
guggcucacaccugaaucccagc

SEQ ID NO: 664131 - RNA, 22 nt, Human
uaacagaaauaaaacauuuaug

SEQ ID NO: 664132 - RNA, 20 nt, Human
uaagcuucugcuuuuccaca

SEQ ID NO: 664133 - RNA, 22 nt, Human
uaccacuguacuccagccuggg

SEQ ID NO: 664134 - RNA, 24 nt, Human
uacuccagccugggcaacaagagc

SEQ ID NO: 664135 - RNA, 25 nt, Human
uacuccagccugggcaacaagagcg

SEQ ID NO: 664136 - RNA, 23 nt, Human
uagaucaucugaggucaggagcu

SEQ ID NO: 664137 - RNA, 24 nt, Human
uagaucaucugaggucaggagcuu

SEQ ID NO: 664138 - RNA, 23 nt, Human
uaugaauaaaguccaaagccaag

SEQ ID NO: 664139 - RNA, 23 nt, Human
ucaaaaaaaaaaaaaaagggagu

SEQ ID NO: 664140 - RNA, 21 nt, Human
ucacaccugaaucccagcacu

SEQ ID NO: 664141 - RNA, 23 nt, Human
ucauaccacuguacuccagccug

SEQ ID NO: 664142 - RNA, 23 nt, Human
uccaucucaaaaaaaaaaaaaaa

SEQ ID NO: 664143 - RNA, 28 nt, Human
ucucaaaaaaaaaaaaaaagggaguuuc

SEQ ID NO: 664144 - RNA, 24 nt, Human
ucucuacuaaaaauacaaaaaauu

SEQ ID NO: 664145 - RNA, 22 nt, Human
ucugaggucaggagcuugagac

SEQ ID NO: 664146 - RNA, 23 nt, Human
ucugaggucaggagcuugagacc

SEQ ID NO: 664147 - RNA, 18 nt, Human
ucuuugguuuuaucacuu

SEQ ID NO: 664148 - RNA, 21 nt, Human
ugaaauguuaacacagggcuc

SEQ ID NO: 664149 - RNA, 22 nt, Human
ugaauaaaguccaaagccaaga

SEQ ID NO: 664150 - RNA, 21 nt, Human
ugacucacgccuguaauccca

SEQ ID NO: 664151 - RNA, 24 nt, Human
ugccuguaaucccagcuacuuggg

SEQ ID NO: 664152 - RNA, 25 nt, Human
ugcucuucuuaagugaaauguuaau

SEQ ID NO: 664153 - RNA, 23 nt, Human
uggcagcuauauuagucagaagc

SEQ ID NO: 664154 - RNA, 24 nt, Human
uggccaacauagugaaauccuguc

SEQ ID NO: 664155 - RNA, 21 nt, Human
uggcucacaccugaaucccag

SEQ ID NO: 664156 - RNA, 23 nt, Human
uggcucacaccugaaucccagca

SEQ ID NO: 664157 - RNA, 20 nt, Human
ugggaggcagaggcaggaga

SEQ ID NO: 664158 - RNA, 24 nt, Human
ugggaggcagaggcaggagaaucg

SEQ ID NO: 664159 - RNA, 19 nt, Human
ugggaggcugaggcgggug

SEQ ID NO: 664160 - RNA, 20 nt, Human
ugggaggcugaggcgggugg

SEQ ID NO: 664161 - RNA, 23 nt, Human
ugguagaucaucugaggucagga

SEQ ID NO: 664162 - RNA, 22 nt, Human
uggugggugccuguaaucccag

SEQ ID NO: 664163 - RNA, 24 nt, Human
uggugggugccuguaaucccagcu

SEQ ID NO: 664164 - RNA, 24 nt, Human
ugguggugggugccuguaauccca

SEQ ID NO: 664165 - RNA, 18 nt, Human
uguccaaagggaauagaa

SEQ ID NO: 664166 - RNA, 24 nt, Human
uuagcugggcaugguggugggugc

SEQ ID NO: 664167 - RNA, 22 nt, Human
uuaugaauaaaguccaaagcca

SEQ ID NO: 664168 - RNA, 24 nt, Human
uucagacacagcacagccuacaaa

SEQ ID NO: 664169 - RNA, 20 nt, Human
uugggaggcagaggcaggag

SEQ ID NO: 664170 - RNA, 19 nt, Human
aaaaaaagaagagacaaca

SEQ ID NO: 664171 - RNA, 23 nt, Human
aaaaagaagagacaacagugaag

SEQ ID NO: 664172 - RNA, 21 nt, Human
aaagugcagggaccaaaacca

SEQ ID NO: 664173 - RNA, 24 nt, Human
aaagugcagggaccaaaaccagag

SEQ ID NO: 664174 - RNA, 20 nt, Human
aacgaugaagccgacagaau

SEQ ID NO: 664175 - RNA, 23 nt, Human
aagaagagacaacagugacauca

SEQ ID NO: 664176 - RNA, 20 nt, Human
aagguggaugaagguggcuu

SEQ ID NO: 664177 - RNA, 21 nt, Human
acagauaugauaaucugugcu

SEQ ID NO: 664178 - RNA, 18 nt, Human
accccuugcauccaguca

SEQ ID NO: 664179 - RNA, 19 nt, Human
acccuccaguaacauccau

SEQ ID NO: 664180 - RNA, 19 nt, Human
acuuuguaacacaggcaug

SEQ ID NO: 664181 - RNA, 25 nt, Human
agacagcucccuacagagcagaaag

SEQ ID NO: 664182 - RNA, 28 nt, Human
agccaaaaggcggaggagcuccccaggg

SEQ ID NO: 664183 - RNA, 20 nt, Human
aggcaccggagucacaccac

SEQ ID NO: 664184 - RNA, 20 nt, Human
aggcagagggaaagagcaga

SEQ ID NO: 664185 - RNA, 20 nt, Human
agggagugggggaacacgga

SEQ ID NO: 664186 - RNA, 21 nt, Human
aguaacuaccuuacuaacaaa

SEQ ID NO: 664187 - RNA, 23 nt, Human
agugaccagccccauccugaagc

SEQ ID NO: 664188 - RNA, 24 nt, Human
auuuuucuggcucucccuccucuc

SEQ ID NO: 664189 - RNA, 19 nt, Human
caaacagugccuggcacac

SEQ ID NO: 664190 - RNA, 22 nt, Human
caaagugcagggaccaaaacca

SEQ ID NO: 664191 - RNA, 24 nt, Human
caacuuaagagaaugaaccuauga

SEQ ID NO: 664192 - RNA, 25 nt, Human
caauucaaaucaguggucaagucaa

SEQ ID NO: 664193 - RNA, 23 nt, Human
cacaaagugcagggaccaaaacc

SEQ ID NO: 664194 - RNA, 21 nt, Human
cacaauaucacaggauaauaa

SEQ ID NO: 664195 - RNA, 22 nt, Human
caccccccgaccccagguggca

SEQ ID NO: 664196 - RNA, 18 nt, Human
cacuuagggacacacacc

SEQ ID NO: 664197 - RNA, 22 nt, Human
cagacacaauaaagaacuaaag

SEQ ID NO: 664198 - RNA, 19 nt, Human
cagaguccuggcagaaaca

SEQ ID NO: 664199 - RNA, 20 nt, Human
cagcauauaaaaagacauca

SEQ ID NO: 664200 - RNA, 23 nt, Human
cagcuaggcugaaggcauaaaac

SEQ ID NO: 664201 - RNA, 19 nt, Human
caggaauucauuugggggg

SEQ ID NO: 664202 - RNA, 19 nt, Human
cauccuucuaauccugcug

SEQ ID NO: 664203 - RNA, 23 nt, Human
caugugguucaccaggaggcacc

SEQ ID NO: 664204 - RNA, 21 nt, Human
ccaugugucuuaucauccugg

SEQ ID NO: 664205 - RNA, 21 nt, Human
ccauugcccuuuaccccaaac

SEQ ID NO: 664206 - RNA, 24 nt, Human
cccaaacucuccaaccaccagcau

SEQ ID NO: 664207 - RNA, 24 nt, Human
cccaucccugggaagaagacuguu

SEQ ID NO: 664208 - RNA, 23 nt, Human
cccauccugaagcuacccagggg

SEQ ID NO: 664209 - RNA, 20 nt, Human
cccauucuccuuuacccucc

SEQ ID NO: 664210 - RNA, 21 nt, Human
ccccaaacucuccaaccacca

SEQ ID NO: 664211 - RNA, 23 nt, Human
ccccuuugcaccccccgacccca

SEQ ID NO: 664212 - RNA, 22 nt, Human
cccuaccugcuuucucucccug

SEQ ID NO: 664213 - RNA, 22 nt, Human
ccggagucacaccacaaagugc

SEQ ID NO: 664214 - RNA, 19 nt, Human
ccuagacuaaaggggcagc

SEQ ID NO: 664215 - RNA, 27 nt, Human
ccugcuuucucucccugucuuuuuccc

SEQ ID NO: 664216 - RNA, 21 nt, Human
ccugucuuuuucccauucucc

SEQ ID NO: 664217 - RNA, 20 nt, Human
cuccaccaacaaaccacugu

SEQ ID NO: 664218 - RNA, 22 nt, Human
cuccaugugucuuaucauccug

SEQ ID NO: 664219 - RNA, 18 nt, Human
cuccccagauguugaugg

SEQ ID NO: 664220 - RNA, 20 nt, Human
cucccuccucuccauccuua

SEQ ID NO: 664221 - RNA, 20 nt, Human
cucccugucuuuuucccaac

SEQ ID NO: 664222 - RNA, 23 nt, Human
cuugaaguuucuucugggaugug

SEQ ID NO: 664223 - RNA, 18 nt, Human
gaagccaaaaggcggagg

SEQ ID NO: 664224 - RNA, 26 nt, Human
gaccccagguggcacccuccaguaac

SEQ ID NO: 664225 - RNA, 23 nt, Human
ggaccaaaaccagagaaggugga

SEQ ID NO: 664226 - RNA, 20 nt, Human
ggagacuuuguaacacaggc

SEQ ID NO: 664227 - RNA, 25 nt, Human
ggaggagcuccccagggaguggggg

SEQ ID NO: 664228 - RNA, 18 nt, Human
gggaacacggaggucagc

SEQ ID NO: 664229 - RNA, 18 nt, Human
gugcagggaccaaaacca

SEQ ID NO: 664230 - RNA, 22 nt, Human
uaaaaagacaucacuuuggaga

SEQ ID NO: 664231 - RNA, 19 nt, Human
uaaaacccuaccugcuuuc

SEQ ID NO: 664232 - RNA, 19 nt, Human
uaaagaacuaaagagacag

SEQ ID NO: 664233 - RNA, 22 nt, Human
uaaucacugcaauaguccagau

SEQ ID NO: 664234 - RNA, 21 nt, Human
uaccccaaacucuccaaccac

SEQ ID NO: 664235 - RNA, 21 nt, Human
uacuccuuccccuuugcaccc

SEQ ID NO: 664236 - RNA, 22 nt, Human
uagacuaaaggggcagccccua

SEQ ID NO: 664237 - RNA, 22 nt, Human
uagauaucaggaauucauuugg

SEQ ID NO: 664238 - RNA, 20 nt, Human
uagcaguggaaguguugaaa

SEQ ID NO: 664239 - RNA, 22 nt, Human
uaggaaaaagggauaauccauc

SEQ ID NO: 664240 - RNA, 21 nt, Human
uaucaggaauucauuuggggg

SEQ ID NO: 664241 - RNA, 20 nt, Human
uauccagaagcucucugaac

SEQ ID NO: 664242 - RNA, 20 nt, Human
uauuucacaauaucacagga

SEQ ID NO: 664243 - RNA, 22 nt, Human
uauuucacaauaucacaggaua

SEQ ID NO: 664244 - RNA, 21 nt, Human
ucaaggcagagggaaagagca

SEQ ID NO: 664245 - RNA, 20 nt, Human
ucaguugcccuccuccccag

SEQ ID NO: 664246 - RNA, 22 nt, Human
ucaguugcccuccuccccagau

SEQ ID NO: 664247 - RNA, 21 nt, Human
ucaugagaggcaucgggugcc

SEQ ID NO: 664248 - RNA, 24 nt, Human
uccauguguucagguauccagaag

SEQ ID NO: 664249 - RNA, 18 nt, Human
ucccaacgggucauguuu

SEQ ID NO: 664250 - RNA, 21 nt, Human
ucccuacagagcagaaagccc

SEQ ID NO: 664251 - RNA, 18 nt, Human
ucccugggaagaagacug

SEQ ID NO: 664252 - RNA, 25 nt, Human
uccuaucucuuacgguuggugggag

SEQ ID NO: 664253 - RNA, 20 nt, Human
uccugguuccuagacuaaag

SEQ ID NO: 664254 - RNA, 23 nt, Human
ucuccuuuacccuccucuccuuc

SEQ ID NO: 664255 - RNA, 27 nt, Human
ucucugaacccaguccuuugggagcuu

SEQ ID NO: 664256 - RNA, 22 nt, Human
ucuucuguguuauacauugugc

SEQ ID NO: 664257 - RNA, 18 nt, Human
ugaaggaaagggugcgga

SEQ ID NO: 664258 - RNA, 20 nt, Human
ugaaggcauaaaacccuacc

SEQ ID NO: 664259 - RNA, 21 nt, Human
ugaagguuuugaacaaaugaa

SEQ ID NO: 664260 - RNA, 21 nt, Human
ugagcacuguuuucagcacug

SEQ ID NO: 664261 - RNA, 20 nt, Human
ugcaauaauaccaccaagaa

SEQ ID NO: 664262 - RNA, 19 nt, Human
ugcaccccccgaccccagg

SEQ ID NO: 664263 - RNA, 18 nt, Human
ugcagcaauagcauugga

SEQ ID NO: 664264 - RNA, 21 nt, Human
ugcccaggacucuguccacac

SEQ ID NO: 664265 - RNA, 22 nt, Human
ugcuaagugccuuacauuaccu

SEQ ID NO: 664266 - RNA, 22 nt, Human
uggaaagaugaugggaucuuca

SEQ ID NO: 664267 - RNA, 19 nt, Human
uggugguuauagcagugga

SEQ ID NO: 664268 - RNA, 25 nt, Human
uguccacacuuagggacacacaccc

SEQ ID NO: 664269 - RNA, 19 nt, Human
uguucagguauccagaagc

SEQ ID NO: 664270 - RNA, 23 nt, Human
uguucagguauccagaagcucuc

SEQ ID NO: 664271 - RNA, 24 nt, Human
uucauauauuuuucuggcucuccc

SEQ ID NO: 664272 - RNA, 24 nt, Human
uuccagugaccagccccauccuga

SEQ ID NO: 664273 - RNA, 20 nt, Human
uuccauacuccuuccccuuu

SEQ ID NO: 664274 - RNA, 20 nt, Human
uugcaccccccgaccccagg

SEQ ID NO: 664275 - RNA, 22 nt, Human
uugcaccccccgaccccaggug

SEQ ID NO: 664276 - RNA, 24 nt, Human
uuucccauucuccuuuacccuccu

SEQ ID NO: 664277 - RNA, 22 nt, Human
uuuccugacuuucgucucucuc

SEQ ID NO: 664278 - RNA, 24 nt, Human
uuuucuggcucucccuccucucca

SEQ ID NO: 664279 - RNA, 23 nt, Human
aaaaaaaaaaaaaaaagcaaaaa

SEQ ID NO: 664280 - RNA, 26 nt, Human
aaaaaaaaaaaaaaaagcaaaaacca

SEQ ID NO: 664281 - RNA, 25 nt, Human
aaaaaaaaaaaaaagcaaaaaccaa

SEQ ID NO: 664282 - RNA, 26 nt, Human
aaaaaaaaaaagcaaaaaccaaaaaa

SEQ ID NO: 664283 - RNA, 22 nt, Human
aaaaaaaaccaaaaaaaaccau

SEQ ID NO: 664284 - RNA, 20 nt, Human
aaaaaaaaccaucugggucc

SEQ ID NO: 664285 - RNA, 22 nt, Human
aaaaaaaagcaaaaaccaaaaa

SEQ ID NO: 664286 - RNA, 18 nt, Human
aaaaaaaccaaaaaaaac

SEQ ID NO: 664287 - RNA, 22 nt, Human
aaaaaaaccaucuggguccaaa

SEQ ID NO: 664288 - RNA, 25 nt, Human
aaaccaaaaaaaaccaucugggucc

SEQ ID NO: 664289 - RNA, 22 nt, Human
aaagaaaagcaagaugaaacaa

SEQ ID NO: 664290 - RNA, 20 nt, Human
aaagaaaggaguugaagaau

SEQ ID NO: 664291 - RNA, 19 nt, Human
aaagcaagaugaaacaaaa

SEQ ID NO: 664292 - RNA, 23 nt, Human
aagaaaagcaagaugaaacaaaa

SEQ ID NO: 664293 - RNA, 22 nt, Human
aagacuguaacuuccugagaac

SEQ ID NO: 664294 - RNA, 20 nt, Human
aaggcaaagccaccucuauu

SEQ ID NO: 664295 - RNA, 21 nt, Human
acaaugucaacaucaauguua

SEQ ID NO: 664296 - RNA, 18 nt, Human
acauucuucaggauuuaa

SEQ ID NO: 664297 - RNA, 18 nt, Human
accaaaaaaaaaaaaaaa

SEQ ID NO: 664298 - RNA, 20 nt, Human
acccuuuaaaagcaaagauu

SEQ ID NO: 664299 - RNA, 24 nt, Human
acuuuguacauucaugagaagcug

SEQ ID NO: 664300 - RNA, 26 nt, Human
agacagauguaaaagacuucaguuuc

SEQ ID NO: 664301 - RNA, 20 nt, Human
agacagauguaaaagacuuu

SEQ ID NO: 664302 - RNA, 18 nt, Human
agagaaaaaaaagagaga

SEQ ID NO: 664303 - RNA, 21 nt, Human
agcaaaaaccaaaaaaaaaaa

SEQ ID NO: 664304 - RNA, 18 nt, Human
agcaucuuucuacuccug

SEQ ID NO: 664305 - RNA, 21 nt, Human
agcaucuuucuacuccugcca

SEQ ID NO: 664306 - RNA, 21 nt, Human
aggauuuaacaagucaaaaua

SEQ ID NO: 664307 - RNA, 21 nt, Human
agguugugccaaaguuuacau

SEQ ID NO: 664308 - RNA, 25 nt, Human
aguucugucgcucagggcaccagcg

SEQ ID NO: 664309 - RNA, 18 nt, Human
aucuagacagauguaaaa

SEQ ID NO: 664310 - RNA, 23 nt, Human
augaaucaguacaggguugguga

SEQ ID NO: 664311 - RNA, 24 nt, Human
auggguucuuuucauauugaauuu

SEQ ID NO: 664312 - RNA, 26 nt, Human
augucaacaucaauguuaauaaaaau

SEQ ID NO: 664313 - RNA, 18 nt, Human
auuuacagggccuuccuu

SEQ ID NO: 664314 - RNA, 24 nt, Human
caaaaaaaaaaaaaaaagcaaaaa

SEQ ID NO: 664315 - RNA, 18 nt, Human
cagaauucaaaucuagac

SEQ ID NO: 664316 - RNA, 20 nt, Human
cagcuaaacuauagauaacc

SEQ ID NO: 664317 - RNA, 20 nt, Human
caugacccuuuaaaagcaaa

SEQ ID NO: 664318 - RNA, 25 nt, Human
ccaaaaaaaaaaaaaaaaaccaaaa

SEQ ID NO: 664319 - RNA, 22 nt, Human
cccuaccagaguucugucgcuc

SEQ ID NO: 664320 - RNA, 19 nt, Human
cugauugagauauucaguc

SEQ ID NO: 664321 - RNA, 20 nt, Human
gaaaauccuuuauuuuguag

SEQ ID NO: 664322 - RNA, 21 nt, Human
gaauggaacaucuguuuaacc

SEQ ID NO: 664323 - RNA, 18 nt, Human
gagaugcugcuuugcugu

SEQ ID NO: 664324 - RNA, 22 nt, Human
gaggaaaggcugggucuggaaa

SEQ ID NO: 664325 - RNA, 24 nt, Human
gcaaugaaucaguacaggguuggu

SEQ ID NO: 664326 - RNA, 30 nt, Human
gcacuaauuagcuguguguguguaugagaa

SEQ ID NO: 664327 - RNA, 21 nt, Human
ggaaaggggagggagagcagc

SEQ ID NO: 664328 - RNA, 21 nt, Human
ggcaaugauuuuaacaauuau

SEQ ID NO: 664329 - RNA, 22 nt, Human
uaaaagacuucaguuucaaauu

SEQ ID NO: 664330 - RNA, 19 nt, Human
uaaagucauugaacccaug

SEQ ID NO: 664331 - RNA, 21 nt, Human
uaaaugaaaauccuuuauuuu

SEQ ID NO: 664332 - RNA, 24 nt, Human
uaaaugaaaauccuuuauuuugua

SEQ ID NO: 664333 - RNA, 21 nt, Human
uaacaagucaaaauaaaagca

SEQ ID NO: 664334 - RNA, 26 nt, Human
uaaccaaaaaaaaaaaaaaaagcaaa

SEQ ID NO: 664335 - RNA, 20 nt, Human
uaagcugcaaaaagaaaguu

SEQ ID NO: 664336 - RNA, 18 nt, Human
uacagccagcccccuacc

SEQ ID NO: 664337 - RNA, 19 nt, Human
uaucauacauauugcgugu

SEQ ID NO: 664338 - RNA, 21 nt, Human
ucaguacaggguuggugacau

SEQ ID NO: 664339 - RNA, 19 nt, Human
ucgcucagggcaccagcgg

SEQ ID NO: 664340 - RNA, 20 nt, Human
ucuguaaggaauuaaauugc

SEQ ID NO: 664341 - RNA, 21 nt, Human
ugaaaauucuagguuucaaca

SEQ ID NO: 664342 - RNA, 19 nt, Human
ugagcaucuuucuacuccu

SEQ ID NO: 664343 - RNA, 18 nt, Human
ugcaaaaagaaaguuaca

SEQ ID NO: 664344 - RNA, 22 nt, Human
ugcaggaaaggggagggagagc

SEQ ID NO: 664345 - RNA, 22 nt, Human
ugccagauugaaaauucuaggu

SEQ ID NO: 664346 - RNA, 20 nt, Human
ugcugcuuugcugucugcau

SEQ ID NO: 664347 - RNA, 19 nt, Human
ugcugucugcauuuuuagg

SEQ ID NO: 664348 - RNA, 21 nt, Human
uuccaugccacgucaauuuac

SEQ ID NO: 664349 - RNA, 19 nt, Human
uugaucuuagagaaacaug

SEQ ID NO: 664350 - RNA, 20 nt, Human
uugaucuuagagaaacaugg

SEQ ID NO: 664351 - RNA, 21 nt, Human
aauacacuucuaguccaacug

SEQ ID NO: 664352 - RNA, 25 nt, Human
acagaacaacaaugcuuacgcgaaa

SEQ ID NO: 664353 - RNA, 21 nt, Human
acgccaagacggcugggaagc

SEQ ID NO: 664354 - RNA, 22 nt, Human
acgcggagcggcggggguugga

SEQ ID NO: 664355 - RNA, 18 nt, Human
acucggcccgcccugcga

SEQ ID NO: 664356 - RNA, 22 nt, Human
agacggcugggaagccccaggc

SEQ ID NO: 664357 - RNA, 21 nt, Human
agagugccgcgggagcuugac

SEQ ID NO: 664358 - RNA, 24 nt, Human
caauaacccucaaaacagaacaac

SEQ ID NO: 664359 - RNA, 24 nt, Human
caaugaguucuucucagcugguuu

SEQ ID NO: 664360 - RNA, 18 nt, Human
cacucggcccgcccugcg

SEQ ID NO: 664361 - RNA, 24 nt, Human
ccacgcuucuuucccccgcgcccc

SEQ ID NO: 664362 - RNA, 25 nt, Human
ccccaggccagcagcggaaguccac

SEQ ID NO: 664363 - RNA, 23 nt, Human
ccugagagcggcguucuacgcgg

SEQ ID NO: 664364 - RNA, 23 nt, Human
ccuggcccuggugagagacugaa

SEQ ID NO: 664365 - RNA, 21 nt, Human
cgccaagacggcugggaagcc

SEQ ID NO: 664366 - RNA, 27 nt, Human
cgcccugcgacuuugaaaccggugccc

SEQ ID NO: 664367 - RNA, 22 nt, Human
cgcgaaauaacacaagccuuaa

SEQ ID NO: 664368 - RNA, 23 nt, Human
cggcggggguuggagaggacaac

SEQ ID NO: 664369 - RNA, 18 nt, Human
cuacgcggagcggcgggg

SEQ ID NO: 664370 - RNA, 19 nt, Human
cuaguccaacugcuuuccc

SEQ ID NO: 664371 - RNA, 21 nt, Human
cuccuuggagacgguggcgcc

SEQ ID NO: 664372 - RNA, 23 nt, Human
cuggggacuccacguucaaccga

SEQ ID NO: 664373 - RNA, 20 nt, Human
gaaguccacucggcccgccc

SEQ ID NO: 664374 - RNA, 20 nt, Human
gacugaagauugcuggggac

SEQ ID NO: 664375 - RNA, 30 nt, Human
gggaagccccaggccagcagcggaaguccc

SEQ ID NO: 664376 - RNA, 21 nt, Human
uacacuucuaguccaacugcu

SEQ ID NO: 664377 - RNA, 19 nt, Human
uacaggaaguggucacugc

SEQ ID NO: 664378 - RNA, 26 nt, Human
uacaggaaguggucacugcucuguuu

SEQ ID NO: 664379 - RNA, 20 nt, Human
uaggagagugccgcgggagc

SEQ ID NO: 664380 - RNA, 19 nt, Human
uaguuuagagcuuucacca

SEQ ID NO: 664381 - RNA, 20 nt, Human
ucccaacucuaaaguucugu

SEQ ID NO: 664382 - RNA, 20 nt, Human
uccuuggagacgguggcgcc

SEQ ID NO: 664383 - RNA, 23 nt, Human
ucuuuacuuacaggaagugguca

SEQ ID NO: 664384 - RNA, 23 nt, Human
ugcaaucugcauccuacucacgc

SEQ ID NO: 664385 - RNA, 24 nt, Human
ugccccggaccacuccuuggagac

SEQ ID NO: 664386 - RNA, 18 nt, Human
ugcgggaaaacaaaacua

SEQ ID NO: 664387 - RNA, 23 nt, Human
ugcucuguuuuccaauaacccuc

SEQ ID NO: 664388 - RNA, 24 nt, Human
ugcucuguuuuccaauaacccuca

SEQ ID NO: 664389 - RNA, 21 nt, Human
uggucacugcucuguuuucca

SEQ ID NO: 664390 - RNA, 18 nt, Human
uggugagagacugaagau

SEQ ID NO: 664391 - RNA, 27 nt, Human
uggugagagacugaagauugcugggga

SEQ ID NO: 664392 - RNA, 21 nt, Human
uggugggaagaggacgcgguc

SEQ ID NO: 664393 - RNA, 21 nt, Human
uucaauacacuucuaguccaa

SEQ ID NO: 664394 - RNA, 20 nt, Human
uugcuggggacuccacguuc

SEQ ID NO: 664395 - RNA, 21 nt, Human
uuggagacgguggcgccucuu

SEQ ID NO: 664396 - RNA, 24 nt, Human
uuucaccaccuuuaccuuccucug

SEQ ID NO: 664397 - RNA, 21 nt, Human
uuugcaggcuuuaccauuuca

SEQ ID NO: 664398 - RNA, 20 nt, Human
aaaaagauuucacagggaca

SEQ ID NO: 664399 - RNA, 19 nt, Human
aaaaggaaagguaugucac

SEQ ID NO: 664400 - RNA, 24 nt, Human
aaacaaacaaacaaacaaauaccc

SEQ ID NO: 664401 - RNA, 21 nt, Human
aaacaaacaaacaaauaccca

SEQ ID NO: 664402 - RNA, 27 nt, Human
aaacacugauaaagugucuuuaaacaa

SEQ ID NO: 664403 - RNA, 19 nt, Human
aaauaugcuugagauggau

SEQ ID NO: 664404 - RNA, 20 nt, Human
aacaaugaauacuuuuacua

SEQ ID NO: 664405 - RNA, 18 nt, Human
aagaggaaaguuguuccu

SEQ ID NO: 664406 - RNA, 24 nt, Human
aauguacauguguacaugugcaca

SEQ ID NO: 664407 - RNA, 19 nt, Human
acaaagacacacucccuca

SEQ ID NO: 664408 - RNA, 21 nt, Human
acauuuuaccuaaaugcaugu

SEQ ID NO: 664409 - RNA, 21 nt, Human
agacaucucucuggccaaaau

SEQ ID NO: 664410 - RNA, 23 nt, Human
agcaacaaucauucagcauucac

SEQ ID NO: 664411 - RNA, 20 nt, Human
aggaagccgguccugcggga

SEQ ID NO: 664412 - RNA, 23 nt, Human
aggccgugagagucggcgaggaa

SEQ ID NO: 664413 - RNA, 23 nt, Human
caaacaaacaaauacccauagaa

SEQ ID NO: 664414 - RNA, 21 nt, Human
caaagacacacucccucaagg

SEQ ID NO: 664415 - RNA, 19 nt, Human
caaccacagcagccgcaac

SEQ ID NO: 664416 - RNA, 18 nt, Human
caacccgccaaaugacaa

SEQ ID NO: 664417 - RNA, 20 nt, Human
caauucacugcauauaaaug

SEQ ID NO: 664418 - RNA, 23 nt, Human
cacagaaaauucacagaaccuaa

SEQ ID NO: 664419 - RNA, 24 nt, Human
caccaggucucuccccucgauuau

SEQ ID NO: 664420 - RNA, 27 nt, Human
cacugcauauaaauguacauguguaca

SEQ ID NO: 664421 - RNA, 20 nt, Human
cagccgcaaccuaacggcgg

SEQ ID NO: 664422 - RNA, 18 nt, Human
cccaggaaggguuuugca

SEQ ID NO: 664423 - RNA, 22 nt, Human
ccuaaaugcauguuaaccacca

SEQ ID NO: 664424 - RNA, 20 nt, Human
cggcgccgccucugcgcgcc

SEQ ID NO: 664425 - RNA, 21 nt, Human
cuaacggcggacgaagacugg

SEQ ID NO: 664426 - RNA, 25 nt, Human
cugccauaaaaagauuucacaggga

SEQ ID NO: 664427 - RNA, 24 nt, Human
cuuuauauuucucacaaagacaca

SEQ ID NO: 664428 - RNA, 19 nt, Human
gacaucucucuggccaaaa

SEQ ID NO: 664429 - RNA, 22 nt, Human
gcauucacuaauucagugugca

SEQ ID NO: 664430 - RNA, 24 nt, Human
gccaaaugacaaacugucauaaac

SEQ ID NO: 664431 - RNA, 19 nt, Human
gcgcgccgugaggacacag

SEQ ID NO: 664432 - RNA, 20 nt, Human
gcucugggcugcgagggacc

SEQ ID NO: 664433 - RNA, 19 nt, Human
gguccaacucuccuggcuc

SEQ ID NO: 664434 - RNA, 21 nt, Human
gguccuauccuccucacuguc

SEQ ID NO: 664435 - RNA, 26 nt, Human
guggccccugucuggcguucuacccc

SEQ ID NO: 664436 - RNA, 25 nt, Human
uaaacaaacaaacaaacaaauaccc

SEQ ID NO: 664437 - RNA, 24 nt, Human
uaagacaucucucuggccaaaaua

SEQ ID NO: 664438 - RNA, 24 nt, Human
uaagaggaaaguuguuccugacau

SEQ ID NO: 664439 - RNA, 21 nt, Human
uacauguguacaugugcacau

SEQ ID NO: 664440 - RNA, 18 nt, Human
uauucaagaaacacugau

SEQ ID NO: 664441 - RNA, 22 nt, Human
ucaagccuuuauauuucucaca

SEQ ID NO: 664442 - RNA, 23 nt, Human
uccaucccccaacccgccaaaug

SEQ ID NO: 664443 - RNA, 22 nt, Human
uccccuagcaacaaucauucag

SEQ ID NO: 664444 - RNA, 21 nt, Human
ucuagauuguuuccuccaucu

SEQ ID NO: 664445 - RNA, 21 nt, Human
ucuuuaaacaaacaaacaaac

SEQ ID NO: 664446 - RNA, 18 nt, Human
ugacaagugauuaccugc

SEQ ID NO: 664447 - RNA, 18 nt, Human
ugacauaaaagcguguaa

SEQ ID NO: 664448 - RNA, 22 nt, Human
ugcacagaaaauucacagaacc

SEQ ID NO: 664449 - RNA, 18 nt, Human
uggcaaccacagcagccg

SEQ ID NO: 664450 - RNA, 20 nt, Human
ugguccaacucuccuggcuc

SEQ ID NO: 664451 - RNA, 19 nt, Human
ugguugauaaaaauguuug

SEQ ID NO: 664452 - RNA, 24 nt, Human
ugguugauaaaaauguuuggauca

SEQ ID NO: 664453 - RNA, 19 nt, Human
uguguacaugugcacaugu

SEQ ID NO: 664454 - RNA, 20 nt, Human
uguguacaugugcacaugug

SEQ ID NO: 664455 - RNA, 18 nt, Human
uuagagauauauauaugu

SEQ ID NO: 664456 - RNA, 24 nt, Human
uuagagauauauauauguaaaaca

SEQ ID NO: 664457 - RNA, 26 nt, Human
uuauacucaaaaggaaagguauguca

SEQ ID NO: 664458 - RNA, 24 nt, Human
aacuaaagaauaccagggcaacag

SEQ ID NO: 664459 - RNA, 23 nt, Human
aagaauaccagggcaacagaaug

SEQ ID NO: 664460 - RNA, 19 nt, Human
aagacuaaucaagcuguag

SEQ ID NO: 664461 - RNA, 21 nt, Human
aaugcaguuaucuugaaaugc

SEQ ID NO: 664462 - RNA, 26 nt, Human
agaaagaagauguaauggcuacaaaa

SEQ ID NO: 664463 - RNA, 20 nt, Human
agaaugcaguuaucuugaaa

SEQ ID NO: 664464 - RNA, 21 nt, Human
agagaagaagaaagaagaugu

SEQ ID NO: 664465 - RNA, 19 nt, Human
agagauuguagcucgggug

SEQ ID NO: 664466 - RNA, 20 nt, Human
agcucggguguggugcgguu

SEQ ID NO: 664467 - RNA, 18 nt, Human
agggguuaaaaacuaaau

SEQ ID NO: 664468 - RNA, 21 nt, Human
caaaaacaagacuaaucaagc

SEQ ID NO: 664469 - RNA, 23 nt, Human
cacaccuguuacgaagccaaaag

SEQ ID NO: 664470 - RNA, 24 nt, Human
cagcggaacccagaucaggccgcu

SEQ ID NO: 664471 - RNA, 21 nt, Human
caggcggauucagcgagauuu

SEQ ID NO: 664472 - RNA, 22 nt, Human
cgaaaggaaucagcggaaccca

SEQ ID NO: 664473 - RNA, 25 nt, Human
cgaaaggaaucagcggaacccagau

SEQ ID NO: 664474 - RNA, 19 nt, Human
cuaaagaauaccagggcaa

SEQ ID NO: 664475 - RNA, 20 nt, Human
gaugauaggaaaaggagaga

SEQ ID NO: 664476 - RNA, 24 nt, Human
gaugauaggaaaaggagagaagaa

SEQ ID NO: 664477 - RNA, 22 nt, Human
gcaaugcugaaaugucuuuagu

SEQ ID NO: 664478 - RNA, 19 nt, Human
ggaaucagcggaacccaga

SEQ ID NO: 664479 - RNA, 18 nt, Human
ggcaacagaaugcaguua

SEQ ID NO: 664480 - RNA, 20 nt, Human
ggcuacaaaaacaagacuaa

SEQ ID NO: 664481 - RNA, 26 nt, Human
guuacgaaaggaaucagcggaaccca

SEQ ID NO: 664482 - RNA, 21 nt, Human
uagcaacuugauaagcaaugc

SEQ ID NO: 664483 - RNA, 18 nt, Human
ucaggguuaaacugcuga

SEQ ID NO: 664484 - RNA, 23 nt, Human
ucaguuaaaaaaauacucucuca

SEQ ID NO: 664485 - RNA, 23 nt, Human
ucccaacuaaagaauaccagggc

SEQ ID NO: 664486 - RNA, 18 nt, Human
uccugggucuccagugcc

SEQ ID NO: 664487 - RNA, 18 nt, Human
ugaaaugcacaccuguua

SEQ ID NO: 664488 - RNA, 22 nt, Human
ugaaaugcacaccuguuacgaa

SEQ ID NO: 664489 - RNA, 18 nt, Human
ugacugccauccucaauc

SEQ ID NO: 664490 - RNA, 28 nt, Human
ugccaacccacguccauauauggucacc

SEQ ID NO: 664491 - RNA, 20 nt, Human
uggaugauaggaaaaggaga

SEQ ID NO: 664492 - RNA, 18 nt, Human
uucacagaauacguccgu

SEQ ID NO: 664493 - RNA, 18 nt, Human
aaaaagccaaaaagaaau

SEQ ID NO: 664494 - RNA, 19 nt, Human
aaaaaugagaauaggaagg

SEQ ID NO: 664495 - RNA, 24 nt, Human
aaaaauucuccaccaaagcacauc

SEQ ID NO: 664496 - RNA, 23 nt, Human
aaagugcugggauuagaggcgug

SEQ ID NO: 664497 - RNA, 24 nt, Human
aaagugcugggauuagaggcgugg

SEQ ID NO: 664498 - RNA, 25 nt, Human
aaagugcugggauuagaggcguggg

SEQ ID NO: 664499 - RNA, 19 nt, Human
aaccaccccaauggacucu

SEQ ID NO: 664500 - RNA, 18 nt, Human
aagcugcucauuggaaac

SEQ ID NO: 664501 - RNA, 21 nt, Human
aaguaauucuccugccucagc

SEQ ID NO: 664502 - RNA, 25 nt, Human
aaguagccucacauuuucuuagagc

SEQ ID NO: 664503 - RNA, 19 nt, Human
aagugcugggauuagaggc

SEQ ID NO: 664504 - RNA, 20 nt, Human
aaugguaccuucugggcacc

SEQ ID NO: 664505 - RNA, 24 nt, Human
aaugguaccuucugggcaccugcu

SEQ ID NO: 664506 - RNA, 18 nt, Human
acaaggaaaaaauucucc

SEQ ID NO: 664507 - RNA, 21 nt, Human
acaggguuucaccauguuggu

SEQ ID NO: 664508 - RNA, 23 nt, Human
acaggguuucaccauguugguca

SEQ ID NO: 664509 - RNA, 24 nt, Human
acaggguuucaccauguuggucag

SEQ ID NO: 664510 - RNA, 24 nt, Human
accauguuggucaggcuggucucg

SEQ ID NO: 664511 - RNA, 20 nt, Human
acccagaggugcucugagaa

SEQ ID NO: 664512 - RNA, 24 nt, Human
agaaguagccucacauuuucuuag

SEQ ID NO: 664513 - RNA, 24 nt, Human
agcaaccuccuugcagacuucagc

SEQ ID NO: 664514 - RNA, 23 nt, Human
agcugggauuacaggugugugcc

SEQ ID NO: 664515 - RNA, 22 nt, Human
aggaaaaaauucuccaccaaag

SEQ ID NO: 664516 - RNA, 25 nt, Human
aggaaaaccacuauuuuuuuuucuc

SEQ ID NO: 664517 - RNA, 23 nt, Human
aggagaagagaagagaaaaaugu

SEQ ID NO: 664518 - RNA, 19 nt, Human
aggcaaaaaagccaaaagg

SEQ ID NO: 664519 - RNA, 20 nt, Human
aggcgugggcuaccacaccc

SEQ ID NO: 664520 - RNA, 25 nt, Human
aggcuggagugcaguagcgcaaucu

SEQ ID NO: 664521 - RNA, 23 nt, Human
aguagcugggauuacaggugugu

SEQ ID NO: 664522 - RNA, 25 nt, Human
aguagcugggauuacaggugugugc

SEQ ID NO: 664523 - RNA, 20 nt, Human
agugcaguagcgcaaucuag

SEQ ID NO: 664524 - RNA, 20 nt, Human
aguggaguuaaaugaugugg

SEQ ID NO: 664525 - RNA, 21 nt, Human
auccacagcaaaccuuggcag

SEQ ID NO: 664526 - RNA, 23 nt, Human
augagacagagucucccucuguu

SEQ ID NO: 664527 - RNA, 24 nt, Human
augucugcaggccuaggaggggac

SEQ ID NO: 664528 - RNA, 24 nt, Human
auuuuuguauuuuuaguagagaca

SEQ ID NO: 664529 - RNA, 19 nt, Human
caaagguagauaaagagcc

SEQ ID NO: 664530 - RNA, 24 nt, Human
caaagugcugggauuagaggcgug

SEQ ID NO: 664531 - RNA, 24 nt, Human
caacacgcccagcuaauuuuugua

SEQ ID NO: 664532 - RNA, 22 nt, Human
cacaucgacacguuuguccucc

SEQ ID NO: 664533 - RNA, 21 nt, Human
caccauguuggucaggcuggu

SEQ ID NO: 664534 - RNA, 24 nt, Human
caccauguuggucaggcuggucuc

SEQ ID NO: 664535 - RNA, 26 nt, Human
cacguuuguccuccccaccccuuuuu

SEQ ID NO: 664536 - RNA, 20 nt, Human
cagccuccugaguagcuggg

SEQ ID NO: 664537 - RNA, 21 nt, Human
caggagagugaaaaucucccg

SEQ ID NO: 664538 - RNA, 24 nt, Human
caggguuucaccauguuggucagg

SEQ ID NO: 664539 - RNA, 18 nt, Human
caguagcgcaaucuaggc

SEQ ID NO: 664540 - RNA, 20 nt, Human
caugcaggggaaaauaaauc

SEQ ID NO: 664541 - RNA, 23 nt, Human
ccaaaaagaaaugggaaaggaca

SEQ ID NO: 664542 - RNA, 22 nt, Human
ccaaagugcugggauuagaggc

SEQ ID NO: 664543 - RNA, 24 nt, Human
ccaaagugcugggauuagaggcgu

SEQ ID NO: 664544 - RNA, 20 nt, Human
ccaacacgcccagcuaauuu

SEQ ID NO: 664545 - RNA, 25 nt, Human
ccacagcaaaccuuggcaggaacau

SEQ ID NO: 664546 - RNA, 23 nt, Human
ccaggcauuucacuuuguuuuuu

SEQ ID NO: 664547 - RNA, 21 nt, Human
ccccaccccuuuuuaacugaa

SEQ ID NO: 664548 - RNA, 21 nt, Human
ccgcaaagguagauaaagagc

SEQ ID NO: 664549 - RNA, 24 nt, Human
ccgccucagccucccaaagugcug

SEQ ID NO: 664550 - RNA, 22 nt, Human
ccugaguagcugggauuacagg

SEQ ID NO: 664551 - RNA, 23 nt, Human
ccugaguagcugggauuacaggu

SEQ ID NO: 664552 - RNA, 24 nt, Human
ccugaguagcugggauuacaggug

SEQ ID NO: 664553 - RNA, 24 nt, Human
cgccucagccucccaaagugcugg

SEQ ID NO: 664554 - RNA, 24 nt, Human
cucagccuccugaguagcugggau

SEQ ID NO: 664555 - RNA, 26 nt, Human
cuccccgccucagccucccaaagugc

SEQ ID NO: 664556 - RNA, 24 nt, Human
cucccucuguugccuaggcuggag

SEQ ID NO: 664557 - RNA, 21 nt, Human
cuccguccggaccaagcgucc

SEQ ID NO: 664558 - RNA, 24 nt, Human
cuccugaccuugugaucuccccgc

SEQ ID NO: 664559 - RNA, 21 nt, Human
cugaguagcugggauuacagg

SEQ ID NO: 664560 - RNA, 24 nt, Human
cugaguagcugggauuacaggugu

SEQ ID NO: 664561 - RNA, 23 nt, Human
cugccucagccuccugaguagcu

SEQ ID NO: 664562 - RNA, 27 nt, Human
cuugugaucuccccgccucagccuccc

SEQ ID NO: 664563 - RNA, 19 nt, Human
gaagaagaggaguggagag

SEQ ID NO: 664564 - RNA, 18 nt, Human
gacacguuuguccucccc

SEQ ID NO: 664565 - RNA, 23 nt, Human
gacacguuuguccuccccacccc

SEQ ID NO: 664566 - RNA, 24 nt, Human
gaccuugugaucuccccgccucag

SEQ ID NO: 664567 - RNA, 22 nt, Human
gacgucaggagaagagaagaga

SEQ ID NO: 664568 - RNA, 23 nt, Human
gagaauaggaaggaaguuuuugc

SEQ ID NO: 664569 - RNA, 22 nt, Human
gaguacuuaaauccaaaguucc

SEQ ID NO: 664570 - RNA, 19 nt, Human
gaguagcugggauuacagg

SEQ ID NO: 664571 - RNA, 19 nt, Human
gaguugaucuuucucuucc

SEQ ID NO: 664572 - RNA, 18 nt, Human
gauuacaggugugugcca

SEQ ID NO: 664573 - RNA, 20 nt, Human
gcaaaaaagccaaaaagaaa

SEQ ID NO: 664574 - RNA, 22 nt, Human
gcccagcuaauuuuuguauuuu

SEQ ID NO: 664575 - RNA, 20 nt, Human
gccuaggcuggagugcagua

SEQ ID NO: 664576 - RNA, 20 nt, Human
gccucagccuccugaguagc

SEQ ID NO: 664577 - RNA, 24 nt, Human
gcgcaaucuaggcuccccccgcag

SEQ ID NO: 664578 - RNA, 22 nt, Human
gcucacuuugucauuuuccccc

SEQ ID NO: 664579 - RNA, 24 nt, Human
gcuggagugcaguagcgcaaucua

SEQ ID NO: 664580 - RNA, 19 nt, Human
ggauuuucuuuaagcaagc

SEQ ID NO: 664581 - RNA, 23 nt, Human
ggcuggucucgaucuccugaccu

SEQ ID NO: 664582 - RNA, 24 nt, Human
gggaaaauaaaucaaagagaaggc

SEQ ID NO: 664583 - RNA, 19 nt, Human
gggcuaaaagguggaggca

SEQ ID NO: 664584 - RNA, 21 nt, Human
gggcuaaaagguggaggcaaa

SEQ ID NO: 664585 - RNA, 22 nt, Human
ggguuucaccauguuggucagg

SEQ ID NO: 664586 - RNA, 20 nt, Human
ggucucgaucuccugaccuu

SEQ ID NO: 664587 - RNA, 24 nt, Human
guaauucuccugccucagccuccu

SEQ ID NO: 664588 - RNA, 18 nt, Human
guagcugggauuacaggu

SEQ ID NO: 664589 - RNA, 24 nt, Human
gugaucuccccgccucagccuccc

SEQ ID NO: 664590 - RNA, 21 nt, Human
uaagaaaaaaugagaauagga

SEQ ID NO: 664591 - RNA, 22 nt, Human
uaagaaaaaaugagaauaggaa

SEQ ID NO: 664592 - RNA, 18 nt, Human
uaagcauggcaugaaacc

SEQ ID NO: 664593 - RNA, 20 nt, Human
uaauucuccugccucagccu

SEQ ID NO: 664594 - RNA, 24 nt, Human
uaauuuuuguauuuuuaguagaga

SEQ ID NO: 664595 - RNA, 18 nt, Human
uacaaaggagcagaucau

SEQ ID NO: 664596 - RNA, 22 nt, Human
uagagacaggguuucaccaugu

SEQ ID NO: 664597 - RNA, 24 nt, Human
uaguagagacaggguuucaccaug

SEQ ID NO: 664598 - RNA, 25 nt, Human
uaguagagacaggguuucaccaugu

SEQ ID NO: 664599 - RNA, 18 nt, Human
ucacuuugucauuuuccc

SEQ ID NO: 664600 - RNA, 22 nt, Human
ucagaaccaggaauucugcacc

SEQ ID NO: 664601 - RNA, 21 nt, Human
ucagcccaagccagcaaccuc

SEQ ID NO: 664602 - RNA, 20 nt, Human
ucagccuccugaguagcugg

SEQ ID NO: 664603 - RNA, 21 nt, Human
ucauuggaaacaagagggccc

SEQ ID NO: 664604 - RNA, 21 nt, Human
uccacagcaaaccuuggcagg

SEQ ID NO: 664605 - RNA, 24 nt, Human
ucccaaagugcugggauuagaggc

SEQ ID NO: 664606 - RNA, 24 nt, Human
ucccucuguugccuaggcuggagu

SEQ ID NO: 664607 - RNA, 24 nt, Human
uccugaguagcugggauuacaggu

SEQ ID NO: 664608 - RNA, 19 nt, Human
ucucccucuguugccuagg

SEQ ID NO: 664609 - RNA, 23 nt, Human
ucucccucuguugccuaggcugg

SEQ ID NO: 664610 - RNA, 24 nt, Human
ucucccucuguugccuaggcugga

SEQ ID NO: 664611 - RNA, 24 nt, Human
ucuccugccucagccuccugagua

SEQ ID NO: 664612 - RNA, 21 nt, Human
ucucuaaacgccauucaauuc

SEQ ID NO: 664613 - RNA, 21 nt, Human
ucugcaccucucucuaagcuc

SEQ ID NO: 664614 - RNA, 22 nt, Human
ucugcaggccuaggaggggacu

SEQ ID NO: 664615 - RNA, 24 nt, Human
ucuguugccuaggcuggagugcag

SEQ ID NO: 664616 - RNA, 18 nt, Human
ugagaagcagguaaauca

SEQ ID NO: 664617 - RNA, 22 nt, Human
ugagacagagucucccucuguu

SEQ ID NO: 664618 - RNA, 24 nt, Human
ugagacagagucucccucuguugc

SEQ ID NO: 664619 - RNA, 23 nt, Human
ugcagacuucagccccacuguau

SEQ ID NO: 664620 - RNA, 19 nt, Human
ugccuaggcuggagugcag

SEQ ID NO: 664621 - RNA, 20 nt, Human
ugccuaggcuggagugcagu

SEQ ID NO: 664622 - RNA, 24 nt, Human
ugccuaggcuggagugcaguagcg

SEQ ID NO: 664623 - RNA, 24 nt, Human
ugccucagccuccugaguagcugg

SEQ ID NO: 664624 - RNA, 21 nt, Human
uggaagaagaggaguggagag

SEQ ID NO: 664625 - RNA, 24 nt, Human
uggagugcaguagcgcaaucuagg

SEQ ID NO: 664626 - RNA, 19 nt, Human
ugggauuacaggugugugc

SEQ ID NO: 664627 - RNA, 21 nt, Human
ugggauuacaggugugugcca

SEQ ID NO: 664628 - RNA, 18 nt, Human
ugggauuagaggcguggg

SEQ ID NO: 664629 - RNA, 19 nt, Human
ugggauuagaggcgugggc

SEQ ID NO: 664630 - RNA, 22 nt, Human
ugggauuagaggcgugggcuac

SEQ ID NO: 664631 - RNA, 23 nt, Human
ugggauuagaggcgugggcuacc

SEQ ID NO: 664632 - RNA, 24 nt, Human
ugggauuagaggcgugggcuacca

SEQ ID NO: 664633 - RNA, 24 nt, Human
uggucaggcuggucucgaucuccu

SEQ ID NO: 664634 - RNA, 19 nt, Human
uguauguuuucuaggucuc

SEQ ID NO: 664635 - RNA, 24 nt, Human
ugugaucuccccgccucagccucc

SEQ ID NO: 664636 - RNA, 18 nt, Human
uguguccagugagaaagu

SEQ ID NO: 664637 - RNA, 20 nt, Human
uguugccuaggcuggagugc

SEQ ID NO: 664638 - RNA, 18 nt, Human
uuagagcucacuuuguca

SEQ ID NO: 664639 - RNA, 24 nt, Human
uuaguagagacaggguuucaccau

SEQ ID NO: 664640 - RNA, 24 nt, Human
uucaauucucuccucucuuuaauu

SEQ ID NO: 664641 - RNA, 20 nt, Human
uucacucccucaugucugca

SEQ ID NO: 664642 - RNA, 22 nt, Human
uucccagcgccgagcuccgucc

SEQ ID NO: 664643 - RNA, 24 nt, Human
uuccuggaaaaauaggauguaaaa

SEQ ID NO: 664644 - RNA, 20 nt, Human
uugaucuuucucuuccuuug

SEQ ID NO: 664645 - RNA, 24 nt, Human
uuucaccauguuggucaggcuggu

SEQ ID NO: 664646 - RNA, 22 nt, Human
uuucugaacugcuucucacaug

SEQ ID NO: 664647 - RNA, 21 nt, Human
uuugcaaacaaggaaaaccac

SEQ ID NO: 664648 - RNA, 24 nt, Human
uuugcaaacaaggaaaaccacuau

SEQ ID NO: 664649 - RNA, 24 nt, Human
uuuuuaguagagacaggguuucac

SEQ ID NO: 664650 - RNA, 20 nt, Human
uuuuuguauuuuuaguagag

SEQ ID NO: 664651 - RNA, 19 nt, Human
aaguuuguugagaauuuau

SEQ ID NO: 664652 - RNA, 21 nt, Human
agagauauaccaccccccagc

SEQ ID NO: 664653 - RNA, 22 nt, Human
ccaccccccagcuaagaguggg

SEQ ID NO: 664654 - RNA, 18 nt, Human
ccaguauuuuucugcugu

SEQ ID NO: 664655 - RNA, 20 nt, Human
cccucccucccggccgccca

SEQ ID NO: 664656 - RNA, 24 nt, Human
cccuccgagcgucuggcggcccgg

SEQ ID NO: 664657 - RNA, 18 nt, Human
ccucccggccgcccaguc

SEQ ID NO: 664658 - RNA, 22 nt, Human
cgcccucccucccggccgccca

SEQ ID NO: 664659 - RNA, 18 nt, Human
cggcccgggagccggcaa

SEQ ID NO: 664660 - RNA, 24 nt, Human
cgggagccggcaaacaacucaagc

SEQ ID NO: 664661 - RNA, 21 nt, Human
ggccagaggggcaguggggcc

SEQ ID NO: 664662 - RNA, 22 nt, Human
ggccgggcucccuccgagcguc

SEQ ID NO: 664663 - RNA, 19 nt, Human
ggugcacgucccggccgcg

SEQ ID NO: 664664 - RNA, 18 nt, Human
gucgugacccggggcgcc

SEQ ID NO: 664665 - RNA, 26 nt, Human
uaaaaaugccaguauuuuucugcugu

SEQ ID NO: 664666 - RNA, 21 nt, Human
uagagauauaccaccccccuc

SEQ ID NO: 664667 - RNA, 18 nt, Human
ucccggccgcccaguccg

SEQ ID NO: 664668 - RNA, 22 nt, Human
ucugugucucugaguuugugug

SEQ ID NO: 664669 - RNA, 20 nt, Human
ugacccggggcgcccucccu

SEQ ID NO: 664670 - RNA, 19 nt, Human
ugugucucugaguuugugu

SEQ ID NO: 664671 - RNA, 28 nt, Human
acacggccuccuccccaccagguccucc

SEQ ID NO: 664672 - RNA, 26 nt, Human
acagaacugguggaagaucuccuucc

SEQ ID NO: 664673 - RNA, 19 nt, Human
agaaacauuuaggacucag

SEQ ID NO: 664674 - RNA, 21 nt, Human
agguccucccacacuggccuc

SEQ ID NO: 664675 - RNA, 21 nt, Human
caccagguccucccacacugg

SEQ ID NO: 664676 - RNA, 24 nt, Human
caccagguccucccacacuggccu

SEQ ID NO: 664677 - RNA, 18 nt, Human
cacuccucagcccacucc

SEQ ID NO: 664678 - RNA, 18 nt, Human
cacuggccucuccccggc

SEQ ID NO: 664679 - RNA, 23 nt, Human
cacuggccucuccccggccuucc

SEQ ID NO: 664680 - RNA, 19 nt, Human
cagcccacucccgaccugc

SEQ ID NO: 664681 - RNA, 20 nt, Human
ccacuccucagcccacuccc

SEQ ID NO: 664682 - RNA, 25 nt, Human
cccccggaggacacaaaggggccgg

SEQ ID NO: 664683 - RNA, 20 nt, Human
ccccggaggacacaaagggg

SEQ ID NO: 664684 - RNA, 21 nt, Human
ccccggccuuccagagagccc

SEQ ID NO: 664685 - RNA, 22 nt, Human
ccucccacacuggccucucccc

SEQ ID NO: 664686 - RNA, 20 nt, Human
cgagcuuccggagacccaca

SEQ ID NO: 664687 - RNA, 21 nt, Human
cggugcagcuccgcgcagggu

SEQ ID NO: 664688 - RNA, 21 nt, Human
cugcagcuccgagccuggccc

SEQ ID NO: 664689 - RNA, 23 nt, Human
cugcagcuccgagccuggcccgg

SEQ ID NO: 664690 - RNA, 21 nt, Human
cuggccucuccccggccuucc

SEQ ID NO: 664691 - RNA, 18 nt, Human
cugguggaagaucuccuu

SEQ ID NO: 664692 - RNA, 23 nt, Human
cuuccggagacccacacgccacu

SEQ ID NO: 664693 - RNA, 24 nt, Human
gaagcgccucagcugccuccgccc

SEQ ID NO: 664694 - RNA, 23 nt, Human
gcagcagcggugcagcuccgcgc

SEQ ID NO: 664695 - RNA, 19 nt, Human
gcagcuccgagccuggccc

SEQ ID NO: 664696 - RNA, 20 nt, Human
gcagcuccgcgcaggguuug

SEQ ID NO: 664697 - RNA, 20 nt, Human
gccuccuccccaccaggucc

SEQ ID NO: 664698 - RNA, 25 nt, Human
ggaaauagcaguggccucagaugac

SEQ ID NO: 664699 - RNA, 21 nt, Human
ggccuccuccccaccaggucc

SEQ ID NO: 664700 - RNA, 19 nt, Human
guaacacggccuccucccc

SEQ ID NO: 664701 - RNA, 20 nt, Human
gucgcagugucuggcagcag

SEQ ID NO: 664702 - RNA, 19 nt, Human
uagaaaaggucgcggcguc

SEQ ID NO: 664703 - RNA, 23 nt, Human
uagcaguggccucagaugacucc

SEQ ID NO: 664704 - RNA, 20 nt, Human
uaguuggauggaacccagcc

SEQ ID NO: 664705 - RNA, 18 nt, Human
ucagaccaaggugacaac

SEQ ID NO: 664706 - RNA, 18 nt, Human
ucagaccaaggugacaac

SEQ ID NO: 664707 - RNA, 18 nt, Human
uccccaccagguccuccc

SEQ ID NO: 664708 - RNA, 20 nt, Human
ucccugcagcuccgagccug

SEQ ID NO: 664709 - RNA, 24 nt, Human
ucuggcagcagcggugcagcuccu

SEQ ID NO: 664710 - RNA, 22 nt, Human
ucuuucuuccuccuggcucuuc

SEQ ID NO: 664711 - RNA, 18 nt, Human
uguaacacggccuccucc

SEQ ID NO: 664712 - RNA, 18 nt, Human
uucccugcagcuccgagc

SEQ ID NO: 664713 - RNA, 18 nt, Human
uucuagaaacauuuagga

SEQ ID NO: 664714 - RNA, 19 nt, Human
uuguaacacggccuccucc

SEQ ID NO: 664715 - RNA, 21 nt, Human
uuucuuccuccuggcucuucu

SEQ ID NO: 664716 - RNA, 21 nt, Human
aaaauuccuccaguguagcuu

SEQ ID NO: 664717 - RNA, 24 nt, Human
agacuugaauagcauguuuagugg

SEQ ID NO: 664718 - RNA, 21 nt, Human
auaaaaauuccuccaguguag

SEQ ID NO: 664719 - RNA, 18 nt, Human
auguuuagugcauaugag

SEQ ID NO: 664720 - RNA, 18 nt, Human
cacaucucuuggcauguu

SEQ ID NO: 664721 - RNA, 18 nt, Human
cacuggcauuacauucuu

SEQ ID NO: 664722 - RNA, 20 nt, Human
cauguauaugcaugcauuca

SEQ ID NO: 664723 - RNA, 24 nt, Human
cauuucacaucucuuggcauguua

SEQ ID NO: 664724 - RNA, 23 nt, Human
cauuuuugacaauuaugaucuga

SEQ ID NO: 664725 - RNA, 18 nt, Human
ccgcgcccccggcagccc

SEQ ID NO: 664726 - RNA, 21 nt, Human
ccgcgcccccggcagcccagg

SEQ ID NO: 664727 - RNA, 23 nt, Human
ccgcgcccccggcagcccagggc

SEQ ID NO: 664728 - RNA, 24 nt, Human
cgcccccggcagcccagggcgcgc

SEQ ID NO: 664729 - RNA, 19 nt, Human
cgcgcccccggcagcccag

SEQ ID NO: 664730 - RNA, 21 nt, Human
cggccgcgcccccggcagccc

SEQ ID NO: 664731 - RNA, 18 nt, Human
cucacaucucuuuggcca

SEQ ID NO: 664732 - RNA, 19 nt, Human
cuucugguuccucucuugg

SEQ ID NO: 664733 - RNA, 22 nt, Human
gagcugccgccuccucgggucc

SEQ ID NO: 664734 - RNA, 19 nt, Human
gccgcgcccccggcagccc

SEQ ID NO: 664735 - RNA, 23 nt, Human
guccaagugccaccgcggccgcg

SEQ ID NO: 664736 - RNA, 24 nt, Human
uaaaauuuucuuugauaugaauuu

SEQ ID NO: 664737 - RNA, 23 nt, Human
uaacuuuugcucuugauaaaauu

SEQ ID NO: 664738 - RNA, 18 nt, Human
uagaauuucaagggcuga

SEQ ID NO: 664739 - RNA, 18 nt, Human
uauaaaaauuccuccagu

SEQ ID NO: 664740 - RNA, 24 nt, Human
uauaugcaugcauucaaaggcuau

SEQ ID NO: 664741 - RNA, 20 nt, Human
uccaagugccaccgcggccg

SEQ ID NO: 664742 - RNA, 22 nt, Human
uccaagugccaccgcggccgcg

SEQ ID NO: 664743 - RNA, 20 nt, Human
ucucuuggggaagggcagag

SEQ ID NO: 664744 - RNA, 22 nt, Human
ugaucugaacaauuuacaucca

SEQ ID NO: 664745 - RNA, 22 nt, Human
uggaauguguuagaaauaaaau

SEQ ID NO: 664746 - RNA, 22 nt, Human
ugguuccucucuuggggaaggg

SEQ ID NO: 664747 - RNA, 19 nt, Human
uucaagggcugauaggucc

SEQ ID NO: 664748 - RNA, 20 nt, Human
uucacugccuggauguuugg

SEQ ID NO: 664749 - RNA, 21 nt, Human
uucauguauaugcaugcauuc

SEQ ID NO: 664750 - RNA, 25 nt, Human
uuuagaauuucaagggcugauaggu

SEQ ID NO: 664751 - RNA, 21 nt, Human
uuuucagacuuaggauaaagg

SEQ ID NO: 664752 - RNA, 22 nt, Human
aaaaacaaaacaaaacaaaaac

SEQ ID NO: 664753 - RNA, 20 nt, Human
aaaacaaaacaaaacaaaaa

SEQ ID NO: 664754 - RNA, 21 nt, Human
aaaacaaaacaaaacaaaaac

SEQ ID NO: 664755 - RNA, 21 nt, Human
aaaagcuauaaaagagaccuu

SEQ ID NO: 664756 - RNA, 18 nt, Human
aaaauuagcugggcgugg

SEQ ID NO: 664757 - RNA, 19 nt, Human
aaacaaaacaaaacaaaaa

SEQ ID NO: 664758 - RNA, 23 nt, Human
aaacaaaacaaaacaaaaacuaa

SEQ ID NO: 664759 - RNA, 22 nt, Human
aacauggugaaaucccccgucu

SEQ ID NO: 664760 - RNA, 21 nt, Human
aagguggguggaucaugaggu

SEQ ID NO: 664761 - RNA, 24 nt, Human
aaguggcucuuauaaagguaaggu

SEQ ID NO: 664762 - RNA, 24 nt, Human
aaucauuugaacucaggaggcaga

SEQ ID NO: 664763 - RNA, 22 nt, Human
acaaaacaaaaacuaaggaagc

SEQ ID NO: 664764 - RNA, 18 nt, Human
acaaaacaaaacaaaaac

SEQ ID NO: 664765 - RNA, 18 nt, Human
acaaaacaaaacaaaaac

SEQ ID NO: 664766 - RNA, 21 nt, Human
acaaaacaaaacaaaaacuaa

SEQ ID NO: 664767 - RNA, 21 nt, Human
acacauuuucuaaaggaagcc

SEQ ID NO: 664768 - RNA, 24 nt, Human
acagagugagacuccaucucaaaa

SEQ ID NO: 664769 - RNA, 19 nt, Human
acagcucccgccggaagcc

SEQ ID NO: 664770 - RNA, 24 nt, Human
acucaggaggcagagguugcagug

SEQ ID NO: 664771 - RNA, 24 nt, Human
acugcauuccagccugggcgacag

SEQ ID NO: 664772 - RNA, 26 nt, Human
acugcauuccagccugggcgacagag

SEQ ID NO: 664773 - RNA, 18 nt, Human
agagguugcagugagcug

SEQ ID NO: 664774 - RNA, 22 nt, Human
agagguugcagugagcugagau

SEQ ID NO: 664775 - RNA, 23 nt, Human
agagguugcagugagcugagauc

SEQ ID NO: 664776 - RNA, 24 nt, Human
agagguugcagugagcugagauca

SEQ ID NO: 664777 - RNA, 20 nt, Human
agagguugcagugagcuggc

SEQ ID NO: 664778 - RNA, 24 nt, Human
agcacuuugggaggcuaagguggg

SEQ ID NO: 664779 - RNA, 24 nt, Human
agccuggccaacauggugaaaucc

SEQ ID NO: 664780 - RNA, 24 nt, Human
agccugggcgacagagugagacuc

SEQ ID NO: 664781 - RNA, 23 nt, Human
agcugggcgugguggcaggugcc

SEQ ID NO: 664782 - RNA, 20 nt, Human
aggcagagguugcagugagc

SEQ ID NO: 664783 - RNA, 24 nt, Human
aggcagagguugcagugagcugag

SEQ ID NO: 664784 - RNA, 18 nt, Human
aggcaggagaaucauuug

SEQ ID NO: 664785 - RNA, 21 nt, Human
aggcaggagaaucauuugaac

SEQ ID NO: 664786 - RNA, 20 nt, Human
aggcugaggcaggagaauca

SEQ ID NO: 664787 - RNA, 24 nt, Human
aggcugaggcaggagaaucauuug

SEQ ID NO: 664788 - RNA, 22 nt, Human
aggugcgguggcucacaccuaa

SEQ ID NO: 664789 - RNA, 18 nt, Human
aguggcagagcaagacuc

SEQ ID NO: 664790 - RNA, 22 nt, Human
aucaugaggucaggaguucaag

SEQ ID NO: 664791 - RNA, 24 nt, Human
aucaugccacugcauuccagccug

SEQ ID NO: 664792 - RNA, 24 nt, Human
aucggccaggugcgguggcucaca

SEQ ID NO: 664793 - RNA, 19 nt, Human
aucuacuccaucaaguggc

SEQ ID NO: 664794 - RNA, 22 nt, Human
augccacugcauuccagccugg

SEQ ID NO: 664795 - RNA, 22 nt, Human
auucaagaagcauauuuauaaa

SEQ ID NO: 664796 - RNA, 22 nt, Human
caaaacaaaacaaaaacuaagg

SEQ ID NO: 664797 - RNA, 25 nt, Human
caaaacaaaacaaaaacuaaggaag

SEQ ID NO: 664798 - RNA, 24 nt, Human
caaagauaccaaaauccaaauuua

SEQ ID NO: 664799 - RNA, 23 nt, Human
caacauggugaaaucccccgucu

SEQ ID NO: 664800 - RNA, 24 nt, Human
caagaccagccuggccaacauggu

SEQ ID NO: 664801 - RNA, 22 nt, Human
cacaccuaaucccagcacuuug

SEQ ID NO: 664802 - RNA, 19 nt, Human
cacugcauuccagccuggg

SEQ ID NO: 664803 - RNA, 22 nt, Human
cacugcauuccagccugggcga

SEQ ID NO: 664804 - RNA, 23 nt, Human
cacugcauuccagccugggcgac

SEQ ID NO: 664805 - RNA, 24 nt, Human
cacugcauuccagccugggcgaca

SEQ ID NO: 664806 - RNA, 19 nt, Human
cagagcaagacuccgucuc

SEQ ID NO: 664807 - RNA, 19 nt, Human
cagagcaagacuccgucuc

SEQ ID NO: 664808 - RNA, 24 nt, Human
cagcacuuugggaggcuaaggugg

SEQ ID NO: 664809 - RNA, 20 nt, Human
cagccugggcgacagaguga

SEQ ID NO: 664810 - RNA, 24 nt, Human
cagcuacucgggaggcugaggcag

SEQ ID NO: 664811 - RNA, 23 nt, Human
caucucaaaaaacaaaacaaaac

SEQ ID NO: 664812 - RNA, 26 nt, Human
caucucaaaaaacaaaacaaaacaaa

SEQ ID NO: 664813 - RNA, 22 nt, Human
cauuccagccugggcgacagag

SEQ ID NO: 664814 - RNA, 24 nt, Human
cauuccagccugggcgacagagug

SEQ ID NO: 664815 - RNA, 20 nt, Human
ccaaaauccaaauuuaaaga

SEQ ID NO: 664816 - RNA, 20 nt, Human
ccacugcauuccagccuggg

SEQ ID NO: 664817 - RNA, 21 nt, Human
ccacugcauuccagccugggc

SEQ ID NO: 664818 - RNA, 21 nt, Human
ccacugcauuccagccugggc

SEQ ID NO: 664819 - RNA, 23 nt, Human
ccacugcauuccagccugggcga

SEQ ID NO: 664820 - RNA, 24 nt, Human
ccacugcauuccagccugggcgac

SEQ ID NO: 664821 - RNA, 23 nt, Human
ccccgucuuuacuaaaaauacaa

SEQ ID NO: 664822 - RNA, 23 nt, Human
ccuggccaacauggugaaauccc

SEQ ID NO: 664823 - RNA, 24 nt, Human
ccuggccaacauggugaaaucccc

SEQ ID NO: 664824 - RNA, 26 nt, Human
ccuggccaacauggugaaaucccccg

SEQ ID NO: 664825 - RNA, 22 nt, Human
ccugggcgacagagugagacuc

SEQ ID NO: 664826 - RNA, 19 nt, Human
ccuguaaucccagcuacuc

SEQ ID NO: 664827 - RNA, 21 nt, Human
ccuguaaucccagcuacucgg

SEQ ID NO: 664828 - RNA, 22 nt, Human
ccuguaaucccagcuacucggg

SEQ ID NO: 664829 - RNA, 24 nt, Human
cggccaggugcgguggcucacacc

SEQ ID NO: 664830 - RNA, 24 nt, Human
cgggaggcugaggcaggagaauca

SEQ ID NO: 664831 - RNA, 23 nt, Human
cgguggcucacaccuaaucccag

SEQ ID NO: 664832 - RNA, 22 nt, Human
cucacaccuaaucccagcacuu

SEQ ID NO: 664833 - RNA, 23 nt, Human
cuccaucucaaaaaacaaaacaa

SEQ ID NO: 664834 - RNA, 24 nt, Human
gacagagugagacuccaucucaaa

SEQ ID NO: 664835 - RNA, 23 nt, Human
gagaaucauuugaacucaggagg

SEQ ID NO: 664836 - RNA, 21 nt, Human
gaggcagagguugcagugagc

SEQ ID NO: 664837 - RNA, 24 nt, Human
gaucaugaggucaggaguucaaga

SEQ ID NO: 664838 - RNA, 24 nt, Human
gcauuccagccugggcgacagagu

SEQ ID NO: 664839 - RNA, 25 nt, Human
gccaacauggugaaaucccccgucu

SEQ ID NO: 664840 - RNA, 22 nt, Human
gccacugcauuccagccugggc

SEQ ID NO: 664841 - RNA, 24 nt, Human
gccacugcauuccagccugggcga

SEQ ID NO: 664842 - RNA, 20 nt, Human
gcugagaucaugccacugca

SEQ ID NO: 664843 - RNA, 21 nt, Human
ggcagagcaagacuccgucuc

SEQ ID NO: 664844 - RNA, 21 nt, Human
ggcaggugccuguaaucccag

SEQ ID NO: 664845 - RNA, 24 nt, Human
gggcgugguggcaggugccuguaa

SEQ ID NO: 664846 - RNA, 23 nt, Human
gguggaucaugaggucaggaguu

SEQ ID NO: 664847 - RNA, 24 nt, Human
gguggcaggugccuguaaucccag

SEQ ID NO: 664848 - RNA, 23 nt, Human
gguggguggaucaugaggucagg

SEQ ID NO: 664849 - RNA, 20 nt, Human
guacuaaaauuuuuaaagga

SEQ ID NO: 664850 - RNA, 23 nt, Human
guggaucaugaggucaggaguuc

SEQ ID NO: 664851 - RNA, 22 nt, Human
guggcucacaccuaaucccagc

SEQ ID NO: 664852 - RNA, 24 nt, Human
uaagguggguggaucaugagguca

SEQ ID NO: 664853 - RNA, 24 nt, Human
uacaaaaccaaagauaccaaaauc

SEQ ID NO: 664854 - RNA, 25 nt, Human
uaccaaaauccaaauuuaaagaaac

SEQ ID NO: 664855 - RNA, 25 nt, Human
uauaaaagagaccuuuacuuuuuga

SEQ ID NO: 664856 - RNA, 18 nt, Human
ucaaagaaaaauuuagca

SEQ ID NO: 664857 - RNA, 24 nt, Human
ucaugaggucaggaguucaagacc

SEQ ID NO: 664858 - RNA, 23 nt, Human
ucaugccacugcauuccagccug

SEQ ID NO: 664859 - RNA, 23 nt, Human
uccaaaauuucugcuaaaaauuu

SEQ ID NO: 664860 - RNA, 19 nt, Human
uccagccugggcgacagag

SEQ ID NO: 664861 - RNA, 23 nt, Human
uccagccugggcgacagagugag

SEQ ID NO: 664862 - RNA, 24 nt, Human
uccagccugggcgacagagugaga

SEQ ID NO: 664863 - RNA, 26 nt, Human
ucccccgucuuuacuaaaaauacaaa

SEQ ID NO: 664864 - RNA, 19 nt, Human
ucggaaaaaaaaagaaaua

SEQ ID NO: 664865 - RNA, 25 nt, Human
ucgggaggcugaggcaggagaauca

SEQ ID NO: 664866 - RNA, 25 nt, Human
ucucaaaaaacaaaacaaaacaaaa

SEQ ID NO: 664867 - RNA, 24 nt, Human
ugagaucaugccacugcauuccag

SEQ ID NO: 664868 - RNA, 22 nt, Human
ugagcugagaucaugccacugc

SEQ ID NO: 664869 - RNA, 20 nt, Human
ugaggcaggagaaucauuug

SEQ ID NO: 664870 - RNA, 23 nt, Human
ugaggcaggagaaucauuugaac

SEQ ID NO: 664871 - RNA, 23 nt, Human
ugaggcaggagaaucauuugaac

SEQ ID NO: 664872 - RNA, 24 nt, Human
ugaggcaggagaaucauuugaacu

SEQ ID NO: 664873 - RNA, 24 nt, Human
ugccuguaaucccagcuacucggg

SEQ ID NO: 664874 - RNA, 22 nt, Human
uggaucaugaggucaggaguuc

SEQ ID NO: 664875 - RNA, 24 nt, Human
uggaucaugaggucaggaguucaa

SEQ ID NO: 664876 - RNA, 19 nt, Human
uggccaacauggugaaauc

SEQ ID NO: 664877 - RNA, 22 nt, Human
uggcucacaccuaaucccagca

SEQ ID NO: 664878 - RNA, 20 nt, Human
ugggaggcuaaggugggugg

SEQ ID NO: 664879 - RNA, 23 nt, Human
ugggaggcuaagguggguggauc

SEQ ID NO: 664880 - RNA, 24 nt, Human
ugggaggcuaagguggguggauca

SEQ ID NO: 664881 - RNA, 24 nt, Human
ugguggcaggugccuguaauccca

SEQ ID NO: 664882 - RNA, 23 nt, Human
ugugaacaagacuacuauuaucu

SEQ ID NO: 664883 - RNA, 25 nt, Human
ugugaacaagacuacuauuaucuaa

SEQ ID NO: 664884 - RNA, 24 nt, Human
uuagcugggcgugguggcaggugc

SEQ ID NO: 664885 - RNA, 21 nt, Human
uucaggagaaccucaaagaaa

SEQ ID NO: 664886 - RNA, 18 nt, Human
uugcagugagcugagauc

SEQ ID NO: 664887 - RNA, 20 nt, Human
uugcagugagcugagaucau

SEQ ID NO: 664888 - RNA, 21 nt, Human
uugcagugagcugagaucaug

SEQ ID NO: 664889 - RNA, 23 nt, Human
uugcagugagcugagaucaugcc

SEQ ID NO: 664890 - RNA, 25 nt, Human
uugggaggcuaagguggguggauca

SEQ ID NO: 664891 - RNA, 20 nt, Human
uuuuucccuuucccaaaaug

SEQ ID NO: 664892 - RNA, 22 nt, Human
aaaaaacucaucagacacaaac

SEQ ID NO: 664893 - RNA, 21 nt, Human
aaacaaaggcagaacacagga

SEQ ID NO: 664894 - RNA, 21 nt, Human
aaacaagagaagcugaaacaa

SEQ ID NO: 664895 - RNA, 23 nt, Human
aaagaugcagggggaguuuugga

SEQ ID NO: 664896 - RNA, 19 nt, Human
aaaguagagggaaaccaug

SEQ ID NO: 664897 - RNA, 21 nt, Human
aaaugaaacaagagaagcuga

SEQ ID NO: 664898 - RNA, 19 nt, Human
aacaagagaagcugaaaca

SEQ ID NO: 664899 - RNA, 22 nt, Human
aaccacaccaaacacucauccc

SEQ ID NO: 664900 - RNA, 21 nt, Human
aaccaugagcccccacccucu

SEQ ID NO: 664901 - RNA, 21 nt, Human
aagaacaucaggccccagggc

SEQ ID NO: 664902 - RNA, 23 nt, Human
aagaacuuucccauuacccaaaa

SEQ ID NO: 664903 - RNA, 22 nt, Human
aagcagccucagaaggggaggu

SEQ ID NO: 664904 - RNA, 26 nt, Human
aagcagccucagaagggggggaacgc

SEQ ID NO: 664905 - RNA, 22 nt, Human
aauacacaugcaugcacaggug

SEQ ID NO: 664906 - RNA, 22 nt, Human
aaugacccccuacuacacacac

SEQ ID NO: 664907 - RNA, 25 nt, Human
acacacacacgcaaaguuaggucca

SEQ ID NO: 664908 - RNA, 21 nt, Human
acaucaggccccagggcagca

SEQ ID NO: 664909 - RNA, 22 nt, Human
agaacuuucccauuacccaaaa

SEQ ID NO: 664910 - RNA, 19 nt, Human
agacacaaaccacaccaaa

SEQ ID NO: 664911 - RNA, 25 nt, Human
agacacaaaccacaccaaacacuca

SEQ ID NO: 664912 - RNA, 24 nt, Human
aggcagaaauacacaugcaugcag

SEQ ID NO: 664913 - RNA, 18 nt, Human
aggccaagcacagaaagc

SEQ ID NO: 664914 - RNA, 22 nt, Human
agguucuuccaaaagccugcuc

SEQ ID NO: 664915 - RNA, 22 nt, Human
augcacacacauccacacacca

SEQ ID NO: 664916 - RNA, 22 nt, Human
augcagggggaguuuugggaaa

SEQ ID NO: 664917 - RNA, 24 nt, Human
augccacagcauuaccucugcaau

SEQ ID NO: 664918 - RNA, 23 nt, Human
caaacagguucuuccaaaagccu

SEQ ID NO: 664919 - RNA, 20 nt, Human
caaaccacaccaaacacuca

SEQ ID NO: 664920 - RNA, 23 nt, Human
caacuggaaacugggaccuagag

SEQ ID NO: 664921 - RNA, 22 nt, Human
caagagaagcugaaacaaucua

SEQ ID NO: 664922 - RNA, 19 nt, Human
cacaaaccacaccaaacac

SEQ ID NO: 664923 - RNA, 23 nt, Human
cacacaccauagaaccaggcaga

SEQ ID NO: 664924 - RNA, 20 nt, Human
cacacauccacacaccauag

SEQ ID NO: 664925 - RNA, 18 nt, Human
cacagcauuaccucugca

SEQ ID NO: 664926 - RNA, 22 nt, Human
cacaugcaugcacagguggcua

SEQ ID NO: 664927 - RNA, 18 nt, Human
caccaaacacucauccca

SEQ ID NO: 664928 - RNA, 22 nt, Human
cacccucuaucccuccccauug

SEQ ID NO: 664929 - RNA, 25 nt, Human
cacccucuaucccuccccauugaca

SEQ ID NO: 664930 - RNA, 18 nt, Human
caccugaauguuaaaaaa

SEQ ID NO: 664931 - RNA, 19 nt, Human
cacucuuaagaacuuuccc

SEQ ID NO: 664932 - RNA, 23 nt, Human
cagcucggacccccucuauauga

SEQ ID NO: 664933 - RNA, 25 nt, Human
caggaugggaaaaagggcugaucaa

SEQ ID NO: 664934 - RNA, 20 nt, Human
caggccaagcacagaaagcc

SEQ ID NO: 664935 - RNA, 23 nt, Human
cauaggccaaagucaggccaagc

SEQ ID NO: 664936 - RNA, 22 nt, Human
ccaaaguagagggaaaccauga

SEQ ID NO: 664937 - RNA, 18 nt, Human
cccaaaaagaaaugaccc

SEQ ID NO: 664938 - RNA, 21 nt, Human
cccacccucuaucccucccca

SEQ ID NO: 664939 - RNA, 21 nt, Human
ccccacccucuaucccucccc

SEQ ID NO: 664940 - RNA, 20 nt, Human
ccccauaauaagguuuuggg

SEQ ID NO: 664941 - RNA, 26 nt, Human
cccccuacuacacacacacacacgca

SEQ ID NO: 664942 - RNA, 19 nt, Human
ccgaagggcccccauaaua

SEQ ID NO: 664943 - RNA, 19 nt, Human
ccugaauguuaaaaaacuc

SEQ ID NO: 664944 - RNA, 19 nt, Human
ccugcucacaagguagaca

SEQ ID NO: 664945 - RNA, 19 nt, Human
cuccagugauacacugagg

SEQ ID NO: 664946 - RNA, 26 nt, Human
cugaauguuaaaaaacucaucagaca

SEQ ID NO: 664947 - RNA, 23 nt, Human
cugaggcagaagcaauaugccac

SEQ ID NO: 664948 - RNA, 19 nt, Human
gccccagggcagcaaugcu

SEQ ID NO: 664949 - RNA, 25 nt, Human
gcccccacccucuaucccuccccau

SEQ ID NO: 664950 - RNA, 22 nt, Human
ggcaggguccugugacuccagu

SEQ ID NO: 664951 - RNA, 20 nt, Human
guccagcauaggccaaaguc

SEQ ID NO: 664952 - RNA, 22 nt, Human
uaaaauuaaaacaaaggcagaa

SEQ ID NO: 664953 - RNA, 23 nt, Human
uaagaacuuucccauuacccaaa

SEQ ID NO: 664954 - RNA, 24 nt, Human
uacacacacacacacgcaaaguua

SEQ ID NO: 664955 - RNA, 19 nt, Human
uacccaaaaagaaaugacc

SEQ ID NO: 664956 - RNA, 28 nt, Human
uauaugacagauucaugcacacagugug

SEQ ID NO: 664957 - RNA, 23 nt, Human
uccacacaccauagaaccaggca

SEQ ID NO: 664958 - RNA, 20 nt, Human
ucccaaaguagagggaaacc

SEQ ID NO: 664959 - RNA, 18 nt, Human
ucccauuacccaaaaaga

SEQ ID NO: 664960 - RNA, 19 nt, Human
uccccauugacacucuuaa

SEQ ID NO: 664961 - RNA, 18 nt, Human
ucugcaaucugugcccuc

SEQ ID NO: 664962 - RNA, 19 nt, Human
ucuuccaaaagccugcuca

SEQ ID NO: 664963 - RNA, 18 nt, Human
ugacccccuacuacacac

SEQ ID NO: 664964 - RNA, 23 nt, Human
ugacuccagugauacacugaggc

SEQ ID NO: 664965 - RNA, 21 nt, Human
ugaggcagaagcaauaugcca

SEQ ID NO: 664966 - RNA, 23 nt, Human
ugcacacacauccacacaccaua

SEQ ID NO: 664967 - RNA, 24 nt, Human
ugggaaagcagccucagaagggga

SEQ ID NO: 664968 - RNA, 19 nt, Human
ugggauguucagacaagag

SEQ ID NO: 664969 - RNA, 21 nt, Human
uguuuuguuuuucauuuucuu

SEQ ID NO: 664970 - RNA, 22 nt, Human
uuacaugcucugaggaagccaa

SEQ ID NO: 664971 - RNA, 18 nt, Human
uuacccaaaaagaaauga

SEQ ID NO: 664972 - RNA, 19 nt, Human
uucuaagaccgaagggccc

SEQ ID NO: 664973 - RNA, 27 nt, Human
uuuugcaucaaacagguucuuccaaaa

SEQ ID NO: 664974 - RNA, 26 nt, Human
aaacaaugccaucuuugaaaaauccc

SEQ ID NO: 664975 - RNA, 24 nt, Human
aaacagaaaaucaaaaguuucaac

SEQ ID NO: 664976 - RNA, 20 nt, Human
aaagauaccccaaacaaagg

SEQ ID NO: 664977 - RNA, 24 nt, Human
aaagcccuuucauuuccuuacaaa

SEQ ID NO: 664978 - RNA, 21 nt, Human
aaguguccacugccaacaucc

SEQ ID NO: 664979 - RNA, 24 nt, Human
aaucacuugaauccgggaggcaga

SEQ ID NO: 664980 - RNA, 26 nt, Human
aauuuugcuaacuacagcucuuacca

SEQ ID NO: 664981 - RNA, 24 nt, Human
acagagcgagacuccaucucaaaa

SEQ ID NO: 664982 - RNA, 24 nt, Human
accccaucucuacuaaaaauacaa

SEQ ID NO: 664983 - RNA, 24 nt, Human
accugaggucaggaguucaagacc

SEQ ID NO: 664984 - RNA, 21 nt, Human
acuccagcauuuuuuccgaau

SEQ ID NO: 664985 - RNA, 24 nt, Human
acugcacuccagucugggugacag

SEQ ID NO: 664986 - RNA, 26 nt, Human
acugcacuccagucugggugacagag

SEQ ID NO: 664987 - RNA, 18 nt, Human
acuugaauccgggaggca

SEQ ID NO: 664988 - RNA, 24 nt, Human
agagauugcagugagccgagaucg

SEQ ID NO: 664989 - RNA, 22 nt, Human
agaucaccugaggucaggaguu

SEQ ID NO: 664990 - RNA, 23 nt, Human
agaucaccugaggucaggaguuc

SEQ ID NO: 664991 - RNA, 19 nt, Human
agcauggugaaaccccauc

SEQ ID NO: 664992 - RNA, 20 nt, Human
agcauggugaaaccccaucu

SEQ ID NO: 664993 - RNA, 22 nt, Human
agccuggccagcauggugaaac

SEQ ID NO: 664994 - RNA, 24 nt, Human
agccuggccagcauggugaaaccc

SEQ ID NO: 664995 - RNA, 19 nt, Human
agcgcuuugggaggcuggg

SEQ ID NO: 664996 - RNA, 21 nt, Human
aggcagagauugcagugagcc

SEQ ID NO: 664997 - RNA, 24 nt, Human
aggcagagauugcagugagccgag

SEQ ID NO: 664998 - RNA, 18 nt, Human
aggcaggagaaucacuug

SEQ ID NO: 664999 - RNA, 24 nt, Human
aggcaggagaaucacuugaauccg

SEQ ID NO: 665000 - RNA, 24 nt, Human
aggcugaggcaggagaaucacuug

SEQ ID NO: 665001 - RNA, 24 nt, Human
agucugggugacagagcgagacuc

SEQ ID NO: 665002 - RNA, 24 nt, Human
aguggcucacaccuguaaucccag

SEQ ID NO: 665003 - RNA, 19 nt, Human
auacaauacaacggaauuc

SEQ ID NO: 665004 - RNA, 19 nt, Human
auacuucugcauccauaua

SEQ ID NO: 665005 - RNA, 24 nt, Human
auugcagugagccgagaucgugcc

SEQ ID NO: 665006 - RNA, 18 nt, Human
caaaaacuacuccggugu

SEQ ID NO: 665007 - RNA, 22 nt, Human
caaaagauaccccaaacaaagc

SEQ ID NO: 665008 - RNA, 24 nt, Human
caagaccagccuggccagcauggu

SEQ ID NO: 665009 - RNA, 23 nt, Human
caauuuuaagacaaaagauaccc

SEQ ID NO: 665010 - RNA, 24 nt, Human
cacacagaucaccugaggucagga

SEQ ID NO: 665011 - RNA, 24 nt, Human
cacaccuguaaucccagcgcuuug

SEQ ID NO: 665012 - RNA, 19 nt, Human
cacccuaaagaggaugcca

SEQ ID NO: 665013 - RNA, 23 nt, Human
caccugaggucaggaguucaaga

SEQ ID NO: 665014 - RNA, 23 nt, Human
caccuguaaucccagcgcuuugg

SEQ ID NO: 665015 - RNA, 24 nt, Human
caccuguaaucccagcgcuuuggg

SEQ ID NO: 665016 - RNA, 22 nt, Human
cacuccagucugggugacagag

SEQ ID NO: 665017 - RNA, 24 nt, Human
cacuccagucugggugacagagcg

SEQ ID NO: 665018 - RNA, 19 nt, Human
cacugcacuccagucuggg

SEQ ID NO: 665019 - RNA, 21 nt, Human
cacugcacuccagucugggug

SEQ ID NO: 665020 - RNA, 22 nt, Human
cacugcacuccagucuggguga

SEQ ID NO: 665021 - RNA, 23 nt, Human
cacugcacuccagucugggugac

SEQ ID NO: 665022 - RNA, 24 nt, Human
cacugcacuccagucugggugaca

SEQ ID NO: 665023 - RNA, 25 nt, Human
cacugcacuccagucugggugacag

SEQ ID NO: 665024 - RNA, 24 nt, Human
cagaucaccugaggucaggaguuc

SEQ ID NO: 665025 - RNA, 27 nt, Human
cagaucaccugaggucaggaguucaag

SEQ ID NO: 665026 - RNA, 20 nt, Human
cagcacagaauugacacccu

SEQ ID NO: 665027 - RNA, 24 nt, Human
cagcauggugaaaccccaucucua

SEQ ID NO: 665028 - RNA, 23 nt, Human
cagcauuuuuuccgaauauaguc

SEQ ID NO: 665029 - RNA, 23 nt, Human
cagcgcuuugggaggcuggggca

SEQ ID NO: 665030 - RNA, 24 nt, Human
cagcuacuugggaggcugaggcag

SEQ ID NO: 665031 - RNA, 20 nt, Human
cauggaaaaccuuuaagcua

SEQ ID NO: 665032 - RNA, 18 nt, Human
cauggugaaaccccaucu

SEQ ID NO: 665033 - RNA, 19 nt, Human
cauggugaaaccccaucuc

SEQ ID NO: 665034 - RNA, 21 nt, Human
cauggugaaaccccaucucua

SEQ ID NO: 665035 - RNA, 22 nt, Human
ccaaacagaaaaucaaaaguuu

SEQ ID NO: 665036 - RNA, 20 nt, Human
ccacugcacuccagucuggg

SEQ ID NO: 665037 - RNA, 20 nt, Human
ccacugcacuccagucuggg

SEQ ID NO: 665038 - RNA, 21 nt, Human
ccacugcacuccagucugggu

SEQ ID NO: 665039 - RNA, 21 nt, Human
ccacugcacuccagucugggu

SEQ ID NO: 665040 - RNA, 23 nt, Human
ccacugcacuccagucuggguga

SEQ ID NO: 665041 - RNA, 24 nt, Human
ccacugcacuccagucugggugac

SEQ ID NO: 665042 - RNA, 23 nt, Human
ccuggccagcauggugaaacccc

SEQ ID NO: 665043 - RNA, 24 nt, Human
ccuggccagcauggugaaacccca

SEQ ID NO: 665044 - RNA, 24 nt, Human
cgagaucgugccacugcacuccag

SEQ ID NO: 665045 - RNA, 24 nt, Human
cggagcccaaacaaguagggggcu

SEQ ID NO: 665046 - RNA, 26 nt, Human
cggagcccaaacaaguagggggcugg

SEQ ID NO: 665047 - RNA, 20 nt, Human
cggugugguggcacaggccu

SEQ ID NO: 665048 - RNA, 20 nt, Human
cucacaccuguaaucccagc

SEQ ID NO: 665049 - RNA, 24 nt, Human
cucacaccuguaaucccagcgcuu

SEQ ID NO: 665050 - RNA, 24 nt, Human
cugccaacauccuuggacgaaaac

SEQ ID NO: 665051 - RNA, 23 nt, Human
cuggccagcauggugaaacccca

SEQ ID NO: 665052 - RNA, 21 nt, Human
cugggugacagagcgagacuc

SEQ ID NO: 665053 - RNA, 25 nt, Human
cuuuauaauacuuccuaaauggcug

SEQ ID NO: 665054 - RNA, 23 nt, Human
gagaaucacuugaauccgggagg

SEQ ID NO: 665055 - RNA, 23 nt, Human
gaucaccugaggucaggaguuca

SEQ ID NO: 665056 - RNA, 24 nt, Human
gaucaccugaggucaggaguucaa

SEQ ID NO: 665057 - RNA, 24 nt, Human
gcacuccagucugggugacagagc

SEQ ID NO: 665058 - RNA, 23 nt, Human
gcaggagaaucacuugaauccgg

SEQ ID NO: 665059 - RNA, 19 nt, Human
gccacugcacuccagucug

SEQ ID NO: 665060 - RNA, 19 nt, Human
gccacugcacuccagucug

SEQ ID NO: 665061 - RNA, 24 nt, Human
gccacugcacuccagucuggguga

SEQ ID NO: 665062 - RNA, 24 nt, Human
gccagcauggugaaaccccaucuc

SEQ ID NO: 665063 - RNA, 20 nt, Human
gccgagaucgugccacugca

SEQ ID NO: 665064 - RNA, 27 nt, Human
gccgcaguacaaacaaauuacagaaua

SEQ ID NO: 665065 - RNA, 24 nt, Human
gcucaucugugauugcacaaccga

SEQ ID NO: 665066 - RNA, 21 nt, Human
gcucuuaccacucuucuccau

SEQ ID NO: 665067 - RNA, 26 nt, Human
ggacgaaaaccaagucccccgggaga

SEQ ID NO: 665068 - RNA, 21 nt, Human
ggcacacagaucaccugaggu

SEQ ID NO: 665069 - RNA, 24 nt, Human
ggccuguuuucccagcuacuuggg

SEQ ID NO: 665070 - RNA, 23 nt, Human
ggcucaguggcucacaccuguaa

SEQ ID NO: 665071 - RNA, 18 nt, Human
ggcuggcccucuucuggc

SEQ ID NO: 665072 - RNA, 19 nt, Human
ggugugguggcacaggccu

SEQ ID NO: 665073 - RNA, 22 nt, Human
guacaaacaaauuacagaauaa

SEQ ID NO: 665074 - RNA, 18 nt, Human
uaaaaauacaaaaacuac

SEQ ID NO: 665075 - RNA, 22 nt, Human
uaagacaaaagauaccccaaac

SEQ ID NO: 665076 - RNA, 23 nt, Human
uacuccggugugguggcacaggc

SEQ ID NO: 665077 - RNA, 23 nt, Human
uacuucguaaaaacaauacuuuu

SEQ ID NO: 665078 - RNA, 23 nt, Human
uagaaacuccaauuucuacaaag

SEQ ID NO: 665079 - RNA, 23 nt, Human
ucaacaauuugcaaagcagcaca

SEQ ID NO: 665080 - RNA, 23 nt, Human
ucaccugaggucaggaguucaag

SEQ ID NO: 665081 - RNA, 21 nt, Human
ucagauauugcagauuuaaaa

SEQ ID NO: 665082 - RNA, 21 nt, Human
uccacugccaacauccuugga

SEQ ID NO: 665083 - RNA, 23 nt, Human
uccacugccaacauccuuggacg

SEQ ID NO: 665084 - RNA, 24 nt, Human
uccacugccaacauccuuggacga

SEQ ID NO: 665085 - RNA, 23 nt, Human
uccagucugggugacagagcgag

SEQ ID NO: 665086 - RNA, 24 nt, Human
uccagucugggugacagagcgaga

SEQ ID NO: 665087 - RNA, 18 nt, Human
uccggugugguggcacag

SEQ ID NO: 665088 - RNA, 23 nt, Human
ucgugccacugcacuccagucug

SEQ ID NO: 665089 - RNA, 19 nt, Human
ucuccauggaaaaccuuua

SEQ ID NO: 665090 - RNA, 21 nt, Human
ucucuacuaaaaauacaaaaa

SEQ ID NO: 665091 - RNA, 18 nt, Human
ucuuaccacucuucucca

SEQ ID NO: 665092 - RNA, 19 nt, Human
ugaaaccccaucucuacua

SEQ ID NO: 665093 - RNA, 24 nt, Human
ugacaagaguuagcuuuggacguc

SEQ ID NO: 665094 - RNA, 22 nt, Human
ugagccgagaucgugccacugc

SEQ ID NO: 665095 - RNA, 20 nt, Human
ugaggcaggagaaucacuug

SEQ ID NO: 665096 - RNA, 24 nt, Human
ugaggcaggagaaucacuugaauc

SEQ ID NO: 665097 - RNA, 25 nt, Human
ugaggcaggagaaucacuugaaucc

SEQ ID NO: 665098 - RNA, 24 nt, Human
ugccacugcacuccagucugggug

SEQ ID NO: 665099 - RNA, 24 nt, Human
uggccagcauggugaaaccccauc

SEQ ID NO: 665100 - RNA, 21 nt, Human
uggcucacaccuguaauccca

SEQ ID NO: 665101 - RNA, 22 nt, Human
uggcucacaccuguaaucccag

SEQ ID NO: 665102 - RNA, 24 nt, Human
uggcucacaccuguaaucccagcg

SEQ ID NO: 665103 - RNA, 19 nt, Human
ugggaggcugaggcaggag

SEQ ID NO: 665104 - RNA, 24 nt, Human
ugggaggcugaggcaggagaauca

SEQ ID NO: 665105 - RNA, 24 nt, Human
ugggaggcuggggcacacagauca

SEQ ID NO: 665106 - RNA, 20 nt, Human
uggggcacacagaucaccug

SEQ ID NO: 665107 - RNA, 24 nt, Human
uggggcacacagaucaccugaggu

SEQ ID NO: 665108 - RNA, 24 nt, Human
uuaagggccuuuauaauacuuccu

SEQ ID NO: 665109 - RNA, 24 nt, Human
uuacagcaaauuuacuucuccucu

SEQ ID NO: 665110 - RNA, 19 nt, Human
uuccuaaauggcugggcuc

SEQ ID NO: 665111 - RNA, 18 nt, Human
uugcagugagccgagauc

SEQ ID NO: 665112 - RNA, 21 nt, Human
uugcagugagccgagaucgug

SEQ ID NO: 665113 - RNA, 22 nt, Human
uugcagugagccgagaucgugc

SEQ ID NO: 665114 - RNA, 25 nt, Human
uugggaggcugaggcaggagaauca

SEQ ID NO: 665115 - RNA, 19 nt, Human
cagcuggggccgacacagg

SEQ ID NO: 665116 - RNA, 19 nt, Human
caggggaggacagcaggca

SEQ ID NO: 665117 - RNA, 18 nt, Human
cagugcaggggaggacag

SEQ ID NO: 665118 - RNA, 20 nt, Human
ccuccacacugagcugggcc

SEQ ID NO: 665119 - RNA, 21 nt, Human
ccuccacacugagcugggccu

SEQ ID NO: 665120 - RNA, 22 nt, Human
cgggcggggcgggcacccaaac

SEQ ID NO: 665121 - RNA, 21 nt, Human
cggggcgggcacccaaacauc

SEQ ID NO: 665122 - RNA, 23 nt, Human
cucagcuggggccgacacagggg

SEQ ID NO: 665123 - RNA, 20 nt, Human
cuccaucagcucccagcucc

SEQ ID NO: 665124 - RNA, 20 nt, Human
cucggguccauugcaggcca

SEQ ID NO: 665125 - RNA, 21 nt, Human
gcaggggaggacagcaggcag

SEQ ID NO: 665126 - RNA, 19 nt, Human
gccgacacaggggcgagug

SEQ ID NO: 665127 - RNA, 27 nt, Human
gcgggcgaggcgggcggggcgggcacc

SEQ ID NO: 665128 - RNA, 18 nt, Human
gggcgaggcgggcggggc

SEQ ID NO: 665129 - RNA, 22 nt, Human
guuuauucgggugcucagcugg

SEQ ID NO: 665130 - RNA, 21 nt, Human
ugcaggggaggacagcaggca

SEQ ID NO: 665131 - RNA, 21 nt, Human
uggcagggccagcagccucca

SEQ ID NO: 665132 - RNA, 21 nt, Human
uugcaggccaggugacggcau

SEQ ID NO: 665133 - RNA, 21 nt, Human
aaacaauccacacacaggcca

SEQ ID NO: 665134 - RNA, 25 nt, Human
aaacaauccacacacaggccacugg

SEQ ID NO: 665135 - RNA, 18 nt, Human
aaaggcagaaacaaucca

SEQ ID NO: 665136 - RNA, 20 nt, Human
aaaggcagaaacaauccaca

SEQ ID NO: 665137 - RNA, 20 nt, Human
aaccucugccucccaggcuc

SEQ ID NO: 665138 - RNA, 23 nt, Human
aacuccucccccagaaccuucug

SEQ ID NO: 665139 - RNA, 20 nt, Human
aagaacuccucccccagaac

SEQ ID NO: 665140 - RNA, 23 nt, Human
aagauacuuuuuuccuucaacug

SEQ ID NO: 665141 - RNA, 19 nt, Human
aaguagagagaguaagagg

SEQ ID NO: 665142 - RNA, 18 nt, Human
aaguccccaagagagcag

SEQ ID NO: 665143 - RNA, 24 nt, Human
aagugaucugccugccucagccuc

SEQ ID NO: 665144 - RNA, 22 nt, Human
aauaggaagugaccuuggggga

SEQ ID NO: 665145 - RNA, 18 nt, Human
acaggguuucaccauguu

SEQ ID NO: 665146 - RNA, 23 nt, Human
acaggguuucaccauguuggcca

SEQ ID NO: 665147 - RNA, 24 nt, Human
acaggguuucaccauguuggccag

SEQ ID NO: 665148 - RNA, 24 nt, Human
accauguuggccaggcuggucuug

SEQ ID NO: 665149 - RNA, 18 nt, Human
acucccaucccaggucca

SEQ ID NO: 665150 - RNA, 22 nt, Human
agacagaagccaaaagguaggg

SEQ ID NO: 665151 - RNA, 24 nt, Human
agacagaagccaaaagguagggga

SEQ ID NO: 665152 - RNA, 21 nt, Human
agagcucugggcgucagcaac

SEQ ID NO: 665153 - RNA, 21 nt, Human
agcacacugcccagccccucc

SEQ ID NO: 665154 - RNA, 22 nt, Human
agcacacugcccagccccucca

SEQ ID NO: 665155 - RNA, 24 nt, Human
agcgauucuccugccucagccucc

SEQ ID NO: 665156 - RNA, 20 nt, Human
aggugcuaggcacaccuggc

SEQ ID NO: 665157 - RNA, 18 nt, Human
aguagcuggaauuauagg

SEQ ID NO: 665158 - RNA, 24 nt, Human
agugaucugccugccucagccucc

SEQ ID NO: 665159 - RNA, 20 nt, Human
agugcaguggugcggucucg

SEQ ID NO: 665160 - RNA, 23 nt, Human
agugcaguggugcggucucggcu

SEQ ID NO: 665161 - RNA, 24 nt, Human
agugcaguggugcggucucggcuc

SEQ ID NO: 665162 - RNA, 20 nt, Human
aguuccuguccuucuucuuc

SEQ ID NO: 665163 - RNA, 18 nt, Human
auccugagggaugggaaa

SEQ ID NO: 665164 - RNA, 22 nt, Human
augccugcagccagagcucugg

SEQ ID NO: 665165 - RNA, 24 nt, Human
auuuuuguauuuuuaguagagaca

SEQ ID NO: 665166 - RNA, 23 nt, Human
caaccucugccucccaggcucaa

SEQ ID NO: 665167 - RNA, 20 nt, Human
caagcgauucuccugccuca

SEQ ID NO: 665168 - RNA, 22 nt, Human
caagcgauucuccugccucagc

SEQ ID NO: 665169 - RNA, 21 nt, Human
cacaacaccaugcccagcuaa

SEQ ID NO: 665170 - RNA, 22 nt, Human
cacaggaguuccguggugauuu

SEQ ID NO: 665171 - RNA, 24 nt, Human
caccaugcccagcuaauuuuugua

SEQ ID NO: 665172 - RNA, 19 nt, Human
caccaugccuggcccacuu

SEQ ID NO: 665173 - RNA, 21 nt, Human
caccauguuggccaggcuggu

SEQ ID NO: 665174 - RNA, 22 nt, Human
caccauguuggccaggcugguc

SEQ ID NO: 665175 - RNA, 23 nt, Human
caccauguuggccaggcuggucu

SEQ ID NO: 665176 - RNA, 24 nt, Human
caccauguuggccaggcuggucuu

SEQ ID NO: 665177 - RNA, 21 nt, Human
cacugcccagccccuccaggc

SEQ ID NO: 665178 - RNA, 19 nt, Human
cacuuugcccacguugggg

SEQ ID NO: 665179 - RNA, 21 nt, Human
cagacaguuccugggggauaa

SEQ ID NO: 665180 - RNA, 24 nt, Human
cagcaaccucugccucccaggcuc

SEQ ID NO: 665181 - RNA, 19 nt, Human
cagcagcccggccagcaca

SEQ ID NO: 665182 - RNA, 19 nt, Human
cagccuccugaguagcugg

SEQ ID NO: 665183 - RNA, 20 nt, Human
caggagcccaggugcugaga

SEQ ID NO: 665184 - RNA, 18 nt, Human
caggauaacccuaggaga

SEQ ID NO: 665185 - RNA, 20 nt, Human
caggcucagcccucgacugc

SEQ ID NO: 665186 - RNA, 24 nt, Human
caggguuucaccauguuggccagg

SEQ ID NO: 665187 - RNA, 24 nt, Human
cauguuggccaggcuggucuugaa

SEQ ID NO: 665188 - RNA, 20 nt, Human
ccacgugcuaggauuacagg

SEQ ID NO: 665189 - RNA, 23 nt, Human
ccauggaaggaauaggaagugac

SEQ ID NO: 665190 - RNA, 18 nt, Human
ccauggugccuugguggg

SEQ ID NO: 665191 - RNA, 21 nt, Human
cccacucccaucccaggucca

SEQ ID NO: 665192 - RNA, 21 nt, Human
cccagcagcccggccagcaca

SEQ ID NO: 665193 - RNA, 20 nt, Human
cccaggcucaagcgauucuc

SEQ ID NO: 665194 - RNA, 21 nt, Human
cccaggcucaagcgauucucc

SEQ ID NO: 665195 - RNA, 19 nt, Human
cccaggcuggagugcagug

SEQ ID NO: 665196 - RNA, 20 nt, Human
ccccacucucuuagcccaaa

SEQ ID NO: 665197 - RNA, 22 nt, Human
cccccagaaccuucugagccag

SEQ ID NO: 665198 - RNA, 26 nt, Human
cccccagaaccuucugagccagccuu

SEQ ID NO: 665199 - RNA, 22 nt, Human
cccucuaugaaguccccaagag

SEQ ID NO: 665200 - RNA, 23 nt, Human
cccugcccagacccacacauacc

SEQ ID NO: 665201 - RNA, 21 nt, Human
ccuaagugaucugccugccuc

SEQ ID NO: 665202 - RNA, 23 nt, Human
ccuaagugaucugccugccucag

SEQ ID NO: 665203 - RNA, 20 nt, Human
ccuagccuaagugaucugcc

SEQ ID NO: 665204 - RNA, 24 nt, Human
ccucccaggcucaagcgauucucc

SEQ ID NO: 665205 - RNA, 21 nt, Human
ccucuagcuccauccuacccc

SEQ ID NO: 665206 - RNA, 22 nt, Human
ccugagggaugggaaaggaggu

SEQ ID NO: 665207 - RNA, 19 nt, Human
ccugaguagcuggaauuau

SEQ ID NO: 665208 - RNA, 21 nt, Human
ccugcagccagagcucugggc

SEQ ID NO: 665209 - RNA, 23 nt, Human
ccugccucagccuccugaguagc

SEQ ID NO: 665210 - RNA, 24 nt, Human
cgcucugucgcccaggcuggagug

SEQ ID NO: 665211 - RNA, 21 nt, Human
cggaagacagggagaggagug

SEQ ID NO: 665212 - RNA, 22 nt, Human
cuaugaaguccccaagagagca

SEQ ID NO: 665213 - RNA, 24 nt, Human
cucaagcgauucuccugccucagc

SEQ ID NO: 665214 - RNA, 24 nt, Human
cucacagcaaccucugccucccag

SEQ ID NO: 665215 - RNA, 19 nt, Human
cuccaggccagcccuucug

SEQ ID NO: 665216 - RNA, 21 nt, Human
cuccaggcucagcccucgacu

SEQ ID NO: 665217 - RNA, 23 nt, Human
cuccaggcucagcccucgacugc

SEQ ID NO: 665218 - RNA, 21 nt, Human
cucgcucugucgcccaggcug

SEQ ID NO: 665219 - RNA, 24 nt, Human
cucgcucugucgcccaggcuggag

SEQ ID NO: 665220 - RNA, 25 nt, Human
cugcccugcccagacccacacauac

SEQ ID NO: 665221 - RNA, 23 nt, Human
cugccucagccuccccacgugcu

SEQ ID NO: 665222 - RNA, 23 nt, Human
cugccucagccuccugaguagcu

SEQ ID NO: 665223 - RNA, 19 nt, Human
cuggcaggagcccaggugc

SEQ ID NO: 665224 - RNA, 21 nt, Human
cuguccuucuucuuccccucu

SEQ ID NO: 665225 - RNA, 27 nt, Human
cuuugcccuagccuugauaccgguucc

SEQ ID NO: 665226 - RNA, 21 nt, Human
gaccucuacugcccugcccag

SEQ ID NO: 665227 - RNA, 22 nt, Human
gacguugaagcucgccuccagg

SEQ ID NO: 665228 - RNA, 21 nt, Human
gagauggagucucgcucuguc

SEQ ID NO: 665229 - RNA, 18 nt, Human
gauuacaggugugagcca

SEQ ID NO: 665230 - RNA, 21 nt, Human
gauuacaggugugagccacca

SEQ ID NO: 665231 - RNA, 24 nt, Human
gauuacaggugugagccaccaugc

SEQ ID NO: 665232 - RNA, 19 nt, Human
gcaaaugcagcagccggcc

SEQ ID NO: 665233 - RNA, 20 nt, Human
gcagccaaauccauggugcc

SEQ ID NO: 665234 - RNA, 22 nt, Human
gcccagcuaauuuuuguauuuu

SEQ ID NO: 665235 - RNA, 19 nt, Human
gcccaggcuggagugcagu

SEQ ID NO: 665236 - RNA, 20 nt, Human
gcccaggcuggagugcagug

SEQ ID NO: 665237 - RNA, 23 nt, Human
gcccaggcuggagugcaguggug

SEQ ID NO: 665238 - RNA, 24 nt, Human
gccuaagugaucugccugccucag

SEQ ID NO: 665239 - RNA, 19 nt, Human
gccuuucgcuuugucuugg

SEQ ID NO: 665240 - RNA, 24 nt, Human
gcgauucuccugccucagccuccu

SEQ ID NO: 665241 - RNA, 25 nt, Human
gcucugucgcccaggcuggagugca

SEQ ID NO: 665242 - RNA, 23 nt, Human
ggagucucgcucugucgcccagg

SEQ ID NO: 665243 - RNA, 22 nt, Human
ggauuacaggugugagccacca

SEQ ID NO: 665244 - RNA, 24 nt, Human
ggauuacaggugugagccaccaug

SEQ ID NO: 665245 - RNA, 22 nt, Human
ggccauggagaugccugcagcc

SEQ ID NO: 665246 - RNA, 18 nt, Human
gggaaaggaggugggagu

SEQ ID NO: 665247 - RNA, 20 nt, Human
gggaggcaaaugcagcagcc

SEQ ID NO: 665248 - RNA, 22 nt, Human
ggguuucaccauguuggccagg

SEQ ID NO: 665249 - RNA, 21 nt, Human
ggucucggcucacagcaaccu

SEQ ID NO: 665250 - RNA, 19 nt, Human
guccuucuucuuccccucu

SEQ ID NO: 665251 - RNA, 24 nt, Human
gugaucugccugccucagccuccc

SEQ ID NO: 665252 - RNA, 21 nt, Human
gugcuaggauuacagguguga

SEQ ID NO: 665253 - RNA, 21 nt, Human
guggugcggucucggcucaca

SEQ ID NO: 665254 - RNA, 24 nt, Human
uaauuuuuguauuuuuaguagaga

SEQ ID NO: 665255 - RNA, 22 nt, Human
uacaggugugagccaccaugcc

SEQ ID NO: 665256 - RNA, 22 nt, Human
uacaggugugagccaccaugcc

SEQ ID NO: 665257 - RNA, 23 nt, Human
uacaggugugagccaccaugccu

SEQ ID NO: 665258 - RNA, 21 nt, Human
uaccagagaaggaaacuccca

SEQ ID NO: 665259 - RNA, 22 nt, Human
uagagacaggguuucaccaugu

SEQ ID NO: 665260 - RNA, 18 nt, Human
uaggauuacaggugugag

SEQ ID NO: 665261 - RNA, 22 nt, Human
uaggauuacaggugugagccac

SEQ ID NO: 665262 - RNA, 24 nt, Human
uaggauuacaggugugagccacca

SEQ ID NO: 665263 - RNA, 25 nt, Human
uaggauuacaggugugagccaccau

SEQ ID NO: 665264 - RNA, 24 nt, Human
uaguagagacaggguuucaccaug

SEQ ID NO: 665265 - RNA, 26 nt, Human
uaguagagacaggguuucaccauguu

SEQ ID NO: 665266 - RNA, 24 nt, Human
ucacagcaaccucugccucccagg

SEQ ID NO: 665267 - RNA, 25 nt, Human
ucacagcaaccucugccucccaggc

SEQ ID NO: 665268 - RNA, 19 nt, Human
ucagcaccugaggggcgag

SEQ ID NO: 665269 - RNA, 22 nt, Human
ucagccuccugaguagcuggaa

SEQ ID NO: 665270 - RNA, 22 nt, Human
uccacacacaggccacugggau

SEQ ID NO: 665271 - RNA, 18 nt, Human
uccacucaccugggugag

SEQ ID NO: 665272 - RNA, 21 nt, Human
uccauccuaccccacucccau

SEQ ID NO: 665273 - RNA, 19 nt, Human
uccauggugccuugguggg

SEQ ID NO: 665274 - RNA, 18 nt, Human
ucccacaaaggcagaaac

SEQ ID NO: 665275 - RNA, 21 nt, Human
ucccaggcucaagcgauucuc

SEQ ID NO: 665276 - RNA, 24 nt, Human
ucccaggcucaagcgauucuccug

SEQ ID NO: 665277 - RNA, 24 nt, Human
ucccauggaaggaauaggaaguga

SEQ ID NO: 665278 - RNA, 22 nt, Human
ucccccagaaccuucugagcca

SEQ ID NO: 665279 - RNA, 18 nt, Human
ucccucuaugaagucccc

SEQ ID NO: 665280 - RNA, 20 nt, Human
uccuaccccacucccauccc

SEQ ID NO: 665281 - RNA, 24 nt, Human
uccugaguagcuggaauuauaggu

SEQ ID NO: 665282 - RNA, 24 nt, Human
ucgcccaggcuggagugcaguggu

SEQ ID NO: 665283 - RNA, 24 nt, Human
ucgcucugucgcccaggcuggagu

SEQ ID NO: 665284 - RNA, 24 nt, Human
ucuccugccucagccuccugagua

SEQ ID NO: 665285 - RNA, 19 nt, Human
ucucgcucugucgcccagg

SEQ ID NO: 665286 - RNA, 22 nt, Human
ucucgcucugucgcccaggcug

SEQ ID NO: 665287 - RNA, 23 nt, Human
ucucgcucugucgcccaggcugg

SEQ ID NO: 665288 - RNA, 24 nt, Human
ucucgcucugucgcccaggcugga

SEQ ID NO: 665289 - RNA, 26 nt, Human
ucucgcucugucgcccaggcuggagu

SEQ ID NO: 665290 - RNA, 27 nt, Human
ucucgcucugucgcccaggcuggagug

SEQ ID NO: 665291 - RNA, 25 nt, Human
ucugccucucccucuaugaaguccc

SEQ ID NO: 665292 - RNA, 24 nt, Human
ucugucgcccaggcuggagugcag

SEQ ID NO: 665293 - RNA, 23 nt, Human
ugaaauucaaggagaccagauga

SEQ ID NO: 665294 - RNA, 23 nt, Human
ugaauuccuagccuaagugaucu

SEQ ID NO: 665295 - RNA, 19 nt, Human
ugagaaaagaacuccuccc

SEQ ID NO: 665296 - RNA, 21 nt, Human
ugagaaaagaacuccuccccc

SEQ ID NO: 665297 - RNA, 21 nt, Human
ugcagugcccauggggcuucc

SEQ ID NO: 665298 - RNA, 21 nt, Human
ugcccagccccuccaggcuca

SEQ ID NO: 665299 - RNA, 24 nt, Human
ugccucagccuccccacgugcuag

SEQ ID NO: 665300 - RNA, 24 nt, Human
ugccucagccuccugaguagcugg

SEQ ID NO: 665301 - RNA, 25 nt, Human
ugccucucccucuaugaagucccca

SEQ ID NO: 665302 - RNA, 24 nt, Human
ugcuaggauuacaggugugagcca

SEQ ID NO: 665303 - RNA, 23 nt, Human
ugcugaaucugauaggaccagca

SEQ ID NO: 665304 - RNA, 18 nt, Human
uggaaggaauaggaagug

SEQ ID NO: 665305 - RNA, 19 nt, Human
uggaaggaauaggaaguga

SEQ ID NO: 665306 - RNA, 24 nt, Human
uggaauuauaggugcacaacacca

SEQ ID NO: 665307 - RNA, 25 nt, Human
uggaauuauaggugcacaacaccau

SEQ ID NO: 665308 - RNA, 20 nt, Human
uggagugcaguggugcgguc

SEQ ID NO: 665309 - RNA, 23 nt, Human
uggagugcaguggugcggucucg

SEQ ID NO: 665310 - RNA, 24 nt, Human
uggagugcaguggugcggucucgg

SEQ ID NO: 665311 - RNA, 24 nt, Human
uggcaaucaaucgguguaaguucc

SEQ ID NO: 665312 - RNA, 24 nt, Human
uggccaggcuggucuugaauuccu

SEQ ID NO: 665313 - RNA, 21 nt, Human
ugggaaaggaggugggagugg

SEQ ID NO: 665314 - RNA, 20 nt, Human
uggggaagcuggaugcagug

SEQ ID NO: 665315 - RNA, 20 nt, Human
ugggggaggcaaaugcagca

SEQ ID NO: 665316 - RNA, 19 nt, Human
ugggggcagacaguuccug

SEQ ID NO: 665317 - RNA, 20 nt, Human
uggguauccugagggauggg

SEQ ID NO: 665318 - RNA, 21 nt, Human
ugugacugguucuuugcccua

SEQ ID NO: 665319 - RNA, 24 nt, Human
uuaguagagacaggguuucaccau

SEQ ID NO: 665320 - RNA, 27 nt, Human
uuccccacucucuuagcccaaagucua

SEQ ID NO: 665321 - RNA, 18 nt, Human
uugccuuucgcuuugucu

SEQ ID NO: 665322 - RNA, 24 nt, Human
uuucaccauguuggccaggcuggu

SEQ ID NO: 665323 - RNA, 24 nt, Human
uuuuuaguagagacaggguuucac

SEQ ID NO: 665324 - RNA, 20 nt, Human
uuuuuguauuuuuaguagag

SEQ ID NO: 665325 - RNA, 19 nt, Human
acuccagccucaggggcca

SEQ ID NO: 665326 - RNA, 21 nt, Human
acucuuucucauuucucuguu

SEQ ID NO: 665327 - RNA, 19 nt, Human
agacagaguugcauggagg

SEQ ID NO: 665328 - RNA, 23 nt, Human
agcuaagagaaugagauucauga

SEQ ID NO: 665329 - RNA, 24 nt, Human
aggaagcagagggugugaucaucc

SEQ ID NO: 665330 - RNA, 20 nt, Human
aggcuggcagguggccagga

SEQ ID NO: 665331 - RNA, 22 nt, Human
agggaggaagggaggcaggggc

SEQ ID NO: 665332 - RNA, 20 nt, Human
agggaggguggggaccaaga

SEQ ID NO: 665333 - RNA, 20 nt, Human
agguggccaggaagcagagg

SEQ ID NO: 665334 - RNA, 18 nt, Human
aggugguuuuauuuaccc

SEQ ID NO: 665335 - RNA, 22 nt, Human
aguugcauggaggcuggcaggu

SEQ ID NO: 665336 - RNA, 21 nt, Human
auggaggcuggcagguggcca

SEQ ID NO: 665337 - RNA, 21 nt, Human
augggcagcagacagacagag

SEQ ID NO: 665338 - RNA, 24 nt, Human
auucaugagcccuggcccugaccg

SEQ ID NO: 665339 - RNA, 20 nt, Human
cacagcucuguugacccuuu

SEQ ID NO: 665340 - RNA, 22 nt, Human
cagacagacagaguugcaugga

SEQ ID NO: 665341 - RNA, 19 nt, Human
cagaggcccacccacagac

SEQ ID NO: 665342 - RNA, 21 nt, Human
cagcagacagacagaguugca

SEQ ID NO: 665343 - RNA, 18 nt, Human
cagcagcccagggugcca

SEQ ID NO: 665344 - RNA, 20 nt, Human
cagguggccaggaagcagag

SEQ ID NO: 665345 - RNA, 19 nt, Human
ccagggaggaagggaggca

SEQ ID NO: 665346 - RNA, 23 nt, Human
ccagggugccaggguccagaagu

SEQ ID NO: 665347 - RNA, 25 nt, Human
ccagggugccaggguccagaaguug

SEQ ID NO: 665348 - RNA, 18 nt, Human
cccccgggcaggcuuggg

SEQ ID NO: 665349 - RNA, 27 nt, Human
cccccgggcaggcuugggacuuggccc

SEQ ID NO: 665350 - RNA, 22 nt, Human
cccucaggcugugcuggccuag

SEQ ID NO: 665351 - RNA, 24 nt, Human
cccugacagaggccacuuccccca

SEQ ID NO: 665352 - RNA, 18 nt, Human
cccuuugcuguaccccuc

SEQ ID NO: 665353 - RNA, 21 nt, Human
ccgaacuccuccaggccagca

SEQ ID NO: 665354 - RNA, 25 nt, Human
ccucaggggccagcaaagggucccc

SEQ ID NO: 665355 - RNA, 19 nt, Human
ccuccaggccagcagccca

SEQ ID NO: 665356 - RNA, 21 nt, Human
cgccagggaggaagggaggca

SEQ ID NO: 665357 - RNA, 21 nt, Human
cuauauugcugcccacacaaa

SEQ ID NO: 665358 - RNA, 19 nt, Human
cucagaggcccacccacag

SEQ ID NO: 665359 - RNA, 18 nt, Human
cucucauuucuuccccag

SEQ ID NO: 665360 - RNA, 21 nt, Human
cugacagaggccacuuccccc

SEQ ID NO: 665361 - RNA, 19 nt, Human
cugggccucagggggcugu

SEQ ID NO: 665362 - RNA, 21 nt, Human
cuucagggcucccaugcaagu

SEQ ID NO: 665363 - RNA, 21 nt, Human
gaggaugugcgagaagugcag

SEQ ID NO: 665364 - RNA, 23 nt, Human
gaggcaggggccgcgacuccugg

SEQ ID NO: 665365 - RNA, 22 nt, Human
gcaguggccugccccucuccaa

SEQ ID NO: 665366 - RNA, 24 nt, Human
gcccuggcccugacagaggccacu

SEQ ID NO: 665367 - RNA, 19 nt, Human
gccugcccgucccaccagc

SEQ ID NO: 665368 - RNA, 21 nt, Human
gcuggcagguggccaggaagc

SEQ ID NO: 665369 - RNA, 24 nt, Human
ggagaauggcugcuggggaggaga

SEQ ID NO: 665370 - RNA, 20 nt, Human
ggaggaagggaggcaggggc

SEQ ID NO: 665371 - RNA, 22 nt, Human
ggcaggugaggaucgccaggga

SEQ ID NO: 665372 - RNA, 19 nt, Human
gggaaaggggagaauggcu

SEQ ID NO: 665373 - RNA, 18 nt, Human
gggaaggggugccagacu

SEQ ID NO: 665374 - RNA, 24 nt, Human
ggggaggagaugcggagugcaggg

SEQ ID NO: 665375 - RNA, 22 nt, Human
ggggccagcaaaggguccccuu

SEQ ID NO: 665376 - RNA, 21 nt, Human
gguuguggacagagagcugca

SEQ ID NO: 665377 - RNA, 20 nt, Human
guagugcgggugugcaggaa

SEQ ID NO: 665378 - RNA, 20 nt, Human
guccagaaguugcuugcaca

SEQ ID NO: 665379 - RNA, 19 nt, Human
gugcagggaggguggggac

SEQ ID NO: 665380 - RNA, 19 nt, Human
gugguggcacccugcacag

SEQ ID NO: 665381 - RNA, 22 nt, Human
uacccuauauugcugcccacac

SEQ ID NO: 665382 - RNA, 19 nt, Human
uagggcagacccggccugc

SEQ ID NO: 665383 - RNA, 20 nt, Human
ucacaagggaaaggggagaa

SEQ ID NO: 665384 - RNA, 23 nt, Human
uccuccaggccagcagcccaggg

SEQ ID NO: 665385 - RNA, 21 nt, Human
ucugggccucagggggcuguc

SEQ ID NO: 665386 - RNA, 19 nt, Human
ugagauggaggcagaggcc

SEQ ID NO: 665387 - RNA, 19 nt, Human
ugagcccuggcccugacag

SEQ ID NO: 665388 - RNA, 23 nt, Human
ugccagacuccagccucaggggc

SEQ ID NO: 665389 - RNA, 19 nt, Human
ugcuggggaggagaugcgg

SEQ ID NO: 665390 - RNA, 18 nt, Human
uggacagagagcugcaug

SEQ ID NO: 665391 - RNA, 21 nt, Human
uggacccagucauuaccgggc

SEQ ID NO: 665392 - RNA, 20 nt, Human
uggccaggaagcagagggug

SEQ ID NO: 665393 - RNA, 24 nt, Human
uggcugcuggggaggagaugcggg

SEQ ID NO: 665394 - RNA, 22 nt, Human
uggcugggcaggugaggaucgc

SEQ ID NO: 665395 - RNA, 18 nt, Human
uggcugggcaggugaggg

SEQ ID NO: 665396 - RNA, 21 nt, Human
uguggggugucugguuuucug

SEQ ID NO: 665397 - RNA, 24 nt, Human
aaagugcugggauuacaggcguga

SEQ ID NO: 665398 - RNA, 23 nt, Human
aaaguguuggcauuacggcguga

SEQ ID NO: 665399 - RNA, 24 nt, Human
aaggguuucaccauguuggccagg

SEQ ID NO: 665400 - RNA, 19 nt, Human
aaguagcugggacuacagg

SEQ ID NO: 665401 - RNA, 20 nt, Human
aaguagcugggacuacaggu

SEQ ID NO: 665402 - RNA, 24 nt, Human
aaguagcugggacuacagguaugc

SEQ ID NO: 665403 - RNA, 19 nt, Human
aagugcugggauuacaggc

SEQ ID NO: 665404 - RNA, 19 nt, Human
aagugcugggauuacaggc

SEQ ID NO: 665405 - RNA, 26 nt, Human
aagugcugggauuacaggcgugagcc

SEQ ID NO: 665406 - RNA, 21 nt, Human
accauguuggccaggcugguc

SEQ ID NO: 665407 - RNA, 22 nt, Human
acccaggcuggagugcacuggu

SEQ ID NO: 665408 - RNA, 23 nt, Human
accucagccucccaaagugcugg

SEQ ID NO: 665409 - RNA, 20 nt, Human
acgagguuucaccauauuag

SEQ ID NO: 665410 - RNA, 18 nt, Human
agacuacaggcacgcacc

SEQ ID NO: 665411 - RNA, 20 nt, Human
aggcacgcaccaccaugccc

SEQ ID NO: 665412 - RNA, 22 nt, Human
agguuucaccauauuagccagg

SEQ ID NO: 665413 - RNA, 22 nt, Human
aguagagacgagguuucaccau

SEQ ID NO: 665414 - RNA, 23 nt, Human
aguagcugagacuacaggcacgc

SEQ ID NO: 665415 - RNA, 24 nt, Human
agugcacuggugaaaucucggcuc

SEQ ID NO: 665416 - RNA, 18 nt, Human
agugcugggauuacaggc

SEQ ID NO: 665417 - RNA, 20 nt, Human
aguucaagugauucuccugc

SEQ ID NO: 665418 - RNA, 18 nt, Human
auucuccugccucagccu

SEQ ID NO: 665419 - RNA, 24 nt, Human
auuuuuguauuuuuaguagagacg

SEQ ID NO: 665420 - RNA, 24 nt, Human
caaagugcugggauuacaggcgug

SEQ ID NO: 665421 - RNA, 22 nt, Human
caagugauucuccugccucagc

SEQ ID NO: 665422 - RNA, 27 nt, Human
caagugauucuccugccucagccuccc

SEQ ID NO: 665423 - RNA, 24 nt, Human
caccacaccuggcuaauuuuugua

SEQ ID NO: 665424 - RNA, 22 nt, Human
caccaccaugcccagcuaauuu

SEQ ID NO: 665425 - RNA, 21 nt, Human
caccauauuagccaggcuggu

SEQ ID NO: 665426 - RNA, 27 nt, Human
caccauauuagccaggcuggucuggaa

SEQ ID NO: 665427 - RNA, 24 nt, Human
caccaugcccagcuaauuuuugua

SEQ ID NO: 665428 - RNA, 21 nt, Human
caccauguuggccaggcuggu

SEQ ID NO: 665429 - RNA, 22 nt, Human
caccauguuggccaggcugguc

SEQ ID NO: 665430 - RNA, 31 nt, Human
caccauguuggccaggcuggucgugaacucc

SEQ ID NO: 665431 - RNA, 23 nt, Human
cacgcaccaccaugcccagcuaa

SEQ ID NO: 665432 - RNA, 21 nt, Human
cacugcaaccuucgccucccg

SEQ ID NO: 665433 - RNA, 20 nt, Human
cagccuccugaguagcugag

SEQ ID NO: 665434 - RNA, 21 nt, Human
cagcggcagcggcgcgcaucg

SEQ ID NO: 665435 - RNA, 22 nt, Human
caggcgauucuccugccucagc

SEQ ID NO: 665436 - RNA, 23 nt, Human
caguagagaaggguuucaccaug

SEQ ID NO: 665437 - RNA, 21 nt, Human
cauauuagccaggcuggucug

SEQ ID NO: 665438 - RNA, 24 nt, Human
cauauuagccaggcuggucuggaa

SEQ ID NO: 665439 - RNA, 24 nt, Human
cauguuggccaggcuggucgugaa

SEQ ID NO: 665440 - RNA, 22 nt, Human
ccaaagugcugggauuacaggc

SEQ ID NO: 665441 - RNA, 22 nt, Human
ccaaagugcugggauuacaggc

SEQ ID NO: 665442 - RNA, 24 nt, Human
ccaaagugcugggauuacaggcgu

SEQ ID NO: 665443 - RNA, 23 nt, Human
ccaaaguguuggcauuacggcgu

SEQ ID NO: 665444 - RNA, 30 nt, Human
ccaccagacugauccccucacccccacgcu

SEQ ID NO: 665445 - RNA, 22 nt, Human
ccacugcacccaccacauuaac

SEQ ID NO: 665446 - RNA, 22 nt, Human
ccacugccacccucugcccugc

SEQ ID NO: 665447 - RNA, 22 nt, Human
cccaaguagcugggacuacagg

SEQ ID NO: 665448 - RNA, 23 nt, Human
cccaaguagcugggacuacaggu

SEQ ID NO: 665449 - RNA, 20 nt, Human
ccccucacccccacgcagcg

SEQ ID NO: 665450 - RNA, 22 nt, Human
ccccucgagacaagagucuggc

SEQ ID NO: 665451 - RNA, 23 nt, Human
cccgaguucaagugauucuccug

SEQ ID NO: 665452 - RNA, 20 nt, Human
cccggguucaggcgauucuc

SEQ ID NO: 665453 - RNA, 23 nt, Human
cccggguucaggcgauucuccug

SEQ ID NO: 665454 - RNA, 24 nt, Human
cccugacauuauugugaagcucug

SEQ ID NO: 665455 - RNA, 24 nt, Human
ccgcccggguucaggcgauucucc

SEQ ID NO: 665456 - RNA, 24 nt, Human
ccucccgaguucaagugauucucc

SEQ ID NO: 665457 - RNA, 24 nt, Human
ccugaccucaggugaucugcccac

SEQ ID NO: 665458 - RNA, 22 nt, Human
ccugaccuuguaauccacucac

SEQ ID NO: 665459 - RNA, 19 nt, Human
ccugaguagcugagacuac

SEQ ID NO: 665460 - RNA, 24 nt, Human
ccugaguagcugagacuacaggca

SEQ ID NO: 665461 - RNA, 23 nt, Human
ccugccucagccucccaaguagc

SEQ ID NO: 665462 - RNA, 24 nt, Human
ccugccucagccucccaaguagcu

SEQ ID NO: 665463 - RNA, 23 nt, Human
ccugccucagccuccugaguagc

SEQ ID NO: 665464 - RNA, 23 nt, Human
cgcccaggcuggaucuuggcuca

SEQ ID NO: 665465 - RNA, 20 nt, Human
cgccucacuccugcagcugc

SEQ ID NO: 665466 - RNA, 22 nt, Human
cgccucccgaguucaagugauu

SEQ ID NO: 665467 - RNA, 23 nt, Human
cgccucccgaguucaagugauuc

SEQ ID NO: 665468 - RNA, 23 nt, Human
cuaauuuuuguauuuucaguaga

SEQ ID NO: 665469 - RNA, 24 nt, Human
cuacaaccuccaccgcccggguuc

SEQ ID NO: 665470 - RNA, 24 nt, Human
cucacuacaaccuccaccgcccgg

SEQ ID NO: 665471 - RNA, 24 nt, Human
cucacugcaaccuucgccucccga

SEQ ID NO: 665472 - RNA, 24 nt, Human
cucagccucccaaguagcugggac

SEQ ID NO: 665473 - RNA, 19 nt, Human
cucccgaguucaagugauu

SEQ ID NO: 665474 - RNA, 18 nt, Human
cuccugaccuuguaaucc

SEQ ID NO: 665475 - RNA, 25 nt, Human
cuccugaccuuguaauccacucacc

SEQ ID NO: 665476 - RNA, 20 nt, Human
cucugagaagaugucaugca

SEQ ID NO: 665477 - RNA, 20 nt, Human
cucugucacccaggcuggag

SEQ ID NO: 665478 - RNA, 25 nt, Human
cucugucacccaggcuggagugcac

SEQ ID NO: 665479 - RNA, 23 nt, Human
cugcaaccuucgccucccgaguu

SEQ ID NO: 665480 - RNA, 23 nt, Human
cugccucagccuccugaguagcu

SEQ ID NO: 665481 - RNA, 21 nt, Human
cuggcucugucgcccaggcug

SEQ ID NO: 665482 - RNA, 18 nt, Human
cugucacccaggcuggag

SEQ ID NO: 665483 - RNA, 20 nt, Human
cuugccuaugugccacugcc

SEQ ID NO: 665484 - RNA, 23 nt, Human
cuuuccaccagacugauccccuc

SEQ ID NO: 665485 - RNA, 24 nt, Human
gaaggguuucaccauguuggccag

SEQ ID NO: 665486 - RNA, 24 nt, Human
gaccucaggugaucugcccacuuc

SEQ ID NO: 665487 - RNA, 22 nt, Human
gaccuuguaauccacucaccuc

SEQ ID NO: 665488 - RNA, 24 nt, Human
gaccuuguaauccacucaccucag

SEQ ID NO: 665489 - RNA, 22 nt, Human
gacuacaggcacgcaccaccau

SEQ ID NO: 665490 - RNA, 22 nt, Human
gagacaagagucuggcucuguc

SEQ ID NO: 665491 - RNA, 22 nt, Human
gaguucaagugauucuccugcc

SEQ ID NO: 665492 - RNA, 18 nt, Human
gauuacaggcgugagcca

SEQ ID NO: 665493 - RNA, 22 nt, Human
gauuacaggcgugagccacugc

SEQ ID NO: 665494 - RNA, 23 nt, Human
gauuacaggcgugagccacugca

SEQ ID NO: 665495 - RNA, 21 nt, Human
gauucuccugccucagccucc

SEQ ID NO: 665496 - RNA, 21 nt, Human
gauucuccugccucagccucc

SEQ ID NO: 665497 - RNA, 19 nt, Human
gcacgcaccaccaugccca

SEQ ID NO: 665498 - RNA, 23 nt, Human
gcauuuuuuuuuauuuauuuuuu

SEQ ID NO: 665499 - RNA, 22 nt, Human
gcccagcuaauuuuuguauuuu

SEQ ID NO: 665500 - RNA, 24 nt, Human
gcccggguucaggcgauucuccug

SEQ ID NO: 665501 - RNA, 23 nt, Human
gcgauucuccugccucagccucc

SEQ ID NO: 665502 - RNA, 26 nt, Human
gcucugucgcccaggcuggaucuugg

SEQ ID NO: 665503 - RNA, 23 nt, Human
gcuggucgugaacuccugaccuc

SEQ ID NO: 665504 - RNA, 25 nt, Human
gcuggucuggaacuccugaccuugu

SEQ ID NO: 665505 - RNA, 19 nt, Human
ggacuacagguaugcgcca

SEQ ID NO: 665506 - RNA, 19 nt, Human
ggccaggcuggucgugaac

SEQ ID NO: 665507 - RNA, 19 nt, Human
ggcucugucgcccaggcug

SEQ ID NO: 665508 - RNA, 23 nt, Human
ggcuggaucuuggcucacuacaa

SEQ ID NO: 665509 - RNA, 24 nt, Human
ggcuggucgugaacuccugaccuc

SEQ ID NO: 665510 - RNA, 23 nt, Human
ggcuggucuggaacuccugaccu

SEQ ID NO: 665511 - RNA, 21 nt, Human
ggguuucaccauguuggccag

SEQ ID NO: 665512 - RNA, 22 nt, Human
ggguuucaccauguuggccagg

SEQ ID NO: 665513 - RNA, 20 nt, Human
ggucuggaacuccugaccuu

SEQ ID NO: 665514 - RNA, 24 nt, Human
guaauccacucaccucagccuccc

SEQ ID NO: 665515 - RNA, 24 nt, Human
gugauucuccugccucagccuccc

SEQ ID NO: 665516 - RNA, 24 nt, Human
uaauccacucaccucagccuccca

SEQ ID NO: 665517 - RNA, 24 nt, Human
uaauuuuuguauuuucaguagaga

SEQ ID NO: 665518 - RNA, 24 nt, Human
uaauuuuuguauuuuuaguagaga

SEQ ID NO: 665519 - RNA, 19 nt, Human
uacaggcgugagccacugc

SEQ ID NO: 665520 - RNA, 24 nt, Human
uacaggcgugagccacugcaccca

SEQ ID NO: 665521 - RNA, 22 nt, Human
uacagguaugcgccaccacacc

SEQ ID NO: 665522 - RNA, 22 nt, Human
uaccuccaagcgccucacuccu

SEQ ID NO: 665523 - RNA, 21 nt, Human
uagagaaggguuucaccaugu

SEQ ID NO: 665524 - RNA, 24 nt, Human
uagccaggcuggucuggaacuccu

SEQ ID NO: 665525 - RNA, 23 nt, Human
uaguagagacgagguuucaccau

SEQ ID NO: 665526 - RNA, 26 nt, Human
uaguagagacgagguuucaccauauu

SEQ ID NO: 665527 - RNA, 28 nt, Human
uauuuauuuuuuuuuugagauggagucu

SEQ ID NO: 665528 - RNA, 18 nt, Human
ucaagugauucuccugcc

SEQ ID NO: 665529 - RNA, 18 nt, Human
ucacccaggcuggagugc

SEQ ID NO: 665530 - RNA, 24 nt, Human
ucaccucagccucccaaagugcug

SEQ ID NO: 665531 - RNA, 18 nt, Human
ucacuacaaccuccaccg

SEQ ID NO: 665532 - RNA, 24 nt, Human
ucacuacaaccuccaccgcccggg

SEQ ID NO: 665533 - RNA, 27 nt, Human
ucacuacaaccuccaccgcccggguuc

SEQ ID NO: 665534 - RNA, 18 nt, Human
ucacugcaaccuucgccu

SEQ ID NO: 665535 - RNA, 19 nt, Human
ucacugcaaccuucgccuc

SEQ ID NO: 665536 - RNA, 22 nt, Human
ucacugcaaccuucgccucccg

SEQ ID NO: 665537 - RNA, 24 nt, Human
ucacugcaaccuucgccucccgag

SEQ ID NO: 665538 - RNA, 18 nt, Human
ucagccucccaaguagcu

SEQ ID NO: 665539 - RNA, 20 nt, Human
ucagccucccaaguagcugg

SEQ ID NO: 665540 - RNA, 23 nt, Human
ucaguagagaaggguuucaccau

SEQ ID NO: 665541 - RNA, 24 nt, Human
ucaguagagaaggguuucaccaug

SEQ ID NO: 665542 - RNA, 19 nt, Human
uccaagcgccucacuccug

SEQ ID NO: 665543 - RNA, 23 nt, Human
uccaccagacugauccccucacc

SEQ ID NO: 665544 - RNA, 21 nt, Human
uccacucaccucagccuccca

SEQ ID NO: 665545 - RNA, 24 nt, Human
ucccaaagugcugggauuacaggc

SEQ ID NO: 665546 - RNA, 23 nt, Human
ucccaaguagcugggacuacagg

SEQ ID NO: 665547 - RNA, 21 nt, Human
ucccgaguucaagugauucuc

SEQ ID NO: 665548 - RNA, 24 nt, Human
ucccgaguucaagugauucuccug

SEQ ID NO: 665549 - RNA, 24 nt, Human
uccugaguagcugagacuacaggc

SEQ ID NO: 665550 - RNA, 26 nt, Human
ucuccugccucagccucccaaguagc

SEQ ID NO: 665551 - RNA, 24 nt, Human
ucuccugccucagccuccugagua

SEQ ID NO: 665552 - RNA, 19 nt, Human
ucuggcucugucgcccagg

SEQ ID NO: 665553 - RNA, 23 nt, Human
ucuggcucugucgcccaggcugg

SEQ ID NO: 665554 - RNA, 24 nt, Human
ucuggcucugucgcccaggcugga

SEQ ID NO: 665555 - RNA, 18 nt, Human
ucugucacccaggcugga

SEQ ID NO: 665556 - RNA, 18 nt, Human
ucugucgcccaggcugga

SEQ ID NO: 665557 - RNA, 23 nt, Human
ucuugcucugucacccaggcugg

SEQ ID NO: 665558 - RNA, 24 nt, Human
ucuugcucugucacccaggcugga

SEQ ID NO: 665559 - RNA, 18 nt, Human
ugaccucaggugaucugc

SEQ ID NO: 665560 - RNA, 20 nt, Human
ugaccucaggugaucugccc

SEQ ID NO: 665561 - RNA, 21 nt, Human
ugaccucaggugaucugccca

SEQ ID NO: 665562 - RNA, 22 nt, Human
ugaccucaggugaucugcccac

SEQ ID NO: 665563 - RNA, 23 nt, Human
ugaccuuguaauccacucaccuc

SEQ ID NO: 665564 - RNA, 21 nt, Human
ugagacuacaggcacgcacca

SEQ ID NO: 665565 - RNA, 24 nt, Human
ugagacuacaggcacgcaccacca

SEQ ID NO: 665566 - RNA, 22 nt, Human
ugagauggagucuugcucuguc

SEQ ID NO: 665567 - RNA, 19 nt, Human
ugagcacuuccugugagcc

SEQ ID NO: 665568 - RNA, 20 nt, Human
ugaucugcccacuucggucu

SEQ ID NO: 665569 - RNA, 22 nt, Human
ugcacuggugaaaucucggcuc

SEQ ID NO: 665570 - RNA, 21 nt, Human
ugccacccucugcccugcucu

SEQ ID NO: 665571 - RNA, 19 nt, Human
ugcccugcucuuuggguca

SEQ ID NO: 665572 - RNA, 24 nt, Human
ugccucagccucccaaguagcugg

SEQ ID NO: 665573 - RNA, 24 nt, Human
ugccucagccuccugaguagcuga

SEQ ID NO: 665574 - RNA, 24 nt, Human
ugcugggauuacaggcgugagcca

SEQ ID NO: 665575 - RNA, 19 nt, Human
uggagucuugcucugucac

SEQ ID NO: 665576 - RNA, 24 nt, Human
uggagugcacuggugaaaucucgg

SEQ ID NO: 665577 - RNA, 23 nt, Human
uggaucuuggcucacuacaaccu

SEQ ID NO: 665578 - RNA, 27 nt, Human
uggcauuacggcgugagcaccuggcca

SEQ ID NO: 665579 - RNA, 24 nt, Human
uggccaggcuggucgugaacuccu

SEQ ID NO: 665580 - RNA, 21 nt, Human
ugggacuacagguaugcgcca

SEQ ID NO: 665581 - RNA, 22 nt, Human
ugggacuacagguaugcgccac

SEQ ID NO: 665582 - RNA, 24 nt, Human
ugggacuacagguaugcgccacca

SEQ ID NO: 665583 - RNA, 18 nt, Human
ugggauuacaggcgugag

SEQ ID NO: 665584 - RNA, 19 nt, Human
ugggauuacaggcgugagc

SEQ ID NO: 665585 - RNA, 21 nt, Human
ugggauuacaggcgugagcca

SEQ ID NO: 665586 - RNA, 22 nt, Human
ugggauuacaggcgugagccac

SEQ ID NO: 665587 - RNA, 22 nt, Human
ugggauuacaggcgugagccac

SEQ ID NO: 665588 - RNA, 24 nt, Human
ugggauuacaggcgugagccacug

SEQ ID NO: 665589 - RNA, 26 nt, Human
ugggauuacaggcgugagccacugca

SEQ ID NO: 665590 - RNA, 21 nt, Human
ugugaagcucugagaagaugu

SEQ ID NO: 665591 - RNA, 24 nt, Human
uuaguagagacgagguuucaccau

SEQ ID NO: 665592 - RNA, 21 nt, Human
uucaagugauucuccugccuc

SEQ ID NO: 665593 - RNA, 23 nt, Human
uucaagugauucuccugccucag

SEQ ID NO: 665594 - RNA, 24 nt, Human
uucaagugauucuccugccucagc

SEQ ID NO: 665595 - RNA, 18 nt, Human
uucaggcgauucuccugc

SEQ ID NO: 665596 - RNA, 21 nt, Human
uucaggcgauucuccugccuc

SEQ ID NO: 665597 - RNA, 23 nt, Human
uucaggcgauucuccugccucag

SEQ ID NO: 665598 - RNA, 24 nt, Human
uucaguagagaaggguuucaccau

SEQ ID NO: 665599 - RNA, 24 nt, Human
uuccaccagacugauccccucacc

SEQ ID NO: 665600 - RNA, 21 nt, Human
uugagauggagucuugcucug

SEQ ID NO: 665601 - RNA, 24 nt, Human
uugcucugucacccaggcuggagu

SEQ ID NO: 665602 - RNA, 24 nt, Human
uuucaccauguuggccaggcuggu

SEQ ID NO: 665603 - RNA, 23 nt, Human
uuuucaguagagaaggguuucac

SEQ ID NO: 665604 - RNA, 24 nt, Human
uuuuuaguagagacgagguuucac

SEQ ID NO: 665605 - RNA, 20 nt, Human
uuuuuguauuuucaguagag

SEQ ID NO: 665606 - RNA, 20 nt, Human
uuuuuguauuuuuaguagag

SEQ ID NO: 665607 - RNA, 22 nt, Human
uuuuuuuuuugagauggagucu

SEQ ID NO: 665608 - RNA, 22 nt, Human
aagaaaccucaugucugagggc

SEQ ID NO: 665609 - RNA, 20 nt, Human
aagcugccuggagacuguag

SEQ ID NO: 665610 - RNA, 20 nt, Human
aaggagcaggugagagccag

SEQ ID NO: 665611 - RNA, 18 nt, Human
accaaacccagccucagc

SEQ ID NO: 665612 - RNA, 22 nt, Human
acccacaugcaccaaacccagc

SEQ ID NO: 665613 - RNA, 20 nt, Human
accucaugucugagggcaag

SEQ ID NO: 665614 - RNA, 22 nt, Human
agaaagcauaaaccccagcgcu

SEQ ID NO: 665615 - RNA, 24 nt, Human
auagccagagccucuggcagagga

SEQ ID NO: 665616 - RNA, 21 nt, Human
caaaaugaaauaaggaaccug

SEQ ID NO: 665617 - RNA, 20 nt, Human
caaacccagccucagcaccu

SEQ ID NO: 665618 - RNA, 24 nt, Human
cacaaggcagcccggacaagacac

SEQ ID NO: 665619 - RNA, 19 nt, Human
caccaaacccagccucagc

SEQ ID NO: 665620 - RNA, 18 nt, Human
cagcaccuagcccacccc

SEQ ID NO: 665621 - RNA, 25 nt, Human
cagcagcugaagcugaagacuccag

SEQ ID NO: 665622 - RNA, 19 nt, Human
cagccuaaaggagcaggug

SEQ ID NO: 665623 - RNA, 18 nt, Human
ccagacagcagcugaagc

SEQ ID NO: 665624 - RNA, 19 nt, Human
ccagggccaggccaucggg

SEQ ID NO: 665625 - RNA, 23 nt, Human
cccagccucagcaccuagcccac

SEQ ID NO: 665626 - RNA, 18 nt, Human
ccccagacagcagcugaa

SEQ ID NO: 665627 - RNA, 22 nt, Human
ccccugagagcccugagaucga

SEQ ID NO: 665628 - RNA, 23 nt, Human
ccuagcccaccccgaugggacgg

SEQ ID NO: 665629 - RNA, 23 nt, Human
ccucaacccacaugcaccaaacc

SEQ ID NO: 665630 - RNA, 23 nt, Human
cgacauuucugaagcccugccac

SEQ ID NO: 665631 - RNA, 18 nt, Human
cucagcaccuagcccacc

SEQ ID NO: 665632 - RNA, 22 nt, Human
gaggcugcucaggaagcacaga

SEQ ID NO: 665633 - RNA, 23 nt, Human
gcaccaaacccagccucagcacc

SEQ ID NO: 665634 - RNA, 19 nt, Human
gcagggacugcccccugag

SEQ ID NO: 665635 - RNA, 18 nt, Human
uacagccuaaaggagcag

SEQ ID NO: 665636 - RNA, 20 nt, Human
uagcagcuacgguugaggcu

SEQ ID NO: 665637 - RNA, 20 nt, Human
uagggaucugagacuugaaa

SEQ ID NO: 665638 - RNA, 24 nt, Human
uagggucguccucucaagucaagc

SEQ ID NO: 665639 - RNA, 18 nt, Human
ucugaagcccugccaccu

SEQ ID NO: 665640 - RNA, 23 nt, Human
ugaccuccuggggaaggagggag

SEQ ID NO: 665641 - RNA, 19 nt, Human
ugagaucaaaaugaaauaa

SEQ ID NO: 665642 - RNA, 20 nt, Human
ugagauggaccagaggcucc

SEQ ID NO: 665643 - RNA, 24 nt, Human
uggcagaggagaugggggaaacuu

SEQ ID NO: 665644 - RNA, 24 nt, Human
uggggaaggagggagcugagauca

SEQ ID NO: 665645 - RNA, 21 nt, Human
ugggggaaacugagguagccc

SEQ ID NO: 665646 - RNA, 20 nt, Human
agccagaaagagcuuccugu

SEQ ID NO: 665647 - RNA, 21 nt, Human
agcugagcucagaaagaagcu

SEQ ID NO: 665648 - RNA, 25 nt, Human
agcuucaguugggagccagaaagag

SEQ ID NO: 665649 - RNA, 27 nt, Human
aggagaagggaaaccaaaaucacagaa

SEQ ID NO: 665650 - RNA, 20 nt, Human
aggcagaggcagcagaguua

SEQ ID NO: 665651 - RNA, 20 nt, Human
cagaaagaagcuaaugauug

SEQ ID NO: 665652 - RNA, 22 nt, Human
cagaaagaagcuaaugauugcg

SEQ ID NO: 665653 - RNA, 21 nt, Human
cuaaguccauaaaauaucagc

SEQ ID NO: 665654 - RNA, 20 nt, Human
gaagaaaucuuguugccuuc

SEQ ID NO: 665655 - RNA, 19 nt, Human
ugaauaggcaggcagaggc

SEQ ID NO: 665656 - RNA, 19 nt, Human
ugagcucagaaagaagcua

SEQ ID NO: 665657 - RNA, 20 nt, Human
ugagcucagaaagaagcuaa

SEQ ID NO: 665658 - RNA, 22 nt, Human
ugccugccugcacucugugaac

SEQ ID NO: 665659 - RNA, 20 nt, Human
uguugaaaagaauucuguaa

SEQ ID NO: 665660 - RNA, 21 nt, Human
uugacggcggcugcuggccuc

SEQ ID NO: 665661 - RNA, 25 nt, Human
aaaaaaaaaagaaagaaagaaagaa

SEQ ID NO: 665662 - RNA, 20 nt, Human
aaaaaaaaucguaaaaagca

SEQ ID NO: 665663 - RNA, 23 nt, Human
aaaaagcaauugaggaggauggc

SEQ ID NO: 665664 - RNA, 22 nt, Human
aaaacggaacagaaaaugaaug

SEQ ID NO: 665665 - RNA, 22 nt, Human
aaaaggacaaaacggaacagaa

SEQ ID NO: 665666 - RNA, 24 nt, Human
aaaaggacaaaacggaacagaaaa

SEQ ID NO: 665667 - RNA, 21 nt, Human
aagaaagaaagaaagaaagaa

SEQ ID NO: 665668 - RNA, 20 nt, Human
aagugcaaaacaagccauag

SEQ ID NO: 665669 - RNA, 19 nt, Human
agaaagaaagaaacuauaa

SEQ ID NO: 665670 - RNA, 21 nt, Human
aggacaaaacggaacagaaaa

SEQ ID NO: 665671 - RNA, 21 nt, Human
aggcagugaaauuauucugaa

SEQ ID NO: 665672 - RNA, 20 nt, Human
aggcccgagccgggcagcag

SEQ ID NO: 665673 - RNA, 26 nt, Human
aggcccgagccgggcagcagcagcgg

SEQ ID NO: 665674 - RNA, 26 nt, Human
caccgugcuaaccagucgcgcaggac

SEQ ID NO: 665675 - RNA, 20 nt, Human
cagagugcugagauccugcg

SEQ ID NO: 665676 - RNA, 24 nt, Human
cauacagauuuaaaaaaaaaaaga

SEQ ID NO: 665677 - RNA, 22 nt, Human
ccaccgugcuaaccagucgcgc

SEQ ID NO: 665678 - RNA, 22 nt, Human
cccgcgccgcauccuccggccg

SEQ ID NO: 665679 - RNA, 21 nt, Human
ccgcauccuccggccgccccc

SEQ ID NO: 665680 - RNA, 21 nt, Human
ccgcauccuccggccgccccc

SEQ ID NO: 665681 - RNA, 23 nt, Human
ccgcauccuccggccgcccccuc

SEQ ID NO: 665682 - RNA, 22 nt, Human
ccgcgccgcauccuccggccgc

SEQ ID NO: 665683 - RNA, 19 nt, Human
ccuccggccgcccccuccc

SEQ ID NO: 665684 - RNA, 22 nt, Human
ccuccggccgcccccuccccgc

SEQ ID NO: 665685 - RNA, 20 nt, Human
cgcagccccgcgccgcaucc

SEQ ID NO: 665686 - RNA, 23 nt, Human
cgccgcugucgccgccgccaccg

SEQ ID NO: 665687 - RNA, 25 nt, Human
cgccuuaaaaaggacaaaacggaac

SEQ ID NO: 665688 - RNA, 24 nt, Human
cgcgcgcgcggcucggcggggcgg

SEQ ID NO: 665689 - RNA, 25 nt, Human
cuuaaaaaggacaaaacggaacaga

SEQ ID NO: 665690 - RNA, 22 nt, Human
gcgcagccccgcgccgcauccu

SEQ ID NO: 665691 - RNA, 21 nt, Human
gcgugccgcacgcggguggcu

SEQ ID NO: 665692 - RNA, 21 nt, Human
ggauccugcucggcgcucagg

SEQ ID NO: 665693 - RNA, 23 nt, Human
ggcagcagcagcggacguagcga

SEQ ID NO: 665694 - RNA, 21 nt, Human
ggcguggcuaccagcuccacc

SEQ ID NO: 665695 - RNA, 19 nt, Human
gggcagcagcagcggacca

SEQ ID NO: 665696 - RNA, 27 nt, Human
gggcagcagcagcggacguagcgagcg

SEQ ID NO: 665697 - RNA, 21 nt, Human
uaaaaaaaaaaagaaagaaag

SEQ ID NO: 665698 - RNA, 20 nt, Human
uaaaaagcaauugaggagga

SEQ ID NO: 665699 - RNA, 22 nt, Human
uaaaaagcaauugaggaggaug

SEQ ID NO: 665700 - RNA, 19 nt, Human
uaaaaaggacaaaacggaa

SEQ ID NO: 665701 - RNA, 20 nt, Human
uaaaaaggacaaaacggaac

SEQ ID NO: 665702 - RNA, 23 nt, Human
uaagugcaaaacaagccauaggc

SEQ ID NO: 665703 - RNA, 23 nt, Human
uacagauuuaaaaaaaaaaagaa

SEQ ID NO: 665704 - RNA, 24 nt, Human
uacagauuuaaaaaaaaaaagaaa

SEQ ID NO: 665705 - RNA, 24 nt, Human
ugaaugcaugcacaaaaaaaaucg

SEQ ID NO: 665706 - RNA, 26 nt, Human
ugcacaaaaaaaaucguaaaaagcaa

SEQ ID NO: 665707 - RNA, 22 nt, Human
ugcgguccacaccuguucacgc

SEQ ID NO: 665708 - RNA, 23 nt, Human
ugggauccugcucggcgcucagg

SEQ ID NO: 665709 - RNA, 21 nt, Human
uuuaaaaaaaaaaagaaagaa

SEQ ID NO: 665710 - RNA, 19 nt, Human
aaaagguccacuccaaaag

SEQ ID NO: 665711 - RNA, 18 nt, Human
aagcggcgguggcggcag

SEQ ID NO: 665712 - RNA, 23 nt, Human
aauaacaaggaacagccaagcca

SEQ ID NO: 665713 - RNA, 22 nt, Human
accaaaaggaauauaaugaauc

SEQ ID NO: 665714 - RNA, 22 nt, Human
accucaagaccucugaucauca

SEQ ID NO: 665715 - RNA, 25 nt, Human
agaccucugaucaucaagacccguc

SEQ ID NO: 665716 - RNA, 22 nt, Human
agaugucaagaccucaagaccu

SEQ ID NO: 665717 - RNA, 25 nt, Human
aggacaacagaaggaaaccgguacc

SEQ ID NO: 665718 - RNA, 24 nt, Human
aggacacacauacauacaaccccc

SEQ ID NO: 665719 - RNA, 19 nt, Human
aguaccccuucacauacuc

SEQ ID NO: 665720 - RNA, 18 nt, Human
auaaugcacaggacaacc

SEQ ID NO: 665721 - RNA, 18 nt, Human
auauuauaaugcacagga

SEQ ID NO: 665722 - RNA, 18 nt, Human
auggaaaccaaaauguau

SEQ ID NO: 665723 - RNA, 23 nt, Human
caaacacagaaaaccaggagcuc

SEQ ID NO: 665724 - RNA, 22 nt, Human
cagaagcggcgguggcggcagc

SEQ ID NO: 665725 - RNA, 21 nt, Human
cagaaggaaccauccugggca

SEQ ID NO: 665726 - RNA, 22 nt, Human
ccaaaaggacuggugcccagug

SEQ ID NO: 665727 - RNA, 24 nt, Human
ccaaacacagaaaaccaggagcuc

SEQ ID NO: 665728 - RNA, 23 nt, Human
ccaccucucaagaacauugcacc

SEQ ID NO: 665729 - RNA, 22 nt, Human
cccaucccagcauuuuuaagag

SEQ ID NO: 665730 - RNA, 26 nt, Human
ccgaagcccgcgcggacccgcccccu

SEQ ID NO: 665731 - RNA, 19 nt, Human
ccuccgaagcccgcgcgga

SEQ ID NO: 665732 - RNA, 19 nt, Human
ccucucccuucacuuagaa

SEQ ID NO: 665733 - RNA, 19 nt, Human
cggaaggggagggauccua

SEQ ID NO: 665734 - RNA, 21 nt, Human
cucccaggccugcccgccgcg

SEQ ID NO: 665735 - RNA, 22 nt, Human
cuccucuggcagggcgggcucc

SEQ ID NO: 665736 - RNA, 19 nt, Human
cugaucaucaaaauaaguu

SEQ ID NO: 665737 - RNA, 20 nt, Human
cuggcagggcgggcuccucc

SEQ ID NO: 665738 - RNA, 24 nt, Human
cuuuacgccgugaccucccucucc

SEQ ID NO: 665739 - RNA, 18 nt, Human
cuuucuuggaaggugaug

SEQ ID NO: 665740 - RNA, 22 nt, Human
gacaaagagcuucagggaggga

SEQ ID NO: 665741 - RNA, 18 nt, Human
gccccaaaccagggcuuu

SEQ ID NO: 665742 - RNA, 20 nt, Human
ggaacagccaagccagccuc

SEQ ID NO: 665743 - RNA, 23 nt, Human
ggacacacauacauacaaccccc

SEQ ID NO: 665744 - RNA, 23 nt, Human
gggaauagacauuccagaaggaa

SEQ ID NO: 665745 - RNA, 23 nt, Human
gguauaaaaucuaccaaaaggaa

SEQ ID NO: 665746 - RNA, 21 nt, Human
uaauucacaacguuuccucuc

SEQ ID NO: 665747 - RNA, 20 nt, Human
uagaaagggauuaugaaugg

SEQ ID NO: 665748 - RNA, 23 nt, Human
uaggacacacauacauacaaccc

SEQ ID NO: 665749 - RNA, 22 nt, Human
uaguagauauggccccaucccu

SEQ ID NO: 665750 - RNA, 18 nt, Human
ucaaaaguggcggccaca

SEQ ID NO: 665751 - RNA, 22 nt, Human
ucaacaccuacauggaaaccaa

SEQ ID NO: 665752 - RNA, 26 nt, Human
ucaacaccuacauggaaaccaaaaug

SEQ ID NO: 665753 - RNA, 23 nt, Human
uccaaacacagaaaaccaggagc

SEQ ID NO: 665754 - RNA, 18 nt, Human
ucccucuccucuggcagg

SEQ ID NO: 665755 - RNA, 20 nt, Human
ucccucuccucuggcaggag

SEQ ID NO: 665756 - RNA, 25 nt, Human
uccucucuugcugcuacucugguaa

SEQ ID NO: 665757 - RNA, 18 nt, Human
uccugggcaaagccuucc

SEQ ID NO: 665758 - RNA, 21 nt, Human
ucuaccaaaaggaauauaaug

SEQ ID NO: 665759 - RNA, 18 nt, Human
ucuugcugcuacucuggu

SEQ ID NO: 665760 - RNA, 21 nt, Human
ugacaaggccuuuugcaaaag

SEQ ID NO: 665761 - RNA, 18 nt, Human
ugagagccagugugaaca

SEQ ID NO: 665762 - RNA, 20 nt, Human
ugcaaaagguccacuccaaa

SEQ ID NO: 665763 - RNA, 22 nt, Human
ugcacaggacaacagaaggaaa

SEQ ID NO: 665764 - RNA, 20 nt, Human
ugcccagugccuuguggccu

SEQ ID NO: 665765 - RNA, 19 nt, Human
uggaaggugaugacaaggc

SEQ ID NO: 665766 - RNA, 18 nt, Human
uucagggagggaaggagg

SEQ ID NO: 665767 - RNA, 25 nt, Human
uucggaauaacaaggaacagccaag

SEQ ID NO: 665768 - RNA, 22 nt, Human
uugcugagcuuauucagcacau

SEQ ID NO: 665769 - RNA, 19 nt, Human
uuucuuggaaggugaugac

SEQ ID NO: 665770 - RNA, 18 nt, Human
aaaaggcauuuucaaugc

SEQ ID NO: 665771 - RNA, 24 nt, Human
aaacagaagcuacaagauguugcc

SEQ ID NO: 665772 - RNA, 19 nt, Human
aaagugcugggauuacagg

SEQ ID NO: 665773 - RNA, 23 nt, Human
aaagugcugggauuacaggcgua

SEQ ID NO: 665774 - RNA, 22 nt, Human
aacacauaaaauuaaccaacac

SEQ ID NO: 665775 - RNA, 21 nt, Human
aacagaacgaacacacccaga

SEQ ID NO: 665776 - RNA, 19 nt, Human
aagauguugccagugggag

SEQ ID NO: 665777 - RNA, 27 nt, Human
aagcaggaagcuaaauugaggggaccc

SEQ ID NO: 665778 - RNA, 19 nt, Human
aagugcugggauuacaggc

SEQ ID NO: 665779 - RNA, 19 nt, Human
aagugcugggauuacaggc

SEQ ID NO: 665780 - RNA, 26 nt, Human
aagugcugggauuacaggcguaagcc

SEQ ID NO: 665781 - RNA, 19 nt, Human
acagcagcuucaaaugucc

SEQ ID NO: 665782 - RNA, 18 nt, Human
acaggcguaagccaccau

SEQ ID NO: 665783 - RNA, 23 nt, Human
acagugcuaaaaacagaagcuac

SEQ ID NO: 665784 - RNA, 24 nt, Human
accauguuggccaggcuggucuug

SEQ ID NO: 665785 - RNA, 22 nt, Human
acuacauccaccaagucacgcc

SEQ ID NO: 665786 - RNA, 23 nt, Human
agagaccaggcaccagccccagu

SEQ ID NO: 665787 - RNA, 20 nt, Human
agcaauucuucaucucagcc

SEQ ID NO: 665788 - RNA, 24 nt, Human
agcagcuucaaauguccaguaacg

SEQ ID NO: 665789 - RNA, 20 nt, Human
agccuuucuuucugggaguu

SEQ ID NO: 665790 - RNA, 25 nt, Human
agcggagugcuggagugcaguggcg

SEQ ID NO: 665791 - RNA, 19 nt, Human
agcuugaaaaacaacggca

SEQ ID NO: 665792 - RNA, 21 nt, Human
aggcauugauggaagaugaaa

SEQ ID NO: 665793 - RNA, 22 nt, Human
agggaaaugaggagagaccagg

SEQ ID NO: 665794 - RNA, 18 nt, Human
aguagcugggauuacagg

SEQ ID NO: 665795 - RNA, 25 nt, Human
aguagcugggauuacaggugcacac

SEQ ID NO: 665796 - RNA, 20 nt, Human
agugcaguggcgggaucuug

SEQ ID NO: 665797 - RNA, 23 nt, Human
agugcaguggcgggaucuuggcu

SEQ ID NO: 665798 - RNA, 24 nt, Human
agugcaguggcgggaucuuggcuc

SEQ ID NO: 665799 - RNA, 18 nt, Human
agugcuaaaaacagaagc

SEQ ID NO: 665800 - RNA, 18 nt, Human
agugcugggauuacaggc

SEQ ID NO: 665801 - RNA, 18 nt, Human
aucaucacugugccacag

SEQ ID NO: 665802 - RNA, 18 nt, Human
augggguuucaccauguu

SEQ ID NO: 665803 - RNA, 22 nt, Human
augggguuucaccauguuggcc

SEQ ID NO: 665804 - RNA, 24 nt, Human
augggguuucaccauguuggccag

SEQ ID NO: 665805 - RNA, 27 nt, Human
auugaaauuagguuuuaaauuuuaauu

SEQ ID NO: 665806 - RNA, 24 nt, Human
caaagugcugggauuacaggcgua

SEQ ID NO: 665807 - RNA, 21 nt, Human
caacacauaaaauuaaccaac

SEQ ID NO: 665808 - RNA, 19 nt, Human
caaguaucuauugaggauc

SEQ ID NO: 665809 - RNA, 24 nt, Human
caagucaacacauaaaauuaacca

SEQ ID NO: 665810 - RNA, 21 nt, Human
caaugcuggugguaauauaaa

SEQ ID NO: 665811 - RNA, 19 nt, Human
cacaccaccacaccuggcu

SEQ ID NO: 665812 - RNA, 24 nt, Human
caccacaccuggcuaauuuuugua

SEQ ID NO: 665813 - RNA, 21 nt, Human
caccauguuggccaggcuggu

SEQ ID NO: 665814 - RNA, 23 nt, Human
caccauguuggccaggcuggucu

SEQ ID NO: 665815 - RNA, 24 nt, Human
caccauguuggccaggcuggucuu

SEQ ID NO: 665816 - RNA, 27 nt, Human
caccauguuggccaggcuggucuugaa

SEQ ID NO: 665817 - RNA, 22 nt, Human
cacccaccucggccucccaaag

SEQ ID NO: 665818 - RNA, 23 nt, Human
cacccaccucggccucccaaagu

SEQ ID NO: 665819 - RNA, 24 nt, Human
caccucggccucccaaagugcugg

SEQ ID NO: 665820 - RNA, 22 nt, Human
cacgccuacuucaaagucaucc

SEQ ID NO: 665821 - RNA, 18 nt, Human
cacuauauuacuuuugca

SEQ ID NO: 665822 - RNA, 24 nt, Human
cacugcagccuuugccuccugggu

SEQ ID NO: 665823 - RNA, 20 nt, Human
cagaacgaacacacccagaa

SEQ ID NO: 665824 - RNA, 21 nt, Human
cagaacgaacacacccagaaa

SEQ ID NO: 665825 - RNA, 21 nt, Human
cagagaaacagaacgaacaca

SEQ ID NO: 665826 - RNA, 27 nt, Human
cagagaaacagaacgaacacacccaga

SEQ ID NO: 665827 - RNA, 21 nt, Human
cagauaauaagagccaacacu

SEQ ID NO: 665828 - RNA, 19 nt, Human
cagccuuucuuucugggag

SEQ ID NO: 665829 - RNA, 20 nt, Human
cagccuuugccuccuggguu

SEQ ID NO: 665830 - RNA, 23 nt, Human
caggauuuuaugcuaaggucagg

SEQ ID NO: 665831 - RNA, 21 nt, Human
caggugcacaccaccacaccu

SEQ ID NO: 665832 - RNA, 19 nt, Human
cauaaaaugacaggaagga

SEQ ID NO: 665833 - RNA, 21 nt, Human
cauaaaauuaaccaacacucu

SEQ ID NO: 665834 - RNA, 19 nt, Human
caucgcaagucacccucca

SEQ ID NO: 665835 - RNA, 20 nt, Human
caucgcaagucacccuccau

SEQ ID NO: 665836 - RNA, 24 nt, Human
caucucagccucccgaguagcugg

SEQ ID NO: 665837 - RNA, 22 nt, Human
caugacagggaaaugaggagag

SEQ ID NO: 665838 - RNA, 23 nt, Human
caugacagggaaaugaggagaga

SEQ ID NO: 665839 - RNA, 24 nt, Human
cauguuggccaggcuggucuugaa

SEQ ID NO: 665840 - RNA, 20 nt, Human
cauuguuaucaucaucaucc

SEQ ID NO: 665841 - RNA, 20 nt, Human
ccaaagugcugggauuacag

SEQ ID NO: 665842 - RNA, 22 nt, Human
ccaaagugcugggauuacaggc

SEQ ID NO: 665843 - RNA, 22 nt, Human
ccaaagugcugggauuacaggc

SEQ ID NO: 665844 - RNA, 24 nt, Human
ccaaagugcugggauuacaggcgu

SEQ ID NO: 665845 - RNA, 20 nt, Human
ccaacauauggaaaucagga

SEQ ID NO: 665846 - RNA, 18 nt, Human
ccaccaugccuggccaac

SEQ ID NO: 665847 - RNA, 18 nt, Human
ccagagaaacagaacgaa

SEQ ID NO: 665848 - RNA, 19 nt, Human
cccagaaauaauguuuuac

SEQ ID NO: 665849 - RNA, 19 nt, Human
cccagagaaacagaacgaa

SEQ ID NO: 665850 - RNA, 23 nt, Human
cccgaguagcugggauuacaggu

SEQ ID NO: 665851 - RNA, 24 nt, Human
cccgaguagcugggauuacaggug

SEQ ID NO: 665852 - RNA, 21 nt, Human
ccgaguagcugggauuacagg

SEQ ID NO: 665853 - RNA, 20 nt, Human
ccgccgccgcccggcgcugu

SEQ ID NO: 665854 - RNA, 24 nt, Human
ccuccuggguuuaagcaauucuuc

SEQ ID NO: 665855 - RNA, 24 nt, Human
cuaauuuuuguauuuuuguagaga

SEQ ID NO: 665856 - RNA, 21 nt, Human
cuauauuacacuauauuacuu

SEQ ID NO: 665857 - RNA, 21 nt, Human
cucacugcagccuuugccucc

SEQ ID NO: 665858 - RNA, 24 nt, Human
cucacugcagccuuugccuccugg

SEQ ID NO: 665859 - RNA, 23 nt, Human
cucagccucccgaguagcuggga

SEQ ID NO: 665860 - RNA, 21 nt, Human
cuccuggguuuaagcaauucu

SEQ ID NO: 665861 - RNA, 18 nt, Human
cucuugacuucgugaucc

SEQ ID NO: 665862 - RNA, 25 nt, Human
cucuugacuucgugauccacccacc

SEQ ID NO: 665863 - RNA, 25 nt, Human
cuggagugcaguggcgggaucuugg

SEQ ID NO: 665864 - RNA, 19 nt, Human
gaaaaggcauuuucaaugc

SEQ ID NO: 665865 - RNA, 22 nt, Human
gacuucgugauccacccaccuc

SEQ ID NO: 665866 - RNA, 24 nt, Human
gacuucgugauccacccaccucgg

SEQ ID NO: 665867 - RNA, 22 nt, Human
gagaaacagaacgaacacaccc

SEQ ID NO: 665868 - RNA, 20 nt, Human
gagaugggguuucaccaugu

SEQ ID NO: 665869 - RNA, 24 nt, Human
gagaugggguuucaccauguuggc

SEQ ID NO: 665870 - RNA, 26 nt, Human
gagccaacacuccuauggcucuucuc

SEQ ID NO: 665871 - RNA, 23 nt, Human
gaucuuuggacccggcaaucuua

SEQ ID NO: 665872 - RNA, 18 nt, Human
gauuacaggcguaagcca

SEQ ID NO: 665873 - RNA, 21 nt, Human
gauuacaggcguaagccacca

SEQ ID NO: 665874 - RNA, 24 nt, Human
gauuacaggcguaagccaccaugc

SEQ ID NO: 665875 - RNA, 19 nt, Human
gcuaaaaacagaagcuaca

SEQ ID NO: 665876 - RNA, 21 nt, Human
gcucacugcagccuuugccuc

SEQ ID NO: 665877 - RNA, 25 nt, Human
ggagugcuggagugcaguggcggga

SEQ ID NO: 665878 - RNA, 24 nt, Human
ggauuacaggcguaagccaccaug

SEQ ID NO: 665879 - RNA, 22 nt, Human
ggcucuucucagaacugggagu

SEQ ID NO: 665880 - RNA, 22 nt, Human
gggguuucaccauguuggccag

SEQ ID NO: 665881 - RNA, 18 nt, Human
ggguuucaccauguuggc

SEQ ID NO: 665882 - RNA, 22 nt, Human
ggguuucaccauguuggccagg

SEQ ID NO: 665883 - RNA, 19 nt, Human
guagagaugggguuucacc

SEQ ID NO: 665884 - RNA, 21 nt, Human
guagagaugggguuucaccau

SEQ ID NO: 665885 - RNA, 22 nt, Human
guagagaugggguuucaccaug

SEQ ID NO: 665886 - RNA, 18 nt, Human
guagcugggauuacaggu

SEQ ID NO: 665887 - RNA, 24 nt, Human
gugauccacccaccucggccuccc

SEQ ID NO: 665888 - RNA, 21 nt, Human
uaaaauuaaccaacacucuua

SEQ ID NO: 665889 - RNA, 23 nt, Human
uaauuuuuguauuuuuguagaga

SEQ ID NO: 665890 - RNA, 22 nt, Human
uacagcagcuucaaauguccag

SEQ ID NO: 665891 - RNA, 22 nt, Human
uacaggcguaagccaccaugcc

SEQ ID NO: 665892 - RNA, 22 nt, Human
uacaggugcacaccaccacacc

SEQ ID NO: 665893 - RNA, 22 nt, Human
uagagaugggguuucaccaugu

SEQ ID NO: 665894 - RNA, 23 nt, Human
uagaucuuuggacccggcaaucu

SEQ ID NO: 665895 - RNA, 22 nt, Human
uaucaucgcaagucacccucca

SEQ ID NO: 665896 - RNA, 24 nt, Human
uauucauucaucaaguaucuauug

SEQ ID NO: 665897 - RNA, 24 nt, Human
ucacugcagccuuugccuccuggg

SEQ ID NO: 665898 - RNA, 25 nt, Human
ucacugcagccuuugccuccugggu

SEQ ID NO: 665899 - RNA, 26 nt, Human
ucacugcagccuuugccuccuggguc

SEQ ID NO: 665900 - RNA, 20 nt, Human
ucacugugccacagcagcuu

SEQ ID NO: 665901 - RNA, 18 nt, Human
ucagaaaagcgagucaca

SEQ ID NO: 665902 - RNA, 20 nt, Human
ucagccucccgaguagcugg

SEQ ID NO: 665903 - RNA, 22 nt, Human
uccaccaagucacgccuacuuc

SEQ ID NO: 665904 - RNA, 24 nt, Human
uccaugggcuggcaugcccaaaga

SEQ ID NO: 665905 - RNA, 19 nt, Human
uccaugugcugggcgaggu

SEQ ID NO: 665906 - RNA, 19 nt, Human
uccauuuuuaauuugggua

SEQ ID NO: 665907 - RNA, 24 nt, Human
ucccaaagugcugggauuacaggc

SEQ ID NO: 665908 - RNA, 23 nt, Human
ucccagagaaacagaacgaacac

SEQ ID NO: 665909 - RNA, 20 nt, Human
uccccgccgccgcccggcgc

SEQ ID NO: 665910 - RNA, 23 nt, Human
ucccgaguagcugggauuacagg

SEQ ID NO: 665911 - RNA, 24 nt, Human
ucccgaguagcugggauuacaggu

SEQ ID NO: 665912 - RNA, 21 nt, Human
uccuggguuuaagcaauucuu

SEQ ID NO: 665913 - RNA, 23 nt, Human
uccuggguuuaagcaauucuuca

SEQ ID NO: 665914 - RNA, 18 nt, Human
ucggccucccaaagugcu

SEQ ID NO: 665915 - RNA, 20 nt, Human
ucuucuuuaaacccuuucag

SEQ ID NO: 665916 - RNA, 22 nt, Human
ucuucuuuaaacccuuucagua

SEQ ID NO: 665917 - RNA, 24 nt, Human
ugaaaaacaacggcaugaccacau

SEQ ID NO: 665918 - RNA, 20 nt, Human
ugacaggaaggauuugcacu

SEQ ID NO: 665919 - RNA, 19 nt, Human
ugacagggaaaugaggaga

SEQ ID NO: 665920 - RNA, 20 nt, Human
ugacuucgugauccacccac

SEQ ID NO: 665921 - RNA, 24 nt, Human
ugauccacccaccucggccuccca

SEQ ID NO: 665922 - RNA, 20 nt, Human
ugcagccuuugccuccuggg

SEQ ID NO: 665923 - RNA, 22 nt, Human
ugcaguggcgggaucuuggcuc

SEQ ID NO: 665924 - RNA, 18 nt, Human
ugccacagcagcuugaaa

SEQ ID NO: 665925 - RNA, 22 nt, Human
ugccacagcagcuugaaaaaca

SEQ ID NO: 665926 - RNA, 23 nt, Human
ugccacagcagcuugaaaaacaa

SEQ ID NO: 665927 - RNA, 26 nt, Human
ugccagugggagagcacuccaugggc

SEQ ID NO: 665928 - RNA, 25 nt, Human
ugcccaaagaaggcauugauggaag

SEQ ID NO: 665929 - RNA, 24 nt, Human
ugcugggauuacaggcguaagcca

SEQ ID NO: 665930 - RNA, 23 nt, Human
uggagugcaguggcgggaucuug

SEQ ID NO: 665931 - RNA, 24 nt, Human
uggagugcaguggcgggaucuugg

SEQ ID NO: 665932 - RNA, 24 nt, Human
uggccaggcuggucuugaacucuu

SEQ ID NO: 665933 - RNA, 21 nt, Human
uggcgggaucuuggcucacug

SEQ ID NO: 665934 - RNA, 18 nt, Human
ugggauuacaggcguaag

SEQ ID NO: 665935 - RNA, 22 nt, Human
ugggauuacaggcguaagccac

SEQ ID NO: 665936 - RNA, 24 nt, Human
ugggauuacaggcguaagccacca

SEQ ID NO: 665937 - RNA, 25 nt, Human
ugggauuacaggcguaagccaccau

SEQ ID NO: 665938 - RNA, 21 nt, Human
ugggauuacaggugcacacca

SEQ ID NO: 665939 - RNA, 22 nt, Human
ugggauuacaggugcacaccac

SEQ ID NO: 665940 - RNA, 24 nt, Human
ugggauuacaggugcacaccacca

SEQ ID NO: 665941 - RNA, 24 nt, Human
ugggguuucaccauguuggccagg

SEQ ID NO: 665942 - RNA, 24 nt, Human
uguagagaugggguuucaccaugu

SEQ ID NO: 665943 - RNA, 22 nt, Human
uuagucugggaucccagagaaa

SEQ ID NO: 665944 - RNA, 25 nt, Human
uucaaugcuggugguaauauaaauu

SEQ ID NO: 665945 - RNA, 24 nt, Human
uucaucucagccucccgaguagcu

SEQ ID NO: 665946 - RNA, 22 nt, Human
uucauuguuaucaucaucaucc

SEQ ID NO: 665947 - RNA, 18 nt, Human
uuccagugaaagacaagg

SEQ ID NO: 665948 - RNA, 27 nt, Human
uugaaaaacaacggcaugaccacauaa

SEQ ID NO: 665949 - RNA, 24 nt, Human
uuguagagaugggguuucaccaug

SEQ ID NO: 665950 - RNA, 20 nt, Human
uugugucuacagugcuaaaa

SEQ ID NO: 665951 - RNA, 24 nt, Human
uuucaccauguuggccaggcuggu

SEQ ID NO: 665952 - RNA, 21 nt, Human
uuucaguauuuuuccauguuu

SEQ ID NO: 665953 - RNA, 21 nt, Human
uuugccuccuggguuuaagca

SEQ ID NO: 665954 - RNA, 24 nt, Human
uuugccuccuggguuuaagcaauu

SEQ ID NO: 665955 - RNA, 24 nt, Human
uuuguagagaugggguuucaccau

SEQ ID NO: 665956 - RNA, 23 nt, Human
uuuuuguagagaugggguuucac

SEQ ID NO: 665957 - RNA, 21 nt, Human
uuuuuguauuuuuguagagau

SEQ ID NO: 665958 - RNA, 19 nt, Human
aaacagcaaagaccccggc

SEQ ID NO: 665959 - RNA, 22 nt, Human
aaacagcaaagaccccggccgu

SEQ ID NO: 665960 - RNA, 24 nt, Human
aaauauaaaaaguuacaaaauucc

SEQ ID NO: 665961 - RNA, 18 nt, Human
aagacccccgacccccgc

SEQ ID NO: 665962 - RNA, 18 nt, Human
aagcacacacuccaagca

SEQ ID NO: 665963 - RNA, 18 nt, Human
aagcggaaacccgggccg

SEQ ID NO: 665964 - RNA, 23 nt, Human
aagcugcuuuugcauaaaaaaau

SEQ ID NO: 665965 - RNA, 18 nt, Human
aaggaggguuuggcuggg

SEQ ID NO: 665966 - RNA, 24 nt, Human
aaggccugugggacagaaaugggg

SEQ ID NO: 665967 - RNA, 21 nt, Human
acacacacacgcgcgcgcgcg

SEQ ID NO: 665968 - RNA, 18 nt, Human
acacacacagacacacac

SEQ ID NO: 665969 - RNA, 24 nt, Human
acacacacagacacacacacacgc

SEQ ID NO: 665970 - RNA, 33 nt, Human
acacacagacacacacacacgcgcgcgcgcggu

SEQ ID NO: 665971 - RNA, 20 nt, Human
accaagugcagacaaaccca

SEQ ID NO: 665972 - RNA, 20 nt, Human
acccaugcccucucuuuuuc

SEQ ID NO: 665973 - RNA, 25 nt, Human
acccuccuccagggccucuuuguug

SEQ ID NO: 665974 - RNA, 20 nt, Human
acucagaaguccaggccucc

SEQ ID NO: 665975 - RNA, 24 nt, Human
acucgcugucuccggucuaacuuc

SEQ ID NO: 665976 - RNA, 21 nt, Human
agacaaacccaccggggccug

SEQ ID NO: 665977 - RNA, 22 nt, Human
agaggacucucagaccugcaag

SEQ ID NO: 665978 - RNA, 21 nt, Human
agcagcauggaacaccugcug

SEQ ID NO: 665979 - RNA, 19 nt, Human
aggaagaaggaggguuugg

SEQ ID NO: 665980 - RNA, 23 nt, Human
aggaagaaggaggguuuggcugg

SEQ ID NO: 665981 - RNA, 21 nt, Human
aggccuccgcuccaacgccag

SEQ ID NO: 665982 - RNA, 21 nt, Human
aggcuacaaaugcuccaaaca

SEQ ID NO: 665983 - RNA, 23 nt, Human
aggcugggcucaggcagaaccug

SEQ ID NO: 665984 - RNA, 18 nt, Human
aggcuguagggggccugc

SEQ ID NO: 665985 - RNA, 27 nt, Human
agggucauugucaccaaaguggcuggu

SEQ ID NO: 665986 - RNA, 18 nt, Human
agugcugagcugaggggc

SEQ ID NO: 665987 - RNA, 18 nt, Human
auggaacaccugcugccc

SEQ ID NO: 665988 - RNA, 22 nt, Human
caacacaucucucucucucaca

SEQ ID NO: 665989 - RNA, 18 nt, Human
caagcgcagcuccaggca

SEQ ID NO: 665990 - RNA, 22 nt, Human
caaggcaaaggucaauuucucc

SEQ ID NO: 665991 - RNA, 20 nt, Human
cacacacacacacacacaca

SEQ ID NO: 665992 - RNA, 22 nt, Human
cacacacacacgcgcgcgcgcg

SEQ ID NO: 665993 - RNA, 22 nt, Human
cacacacacagacacacacaca

SEQ ID NO: 665994 - RNA, 24 nt, Human
cacacacaggcacgcacaucugca

SEQ ID NO: 665995 - RNA, 20 nt, Human
cacacgcaagagaauaaggc

SEQ ID NO: 665996 - RNA, 21 nt, Human
caccccuccuguccccggcca

SEQ ID NO: 665997 - RNA, 22 nt, Human
cacguguauuuuugcuaaaacu

SEQ ID NO: 665998 - RNA, 18 nt, Human
cagcccccucugcaacuc

SEQ ID NO: 665999 - RNA, 19 nt, Human
cagcguggucaacagugcu

SEQ ID NO: 666000 - RNA, 28 nt, Human
caggcacacacacagacacacacacacg

SEQ ID NO: 666001 - RNA, 19 nt, Human
caugguuucugucuuuguu

SEQ ID NO: 666002 - RNA, 23 nt, Human
ccaacacaucucucucucucaca

SEQ ID NO: 666003 - RNA, 18 nt, Human
cccacccuccuccagggc

SEQ ID NO: 666004 - RNA, 23 nt, Human
cccagaagacaugguuuccaagg

SEQ ID NO: 666005 - RNA, 19 nt, Human
cccauagaccugcccugag

SEQ ID NO: 666006 - RNA, 22 nt, Human
cccccagaagacaugguuucca

SEQ ID NO: 666007 - RNA, 21 nt, Human
ccccggccagccccacccucc

SEQ ID NO: 666008 - RNA, 19 nt, Human
ccccggccgugaugucggc

SEQ ID NO: 666009 - RNA, 21 nt, Human
ccccuauccagaagggcuguc

SEQ ID NO: 666010 - RNA, 26 nt, Human
ccccugugaggcgcagggguggaggc

SEQ ID NO: 666011 - RNA, 24 nt, Human
ccggggcucggccuggcuccccuc

SEQ ID NO: 666012 - RNA, 20 nt, Human
ccucauacgcagcgugguca

SEQ ID NO: 666013 - RNA, 22 nt, Human
ccuccagggccucuuuguuggc

SEQ ID NO: 666014 - RNA, 23 nt, Human
ccuccuguccccggccagcccca

SEQ ID NO: 666015 - RNA, 18 nt, Human
ccuggcuccccucuucuc

SEQ ID NO: 666016 - RNA, 20 nt, Human
ccugucaugguuucugucuu

SEQ ID NO: 666017 - RNA, 21 nt, Human
ccugugaggcgcaggggugga

SEQ ID NO: 666018 - RNA, 19 nt, Human
ccugugggacagaaauggg

SEQ ID NO: 666019 - RNA, 20 nt, Human
ccuguuagugaaacagaaga

SEQ ID NO: 666020 - RNA, 20 nt, Human
cgacuuucuuggccaccccu

SEQ ID NO: 666021 - RNA, 21 nt, Human
cgcaagagaauaaggcuacaa

SEQ ID NO: 666022 - RNA, 23 nt, Human
cggaaacccgggccgucugcccc

SEQ ID NO: 666023 - RNA, 26 nt, Human
cggggcucggccuggcuccccucuuc

SEQ ID NO: 666024 - RNA, 21 nt, Human
cucacacacacacacacacac

SEQ ID NO: 666025 - RNA, 19 nt, Human
cucggccuggcuccccucu

SEQ ID NO: 666026 - RNA, 26 nt, Human
cugaagccugauacaauacccaacag

SEQ ID NO: 666027 - RNA, 21 nt, Human
cugagcugaggggcaagccug

SEQ ID NO: 666028 - RNA, 19 nt, Human
cugcacccgccucccccaa

SEQ ID NO: 666029 - RNA, 22 nt, Human
cugggcucuaggaagaaggagg

SEQ ID NO: 666030 - RNA, 19 nt, Human
gaaacagucuuagacccag

SEQ ID NO: 666031 - RNA, 20 nt, Human
gaacacagaaggcuggucuc

SEQ ID NO: 666032 - RNA, 23 nt, Human
gaacccaggcgucuaaacagcaa

SEQ ID NO: 666033 - RNA, 21 nt, Human
gaccugcaguccccccacccc

SEQ ID NO: 666034 - RNA, 25 nt, Human
gaggcgcagggguggaggccugugu

SEQ ID NO: 666035 - RNA, 18 nt, Human
gcagagacguuaaagggc

SEQ ID NO: 666036 - RNA, 18 nt, Human
gccccacuuccugggcga

SEQ ID NO: 666037 - RNA, 18 nt, Human
gcccggagggaagcggaa

SEQ ID NO: 666038 - RNA, 18 nt, Human
gccugcuguguccgcagc

SEQ ID NO: 666039 - RNA, 25 nt, Human
gcgcagcuccaggcacacacacaga

SEQ ID NO: 666040 - RNA, 26 nt, Human
gcgcgcaaacacacacaggcacgcac

SEQ ID NO: 666041 - RNA, 24 nt, Human
gcgcgcgcaaacacacacaggcac

SEQ ID NO: 666042 - RNA, 21 nt, Human
gcuccaaacauggguccagaa

SEQ ID NO: 666043 - RNA, 18 nt, Human
gcucuaggaagaaggagg

SEQ ID NO: 666044 - RNA, 29 nt, Human
ggcacacacacagacacacacacacgcgg

SEQ ID NO: 666045 - RNA, 19 nt, Human
ggcagagacguuaaagggc

SEQ ID NO: 666046 - RNA, 18 nt, Human
ggccggggcucggccugg

SEQ ID NO: 666047 - RNA, 24 nt, Human
ggccgugaugucggcuccgcaacc

SEQ ID NO: 666048 - RNA, 21 nt, Human
ggccuggcuccccucuucucg

SEQ ID NO: 666049 - RNA, 18 nt, Human
ggcgcagggguggaggcc

SEQ ID NO: 666050 - RNA, 19 nt, Human
gggacagaaauggggagaa

SEQ ID NO: 666051 - RNA, 21 nt, Human
ggggccuggcggggcagcccu

SEQ ID NO: 666052 - RNA, 23 nt, Human
ggggccuggcggggcagcccugu

SEQ ID NO: 666053 - RNA, 21 nt, Human
gguggaggccuguguggcuca

SEQ ID NO: 666054 - RNA, 20 nt, Human
gugaaacagaagacccccga

SEQ ID NO: 666055 - RNA, 24 nt, Human
gugaaacagaagacccccgacccc

SEQ ID NO: 666056 - RNA, 20 nt, Human
guuuggcugggcccgcccag

SEQ ID NO: 666057 - RNA, 20 nt, Human
uaaacagcaaagaccccggc

SEQ ID NO: 666058 - RNA, 22 nt, Human
uagcagcauggaacaccugcug

SEQ ID NO: 666059 - RNA, 21 nt, Human
ucaacagugcugagcugaggg

SEQ ID NO: 666060 - RNA, 23 nt, Human
uccaagcaaguggucagucuggc

SEQ ID NO: 666061 - RNA, 22 nt, Human
uccagggccucuuuguuggcug

SEQ ID NO: 666062 - RNA, 20 nt, Human
ucggcuccgcaacccaugcc

SEQ ID NO: 666063 - RNA, 18 nt, Human
ucgguccugcacccgccu

SEQ ID NO: 666064 - RNA, 21 nt, Human
ucucacacacacacacacaca

SEQ ID NO: 666065 - RNA, 20 nt, Human
ucugccccuauccagaaggg

SEQ ID NO: 666066 - RNA, 24 nt, Human
ugaaacagaagacccccgaccccc

SEQ ID NO: 666067 - RNA, 22 nt, Human
ugaccugcaguccccccacccc

SEQ ID NO: 666068 - RNA, 21 nt, Human
ugaggccuagagucacagaaa

SEQ ID NO: 666069 - RNA, 21 nt, Human
ugcacccgccucccccaaccc

SEQ ID NO: 666070 - RNA, 20 nt, Human
ugcagacaaacccaccgggg

SEQ ID NO: 666071 - RNA, 19 nt, Human
ugcugagcugaggggcaag

SEQ ID NO: 666072 - RNA, 20 nt, Human
uggaggccuguguggcucag

SEQ ID NO: 666073 - RNA, 23 nt, Human
uggcggggcagcccugucauggu

SEQ ID NO: 666074 - RNA, 21 nt, Human
uggcucagguugccaaggcac

SEQ ID NO: 666075 - RNA, 18 nt, Human
uggcugggcccgcccagc

SEQ ID NO: 666076 - RNA, 20 nt, Human
ugggagguguuaguuauggg

SEQ ID NO: 666077 - RNA, 24 nt, Human
ugggagguguuaguuaugggugcc

SEQ ID NO: 666078 - RNA, 21 nt, Human
ugggauacccaagaugcccuc

SEQ ID NO: 666079 - RNA, 19 nt, Human
ugggcucuaggaagaagga

SEQ ID NO: 666080 - RNA, 24 nt, Human
ugggcucuaggaagaaggaggguu

SEQ ID NO: 666081 - RNA, 18 nt, Human
uguagggggccugcugug

SEQ ID NO: 666082 - RNA, 21 nt, Human
uuagugaaacagaagaccccc

SEQ ID NO: 666083 - RNA, 23 nt, Human
uucaagcacacacuccaagcaag

SEQ ID NO: 666084 - RNA, 19 nt, Human
uucuugcgacuuucuuggc

SEQ ID NO: 666085 - RNA, 22 nt, Human
aaugaagaaacaaaaaaaauug

SEQ ID NO: 666086 - RNA, 21 nt, Human
aauuaacugcuaccaaauucc

SEQ ID NO: 666087 - RNA, 18 nt, Human
accuuggucacaguguac

SEQ ID NO: 666088 - RNA, 21 nt, Human
acucuaaggaaauuuucugaa

SEQ ID NO: 666089 - RNA, 25 nt, Human
aggcuuucauggauugggggagggg

SEQ ID NO: 666090 - RNA, 19 nt, Human
augcacacgcacacaagca

SEQ ID NO: 666091 - RNA, 20 nt, Human
cacacgcacacaagcagcaa

SEQ ID NO: 666092 - RNA, 25 nt, Human
cacacgcacacaagcagcaaaugua

SEQ ID NO: 666093 - RNA, 25 nt, Human
cacaguguacugauucacccuccca

SEQ ID NO: 666094 - RNA, 23 nt, Human
cacgcacacaagcagcaaaugua

SEQ ID NO: 666095 - RNA, 22 nt, Human
ccaacauugaacucuguaagcc

SEQ ID NO: 666096 - RNA, 21 nt, Human
ccuucaacaccaaaaaggccc

SEQ ID NO: 666097 - RNA, 24 nt, Human
cguguucacaaaugcacacgcaca

SEQ ID NO: 666098 - RNA, 19 nt, Human
gcacacgcacacaagcagc

SEQ ID NO: 666099 - RNA, 24 nt, Human
gcagaauuuuguauagauaugcug

SEQ ID NO: 666100 - RNA, 25 nt, Human
ggaauucuuucaaauuuugaagcuu

SEQ ID NO: 666101 - RNA, 21 nt, Human
ggaggcagagauggugagucc

SEQ ID NO: 666102 - RNA, 24 nt, Human
guucaauaaaguuuauguccugaa

SEQ ID NO: 666103 - RNA, 21 nt, Human
uaacauaaaguccagaaacau

SEQ ID NO: 666104 - RNA, 22 nt, Human
uaacauaaaguccagaaacauu

SEQ ID NO: 666105 - RNA, 22 nt, Human
ucaauccaacacggugacuuau

SEQ ID NO: 666106 - RNA, 18 nt, Human
ucacaguguacugauuca

SEQ ID NO: 666107 - RNA, 19 nt, Human
ucauggauugggggagggg

SEQ ID NO: 666108 - RNA, 21 nt, Human
ucuguaagccucaugggaggc

SEQ ID NO: 666109 - RNA, 25 nt, Human
ugaagaaacaaaaaaaauuggcuug

SEQ ID NO: 666110 - RNA, 22 nt, Human
ugauauagcgaugauucaaagu

SEQ ID NO: 666111 - RNA, 19 nt, Human
ugauggaauucuuucaaau

SEQ ID NO: 666112 - RNA, 18 nt, Human
uggauugggggaggggaa

SEQ ID NO: 666113 - RNA, 20 nt, Human
uggauugggggaggggaaau

SEQ ID NO: 666114 - RNA, 23 nt, Human
uguauagauaugcuguacguggu

SEQ ID NO: 666115 - RNA, 18 nt, Human
ugucugagagaugcagga

SEQ ID NO: 666116 - RNA, 21 nt, Human
uucauggauugggggagggga

SEQ ID NO: 666117 - RNA, 18 nt, Human
uuugaggaccuuggucac

SEQ ID NO: 666118 - RNA, 20 nt, Human
gacacuagggauuacuuccu

SEQ ID NO: 666119 - RNA, 24 nt, Human
gcugaaucugcugacacuagggau

SEQ ID NO: 666120 - RNA, 18 nt, Human
ggguucuugugaugaugg

SEQ ID NO: 666121 - RNA, 21 nt, Human
uauacaccaguaccgcugaau

SEQ ID NO: 666122 - RNA, 21 nt, Human
uaucacaaugaaguuugguau

SEQ ID NO: 666123 - RNA, 23 nt, Human
ugaugauggugcucuugaguaua

SEQ ID NO: 666124 - RNA, 22 nt, Human
uuauacaccaguaccgcugaau

SEQ ID NO: 666125 - RNA, 23 nt, Human
uucaagcucaugaaguucauucu

SEQ ID NO: 666126 - RNA, 23 nt, Human
uuucaagcucaugaaguucauuc

SEQ ID NO: 666127 - RNA, 21 nt, Human
uuuucuggccaggcaaugaga

SEQ ID NO: 666128 - RNA, 19 nt, Human
uuuuucaagcucaugaagu

SEQ ID NO: 666129 - RNA, 19 nt, Human
aaacacaaaaaaggauaaa

SEQ ID NO: 666130 - RNA, 22 nt, Human
aaauaaauguacagaaucucuc

SEQ ID NO: 666131 - RNA, 18 nt, Human
aaauguacagaaucucuc

SEQ ID NO: 666132 - RNA, 25 nt, Human
aagccagagcagaaaucauaaggga

SEQ ID NO: 666133 - RNA, 21 nt, Human
aagggaccuuagcuggcagcc

SEQ ID NO: 666134 - RNA, 25 nt, Human
acaaauauuaacaaccagagucacu

SEQ ID NO: 666135 - RNA, 22 nt, Human
agaaaucauaagggaccuuagc

SEQ ID NO: 666136 - RNA, 20 nt, Human
agcccagacccggaggcacc

SEQ ID NO: 666137 - RNA, 23 nt, Human
aggaagaaaaaguuggugaagaa

SEQ ID NO: 666138 - RNA, 22 nt, Human
auaaaauuuucucccaaauaaa

SEQ ID NO: 666139 - RNA, 24 nt, Human
auagcacacucacauacgcacaaa

SEQ ID NO: 666140 - RNA, 19 nt, Human
cacacaucaacaguaagau

SEQ ID NO: 666141 - RNA, 21 nt, Human
cacacucacauacgcacaaaa

SEQ ID NO: 666142 - RNA, 23 nt, Human
cacaugcacgcugaacauccgca

SEQ ID NO: 666143 - RNA, 19 nt, Human
caccggaguccucucccca

SEQ ID NO: 666144 - RNA, 24 nt, Human
caggcagcaggagcccagagucca

SEQ ID NO: 666145 - RNA, 19 nt, Human
caugcacgcugaacauccg

SEQ ID NO: 666146 - RNA, 21 nt, Human
caugcacgcugaacauccgca

SEQ ID NO: 666147 - RNA, 18 nt, Human
cauugcacuauuuguuuu

SEQ ID NO: 666148 - RNA, 25 nt, Human
ccagaguccacacccuuaacuaugc

SEQ ID NO: 666149 - RNA, 18 nt, Human
ccaggaaucaccugcagg

SEQ ID NO: 666150 - RNA, 19 nt, Human
cccagaguccacacccuua

SEQ ID NO: 666151 - RNA, 25 nt, Human
ccccacccuagggcguaagaccaaa

SEQ ID NO: 666152 - RNA, 21 nt, Human
cccgcgccgggcccaggcccc

SEQ ID NO: 666153 - RNA, 22 nt, Human
cccuuaacuaugccauguugcu

SEQ ID NO: 666154 - RNA, 23 nt, Human
ccggaggcaccggaguccucucc

SEQ ID NO: 666155 - RNA, 23 nt, Human
ccugcagggucucggccucugcu

SEQ ID NO: 666156 - RNA, 24 nt, Human
ccuuagcuggcagccccaggaauc

SEQ ID NO: 666157 - RNA, 22 nt, Human
cguaagaccaaaaaaacgccaa

SEQ ID NO: 666158 - RNA, 19 nt, Human
cuacuguuuuuagcuguuu

SEQ ID NO: 666159 - RNA, 22 nt, Human
cucacauacgcacaaaauccua

SEQ ID NO: 666160 - RNA, 20 nt, Human
cucggccucugcucccggcc

SEQ ID NO: 666161 - RNA, 20 nt, Human
cugaaaacugcaaagccaga

SEQ ID NO: 666162 - RNA, 18 nt, Human
cugcagggucucggccuc

SEQ ID NO: 666163 - RNA, 21 nt, Human
gaaaagccuaaaauaugauaa

SEQ ID NO: 666164 - RNA, 20 nt, Human
gaagaaaaaguuggugaaga

SEQ ID NO: 666165 - RNA, 19 nt, Human
gaccuuagcuggcagcccc

SEQ ID NO: 666166 - RNA, 23 nt, Human
gcaaagccagagcagaaaucaua

SEQ ID NO: 666167 - RNA, 24 nt, Human
gcaucagaucugcaacaugauuug

SEQ ID NO: 666168 - RNA, 18 nt, Human
gcuccaauuguguaaaga

SEQ ID NO: 666169 - RNA, 20 nt, Human
gcugaaaauuucccucuauu

SEQ ID NO: 666170 - RNA, 18 nt, Human
gcugaacauccgcaaguu

SEQ ID NO: 666171 - RNA, 18 nt, Human
gucucggccucugcuccc

SEQ ID NO: 666172 - RNA, 19 nt, Human
uaagugcuuugaaaauguu

SEQ ID NO: 666173 - RNA, 23 nt, Human
uaaugcaaaacuugacugacauu

SEQ ID NO: 666174 - RNA, 21 nt, Human
uacaauacaaauauuaacaac

SEQ ID NO: 666175 - RNA, 22 nt, Human
uacaauacaaauauuaacaacc

SEQ ID NO: 666176 - RNA, 19 nt, Human
uaccagugucuuugcaguu

SEQ ID NO: 666177 - RNA, 22 nt, Human
uagaaaagccuaaaauaugaua

SEQ ID NO: 666178 - RNA, 23 nt, Human
uagaccucaaagcaauccuaaga

SEQ ID NO: 666179 - RNA, 25 nt, Human
uagcacacucacauacgcacaaaau

SEQ ID NO: 666180 - RNA, 19 nt, Human
uagcuguuuaaaaacagcu

SEQ ID NO: 666181 - RNA, 18 nt, Human
uagggcguaagaccaaaa

SEQ ID NO: 666182 - RNA, 19 nt, Human
ucaacaguaagauacauaa

SEQ ID NO: 666183 - RNA, 24 nt, Human
ucagacacuauucuaagugcuuug

SEQ ID NO: 666184 - RNA, 25 nt, Human
ucggccucugcucccggcccgcgcc

SEQ ID NO: 666185 - RNA, 21 nt, Human
ucuaccagugucuuugcaguu

SEQ ID NO: 666186 - RNA, 22 nt, Human
ucucggccucugcucccggccc

SEQ ID NO: 666187 - RNA, 23 nt, Human
ugaaaacugcaaagccagagcag

SEQ ID NO: 666188 - RNA, 20 nt, Human
ugaaagguuuccuuccuguu

SEQ ID NO: 666189 - RNA, 22 nt, Human
ugacuucugaaagguuuccuuc

SEQ ID NO: 666190 - RNA, 27 nt, Human
ugauuuguaguauaacuguuucccucu

SEQ ID NO: 666191 - RNA, 25 nt, Human
ugcaaaacaaaaguaugacuucuga

SEQ ID NO: 666192 - RNA, 18 nt, Human
ugcagggucucggccucu

SEQ ID NO: 666193 - RNA, 22 nt, Human
ugccauguugcuucuaugaggg

SEQ ID NO: 666194 - RNA, 21 nt, Human
ugggaaaggcugaaaacugca

SEQ ID NO: 666195 - RNA, 18 nt, Human
ugggaacugaggcacaga

SEQ ID NO: 666196 - RNA, 21 nt, Human
ugggaugggaacugaggcaca

SEQ ID NO: 666197 - RNA, 22 nt, Human
ugggaugggaacugaggcacag

SEQ ID NO: 666198 - RNA, 22 nt, Human
uguuaacucauuuagaccucaa

SEQ ID NO: 666199 - RNA, 21 nt, Human
uguuuugaaggauuaauucag

SEQ ID NO: 666200 - RNA, 24 nt, Human
uuaacucauuuagaccucaaagca

SEQ ID NO: 666201 - RNA, 21 nt, Human
uuaaguagcaugccccaugcu

SEQ ID NO: 666202 - RNA, 25 nt, Human
uuaauucagucaagagaauuuccca

SEQ ID NO: 666203 - RNA, 23 nt, Human
uuaccacugucuauauccauuua

SEQ ID NO: 666204 - RNA, 18 nt, Human
uuagaaaagccuaaaaua

SEQ ID NO: 666205 - RNA, 19 nt, Human
uucacaaaauacaaauaau

SEQ ID NO: 666206 - RNA, 21 nt, Human
uuggugaagaacauuuaggac

SEQ ID NO: 666207 - RNA, 24 nt, Human
uuuaaaauaucuauccaaguacca

SEQ ID NO: 666208 - RNA, 23 nt, Human
uuugaauuuuuauugaacaccuu

SEQ ID NO: 666209 - RNA, 22 nt, Human
uuuguaguauaacuguuucccu

SEQ ID NO: 666210 - RNA, 19 nt, Human
uuugugagcuuuuggaugu

SEQ ID NO: 666211 - RNA, 25 nt, Human
uuuuacaauuugcaugacuucugcc

SEQ ID NO: 666212 - RNA, 19 nt, Human
aaagcacauacaaaguaug

SEQ ID NO: 666213 - RNA, 18 nt, Human
aaccgcaaagacagggag

SEQ ID NO: 666214 - RNA, 20 nt, Human
aagcagacuccaaaguguuu

SEQ ID NO: 666215 - RNA, 20 nt, Human
aagcaucauuccugcugcuu

SEQ ID NO: 666216 - RNA, 20 nt, Human
aagugcccacccaccccuuc

SEQ ID NO: 666217 - RNA, 19 nt, Human
aaugucaguuuccugccug

SEQ ID NO: 666218 - RNA, 21 nt, Human
acagccagcgaaguauacaac

SEQ ID NO: 666219 - RNA, 18 nt, Human
agcaucauuccugcugcu

SEQ ID NO: 666220 - RNA, 27 nt, Human
agugcccacccaccccuucccuaaagc

SEQ ID NO: 666221 - RNA, 25 nt, Human
aucucauuuucauuccucaaaucag

SEQ ID NO: 666222 - RNA, 20 nt, Human
auuacauuccccccucccca

SEQ ID NO: 666223 - RNA, 21 nt, Human
caagugcccacccaccccuuc

SEQ ID NO: 666224 - RNA, 24 nt, Human
cacacagccagcgaaguauacaac

SEQ ID NO: 666225 - RNA, 24 nt, Human
caccccuucccuaaagcacauaca

SEQ ID NO: 666226 - RNA, 22 nt, Human
cacuucugccuccuucuuucca

SEQ ID NO: 666227 - RNA, 19 nt, Human
cagaacaugaauuccaucu

SEQ ID NO: 666228 - RNA, 24 nt, Human
cagacuccaaaguguucaucagag

SEQ ID NO: 666229 - RNA, 20 nt, Human
cagucuacauccaaauuugc

SEQ ID NO: 666230 - RNA, 21 nt, Human
caguuucugaaguugcugagg

SEQ ID NO: 666231 - RNA, 18 nt, Human
caucagaguuuuaguuua

SEQ ID NO: 666232 - RNA, 19 nt, Human
ccaagugcccacccacccc

SEQ ID NO: 666233 - RNA, 19 nt, Human
ccacugagaguacuuccug

SEQ ID NO: 666234 - RNA, 22 nt, Human
cccaccccuucccuaaagcaca

SEQ ID NO: 666235 - RNA, 23 nt, Human
cccaccccuucccuaaagcacau

SEQ ID NO: 666236 - RNA, 22 nt, Human
cccacugagaguacuuccugga

SEQ ID NO: 666237 - RNA, 19 nt, Human
cccauggagagugaaaguu

SEQ ID NO: 666238 - RNA, 18 nt, Human
ccccacugagaguacuuc

SEQ ID NO: 666239 - RNA, 21 nt, Human
cccuccccaguucuaccugua

SEQ ID NO: 666240 - RNA, 19 nt, Human
ccucaugcucuuuauccuc

SEQ ID NO: 666241 - RNA, 22 nt, Human
ccuccuucuuuccaugcugucc

SEQ ID NO: 666242 - RNA, 24 nt, Human
cgucauaaaguucaagagucucag

SEQ ID NO: 666243 - RNA, 21 nt, Human
cuccuucuuuccaugcugucc

SEQ ID NO: 666244 - RNA, 20 nt, Human
cugauuuuauuucucucuca

SEQ ID NO: 666245 - RNA, 23 nt, Human
cuucugccuccuucuuuccaugc

SEQ ID NO: 666246 - RNA, 19 nt, Human
cuuggaaugucaguuuccu

SEQ ID NO: 666247 - RNA, 21 nt, Human
gaaaaguacacccagggccuc

SEQ ID NO: 666248 - RNA, 21 nt, Human
gagaaacgggguggaggagag

SEQ ID NO: 666249 - RNA, 26 nt, Human
gcccuaaagcccuucccaaccggagg

SEQ ID NO: 666250 - RNA, 22 nt, Human
ggauugaaaaguacacccaggg

SEQ ID NO: 666251 - RNA, 21 nt, Human
gggguggaggagagggcuggu

SEQ ID NO: 666252 - RNA, 20 nt, Human
ggguggaggagagggcuggu

SEQ ID NO: 666253 - RNA, 23 nt, Human
gguugaauuuucuucacaaaccu

SEQ ID NO: 666254 - RNA, 23 nt, Human
gucuccuucacuaaagcagacuc

SEQ ID NO: 666255 - RNA, 19 nt, Human
gucugucagucuacaucca

SEQ ID NO: 666256 - RNA, 23 nt, Human
uaaaaaauuacauuccccccucc

SEQ ID NO: 666257 - RNA, 19 nt, Human
uaaagcagacuccaaagug

SEQ ID NO: 666258 - RNA, 21 nt, Human
uaaauaugacacauccuuguc

SEQ ID NO: 666259 - RNA, 20 nt, Human
uaccuguagccaugaugaau

SEQ ID NO: 666260 - RNA, 22 nt, Human
uacuucacacagccagcgaagu

SEQ ID NO: 666261 - RNA, 22 nt, Human
uagauccuuggaaugucaguuu

SEQ ID NO: 666262 - RNA, 20 nt, Human
uauccucacuuccucagucc

SEQ ID NO: 666263 - RNA, 20 nt, Human
ucaaaauauugaagacuccg

SEQ ID NO: 666264 - RNA, 22 nt, Human
ucaagagucucagauuacauga

SEQ ID NO: 666265 - RNA, 23 nt, Human
ucagugcccuaaagcccuuccca

SEQ ID NO: 666266 - RNA, 25 nt, Human
ucccaaaccgcaaagacagggaguc

SEQ ID NO: 666267 - RNA, 20 nt, Human
ucccaaagugcaaauauugc

SEQ ID NO: 666268 - RNA, 19 nt, Human
ucccauggagagugaaagu

SEQ ID NO: 666269 - RNA, 22 nt, Human
uccucacuuccucagucccuuc

SEQ ID NO: 666270 - RNA, 19 nt, Human
uccucagucccuucaacac

SEQ ID NO: 666271 - RNA, 26 nt, Human
ucucccacaaugucaggggaugaaag

SEQ ID NO: 666272 - RNA, 27 nt, Human
ucucccacaaugucaggggaugaaagc

SEQ ID NO: 666273 - RNA, 24 nt, Human
ucucucacacguaucaggggcagu

SEQ ID NO: 666274 - RNA, 23 nt, Human
ucugaaaaacacuuuuugagcca

SEQ ID NO: 666275 - RNA, 27 nt, Human
ucugccuccuucuuuccaugcuguccu

SEQ ID NO: 666276 - RNA, 22 nt, Human
ucugucccauggagagugaaag

SEQ ID NO: 666277 - RNA, 21 nt, Human
ucuuugauuucauuucagugc

SEQ ID NO: 666278 - RNA, 22 nt, Human
ugaaaaacacuuuuugagccaa

SEQ ID NO: 666279 - RNA, 19 nt, Human
ugaaagcagguggucccca

SEQ ID NO: 666280 - RNA, 22 nt, Human
ugaaagcaggugguccccacug

SEQ ID NO: 666281 - RNA, 24 nt, Human
ugaaagcaggugguccccacugag

SEQ ID NO: 666282 - RNA, 18 nt, Human
ugagaguacuuccuggau

SEQ ID NO: 666283 - RNA, 20 nt, Human
ugcccuaaagcccuucccac

SEQ ID NO: 666284 - RNA, 30 nt, Human
ugcccuaaagcccuucccacuuuggucucu

SEQ ID NO: 666285 - RNA, 22 nt, Human
ugcuacuaaaaauaaaauaaag

SEQ ID NO: 666286 - RNA, 22 nt, Human
ugcucuuuauccucacuuccuc

SEQ ID NO: 666287 - RNA, 22 nt, Human
ugcuucuucaucuuugauuuca

SEQ ID NO: 666288 - RNA, 21 nt, Human
uggcauuugcagagugugauc

SEQ ID NO: 666289 - RNA, 19 nt, Human
uucagacuugauaaugaga

SEQ ID NO: 666290 - RNA, 18 nt, Human
uucagcuaugucugucag

SEQ ID NO: 666291 - RNA, 20 nt, Human
uuccuggauuagauccuugg

SEQ ID NO: 666292 - RNA, 19 nt, Human
uugcugagguugaauuuuc

SEQ ID NO: 666293 - RNA, 20 nt, Human
uuuauuucucucucacacgu

SEQ ID NO: 666294 - RNA, 24 nt, Human
aaaaagaaagguuucuaccaucag

SEQ ID NO: 666295 - RNA, 24 nt, Human
aaacagcugggauuacagguguga

SEQ ID NO: 666296 - RNA, 25 nt, Human
aaacagcugggauuacaggugugag

SEQ ID NO: 666297 - RNA, 18 nt, Human
aaaucaguccugaaagac

SEQ ID NO: 666298 - RNA, 22 nt, Human
aaccagacuucccaccagcaca

SEQ ID NO: 666299 - RNA, 21 nt, Human
aagaacucgagaacuccagcc

SEQ ID NO: 666300 - RNA, 19 nt, Human
aagccagcauuuucucuug

SEQ ID NO: 666301 - RNA, 21 nt, Human
aaguagcugggauacaggcau

SEQ ID NO: 666302 - RNA, 24 nt, Human
acagcugggauuacaggugugagc

SEQ ID NO: 666303 - RNA, 21 nt, Human
acagugacaugaucucagcuc

SEQ ID NO: 666304 - RNA, 25 nt, Human
acucuguugcccaggcuggaguaca

SEQ ID NO: 666305 - RNA, 30 nt, Human
agaaucuuucccaaguuuguucaccguacu

SEQ ID NO: 666306 - RNA, 22 nt, Human
agccagaaaugggggagcucca

SEQ ID NO: 666307 - RNA, 24 nt, Human
agcuggucuugaacuccugaccuc

SEQ ID NO: 666308 - RNA, 20 nt, Human
aggaaccccugaaaggagag

SEQ ID NO: 666309 - RNA, 20 nt, Human
aggcaugcaccaccaugccc

SEQ ID NO: 666310 - RNA, 24 nt, Human
aggugauccaccugccucagccuc

SEQ ID NO: 666311 - RNA, 23 nt, Human
aggugugagccaccgugccuggc

SEQ ID NO: 666312 - RNA, 23 nt, Human
augcuucagccucccaaguagcu

SEQ ID NO: 666313 - RNA, 24 nt, Human
augcuucagccucccaaguagcug

SEQ ID NO: 666314 - RNA, 19 nt, Human
augcuucugcagaaaacaa

SEQ ID NO: 666315 - RNA, 18 nt, Human
augggguuucuccauguu

SEQ ID NO: 666316 - RNA, 20 nt, Human
augggguuucuccauguugg

SEQ ID NO: 666317 - RNA, 24 nt, Human
auuuuuguauuuuuaguagagaug

SEQ ID NO: 666318 - RNA, 22 nt, Human
caaacuacacgaagucacauaa

SEQ ID NO: 666319 - RNA, 22 nt, Human
caagugauucucaugcuucagc

SEQ ID NO: 666320 - RNA, 27 nt, Human
caagugauucucaugcuucagccuccc

SEQ ID NO: 666321 - RNA, 22 nt, Human
caccaccaugcccugcuaauuu

SEQ ID NO: 666322 - RNA, 25 nt, Human
caccacugcugaaaagaguuggggg

SEQ ID NO: 666323 - RNA, 24 nt, Human
caccaugcccugcuaauuuuugua

SEQ ID NO: 666324 - RNA, 23 nt, Human
cacgaagucacauaaaagaacuc

SEQ ID NO: 666325 - RNA, 22 nt, Human
cacucuguugcccaggcuggag

SEQ ID NO: 666326 - RNA, 18 nt, Human
cacugcaaccucugccuc

SEQ ID NO: 666327 - RNA, 22 nt, Human
cagcaaagauaaauucaggaaa

SEQ ID NO: 666328 - RNA, 23 nt, Human
cagcaaagauaaauucaggaaac

SEQ ID NO: 666329 - RNA, 24 nt, Human
cagcaagcuaaaguuccuuuagaa

SEQ ID NO: 666330 - RNA, 23 nt, Human
cagccucccaaacagcugggauu

SEQ ID NO: 666331 - RNA, 22 nt, Human
caggugauccaccugccucagc

SEQ ID NO: 666332 - RNA, 23 nt, Human
cauaaaagaacucgagaacucca

SEQ ID NO: 666333 - RNA, 24 nt, Human
cauguuggccaagcuggucuugaa

SEQ ID NO: 666334 - RNA, 21 nt, Human
ccaaacagcugggauuacagg

SEQ ID NO: 666335 - RNA, 24 nt, Human
ccaaacagcugggauuacaggugu

SEQ ID NO: 666336 - RNA, 22 nt, Human
ccaccgccugcugucuucuucc

SEQ ID NO: 666337 - RNA, 23 nt, Human
ccaccgccugcugucuucuucca

SEQ ID NO: 666338 - RNA, 23 nt, Human
ccaccugccucagccucccaaac

SEQ ID NO: 666339 - RNA, 20 nt, Human
ccaggauucaagugauucuc

SEQ ID NO: 666340 - RNA, 21 nt, Human
ccauguuggccaagcuggucu

SEQ ID NO: 666341 - RNA, 21 nt, Human
ccauguuggccaagcuggucu

SEQ ID NO: 666342 - RNA, 24 nt, Human
cccaaacagcugggauuacaggug

SEQ ID NO: 666343 - RNA, 25 nt, Human
cccaagcccuaaaugaauacagcaa

SEQ ID NO: 666344 - RNA, 22 nt, Human
cccaaguagcugggauacaggc

SEQ ID NO: 666345 - RNA, 21 nt, Human
cccaccgccugcugucuucuu

SEQ ID NO: 666346 - RNA, 19 nt, Human
cccaggcuggaguacagug

SEQ ID NO: 666347 - RNA, 27 nt, Human
ccccugaaaggagagccagaaaugggg

SEQ ID NO: 666348 - RNA, 21 nt, Human
ccugaccucaggugauccacc

SEQ ID NO: 666349 - RNA, 23 nt, Human
ccugaccucaggugauccaccug

SEQ ID NO: 666350 - RNA, 23 nt, Human
ccugaccucaggugauccaccug

SEQ ID NO: 666351 - RNA, 24 nt, Human
ccugccucagccucccaaacagcu

SEQ ID NO: 666352 - RNA, 24 nt, Human
cucacucuguugcccaggcuggag

SEQ ID NO: 666353 - RNA, 24 nt, Human
cucacugcaaccucugccuccagg

SEQ ID NO: 666354 - RNA, 23 nt, Human
cucaggugauccaccugccucag

SEQ ID NO: 666355 - RNA, 19 nt, Human
cuccaggauucaagugauu

SEQ ID NO: 666356 - RNA, 24 nt, Human
cugcaaccucugccuccaggauuc

SEQ ID NO: 666357 - RNA, 24 nt, Human
cuguaagcuccuaacagaccaugc

SEQ ID NO: 666358 - RNA, 19 nt, Human
cuguugcccaggcuggagu

SEQ ID NO: 666359 - RNA, 25 nt, Human
cuucagccucccaaguagcugggau

SEQ ID NO: 666360 - RNA, 24 nt, Human
cuuucuggcugcaagagucagggg

SEQ ID NO: 666361 - RNA, 20 nt, Human
gaagucacauaaaagaacuc

SEQ ID NO: 666362 - RNA, 24 nt, Human
gaccucaggugauccaccugccuc

SEQ ID NO: 666363 - RNA, 18 nt, Human
gagaugggguuucuccau

SEQ ID NO: 666364 - RNA, 24 nt, Human
gagaugggguuucuccauguuggc

SEQ ID NO: 666365 - RNA, 21 nt, Human
gauccaccugccucagccucc

SEQ ID NO: 666366 - RNA, 18 nt, Human
gauuacaggugugagcca

SEQ ID NO: 666367 - RNA, 21 nt, Human
gauuacaggugugagccaccg

SEQ ID NO: 666368 - RNA, 24 nt, Human
gauuacaggugugagccaccgugc

SEQ ID NO: 666369 - RNA, 21 nt, Human
gauucucaugcuucagccucc

SEQ ID NO: 666370 - RNA, 22 nt, Human
gcaaccucugccuccaggauuc

SEQ ID NO: 666371 - RNA, 19 nt, Human
gcccaggcuggaguacagu

SEQ ID NO: 666372 - RNA, 22 nt, Human
gcccugcuaauuuuuguauuuu

SEQ ID NO: 666373 - RNA, 23 nt, Human
gcuaaaguuccuuuagaaaacca

SEQ ID NO: 666374 - RNA, 19 nt, Human
gcuggaguacagugacaug

SEQ ID NO: 666375 - RNA, 19 nt, Human
gcugggauuacagguguga

SEQ ID NO: 666376 - RNA, 20 nt, Human
gcuucugcagaaaacaauuc

SEQ ID NO: 666377 - RNA, 24 nt, Human
ggauacaggcaugcaccaccaugc

SEQ ID NO: 666378 - RNA, 22 nt, Human
gggacucucccaagcccuaaau

SEQ ID NO: 666379 - RNA, 24 nt, Human
gggggagcuccaaacucuuugugu

SEQ ID NO: 666380 - RNA, 18 nt, Human
gggguuucuccauguugg

SEQ ID NO: 666381 - RNA, 19 nt, Human
ggucuugaacuccugaccu

SEQ ID NO: 666382 - RNA, 18 nt, Human
gugauccaccugccucag

SEQ ID NO: 666383 - RNA, 24 nt, Human
gugauccaccugccucagccuccc

SEQ ID NO: 666384 - RNA, 24 nt, Human
gugauucucaugcuucagccuccc

SEQ ID NO: 666385 - RNA, 25 nt, Human
uaaagcaacaaacuacacgaaguca

SEQ ID NO: 666386 - RNA, 19 nt, Human
uaaccagacuucccaccag

SEQ ID NO: 666387 - RNA, 19 nt, Human
uaacugacuugugaacuaa

SEQ ID NO: 666388 - RNA, 24 nt, Human
uaauuuuuguauuuuuaguagaga

SEQ ID NO: 666389 - RNA, 22 nt, Human
uacaggugugagccaccgugcc

SEQ ID NO: 666390 - RNA, 22 nt, Human
uacaggugugagccaccgugcc

SEQ ID NO: 666391 - RNA, 24 nt, Human
uaguagagaugggguuucuccaug

SEQ ID NO: 666392 - RNA, 21 nt, Human
uauucugauaacaaacucugg

SEQ ID NO: 666393 - RNA, 19 nt, Human
ucaagugauucucaugcuu

SEQ ID NO: 666394 - RNA, 19 nt, Human
ucacugcaaccucugccuc

SEQ ID NO: 666395 - RNA, 23 nt, Human
ucacugcaaccucugccuccagg

SEQ ID NO: 666396 - RNA, 27 nt, Human
ucacugcaaccucugccuccaggauuc

SEQ ID NO: 666397 - RNA, 18 nt, Human
ucagccucccaaacagcu

SEQ ID NO: 666398 - RNA, 20 nt, Human
ucagccucccaaacagcugg

SEQ ID NO: 666399 - RNA, 18 nt, Human
ucagccucccaaguagcu

SEQ ID NO: 666400 - RNA, 20 nt, Human
ucagccucccaaguagcugg

SEQ ID NO: 666401 - RNA, 22 nt, Human
ucaggugauccaccugccucag

SEQ ID NO: 666402 - RNA, 23 nt, Human
ucauugauuuuuaaagagaaucu

SEQ ID NO: 666403 - RNA, 19 nt, Human
uccagcgcgucaagcucca

SEQ ID NO: 666404 - RNA, 19 nt, Human
uccauguuggccaagcugg

SEQ ID NO: 666405 - RNA, 23 nt, Human
ucccaaacagcugggauuacagg

SEQ ID NO: 666406 - RNA, 23 nt, Human
ucccaaacagcugggauuacagg

SEQ ID NO: 666407 - RNA, 24 nt, Human
ucccaaacagcugggauuacaggu

SEQ ID NO: 666408 - RNA, 23 nt, Human
ucccaaguagcugggauacaggc

SEQ ID NO: 666409 - RNA, 18 nt, Human
uccuauggccuguaagcu

SEQ ID NO: 666410 - RNA, 23 nt, Human
ucucacucuguugcccaggcugg

SEQ ID NO: 666411 - RNA, 24 nt, Human
ucucacucuguugcccaggcugga

SEQ ID NO: 666412 - RNA, 25 nt, Human
ucucacucuguugcccaggcuggag

SEQ ID NO: 666413 - RNA, 26 nt, Human
ucucacucuguugcccaggcuggagu

SEQ ID NO: 666414 - RNA, 22 nt, Human
ucucccaagcccuaaaugaaua

SEQ ID NO: 666415 - RNA, 22 nt, Human
ucugcagaaaacaauucuggac

SEQ ID NO: 666416 - RNA, 18 nt, Human
ucuguugcccaggcugga

SEQ ID NO: 666417 - RNA, 23 nt, Human
ucuugaacuccugaccucaggug

SEQ ID NO: 666418 - RNA, 22 nt, Human
ugaaaagaguugggggaggaaa

SEQ ID NO: 666419 - RNA, 24 nt, Human
ugaaaagaguugggggaggaaccc

SEQ ID NO: 666420 - RNA, 19 nt, Human
ugaaaggagagccagaaau

SEQ ID NO: 666421 - RNA, 24 nt, Human
ugacaugaucucagcucacugcaa

SEQ ID NO: 666422 - RNA, 24 nt, Human
ugaccucaggugauccaccugccu

SEQ ID NO: 666423 - RNA, 21 nt, Human
ugacugaauuaucuugggacu

SEQ ID NO: 666424 - RNA, 23 nt, Human
ugacugaauuaucuugggacucu

SEQ ID NO: 666425 - RNA, 21 nt, Human
ugauucuguuguauuuacaga

SEQ ID NO: 666426 - RNA, 21 nt, Human
ugcccaggcuggaguacagug

SEQ ID NO: 666427 - RNA, 24 nt, Human
ugcccaggcuggaguacagugaca

SEQ ID NO: 666428 - RNA, 26 nt, Human
ugccucagccucccaaacagcuggga

SEQ ID NO: 666429 - RNA, 24 nt, Human
ugcuucagccucccaaguagcugg

SEQ ID NO: 666430 - RNA, 19 nt, Human
uggaguacagugacaugau

SEQ ID NO: 666431 - RNA, 23 nt, Human
uggaguacagugacaugaucuca

SEQ ID NO: 666432 - RNA, 24 nt, Human
uggccaagcuggucuugaacuccu

SEQ ID NO: 666433 - RNA, 23 nt, Human
ugggauacaggcaugcaccacca

SEQ ID NO: 666434 - RNA, 18 nt, Human
ugggauuacaggugugag

SEQ ID NO: 666435 - RNA, 21 nt, Human
ugggauuacaggugugagcca

SEQ ID NO: 666436 - RNA, 22 nt, Human
ugggauuacaggugugagccac

SEQ ID NO: 666437 - RNA, 23 nt, Human
ugggauuacaggugugagccacc

SEQ ID NO: 666438 - RNA, 23 nt, Human
ugggauuacaggugugagccacc

SEQ ID NO: 666439 - RNA, 24 nt, Human
ugggauuacaggugugagccaccg

SEQ ID NO: 666440 - RNA, 19 nt, Human
ugggguuucuccauguugg

SEQ ID NO: 666441 - RNA, 18 nt, Human
uggguuucuaauauuaac

SEQ ID NO: 666442 - RNA, 23 nt, Human
uuaaagcaacaaacuacacgaag

SEQ ID NO: 666443 - RNA, 18 nt, Human
uuaguagagaugggguuu

SEQ ID NO: 666444 - RNA, 24 nt, Human
uuaguagagaugggguuucuccau

SEQ ID NO: 666445 - RNA, 23 nt, Human
uucaagugauucucaugcuucag

SEQ ID NO: 666446 - RNA, 19 nt, Human
uuccuuuagaaaaccacca

SEQ ID NO: 666447 - RNA, 20 nt, Human
uugagacagucucacucugu

SEQ ID NO: 666448 - RNA, 24 nt, Human
uugagacagucucacucuguugcc

SEQ ID NO: 666449 - RNA, 24 nt, Human
uugcccaggcuggaguacagugac

SEQ ID NO: 666450 - RNA, 23 nt, Human
uuguauuuuuaguagagaugggg

SEQ ID NO: 666451 - RNA, 21 nt, Human
uuucuccauguuggccaagcu

SEQ ID NO: 666452 - RNA, 21 nt, Human
uuugcuagaauuccuuucuua

SEQ ID NO: 666453 - RNA, 22 nt, Human
uuuuuaguagagaugggguuuc

SEQ ID NO: 666454 - RNA, 20 nt, Human
uuuuuguauuuuuaguagag

SEQ ID NO: 666455 - RNA, 25 nt, Human
uuuuuuuuuuuuugagacagucuca

SEQ ID NO: 666456 - RNA, 18 nt, Human
uuuuuuuuuuuuuuuuug

SEQ ID NO: 666457 - RNA, 22 nt, Human
aaaaacacgcccuucccacaua

SEQ ID NO: 666458 - RNA, 19 nt, Human
aaaacuugaagcaaggaca

SEQ ID NO: 666459 - RNA, 21 nt, Human
aacccuugggccccucagagg

SEQ ID NO: 666460 - RNA, 23 nt, Human
aagcccugcagacccaagcucca

SEQ ID NO: 666461 - RNA, 23 nt, Human
aagcgucgaaacccgcuuucacc

SEQ ID NO: 666462 - RNA, 18 nt, Human
aaggcuggaggcugguga

SEQ ID NO: 666463 - RNA, 19 nt, Human
acccaaagccucaggccuc

SEQ ID NO: 666464 - RNA, 20 nt, Human
acccacaagaggugggaaac

SEQ ID NO: 666465 - RNA, 19 nt, Human
acccagagcugugugucag

SEQ ID NO: 666466 - RNA, 18 nt, Human
acccuggacccaaagccu

SEQ ID NO: 666467 - RNA, 22 nt, Human
accgaacgcuucccacagcaac

SEQ ID NO: 666468 - RNA, 22 nt, Human
acucacgacuaacauuuucuag

SEQ ID NO: 666469 - RNA, 22 nt, Human
acuccagauucagaccaggcca

SEQ ID NO: 666470 - RNA, 22 nt, Human
acugcacugggcccacgugauc

SEQ ID NO: 666471 - RNA, 18 nt, Human
agacauccuaaaacuuga

SEQ ID NO: 666472 - RNA, 23 nt, Human
agacauccuaaaacuugaagcaa

SEQ ID NO: 666473 - RNA, 18 nt, Human
agacaugaaagccauaac

SEQ ID NO: 666474 - RNA, 21 nt, Human
agagcugugugucagagagca

SEQ ID NO: 666475 - RNA, 24 nt, Human
agcaguccucucacggcugggagc

SEQ ID NO: 666476 - RNA, 19 nt, Human
aggcaggcgggaggagucu

SEQ ID NO: 666477 - RNA, 24 nt, Human
agguacgguggaggucaggcaucu

SEQ ID NO: 666478 - RNA, 23 nt, Human
caacccagucacucaugcaccuc

SEQ ID NO: 666479 - RNA, 24 nt, Human
caccuagacaugaaagccauaacc

SEQ ID NO: 666480 - RNA, 20 nt, Human
caccuccaucaggacuggcu

SEQ ID NO: 666481 - RNA, 27 nt, Human
cagaaggauaugggaugaaugcagugg

SEQ ID NO: 666482 - RNA, 23 nt, Human
cagcaacgcccugcccuggcuuu

SEQ ID NO: 666483 - RNA, 23 nt, Human
cagguaaucaaauucucucccaa

SEQ ID NO: 666484 - RNA, 23 nt, Human
caugauggcgcggcuggccccgg

SEQ ID NO: 666485 - RNA, 19 nt, Human
ccacaccaaagcccuaagg

SEQ ID NO: 666486 - RNA, 19 nt, Human
ccacagcaacgcccugccc

SEQ ID NO: 666487 - RNA, 21 nt, Human
ccaucaggacuggcuggugaa

SEQ ID NO: 666488 - RNA, 18 nt, Human
cccaaagccucaggccuc

SEQ ID NO: 666489 - RNA, 20 nt, Human
cccaaagccucaggccucca

SEQ ID NO: 666490 - RNA, 24 nt, Human
cccaaagccucaggccuccaucuc

SEQ ID NO: 666491 - RNA, 21 nt, Human
cccacagcaacgcccugccuu

SEQ ID NO: 666492 - RNA, 19 nt, Human
cccacauagugcgugaggc

SEQ ID NO: 666493 - RNA, 22 nt, Human
ccccacaccuagacaugaaagc

SEQ ID NO: 666494 - RNA, 22 nt, Human
ccccggacugaccucgcugugu

SEQ ID NO: 666495 - RNA, 24 nt, Human
cccuccuaagcgucgaaacccgcu

SEQ ID NO: 666496 - RNA, 21 nt, Human
cccugcccuggcuuugccuuc

SEQ ID NO: 666497 - RNA, 22 nt, Human
cccugcccuggcuuugccuucu

SEQ ID NO: 666498 - RNA, 18 nt, Human
cccuggacccaaagccuc

SEQ ID NO: 666499 - RNA, 25 nt, Human
cccuggacccaaagccucaggccuc

SEQ ID NO: 666500 - RNA, 22 nt, Human
ccgcccgggccaucgaccggcc

SEQ ID NO: 666501 - RNA, 18 nt, Human
ccgcugaggcugguuuua

SEQ ID NO: 666502 - RNA, 22 nt, Human
ccuccucuguccccacaccuag

SEQ ID NO: 666503 - RNA, 20 nt, Human
ccucugcugcuuccaguuaa

SEQ ID NO: 666504 - RNA, 24 nt, Human
ccugaaaaccaguuccccuuuccc

SEQ ID NO: 666505 - RNA, 23 nt, Human
ccugccaaaggcuggaggcuggu

SEQ ID NO: 666506 - RNA, 19 nt, Human
cgcuguguggcugcaaagc

SEQ ID NO: 666507 - RNA, 25 nt, Human
cggcacgagauccaagcuaguuguu

SEQ ID NO: 666508 - RNA, 20 nt, Human
cuagaaggacaugaauagug

SEQ ID NO: 666509 - RNA, 22 nt, Human
cuagacaugaaagccauaaccc

SEQ ID NO: 666510 - RNA, 19 nt, Human
cucccucggcccuccuaag

SEQ ID NO: 666511 - RNA, 21 nt, Human
cugucagaguccugagaucac

SEQ ID NO: 666512 - RNA, 24 nt, Human
cuuucccugucccagucaacccag

SEQ ID NO: 666513 - RNA, 20 nt, Human
gaaggcaggcgggaggaguc

SEQ ID NO: 666514 - RNA, 20 nt, Human
gacauccauccccggguccc

SEQ ID NO: 666515 - RNA, 18 nt, Human
gaccaggccauccucucc

SEQ ID NO: 666516 - RNA, 20 nt, Human
gaccaggccauccucucccg

SEQ ID NO: 666517 - RNA, 18 nt, Human
gaccucgcuguguggcug

SEQ ID NO: 666518 - RNA, 27 nt, Human
gacugcuuucuacccacuaucuuuagg

SEQ ID NO: 666519 - RNA, 18 nt, Human
gcacagaaggauauggga

SEQ ID NO: 666520 - RNA, 19 nt, Human
gccccggacugaccucgcu

SEQ ID NO: 666521 - RNA, 19 nt, Human
gcccugcccuggcuuugcc

SEQ ID NO: 666522 - RNA, 19 nt, Human
gcccuggcuuugccuucuc

SEQ ID NO: 666523 - RNA, 18 nt, Human
gcugcaaagcccugcaga

SEQ ID NO: 666524 - RNA, 22 nt, Human
ggaaucuucucccucggcccuc

SEQ ID NO: 666525 - RNA, 24 nt, Human
ggacaaggaagacugcacguccuc

SEQ ID NO: 666526 - RNA, 18 nt, Human
ggagccucugcugcuucc

SEQ ID NO: 666527 - RNA, 21 nt, Human
ggagccucugcugcuuccagu

SEQ ID NO: 666528 - RNA, 22 nt, Human
ggcgaggccaccauuaccauga

SEQ ID NO: 666529 - RNA, 19 nt, Human
gggugcgaggggugggggg

SEQ ID NO: 666530 - RNA, 18 nt, Human
ggguggcauuaauuacuc

SEQ ID NO: 666531 - RNA, 20 nt, Human
guggaggucaggcaucuaca

SEQ ID NO: 666532 - RNA, 18 nt, Human
guuccccuuucccugucc

SEQ ID NO: 666533 - RNA, 22 nt, Human
uaaggaauccacaggcaugcaa

SEQ ID NO: 666534 - RNA, 20 nt, Human
uagacaugaaagccauaacc

SEQ ID NO: 666535 - RNA, 19 nt, Human
uaggagaggacaaggaaga

SEQ ID NO: 666536 - RNA, 22 nt, Human
uaggagaggacaaggaagacug

SEQ ID NO: 666537 - RNA, 23 nt, Human
uagugcgugaggcaugugcacau

SEQ ID NO: 666538 - RNA, 23 nt, Human
uauuugaacugcacugggcccac

SEQ ID NO: 666539 - RNA, 21 nt, Human
uccacaccaaagcccuaaggc

SEQ ID NO: 666540 - RNA, 19 nt, Human
ucccacagcaacgcccugc

SEQ ID NO: 666541 - RNA, 24 nt, Human
ucccacagcaacgcccugcccugg

SEQ ID NO: 666542 - RNA, 19 nt, Human
ucccacauagugcgugagg

SEQ ID NO: 666543 - RNA, 21 nt, Human
uccccacaccuagacaugaaa

SEQ ID NO: 666544 - RNA, 24 nt, Human
uccccauugucguaaggaauccac

SEQ ID NO: 666545 - RNA, 21 nt, Human
uccugccaaaggcuggaggcu

SEQ ID NO: 666546 - RNA, 22 nt, Human
ucgaccggccccgccgccgccg

SEQ ID NO: 666547 - RNA, 25 nt, Human
ucucagggucacgcgggcgauuugc

SEQ ID NO: 666548 - RNA, 24 nt, Human
ucucugagugugcacccagagcug

SEQ ID NO: 666549 - RNA, 18 nt, Human
ucugccucucccuccucu

SEQ ID NO: 666550 - RNA, 26 nt, Human
ugaaaacaugaaagcugaaaguucag

SEQ ID NO: 666551 - RNA, 19 nt, Human
ugaaaaccaguuccccuuu

SEQ ID NO: 666552 - RNA, 22 nt, Human
ugaaaauaagccucuauugucc

SEQ ID NO: 666553 - RNA, 19 nt, Human
ugaaagccauaacccuugg

SEQ ID NO: 666554 - RNA, 22 nt, Human
ugacauggauggggcgaggcca

SEQ ID NO: 666555 - RNA, 18 nt, Human
ugaccucgcuguguggcu

SEQ ID NO: 666556 - RNA, 22 nt, Human
ugagcaguccucucacggcugg

SEQ ID NO: 666557 - RNA, 18 nt, Human
ugccaaaggcuggaggcu

SEQ ID NO: 666558 - RNA, 21 nt, Human
ugcccuggcuuugccuucucg

SEQ ID NO: 666559 - RNA, 22 nt, Human
ugcccuggcuuugccuucucgc

SEQ ID NO: 666560 - RNA, 18 nt, Human
ugcgaggggugggggggc

SEQ ID NO: 666561 - RNA, 18 nt, Human
ugcgaggggugggggggc

SEQ ID NO: 666562 - RNA, 20 nt, Human
ugcgaggggugggggggcgg

SEQ ID NO: 666563 - RNA, 22 nt, Human
uggacccaaagccucaggccuc

SEQ ID NO: 666564 - RNA, 22 nt, Human
uggcgcggcuggccccggacug

SEQ ID NO: 666565 - RNA, 21 nt, Human
uggcgcuuguuccuuccuggu

SEQ ID NO: 666566 - RNA, 18 nt, Human
uggcugcaaagcccugca

SEQ ID NO: 666567 - RNA, 22 nt, Human
ugggaaacaccgcguuccccau

SEQ ID NO: 666568 - RNA, 20 nt, Human
ugggaugaaugcaguggcuc

SEQ ID NO: 666569 - RNA, 21 nt, Human
uggugaacacgccugggacag

SEQ ID NO: 666570 - RNA, 19 nt, Human
uguuuugcuuuugccuuuc

SEQ ID NO: 666571 - RNA, 23 nt, Human
aacacuccauguauaucaaaucu

SEQ ID NO: 666572 - RNA, 24 nt, Human
acaguggugcaauuuuccaggcac

SEQ ID NO: 666573 - RNA, 23 nt, Human
cuaaaaaaguacaaaccaagcac

SEQ ID NO: 666574 - RNA, 24 nt, Human
cuaaaaaaguacaaaccaagcaca

SEQ ID NO: 666575 - RNA, 20 nt, Human
gugcuauuuuggcuuguugg

SEQ ID NO: 666576 - RNA, 21 nt, Human
uaaauuuuaacauuugcacag

SEQ ID NO: 666577 - RNA, 24 nt, Human
uaacauuugcacagcuccaaauau

SEQ ID NO: 666578 - RNA, 24 nt, Human
uaagcaauaauuaagcaaauugaa

SEQ ID NO: 666579 - RNA, 23 nt, Human
uaaucgcuguauauuuuccaaaa

SEQ ID NO: 666580 - RNA, 21 nt, Human
uacaaaccaagcacaguggug

SEQ ID NO: 666581 - RNA, 25 nt, Human
ucauugucacguacaucugcauuuc

SEQ ID NO: 666582 - RNA, 20 nt, Human
ucucauugucacguacaucu

SEQ ID NO: 666583 - RNA, 21 nt, Human
uuaacauuugcacagcuccaa

SEQ ID NO: 666584 - RNA, 21 nt, Human
uuucaaguugcuuauuuacaa

SEQ ID NO: 666585 - RNA, 20 nt, Human
uuuuaacauuugcacagcuc

SEQ ID NO: 666586 - RNA, 24 nt, Human
aaacaggaggcaagcagaccagag

SEQ ID NO: 666587 - RNA, 18 nt, Human
aaagagaaacaggaggca

SEQ ID NO: 666588 - RNA, 18 nt, Human
agacgcggcccucucccc

SEQ ID NO: 666589 - RNA, 21 nt, Human
aggcaagcagaccagagcuag

SEQ ID NO: 666590 - RNA, 24 nt, Human
cacagagucuggagaaugcagagc

SEQ ID NO: 666591 - RNA, 20 nt, Human
ccaagcuccuccacagaccg

SEQ ID NO: 666592 - RNA, 19 nt, Human
cccacgcgaggccuccaaa

SEQ ID NO: 666593 - RNA, 23 nt, Human
ccuccacagacgcggcccucucc

SEQ ID NO: 666594 - RNA, 23 nt, Human
cugaaacagccauucuuucuccc

SEQ ID NO: 666595 - RNA, 22 nt, Human
gaggcaagcagaccagagcuag

SEQ ID NO: 666596 - RNA, 21 nt, Human
gcagaccagagcuaguauggc

SEQ ID NO: 666597 - RNA, 19 nt, Human
gccaagcuccuccacagac

SEQ ID NO: 666598 - RNA, 20 nt, Human
gcggcccucuccccacgcga

SEQ ID NO: 666599 - RNA, 23 nt, Human
gcugcaagaaaugaucaguccuc

SEQ ID NO: 666600 - RNA, 19 nt, Human
gugcaguucaggguccaag

SEQ ID NO: 666601 - RNA, 18 nt, Human
uccccacgcgaggccucc

SEQ ID NO: 666602 - RNA, 23 nt, Human
uccccugggcucuugacagaggu

SEQ ID NO: 666603 - RNA, 26 nt, Human
uccccugggcucuugacagaggugca

SEQ ID NO: 666604 - RNA, 21 nt, Human
ugacagaggugcaguucaggg

SEQ ID NO: 666605 - RNA, 18 nt, Human
ugcggagccaagcuccuc

SEQ ID NO: 666606 - RNA, 21 nt, Human
uggcucccggguuccaagccc

SEQ ID NO: 666607 - RNA, 18 nt, Human
ugggcucuugacagaggu

SEQ ID NO: 666608 - RNA, 25 nt, Human
ugggcucuugacagaggugcaguuc

SEQ ID NO: 666609 - RNA, 24 nt, Human
uuccaagcccaauuucggguucgc

SEQ ID NO: 666610 - RNA, 25 nt, Human
aaauaaacaggugggaggcugggca

SEQ ID NO: 666611 - RNA, 22 nt, Human
agccccugggggcaguggaggu

SEQ ID NO: 666612 - RNA, 21 nt, Human
aggugaauacagggcccuucu

SEQ ID NO: 666613 - RNA, 18 nt, Human
agucaaggcaaggucccc

SEQ ID NO: 666614 - RNA, 23 nt, Human
ccccugguccauaugggcccccc

SEQ ID NO: 666615 - RNA, 19 nt, Human
cccugguccauaugggccc

SEQ ID NO: 666616 - RNA, 22 nt, Human
cuguguggagccccuggccagc

SEQ ID NO: 666617 - RNA, 24 nt, Human
ucaaggcaagguccccugguccau

SEQ ID NO: 666618 - RNA, 22 nt, Human
ucacugagcucaugaagugccu

SEQ ID NO: 666619 - RNA, 20 nt, Human
uccccugguccauaugggcc

SEQ ID NO: 666620 - RNA, 23 nt, Human
uggccagcgggggagaaaaaggu

SEQ ID NO: 666621 - RNA, 23 nt, Human
ugggaggcugggcagucccccag

SEQ ID NO: 666622 - RNA, 18 nt, Human
ugggguugggcugguccu

SEQ ID NO: 666623 - RNA, 25 nt, Human
ugggguugggcugguccuuauagug

SEQ ID NO: 666624 - RNA, 22 nt, Human
uguuuccuuuauuauaaagcac

SEQ ID NO: 666625 - RNA, 21 nt, Human
aacaugauuuuaaaggugguc

SEQ ID NO: 666626 - RNA, 21 nt, Human
aaggugguauaucucuugugg

SEQ ID NO: 666627 - RNA, 20 nt, Human
acacaaaauauacacauaua

SEQ ID NO: 666628 - RNA, 21 nt, Human
auaguuugguuugugggggug

SEQ ID NO: 666629 - RNA, 23 nt, Human
caacaaauuaacaauuauauaga

SEQ ID NO: 666630 - RNA, 19 nt, Human
caacaugauccaaauaguu

SEQ ID NO: 666631 - RNA, 22 nt, Human
cucuaaaugaaagaauuaagga

SEQ ID NO: 666632 - RNA, 24 nt, Human
cucucuaaaugaaagaauuaagga

SEQ ID NO: 666633 - RNA, 23 nt, Human
cuguuucugacccggcagcucua

SEQ ID NO: 666634 - RNA, 22 nt, Human
gaaaaccauacucuuugucucc

SEQ ID NO: 666635 - RNA, 23 nt, Human
ggugaaagagggaaugagaaaaa

SEQ ID NO: 666636 - RNA, 21 nt, Human
guuaugguggguaaacagcca

SEQ ID NO: 666637 - RNA, 19 nt, Human
ucaugccaggaaaaccaua

SEQ ID NO: 666638 - RNA, 21 nt, Human
uccuuggaacaauuuaacaca

SEQ ID NO: 666639 - RNA, 24 nt, Human
ugacccggcagcucuaaucagcaa

SEQ ID NO: 666640 - RNA, 24 nt, Human
ugccaggaaaaccauacucuuugg

SEQ ID NO: 666641 - RNA, 18 nt, Human
uggagggaaaucuugcug

SEQ ID NO: 666642 - RNA, 18 nt, Human
ugggggugaaagagggaa

SEQ ID NO: 666643 - RNA, 21 nt, Human
ugucucacagcuguuucugac

SEQ ID NO: 666644 - RNA, 21 nt, Human
uugcugaaauuacagcuucuu

SEQ ID NO: 666645 - RNA, 18 nt, Human
uuuacaaaaauuagaaca

SEQ ID NO: 666646 - RNA, 19 nt, Human
uuuacaaaaauuagaacau

SEQ ID NO: 666647 - RNA, 18 nt, Human
aaaaggcaggaccuggug

SEQ ID NO: 666648 - RNA, 20 nt, Human
aaacaaagcaagggcagugu

SEQ ID NO: 666649 - RNA, 19 nt, Human
aaacuuuagccccagcacc

SEQ ID NO: 666650 - RNA, 21 nt, Human
aagaacagcagggcaggaccg

SEQ ID NO: 666651 - RNA, 21 nt, Human
aagcaaccaguuaagaggccg

SEQ ID NO: 666652 - RNA, 20 nt, Human
aagcagcaagucugggaggg

SEQ ID NO: 666653 - RNA, 23 nt, Human
aagcaggagugcaggguguuggc

SEQ ID NO: 666654 - RNA, 20 nt, Human
acacuggagggaugcccaga

SEQ ID NO: 666655 - RNA, 21 nt, Human
accccaaacuuuagccccagc

SEQ ID NO: 666656 - RNA, 20 nt, Human
acuuccagcucugacugccu

SEQ ID NO: 666657 - RNA, 23 nt, Human
agaacagcagggcaggaccugaa

SEQ ID NO: 666658 - RNA, 20 nt, Human
agaccagggcagggcuggaa

SEQ ID NO: 666659 - RNA, 20 nt, Human
agagcaguucugggauacag

SEQ ID NO: 666660 - RNA, 19 nt, Human
agagcccucucacccagcc

SEQ ID NO: 666661 - RNA, 21 nt, Human
agccccugggcugcagguccu

SEQ ID NO: 666662 - RNA, 18 nt, Human
aggcaggaccuggugggc

SEQ ID NO: 666663 - RNA, 22 nt, Human
auacagugucugaauccucagu

SEQ ID NO: 666664 - RNA, 22 nt, Human
auccucaguggucacugcucuc

SEQ ID NO: 666665 - RNA, 19 nt, Human
caagauccugucugaggag

SEQ ID NO: 666666 - RNA, 21 nt, Human
caagcagcaagucugggaggg

SEQ ID NO: 666667 - RNA, 23 nt, Human
caagcagcaagucugggagggcc

SEQ ID NO: 666668 - RNA, 22 nt, Human
caccacggccuccagcugccgg

SEQ ID NO: 666669 - RNA, 18 nt, Human
cagcaucugggccagcuu

SEQ ID NO: 666670 - RNA, 21 nt, Human
cagcaucugggccagcuuugg

SEQ ID NO: 666671 - RNA, 19 nt, Human
cagcugccggcgcaagcag

SEQ ID NO: 666672 - RNA, 22 nt, Human
caucguaggacaccugcccuuc

SEQ ID NO: 666673 - RNA, 22 nt, Human
caucugggccagcuuugggaac

SEQ ID NO: 666674 - RNA, 23 nt, Human
cauugauaauccgagucucuggg

SEQ ID NO: 666675 - RNA, 22 nt, Human
ccaaagguuucuacaagccacc

SEQ ID NO: 666676 - RNA, 23 nt, Human
ccagcaccuguuccucaucucca

SEQ ID NO: 666677 - RNA, 23 nt, Human
cccaaacucacaucuccggaugc

SEQ ID NO: 666678 - RNA, 23 nt, Human
cccaaagguuucuacaagccacc

SEQ ID NO: 666679 - RNA, 20 nt, Human
cccaguaauggccugucagg

SEQ ID NO: 666680 - RNA, 19 nt, Human
ccccuaucugagaaugaua

SEQ ID NO: 666681 - RNA, 20 nt, Human
ccgagucucugggccucauc

SEQ ID NO: 666682 - RNA, 19 nt, Human
ccucaguggucacugcucu

SEQ ID NO: 666683 - RNA, 19 nt, Human
ccuccugucuucucugagg

SEQ ID NO: 666684 - RNA, 22 nt, Human
ccucucacccagccaacuccaa

SEQ ID NO: 666685 - RNA, 23 nt, Human
ccugauccuggccagcugccagc

SEQ ID NO: 666686 - RNA, 26 nt, Human
cggaacccacggucucccugccuccu

SEQ ID NO: 666687 - RNA, 22 nt, Human
cucuaccccaaacuuuagcccc

SEQ ID NO: 666688 - RNA, 25 nt, Human
cucuuggucacacuggagggaugcc

SEQ ID NO: 666689 - RNA, 23 nt, Human
cugcccaaagguuucuacaagcc

SEQ ID NO: 666690 - RNA, 20 nt, Human
cuuggaagccccugggcugc

SEQ ID NO: 666691 - RNA, 22 nt, Human
cuugugcucuaccccaaacuuu

SEQ ID NO: 666692 - RNA, 21 nt, Human
gaacagcagggcaggaccuga

SEQ ID NO: 666693 - RNA, 22 nt, Human
gaagccccugggcugcaggucc

SEQ ID NO: 666694 - RNA, 24 nt, Human
gaauuggagaccuggaucuaaaca

SEQ ID NO: 666695 - RNA, 25 nt, Human
gaccaagcaagcagcaagucuggga

SEQ ID NO: 666696 - RNA, 20 nt, Human
gagagucuaaauccagggau

SEQ ID NO: 666697 - RNA, 18 nt, Human
gccugucaggaacuccuc

SEQ ID NO: 666698 - RNA, 20 nt, Human
gcuagggauagggcaggcag

SEQ ID NO: 666699 - RNA, 23 nt, Human
gcucuuggucacacuggagggau

SEQ ID NO: 666700 - RNA, 21 nt, Human
gcugucuugaagauggcuguu

SEQ ID NO: 666701 - RNA, 21 nt, Human
ggagaagcaaccaguuaaggg

SEQ ID NO: 666702 - RNA, 21 nt, Human
ggccagcuuugggaaccugug

SEQ ID NO: 666703 - RNA, 24 nt, Human
ggcuugauccucauugaauucaga

SEQ ID NO: 666704 - RNA, 21 nt, Human
gggcuggaacuagggagaagc

SEQ ID NO: 666705 - RNA, 19 nt, Human
ggggacccaagcaaugcag

SEQ ID NO: 666706 - RNA, 24 nt, Human
ggggcaaggccagaccuuaggaga

SEQ ID NO: 666707 - RNA, 21 nt, Human
gggucgggaugaccgggaagu

SEQ ID NO: 666708 - RNA, 22 nt, Human
guaggacaccugcccuuccucu

SEQ ID NO: 666709 - RNA, 26 nt, Human
gugcucuaccccaaacuuuagcccca

SEQ ID NO: 666710 - RNA, 20 nt, Human
guggaccaagcaagcagcaa

SEQ ID NO: 666711 - RNA, 22 nt, Human
guguaucagcaucugggccagc

SEQ ID NO: 666712 - RNA, 21 nt, Human
uaaguuguaaagucacucugc

SEQ ID NO: 666713 - RNA, 19 nt, Human
uagcaaauggagagcccuc

SEQ ID NO: 666714 - RNA, 22 nt, Human
uagcaaauggagagcccucuca

SEQ ID NO: 666715 - RNA, 21 nt, Human
uagcagacaugaggcugccca

SEQ ID NO: 666716 - RNA, 18 nt, Human
uaucaccgcaaaaggcag

SEQ ID NO: 666717 - RNA, 22 nt, Human
ucacacuggagggaugcccaga

SEQ ID NO: 666718 - RNA, 18 nt, Human
ucacauggguuuccuagu

SEQ ID NO: 666719 - RNA, 21 nt, Human
ucacauggguuuccuaguuaa

SEQ ID NO: 666720 - RNA, 22 nt, Human
ucacccagccaacuccaagagu

SEQ ID NO: 666721 - RNA, 26 nt, Human
ucacgaacacagagacgucaucguag

SEQ ID NO: 666722 - RNA, 20 nt, Human
ucacugcucucuuggcccug

SEQ ID NO: 666723 - RNA, 21 nt, Human
ucagccacucuucuucagccc

SEQ ID NO: 666724 - RNA, 24 nt, Human
ucagugcucugucuucucagccau

SEQ ID NO: 666725 - RNA, 18 nt, Human
ucaguggucacugcucuc

SEQ ID NO: 666726 - RNA, 18 nt, Human
ucccugugugcuguguau

SEQ ID NO: 666727 - RNA, 21 nt, Human
ucuacaagccaccugcgugga

SEQ ID NO: 666728 - RNA, 23 nt, Human
ucuacaagccaccugcguggacu

SEQ ID NO: 666729 - RNA, 18 nt, Human
ucuccggaugcacagcuu

SEQ ID NO: 666730 - RNA, 22 nt, Human
ucuucagccccaaacucacauc

SEQ ID NO: 666731 - RNA, 24 nt, Human
ucuucagccccaaacucacaucuc

SEQ ID NO: 666732 - RNA, 26 nt, Human
ugaacacaugcccugauaaccaugaa

SEQ ID NO: 666733 - RNA, 24 nt, Human
ugaauccucaguggucacugcucu

SEQ ID NO: 666734 - RNA, 20 nt, Human
ugaauucagauuucucugca

SEQ ID NO: 666735 - RNA, 22 nt, Human
ugagaaugauacuuugggcugu

SEQ ID NO: 666736 - RNA, 22 nt, Human
ugagagcacugggcgguggcua

SEQ ID NO: 666737 - RNA, 28 nt, Human
ugagagcacugggcgguggcuagggaua

SEQ ID NO: 666738 - RNA, 24 nt, Human
ugcccaaagguuucuacaagccac

SEQ ID NO: 666739 - RNA, 18 nt, Human
ugccugguauaaauguuc

SEQ ID NO: 666740 - RNA, 18 nt, Human
ugcucugucuucucagcc

SEQ ID NO: 666741 - RNA, 22 nt, Human
ugcuguguaucagcaucugggc

SEQ ID NO: 666742 - RNA, 24 nt, Human
uggaccaagcaagcagcaagucug

SEQ ID NO: 666743 - RNA, 18 nt, Human
ugggagggccacgggcug

SEQ ID NO: 666744 - RNA, 26 nt, Human
ugucaggaacuccucugggcacaggg

SEQ ID NO: 666745 - RNA, 20 nt, Human
ugucugaauccucagugguc

SEQ ID NO: 666746 - RNA, 23 nt, Human
uguguaucagcaucugggccagc

SEQ ID NO: 666747 - RNA, 19 nt, Human
uguuuuagcagacaugagg

SEQ ID NO: 666748 - RNA, 18 nt, Human
aagaggcaaggcagcacg

SEQ ID NO: 666749 - RNA, 20 nt, Human
aagcagugcccgccaggccu

SEQ ID NO: 666750 - RNA, 19 nt, Human
aagcgccaaggacugcagc

SEQ ID NO: 666751 - RNA, 21 nt, Human
aaggacugcagccaggagaga

SEQ ID NO: 666752 - RNA, 20 nt, Human
acacucuccgcagugcugug

SEQ ID NO: 666753 - RNA, 18 nt, Human
acaggcguccugugccuc

SEQ ID NO: 666754 - RNA, 25 nt, Human
accaaagcgccaaggacugcagcca

SEQ ID NO: 666755 - RNA, 22 nt, Human
agaaacaggcacuguuaugacc

SEQ ID NO: 666756 - RNA, 18 nt, Human
agaaagauaaaucccaag

SEQ ID NO: 666757 - RNA, 24 nt, Human
agauaaaucccaagauucuuggca

SEQ ID NO: 666758 - RNA, 20 nt, Human
agcacuuugggaggucgagg

SEQ ID NO: 666759 - RNA, 22 nt, Human
agcagugcccgccaggccuggg

SEQ ID NO: 666760 - RNA, 20 nt, Human
agcaucuuucugaaccaccc

SEQ ID NO: 666761 - RNA, 25 nt, Human
agccugggcaacauagcccugacuc

SEQ ID NO: 666762 - RNA, 23 nt, Human
agcuagcaucuuucugaaccacc

SEQ ID NO: 666763 - RNA, 19 nt, Human
aggaacccaggaaaaagga

SEQ ID NO: 666764 - RNA, 25 nt, Human
aggaagaacaaaaggaaccgguacc

SEQ ID NO: 666765 - RNA, 18 nt, Human
aggcaggaaggucguuug

SEQ ID NO: 666766 - RNA, 23 nt, Human
aggcaggaaggucguuugaggcc

SEQ ID NO: 666767 - RNA, 20 nt, Human
aggcaggucacccacucccc

SEQ ID NO: 666768 - RNA, 23 nt, Human
aggcccgggcaucacgccuguaa

SEQ ID NO: 666769 - RNA, 21 nt, Human
aggucgaggcaggaaggucgu

SEQ ID NO: 666770 - RNA, 24 nt, Human
aggucgaggcaggaaggucguuug

SEQ ID NO: 666771 - RNA, 24 nt, Human
auccucggcgacccacugcacaag

SEQ ID NO: 666772 - RNA, 23 nt, Human
auuagagguguguggcgggaggu

SEQ ID NO: 666773 - RNA, 23 nt, Human
caaagcgccaaggacugcagcca

SEQ ID NO: 666774 - RNA, 19 nt, Human
caagaggugccgagggaug

SEQ ID NO: 666775 - RNA, 19 nt, Human
cacccacucccccguccug

SEQ ID NO: 666776 - RNA, 21 nt, Human
cacccugagggcaguucugcu

SEQ ID NO: 666777 - RNA, 22 nt, Human
cacccugagggcaguucugcuc

SEQ ID NO: 666778 - RNA, 24 nt, Human
cacgccuguaaucccagcacuuug

SEQ ID NO: 666779 - RNA, 18 nt, Human
cagcaaggcauagaaaga

SEQ ID NO: 666780 - RNA, 24 nt, Human
cagcacuuugggaggucgaggcag

SEQ ID NO: 666781 - RNA, 25 nt, Human
cagcacuuugggaggucgaggcagg

SEQ ID NO: 666782 - RNA, 18 nt, Human
cagcaucucuucaguccc

SEQ ID NO: 666783 - RNA, 20 nt, Human
cagcgcucuucgcacccuuc

SEQ ID NO: 666784 - RNA, 22 nt, Human
caggcguccugugccucuuccu

SEQ ID NO: 666785 - RNA, 22 nt, Human
caucacgccuguaaucccagca

SEQ ID NO: 666786 - RNA, 21 nt, Human
ccacugcacaagcaggccgcu

SEQ ID NO: 666787 - RNA, 19 nt, Human
ccaggaaaaaggaaaacaa

SEQ ID NO: 666788 - RNA, 22 nt, Human
cccagcgcucuucgcacccuuc

SEQ ID NO: 666789 - RNA, 19 nt, Human
cccuccuuucuuucgaucc

SEQ ID NO: 666790 - RNA, 21 nt, Human
cccugacuccacaugcccucc

SEQ ID NO: 666791 - RNA, 19 nt, Human
ccuccuuucuuucgauccc

SEQ ID NO: 666792 - RNA, 24 nt, Human
ccucuagugaggccggagggacca

SEQ ID NO: 666793 - RNA, 27 nt, Human
ccugacuccacaugcccuccuuucuuu

SEQ ID NO: 666794 - RNA, 23 nt, Human
ccugcuuggccuuaucauggcaa

SEQ ID NO: 666795 - RNA, 18 nt, Human
cgccaggccugggccagg

SEQ ID NO: 666796 - RNA, 23 nt, Human
cgccuguaaucccagcacuuugg

SEQ ID NO: 666797 - RNA, 24 nt, Human
cgccuguaaucccagcacuuuggg

SEQ ID NO: 666798 - RNA, 19 nt, Human
cgcugggcuggagacagcc

SEQ ID NO: 666799 - RNA, 23 nt, Human
cggcccagcgcucuucgcacccu

SEQ ID NO: 666800 - RNA, 24 nt, Human
cgggcaucacgccuguaaucccag

SEQ ID NO: 666801 - RNA, 23 nt, Human
cuagcccagcugagugggguggg

SEQ ID NO: 666802 - RNA, 21 nt, Human
cuagugaggccggagggaccc

SEQ ID NO: 666803 - RNA, 21 nt, Human
cucuucgcacccuucuggacc

SEQ ID NO: 666804 - RNA, 22 nt, Human
cuguaaauaaaccuuuuuuucu

SEQ ID NO: 666805 - RNA, 23 nt, Human
cuugugaggugguguuugagggc

SEQ ID NO: 666806 - RNA, 21 nt, Human
gaagaacaaaaggaacccagg

SEQ ID NO: 666807 - RNA, 21 nt, Human
gagcuucgcugggcuggagac

SEQ ID NO: 666808 - RNA, 19 nt, Human
gagguuuggagccagacug

SEQ ID NO: 666809 - RNA, 19 nt, Human
gccugggccaggagagcuc

SEQ ID NO: 666810 - RNA, 23 nt, Human
ggcaggaaggucguuugaggcca

SEQ ID NO: 666811 - RNA, 22 nt, Human
ggcaucacgccuguaaucccag

SEQ ID NO: 666812 - RNA, 24 nt, Human
ggcaucacgccuguaaucccagca

SEQ ID NO: 666813 - RNA, 18 nt, Human
ggcuucuugugagguggu

SEQ ID NO: 666814 - RNA, 23 nt, Human
ggucguuugaggccagaguucga

SEQ ID NO: 666815 - RNA, 21 nt, Human
ggugccgagggaugagaggaa

SEQ ID NO: 666816 - RNA, 24 nt, Human
guggcauaguugguuaauguuaga

SEQ ID NO: 666817 - RNA, 19 nt, Human
guggggggcucagaagggu

SEQ ID NO: 666818 - RNA, 18 nt, Human
guuaugaccauuuuacag

SEQ ID NO: 666819 - RNA, 21 nt, Human
uaacccccacccugcuggugu

SEQ ID NO: 666820 - RNA, 19 nt, Human
uacccuauuugccccucuc

SEQ ID NO: 666821 - RNA, 22 nt, Human
uagcccagcugagugggguggg

SEQ ID NO: 666822 - RNA, 19 nt, Human
uaguucgcagaaacaggca

SEQ ID NO: 666823 - RNA, 24 nt, Human
uauagagccuccuuuuucuacucc

SEQ ID NO: 666824 - RNA, 25 nt, Human
ucaauaguucgcagaaacaggccga

SEQ ID NO: 666825 - RNA, 23 nt, Human
ucacgccuguaaucccagcacuu

SEQ ID NO: 666826 - RNA, 21 nt, Human
uccaaaagauggaagaaggcc

SEQ ID NO: 666827 - RNA, 22 nt, Human
uccccaccgccacaggcguccu

SEQ ID NO: 666828 - RNA, 22 nt, Human
ucccuaacuucccaccuggcuu

SEQ ID NO: 666829 - RNA, 18 nt, Human
uccucggaggggccgugg

SEQ ID NO: 666830 - RNA, 21 nt, Human
ucuggaccaaagcgccaagga

SEQ ID NO: 666831 - RNA, 22 nt, Human
ucuggaccaaagcgccaaggac

SEQ ID NO: 666832 - RNA, 23 nt, Human
ucuuucugaaccaccccaggggg

SEQ ID NO: 666833 - RNA, 21 nt, Human
ugaaaaguggggggcucagaa

SEQ ID NO: 666834 - RNA, 19 nt, Human
ugagggggacccaaucugg

SEQ ID NO: 666835 - RNA, 21 nt, Human
ugaggugguguuugagggcca

SEQ ID NO: 666836 - RNA, 23 nt, Human
ugagucuccaguauguucggccc

SEQ ID NO: 666837 - RNA, 22 nt, Human
ugcugggugucugguaacagcc

SEQ ID NO: 666838 - RNA, 22 nt, Human
uggaagaaggcccgggcaucac

SEQ ID NO: 666839 - RNA, 20 nt, Human
uggcagugaugaggcagguc

SEQ ID NO: 666840 - RNA, 21 nt, Human
uggggcgccaaugagguuugg

SEQ ID NO: 666841 - RNA, 23 nt, Human
uggugcugggugucugguaacag

SEQ ID NO: 666842 - RNA, 18 nt, Human
ugucagcaaggcauagaa

SEQ ID NO: 666843 - RNA, 20 nt, Human
uguggcgggagguaacacaa

SEQ ID NO: 666844 - RNA, 19 nt, Human
uguuuuguuuuguuuuuua

SEQ ID NO: 666845 - RNA, 22 nt, Human
uuagagguguguggcgggaggu

SEQ ID NO: 666846 - RNA, 20 nt, Human
uucccaccuggcuucuugug

SEQ ID NO: 666847 - RNA, 20 nt, Human
uugaagaggcaaggcagcac

SEQ ID NO: 666848 - RNA, 20 nt, Human
uugagggccaagguaggugu

SEQ ID NO: 666849 - RNA, 20 nt, Human
uugguuuccccuccuuucca

SEQ ID NO: 666850 - RNA, 24 nt, Human
uuguuuuguuuuuuaacaucagua

SEQ ID NO: 666851 - RNA, 25 nt, Human
uuucauggcuucuccgcgccggggu

SEQ ID NO: 666852 - RNA, 22 nt, Human
uuugaggccagaguucgagacc

SEQ ID NO: 666853 - RNA, 18 nt, Human
uuuguuuuguuuuguuuu

SEQ ID NO: 666854 - RNA, 18 nt, Human
uuuuucccauuaauuuuc

SEQ ID NO: 666855 - RNA, 20 nt, Human
aacaccccagcccaccagcu

SEQ ID NO: 666856 - RNA, 20 nt, Human
aaccucccccucaggcccug

SEQ ID NO: 666857 - RNA, 22 nt, Human
aagcagccaaggaucccucucg

SEQ ID NO: 666858 - RNA, 24 nt, Human
aagcagccaaggaucccucucgag

SEQ ID NO: 666859 - RNA, 19 nt, Human
aagcucccaaggggcccca

SEQ ID NO: 666860 - RNA, 20 nt, Human
aagcugccccucuccccggg

SEQ ID NO: 666861 - RNA, 18 nt, Human
acaaugaagcagccaagg

SEQ ID NO: 666862 - RNA, 18 nt, Human
acaccacucaggacucug

SEQ ID NO: 666863 - RNA, 20 nt, Human
acccaacccaggaggcagcc

SEQ ID NO: 666864 - RNA, 22 nt, Human
acccacaccacucaggacucug

SEQ ID NO: 666865 - RNA, 22 nt, Human
acccacacccacaccacucagg

SEQ ID NO: 666866 - RNA, 22 nt, Human
accccagcccaccagcugaguc

SEQ ID NO: 666867 - RNA, 18 nt, Human
acucagaauccagcaccc

SEQ ID NO: 666868 - RNA, 22 nt, Human
acucagggccugggggccagcc

SEQ ID NO: 666869 - RNA, 19 nt, Human
agacaaugaagcagccaag

SEQ ID NO: 666870 - RNA, 25 nt, Human
agaccagggccaacguaccuugaga

SEQ ID NO: 666871 - RNA, 23 nt, Human
agagaaaaaaaaaugaacccuaa

SEQ ID NO: 666872 - RNA, 24 nt, Human
agagccugcaucccccaaaaccag

SEQ ID NO: 666873 - RNA, 24 nt, Human
agcaccuucucagagccugcaucc

SEQ ID NO: 666874 - RNA, 19 nt, Human
agccaccacggagacacag

SEQ ID NO: 666875 - RNA, 22 nt, Human
agccagcccaggccaggagccc

SEQ ID NO: 666876 - RNA, 18 nt, Human
agccuggggccggaguuc

SEQ ID NO: 666877 - RNA, 22 nt, Human
agcgcuuugucuccugggcggc

SEQ ID NO: 666878 - RNA, 19 nt, Human
aggaggugucccagccccg

SEQ ID NO: 666879 - RNA, 19 nt, Human
aggaguauggggguggggg

SEQ ID NO: 666880 - RNA, 23 nt, Human
aggcaagcucccaaggggcccca

SEQ ID NO: 666881 - RNA, 20 nt, Human
aggcacagagccaggccagc

SEQ ID NO: 666882 - RNA, 23 nt, Human
aggcaggcaggcacagagccagg

SEQ ID NO: 666883 - RNA, 18 nt, Human
aggccaggcccaggugug

SEQ ID NO: 666884 - RNA, 26 nt, Human
aggggaccggcggucagccccgaagc

SEQ ID NO: 666885 - RNA, 21 nt, Human
agggggccaccgguguggggc

SEQ ID NO: 666886 - RNA, 22 nt, Human
agguguccucagggggccaccg

SEQ ID NO: 666887 - RNA, 19 nt, Human
agguguggcugccaugacc

SEQ ID NO: 666888 - RNA, 19 nt, Human
agguugcgggguggcccgg

SEQ ID NO: 666889 - RNA, 24 nt, Human
agucacuacccucccagccaccgu

SEQ ID NO: 666890 - RNA, 23 nt, Human
agucugccaggacacggggcucu

SEQ ID NO: 666891 - RNA, 20 nt, Human
augaagcagccaaggauccc

SEQ ID NO: 666892 - RNA, 20 nt, Human
augcagucaaggagugucug

SEQ ID NO: 666893 - RNA, 23 nt, Human
augcagucaaggagugucuggag

SEQ ID NO: 666894 - RNA, 18 nt, Human
auguuagagggggcugcc

SEQ ID NO: 666895 - RNA, 26 nt, Human
caaggccaggcccagguguggcugcc

SEQ ID NO: 666896 - RNA, 22 nt, Human
cacccacaccacucaggacucu

SEQ ID NO: 666897 - RNA, 26 nt, Human
cacccacacccacaccacucaggacu

SEQ ID NO: 666898 - RNA, 19 nt, Human
caccccagcccaccagcug

SEQ ID NO: 666899 - RNA, 27 nt, Human
caccccuccauauuuccccaagcucaa

SEQ ID NO: 666900 - RNA, 23 nt, Human
caccccucucucccaggagacca

SEQ ID NO: 666901 - RNA, 19 nt, Human
cacccuuccgguccugcac

SEQ ID NO: 666902 - RNA, 19 nt, Human
cacuaggucagcaccuggg

SEQ ID NO: 666903 - RNA, 20 nt, Human
cagacagggcccgcggccag

SEQ ID NO: 666904 - RNA, 18 nt, Human
cagcaccugggccuuccu

SEQ ID NO: 666905 - RNA, 20 nt, Human
cagccaccguccugcuccug

SEQ ID NO: 666906 - RNA, 18 nt, Human
cagccagcccaggccagg

SEQ ID NO: 666907 - RNA, 18 nt, Human
cagcccaagcugccccuc

SEQ ID NO: 666908 - RNA, 26 nt, Human
cagcccaggccaggagccccgaggac

SEQ ID NO: 666909 - RNA, 19 nt, Human
caggaggcagccugauccc

SEQ ID NO: 666910 - RNA, 21 nt, Human
caggaggcagccugaucccac

SEQ ID NO: 666911 - RNA, 24 nt, Human
caggaggggacauguuagaggggg

SEQ ID NO: 666912 - RNA, 21 nt, Human
caggaucugcucccccagucu

SEQ ID NO: 666913 - RNA, 21 nt, Human
caggccacagaucgcccucag

SEQ ID NO: 666914 - RNA, 22 nt, Human
cagggcccgcggccagagagcc

SEQ ID NO: 666915 - RNA, 23 nt, Human
cagggugagggccaggagguguc

SEQ ID NO: 666916 - RNA, 22 nt, Human
caggucccggagcaaggccagg

SEQ ID NO: 666917 - RNA, 20 nt, Human
caugaccgauccucccucug

SEQ ID NO: 666918 - RNA, 21 nt, Human
ccacccacacccacaccacuc

SEQ ID NO: 666919 - RNA, 25 nt, Human
ccacccacacccacaccacucagga

SEQ ID NO: 666920 - RNA, 21 nt, Human
ccaccucacccuuccgguccu

SEQ ID NO: 666921 - RNA, 19 nt, Human
ccacucagaauccagcacc

SEQ ID NO: 666922 - RNA, 25 nt, Human
ccagauccugugccacccacaccca

SEQ ID NO: 666923 - RNA, 20 nt, Human
ccagcccaagcugccccucu

SEQ ID NO: 666924 - RNA, 23 nt, Human
ccagcccaccagcugagucugcc

SEQ ID NO: 666925 - RNA, 21 nt, Human
ccagccccgagguucucccug

SEQ ID NO: 666926 - RNA, 24 nt, Human
ccagccccgagguucucccugaug

SEQ ID NO: 666927 - RNA, 26 nt, Human
ccaggaagggaggucaggcaagcucc

SEQ ID NO: 666928 - RNA, 19 nt, Human
ccaggacacggggcucugg

SEQ ID NO: 666929 - RNA, 19 nt, Human
ccaggaggcagccugaucc

SEQ ID NO: 666930 - RNA, 24 nt, Human
ccaggcccagguguggcugccaug

SEQ ID NO: 666931 - RNA, 18 nt, Human
ccauauuuccccaagcuc

SEQ ID NO: 666932 - RNA, 24 nt, Human
ccaugccccagauccugugccacc

SEQ ID NO: 666933 - RNA, 20 nt, Human
cccaagcucaagggucucca

SEQ ID NO: 666934 - RNA, 25 nt, Human
cccacaccacucaggacucuggaag

SEQ ID NO: 666935 - RNA, 22 nt, Human
cccacucagaauccagcaccuu

SEQ ID NO: 666936 - RNA, 22 nt, Human
cccagagcaaguccagagucac

SEQ ID NO: 666937 - RNA, 25 nt, Human
ccccagauccugugccacccacacc

SEQ ID NO: 666938 - RNA, 22 nt, Human
ccccagucucuccaggacccgg

SEQ ID NO: 666939 - RNA, 28 nt, Human
cccccagucucuccaggacccggccugu

SEQ ID NO: 666940 - RNA, 24 nt, Human
ccccgaggaccaggccaccucacc

SEQ ID NO: 666941 - RNA, 18 nt, Human
cccgacacccaacccagg

SEQ ID NO: 666942 - RNA, 19 nt, Human
cccucagucccagugaccc

SEQ ID NO: 666943 - RNA, 24 nt, Human
ccgaagccaagcaagaccuggucc

SEQ ID NO: 666944 - RNA, 19 nt, Human
ccucaggaucugcuccccc

SEQ ID NO: 666945 - RNA, 22 nt, Human
ccuccauauuuccccaagcuca

SEQ ID NO: 666946 - RNA, 18 nt, Human
ccucccagccaccguccu

SEQ ID NO: 666947 - RNA, 20 nt, Human
ccucccagccaccguccugc

SEQ ID NO: 666948 - RNA, 23 nt, Human
ccucccccucaggcccuggauuc

SEQ ID NO: 666949 - RNA, 24 nt, Human
ccucgggccauggcuacccagccc

SEQ ID NO: 666950 - RNA, 18 nt, Human
ccuggagcugaagagggg

SEQ ID NO: 666951 - RNA, 24 nt, Human
ccuggagcugaagaggggcucugg

SEQ ID NO: 666952 - RNA, 20 nt, Human
ccugugccacccacacccac

SEQ ID NO: 666953 - RNA, 24 nt, Human
ccugugccacccacacccacacca

SEQ ID NO: 666954 - RNA, 19 nt, Human
ccuugcccaugauuucccu

SEQ ID NO: 666955 - RNA, 27 nt, Human
cggacagcucccccgacacccaaccca

SEQ ID NO: 666956 - RNA, 18 nt, Human
cggcagcucaggccagcc

SEQ ID NO: 666957 - RNA, 21 nt, Human
cggccagagagccacugccac

SEQ ID NO: 666958 - RNA, 18 nt, Human
cggcggucagccccgaag

SEQ ID NO: 666959 - RNA, 24 nt, Human
cucagaauccagcaccuucucaga

SEQ ID NO: 666960 - RNA, 21 nt, Human
cuccagcccaagcugccccuc

SEQ ID NO: 666961 - RNA, 23 nt, Human
cugcaccuguguccccagucacu

SEQ ID NO: 666962 - RNA, 22 nt, Human
cuggaagccacacucggugugc

SEQ ID NO: 666963 - RNA, 19 nt, Human
cuggagcugaagaggggcu

SEQ ID NO: 666964 - RNA, 20 nt, Human
cugucaccaagaggcagcgu

SEQ ID NO: 666965 - RNA, 20 nt, Human
cugugccacccacacccaca

SEQ ID NO: 666966 - RNA, 22 nt, Human
cuuccgguccugcacuaacacc

SEQ ID NO: 666967 - RNA, 25 nt, Human
cuugcccaugauuucccucaggauc

SEQ ID NO: 666968 - RNA, 25 nt, Human
gaaccccucccaugccccagauccu

SEQ ID NO: 666969 - RNA, 20 nt, Human
gaagcagccaaggaucccuc

SEQ ID NO: 666970 - RNA, 20 nt, Human
gacaaugaagcagccaagga

SEQ ID NO: 666971 - RNA, 20 nt, Human
gaccaggccaccucacccuu

SEQ ID NO: 666972 - RNA, 18 nt, Human
gagcagggcuugcugggg

SEQ ID NO: 666973 - RNA, 22 nt, Human
gagccacugccaccaggagcac

SEQ ID NO: 666974 - RNA, 21 nt, Human
gagccugcaucccccaaaacc

SEQ ID NO: 666975 - RNA, 21 nt, Human
gagucugccaggacacggggc

SEQ ID NO: 666976 - RNA, 21 nt, Human
gcaaacaggaaacuaaagcag

SEQ ID NO: 666977 - RNA, 19 nt, Human
gcagaguccugccucagcc

SEQ ID NO: 666978 - RNA, 21 nt, Human
gcagaguccugccucagccag

SEQ ID NO: 666979 - RNA, 23 nt, Human
gcagggcuugcuggggggaagac

SEQ ID NO: 666980 - RNA, 18 nt, Human
gccaugguucgggacugg

SEQ ID NO: 666981 - RNA, 23 nt, Human
gccccgaagccaagcaagaccug

SEQ ID NO: 666982 - RNA, 22 nt, Human
gccuugcccaugauuucccuca

SEQ ID NO: 666983 - RNA, 29 nt, Human
gcgacggcggcggcagcgcuuugucuccu

SEQ ID NO: 666984 - RNA, 18 nt, Human
gggacauguuagaggggg

SEQ ID NO: 666985 - RNA, 28 nt, Human
gggcacugaggacuguaaacaugaccca

SEQ ID NO: 666986 - RNA, 19 nt, Human
ggggcucugucucuggcug

SEQ ID NO: 666987 - RNA, 20 nt, Human
gggggcugagcucaggaggg

SEQ ID NO: 666988 - RNA, 23 nt, Human
gggucuccagagacagaaggaag

SEQ ID NO: 666989 - RNA, 20 nt, Human
gggugggggcugagcucagg

SEQ ID NO: 666990 - RNA, 25 nt, Human
gguggcggcgacggcggcggcagcg

SEQ ID NO: 666991 - RNA, 25 nt, Human
gugccacccacacccacaccacuca

SEQ ID NO: 666992 - RNA, 22 nt, Human
uaacaccugcaccugugucccc

SEQ ID NO: 666993 - RNA, 22 nt, Human
uaguguugcacgugacguuccc

SEQ ID NO: 666994 - RNA, 20 nt, Human
uaugggggugggggcugagc

SEQ ID NO: 666995 - RNA, 19 nt, Human
ucaaggguaggccuucugg

SEQ ID NO: 666996 - RNA, 22 nt, Human
ucaccccucucucccaggagac

SEQ ID NO: 666997 - RNA, 20 nt, Human
ucacuacccucccagccacc

SEQ ID NO: 666998 - RNA, 24 nt, Human
ucagccagcccaggccaggagccc

SEQ ID NO: 666999 - RNA, 21 nt, Human
ucagccccgaagccaagcaag

SEQ ID NO: 667000 - RNA, 20 nt, Human
ucaggaaaccucccccucaa

SEQ ID NO: 667001 - RNA, 22 nt, Human
ucaggccacagaucgcccucag

SEQ ID NO: 667002 - RNA, 23 nt, Human
ucccagccaccguccugcuccug

SEQ ID NO: 667003 - RNA, 19 nt, Human
ucccaggagaccagggcca

SEQ ID NO: 667004 - RNA, 20 nt, Human
uccccaccaggaguaugggg

SEQ ID NO: 667005 - RNA, 22 nt, Human
ucccccagucucuccaggaccc

SEQ ID NO: 667006 - RNA, 21 nt, Human
uccccucccaccagcaaacag

SEQ ID NO: 667007 - RNA, 20 nt, Human
ucccucaccccucucuccca

SEQ ID NO: 667008 - RNA, 18 nt, Human
ucccugggggaaccugcu

SEQ ID NO: 667009 - RNA, 20 nt, Human
uccuaggcggugagucagcu

SEQ ID NO: 667010 - RNA, 18 nt, Human
uccucuggcaggucccgg

SEQ ID NO: 667011 - RNA, 19 nt, Human
ucucagagccugcaucccc

SEQ ID NO: 667012 - RNA, 23 nt, Human
ucuccagagacagaaggaagggg

SEQ ID NO: 667013 - RNA, 21 nt, Human
ucuccagcccaagcugccccu

SEQ ID NO: 667014 - RNA, 20 nt, Human
ucucccaggagaccagggcc

SEQ ID NO: 667015 - RNA, 21 nt, Human
ucugaaccccucccaugcccc

SEQ ID NO: 667016 - RNA, 26 nt, Human
ugacccagggugagggccaggaggug

SEQ ID NO: 667017 - RNA, 20 nt, Human
ugagcucaggaggggacaug

SEQ ID NO: 667018 - RNA, 18 nt, Human
ugaggccuggcaggggac

SEQ ID NO: 667019 - RNA, 22 nt, Human
ugauugcagacacacaccccuc

SEQ ID NO: 667020 - RNA, 19 nt, Human
ugcacgugacguuccccuc

SEQ ID NO: 667021 - RNA, 24 nt, Human
ugccacccacacccacaccacuca

SEQ ID NO: 667022 - RNA, 18 nt, Human
ugccaggacacggggcuc

SEQ ID NO: 667023 - RNA, 22 nt, Human
ugccaggcugccggacagcucc

SEQ ID NO: 667024 - RNA, 26 nt, Human
ugccccagauccugugccacccacac

SEQ ID NO: 667025 - RNA, 19 nt, Human
ugccuguggagagcagggc

SEQ ID NO: 667026 - RNA, 19 nt, Human
uggaaggaggugagcgggg

SEQ ID NO: 667027 - RNA, 21 nt, Human
uggaaggaggugagcggggac

SEQ ID NO: 667028 - RNA, 22 nt, Human
uggcccggccaugguucgggac

SEQ ID NO: 667029 - RNA, 26 nt, Human
uggcccggccaugguucgggacuggc

SEQ ID NO: 667030 - RNA, 22 nt, Human
uggcccgguggcggcgacggcg

SEQ ID NO: 667031 - RNA, 18 nt, Human
uggcggcgacggcggcgg

SEQ ID NO: 667032 - RNA, 24 nt, Human
uggcggcgacggcggcggcagcgc

SEQ ID NO: 667033 - RNA, 18 nt, Human
ugggcugagucugucacc

SEQ ID NO: 667034 - RNA, 21 nt, Human
ugggggaaccugcuagaaggu

SEQ ID NO: 667035 - RNA, 21 nt, Human
uggugagaagaaaggggaccg

SEQ ID NO: 667036 - RNA, 19 nt, Human
uguaaaccuacgccaggac

SEQ ID NO: 667037 - RNA, 19 nt, Human
ugucccagagggcauagag

SEQ ID NO: 667038 - RNA, 23 nt, Human
ugucccagccccgagguucuccc

SEQ ID NO: 667039 - RNA, 21 nt, Human
ugucuggagagcccugugaga

SEQ ID NO: 667040 - RNA, 23 nt, Human
uuccccaagcucaagggucucca

SEQ ID NO: 667041 - RNA, 21 nt, Human
uugacaaaauuuuacuuuagc

SEQ ID NO: 667042 - RNA, 20 nt, Human
uugcacgugacguuccccuu

SEQ ID NO: 667043 - RNA, 22 nt, Human
uuguugccagagaaaaaaaaag

SEQ ID NO: 667044 - RNA, 26 nt, Human
aaaugggauucaggggccgucuucuc

SEQ ID NO: 667045 - RNA, 19 nt, Human
aagaugacacaaaagagcc

SEQ ID NO: 667046 - RNA, 23 nt, Human
aaugcaggccccgaaggcugccu

SEQ ID NO: 667047 - RNA, 30 nt, Human
agacccagcuggccugagugugcacgaaaa

SEQ ID NO: 667048 - RNA, 23 nt, Human
agcaaggggccaaaugggauuca

SEQ ID NO: 667049 - RNA, 23 nt, Human
aggccccgaaggcugccuccacc

SEQ ID NO: 667050 - RNA, 18 nt, Human
auggaaacggugaggugg

SEQ ID NO: 667051 - RNA, 21 nt, Human
cacccuuauucucaaaugcag

SEQ ID NO: 667052 - RNA, 21 nt, Human
ccaggacucauguccuguacu

SEQ ID NO: 667053 - RNA, 18 nt, Human
ccccgaaggcugccuccc

SEQ ID NO: 667054 - RNA, 18 nt, Human
ccuccagccagcaagggg

SEQ ID NO: 667055 - RNA, 23 nt, Human
ccucgggucccucaccaggacuc

SEQ ID NO: 667056 - RNA, 25 nt, Human
cuccuuggguccaccaggcugggag

SEQ ID NO: 667057 - RNA, 23 nt, Human
cuguacuguccuccucgcuuaca

SEQ ID NO: 667058 - RNA, 22 nt, Human
gggagucugaaccgauuuagcu

SEQ ID NO: 667059 - RNA, 20 nt, Human
uaagaugacacaaaagagcc

SEQ ID NO: 667060 - RNA, 21 nt, Human
ucagcagacgccuggaacuag

SEQ ID NO: 667061 - RNA, 19 nt, Human
uccaccaggcugggaggca

SEQ ID NO: 667062 - RNA, 18 nt, Human
uccuguacuguccuccuc

SEQ ID NO: 667063 - RNA, 19 nt, Human
ucuuucagcagacgccugg

SEQ ID NO: 667064 - RNA, 22 nt, Human
ugagugugcacgaaaugggacc

SEQ ID NO: 667065 - RNA, 20 nt, Human
uguacuguccuccucgcuua

SEQ ID NO: 667066 - RNA, 23 nt, Human
uguccugcuccucgggucccuca

SEQ ID NO: 667067 - RNA, 20 nt, Human
uguccuguacuguccuccuc

SEQ ID NO: 667068 - RNA, 19 nt, Human
uucucuguccugcuccucg

SEQ ID NO: 667069 - RNA, 18 nt, Human
aagccgaggaguugucgg

SEQ ID NO: 667070 - RNA, 24 nt, Human
aagggacuuagggggauggggucu

SEQ ID NO: 667071 - RNA, 20 nt, Human
acuuagggggauggggucug

SEQ ID NO: 667072 - RNA, 18 nt, Human
agaaggaaguagaggagg

SEQ ID NO: 667073 - RNA, 22 nt, Human
agaguuggggagggggccuagg

SEQ ID NO: 667074 - RNA, 22 nt, Human
aggaggagggugggaggugggu

SEQ ID NO: 667075 - RNA, 21 nt, Human
aggaguugucggugugggguc

SEQ ID NO: 667076 - RNA, 18 nt, Human
aggauggaggucagggca

SEQ ID NO: 667077 - RNA, 23 nt, Human
aggcaguguccaggauggagguc

SEQ ID NO: 667078 - RNA, 23 nt, Human
agggaagggauggaaauguagua

SEQ ID NO: 667079 - RNA, 24 nt, Human
agggauggaaauguaguacccgga

SEQ ID NO: 667080 - RNA, 22 nt, Human
agggggauggggucugguuaga

SEQ ID NO: 667081 - RNA, 18 nt, Human
aggguuccagagucuggu

SEQ ID NO: 667082 - RNA, 22 nt, Human
cagaaggaaguagaggaggggu

SEQ ID NO: 667083 - RNA, 18 nt, Human
ccugggguugggggaggg

SEQ ID NO: 667084 - RNA, 21 nt, Human
ccugguguccaagaguugggg

SEQ ID NO: 667085 - RNA, 21 nt, Human
cgguggggcugagacugucgg

SEQ ID NO: 667086 - RNA, 23 nt, Human
cgguguggggucggaaagcugga

SEQ ID NO: 667087 - RNA, 25 nt, Human
cgguguggggucggaaagcuggagg

SEQ ID NO: 667088 - RNA, 18 nt, Human
cucagaaggaaguagagg

SEQ ID NO: 667089 - RNA, 18 nt, Human
cucaguugggucuugaag

SEQ ID NO: 667090 - RNA, 21 nt, Human
cugacuggccugggguugggg

SEQ ID NO: 667091 - RNA, 23 nt, Human
cuggauggucuggagugggaggu

SEQ ID NO: 667092 - RNA, 18 nt, Human
cuggggagguuggggugg

SEQ ID NO: 667093 - RNA, 18 nt, Human
gaaagacuaagggagugg

SEQ ID NO: 667094 - RNA, 21 nt, Human
gaaggagaagaggaggagggu

SEQ ID NO: 667095 - RNA, 22 nt, Human
gagaagaggaggagggugggag

SEQ ID NO: 667096 - RNA, 22 nt, Human
gaggaggagggugggagguggg

SEQ ID NO: 667097 - RNA, 23 nt, Human
gaggaggagggugggaggugggu

SEQ ID NO: 667098 - RNA, 20 nt, Human
gagugguggcagggagaaag

SEQ ID NO: 667099 - RNA, 20 nt, Human
gccugguguccaagaguugg

SEQ ID NO: 667100 - RNA, 19 nt, Human
ggaggagggugggaggugg

SEQ ID NO: 667101 - RNA, 21 nt, Human
ggagggggcaguuguagacug

SEQ ID NO: 667102 - RNA, 25 nt, Human
gggcugagacugucggcugaggguu

SEQ ID NO: 667103 - RNA, 24 nt, Human
ggggagggggccuaggacauccgu

SEQ ID NO: 667104 - RNA, 19 nt, Human
gggucuggaagccgaggag

SEQ ID NO: 667105 - RNA, 18 nt, Human
ggucugguuagaguuggg

SEQ ID NO: 667106 - RNA, 21 nt, Human
ggugucaaaauagggaaggga

SEQ ID NO: 667107 - RNA, 19 nt, Human
gguguccaagaguuggggc

SEQ ID NO: 667108 - RNA, 20 nt, Human
gguguuggguguucuaguug

SEQ ID NO: 667109 - RNA, 19 nt, Human
gugcagagucuggggaggu

SEQ ID NO: 667110 - RNA, 24 nt, Human
guggcagggagaaaggcugugggg

SEQ ID NO: 667111 - RNA, 20 nt, Human
guggggucggaaagcuggag

SEQ ID NO: 667112 - RNA, 20 nt, Human
gugguggcagggagaaaggc

SEQ ID NO: 667113 - RNA, 22 nt, Human
uaagccugggaaagacuaaggg

SEQ ID NO: 667114 - RNA, 18 nt, Human
uccagagucugguguggc

SEQ ID NO: 667115 - RNA, 18 nt, Human
ugaaggagaagaggagga

SEQ ID NO: 667116 - RNA, 23 nt, Human
uggagggggcaguuguagacugu

SEQ ID NO: 667117 - RNA, 20 nt, Human
uggcagggagaaaggcugug

SEQ ID NO: 667118 - RNA, 22 nt, Human
uggccugggguugggggagggc

SEQ ID NO: 667119 - RNA, 22 nt, Human
uggcugggcggagucagaucgg

SEQ ID NO: 667120 - RNA, 23 nt, Human
ugggaaagacuaagggaguggug

SEQ ID NO: 667121 - RNA, 21 nt, Human
uggggagggggccuaggacau

SEQ ID NO: 667122 - RNA, 18 nt, Human
uggggcagucgaaaaagg

SEQ ID NO: 667123 - RNA, 22 nt, Human
uggggcugagacugucggcuga

SEQ ID NO: 667124 - RNA, 20 nt, Human
ugguagggucuggaagccga

SEQ ID NO: 667125 - RNA, 21 nt, Human
ugguguccaagaguuggggca

SEQ ID NO: 667126 - RNA, 19 nt, Human
ugguguggcuggcuggggu

SEQ ID NO: 667127 - RNA, 24 nt, Human
caggucccgggccaggccgccccu

SEQ ID NO: 667128 - RNA, 20 nt, Human
ccccuggacuccggcgcggg

SEQ ID NO: 667129 - RNA, 18 nt, Human
cccgggccaggccgcccc

SEQ ID NO: 667130 - RNA, 19 nt, Human
ccuggacuccggcgcgggg

SEQ ID NO: 667131 - RNA, 25 nt, Human
cguccagaaggggccccuggacucc

SEQ ID NO: 667132 - RNA, 20 nt, Human
cuggagcagcagcagguccc

SEQ ID NO: 667133 - RNA, 20 nt, Human
gagcagcagcaggucccggg

SEQ ID NO: 667134 - RNA, 22 nt, Human
gagcagcagcaggucccgggcc

SEQ ID NO: 667135 - RNA, 18 nt, Human
uuuuuuuuuuuuuugccg

SEQ ID NO: 667136 - RNA, 18 nt, Human
uuuuuuuuuuuuuuuuug

SEQ ID NO: 667137 - RNA, 23 nt, Human
aaaacgcuucguucaucaucccu

SEQ ID NO: 667138 - RNA, 19 nt, Human
aagaguugccccuaccucc

SEQ ID NO: 667139 - RNA, 22 nt, Human
aauagcgauggcggcccucggc

SEQ ID NO: 667140 - RNA, 18 nt, Human
agaaccagggugacggaa

SEQ ID NO: 667141 - RNA, 22 nt, Human
agacaggaagagaagaggggac

SEQ ID NO: 667142 - RNA, 20 nt, Human
caagcgagaaaaagagggag

SEQ ID NO: 667143 - RNA, 23 nt, Human
ccgcaauagcgauggcggcccuc

SEQ ID NO: 667144 - RNA, 24 nt, Human
ccggcggccaugacagcuaccgag

SEQ ID NO: 667145 - RNA, 24 nt, Human
cggagaaccgagacuacagaacca

SEQ ID NO: 667146 - RNA, 22 nt, Human
gaaaaccaggacggcgccaagc

SEQ ID NO: 667147 - RNA, 19 nt, Human
gcuucguucaucaucccuu

SEQ ID NO: 667148 - RNA, 25 nt, Human
ggucuuuuucccagacaggaagaga

SEQ ID NO: 667149 - RNA, 24 nt, Human
uagcgauggcggcccucggcgcag

SEQ ID NO: 667150 - RNA, 20 nt, Human
uccacaagcgagaaaaagag

SEQ ID NO: 667151 - RNA, 21 nt, Human
uccacaagcgagaaaaagagg

SEQ ID NO: 667152 - RNA, 20 nt, Human
ugacccggcggccaugacag

SEQ ID NO: 667153 - RNA, 22 nt, Human
ugacggaaaaccaggacggcgc

SEQ ID NO: 667154 - RNA, 23 nt, Human
ugcaguccccucaaaacgcuucg

SEQ ID NO: 667155 - RNA, 18 nt, Human
uugagcuauggucuuuuu

SEQ ID NO: 667156 - RNA, 23 nt, Human
acaaagaugaaaagacaaagccc

SEQ ID NO: 667157 - RNA, 18 nt, Human
agcccuagcuagaucagc

SEQ ID NO: 667158 - RNA, 18 nt, Human
augagaaugaguugggca

SEQ ID NO: 667159 - RNA, 21 nt, Human
cagcggccauggcgcuuggag

SEQ ID NO: 667160 - RNA, 20 nt, Human
ccccugaagucgagccuggg

SEQ ID NO: 667161 - RNA, 21 nt, Human
cgacccgggcucgggcggcag

SEQ ID NO: 667162 - RNA, 24 nt, Human
cuggugcuaguguuucuaucagau

SEQ ID NO: 667163 - RNA, 18 nt, Human
gcgacccgggcucgggcg

SEQ ID NO: 667164 - RNA, 20 nt, Human
gggucuaacauaguggucau

SEQ ID NO: 667165 - RNA, 24 nt, Human
guauaucccaccuauacugguaac

SEQ ID NO: 667166 - RNA, 21 nt, Human
uaacauaguggucauuugucc

SEQ ID NO: 667167 - RNA, 21 nt, Human
uagaaaagugcugccagaaac

SEQ ID NO: 667168 - RNA, 27 nt, Human
ugaaaagacaaagcccuagcuagauca

SEQ ID NO: 667169 - RNA, 20 nt, Human
ugaccccugaagucgagccu

SEQ ID NO: 667170 - RNA, 24 nt, Human
ugauagauacugaguuuuugcuca

SEQ ID NO: 667171 - RNA, 18 nt, Human
ugggggucuaacauagug

SEQ ID NO: 667172 - RNA, 20 nt, Human
ugggguuugggacaggaaca

SEQ ID NO: 667173 - RNA, 20 nt, Human
uugcucauuugcuacaugaa

SEQ ID NO: 667174 - RNA, 20 nt, Human
aaggaaccauggccaaaugc

SEQ ID NO: 667175 - RNA, 23 nt, Human
agacgaaaaggaaccauggccaa

SEQ ID NO: 667176 - RNA, 25 nt, Human
auggccaaaugccuaucaaucagcc

SEQ ID NO: 667177 - RNA, 21 nt, Human
caaaugccuaucaaucagccc

SEQ ID NO: 667178 - RNA, 24 nt, Human
cagcccuucccucagcaugugguu

SEQ ID NO: 667179 - RNA, 26 nt, Human
cauggccaaaugccuaucaaucagcc

SEQ ID NO: 667180 - RNA, 22 nt, Human
ccagcgucugggugcacgcugg

SEQ ID NO: 667181 - RNA, 23 nt, Human
ccccaaagguagacgaaaaggaa

SEQ ID NO: 667182 - RNA, 20 nt, Human
cccccaaagguagacgaaaa

SEQ ID NO: 667183 - RNA, 22 nt, Human
cccccaaagguagacgaaaagg

SEQ ID NO: 667184 - RNA, 24 nt, Human
ccugagaaggcccccaaagguaga

SEQ ID NO: 667185 - RNA, 23 nt, Human
cuccauggucuugaacgccugcu

SEQ ID NO: 667186 - RNA, 24 nt, Human
ggcaggagcugcucauggaaaggu

SEQ ID NO: 667187 - RNA, 21 nt, Human
uaacaacagccuuguucuggg

SEQ ID NO: 667188 - RNA, 18 nt, Human
uaaugaacagaggauacu

SEQ ID NO: 667189 - RNA, 19 nt, Human
ucaaucagcccgguaccua

SEQ ID NO: 667190 - RNA, 24 nt, Human
ucagcccuucccucagcauguggu

SEQ ID NO: 667191 - RNA, 18 nt, Human
ugggugcacgcuggcugu

SEQ ID NO: 667192 - RNA, 21 nt, Human
uuccacauaguaacaacagcc

SEQ ID NO: 667193 - RNA, 20 nt, Human
uucugggccugagaaggccc

SEQ ID NO: 667194 - RNA, 21 nt, Human
acuaaggugucuugauaaggu

SEQ ID NO: 667195 - RNA, 19 nt, Human
agacgaaggucguccaaac

SEQ ID NO: 667196 - RNA, 19 nt, Human
agacgaaggucguccaaac

SEQ ID NO: 667197 - RNA, 22 nt, Human
agaggagaaacaguauuaugaa

SEQ ID NO: 667198 - RNA, 18 nt, Human
aggcagcauggacuuaca

SEQ ID NO: 667199 - RNA, 19 nt, Human
caagaguacaaagacaacu

SEQ ID NO: 667200 - RNA, 21 nt, Human
cacucaguaccucugugccag

SEQ ID NO: 667201 - RNA, 26 nt, Human
caggagccaaaccaaauaaauaagag

SEQ ID NO: 667202 - RNA, 22 nt, Human
ccguucaguacuuuucuccuca

SEQ ID NO: 667203 - RNA, 22 nt, Human
cuggaggcagguugccuuuucu

SEQ ID NO: 667204 - RNA, 24 nt, Human
cuuuccuaagcacaucucauuucc

SEQ ID NO: 667205 - RNA, 18 nt, Human
gaaacaguauuaugaaca

SEQ ID NO: 667206 - RNA, 18 nt, Human
gccaaaccaaauaaauaa

SEQ ID NO: 667207 - RNA, 19 nt, Human
ggaggucagggagcaaucc

SEQ ID NO: 667208 - RNA, 18 nt, Human
uaccucugugccagaaga

SEQ ID NO: 667209 - RNA, 19 nt, Human
uagaacccaauuucuggga

SEQ ID NO: 667210 - RNA, 23 nt, Human
uagggaagugggguagaaggggg

SEQ ID NO: 667211 - RNA, 20 nt, Human
ucaggccaaguggaagaaua

SEQ ID NO: 667212 - RNA, 22 nt, Human
ucaggccaaguggaagaauaag

SEQ ID NO: 667213 - RNA, 20 nt, Human
ucaguaccucugugccagaa

SEQ ID NO: 667214 - RNA, 24 nt, Human
ugaaaaggcugcaggcauauggug

SEQ ID NO: 667215 - RNA, 18 nt, Human
ugaggcuuuauguauuuc

SEQ ID NO: 667216 - RNA, 24 nt, Human
ugccuuuucuccugaggaaucuca

SEQ ID NO: 667217 - RNA, 24 nt, Human
ugguaagaaagccccuugcucucu

SEQ ID NO: 667218 - RNA, 24 nt, Human
ugucuugauaagguccagagacaa

SEQ ID NO: 667219 - RNA, 18 nt, Human
aaagugcuguuuccuccu

SEQ ID NO: 667220 - RNA, 21 nt, Human
aagagucagacaaaaucaaga

SEQ ID NO: 667221 - RNA, 20 nt, Human
aagugcuguuuccuccugcu

SEQ ID NO: 667222 - RNA, 22 nt, Human
acagcagacagaaaaagucaaa

SEQ ID NO: 667223 - RNA, 18 nt, Human
acccugagaaugccucgg

SEQ ID NO: 667224 - RNA, 18 nt, Human
acugaaccgcaggagacu

SEQ ID NO: 667225 - RNA, 18 nt, Human
agacaaaaucaagacgua

SEQ ID NO: 667226 - RNA, 19 nt, Human
agagggggugggggaagag

SEQ ID NO: 667227 - RNA, 22 nt, Human
agcacagauacccugagaaugc

SEQ ID NO: 667228 - RNA, 21 nt, Human
agccaggccuugccuuucccg

SEQ ID NO: 667229 - RNA, 20 nt, Human
agcucuaaguaagccaggcc

SEQ ID NO: 667230 - RNA, 24 nt, Human
aggauagugaggaacugcuccagc

SEQ ID NO: 667231 - RNA, 22 nt, Human
aggguccucccuuccucugccc

SEQ ID NO: 667232 - RNA, 24 nt, Human
aggguccugacugagcugcuccuc

SEQ ID NO: 667233 - RNA, 19 nt, Human
agguagugcuugcuccugg

SEQ ID NO: 667234 - RNA, 22 nt, Human
auccagcaguaaagaacccagc

SEQ ID NO: 667235 - RNA, 20 nt, Human
caacgcacaacccccagagg

SEQ ID NO: 667236 - RNA, 21 nt, Human
caacgcacaacccccagaggc

SEQ ID NO: 667237 - RNA, 22 nt, Human
caacucuuucuccaguuucacc

SEQ ID NO: 667238 - RNA, 21 nt, Human
caaugaccccuccugaaacuc

SEQ ID NO: 667239 - RNA, 18 nt, Human
cacagauacccugagaau

SEQ ID NO: 667240 - RNA, 18 nt, Human
caccauggcggccagggc

SEQ ID NO: 667241 - RNA, 21 nt, Human
caccccgcaaggcccugcagu

SEQ ID NO: 667242 - RNA, 20 nt, Human
caccuugcaccccgcaaggc

SEQ ID NO: 667243 - RNA, 22 nt, Human
cacgugucaagguuuugccuuu

SEQ ID NO: 667244 - RNA, 23 nt, Human
cagagcuccuggagcucccuaag

SEQ ID NO: 667245 - RNA, 24 nt, Human
cagcaguaaagaacccagcugcca

SEQ ID NO: 667246 - RNA, 25 nt, Human
cagcaguaaagaacccagcugccau

SEQ ID NO: 667247 - RNA, 22 nt, Human
cagccaucaccuugcaccccgg

SEQ ID NO: 667248 - RNA, 21 nt, Human
cagcuaugcucucuggaagcu

SEQ ID NO: 667249 - RNA, 25 nt, Human
cagcugccaucucuuggucucuggg

SEQ ID NO: 667250 - RNA, 20 nt, Human
caggcaagacagagcccuca

SEQ ID NO: 667251 - RNA, 22 nt, Human
ccacggcauucccacggccagg

SEQ ID NO: 667252 - RNA, 23 nt, Human
ccacuuggguaagagauggaagc

SEQ ID NO: 667253 - RNA, 26 nt, Human
ccagugcucuuucugucagguccucc

SEQ ID NO: 667254 - RNA, 20 nt, Human
ccagugcuuuccugcagcca

SEQ ID NO: 667255 - RNA, 18 nt, Human
ccccaacgcacaaccccc

SEQ ID NO: 667256 - RNA, 21 nt, Human
ccccagcuggaugccuggcuc

SEQ ID NO: 667257 - RNA, 22 nt, Human
ccgcaggagacugcuucccuca

SEQ ID NO: 667258 - RNA, 18 nt, Human
ccggauccaggcguagaa

SEQ ID NO: 667259 - RNA, 19 nt, Human
ccucgggucaugggcuguc

SEQ ID NO: 667260 - RNA, 22 nt, Human
ccucugcaaagugcuguuuccu

SEQ ID NO: 667261 - RNA, 19 nt, Human
ccuggagcucccuaagagc

SEQ ID NO: 667262 - RNA, 22 nt, Human
ccugggguccagcugccuccug

SEQ ID NO: 667263 - RNA, 24 nt, Human
ccuguggcauggaacccaccgccu

SEQ ID NO: 667264 - RNA, 19 nt, Human
cgccagugcuauccgcggu

SEQ ID NO: 667265 - RNA, 19 nt, Human
cuaggguccucccuuccuc

SEQ ID NO: 667266 - RNA, 20 nt, Human
cucauucaccacggcauucc

SEQ ID NO: 667267 - RNA, 22 nt, Human
cucauucaccacggcauuccca

SEQ ID NO: 667268 - RNA, 21 nt, Human
cucgggccucagccaccgacc

SEQ ID NO: 667269 - RNA, 22 nt, Human
cucuaaguaagccaggccuugc

SEQ ID NO: 667270 - RNA, 21 nt, Human
cucucugggccaugcucccgg

SEQ ID NO: 667271 - RNA, 22 nt, Human
cucuuggucucugggauucacu

SEQ ID NO: 667272 - RNA, 23 nt, Human
cugcuccagcaccagcagcucca

SEQ ID NO: 667273 - RNA, 20 nt, Human
cuggccccagcuggaugccu

SEQ ID NO: 667274 - RNA, 18 nt, Human
cuggcucccaagcgccuc

SEQ ID NO: 667275 - RNA, 26 nt, Human
cugucgcaugcauccccaacgcacaa

SEQ ID NO: 667276 - RNA, 20 nt, Human
gaaguuuuacagaugaggau

SEQ ID NO: 667277 - RNA, 19 nt, Human
gacucccuccgaggagacu

SEQ ID NO: 667278 - RNA, 19 nt, Human
gagggaagauccagcacgg

SEQ ID NO: 667279 - RNA, 21 nt, Human
gcuuccugggguccagcugcc

SEQ ID NO: 667280 - RNA, 23 nt, Human
gcuugaccuccacuggccccagc

SEQ ID NO: 667281 - RNA, 23 nt, Human
ggaccagugcuuuccugcagcca

SEQ ID NO: 667282 - RNA, 18 nt, Human
ggcaggaguggucauggg

SEQ ID NO: 667283 - RNA, 19 nt, Human
ggcaggauagugaggaacu

SEQ ID NO: 667284 - RNA, 18 nt, Human
ggccccaaccugcgaucc

SEQ ID NO: 667285 - RNA, 23 nt, Human
ggccuugccuuucccgcguuggc

SEQ ID NO: 667286 - RNA, 18 nt, Human
ggcguagaacucgcgggg

SEQ ID NO: 667287 - RNA, 24 nt, Human
gggaagauccagcacggggcagga

SEQ ID NO: 667288 - RNA, 20 nt, Human
gggcaggaguggucauggga

SEQ ID NO: 667289 - RNA, 23 nt, Human
gggcaucccccauucaggcuuga

SEQ ID NO: 667290 - RNA, 25 nt, Human
gggcaucccccauucaggcuugacc

SEQ ID NO: 667291 - RNA, 21 nt, Human
uaaaaacugcaaguggagaca

SEQ ID NO: 667292 - RNA, 23 nt, Human
uacagcagacagaaaaagucaaa

SEQ ID NO: 667293 - RNA, 20 nt, Human
uagaacucgcggggcaggau

SEQ ID NO: 667294 - RNA, 23 nt, Human
uaugacccugcaggcaagacaga

SEQ ID NO: 667295 - RNA, 18 nt, Human
ucaaauggaagcaacucu

SEQ ID NO: 667296 - RNA, 26 nt, Human
ucaauggaaaagagaggggguggggg

SEQ ID NO: 667297 - RNA, 20 nt, Human
ucaggaagaugaggucccag

SEQ ID NO: 667298 - RNA, 24 nt, Human
uccagcacggggcaggagggcagg

SEQ ID NO: 667299 - RNA, 25 nt, Human
uccaguuucaccacaggaauaccca

SEQ ID NO: 667300 - RNA, 20 nt, Human
uccccaacgcacaacccccc

SEQ ID NO: 667301 - RNA, 22 nt, Human
ucccggauccaggcguagaacu

SEQ ID NO: 667302 - RNA, 23 nt, Human
ucccggauccaggcguagaacuc

SEQ ID NO: 667303 - RNA, 21 nt, Human
uccuggaaggcccgugucuca

SEQ ID NO: 667304 - RNA, 18 nt, Human
ucgcggggcaggauagug

SEQ ID NO: 667305 - RNA, 19 nt, Human
ucugagcuaugacccugca

SEQ ID NO: 667306 - RNA, 20 nt, Human
ucuuuaaauggccccaaccu

SEQ ID NO: 667307 - RNA, 21 nt, Human
ugagaaagaugaaugauggug

SEQ ID NO: 667308 - RNA, 22 nt, Human
ugcagccaucaccuugcacccc

SEQ ID NO: 667309 - RNA, 22 nt, Human
ugcauccccaacgcacaacccc

SEQ ID NO: 667310 - RNA, 18 nt, Human
ugccaucucuuggucucu

SEQ ID NO: 667311 - RNA, 21 nt, Human
ugccuguggcauggaacccac

SEQ ID NO: 667312 - RNA, 30 nt, Human
uggaaaagagagggggugggggaagagucc

SEQ ID NO: 667313 - RNA, 26 nt, Human
uggccuccagugcucuuucugucagg

SEQ ID NO: 667314 - RNA, 22 nt, Human
ugggaccagugcuuuccugcag

SEQ ID NO: 667315 - RNA, 23 nt, Human
ugggggaagagucuuccgguccg

SEQ ID NO: 667316 - RNA, 25 nt, Human
ugucgcaugcauccccaacgcacag

SEQ ID NO: 667317 - RNA, 20 nt, Human
ugugauggugcgcucaaccc

SEQ ID NO: 667318 - RNA, 19 nt, Human
uuaaauggccccaaccugc

SEQ ID NO: 667319 - RNA, 20 nt, Human
uuacucccagcuuuguucgg

SEQ ID NO: 667320 - RNA, 19 nt, Human
uuagaucagggugguggca

SEQ ID NO: 667321 - RNA, 25 nt, Human
uuccuaauaguugguguguugacag

SEQ ID NO: 667322 - RNA, 23 nt, Human
uuccugggguccagcugccuccu

SEQ ID NO: 667323 - RNA, 24 nt, Human
uucuccaguuucaccacaggaaua

SEQ ID NO: 667324 - RNA, 24 nt, Human
uuuccugcagccaucaccuugcac

SEQ ID NO: 667325 - RNA, 20 nt, Human
aaaaaaguccuuccaucccu

SEQ ID NO: 667326 - RNA, 27 nt, Human
aaaaagaggguauaugaaguaccuagg

SEQ ID NO: 667327 - RNA, 21 nt, Human
aaaaagccaaacucgaaauac

SEQ ID NO: 667328 - RNA, 25 nt, Human
aaaguccuuccaucccucaccccug

SEQ ID NO: 667329 - RNA, 23 nt, Human
aacauaguaaugguaauccaccu

SEQ ID NO: 667330 - RNA, 24 nt, Human
acagagcaagaccccuucucuuug

SEQ ID NO: 667331 - RNA, 19 nt, Human
acugcacuccagacugggu

SEQ ID NO: 667332 - RNA, 24 nt, Human
acugcacuccagacugggugacag

SEQ ID NO: 667333 - RNA, 26 nt, Human
acugcacuccagacugggugacagag

SEQ ID NO: 667334 - RNA, 20 nt, Human
agaaaaagccaaacucgaaa

SEQ ID NO: 667335 - RNA, 19 nt, Human
agaaaagaccucccugagg

SEQ ID NO: 667336 - RNA, 23 nt, Human
agaaaucagaaaagaccucccug

SEQ ID NO: 667337 - RNA, 20 nt, Human
agaggcuauuugggaggcug

SEQ ID NO: 667338 - RNA, 18 nt, Human
agaugggaggaucacuug

SEQ ID NO: 667339 - RNA, 24 nt, Human
agccugggcaacacagcgagaccc

SEQ ID NO: 667340 - RNA, 18 nt, Human
agcugccaaacacucuuc

SEQ ID NO: 667341 - RNA, 22 nt, Human
aggagguugaaaccagccuggg

SEQ ID NO: 667342 - RNA, 21 nt, Human
aggaucacuugaggccaggag

SEQ ID NO: 667343 - RNA, 22 nt, Human
aggaucacuugaggccaggagg

SEQ ID NO: 667344 - RNA, 24 nt, Human
aggaucacuugaggccaggagguu

SEQ ID NO: 667345 - RNA, 24 nt, Human
aggaucacuugugcccaggagcuc

SEQ ID NO: 667346 - RNA, 18 nt, Human
aggcaagaggaucacuug

SEQ ID NO: 667347 - RNA, 21 nt, Human
aggcauuguggcgugcaccug

SEQ ID NO: 667348 - RNA, 24 nt, Human
aggcugaggcaagaggaucacuug

SEQ ID NO: 667349 - RNA, 18 nt, Human
aucccauucucuuccagg

SEQ ID NO: 667350 - RNA, 26 nt, Human
aucuuccugcagacaucucauuucca

SEQ ID NO: 667351 - RNA, 20 nt, Human
auucaguggccugggcuaca

SEQ ID NO: 667352 - RNA, 24 nt, Human
auuuugccacugcacuccagacug

SEQ ID NO: 667353 - RNA, 24 nt, Human
caagaggaucacuugaggccagga

SEQ ID NO: 667354 - RNA, 20 nt, Human
caaggcacagaaaaagccaa

SEQ ID NO: 667355 - RNA, 22 nt, Human
caaggcacagaaaaagccaaac

SEQ ID NO: 667356 - RNA, 24 nt, Human
caccaagaaaucagaaaagaccuc

SEQ ID NO: 667357 - RNA, 22 nt, Human
caccacuuuuccucaaggcaca

SEQ ID NO: 667358 - RNA, 19 nt, Human
caccugaagucccagcuac

SEQ ID NO: 667359 - RNA, 22 nt, Human
caccugaagucccagcuacuca

SEQ ID NO: 667360 - RNA, 23 nt, Human
cacuccagacugggugacagagc

SEQ ID NO: 667361 - RNA, 19 nt, Human
cacugcacuccagacuggg

SEQ ID NO: 667362 - RNA, 23 nt, Human
cacugcacuccagacugggugac

SEQ ID NO: 667363 - RNA, 24 nt, Human
cacugcacuccagacugggugaca

SEQ ID NO: 667364 - RNA, 24 nt, Human
cacugcacuccagacugggugaca

SEQ ID NO: 667365 - RNA, 22 nt, Human
cagaaaaagccaaacucgaaau

SEQ ID NO: 667366 - RNA, 21 nt, Human
cagaaaagaccucccugagga

SEQ ID NO: 667367 - RNA, 25 nt, Human
cagcgcagccagccuaaccccuugg

SEQ ID NO: 667368 - RNA, 26 nt, Human
ccacugagauaaauaucaggggcggg

SEQ ID NO: 667369 - RNA, 20 nt, Human
ccacugcacuccagacuggg

SEQ ID NO: 667370 - RNA, 20 nt, Human
ccacugcacuccagacuggg

SEQ ID NO: 667371 - RNA, 21 nt, Human
ccacugcacuccagacugggu

SEQ ID NO: 667372 - RNA, 24 nt, Human
ccacugcacuccagacugggugac

SEQ ID NO: 667373 - RNA, 22 nt, Human
ccaggagcuccaggcugcagug

SEQ ID NO: 667374 - RNA, 22 nt, Human
ccauuguccuuuuccggccacc

SEQ ID NO: 667375 - RNA, 22 nt, Human
cccaccaagaaaucagaaaaga

SEQ ID NO: 667376 - RNA, 19 nt, Human
ccuauuucuuuguaaaucc

SEQ ID NO: 667377 - RNA, 18 nt, Human
ccucgugagcuuacaauc

SEQ ID NO: 667378 - RNA, 26 nt, Human
ccugaagucccagcuacucaaggcag

SEQ ID NO: 667379 - RNA, 22 nt, Human
ccugggcaacacagcgagaccc

SEQ ID NO: 667380 - RNA, 18 nt, Human
ccuuggguuucagcugcc

SEQ ID NO: 667381 - RNA, 20 nt, Human
cucaaggcacagaaaaagcc

SEQ ID NO: 667382 - RNA, 22 nt, Human
cucucugagacagaaaaacaag

SEQ ID NO: 667383 - RNA, 24 nt, Human
cugagauaaauaucaggggcgggg

SEQ ID NO: 667384 - RNA, 18 nt, Human
cuuuguauggucaaugau

SEQ ID NO: 667385 - RNA, 18 nt, Human
gaaaaagccaaacucgaa

SEQ ID NO: 667386 - RNA, 24 nt, Human
gacccugugucuacaaaaaauuaa

SEQ ID NO: 667387 - RNA, 21 nt, Human
gacgcacuuccuuucuuuccc

SEQ ID NO: 667388 - RNA, 19 nt, Human
gacuaucucucugagacag

SEQ ID NO: 667389 - RNA, 18 nt, Human
gaucacuugaggccagga

SEQ ID NO: 667390 - RNA, 24 nt, Human
gaucacuugaggccaggagguuga

SEQ ID NO: 667391 - RNA, 18 nt, Human
gaucacuugugcccagga

SEQ ID NO: 667392 - RNA, 21 nt, Human
gauuuugccacugcacuccag

SEQ ID NO: 667393 - RNA, 20 nt, Human
gcacagaaaaagccaaacuc

SEQ ID NO: 667394 - RNA, 18 nt, Human
gcacaggcuagcuccugg

SEQ ID NO: 667395 - RNA, 24 nt, Human
gcacuccagacugggugacagagc

SEQ ID NO: 667396 - RNA, 21 nt, Human
gccacugcacuccagacuggg

SEQ ID NO: 667397 - RNA, 24 nt, Human
gcccaggagcuccaggaccaaagu

SEQ ID NO: 667398 - RNA, 19 nt, Human
gccugaacucugacuaucc

SEQ ID NO: 667399 - RNA, 21 nt, Human
ggcacagaaaaagccaaacuc

SEQ ID NO: 667400 - RNA, 19 nt, Human
ggggagagcguuuauccgc

SEQ ID NO: 667401 - RNA, 23 nt, Human
gggguggggcagagaacgaauac

SEQ ID NO: 667402 - RNA, 19 nt, Human
gugaaguguaccguccaua

SEQ ID NO: 667403 - RNA, 18 nt, Human
uacacuucagaagggcac

SEQ ID NO: 667404 - RNA, 26 nt, Human
uauagcagugagcaagaugugaacaa

SEQ ID NO: 667405 - RNA, 19 nt, Human
ucaaauucuuccuccucau

SEQ ID NO: 667406 - RNA, 18 nt, Human
ucacuggaucucuugguu

SEQ ID NO: 667407 - RNA, 21 nt, Human
uccaggguaaaauccauguuc

SEQ ID NO: 667408 - RNA, 18 nt, Human
ucccaaagauuaauucac

SEQ ID NO: 667409 - RNA, 23 nt, Human
ucccgcguggggcauauaaggau

SEQ ID NO: 667410 - RNA, 24 nt, Human
ucccuaaaccaagguacuugaucu

SEQ ID NO: 667411 - RNA, 24 nt, Human
ucccuuggguuucagcugccaaac

SEQ ID NO: 667412 - RNA, 20 nt, Human
uccucagcacguacucacua

SEQ ID NO: 667413 - RNA, 26 nt, Human
ucucagagcaaacuguaaugaaggca

SEQ ID NO: 667414 - RNA, 18 nt, Human
ucucugcccucgugagcu

SEQ ID NO: 667415 - RNA, 21 nt, Human
ucuugcucugucggucacugg

SEQ ID NO: 667416 - RNA, 22 nt, Human
ucuugcucugucggucacugga

SEQ ID NO: 667417 - RNA, 21 nt, Human
ugaaggcagggaauagggccu

SEQ ID NO: 667418 - RNA, 20 nt, Human
ugacauggaaaccauugucc

SEQ ID NO: 667419 - RNA, 19 nt, Human
ugagauaaauaucaggggc

SEQ ID NO: 667420 - RNA, 23 nt, Human
ugagauagucaaauucuuccucc

SEQ ID NO: 667421 - RNA, 21 nt, Human
ugagccaugauuuugccacug

SEQ ID NO: 667422 - RNA, 25 nt, Human
ugaggaaggaacauuuaggaucagc

SEQ ID NO: 667423 - RNA, 18 nt, Human
ugaggcaagaggaucacu

SEQ ID NO: 667424 - RNA, 20 nt, Human
ugaggcaagaggaucacuug

SEQ ID NO: 667425 - RNA, 24 nt, Human
ugaggcaagaggaucacuugaggc

SEQ ID NO: 667426 - RNA, 26 nt, Human
ugaggcaagaggaucacuugaggcca

SEQ ID NO: 667427 - RNA, 21 nt, Human
ugaggccaggagguugaaacc

SEQ ID NO: 667428 - RNA, 23 nt, Human
ugaggccaggagguugaaaccag

SEQ ID NO: 667429 - RNA, 19 nt, Human
ugcagacaucucauuucca

SEQ ID NO: 667430 - RNA, 22 nt, Human
ugcagugagccaugauuuugcc

SEQ ID NO: 667431 - RNA, 18 nt, Human
ugccaaaaaaguccuucc

SEQ ID NO: 667432 - RNA, 21 nt, Human
ugccuacaacuccgugagauc

SEQ ID NO: 667433 - RNA, 24 nt, Human
ugggaggaucacuugugcccagga

SEQ ID NO: 667434 - RNA, 19 nt, Human
ugggaggcugaggcaagag

SEQ ID NO: 667435 - RNA, 24 nt, Human
ugggaggcugaggcaagaggauca

SEQ ID NO: 667436 - RNA, 21 nt, Human
ugggggcaaaaaaaaagaggg

SEQ ID NO: 667437 - RNA, 18 nt, Human
ugugaacaagaucucugc

SEQ ID NO: 667438 - RNA, 24 nt, Human
ugugaacaagaucucugcccucgu

SEQ ID NO: 667439 - RNA, 24 nt, Human
ugugcucagcaaugagaauauagc

SEQ ID NO: 667440 - RNA, 21 nt, Human
ugugugcucagcaaugagaau

SEQ ID NO: 667441 - RNA, 21 nt, Human
uuaggcauuguggcgugcacc

SEQ ID NO: 667442 - RNA, 22 nt, Human
uucaggaguugcgggguggggc

SEQ ID NO: 667443 - RNA, 18 nt, Human
uugcaggugugugaagug

SEQ ID NO: 667444 - RNA, 19 nt, Human
uugcaggugugugaaguga

SEQ ID NO: 667445 - RNA, 25 nt, Human
uugggaggcugaggcaagaggauca

SEQ ID NO: 667446 - RNA, 25 nt, Human
aacaauggggaucccaguggagaga

SEQ ID NO: 667447 - RNA, 19 nt, Human
aacugccaacuccugagca

SEQ ID NO: 667448 - RNA, 19 nt, Human
aagcuaccagccucccucc

SEQ ID NO: 667449 - RNA, 23 nt, Human
aaucacugaggcccugaccccaa

SEQ ID NO: 667450 - RNA, 21 nt, Human
agcuggcccgagcacuccugg

SEQ ID NO: 667451 - RNA, 18 nt, Human
agggaugggaaaaggacc

SEQ ID NO: 667452 - RNA, 22 nt, Human
aggggacaggagaaucacugag

SEQ ID NO: 667453 - RNA, 18 nt, Human
aguugggggaggugcgcg

SEQ ID NO: 667454 - RNA, 21 nt, Human
cagcauuaaaaaacuaggaga

SEQ ID NO: 667455 - RNA, 26 nt, Human
cagcauuaaaaaacuaggagacuuca

SEQ ID NO: 667456 - RNA, 27 nt, Human
cagcauuaaaaaacuaggagacuucac

SEQ ID NO: 667457 - RNA, 18 nt, Human
cccacagcugcccucgcc

SEQ ID NO: 667458 - RNA, 18 nt, Human
cccacugcacacugaggc

SEQ ID NO: 667459 - RNA, 19 nt, Human
cccgagcacuccuggagcc

SEQ ID NO: 667460 - RNA, 19 nt, Human
cccugaccccaaggcaacc

SEQ ID NO: 667461 - RNA, 23 nt, Human
ccugaccccaaggcaaccgagac

SEQ ID NO: 667462 - RNA, 19 nt, Human
ccugccgcggcgcagcugc

SEQ ID NO: 667463 - RNA, 20 nt, Human
cggacauccacgaacgacga

SEQ ID NO: 667464 - RNA, 21 nt, Human
cugaccccaaggcaaccgaga

SEQ ID NO: 667465 - RNA, 24 nt, Human
cuggcaaagcuaccagccucccuc

SEQ ID NO: 667466 - RNA, 18 nt, Human
gaaaugucagcauuaaaa

SEQ ID NO: 667467 - RNA, 22 nt, Human
gacaggagaaucacugaggccc

SEQ ID NO: 667468 - RNA, 21 nt, Human
gcaaagcuaccagccucccuc

SEQ ID NO: 667469 - RNA, 20 nt, Human
gggagggaugggaaaaggac

SEQ ID NO: 667470 - RNA, 23 nt, Human
ggggaucccaguggagagagggc

SEQ ID NO: 667471 - RNA, 18 nt, Human
guccuagucucgggacac

SEQ ID NO: 667472 - RNA, 22 nt, Human
uaagaaaugucagcauuaaaaa

SEQ ID NO: 667473 - RNA, 22 nt, Human
uccugagcaugagggaggggac

SEQ ID NO: 667474 - RNA, 18 nt, Human
uggcaaagcuaccagccu

SEQ ID NO: 667475 - RNA, 19 nt, Human
uggcaaagcuaccagccuc

SEQ ID NO: 667476 - RNA, 19 nt, Human
ugggaaaaggaccagcugg

SEQ ID NO: 667477 - RNA, 18 nt, Human
uggggagggaugggaaaa

SEQ ID NO: 667478 - RNA, 22 nt, Human
uggggaucccaguggagagagg

SEQ ID NO: 667479 - RNA, 18 nt, Human
uucauggggagggauggg

SEQ ID NO: 667480 - RNA, 19 nt, Human
aaagagaaugucugcccuc

SEQ ID NO: 667481 - RNA, 23 nt, Human
agcaagcagaugcuaagaugagu

SEQ ID NO: 667482 - RNA, 22 nt, Human
aggugugcuccaaagagaaugu

SEQ ID NO: 667483 - RNA, 19 nt, Human
caagcagaugcuaagauga

SEQ ID NO: 667484 - RNA, 21 nt, Human
caagcccccaccucgguucua

SEQ ID NO: 667485 - RNA, 18 nt, Human
caagucccagccugguca

SEQ ID NO: 667486 - RNA, 25 nt, Human
caauccacuggagaagugagacaau

SEQ ID NO: 667487 - RNA, 20 nt, Human
cacacucugcagcaaguccc

SEQ ID NO: 667488 - RNA, 23 nt, Human
caccaagcccccaccucgguucu

SEQ ID NO: 667489 - RNA, 22 nt, Human
cacucugcagcaagucccagcc

SEQ ID NO: 667490 - RNA, 19 nt, Human
cacuucuauccccugggug

SEQ ID NO: 667491 - RNA, 24 nt, Human
caugaaguucacuugagauugggg

SEQ ID NO: 667492 - RNA, 21 nt, Human
ccaagcccccaccucgguucu

SEQ ID NO: 667493 - RNA, 22 nt, Human
ccccugggugaagacucaauuu

SEQ ID NO: 667494 - RNA, 19 nt, Human
cccucugucuccacuggag

SEQ ID NO: 667495 - RNA, 20 nt, Human
ccugaggugugcuccaaaga

SEQ ID NO: 667496 - RNA, 21 nt, Human
ccuucaccaagcccccaccuc

SEQ ID NO: 667497 - RNA, 19 nt, Human
gagauugggguuuugccau

SEQ ID NO: 667498 - RNA, 20 nt, Human
gcgcagccugcucuuccugg

SEQ ID NO: 667499 - RNA, 24 nt, Human
uaaaauacaccaucuugauggccu

SEQ ID NO: 667500 - RNA, 25 nt, Human
uagcuuuuuuggggaaaaguguuaa

SEQ ID NO: 667501 - RNA, 23 nt, Human
uaguuccaugaaguucacuugag

SEQ ID NO: 667502 - RNA, 22 nt, Human
ucaccaagcccccaccucgguu

SEQ ID NO: 667503 - RNA, 18 nt, Human
uccacuggagaagugaga

SEQ ID NO: 667504 - RNA, 19 nt, Human
ucugcagcaagucccagcc

SEQ ID NO: 667505 - RNA, 18 nt, Human
ucugcccucugucuccac

SEQ ID NO: 667506 - RNA, 19 nt, Human
ugccacuggguuuauugaa

SEQ ID NO: 667507 - RNA, 23 nt, Human
ugcuuaaaauacaccaucuugau

SEQ ID NO: 667508 - RNA, 21 nt, Human
uuccaugaaguucacuugaga

SEQ ID NO: 667509 - RNA, 21 nt, Human
uugagauugggguuuugccau

SEQ ID NO: 667510 - RNA, 23 nt, Human
uuugcuuaaaauacaccaucuug

SEQ ID NO: 667511 - RNA, 18 nt, Human
cacagugaaauugugggu

SEQ ID NO: 667512 - RNA, 21 nt, Human
cagcugacucuucacagugaa

SEQ ID NO: 667513 - RNA, 21 nt, Human
cgagcuggacugacuggaccg

SEQ ID NO: 667514 - RNA, 20 nt, Human
cuucacagugaaauuguggg

SEQ ID NO: 667515 - RNA, 21 nt, Human
ggcaguuaugggagauguggu

SEQ ID NO: 667516 - RNA, 26 nt, Human
ggcucaggacgaugugcuggggcagg

SEQ ID NO: 667517 - RNA, 21 nt, Human
gggcggcucaggacgaugugc

SEQ ID NO: 667518 - RNA, 21 nt, Human
uaugggagaugugguuaccua

SEQ ID NO: 667519 - RNA, 21 nt, Human
ucaggacauucuggaacaagg

SEQ ID NO: 667520 - RNA, 23 nt, Human
ucaggggugguggcugcacucuu

SEQ ID NO: 667521 - RNA, 20 nt, Human
ugacuggaccgcaggcucac

SEQ ID NO: 667522 - RNA, 20 nt, Human
ugagacuccacagaaggugg

SEQ ID NO: 667523 - RNA, 20 nt, Human
ugaggcccacgggggaaaau

SEQ ID NO: 667524 - RNA, 21 nt, Human
ugcuggggcaguuaugggaga

SEQ ID NO: 667525 - RNA, 18 nt, Human
uggacugacuggaccgca

SEQ ID NO: 667526 - RNA, 18 nt, Human
uggagacagguugggcgg

SEQ ID NO: 667527 - RNA, 25 nt, Human
ugucucaggacauucuggaacaagg

SEQ ID NO: 667528 - RNA, 19 nt, Human
uguuucucccuucggccua

SEQ ID NO: 667529 - RNA, 24 nt, Human
uguuucucccuucggccuacaggg

SEQ ID NO: 667530 - RNA, 22 nt, Human
uuucucccuucggccuacaggg

SEQ ID NO: 667531 - RNA, 22 nt, Human
aagcauacuguaguuaaaaaua

SEQ ID NO: 667532 - RNA, 21 nt, Human
aauauuaaaagaccaagaaaa

SEQ ID NO: 667533 - RNA, 22 nt, Human
aaugcuaaaagcucacguagcu

SEQ ID NO: 667534 - RNA, 22 nt, Human
acaagcauacuguaguuaaaaa

SEQ ID NO: 667535 - RNA, 18 nt, Human
acacaaacucagggaaaa

SEQ ID NO: 667536 - RNA, 18 nt, Human
aggaggcuuggaucucac

SEQ ID NO: 667537 - RNA, 25 nt, Human
agggaaaaaagaaaaguuuauccag

SEQ ID NO: 667538 - RNA, 19 nt, Human
auggugcucagcuccuugg

SEQ ID NO: 667539 - RNA, 21 nt, Human
cagcuccuuggccuuuaggag

SEQ ID NO: 667540 - RNA, 30 nt, Human
caggaguuaaaagaagcauacaagcauacc

SEQ ID NO: 667541 - RNA, 18 nt, Human
cauacaagcauacuguag

SEQ ID NO: 667542 - RNA, 22 nt, Human
cauacaagcauacuguaguuaa

SEQ ID NO: 667543 - RNA, 23 nt, Human
ccaaaauagcauuaugcuucuga

SEQ ID NO: 667544 - RNA, 20 nt, Human
ccgccgcguuucccccaacc

SEQ ID NO: 667545 - RNA, 23 nt, Human
ccgccgcguuucccccaaccccc

SEQ ID NO: 667546 - RNA, 20 nt, Human
ccgcuuccgcgacgcagaag

SEQ ID NO: 667547 - RNA, 24 nt, Human
ccucccgcuguacggugccaaacc

SEQ ID NO: 667548 - RNA, 22 nt, Human
cgggacgggggcggcguccgcc

SEQ ID NO: 667549 - RNA, 23 nt, Human
cuaaugcuaaaagcucacguagc

SEQ ID NO: 667550 - RNA, 21 nt, Human
cuagauggugcucagcuccuu

SEQ ID NO: 667551 - RNA, 25 nt, Human
cugauggcugcgucggauucuuucu

SEQ ID NO: 667552 - RNA, 21 nt, Human
cuuucaagcgaucccgcucac

SEQ ID NO: 667553 - RNA, 23 nt, Human
ggguggggcccuuaaccucccgc

SEQ ID NO: 667554 - RNA, 19 nt, Human
gucauugugcuggucccaa

SEQ ID NO: 667555 - RNA, 23 nt, Human
guccccuucgggacgggggcggc

SEQ ID NO: 667556 - RNA, 20 nt, Human
gugaacuccaaaauaggcac

SEQ ID NO: 667557 - RNA, 19 nt, Human
gugcucagcuccuuggccu

SEQ ID NO: 667558 - RNA, 25 nt, Human
uagauggugcucagcuccuuggccu

SEQ ID NO: 667559 - RNA, 22 nt, Human
ucccccaaccguggcgaccugc

SEQ ID NO: 667560 - RNA, 19 nt, Human
ucuagauggugcucagcuc

SEQ ID NO: 667561 - RNA, 21 nt, Human
ucuuucuucaauguuaaugau

SEQ ID NO: 667562 - RNA, 23 nt, Human
uguuaaugauaaacccuugcaca

SEQ ID NO: 667563 - RNA, 20 nt, Human
uguuuuuuuuuuuuuuuugg

SEQ ID NO: 667564 - RNA, 24 nt, Human
uguuuuuuuuuuuuuuuuggauuu

SEQ ID NO: 667565 - RNA, 21 nt, Human
uucaaaggaagaaaauuaugu

SEQ ID NO: 667566 - RNA, 23 nt, Human
accgcguucaucaaacccgcggc

SEQ ID NO: 667567 - RNA, 25 nt, Human
cguaccagucuccccgggaaccgcg

SEQ ID NO: 667568 - RNA, 22 nt, Human
uaagcaccacauauacuauauu

SEQ ID NO: 667569 - RNA, 22 nt, Human
uuucaugauaaaugaugcuacu

SEQ ID NO: 667570 - RNA, 18 nt, Human
aaaggcacccuacccaca

SEQ ID NO: 667571 - RNA, 18 nt, Human
acagacagaagccaggcu

SEQ ID NO: 667572 - RNA, 21 nt, Human
agacagaagccaggcugcacc

SEQ ID NO: 667573 - RNA, 19 nt, Human
agccaggcugcaccugggg

SEQ ID NO: 667574 - RNA, 21 nt, Human
aggcaggccugugagagggag

SEQ ID NO: 667575 - RNA, 24 nt, Human
caaaggcacccuacccacaaugcc

SEQ ID NO: 667576 - RNA, 21 nt, Human
cacccuacccacaaugccagc

SEQ ID NO: 667577 - RNA, 18 nt, Human
cauugcaguucuucgcac

SEQ ID NO: 667578 - RNA, 24 nt, Human
cccaugauccccauuccccaggca

SEQ ID NO: 667579 - RNA, 21 nt, Human
cccuacccacaaugccagcac

SEQ ID NO: 667580 - RNA, 19 nt, Human
ccugugagagggaggcaaa

SEQ ID NO: 667581 - RNA, 21 nt, Human
cgaggucuggcucugaccagc

SEQ ID NO: 667582 - RNA, 22 nt, Human
cgcacccuagacccagcuccac

SEQ ID NO: 667583 - RNA, 23 nt, Human
cuacccacaaugccagcacccca

SEQ ID NO: 667584 - RNA, 21 nt, Human
gcacccuagacccagcuccac

SEQ ID NO: 667585 - RNA, 27 nt, Human
gcagcagccauugcaguucuucgcacc

SEQ ID NO: 667586 - RNA, 24 nt, Human
gcucugaccagcuucccuguggcu

SEQ ID NO: 667587 - RNA, 20 nt, Human
gggagaggguggugcugaga

SEQ ID NO: 667588 - RNA, 18 nt, Human
guggacucagcugcuccc

SEQ ID NO: 667589 - RNA, 21 nt, Human
uacccacaaugccagcaccca

SEQ ID NO: 667590 - RNA, 19 nt, Human
uccccaggcacgaggucug

SEQ ID NO: 667591 - RNA, 23 nt, Human
uccccaggcacgaggucuggcuc

SEQ ID NO: 667592 - RNA, 19 nt, Human
ucccuguggcugauaggag

SEQ ID NO: 667593 - RNA, 20 nt, Human
ugagauacagacagaagccg

SEQ ID NO: 667594 - RNA, 19 nt, Human
ugcaguucuucgcacccua

SEQ ID NO: 667595 - RNA, 24 nt, Human
aaaaaacuuauuccucccugcuga

SEQ ID NO: 667596 - RNA, 20 nt, Human
aaaaggcccggccucugcgc

SEQ ID NO: 667597 - RNA, 18 nt, Human
agacggaagccugaaaac

SEQ ID NO: 667598 - RNA, 24 nt, Human
caccugaaucugaaaccagugauu

SEQ ID NO: 667599 - RNA, 19 nt, Human
cagcaaagaccgccgggca

SEQ ID NO: 667600 - RNA, 24 nt, Human
ccacucucugaagguuugggagac

SEQ ID NO: 667601 - RNA, 21 nt, Human
ccgccgggcacccgccgccuc

SEQ ID NO: 667602 - RNA, 18 nt, Human
ccucagacuccagcaccu

SEQ ID NO: 667603 - RNA, 24 nt, Human
ccucccugcugagacugugggaag

SEQ ID NO: 667604 - RNA, 20 nt, Human
ccugaaaacuccucagacuc

SEQ ID NO: 667605 - RNA, 21 nt, Human
ccugaaucugaaaccagugau

SEQ ID NO: 667606 - RNA, 23 nt, Human
ccuguaaagccuguuucaauugc

SEQ ID NO: 667607 - RNA, 20 nt, Human
cgccgggcacccgccgccgg

SEQ ID NO: 667608 - RNA, 20 nt, Human
cuccagcaccucccuuuuac

SEQ ID NO: 667609 - RNA, 21 nt, Human
cuccucagacuccagcaccuc

SEQ ID NO: 667610 - RNA, 24 nt, Human
cuccuuacuucgcucccauccacu

SEQ ID NO: 667611 - RNA, 22 nt, Human
cugaaaccagugauuuucuugu

SEQ ID NO: 667612 - RNA, 19 nt, Human
gcaaagaccgccgggcacc

SEQ ID NO: 667613 - RNA, 24 nt, Human
gcggcagcaaagaccgccgggcac

SEQ ID NO: 667614 - RNA, 18 nt, Human
ggagacuuuuccaaagua

SEQ ID NO: 667615 - RNA, 18 nt, Human
ggcagcaaagaccgccgg

SEQ ID NO: 667616 - RNA, 20 nt, Human
gggaagucgggugacugggc

SEQ ID NO: 667617 - RNA, 23 nt, Human
gggaagucgggugacugggcggu

SEQ ID NO: 667618 - RNA, 19 nt, Human
uaccauguaucugcucagg

SEQ ID NO: 667619 - RNA, 21 nt, Human
ucagaaacucuauuagcaucu

SEQ ID NO: 667620 - RNA, 21 nt, Human
ucagcaucuaacaaaacuuga

SEQ ID NO: 667621 - RNA, 22 nt, Human
uccaaauuacagaugaaaaaaa

SEQ ID NO: 667622 - RNA, 18 nt, Human
ucccugcugagacugugg

SEQ ID NO: 667623 - RNA, 21 nt, Human
ucccugcugagacugugggaa

SEQ ID NO: 667624 - RNA, 21 nt, Human
uccgagccugccagacuuccu

SEQ ID NO: 667625 - RNA, 26 nt, Human
ucugaaaccagugauuuucuuguuuc

SEQ ID NO: 667626 - RNA, 18 nt, Human
ucuguggauauucuugga

SEQ ID NO: 667627 - RNA, 24 nt, Human
ugaaagaaaaggcccggccucugc

SEQ ID NO: 667628 - RNA, 24 nt, Human
ugacugggcgguuuggccuugcug

SEQ ID NO: 667629 - RNA, 18 nt, Human
ugcaucuguuuguauuca

SEQ ID NO: 667630 - RNA, 30 nt, Human
ugccagacuuccuucgagacggaagccugg

SEQ ID NO: 667631 - RNA, 20 nt, Human
ugcuuagcuuuuucagcuuc

SEQ ID NO: 667632 - RNA, 23 nt, Human
uuccuguaaagccuguuucaauu

SEQ ID NO: 667633 - RNA, 21 nt, Human
uucgagacggaagccugaaaa

SEQ ID NO: 667634 - RNA, 24 nt, Human
uucucaauuuccagacgugcuacu

SEQ ID NO: 667635 - RNA, 20 nt, Human
uucuucacuguuuucacagc

SEQ ID NO: 667636 - RNA, 18 nt, Human
uugcauuguugucucagu

SEQ ID NO: 667637 - RNA, 18 nt, Human
uugcauuguugucucagu

SEQ ID NO: 667638 - RNA, 22 nt, Human
uugucuuuuuucuucacuguuu

SEQ ID NO: 667639 - RNA, 18 nt, Human
uugugcugaaagaaaagg

SEQ ID NO: 667640 - RNA, 20 nt, Human
uuuccagcaccaacuucucc

SEQ ID NO: 667641 - RNA, 22 nt, Human
uuucuucacuguuuucacagcu

SEQ ID NO: 667642 - RNA, 24 nt, Human
uuucuuguuucuuucuccaauggu

SEQ ID NO: 667643 - RNA, 21 nt, Human
agagaagccagcccuccugga

SEQ ID NO: 667644 - RNA, 21 nt, Human
aggaaaguagcugggcagggg

SEQ ID NO: 667645 - RNA, 22 nt, Human
aggucggggagaggcugcagga

SEQ ID NO: 667646 - RNA, 27 nt, Human
cagggggccuuuccucugcagaggcuc

SEQ ID NO: 667647 - RNA, 23 nt, Human
ccccugggggauggagugggggu

SEQ ID NO: 667648 - RNA, 18 nt, Human
cccuaggauugacaaacc

SEQ ID NO: 667649 - RNA, 21 nt, Human
cugcagaggcucugaggucgg

SEQ ID NO: 667650 - RNA, 24 nt, Human
cugggggauggaguggggguacag

SEQ ID NO: 667651 - RNA, 21 nt, Human
gaagcagagcucugcagagaa

SEQ ID NO: 667652 - RNA, 18 nt, Human
gagcucugcagagaagcc

SEQ ID NO: 667653 - RNA, 24 nt, Human
gcaggaagcagagcucugcagaga

SEQ ID NO: 667654 - RNA, 20 nt, Human
ggcagggccccagggggccu

SEQ ID NO: 667655 - RNA, 20 nt, Human
ggcagggguguuccccuggg

SEQ ID NO: 667656 - RNA, 18 nt, Human
gggagaggcugcaggaag

SEQ ID NO: 667657 - RNA, 20 nt, Human
gggagaggcugcaggaagca

SEQ ID NO: 667658 - RNA, 19 nt, Human
uagccuggcuccugucccc

SEQ ID NO: 667659 - RNA, 24 nt, Human
uccccugggggauggagugggggu

SEQ ID NO: 667660 - RNA, 18 nt, Human
ucugaggucggggagagg

SEQ ID NO: 667661 - RNA, 24 nt, Human
ugggcagggguguuccccuggggg

SEQ ID NO: 667662 - RNA, 18 nt, Human
ugggggauggaguggggg

SEQ ID NO: 667663 - RNA, 19 nt, Human
aacucguccccuccccagc

SEQ ID NO: 667664 - RNA, 20 nt, Human
accccgaggccucugccaac

SEQ ID NO: 667665 - RNA, 18 nt, Human
accucgcggcccuggccc

SEQ ID NO: 667666 - RNA, 20 nt, Human
accucgcggcccuggcccug

SEQ ID NO: 667667 - RNA, 22 nt, Human
accucgcggcccuggcccugac

SEQ ID NO: 667668 - RNA, 20 nt, Human
agcaagaagggagggucugg

SEQ ID NO: 667669 - RNA, 23 nt, Human
agcugugggaccagaggacuguu

SEQ ID NO: 667670 - RNA, 23 nt, Human
agugccaguguggggaggugggu

SEQ ID NO: 667671 - RNA, 21 nt, Human
caaguauaauaaacucagcug

SEQ ID NO: 667672 - RNA, 26 nt, Human
ccaacuaccucgcggcccuggcccug

SEQ ID NO: 667673 - RNA, 18 nt, Human
ccccuuccaggaggaccc

SEQ ID NO: 667674 - RNA, 23 nt, Human
cgcggcccuggcccugacguugc

SEQ ID NO: 667675 - RNA, 22 nt, Human
cugugggaccagaggacuguug

SEQ ID NO: 667676 - RNA, 22 nt, Human
uaaaagaaaacaaguauaauaa

SEQ ID NO: 667677 - RNA, 26 nt, Human
uccaggaggaccccgaggccucugcc

SEQ ID NO: 667678 - RNA, 22 nt, Human
uccccuccccagcaagaaggga

SEQ ID NO: 667679 - RNA, 27 nt, Human
ugccaacuaccucgcggcccuggcccu

SEQ ID NO: 667680 - RNA, 18 nt, Human
uggaaggaggcagcuggc

SEQ ID NO: 667681 - RNA, 23 nt, Human
ugggaccagaggacuguugcuaa

SEQ ID NO: 667682 - RNA, 24 nt, Human
uggguagaacucguccccucccca

SEQ ID NO: 667683 - RNA, 25 nt, Human
uggguagaacucguccccuccccag

SEQ ID NO: 667684 - RNA, 24 nt, Human
aagagaaggauguggccacagaca

SEQ ID NO: 667685 - RNA, 21 nt, Human
acacagaucaaacauagacca

SEQ ID NO: 667686 - RNA, 23 nt, Human
acacuguacuaugcaacugggag

SEQ ID NO: 667687 - RNA, 23 nt, Human
acagacaauaucauaauaguagc

SEQ ID NO: 667688 - RNA, 21 nt, Human
agaacugcucugacuccgccc

SEQ ID NO: 667689 - RNA, 22 nt, Human
agccauuuguucagcaaguuuu

SEQ ID NO: 667690 - RNA, 22 nt, Human
aggaagucagggagguuggggu

SEQ ID NO: 667691 - RNA, 22 nt, Human
aggcuuccaggaagaggugauc

SEQ ID NO: 667692 - RNA, 22 nt, Human
agucagggagguuggggucugg

SEQ ID NO: 667693 - RNA, 22 nt, Human
aguggaccuccccacacaguuc

SEQ ID NO: 667694 - RNA, 18 nt, Human
aguguccgaguuguaggg

SEQ ID NO: 667695 - RNA, 23 nt, Human
aguuacugaaggaagucaggggg

SEQ ID NO: 667696 - RNA, 22 nt, Human
auucucauuuuaaagaugaaga

SEQ ID NO: 667697 - RNA, 23 nt, Human
caaacuaaucaagaacaaugcua

SEQ ID NO: 667698 - RNA, 24 nt, Human
caaauacuuucacaauuagcuaca

SEQ ID NO: 667699 - RNA, 18 nt, Human
cacucauccagccauuug

SEQ ID NO: 667700 - RNA, 30 nt, Human
cacugagcuccuugcuguuccuaagaccuu

SEQ ID NO: 667701 - RNA, 23 nt, Human
cacuguacuaugcaacugggaga

SEQ ID NO: 667702 - RNA, 21 nt, Human
cagcaacaacgauuucucaag

SEQ ID NO: 667703 - RNA, 19 nt, Human
cagcuuaggacagaucccc

SEQ ID NO: 667704 - RNA, 19 nt, Human
ccacacaguucuggucccc

SEQ ID NO: 667705 - RNA, 23 nt, Human
ccccuggcugcuguacucagcuu

SEQ ID NO: 667706 - RNA, 22 nt, Human
ccucaagaacugcucugacucc

SEQ ID NO: 667707 - RNA, 19 nt, Human
cucaggucucccccgccuc

SEQ ID NO: 667708 - RNA, 25 nt, Human
cuccagccacacugagcuccuugcu

SEQ ID NO: 667709 - RNA, 20 nt, Human
cucuuccucuugcccugagg

SEQ ID NO: 667710 - RNA, 19 nt, Human
cugacauuuuagggagaag

SEQ ID NO: 667711 - RNA, 19 nt, Human
cugcaugcaacuuuguucu

SEQ ID NO: 667712 - RNA, 20 nt, Human
cugcuguacucagcuuagga

SEQ ID NO: 667713 - RNA, 19 nt, Human
cuggcuugcuccauuccug

SEQ ID NO: 667714 - RNA, 19 nt, Human
gaagaaacugaagcacaga

SEQ ID NO: 667715 - RNA, 22 nt, Human
gaaggauguggccacagacaaa

SEQ ID NO: 667716 - RNA, 19 nt, Human
gacagauccccacuaggcc

SEQ ID NO: 667717 - RNA, 18 nt, Human
gagaacucccugucuagu

SEQ ID NO: 667718 - RNA, 19 nt, Human
gcugcuguacucagcuuag

SEQ ID NO: 667719 - RNA, 18 nt, Human
gcuugcuccauuccuguu

SEQ ID NO: 667720 - RNA, 19 nt, Human
gguccccuggcugcuguac

SEQ ID NO: 667721 - RNA, 22 nt, Human
gucagacacuguacuaugcaac

SEQ ID NO: 667722 - RNA, 21 nt, Human
guucugcugcuucugagcugu

SEQ ID NO: 667723 - RNA, 19 nt, Human
uaaacaaauacuuucacaa

SEQ ID NO: 667724 - RNA, 23 nt, Human
uccagcagaacagagugcuguaa

SEQ ID NO: 667725 - RNA, 22 nt, Human
ucucccccgccuccuugaaccu

SEQ ID NO: 667726 - RNA, 22 nt, Human
ugaagaaacugaagcacagaag

SEQ ID NO: 667727 - RNA, 21 nt, Human
ugaagggugaacagugcaagu

SEQ ID NO: 667728 - RNA, 22 nt, Human
ugagcucaggucucccccgccu

SEQ ID NO: 667729 - RNA, 23 nt, Human
ugcacaaccuaacauuucagcac

SEQ ID NO: 667730 - RNA, 18 nt, Human
ugccaaacuaaucaagaa

SEQ ID NO: 667731 - RNA, 22 nt, Human
ugccaaacuaaucaagaacaau

SEQ ID NO: 667732 - RNA, 20 nt, Human
ugcccaaaccagcuaguaag

SEQ ID NO: 667733 - RNA, 21 nt, Human
ugcugugacuucugucucagc

SEQ ID NO: 667734 - RNA, 21 nt, Human
uggaaggaacuaggugcagca

SEQ ID NO: 667735 - RNA, 23 nt, Human
uggaccugggucccaaugucagu

SEQ ID NO: 667736 - RNA, 21 nt, Human
uggcaagagcaauggcaggga

SEQ ID NO: 667737 - RNA, 19 nt, Human
uggggacacagaucaaaca

SEQ ID NO: 667738 - RNA, 21 nt, Human
uguacuggcuugcuccauucc

SEQ ID NO: 667739 - RNA, 26 nt, Human
uguuucacucauccagccauuuguuc

SEQ ID NO: 667740 - RNA, 28 nt, Human
uuacggcggcaguuucugaacucuuccu

SEQ ID NO: 667741 - RNA, 22 nt, Human
uuagcuacaacuacaauaagug

SEQ ID NO: 667742 - RNA, 20 nt, Human
uucagcaaguuuuguguuug

SEQ ID NO: 667743 - RNA, 22 nt, Human
uuccaggcugagggcauggcau

SEQ ID NO: 667744 - RNA, 21 nt, Human
uuucucaguaaggaaucccga

SEQ ID NO: 667745 - RNA, 21 nt, Human
aagagauucucugaggccuuc

SEQ ID NO: 667746 - RNA, 18 nt, Human
acagcuggggacucgggg

SEQ ID NO: 667747 - RNA, 21 nt, Human
acugugcuccagccaugccag

SEQ ID NO: 667748 - RNA, 20 nt, Human
agaagcacaaacagcuggcg

SEQ ID NO: 667749 - RNA, 27 nt, Human
agacaccagagguauguagucgaagcu

SEQ ID NO: 667750 - RNA, 23 nt, Human
agcacaaacagcuggcgggcagc

SEQ ID NO: 667751 - RNA, 19 nt, Human
agccaccaacucccacuca

SEQ ID NO: 667752 - RNA, 18 nt, Human
aggaggccgaacugugcu

SEQ ID NO: 667753 - RNA, 19 nt, Human
aggcuccggaggccagcuu

SEQ ID NO: 667754 - RNA, 19 nt, Human
cagaagcaccgugcuucuc

SEQ ID NO: 667755 - RNA, 19 nt, Human
cagcggccuugagugugcc

SEQ ID NO: 667756 - RNA, 21 nt, Human
caggcccagcuugcccuuggc

SEQ ID NO: 667757 - RNA, 19 nt, Human
cagugccgcagaagcacaa

SEQ ID NO: 667758 - RNA, 18 nt, Human
caugucagcaauuuccug

SEQ ID NO: 667759 - RNA, 18 nt, Human
ccacucagugaaguagga

SEQ ID NO: 667760 - RNA, 21 nt, Human
ccacuugagcuucuccauggg

SEQ ID NO: 667761 - RNA, 21 nt, Human
cccacagcuucccagugugcu

SEQ ID NO: 667762 - RNA, 20 nt, Human
cccucggcuccaggcccagc

SEQ ID NO: 667763 - RNA, 23 nt, Human
cggcuccaggcccagcuugcccu

SEQ ID NO: 667764 - RNA, 23 nt, Human
cguugagcaggaaggcuccggag

SEQ ID NO: 667765 - RNA, 26 nt, Human
cuucccagugugcuccaccacugccc

SEQ ID NO: 667766 - RNA, 19 nt, Human
cuugagcuucuccaugggg

SEQ ID NO: 667767 - RNA, 22 nt, Human
cuuggcagccaccaacucccac

SEQ ID NO: 667768 - RNA, 25 nt, Human
gaagcaccgugcuucucgcggccga

SEQ ID NO: 667769 - RNA, 18 nt, Human
gagacaccagagguaugu

SEQ ID NO: 667770 - RNA, 23 nt, Human
gagauucucugaggccuucaugg

SEQ ID NO: 667771 - RNA, 22 nt, Human
gccagccccaccaccguggccc

SEQ ID NO: 667772 - RNA, 18 nt, Human
gcuccaccacugcccucg

SEQ ID NO: 667773 - RNA, 20 nt, Human
gcuccaggcccagcuugccc

SEQ ID NO: 667774 - RNA, 19 nt, Human
ggaggccgaacugugcucc

SEQ ID NO: 667775 - RNA, 27 nt, Human
gggcagcggccuugagugugcccugcg

SEQ ID NO: 667776 - RNA, 19 nt, Human
guaccggcgccucuuguca

SEQ ID NO: 667777 - RNA, 20 nt, Human
gugcguggccucacagaagg

SEQ ID NO: 667778 - RNA, 19 nt, Human
guggcccacagcuucccag

SEQ ID NO: 667779 - RNA, 19 nt, Human
uagccaggcugcgcugggg

SEQ ID NO: 667780 - RNA, 21 nt, Human
uagccaggcugcgcuggggac

SEQ ID NO: 667781 - RNA, 22 nt, Human
ucagcaauuuccugaagacugg

SEQ ID NO: 667782 - RNA, 19 nt, Human
uccaaagagauucucugag

SEQ ID NO: 667783 - RNA, 18 nt, Human
ucgauggcaggugaaggg

SEQ ID NO: 667784 - RNA, 24 nt, Human
ugagcaggaaggcuccggaggcca

SEQ ID NO: 667785 - RNA, 24 nt, Human
ugcccucggcuccaggcccagcuu

SEQ ID NO: 667786 - RNA, 19 nt, Human
ugccgcagaagcacaaaca

SEQ ID NO: 667787 - RNA, 24 nt, Human
ugccgcagaagcacaaacagcugg

SEQ ID NO: 667788 - RNA, 23 nt, Human
ugcuccagccaugccagccccac

SEQ ID NO: 667789 - RNA, 20 nt, Human
uggcgggcagcggccuugag

SEQ ID NO: 667790 - RNA, 23 nt, Human
ugggauuggagaugugcaaagaa

SEQ ID NO: 667791 - RNA, 23 nt, Human
uguagccaggcugcgcuggggac

SEQ ID NO: 667792 - RNA, 23 nt, Human
uguugagauuuagccaggaucca

SEQ ID NO: 667793 - RNA, 22 nt, Human
aaaaaacuaaaagacaccagcc

SEQ ID NO: 667794 - RNA, 24 nt, Human
aaagacaccagccaaagaaucaca

SEQ ID NO: 667795 - RNA, 25 nt, Human
aaagacaccagccaaagaaucacaa

SEQ ID NO: 667796 - RNA, 22 nt, Human
aagaaucacaagagaaacuggc

SEQ ID NO: 667797 - RNA, 21 nt, Human
agaaacagcuggacccauggc

SEQ ID NO: 667798 - RNA, 24 nt, Human
caagagaaacuggcugauagaauu

SEQ ID NO: 667799 - RNA, 23 nt, Human
caucagcagagcagguuuuccaa

SEQ ID NO: 667800 - RNA, 18 nt, Human
gcuggacccauggccagg

SEQ ID NO: 667801 - RNA, 23 nt, Human
guagaacauucuuccguggguaa

SEQ ID NO: 667802 - RNA, 21 nt, Human
uaaaaaacuaaaagacaccaa

SEQ ID NO: 667803 - RNA, 18 nt, Human
cuggugaggcaggucucu

SEQ ID NO: 667804 - RNA, 21 nt, Human
ugcagcuuccagcucuggguc

SEQ ID NO: 667805 - RNA, 23 nt, Human
ugucuuucagcacaacggcagca

SEQ ID NO: 667806 - RNA, 22 nt, Human
uugcagcuuccagcucuggguc

SEQ ID NO: 667807 - RNA, 23 nt, Human
acccccaaacccccaggccacac

SEQ ID NO: 667808 - RNA, 19 nt, Human
accgcccugcccaggcccc

SEQ ID NO: 667809 - RNA, 18 nt, Human
agacaccgcccugcccag

SEQ ID NO: 667810 - RNA, 23 nt, Human
agacagaggcagcagggccaagg

SEQ ID NO: 667811 - RNA, 22 nt, Human
aggagcaguucagguugggagg

SEQ ID NO: 667812 - RNA, 21 nt, Human
aggcacgcaccgcaccgcaga

SEQ ID NO: 667813 - RNA, 21 nt, Human
aggcagcagggccaagggcga

SEQ ID NO: 667814 - RNA, 24 nt, Human
aucuuucuguaagaauaauuugug

SEQ ID NO: 667815 - RNA, 23 nt, Human
caccgcaccgcagacggggaaug

SEQ ID NO: 667816 - RNA, 20 nt, Human
cagcccagcuagcgcagccc

SEQ ID NO: 667817 - RNA, 20 nt, Human
cagcggggugcagcccccuu

SEQ ID NO: 667818 - RNA, 18 nt, Human
cagggccaagggcgagcg

SEQ ID NO: 667819 - RNA, 22 nt, Human
caugggccagacuccaaagccc

SEQ ID NO: 667820 - RNA, 22 nt, Human
ccagcccagcuagcgcagcccc

SEQ ID NO: 667821 - RNA, 22 nt, Human
ccagcggggugcagcccccuuu

SEQ ID NO: 667822 - RNA, 22 nt, Human
ccaggccccuguaccacuggcu

SEQ ID NO: 667823 - RNA, 24 nt, Human
cccaggccacacugucagucugcc

SEQ ID NO: 667824 - RNA, 24 nt, Human
ccccaggccacacugucagucugc

SEQ ID NO: 667825 - RNA, 19 nt, Human
cccccaaacccccaggcca

SEQ ID NO: 667826 - RNA, 18 nt, Human
cccccaggccacacuguc

SEQ ID NO: 667827 - RNA, 23 nt, Human
cccccaggccacacugucagucu

SEQ ID NO: 667828 - RNA, 24 nt, Human
cccccaggccacacugucagucug

SEQ ID NO: 667829 - RNA, 23 nt, Human
cccccagugaugggcagggguug

SEQ ID NO: 667830 - RNA, 18 nt, Human
cccccuuuccugcugucc

SEQ ID NO: 667831 - RNA, 21 nt, Human
ccccugcuucccuggcacccc

SEQ ID NO: 667832 - RNA, 26 nt, Human
ccccuguaccacuggcucugccgccc

SEQ ID NO: 667833 - RNA, 21 nt, Human
cccuguaccacuggcucugcc

SEQ ID NO: 667834 - RNA, 18 nt, Human
ccgcccaggccucccgcc

SEQ ID NO: 667835 - RNA, 20 nt, Human
ccgcccaggccucccgccug

SEQ ID NO: 667836 - RNA, 18 nt, Human
ccgcccugcccaggcccc

SEQ ID NO: 667837 - RNA, 19 nt, Human
ccuccccagaaacccuccu

SEQ ID NO: 667838 - RNA, 23 nt, Human
ccuggcacccccaaacccccagg

SEQ ID NO: 667839 - RNA, 24 nt, Human
cggggugcagcccccuuuccugcu

SEQ ID NO: 667840 - RNA, 22 nt, Human
cuccuggcuugggaugaggggc

SEQ ID NO: 667841 - RNA, 21 nt, Human
cucugccgcccaggccucccg

SEQ ID NO: 667842 - RNA, 20 nt, Human
gaggggccccaggccccacc

SEQ ID NO: 667843 - RNA, 23 nt, Human
gcaccccuccccagaaacccucc

SEQ ID NO: 667844 - RNA, 21 nt, Human
gccacacugucagucugccag

SEQ ID NO: 667845 - RNA, 19 nt, Human
gcccaggccccuguaccac

SEQ ID NO: 667846 - RNA, 19 nt, Human
gcccccuuuccugcugucc

SEQ ID NO: 667847 - RNA, 19 nt, Human
gggaaugagaauuucugga

SEQ ID NO: 667848 - RNA, 24 nt, Human
ggggugcagcccccuuuccugcug

SEQ ID NO: 667849 - RNA, 19 nt, Human
uaggagaggugugcaggca

SEQ ID NO: 667850 - RNA, 22 nt, Human
uccccagaaacccuccuggcuu

SEQ ID NO: 667851 - RNA, 22 nt, Human
ucccuggcacccccaaaccccc

SEQ ID NO: 667852 - RNA, 27 nt, Human
ucugccaggggcugcaccccuccccaa

SEQ ID NO: 667853 - RNA, 24 nt, Human
ucuggauaacuaucuuucuguaag

SEQ ID NO: 667854 - RNA, 22 nt, Human
ugcugccagacaccgcccugcc

SEQ ID NO: 667855 - RNA, 24 nt, Human
uggauaacuaucuuucuguaagaa

SEQ ID NO: 667856 - RNA, 20 nt, Human
uggcacccccaaacccccag

SEQ ID NO: 667857 - RNA, 21 nt, Human
ugggccagacuccaaagcccu

SEQ ID NO: 667858 - RNA, 19 nt, Human
ugggggaaagagaaccgca

SEQ ID NO: 667859 - RNA, 26 nt, Human
uguaagaauaauuuguggguucagga

SEQ ID NO: 667860 - RNA, 23 nt, Human
ugucagucugccaggggcugcac

SEQ ID NO: 667861 - RNA, 22 nt, Human
uucuguaagaauaauuuguggg

SEQ ID NO: 667862 - RNA, 21 nt, Human
accaguacuguccaauagaac

SEQ ID NO: 667863 - RNA, 20 nt, Human
agaaugaguuguggaaucug

SEQ ID NO: 667864 - RNA, 18 nt, Human
agacagagucuuguuaug

SEQ ID NO: 667865 - RNA, 26 nt, Human
auguugcccuggaugguuggucaacc

SEQ ID NO: 667866 - RNA, 18 nt, Human
cagagucuuguuauguug

SEQ ID NO: 667867 - RNA, 18 nt, Human
ccaacaucugaauaaacc

SEQ ID NO: 667868 - RNA, 18 nt, Human
ccuggccuugagugaucc

SEQ ID NO: 667869 - RNA, 21 nt, Human
cuuuggcuuuggguuuccauu

SEQ ID NO: 667870 - RNA, 19 nt, Human
gcaauuggcuacaucauac

SEQ ID NO: 667871 - RNA, 18 nt, Human
ggcgugacucuccuuugc

SEQ ID NO: 667872 - RNA, 22 nt, Human
uagagacagagucuuguuaugu

SEQ ID NO: 667873 - RNA, 24 nt, Human
uauagagacagagucuuguuaugu

SEQ ID NO: 667874 - RNA, 26 nt, Human
uauguuacuguugcuaggucauugug

SEQ ID NO: 667875 - RNA, 21 nt, Human
ucauacagccuagguguguug

SEQ ID NO: 667876 - RNA, 19 nt, Human
ucucuauaccaguacuguc

SEQ ID NO: 667877 - RNA, 23 nt, Human
ugcccuggauggucuugcacucc

SEQ ID NO: 667878 - RNA, 24 nt, Human
uguuauguugcccuggauggucuu

SEQ ID NO: 667879 - RNA, 19 nt, Human
uguugcccuggauggucuu

SEQ ID NO: 667880 - RNA, 19 nt, Human
uguugggauuggauguaga

SEQ ID NO: 667881 - RNA, 23 nt, Human
uuauagagacagagucuuguuau

SEQ ID NO: 667882 - RNA, 24 nt, Human
uuauagagacagagucuuguuaug

SEQ ID NO: 667883 - RNA, 22 nt, Human
uucugggugaaauaaagcccuc

SEQ ID NO: 667884 - RNA, 23 nt, Human
uuucugggugaaauaaagcccuc

SEQ ID NO: 667885 - RNA, 23 nt, Human
uuuggcuuuggguuuccauuuug

SEQ ID NO: 667886 - RNA, 19 nt, Human
aacacggagaaaccccguc

SEQ ID NO: 667887 - RNA, 20 nt, Human
aacacggagaaaccccgucu

SEQ ID NO: 667888 - RNA, 21 nt, Human
aacacggagaaaccccgucuc

SEQ ID NO: 667889 - RNA, 20 nt, Human
aacuuagcuccauucuguga

SEQ ID NO: 667890 - RNA, 24 nt, Human
aagucagcuucuggcuugagcugg

SEQ ID NO: 667891 - RNA, 24 nt, Human
aaucacuugaacccgggaggcaga

SEQ ID NO: 667892 - RNA, 20 nt, Human
acaagagcgaaacucugucu

SEQ ID NO: 667893 - RNA, 21 nt, Human
acaagagcgaaacucugucuc

SEQ ID NO: 667894 - RNA, 23 nt, Human
acaccaggcccauagugaccgac

SEQ ID NO: 667895 - RNA, 27 nt, Human
acaggaagaaacggugguggcagaggg

SEQ ID NO: 667896 - RNA, 25 nt, Human
acccccaacaaaaagggcuaaaaac

SEQ ID NO: 667897 - RNA, 24 nt, Human
accccgucucuacuaaaaauacaa

SEQ ID NO: 667898 - RNA, 21 nt, Human
acccugggguugaacagggcc

SEQ ID NO: 667899 - RNA, 24 nt, Human
acuuugggaggcugaggugggcag

SEQ ID NO: 667900 - RNA, 19 nt, Human
agacaggagcuggcugggg

SEQ ID NO: 667901 - RNA, 25 nt, Human
agaccagagcaagggaaacaaggaa

SEQ ID NO: 667902 - RNA, 19 nt, Human
agagagggguccugccccc

SEQ ID NO: 667903 - RNA, 22 nt, Human
agagcgaaacucugucucaaaa

SEQ ID NO: 667904 - RNA, 22 nt, Human
agagguugcagugagcugagau

SEQ ID NO: 667905 - RNA, 24 nt, Human
agagguugcagugagcugagaucg

SEQ ID NO: 667906 - RNA, 22 nt, Human
agauugccugaggucagggguu

SEQ ID NO: 667907 - RNA, 24 nt, Human
agcacuuugggaggcugagguggg

SEQ ID NO: 667908 - RNA, 18 nt, Human
agccugaccaacacggag

SEQ ID NO: 667909 - RNA, 22 nt, Human
agcugggcgugguggugcaugc

SEQ ID NO: 667910 - RNA, 23 nt, Human
agcugggcgugguggugcaugcc

SEQ ID NO: 667911 - RNA, 24 nt, Human
agcugguguuucuaggcagggccu

SEQ ID NO: 667912 - RNA, 23 nt, Human
aggaagaaacggugguggcagag

SEQ ID NO: 667913 - RNA, 19 nt, Human
aggagcaugccucugcccc

SEQ ID NO: 667914 - RNA, 20 nt, Human
aggcagagguugcagugagc

SEQ ID NO: 667915 - RNA, 24 nt, Human
aggcagagguugcagugagcugag

SEQ ID NO: 667916 - RNA, 18 nt, Human
aggcaggagaaucacuug

SEQ ID NO: 667917 - RNA, 24 nt, Human
aggcaggagaaucacuugaacccg

SEQ ID NO: 667918 - RNA, 21 nt, Human
aggcagggccugucccaugca

SEQ ID NO: 667919 - RNA, 24 nt, Human
aggcugaggcaggagaaucacuug

SEQ ID NO: 667920 - RNA, 20 nt, Human
aggcugaggugggcagauug

SEQ ID NO: 667921 - RNA, 21 nt, Human
aggcugaggugggcagauugc

SEQ ID NO: 667922 - RNA, 19 nt, Human
agggaaacaaggaacucga

SEQ ID NO: 667923 - RNA, 24 nt, Human
agggcuaaaaacuaguggugagcc

SEQ ID NO: 667924 - RNA, 20 nt, Human
agggguuugagaccagccug

SEQ ID NO: 667925 - RNA, 22 nt, Human
aggugggcagauugccugaggu

SEQ ID NO: 667926 - RNA, 23 nt, Human
aguauauauuuacaugcacauuu

SEQ ID NO: 667927 - RNA, 24 nt, Human
aguggcucacgccuguaaucccag

SEQ ID NO: 667928 - RNA, 24 nt, Human
aucauuguacuccagccuggguga

SEQ ID NO: 667929 - RNA, 24 nt, Human
aucgcaucauuguacuccagccug

SEQ ID NO: 667930 - RNA, 20 nt, Human
aucugggugggacaguguug

SEQ ID NO: 667931 - RNA, 24 nt, Human
auugccugaggucagggguuugag

SEQ ID NO: 667932 - RNA, 21 nt, Human
auuguacuccagccuggguga

SEQ ID NO: 667933 - RNA, 25 nt, Human
auuguacuccagccugggugacaag

SEQ ID NO: 667934 - RNA, 25 nt, Human
caaaaagggcuaaaaacuaguggug

SEQ ID NO: 667935 - RNA, 21 nt, Human
caaaauaagcugggcguggug

SEQ ID NO: 667936 - RNA, 19 nt, Human
caacaaaaagggcuaaaaa

SEQ ID NO: 667937 - RNA, 24 nt, Human
caacacggagaaaccccgucucua

SEQ ID NO: 667938 - RNA, 22 nt, Human
caacauccacgaaggaggcaac

SEQ ID NO: 667939 - RNA, 20 nt, Human
cacacccugugcccucaccc

SEQ ID NO: 667940 - RNA, 18 nt, Human
caccccacccccaacaaa

SEQ ID NO: 667941 - RNA, 24 nt, Human
cacccccaacaaaaagggcuaaaa

SEQ ID NO: 667942 - RNA, 24 nt, Human
cacgccuguaaucccagcacuuug

SEQ ID NO: 667943 - RNA, 24 nt, Human
cagauugccugaggucagggguuu

SEQ ID NO: 667944 - RNA, 21 nt, Human
cagcacuuugggaggcugagg

SEQ ID NO: 667945 - RNA, 24 nt, Human
cagcacuuugggaggcugaggugg

SEQ ID NO: 667946 - RNA, 21 nt, Human
cagcauggagggucaggacag

SEQ ID NO: 667947 - RNA, 24 nt, Human
cagcuacucgggaggcugaggcag

SEQ ID NO: 667948 - RNA, 18 nt, Human
cagcuucuggcuugagcu

SEQ ID NO: 667949 - RNA, 21 nt, Human
caggagaccaagaucucagag

SEQ ID NO: 667950 - RNA, 23 nt, Human
caguguugagaacuggggacccu

SEQ ID NO: 667951 - RNA, 19 nt, Human
cauuguacuccagccuggg

SEQ ID NO: 667952 - RNA, 19 nt, Human
cauuguacuccagccuggg

SEQ ID NO: 667953 - RNA, 19 nt, Human
cauuguacuccagccuggg

SEQ ID NO: 667954 - RNA, 20 nt, Human
cauuguacuccagccugggu

SEQ ID NO: 667955 - RNA, 21 nt, Human
cauuguacuccagccugggug

SEQ ID NO: 667956 - RNA, 22 nt, Human
cauuguacuccagccuggguga

SEQ ID NO: 667957 - RNA, 23 nt, Human
cauuguacuccagccugggugac

SEQ ID NO: 667958 - RNA, 24 nt, Human
cauuguacuccagccugggugaca

SEQ ID NO: 667959 - RNA, 25 nt, Human
cauuguacuccagccugggugacaa

SEQ ID NO: 667960 - RNA, 21 nt, Human
ccaaccaaaaaugucuccaga

SEQ ID NO: 667961 - RNA, 22 nt, Human
ccacacccugugcccucacccc

SEQ ID NO: 667962 - RNA, 18 nt, Human
ccauacagacaggagcug

SEQ ID NO: 667963 - RNA, 18 nt, Human
cccauggcggccaaaguc

SEQ ID NO: 667964 - RNA, 23 nt, Human
ccccaacaaaaagggcuaaaaac

SEQ ID NO: 667965 - RNA, 21 nt, Human
ccccaccccacccccaacaaa

SEQ ID NO: 667966 - RNA, 20 nt, Human
ccccgugguucugccagcgc

SEQ ID NO: 667967 - RNA, 21 nt, Human
ccccgugguucugccagcgcc

SEQ ID NO: 667968 - RNA, 21 nt, Human
cccugugcccucaccccauuc

SEQ ID NO: 667969 - RNA, 18 nt, Human
ccgugguucugccagcgc

SEQ ID NO: 667970 - RNA, 23 nt, Human
ccguugggaaaaccagcacccca

SEQ ID NO: 667971 - RNA, 25 nt, Human
ccucagcaggaccaggcuggaaccc

SEQ ID NO: 667972 - RNA, 21 nt, Human
ccucuggaaggcugauagcuc

SEQ ID NO: 667973 - RNA, 18 nt, Human
ccucuggucgaagccugg

SEQ ID NO: 667974 - RNA, 19 nt, Human
ccucuggucgaagccuggg

SEQ ID NO: 667975 - RNA, 23 nt, Human
ccugaccaacacggagaaacccc

SEQ ID NO: 667976 - RNA, 24 nt, Human
ccugaccaacacggagaaaccccg

SEQ ID NO: 667977 - RNA, 22 nt, Human
ccugaggucagggguuugagac

SEQ ID NO: 667978 - RNA, 19 nt, Human
ccuguaaucccagcuacuc

SEQ ID NO: 667979 - RNA, 21 nt, Human
ccuguaaucccagcuacucgg

SEQ ID NO: 667980 - RNA, 22 nt, Human
ccuguaaucccagcuacucggg

SEQ ID NO: 667981 - RNA, 21 nt, Human
cgcaucauuguacuccagccu

SEQ ID NO: 667982 - RNA, 23 nt, Human
cgccuguaaucccagcacuuugg

SEQ ID NO: 667983 - RNA, 24 nt, Human
cgccuguaaucccagcacuuuggg

SEQ ID NO: 667984 - RNA, 23 nt, Human
cgcuucagucagaggauggggcu

SEQ ID NO: 667985 - RNA, 24 nt, Human
cgggaggcagagguugcagugagc

SEQ ID NO: 667986 - RNA, 24 nt, Human
cgggaggcugaggcaggagaauca

SEQ ID NO: 667987 - RNA, 22 nt, Human
cucacgccuguaaucccagcac

SEQ ID NO: 667988 - RNA, 24 nt, Human
cucacgccuguaaucccagcacuu

SEQ ID NO: 667989 - RNA, 24 nt, Human
cucagggaguacccguugggaaaa

SEQ ID NO: 667990 - RNA, 25 nt, Human
cucagggaguacccguugggaaaac

SEQ ID NO: 667991 - RNA, 22 nt, Human
cucuccucugcccccaccccac

SEQ ID NO: 667992 - RNA, 21 nt, Human
cugcaggggacccuggcuucc

SEQ ID NO: 667993 - RNA, 22 nt, Human
cugcccccaccccacccccaac

SEQ ID NO: 667994 - RNA, 19 nt, Human
cugcugccaugcugagcug

SEQ ID NO: 667995 - RNA, 19 nt, Human
cugggccugagaaccccau

SEQ ID NO: 667996 - RNA, 20 nt, Human
cuucccagcuggcaggaccu

SEQ ID NO: 667997 - RNA, 22 nt, Human
gacaagagcgaaacucugucuc

SEQ ID NO: 667998 - RNA, 24 nt, Human
gacccuggcuuccacgaaguugga

SEQ ID NO: 667999 - RNA, 21 nt, Human
gagaaaccccgucucuacuaa

SEQ ID NO: 668000 - RNA, 23 nt, Human
gagaaucacuugaacccgggagg

SEQ ID NO: 668001 - RNA, 23 nt, Human
gaggugggcagauugccugaggu

SEQ ID NO: 668002 - RNA, 24 nt, Human
gauugccugaggucagggguuuga

SEQ ID NO: 668003 - RNA, 23 nt, Human
gcaggagaaucacuugaacccgg

SEQ ID NO: 668004 - RNA, 20 nt, Human
gcaucauuguacuccagccu

SEQ ID NO: 668005 - RNA, 24 nt, Human
gccugaggucagggguuugagacc

SEQ ID NO: 668006 - RNA, 18 nt, Human
gccugggccugagaaccc

SEQ ID NO: 668007 - RNA, 21 nt, Human
gcucaaggacaggaagaaaag

SEQ ID NO: 668008 - RNA, 19 nt, Human
ggagcuggcuggggagggc

SEQ ID NO: 668009 - RNA, 24 nt, Human
ggagcuggcuggggagggcaggug

SEQ ID NO: 668010 - RNA, 18 nt, Human
ggauggggcuucccccuc

SEQ ID NO: 668011 - RNA, 18 nt, Human
ggccuggggucaugaguu

SEQ ID NO: 668012 - RNA, 22 nt, Human
ggccuuggagccaucugggugg

SEQ ID NO: 668013 - RNA, 23 nt, Human
ggcuaaaaacuaguggugagccg

SEQ ID NO: 668014 - RNA, 18 nt, Human
ggcugguggcugggugac

SEQ ID NO: 668015 - RNA, 21 nt, Human
gggcaggugugucugcuuggc

SEQ ID NO: 668016 - RNA, 24 nt, Human
gggcgugguggugcaugccuguaa

SEQ ID NO: 668017 - RNA, 24 nt, Human
gggcuucccccuccuaggagcccc

SEQ ID NO: 668018 - RNA, 21 nt, Human
ggguggugggggaggggagac

SEQ ID NO: 668019 - RNA, 19 nt, Human
ggucagggguuugagacca

SEQ ID NO: 668020 - RNA, 23 nt, Human
ggugagccgggugcaguggcuca

SEQ ID NO: 668021 - RNA, 23 nt, Human
ggugcaguggcucacgccuguaa

SEQ ID NO: 668022 - RNA, 24 nt, Human
gguggugcaugccuguaaucccag

SEQ ID NO: 668023 - RNA, 18 nt, Human
ggugguggcagagggucc

SEQ ID NO: 668024 - RNA, 25 nt, Human
guacuccagccugggugacaagagc

SEQ ID NO: 668025 - RNA, 20 nt, Human
guauauauuuacaugcacau

SEQ ID NO: 668026 - RNA, 24 nt, Human
gugagccgggugcaguggcucacg

SEQ ID NO: 668027 - RNA, 21 nt, Human
guggagcaggggccugggguc

SEQ ID NO: 668028 - RNA, 19 nt, Human
guugcagugagcugagauc

SEQ ID NO: 668029 - RNA, 18 nt, Human
uaaaaauacaaaauaagc

SEQ ID NO: 668030 - RNA, 24 nt, Human
uaagcugggcgugguggugcaugc

SEQ ID NO: 668031 - RNA, 21 nt, Human
uacuccagccugggugacaag

SEQ ID NO: 668032 - RNA, 24 nt, Human
uacuccagccugggugacaagagc

SEQ ID NO: 668033 - RNA, 25 nt, Human
uacuccagccugggugacaagagcg

SEQ ID NO: 668034 - RNA, 24 nt, Human
ucagcuucuggcuugagcugggca

SEQ ID NO: 668035 - RNA, 24 nt, Human
ucauuguacuccagccugggugac

SEQ ID NO: 668036 - RNA, 23 nt, Human
uccacacccugugcccucacccc

SEQ ID NO: 668037 - RNA, 19 nt, Human
uccagccugggugacaaga

SEQ ID NO: 668038 - RNA, 20 nt, Human
uccauucugugacucagaga

SEQ ID NO: 668039 - RNA, 20 nt, Human
ucccucagcaggaccaggcu

SEQ ID NO: 668040 - RNA, 22 nt, Human
uccuuggccuuggagccaucuu

SEQ ID NO: 668041 - RNA, 23 nt, Human
ucgcaucauuguacuccagccug

SEQ ID NO: 668042 - RNA, 25 nt, Human
ucgggaggcugaggcaggagaauca

SEQ ID NO: 668043 - RNA, 25 nt, Human
ucucagagguggcgucauccugggg

SEQ ID NO: 668044 - RNA, 22 nt, Human
ucuccagaccuugccugauguc

SEQ ID NO: 668045 - RNA, 20 nt, Human
ucucuacuaaaaauacaaaa

SEQ ID NO: 668046 - RNA, 19 nt, Human
ucucuggucuccacccacu

SEQ ID NO: 668047 - RNA, 19 nt, Human
ucuuggguuguggucagag

SEQ ID NO: 668048 - RNA, 21 nt, Human
ugacaagagcgaaacucuguc

SEQ ID NO: 668049 - RNA, 18 nt, Human
ugacuggucucacggcuc

SEQ ID NO: 668050 - RNA, 24 nt, Human
ugagaaccccaucauacacgugga

SEQ ID NO: 668051 - RNA, 18 nt, Human
ugagaacuggggacccug

SEQ ID NO: 668052 - RNA, 24 nt, Human
ugagaccagccugaccaacacgga

SEQ ID NO: 668053 - RNA, 22 nt, Human
ugagcugagaucgcaucauugu

SEQ ID NO: 668054 - RNA, 24 nt, Human
ugagcugguguuucuaggcagggc

SEQ ID NO: 668055 - RNA, 20 nt, Human
ugaggcaggagaaucacuug

SEQ ID NO: 668056 - RNA, 24 nt, Human
ugaggcaggagaaucacuugaacc

SEQ ID NO: 668057 - RNA, 25 nt, Human
ugaggcaggagaaucacuugaaccc

SEQ ID NO: 668058 - RNA, 18 nt, Human
ugaggucagggguuugag

SEQ ID NO: 668059 - RNA, 24 nt, Human
ugaggugggcagauugccugaggu

SEQ ID NO: 668060 - RNA, 26 nt, Human
ugaggugggcagauugccugagguca

SEQ ID NO: 668061 - RNA, 19 nt, Human
ugcaggauguugagcggcu

SEQ ID NO: 668062 - RNA, 24 nt, Human
ugcccccaccccacccccaacaaa

SEQ ID NO: 668063 - RNA, 24 nt, Human
ugccuguaaucccagcuacucggg

SEQ ID NO: 668064 - RNA, 18 nt, Human
ugcuuggcgucccucagc

SEQ ID NO: 668065 - RNA, 20 nt, Human
uggaaggcugauagcucagg

SEQ ID NO: 668066 - RNA, 21 nt, Human
uggagcaggggccugggguca

SEQ ID NO: 668067 - RNA, 18 nt, Human
uggcaggaccugggggac

SEQ ID NO: 668068 - RNA, 23 nt, Human
uggcaggaccugggggacauccu

SEQ ID NO: 668069 - RNA, 19 nt, Human
uggccuuggagccaucugg

SEQ ID NO: 668070 - RNA, 25 nt, Human
uggcgucauccugggggauggcuca

SEQ ID NO: 668071 - RNA, 24 nt, Human
uggcucacgccuguaaucccagca

SEQ ID NO: 668072 - RNA, 18 nt, Human
uggcucaucuagggugug

SEQ ID NO: 668073 - RNA, 20 nt, Human
ugggaggcugaggugggcag

SEQ ID NO: 668074 - RNA, 22 nt, Human
ugggaggcugaggugggcagau

SEQ ID NO: 668075 - RNA, 24 nt, Human
ugggaggcugaggugggcagauug

SEQ ID NO: 668076 - RNA, 19 nt, Human
ugggggacauccuggugga

SEQ ID NO: 668077 - RNA, 23 nt, Human
uggucccggggugccgcucgcuu

SEQ ID NO: 668078 - RNA, 24 nt, Human
uggucccggggugccgcucgcuuc

SEQ ID NO: 668079 - RNA, 18 nt, Human
uggugagccgggugcagu

SEQ ID NO: 668080 - RNA, 21 nt, Human
uggugcaugccuguaauccca

SEQ ID NO: 668081 - RNA, 22 nt, Human
uggugcaugccuguaaucccag

SEQ ID NO: 668082 - RNA, 23 nt, Human
ugguggcagaggguccucugguc

SEQ ID NO: 668083 - RNA, 21 nt, Human
uggugggggaggggagacacc

SEQ ID NO: 668084 - RNA, 24 nt, Human
ugguggugcaugccuguaauccca

SEQ ID NO: 668085 - RNA, 23 nt, Human
ugguucugccagcgccucugugc

SEQ ID NO: 668086 - RNA, 23 nt, Human
uguacuccagccugggugacaag

SEQ ID NO: 668087 - RNA, 23 nt, Human
uguccccauggcggccaaaguca

SEQ ID NO: 668088 - RNA, 20 nt, Human
ugugacucagagaggggucc

SEQ ID NO: 668089 - RNA, 20 nt, Human
uguguccuuugaacccuggg

SEQ ID NO: 668090 - RNA, 20 nt, Human
uucccagcuggcaggaccug

SEQ ID NO: 668091 - RNA, 18 nt, Human
uugcagugagcugagauc

SEQ ID NO: 668092 - RNA, 19 nt, Human
uugcagugagcugagaucg

SEQ ID NO: 668093 - RNA, 20 nt, Human
uugcagugagcugagaucgc

SEQ ID NO: 668094 - RNA, 21 nt, Human
uugcagugagcugagaucgca

SEQ ID NO: 668095 - RNA, 20 nt, Human
uuggagccaucuggguggga

SEQ ID NO: 668096 - RNA, 22 nt, Human
uugggaggcugaggugggcaga

SEQ ID NO: 668097 - RNA, 25 nt, Human
uuguggucagagacggagccaggag

SEQ ID NO: 668098 - RNA, 20 nt, Human
uuuccuggccuccgcacuga

SEQ ID NO: 668099 - RNA, 21 nt, Human
uuuccuggccuccgcacugcu

SEQ ID NO: 668100 - RNA, 19 nt, Human
aacucagcucaaggagcca

SEQ ID NO: 668101 - RNA, 24 nt, Human
aaggcaucaccaggaaaggugaaa

SEQ ID NO: 668102 - RNA, 21 nt, Human
caucaccaggaaaggugaaag

SEQ ID NO: 668103 - RNA, 26 nt, Human
cucccucaugagccccacucgggcaa

SEQ ID NO: 668104 - RNA, 23 nt, Human
gagccaaaggcaucaccaggaaa

SEQ ID NO: 668105 - RNA, 25 nt, Human
aagaggcggaggggacgaagggcgg

SEQ ID NO: 668106 - RNA, 25 nt, Human
acugucuugucuucccuuccagaag

SEQ ID NO: 668107 - RNA, 21 nt, Human
agaauccguuccucaaccuuc

SEQ ID NO: 668108 - RNA, 24 nt, Human
agacauuuagagaagacacccaga

SEQ ID NO: 668109 - RNA, 21 nt, Human
agaggcaagcaggugggaggg

SEQ ID NO: 668110 - RNA, 20 nt, Human
agcuggguaagcgggggcag

SEQ ID NO: 668111 - RNA, 23 nt, Human
aggcggaggggacgaagggcggg

SEQ ID NO: 668112 - RNA, 18 nt, Human
agggcaggggagaucuga

SEQ ID NO: 668113 - RNA, 30 nt, Human
caacagacuuuguuauuggucugagaucuu

SEQ ID NO: 668114 - RNA, 21 nt, Human
cacccagaauccguuccucaa

SEQ ID NO: 668115 - RNA, 22 nt, Human
cacccagaauccguuccucaac

SEQ ID NO: 668116 - RNA, 23 nt, Human
caccuuccacaaguugauggccu

SEQ ID NO: 668117 - RNA, 20 nt, Human
cagaauccguuccucaaccu

SEQ ID NO: 668118 - RNA, 22 nt, Human
cagccgcggaucgucuaaggug

SEQ ID NO: 668119 - RNA, 23 nt, Human
cagcuccuauaauuccuucuccc

SEQ ID NO: 668120 - RNA, 25 nt, Human
caguggguuccccuccagagacacc

SEQ ID NO: 668121 - RNA, 20 nt, Human
ccauggccucauccucccug

SEQ ID NO: 668122 - RNA, 20 nt, Human
cccacacagggacaggaggu

SEQ ID NO: 668123 - RNA, 27 nt, Human
cccuccagagacaccuuccugagggcu

SEQ ID NO: 668124 - RNA, 24 nt, Human
ccuauaauuccuucuccccaucca

SEQ ID NO: 668125 - RNA, 29 nt, Human
ccuccagagacaccuuccugagggcaggg

SEQ ID NO: 668126 - RNA, 23 nt, Human
ccuguagcuggguaagcgggggc

SEQ ID NO: 668127 - RNA, 19 nt, Human
cgggugggggcggggccgg

SEQ ID NO: 668128 - RNA, 22 nt, Human
cuuccagaagauguuguuucuc

SEQ ID NO: 668129 - RNA, 20 nt, Human
cuugaugggaucccuuggca

SEQ ID NO: 668130 - RNA, 21 nt, Human
gacuugcuguccuccugcucc

SEQ ID NO: 668131 - RNA, 19 nt, Human
gagacaccuuccugagggc

SEQ ID NO: 668132 - RNA, 24 nt, Human
gaggucaccccacacagggaccag

SEQ ID NO: 668133 - RNA, 24 nt, Human
gagucuuagaggcaagcagguggg

SEQ ID NO: 668134 - RNA, 23 nt, Human
gcacugguacuccucuguagggg

SEQ ID NO: 668135 - RNA, 21 nt, Human
gccccgagucuuagaggcaag

SEQ ID NO: 668136 - RNA, 20 nt, Human
gcgggugggggcggggccgg

SEQ ID NO: 668137 - RNA, 26 nt, Human
gcuccuauaauuccuucuccccaucc

SEQ ID NO: 668138 - RNA, 19 nt, Human
gcucggcgaagucggucuc

SEQ ID NO: 668139 - RNA, 19 nt, Human
gcuggguaagcgggggcag

SEQ ID NO: 668140 - RNA, 23 nt, Human
gcuuuugggcuccuccuccccca

SEQ ID NO: 668141 - RNA, 18 nt, Human
gggaucccuuggcaacau

SEQ ID NO: 668142 - RNA, 19 nt, Human
gggcgggugggggcggggc

SEQ ID NO: 668143 - RNA, 20 nt, Human
gggugggggcggggccgguu

SEQ ID NO: 668144 - RNA, 18 nt, Human
guagauuuccuucacuga

SEQ ID NO: 668145 - RNA, 23 nt, Human
gucuucccuuccagaagauguug

SEQ ID NO: 668146 - RNA, 24 nt, Human
uagagaagacacccagaauccguu

SEQ ID NO: 668147 - RNA, 19 nt, Human
ucccccacgggaggcagaa

SEQ ID NO: 668148 - RNA, 19 nt, Human
ucccuuggcaacaucagcu

SEQ ID NO: 668149 - RNA, 23 nt, Human
ucccuuggcaacaucagcuccug

SEQ ID NO: 668150 - RNA, 24 nt, Human
ucccuuggcaacaucagcuccugg

SEQ ID NO: 668151 - RNA, 18 nt, Human
uccuccugcuccagcucc

SEQ ID NO: 668152 - RNA, 21 nt, Human
uccugcuccagcuccaccugg

SEQ ID NO: 668153 - RNA, 26 nt, Human
ugagggcaggggagaucuccccgagg

SEQ ID NO: 668154 - RNA, 24 nt, Human
uggaugaacagagaggcaggagcu

SEQ ID NO: 668155 - RNA, 22 nt, Human
uggauggugggccggaagaaca

SEQ ID NO: 668156 - RNA, 18 nt, Human
ugggagggggcuagggga

SEQ ID NO: 668157 - RNA, 25 nt, Human
uguagccccgagucuuagaggcaag

SEQ ID NO: 668158 - RNA, 24 nt, Human
uuggccuugaugggaucccuuggc

SEQ ID NO: 668159 - RNA, 25 nt, Human
uuuggccuugaugggaucccuuggc

SEQ ID NO: 668160 - RNA, 26 nt, Human
aaaaagaagaagaaaguggucaaaga

SEQ ID NO: 668161 - RNA, 26 nt, Human
aaaagaagaagaaaguggucaaagaa

SEQ ID NO: 668162 - RNA, 22 nt, Human
aaaaucuccccagaccccagac

SEQ ID NO: 668163 - RNA, 21 nt, Human
aaagugagcuucucaaaacca

SEQ ID NO: 668164 - RNA, 22 nt, Human
aaaugcaauguccauaucaaau

SEQ ID NO: 668165 - RNA, 19 nt, Human
aacacagugaaaucccauc

SEQ ID NO: 668166 - RNA, 20 nt, Human
aacacagugaaaucccaucu

SEQ ID NO: 668167 - RNA, 21 nt, Human
aacacagugaaaucccaucuc

SEQ ID NO: 668168 - RNA, 19 nt, Human
aagaaaaagaagaaagaga

SEQ ID NO: 668169 - RNA, 26 nt, Human
aagaagaaaguggucaaaggggaccc

SEQ ID NO: 668170 - RNA, 20 nt, Human
aagaagaagaaaguggucaa

SEQ ID NO: 668171 - RNA, 21 nt, Human
aagugagcuucucaaaaccag

SEQ ID NO: 668172 - RNA, 22 nt, Human
acagagugagacacugccucaa

SEQ ID NO: 668173 - RNA, 19 nt, Human
acggacagagaagucaucc

SEQ ID NO: 668174 - RNA, 24 nt, Human
acuccagccuggacaacagaguga

SEQ ID NO: 668175 - RNA, 20 nt, Human
agaaaaagaagaaagagaag

SEQ ID NO: 668176 - RNA, 21 nt, Human
agaaaaagaagaaagagaagg

SEQ ID NO: 668177 - RNA, 21 nt, Human
agaaaaagaagaaagagaagg

SEQ ID NO: 668178 - RNA, 24 nt, Human
agaaagagaagggugucagcaccc

SEQ ID NO: 668179 - RNA, 20 nt, Human
agaagaaaaagaagaagaaa

SEQ ID NO: 668180 - RNA, 24 nt, Human
agaagaaaaggaagucaucucugg

SEQ ID NO: 668181 - RNA, 24 nt, Human
agacagggugaggaggaaaccaga

SEQ ID NO: 668182 - RNA, 19 nt, Human
agagaagaaaaagaagaag

SEQ ID NO: 668183 - RNA, 25 nt, Human
agagaagccacgcgugcaacccgaa

SEQ ID NO: 668184 - RNA, 21 nt, Human
agagaagucauccagcccaag

SEQ ID NO: 668185 - RNA, 20 nt, Human
agaguuggcaagaagcuuaa

SEQ ID NO: 668186 - RNA, 24 nt, Human
agcacuuugggaggcugaggcggg

SEQ ID NO: 668187 - RNA, 23 nt, Human
aggaguucgagaccaguuuggcc

SEQ ID NO: 668188 - RNA, 20 nt, Human
aggcggguggaucccgaggu

SEQ ID NO: 668189 - RNA, 24 nt, Human
aggcggguggaucccgaggucagg

SEQ ID NO: 668190 - RNA, 18 nt, Human
aggcugaggcggguggau

SEQ ID NO: 668191 - RNA, 22 nt, Human
aggcugaggcggguggaucccg

SEQ ID NO: 668192 - RNA, 27 nt, Human
auaucgcugcacuccagccuggacaac

SEQ ID NO: 668193 - RNA, 20 nt, Human
aucuccccagaccccagaca

SEQ ID NO: 668194 - RNA, 23 nt, Human
cacgggcaggcaccugagaugcc

SEQ ID NO: 668195 - RNA, 22 nt, Human
cacuccagccuggacaacagag

SEQ ID NO: 668196 - RNA, 24 nt, Human
cacuccagccuggacaacagagug

SEQ ID NO: 668197 - RNA, 19 nt, Human
cagaagaaaaggaagucau

SEQ ID NO: 668198 - RNA, 22 nt, Human
cagaccccagacagggugagga

SEQ ID NO: 668199 - RNA, 21 nt, Human
cagagaagaaaaagaagaaga

SEQ ID NO: 668200 - RNA, 24 nt, Human
cagcacuuugggaggcugaggcgg

SEQ ID NO: 668201 - RNA, 21 nt, Human
caggccuuagcugagguggca

SEQ ID NO: 668202 - RNA, 21 nt, Human
cagucuugcugucucaggagg

SEQ ID NO: 668203 - RNA, 24 nt, Human
caguuuggccaacacagugaaauc

SEQ ID NO: 668204 - RNA, 18 nt, Human
caucaucuucauguugag

SEQ ID NO: 668205 - RNA, 26 nt, Human
caucuucauguugaguaggccaagga

SEQ ID NO: 668206 - RNA, 23 nt, Human
ccagaccccagacagggugagga

SEQ ID NO: 668207 - RNA, 24 nt, Human
ccagagaagaaaaagaagaagaaa

SEQ ID NO: 668208 - RNA, 22 nt, Human
ccaggaguucgaggcugcagug

SEQ ID NO: 668209 - RNA, 21 nt, Human
cccagagaagaaaaagaagaa

SEQ ID NO: 668210 - RNA, 22 nt, Human
cccgaggucaggaguucgagac

SEQ ID NO: 668211 - RNA, 19 nt, Human
ccggaaaguagaccugggc

SEQ ID NO: 668212 - RNA, 21 nt, Human
ccuauaaaagccacagccccc

SEQ ID NO: 668213 - RNA, 21 nt, Human
ccugggcccugggaucccaga

SEQ ID NO: 668214 - RNA, 24 nt, Human
cgagaccaguuuggccaacacagu

SEQ ID NO: 668215 - RNA, 24 nt, Human
cgcugcacuccagccuggacaaca

SEQ ID NO: 668216 - RNA, 27 nt, Human
cggcugggcgcggucgcucagggcugu

SEQ ID NO: 668217 - RNA, 24 nt, Human
cucagggcuguaaucccagcacuu

SEQ ID NO: 668218 - RNA, 19 nt, Human
cugcacuccagccuggaca

SEQ ID NO: 668219 - RNA, 23 nt, Human
cugcacuccagccuggacaacag

SEQ ID NO: 668220 - RNA, 19 nt, Human
cuguaaucccagcacuuug

SEQ ID NO: 668221 - RNA, 22 nt, Human
cuugagcccaggaguucgaggc

SEQ ID NO: 668222 - RNA, 21 nt, Human
cuuugcccauguuucuccuau

SEQ ID NO: 668223 - RNA, 26 nt, Human
gaaaaagaagaagaaaguggucaaag

SEQ ID NO: 668224 - RNA, 20 nt, Human
gaagaaaaagaagaagaaag

SEQ ID NO: 668225 - RNA, 24 nt, Human
gaagaaaaagaagaagaaaguggu

SEQ ID NO: 668226 - RNA, 21 nt, Human
gagaagccacgcgugcaaccc

SEQ ID NO: 668227 - RNA, 18 nt, Human
gagcccaggaguucgagg

SEQ ID NO: 668228 - RNA, 18 nt, Human
gaguggcagaaguggaag

SEQ ID NO: 668229 - RNA, 21 nt, Human
gaucccgaggucaggaguucg

SEQ ID NO: 668230 - RNA, 22 nt, Human
gaucccgaggucaggaguucga

SEQ ID NO: 668231 - RNA, 24 nt, Human
gaucccgaggucaggaguucgaga

SEQ ID NO: 668232 - RNA, 24 nt, Human
gcacuccagccuggacaacagagu

SEQ ID NO: 668233 - RNA, 23 nt, Human
gcccccucuaagaguguggucca

SEQ ID NO: 668234 - RNA, 24 nt, Human
gcugcacuccagccuggacaacag

SEQ ID NO: 668235 - RNA, 21 nt, Human
ggucaaagaaccagggacuca

SEQ ID NO: 668236 - RNA, 24 nt, Human
ggucgcucagggcuguaaucccag

SEQ ID NO: 668237 - RNA, 23 nt, Human
gguggaucccgaggucaggaguu

SEQ ID NO: 668238 - RNA, 21 nt, Human
gucaaagaaccagggacucaa

SEQ ID NO: 668239 - RNA, 23 nt, Human
guggaucccgaggucaggaguuc

SEQ ID NO: 668240 - RNA, 24 nt, Human
uaaaagccacagcccccucuaaga

SEQ ID NO: 668241 - RNA, 20 nt, Human
uaaguaugaaauccugugac

SEQ ID NO: 668242 - RNA, 23 nt, Human
uaauaaguaugaaauccugugac

SEQ ID NO: 668243 - RNA, 21 nt, Human
uacugcaggccuuagcugagg

SEQ ID NO: 668244 - RNA, 21 nt, Human
uagaaccugagaccacgcugg

SEQ ID NO: 668245 - RNA, 22 nt, Human
uaucgcugcacuccagccugga

SEQ ID NO: 668246 - RNA, 24 nt, Human
uaucgcugcacuccagccuggaca

SEQ ID NO: 668247 - RNA, 23 nt, Human
ucagcacccuuugcgaggggcac

SEQ ID NO: 668248 - RNA, 23 nt, Human
uccagccuggacaacagagugag

SEQ ID NO: 668249 - RNA, 24 nt, Human
uccagccuggacaacagagugaga

SEQ ID NO: 668250 - RNA, 24 nt, Human
ucccgaggucaggaguucgagacc

SEQ ID NO: 668251 - RNA, 23 nt, Human
ucccuugagcccaggaguucgag

SEQ ID NO: 668252 - RNA, 24 nt, Human
ucgcucagggcuguaaucccagca

SEQ ID NO: 668253 - RNA, 18 nt, Human
ucgcugcacuccagccug

SEQ ID NO: 668254 - RNA, 19 nt, Human
ucgcugcacuccagccugg

SEQ ID NO: 668255 - RNA, 21 nt, Human
ucgcugcacuccagccuggac

SEQ ID NO: 668256 - RNA, 25 nt, Human
ucucccaugccucuggggugaaaau

SEQ ID NO: 668257 - RNA, 26 nt, Human
ucucuugcuccuucucuucgggccgc

SEQ ID NO: 668258 - RNA, 19 nt, Human
ucuuagcuacugcaggccu

SEQ ID NO: 668259 - RNA, 23 nt, Human
ucuucucuugcuccuucucuucu

SEQ ID NO: 668260 - RNA, 18 nt, Human
ucuucuucucuugcuccu

SEQ ID NO: 668261 - RNA, 19 nt, Human
ugaaaaucuccccagaccc

SEQ ID NO: 668262 - RNA, 23 nt, Human
ugaccauaucgcugcacuccagc

SEQ ID NO: 668263 - RNA, 20 nt, Human
ugagaccacgcugcgugcca

SEQ ID NO: 668264 - RNA, 18 nt, Human
ugagaucuucuucucuug

SEQ ID NO: 668265 - RNA, 19 nt, Human
ugagaugccucuagugaag

SEQ ID NO: 668266 - RNA, 19 nt, Human
ugagaugccucuagugaag

SEQ ID NO: 668267 - RNA, 23 nt, Human
ugagaugccucuagugaagaaaa

SEQ ID NO: 668268 - RNA, 18 nt, Human
ugagcccaggaguucgag

SEQ ID NO: 668269 - RNA, 21 nt, Human
ugaggaggaaaccagaguugg

SEQ ID NO: 668270 - RNA, 24 nt, Human
ugaggcggguggaucccgagguca

SEQ ID NO: 668271 - RNA, 24 nt, Human
ugagguggcaggaucccuugagcc

SEQ ID NO: 668272 - RNA, 20 nt, Human
ugaguaggccaaggaggagg

SEQ ID NO: 668273 - RNA, 21 nt, Human
ugccucuagugaagaaaaaga

SEQ ID NO: 668274 - RNA, 21 nt, Human
uggaggcggggaaguuuggcc

SEQ ID NO: 668275 - RNA, 22 nt, Human
uggaucccgaggucaggaguuc

SEQ ID NO: 668276 - RNA, 19 nt, Human
uggcaagaagcuuaaaaaa

SEQ ID NO: 668277 - RNA, 19 nt, Human
uggcagaaguggaagaaaa

SEQ ID NO: 668278 - RNA, 20 nt, Human
uggccaacacagugaaaucc

SEQ ID NO: 668279 - RNA, 22 nt, Human
uggccaacacagugaaauccca

SEQ ID NO: 668280 - RNA, 20 nt, Human
ugggaggcugaggcgggugg

SEQ ID NO: 668281 - RNA, 23 nt, Human
ugggaggcugaggcggguggauc

SEQ ID NO: 668282 - RNA, 20 nt, Human
ugggcagaagaaaaggaagu

SEQ ID NO: 668283 - RNA, 21 nt, Human
ugggcagaagaaaaggaaguc

SEQ ID NO: 668284 - RNA, 20 nt, Human
uuaaacaaugaugauuacuu

SEQ ID NO: 668285 - RNA, 25 nt, Human
uuacuuugcccauguuucuccuaua

SEQ ID NO: 668286 - RNA, 23 nt, Human
uuggccaacacagugaaauccca

SEQ ID NO: 668287 - RNA, 22 nt, Human
aaagagcuagguuaucucaaac

SEQ ID NO: 668288 - RNA, 19 nt, Human
aaauagaaagaccaggucu

SEQ ID NO: 668289 - RNA, 23 nt, Human
aaccucaggugaucugcccgccu

SEQ ID NO: 668290 - RNA, 21 nt, Human
aagggcccguacuaauuugac

SEQ ID NO: 668291 - RNA, 18 nt, Human
aauccugugaaagaaguu

SEQ ID NO: 668292 - RNA, 18 nt, Human
acaggguuucaccauguu

SEQ ID NO: 668293 - RNA, 21 nt, Human
acaggguuucaccauguuggc

SEQ ID NO: 668294 - RNA, 24 nt, Human
acaggguuucaccauguuggccag

SEQ ID NO: 668295 - RNA, 24 nt, Human
accauguuggccaggcugaucuug

SEQ ID NO: 668296 - RNA, 21 nt, Human
acugaagcacagcaacucaua

SEQ ID NO: 668297 - RNA, 25 nt, Human
aggcuggagugcaguggcacgaucu

SEQ ID NO: 668298 - RNA, 24 nt, Human
aggugaucugcccgccuuggccuc

SEQ ID NO: 668299 - RNA, 23 nt, Human
aguagcugguauuacaggcgcgu

SEQ ID NO: 668300 - RNA, 20 nt, Human
agugcaguggcacgaucucg

SEQ ID NO: 668301 - RNA, 18 nt, Human
caacacagcucucuuccu

SEQ ID NO: 668302 - RNA, 25 nt, Human
caacacagcucucuuccuuaugcuu

SEQ ID NO: 668303 - RNA, 22 nt, Human
caagugacucuccugccucagc

SEQ ID NO: 668304 - RNA, 24 nt, Human
cacacugaagcacagcaacucaua

SEQ ID NO: 668305 - RNA, 21 nt, Human
caccauguuggccaggcugau

SEQ ID NO: 668306 - RNA, 23 nt, Human
caccauguuggccaggcugaucu

SEQ ID NO: 668307 - RNA, 24 nt, Human
caccauguuggccaggcugaucuu

SEQ ID NO: 668308 - RNA, 27 nt, Human
caccauguuggccaggcugaucuugaa

SEQ ID NO: 668309 - RNA, 22 nt, Human
caccuucagguccuuauuucaa

SEQ ID NO: 668310 - RNA, 23 nt, Human
cacugcagccuccgccucccggg

SEQ ID NO: 668311 - RNA, 19 nt, Human
cagccuccugaguagcugg

SEQ ID NO: 668312 - RNA, 24 nt, Human
caggguuucaccauguuggccagg

SEQ ID NO: 668313 - RNA, 24 nt, Human
cauguuggccaggcugaucuugaa

SEQ ID NO: 668314 - RNA, 18 nt, Human
cauucaaguaaaaaaaaa

SEQ ID NO: 668315 - RNA, 21 nt, Human
ccaaugauaggugaaguccuu

SEQ ID NO: 668316 - RNA, 23 nt, Human
cccagcuaauuuugguauuuuua

SEQ ID NO: 668317 - RNA, 20 nt, Human
cccggguucaagugacucuc

SEQ ID NO: 668318 - RNA, 23 nt, Human
cccggguucaagugacucuccug

SEQ ID NO: 668319 - RNA, 24 nt, Human
ccgccucccggguucaagugacuc

SEQ ID NO: 668320 - RNA, 22 nt, Human
ccuaaccucaggugaucugccc

SEQ ID NO: 668321 - RNA, 22 nt, Human
ccucccggguucaagugacucu

SEQ ID NO: 668322 - RNA, 18 nt, Human
ccuccugaguagcuggua

SEQ ID NO: 668323 - RNA, 23 nt, Human
ccugaguagcugguauuacaggc

SEQ ID NO: 668324 - RNA, 24 nt, Human
ccugccucagccuccugaguagcu

SEQ ID NO: 668325 - RNA, 24 nt, Human
cgcucuugucgcccaggcuggagu

SEQ ID NO: 668326 - RNA, 24 nt, Human
cucacugcagccuccgccucccgg

SEQ ID NO: 668327 - RNA, 26 nt, Human
cuccuaaccucaggugaucugcccgc

SEQ ID NO: 668328 - RNA, 24 nt, Human
cucgcucuugucgcccaggcugga

SEQ ID NO: 668329 - RNA, 26 nt, Human
cucuccugccucagccuccugaguag

SEQ ID NO: 668330 - RNA, 23 nt, Human
cugcagccuccgccucccggguu

SEQ ID NO: 668331 - RNA, 20 nt, Human
cuuuuuuuuuugagacagag

SEQ ID NO: 668332 - RNA, 21 nt, Human
gcccagcaacuuaaaaaacac

SEQ ID NO: 668333 - RNA, 23 nt, Human
gcccaggcuggagugcaguggca

SEQ ID NO: 668334 - RNA, 20 nt, Human
gccucagccuccugaguagc

SEQ ID NO: 668335 - RNA, 24 nt, Human
gcucuugucgcccaggcuggagug

SEQ ID NO: 668336 - RNA, 23 nt, Human
gcugaucuugaacuccuaaccuc

SEQ ID NO: 668337 - RNA, 19 nt, Human
gcuggagugcaguggcacg

SEQ ID NO: 668338 - RNA, 22 nt, Human
ggguuucaccauguuggccagg

SEQ ID NO: 668339 - RNA, 23 nt, Human
gugacucuccugccucagccucc

SEQ ID NO: 668340 - RNA, 28 nt, Human
uaaaaaacacacacugaagccggggccc

SEQ ID NO: 668341 - RNA, 18 nt, Human
uaaccucaggugaucugc

SEQ ID NO: 668342 - RNA, 24 nt, Human
uaaccucaggugaucugcccgccu

SEQ ID NO: 668343 - RNA, 24 nt, Human
uaauagagacaggguuucaccaug

SEQ ID NO: 668344 - RNA, 26 nt, Human
uaauagagacaggguuucaccauguu

SEQ ID NO: 668345 - RNA, 24 nt, Human
uaauuuugguauuuuuaauagaga

SEQ ID NO: 668346 - RNA, 22 nt, Human
uaccaaugugauauauagcuag

SEQ ID NO: 668347 - RNA, 21 nt, Human
uagagacaggguuucaccaug

SEQ ID NO: 668348 - RNA, 22 nt, Human
uagagacaggguuucaccaugu

SEQ ID NO: 668349 - RNA, 22 nt, Human
uaggaaagaccaaugauaggug

SEQ ID NO: 668350 - RNA, 22 nt, Human
uauagcuaggaaagaccggggc

SEQ ID NO: 668351 - RNA, 22 nt, Human
uauuuacauucaaguaaaaaaa

SEQ ID NO: 668352 - RNA, 23 nt, Human
ucacugcagccuccgccucccgg

SEQ ID NO: 668353 - RNA, 23 nt, Human
ucacugcagccuccgccucccgg

SEQ ID NO: 668354 - RNA, 24 nt, Human
ucacugcagccuccgccucccggg

SEQ ID NO: 668355 - RNA, 20 nt, Human
ucagccuccugaguagcugg

SEQ ID NO: 668356 - RNA, 21 nt, Human
ucccggguucaagugacucuc

SEQ ID NO: 668357 - RNA, 24 nt, Human
ucccggguucaagugacucuccug

SEQ ID NO: 668358 - RNA, 21 nt, Human
ucccucccaaaaugugaggau

SEQ ID NO: 668359 - RNA, 24 nt, Human
uccugaguagcugguauuacaggc

SEQ ID NO: 668360 - RNA, 19 nt, Human
uccugcuuucuacugucuu

SEQ ID NO: 668361 - RNA, 22 nt, Human
ucgcccaggcuggagugcagug

SEQ ID NO: 668362 - RNA, 24 nt, Human
ucucgcucuugucgcccaggcugg

SEQ ID NO: 668363 - RNA, 25 nt, Human
ucucgcucuugucgcccaggcugga

SEQ ID NO: 668364 - RNA, 25 nt, Human
ucuuuuuuuuuugagacagagucuc

SEQ ID NO: 668365 - RNA, 20 nt, Human
ugacaaaauagaaagaccag

SEQ ID NO: 668366 - RNA, 18 nt, Human
ugagacagagucucgcuc

SEQ ID NO: 668367 - RNA, 24 nt, Human
ugcccagcaacuuaaaaaacacac

SEQ ID NO: 668368 - RNA, 24 nt, Human
ugccucagccuccugaguagcugg

SEQ ID NO: 668369 - RNA, 23 nt, Human
uggagugcaguggcacgaucucg

SEQ ID NO: 668370 - RNA, 24 nt, Human
uggccaggcugaucuugaacuccu

SEQ ID NO: 668371 - RNA, 21 nt, Human
ugguauuacaggcgcgugcca

SEQ ID NO: 668372 - RNA, 22 nt, Human
ugguauuacaggcgcgugccac

SEQ ID NO: 668373 - RNA, 24 nt, Human
ugguauuacaggcgcgugccacca

SEQ ID NO: 668374 - RNA, 25 nt, Human
ugguauuacaggcgcgugccaccau

SEQ ID NO: 668375 - RNA, 21 nt, Human
ugucgcccaggcuggagugca

SEQ ID NO: 668376 - RNA, 26 nt, Human
ugucuugccaccuucagguccuuauu

SEQ ID NO: 668377 - RNA, 22 nt, Human
uuaaaaaacacacacugaagca

SEQ ID NO: 668378 - RNA, 25 nt, Human
uuaaaaaacacacacugaagcacag

SEQ ID NO: 668379 - RNA, 24 nt, Human
uuaauagagacaggguuucaccau

SEQ ID NO: 668380 - RNA, 24 nt, Human
uuacauucaaguaaaaaaaaaaaa

SEQ ID NO: 668381 - RNA, 23 nt, Human
uucaagugacucuccugccucag

SEQ ID NO: 668382 - RNA, 24 nt, Human
uucaagugacucuccugccucagc

SEQ ID NO: 668383 - RNA, 21 nt, Human
uuucaccauguuggccaggcu

SEQ ID NO: 668384 - RNA, 24 nt, Human
uuuuuaauagagacaggguuucac

SEQ ID NO: 668385 - RNA, 18 nt, Human
aaaggaaacuggagugcu

SEQ ID NO: 668386 - RNA, 19 nt, Human
aacaugaaacuguuggaaa

SEQ ID NO: 668387 - RNA, 20 nt, Human
aacgccgcuccuccugccag

SEQ ID NO: 668388 - RNA, 24 nt, Human
aacuggagugcugggccaguggag

SEQ ID NO: 668389 - RNA, 20 nt, Human
acgccgcuccuccugccagg

SEQ ID NO: 668390 - RNA, 22 nt, Human
acugaacucuccucucuuaaaa

SEQ ID NO: 668391 - RNA, 19 nt, Human
agacuccaggggagccucg

SEQ ID NO: 668392 - RNA, 24 nt, Human
agagaaccaaguugaaaaggucaa

SEQ ID NO: 668393 - RNA, 23 nt, Human
aggaaaagguggagacuccaggg

SEQ ID NO: 668394 - RNA, 21 nt, Human
aggagcagggguagagccacu

SEQ ID NO: 668395 - RNA, 19 nt, Human
aggcagggaaaggaaacug

SEQ ID NO: 668396 - RNA, 21 nt, Human
aggcggcagggucgggcagga

SEQ ID NO: 668397 - RNA, 21 nt, Human
agggaauagcccuggaaucca

SEQ ID NO: 668398 - RNA, 23 nt, Human
aggggucaagggcuucaggaccu

SEQ ID NO: 668399 - RNA, 25 nt, Human
auaccaaagccugucuggcucccca

SEQ ID NO: 668400 - RNA, 22 nt, Human
caccugcauccuucaaggguuc

SEQ ID NO: 668401 - RNA, 30 nt, Human
cacuggccuggguaagccccuggcugcacc

SEQ ID NO: 668402 - RNA, 21 nt, Human
caggcccccaggggucaaggg

SEQ ID NO: 668403 - RNA, 19 nt, Human
cagggaaaggaaacuggag

SEQ ID NO: 668404 - RNA, 20 nt, Human
cauaacugagacuguccucc

SEQ ID NO: 668405 - RNA, 24 nt, Human
ccaaagccugucuggcuccccagg

SEQ ID NO: 668406 - RNA, 24 nt, Human
ccagcccagcgagauccuacacua

SEQ ID NO: 668407 - RNA, 18 nt, Human
ccauagacacagagaucc

SEQ ID NO: 668408 - RNA, 24 nt, Human
cccagcgagauccuacacuaccca

SEQ ID NO: 668409 - RNA, 22 nt, Human
ccccggcugaacgccgcuccuc

SEQ ID NO: 668410 - RNA, 20 nt, Human
cccggagcguuucuucaggc

SEQ ID NO: 668411 - RNA, 24 nt, Human
cccggcugaacgccgcuccuccug

SEQ ID NO: 668412 - RNA, 22 nt, Human
ccgccgcuuccgggacgcgaau

SEQ ID NO: 668413 - RNA, 23 nt, Human
ccgcggccgccaccgccgcuucc

SEQ ID NO: 668414 - RNA, 23 nt, Human
ccucuuguaggagagaaccaagu

SEQ ID NO: 668415 - RNA, 18 nt, Human
ccuggcugcacagccccg

SEQ ID NO: 668416 - RNA, 26 nt, Human
cgagauccuacacuacccaggccccc

SEQ ID NO: 668417 - RNA, 19 nt, Human
cgauaccaaagccugucug

SEQ ID NO: 668418 - RNA, 22 nt, Human
cggccgccaccgccgcuuccgg

SEQ ID NO: 668419 - RNA, 21 nt, Human
cucagcuccggcccacucccc

SEQ ID NO: 668420 - RNA, 22 nt, Human
cuccaguguaaagaaagcacgg

SEQ ID NO: 668421 - RNA, 22 nt, Human
cuccccagggcuguggcaccuc

SEQ ID NO: 668422 - RNA, 19 nt, Human
cugagcccguaagagucca

SEQ ID NO: 668423 - RNA, 19 nt, Human
gaacucuccucucuuaaaa

SEQ ID NO: 668424 - RNA, 21 nt, Human
gacaagaggcagggaaaggaa

SEQ ID NO: 668425 - RNA, 24 nt, Human
gcagggucgggcaggagcaggggu

SEQ ID NO: 668426 - RNA, 25 nt, Human
gccccggagcguuucuucaggccuc

SEQ ID NO: 668427 - RNA, 21 nt, Human
gcugcuuggcucggcaagaaa

SEQ ID NO: 668428 - RNA, 21 nt, Human
ggaaagaaauggagaccccca

SEQ ID NO: 668429 - RNA, 19 nt, Human
ggaaaggaaacuggagugc

SEQ ID NO: 668430 - RNA, 22 nt, Human
ggaauagcccuggaauccagga

SEQ ID NO: 668431 - RNA, 21 nt, Human
ggacaagaggcagggaaagga

SEQ ID NO: 668432 - RNA, 19 nt, Human
ggagugcugggccagugga

SEQ ID NO: 668433 - RNA, 20 nt, Human
ggccgccaccgccgcuuccc

SEQ ID NO: 668434 - RNA, 24 nt, Human
gguaagccccuggcugcacagccc

SEQ ID NO: 668435 - RNA, 21 nt, Human
guccgaaaaucuccuccgccu

SEQ ID NO: 668436 - RNA, 18 nt, Human
guggaggacugcccgugc

SEQ ID NO: 668437 - RNA, 18 nt, Human
uaacugagacuguccucc

SEQ ID NO: 668438 - RNA, 19 nt, Human
uaagccccuggcugcacag

SEQ ID NO: 668439 - RNA, 19 nt, Human
uaagcugcuuggcucggca

SEQ ID NO: 668440 - RNA, 23 nt, Human
uagaaauagacaaauuauuugcu

SEQ ID NO: 668441 - RNA, 23 nt, Human
ucagcuccggcccacuccccuca

SEQ ID NO: 668442 - RNA, 19 nt, Human
uccagggaauagcccugga

SEQ ID NO: 668443 - RNA, 19 nt, Human
uccagguagaucuccagcc

SEQ ID NO: 668444 - RNA, 19 nt, Human
ucccccggcugaacgccgc

SEQ ID NO: 668445 - RNA, 21 nt, Human
ucccccggcugaacgccgcuc

SEQ ID NO: 668446 - RNA, 24 nt, Human
uccgaaaaucuccuccgccuacgc

SEQ ID NO: 668447 - RNA, 19 nt, Human
uccgccuacgccgcggccg

SEQ ID NO: 668448 - RNA, 18 nt, Human
uccuucaaggguuccagg

SEQ ID NO: 668449 - RNA, 24 nt, Human
ucucuuaaaaggacacagaggcug

SEQ ID NO: 668450 - RNA, 19 nt, Human
ugcccgugcaguucccuuu

SEQ ID NO: 668451 - RNA, 23 nt, Human
ugcuccacucaccuggccuccca

SEQ ID NO: 668452 - RNA, 20 nt, Human
uggaaagaaauggagacccc

SEQ ID NO: 668453 - RNA, 22 nt, Human
uggaaagaaauggagaccccca

SEQ ID NO: 668454 - RNA, 24 nt, Human
uggaauccaggacccagcccagcg

SEQ ID NO: 668455 - RNA, 18 nt, Human
uggcaccuccacuggccu

SEQ ID NO: 668456 - RNA, 21 nt, Human
uggccuggguaagccccuggc

SEQ ID NO: 668457 - RNA, 24 nt, Human
uggccuggguaagccccuggcugc

SEQ ID NO: 668458 - RNA, 19 nt, Human
uggcucggcaagaaagcgg

SEQ ID NO: 668459 - RNA, 19 nt, Human
uugaaaaggucaaacgcug

SEQ ID NO: 668460 - RNA, 21 nt, Human
uuggacaagaggcagggaaag

SEQ ID NO: 668461 - RNA, 24 nt, Human
aaaaagacagaggccugccacugg

SEQ ID NO: 668462 - RNA, 18 nt, Human
aaaagacagagacccaca

SEQ ID NO: 668463 - RNA, 21 nt, Human
aaacaggaggugggggaucca

SEQ ID NO: 668464 - RNA, 21 nt, Human
aaagaccccacagagagccag

SEQ ID NO: 668465 - RNA, 20 nt, Human
aagaccccacagagagccag

SEQ ID NO: 668466 - RNA, 18 nt, Human
aagcccagagaacaggag

SEQ ID NO: 668467 - RNA, 18 nt, Human
acaaaaaaagaccccaca

SEQ ID NO: 668468 - RNA, 20 nt, Human
acaaaaaaagaccccacaga

SEQ ID NO: 668469 - RNA, 22 nt, Human
acaaaaaaagaccccacagaga

SEQ ID NO: 668470 - RNA, 22 nt, Human
acagggaaggggcagauaugga

SEQ ID NO: 668471 - RNA, 18 nt, Human
acccacaaggcaaacagg

SEQ ID NO: 668472 - RNA, 23 nt, Human
agaaaaagacagagacccacaag

SEQ ID NO: 668473 - RNA, 22 nt, Human
agacagggaaggggcagauaug

SEQ ID NO: 668474 - RNA, 23 nt, Human
agacagggaaggggcagauaugg

SEQ ID NO: 668475 - RNA, 20 nt, Human
agacagggacacaggaugcg

SEQ ID NO: 668476 - RNA, 22 nt, Human
agacggacagacacugaccagg

SEQ ID NO: 668477 - RNA, 18 nt, Human
agaugaggagagagagcc

SEQ ID NO: 668478 - RNA, 21 nt, Human
aggaggugggggauccacagg

SEQ ID NO: 668479 - RNA, 25 nt, Human
aggaggugggggauccacagggggc

SEQ ID NO: 668480 - RNA, 24 nt, Human
agugucaggagcagagagaaagga

SEQ ID NO: 668481 - RNA, 20 nt, Human
augaagggcagaugaaaaca

SEQ ID NO: 668482 - RNA, 23 nt, Human
caaaaaaagaccccacagagagc

SEQ ID NO: 668483 - RNA, 21 nt, Human
cacaccugucagcacuggggg

SEQ ID NO: 668484 - RNA, 18 nt, Human
cagacagggaaggggcag

SEQ ID NO: 668485 - RNA, 18 nt, Human
cagcagacagggaagggg

SEQ ID NO: 668486 - RNA, 19 nt, Human
caggagaucaggagucaga

SEQ ID NO: 668487 - RNA, 21 nt, Human
caggagaucaggagucagaaa

SEQ ID NO: 668488 - RNA, 26 nt, Human
gaaaacaguugaaggggcaaaaagac

SEQ ID NO: 668489 - RNA, 23 nt, Human
gaaaagcagugucaggagcagag

SEQ ID NO: 668490 - RNA, 24 nt, Human
gaaaagcagugucaggagcagaga

SEQ ID NO: 668491 - RNA, 24 nt, Human
gagccggaaacaggagguggggga

SEQ ID NO: 668492 - RNA, 20 nt, Human
gaguaaggagcuacagagac

SEQ ID NO: 668493 - RNA, 21 nt, Human
ggaaaagcagugucaggagca

SEQ ID NO: 668494 - RNA, 21 nt, Human
ggagauggagaugaggagaga

SEQ ID NO: 668495 - RNA, 22 nt, Human
ggagcagagagaaaggaaccgg

SEQ ID NO: 668496 - RNA, 20 nt, Human
gggagauggagaugaggaga

SEQ ID NO: 668497 - RNA, 22 nt, Human
gggcagggugggggcugcgugc

SEQ ID NO: 668498 - RNA, 25 nt, Human
gggccagggcucagcagacagggaa

SEQ ID NO: 668499 - RNA, 19 nt, Human
gggcucuuggggaguaagg

SEQ ID NO: 668500 - RNA, 18 nt, Human
gugggggcugcgugcccc

SEQ ID NO: 668501 - RNA, 24 nt, Human
uauggagacaagacggacagacac

SEQ ID NO: 668502 - RNA, 20 nt, Human
ucagcagacagggaaggggc

SEQ ID NO: 668503 - RNA, 21 nt, Human
uccacacauauacuuuauuuc

SEQ ID NO: 668504 - RNA, 24 nt, Human
ucccaugcugaaccuggcgucuuc

SEQ ID NO: 668505 - RNA, 20 nt, Human
ucccauuuucccaugcugaa

SEQ ID NO: 668506 - RNA, 18 nt, Human
ugaagggcagaugaaaac

SEQ ID NO: 668507 - RNA, 18 nt, Human
ugaaggggcaaaaagaca

SEQ ID NO: 668508 - RNA, 18 nt, Human
ugaaggggcaaaaagaca

SEQ ID NO: 668509 - RNA, 19 nt, Human
ugaccaggaagcccagaga

SEQ ID NO: 668510 - RNA, 22 nt, Human
ugaggagagagagccggaaaca

SEQ ID NO: 668511 - RNA, 18 nt, Human
ugaugaagggcagaugaa

SEQ ID NO: 668512 - RNA, 23 nt, Human
aagggcugcugcccgugcuuccu

SEQ ID NO: 668513 - RNA, 21 nt, Human
aggaucaggaagagagggagg

SEQ ID NO: 668514 - RNA, 24 nt, Human
aggcaguagagaccuggaugaacc

SEQ ID NO: 668515 - RNA, 18 nt, Human
aggggagaugcacacacg

SEQ ID NO: 668516 - RNA, 22 nt, Human
caagugaggcaguagagaccug

SEQ ID NO: 668517 - RNA, 21 nt, Human
cacuuuugguuuauuuggggg

SEQ ID NO: 668518 - RNA, 22 nt, Human
cagcuccagguccagguccccc

SEQ ID NO: 668519 - RNA, 18 nt, Human
caggaagagagggaggug

SEQ ID NO: 668520 - RNA, 26 nt, Human
ccaugccugcucaggguccuuccuuu

SEQ ID NO: 668521 - RNA, 25 nt, Human
ccucugcugaggccccuucuccuca

SEQ ID NO: 668522 - RNA, 20 nt, Human
ccugcucaggguccuuccuu

SEQ ID NO: 668523 - RNA, 20 nt, Human
ccugguaggagaggggagau

SEQ ID NO: 668524 - RNA, 23 nt, Human
cggagcagguauuguccaggagg

SEQ ID NO: 668525 - RNA, 25 nt, Human
cugcugcccgugcuuccucugcuga

SEQ ID NO: 668526 - RNA, 21 nt, Human
gacaggcugaugggcuucagg

SEQ ID NO: 668527 - RNA, 22 nt, Human
gaggugagagagggacugaggg

SEQ ID NO: 668528 - RNA, 18 nt, Human
gaucaggaagagagggag

SEQ ID NO: 668529 - RNA, 22 nt, Human
gcugcagccagccauagcugag

SEQ ID NO: 668530 - RNA, 19 nt, Human
gcuggugagaaugcugaca

SEQ ID NO: 668531 - RNA, 23 nt, Human
ggcugcugcccgugcuuccucug

SEQ ID NO: 668532 - RNA, 19 nt, Human
gggugggugggaaggauca

SEQ ID NO: 668533 - RNA, 21 nt, Human
gugcuuccucugcugaggccc

SEQ ID NO: 668534 - RNA, 22 nt, Human
ucaggguccuuccuuugagcug

SEQ ID NO: 668535 - RNA, 18 nt, Human
ucagguggucuguggggc

SEQ ID NO: 668536 - RNA, 21 nt, Human
uccaggucccccugguaggag

SEQ ID NO: 668537 - RNA, 19 nt, Human
ucuccaggagaugcccgcu

SEQ ID NO: 668538 - RNA, 19 nt, Human
ucugaagcuggaguggggg

SEQ ID NO: 668539 - RNA, 25 nt, Human
ugagaccaaaugucugccugucucc

SEQ ID NO: 668540 - RNA, 18 nt, Human
ugagagagggacugaggg

SEQ ID NO: 668541 - RNA, 20 nt, Human
ugagcugcagccagccauag

SEQ ID NO: 668542 - RNA, 18 nt, Human
ugaggcaguagagaccug

SEQ ID NO: 668543 - RNA, 20 nt, Human
ugcuuccucugcugaggccc

SEQ ID NO: 668544 - RNA, 21 nt, Human
ugcuuccucugcugaggcccc

SEQ ID NO: 668545 - RNA, 18 nt, Human
uggagugggggcuccuuu

SEQ ID NO: 668546 - RNA, 20 nt, Human
uggagugggggcuccuuuag

SEQ ID NO: 668547 - RNA, 23 nt, Human
uggggggugggugggaaggauca

SEQ ID NO: 668548 - RNA, 18 nt, Human
ugucucagguggucugug

SEQ ID NO: 668549 - RNA, 25 nt, Human
aacaauaccaguaagguuuaacaau

SEQ ID NO: 668550 - RNA, 23 nt, Human
acagaaaagaaauaucccuucca

SEQ ID NO: 668551 - RNA, 21 nt, Human
agaacaaaagaaaccuauggg

SEQ ID NO: 668552 - RNA, 22 nt, Human
auugcaauaaaccuuuaggaaa

SEQ ID NO: 668553 - RNA, 19 nt, Human
caucauaacacuccaaacc

SEQ ID NO: 668554 - RNA, 21 nt, Human
cccgcccagcauccgcucacu

SEQ ID NO: 668555 - RNA, 23 nt, Human
cgaaacagaauccacaucuaugu

SEQ ID NO: 668556 - RNA, 25 nt, Human
cucagaacaaaagaaaccuauggga

SEQ ID NO: 668557 - RNA, 21 nt, Human
cuucaagaggcguaucaggaa

SEQ ID NO: 668558 - RNA, 22 nt, Human
cuugaaagaacagaagucaaga

SEQ ID NO: 668559 - RNA, 22 nt, Human
gaaacagaauccacaucuaugu

SEQ ID NO: 668560 - RNA, 18 nt, Human
gaaagaacagaagucaag

SEQ ID NO: 668561 - RNA, 22 nt, Human
gaacaaaagaaaccuaugggaa

SEQ ID NO: 668562 - RNA, 19 nt, Human
gaagagugccccgcccagc

SEQ ID NO: 668563 - RNA, 18 nt, Human
guccuuuggcauauguua

SEQ ID NO: 668564 - RNA, 24 nt, Human
gugaugccagacauggucuacaag

SEQ ID NO: 668565 - RNA, 20 nt, Human
ucauaacacuccaaaccuga

SEQ ID NO: 668566 - RNA, 19 nt, Human
ugaaagaacagaagucaag

SEQ ID NO: 668567 - RNA, 20 nt, Human
ugaaagaacagaagucaaga

SEQ ID NO: 668568 - RNA, 27 nt, Human
ugagggagacgggaugguuggggaggc

SEQ ID NO: 668569 - RNA, 21 nt, Human
uggaacaauaccaguaagguu

SEQ ID NO: 668570 - RNA, 20 nt, Human
uggaagagugccccgcccag

SEQ ID NO: 668571 - RNA, 21 nt, Human
uggaagagugccccgcccagc

SEQ ID NO: 668572 - RNA, 19 nt, Human
ugggaacuuacgaaacaga

SEQ ID NO: 668573 - RNA, 20 nt, Human
ugggaagagcaauagccugu

SEQ ID NO: 668574 - RNA, 25 nt, Human
agaagaagaagcaacagucuucuag

SEQ ID NO: 668575 - RNA, 20 nt, Human
aggaggaaaaugagaaccca

SEQ ID NO: 668576 - RNA, 26 nt, Human
cccacugguagaagaagaagcaacag

SEQ ID NO: 668577 - RNA, 22 nt, Human
gaagaagcaacagucuucuagg

SEQ ID NO: 668578 - RNA, 23 nt, Human
uaggaggaaaaugagaacccacu

SEQ ID NO: 668579 - RNA, 18 nt, Human
ucuugcauuaaaugagga

SEQ ID NO: 668580 - RNA, 19 nt, Human
ugaagaagcugaauccaag

SEQ ID NO: 668581 - RNA, 21 nt, Human
ugaagaagcugaauccaagug

SEQ ID NO: 668582 - RNA, 21 nt, Human
uggaagcuucugaguaugagg

SEQ ID NO: 668583 - RNA, 21 nt, Human
uucaaggggggaggaaaaaag

SEQ ID NO: 668584 - RNA, 20 nt, Human
uuuggaagcuucugaguaug

SEQ ID NO: 668585 - RNA, 19 nt, Human
uuuuuuuuuuuuuuucugu

SEQ ID NO: 668586 - RNA, 20 nt, Human
uuuuuuuuuuuuuuuucugg

SEQ ID NO: 668587 - RNA, 23 nt, Human
auccaaaguaagucucucccuuc

SEQ ID NO: 668588 - RNA, 22 nt, Human
caaaggcucuuuaucuuccaga

SEQ ID NO: 668589 - RNA, 19 nt, Human
cacucacagaugacagggc

SEQ ID NO: 668590 - RNA, 21 nt, Human
cacugugccacacucacagau

SEQ ID NO: 668591 - RNA, 22 nt, Human
ccaaaggcucuuuaucuuccag

SEQ ID NO: 668592 - RNA, 20 nt, Human
gaugacagggcuugcgguac

SEQ ID NO: 668593 - RNA, 21 nt, Human
ucuccaggccuucacugugcc

SEQ ID NO: 668594 - RNA, 20 nt, Human
ugacucuccaggccuucacu

SEQ ID NO: 668595 - RNA, 23 nt, Human
aaagagcagguaucauccaaaca

SEQ ID NO: 668596 - RNA, 21 nt, Human
aauucuuuuuguacaacacau

SEQ ID NO: 668597 - RNA, 20 nt, Human
accgauagugucuggugguu

SEQ ID NO: 668598 - RNA, 26 nt, Human
accgauagugucuggugguuucuccc

SEQ ID NO: 668599 - RNA, 23 nt, Human
augugcagcagccauuucugauu

SEQ ID NO: 668600 - RNA, 20 nt, Human
caccagaacucccuaagcaa

SEQ ID NO: 668601 - RNA, 23 nt, Human
caccagagaugaccgauaguguc

SEQ ID NO: 668602 - RNA, 24 nt, Human
cagaacucccuaagcaaucuuucc

SEQ ID NO: 668603 - RNA, 19 nt, Human
cccguugcgcuccaaggcc

SEQ ID NO: 668604 - RNA, 24 nt, Human
cuaaugcuguugauuucauuuguu

SEQ ID NO: 668605 - RNA, 19 nt, Human
cucccuaagcaaucuuucc

SEQ ID NO: 668606 - RNA, 23 nt, Human
cugaaauaaagagcagguaucau

SEQ ID NO: 668607 - RNA, 18 nt, Human
gccuaaacuucuggcugc

SEQ ID NO: 668608 - RNA, 22 nt, Human
gccuaaacuucuggcugcuugc

SEQ ID NO: 668609 - RNA, 20 nt, Human
ggccaggaccagcugcuggu

SEQ ID NO: 668610 - RNA, 24 nt, Human
uaaacuucuggcugcuugcugcuu

SEQ ID NO: 668611 - RNA, 22 nt, Human
uaaagagcagguaucauccaaa

SEQ ID NO: 668612 - RNA, 24 nt, Human
uaaagagcagguaucauccaaacc

SEQ ID NO: 668613 - RNA, 24 nt, Human
ucucauccugaaauaaagagcagg

SEQ ID NO: 668614 - RNA, 19 nt, Human
ucuugcuguggaguaaggu

SEQ ID NO: 668615 - RNA, 18 nt, Human
ugacaccagagaugaccg

SEQ ID NO: 668616 - RNA, 21 nt, Human
ugaccgauagugucugguggu

SEQ ID NO: 668617 - RNA, 20 nt, Human
ugcgcuccaaggccaggacc

SEQ ID NO: 668618 - RNA, 24 nt, Human
uggaaagcuaaacauugauaacca

SEQ ID NO: 668619 - RNA, 20 nt, Human
uggaguaaggugaccaaugg

SEQ ID NO: 668620 - RNA, 19 nt, Human
ugguguuuuucuugggcuu

SEQ ID NO: 668621 - RNA, 23 nt, Human
ugucuggugguuucucccucuca

SEQ ID NO: 668622 - RNA, 26 nt, Human
uuuuaugugcagcagccauuucugau

SEQ ID NO: 668623 - RNA, 20 nt, Human
aaaaucacauagucaaacua

SEQ ID NO: 668624 - RNA, 21 nt, Human
aaaaugcuucuuuccugucca

SEQ ID NO: 668625 - RNA, 20 nt, Human
aaaugcuucuuuccugucca

SEQ ID NO: 668626 - RNA, 21 nt, Human
aggccauauuugcuuugugaa

SEQ ID NO: 668627 - RNA, 21 nt, Human
agugugggggguggaaaggga

SEQ ID NO: 668628 - RNA, 21 nt, Human
auagaacaaauuugaauuaca

SEQ ID NO: 668629 - RNA, 20 nt, Human
aucacauagucaaacuaaaa

SEQ ID NO: 668630 - RNA, 22 nt, Human
aucauuucgagcaaagacaauu

SEQ ID NO: 668631 - RNA, 20 nt, Human
auuaguuuauuuuuuaacca

SEQ ID NO: 668632 - RNA, 20 nt, Human
cacgcacauugcugugcaca

SEQ ID NO: 668633 - RNA, 22 nt, Human
cagcccuugagucaaggcucaa

SEQ ID NO: 668634 - RNA, 19 nt, Human
cccacgcacauugcugugc

SEQ ID NO: 668635 - RNA, 22 nt, Human
cccacgcacauugcugugcaca

SEQ ID NO: 668636 - RNA, 23 nt, Human
ccucacagaauuuccuaaugaaa

SEQ ID NO: 668637 - RNA, 25 nt, Human
ccuuccaauaaaacacuugauucca

SEQ ID NO: 668638 - RNA, 21 nt, Human
cgagccccaagaagauuaaaa

SEQ ID NO: 668639 - RNA, 20 nt, Human
cucaaggguacaacugcacc

SEQ ID NO: 668640 - RNA, 19 nt, Human
cugugcacaggugcuugca

SEQ ID NO: 668641 - RNA, 20 nt, Human
gaaaauucaagcucgagaac

SEQ ID NO: 668642 - RNA, 24 nt, Human
gaacaaauuugaauuacaggccau

SEQ ID NO: 668643 - RNA, 18 nt, Human
gacaauuuucugcaugua

SEQ ID NO: 668644 - RNA, 21 nt, Human
gcagacccagaaaucugguua

SEQ ID NO: 668645 - RNA, 21 nt, Human
gcccucaaggcauuuuucugu

SEQ ID NO: 668646 - RNA, 18 nt, Human
gcuugcagagaaguuuug

SEQ ID NO: 668647 - RNA, 23 nt, Human
guccuuuuccuuucaacugccgg

SEQ ID NO: 668648 - RNA, 21 nt, Human
guggcagacccagaaaucugg

SEQ ID NO: 668649 - RNA, 22 nt, Human
ucacauagaacaaauuugaauu

SEQ ID NO: 668650 - RNA, 22 nt, Human
ucacuccacugaggugaaugac

SEQ ID NO: 668651 - RNA, 21 nt, Human
ucagaaaaugcuucuuuccug

SEQ ID NO: 668652 - RNA, 26 nt, Human
ucucacagaugcccacgcacauugcu

SEQ ID NO: 668653 - RNA, 18 nt, Human
ugaggugaaugacaaacu

SEQ ID NO: 668654 - RNA, 23 nt, Human
ugaguuuuuacucagagaguauc

SEQ ID NO: 668655 - RNA, 23 nt, Human
ugcauguaugaguuuuucccucg

SEQ ID NO: 668656 - RNA, 22 nt, Human
ugcuugcagagaaguuuugucu

SEQ ID NO: 668657 - RNA, 23 nt, Human
ugguuacaagcuccucacagaau

SEQ ID NO: 668658 - RNA, 21 nt, Human
ugugaacacgcaccaagugug

SEQ ID NO: 668659 - RNA, 18 nt, Human
ugugcacaggugcuugca

SEQ ID NO: 668660 - RNA, 24 nt, Human
uguuuugccuauauuuugcccuca

SEQ ID NO: 668661 - RNA, 20 nt, Human
uuucaacugccgguguuugc

SEQ ID NO: 668662 - RNA, 22 nt, Human
uuuccagauauucagauggagg

SEQ ID NO: 668663 - RNA, 24 nt, Human
uuugcccucaaggcauuuuucugu

SEQ ID NO: 668664 - RNA, 25 nt, Human
aaaaacaaggggaaggggcucugac

SEQ ID NO: 668665 - RNA, 20 nt, Human
aaaaacucucccacccaaag

SEQ ID NO: 668666 - RNA, 23 nt, Human
aaaaacucucccacccaaagagc

SEQ ID NO: 668667 - RNA, 19 nt, Human
aaaacucucccacccaagg

SEQ ID NO: 668668 - RNA, 18 nt, Human
aaaagauccaugcucccc

SEQ ID NO: 668669 - RNA, 19 nt, Human
aaacccccacagcacaacc

SEQ ID NO: 668670 - RNA, 20 nt, Human
aaagacacaaaauggccaua

SEQ ID NO: 668671 - RNA, 22 nt, Human
aaagcccccaaauuuaggcccc

SEQ ID NO: 668672 - RNA, 24 nt, Human
aaaugccaaggaagcagcuuaaaa

SEQ ID NO: 668673 - RNA, 21 nt, Human
aagauccaugcucccccggga

SEQ ID NO: 668674 - RNA, 23 nt, Human
aagcccccaaauuuaggccccaa

SEQ ID NO: 668675 - RNA, 21 nt, Human
aaucuuccccuccuuccacug

SEQ ID NO: 668676 - RNA, 20 nt, Human
acacggagagguugcccaaa

SEQ ID NO: 668677 - RNA, 21 nt, Human
acccaaacccccacagcacaa

SEQ ID NO: 668678 - RNA, 19 nt, Human
acccaaagagccaaagagg

SEQ ID NO: 668679 - RNA, 21 nt, Human
acccugcucccuucccucaaa

SEQ ID NO: 668680 - RNA, 21 nt, Human
agacacaaaauggccauaacc

SEQ ID NO: 668681 - RNA, 24 nt, Human
agacacaaaauggccauaaccuag

SEQ ID NO: 668682 - RNA, 21 nt, Human
agcagcuuaaaacacagcccc

SEQ ID NO: 668683 - RNA, 21 nt, Human
agcccccgguccacucaccuc

SEQ ID NO: 668684 - RNA, 22 nt, Human
agcccccgguccacucaccucc

SEQ ID NO: 668685 - RNA, 21 nt, Human
agcccucagcccuccccauua

SEQ ID NO: 668686 - RNA, 22 nt, Human
agcggcaagugcugcugugcac

SEQ ID NO: 668687 - RNA, 20 nt, Human
agcuuaaaacacagcccccg

SEQ ID NO: 668688 - RNA, 24 nt, Human
aggacaaaagauccaugcuccccc

SEQ ID NO: 668689 - RNA, 21 nt, Human
caaaagacacaaaauggccau

SEQ ID NO: 668690 - RNA, 19 nt, Human
caaaagauccaugcucccc

SEQ ID NO: 668691 - RNA, 25 nt, Human
caaaagcccccaaauuuaggcccca

SEQ ID NO: 668692 - RNA, 18 nt, Human
caaaaucuuccccuccuu

SEQ ID NO: 668693 - RNA, 24 nt, Human
cacacagcaccaaggggcaguggc

SEQ ID NO: 668694 - RNA, 21 nt, Human
cacaucaaaagccucguuacu

SEQ ID NO: 668695 - RNA, 19 nt, Human
cacucaccuccagcucaac

SEQ ID NO: 668696 - RNA, 21 nt, Human
cacugggaccacacagcacca

SEQ ID NO: 668697 - RNA, 20 nt, Human
cagcacaaccucaaaagaca

SEQ ID NO: 668698 - RNA, 20 nt, Human
cagcccccgguccacucacc

SEQ ID NO: 668699 - RNA, 23 nt, Human
cagccgaggcugcagcuuguauu

SEQ ID NO: 668700 - RNA, 18 nt, Human
cagcggcaagugcugcug

SEQ ID NO: 668701 - RNA, 20 nt, Human
ccaaacccccacagcacaac

SEQ ID NO: 668702 - RNA, 23 nt, Human
ccacagcacaaccucaaaagaca

SEQ ID NO: 668703 - RNA, 21 nt, Human
ccaugcucccccgggaacaga

SEQ ID NO: 668704 - RNA, 21 nt, Human
cccaaacccccacagcacaac

SEQ ID NO: 668705 - RNA, 21 nt, Human
cccacagcacaaccucaaaag

SEQ ID NO: 668706 - RNA, 24 nt, Human
cccacccaaagagccaaagaggug

SEQ ID NO: 668707 - RNA, 20 nt, Human
ccccacagcacaaccucaaa

SEQ ID NO: 668708 - RNA, 21 nt, Human
ccuuacugguggcuaccaggu

SEQ ID NO: 668709 - RNA, 23 nt, Human
ccuuacugguggcuaccagguuu

SEQ ID NO: 668710 - RNA, 23 nt, Human
cuagaaaaaucuaaaaucuggaa

SEQ ID NO: 668711 - RNA, 21 nt, Human
cucaaaagacacaaaauggcc

SEQ ID NO: 668712 - RNA, 21 nt, Human
cuccagcucaacacaucaaaa

SEQ ID NO: 668713 - RNA, 19 nt, Human
cucccuucccucaaaccca

SEQ ID NO: 668714 - RNA, 24 nt, Human
cucucccacccaaagagccaaaga

SEQ ID NO: 668715 - RNA, 21 nt, Human
gaaaaacucucccacccaaag

SEQ ID NO: 668716 - RNA, 23 nt, Human
gacaaaagauccaugcucccccg

SEQ ID NO: 668717 - RNA, 20 nt, Human
gagcaaguguggggcugggg

SEQ ID NO: 668718 - RNA, 24 nt, Human
gcacaaccucaaaagacacaaaau

SEQ ID NO: 668719 - RNA, 21 nt, Human
ggacaaaagauccaugcuccc

SEQ ID NO: 668720 - RNA, 24 nt, Human
ggccauaaccuagaaaaaucuaaa

SEQ ID NO: 668721 - RNA, 22 nt, Human
ggcgacaauaagucaaaaggga

SEQ ID NO: 668722 - RNA, 21 nt, Human
uaaaacacagcccccggucca

SEQ ID NO: 668723 - RNA, 24 nt, Human
uaccagagcgccucauacacaccu

SEQ ID NO: 668724 - RNA, 23 nt, Human
uagaaagcagugaggacaaaaga

SEQ ID NO: 668725 - RNA, 20 nt, Human
uaggccccaacagggcagag

SEQ ID NO: 668726 - RNA, 19 nt, Human
uauaacaguaaaauaaaaa

SEQ ID NO: 668727 - RNA, 24 nt, Human
ucaaaagacacaaaauggccauaa

SEQ ID NO: 668728 - RNA, 20 nt, Human
ucaaaagccucguuacugac

SEQ ID NO: 668729 - RNA, 24 nt, Human
ucaaaagccucguuacugacagac

SEQ ID NO: 668730 - RNA, 19 nt, Human
ucaaacccaaacccccaca

SEQ ID NO: 668731 - RNA, 24 nt, Human
ucaaacccaaacccccacagcaca

SEQ ID NO: 668732 - RNA, 25 nt, Human
ucaaccgccacccugcucccuuccc

SEQ ID NO: 668733 - RNA, 21 nt, Human
ucagagcaaguguggggcugg

SEQ ID NO: 668734 - RNA, 22 nt, Human
ucagcccuccccauuagaaagc

SEQ ID NO: 668735 - RNA, 22 nt, Human
uccagcucaacacaucaaaagc

SEQ ID NO: 668736 - RNA, 22 nt, Human
ucccccgggaacagaaggcagu

SEQ ID NO: 668737 - RNA, 21 nt, Human
ucccucaaacccaaaccccca

SEQ ID NO: 668738 - RNA, 19 nt, Human
uccucaaccgccacccugc

SEQ ID NO: 668739 - RNA, 20 nt, Human
ucuaaaaucuggaaaaacuc

SEQ ID NO: 668740 - RNA, 21 nt, Human
ugcacagaagacaggaaccga

SEQ ID NO: 668741 - RNA, 20 nt, Human
ugccaaggaagcagcuuaaa

SEQ ID NO: 668742 - RNA, 23 nt, Human
ugcccaaaagcccccaaauuuag

SEQ ID NO: 668743 - RNA, 23 nt, Human
ugcuguggggacagggagcccuc

SEQ ID NO: 668744 - RNA, 22 nt, Human
uggaaaaacucucccacccaaa

SEQ ID NO: 668745 - RNA, 24 nt, Human
uggcagccgaggcugcagcuugua

SEQ ID NO: 668746 - RNA, 21 nt, Human
uggcgacaauaagucaaaaga

SEQ ID NO: 668747 - RNA, 18 nt, Human
ugggaccacacagcacca

SEQ ID NO: 668748 - RNA, 20 nt, Human
uggggcccaaucgagugugg

SEQ ID NO: 668749 - RNA, 21 nt, Human
uuccaaaaucuuccccuccuu

SEQ ID NO: 668750 - RNA, 22 nt, Human
uuuucagagcaaguguggggcu

SEQ ID NO: 668751 - RNA, 23 nt, Human
aaaaaagagacagugagagagaa

SEQ ID NO: 668752 - RNA, 18 nt, Human
aaaagguccuccaacccc

SEQ ID NO: 668753 - RNA, 20 nt, Human
aacacaaugcucccccacug

SEQ ID NO: 668754 - RNA, 22 nt, Human
aacaguccagcugcaccuuggu

SEQ ID NO: 668755 - RNA, 26 nt, Human
aagagacagugagagagaaaucaggc

SEQ ID NO: 668756 - RNA, 20 nt, Human
aaguccucggggucaggagg

SEQ ID NO: 668757 - RNA, 19 nt, Human
acacagaaaagguccucca

SEQ ID NO: 668758 - RNA, 20 nt, Human
acacugucugacacagacaa

SEQ ID NO: 668759 - RNA, 23 nt, Human
agaaacucagggcuucccuggcc

SEQ ID NO: 668760 - RNA, 27 nt, Human
agacacccacaacacaaagugguccca

SEQ ID NO: 668761 - RNA, 22 nt, Human
agacagugagagagaaaucagg

SEQ ID NO: 668762 - RNA, 22 nt, Human
agagagaaaucaggcccccugg

SEQ ID NO: 668763 - RNA, 20 nt, Human
aggccgaggccggcgucuga

SEQ ID NO: 668764 - RNA, 21 nt, Human
cacacagacacccacaacaca

SEQ ID NO: 668765 - RNA, 20 nt, Human
cacaucgcucaggccggucc

SEQ ID NO: 668766 - RNA, 20 nt, Human
caccagagagaccagaccaa

SEQ ID NO: 668767 - RNA, 24 nt, Human
cacccacaacacaaugcuccccuu

SEQ ID NO: 668768 - RNA, 27 nt, Human
cagacacccacaacacaaugcuccccc

SEQ ID NO: 668769 - RNA, 20 nt, Human
caggccgguccaugugccag

SEQ ID NO: 668770 - RNA, 26 nt, Human
caugcuggcgcgggcugggggugcgg

SEQ ID NO: 668771 - RNA, 21 nt, Human
ccaccagagagaccagaccaa

SEQ ID NO: 668772 - RNA, 23 nt, Human
ccaccagagagaccagaccaagu

SEQ ID NO: 668773 - RNA, 29 nt, Human
ccaucaauggugacagacaagguccccuu

SEQ ID NO: 668774 - RNA, 19 nt, Human
ccaugugccaggccgcucc

SEQ ID NO: 668775 - RNA, 24 nt, Human
cccacaacacaaugcucccccacu

SEQ ID NO: 668776 - RNA, 20 nt, Human
cccagccucugccccugagc

SEQ ID NO: 668777 - RNA, 25 nt, Human
cccagccucugccccugagccuggc

SEQ ID NO: 668778 - RNA, 19 nt, Human
cccagcugagcugcaugac

SEQ ID NO: 668779 - RNA, 21 nt, Human
ccccccauggggcagagccgu

SEQ ID NO: 668780 - RNA, 27 nt, Human
ccccgccagaaacucagggcuucccug

SEQ ID NO: 668781 - RNA, 24 nt, Human
ccccuagaaagcugggccucgcag

SEQ ID NO: 668782 - RNA, 20 nt, Human
ccucauaucacauucccagg

SEQ ID NO: 668783 - RNA, 22 nt, Human
ccugagccuggccccagucggc

SEQ ID NO: 668784 - RNA, 20 nt, Human
ccugcugguugggggcuguu

SEQ ID NO: 668785 - RNA, 20 nt, Human
ccuggccccagucggccuca

SEQ ID NO: 668786 - RNA, 22 nt, Human
ccuuaaaacucugggguuguag

SEQ ID NO: 668787 - RNA, 18 nt, Human
cgcuccugcugguugggg

SEQ ID NO: 668788 - RNA, 21 nt, Human
cucaucgcccaggccgaggcc

SEQ ID NO: 668789 - RNA, 23 nt, Human
cugaggcuggggaggcacuuuug

SEQ ID NO: 668790 - RNA, 24 nt, Human
cugaggcuggggaggcacuuuugg

SEQ ID NO: 668791 - RNA, 20 nt, Human
cugccccugagccuggcccc

SEQ ID NO: 668792 - RNA, 21 nt, Human
cuggccucgcagcccucgcca

SEQ ID NO: 668793 - RNA, 23 nt, Human
gcgcggugggguggggaggcugg

SEQ ID NO: 668794 - RNA, 21 nt, Human
gcggugggguggggaggcugg

SEQ ID NO: 668795 - RNA, 21 nt, Human
gcggugggguggggaggcugg

SEQ ID NO: 668796 - RNA, 21 nt, Human
gcuguuuucuucucugauugu

SEQ ID NO: 668797 - RNA, 22 nt, Human
ggacacugucugacacagacaa

SEQ ID NO: 668798 - RNA, 18 nt, Human
ggagugucagugaccacg

SEQ ID NO: 668799 - RNA, 20 nt, Human
ggccggggcuagggccgcgg

SEQ ID NO: 668800 - RNA, 20 nt, Human
gggagugucagugaccacgu

SEQ ID NO: 668801 - RNA, 22 nt, Human
gggcugaggcuggggaggcacu

SEQ ID NO: 668802 - RNA, 19 nt, Human
gggugcggccggggcuagg

SEQ ID NO: 668803 - RNA, 20 nt, Human
ggugggguggggaggcuggg

SEQ ID NO: 668804 - RNA, 23 nt, Human
gucccagccucugccccugagcc

SEQ ID NO: 668805 - RNA, 23 nt, Human
gugcggugggguggggaggcugg

SEQ ID NO: 668806 - RNA, 18 nt, Human
guggcccucaggacacuc

SEQ ID NO: 668807 - RNA, 18 nt, Human
gugggggcugaggcuggg

SEQ ID NO: 668808 - RNA, 22 nt, Human
guguaaaaaaggccccccaugg

SEQ ID NO: 668809 - RNA, 22 nt, Human
guguguguguguaaugugugug

SEQ ID NO: 668810 - RNA, 25 nt, Human
guuguagccaccagagagaccagac

SEQ ID NO: 668811 - RNA, 27 nt, Human
uaaaaaaggccccccauggggcagagc

SEQ ID NO: 668812 - RNA, 18 nt, Human
uaagcagcucccagcuga

SEQ ID NO: 668813 - RNA, 27 nt, Human
ucaauggugacagacaagguccccgag

SEQ ID NO: 668814 - RNA, 22 nt, Human
ucagugaccacguggcccucag

SEQ ID NO: 668815 - RNA, 19 nt, Human
ucaugcuggcgcgggcugg

SEQ ID NO: 668816 - RNA, 22 nt, Human
ucccagggagggacacuguccu

SEQ ID NO: 668817 - RNA, 19 nt, Human
ucccccacugcucagcccc

SEQ ID NO: 668818 - RNA, 19 nt, Human
uccccuagaaagcugggcc

SEQ ID NO: 668819 - RNA, 23 nt, Human
uccuuaaaacucugggguuguag

SEQ ID NO: 668820 - RNA, 18 nt, Human
ugacagacaagguccccg

SEQ ID NO: 668821 - RNA, 26 nt, Human
ugagagagaaaucaggcccccuggga

SEQ ID NO: 668822 - RNA, 25 nt, Human
uggcacauuuguguguguguguguu

SEQ ID NO: 668823 - RNA, 18 nt, Human
uggcuuggguggagugca

SEQ ID NO: 668824 - RNA, 22 nt, Human
ugggggcugaggcuggggaggc

SEQ ID NO: 668825 - RNA, 19 nt, Human
ugggguggggaggcugggc

SEQ ID NO: 668826 - RNA, 19 nt, Human
ugggguggggaggcugggc

SEQ ID NO: 668827 - RNA, 33 nt, Human
uggguguggcacauuuguguguguguguguggu

SEQ ID NO: 668828 - RNA, 21 nt, Human
ugucacauuccagggagggac

SEQ ID NO: 668829 - RNA, 20 nt, Human
ugucccagccucugccccug

SEQ ID NO: 668830 - RNA, 24 nt, Human
ugucucaucgcccaggccgaggcc

SEQ ID NO: 668831 - RNA, 27 nt, Human
ugucuggguguggcacauuugugugug

SEQ ID NO: 668832 - RNA, 21 nt, Human
uguggcacauuugugugugug

SEQ ID NO: 668833 - RNA, 33 nt, Human
uguggcacauuuguguguguguguguguguggu

SEQ ID NO: 668834 - RNA, 19 nt, Human
uguggcuggaggugggggc

SEQ ID NO: 668835 - RNA, 18 nt, Human
uguguggcuggagguggg

SEQ ID NO: 668836 - RNA, 18 nt, Human
uguguguguaaugugugu

SEQ ID NO: 668837 - RNA, 22 nt, Human
uguguguguggcuggagguggg

SEQ ID NO: 668838 - RNA, 21 nt, Human
uguguguguguaaugugugug

SEQ ID NO: 668839 - RNA, 22 nt, Human
uguguguguguaaugugugugu

SEQ ID NO: 668840 - RNA, 21 nt, Human
uguguguguguguaaugugug

SEQ ID NO: 668841 - RNA, 22 nt, Human
uguguguguguguaaugugugu

SEQ ID NO: 668842 - RNA, 22 nt, Human
uguguguguguguguaaugugu

SEQ ID NO: 668843 - RNA, 24 nt, Human
uguguguguguguguaaugugugu

SEQ ID NO: 668844 - RNA, 22 nt, Human
uguguguguguguguguaaugu

SEQ ID NO: 668845 - RNA, 24 nt, Human
uguguguguguguguguaaugugu

SEQ ID NO: 668846 - RNA, 18 nt, Human
ugugugugugugugugug

SEQ ID NO: 668847 - RNA, 18 nt, Human
ugugugugugugugugug

SEQ ID NO: 668848 - RNA, 18 nt, Human
ugugugugugugugugug

SEQ ID NO: 668849 - RNA, 20 nt, Human
ugugugugugugugugugua

SEQ ID NO: 668850 - RNA, 23 nt, Human
uguguguguguguguguguaaug

SEQ ID NO: 668851 - RNA, 21 nt, Human
ugugugugugugugugugugu

SEQ ID NO: 668852 - RNA, 21 nt, Human
ugugugugugugugugugugu

SEQ ID NO: 668853 - RNA, 23 nt, Human
uguguguguguguguguguguaa

SEQ ID NO: 668854 - RNA, 23 nt, Human
ugugugugugugugugugugugu

SEQ ID NO: 668855 - RNA, 19 nt, Human
uucacuucacccccaaggc

SEQ ID NO: 668856 - RNA, 24 nt, Human
uuugugugugugugugugugugug

SEQ ID NO: 668857 - RNA, 24 nt, Human
ccaagccgggugacagcccuuucc

SEQ ID NO: 668858 - RNA, 23 nt, Human
cugugugccuacguauccucccc

SEQ ID NO: 668859 - RNA, 19 nt, Human
gguguggaaggggccaagc

SEQ ID NO: 668860 - RNA, 22 nt, Human
uggaaggggccaagccggguga

SEQ ID NO: 668861 - RNA, 21 nt, Human
aaccccucggcccaccgcucc

SEQ ID NO: 668862 - RNA, 22 nt, Human
accacauacaaacccagccuug

SEQ ID NO: 668863 - RNA, 20 nt, Human
accucgcucccccgccccac

SEQ ID NO: 668864 - RNA, 20 nt, Human
caaacccagccuuggugcuc

SEQ ID NO: 668865 - RNA, 23 nt, Human
caaccccucggcccaccgcuccu

SEQ ID NO: 668866 - RNA, 19 nt, Human
cacauuguccccaauuacu

SEQ ID NO: 668867 - RNA, 19 nt, Human
caccacauacaaacccagc

SEQ ID NO: 668868 - RNA, 18 nt, Human
caccuccaaccccucggc

SEQ ID NO: 668869 - RNA, 25 nt, Human
ccacauacaaacccagccuuggugc

SEQ ID NO: 668870 - RNA, 22 nt, Human
ccaccucgcucccccgccccac

SEQ ID NO: 668871 - RNA, 26 nt, Human
cccacagcccgagguccuccuggggc

SEQ ID NO: 668872 - RNA, 24 nt, Human
ccccacuccccgacuccgcucucc

SEQ ID NO: 668873 - RNA, 21 nt, Human
ccccgccccacuccccgacuc

SEQ ID NO: 668874 - RNA, 22 nt, Human
ccccggcgccaccucgcucccc

SEQ ID NO: 668875 - RNA, 26 nt, Human
ccgacuccgcucucccggcccacugu

SEQ ID NO: 668876 - RNA, 18 nt, Human
ccgccccacuccccgacu

SEQ ID NO: 668877 - RNA, 24 nt, Human
ccucgcucccccgccccacucccc

SEQ ID NO: 668878 - RNA, 21 nt, Human
cgacuccgcucucccggccca

SEQ ID NO: 668879 - RNA, 24 nt, Human
cuccgcucucccggcccacagccc

SEQ ID NO: 668880 - RNA, 20 nt, Human
cucggcccaccgcuccuucc

SEQ ID NO: 668881 - RNA, 21 nt, Human
gacuccgcucucccggcccac

SEQ ID NO: 668882 - RNA, 23 nt, Human
gagguccuccuggggccccaccu

SEQ ID NO: 668883 - RNA, 22 nt, Human
gccaccucgcucccccgcccca

SEQ ID NO: 668884 - RNA, 26 nt, Human
gccccaccuccaaccccucggcccac

SEQ ID NO: 668885 - RNA, 19 nt, Human
guggcgcgcgccgcgaacc

SEQ ID NO: 668886 - RNA, 22 nt, Human
uccccggcgccaccucgcuccc

SEQ ID NO: 668887 - RNA, 22 nt, Human
uccgcgcuaccgcgugaacaga

SEQ ID NO: 668888 - RNA, 20 nt, Human
uccuggggccccaccuccaa

SEQ ID NO: 668889 - RNA, 21 nt, Human
ucgcucccccgccccacuccc

SEQ ID NO: 668890 - RNA, 26 nt, Human
uguguuuauucccccaccacauacaa

SEQ ID NO: 668891 - RNA, 22 nt, Human
uucccccaccacauacaaaccc

SEQ ID NO: 668892 - RNA, 24 nt, Human
uucccccaccacauacaaacccag

SEQ ID NO: 668893 - RNA, 24 nt, Human
uuuuuuuuuuuuuuuuuuaauuuu

SEQ ID NO: 668894 - RNA, 21 nt, Human
aggggaagggagggcaggggc

SEQ ID NO: 668895 - RNA, 23 nt, Human
gggacaggggaagggagggcagg

SEQ ID NO: 668896 - RNA, 18 nt, Human
ggggaagggagggcaggg

SEQ ID NO: 668897 - RNA, 19 nt, Human
ggggacggggacaggggaa

SEQ ID NO: 668898 - RNA, 23 nt, Human
ggggacggggacaggggaaggga

SEQ ID NO: 668899 - RNA, 30 nt, Human
aaaaagaagcacacacacacacacacacag

SEQ ID NO: 668900 - RNA, 30 nt, Human
aaagaagcacacacacacacacacacacag

SEQ ID NO: 668901 - RNA, 30 nt, Human
aagaagcacacacacacacacacacacaca

SEQ ID NO: 668902 - RNA, 22 nt, Human
aaguggaccauaagguguaugg

SEQ ID NO: 668903 - RNA, 23 nt, Human
acacacacacacacacacacaca

SEQ ID NO: 668904 - RNA, 23 nt, Human
acacacacacacacacacacaca

SEQ ID NO: 668905 - RNA, 23 nt, Human
acacacacacacacacacacaca

SEQ ID NO: 668906 - RNA, 23 nt, Human
acacacacacacacacacacaca

SEQ ID NO: 668907 - RNA, 23 nt, Human
acacacacacacacacacacaca

SEQ ID NO: 668908 - RNA, 23 nt, Human
acacacacacacacacacacaca

SEQ ID NO: 668909 - RNA, 23 nt, Human
acacacacacacacacacacaca

SEQ ID NO: 668910 - RNA, 23 nt, Human
acacacacacacacacacacaca

SEQ ID NO: 668911 - RNA, 23 nt, Human
acacacacacacacacacacaca

SEQ ID NO: 668912 - RNA, 23 nt, Human
acacacacacacacacaugcgcg

SEQ ID NO: 668913 - RNA, 23 nt, Human
acacacacacacacaugcgcgcg

SEQ ID NO: 668914 - RNA, 27 nt, Human
acacacacacacaugcgcgcgcgcuuu

SEQ ID NO: 668915 - RNA, 21 nt, Human
acacacacacaugcgcgcgcg

SEQ ID NO: 668916 - RNA, 22 nt, Human
acagcucagcaacaugaacauc

SEQ ID NO: 668917 - RNA, 25 nt, Human
agagaagaaauacagucccuuugga

SEQ ID NO: 668918 - RNA, 20 nt, Human
agguuccaucccucuucagg

SEQ ID NO: 668919 - RNA, 20 nt, Human
cacacacacacacacacaca

SEQ ID NO: 668920 - RNA, 20 nt, Human
cacacacacacacacacaca

SEQ ID NO: 668921 - RNA, 20 nt, Human
cacacacacacacacacaca

SEQ ID NO: 668922 - RNA, 20 nt, Human
cacacacacacacacacaca

SEQ ID NO: 668923 - RNA, 20 nt, Human
cacacacacacacacacaca

SEQ ID NO: 668924 - RNA, 20 nt, Human
cacacacacacacacacaca

SEQ ID NO: 668925 - RNA, 20 nt, Human
cacacacacacacacacaca

SEQ ID NO: 668926 - RNA, 20 nt, Human
cacacacacacacacacaca

SEQ ID NO: 668927 - RNA, 20 nt, Human
cacacacacacacacacaca

SEQ ID NO: 668928 - RNA, 20 nt, Human
cacacacacacacacacaca

SEQ ID NO: 668929 - RNA, 20 nt, Human
cacacacacacacacacaca

SEQ ID NO: 668930 - RNA, 22 nt, Human
cacacacacacacacacacaca

SEQ ID NO: 668931 - RNA, 26 nt, Human
cacacacacacacacacacacacaca

SEQ ID NO: 668932 - RNA, 26 nt, Human
cacacacacacacacacacacacaca

SEQ ID NO: 668933 - RNA, 26 nt, Human
cacacacacacacacacacacacaca

SEQ ID NO: 668934 - RNA, 26 nt, Human
cacacacacacacacacacacacaca

SEQ ID NO: 668935 - RNA, 26 nt, Human
cacacacacacacacacacacacaug

SEQ ID NO: 668936 - RNA, 26 nt, Human
cacacacacacacacacacacaugcg

SEQ ID NO: 668937 - RNA, 19 nt, Human
caugaaguggaccauaagg

SEQ ID NO: 668938 - RNA, 24 nt, Human
cccgccaccacugccgggaauacg

SEQ ID NO: 668939 - RNA, 19 nt, Human
cccgcgggcgccgccgccg

SEQ ID NO: 668940 - RNA, 23 nt, Human
cccgcgggcgccgccgccgcccc

SEQ ID NO: 668941 - RNA, 20 nt, Human
ccgcccccgccaccacugcc

SEQ ID NO: 668942 - RNA, 25 nt, Human
ccgccgcccccgccaccacugccgg

SEQ ID NO: 668943 - RNA, 20 nt, Human
ccgccgccgcccccgccacc

SEQ ID NO: 668944 - RNA, 21 nt, Human
ccgccgccgcccccgccacca

SEQ ID NO: 668945 - RNA, 21 nt, Human
ccgcgggcgccgccgccgccc

SEQ ID NO: 668946 - RNA, 18 nt, Human
cgaugggguccgcagccg

SEQ ID NO: 668947 - RNA, 23 nt, Human
cucccgcgccuuccucucccugc

SEQ ID NO: 668948 - RNA, 22 nt, Human
cugacccagagguuccaucccu

SEQ ID NO: 668949 - RNA, 21 nt, Human
cuugccaaggcuggaaccucc

SEQ ID NO: 668950 - RNA, 22 nt, Human
gcacauucacugauaaaacauc

SEQ ID NO: 668951 - RNA, 18 nt, Human
gcgccgccgccgcccccg

SEQ ID NO: 668952 - RNA, 19 nt, Human
ggaaagaagcaugauccaa

SEQ ID NO: 668953 - RNA, 23 nt, Human
ggugcuccugcuuacagcucagg

SEQ ID NO: 668954 - RNA, 19 nt, Human
gucugaaaggcacaugaag

SEQ ID NO: 668955 - RNA, 22 nt, Human
uaaaacauccccuauucccucc

SEQ ID NO: 668956 - RNA, 24 nt, Human
uaaaacauccccuauucccuccca

SEQ ID NO: 668957 - RNA, 27 nt, Human
uaauuucagcaaacugauuuccaguac

SEQ ID NO: 668958 - RNA, 27 nt, Human
uccaggaagggccacacuccucuugcc

SEQ ID NO: 668959 - RNA, 22 nt, Human
ucccucccaagaaagcggagau

SEQ ID NO: 668960 - RNA, 21 nt, Human
ucccucuucagguggagcuac

SEQ ID NO: 668961 - RNA, 19 nt, Human
uccgcagccggcugcgggg

SEQ ID NO: 668962 - RNA, 18 nt, Human
ucugaaaggcacaugaag

SEQ ID NO: 668963 - RNA, 23 nt, Human
ugaaaggcacaugaaguggacca

SEQ ID NO: 668964 - RNA, 21 nt, Human
ugaacaucucugaauaugaaa

SEQ ID NO: 668965 - RNA, 19 nt, Human
ugaguguggauuccagcug

SEQ ID NO: 668966 - RNA, 23 nt, Human
ugcuaggaggguguguccagagg

SEQ ID NO: 668967 - RNA, 28 nt, Human
uggcacauucacugauaaaacauccccc

SEQ ID NO: 668968 - RNA, 24 nt, Human
ugugaacacguguuggaaagaagc

SEQ ID NO: 668969 - RNA, 18 nt, Human
uguuugcgucccccuccc

SEQ ID NO: 668970 - RNA, 26 nt, Human
aaaaaaaagacaacuguuaaagaaaa

SEQ ID NO: 668971 - RNA, 28 nt, Human
aaaaaaagcaagagaaagaccgguaccc

SEQ ID NO: 668972 - RNA, 18 nt, Human
aaaauagagucccugguc

SEQ ID NO: 668973 - RNA, 20 nt, Human
aaacuugaaaagaucaagug

SEQ ID NO: 668974 - RNA, 24 nt, Human
aaauccuuuauccuuuagaauguc

SEQ ID NO: 668975 - RNA, 19 nt, Human
aagggucacagaaagacag

SEQ ID NO: 668976 - RNA, 26 nt, Human
agaaaaaaaagacaacuguuaaagaa

SEQ ID NO: 668977 - RNA, 28 nt, Human
agaaaaaaaagacaacuguuaaagaaaa

SEQ ID NO: 668978 - RNA, 18 nt, Human
agauccucaacauaaaac

SEQ ID NO: 668979 - RNA, 22 nt, Human
auucuugauacagaaucaaaag

SEQ ID NO: 668980 - RNA, 24 nt, Human
caaaauagaugcucaaaauaaugc

SEQ ID NO: 668981 - RNA, 21 nt, Human
caagugcaguugauccaggcu

SEQ ID NO: 668982 - RNA, 21 nt, Human
caccucaaaauagaugcucaa

SEQ ID NO: 668983 - RNA, 19 nt, Human
cagcaaaaccaccuguuuc

SEQ ID NO: 668984 - RNA, 25 nt, Human
cgauaacaauacuuaaaugcacuuu

SEQ ID NO: 668985 - RNA, 28 nt, Human
cucaaaauagaugcucaaaauaaugccc

SEQ ID NO: 668986 - RNA, 25 nt, Human
cucaauagcagggaaaaaaaagcaa

SEQ ID NO: 668987 - RNA, 22 nt, Human
cugaauuuagaaaaaaaagaca

SEQ ID NO: 668988 - RNA, 24 nt, Human
cuguuucuuaggaguuucaccaua

SEQ ID NO: 668989 - RNA, 21 nt, Human
cuuaaggcaauauauuuaaau

SEQ ID NO: 668990 - RNA, 24 nt, Human
cuucuuccuccuuuucuaaagccc

SEQ ID NO: 668991 - RNA, 22 nt, Human
gcacauucuuuaguagguccuu

SEQ ID NO: 668992 - RNA, 23 nt, Human
gguggcacauucuuuaguagguc

SEQ ID NO: 668993 - RNA, 23 nt, Human
gucuccuuucucucagcaaacuc

SEQ ID NO: 668994 - RNA, 19 nt, Human
uaaacaucaccucaaaaua

SEQ ID NO: 668995 - RNA, 22 nt, Human
uaaaguaaaucaaaucaccuca

SEQ ID NO: 668996 - RNA, 24 nt, Human
uaagauccucaacauaaaacuuga

SEQ ID NO: 668997 - RNA, 23 nt, Human
uaauaauugauaaaaauguacaa

SEQ ID NO: 668998 - RNA, 23 nt, Human
uacaaaaauauucaaaucagaaa

SEQ ID NO: 668999 - RNA, 19 nt, Human
uacaaauccuuuauccuuu

SEQ ID NO: 669000 - RNA, 23 nt, Human
uagacaaggauauugcaacuauc

SEQ ID NO: 669001 - RNA, 19 nt, Human
uagaucuucaaaauccagc

SEQ ID NO: 669002 - RNA, 21 nt, Human
uagcagggaaaaaaaagcaag

SEQ ID NO: 669003 - RNA, 23 nt, Human
uagcagggaaaaaaaagcaagag

SEQ ID NO: 669004 - RNA, 22 nt, Human
uaguugaucuuuuaguugaacu

SEQ ID NO: 669005 - RNA, 23 nt, Human
uaucgccacaaaaucuucaaaag

SEQ ID NO: 669006 - RNA, 20 nt, Human
ucaaagcaaauuaaugcauc

SEQ ID NO: 669007 - RNA, 21 nt, Human
ucagaacuaauaguuggauac

SEQ ID NO: 669008 - RNA, 26 nt, Human
uccauccuacagugcccugugaaagg

SEQ ID NO: 669009 - RNA, 18 nt, Human
ucuccuuucucucagcaa

SEQ ID NO: 669010 - RNA, 22 nt, Human
ugaaaagaucaagugcaguuga

SEQ ID NO: 669011 - RNA, 19 nt, Human
ugaaagggucacagaaaga

SEQ ID NO: 669012 - RNA, 19 nt, Human
ugaccaagcauauuaguga

SEQ ID NO: 669013 - RNA, 24 nt, Human
ugcuuuaagauccucaacauaaaa

SEQ ID NO: 669014 - RNA, 24 nt, Human
ugugaaagggucacagaaagacag

SEQ ID NO: 669015 - RNA, 21 nt, Human
uuaauccauccuacagugccc

SEQ ID NO: 669016 - RNA, 23 nt, Human
uucagauguuugauaaaaaauaa

SEQ ID NO: 669017 - RNA, 23 nt, Human
uuccagcaaaaccaccuguuucu

SEQ ID NO: 669018 - RNA, 19 nt, Human
uucuuuguccauauuuugu

SEQ ID NO: 669019 - RNA, 23 nt, Human
uugauccaggcugaccaagcaua

SEQ ID NO: 669020 - RNA, 20 nt, Human
uugccaccuuuaauccaucc

SEQ ID NO: 669021 - RNA, 23 nt, Human
uuuaagauccucaacauaaaacu

SEQ ID NO: 669022 - RNA, 21 nt, Human
uuuagaaaaaaaagacaacug

SEQ ID NO: 669023 - RNA, 20 nt, Human
uuucuucuucuuccuccuuu

SEQ ID NO: 669024 - RNA, 23 nt, Human
uuucuucuucuuccuccuuuucu

SEQ ID NO: 669025 - RNA, 21 nt, Human
uuuuucgcugucgucuccuuu

SEQ ID NO: 669026 - RNA, 22 nt, Human
aggcaggaccuccaccaacagc

SEQ ID NO: 669027 - RNA, 21 nt, Human
agguuguuggaagaaccccag

SEQ ID NO: 669028 - RNA, 27 nt, Human
caacagcgcuguaggucccccgaaucg

SEQ ID NO: 669029 - RNA, 19 nt, Human
caccaacagcgcuguaggu

SEQ ID NO: 669030 - RNA, 21 nt, Human
ccaucuauuccuggaggcagg

SEQ ID NO: 669031 - RNA, 23 nt, Human
uccaccaacagcgcuguaggucc

SEQ ID NO: 669032 - RNA, 28 nt, Human
uccaccaacagcgcuguagguccaggcu

SEQ ID NO: 669033 - RNA, 18 nt, Human
uggaagaaccccagagga

SEQ ID NO: 669034 - RNA, 22 nt, Human
uguuggaagaaccccagaggac

SEQ ID NO: 669035 - RNA, 21 nt, Human
uuccuggaggcaggaccucca

SEQ ID NO: 669036 - RNA, 20 nt, Human
uuguuggaagaaccccagag

SEQ ID NO: 669037 - RNA, 21 nt, Human
aaccccgccccaccgggccac

SEQ ID NO: 669038 - RNA, 18 nt, Human
acccgcuccccugacccc

SEQ ID NO: 669039 - RNA, 20 nt, Human
acucugaggggucgcucggg

SEQ ID NO: 669040 - RNA, 22 nt, Human
agcgagagguuguggcggaugc

SEQ ID NO: 669041 - RNA, 20 nt, Human
agcgcgauguacgaggaggg

SEQ ID NO: 669042 - RNA, 24 nt, Human
aggugcccgcccagcaccgcgccc

SEQ ID NO: 669043 - RNA, 25 nt, Human
aggugcccgcccagcaccgcgcccu

SEQ ID NO: 669044 - RNA, 19 nt, Human
auguacgaggaggggggcu

SEQ ID NO: 669045 - RNA, 21 nt, Human
caccgggccaccugcagcccc

SEQ ID NO: 669046 - RNA, 18 nt, Human
cagccccuguacccgcuc

SEQ ID NO: 669047 - RNA, 20 nt, Human
cagccccuguacccgcuccc

SEQ ID NO: 669048 - RNA, 19 nt, Human
ccaccugcagccccggcug

SEQ ID NO: 669049 - RNA, 18 nt, Human
cccggaggcugcgcugcg

SEQ ID NO: 669050 - RNA, 22 nt, Human
cccucugccaccgccugauacc

SEQ ID NO: 669051 - RNA, 21 nt, Human
ccgccgccgcccucgaugugc

SEQ ID NO: 669052 - RNA, 19 nt, Human
ccguuggcgcaguccuccu

SEQ ID NO: 669053 - RNA, 20 nt, Human
ccguuggcgcaguccuccuc

SEQ ID NO: 669054 - RNA, 24 nt, Human
ccuccucgucuucaucuuccuccu

SEQ ID NO: 669055 - RNA, 20 nt, Human
ccucgucuucaucuuccucc

SEQ ID NO: 669056 - RNA, 18 nt, Human
ccugggaggcgggguccc

SEQ ID NO: 669057 - RNA, 19 nt, Human
cgauuuuaccgucuucccc

SEQ ID NO: 669058 - RNA, 20 nt, Human
cgccccaccgggccaccugc

SEQ ID NO: 669059 - RNA, 21 nt, Human
cgccugauaccgcagcagcgc

SEQ ID NO: 669060 - RNA, 20 nt, Human
cgcucgggccgccgccgccc

SEQ ID NO: 669061 - RNA, 21 nt, Human
cgcucgggccgccgccgcccu

SEQ ID NO: 669062 - RNA, 23 nt, Human
cgcugagcgugaggcgcuugugc

SEQ ID NO: 669063 - RNA, 25 nt, Human
cgucuucaucuuccuccucucccaa

SEQ ID NO: 669064 - RNA, 20 nt, Human
cugccaggcggggaacuugc

SEQ ID NO: 669065 - RNA, 22 nt, Human
cuucagaggccgccgcagaccu

SEQ ID NO: 669066 - RNA, 22 nt, Human
gaagcgcaaccccgccccaccg

SEQ ID NO: 669067 - RNA, 20 nt, Human
gacgcggccgacaggugccc

SEQ ID NO: 669068 - RNA, 21 nt, Human
gagcgcgauguacgaggaggg

SEQ ID NO: 669069 - RNA, 21 nt, Human
gcagaccuuggcggugcccug

SEQ ID NO: 669070 - RNA, 25 nt, Human
gcgcagccccuguacccgcuccccu

SEQ ID NO: 669071 - RNA, 19 nt, Human
gcgggcuuugcaggauggc

SEQ ID NO: 669072 - RNA, 24 nt, Human
gcugcgcugcgguguggagcgaag

SEQ ID NO: 669073 - RNA, 18 nt, Human
ggccauggugaugagcgc

SEQ ID NO: 669074 - RNA, 25 nt, Human
ggcucgccgccuccuccucgucuuc

SEQ ID NO: 669075 - RNA, 20 nt, Human
gggaagcgcaaccccgcccc

SEQ ID NO: 669076 - RNA, 24 nt, Human
gggcuuugccggcugccgggcauc

SEQ ID NO: 669077 - RNA, 22 nt, Human
gucgcucgggccgccgccgccc

SEQ ID NO: 669078 - RNA, 27 nt, Human
gucgcucgggccgccgccgcccucgau

SEQ ID NO: 669079 - RNA, 22 nt, Human
uccccaucggagucccggaggc

SEQ ID NO: 669080 - RNA, 23 nt, Human
uccuccuccugaugccgcugcug

SEQ ID NO: 669081 - RNA, 28 nt, Human
uccuccugaugccgcugcuguugcugcc

SEQ ID NO: 669082 - RNA, 23 nt, Human
ucugccaggcggggaacuugcgg

SEQ ID NO: 669083 - RNA, 21 nt, Human
ucuucagaggccgccgcagac

SEQ ID NO: 669084 - RNA, 22 nt, Human
ugacggucgcuggagcaggggg

SEQ ID NO: 669085 - RNA, 23 nt, Human
ugccaaacucugaggggucgcuc

SEQ ID NO: 669086 - RNA, 19 nt, Human
ugcccuugccugggcggcc

SEQ ID NO: 669087 - RNA, 19 nt, Human
ugcgcagccccuguacccg

SEQ ID NO: 669088 - RNA, 21 nt, Human
ugggaggcgggguccaggcuc

SEQ ID NO: 669089 - RNA, 19 nt, Human
ugucgaacauguccuggga

SEQ ID NO: 669090 - RNA, 22 nt, Human
ugucgaacauguccugggaggc

SEQ ID NO: 669091 - RNA, 21 nt, Human
uguggcggaugcuguucugcc

SEQ ID NO: 669092 - RNA, 18 nt, Human
uugcaggauggccauggu

SEQ ID NO: 669093 - RNA, 19 nt, Human
aagggggaggggagggaag

SEQ ID NO: 669094 - RNA, 18 nt, Human
acccuaggaacaagaggg

SEQ ID NO: 669095 - RNA, 19 nt, Human
agaaggcagggccgggacc

SEQ ID NO: 669096 - RNA, 22 nt, Human
agacagcgugggcaggggccug

SEQ ID NO: 669097 - RNA, 25 nt, Human
aggaacaagagggggacacauugac

SEQ ID NO: 669098 - RNA, 20 nt, Human
aggccucagucuccaccccu

SEQ ID NO: 669099 - RNA, 19 nt, Human
aggggagggaagggaggaa

SEQ ID NO: 669100 - RNA, 23 nt, Human
aucauucggauggaagggggagg

SEQ ID NO: 669101 - RNA, 21 nt, Human
cagcgugggcaggggccuggc

SEQ ID NO: 669102 - RNA, 22 nt, Human
ccaagcucccaaggcguggggc

SEQ ID NO: 669103 - RNA, 21 nt, Human
cccaugccaagcucccaaggc

SEQ ID NO: 669104 - RNA, 24 nt, Human
ccuuuggguggccaggcccggcuu

SEQ ID NO: 669105 - RNA, 22 nt, Human
cgggagggaggagcggccccug

SEQ ID NO: 669106 - RNA, 22 nt, Human
cgugggcaggggccuggccggg

SEQ ID NO: 669107 - RNA, 18 nt, Human
gaagggggaggggaggga

SEQ ID NO: 669108 - RNA, 24 nt, Human
gagcaugccgagggcuuccacaau

SEQ ID NO: 669109 - RNA, 20 nt, Human
gagggaagggaggaagaggc

SEQ ID NO: 669110 - RNA, 20 nt, Human
gcccgcacccuaggaacaag

SEQ ID NO: 669111 - RNA, 18 nt, Human
gccgccucccuugcuccc

SEQ ID NO: 669112 - RNA, 18 nt, Human
gccuuuggguggccaggc

SEQ ID NO: 669113 - RNA, 20 nt, Human
ggaagaggcugugggggagg

SEQ ID NO: 669114 - RNA, 24 nt, Human
ggaccugaggccgggcuggggcag

SEQ ID NO: 669115 - RNA, 19 nt, Human
ggagggaggagcggccccu

SEQ ID NO: 669116 - RNA, 22 nt, Human
ggcagagagcauucuagugggg

SEQ ID NO: 669117 - RNA, 21 nt, Human
ggccgggaccugaggccgggc

SEQ ID NO: 669118 - RNA, 23 nt, Human
ggccgggcuggggcaggcgggcu

SEQ ID NO: 669119 - RNA, 21 nt, Human
gggaagggaggaagaggcugu

SEQ ID NO: 669120 - RNA, 18 nt, Human
gggaggggagcaugccga

SEQ ID NO: 669121 - RNA, 23 nt, Human
gggcaggggccuggccgggugga

SEQ ID NO: 669122 - RNA, 30 nt, Human
gggcaggggccuggccggguggagggugcc

SEQ ID NO: 669123 - RNA, 19 nt, Human
gggcaguguagaaggcagg

SEQ ID NO: 669124 - RNA, 21 nt, Human
gggcgguggggcaguguagaa

SEQ ID NO: 669125 - RNA, 27 nt, Human
gggcuggggcaggcgggcuggggccuu

SEQ ID NO: 669126 - RNA, 20 nt, Human
gggggaguauuuagcccaug

SEQ ID NO: 669127 - RNA, 18 nt, Human
ggggugggagcgggaggg

SEQ ID NO: 669128 - RNA, 21 nt, Human
gguggagggugcagggcggug

SEQ ID NO: 669129 - RNA, 21 nt, Human
uaggaacaagagggggacaca

SEQ ID NO: 669130 - RNA, 24 nt, Human
uagugggggcuucuccugaggccu

SEQ ID NO: 669131 - RNA, 24 nt, Human
uaucccgucuucccuggucagguu

SEQ ID NO: 669132 - RNA, 24 nt, Human
ucaaaggggcugcgaugacccaug

SEQ ID NO: 669133 - RNA, 19 nt, Human
ucgcagacagccgccuccc

SEQ ID NO: 669134 - RNA, 18 nt, Human
ugcagggcgguggggcag

SEQ ID NO: 669135 - RNA, 19 nt, Human
ugccuuuggguggccaggc

SEQ ID NO: 669136 - RNA, 23 nt, Human
ugcuaguaggcccugaacuaugg

SEQ ID NO: 669137 - RNA, 23 nt, Human
uggaagggaggggcagagagcau

SEQ ID NO: 669138 - RNA, 20 nt, Human
ugggcaggggccuggccggg

SEQ ID NO: 669139 - RNA, 19 nt, Human
uggggcaggcgggcugggg

SEQ ID NO: 669140 - RNA, 18 nt, Human
ugggggugggagcgggag

SEQ ID NO: 669141 - RNA, 24 nt, Human
ugugggggaggggagcaugccgag

SEQ ID NO: 669142 - RNA, 20 nt, Human
uuagcccaugccaagcuccc

SEQ ID NO: 669143 - RNA, 20 nt, Human
uuccuggaggagaaggccau

SEQ ID NO: 669144 - RNA, 18 nt, Human
aaacacggaacaaugaaa

SEQ ID NO: 669145 - RNA, 25 nt, Human
aaaccaccaaacccaaacuuccagc

SEQ ID NO: 669146 - RNA, 23 nt, Human
aaacuuccagcugcucucagccu

SEQ ID NO: 669147 - RNA, 25 nt, Human
aaauugccccacggggcaggagggu

SEQ ID NO: 669148 - RNA, 22 nt, Human
aacaaugaaacacuguguguac

SEQ ID NO: 669149 - RNA, 22 nt, Human
aaccaccaaacccaaacuucca

SEQ ID NO: 669150 - RNA, 19 nt, Human
aaggcacgccccacgcccc

SEQ ID NO: 669151 - RNA, 20 nt, Human
accaaacccaaacuuccagc

SEQ ID NO: 669152 - RNA, 18 nt, Human
acccaaacuuccagcugc

SEQ ID NO: 669153 - RNA, 23 nt, Human
accccgggggcgccuccuccgaa

SEQ ID NO: 669154 - RNA, 21 nt, Human
acggccucccggacgcgcgcu

SEQ ID NO: 669155 - RNA, 21 nt, Human
agagaccuggggaagcagggg

SEQ ID NO: 669156 - RNA, 22 nt, Human
agagaccuggggaagcaggggg

SEQ ID NO: 669157 - RNA, 19 nt, Human
agccugccccggccccagg

SEQ ID NO: 669158 - RNA, 19 nt, Human
agcuugguugccccggccc

SEQ ID NO: 669159 - RNA, 19 nt, Human
aggcacgccccacgccccc

SEQ ID NO: 669160 - RNA, 21 nt, Human
caaugaaacacuguguguaca

SEQ ID NO: 669161 - RNA, 19 nt, Human
cacagccugccccggcccc

SEQ ID NO: 669162 - RNA, 21 nt, Human
caccaaacccaaacuuccagc

SEQ ID NO: 669163 - RNA, 25 nt, Human
cacgcccccgaggagugcaggcagg

SEQ ID NO: 669164 - RNA, 20 nt, Human
cagcccagggaguccgggug

SEQ ID NO: 669165 - RNA, 22 nt, Human
ccaaaccaccaaacccaaacuu

SEQ ID NO: 669166 - RNA, 19 nt, Human
ccacgggcugagccgggug

SEQ ID NO: 669167 - RNA, 21 nt, Human
cccacgcccccgaggagugca

SEQ ID NO: 669168 - RNA, 20 nt, Human
ccccaaaccaccaaacccaa

SEQ ID NO: 669169 - RNA, 24 nt, Human
ccccaaaccaccaaacccaaacuu

SEQ ID NO: 669170 - RNA, 23 nt, Human
ccccacgcccccgaggagugcag

SEQ ID NO: 669171 - RNA, 23 nt, Human
ccccagacucccguuacacggcc

SEQ ID NO: 669172 - RNA, 18 nt, Human
ccccagccugacccgggc

SEQ ID NO: 669173 - RNA, 19 nt, Human
cccccaaaccaccaaaccc

SEQ ID NO: 669174 - RNA, 29 nt, Human
cccccaaaccaccaaacccaaacuuccag

SEQ ID NO: 669175 - RNA, 21 nt, Human
cccccgaggagugcaggcagg

SEQ ID NO: 669176 - RNA, 24 nt, Human
ccccgaggagugcaggcaggggcg

SEQ ID NO: 669177 - RNA, 20 nt, Human
ccccggccccagggaggcuc

SEQ ID NO: 669178 - RNA, 21 nt, Human
cccgcccccuagggauggggc

SEQ ID NO: 669179 - RNA, 18 nt, Human
cccggcccccaaaccacc

SEQ ID NO: 669180 - RNA, 20 nt, Human
cccucccaguuaagccucag

SEQ ID NO: 669181 - RNA, 18 nt, Human
cccucguuuucagccucc

SEQ ID NO: 669182 - RNA, 20 nt, Human
cccugcuccgccccauccac

SEQ ID NO: 669183 - RNA, 20 nt, Human
ccggcccccaaaccaccaaa

SEQ ID NO: 669184 - RNA, 19 nt, Human
ccuccaggccucggcucuc

SEQ ID NO: 669185 - RNA, 20 nt, Human
ccugggcccucguuuucagc

SEQ ID NO: 669186 - RNA, 22 nt, Human
cgccgcgcucucuggcccgcug

SEQ ID NO: 669187 - RNA, 18 nt, Human
cgcugaguccccagacuc

SEQ ID NO: 669188 - RNA, 22 nt, Human
cgcuucuuggucccaguaguuc

SEQ ID NO: 669189 - RNA, 21 nt, Human
cggcccccaaaccaccaaacc

SEQ ID NO: 669190 - RNA, 22 nt, Human
cggcccccaaaccaccaaaccc

SEQ ID NO: 669191 - RNA, 24 nt, Human
cggcccccaaaccaccaaacccaa

SEQ ID NO: 669192 - RNA, 22 nt, Human
cuccccgcccccuagggauggg

SEQ ID NO: 669193 - RNA, 23 nt, Human
cucccguuacacggccucccgga

SEQ ID NO: 669194 - RNA, 19 nt, Human
cucucugcccccuccccca

SEQ ID NO: 669195 - RNA, 23 nt, Human
cuguuccuccccagccuggugac

SEQ ID NO: 669196 - RNA, 19 nt, Human
gcagcgauucugguccugg

SEQ ID NO: 669197 - RNA, 24 nt, Human
gccuuggagcccuggcccagcccc

SEQ ID NO: 669198 - RNA, 20 nt, Human
gcucugggagggcccaguuc

SEQ ID NO: 669199 - RNA, 20 nt, Human
gcuggggcugguggccaugu

SEQ ID NO: 669200 - RNA, 19 nt, Human
ggagaagccuccagggggu

SEQ ID NO: 669201 - RNA, 18 nt, Human
gggaagcggaggugcucu

SEQ ID NO: 669202 - RNA, 24 nt, Human
ggggaagcggaggugcucugggag

SEQ ID NO: 669203 - RNA, 18 nt, Human
gggguaccccgcuucuug

SEQ ID NO: 669204 - RNA, 20 nt, Human
gguggggcagggccuggccu

SEQ ID NO: 669205 - RNA, 21 nt, Human
gugcaggcaggggcguggggu

SEQ ID NO: 669206 - RNA, 19 nt, Human
guggagcaaggcacgcccc

SEQ ID NO: 669207 - RNA, 20 nt, Human
guuacacggccucccggacg

SEQ ID NO: 669208 - RNA, 24 nt, Human
guuuuggacccugacuugggcacu

SEQ ID NO: 669209 - RNA, 19 nt, Human
uaaguauguggugccugcg

SEQ ID NO: 669210 - RNA, 23 nt, Human
uaauuagcauuuguuguaccugg

SEQ ID NO: 669211 - RNA, 18 nt, Human
uacaagguggggcugggg

SEQ ID NO: 669212 - RNA, 30 nt, Human
uaccccgcuucuuggucccaguaguuccaa

SEQ ID NO: 669213 - RNA, 20 nt, Human
uccacgggcugagccgggug

SEQ ID NO: 669214 - RNA, 21 nt, Human
uccgagggggcggucagcauc

SEQ ID NO: 669215 - RNA, 23 nt, Human
uccugggcccucguuucucgggg

SEQ ID NO: 669216 - RNA, 19 nt, Human
uccuuuagccgguuucugg

SEQ ID NO: 669217 - RNA, 25 nt, Human
ucgggcuuaaagauuagggauuuac

SEQ ID NO: 669218 - RNA, 22 nt, Human
ucucagccucaagucgggcuua

SEQ ID NO: 669219 - RNA, 18 nt, Human
ucucauggugcagggucc

SEQ ID NO: 669220 - RNA, 18 nt, Human
ucuccgagggggcgguca

SEQ ID NO: 669221 - RNA, 18 nt, Human
ucucucugcccccucccc

SEQ ID NO: 669222 - RNA, 22 nt, Human
ucucuggcccgcugagucccca

SEQ ID NO: 669223 - RNA, 21 nt, Human
ucuguccugccccauacagcu

SEQ ID NO: 669224 - RNA, 21 nt, Human
ucuguggaccuguguuggggg

SEQ ID NO: 669225 - RNA, 18 nt, Human
ugacuugggcacugucca

SEQ ID NO: 669226 - RNA, 24 nt, Human
ugccaggagaagccuccagggggu

SEQ ID NO: 669227 - RNA, 22 nt, Human
ugccccggccccagggaggcuc

SEQ ID NO: 669228 - RNA, 24 nt, Human
ugcucucagccucaagucgggcuu

SEQ ID NO: 669229 - RNA, 23 nt, Human
uggaccuguguuggggggcaguu

SEQ ID NO: 669230 - RNA, 20 nt, Human
uggcaccaccucauuuuggu

SEQ ID NO: 669231 - RNA, 18 nt, Human
uggccauguggccuuugg

SEQ ID NO: 669232 - RNA, 24 nt, Human
uggcccgccgcgcucucuggcccg

SEQ ID NO: 669233 - RNA, 23 nt, Human
ugggaaaacacggaacaaugaaa

SEQ ID NO: 669234 - RNA, 21 nt, Human
uggggccaggcaaagacccca

SEQ ID NO: 669235 - RNA, 23 nt, Human
uggggcuggggaaaggaggcagc

SEQ ID NO: 669236 - RNA, 24 nt, Human
uggucuccucucucugcccccucc

SEQ ID NO: 669237 - RNA, 22 nt, Human
uguaaauaacuuucaugaaaaa

SEQ ID NO: 669238 - RNA, 20 nt, Human
agagcgaaguccaugaugcu

SEQ ID NO: 669239 - RNA, 18 nt, Human
agcgggcuggggcugagg

SEQ ID NO: 669240 - RNA, 22 nt, Human
augcgccacggccacuguggug

SEQ ID NO: 669241 - RNA, 27 nt, Human
cacccgaggcagggguuaaccgggucg

SEQ ID NO: 669242 - RNA, 20 nt, Human
caccucaguguucaugucgg

SEQ ID NO: 669243 - RNA, 20 nt, Human
cacggccacugugguggcgu

SEQ ID NO: 669244 - RNA, 18 nt, Human
cacugugguggcgugagu

SEQ ID NO: 669245 - RNA, 19 nt, Human
cagccgaggcacauccacc

SEQ ID NO: 669246 - RNA, 24 nt, Human
cagggcgugcaguggcggggucug

SEQ ID NO: 669247 - RNA, 21 nt, Human
cagggguuaggccugaggccc

SEQ ID NO: 669248 - RNA, 19 nt, Human
caucaguggcugggguggg

SEQ ID NO: 669249 - RNA, 24 nt, Human
ccacgacagcgacugcaggucccc

SEQ ID NO: 669250 - RNA, 20 nt, Human
cucauccuucaucuccuccc

SEQ ID NO: 669251 - RNA, 21 nt, Human
cugcagccgaggcacauccac

SEQ ID NO: 669252 - RNA, 21 nt, Human
cugugguggcgugagucagca

SEQ ID NO: 669253 - RNA, 24 nt, Human
cugugguggcgugagucagcacgg

SEQ ID NO: 669254 - RNA, 23 nt, Human
gacugcagggacagggucaucag

SEQ ID NO: 669255 - RNA, 20 nt, Human
gagcgggcuggggcugaggu

SEQ ID NO: 669256 - RNA, 22 nt, Human
gagcgggcuggggcugaggucc

SEQ ID NO: 669257 - RNA, 21 nt, Human
gaggcacauccaccgccguga

SEQ ID NO: 669258 - RNA, 21 nt, Human
gcgugcaguggcggggucugg

SEQ ID NO: 669259 - RNA, 21 nt, Human
ggagcgggcuggggcugaggu

SEQ ID NO: 669260 - RNA, 20 nt, Human
gggcuggggcugagguccgg

SEQ ID NO: 669261 - RNA, 25 nt, Human
ggggugggggagcgggcuggggcug

SEQ ID NO: 669262 - RNA, 18 nt, Human
gggugggagcugggagac

SEQ ID NO: 669263 - RNA, 19 nt, Human
gggugggggagcgggcugg

SEQ ID NO: 669264 - RNA, 22 nt, Human
gggugggggagcgggcuggggc

SEQ ID NO: 669265 - RNA, 18 nt, Human
ggguuaggccugaggccc

SEQ ID NO: 669266 - RNA, 24 nt, Human
ggugcagggggacugacugcaggg

SEQ ID NO: 669267 - RNA, 20 nt, Human
ggugcuggagagucuggagc

SEQ ID NO: 669268 - RNA, 19 nt, Human
gugcaguggcggggucugg

SEQ ID NO: 669269 - RNA, 20 nt, Human
guggcuggggugggagcugg

SEQ ID NO: 669270 - RNA, 19 nt, Human
ucaguggcuggggugggag

SEQ ID NO: 669271 - RNA, 21 nt, Human
ucaucaguggcuggggugggg

SEQ ID NO: 669272 - RNA, 20 nt, Human
uccccugcagagcgaagucc

SEQ ID NO: 669273 - RNA, 22 nt, Human
uccccugcagagcgaaguccau

SEQ ID NO: 669274 - RNA, 21 nt, Human
ucccucauccuucaucuccuc

SEQ ID NO: 669275 - RNA, 23 nt, Human
uccucccacagguuccccugcag

SEQ ID NO: 669276 - RNA, 21 nt, Human
ucgcugccacccgaggcaggu

SEQ ID NO: 669277 - RNA, 23 nt, Human
ugaggcccccaggucacagccaa

SEQ ID NO: 669278 - RNA, 20 nt, Human
uggcggggucugggcuggug

SEQ ID NO: 669279 - RNA, 23 nt, Human
uggcgugagucagcacgggggcc

SEQ ID NO: 669280 - RNA, 18 nt, Human
ugggaaggacuggucgcg

SEQ ID NO: 669281 - RNA, 18 nt, Human
ugggcuggugcuggagag

SEQ ID NO: 669282 - RNA, 24 nt, Human
uggggugggagcugggagacagcc

SEQ ID NO: 669283 - RNA, 21 nt, Human
ugugguggcgugagucagcac

SEQ ID NO: 669284 - RNA, 22 nt, Human
aaaaaauaaaggaaagacagaa

SEQ ID NO: 669285 - RNA, 23 nt, Human
aagaagggggagcagcagcccag

SEQ ID NO: 669286 - RNA, 22 nt, Human
aauaaaggaaagacagaaagaa

SEQ ID NO: 669287 - RNA, 22 nt, Human
agaaagaagggggagcagcagc

SEQ ID NO: 669288 - RNA, 22 nt, Human
agaagggggagcagcagcccag

SEQ ID NO: 669289 - RNA, 23 nt, Human
agaagggggagcagcagcccagc

SEQ ID NO: 669290 - RNA, 22 nt, Human
agcaccaaagaagagagaagga

SEQ ID NO: 669291 - RNA, 18 nt, Human
agcccggggacugcgcgg

SEQ ID NO: 669292 - RNA, 29 nt, Human
aggaaagacagaaagaagggggaggaaac

SEQ ID NO: 669293 - RNA, 25 nt, Human
agggggagcagcagcccagcgggug

SEQ ID NO: 669294 - RNA, 23 nt, Human
caaaaaauaaaggaaagacagaa

SEQ ID NO: 669295 - RNA, 23 nt, Human
caaaggguuuucucuguaggucu

SEQ ID NO: 669296 - RNA, 26 nt, Human
caccccccacccggucgaauggcccg

SEQ ID NO: 669297 - RNA, 22 nt, Human
cagcccccuccccccgccgccc

SEQ ID NO: 669298 - RNA, 22 nt, Human
cagcggguguucgcagagguuc

SEQ ID NO: 669299 - RNA, 24 nt, Human
cagcucccucuccccucuucgccc

SEQ ID NO: 669300 - RNA, 27 nt, Human
ccaccucccaguccugccgcgcccgcc

SEQ ID NO: 669301 - RNA, 21 nt, Human
cccagccgcaggucccucccg

SEQ ID NO: 669302 - RNA, 19 nt, Human
ccccccgucaccccccacc

SEQ ID NO: 669303 - RNA, 22 nt, Human
ccccccgucaccccccacccgg

SEQ ID NO: 669304 - RNA, 19 nt, Human
ccccggccaggccgcgaug

SEQ ID NO: 669305 - RNA, 19 nt, Human
ccccgucaccccccacccg

SEQ ID NO: 669306 - RNA, 19 nt, Human
cccgcggcgccgccgcuca

SEQ ID NO: 669307 - RNA, 21 nt, Human
cccgcugccgccaccucccag

SEQ ID NO: 669308 - RNA, 23 nt, Human
cccgcugccgccaccucccaguc

SEQ ID NO: 669309 - RNA, 21 nt, Human
cccgggccggagccccguccu

SEQ ID NO: 669310 - RNA, 19 nt, Human
ccgcaggucccucccgggc

SEQ ID NO: 669311 - RNA, 24 nt, Human
ccgccgcccagccgcaggucccuc

SEQ ID NO: 669312 - RNA, 22 nt, Human
ccgccgcucaagucugugcugu

SEQ ID NO: 669313 - RNA, 23 nt, Human
ccgccgcucaagucugugcuguc

SEQ ID NO: 669314 - RNA, 24 nt, Human
ccgcgcccgccucccaggaacagg

SEQ ID NO: 669315 - RNA, 18 nt, Human
ccgcggucagagcccgag

SEQ ID NO: 669316 - RNA, 28 nt, Human
ccucccaggaacaggaggaccugaagac

SEQ ID NO: 669317 - RNA, 20 nt, Human
ccuccccccgccgcccagcc

SEQ ID NO: 669318 - RNA, 23 nt, Human
ccuccccccgccgcccagccgca

SEQ ID NO: 669319 - RNA, 22 nt, Human
ccuccgcgaccccccgucaccc

SEQ ID NO: 669320 - RNA, 20 nt, Human
ccucgcgcggggcagccccc

SEQ ID NO: 669321 - RNA, 23 nt, Human
ccucuucgcccgcgggccagagg

SEQ ID NO: 669322 - RNA, 24 nt, Human
ccugccgcgcccgccucccaggaa

SEQ ID NO: 669323 - RNA, 23 nt, Human
ccuggggaagcaccaaagaagag

SEQ ID NO: 669324 - RNA, 18 nt, Human
cgaccccccgucaccccc

SEQ ID NO: 669325 - RNA, 22 nt, Human
cgaccccccgucaccccccacc

SEQ ID NO: 669326 - RNA, 23 nt, Human
cgaccccccgucaccccccaccc

SEQ ID NO: 669327 - RNA, 19 nt, Human
cgagcgaaucgacggccuc

SEQ ID NO: 669328 - RNA, 19 nt, Human
cgaguccucgcccgcugcc

SEQ ID NO: 669329 - RNA, 19 nt, Human
cgcagagguucgagcccgg

SEQ ID NO: 669330 - RNA, 24 nt, Human
cgcagaugggcccuugucacuucc

SEQ ID NO: 669331 - RNA, 20 nt, Human
cgccgcucaagucugugcug

SEQ ID NO: 669332 - RNA, 24 nt, Human
cgccggggcggggugcagcggggg

SEQ ID NO: 669333 - RNA, 21 nt, Human
cgccuccgcgaccccccguca

SEQ ID NO: 669334 - RNA, 18 nt, Human
cggcucccgggcgccgcc

SEQ ID NO: 669335 - RNA, 19 nt, Human
cggcucuucuccccuuucc

SEQ ID NO: 669336 - RNA, 23 nt, Human
cggggacugcgcgggcagcuccc

SEQ ID NO: 669337 - RNA, 18 nt, Human
cggggcggggagaagggg

SEQ ID NO: 669338 - RNA, 22 nt, Human
cuccgcccccuucccagucggg

SEQ ID NO: 669339 - RNA, 24 nt, Human
gagaaggagaguugguuaucccgg

SEQ ID NO: 669340 - RNA, 21 nt, Human
gagcagauuuggcaaaggguu

SEQ ID NO: 669341 - RNA, 18 nt, Human
gagcagcagcccagcggg

SEQ ID NO: 669342 - RNA, 18 nt, Human
gagcagcagcccagcggg

SEQ ID NO: 669343 - RNA, 20 nt, Human
gcccggcggggacggccacu

SEQ ID NO: 669344 - RNA, 18 nt, Human
gccgccaccucccagucc

SEQ ID NO: 669345 - RNA, 22 nt, Human
gccggagccccguccucggcga

SEQ ID NO: 669346 - RNA, 26 nt, Human
gcgccggggcggggugcagcggggga

SEQ ID NO: 669347 - RNA, 20 nt, Human
gcggggagaagggggagggg

SEQ ID NO: 669348 - RNA, 22 nt, Human
ggaaagacagaaagaaggggga

SEQ ID NO: 669349 - RNA, 25 nt, Human
ggaccugaagacgugcggccagcgg

SEQ ID NO: 669350 - RNA, 21 nt, Human
ggaggggcgcccgggggaggg

SEQ ID NO: 669351 - RNA, 18 nt, Human
ggaggggcggccgcgccu

SEQ ID NO: 669352 - RNA, 21 nt, Human
ggcggggcggggagaaggggg

SEQ ID NO: 669353 - RNA, 21 nt, Human
gggagaagggggaggggcgcc

SEQ ID NO: 669354 - RNA, 18 nt, Human
gggagcagcagcccagcg

SEQ ID NO: 669355 - RNA, 21 nt, Human
gggcggggagaagggggaggg

SEQ ID NO: 669356 - RNA, 23 nt, Human
ggggaggggcgcccgggggaggg

SEQ ID NO: 669357 - RNA, 20 nt, Human
gggugcagcgggggagggac

SEQ ID NO: 669358 - RNA, 23 nt, Human
gucugugcugucuucggcucuuc

SEQ ID NO: 669359 - RNA, 21 nt, Human
uaaagcgggcagcggccggag

SEQ ID NO: 669360 - RNA, 25 nt, Human
uaaaggaaagacagaaagaaggggg

SEQ ID NO: 669361 - RNA, 24 nt, Human
ucacuguccacuugcugagagcag

SEQ ID NO: 669362 - RNA, 26 nt, Human
ucacuguccacuugcugagagcagau

SEQ ID NO: 669363 - RNA, 22 nt, Human
ucacuuccaaaaaauaaaggaa

SEQ ID NO: 669364 - RNA, 21 nt, Human
uccaaggguaagugcuucacc

SEQ ID NO: 669365 - RNA, 19 nt, Human
ucccaggaacaggaggacc

SEQ ID NO: 669366 - RNA, 20 nt, Human
uccccccgccgcccagccgc

SEQ ID NO: 669367 - RNA, 23 nt, Human
ucccgggccggagccccguccuc

SEQ ID NO: 669368 - RNA, 21 nt, Human
ucccgggcgccgccgccgccg

SEQ ID NO: 669369 - RNA, 18 nt, Human
uccgggggagggagcgag

SEQ ID NO: 669370 - RNA, 23 nt, Human
uccugccgcgcccgccucccagg

SEQ ID NO: 669371 - RNA, 19 nt, Human
ucgcccgcgggccagaggg

SEQ ID NO: 669372 - RNA, 20 nt, Human
ucucgcgccggggcggggug

SEQ ID NO: 669373 - RNA, 23 nt, Human
ucugcuggguuaggaaaauggcg

SEQ ID NO: 669374 - RNA, 23 nt, Human
ugcuuugcccacuuccccuuccu

SEQ ID NO: 669375 - RNA, 19 nt, Human
uggcgcagccgagccgcgg

SEQ ID NO: 669376 - RNA, 23 nt, Human
uuagaguucuguuccaaggguaa

SEQ ID NO: 669377 - RNA, 25 nt, Human
uucgcagagguucgagcccggcggg

SEQ ID NO: 669378 - RNA, 18 nt, Human
uuggcaaaggguuuucuc

SEQ ID NO: 669379 - RNA, 25 nt, Human
aaaaaaaaaaaaaaagcaauacauu

SEQ ID NO: 669380 - RNA, 25 nt, Human
aaaaaaaaaaaaaagcaauacauua

SEQ ID NO: 669381 - RNA, 28 nt, Human
aaaaaaaaaaagcaauacauuaaaaagg

SEQ ID NO: 669382 - RNA, 23 nt, Human
aaaaaaaaaauaaaagaaaagaa

SEQ ID NO: 669383 - RNA, 21 nt, Human
aaaaaaaaagcaauacauuaa

SEQ ID NO: 669384 - RNA, 21 nt, Human
aaaaaagaaaauccgaaacac

SEQ ID NO: 669385 - RNA, 23 nt, Human
aaaaauaaaaacaaacugaagga

SEQ ID NO: 669386 - RNA, 21 nt, Human
aaaaggucacgucuuaccccu

SEQ ID NO: 669387 - RNA, 21 nt, Human
aaacaaaaguggcauacaauc

SEQ ID NO: 669388 - RNA, 24 nt, Human
aaacaaaaguggcauacaaucuaa

SEQ ID NO: 669389 - RNA, 19 nt, Human
aaacaccccucccccgaac

SEQ ID NO: 669390 - RNA, 23 nt, Human
aaaccaacccacacccguuaucg

SEQ ID NO: 669391 - RNA, 22 nt, Human
aaagcaaucuucaguuauaguc

SEQ ID NO: 669392 - RNA, 23 nt, Human
aaaggccuuccccaucccaacug

SEQ ID NO: 669393 - RNA, 21 nt, Human
aaauguaguugacaccaagcc

SEQ ID NO: 669394 - RNA, 23 nt, Human
aacaaaaaguagaaaaaucaaaa

SEQ ID NO: 669395 - RNA, 23 nt, Human
aacaccccucccccgaaccaccc

SEQ ID NO: 669396 - RNA, 23 nt, Human
aaccaacccacacccguuaucgc

SEQ ID NO: 669397 - RNA, 28 nt, Human
aagaaaauccgaaacaccccucccccga

SEQ ID NO: 669398 - RNA, 22 nt, Human
aaggaaaaauaacuacuagaaa

SEQ ID NO: 669399 - RNA, 22 nt, Human
aaugagugacagaaagcuacaa

SEQ ID NO: 669400 - RNA, 27 nt, Human
aaugguugcugcaaaaaaaaaaaaauu

SEQ ID NO: 669401 - RNA, 27 nt, Human
acaccaagcccugguuagccaccuggc

SEQ ID NO: 669402 - RNA, 20 nt, Human
acaccccucccccgaaccac

SEQ ID NO: 669403 - RNA, 22 nt, Human
acaccccucccccgaaccaccc

SEQ ID NO: 669404 - RNA, 23 nt, Human
acaccccucccccgaaccacccc

SEQ ID NO: 669405 - RNA, 25 nt, Human
acauucaucacaagguacagaaaac

SEQ ID NO: 669406 - RNA, 18 nt, Human
accccucccccgaaccac

SEQ ID NO: 669407 - RNA, 20 nt, Human
accuggccaugcugagcccc

SEQ ID NO: 669408 - RNA, 23 nt, Human
accuggccaugcugagccccagc

SEQ ID NO: 669409 - RNA, 20 nt, Human
accuguaaccaucacauuuc

SEQ ID NO: 669410 - RNA, 19 nt, Human
acugagguuguacugaccu

SEQ ID NO: 669411 - RNA, 23 nt, Human
agaaaaaagguacaaagaaagaa

SEQ ID NO: 669412 - RNA, 27 nt, Human
agaaaaaggaaaaauaacuacuagaaa

SEQ ID NO: 669413 - RNA, 24 nt, Human
agaaaagaaaaaaagaaaauccga

SEQ ID NO: 669414 - RNA, 19 nt, Human
agagccuuccaaggccaua

SEQ ID NO: 669415 - RNA, 18 nt, Human
agaggccaucggcccaaa

SEQ ID NO: 669416 - RNA, 21 nt, Human
agaguuugucucucuuuuuuu

SEQ ID NO: 669417 - RNA, 19 nt, Human
aggaaagugggugcagagc

SEQ ID NO: 669418 - RNA, 23 nt, Human
aguggaugggaguguuacuuuuc

SEQ ID NO: 669419 - RNA, 27 nt, Human
auaaaacagagaacauaauuuaccuuu

SEQ ID NO: 669420 - RNA, 18 nt, Human
auaaagcauaaaacagag

SEQ ID NO: 669421 - RNA, 20 nt, Human
augcauaaugccacaggacu

SEQ ID NO: 669422 - RNA, 22 nt, Human
auggaggccugaggucagaacu

SEQ ID NO: 669423 - RNA, 22 nt, Human
caaagucugcugcuaaaaguga

SEQ ID NO: 669424 - RNA, 22 nt, Human
caaauguaguugacaccaagcc

SEQ ID NO: 669425 - RNA, 20 nt, Human
caacuggaagcaaaaaaaaa

SEQ ID NO: 669426 - RNA, 19 nt, Human
caacuuugguuccauuauc

SEQ ID NO: 669427 - RNA, 27 nt, Human
cacaaaaagaaaaaggaaaaauaacua

SEQ ID NO: 669428 - RNA, 19 nt, Human
cacaaaggccuuccccauc

SEQ ID NO: 669429 - RNA, 22 nt, Human
cacagccauaaaaagccugggg

SEQ ID NO: 669430 - RNA, 21 nt, Human
cacaggacugcaacacacaga

SEQ ID NO: 669431 - RNA, 18 nt, Human
cacaguucuuaaacaaaa

SEQ ID NO: 669432 - RNA, 18 nt, Human
caccccucccccgaacca

SEQ ID NO: 669433 - RNA, 19 nt, Human
caccccucccccgaaccac

SEQ ID NO: 669434 - RNA, 22 nt, Human
caccccucccccgaaccacccc

SEQ ID NO: 669435 - RNA, 19 nt, Human
caccuggccaugcugagcc

SEQ ID NO: 669436 - RNA, 20 nt, Human
cagcgccgccgccgccaccc

SEQ ID NO: 669437 - RNA, 23 nt, Human
caguucuuaaacaaaaguggcau

SEQ ID NO: 669438 - RNA, 22 nt, Human
cauaaaaagccuggggucacug

SEQ ID NO: 669439 - RNA, 25 nt, Human
cauuuugcaaacaaaaccaacccac

SEQ ID NO: 669440 - RNA, 24 nt, Human
ccaaauggaggccugaggucagaa

SEQ ID NO: 669441 - RNA, 25 nt, Human
ccaauacugcugcguggaaugaauc

SEQ ID NO: 669442 - RNA, 23 nt, Human
ccaugcugagccccagcaccaag

SEQ ID NO: 669443 - RNA, 22 nt, Human
cccccaaagcccagggccuaca

SEQ ID NO: 669444 - RNA, 19 nt, Human
cccccaauacugcugcgug

SEQ ID NO: 669445 - RNA, 19 nt, Human
ccccccaauacacacacaa

SEQ ID NO: 669446 - RNA, 28 nt, Human
ccccccaauacacacacaaaggccuucc

SEQ ID NO: 669447 - RNA, 18 nt, Human
cccccgaaccacccccaa

SEQ ID NO: 669448 - RNA, 19 nt, Human
ccccucccccgaaccaccc

SEQ ID NO: 669449 - RNA, 22 nt, Human
cccuccccccaauacacacaca

SEQ ID NO: 669450 - RNA, 20 nt, Human
ccgaaacaccccucccccga

SEQ ID NO: 669451 - RNA, 22 nt, Human
ccucaaaaggucacgucuuacc

SEQ ID NO: 669452 - RNA, 21 nt, Human
ccuccaagaggccaucggccc

SEQ ID NO: 669453 - RNA, 23 nt, Human
ccuccccccaauacacacacaaa

SEQ ID NO: 669454 - RNA, 24 nt, Human
ccucccccgaaccacccccaauac

SEQ ID NO: 669455 - RNA, 19 nt, Human
ccuggccaugcugagcccc

SEQ ID NO: 669456 - RNA, 22 nt, Human
ccuggccaugcugagccccagc

SEQ ID NO: 669457 - RNA, 21 nt, Human
ccuuccccaucccaacuggaa

SEQ ID NO: 669458 - RNA, 19 nt, Human
cuaaaaaaaacuacagucc

SEQ ID NO: 669459 - RNA, 22 nt, Human
cuccaagugucaucaucccaaa

SEQ ID NO: 669460 - RNA, 18 nt, Human
cucccuuccuucuguagc

SEQ ID NO: 669461 - RNA, 20 nt, Human
cugguagaaugugguggcau

SEQ ID NO: 669462 - RNA, 24 nt, Human
cuguuagcaguggcgacuccugcu

SEQ ID NO: 669463 - RNA, 23 nt, Human
cuucaaaaguaacugccagagaa

SEQ ID NO: 669464 - RNA, 20 nt, Human
gaaggaaaaaaaaaaaaaaa

SEQ ID NO: 669465 - RNA, 18 nt, Human
gaagggaucgaagcccuc

SEQ ID NO: 669466 - RNA, 22 nt, Human
gacugcccuuuauacagaaagc

SEQ ID NO: 669467 - RNA, 22 nt, Human
gacuguacaacaaauggagaac

SEQ ID NO: 669468 - RNA, 19 nt, Human
gagccccagcaccaagcug

SEQ ID NO: 669469 - RNA, 23 nt, Human
gcaaaaaaaaaaaaaaaaaaaaa

SEQ ID NO: 669470 - RNA, 23 nt, Human
gccucuaaauucuuuugccuccu

SEQ ID NO: 669471 - RNA, 19 nt, Human
ggacccccccaaagcccag

SEQ ID NO: 669472 - RNA, 19 nt, Human
ggaccuuuuugaaaaagac

SEQ ID NO: 669473 - RNA, 22 nt, Human
ggagagccuuccaaggccauau

SEQ ID NO: 669474 - RNA, 21 nt, Human
ggcaacuugguuccacaaggg

SEQ ID NO: 669475 - RNA, 19 nt, Human
ggcuucuguaaagcaaucu

SEQ ID NO: 669476 - RNA, 19 nt, Human
ggugcagagcugaagugug

SEQ ID NO: 669477 - RNA, 22 nt, Human
gguugcugcaaaaaaaaaaaaa

SEQ ID NO: 669478 - RNA, 22 nt, Human
guaaagcaaucuucaguuauag

SEQ ID NO: 669479 - RNA, 23 nt, Human
guuaacucccuuaacaaguucaa

SEQ ID NO: 669480 - RNA, 18 nt, Human
uaaaaauaaaaacaaacu

SEQ ID NO: 669481 - RNA, 18 nt, Human
uaaacugucuccuuuauu

SEQ ID NO: 669482 - RNA, 22 nt, Human
uaaagcauaaaacagagaacau

SEQ ID NO: 669483 - RNA, 23 nt, Human
uaaaggcagugauaaucaacaug

SEQ ID NO: 669484 - RNA, 25 nt, Human
uaaugccacaggacugcaacacagu

SEQ ID NO: 669485 - RNA, 22 nt, Human
uacagaaaacuuuaagccucca

SEQ ID NO: 669486 - RNA, 18 nt, Human
uaccuuuguguaauaucu

SEQ ID NO: 669487 - RNA, 22 nt, Human
uagagugcagcauuugggaccu

SEQ ID NO: 669488 - RNA, 25 nt, Human
uagcaaauuuacaacacugauguug

SEQ ID NO: 669489 - RNA, 20 nt, Human
ucacagcacaguucuuaaac

SEQ ID NO: 669490 - RNA, 21 nt, Human
uccgaaacaccccucccccga

SEQ ID NO: 669491 - RNA, 22 nt, Human
uccgaaacaccccucccccgaa

SEQ ID NO: 669492 - RNA, 25 nt, Human
uccgaaacaccccucccccgaacca

SEQ ID NO: 669493 - RNA, 18 nt, Human
ucggaaaaaaaggaaaaa

SEQ ID NO: 669494 - RNA, 19 nt, Human
ucggcccaaauggaggccu

SEQ ID NO: 669495 - RNA, 19 nt, Human
ucgggguuggcccgccccg

SEQ ID NO: 669496 - RNA, 22 nt, Human
ucugggacacucuggcuguuag

SEQ ID NO: 669497 - RNA, 20 nt, Human
ucugggcaaaggcuuggucu

SEQ ID NO: 669498 - RNA, 20 nt, Human
ucugucauucauucucuuuc

SEQ ID NO: 669499 - RNA, 19 nt, Human
ugaaaucgaauuugcauuc

SEQ ID NO: 669500 - RNA, 24 nt, Human
ugacguguuuuuuuuuuuuccuuu

SEQ ID NO: 669501 - RNA, 19 nt, Human
ugacucuaaacugucuccu

SEQ ID NO: 669502 - RNA, 22 nt, Human
ugagaugggacucccuuccuuc

SEQ ID NO: 669503 - RNA, 20 nt, Human
ugagugacagaaagcuacaa

SEQ ID NO: 669504 - RNA, 21 nt, Human
ugagugacagaaagcuacaac

SEQ ID NO: 669505 - RNA, 20 nt, Human
ugcaacacacagagggaagc

SEQ ID NO: 669506 - RNA, 23 nt, Human
ugcauaaugccacaggacugcaa

SEQ ID NO: 669507 - RNA, 20 nt, Human
ugcauaccauguuugggacc

SEQ ID NO: 669508 - RNA, 25 nt, Human
ugccacaggacugcaacacacagag

SEQ ID NO: 669509 - RNA, 22 nt, Human
ugcugguagaaugugguggcau

SEQ ID NO: 669510 - RNA, 22 nt, Human
uggcaggacugcaguucaaagu

SEQ ID NO: 669511 - RNA, 21 nt, Human
uggccaugcugagccccagca

SEQ ID NO: 669512 - RNA, 27 nt, Human
ugggcaaaggcuuggucuuccgguccg

SEQ ID NO: 669513 - RNA, 23 nt, Human
ugggguucuugauggcacuaaga

SEQ ID NO: 669514 - RNA, 19 nt, Human
ugucucacagccauaaaaa

SEQ ID NO: 669515 - RNA, 19 nt, Human
ugucugaaggaagauggaa

SEQ ID NO: 669516 - RNA, 22 nt, Human
uguguagagugcagcauuuggg

SEQ ID NO: 669517 - RNA, 23 nt, Human
uguuccuagaguuugucucucuu

SEQ ID NO: 669518 - RNA, 20 nt, Human
uuaaccccuccccccaauac

SEQ ID NO: 669519 - RNA, 26 nt, Human
uuaaccccuccccccaauacacacac

SEQ ID NO: 669520 - RNA, 25 nt, Human
uucauguguagagugcagcauuugg

SEQ ID NO: 669521 - RNA, 20 nt, Human
uugaaaaagaccaaaacgga

SEQ ID NO: 669522 - RNA, 22 nt, Human
uugacaccaagcccugguuagc

SEQ ID NO: 669523 - RNA, 25 nt, Human
uugcaaacaaaaccaacccacaccc

SEQ ID NO: 669524 - RNA, 23 nt, Human
uuggcuucuguaaagcaaucuuc

SEQ ID NO: 669525 - RNA, 22 nt, Human
uuugcaaacaaaaccaacccac

SEQ ID NO: 669526 - RNA, 25 nt, Human
uuuuuuuuuuuuuuuuuuuuuaagg

SEQ ID NO: 669527 - RNA, 27 nt, Human
aaaaaaaaacacgcacauaaguaucau

SEQ ID NO: 669528 - RNA, 18 nt, Human
aaaaauacugauacacau

SEQ ID NO: 669529 - RNA, 21 nt, Human
aaacacauaacuugagauucu

SEQ ID NO: 669530 - RNA, 23 nt, Human
aaacacgcacauaaguaucauaa

SEQ ID NO: 669531 - RNA, 22 nt, Human
aaagacauaacauccucugaaa

SEQ ID NO: 669532 - RNA, 25 nt, Human
aaagacauaacauccucugaaaaau

SEQ ID NO: 669533 - RNA, 23 nt, Human
aagugccagugaauacuuagaac

SEQ ID NO: 669534 - RNA, 23 nt, Human
acaguauuccuacacuacucuga

SEQ ID NO: 669535 - RNA, 22 nt, Human
acuaccacuucccccacagaua

SEQ ID NO: 669536 - RNA, 18 nt, Human
agaggucuuuguaucuag

SEQ ID NO: 669537 - RNA, 20 nt, Human
agugaauacuuagaacuuca

SEQ ID NO: 669538 - RNA, 19 nt, Human
aguguauaauacauaugua

SEQ ID NO: 669539 - RNA, 21 nt, Human
auacacauccaaaauaguauc

SEQ ID NO: 669540 - RNA, 24 nt, Human
caaaaaagauggaaaaauuccaaa

SEQ ID NO: 669541 - RNA, 22 nt, Human
caaaaaauaagaugaaaacuaa

SEQ ID NO: 669542 - RNA, 22 nt, Human
cagcaucaccagcauguggaca

SEQ ID NO: 669543 - RNA, 19 nt, Human
cauguggacaaaaaauaag

SEQ ID NO: 669544 - RNA, 20 nt, Human
cccaccuucccugagaccgc

SEQ ID NO: 669545 - RNA, 19 nt, Human
cccugagaccgcgccgcac

SEQ ID NO: 669546 - RNA, 26 nt, Human
cucaaaaaagauggaaaaauuccaaa

SEQ ID NO: 669547 - RNA, 24 nt, Human
gccugcuucuugaugucugcauuu

SEQ ID NO: 669548 - RNA, 20 nt, Human
ggccaauuauuguuucucag

SEQ ID NO: 669549 - RNA, 21 nt, Human
gugaaaaaacaaugcuccaca

SEQ ID NO: 669550 - RNA, 18 nt, Human
uaaaaaaacacacugaca

SEQ ID NO: 669551 - RNA, 23 nt, Human
uaaaaacaaaaauacugauacac

SEQ ID NO: 669552 - RNA, 26 nt, Human
uaaaaacaaaaauacugauacacauc

SEQ ID NO: 669553 - RNA, 25 nt, Human
uaaaauuaaugagauacaaauuuua

SEQ ID NO: 669554 - RNA, 19 nt, Human
uaagaugaaaacuaaaguc

SEQ ID NO: 669555 - RNA, 19 nt, Human
uacaaacacauguucaagu

SEQ ID NO: 669556 - RNA, 18 nt, Human
uacaacaauuauguuaau

SEQ ID NO: 669557 - RNA, 23 nt, Human
uacacauccaaaauaguaucucu

SEQ ID NO: 669558 - RNA, 19 nt, Human
uacacuacucugaagaccc

SEQ ID NO: 669559 - RNA, 21 nt, Human
uacuucuaguuuaccaauuuu

SEQ ID NO: 669560 - RNA, 19 nt, Human
uagaaaauuaccuuuaaaa

SEQ ID NO: 669561 - RNA, 20 nt, Human
uaggagauaaugcaaguaau

SEQ ID NO: 669562 - RNA, 26 nt, Human
uauacaaacacauguucaaguguaua

SEQ ID NO: 669563 - RNA, 29 nt, Human
uauacaaacacauguucaaguguauaauu

SEQ ID NO: 669564 - RNA, 23 nt, Human
ucacuggaccaaaagccucaaaa

SEQ ID NO: 669565 - RNA, 20 nt, Human
ucccccacagauaacugagu

SEQ ID NO: 669566 - RNA, 18 nt, Human
ucccugagaccgcgccgc

SEQ ID NO: 669567 - RNA, 21 nt, Human
uccuauggaauggacauaaag

SEQ ID NO: 669568 - RNA, 22 nt, Human
ugaaaaaacaaugcuccacaaa

SEQ ID NO: 669569 - RNA, 25 nt, Human
ugaaaaaacaaugcuccacaaauca

SEQ ID NO: 669570 - RNA, 22 nt, Human
ugaaacagccuaccaaaaauac

SEQ ID NO: 669571 - RNA, 23 nt, Human
ugaaguuuugugagaaggacuga

SEQ ID NO: 669572 - RNA, 21 nt, Human
ugagaaggacugauaggagau

SEQ ID NO: 669573 - RNA, 19 nt, Human
ugcauaugugugucuuccu

SEQ ID NO: 669574 - RNA, 23 nt, Human
uggacaaaaaauaagaugaaaac

SEQ ID NO: 669575 - RNA, 27 nt, Human
ugggaaaaacuuuggaaaaaaaaacac

SEQ ID NO: 669576 - RNA, 27 nt, Human
uuaaaacuaauuaugugaaaaaacaau

SEQ ID NO: 669577 - RNA, 24 nt, Human
uuauuacuaccacuucccccacag

SEQ ID NO: 669578 - RNA, 22 nt, Human
uucacuggaccaaaagccucaa

SEQ ID NO: 669579 - RNA, 24 nt, Human
uugucagcuauggauucguuucug

SEQ ID NO: 669580 - RNA, 21 nt, Human
uuuuuaaacaauagcuaccau

SEQ ID NO: 669581 - RNA, 19 nt, Human
aagccagaacuuucagaag

SEQ ID NO: 669582 - RNA, 20 nt, Human
acccgaugacaucagaacca

SEQ ID NO: 669583 - RNA, 23 nt, Human
agaacaccugagcaacuuuagca

SEQ ID NO: 669584 - RNA, 18 nt, Human
agacaggagauaccaggg

SEQ ID NO: 669585 - RNA, 25 nt, Human
agagaggaugugggguggggaaggc

SEQ ID NO: 669586 - RNA, 20 nt, Human
agagaucugcaucugacccc

SEQ ID NO: 669587 - RNA, 20 nt, Human
agcaggucauccuuuaggua

SEQ ID NO: 669588 - RNA, 20 nt, Human
agguggcccggggucggggg

SEQ ID NO: 669589 - RNA, 22 nt, Human
aucguguuucuuguuucugggc

SEQ ID NO: 669590 - RNA, 24 nt, Human
caaaucaaaaaggugaagucagga

SEQ ID NO: 669591 - RNA, 18 nt, Human
cacccaucccccgccaga

SEQ ID NO: 669592 - RNA, 20 nt, Human
cagcagcacuggggugagcc

SEQ ID NO: 669593 - RNA, 21 nt, Human
cagcagcacuggggugagccu

SEQ ID NO: 669594 - RNA, 23 nt, Human
cagccacugcucaggggcuccug

SEQ ID NO: 669595 - RNA, 22 nt, Human
caggccuggaugugcacaguag

SEQ ID NO: 669596 - RNA, 21 nt, Human
caucuucaguaaggccaagag

SEQ ID NO: 669597 - RNA, 22 nt, Human
ccacccaucccccgccagacac

SEQ ID NO: 669598 - RNA, 24 nt, Human
ccagacacauggacacaccgaggc

SEQ ID NO: 669599 - RNA, 23 nt, Human
cuaucccauaccuuugcaaagga

SEQ ID NO: 669600 - RNA, 18 nt, Human
cucagcuucuuggggccu

SEQ ID NO: 669601 - RNA, 25 nt, Human
cucagguaaaggugauguuugagga

SEQ ID NO: 669602 - RNA, 18 nt, Human
cuggugcuguuucuggag

SEQ ID NO: 669603 - RNA, 18 nt, Human
gaggagaagccagcagca

SEQ ID NO: 669604 - RNA, 19 nt, Human
gcacuggggugagccuugg

SEQ ID NO: 669605 - RNA, 18 nt, Human
gccagaaugguaucgugu

SEQ ID NO: 669606 - RNA, 18 nt, Human
gcggugguggcgagagug

SEQ ID NO: 669607 - RNA, 19 nt, Human
gcucaggggcuccugaccc

SEQ ID NO: 669608 - RNA, 18 nt, Human
ggagcagccacugcucag

SEQ ID NO: 669609 - RNA, 22 nt, Human
ggagcaguagggaagacaggag

SEQ ID NO: 669610 - RNA, 18 nt, Human
ggcccggggucgggggcu

SEQ ID NO: 669611 - RNA, 23 nt, Human
gggaagacaggagauaccaggga

SEQ ID NO: 669612 - RNA, 21 nt, Human
gggaaggguacauacccuagg

SEQ ID NO: 669613 - RNA, 25 nt, Human
gggcacacaccaaaucaaaaaggug

SEQ ID NO: 669614 - RNA, 21 nt, Human
gggcuggucagagcgcgaacg

SEQ ID NO: 669615 - RNA, 19 nt, Human
gggucgggggcuggcucug

SEQ ID NO: 669616 - RNA, 19 nt, Human
gugcagagaaauggcugug

SEQ ID NO: 669617 - RNA, 20 nt, Human
gugggguggggaaggccaga

SEQ ID NO: 669618 - RNA, 28 nt, Human
uaaggccaagagaggauguggggugggg

SEQ ID NO: 669619 - RNA, 19 nt, Human
uacaguccacccauccccc

SEQ ID NO: 669620 - RNA, 23 nt, Human
uagaacaccugagcaacuuuagc

SEQ ID NO: 669621 - RNA, 23 nt, Human
uaucccauaccuuugcaaaggag

SEQ ID NO: 669622 - RNA, 20 nt, Human
ucagaagagaagaaaauaca

SEQ ID NO: 669623 - RNA, 23 nt, Human
ucagacccacgcggugguggcga

SEQ ID NO: 669624 - RNA, 20 nt, Human
ucagugaaaggugacugugu

SEQ ID NO: 669625 - RNA, 18 nt, Human
ugaaauacauuaguccua

SEQ ID NO: 669626 - RNA, 18 nt, Human
ugcaaaggaggggagggg

SEQ ID NO: 669627 - RNA, 18 nt, Human
ugccggcggaacccgggg

SEQ ID NO: 669628 - RNA, 26 nt, Human
uggagcaguagggaagacaggagaua

SEQ ID NO: 669629 - RNA, 19 nt, Human
uggcccggggucgggggcu

SEQ ID NO: 669630 - RNA, 21 nt, Human
uggcccggggucgggggcugg

SEQ ID NO: 669631 - RNA, 20 nt, Human
uggggaaggccagaauggua

SEQ ID NO: 669632 - RNA, 21 nt, Human
uggucagagcgcgaacggcgg

SEQ ID NO: 669633 - RNA, 21 nt, Human
ugugcuggugcuguuucugga

SEQ ID NO: 669634 - RNA, 20 nt, Human
uguguaaaggccagaaacug

SEQ ID NO: 669635 - RNA, 19 nt, Human
uuaggguuuggagcaguag

SEQ ID NO: 669636 - RNA, 18 nt, Human
uucagaagagaagaaaau

SEQ ID NO: 669637 - RNA, 24 nt, Human
uuggagcaguagggaagacaggag

SEQ ID NO: 669638 - RNA, 21 nt, Human
uuuuuagcaccaaauggugga

SEQ ID NO: 669639 - RNA, 21 nt, Human
uuuuuuagcaccaaauggugg

SEQ ID NO: 669640 - RNA, 19 nt, Human
uuuuuuuuagcaccaaaug

SEQ ID NO: 669641 - RNA, 18 nt, Human
uuuuuuuuuuuuuuuuug

SEQ ID NO: 669642 - RNA, 20 nt, Human
uuuuuuuuuuuuuuuuuguu

SEQ ID NO: 669643 - RNA, 22 nt, Human
uuuuuuuuuuuuuuuuuguugg

SEQ ID NO: 669644 - RNA, 20 nt, Human
aaacuggcuacucugucccg

SEQ ID NO: 669645 - RNA, 23 nt, Human
aaaucugccuuaaauagggccaa

SEQ ID NO: 669646 - RNA, 20 nt, Human
aaauggccccggagagccca

SEQ ID NO: 669647 - RNA, 18 nt, Human
aacacauuuauucaaagc

SEQ ID NO: 669648 - RNA, 22 nt, Human
aacccaggcccccaggauccca

SEQ ID NO: 669649 - RNA, 21 nt, Human
aacugcagcccucaagggaac

SEQ ID NO: 669650 - RNA, 19 nt, Human
aagcacagacgcccagcac

SEQ ID NO: 669651 - RNA, 21 nt, Human
aagcacagacgcccagcacgu

SEQ ID NO: 669652 - RNA, 21 nt, Human
aagcagcaccuccaaagacac

SEQ ID NO: 669653 - RNA, 18 nt, Human
aagcaggcauuucaguua

SEQ ID NO: 669654 - RNA, 21 nt, Human
acacugcgcucuucuccgagc

SEQ ID NO: 669655 - RNA, 24 nt, Human
acacugcgcucuucuccgagcacc

SEQ ID NO: 669656 - RNA, 22 nt, Human
acccgcgaaacacucgcgauuu

SEQ ID NO: 669657 - RNA, 19 nt, Human
acccggagcugugcgggcg

SEQ ID NO: 669658 - RNA, 24 nt, Human
acccgugucguacagccuuccccc

SEQ ID NO: 669659 - RNA, 26 nt, Human
accgaagcacagacgcccagcacguc

SEQ ID NO: 669660 - RNA, 20 nt, Human
accggcagaaacuggcuacu

SEQ ID NO: 669661 - RNA, 24 nt, Human
accuccaaagacacaagaugguuu

SEQ ID NO: 669662 - RNA, 23 nt, Human
agaagagagacaguugcaaagag

SEQ ID NO: 669663 - RNA, 23 nt, Human
agacgcccagcacguccgcgcuu

SEQ ID NO: 669664 - RNA, 20 nt, Human
agacuccagcacuugcaaaa

SEQ ID NO: 669665 - RNA, 19 nt, Human
agcagcaccuccaaagaca

SEQ ID NO: 669666 - RNA, 21 nt, Human
agcccugaaaagguaaagcaa

SEQ ID NO: 669667 - RNA, 21 nt, Human
agccugaguagaacugcagcc

SEQ ID NO: 669668 - RNA, 25 nt, Human
aggcuggcgcuguggccaccccggg

SEQ ID NO: 669669 - RNA, 21 nt, Human
agguaaagcaaguaacuggca

SEQ ID NO: 669670 - RNA, 22 nt, Human
aguuuccgugaaagcccggagc

SEQ ID NO: 669671 - RNA, 22 nt, Human
aucuacucauguucuccucccc

SEQ ID NO: 669672 - RNA, 23 nt, Human
caaaagccagaguucuccaccag

SEQ ID NO: 669673 - RNA, 21 nt, Human
caaagggucccuucauggcac

SEQ ID NO: 669674 - RNA, 19 nt, Human
caccuccuuuccccacccg

SEQ ID NO: 669675 - RNA, 20 nt, Human
cacuuuagacagggcguggg

SEQ ID NO: 669676 - RNA, 21 nt, Human
cagcuguuauugcaaauggcc

SEQ ID NO: 669677 - RNA, 20 nt, Human
caggaucccagagccacccc

SEQ ID NO: 669678 - RNA, 18 nt, Human
cagggcccggucucggga

SEQ ID NO: 669679 - RNA, 23 nt, Human
cagggcccggucucgggaguuuc

SEQ ID NO: 669680 - RNA, 19 nt, Human
cauguucuccucccccaaa

SEQ ID NO: 669681 - RNA, 22 nt, Human
ccagagccacccgcuugaguag

SEQ ID NO: 669682 - RNA, 20 nt, Human
ccagaguucuccaccagccu

SEQ ID NO: 669683 - RNA, 22 nt, Human
ccagaguucuccaccagccuga

SEQ ID NO: 669684 - RNA, 20 nt, Human
ccaggaucccagagccaccc

SEQ ID NO: 669685 - RNA, 19 nt, Human
cccaaaguggaucaggagc

SEQ ID NO: 669686 - RNA, 18 nt, Human
cccaggaucccagagcca

SEQ ID NO: 669687 - RNA, 22 nt, Human
cccaggcccccaggaucccaga

SEQ ID NO: 669688 - RNA, 22 nt, Human
cccccaggaucccagagccacc

SEQ ID NO: 669689 - RNA, 23 nt, Human
cccccaggaucccagagccaccc

SEQ ID NO: 669690 - RNA, 27 nt, Human
ccccgcccccaccuccuuuccccaccc

SEQ ID NO: 669691 - RNA, 26 nt, Human
cccgcaacccagugcgugcccaggaa

SEQ ID NO: 669692 - RNA, 23 nt, Human
cccgcccccaccuccuuucccca

SEQ ID NO: 669693 - RNA, 24 nt, Human
cccgcccccaccuccuuuccccac

SEQ ID NO: 669694 - RNA, 24 nt, Human
cccugucugggcacccggagcugu

SEQ ID NO: 669695 - RNA, 18 nt, Human
ccgcggcggagcgggcgc

SEQ ID NO: 669696 - RNA, 19 nt, Human
ccucaggagacuccagcac

SEQ ID NO: 669697 - RNA, 25 nt, Human
ccucaggagacuccagcacuugcaa

SEQ ID NO: 669698 - RNA, 27 nt, Human
ccuucccccaccacucugagaagagag

SEQ ID NO: 669699 - RNA, 19 nt, Human
ccuuuagagugagugaaca

SEQ ID NO: 669700 - RNA, 21 nt, Human
cgcggcggagcgggcgcggag

SEQ ID NO: 669701 - RNA, 23 nt, Human
cggagcccgccaggcacucuagg

SEQ ID NO: 669702 - RNA, 19 nt, Human
cuaccgaagcacagacgcc

SEQ ID NO: 669703 - RNA, 21 nt, Human
cuccgcgccucucuacccuuc

SEQ ID NO: 669704 - RNA, 24 nt, Human
cuccgugguuccggcgcaccgcga

SEQ ID NO: 669705 - RNA, 24 nt, Human
cucuacccuuccaccaccauucaa

SEQ ID NO: 669706 - RNA, 20 nt, Human
gcccccaacccaggccccca

SEQ ID NO: 669707 - RNA, 21 nt, Human
gcccccaccuccuuuccccac

SEQ ID NO: 669708 - RNA, 20 nt, Human
gcgcggccaggggcgguggu

SEQ ID NO: 669709 - RNA, 21 nt, Human
gcgcggugggccgcggcggag

SEQ ID NO: 669710 - RNA, 20 nt, Human
gcugggggcucggcugccgg

SEQ ID NO: 669711 - RNA, 26 nt, Human
ggaccggggccggggcggacgcggaa

SEQ ID NO: 669712 - RNA, 21 nt, Human
ggagagcccauuauaagcugc

SEQ ID NO: 669713 - RNA, 24 nt, Human
ggagaggaggaacccagggcccgg

SEQ ID NO: 669714 - RNA, 24 nt, Human
ggcgugggguucacuccgcgccuc

SEQ ID NO: 669715 - RNA, 21 nt, Human
ggcugugugucccuggagugu

SEQ ID NO: 669716 - RNA, 23 nt, Human
gggaaccccuugcccuccagucc

SEQ ID NO: 669717 - RNA, 20 nt, Human
gggccgcggcggagcgggcg

SEQ ID NO: 669718 - RNA, 19 nt, Human
gggggaggggcagagggag

SEQ ID NO: 669719 - RNA, 23 nt, Human
guccucaggagacuccagcacuu

SEQ ID NO: 669720 - RNA, 19 nt, Human
guggauuguggccacaugg

SEQ ID NO: 669721 - RNA, 19 nt, Human
guggauuguggccacaugg

SEQ ID NO: 669722 - RNA, 19 nt, Human
uaacuccuauucaaccccc

SEQ ID NO: 669723 - RNA, 18 nt, Human
uaagcagcaccuccaaag

SEQ ID NO: 669724 - RNA, 19 nt, Human
uaagucuggaccggggccg

SEQ ID NO: 669725 - RNA, 21 nt, Human
uagcccccaacccaggccccc

SEQ ID NO: 669726 - RNA, 21 nt, Human
uaggcugugugucccuggagu

SEQ ID NO: 669727 - RNA, 23 nt, Human
ucacauggcgucucccuagcccc

SEQ ID NO: 669728 - RNA, 22 nt, Human
ucaggagacuccagcacuugca

SEQ ID NO: 669729 - RNA, 18 nt, Human
ucauguucuccuccccca

SEQ ID NO: 669730 - RNA, 23 nt, Human
uccaaaagccagaguucuccacc

SEQ ID NO: 669731 - RNA, 21 nt, Human
uccagacacuccggugcgaag

SEQ ID NO: 669732 - RNA, 22 nt, Human
uccccgcccccaccuccuuucc

SEQ ID NO: 669733 - RNA, 22 nt, Human
ucccuagcccccaacccaggcc

SEQ ID NO: 669734 - RNA, 19 nt, Human
uccggcgcaccgcgauccg

SEQ ID NO: 669735 - RNA, 24 nt, Human
ucucuacccuuccaccaccauuca

SEQ ID NO: 669736 - RNA, 21 nt, Human
ucugaaaauacacuuuagaca

SEQ ID NO: 669737 - RNA, 23 nt, Human
ugaacaguauguuccaagcacuu

SEQ ID NO: 669738 - RNA, 19 nt, Human
ugagaagagagacaguugc

SEQ ID NO: 669739 - RNA, 18 nt, Human
ugaggcuggcgcuguggc

SEQ ID NO: 669740 - RNA, 23 nt, Human
ugagugaacaguauguuccaagc

SEQ ID NO: 669741 - RNA, 20 nt, Human
ugagugaacaguauguuccc

SEQ ID NO: 669742 - RNA, 19 nt, Human
ugcaaagagagcgcagggg

SEQ ID NO: 669743 - RNA, 20 nt, Human
ugcagcccucaagggaaccc

SEQ ID NO: 669744 - RNA, 18 nt, Human
ugcccaggaaacagugac

SEQ ID NO: 669745 - RNA, 19 nt, Human
uggaugaugaacaagccau

SEQ ID NO: 669746 - RNA, 20 nt, Human
uggauuguggccacaugguc

SEQ ID NO: 669747 - RNA, 20 nt, Human
uggcaaagcuggcagcuucu

SEQ ID NO: 669748 - RNA, 23 nt, Human
uguucuccucccccaaaguggau

SEQ ID NO: 669749 - RNA, 19 nt, Human
uguuugauauuaagcagca

SEQ ID NO: 669750 - RNA, 21 nt, Human
uuaacuccuauucaaccccca

SEQ ID NO: 669751 - RNA, 21 nt, Human
uuaagcagcaccuccaaagac

SEQ ID NO: 669752 - RNA, 25 nt, Human
uuccaaaagccagaguucuccaccu

SEQ ID NO: 669753 - RNA, 23 nt, Human
uugauauuaagcagcaccuccaa

SEQ ID NO: 669754 - RNA, 19 nt, Human
uuuuucgguuccucgucau

SEQ ID NO: 669755 - RNA, 22 nt, Human
aaaaaaaaaagaggggggcaag

SEQ ID NO: 669756 - RNA, 23 nt, Human
aaaaaaaaaccucacuuucccca

SEQ ID NO: 669757 - RNA, 21 nt, Human
aaaaccucacuuuccccacaa

SEQ ID NO: 669758 - RNA, 24 nt, Human
aaaaccucacuuuccccacaaaaa

SEQ ID NO: 669759 - RNA, 20 nt, Human
aaaaggccaaagggcaggac

SEQ ID NO: 669760 - RNA, 21 nt, Human
aaaaggccaaagggcaggacg

SEQ ID NO: 669761 - RNA, 22 nt, Human
aaagaccucccucauccucuca

SEQ ID NO: 669762 - RNA, 24 nt, Human
aaagcacaauacuguuaucacaaa

SEQ ID NO: 669763 - RNA, 23 nt, Human
aaagcagauaggaaggagggaag

SEQ ID NO: 669764 - RNA, 19 nt, Human
aacauucuccuaagucacc

SEQ ID NO: 669765 - RNA, 18 nt, Human
aaccacugaccccauccc

SEQ ID NO: 669766 - RNA, 20 nt, Human
aaccgcgcugggaacagggu

SEQ ID NO: 669767 - RNA, 20 nt, Human
aacucuucucuccuucccuu

SEQ ID NO: 669768 - RNA, 25 nt, Human
aagaauucuagacccaggccuggcc

SEQ ID NO: 669769 - RNA, 22 nt, Human
aagaccucccucauccucucag

SEQ ID NO: 669770 - RNA, 18 nt, Human
aagcagauaggaaggagg

SEQ ID NO: 669771 - RNA, 22 nt, Human
aagcauuucaggggaggagaug

SEQ ID NO: 669772 - RNA, 20 nt, Human
acacaccagcagccacgcaa

SEQ ID NO: 669773 - RNA, 22 nt, Human
acaccaggcagcagcaacaguu

SEQ ID NO: 669774 - RNA, 19 nt, Human
acagccacgcagccccaca

SEQ ID NO: 669775 - RNA, 19 nt, Human
acagccugccucuccagga

SEQ ID NO: 669776 - RNA, 24 nt, Human
acaugacacauucaucugcuggaa

SEQ ID NO: 669777 - RNA, 27 nt, Human
accccaucccugcaggauguugguggg

SEQ ID NO: 669778 - RNA, 19 nt, Human
acgcuacgaggaagaggac

SEQ ID NO: 669779 - RNA, 24 nt, Human
acugaccccacacaccagcagcca

SEQ ID NO: 669780 - RNA, 24 nt, Human
acuguuaucacaaaaaaaaucauc

SEQ ID NO: 669781 - RNA, 21 nt, Human
agaaaugugguggcccagggc

SEQ ID NO: 669782 - RNA, 21 nt, Human
agaccccaggucagagcccag

SEQ ID NO: 669783 - RNA, 23 nt, Human
agagaggcaaaucgagccucagg

SEQ ID NO: 669784 - RNA, 20 nt, Human
agagagggcaggaggcugcc

SEQ ID NO: 669785 - RNA, 18 nt, Human
agagcaucugaagcgagc

SEQ ID NO: 669786 - RNA, 19 nt, Human
agaggccuggggagaggag

SEQ ID NO: 669787 - RNA, 20 nt, Human
agaggccuggggagaggagg

SEQ ID NO: 669788 - RNA, 22 nt, Human
agagggcaggaggcugcccaca

SEQ ID NO: 669789 - RNA, 22 nt, Human
agaggggugucugggaaacgcu

SEQ ID NO: 669790 - RNA, 25 nt, Human
agauaggaaggagggaaggcagagc

SEQ ID NO: 669791 - RNA, 21 nt, Human
agauguccccuguucauccuc

SEQ ID NO: 669792 - RNA, 23 nt, Human
agcagggagccgacuggcagggg

SEQ ID NO: 669793 - RNA, 21 nt, Human
agccacgcagccccacacggc

SEQ ID NO: 669794 - RNA, 23 nt, Human
agccacgcagccccacacggcaa

SEQ ID NO: 669795 - RNA, 20 nt, Human
agcccugggagcugaggaca

SEQ ID NO: 669796 - RNA, 22 nt, Human
aggaaggccagacacaccgaag

SEQ ID NO: 669797 - RNA, 21 nt, Human
aggagcagacgcuacgaggaa

SEQ ID NO: 669798 - RNA, 23 nt, Human
aggagggggcagagaucgguccc

SEQ ID NO: 669799 - RNA, 22 nt, Human
aggcaccuggcucaggauucug

SEQ ID NO: 669800 - RNA, 26 nt, Human
aggcaccuggcucaggauucugcggc

SEQ ID NO: 669801 - RNA, 19 nt, Human
aggcagccaaguccuuggu

SEQ ID NO: 669802 - RNA, 24 nt, Human
agggaaaagggguuuggcaggagg

SEQ ID NO: 669803 - RNA, 19 nt, Human
aggggaggagaugucagua

SEQ ID NO: 669804 - RNA, 23 nt, Human
aggugagugguucccaggcaucc

SEQ ID NO: 669805 - RNA, 20 nt, Human
agucggcgugggcagguggg

SEQ ID NO: 669806 - RNA, 20 nt, Human
agucggcgugggcagguggg

SEQ ID NO: 669807 - RNA, 19 nt, Human
augcaguuuacuggaaaaa

SEQ ID NO: 669808 - RNA, 18 nt, Human
auggggcaacugagaccc

SEQ ID NO: 669809 - RNA, 22 nt, Human
auggggcaacugagacccagag

SEQ ID NO: 669810 - RNA, 20 nt, Human
augugggccgcagccccagg

SEQ ID NO: 669811 - RNA, 19 nt, Human
caaaagccuuuuauucauu

SEQ ID NO: 669812 - RNA, 21 nt, Human
caaaauaaaaaacaaaagcac

SEQ ID NO: 669813 - RNA, 22 nt, Human
caaaauaaaaaacaaaagcaca

SEQ ID NO: 669814 - RNA, 25 nt, Human
caaacaccaaagcaagaguugagaa

SEQ ID NO: 669815 - RNA, 18 nt, Human
caaagagcaagggccgga

SEQ ID NO: 669816 - RNA, 23 nt, Human
caaagcaagaguugagaaaccua

SEQ ID NO: 669817 - RNA, 20 nt, Human
caaagcagcagcaagaauuc

SEQ ID NO: 669818 - RNA, 18 nt, Human
caagaccaaccagcccgg

SEQ ID NO: 669819 - RNA, 27 nt, Human
caagcauaccaucugcuaaggccagaa

SEQ ID NO: 669820 - RNA, 18 nt, Human
caaggaggcggggguccc

SEQ ID NO: 669821 - RNA, 18 nt, Human
cacaccaggcagcagcaa

SEQ ID NO: 669822 - RNA, 21 nt, Human
cacagcaucaccagccacagg

SEQ ID NO: 669823 - RNA, 23 nt, Human
caccaaagcaagaguugagaaac

SEQ ID NO: 669824 - RNA, 24 nt, Human
caccaacccccuccgaaaaaacac

SEQ ID NO: 669825 - RNA, 24 nt, Human
caccagccacaggaaacugaaccc

SEQ ID NO: 669826 - RNA, 19 nt, Human
caccucuccccucuccaaa

SEQ ID NO: 669827 - RNA, 20 nt, Human
caccucuccccucuccaaaa

SEQ ID NO: 669828 - RNA, 24 nt, Human
cacggcaacgucacuacggcagag

SEQ ID NO: 669829 - RNA, 20 nt, Human
cacuuuccccacaaaaagca

SEQ ID NO: 669830 - RNA, 23 nt, Human
cagagggugacacguacgcuugc

SEQ ID NO: 669831 - RNA, 18 nt, Human
cagaguucucugaggucc

SEQ ID NO: 669832 - RNA, 20 nt, Human
cagaguucucugaggucccc

SEQ ID NO: 669833 - RNA, 19 nt, Human
cagauggggcaacugagac

SEQ ID NO: 669834 - RNA, 22 nt, Human
cagcaccccgccagggccggga

SEQ ID NO: 669835 - RNA, 24 nt, Human
cagcagggaaaagggguuuggcag

SEQ ID NO: 669836 - RNA, 22 nt, Human
cagccccacacggcaacgucac

SEQ ID NO: 669837 - RNA, 18 nt, Human
cagcccccuccucgccuc

SEQ ID NO: 669838 - RNA, 18 nt, Human
caggucagagcccagcug

SEQ ID NO: 669839 - RNA, 25 nt, Human
cauggaaaagggccuucaagaccag

SEQ ID NO: 669840 - RNA, 24 nt, Human
ccaacccccuccgaaaaaacacaa

SEQ ID NO: 669841 - RNA, 21 nt, Human
ccacaccuguggcuucaaacc

SEQ ID NO: 669842 - RNA, 20 nt, Human
ccacaugcuuaagcccagaa

SEQ ID NO: 669843 - RNA, 24 nt, Human
ccaccaacccccuccgaaaaaaca

SEQ ID NO: 669844 - RNA, 23 nt, Human
ccaccauguucguucccugcccc

SEQ ID NO: 669845 - RNA, 25 nt, Human
ccagaagccacaccuguggcuucaa

SEQ ID NO: 669846 - RNA, 21 nt, Human
ccaggcaaacucuagugaaaa

SEQ ID NO: 669847 - RNA, 22 nt, Human
cccacaaucaaagagcaagggc

SEQ ID NO: 669848 - RNA, 20 nt, Human
cccacacaccagcagccacg

SEQ ID NO: 669849 - RNA, 23 nt, Human
cccaccaacccccuccgaaaaaa

SEQ ID NO: 669850 - RNA, 20 nt, Human
cccagggccucugaggacuc

SEQ ID NO: 669851 - RNA, 18 nt, Human
ccccagaccccaggucag

SEQ ID NO: 669852 - RNA, 20 nt, Human
cccccuccucgccuccccgc

SEQ ID NO: 669853 - RNA, 24 nt, Human
ccccgccagggccgggaagggcgg

SEQ ID NO: 669854 - RNA, 19 nt, Human
ccccgcccccccgggccgg

SEQ ID NO: 669855 - RNA, 25 nt, Human
ccccgcccccccgggccggacccgg

SEQ ID NO: 669856 - RNA, 20 nt, Human
ccccgcuccagccucccucc

SEQ ID NO: 669857 - RNA, 20 nt, Human
ccccuagacacccucggccc

SEQ ID NO: 669858 - RNA, 23 nt, Human
cccgggccggacccgguuggggc

SEQ ID NO: 669859 - RNA, 19 nt, Human
cccugccccagaccccagg

SEQ ID NO: 669860 - RNA, 22 nt, Human
cccuggccccagugcgaggcuc

SEQ ID NO: 669861 - RNA, 18 nt, Human
cccugugcaaggacuccu

SEQ ID NO: 669862 - RNA, 25 nt, Human
ccguggccgacuggccgccuggggc

SEQ ID NO: 669863 - RNA, 20 nt, Human
ccucaaagaauccacccuuc

SEQ ID NO: 669864 - RNA, 25 nt, Human
ccucauccucucagcccaaagccac

SEQ ID NO: 669865 - RNA, 24 nt, Human
ccucccgggucaagggcagccggc

SEQ ID NO: 669866 - RNA, 21 nt, Human
ccucggcccacccacagccuc

SEQ ID NO: 669867 - RNA, 21 nt, Human
ccucggcggccgcggcccccg

SEQ ID NO: 669868 - RNA, 24 nt, Human
ccucucagcccaaagccaccaugu

SEQ ID NO: 669869 - RNA, 20 nt, Human
ccucugaggacucacagccc

SEQ ID NO: 669870 - RNA, 19 nt, Human
ccugcgaggcagccaaguc

SEQ ID NO: 669871 - RNA, 21 nt, Human
ccuggcccugacagucuggga

SEQ ID NO: 669872 - RNA, 18 nt, Human
ccuggggccgcaccugcc

SEQ ID NO: 669873 - RNA, 20 nt, Human
ccuucaagaccaaccagccc

SEQ ID NO: 669874 - RNA, 22 nt, Human
cgaaggacgagggacgagggca

SEQ ID NO: 669875 - RNA, 21 nt, Human
cgagccucaggcagaggccaa

SEQ ID NO: 669876 - RNA, 18 nt, Human
cgagggcaaggcagaguu

SEQ ID NO: 669877 - RNA, 27 nt, Human
cgcagauauuaaaaaaaaaaaaaaaaa

SEQ ID NO: 669878 - RNA, 27 nt, Human
cggcaacgucacuacggcagaggccuu

SEQ ID NO: 669879 - RNA, 21 nt, Human
cggcccccgcccccccgggcc

SEQ ID NO: 669880 - RNA, 24 nt, Human
cggcggccgcggcccccgcccccc

SEQ ID NO: 669881 - RNA, 21 nt, Human
cgggcugugggcccaccggca

SEQ ID NO: 669882 - RNA, 19 nt, Human
cggggacagaggcagcagg

SEQ ID NO: 669883 - RNA, 23 nt, Human
cuagacccaggccuggcccugac

SEQ ID NO: 669884 - RNA, 19 nt, Human
cucacuuuccccacaaaaa

SEQ ID NO: 669885 - RNA, 23 nt, Human
cuccccaccaacccccuccgaaa

SEQ ID NO: 669886 - RNA, 24 nt, Human
cuccccaccaacccccuccgaaaa

SEQ ID NO: 669887 - RNA, 18 nt, Human
cucccucauccucucagc

SEQ ID NO: 669888 - RNA, 23 nt, Human
cucccucauccucucagcccaaa

SEQ ID NO: 669889 - RNA, 18 nt, Human
cuccuucccucccuccca

SEQ ID NO: 669890 - RNA, 21 nt, Human
cucucagcccaaagccaccau

SEQ ID NO: 669891 - RNA, 25 nt, Human
cugccaggcaaacucuagugaaaau

SEQ ID NO: 669892 - RNA, 23 nt, Human
cugcuggaacugaccccacacac

SEQ ID NO: 669893 - RNA, 18 nt, Human
cuggggccgcaccugccu

SEQ ID NO: 669894 - RNA, 21 nt, Human
cuggggcuggugccugcccug

SEQ ID NO: 669895 - RNA, 18 nt, Human
cuguguguggaugcggaa

SEQ ID NO: 669896 - RNA, 22 nt, Human
gaacucuucucuccuucccucc

SEQ ID NO: 669897 - RNA, 21 nt, Human
gaaggcuggguggacgcacgg

SEQ ID NO: 669898 - RNA, 21 nt, Human
gaagggguccacaugcuuaag

SEQ ID NO: 669899 - RNA, 24 nt, Human
gaaugcuccagccaaggggaacag

SEQ ID NO: 669900 - RNA, 19 nt, Human
gacucacagcccccuccuc

SEQ ID NO: 669901 - RNA, 18 nt, Human
gagcaucugaagcgagcc

SEQ ID NO: 669902 - RNA, 20 nt, Human
gaggggggcaaggcuuccca

SEQ ID NO: 669903 - RNA, 24 nt, Human
gagucccaggucgcccgggccagc

SEQ ID NO: 669904 - RNA, 24 nt, Human
gaugguccuggggccgcaccugcc

SEQ ID NO: 669905 - RNA, 23 nt, Human
gcaaagcagcagcaagaauucua

SEQ ID NO: 669906 - RNA, 22 nt, Human
gcacgggguuggugucagggcu

SEQ ID NO: 669907 - RNA, 21 nt, Human
gcaggaggcauucgggcugga

SEQ ID NO: 669908 - RNA, 23 nt, Human
gcccagggccucugaggacucac

SEQ ID NO: 669909 - RNA, 24 nt, Human
gccccagaccccaggucagagccc

SEQ ID NO: 669910 - RNA, 19 nt, Human
gccuggggagaggaggggg

SEQ ID NO: 669911 - RNA, 22 nt, Human
gcucugggcuggcucgggcugu

SEQ ID NO: 669912 - RNA, 18 nt, Human
gcuggcucgggcuguggg

SEQ ID NO: 669913 - RNA, 19 nt, Human
gcugugacucagacagucc

SEQ ID NO: 669914 - RNA, 18 nt, Human
ggaaccacugaccccauc

SEQ ID NO: 669915 - RNA, 18 nt, Human
ggaaccgaggaccaaagu

SEQ ID NO: 669916 - RNA, 21 nt, Human
ggaacugaccccacacaccag

SEQ ID NO: 669917 - RNA, 21 nt, Human
ggaaggccagacacaccgaag

SEQ ID NO: 669918 - RNA, 19 nt, Human
ggacaaggugugccacaug

SEQ ID NO: 669919 - RNA, 19 nt, Human
ggacgagggcaaggcagag

SEQ ID NO: 669920 - RNA, 19 nt, Human
ggagaggagagccggggcc

SEQ ID NO: 669921 - RNA, 20 nt, Human
ggcaggcaccgcuggaagcc

SEQ ID NO: 669922 - RNA, 23 nt, Human
ggccgacuggccgccuggggcug

SEQ ID NO: 669923 - RNA, 22 nt, Human
ggccgcggcccccgcccccccg

SEQ ID NO: 669924 - RNA, 19 nt, Human
ggccuggggagaggagggg

SEQ ID NO: 669925 - RNA, 21 nt, Human
ggcugagguggccucauggca

SEQ ID NO: 669926 - RNA, 19 nt, Human
ggcuucuuggccgcugcag

SEQ ID NO: 669927 - RNA, 22 nt, Human
gggcaggugggucagggcgugc

SEQ ID NO: 669928 - RNA, 19 nt, Human
gggcugagguggccucaug

SEQ ID NO: 669929 - RNA, 22 nt, Human
gggcuggcucgggcugugggcc

SEQ ID NO: 669930 - RNA, 22 nt, Human
ggggaggggggguuaccguggg

SEQ ID NO: 669931 - RNA, 23 nt, Human
ggggcugccaaugaacgccucag

SEQ ID NO: 669932 - RNA, 21 nt, Human
gggguuggcugaaugcuccag

SEQ ID NO: 669933 - RNA, 23 nt, Human
ggguuggugucagggcugaggug

SEQ ID NO: 669934 - RNA, 20 nt, Human
ggucaagggcagccggcugu

SEQ ID NO: 669935 - RNA, 22 nt, Human
ggucccaaagagcgcucaaggg

SEQ ID NO: 669936 - RNA, 19 nt, Human
gguccccuugauuucugcu

SEQ ID NO: 669937 - RNA, 20 nt, Human
ggucccugccaggcaaacuc

SEQ ID NO: 669938 - RNA, 27 nt, Human
ggugcaggacaggggagaggggaacgc

SEQ ID NO: 669939 - RNA, 21 nt, Human
ggugcugagucccaggucgcc

SEQ ID NO: 669940 - RNA, 23 nt, Human
guauauaaaaaaaaaaccucacu

SEQ ID NO: 669941 - RNA, 19 nt, Human
guggaaccacugaccccau

SEQ ID NO: 669942 - RNA, 24 nt, Human
uaaaaaaaaaaaaaaaaagagggg

SEQ ID NO: 669943 - RNA, 23 nt, Human
uaaaaaaaaaaccucacuuuccc

SEQ ID NO: 669944 - RNA, 28 nt, Human
uaaaaaaaaaaccucacuuuccccacaa

SEQ ID NO: 669945 - RNA, 23 nt, Human
uaaaaaacaaaagcacacgcgca

SEQ ID NO: 669946 - RNA, 26 nt, Human
uaaaaaacaaaagcacacgcgcaaga

SEQ ID NO: 669947 - RNA, 21 nt, Human
uaagcccagacacccucagcc

SEQ ID NO: 669948 - RNA, 21 nt, Human
ucaaaauaaaaaacaaaagca

SEQ ID NO: 669949 - RNA, 21 nt, Human
ucaaagaccaccucuccugac

SEQ ID NO: 669950 - RNA, 22 nt, Human
ucaagggcagccggcugugugu

SEQ ID NO: 669951 - RNA, 25 nt, Human
ucauaauuaaucauccuagccacgc

SEQ ID NO: 669952 - RNA, 19 nt, Human
uccaccucuccccucucca

SEQ ID NO: 669953 - RNA, 25 nt, Human
uccaccucuccccucuccaaaaauc

SEQ ID NO: 669954 - RNA, 19 nt, Human
uccagggauggccuagcag

SEQ ID NO: 669955 - RNA, 19 nt, Human
uccaugcugcggcaaacac

SEQ ID NO: 669956 - RNA, 24 nt, Human
uccaugcugcggcaaacaccaaag

SEQ ID NO: 669957 - RNA, 19 nt, Human
ucccucgggcugcuggggu

SEQ ID NO: 669958 - RNA, 22 nt, Human
ucccugccccagaccccagguc

SEQ ID NO: 669959 - RNA, 23 nt, Human
uccuaagucaccaucaacacaaa

SEQ ID NO: 669960 - RNA, 22 nt, Human
ucggcggccgcggcccccgccc

SEQ ID NO: 669961 - RNA, 20 nt, Human
ucuagacccaggccuggccc

SEQ ID NO: 669962 - RNA, 18 nt, Human
ucuccccucuccaaaaau

SEQ ID NO: 669963 - RNA, 22 nt, Human
ucugcaucagagcaucugaagc

SEQ ID NO: 669964 - RNA, 21 nt, Human
ucugcggcaucacugcagcca

SEQ ID NO: 669965 - RNA, 19 nt, Human
ucugcuggaacugacccca

SEQ ID NO: 669966 - RNA, 18 nt, Human
ucuugaaauccccucccc

SEQ ID NO: 669967 - RNA, 21 nt, Human
ugaaaauggccaguguccagc

SEQ ID NO: 669968 - RNA, 18 nt, Human
ugaaaccccaggugcacu

SEQ ID NO: 669969 - RNA, 18 nt, Human
ugacaugaugucggcaug

SEQ ID NO: 669970 - RNA, 22 nt, Human
ugaccccacacaccagcagcca

SEQ ID NO: 669971 - RNA, 20 nt, Human
ugacuaggcagaaccccuag

SEQ ID NO: 669972 - RNA, 19 nt, Human
ugacucugcaaagcagcag

SEQ ID NO: 669973 - RNA, 22 nt, Human
ugacucugcaaagcagcagcaa

SEQ ID NO: 669974 - RNA, 23 nt, Human
ugaggacacaccaggcagcagca

SEQ ID NO: 669975 - RNA, 21 nt, Human
ugagugguucccaggcaucca

SEQ ID NO: 669976 - RNA, 20 nt, Human
ugcacauguaaacggugggc

SEQ ID NO: 669977 - RNA, 19 nt, Human
ugccccuucuuccagcucc

SEQ ID NO: 669978 - RNA, 24 nt, Human
ugccucaguggcaggccguccccg

SEQ ID NO: 669979 - RNA, 20 nt, Human
ugcugagucccaggucgccc

SEQ ID NO: 669980 - RNA, 27 nt, Human
ugcugagucccaggucgcccgggccag

SEQ ID NO: 669981 - RNA, 22 nt, Human
ugcugcgggaagggacaaggug

SEQ ID NO: 669982 - RNA, 22 nt, Human
ugcuggcaauuggagccggugg

SEQ ID NO: 669983 - RNA, 19 nt, Human
uggaaaaagcagauaggaa

SEQ ID NO: 669984 - RNA, 22 nt, Human
uggaggccugcuugcugagggu

SEQ ID NO: 669985 - RNA, 22 nt, Human
uggcgggugggcaauggaggcu

SEQ ID NO: 669986 - RNA, 24 nt, Human
ugggaagcggcuucucaaggacac

SEQ ID NO: 669987 - RNA, 21 nt, Human
ugggcuggcucgggcuguggg

SEQ ID NO: 669988 - RNA, 22 nt, Human
uggggcuggugccugcccuggc

SEQ ID NO: 669989 - RNA, 19 nt, Human
ugggggaggggggguuacc

SEQ ID NO: 669990 - RNA, 21 nt, Human
ugggugcaggacaggggagag

SEQ ID NO: 669991 - RNA, 19 nt, Human
ugguccaggguggccucgc

SEQ ID NO: 669992 - RNA, 19 nt, Human
ugguucccaggcauccagc

SEQ ID NO: 669993 - RNA, 20 nt, Human
ugguucccaggcauccagcu

SEQ ID NO: 669994 - RNA, 21 nt, Human
ugucagucugugucuucuagg

SEQ ID NO: 669995 - RNA, 21 nt, Human
uguggagaggcgcacgggcug

SEQ ID NO: 669996 - RNA, 21 nt, Human
ugugguggcccagggccucug

SEQ ID NO: 669997 - RNA, 22 nt, Human
uucaaaauaaaaaacaaaagca

SEQ ID NO: 669998 - RNA, 24 nt, Human
uuccccacaaaaagcacaauacug

SEQ ID NO: 669999 - RNA, 22 nt, Human
uuccucgggcuggaggccugcu

SEQ ID NO: 670000 - RNA, 27 nt, Human
uucuaggacagaagguaguuguuuuuu

SEQ ID NO: 670001 - RNA, 22 nt, Human
uucugggucccaaagagcgcuc

SEQ ID NO: 670002 - RNA, 22 nt, Human
uucuuccagcucccagccuuag

SEQ ID NO: 670003 - RNA, 23 nt, Human
uuggccgcugcaggccaccaucc

SEQ ID NO: 670004 - RNA, 19 nt, Human
uuucaggggaggagauguc

SEQ ID NO: 670005 - RNA, 22 nt, Human
uuuggcaggaggcauucgggcu

SEQ ID NO: 670006 - RNA, 19 nt, Human
aaagugcuaggauuacagg

SEQ ID NO: 670007 - RNA, 24 nt, Human
aaagugcuaggauuacaggcauga

SEQ ID NO: 670008 - RNA, 25 nt, Human
aaauguagaaaaucaaagcuaaacc

SEQ ID NO: 670009 - RNA, 26 nt, Human
aagugcuaggauuacaggcaugagcc

SEQ ID NO: 670010 - RNA, 18 nt, Human
acauguauggccuauggc

SEQ ID NO: 670011 - RNA, 21 nt, Human
accacacugguauauggcaca

SEQ ID NO: 670012 - RNA, 23 nt, Human
accucagccucccaaagugcuag

SEQ ID NO: 670013 - RNA, 23 nt, Human
acucuaucuuagaguaucacaga

SEQ ID NO: 670014 - RNA, 18 nt, Human
acucugucacccaggcug

SEQ ID NO: 670015 - RNA, 25 nt, Human
acucugucacccaggcuggagggca

SEQ ID NO: 670016 - RNA, 20 nt, Human
agaaaaagagaggucuaaua

SEQ ID NO: 670017 - RNA, 24 nt, Human
agaaagggacaccugggaagagaa

SEQ ID NO: 670018 - RNA, 22 nt, Human
agauuuuccugacucagccucc

SEQ ID NO: 670019 - RNA, 18 nt, Human
agccacagcgcacccagc

SEQ ID NO: 670020 - RNA, 19 nt, Human
agccacagcgcacccagcc

SEQ ID NO: 670021 - RNA, 22 nt, Human
agcuaaaccccucaguuaucuc

SEQ ID NO: 670022 - RNA, 18 nt, Human
aggagaaagggacaccug

SEQ ID NO: 670023 - RNA, 23 nt, Human
aggaggacuuaaggacacuaggg

SEQ ID NO: 670024 - RNA, 18 nt, Human
aucucacucugucaccca

SEQ ID NO: 670025 - RNA, 19 nt, Human
augagccacagcgcaccca

SEQ ID NO: 670026 - RNA, 24 nt, Human
auggcauuucaucauguuggucag

SEQ ID NO: 670027 - RNA, 24 nt, Human
auuuuuauauuuuuaguggagaug

SEQ ID NO: 670028 - RNA, 24 nt, Human
caaagugcuaggauuacaggcaug

SEQ ID NO: 670029 - RNA, 27 nt, Human
cacacagacaccacacugguauauggc

SEQ ID NO: 670030 - RNA, 24 nt, Human
cacaccaccaugccuggcuaauuu

SEQ ID NO: 670031 - RNA, 22 nt, Human
cacucugucacccaggcuggag

SEQ ID NO: 670032 - RNA, 25 nt, Human
cacucugucacccaggcuggagggc

SEQ ID NO: 670033 - RNA, 22 nt, Human
cagcuucacacacagacaccac

SEQ ID NO: 670034 - RNA, 20 nt, Human
cauguuggucaggcugaucu

SEQ ID NO: 670035 - RNA, 21 nt, Human
cauguuggucaggcugaucuc

SEQ ID NO: 670036 - RNA, 22 nt, Human
cauguuggucaggcugaucucg

SEQ ID NO: 670037 - RNA, 19 nt, Human
ccaaagugcuaggauuaca

SEQ ID NO: 670038 - RNA, 24 nt, Human
ccaaagugcuaggauuacaggcau

SEQ ID NO: 670039 - RNA, 23 nt, Human
cccagguagcugggacugcaggc

SEQ ID NO: 670040 - RNA, 23 nt, Human
ccccucaguuaucucgaacucau

SEQ ID NO: 670041 - RNA, 22 nt, Human
ccucaagugaucugcccaccuc

SEQ ID NO: 670042 - RNA, 24 nt, Human
ccucccagguagcugggacugcag

SEQ ID NO: 670043 - RNA, 19 nt, Human
ccugacucagccucccagg

SEQ ID NO: 670044 - RNA, 22 nt, Human
ccugguucaagagauuuuccug

SEQ ID NO: 670045 - RNA, 24 nt, Human
cucaagugaucugcccaccucagc

SEQ ID NO: 670046 - RNA, 24 nt, Human
cucacucugucacccaggcuggag

SEQ ID NO: 670047 - RNA, 24 nt, Human
cucagccucccagguagcugggac

SEQ ID NO: 670048 - RNA, 22 nt, Human
cuggagggcaguggcacaaucu

SEQ ID NO: 670049 - RNA, 20 nt, Human
cuuuguuagcuauuucuacu

SEQ ID NO: 670050 - RNA, 24 nt, Human
cuuuuacccaacaaugcagcuuca

SEQ ID NO: 670051 - RNA, 22 nt, Human
gaaaggauggucucuacccaca

SEQ ID NO: 670052 - RNA, 22 nt, Human
gacugcaggcccacaccaccau

SEQ ID NO: 670053 - RNA, 24 nt, Human
gagauggcauuucaucauguuggu

SEQ ID NO: 670054 - RNA, 18 nt, Human
gauuacaggcaugagcca

SEQ ID NO: 670055 - RNA, 22 nt, Human
gauuacaggcaugagccacagc

SEQ ID NO: 670056 - RNA, 21 nt, Human
gcaacguccaccuccugguuc

SEQ ID NO: 670057 - RNA, 18 nt, Human
ggagaaagggacaccugg

SEQ ID NO: 670058 - RNA, 19 nt, Human
ggauggucucuacccacac

SEQ ID NO: 670059 - RNA, 22 nt, Human
ggauuacaggcaugagccacag

SEQ ID NO: 670060 - RNA, 22 nt, Human
ggauuacaggcaugagccacag

SEQ ID NO: 670061 - RNA, 22 nt, Human
ggcauuucaucauguuggucag

SEQ ID NO: 670062 - RNA, 24 nt, Human
ggcauuucaucauguuggucaggc

SEQ ID NO: 670063 - RNA, 23 nt, Human
gggacaauagagaaacuaguagc

SEQ ID NO: 670064 - RNA, 24 nt, Human
gugaucugcccaccucagccuccc

SEQ ID NO: 670065 - RNA, 18 nt, Human
uaacucuuacagcagaac

SEQ ID NO: 670066 - RNA, 25 nt, Human
uaagaaaggaaauuaggauauaaaa

SEQ ID NO: 670067 - RNA, 24 nt, Human
uaauuuuuauauuuuuaguggaga

SEQ ID NO: 670068 - RNA, 26 nt, Human
uacaggcaugagccacagcgcaccca

SEQ ID NO: 670069 - RNA, 21 nt, Human
uagaguaucacagauagagua

SEQ ID NO: 670070 - RNA, 18 nt, Human
uaggauuacaggcaugag

SEQ ID NO: 670071 - RNA, 21 nt, Human
uaggauuacaggcaugagcca

SEQ ID NO: 670072 - RNA, 22 nt, Human
uaggauuacaggcaugagccac

SEQ ID NO: 670073 - RNA, 24 nt, Human
uaggauuacaggcaugagccacag

SEQ ID NO: 670074 - RNA, 25 nt, Human
uaggauuacaggcaugagccacagc

SEQ ID NO: 670075 - RNA, 24 nt, Human
uaguggagauggcauuucaucaug

SEQ ID NO: 670076 - RNA, 27 nt, Human
uauaaaacaaggaggauuggcugaagc

SEQ ID NO: 670077 - RNA, 23 nt, Human
uauauggcacaagcuggccuaau

SEQ ID NO: 670078 - RNA, 24 nt, Human
uaucaauaaggaaagaaaugggau

SEQ ID NO: 670079 - RNA, 19 nt, Human
ucaaagcuaaaccccucag

SEQ ID NO: 670080 - RNA, 23 nt, Human
ucacugcaacguccaccuccugg

SEQ ID NO: 670081 - RNA, 24 nt, Human
ucacugcaacguccaccuccuggu

SEQ ID NO: 670082 - RNA, 27 nt, Human
ucacugcaacguccaccuccugguuca

SEQ ID NO: 670083 - RNA, 25 nt, Human
ucagaaaaagagaggucuaauaucu

SEQ ID NO: 670084 - RNA, 18 nt, Human
ucagccucccaaagugcu

SEQ ID NO: 670085 - RNA, 24 nt, Human
ucaguuaucucgaacucaugcaac

SEQ ID NO: 670086 - RNA, 24 nt, Human
ucccaaagugcuaggauuacaggc

SEQ ID NO: 670087 - RNA, 24 nt, Human
ucccagguagcugggacugcaggc

SEQ ID NO: 670088 - RNA, 23 nt, Human
uccugguucaagagauuuuccug

SEQ ID NO: 670089 - RNA, 18 nt, Human
ucucaaacaugagaccca

SEQ ID NO: 670090 - RNA, 22 nt, Human
ucucacucugucacccaggcug

SEQ ID NO: 670091 - RNA, 23 nt, Human
ucucacucugucacccaggcugg

SEQ ID NO: 670092 - RNA, 24 nt, Human
ucucacucugucacccaggcugga

SEQ ID NO: 670093 - RNA, 26 nt, Human
ucucacucugucacccaggcuggagg

SEQ ID NO: 670094 - RNA, 27 nt, Human
ucucacucugucacccaggcuggaggg

SEQ ID NO: 670095 - RNA, 21 nt, Human
ucugcccaccucagccuccca

SEQ ID NO: 670096 - RNA, 18 nt, Human
ucugucacccaggcugga

SEQ ID NO: 670097 - RNA, 20 nt, Human
ugacucagccucccagguag

SEQ ID NO: 670098 - RNA, 24 nt, Human
ugacucagccucccagguagcugg

SEQ ID NO: 670099 - RNA, 22 nt, Human
ugagacccagcuuuuuuccaga

SEQ ID NO: 670100 - RNA, 24 nt, Human
ugaucugcccaccucagccuccca

SEQ ID NO: 670101 - RNA, 18 nt, Human
ugauucuuaaacguuuuc

SEQ ID NO: 670102 - RNA, 23 nt, Human
uggagggcaguggcacaaucugg

SEQ ID NO: 670103 - RNA, 24 nt, Human
uggcacaaucugggaucacugcaa

SEQ ID NO: 670104 - RNA, 24 nt, Human
uggcauuucaucauguuggucagg

SEQ ID NO: 670105 - RNA, 18 nt, Human
uggccucaagugaucugc

SEQ ID NO: 670106 - RNA, 22 nt, Human
uggccucaagugaucugcccac

SEQ ID NO: 670107 - RNA, 24 nt, Human
ugggaacuugucucaaacaugaga

SEQ ID NO: 670108 - RNA, 25 nt, Human
ugggaagagaaucacaccacagaga

SEQ ID NO: 670109 - RNA, 18 nt, Human
ugggaucuuguuaugcag

SEQ ID NO: 670110 - RNA, 24 nt, Human
uggucaggcugaucucgaacuauu

SEQ ID NO: 670111 - RNA, 22 nt, Human
ugguucaagagauuuuccugac

SEQ ID NO: 670112 - RNA, 20 nt, Human
uguuggaccauaauugauuc

SEQ ID NO: 670113 - RNA, 19 nt, Human
uucaagagauuuuccugac

SEQ ID NO: 670114 - RNA, 19 nt, Human
uuuaaacugaccucagaag

SEQ ID NO: 670115 - RNA, 21 nt, Human
uuucaucauguuggucaggcu

SEQ ID NO: 670116 - RNA, 20 nt, Human
uuuguagacagaaucucacu

SEQ ID NO: 670117 - RNA, 23 nt, Human
uuuuuaguggagauggcauuuca

SEQ ID NO: 670118 - RNA, 20 nt, Human
uuuuuauauuuuuaguggag

SEQ ID NO: 670119 - RNA, 18 nt, Human
aguaggcaguuucugaaa

SEQ ID NO: 670120 - RNA, 19 nt, Human
caggauauucccaaauuaa

SEQ ID NO: 670121 - RNA, 22 nt, Human
uaaaguaauuuggccaaaauca

SEQ ID NO: 670122 - RNA, 20 nt, Human
uaucucaaaagaaaauaauu

SEQ ID NO: 670123 - RNA, 24 nt, Human
ucaaaagaaaauaauuagaaaauu

SEQ ID NO: 670124 - RNA, 22 nt, Human
uuaaaguaauuuggccaaaauc

SEQ ID NO: 670125 - RNA, 24 nt, Human
ccauuuaguguaguaguuuuuccu

SEQ ID NO: 670126 - RNA, 24 nt, Human
cccaccagauguucccagagagaa

SEQ ID NO: 670127 - RNA, 22 nt, Human
cccccccguggugagguuccac

SEQ ID NO: 670128 - RNA, 22 nt, Human
cgggagcauugugacugugagg

SEQ ID NO: 670129 - RNA, 20 nt, Human
gagggcagccucuuaucaca

SEQ ID NO: 670130 - RNA, 19 nt, Human
gcccagcaccucugugacc

SEQ ID NO: 670131 - RNA, 25 nt, Human
gcuaaacuggguaggaaaaguugua

SEQ ID NO: 670132 - RNA, 19 nt, Human
ggcccagcccucccccccg

SEQ ID NO: 670133 - RNA, 21 nt, Human
ggcugacaccacaggugaugu

SEQ ID NO: 670134 - RNA, 22 nt, Human
uaaaacagguguuuugcuaaac

SEQ ID NO: 670135 - RNA, 25 nt, Human
uaacagauguucuucucuuggaucu

SEQ ID NO: 670136 - RNA, 19 nt, Human
uacccaccagauguuccca

SEQ ID NO: 670137 - RNA, 22 nt, Human
uaguaguuuuuccuggaggauu

SEQ ID NO: 670138 - RNA, 21 nt, Human
ucucuuggaucuugacucuga

SEQ ID NO: 670139 - RNA, 18 nt, Human
uggaauagggccuguagu

SEQ ID NO: 670140 - RNA, 21 nt, Human
uguaacagauguucuucucuu

SEQ ID NO: 670141 - RNA, 20 nt, Human
uuccuggaggauuuggauuu

SEQ ID NO: 670142 - RNA, 23 nt, Human
aagcagcaagugacagaggaggg

SEQ ID NO: 670143 - RNA, 22 nt, Human
acccccccaucuggaguuaagg

SEQ ID NO: 670144 - RNA, 22 nt, Human
agaggagggugccuggcuccag

SEQ ID NO: 670145 - RNA, 23 nt, Human
agugacagaggagggugccuggu

SEQ ID NO: 670146 - RNA, 18 nt, Human
cagcagccugggcuuggc

SEQ ID NO: 670147 - RNA, 20 nt, Human
cagggugcccacucccucuu

SEQ ID NO: 670148 - RNA, 19 nt, Human
ccagcagccugggcuuggc

SEQ ID NO: 670149 - RNA, 24 nt, Human
cccccaaaaacaccccagcugggu

SEQ ID NO: 670150 - RNA, 23 nt, Human
ccccggcccggcccgcgggcccc

SEQ ID NO: 670151 - RNA, 19 nt, Human
ccgcgggccccgcgcacgc

SEQ ID NO: 670152 - RNA, 18 nt, Human
ccggcccgcgggccccgc

SEQ ID NO: 670153 - RNA, 18 nt, Human
ccggcccgcgggccccgc

SEQ ID NO: 670154 - RNA, 19 nt, Human
ccuggccagugucugaccu

SEQ ID NO: 670155 - RNA, 22 nt, Human
cgccagggugcccacucccucu

SEQ ID NO: 670156 - RNA, 20 nt, Human
cuggcuccagcagccugggc

SEQ ID NO: 670157 - RNA, 20 nt, Human
gacucccccaaaaacacccc

SEQ ID NO: 670158 - RNA, 19 nt, Human
gagggcccgccagggugcc

SEQ ID NO: 670159 - RNA, 21 nt, Human
gcgacucccccaaaaacaccc

SEQ ID NO: 670160 - RNA, 25 nt, Human
gcugcagcccaggucaccccggccc

SEQ ID NO: 670161 - RNA, 20 nt, Human
ggagagggcccgccagggug

SEQ ID NO: 670162 - RNA, 21 nt, Human
ggagggugccuggcuccagca

SEQ ID NO: 670163 - RNA, 24 nt, Human
gguggggagagggcccgccagggu

SEQ ID NO: 670164 - RNA, 18 nt, Human
ucccccaaaaacacccca

SEQ ID NO: 670165 - RNA, 20 nt, Human
ucccccaaaaacaccccagc

SEQ ID NO: 670166 - RNA, 21 nt, Human
ucuggaguuaaggcuccaagc

SEQ ID NO: 670167 - RNA, 23 nt, Human
ugacagaggagggugccuggcuc

SEQ ID NO: 670168 - RNA, 18 nt, Human
ugccuggccagugucuga

SEQ ID NO: 670169 - RNA, 18 nt, Human
ugggugggugccuggggg

SEQ ID NO: 670170 - RNA, 18 nt, Human
uuuuuuuuuuuuuugccu

SEQ ID NO: 670171 - RNA, 20 nt, Human
uuuuuuuuuuuuuugccugg

SEQ ID NO: 670172 - RNA, 22 nt, Human
uuuuuuuuuuuuuuuugccugg

SEQ ID NO: 670173 - RNA, 21 nt, Human
uuuuuuuuuuuuuuuuugccu

SEQ ID NO: 670174 - RNA, 20 nt, Human
uuuuuuuuuuuuuuuuuugg

SEQ ID NO: 670175 - RNA, 22 nt, Human
aaggguggacgggaacugagga

SEQ ID NO: 670176 - RNA, 21 nt, Human
aauuauuuuuuaauggagaac

SEQ ID NO: 670177 - RNA, 24 nt, Human
agacaggaggcuggcugggcaggg

SEQ ID NO: 670178 - RNA, 18 nt, Human
caggagccacugguugaa

SEQ ID NO: 670179 - RNA, 20 nt, Human
gggcagggagcugaggcagg

SEQ ID NO: 670180 - RNA, 18 nt, Human
ucucugggcagauggaag

SEQ ID NO: 670181 - RNA, 21 nt, Human
ugaggacagggccaguaccgu

SEQ ID NO: 670182 - RNA, 21 nt, Human
ugaggcagggaggaaaagucu

SEQ ID NO: 670183 - RNA, 23 nt, Human
ugaggcagggaggaaaagucucc

SEQ ID NO: 670184 - RNA, 19 nt, Human
ugcaccugggaagcgaggc

SEQ ID NO: 670185 - RNA, 21 nt, Human
uggcugggcagggagcugagg

SEQ ID NO: 670186 - RNA, 22 nt, Human
uggcugggcagggagcugaggc

SEQ ID NO: 670187 - RNA, 19 nt, Human
uguccagaccugccgggag

SEQ ID NO: 670188 - RNA, 22 nt, Human
agacccguccugggagccagga

SEQ ID NO: 670189 - RNA, 21 nt, Human
aggaggguuggaaggaccgcg

SEQ ID NO: 670190 - RNA, 21 nt, Human
aggccagagcccgugagggga

SEQ ID NO: 670191 - RNA, 25 nt, Human
cacccaggcucaagagggagggggc

SEQ ID NO: 670192 - RNA, 24 nt, Human
cagacccguccugggagccaggag

SEQ ID NO: 670193 - RNA, 21 nt, Human
cagagggcguccaagaugcag

SEQ ID NO: 670194 - RNA, 24 nt, Human
cccagccaagggcugcuucugacu

SEQ ID NO: 670195 - RNA, 23 nt, Human
cgcgagcucugguuaaggccaga

SEQ ID NO: 670196 - RNA, 21 nt, Human
gagccgcagccccgaaacuga

SEQ ID NO: 670197 - RNA, 24 nt, Human
ggaggugcugugcacccaggcuca

SEQ ID NO: 670198 - RNA, 18 nt, Human
ggaggugggaccuguccc

SEQ ID NO: 670199 - RNA, 22 nt, Human
ggaggugggaccuguccccgcc

SEQ ID NO: 670200 - RNA, 24 nt, Human
gggacuuucuucucacaaagaccu

SEQ ID NO: 670201 - RNA, 24 nt, Human
gggcacaccucacccagccaaggg

SEQ ID NO: 670202 - RNA, 22 nt, Human
gguagcaggaggguuggaagga

SEQ ID NO: 670203 - RNA, 23 nt, Human
uagacuucugugagccgcagccc

SEQ ID NO: 670204 - RNA, 22 nt, Human
ucccgggcagguuagacuucug

SEQ ID NO: 670205 - RNA, 21 nt, Human
ucugugagccgcagccccgaa

SEQ ID NO: 670206 - RNA, 23 nt, Human
ucugugagccgcagccccgaaac

SEQ ID NO: 670207 - RNA, 21 nt, Human
uggaaggaccgcgcgcaggag

SEQ ID NO: 670208 - RNA, 18 nt, Human
ugggagccaggagguggg

SEQ ID NO: 670209 - RNA, 19 nt, Human
uggugcagacccguccugg

SEQ ID NO: 670210 - RNA, 20 nt, Human
ugugcaggcaggagggcuuc

SEQ ID NO: 670211 - RNA, 22 nt, Human
uucuucucacaaagaccuuucu

SEQ ID NO: 670212 - RNA, 21 nt, Human
aaaaaaacaacacaacacuag

SEQ ID NO: 670213 - RNA, 23 nt, Human
aacacuuuuucucccuccugcca

SEQ ID NO: 670214 - RNA, 21 nt, Human
aaccugcucucucuauaccuc

SEQ ID NO: 670215 - RNA, 22 nt, Human
aaccugcucucucuauaccucu

SEQ ID NO: 670216 - RNA, 20 nt, Human
acaguaaguaauuugcuuaa

SEQ ID NO: 670217 - RNA, 19 nt, Human
accccagugccuucaaugc

SEQ ID NO: 670218 - RNA, 21 nt, Human
accuaugcauacauggaaaac

SEQ ID NO: 670219 - RNA, 22 nt, Human
cacccuaagacacuucugacag

SEQ ID NO: 670220 - RNA, 25 nt, Human
cagaaaaauacuuacuuaagccuca

SEQ ID NO: 670221 - RNA, 27 nt, Human
cauaaaaauacaguaaguaauuugcuu

SEQ ID NO: 670222 - RNA, 23 nt, Human
caucucccgccgcagcgccagcc

SEQ ID NO: 670223 - RNA, 22 nt, Human
ccaaaucuucugucuucggcau

SEQ ID NO: 670224 - RNA, 26 nt, Human
ccacccuaagacacuucugacagaag

SEQ ID NO: 670225 - RNA, 21 nt, Human
cgcggcccgacagcaucuccc

SEQ ID NO: 670226 - RNA, 21 nt, Human
cuaugcauacauggaaaacac

SEQ ID NO: 670227 - RNA, 22 nt, Human
cuccuggcugccaagcgccgcc

SEQ ID NO: 670228 - RNA, 19 nt, Human
cugccauaaaaauacagua

SEQ ID NO: 670229 - RNA, 24 nt, Human
cuuaagccucaagguccccaauaa

SEQ ID NO: 670230 - RNA, 22 nt, Human
gaaaccacugauuuauaaacua

SEQ ID NO: 670231 - RNA, 20 nt, Human
gaagccguuguaacacuuuu

SEQ ID NO: 670232 - RNA, 21 nt, Human
gacagcaucucccgccgcagc

SEQ ID NO: 670233 - RNA, 21 nt, Human
gcucucucuauaccucuccau

SEQ ID NO: 670234 - RNA, 19 nt, Human
gcugagcuauggaaccugc

SEQ ID NO: 670235 - RNA, 28 nt, Human
uaaaaaaaacaacacaacacuaggaaca

SEQ ID NO: 670236 - RNA, 19 nt, Human
uaagacacuucugacagaa

SEQ ID NO: 670237 - RNA, 23 nt, Human
uaaguaauuugcuuaaaaaaaac

SEQ ID NO: 670238 - RNA, 19 nt, Human
uaccggacuucauuagaag

SEQ ID NO: 670239 - RNA, 24 nt, Human
uacugaacuagauaaccacccuaa

SEQ ID NO: 670240 - RNA, 22 nt, Human
uagauaaccacccuaagacacu

SEQ ID NO: 670241 - RNA, 22 nt, Human
uaggccagagucuagcaggaaa

SEQ ID NO: 670242 - RNA, 18 nt, Human
ucauuuaucauuuaaaua

SEQ ID NO: 670243 - RNA, 19 nt, Human
ugaacuagauaaccacccu

SEQ ID NO: 670244 - RNA, 23 nt, Human
ugcaggcuacaaaucagugcagg

SEQ ID NO: 670245 - RNA, 23 nt, Human
ugcauacauggaaaacacuggca

SEQ ID NO: 670246 - RNA, 28 nt, Human
ugcauuacuuagagacagguuuccaaag

SEQ ID NO: 670247 - RNA, 21 nt, Human
ugccaagcgccgccgcggccc

SEQ ID NO: 670248 - RNA, 22 nt, Human
aaaauaaagauguaacauuuuc

SEQ ID NO: 670249 - RNA, 18 nt, Human
aaaucccagguacugcuu

SEQ ID NO: 670250 - RNA, 23 nt, Human
acacaccaguugcucaaggaccu

SEQ ID NO: 670251 - RNA, 25 nt, Human
acuccugaagagguuuaaagaagag

SEQ ID NO: 670252 - RNA, 18 nt, Human
acuuucaugguuucuuuc

SEQ ID NO: 670253 - RNA, 19 nt, Human
cacugcaguacagacagac

SEQ ID NO: 670254 - RNA, 22 nt, Human
cagggcuuguuuguccaggccu

SEQ ID NO: 670255 - RNA, 24 nt, Human
cccgggggggcaagccuaugggcu

SEQ ID NO: 670256 - RNA, 22 nt, Human
ccgggggggcaagccuaugggc

SEQ ID NO: 670257 - RNA, 25 nt, Human
ccucagggcuuguuuguccaggccu

SEQ ID NO: 670258 - RNA, 21 nt, Human
cuuguugucuucaggguuguu

SEQ ID NO: 670259 - RNA, 20 nt, Human
gagagcgcaaacgggcgaca

SEQ ID NO: 670260 - RNA, 18 nt, Human
gcagaucccuccucaggg

SEQ ID NO: 670261 - RNA, 20 nt, Human
gccgacaguccacugaugcc

SEQ ID NO: 670262 - RNA, 20 nt, Human
gcucaaggaccugccgacag

SEQ ID NO: 670263 - RNA, 22 nt, Human
gcuucuauccagguuaagaauc

SEQ ID NO: 670264 - RNA, 22 nt, Human
uaacugguuuguauugguggga

SEQ ID NO: 670265 - RNA, 19 nt, Human
uaauacaucaacuuacagg

SEQ ID NO: 670266 - RNA, 21 nt, Human
uacugcuuuuacuacugugau

SEQ ID NO: 670267 - RNA, 20 nt, Human
uauccagguuaagaaucccu

SEQ ID NO: 670268 - RNA, 22 nt, Human
uccaagaggugacaaauaugaa

SEQ ID NO: 670269 - RNA, 21 nt, Human
ucccacugcaguacagacaga

SEQ ID NO: 670270 - RNA, 20 nt, Human
ucgcccagguuccggcgggc

SEQ ID NO: 670271 - RNA, 23 nt, Human
ugacaaauaugaacaauacuuca

SEQ ID NO: 670272 - RNA, 20 nt, Human
ugaugagaugauauuuugaa

SEQ ID NO: 670273 - RNA, 20 nt, Human
ugcccgggggggcaagccua

SEQ ID NO: 670274 - RNA, 24 nt, Human
ugcccgggggggcaagccuauggg

SEQ ID NO: 670275 - RNA, 21 nt, Human
ugccgacaguccacugaugcc

SEQ ID NO: 670276 - RNA, 21 nt, Human
ugccuuuagggaaaauucugg

SEQ ID NO: 670277 - RNA, 26 nt, Human
uguauuggugggaaaaucccagguac

SEQ ID NO: 670278 - RNA, 23 nt, Human
uuaaagaagagguaagaccucac

SEQ ID NO: 670279 - RNA, 20 nt, Human
uuaguuuucggagcagggug

SEQ ID NO: 670280 - RNA, 22 nt, Human
uuccaucaaguucaugguuacc

SEQ ID NO: 670281 - RNA, 21 nt, Human
uucccacugcaguacagacag

SEQ ID NO: 670282 - RNA, 23 nt, Human
uugcagaucccuccucagggcuu

SEQ ID NO: 670283 - RNA, 18 nt, Human
uuucaugguuucuuuccu

SEQ ID NO: 670284 - RNA, 25 nt, Human
uuuccugacauugagcaguuucuga

SEQ ID NO: 670285 - RNA, 23 nt, Human
uuuuauguuacauuacaguugcu

SEQ ID NO: 670286 - RNA, 18 nt, Human
aggaauaggaugggggug

SEQ ID NO: 670287 - RNA, 22 nt, Human
aggcaggaggacauccuccucu

SEQ ID NO: 670288 - RNA, 19 nt, Human
aggcaggcaggaggacauc

SEQ ID NO: 670289 - RNA, 23 nt, Human
caaucuagacccagagccgcuuu

SEQ ID NO: 670290 - RNA, 21 nt, Human
cacccuuccuccuagucccca

SEQ ID NO: 670291 - RNA, 21 nt, Human
cacuccaccucacuguucuuc

SEQ ID NO: 670292 - RNA, 23 nt, Human
cacuguucuucagacagcuguga

SEQ ID NO: 670293 - RNA, 19 nt, Human
ccacacccuuccuccuagu

SEQ ID NO: 670294 - RNA, 26 nt, Human
ccacacccuuccuccuaguccccaug

SEQ ID NO: 670295 - RNA, 22 nt, Human
ccaugccacacccuuccuccua

SEQ ID NO: 670296 - RNA, 22 nt, Human
ccgguaaucaagggggccagac

SEQ ID NO: 670297 - RNA, 22 nt, Human
cuagacccagagccgcuuucuc

SEQ ID NO: 670298 - RNA, 23 nt, Human
cuccugggagccuggcagcucug

SEQ ID NO: 670299 - RNA, 19 nt, Human
cugcucaggaccaccacgg

SEQ ID NO: 670300 - RNA, 19 nt, Human
gaaagggggaguaucccuc

SEQ ID NO: 670301 - RNA, 20 nt, Human
gaaagggggaguaucccuca

SEQ ID NO: 670302 - RNA, 21 nt, Human
gaauaggauggggguggggag

SEQ ID NO: 670303 - RNA, 18 nt, Human
gacauccuccucucugcu

SEQ ID NO: 670304 - RNA, 22 nt, Human
gagaccuucaggcaggcaggag

SEQ ID NO: 670305 - RNA, 20 nt, Human
gaggacauccuccucucugc

SEQ ID NO: 670306 - RNA, 23 nt, Human
gaguaucgcuccaacaccgaacu

SEQ ID NO: 670307 - RNA, 23 nt, Human
gccacacccuuccuccuaguccc

SEQ ID NO: 670308 - RNA, 19 nt, Human
ggacauccuccucucugcu

SEQ ID NO: 670309 - RNA, 24 nt, Human
ggacauccuccucucugcucagga

SEQ ID NO: 670310 - RNA, 23 nt, Human
ggagaccuucaggcaggcaggag

SEQ ID NO: 670311 - RNA, 18 nt, Human
ggcccacacguccaggug

SEQ ID NO: 670312 - RNA, 21 nt, Human
ggggagggcuuaaguggccca

SEQ ID NO: 670313 - RNA, 20 nt, Human
ggggguggggagggcuuaag

SEQ ID NO: 670314 - RNA, 19 nt, Human
gggguggggagggcuuaag

SEQ ID NO: 670315 - RNA, 22 nt, Human
uaacgguuuaaaaaaaggguca

SEQ ID NO: 670316 - RNA, 21 nt, Human
ucacuguucuucagacagcug

SEQ ID NO: 670317 - RNA, 21 nt, Human
ucagacagcugugaugugagc

SEQ ID NO: 670318 - RNA, 22 nt, Human
uccaacaccgaacuucccuuua

SEQ ID NO: 670319 - RNA, 24 nt, Human
uccaacaccgaacuucccuuuaac

SEQ ID NO: 670320 - RNA, 22 nt, Human
ugacuacauugaguaucgcucc

SEQ ID NO: 670321 - RNA, 21 nt, Human
uggggguggggagggcuuaag

SEQ ID NO: 670322 - RNA, 19 nt, Human
ugugagcaggggcuaggcc

SEQ ID NO: 670323 - RNA, 22 nt, Human
ugugaugugagcaggggcuagg

SEQ ID NO: 670324 - RNA, 23 nt, Human
uucaugggagaccuucaggcagg

SEQ ID NO: 670325 - RNA, 21 nt, Human
uuuuuuuuuuuuuuuuccauu

SEQ ID NO: 670326 - RNA, 22 nt, Human
aaaaaaaaaaaaaaaaggaaaa

SEQ ID NO: 670327 - RNA, 25 nt, Human
aaaaaaaaaaaggaaacacuauuuu

SEQ ID NO: 670328 - RNA, 24 nt, Human
acauuugcuggaauguguacaucu

SEQ ID NO: 670329 - RNA, 19 nt, Human
aggcauuuggaaagugaaa

SEQ ID NO: 670330 - RNA, 20 nt, Human
aucaagucgucugcauccau

SEQ ID NO: 670331 - RNA, 22 nt, Human
caggcauuuggaaagugaaaga

SEQ ID NO: 670332 - RNA, 22 nt, Human
gaauguguacaucuacacuaaa

SEQ ID NO: 670333 - RNA, 28 nt, Human
guacauuuucaaaaaaaaaaaaaaaaaa

SEQ ID NO: 670334 - RNA, 20 nt, Human
uaaaccaaaaacaaaauuaa

SEQ ID NO: 670335 - RNA, 22 nt, Human
uaacaaagguuuuuuuccccca

SEQ ID NO: 670336 - RNA, 22 nt, Human
ucaaaaaaaaaaaaaaaaaaaa

SEQ ID NO: 670337 - RNA, 20 nt, Human
ucaguagugauagauauuuu

SEQ ID NO: 670338 - RNA, 19 nt, Human
ugcaaauacauuugcugga

SEQ ID NO: 670339 - RNA, 18 nt, Human
uguaaagcacaaaacagg

SEQ ID NO: 670340 - RNA, 18 nt, Human
aaaaaccagaaacuguaa

SEQ ID NO: 670341 - RNA, 20 nt, Human
aaaaccaaaccaaaccaaaa

SEQ ID NO: 670342 - RNA, 21 nt, Human
aaacccuacaaaaugccccuc

SEQ ID NO: 670343 - RNA, 21 nt, Human
aaauaaaaaggacacaaaacc

SEQ ID NO: 670344 - RNA, 22 nt, Human
acaaaaugccccucccaacccc

SEQ ID NO: 670345 - RNA, 24 nt, Human
acacaaaaccaaaccaaaccaaaa

SEQ ID NO: 670346 - RNA, 24 nt, Human
acaccuuggaauuaaaaauaguua

SEQ ID NO: 670347 - RNA, 22 nt, Human
agaaaaaacugcaaauaaaaag

SEQ ID NO: 670348 - RNA, 24 nt, Human
agaaaaaacugcaaauaaaaagga

SEQ ID NO: 670349 - RNA, 21 nt, Human
agaaaugcaagaaaaaauagc

SEQ ID NO: 670350 - RNA, 22 nt, Human
aucuguacaagauacacuacag

SEQ ID NO: 670351 - RNA, 24 nt, Human
caaaaccaucauguugaaauguca

SEQ ID NO: 670352 - RNA, 22 nt, Human
caacaguucuucaucaaaaggu

SEQ ID NO: 670353 - RNA, 22 nt, Human
caagauacacuacaguaaacac

SEQ ID NO: 670354 - RNA, 21 nt, Human
cacaaaaccaaaccaaaccaa

SEQ ID NO: 670355 - RNA, 25 nt, Human
cagaaaaaacugcaaauaaaaagga

SEQ ID NO: 670356 - RNA, 18 nt, Human
cagaacaaaacaacaguu

SEQ ID NO: 670357 - RNA, 22 nt, Human
cagaacaaaacaacaguucuuc

SEQ ID NO: 670358 - RNA, 18 nt, Human
ccaagauacaagaaauua

SEQ ID NO: 670359 - RNA, 19 nt, Human
ccccgccgccgucgccgcc

SEQ ID NO: 670360 - RNA, 28 nt, Human
ccccgccgccgucgccgccgccgccgac

SEQ ID NO: 670361 - RNA, 27 nt, Human
ccgcccccgccgccgucgccgccgccg

SEQ ID NO: 670362 - RNA, 25 nt, Human
ccgccgacgccgccgacgccgccgc

SEQ ID NO: 670363 - RNA, 27 nt, Human
ccgccgacgccgccgacgccgccgcuc

SEQ ID NO: 670364 - RNA, 18 nt, Human
ccgccgccgucgccgccg

SEQ ID NO: 670365 - RNA, 24 nt, Human
ccgccgccgucgccgccgccgccg

SEQ ID NO: 670366 - RNA, 22 nt, Human
ccgccgucgccgccgccgccga

SEQ ID NO: 670367 - RNA, 23 nt, Human
ccgccgucgccgccgccgccgac

SEQ ID NO: 670368 - RNA, 21 nt, Human
ccuaagacuuccaagccacuu

SEQ ID NO: 670369 - RNA, 21 nt, Human
cgcccccgccgccgucgccgc

SEQ ID NO: 670370 - RNA, 25 nt, Human
cgccgccgccgacgccgccgacgcc

SEQ ID NO: 670371 - RNA, 22 nt, Human
cggcuccccgguccggccuccc

SEQ ID NO: 670372 - RNA, 22 nt, Human
cgucgccgccgccgccgacgcc

SEQ ID NO: 670373 - RNA, 19 nt, Human
cuacaaaaugccccuccca

SEQ ID NO: 670374 - RNA, 24 nt, Human
cuacaaaaugccccucccaacccc

SEQ ID NO: 670375 - RNA, 18 nt, Human
cucccgcuccgcuugggg

SEQ ID NO: 670376 - RNA, 23 nt, Human
cucggcuccccgguccggccucc

SEQ ID NO: 670377 - RNA, 19 nt, Human
cugcaaauaaaaaggacac

SEQ ID NO: 670378 - RNA, 21 nt, Human
gcaacagaaaaaacugcaaau

SEQ ID NO: 670379 - RNA, 24 nt, Human
gccgccgccgacgccgccgacgcc

SEQ ID NO: 670380 - RNA, 22 nt, Human
gguaauggaggcaugagaaaaa

SEQ ID NO: 670381 - RNA, 19 nt, Human
gguuuuuuguuuuguuuua

SEQ ID NO: 670382 - RNA, 26 nt, Human
guuaucuguacaagauacacuacagu

SEQ ID NO: 670383 - RNA, 19 nt, Human
uaaaagaaaaaagcaaaca

SEQ ID NO: 670384 - RNA, 23 nt, Human
uaaaagaaaaaagcaaacaacac

SEQ ID NO: 670385 - RNA, 22 nt, Human
uaacaaaaauaaugaaacaaaa

SEQ ID NO: 670386 - RNA, 20 nt, Human
uaagaauacuuaaauacugc

SEQ ID NO: 670387 - RNA, 20 nt, Human
uaauagagaaagguuuuuug

SEQ ID NO: 670388 - RNA, 21 nt, Human
uacaaauagguuuucuuugac

SEQ ID NO: 670389 - RNA, 19 nt, Human
uaucugucucaguucagaa

SEQ ID NO: 670390 - RNA, 25 nt, Human
ucagaauucacaucauucauuacaa

SEQ ID NO: 670391 - RNA, 20 nt, Human
ucagucaaauaaaaagaaca

SEQ ID NO: 670392 - RNA, 24 nt, Human
ucagucaaauaaaaagaacacuuu

SEQ ID NO: 670393 - RNA, 23 nt, Human
ucccgcuccgcuuggggacccgu

SEQ ID NO: 670394 - RNA, 21 nt, Human
ucgccgccgccgccgacgccg

SEQ ID NO: 670395 - RNA, 24 nt, Human
ucgccgccgccgccgacgccgccg

SEQ ID NO: 670396 - RNA, 21 nt, Human
ugaaauaacaaaaauaaugaa

SEQ ID NO: 670397 - RNA, 19 nt, Human
ugaaaugucacagcucuga

SEQ ID NO: 670398 - RNA, 22 nt, Human
ugacuuuguagguauugcucca

SEQ ID NO: 670399 - RNA, 23 nt, Human
ugagaaaaacguaggcuaaacac

SEQ ID NO: 670400 - RNA, 24 nt, Human
ugagaaaaacguaggcuaaacagu

SEQ ID NO: 670401 - RNA, 20 nt, Human
ugcaacagaaaaaacugcaa

SEQ ID NO: 670402 - RNA, 21 nt, Human
ugcaagaaaaaauagcuucaa

SEQ ID NO: 670403 - RNA, 24 nt, Human
ugcaagaaaaaauagcuucaauuc

SEQ ID NO: 670404 - RNA, 18 nt, Human
uggaggcaugagaaaaac

SEQ ID NO: 670405 - RNA, 25 nt, Human
uuaauaguuagacauuucaagcauu

SEQ ID NO: 670406 - RNA, 19 nt, Human
uuauacaaacccuacaaaa

SEQ ID NO: 670407 - RNA, 24 nt, Human
uuauauuaccccuuucgaacucua

SEQ ID NO: 670408 - RNA, 20 nt, Human
uucacagaacaaaacaacug

SEQ ID NO: 670409 - RNA, 21 nt, Human
uuucacagaacaaaacaacag

SEQ ID NO: 670410 - RNA, 20 nt, Human
acccacuucccacaggcacc

SEQ ID NO: 670411 - RNA, 18 nt, Human
acuggcaggucaggauga

SEQ ID NO: 670412 - RNA, 23 nt, Human
acuucccacaggcaccaggucac

SEQ ID NO: 670413 - RNA, 21 nt, Human
aggaaggugggggacacugua

SEQ ID NO: 670414 - RNA, 20 nt, Human
aggccugggauggcagugaa

SEQ ID NO: 670415 - RNA, 25 nt, Human
aguaggagguggagguucccauggg

SEQ ID NO: 670416 - RNA, 24 nt, Human
aguaggagguggagguucgggacc

SEQ ID NO: 670417 - RNA, 22 nt, Human
auggggcaaggaagguggggga

SEQ ID NO: 670418 - RNA, 25 nt, Human
caaagggccucuucaggguuggccu

SEQ ID NO: 670419 - RNA, 21 nt, Human
cacagugaagccugcccgggc

SEQ ID NO: 670420 - RNA, 24 nt, Human
caccaggucacaguccugucccag

SEQ ID NO: 670421 - RNA, 23 nt, Human
caccaggucacuuggcacgcucc

SEQ ID NO: 670422 - RNA, 21 nt, Human
cacgcuucucuggguccucca

SEQ ID NO: 670423 - RNA, 23 nt, Human
cacggccaguaacagcgucccag

SEQ ID NO: 670424 - RNA, 24 nt, Human
cacucucugcuugcccagaucuug

SEQ ID NO: 670425 - RNA, 23 nt, Human
cacugcuaccaacuuggcaaggg

SEQ ID NO: 670426 - RNA, 20 nt, Human
cagaaugaggauccaggccu

SEQ ID NO: 670427 - RNA, 19 nt, Human
cagcagccaccagcagggc

SEQ ID NO: 670428 - RNA, 23 nt, Human
cagcagccaccagcagggcguug

SEQ ID NO: 670429 - RNA, 24 nt, Human
cagccaccagcagggcguugaggg

SEQ ID NO: 670430 - RNA, 21 nt, Human
caggacaucggaugugaccac

SEQ ID NO: 670431 - RNA, 24 nt, Human
ccaggccgagugcaggacaucgga

SEQ ID NO: 670432 - RNA, 24 nt, Human
ccccuguccaccaggucacagucc

SEQ ID NO: 670433 - RNA, 20 nt, Human
cuaggccccuguccaccagg

SEQ ID NO: 670434 - RNA, 21 nt, Human
cucccuucggcugcuccauuc

SEQ ID NO: 670435 - RNA, 26 nt, Human
cugagaacccacuucccacaggcacc

SEQ ID NO: 670436 - RNA, 25 nt, Human
cugcccacacgcuucucuggguccu

SEQ ID NO: 670437 - RNA, 21 nt, Human
cuguagcuccagguuuucucc

SEQ ID NO: 670438 - RNA, 19 nt, Human
cuuccugccgucgcccggc

SEQ ID NO: 670439 - RNA, 21 nt, Human
cuugggaccuuccuaugucca

SEQ ID NO: 670440 - RNA, 22 nt, Human
gagugaauuuauuccaagaaug

SEQ ID NO: 670441 - RNA, 24 nt, Human
gagugcaggacaucggaugugacc

SEQ ID NO: 670442 - RNA, 27 nt, Human
ggaguaggagguggagguucgggaccc

SEQ ID NO: 670443 - RNA, 18 nt, Human
gggcguugaggguggcuc

SEQ ID NO: 670444 - RNA, 18 nt, Human
guacuggcaggucaggau

SEQ ID NO: 670445 - RNA, 21 nt, Human
uacaucuaggccccuguccac

SEQ ID NO: 670446 - RNA, 19 nt, Human
uagcuccagguuuucuccu

SEQ ID NO: 670447 - RNA, 26 nt, Human
uaggagguggagguucccauggggca

SEQ ID NO: 670448 - RNA, 18 nt, Human
uaggccccuguccaccag

SEQ ID NO: 670449 - RNA, 18 nt, Human
ucacugcuaccaacuugg

SEQ ID NO: 670450 - RNA, 26 nt, Human
uccacggccaguaacagcgucccagc

SEQ ID NO: 670451 - RNA, 20 nt, Human
ucuacaacucuaagccauaa

SEQ ID NO: 670452 - RNA, 19 nt, Human
ucucucugaaagaccugga

SEQ ID NO: 670453 - RNA, 22 nt, Human
ugaaagaccuggacacugucau

SEQ ID NO: 670454 - RNA, 18 nt, Human
ugagaaggccagccauag

SEQ ID NO: 670455 - RNA, 23 nt, Human
ugcagaaugaggauccaggccga

SEQ ID NO: 670456 - RNA, 23 nt, Human
ugcuaguuaaggccugggauggc

SEQ ID NO: 670457 - RNA, 20 nt, Human
uucucuggguccuccacggc

SEQ ID NO: 670458 - RNA, 24 nt, Human
uugcuaagggacucccagccauau

SEQ ID NO: 670459 - RNA, 19 nt, Human
uuuuuuuuuuugcaaggac

SEQ ID NO: 670460 - RNA, 21 nt, Human
uuuuuuuuuuuuuugcaagga

SEQ ID NO: 670461 - RNA, 18 nt, Human
uuuuuuuuuuuuuuuuug

SEQ ID NO: 670462 - RNA, 21 nt, Human
uuuuuuuuuuuuuuuuugcaa

SEQ ID NO: 670463 - RNA, 18 nt, Human
aaaagaacuaauccacac

SEQ ID NO: 670464 - RNA, 23 nt, Human
aaacaauuuauuauaacucuagu

SEQ ID NO: 670465 - RNA, 22 nt, Human
aaaccgaaauugaaaaaaguaa

SEQ ID NO: 670466 - RNA, 24 nt, Human
aaagugcugggauuacagguguga

SEQ ID NO: 670467 - RNA, 23 nt, Human
aaauaaacacagaugccaacaaa

SEQ ID NO: 670468 - RNA, 20 nt, Human
aaccagaaaaaaagcaguga

SEQ ID NO: 670469 - RNA, 19 nt, Human
aaccccacaacuuuccucu

SEQ ID NO: 670470 - RNA, 21 nt, Human
aacugcccuucuuugguucuu

SEQ ID NO: 670471 - RNA, 24 nt, Human
aagaauauuccuuuuuccuuaaaa

SEQ ID NO: 670472 - RNA, 24 nt, Human
aagcagaaaacacuggcaccaaaa

SEQ ID NO: 670473 - RNA, 22 nt, Human
aagccuagauuacuaaaaccga

SEQ ID NO: 670474 - RNA, 23 nt, Human
aagggaauuaucuauuuuucuca

SEQ ID NO: 670475 - RNA, 22 nt, Human
aagucacuuuuguccccaaaac

SEQ ID NO: 670476 - RNA, 18 nt, Human
aagugcugggauuacagg

SEQ ID NO: 670477 - RNA, 19 nt, Human
aagugcugggauuacaggu

SEQ ID NO: 670478 - RNA, 26 nt, Human
aagugcugggauuacaggugugagcc

SEQ ID NO: 670479 - RNA, 21 nt, Human
aauaaaccaguuuauuacaga

SEQ ID NO: 670480 - RNA, 19 nt, Human
acaaagcaaaugauuaagc

SEQ ID NO: 670481 - RNA, 24 nt, Human
acaaagcaaaugauuaagcagaaa

SEQ ID NO: 670482 - RNA, 26 nt, Human
acaacuuuccucuuugcuagaacugu

SEQ ID NO: 670483 - RNA, 21 nt, Human
acacaaaaccuacuuugaaac

SEQ ID NO: 670484 - RNA, 19 nt, Human
acagaaucaccuagaauga

SEQ ID NO: 670485 - RNA, 23 nt, Human
accaaauaugaauaugaaaguuu

SEQ ID NO: 670486 - RNA, 23 nt, Human
accaacagaggcacuguaagaga

SEQ ID NO: 670487 - RNA, 25 nt, Human
accacacaauuacuuauccuugauc

SEQ ID NO: 670488 - RNA, 18 nt, Human
accagaaaaaaagcagug

SEQ ID NO: 670489 - RNA, 24 nt, Human
accguguuggucaggcuggucucg

SEQ ID NO: 670490 - RNA, 21 nt, Human
acgggguuucaccguguuggu

SEQ ID NO: 670491 - RNA, 23 nt, Human
acgggguuucaccguguugguca

SEQ ID NO: 670492 - RNA, 24 nt, Human
acgggguuucaccguguuggucag

SEQ ID NO: 670493 - RNA, 18 nt, Human
acuaauccuuuuccccaa

SEQ ID NO: 670494 - RNA, 25 nt, Human
acucuguugcccaggcuggagugca

SEQ ID NO: 670495 - RNA, 18 nt, Human
acugcagcaccuuccacc

SEQ ID NO: 670496 - RNA, 18 nt, Human
agaaaaaaagcagugaag

SEQ ID NO: 670497 - RNA, 22 nt, Human
agaaagaaaauacaaaguuuaa

SEQ ID NO: 670498 - RNA, 19 nt, Human
agacagaccaacagaggca

SEQ ID NO: 670499 - RNA, 24 nt, Human
agacauaaagguccacccugaacc

SEQ ID NO: 670500 - RNA, 21 nt, Human
agacauccuaguuuccaauaa

SEQ ID NO: 670501 - RNA, 19 nt, Human
agauuacaggcaugugcca

SEQ ID NO: 670502 - RNA, 26 nt, Human
agccaccacgcccagccgggccuaga

SEQ ID NO: 670503 - RNA, 20 nt, Human
aggcacacacacacaaaacc

SEQ ID NO: 670504 - RNA, 18 nt, Human
aggccucccucauaaaga

SEQ ID NO: 670505 - RNA, 18 nt, Human
aggcuggagugcaguggc

SEQ ID NO: 670506 - RNA, 20 nt, Human
aguagagacgggguuucacc

SEQ ID NO: 670507 - RNA, 21 nt, Human
aguagcugagauuacaggcau

SEQ ID NO: 670508 - RNA, 23 nt, Human
aguagcugagauuacaggcaugu

SEQ ID NO: 670509 - RNA, 23 nt, Human
agugcaguggcgugauuuuggcu

SEQ ID NO: 670510 - RNA, 24 nt, Human
agugcaguggcgugauuuuggcuc

SEQ ID NO: 670511 - RNA, 20 nt, Human
auaaaauguacauguaaauc

SEQ ID NO: 670512 - RNA, 22 nt, Human
auaaacacagaugccaacaaag

SEQ ID NO: 670513 - RNA, 19 nt, Human
auccaucguuguauucuuu

SEQ ID NO: 670514 - RNA, 19 nt, Human
aucuugacaagacauaaag

SEQ ID NO: 670515 - RNA, 21 nt, Human
augugucugagcagucagugg

SEQ ID NO: 670516 - RNA, 18 nt, Human
auuaagcagaaaacacug

SEQ ID NO: 670517 - RNA, 24 nt, Human
auuuuuguauuuuuaguagagacg

SEQ ID NO: 670518 - RNA, 18 nt, Human
caaaaauauacagagaca

SEQ ID NO: 670519 - RNA, 24 nt, Human
caaaaauauacagagacaccacaa

SEQ ID NO: 670520 - RNA, 19 nt, Human
caaaauaaacaaaggcaag

SEQ ID NO: 670521 - RNA, 19 nt, Human
caaacaguaaagaaaugaa

SEQ ID NO: 670522 - RNA, 24 nt, Human
caaagugcugggauuacaggugug

SEQ ID NO: 670523 - RNA, 21 nt, Human
caaaugcacgagccaagugcu

SEQ ID NO: 670524 - RNA, 23 nt, Human
caacuucuaccucccagguucaa

SEQ ID NO: 670525 - RNA, 22 nt, Human
caagacagugggguuaacaaaa

SEQ ID NO: 670526 - RNA, 20 nt, Human
caagcgauucucuugccuca

SEQ ID NO: 670527 - RNA, 22 nt, Human
caagcgauucucuugccucagc

SEQ ID NO: 670528 - RNA, 23 nt, Human
caauucaguuugagacagaccaa

SEQ ID NO: 670529 - RNA, 23 nt, Human
cacacaaaaccuacuuugaaaca

SEQ ID NO: 670530 - RNA, 24 nt, Human
cacacaaaaccuacuuugaaacaa

SEQ ID NO: 670531 - RNA, 21 nt, Human
caccguguuggucaggcuggu

SEQ ID NO: 670532 - RNA, 24 nt, Human
caccguguuggucaggcuggucuc

SEQ ID NO: 670533 - RNA, 24 nt, Human
cacucuguugcccaggcuggagug

SEQ ID NO: 670534 - RNA, 21 nt, Human
cacugcaacuucuaccuccca

SEQ ID NO: 670535 - RNA, 20 nt, Human
cagccuccugaguagcugag

SEQ ID NO: 670536 - RNA, 24 nt, Human
cauaacauuaaacaaacuggacuc

SEQ ID NO: 670537 - RNA, 20 nt, Human
cauccaggaaaaucuaaaag

SEQ ID NO: 670538 - RNA, 21 nt, Human
caucuuuucaccaaauacuuc

SEQ ID NO: 670539 - RNA, 19 nt, Human
cauguaguuuucgauaaca

SEQ ID NO: 670540 - RNA, 21 nt, Human
caugucaagucacuuuugucc

SEQ ID NO: 670541 - RNA, 20 nt, Human
cauuccccaagacagugggg

SEQ ID NO: 670542 - RNA, 21 nt, Human
ccaaagugcugggauuacagg

SEQ ID NO: 670543 - RNA, 21 nt, Human
ccaaagugcugggauuacagg

SEQ ID NO: 670544 - RNA, 24 nt, Human
ccaaagugcugggauuacaggugu

SEQ ID NO: 670545 - RNA, 21 nt, Human
cccaggcuggagugcaguggc

SEQ ID NO: 670546 - RNA, 20 nt, Human
cccagguucaagcgauucuc

SEQ ID NO: 670547 - RNA, 21 nt, Human
cccagguucaagcgauucucu

SEQ ID NO: 670548 - RNA, 23 nt, Human
cccauaacauuaaacaaacugga

SEQ ID NO: 670549 - RNA, 23 nt, Human
ccccaaaacgaucuuucagagaa

SEQ ID NO: 670550 - RNA, 19 nt, Human
ccccacaacuuuccucuuu

SEQ ID NO: 670551 - RNA, 20 nt, Human
ccuaguuuccaauaauuuau

SEQ ID NO: 670552 - RNA, 24 nt, Human
ccucccagguucaagcgauucucu

SEQ ID NO: 670553 - RNA, 19 nt, Human
ccugaguagcugagauuac

SEQ ID NO: 670554 - RNA, 23 nt, Human
ccugaguagcugagauuacaggc

SEQ ID NO: 670555 - RNA, 24 nt, Human
ccugaguagcugagauuacaggca

SEQ ID NO: 670556 - RNA, 19 nt, Human
ccuuuaaacacauuccaca

SEQ ID NO: 670557 - RNA, 24 nt, Human
cggagucucacucuguugcccagg

SEQ ID NO: 670558 - RNA, 24 nt, Human
cgggguuucaccguguuggucagg

SEQ ID NO: 670559 - RNA, 24 nt, Human
cucacucuguugcccaggcuggag

SEQ ID NO: 670560 - RNA, 24 nt, Human
cucacugcaacuucuaccucccag

SEQ ID NO: 670561 - RNA, 24 nt, Human
cuccugaccucgugauccgcccgc

SEQ ID NO: 670562 - RNA, 23 nt, Human
cugaguagcugagauuacaggca

SEQ ID NO: 670563 - RNA, 24 nt, Human
cugaguagcugagauuacaggcau

SEQ ID NO: 670564 - RNA, 23 nt, Human
cugcaacuucuaccucccagguu

SEQ ID NO: 670565 - RNA, 24 nt, Human
cugcaacuucuaccucccagguuc

SEQ ID NO: 670566 - RNA, 26 nt, Human
cuguuacccaugaaucaauauaaacc

SEQ ID NO: 670567 - RNA, 23 nt, Human
cuugccucagccuccugaguagc

SEQ ID NO: 670568 - RNA, 24 nt, Human
cuugccucagccuccugaguagcu

SEQ ID NO: 670569 - RNA, 19 nt, Human
cuuuacaaaaauauacaga

SEQ ID NO: 670570 - RNA, 22 nt, Human
gaccucgugauccgcccgccuc

SEQ ID NO: 670571 - RNA, 22 nt, Human
gaccucgugauccgcccgccuc

SEQ ID NO: 670572 - RNA, 24 nt, Human
gaccucgugauccgcccgccucgg

SEQ ID NO: 670573 - RNA, 20 nt, Human
gagacaccacaaauugguag

SEQ ID NO: 670574 - RNA, 23 nt, Human
gagacgggguuucaccguguugg

SEQ ID NO: 670575 - RNA, 24 nt, Human
gagacgggguuucaccguguuggu

SEQ ID NO: 670576 - RNA, 22 nt, Human
gaguagcugagauuacaggcau

SEQ ID NO: 670577 - RNA, 25 nt, Human
gaguagcugagauuacaggcaugug

SEQ ID NO: 670578 - RNA, 18 nt, Human
gauuacaggcaugugcca

SEQ ID NO: 670579 - RNA, 24 nt, Human
gauuacaggcaugugccaccaugc

SEQ ID NO: 670580 - RNA, 18 nt, Human
gauuacaggugugagcca

SEQ ID NO: 670581 - RNA, 21 nt, Human
gauuacaggugugagccacca

SEQ ID NO: 670582 - RNA, 22 nt, Human
gauuacaggugugagccaccac

SEQ ID NO: 670583 - RNA, 21 nt, Human
gauucucuugccucagccucc

SEQ ID NO: 670584 - RNA, 22 nt, Human
gcaacuucuaccucccagguuc

SEQ ID NO: 670585 - RNA, 19 nt, Human
gcagcaccuuccacccacc

SEQ ID NO: 670586 - RNA, 20 nt, Human
gccuagacaucuugacaaga

SEQ ID NO: 670587 - RNA, 23 nt, Human
gccucggccucccaaagugcugg

SEQ ID NO: 670588 - RNA, 24 nt, Human
gcgauucucuugccucagccuccu

SEQ ID NO: 670589 - RNA, 21 nt, Human
gcucacugcaacuucuaccuc

SEQ ID NO: 670590 - RNA, 18 nt, Human
gcucaguagacauuuacu

SEQ ID NO: 670591 - RNA, 23 nt, Human
gcuggucucgaacuccugaccuc

SEQ ID NO: 670592 - RNA, 23 nt, Human
ggaaaaucuaaaaaaauuaaaga

SEQ ID NO: 670593 - RNA, 25 nt, Human
ggaaaaucuaaaaaaauuaaagaaa

SEQ ID NO: 670594 - RNA, 23 nt, Human
ggagucucacucuguugcccagg

SEQ ID NO: 670595 - RNA, 22 nt, Human
ggcuggagugcaguggcgugau

SEQ ID NO: 670596 - RNA, 24 nt, Human
ggcuggucucgaacuccugaccuc

SEQ ID NO: 670597 - RNA, 18 nt, Human
gguccacccugaaccuaa

SEQ ID NO: 670598 - RNA, 19 nt, Human
ggucucgaacuccugaccu

SEQ ID NO: 670599 - RNA, 21 nt, Human
guaaauaaacacagaugccaa

SEQ ID NO: 670600 - RNA, 23 nt, Human
guagagacgggguuucaccgugu

SEQ ID NO: 670601 - RNA, 20 nt, Human
guagcugagauuacaggcau

SEQ ID NO: 670602 - RNA, 21 nt, Human
gugaaaagcaggccucccuca

SEQ ID NO: 670603 - RNA, 24 nt, Human
gugauccgcccgccucggccuccc

SEQ ID NO: 670604 - RNA, 22 nt, Human
uaaaaagaacauauaaaaauac

SEQ ID NO: 670605 - RNA, 23 nt, Human
uaaaaaugaccaugguuuauacu

SEQ ID NO: 670606 - RNA, 21 nt, Human
uaaacaaaggcaagauuugcc

SEQ ID NO: 670607 - RNA, 24 nt, Human
uaaauaaacacagaugccaacaaa

SEQ ID NO: 670608 - RNA, 25 nt, Human
uaaauaaacacagaugccaacaaag

SEQ ID NO: 670609 - RNA, 23 nt, Human
uaaauaaacugaggugugaaaag

SEQ ID NO: 670610 - RNA, 22 nt, Human
uaacagcaguaagaaaacuaag

SEQ ID NO: 670611 - RNA, 24 nt, Human
uaacauuaaacaaacuggacucuu

SEQ ID NO: 670612 - RNA, 20 nt, Human
uaaccacacaauuacuuauc

SEQ ID NO: 670613 - RNA, 21 nt, Human
uaacgggcucagcaaaccguc

SEQ ID NO: 670614 - RNA, 23 nt, Human
uaagggaauuaucuauuuuucuc

SEQ ID NO: 670615 - RNA, 19 nt, Human
uaaguaaaccaaacuauga

SEQ ID NO: 670616 - RNA, 18 nt, Human
uaaucuaauuauagcacc

SEQ ID NO: 670617 - RNA, 24 nt, Human
uaauuuaaguaaaccaaacuauga

SEQ ID NO: 670618 - RNA, 24 nt, Human
uaauuuuuguauuuuuaguagaga

SEQ ID NO: 670619 - RNA, 23 nt, Human
uacaggcaugugccaccaugccc

SEQ ID NO: 670620 - RNA, 24 nt, Human
uacaggugugagccaccacgccca

SEQ ID NO: 670621 - RNA, 20 nt, Human
uaccuuaaauuucauggcac

SEQ ID NO: 670622 - RNA, 23 nt, Human
uagcauguguuuggugaggcaga

SEQ ID NO: 670623 - RNA, 21 nt, Human
uaggcacacacacacaaaacc

SEQ ID NO: 670624 - RNA, 21 nt, Human
uaguagagacgggguuucacc

SEQ ID NO: 670625 - RNA, 24 nt, Human
uaguagagacgggguuucaccgug

SEQ ID NO: 670626 - RNA, 26 nt, Human
uaguagagacgggguuucaccguguu

SEQ ID NO: 670627 - RNA, 26 nt, Human
uaguagagacgggguuucaccguugg

SEQ ID NO: 670628 - RNA, 21 nt, Human
uauaaccauugccugguacag

SEQ ID NO: 670629 - RNA, 24 nt, Human
uauuacagauuaaaucauuuuuuc

SEQ ID NO: 670630 - RNA, 19 nt, Human
ucaaaaacucaauuuccca

SEQ ID NO: 670631 - RNA, 20 nt, Human
ucaauuacagaacauacuaa

SEQ ID NO: 670632 - RNA, 24 nt, Human
ucaccguguuggucaggcuggucu

SEQ ID NO: 670633 - RNA, 24 nt, Human
ucacucuguugcccaggcuggagu

SEQ ID NO: 670634 - RNA, 24 nt, Human
ucacugcaacuucuaccucccagg

SEQ ID NO: 670635 - RNA, 25 nt, Human
ucacugcaacuucuaccucccaggu

SEQ ID NO: 670636 - RNA, 24 nt, Human
ucagacauccuaguuuccaauaau

SEQ ID NO: 670637 - RNA, 19 nt, Human
ucaguagacauuuacugaa

SEQ ID NO: 670638 - RNA, 23 nt, Human
uccacaaacaguauuuaaaaucc

SEQ ID NO: 670639 - RNA, 24 nt, Human
uccacccacccuuuggucgcuuga

SEQ ID NO: 670640 - RNA, 23 nt, Human
ucccaaagugcugggauuacagg

SEQ ID NO: 670641 - RNA, 21 nt, Human
ucccagguucaagcgauucuc

SEQ ID NO: 670642 - RNA, 21 nt, Human
ucccagguucaagcgauucuc

SEQ ID NO: 670643 - RNA, 24 nt, Human
ucccagguucaagcgauucucuug

SEQ ID NO: 670644 - RNA, 24 nt, Human
uccugaguagcugagauuacaggc

SEQ ID NO: 670645 - RNA, 24 nt, Human
uccuuuauaccuaaugcaaaguua

SEQ ID NO: 670646 - RNA, 24 nt, Human
ucgcuugaacugcccuucuuuggu

SEQ ID NO: 670647 - RNA, 18 nt, Human
ucggccucccaaagugcu

SEQ ID NO: 670648 - RNA, 23 nt, Human
ucucacucuguugcccaggcugg

SEQ ID NO: 670649 - RNA, 24 nt, Human
ucucacucuguugcccaggcugga

SEQ ID NO: 670650 - RNA, 26 nt, Human
ucucacucuguugcccaggcuggagu

SEQ ID NO: 670651 - RNA, 19 nt, Human
ucucgaacuccugaccucg

SEQ ID NO: 670652 - RNA, 18 nt, Human
ucuguugcccaggcugga

SEQ ID NO: 670653 - RNA, 24 nt, Human
ucuguugcccaggcuggagugcag

SEQ ID NO: 670654 - RNA, 23 nt, Human
ugaauaacacaccucaaacaaaa

SEQ ID NO: 670655 - RNA, 22 nt, Human
ugacaagacauaaagguccacc

SEQ ID NO: 670656 - RNA, 23 nt, Human
ugacuaggaaagaggugagaaga

SEQ ID NO: 670657 - RNA, 19 nt, Human
ugagaagagaugggcccuc

SEQ ID NO: 670658 - RNA, 21 nt, Human
ugagacagaccaacagaggca

SEQ ID NO: 670659 - RNA, 22 nt, Human
ugagacggagucucacucuguu

SEQ ID NO: 670660 - RNA, 18 nt, Human
ugagauuacaggcaugug

SEQ ID NO: 670661 - RNA, 21 nt, Human
ugagauuacaggcaugugcca

SEQ ID NO: 670662 - RNA, 22 nt, Human
ugagauuacaggcaugugccac

SEQ ID NO: 670663 - RNA, 24 nt, Human
ugagauuacaggcaugugccacca

SEQ ID NO: 670664 - RNA, 21 nt, Human
ugcaaacaguaaagaaaugaa

SEQ ID NO: 670665 - RNA, 18 nt, Human
ugcccaggcuggagugca

SEQ ID NO: 670666 - RNA, 21 nt, Human
ugcccaggcuggagugcagug

SEQ ID NO: 670667 - RNA, 22 nt, Human
ugcccaggcuggagugcagugg

SEQ ID NO: 670668 - RNA, 24 nt, Human
ugcccaggcuggagugcaguggcg

SEQ ID NO: 670669 - RNA, 24 nt, Human
ugccucagccuccugaguagcuga

SEQ ID NO: 670670 - RNA, 24 nt, Human
ugcugggauuacaggugugagcca

SEQ ID NO: 670671 - RNA, 19 nt, Human
uggagugcaguggcgugau

SEQ ID NO: 670672 - RNA, 23 nt, Human
uggagugcaguggcgugauuuug

SEQ ID NO: 670673 - RNA, 24 nt, Human
uggagugcaguggcgugauuuugg

SEQ ID NO: 670674 - RNA, 24 nt, Human
uggcgugauuuuggcucacugcaa

SEQ ID NO: 670675 - RNA, 18 nt, Human
ugggauuacaggugugag

SEQ ID NO: 670676 - RNA, 19 nt, Human
ugggauuacaggugugagc

SEQ ID NO: 670677 - RNA, 22 nt, Human
ugggauuacaggugugagccac

SEQ ID NO: 670678 - RNA, 23 nt, Human
ugggauuacaggugugagccacc

SEQ ID NO: 670679 - RNA, 24 nt, Human
ugggauuacaggugugagccacca

SEQ ID NO: 670680 - RNA, 24 nt, Human
uggucaggcuggucucgaacuccu

SEQ ID NO: 670681 - RNA, 21 nt, Human
uguauuuuuaguagagacggg

SEQ ID NO: 670682 - RNA, 19 nt, Human
uguguuuggugaggcagag

SEQ ID NO: 670683 - RNA, 18 nt, Human
uuaguagagacgggguuu

SEQ ID NO: 670684 - RNA, 22 nt, Human
uuaguagagacgggguuucacc

SEQ ID NO: 670685 - RNA, 24 nt, Human
uuaguagagacgggguuucaccgu

SEQ ID NO: 670686 - RNA, 23 nt, Human
uucaagcgauucucuugccucag

SEQ ID NO: 670687 - RNA, 18 nt, Human
uugaacugcccuucuuug

SEQ ID NO: 670688 - RNA, 24 nt, Human
uugcccaggcuggagugcaguggc

SEQ ID NO: 670689 - RNA, 23 nt, Human
uuggaauuuaccugggaaggagu

SEQ ID NO: 670690 - RNA, 21 nt, Human
uuggaccauaccuuuucccac

SEQ ID NO: 670691 - RNA, 23 nt, Human
uuguauuuuuaguagagacgggg

SEQ ID NO: 670692 - RNA, 18 nt, Human
uuuaaacuauacauccag

SEQ ID NO: 670693 - RNA, 25 nt, Human
uuuacacuaggcacacacacacaaa

SEQ ID NO: 670694 - RNA, 22 nt, Human
uuuagucagguacuacacugau

SEQ ID NO: 670695 - RNA, 18 nt, Human
uuugcccacaguaagggc

SEQ ID NO: 670696 - RNA, 25 nt, Human
uuuguuguuuaaacuauacauccag

SEQ ID NO: 670697 - RNA, 24 nt, Human
uuuuuaguagagacgggguuucac

SEQ ID NO: 670698 - RNA, 20 nt, Human
uuuuuguauuuuuaguagag

SEQ ID NO: 670699 - RNA, 26 nt, Human
uuuuuuuuuuuugagacggagucuca

SEQ ID NO: 670700 - RNA, 22 nt, Human
uuuuuuuuuuuuuugagacgga

SEQ ID NO: 670701 - RNA, 23 nt, Human
aaaccaacagaugggaucucuca

SEQ ID NO: 670702 - RNA, 20 nt, Human
aaagugagagagguggcuca

SEQ ID NO: 670703 - RNA, 19 nt, Human
aaauaagaaggaaucaaaa

SEQ ID NO: 670704 - RNA, 19 nt, Human
aagaaagugagagaggugg

SEQ ID NO: 670705 - RNA, 18 nt, Human
aagaaggcucuagucugu

SEQ ID NO: 670706 - RNA, 26 nt, Human
aaucuauagcuagaucgucucccucu

SEQ ID NO: 670707 - RNA, 19 nt, Human
acagacacggacauggaag

SEQ ID NO: 670708 - RNA, 19 nt, Human
acauggaaagaaaacauga

SEQ ID NO: 670709 - RNA, 23 nt, Human
acucacucuaggugaauuuccac

SEQ ID NO: 670710 - RNA, 19 nt, Human
agaauagcuauuauguuca

SEQ ID NO: 670711 - RNA, 23 nt, Human
agacacggacauggaagauaacc

SEQ ID NO: 670712 - RNA, 22 nt, Human
agagugaggugaguaucaagaa

SEQ ID NO: 670713 - RNA, 19 nt, Human
aggaaaguacucacucuag

SEQ ID NO: 670714 - RNA, 22 nt, Human
aggcaguaaguaugugggucca

SEQ ID NO: 670715 - RNA, 18 nt, Human
aggcuaucaucagagcag

SEQ ID NO: 670716 - RNA, 20 nt, Human
agguggcucaggguauggag

SEQ ID NO: 670717 - RNA, 21 nt, Human
aguauguggguccacagacac

SEQ ID NO: 670718 - RNA, 20 nt, Human
auggagaagaagguagacac

SEQ ID NO: 670719 - RNA, 19 nt, Human
caaaaaaauucucgcgcgg

SEQ ID NO: 670720 - RNA, 22 nt, Human
caaacuuccccagcucaaccau

SEQ ID NO: 670721 - RNA, 19 nt, Human
cacaacaguggcaacaggc

SEQ ID NO: 670722 - RNA, 18 nt, Human
cagaagggguaaguggua

SEQ ID NO: 670723 - RNA, 24 nt, Human
cagacaaaucagcuucagcacaau

SEQ ID NO: 670724 - RNA, 20 nt, Human
cagcccagagcccgagacaa

SEQ ID NO: 670725 - RNA, 19 nt, Human
caucucacuaaucaaaaca

SEQ ID NO: 670726 - RNA, 19 nt, Human
ccagacaggagagcugaac

SEQ ID NO: 670727 - RNA, 19 nt, Human
cccagacaggagagcugaa

SEQ ID NO: 670728 - RNA, 19 nt, Human
ccugaaucauaagcauagc

SEQ ID NO: 670729 - RNA, 21 nt, Human
ccugcugggaccaggucucca

SEQ ID NO: 670730 - RNA, 19 nt, Human
cggacauggaagauaacca

SEQ ID NO: 670731 - RNA, 26 nt, Human
cuagaaaccuccccucccucacaugg

SEQ ID NO: 670732 - RNA, 21 nt, Human
cucaaccaugaccugguuacc

SEQ ID NO: 670733 - RNA, 19 nt, Human
cucaggguauggagaagaa

SEQ ID NO: 670734 - RNA, 18 nt, Human
cugcacugccauuccugc

SEQ ID NO: 670735 - RNA, 24 nt, Human
gaaaugacaggaaaugcccacaaa

SEQ ID NO: 670736 - RNA, 23 nt, Human
gaacagacaaaucagcuucagca

SEQ ID NO: 670737 - RNA, 19 nt, Human
gagcagcuggagauuucuc

SEQ ID NO: 670738 - RNA, 21 nt, Human
gcaaccuagaaaauaaaccuc

SEQ ID NO: 670739 - RNA, 21 nt, Human
gccaauuuccugcacugccau

SEQ ID NO: 670740 - RNA, 20 nt, Human
ggaaagaaaacaugagccag

SEQ ID NO: 670741 - RNA, 22 nt, Human
guccacagacacggacauggaa

SEQ ID NO: 670742 - RNA, 19 nt, Human
uaagugguaacaucucacu

SEQ ID NO: 670743 - RNA, 23 nt, Human
uacuuugaagggaaaaugggagg

SEQ ID NO: 670744 - RNA, 19 nt, Human
uagggcaaggcacaacuaa

SEQ ID NO: 670745 - RNA, 21 nt, Human
ucacuaaucaaaacacacagg

SEQ ID NO: 670746 - RNA, 25 nt, Human
ucaucuagaaaccuccccucccuca

SEQ ID NO: 670747 - RNA, 23 nt, Human
uccaaauaagaaggaaucaaaaa

SEQ ID NO: 670748 - RNA, 20 nt, Human
ugaaggacugagauccgagg

SEQ ID NO: 670749 - RNA, 18 nt, Human
ugaaucauaagcauagca

SEQ ID NO: 670750 - RNA, 22 nt, Human
ugaaucauaagcauagcaauuc

SEQ ID NO: 670751 - RNA, 19 nt, Human
ugaaugccuguggcugcca

SEQ ID NO: 670752 - RNA, 20 nt, Human
ugagagggucuggcuuggca

SEQ ID NO: 670753 - RNA, 24 nt, Human
ugagagggucuggcuuggcaucga

SEQ ID NO: 670754 - RNA, 21 nt, Human
ugagagugaggugaguaucaa

SEQ ID NO: 670755 - RNA, 18 nt, Human
uggaaagaaaacaugagc

SEQ ID NO: 670756 - RNA, 19 nt, Human
uggaagaaccaucugggcg

SEQ ID NO: 670757 - RNA, 24 nt, Human
ugggaucucucauugccaaguucu

SEQ ID NO: 670758 - RNA, 19 nt, Human
uggguccacagacacggac

SEQ ID NO: 670759 - RNA, 21 nt, Human
ugugagagggucuggcuuggc

SEQ ID NO: 670760 - RNA, 22 nt, Human
uucaaacuuccccagcucaacc

SEQ ID NO: 670761 - RNA, 24 nt, Human
uuuccugcacugccauuccugcug

SEQ ID NO: 670762 - RNA, 25 nt, Human
caaaagacuccagacuucuuacagg

SEQ ID NO: 670763 - RNA, 24 nt, Human
caaggaggcagugcccaaaagccc

SEQ ID NO: 670764 - RNA, 21 nt, Human
caagguccaccggguccuuca

SEQ ID NO: 670765 - RNA, 19 nt, Human
caccggguccuucaaucuu

SEQ ID NO: 670766 - RNA, 20 nt, Human
cagcagaacucccaaggucc

SEQ ID NO: 670767 - RNA, 22 nt, Human
ccacuaacuucccaaggaggca

SEQ ID NO: 670768 - RNA, 20 nt, Human
ccauccaaggccuuccuucc

SEQ ID NO: 670769 - RNA, 20 nt, Human
cccuagauccagcagaacuc

SEQ ID NO: 670770 - RNA, 25 nt, Human
cgcaugccguacgccacuuccguuu

SEQ ID NO: 670771 - RNA, 20 nt, Human
cguuguacuucgauagcucc

SEQ ID NO: 670772 - RNA, 25 nt, Human
cucccaagguccaccggguccuuca

SEQ ID NO: 670773 - RNA, 20 nt, Human
cuuccugggguuggguaugg

SEQ ID NO: 670774 - RNA, 23 nt, Human
guuguacuucgauagcuccuccu

SEQ ID NO: 670775 - RNA, 25 nt, Human
ucaaagguuuuacugcucauccuga

SEQ ID NO: 670776 - RNA, 18 nt, Human
ucccaaggaggcagugcc

SEQ ID NO: 670777 - RNA, 21 nt, Human
ucuuacagguuucaucucucu

SEQ ID NO: 670778 - RNA, 21 nt, Human
ugaggguccauccaaggccuu

SEQ ID NO: 670779 - RNA, 23 nt, Human
ugcccaaaagcccugugguuuuu

SEQ ID NO: 670780 - RNA, 19 nt, Human
uguggccacuaacuuccca

SEQ ID NO: 670781 - RNA, 22 nt, Human
uuccuuccugggguuggguaug

SEQ ID NO: 670782 - RNA, 22 nt, Human
uuguacuucgauagcuccuccu

SEQ ID NO: 670783 - RNA, 22 nt, Human
aaaaaaaauugaacaaagagac

SEQ ID NO: 670784 - RNA, 21 nt, Human
aaagagacccucuugcgagag

SEQ ID NO: 670785 - RNA, 22 nt, Human
aagggacuuugaggcuuguugg

SEQ ID NO: 670786 - RNA, 20 nt, Human
accucacuucuuuuccuuag

SEQ ID NO: 670787 - RNA, 23 nt, Human
agccuccagggcacgccaaccuu

SEQ ID NO: 670788 - RNA, 20 nt, Human
aggaaggcuggcaucucgcu

SEQ ID NO: 670789 - RNA, 18 nt, Human
aggagauauuuuugggug

SEQ ID NO: 670790 - RNA, 19 nt, Human
agugagagggucacagggg

SEQ ID NO: 670791 - RNA, 23 nt, Human
aguggggacugggugaaacucgg

SEQ ID NO: 670792 - RNA, 22 nt, Human
aucugguuagagcucucuuuca

SEQ ID NO: 670793 - RNA, 25 nt, Human
caacaagcaggcucagugccagccu

SEQ ID NO: 670794 - RNA, 21 nt, Human
caagggacuuugaggcuuguu

SEQ ID NO: 670795 - RNA, 19 nt, Human
cagcagaggaggaagaauu

SEQ ID NO: 670796 - RNA, 24 nt, Human
cagccuccagggcacgccaaccuu

SEQ ID NO: 670797 - RNA, 18 nt, Human
cauaugaggucccauggc

SEQ ID NO: 670798 - RNA, 19 nt, Human
cauaugaggucccauggcu

SEQ ID NO: 670799 - RNA, 23 nt, Human
caugccuuauuagguauugggga

SEQ ID NO: 670800 - RNA, 22 nt, Human
caugucucaggacauuggagga

SEQ ID NO: 670801 - RNA, 24 nt, Human
caugucucaggacauuggaggaga

SEQ ID NO: 670802 - RNA, 23 nt, Human
ccaaccuucucauggugccccaa

SEQ ID NO: 670803 - RNA, 19 nt, Human
ccaaugcacacauaggaag

SEQ ID NO: 670804 - RNA, 24 nt, Human
cccauggcugaggaggcagagggc

SEQ ID NO: 670805 - RNA, 27 nt, Human
ccccaagccccaccccaaugcacacau

SEQ ID NO: 670806 - RNA, 27 nt, Human
ccccaaugcacacauaggaagucucca

SEQ ID NO: 670807 - RNA, 19 nt, Human
cccgggacaggaaggcugg

SEQ ID NO: 670808 - RNA, 18 nt, Human
ccgaagcugccacgcccu

SEQ ID NO: 670809 - RNA, 18 nt, Human
ccgggacaggaaggcugg

SEQ ID NO: 670810 - RNA, 19 nt, Human
ccucuugcgagaggugaga

SEQ ID NO: 670811 - RNA, 19 nt, Human
ccuggaguucaaguuucug

SEQ ID NO: 670812 - RNA, 25 nt, Human
ccuuuuggcuacuaguaaaucccaa

SEQ ID NO: 670813 - RNA, 20 nt, Human
cgcugggcugagagauaagc

SEQ ID NO: 670814 - RNA, 23 nt, Human
cgggagaaaucgggcugccaggc

SEQ ID NO: 670815 - RNA, 22 nt, Human
cuaagcaaaccucacuucuuuu

SEQ ID NO: 670816 - RNA, 21 nt, Human
cuaguaaaucccaaauugcau

SEQ ID NO: 670817 - RNA, 18 nt, Human
cucauggugccccaagcc

SEQ ID NO: 670818 - RNA, 21 nt, Human
cuccagggcacgccaaccuuc

SEQ ID NO: 670819 - RNA, 18 nt, Human
cugccaggcggaguccug

SEQ ID NO: 670820 - RNA, 21 nt, Human
cugccaggcggaguccugcgu

SEQ ID NO: 670821 - RNA, 22 nt, Human
gaaggcuggcaucucgcugggc

SEQ ID NO: 670822 - RNA, 24 nt, Human
gagacaggaccuggggacagagaa

SEQ ID NO: 670823 - RNA, 18 nt, Human
gcagcugcaccguggagu

SEQ ID NO: 670824 - RNA, 21 nt, Human
gccccaagccccaccccaaug

SEQ ID NO: 670825 - RNA, 22 nt, Human
gccccaagccccaccccaaugc

SEQ ID NO: 670826 - RNA, 20 nt, Human
gccccaccccaaugcacaca

SEQ ID NO: 670827 - RNA, 23 nt, Human
ggguaguucaugagaacauuucg

SEQ ID NO: 670828 - RNA, 21 nt, Human
gucauuguauguuauuaaggg

SEQ ID NO: 670829 - RNA, 22 nt, Human
gugccagccucugugucagccu

SEQ ID NO: 670830 - RNA, 21 nt, Human
uaaaaaaaauugaacaaagag

SEQ ID NO: 670831 - RNA, 21 nt, Human
uaagcaaaccucacuucuuuu

SEQ ID NO: 670832 - RNA, 22 nt, Human
uaauaaagugaggucucggggu

SEQ ID NO: 670833 - RNA, 23 nt, Human
uaauaaagugaggucucggggua

SEQ ID NO: 670834 - RNA, 18 nt, Human
uagauuaaaaaaaauuga

SEQ ID NO: 670835 - RNA, 20 nt, Human
uauguuauuaaggguagcau

SEQ ID NO: 670836 - RNA, 18 nt, Human
ucagagcgcuggccugug

SEQ ID NO: 670837 - RNA, 25 nt, Human
uccacuggaauguuccaguguucca

SEQ ID NO: 670838 - RNA, 18 nt, Human
uccgaagcugccacgccc

SEQ ID NO: 670839 - RNA, 23 nt, Human
uccgggagaaaucgggcugccag

SEQ ID NO: 670840 - RNA, 20 nt, Human
uccuggaguucaaguuucug

SEQ ID NO: 670841 - RNA, 21 nt, Human
ugaggucccauggcugaggag

SEQ ID NO: 670842 - RNA, 25 nt, Human
ugccacgcccuaagcaaaccggcgc

SEQ ID NO: 670843 - RNA, 20 nt, Human
ugccaugucccaagccacaa

SEQ ID NO: 670844 - RNA, 21 nt, Human
ugccuuauuagguauugggga

SEQ ID NO: 670845 - RNA, 19 nt, Human
ugcguuuauccgaagcugc

SEQ ID NO: 670846 - RNA, 18 nt, Human
uggaaagaucuuguaaua

SEQ ID NO: 670847 - RNA, 19 nt, Human
uggaauguuccaguguucc

SEQ ID NO: 670848 - RNA, 22 nt, Human
uggggacagagaacgguccucc

SEQ ID NO: 670849 - RNA, 27 nt, Human
uggggacagagaacgguccuccccgag

SEQ ID NO: 670850 - RNA, 21 nt, Human
ugggguaguucaugagaacau

SEQ ID NO: 670851 - RNA, 21 nt, Human
ugugcagagacaggaccuggg

SEQ ID NO: 670852 - RNA, 20 nt, Human
ugugucagccuccagggcac

SEQ ID NO: 670853 - RNA, 24 nt, Human
uucucauggugccccaagccccac

SEQ ID NO: 670854 - RNA, 23 nt, Human
uuggaaguucucacacuaugugg

SEQ ID NO: 670855 - RNA, 20 nt, Human
uuggguauuuggaaagaucu

SEQ ID NO: 670856 - RNA, 22 nt, Human
aggcggaggguguggccagggg

SEQ ID NO: 670857 - RNA, 23 nt, Human
agggacgcggcgguggcugcugc

SEQ ID NO: 670858 - RNA, 19 nt, Human
aggggagcgcgagcgggcg

SEQ ID NO: 670859 - RNA, 22 nt, Human
cuuuacuuuuugucuuagcaga

SEQ ID NO: 670860 - RNA, 19 nt, Human
cuuuuugucuuagcagagg

SEQ ID NO: 670861 - RNA, 20 nt, Human
gagagggacgcggcgguggc

SEQ ID NO: 670862 - RNA, 21 nt, Human
gcccagcagguugucagcucc

SEQ ID NO: 670863 - RNA, 21 nt, Human
gcuggcagggggcuuggucuu

SEQ ID NO: 670864 - RNA, 21 nt, Human
ggaggguguggccaggggagc

SEQ ID NO: 670865 - RNA, 21 nt, Human
ggagguaggagacucggaccc

SEQ ID NO: 670866 - RNA, 21 nt, Human
ggcgguggcugcugcguccag

SEQ ID NO: 670867 - RNA, 22 nt, Human
gggcacggugagcuggcagggg

SEQ ID NO: 670868 - RNA, 19 nt, Human
gggcaggguugggggaggu

SEQ ID NO: 670869 - RNA, 20 nt, Human
ucuuagcagaggagauaacu

SEQ ID NO: 670870 - RNA, 18 nt, Human
ugagcuggcagggggcuu

SEQ ID NO: 670871 - RNA, 19 nt, Human
uggccaggcucuucgaggg

SEQ ID NO: 670872 - RNA, 20 nt, Human
ugucuucccucucuggccag

SEQ ID NO: 670873 - RNA, 21 nt, Human
uugucagcuccuguuucugau

SEQ ID NO: 670874 - RNA, 21 nt, Human
uacaucugccuuuccauccua

SEQ ID NO: 670875 - RNA, 19 nt, Human
aaacagcaaccuaacaaaa

SEQ ID NO: 670876 - RNA, 24 nt, Human
aaagaauucucauauguagaauca

SEQ ID NO: 670877 - RNA, 18 nt, Human
aaaguccuccccagacac

SEQ ID NO: 670878 - RNA, 23 nt, Human
aaaguccuccccagacaccgccu

SEQ ID NO: 670879 - RNA, 22 nt, Human
aaaguuccccuacaaagugcuu

SEQ ID NO: 670880 - RNA, 21 nt, Human
aacaugcagggcccugguggg

SEQ ID NO: 670881 - RNA, 18 nt, Human
aagaaacauaaugaaaug

SEQ ID NO: 670882 - RNA, 21 nt, Human
aaguccuccccagacaccgcc

SEQ ID NO: 670883 - RNA, 21 nt, Human
acaaagagaaacuuugggaaa

SEQ ID NO: 670884 - RNA, 18 nt, Human
acaaaguccuccccagac

SEQ ID NO: 670885 - RNA, 19 nt, Human
acaaaguccuccccagaca

SEQ ID NO: 670886 - RNA, 22 nt, Human
acaaaguccuccccagacaccg

SEQ ID NO: 670887 - RNA, 20 nt, Human
accacagagaacagggaaga

SEQ ID NO: 670888 - RNA, 22 nt, Human
acgcaaaacauccagcucuccu

SEQ ID NO: 670889 - RNA, 24 nt, Human
acucuguuacuuugguucuuaagu

SEQ ID NO: 670890 - RNA, 18 nt, Human
agaaagagagugcagcuu

SEQ ID NO: 670891 - RNA, 23 nt, Human
agaggucuggcugagugaagggc

SEQ ID NO: 670892 - RNA, 24 nt, Human
agagucgcugggggccuggccacc

SEQ ID NO: 670893 - RNA, 22 nt, Human
agcucucagauucucggauagc

SEQ ID NO: 670894 - RNA, 23 nt, Human
aggagcuggucaggaucuccggg

SEQ ID NO: 670895 - RNA, 21 nt, Human
aggaggggaguggggcccagg

SEQ ID NO: 670896 - RNA, 23 nt, Human
agggcuuuauuugaggacagaau

SEQ ID NO: 670897 - RNA, 24 nt, Human
aggugagcuaucuguuguugggga

SEQ ID NO: 670898 - RNA, 21 nt, Human
aggugaggaagagcaguguuu

SEQ ID NO: 670899 - RNA, 19 nt, Human
agguuggcauguucuugaa

SEQ ID NO: 670900 - RNA, 24 nt, Human
agugcaauuccaaauguugagccu

SEQ ID NO: 670901 - RNA, 24 nt, Human
auccuuggaaagccaagcacucaa

SEQ ID NO: 670902 - RNA, 19 nt, Human
augauggcuguguaccucc

SEQ ID NO: 670903 - RNA, 19 nt, Human
auggaaugucccaggcccc

SEQ ID NO: 670904 - RNA, 26 nt, Human
auugcaggccccaaguacaguggguu

SEQ ID NO: 670905 - RNA, 22 nt, Human
auugugcagguggggugcuggu

SEQ ID NO: 670906 - RNA, 20 nt, Human
caaacccauuagcuacucag

SEQ ID NO: 670907 - RNA, 25 nt, Human
caaauguccacccagcccaaaaaau

SEQ ID NO: 670908 - RNA, 20 nt, Human
cacacagccauugcaggccc

SEQ ID NO: 670909 - RNA, 21 nt, Human
caccagaggcagagugucucu

SEQ ID NO: 670910 - RNA, 21 nt, Human
cagaaccgaaacuuucugggg

SEQ ID NO: 670911 - RNA, 22 nt, Human
cagaaccgaaacuuucuggggc

SEQ ID NO: 670912 - RNA, 22 nt, Human
cagaaguuggaaucaccccugc

SEQ ID NO: 670913 - RNA, 23 nt, Human
cagauggaaugucccaggcccca

SEQ ID NO: 670914 - RNA, 23 nt, Human
cagccauugcaggccccaaguac

SEQ ID NO: 670915 - RNA, 27 nt, Human
cagcugaggaguagcucuaaagccaau

SEQ ID NO: 670916 - RNA, 20 nt, Human
caggccccaaguacaguggg

SEQ ID NO: 670917 - RNA, 21 nt, Human
cagggcagaaaaucucuccac

SEQ ID NO: 670918 - RNA, 21 nt, Human
cagggcccugguggggcaggg

SEQ ID NO: 670919 - RNA, 19 nt, Human
cauggucagagccuuggcc

SEQ ID NO: 670920 - RNA, 20 nt, Human
ccaaggacaguuucuuggcc

SEQ ID NO: 670921 - RNA, 18 nt, Human
ccagaaagagagugcagc

SEQ ID NO: 670922 - RNA, 21 nt, Human
ccauccuugguucuaagcauc

SEQ ID NO: 670923 - RNA, 19 nt, Human
cccagacaccgccucugag

SEQ ID NO: 670924 - RNA, 21 nt, Human
ccccaaacccauuagcuacuc

SEQ ID NO: 670925 - RNA, 23 nt, Human
ccccaaguacaguggguuuugcu

SEQ ID NO: 670926 - RNA, 19 nt, Human
ccccacaaaaguccucuuu

SEQ ID NO: 670927 - RNA, 18 nt, Human
ccccuggccaaacuggga

SEQ ID NO: 670928 - RNA, 20 nt, Human
cccucaaaaccagccagacc

SEQ ID NO: 670929 - RNA, 21 nt, Human
ccucaaaaccagccagaccag

SEQ ID NO: 670930 - RNA, 23 nt, Human
ccucaccccuggccaaacuggga

SEQ ID NO: 670931 - RNA, 25 nt, Human
ccugaaauaguuucaccaccuucga

SEQ ID NO: 670932 - RNA, 23 nt, Human
ccugcccgugaaacucuccacaa

SEQ ID NO: 670933 - RNA, 20 nt, Human
ccugucaggaggggaguggg

SEQ ID NO: 670934 - RNA, 23 nt, Human
ccuugcuuaaaaacugacuggaa

SEQ ID NO: 670935 - RNA, 22 nt, Human
ccuuugggugugacaacagcug

SEQ ID NO: 670936 - RNA, 24 nt, Human
ccuuuuaaaaaaaaaaaaaaaaaa

SEQ ID NO: 670937 - RNA, 19 nt, Human
cuccuggaggagugguucu

SEQ ID NO: 670938 - RNA, 24 nt, Human
cucguggguccaccgccgggcaga

SEQ ID NO: 670939 - RNA, 23 nt, Human
cucuggguucucuuuuccuaagg

SEQ ID NO: 670940 - RNA, 24 nt, Human
cugcauaacauacaucaagcagcc

SEQ ID NO: 670941 - RNA, 18 nt, Human
cugccucaaggggggaug

SEQ ID NO: 670942 - RNA, 19 nt, Human
cugccucaaggggggaugu

SEQ ID NO: 670943 - RNA, 18 nt, Human
cuggagcagccuccagcu

SEQ ID NO: 670944 - RNA, 18 nt, Human
cuguuggacuuggccugg

SEQ ID NO: 670945 - RNA, 19 nt, Human
cuuggaccuggaggacaac

SEQ ID NO: 670946 - RNA, 21 nt, Human
cuuggccuggagucccugacc

SEQ ID NO: 670947 - RNA, 22 nt, Human
cuuuaugugacaggugaggaag

SEQ ID NO: 670948 - RNA, 21 nt, Human
cuuugugccaaacgugccucc

SEQ ID NO: 670949 - RNA, 20 nt, Human
gaagugaaguuacugaggug

SEQ ID NO: 670950 - RNA, 19 nt, Human
gagcagugggaagugggca

SEQ ID NO: 670951 - RNA, 20 nt, Human
gagcccuucaacgccucggg

SEQ ID NO: 670952 - RNA, 25 nt, Human
gcacaaaguccuccccaaccggagg

SEQ ID NO: 670953 - RNA, 18 nt, Human
gcaggcagcugguuccau

SEQ ID NO: 670954 - RNA, 22 nt, Human
gcaggcagcugguuccaugaac

SEQ ID NO: 670955 - RNA, 18 nt, Human
gcauguucuugaaggugg

SEQ ID NO: 670956 - RNA, 19 nt, Human
gccaucaaggggcugcccc

SEQ ID NO: 670957 - RNA, 19 nt, Human
gccgaaugcaagaggccca

SEQ ID NO: 670958 - RNA, 22 nt, Human
gccuggguccagaggaaggcuc

SEQ ID NO: 670959 - RNA, 24 nt, Human
gcggaagaggacgggaacgcggug

SEQ ID NO: 670960 - RNA, 22 nt, Human
gcugcagagagcacagcaaacu

SEQ ID NO: 670961 - RNA, 23 nt, Human
ggaagagcaguguuuccugugga

SEQ ID NO: 670962 - RNA, 18 nt, Human
ggaagauuaaauaauucu

SEQ ID NO: 670963 - RNA, 22 nt, Human
ggacaagagcaugacuggagga

SEQ ID NO: 670964 - RNA, 22 nt, Human
ggccaagcggaagaggacggga

SEQ ID NO: 670965 - RNA, 23 nt, Human
ggcccagcucucagauucucgga

SEQ ID NO: 670966 - RNA, 22 nt, Human
gggaagaaaaggaccacagaga

SEQ ID NO: 670967 - RNA, 20 nt, Human
gggcagcccaggggcugagu

SEQ ID NO: 670968 - RNA, 18 nt, Human
gggccaagcggaagagga

SEQ ID NO: 670969 - RNA, 20 nt, Human
gguggugaguggcuucagug

SEQ ID NO: 670970 - RNA, 20 nt, Human
gguuguggcugcuggugugu

SEQ ID NO: 670971 - RNA, 20 nt, Human
gguuuugcucuuggauuauc

SEQ ID NO: 670972 - RNA, 21 nt, Human
gugaagggcuuuauuugagga

SEQ ID NO: 670973 - RNA, 24 nt, Human
gugagguuguggcugcuggugugu

SEQ ID NO: 670974 - RNA, 23 nt, Human
guggugaguggcuucaguggcau

SEQ ID NO: 670975 - RNA, 22 nt, Human
uaacaaaauacaaauguccacc

SEQ ID NO: 670976 - RNA, 18 nt, Human
uaacagugaacaagcuga

SEQ ID NO: 670977 - RNA, 23 nt, Human
uacaaauguccacccagcccaaa

SEQ ID NO: 670978 - RNA, 20 nt, Human
uacuuaauggaaacauugcc

SEQ ID NO: 670979 - RNA, 22 nt, Human
uacuuuauuuaaauccugaggu

SEQ ID NO: 670980 - RNA, 20 nt, Human
ucacaaggguagcuggagga

SEQ ID NO: 670981 - RNA, 24 nt, Human
ucagaauuucggcccucgguggcu

SEQ ID NO: 670982 - RNA, 20 nt, Human
ucaucagcuuggccagaguc

SEQ ID NO: 670983 - RNA, 19 nt, Human
uccacccccauugugcagg

SEQ ID NO: 670984 - RNA, 21 nt, Human
uccccagacaccgccucugag

SEQ ID NO: 670985 - RNA, 18 nt, Human
uccuggguguuuaaaccu

SEQ ID NO: 670986 - RNA, 19 nt, Human
ucgcugggggccuggccac

SEQ ID NO: 670987 - RNA, 22 nt, Human
ucuccaaacccuguggaguuuu

SEQ ID NO: 670988 - RNA, 22 nt, Human
ucuccugccuggguccagagga

SEQ ID NO: 670989 - RNA, 22 nt, Human
ucucuguuggacuuggccugga

SEQ ID NO: 670990 - RNA, 24 nt, Human
ucuuuguugguggugagguugugg

SEQ ID NO: 670991 - RNA, 21 nt, Human
ugaaagguucuauucccuguu

SEQ ID NO: 670992 - RNA, 18 nt, Human
ugaaguuacugaggugcu

SEQ ID NO: 670993 - RNA, 19 nt, Human
ugacaggugaggaagagca

SEQ ID NO: 670994 - RNA, 20 nt, Human
ugacguggcuuuucauuucu

SEQ ID NO: 670995 - RNA, 25 nt, Human
ugacuuuuuaaaaaaaugcuuuaug

SEQ ID NO: 670996 - RNA, 19 nt, Human
ugagcuguggagaggucug

SEQ ID NO: 670997 - RNA, 23 nt, Human
ugaggacaaacaucaggccaaga

SEQ ID NO: 670998 - RNA, 23 nt, Human
ugaggcuuggguauugcucugca

SEQ ID NO: 670999 - RNA, 29 nt, Human
ugcaagaggcccagcuuuucucugggcaa

SEQ ID NO: 671000 - RNA, 21 nt, Human
ugcacgcaaaacauccagcuc

SEQ ID NO: 671001 - RNA, 21 nt, Human
ugcagccaccagaggcagagu

SEQ ID NO: 671002 - RNA, 21 nt, Human
ugccgggcccagcucucagau

SEQ ID NO: 671003 - RNA, 24 nt, Human
ugcugaguucuggagcagccucca

SEQ ID NO: 671004 - RNA, 20 nt, Human
ugcuggugugugguggguuu

SEQ ID NO: 671005 - RNA, 20 nt, Human
ugcuuuaugugacaggugag

SEQ ID NO: 671006 - RNA, 18 nt, Human
uggaaagccaagcacuca

SEQ ID NO: 671007 - RNA, 19 nt, Human
uggaagaaacauaaugaaa

SEQ ID NO: 671008 - RNA, 20 nt, Human
uggaagaaccuggggccuga

SEQ ID NO: 671009 - RNA, 19 nt, Human
uggaagugcucaacucucc

SEQ ID NO: 671010 - RNA, 24 nt, Human
uggagcagcugacuuuuuaaaaaa

SEQ ID NO: 671011 - RNA, 21 nt, Human
uggaggagcuggucaggaucu

SEQ ID NO: 671012 - RNA, 21 nt, Human
uggaguuuuucaguucccgug

SEQ ID NO: 671013 - RNA, 22 nt, Human
uggcuaugaucauuaguaaaca

SEQ ID NO: 671014 - RNA, 19 nt, Human
uggcuggauggauucaaag

SEQ ID NO: 671015 - RNA, 19 nt, Human
ugggaucccaaggacgcuu

SEQ ID NO: 671016 - RNA, 18 nt, Human
ugggcaaaugggcuguug

SEQ ID NO: 671017 - RNA, 23 nt, Human
uggggcagugagggacaagagca

SEQ ID NO: 671018 - RNA, 19 nt, Human
uggggcccagggauccauc

SEQ ID NO: 671019 - RNA, 23 nt, Human
uggugagguuguggcugcuggug

SEQ ID NO: 671020 - RNA, 19 nt, Human
ugguggggcagggcagaaa

SEQ ID NO: 671021 - RNA, 19 nt, Human
uguacacacagccauugca

SEQ ID NO: 671022 - RNA, 23 nt, Human
uguagaaucaugcgcacuuuuaa

SEQ ID NO: 671023 - RNA, 19 nt, Human
ugucccaggccccaaaccc

SEQ ID NO: 671024 - RNA, 19 nt, Human
ugugcagguggggugcugg

SEQ ID NO: 671025 - RNA, 18 nt, Human
uguggagaggucuggcug

SEQ ID NO: 671026 - RNA, 21 nt, Human
uguuggacuuggccuggaguc

SEQ ID NO: 671027 - RNA, 25 nt, Human
uguuugaaagugguucuaauccugg

SEQ ID NO: 671028 - RNA, 24 nt, Human
uuaauggaaacauugccugagccc

SEQ ID NO: 671029 - RNA, 19 nt, Human
uuacuggggcagugaggga

SEQ ID NO: 671030 - RNA, 22 nt, Human
uuacuuuauuuaaauccugagg

SEQ ID NO: 671031 - RNA, 22 nt, Human
uuagaggccccuccaacacugc

SEQ ID NO: 671032 - RNA, 23 nt, Human
uuaggucacaaggguagcuggag

SEQ ID NO: 671033 - RNA, 19 nt, Human
uuaguaaacaugucugcag

SEQ ID NO: 671034 - RNA, 22 nt, Human
uucucaagcccucaaaaccagc

SEQ ID NO: 671035 - RNA, 22 nt, Human
uucuugaagguggugaguggcu

SEQ ID NO: 671036 - RNA, 21 nt, Human
uucuuguugcauauggugcca

SEQ ID NO: 671037 - RNA, 19 nt, Human
uugaggacagaaucagcca

SEQ ID NO: 671038 - RNA, 22 nt, Human
uuggccagagucuccgcaguau

SEQ ID NO: 671039 - RNA, 22 nt, Human
uuggggaaccugucaggagggg

SEQ ID NO: 671040 - RNA, 22 nt, Human
uugucuguaugucuccugccuu

SEQ ID NO: 671041 - RNA, 25 nt, Human
uuuaaaaaaaaaaaaaaaaaagagu

SEQ ID NO: 671042 - RNA, 18 nt, Human
uuuaaaguaccccagucc

SEQ ID NO: 671043 - RNA, 24 nt, Human
uuuguggguaagugaaucugacag

SEQ ID NO: 671044 - RNA, 23 nt, Human
uuuucucugggcaaccucuuugg

SEQ ID NO: 671045 - RNA, 18 nt, Human
accccucugccccgcccc

SEQ ID NO: 671046 - RNA, 22 nt, Human
agacccccaucuccccuaauga

SEQ ID NO: 671047 - RNA, 19 nt, Human
caaggagggggcagcagcc

SEQ ID NO: 671048 - RNA, 25 nt, Human
cagcugcuagucagcugucucuagg

SEQ ID NO: 671049 - RNA, 22 nt, Human
caguccccggugcucacuugcc

SEQ ID NO: 671050 - RNA, 21 nt, Human
ccccgccccuccacauccucc

SEQ ID NO: 671051 - RNA, 23 nt, Human
ccccgccccuccacauccuccac

SEQ ID NO: 671052 - RNA, 18 nt, Human
ccccuccacauccuccac

SEQ ID NO: 671053 - RNA, 19 nt, Human
ccccucugccccgccccuc

SEQ ID NO: 671054 - RNA, 22 nt, Human
ccucaccuccuaccuucccccu

SEQ ID NO: 671055 - RNA, 22 nt, Human
ccuccuaccuucccccuuccca

SEQ ID NO: 671056 - RNA, 25 nt, Human
cgcccugauccucaguccccggugc

SEQ ID NO: 671057 - RNA, 18 nt, Human
cggcuggaccccucugcc

SEQ ID NO: 671058 - RNA, 26 nt, Human
cuaccuucccccuucccagccagaga

SEQ ID NO: 671059 - RNA, 20 nt, Human
cucaccuccuaccuuccccc

SEQ ID NO: 671060 - RNA, 18 nt, Human
cuccccuaaugagccuca

SEQ ID NO: 671061 - RNA, 21 nt, Human
cuccggcuggaccccucugcc

SEQ ID NO: 671062 - RNA, 19 nt, Human
cugccccgccccuccacau

SEQ ID NO: 671063 - RNA, 24 nt, Human
cugccccgccccuccacauccucc

SEQ ID NO: 671064 - RNA, 24 nt, Human
cuggaccccucugccccgccccuc

SEQ ID NO: 671065 - RNA, 21 nt, Human
cuucccagccagagaggauca

SEQ ID NO: 671066 - RNA, 20 nt, Human
cuugacagcugggcagcugc

SEQ ID NO: 671067 - RNA, 19 nt, Human
gagggcaaggagggggcag

SEQ ID NO: 671068 - RNA, 18 nt, Human
gcagcagccaccccgcgc

SEQ ID NO: 671069 - RNA, 18 nt, Human
gggcaaggagggggcagc

SEQ ID NO: 671070 - RNA, 21 nt, Human
ggggacucagccugguccagc

SEQ ID NO: 671071 - RNA, 20 nt, Human
uaaacuccggcuggaccccu

SEQ ID NO: 671072 - RNA, 24 nt, Human
uaggggagacccccaucuccccua

SEQ ID NO: 671073 - RNA, 20 nt, Human
uaggggaugcagggggcagg

SEQ ID NO: 671074 - RNA, 26 nt, Human
uccagaggaacgcaacaauaaauuac

SEQ ID NO: 671075 - RNA, 22 nt, Human
ucuccccuaaugagccucacgg

SEQ ID NO: 671076 - RNA, 23 nt, Human
ugaccuugacagcugggcagcug

SEQ ID NO: 671077 - RNA, 24 nt, Human
ugccccgccccuccacauccucca

SEQ ID NO: 671078 - RNA, 25 nt, Human
ugcucacuugccugaccuugacagc

SEQ ID NO: 671079 - RNA, 21 nt, Human
ugggcagcugcuagucagcug

SEQ ID NO: 671080 - RNA, 19 nt, Human
uguggggacucagccuggu

SEQ ID NO: 671081 - RNA, 22 nt, Human
uugccugaccuugacagcuggg

SEQ ID NO: 671082 - RNA, 24 nt, Human
aaaaaacagcacgugcuccugcac

SEQ ID NO: 671083 - RNA, 20 nt, Human
acugcgucucccucccacuc

SEQ ID NO: 671084 - RNA, 22 nt, Human
augguggucauuguaauaauua

SEQ ID NO: 671085 - RNA, 21 nt, Human
cagcacgugcuccugcacucu

SEQ ID NO: 671086 - RNA, 22 nt, Human
cagcagcaaaacucaaucccaa

SEQ ID NO: 671087 - RNA, 21 nt, Human
cagcgguuucucugaaguuaa

SEQ ID NO: 671088 - RNA, 21 nt, Human
cagcguucuccuccucucggc

SEQ ID NO: 671089 - RNA, 20 nt, Human
ccccucugucucucccuucc

SEQ ID NO: 671090 - RNA, 20 nt, Human
cccuuccuucucggucuguc

SEQ ID NO: 671091 - RNA, 23 nt, Human
cuccugugcgcgcgcccccucug

SEQ ID NO: 671092 - RNA, 25 nt, Human
cucugucuacugcgucucccuccca

SEQ ID NO: 671093 - RNA, 28 nt, Human
cugugcgcgcgcccccucugucucuccc

SEQ ID NO: 671094 - RNA, 19 nt, Human
gaaaugucaugacaaugca

SEQ ID NO: 671095 - RNA, 19 nt, Human
gcacgugcuccugcacucu

SEQ ID NO: 671096 - RNA, 18 nt, Human
gcgcgagcaggaggcagc

SEQ ID NO: 671097 - RNA, 19 nt, Human
ggcucugggcucucggagg

SEQ ID NO: 671098 - RNA, 18 nt, Human
uaaaaaacagcacgugcu

SEQ ID NO: 671099 - RNA, 23 nt, Human
uaaaaagcauuuauccuuccucc

SEQ ID NO: 671100 - RNA, 20 nt, Human
uaacauaaaaagcauuuauc

SEQ ID NO: 671101 - RNA, 26 nt, Human
uagacgcauuuagauaauucacacag

SEQ ID NO: 671102 - RNA, 22 nt, Human
ucccagcggagucaggcuccug

SEQ ID NO: 671103 - RNA, 21 nt, Human
ucccuagugcaaaaugguaga

SEQ ID NO: 671104 - RNA, 19 nt, Human
uccgcuggucucccacagu

SEQ ID NO: 671105 - RNA, 20 nt, Human
ucugucucucccuuccuucu

SEQ ID NO: 671106 - RNA, 25 nt, Human
ucugucucugucuacugcgucuccc

SEQ ID NO: 671107 - RNA, 19 nt, Human
ugcagcucucccaguugga

SEQ ID NO: 671108 - RNA, 22 nt, Human
ugcugcacagcagcaaaacuca

SEQ ID NO: 671109 - RNA, 23 nt, Human
ugcuugugguaggucaguucuag

SEQ ID NO: 671110 - RNA, 19 nt, Human
uggcacggcgcgagcagga

SEQ ID NO: 671111 - RNA, 18 nt, Human
ugguagacgcauuuagau

SEQ ID NO: 671112 - RNA, 21 nt, Human
uguuggaaaugucaugacaau

SEQ ID NO: 671113 - RNA, 19 nt, Human
uuccuucucggucugucuc

SEQ ID NO: 671114 - RNA, 22 nt, Human
uuggcagcggucagcgcguccu

SEQ ID NO: 671115 - RNA, 24 nt, Human
aaacccccaaaucuaccguccccu

SEQ ID NO: 671116 - RNA, 23 nt, Human
agaagaacgaacguggcgccgcc

SEQ ID NO: 671117 - RNA, 22 nt, Human
aggggguggcgugacaggcagg

SEQ ID NO: 671118 - RNA, 22 nt, Human
caaaucuaccguccccucagaa

SEQ ID NO: 671119 - RNA, 20 nt, Human
caccuucccucucugguccu

SEQ ID NO: 671120 - RNA, 25 nt, Human
ccaaagcccgaacacaucccagugg

SEQ ID NO: 671121 - RNA, 21 nt, Human
cccccaaaucuaccguccccu

SEQ ID NO: 671122 - RNA, 24 nt, Human
ccccucagaagaacgaacguggcg

SEQ ID NO: 671123 - RNA, 24 nt, Human
cggccucaagguccaaagcccgaa

SEQ ID NO: 671124 - RNA, 22 nt, Human
cguggcgccgccuccucucggg

SEQ ID NO: 671125 - RNA, 24 nt, Human
cugauagacagcgaagccuucccc

SEQ ID NO: 671126 - RNA, 22 nt, Human
cugcucccaggaaggggguggc

SEQ ID NO: 671127 - RNA, 18 nt, Human
gagaccgugcuccaacuc

SEQ ID NO: 671128 - RNA, 21 nt, Human
gggccuggggcacugcucggc

SEQ ID NO: 671129 - RNA, 24 nt, Human
uagaggaaaacccccaaaucuacc

SEQ ID NO: 671130 - RNA, 22 nt, Human
uaggaugugcuuuccaagagua

SEQ ID NO: 671131 - RNA, 20 nt, Human
uccaacucgggccuggggca

SEQ ID NO: 671132 - RNA, 22 nt, Human
uccacaggauaaucugcaaaga

SEQ ID NO: 671133 - RNA, 18 nt, Human
ucccaggaaggggguggc

SEQ ID NO: 671134 - RNA, 25 nt, Human
ucuccggccucaagguccaaagccc

SEQ ID NO: 671135 - RNA, 21 nt, Human
ugauagacagcgaagccuucc

SEQ ID NO: 671136 - RNA, 23 nt, Human
ugugacuuucaggucaccuuccc

SEQ ID NO: 671137 - RNA, 22 nt, Human
uucagaggaaacggcgcgagaa

SEQ ID NO: 671138 - RNA, 18 nt, Human
aaacaaagaaucaggucu

SEQ ID NO: 671139 - RNA, 18 nt, Human
aaacagaguuaacaugca

SEQ ID NO: 671140 - RNA, 22 nt, Human
aaagaaaaaccuucacaaauaa

SEQ ID NO: 671141 - RNA, 20 nt, Human
aaaggggcucagguuucuug

SEQ ID NO: 671142 - RNA, 18 nt, Human
aaaugucuuccuaugucc

SEQ ID NO: 671143 - RNA, 19 nt, Human
aaccgccccagaaaggaug

SEQ ID NO: 671144 - RNA, 23 nt, Human
aagaaaaaccuucacaaauaacu

SEQ ID NO: 671145 - RNA, 18 nt, Human
aagaaaauggauacagcu

SEQ ID NO: 671146 - RNA, 18 nt, Human
acacaaagucaguagcug

SEQ ID NO: 671147 - RNA, 18 nt, Human
acacguaggcaugggaaa

SEQ ID NO: 671148 - RNA, 20 nt, Human
acacuaccuauuaucauccg

SEQ ID NO: 671149 - RNA, 18 nt, Human
acucaccaugccagggag

SEQ ID NO: 671150 - RNA, 26 nt, Human
acuguguuucuuuuguaggauccuaa

SEQ ID NO: 671151 - RNA, 21 nt, Human
agaaauggagggugagaaaga

SEQ ID NO: 671152 - RNA, 18 nt, Human
agaaggcaccaaagaaga

SEQ ID NO: 671153 - RNA, 23 nt, Human
agaucaaccagcauacuaaaagg

SEQ ID NO: 671154 - RNA, 21 nt, Human
agccagggacuugacccacaa

SEQ ID NO: 671155 - RNA, 23 nt, Human
aggagauggggaggcaugauucu

SEQ ID NO: 671156 - RNA, 23 nt, Human
aggcugaguccucagaguuugga

SEQ ID NO: 671157 - RNA, 21 nt, Human
aggucaccgaagauaagagcu

SEQ ID NO: 671158 - RNA, 21 nt, Human
aggucuauuuauaggcacagc

SEQ ID NO: 671159 - RNA, 18 nt, Human
augaaccuaaaaaaaagg

SEQ ID NO: 671160 - RNA, 19 nt, Human
auuuauagcugauuuccuu

SEQ ID NO: 671161 - RNA, 20 nt, Human
caaggcaaagaaaaaccuuc

SEQ ID NO: 671162 - RNA, 21 nt, Human
cacagaaacagaguuaacaug

SEQ ID NO: 671163 - RNA, 18 nt, Human
caccaugccagggagggc

SEQ ID NO: 671164 - RNA, 18 nt, Human
cacccauugcuaugucuc

SEQ ID NO: 671165 - RNA, 26 nt, Human
cacccuaccauuucagcaaaugucuu

SEQ ID NO: 671166 - RNA, 22 nt, Human
caugcagaggucaccgaagaua

SEQ ID NO: 671167 - RNA, 19 nt, Human
caugggaaacccaaaggcu

SEQ ID NO: 671168 - RNA, 25 nt, Human
cauuccagaaagggcaguuugccau

SEQ ID NO: 671169 - RNA, 21 nt, Human
ccaagaaaaagagaagcucca

SEQ ID NO: 671170 - RNA, 23 nt, Human
ccaagccagggacuugacccaca

SEQ ID NO: 671171 - RNA, 19 nt, Human
ccacacuccugcauugccu

SEQ ID NO: 671172 - RNA, 21 nt, Human
cccagaagccccauaguucac

SEQ ID NO: 671173 - RNA, 21 nt, Human
ccccaagccagggacuugacc

SEQ ID NO: 671174 - RNA, 22 nt, Human
ccccaagccagggacuugaccc

SEQ ID NO: 671175 - RNA, 18 nt, Human
cccuaccauuucagcaaa

SEQ ID NO: 671176 - RNA, 21 nt, Human
cccucucaucuucucucuuuc

SEQ ID NO: 671177 - RNA, 21 nt, Human
ccucagugccgugaggcgaug

SEQ ID NO: 671178 - RNA, 19 nt, Human
ccucucaucuucucucuuu

SEQ ID NO: 671179 - RNA, 23 nt, Human
cguaggcaugggaaacccaaagg

SEQ ID NO: 671180 - RNA, 22 nt, Human
cguugaggacaauggaagaugg

SEQ ID NO: 671181 - RNA, 18 nt, Human
cuaaaaggacacuaccua

SEQ ID NO: 671182 - RNA, 18 nt, Human
cugcauugccuuuaacac

SEQ ID NO: 671183 - RNA, 21 nt, Human
cugcggccugggaagacugug

SEQ ID NO: 671184 - RNA, 22 nt, Human
cuggaagccaacucaccaugcc

SEQ ID NO: 671185 - RNA, 22 nt, Human
cuucaaaacaaggcaaagaaaa

SEQ ID NO: 671186 - RNA, 19 nt, Human
cuugcucuugacccagugu

SEQ ID NO: 671187 - RNA, 18 nt, Human
gaacauuccagaaagggc

SEQ ID NO: 671188 - RNA, 20 nt, Human
gaagcuucuauaaacagagg

SEQ ID NO: 671189 - RNA, 20 nt, Human
gaaggcaccaaagaagaggu

SEQ ID NO: 671190 - RNA, 27 nt, Human
gacaauggaagaugggcucagaagaaa

SEQ ID NO: 671191 - RNA, 18 nt, Human
gacgagggaaacaaagaa

SEQ ID NO: 671192 - RNA, 20 nt, Human
gagaaggcaccaaagaagag

SEQ ID NO: 671193 - RNA, 22 nt, Human
gaggacaauggaagaugggccg

SEQ ID NO: 671194 - RNA, 22 nt, Human
gaggcaugauucucugugggcu

SEQ ID NO: 671195 - RNA, 21 nt, Human
gcaaagaaaaaccuucacaaa

SEQ ID NO: 671196 - RNA, 21 nt, Human
gcaacaucauggucacaaagu

SEQ ID NO: 671197 - RNA, 19 nt, Human
ggaaaauauaaacaacuuc

SEQ ID NO: 671198 - RNA, 23 nt, Human
ggacaucauuguugaagagacag

SEQ ID NO: 671199 - RNA, 18 nt, Human
ggagggcaacuugcaaca

SEQ ID NO: 671200 - RNA, 25 nt, Human
ggcucagaagaaaauggauacagcu

SEQ ID NO: 671201 - RNA, 23 nt, Human
gggaaccagaguccccaaucucc

SEQ ID NO: 671202 - RNA, 23 nt, Human
gggacuuuuauuuccaaaauggc

SEQ ID NO: 671203 - RNA, 19 nt, Human
ggugcuuaauccacacucc

SEQ ID NO: 671204 - RNA, 22 nt, Human
guagcuguuuugcuugcauuga

SEQ ID NO: 671205 - RNA, 23 nt, Human
gugguucuaccacuccuguuucu

SEQ ID NO: 671206 - RNA, 24 nt, Human
guguguucugccgaaagggcgggc

SEQ ID NO: 671207 - RNA, 22 nt, Human
uaacacuaugaaagaucaacca

SEQ ID NO: 671208 - RNA, 21 nt, Human
uaagcccccaacacugcacag

SEQ ID NO: 671209 - RNA, 19 nt, Human
uagcuguuuugcuugcauu

SEQ ID NO: 671210 - RNA, 21 nt, Human
uaggcacagccauugguacug

SEQ ID NO: 671211 - RNA, 19 nt, Human
ucaaaacaaggcaaagaaa

SEQ ID NO: 671212 - RNA, 21 nt, Human
ucaagaguuuccuguucccag

SEQ ID NO: 671213 - RNA, 22 nt, Human
ucauggucacaaaguggccacc

SEQ ID NO: 671214 - RNA, 23 nt, Human
uccauucucaggccaccuucaaa

SEQ ID NO: 671215 - RNA, 22 nt, Human
ucccaagaaaaagagaagcucc

SEQ ID NO: 671216 - RNA, 23 nt, Human
ucccagaagccccauaguucacc

SEQ ID NO: 671217 - RNA, 24 nt, Human
uccccaaucucccugcuacacaaa

SEQ ID NO: 671218 - RNA, 18 nt, Human
ucucaggccaccuucaaa

SEQ ID NO: 671219 - RNA, 18 nt, Human
ucuggcacaggagauggg

SEQ ID NO: 671220 - RNA, 21 nt, Human
ucugucaacgcaaauccacca

SEQ ID NO: 671221 - RNA, 22 nt, Human
ugccagggagggcaacuugcaa

SEQ ID NO: 671222 - RNA, 23 nt, Human
ugccagggagggcaacuugcaac

SEQ ID NO: 671223 - RNA, 19 nt, Human
ugccauuggaaaauauaaa

SEQ ID NO: 671224 - RNA, 19 nt, Human
ugccuuuaacacagaaaca

SEQ ID NO: 671225 - RNA, 21 nt, Human
ugcggccugggaagacuguga

SEQ ID NO: 671226 - RNA, 24 nt, Human
ugcggccugggaagacugugguuc

SEQ ID NO: 671227 - RNA, 23 nt, Human
ugcuacacaaagucaguagcugu

SEQ ID NO: 671228 - RNA, 19 nt, Human
uggaagaugggcucagaag

SEQ ID NO: 671229 - RNA, 18 nt, Human
uggagggaaagucggcug

SEQ ID NO: 671230 - RNA, 23 nt, Human
uggcuggagucagugucucccuu

SEQ ID NO: 671231 - RNA, 27 nt, Human
uggggaggcaugauucucugugggcug

SEQ ID NO: 671232 - RNA, 19 nt, Human
uguccucuacccacagcuc

SEQ ID NO: 671233 - RNA, 24 nt, Human
uuaauccacacuccugcauugccu

SEQ ID NO: 671234 - RNA, 19 nt, Human
uuauagcugauuuccuuuu

SEQ ID NO: 671235 - RNA, 24 nt, Human
uucaaaacaaggcaaagaaaaacc

SEQ ID NO: 671236 - RNA, 18 nt, Human
uuccauagggcacaugcc

SEQ ID NO: 671237 - RNA, 18 nt, Human
uucucucuuucuuggccu

SEQ ID NO: 671238 - RNA, 24 nt, Human
uugacaguuugaaccuccccuucu

SEQ ID NO: 671239 - RNA, 23 nt, Human
uuuauagcugauuuccuuuuuaa

SEQ ID NO: 671240 - RNA, 20 nt, Human
uuucuuggcuggagucagug

SEQ ID NO: 671241 - RNA, 19 nt, Human
uuuguaccacucagcagca

SEQ ID NO: 671242 - RNA, 20 nt, Human
agcuggaagucuccagcuuc

SEQ ID NO: 671243 - RNA, 18 nt, Human
agcuggugcucugugugc

SEQ ID NO: 671244 - RNA, 19 nt, Human
agcuggugcucugugugcc

SEQ ID NO: 671245 - RNA, 21 nt, Human
caacucagcucccauuguacc

SEQ ID NO: 671246 - RNA, 19 nt, Human
ccagcuucucccuccaaca

SEQ ID NO: 671247 - RNA, 19 nt, Human
cuugagugggagcuggagc

SEQ ID NO: 671248 - RNA, 21 nt, Human
gagcuggagcuggaagucucc

SEQ ID NO: 671249 - RNA, 22 nt, Human
uccagcuucucccuccaacaac

SEQ ID NO: 671250 - RNA, 22 nt, Human
ucccuccaacaacucagcuccc

SEQ ID NO: 671251 - RNA, 20 nt, Human
ugagugggagcuggagcugg

SEQ ID NO: 671252 - RNA, 21 nt, Human
aacagacuggggucauacucc

SEQ ID NO: 671253 - RNA, 22 nt, Human
aagauaccaaaggcugucgaaa

SEQ ID NO: 671254 - RNA, 19 nt, Human
aaggcugucgaaaauucac

SEQ ID NO: 671255 - RNA, 21 nt, Human
acacaccauuaacacacaaaa

SEQ ID NO: 671256 - RNA, 22 nt, Human
agagggagagggagcacacacc

SEQ ID NO: 671257 - RNA, 18 nt, Human
gaaagacuaaaggucagg

SEQ ID NO: 671258 - RNA, 24 nt, Human
ggaaaagaguaaauauguccaaac

SEQ ID NO: 671259 - RNA, 21 nt, Human
uaacacacaaaaaaaguaaaa

SEQ ID NO: 671260 - RNA, 21 nt, Human
ucugcaccacagcaccgagga

SEQ ID NO: 671261 - RNA, 19 nt, Human
ugaaagacuaaaggucagg

SEQ ID NO: 671262 - RNA, 18 nt, Human
ugagcuggagaggaacua

SEQ ID NO: 671263 - RNA, 24 nt, Human
uucggguaaaaguccguuauuccu

SEQ ID NO: 671264 - RNA, 24 nt, Human
uuggaagugaaagacuaaagguca

SEQ ID NO: 671265 - RNA, 25 nt, Human
uuggaagugaaagacuaaaggucag

SEQ ID NO: 671266 - RNA, 18 nt, Human
aaaaaaaaacugaaggug

SEQ ID NO: 671267 - RNA, 25 nt, Human
aaaaaaaacugaaggugggagaaaa

SEQ ID NO: 671268 - RNA, 22 nt, Human
aacugcugccccaagggaccuc

SEQ ID NO: 671269 - RNA, 25 nt, Human
aagcaaaaauaacagcuggugaauc

SEQ ID NO: 671270 - RNA, 27 nt, Human
aagcaaaaauaacagcuggugaaucca

SEQ ID NO: 671271 - RNA, 20 nt, Human
aaggugggagaaaaguaaaa

SEQ ID NO: 671272 - RNA, 22 nt, Human
acacugccugagcuaccagccc

SEQ ID NO: 671273 - RNA, 23 nt, Human
acacugccugagcuaccagcccu

SEQ ID NO: 671274 - RNA, 21 nt, Human
accacucucuuacugcagagg

SEQ ID NO: 671275 - RNA, 21 nt, Human
accauccacacccccacaauc

SEQ ID NO: 671276 - RNA, 18 nt, Human
accccaaguuucacucac

SEQ ID NO: 671277 - RNA, 20 nt, Human
acccuggguuucccaaccac

SEQ ID NO: 671278 - RNA, 19 nt, Human
acgcagcagagacgcggcc

SEQ ID NO: 671279 - RNA, 22 nt, Human
acucucuucacccuuugccccc

SEQ ID NO: 671280 - RNA, 25 nt, Human
acuuuuuuuuuuuuuugcuuuuaaa

SEQ ID NO: 671281 - RNA, 24 nt, Human
agaaucucagaucugacaaggccu

SEQ ID NO: 671282 - RNA, 24 nt, Human
agacgcggccuccacaaggucaga

SEQ ID NO: 671283 - RNA, 28 nt, Human
agcaaacuccagccagcagcguucgucc

SEQ ID NO: 671284 - RNA, 22 nt, Human
agcagagacgcggccuccacaa

SEQ ID NO: 671285 - RNA, 20 nt, Human
agccagcagcguucgucccu

SEQ ID NO: 671286 - RNA, 22 nt, Human
agcccuucugcacuggcccucc

SEQ ID NO: 671287 - RNA, 24 nt, Human
aggucugucuauccugcccugguc

SEQ ID NO: 671288 - RNA, 19 nt, Human
aguccuacucugaauucag

SEQ ID NO: 671289 - RNA, 21 nt, Human
agugagcaaaccccuagcccc

SEQ ID NO: 671290 - RNA, 20 nt, Human
aguuugcuuccucuucaguu

SEQ ID NO: 671291 - RNA, 24 nt, Human
auccgcccugcaggcucccuguca

SEQ ID NO: 671292 - RNA, 23 nt, Human
cacacugccugagcuaccagccc

SEQ ID NO: 671293 - RNA, 24 nt, Human
cacccccacaaucugagauuccaa

SEQ ID NO: 671294 - RNA, 20 nt, Human
cacccuuugcccccacccca

SEQ ID NO: 671295 - RNA, 19 nt, Human
cacgcagcagagacgcggc

SEQ ID NO: 671296 - RNA, 20 nt, Human
cagaagccagagucuuucug

SEQ ID NO: 671297 - RNA, 21 nt, Human
cagagaguccucucugcguuu

SEQ ID NO: 671298 - RNA, 19 nt, Human
cagcaaacuccagccagca

SEQ ID NO: 671299 - RNA, 22 nt, Human
cagcagagacgcggccuccaca

SEQ ID NO: 671300 - RNA, 19 nt, Human
cagcagcguucgucccuug

SEQ ID NO: 671301 - RNA, 22 nt, Human
cagccagcagcguucgucccuu

SEQ ID NO: 671302 - RNA, 18 nt, Human
caggaagguggccccagg

SEQ ID NO: 671303 - RNA, 24 nt, Human
cauaaacacaaacacccuaaauag

SEQ ID NO: 671304 - RNA, 24 nt, Human
cauucaccauccacacccccacaa

SEQ ID NO: 671305 - RNA, 18 nt, Human
ccacaccccacggugucc

SEQ ID NO: 671306 - RNA, 23 nt, Human
ccacaccccacggugucccagaa

SEQ ID NO: 671307 - RNA, 19 nt, Human
ccagcaggcagcaccccaa

SEQ ID NO: 671308 - RNA, 21 nt, Human
cccacacucucuucacccuuu

SEQ ID NO: 671309 - RNA, 20 nt, Human
cccacggugucccagaaacu

SEQ ID NO: 671310 - RNA, 20 nt, Human
cccaugaucaccagauccgc

SEQ ID NO: 671311 - RNA, 20 nt, Human
ccccaagggaccucaaggaa

SEQ ID NO: 671312 - RNA, 20 nt, Human
ccccaguuacgaagcaaagc

SEQ ID NO: 671313 - RNA, 19 nt, Human
cccccaaauucugaggcug

SEQ ID NO: 671314 - RNA, 20 nt, Human
cccccaaguggggacuacag

SEQ ID NO: 671315 - RNA, 21 nt, Human
ccccuagcccccaagugggga

SEQ ID NO: 671316 - RNA, 19 nt, Human
cccgcgaacacgcagcaga

SEQ ID NO: 671317 - RNA, 21 nt, Human
cccuauccagacccccuaauc

SEQ ID NO: 671318 - RNA, 20 nt, Human
cccugcacccucguacucgg

SEQ ID NO: 671319 - RNA, 22 nt, Human
cccugcaggcucccugucaccu

SEQ ID NO: 671320 - RNA, 20 nt, Human
ccucguacucggguuucuuc

SEQ ID NO: 671321 - RNA, 24 nt, Human
ccucuggcucccaugaucaccuua

SEQ ID NO: 671322 - RNA, 19 nt, Human
ccugcacuguccccacucc

SEQ ID NO: 671323 - RNA, 19 nt, Human
ccugggucaccaccagaga

SEQ ID NO: 671324 - RNA, 20 nt, Human
ccuggguuucccaaccacuc

SEQ ID NO: 671325 - RNA, 20 nt, Human
ccuucugcacuggcccuccu

SEQ ID NO: 671326 - RNA, 21 nt, Human
cgaagcaaagcgcgggccuac

SEQ ID NO: 671327 - RNA, 20 nt, Human
cgcagcagagacgcggccuc

SEQ ID NO: 671328 - RNA, 23 nt, Human
cgggcgcugugcgcggggaccgc

SEQ ID NO: 671329 - RNA, 22 nt, Human
cuaaagcccacacucucuucac

SEQ ID NO: 671330 - RNA, 27 nt, Human
cuaccagcccuucugcacuggcccucc

SEQ ID NO: 671331 - RNA, 18 nt, Human
cucaaggaauaggaauuc

SEQ ID NO: 671332 - RNA, 22 nt, Human
cucucuucacccuuugccccca

SEQ ID NO: 671333 - RNA, 19 nt, Human
cugagugagcaaaccccua

SEQ ID NO: 671334 - RNA, 18 nt, Human
cugcacccucguacucgg

SEQ ID NO: 671335 - RNA, 23 nt, Human
cugcacuggcccuccugccaaua

SEQ ID NO: 671336 - RNA, 23 nt, Human
cugcacuguccccacucccucug

SEQ ID NO: 671337 - RNA, 22 nt, Human
cugcaggcucccugucaccugu

SEQ ID NO: 671338 - RNA, 20 nt, Human
cuguguaugaaggggggccc

SEQ ID NO: 671339 - RNA, 21 nt, Human
cuucccagcaggcagcacccc

SEQ ID NO: 671340 - RNA, 18 nt, Human
cuucgggaccuacgcguc

SEQ ID NO: 671341 - RNA, 18 nt, Human
cuucugcacuggcccucc

SEQ ID NO: 671342 - RNA, 19 nt, Human
cuuuuaaaaaguggaggug

SEQ ID NO: 671343 - RNA, 21 nt, Human
cuuuuuuuuuuuuuugcuuuu

SEQ ID NO: 671344 - RNA, 20 nt, Human
gacccccuaauccacuugcc

SEQ ID NO: 671345 - RNA, 19 nt, Human
gagcaaaccccuagccccc

SEQ ID NO: 671346 - RNA, 23 nt, Human
gcacuggcccuccugccaauacu

SEQ ID NO: 671347 - RNA, 22 nt, Human
gcagcagagacgcggccuccac

SEQ ID NO: 671348 - RNA, 21 nt, Human
gccacaccccacgguguccca

SEQ ID NO: 671349 - RNA, 25 nt, Human
gccucacacuuuucuccuaaagccc

SEQ ID NO: 671350 - RNA, 19 nt, Human
gcucccugucaccuguggg

SEQ ID NO: 671351 - RNA, 22 nt, Human
ggaagguggccccagguccuag

SEQ ID NO: 671352 - RNA, 21 nt, Human
ggcaggaagguggccccaggu

SEQ ID NO: 671353 - RNA, 24 nt, Human
ggccacaccccacggugucccaga

SEQ ID NO: 671354 - RNA, 25 nt, Human
gggcaggaagguggccccagguccu

SEQ ID NO: 671355 - RNA, 18 nt, Human
ggguuucuuccccauccc

SEQ ID NO: 671356 - RNA, 23 nt, Human
guggagguggaaaaaaaaaaaaa

SEQ ID NO: 671357 - RNA, 23 nt, Human
uaaagcgggcaggaagguggccc

SEQ ID NO: 671358 - RNA, 21 nt, Human
uaaaggggggcauacccaaau

SEQ ID NO: 671359 - RNA, 22 nt, Human
uaagauguccucagagaucccc

SEQ ID NO: 671360 - RNA, 23 nt, Human
uaaugggcccccaaauucugagg

SEQ ID NO: 671361 - RNA, 20 nt, Human
uaggagguggaaugaaagug

SEQ ID NO: 671362 - RNA, 22 nt, Human
uauccugcccuggucuccucca

SEQ ID NO: 671363 - RNA, 23 nt, Human
ucagacucucaggaucuccucag

SEQ ID NO: 671364 - RNA, 20 nt, Human
ucaguucugggguaaagggg

SEQ ID NO: 671365 - RNA, 21 nt, Human
uccaagaaucucagaucugac

SEQ ID NO: 671366 - RNA, 19 nt, Human
uccaagagcagugcccuca

SEQ ID NO: 671367 - RNA, 21 nt, Human
uccaagagcagugcccucacu

SEQ ID NO: 671368 - RNA, 21 nt, Human
uccacuugccuagcagcccca

SEQ ID NO: 671369 - RNA, 23 nt, Human
uccauaaacacaaacacccuaaa

SEQ ID NO: 671370 - RNA, 25 nt, Human
uccauaaacacaaacacccuaaaua

SEQ ID NO: 671371 - RNA, 25 nt, Human
ucccagaaacuggggaggcagugcu

SEQ ID NO: 671372 - RNA, 23 nt, Human
uccccaucccugaggucccuaug

SEQ ID NO: 671373 - RNA, 23 nt, Human
uccuaaagcccacacucucuuca

SEQ ID NO: 671374 - RNA, 22 nt, Human
uccuccaccccaggagaguuuu

SEQ ID NO: 671375 - RNA, 22 nt, Human
uccuucccagcaggcagcaccc

SEQ ID NO: 671376 - RNA, 24 nt, Human
ucucaggaucuccucagaagccag

SEQ ID NO: 671377 - RNA, 22 nt, Human
ucucugaauagucaugcagccu

SEQ ID NO: 671378 - RNA, 21 nt, Human
ugagcaaaccccuagccccca

SEQ ID NO: 671379 - RNA, 18 nt, Human
ugcacuguccccacuccc

SEQ ID NO: 671380 - RNA, 22 nt, Human
ugccucacacuuuucuccuaaa

SEQ ID NO: 671381 - RNA, 22 nt, Human
uggaaaaaaaaaaaaaaacuga

SEQ ID NO: 671382 - RNA, 19 nt, Human
uggagguggaaaaaaaaaa

SEQ ID NO: 671383 - RNA, 22 nt, Human
uggaucguguagucuuuaacug

SEQ ID NO: 671384 - RNA, 19 nt, Human
uggcaaguaguuugcuucc

SEQ ID NO: 671385 - RNA, 18 nt, Human
uggccccagguccuaggu

SEQ ID NO: 671386 - RNA, 24 nt, Human
uggccccagguccuaggugcuccu

SEQ ID NO: 671387 - RNA, 21 nt, Human
uggcccgcgaacacgcagcag

SEQ ID NO: 671388 - RNA, 24 nt, Human
uggcccgcgaacacgcagcagaga

SEQ ID NO: 671389 - RNA, 18 nt, Human
uggcucccaugaucaccu

SEQ ID NO: 671390 - RNA, 19 nt, Human
uggggcccuauccagaccc

SEQ ID NO: 671391 - RNA, 23 nt, Human
ugggguguguaaugggcccccaa

SEQ ID NO: 671392 - RNA, 24 nt, Human
uguaaugggcccccaaauucugag

SEQ ID NO: 671393 - RNA, 24 nt, Human
uguccccacucccucuggcuccca

SEQ ID NO: 671394 - RNA, 19 nt, Human
uucaaagguagagaggacc

SEQ ID NO: 671395 - RNA, 22 nt, Human
uucaccauccacacccccacaa

SEQ ID NO: 671396 - RNA, 21 nt, Human
uugcuuccucuucaguucugg

SEQ ID NO: 671397 - RNA, 24 nt, Human
uuucacucaccaaggccacacccc

SEQ ID NO: 671398 - RNA, 21 nt, Human
uuucuuccccaucccugaggu

SEQ ID NO: 671399 - RNA, 24 nt, Human
uuugcuuuuaaaaaguggaggugg

SEQ ID NO: 671400 - RNA, 24 nt, Human
cagcggacacuccacucgcaagac

SEQ ID NO: 671401 - RNA, 21 nt, Human
cuaugauuuagggcuuuuuuu

SEQ ID NO: 671402 - RNA, 21 nt, Human
aagguccuuugacuucaacuc

SEQ ID NO: 671403 - RNA, 23 nt, Human
acacuagccgacgccugcccucg

SEQ ID NO: 671404 - RNA, 20 nt, Human
acauguuaugaauuguucag

SEQ ID NO: 671405 - RNA, 19 nt, Human
agauaccacaaagcaccac

SEQ ID NO: 671406 - RNA, 22 nt, Human
caccacuuaagucuaaauugcu

SEQ ID NO: 671407 - RNA, 22 nt, Human
cagauaccacaaagcaccacuu

SEQ ID NO: 671408 - RNA, 24 nt, Human
ccuuugacuucaacucuacucauu

SEQ ID NO: 671409 - RNA, 18 nt, Human
cgacucccgacacuagcc

SEQ ID NO: 671410 - RNA, 21 nt, Human
cgccugcccucgugccgaauu

SEQ ID NO: 671411 - RNA, 24 nt, Human
ggcggcgggcgcgacuccucgcgg

SEQ ID NO: 671412 - RNA, 19 nt, Human
uagccagccaccaccagag

SEQ ID NO: 671413 - RNA, 21 nt, Human
ucagauaccacaaagcaccac

SEQ ID NO: 671414 - RNA, 24 nt, Human
ucaguuuucuuuuguucagaaaug

SEQ ID NO: 671415 - RNA, 22 nt, Human
uccuuugacuucaacucuacuc

SEQ ID NO: 671416 - RNA, 20 nt, Human
ucuaccuagaguggaagugu

SEQ ID NO: 671417 - RNA, 20 nt, Human
ugacuucaacucuacucauu

SEQ ID NO: 671418 - RNA, 22 nt, Human
ugggagcuaaacaauacuauuu

SEQ ID NO: 671419 - RNA, 18 nt, Human
ugucaagucauucuucaa

SEQ ID NO: 671420 - RNA, 23 nt, Human
ugucagaaagguccuuugacuuc

SEQ ID NO: 671421 - RNA, 22 nt, Human
uguggaacaaauguuucucugg

SEQ ID NO: 671422 - RNA, 24 nt, Human
uguguuaacuguggaacaaauguu

SEQ ID NO: 671423 - RNA, 19 nt, Human
uguucagaaauggcaaggc

SEQ ID NO: 671424 - RNA, 25 nt, Human
uguucagaaauggcaaggcaauauu

SEQ ID NO: 671425 - RNA, 23 nt, Human
aaaaaaaaaagaaaaaacucaaa

SEQ ID NO: 671426 - RNA, 19 nt, Human
aaaaaacucaaacugagcc

SEQ ID NO: 671427 - RNA, 19 nt, Human
aaaaaggaacuacagaaaa

SEQ ID NO: 671428 - RNA, 23 nt, Human
aaaaggccaagagcagcagaaua

SEQ ID NO: 671429 - RNA, 26 nt, Human
aaaaugaaacaaaaaggaacuacaga

SEQ ID NO: 671430 - RNA, 25 nt, Human
aaacaaaaaggaacuacagaaaacg

SEQ ID NO: 671431 - RNA, 20 nt, Human
aaacauagcucucucucacc

SEQ ID NO: 671432 - RNA, 30 nt, Human
aaagaaaaaacucaaacugagccccaagcc

SEQ ID NO: 671433 - RNA, 20 nt, Human
aaagcaggacauaauugccu

SEQ ID NO: 671434 - RNA, 23 nt, Human
aagaaggcagcuccucacaggcu

SEQ ID NO: 671435 - RNA, 18 nt, Human
aagauggucuccagaggc

SEQ ID NO: 671436 - RNA, 24 nt, Human
aagcagaagggagcaauuggcugg

SEQ ID NO: 671437 - RNA, 19 nt, Human
aagucuacaacugccccaa

SEQ ID NO: 671438 - RNA, 24 nt, Human
acaaaaaaaaaaaaaaaagaaaaa

SEQ ID NO: 671439 - RNA, 18 nt, Human
acaaaaaggaacuacaga

SEQ ID NO: 671440 - RNA, 18 nt, Human
acaccuucauucuggguc

SEQ ID NO: 671441 - RNA, 19 nt, Human
acaggucuucuuuccuaaa

SEQ ID NO: 671442 - RNA, 18 nt, Human
accccaggaccuguaaag

SEQ ID NO: 671443 - RNA, 19 nt, Human
acugcuuccuucuuuucuu

SEQ ID NO: 671444 - RNA, 21 nt, Human
acugcuuccuucuuuucuucc

SEQ ID NO: 671445 - RNA, 24 nt, Human
agaaaugaaacagcaaaaacaaaa

SEQ ID NO: 671446 - RNA, 20 nt, Human
agaagaaaaugaaacaaaaa

SEQ ID NO: 671447 - RNA, 21 nt, Human
agaagaaaaugaaacaaaaag

SEQ ID NO: 671448 - RNA, 23 nt, Human
agaagaaaaugaaacaaaaagga

SEQ ID NO: 671449 - RNA, 23 nt, Human
agaauaccuggcuacagguagcu

SEQ ID NO: 671450 - RNA, 21 nt, Human
agacagaagaaaaugaaacaa

SEQ ID NO: 671451 - RNA, 25 nt, Human
agacagaagaaaaugaaacaaaaag

SEQ ID NO: 671452 - RNA, 21 nt, Human
agaguuccaguugaacaucgc

SEQ ID NO: 671453 - RNA, 22 nt, Human
aggaaaaagccaggucugagga

SEQ ID NO: 671454 - RNA, 24 nt, Human
aggaagaaaauaaugucaccagaa

SEQ ID NO: 671455 - RNA, 19 nt, Human
aggaaguaugagguagagg

SEQ ID NO: 671456 - RNA, 25 nt, Human
aggcucuucccuccccaaggaaagc

SEQ ID NO: 671457 - RNA, 21 nt, Human
agggacugaggaaaaagccag

SEQ ID NO: 671458 - RNA, 18 nt, Human
aggugaccaugagaaugg

SEQ ID NO: 671459 - RNA, 21 nt, Human
agucagaaugcaggaccagua

SEQ ID NO: 671460 - RNA, 20 nt, Human
auauuuugacuuauggugcc

SEQ ID NO: 671461 - RNA, 24 nt, Human
augaaacagcaaaaacaaaaugaa

SEQ ID NO: 671462 - RNA, 21 nt, Human
auggacacuaaauaacacuuc

SEQ ID NO: 671463 - RNA, 21 nt, Human
caaacaggucacacuacccau

SEQ ID NO: 671464 - RNA, 18 nt, Human
caacugccccaacugcac

SEQ ID NO: 671465 - RNA, 19 nt, Human
caacugccccaacugcacu

SEQ ID NO: 671466 - RNA, 19 nt, Human
caccagaaccugcuucuuu

SEQ ID NO: 671467 - RNA, 18 nt, Human
cacuggacgaccccugac

SEQ ID NO: 671468 - RNA, 25 nt, Human
cacuguauaggugaccaugagaauc

SEQ ID NO: 671469 - RNA, 21 nt, Human
cacuugucuuucuuuggguau

SEQ ID NO: 671470 - RNA, 18 nt, Human
cagaaaugaaacagcaaa

SEQ ID NO: 671471 - RNA, 22 nt, Human
cagaaaugaaacagcaaaaaca

SEQ ID NO: 671472 - RNA, 22 nt, Human
cagaaggaucaagaauggacac

SEQ ID NO: 671473 - RNA, 18 nt, Human
cagaagggagcaauuggc

SEQ ID NO: 671474 - RNA, 21 nt, Human
cagcucaaaaacuaccuguac

SEQ ID NO: 671475 - RNA, 18 nt, Human
caggucuucuuuccuaaa

SEQ ID NO: 671476 - RNA, 18 nt, Human
cauucugggucuccugga

SEQ ID NO: 671477 - RNA, 21 nt, Human
ccaccaaaaccaauauuuuga

SEQ ID NO: 671478 - RNA, 21 nt, Human
ccaggccuaucuuccaagguc

SEQ ID NO: 671479 - RNA, 19 nt, Human
ccaggcucacuaaggaccc

SEQ ID NO: 671480 - RNA, 21 nt, Human
ccagugcuccuggguuuguca

SEQ ID NO: 671481 - RNA, 21 nt, Human
cccugguuucuugccugagac

SEQ ID NO: 671482 - RNA, 22 nt, Human
ccgccgccgccgcuuccuccag

SEQ ID NO: 671483 - RNA, 20 nt, Human
ccgccgccgcuuccuccagc

SEQ ID NO: 671484 - RNA, 25 nt, Human
ccucacaggcucuggcugugugugg

SEQ ID NO: 671485 - RNA, 21 nt, Human
ccuugcucuguccaggcucac

SEQ ID NO: 671486 - RNA, 21 nt, Human
cguuaugcuuuugcauagcca

SEQ ID NO: 671487 - RNA, 22 nt, Human
cuaaauaacacuucaugcccaa

SEQ ID NO: 671488 - RNA, 19 nt, Human
cuaacacaagugcuccaca

SEQ ID NO: 671489 - RNA, 24 nt, Human
cuaacgaggugagacagaagaaaa

SEQ ID NO: 671490 - RNA, 25 nt, Human
cucacacacacacaucgaucaucuc

SEQ ID NO: 671491 - RNA, 22 nt, Human
cucacuaaggacccugaacuca

SEQ ID NO: 671492 - RNA, 24 nt, Human
cuccacacgagggaacuacccucc

SEQ ID NO: 671493 - RNA, 20 nt, Human
cuccuugcucuguccaggcu

SEQ ID NO: 671494 - RNA, 23 nt, Human
cugauauacuuaucucagagccu

SEQ ID NO: 671495 - RNA, 20 nt, Human
cugcuuccuucuuuucuucc

SEQ ID NO: 671496 - RNA, 20 nt, Human
cuggaacaagauggucucca

SEQ ID NO: 671497 - RNA, 23 nt, Human
cugggaaaccuaagaauggaauu

SEQ ID NO: 671498 - RNA, 29 nt, Human
cugggucuuggcuuugugagucgguuccg

SEQ ID NO: 671499 - RNA, 21 nt, Human
cugugugcuggacaucaaggc

SEQ ID NO: 671500 - RNA, 26 nt, Human
cugugugcuggacaucaaggcucuuc

SEQ ID NO: 671501 - RNA, 23 nt, Human
cuucaugcccaacugacaccuuc

SEQ ID NO: 671502 - RNA, 24 nt, Human
cuuccaggccuaucuuccaagguc

SEQ ID NO: 671503 - RNA, 22 nt, Human
gaaaaagccaggucugaggaga

SEQ ID NO: 671504 - RNA, 22 nt, Human
gagcuugcaauuggcagccuga

SEQ ID NO: 671505 - RNA, 20 nt, Human
gcaggacauaauugccuaca

SEQ ID NO: 671506 - RNA, 19 nt, Human
gcgugggaaaaggccaaga

SEQ ID NO: 671507 - RNA, 21 nt, Human
gcuggaacaagauggucucca

SEQ ID NO: 671508 - RNA, 21 nt, Human
ggaaggcaacugcuuccuucu

SEQ ID NO: 671509 - RNA, 18 nt, Human
ggcaacugcuuccuucuu

SEQ ID NO: 671510 - RNA, 23 nt, Human
ggcuucuuugaaaaucaaaauga

SEQ ID NO: 671511 - RNA, 20 nt, Human
gggaaacacacuguauaggu

SEQ ID NO: 671512 - RNA, 21 nt, Human
gggaagaaggcagcuccucac

SEQ ID NO: 671513 - RNA, 24 nt, Human
gucagaaugcaggaccaguaucug

SEQ ID NO: 671514 - RNA, 26 nt, Human
gugagacagaagaaaaugaaacaaaa

SEQ ID NO: 671515 - RNA, 23 nt, Human
gugcuccuggguuugucaccuuc

SEQ ID NO: 671516 - RNA, 20 nt, Human
uaacacaagugcuccacacg

SEQ ID NO: 671517 - RNA, 24 nt, Human
uaagacuuuuauuaaugccagaaa

SEQ ID NO: 671518 - RNA, 23 nt, Human
uaaugccagaaaugaaacagcaa

SEQ ID NO: 671519 - RNA, 18 nt, Human
uaccuggcuacagguagc

SEQ ID NO: 671520 - RNA, 21 nt, Human
uacucauuuugugucugcagg

SEQ ID NO: 671521 - RNA, 23 nt, Human
uauggugccuuugcugcugucag

SEQ ID NO: 671522 - RNA, 21 nt, Human
ucaaaacaccuguucagaucc

SEQ ID NO: 671523 - RNA, 20 nt, Human
ucaaaauccucagaggaagu

SEQ ID NO: 671524 - RNA, 28 nt, Human
ucaacagucucuuccaggccuaucuucc

SEQ ID NO: 671525 - RNA, 24 nt, Human
ucacacacacacaucgaucaucuc

SEQ ID NO: 671526 - RNA, 21 nt, Human
ucacacauggcacaagcccgc

SEQ ID NO: 671527 - RNA, 22 nt, Human
ucacccaauuaauccauuuugu

SEQ ID NO: 671528 - RNA, 22 nt, Human
ucacuugacaugcacaucuuuc

SEQ ID NO: 671529 - RNA, 19 nt, Human
ucauagguuuuuuccuggu

SEQ ID NO: 671530 - RNA, 18 nt, Human
ucaucuccaccaaaacca

SEQ ID NO: 671531 - RNA, 24 nt, Human
uccaaggaagaaaauaaugucacc

SEQ ID NO: 671532 - RNA, 20 nt, Human
uccaggcucacuaaggaccc

SEQ ID NO: 671533 - RNA, 21 nt, Human
uccccaaggaaagcuuaacuc

SEQ ID NO: 671534 - RNA, 19 nt, Human
uccugcacuggacgacccc

SEQ ID NO: 671535 - RNA, 21 nt, Human
uccuguugguggcaacacuca

SEQ ID NO: 671536 - RNA, 19 nt, Human
ucucagucagaaugcagga

SEQ ID NO: 671537 - RNA, 21 nt, Human
ucugcagguguuucccacaug

SEQ ID NO: 671538 - RNA, 21 nt, Human
ucuucccuccccaaggaaagc

SEQ ID NO: 671539 - RNA, 20 nt, Human
ugaaaaaagaagacuuuggc

SEQ ID NO: 671540 - RNA, 19 nt, Human
ugaaacaaaaaggaacuac

SEQ ID NO: 671541 - RNA, 23 nt, Human
ugagacagaagaaaaugaaacaa

SEQ ID NO: 671542 - RNA, 18 nt, Human
ugaggaaaaagccagguc

SEQ ID NO: 671543 - RNA, 21 nt, Human
ugccagaaaugaaacagcaaa

SEQ ID NO: 671544 - RNA, 21 nt, Human
ugccccaacugcacugacuau

SEQ ID NO: 671545 - RNA, 24 nt, Human
ugccccugucacuugucuuucuuu

SEQ ID NO: 671546 - RNA, 20 nt, Human
ugcuccuggguuugucaccu

SEQ ID NO: 671547 - RNA, 23 nt, Human
uggaaacccugaaauccuguagc

SEQ ID NO: 671548 - RNA, 18 nt, Human
uggaacaagauggucucc

SEQ ID NO: 671549 - RNA, 19 nt, Human
uggcaacacucacuccaau

SEQ ID NO: 671550 - RNA, 22 nt, Human
uggcaacacucacuccaaucuu

SEQ ID NO: 671551 - RNA, 21 nt, Human
uggcuguggggcuuagggagu

SEQ ID NO: 671552 - RNA, 19 nt, Human
uguggggcuuagggagugg

SEQ ID NO: 671553 - RNA, 23 nt, Human
uuaaugccagaaaugaaacagca

SEQ ID NO: 671554 - RNA, 30 nt, Human
uuaguggacaaaaaaaaaaaaaaaagaaaa

SEQ ID NO: 671555 - RNA, 20 nt, Human
uucucuaagcuggacucugg

SEQ ID NO: 671556 - RNA, 18 nt, Human
uugaagcacaggagagaa

SEQ ID NO: 671557 - RNA, 21 nt, Human
uuguauggucugaaaaaagaa

SEQ ID NO: 671558 - RNA, 18 nt, Human
uuugcugcugucagcuca

SEQ ID NO: 671559 - RNA, 18 nt, Human
uuuuaucaaagcaggaca

SEQ ID NO: 671560 - RNA, 25 nt, Human
aaaggaagggauugcugggguucug

SEQ ID NO: 671561 - RNA, 24 nt, Human
acauuaagaagugccgguccugaa

SEQ ID NO: 671562 - RNA, 24 nt, Human
agaaaccaaaacaaucacuggaug

SEQ ID NO: 671563 - RNA, 22 nt, Human
agagaaaggggaagaaaggagg

SEQ ID NO: 671564 - RNA, 24 nt, Human
agcaggaugggaaaggcgggcaga

SEQ ID NO: 671565 - RNA, 26 nt, Human
agccacaaacauuaagaagugccggu

SEQ ID NO: 671566 - RNA, 24 nt, Human
aggaagggauugcugggguucuga

SEQ ID NO: 671567 - RNA, 19 nt, Human
aggaggaggaggucaagaa

SEQ ID NO: 671568 - RNA, 20 nt, Human
aggcgggcagagaaagggga

SEQ ID NO: 671569 - RNA, 21 nt, Human
agggcugggcugagggaaccc

SEQ ID NO: 671570 - RNA, 24 nt, Human
agucagaaagggaacagaaaccaa

SEQ ID NO: 671571 - RNA, 25 nt, Human
caacuacccccaaaaaagaagguag

SEQ ID NO: 671572 - RNA, 20 nt, Human
cagcaggaugggaaaggcgg

SEQ ID NO: 671573 - RNA, 24 nt, Human
ccacaauuucagucccuuccaacu

SEQ ID NO: 671574 - RNA, 25 nt, Human
ccaccucucucuuuguagaaugaga

SEQ ID NO: 671575 - RNA, 22 nt, Human
cccacaauuucagucccuucca

SEQ ID NO: 671576 - RNA, 23 nt, Human
cccacaauuucagucccuuccaa

SEQ ID NO: 671577 - RNA, 25 nt, Human
cccacaauuucagucccuuccaacu

SEQ ID NO: 671578 - RNA, 19 nt, Human
cccccaaaaaagaagguag

SEQ ID NO: 671579 - RNA, 24 nt, Human
cccccaaaaaagaagguagugaaa

SEQ ID NO: 671580 - RNA, 21 nt, Human
cccccacaauuucagucccuu

SEQ ID NO: 671581 - RNA, 20 nt, Human
ccgggcuggacagggcuggg

SEQ ID NO: 671582 - RNA, 21 nt, Human
ccuccuaccuuccccccacaa

SEQ ID NO: 671583 - RNA, 19 nt, Human
cucuuuguagaaugagacc

SEQ ID NO: 671584 - RNA, 21 nt, Human
cugagggaacccaggggggcc

SEQ ID NO: 671585 - RNA, 20 nt, Human
cuuuguagaaugagaccccc

SEQ ID NO: 671586 - RNA, 18 nt, Human
gaaggaggaggaggucaa

SEQ ID NO: 671587 - RNA, 23 nt, Human
gccaacuccaccauuaccccucc

SEQ ID NO: 671588 - RNA, 19 nt, Human
gccgggacggggggcggcg

SEQ ID NO: 671589 - RNA, 21 nt, Human
gcgcgggcggauucagcggag

SEQ ID NO: 671590 - RNA, 20 nt, Human
ggaaaggcgggcagagaaag

SEQ ID NO: 671591 - RNA, 23 nt, Human
ggaacagaaaccaaaacaaucac

SEQ ID NO: 671592 - RNA, 27 nt, Human
ggaacagaaaccaaaacagcagggacu

SEQ ID NO: 671593 - RNA, 23 nt, Human
gggcugagggaacccaggggggc

SEQ ID NO: 671594 - RNA, 19 nt, Human
ggggcggcgacgacggcgg

SEQ ID NO: 671595 - RNA, 20 nt, Human
gggggcggcgacgacggcgg

SEQ ID NO: 671596 - RNA, 18 nt, Human
gucaagaaaggggggcca

SEQ ID NO: 671597 - RNA, 20 nt, Human
guguuugagcuugaaggagg

SEQ ID NO: 671598 - RNA, 22 nt, Human
uacaagaugccaacuccaccau

SEQ ID NO: 671599 - RNA, 25 nt, Human
uaccccuccuaagagaggcuggaga

SEQ ID NO: 671600 - RNA, 24 nt, Human
uaccuuccccccacaauuucaguc

SEQ ID NO: 671601 - RNA, 19 nt, Human
uagaaugagaccccccucc

SEQ ID NO: 671602 - RNA, 22 nt, Human
ucagaaagggaacagaaaccaa

SEQ ID NO: 671603 - RNA, 18 nt, Human
ucuuuguagaaugagacc

SEQ ID NO: 671604 - RNA, 21 nt, Human
ugaaaggaagggauugcuggg

SEQ ID NO: 671605 - RNA, 22 nt, Human
ugaaaggaagggauugcugggg

SEQ ID NO: 671606 - RNA, 21 nt, Human
ugaaggaggaggaggucaaga

SEQ ID NO: 671607 - RNA, 24 nt, Human
ugaaggaggaggaggucaagaaag

SEQ ID NO: 671608 - RNA, 19 nt, Human
ugagcuugaaggaggagga

SEQ ID NO: 671609 - RNA, 20 nt, Human
ugccuccuaccuucccccca

SEQ ID NO: 671610 - RNA, 21 nt, Human
uggagagaaagccacaaacau

SEQ ID NO: 671611 - RNA, 24 nt, Human
ugggcugagggaacccaggggggc

SEQ ID NO: 671612 - RNA, 18 nt, Human
uguuugagcuugaaggag

SEQ ID NO: 671613 - RNA, 21 nt, Human
uucagcuuggugguuuccucu

SEQ ID NO: 671614 - RNA, 20 nt, Human
uugagcuugaaggaggagga

SEQ ID NO: 671615 - RNA, 26 nt, Human
uuuuuuuuuuuuuuuucagcuugauu

SEQ ID NO: 671616 - RNA, 23 nt, Human
uuuuuuuuuuuuuuuuucagcuu

SEQ ID NO: 671617 - RNA, 26 nt, Human
uuuuuuuuuuuuuuuuuucagcuugg

SEQ ID NO: 671618 - RNA, 24 nt, Human
uuuuuuuuuuuuuuuuuuuuucag

SEQ ID NO: 671619 - RNA, 18 nt, Human
aaaagucaucccuccaaa

SEQ ID NO: 671620 - RNA, 21 nt, Human
aaccaccuucaugccuaaccc

SEQ ID NO: 671621 - RNA, 25 nt, Human
aaccaccuucaugccuaaccccuau

SEQ ID NO: 671622 - RNA, 19 nt, Human
aacugcacaacaauuaaac

SEQ ID NO: 671623 - RNA, 22 nt, Human
aacugcacaacaauuaaacccc

SEQ ID NO: 671624 - RNA, 20 nt, Human
aagggagcacagggaguugc

SEQ ID NO: 671625 - RNA, 20 nt, Human
aaggggcaccaaagagaaag

SEQ ID NO: 671626 - RNA, 24 nt, Human
aagucaucccuccaaaccuuucua

SEQ ID NO: 671627 - RNA, 19 nt, Human
aaguccccuuucccuaccu

SEQ ID NO: 671628 - RNA, 22 nt, Human
aauuccugcuccccacucccac

SEQ ID NO: 671629 - RNA, 22 nt, Human
aauuccugcuccccacucccac

SEQ ID NO: 671630 - RNA, 18 nt, Human
accccuccccuaccccca

SEQ ID NO: 671631 - RNA, 21 nt, Human
acucccaccccacaaaauccc

SEQ ID NO: 671632 - RNA, 25 nt, Human
agaaagaacccuuuucauuagcaga

SEQ ID NO: 671633 - RNA, 24 nt, Human
agccugaagggacagcagcauggg

SEQ ID NO: 671634 - RNA, 18 nt, Human
aggagaugcuaagagugg

SEQ ID NO: 671635 - RNA, 18 nt, Human
aggagaugcuaagagugg

SEQ ID NO: 671636 - RNA, 24 nt, Human
aucaaagccaauccaacagcucug

SEQ ID NO: 671637 - RNA, 26 nt, Human
auuccucuaucaaagccaauccaaca

SEQ ID NO: 671638 - RNA, 19 nt, Human
auugcaaccgggaugggag

SEQ ID NO: 671639 - RNA, 20 nt, Human
caaaaauagaaucucugccc

SEQ ID NO: 671640 - RNA, 23 nt, Human
caacaauuaaaccccaggaauac

SEQ ID NO: 671641 - RNA, 21 nt, Human
caauuccugcuccccacuccc

SEQ ID NO: 671642 - RNA, 21 nt, Human
cacacaccccuccccuacccc

SEQ ID NO: 671643 - RNA, 23 nt, Human
cacacaccccuccccuaccccca

SEQ ID NO: 671644 - RNA, 24 nt, Human
cacacaccccuccccuacccccaa

SEQ ID NO: 671645 - RNA, 18 nt, Human
cacaccccuccccuaccc

SEQ ID NO: 671646 - RNA, 28 nt, Human
caccccacaaaaucccaaaagugaaaau

SEQ ID NO: 671647 - RNA, 18 nt, Human
caccccuccccuaccccc

SEQ ID NO: 671648 - RNA, 21 nt, Human
caccccuccccuacccccaag

SEQ ID NO: 671649 - RNA, 31 nt, Human
cacccucuuuccccaugucgcgcacacacaa

SEQ ID NO: 671650 - RNA, 24 nt, Human
caccucuguccugauacauggaaa

SEQ ID NO: 671651 - RNA, 25 nt, Human
caggugcucccaucugcugggcuuc

SEQ ID NO: 671652 - RNA, 21 nt, Human
cauacuugcccccucccuaca

SEQ ID NO: 671653 - RNA, 23 nt, Human
cauguagcauuccugugcaugug

SEQ ID NO: 671654 - RNA, 21 nt, Human
ccaaaagugaaaauaaaucaa

SEQ ID NO: 671655 - RNA, 18 nt, Human
cccaaagagaagggagca

SEQ ID NO: 671656 - RNA, 22 nt, Human
cccacaaaaucccaaaagugaa

SEQ ID NO: 671657 - RNA, 23 nt, Human
cccaccccacaaaaucccaaaag

SEQ ID NO: 671658 - RNA, 25 nt, Human
cccacucccaccccacaaaauccca

SEQ ID NO: 671659 - RNA, 22 nt, Human
cccagguaugguccacuaccac

SEQ ID NO: 671660 - RNA, 21 nt, Human
ccccaagagaaagaacccuuu

SEQ ID NO: 671661 - RNA, 18 nt, Human
ccccaaguccaggugcuc

SEQ ID NO: 671662 - RNA, 22 nt, Human
ccccaugucgcgcacacacacc

SEQ ID NO: 671663 - RNA, 22 nt, Human
ccccgcgcggggccugccuccu

SEQ ID NO: 671664 - RNA, 21 nt, Human
ccccuauuuuccaaagguaag

SEQ ID NO: 671665 - RNA, 18 nt, Human
ccccuuucccuaccuguc

SEQ ID NO: 671666 - RNA, 25 nt, Human
ccgggggcaacagcgcugggccgag

SEQ ID NO: 671667 - RNA, 18 nt, Human
ccugucuaaauuucuggg

SEQ ID NO: 671668 - RNA, 19 nt, Human
ccugugcaugugagccuga

SEQ ID NO: 671669 - RNA, 22 nt, Human
cgccgcugacccugucccgcuc

SEQ ID NO: 671670 - RNA, 18 nt, Human
cgcgcggggccugccucc

SEQ ID NO: 671671 - RNA, 23 nt, Human
cuaccacaaguccccuuucccua

SEQ ID NO: 671672 - RNA, 24 nt, Human
cuacccccaaguccaggugcuccc

SEQ ID NO: 671673 - RNA, 20 nt, Human
cucccaccccacaaaauccc

SEQ ID NO: 671674 - RNA, 22 nt, Human
cucccugggccgaggaagcagc

SEQ ID NO: 671675 - RNA, 19 nt, Human
cuggccccaacuuguccac

SEQ ID NO: 671676 - RNA, 26 nt, Human
cugucccgcucccucagccgacguca

SEQ ID NO: 671677 - RNA, 22 nt, Human
cugucuugugcaaaugucaaaa

SEQ ID NO: 671678 - RNA, 21 nt, Human
cuuccgagauccccgcgcggg

SEQ ID NO: 671679 - RNA, 20 nt, Human
cuuguccaccuccugaccca

SEQ ID NO: 671680 - RNA, 19 nt, Human
gaaaauacuagaggagaug

SEQ ID NO: 671681 - RNA, 23 nt, Human
gaacuugcagcugacagaacuga

SEQ ID NO: 671682 - RNA, 24 nt, Human
gacugccaucaucucuggccccaa

SEQ ID NO: 671683 - RNA, 20 nt, Human
gagauccccgcgcggggccu

SEQ ID NO: 671684 - RNA, 22 nt, Human
gauaaggggcaccaaagagaaa

SEQ ID NO: 671685 - RNA, 29 nt, Human
ggagggaagcagcuggccauccucccggg

SEQ ID NO: 671686 - RNA, 19 nt, Human
ggagguagaggagagccag

SEQ ID NO: 671687 - RNA, 26 nt, Human
ggccgagugugcaggggggguucggg

SEQ ID NO: 671688 - RNA, 25 nt, Human
gggcggggaucucgggugagccugc

SEQ ID NO: 671689 - RNA, 21 nt, Human
gucaugucugagugcaauucc

SEQ ID NO: 671690 - RNA, 23 nt, Human
gugggagccacccucuuucccca

SEQ ID NO: 671691 - RNA, 24 nt, Human
gugugcucagaauagcugcagaaa

SEQ ID NO: 671692 - RNA, 22 nt, Human
uaaauuucuggguuguugucua

SEQ ID NO: 671693 - RNA, 18 nt, Human
uaagagaucccugucuaa

SEQ ID NO: 671694 - RNA, 24 nt, Human
uacccccaaguccaggugcuccca

SEQ ID NO: 671695 - RNA, 30 nt, Human
uacccccaaguccaggugcucccaucugcu

SEQ ID NO: 671696 - RNA, 23 nt, Human
uagaugucuucaccuucugucuc

SEQ ID NO: 671697 - RNA, 21 nt, Human
uauuuuauuuccuuggccuga

SEQ ID NO: 671698 - RNA, 19 nt, Human
ucaaaaauagaaucucugc

SEQ ID NO: 671699 - RNA, 19 nt, Human
uccacuaccacaagucccc

SEQ ID NO: 671700 - RNA, 22 nt, Human
ucccaccccacaaaaucccaaa

SEQ ID NO: 671701 - RNA, 23 nt, Human
ucccaccccacaaaaucccaaaa

SEQ ID NO: 671702 - RNA, 19 nt, Human
uccccacucccaccccaca

SEQ ID NO: 671703 - RNA, 26 nt, Human
uccccacucccaccccacaaaauccc

SEQ ID NO: 671704 - RNA, 20 nt, Human
uccccagguaugguccacua

SEQ ID NO: 671705 - RNA, 21 nt, Human
ucccccaagagaaagaacccu

SEQ ID NO: 671706 - RNA, 23 nt, Human
uccugacaugcuuucucccuggg

SEQ ID NO: 671707 - RNA, 22 nt, Human
uccugcuccccacucccacccc

SEQ ID NO: 671708 - RNA, 18 nt, Human
uccuucgccgcugacccu

SEQ ID NO: 671709 - RNA, 28 nt, Human
ucgcgcacacacaccccuccccuacccc

SEQ ID NO: 671710 - RNA, 24 nt, Human
ucuacaauuggaaaugccugagac

SEQ ID NO: 671711 - RNA, 23 nt, Human
ucucuggccccaacuuguccacc

SEQ ID NO: 671712 - RNA, 21 nt, Human
ucugucuccuugcggugggag

SEQ ID NO: 671713 - RNA, 21 nt, Human
ugaagggacagcagcauggga

SEQ ID NO: 671714 - RNA, 24 nt, Human
ugaagggacagcagcaugggagca

SEQ ID NO: 671715 - RNA, 19 nt, Human
ugacacacacauuuccccc

SEQ ID NO: 671716 - RNA, 23 nt, Human
ugacacacacauuucccccaaga

SEQ ID NO: 671717 - RNA, 21 nt, Human
ugacccugucccgcucccuca

SEQ ID NO: 671718 - RNA, 25 nt, Human
ugacggugugugugguguaauguuu

SEQ ID NO: 671719 - RNA, 20 nt, Human
ugagccugaagggacagcag

SEQ ID NO: 671720 - RNA, 22 nt, Human
ugauuuacuaaaagucaucccu

SEQ ID NO: 671721 - RNA, 18 nt, Human
ugcaggggggguucgggg

SEQ ID NO: 671722 - RNA, 22 nt, Human
ugcaggggggguucggggcggg

SEQ ID NO: 671723 - RNA, 18 nt, Human
ugcaguggaugauaacca

SEQ ID NO: 671724 - RNA, 18 nt, Human
ugccaucaucucuggccc

SEQ ID NO: 671725 - RNA, 19 nt, Human
ugccaucaucucuggcccc

SEQ ID NO: 671726 - RNA, 23 nt, Human
uggacugccaucaucucuggccc

SEQ ID NO: 671727 - RNA, 18 nt, Human
ugggccgaggaagcagca

SEQ ID NO: 671728 - RNA, 26 nt, Human
ugucaaaaauagaaucucugcccaaa

SEQ ID NO: 671729 - RNA, 22 nt, Human
ugugaugacgguguguguggug

SEQ ID NO: 671730 - RNA, 23 nt, Human
uuccugcuccccacucccacccc

SEQ ID NO: 671731 - RNA, 25 nt, Human
uuuaaugcuauuuaauaacaaaacc

SEQ ID NO: 671732 - RNA, 22 nt, Human
uuuacuaaaagucaucccucca

SEQ ID NO: 671733 - RNA, 23 nt, Human
uuuuuuuuuuuuuuuuuuuaagg

SEQ ID NO: 671734 - RNA, 28 nt, Human
caacaacaacgacggcggcagcggcagg

SEQ ID NO: 671735 - RNA, 19 nt, Human
caccgagcacaacaacaac

SEQ ID NO: 671736 - RNA, 20 nt, Human
cggcggcgggaaggggacgg

SEQ ID NO: 671737 - RNA, 26 nt, Human
cucagcgcaccgagcacaacaacaac

SEQ ID NO: 671738 - RNA, 18 nt, Human
gcggcggcgggaagggga

SEQ ID NO: 671739 - RNA, 21 nt, Human
ggcggcagcggcagcggcagc

SEQ ID NO: 671740 - RNA, 22 nt, Human
ggcggcagcggcagcggcagcc

SEQ ID NO: 671741 - RNA, 19 nt, Human
aaaaacagaaucucugccc

SEQ ID NO: 671742 - RNA, 23 nt, Human
aacagcacugguccaagugugcg

SEQ ID NO: 671743 - RNA, 19 nt, Human
aaccaagaagggaagcagc

SEQ ID NO: 671744 - RNA, 22 nt, Human
aaccaagaagggaagcagcugg

SEQ ID NO: 671745 - RNA, 25 nt, Human
aaccacccucaugccuaaccccuau

SEQ ID NO: 671746 - RNA, 22 nt, Human
aacuuguccaccuccugaccga

SEQ ID NO: 671747 - RNA, 20 nt, Human
aagggagcacagggaguugc

SEQ ID NO: 671748 - RNA, 21 nt, Human
aaugcuauuuaacaacaaaau

SEQ ID NO: 671749 - RNA, 22 nt, Human
aauuccugcuccccacucccac

SEQ ID NO: 671750 - RNA, 22 nt, Human
aauuccugcuccccacucccac

SEQ ID NO: 671751 - RNA, 21 nt, Human
acaaguccccuuucccuaccu

SEQ ID NO: 671752 - RNA, 22 nt, Human
accccuauuuuccaaagauaag

SEQ ID NO: 671753 - RNA, 25 nt, Human
aggaagaacccuuuucauuugcaga

SEQ ID NO: 671754 - RNA, 19 nt, Human
aggagcaccagagagaaag

SEQ ID NO: 671755 - RNA, 19 nt, Human
agggcagaagguggggugg

SEQ ID NO: 671756 - RNA, 19 nt, Human
agguagaggagagccaggu

SEQ ID NO: 671757 - RNA, 24 nt, Human
aucaaagccaauccaacagcucug

SEQ ID NO: 671758 - RNA, 19 nt, Human
caaaaacagaaucucugcc

SEQ ID NO: 671759 - RNA, 27 nt, Human
caacugucaaaaacagaaucucugccc

SEQ ID NO: 671760 - RNA, 23 nt, Human
caagucacacacacaccccuccc

SEQ ID NO: 671761 - RNA, 21 nt, Human
caauuccugcuccccacuccc

SEQ ID NO: 671762 - RNA, 21 nt, Human
cacacaccccuccccuacccc

SEQ ID NO: 671763 - RNA, 23 nt, Human
cacacaccccuccccuaccccua

SEQ ID NO: 671764 - RNA, 18 nt, Human
cacaccccuccccuaccc

SEQ ID NO: 671765 - RNA, 18 nt, Human
caccccuccccuaccccu

SEQ ID NO: 671766 - RNA, 19 nt, Human
caccccuccccuaccccua

SEQ ID NO: 671767 - RNA, 25 nt, Human
caggugcuuccaucugcugggcuuc

SEQ ID NO: 671768 - RNA, 24 nt, Human
caucucuguccugauacauggaaa

SEQ ID NO: 671769 - RNA, 22 nt, Human
caugccuaaccccuauuuucca

SEQ ID NO: 671770 - RNA, 27 nt, Human
cauuccucuaucaaagccaauccaaca

SEQ ID NO: 671771 - RNA, 26 nt, Human
ccacuaccacaaguccccuuucccua

SEQ ID NO: 671772 - RNA, 18 nt, Human
cccaaagagaagggagca

SEQ ID NO: 671773 - RNA, 25 nt, Human
cccacucccaccccacaaaauccua

SEQ ID NO: 671774 - RNA, 23 nt, Human
ccccagguauggcccacuaccac

SEQ ID NO: 671775 - RNA, 19 nt, Human
cccccaagaggaagaaccc

SEQ ID NO: 671776 - RNA, 21 nt, Human
ccccgcgcagggccugccucc

SEQ ID NO: 671777 - RNA, 18 nt, Human
ccccuaaguccaggugcu

SEQ ID NO: 671778 - RNA, 18 nt, Human
ccccuuucccuaccuguc

SEQ ID NO: 671779 - RNA, 20 nt, Human
cccugggccaaggaagcaac

SEQ ID NO: 671780 - RNA, 18 nt, Human
ccucacggugggagccgc

SEQ ID NO: 671781 - RNA, 18 nt, Human
ccugucuaaauuucuggg

SEQ ID NO: 671782 - RNA, 20 nt, Human
ccugugagugugagaaugaa

SEQ ID NO: 671783 - RNA, 20 nt, Human
cgcccucucuuuccccaagu

SEQ ID NO: 671784 - RNA, 18 nt, Human
cgcgcagggccugccucc

SEQ ID NO: 671785 - RNA, 21 nt, Human
cgggagggcagaagguggggu

SEQ ID NO: 671786 - RNA, 19 nt, Human
cugaccccaacuuguccac

SEQ ID NO: 671787 - RNA, 23 nt, Human
cugugagugugagaaugaaggga

SEQ ID NO: 671788 - RNA, 21 nt, Human
gaacugacacacagauuuccc

SEQ ID NO: 671789 - RNA, 23 nt, Human
gaacuugcagcugacagaacuga

SEQ ID NO: 671790 - RNA, 20 nt, Human
gaagguggggugggaggggg

SEQ ID NO: 671791 - RNA, 20 nt, Human
gaccccaacuuguccaccuc

SEQ ID NO: 671792 - RNA, 24 nt, Human
gacugccaucaucucugaccccaa

SEQ ID NO: 671793 - RNA, 20 nt, Human
gaggagcaccagagagaaag

SEQ ID NO: 671794 - RNA, 19 nt, Human
gagugugagaaugaaggga

SEQ ID NO: 671795 - RNA, 22 nt, Human
gaugaggagcaccagagagaaa

SEQ ID NO: 671796 - RNA, 24 nt, Human
gcuggacugccaucaucucugacc

SEQ ID NO: 671797 - RNA, 19 nt, Human
ggagguagaggagagccag

SEQ ID NO: 671798 - RNA, 22 nt, Human
ggcagaagguggggugggaggg

SEQ ID NO: 671799 - RNA, 20 nt, Human
gggugggagggggaccucgg

SEQ ID NO: 671800 - RNA, 23 nt, Human
gggugggagggggaccucgggug

SEQ ID NO: 671801 - RNA, 18 nt, Human
gguagaggagagccaggu

SEQ ID NO: 671802 - RNA, 21 nt, Human
gucaugucugagugcaauucc

SEQ ID NO: 671803 - RNA, 21 nt, Human
guccccuuucccuaccugucu

SEQ ID NO: 671804 - RNA, 18 nt, Human
gucuucaccuucugucuc

SEQ ID NO: 671805 - RNA, 18 nt, Human
gugcuuagaauagcugca

SEQ ID NO: 671806 - RNA, 23 nt, Human
guggggugggagggggaccucgg

SEQ ID NO: 671807 - RNA, 24 nt, Human
gugugcuuagaauagcugcagaaa

SEQ ID NO: 671808 - RNA, 18 nt, Human
guuugugagugagauugc

SEQ ID NO: 671809 - RNA, 19 nt, Human
uaaauuccaagguaggggu

SEQ ID NO: 671810 - RNA, 22 nt, Human
uaaauuucuggguuggugucua

SEQ ID NO: 671811 - RNA, 22 nt, Human
uaaccacccucaugccuaaccc

SEQ ID NO: 671812 - RNA, 18 nt, Human
uaagagaucccugucuaa

SEQ ID NO: 671813 - RNA, 24 nt, Human
uaccccuaaguccaggugcuucca

SEQ ID NO: 671814 - RNA, 23 nt, Human
uagcagcugcaguggauaaccaa

SEQ ID NO: 671815 - RNA, 20 nt, Human
ucaaaaacagaaucucugcu

SEQ ID NO: 671816 - RNA, 26 nt, Human
ucacacacacaccccuccccuacccc

SEQ ID NO: 671817 - RNA, 24 nt, Human
uccaggugcuuccaucugcugggc

SEQ ID NO: 671818 - RNA, 19 nt, Human
uccccacucccaccccaca

SEQ ID NO: 671819 - RNA, 25 nt, Human
uccccacucccaccccacaaaaucc

SEQ ID NO: 671820 - RNA, 20 nt, Human
uccccagguauggcccacua

SEQ ID NO: 671821 - RNA, 21 nt, Human
ucccccaagaggaagaacccu

SEQ ID NO: 671822 - RNA, 19 nt, Human
uccccgcgcagggccugcc

SEQ ID NO: 671823 - RNA, 23 nt, Human
uccugacaugcuuucucccuggg

SEQ ID NO: 671824 - RNA, 25 nt, Human
uccuucgccgcugaccgcuggccac

SEQ ID NO: 671825 - RNA, 24 nt, Human
ucugcaauuggaaaugccugaagc

SEQ ID NO: 671826 - RNA, 21 nt, Human
ugaagcuuauuaaauuccaag

SEQ ID NO: 671827 - RNA, 21 nt, Human
ugaagggacagcagcauggga

SEQ ID NO: 671828 - RNA, 23 nt, Human
ugacacacagauuucccccaaga

SEQ ID NO: 671829 - RNA, 21 nt, Human
ugccaucaucucugaccccaa

SEQ ID NO: 671830 - RNA, 24 nt, Human
uggacugccaucaucucugacccu

SEQ ID NO: 671831 - RNA, 19 nt, Human
ugggagaaaagaagugugg

SEQ ID NO: 671832 - RNA, 24 nt, Human
ugggaugggagaaaagaagugugg

SEQ ID NO: 671833 - RNA, 18 nt, Human
ugggccaaggaagcaaca

SEQ ID NO: 671834 - RNA, 18 nt, Human
uggggugggagggggacc

SEQ ID NO: 671835 - RNA, 23 nt, Human
uggggugggagggggaccucggg

SEQ ID NO: 671836 - RNA, 25 nt, Human
uggggugggagggggaccucgggug

SEQ ID NO: 671837 - RNA, 18 nt, Human
ugggucucuuuucguccc

SEQ ID NO: 671838 - RNA, 26 nt, Human
ugucaaaaacagaaucucugcccaaa

SEQ ID NO: 671839 - RNA, 19 nt, Human
uuagaauagcugcagaaau

SEQ ID NO: 671840 - RNA, 19 nt, Human
uucaccuucugucuccuca

SEQ ID NO: 671841 - RNA, 23 nt, Human
uuccugcuccccacucccacccc

SEQ ID NO: 671842 - RNA, 20 nt, Human
uuggaaaugccugaagcuua

SEQ ID NO: 671843 - RNA, 21 nt, Human
aaaaaaacacaaaacaaaagg

SEQ ID NO: 671844 - RNA, 26 nt, Human
aaaaaaacacaaaacaaaagggagca

SEQ ID NO: 671845 - RNA, 21 nt, Human
aaaaacacaaaacaaaaggga

SEQ ID NO: 671846 - RNA, 26 nt, Human
aaaaacacaaaacaaaagggagcagu

SEQ ID NO: 671847 - RNA, 22 nt, Human
aaacaaaagggagcagucuugg

SEQ ID NO: 671848 - RNA, 24 nt, Human
aaaccugcccccacuuauuuuucc

SEQ ID NO: 671849 - RNA, 22 nt, Human
aagagcacuuguugggagaccc

SEQ ID NO: 671850 - RNA, 21 nt, Human
aagcguguguacacaugagca

SEQ ID NO: 671851 - RNA, 21 nt, Human
acaugugacugaacaugaaga

SEQ ID NO: 671852 - RNA, 21 nt, Human
acccaaaucagcccagaacuc

SEQ ID NO: 671853 - RNA, 20 nt, Human
accccugcuggacaggaacu

SEQ ID NO: 671854 - RNA, 21 nt, Human
acgcaggagaggggaggaugc

SEQ ID NO: 671855 - RNA, 20 nt, Human
agaaaaaggucuguuuccca

SEQ ID NO: 671856 - RNA, 19 nt, Human
agaccccugcuggacagga

SEQ ID NO: 671857 - RNA, 24 nt, Human
agagcacuuguugggagaccccug

SEQ ID NO: 671858 - RNA, 21 nt, Human
agaggagcugcagggguugcc

SEQ ID NO: 671859 - RNA, 21 nt, Human
agaggagcugcagggguugcc

SEQ ID NO: 671860 - RNA, 18 nt, Human
agaggguguugcauggga

SEQ ID NO: 671861 - RNA, 22 nt, Human
agcacuuguugggagaccccug

SEQ ID NO: 671862 - RNA, 19 nt, Human
agcucccaaaggaagcaaa

SEQ ID NO: 671863 - RNA, 21 nt, Human
aggcagaggagcugcaggggu

SEQ ID NO: 671864 - RNA, 23 nt, Human
aggcagaggagcugcagggguug

SEQ ID NO: 671865 - RNA, 18 nt, Human
aggcuccagccuggccag

SEQ ID NO: 671866 - RNA, 21 nt, Human
agggacaccaccucccacccc

SEQ ID NO: 671867 - RNA, 23 nt, Human
agggggagccacaugugagaaag

SEQ ID NO: 671868 - RNA, 25 nt, Human
caacuauccacuggaagcagcucuc

SEQ ID NO: 671869 - RNA, 18 nt, Human
caagagacaccacagugu

SEQ ID NO: 671870 - RNA, 19 nt, Human
cacagugugaaagggacac

SEQ ID NO: 671871 - RNA, 21 nt, Human
caccccauagguccaucuguc

SEQ ID NO: 671872 - RNA, 23 nt, Human
caccucccaccccauagguccau

SEQ ID NO: 671873 - RNA, 19 nt, Human
caccuuucuccuccucccg

SEQ ID NO: 671874 - RNA, 20 nt, Human
caccuuucuccuccucccgu

SEQ ID NO: 671875 - RNA, 18 nt, Human
cagagcacaaaggcagag

SEQ ID NO: 671876 - RNA, 26 nt, Human
caggguaggguacauauggcucuguc

SEQ ID NO: 671877 - RNA, 21 nt, Human
caugagcauguucagugggca

SEQ ID NO: 671878 - RNA, 19 nt, Human
caugauuuaagggaagaaa

SEQ ID NO: 671879 - RNA, 22 nt, Human
cauguauuuacaagagaugaga

SEQ ID NO: 671880 - RNA, 19 nt, Human
ccaaaucagcccagaacuc

SEQ ID NO: 671881 - RNA, 19 nt, Human
ccaccuuucuccuccuccc

SEQ ID NO: 671882 - RNA, 21 nt, Human
ccaugagaggggccggggucc

SEQ ID NO: 671883 - RNA, 23 nt, Human
cccaaaccccaccccugucucuu

SEQ ID NO: 671884 - RNA, 20 nt, Human
cccaaaucagcccagaacuc

SEQ ID NO: 671885 - RNA, 22 nt, Human
cccaccaaacaugaauugggga

SEQ ID NO: 671886 - RNA, 19 nt, Human
ccccaaaccccaccccugu

SEQ ID NO: 671887 - RNA, 21 nt, Human
ccccaggcccggccgcuccuc

SEQ ID NO: 671888 - RNA, 20 nt, Human
ccccccucccuucuccucca

SEQ ID NO: 671889 - RNA, 20 nt, Human
ccccgcuccccccucccuuc

SEQ ID NO: 671890 - RNA, 18 nt, Human
ccccgggccucaaggccc

SEQ ID NO: 671891 - RNA, 20 nt, Human
ccccucaaaaaaacacaaaa

SEQ ID NO: 671892 - RNA, 21 nt, Human
ccccucaaaaaaacacaaaac

SEQ ID NO: 671893 - RNA, 19 nt, Human
ccccucccuucuccuccac

SEQ ID NO: 671894 - RNA, 18 nt, Human
ccccugcuggacaggaac

SEQ ID NO: 671895 - RNA, 19 nt, Human
cccggcuccccggcucucc

SEQ ID NO: 671896 - RNA, 24 nt, Human
cccggggcggcggcagccacggga

SEQ ID NO: 671897 - RNA, 23 nt, Human
cccuacuggccuguccucccuca

SEQ ID NO: 671898 - RNA, 24 nt, Human
cccucccuucuccuccaccuuucc

SEQ ID NO: 671899 - RNA, 22 nt, Human
cccuccucucucgcuuccccca

SEQ ID NO: 671900 - RNA, 23 nt, Human
cccugcccuuccccucucccuuu

SEQ ID NO: 671901 - RNA, 21 nt, Human
cccuuccccucucccuuuccc

SEQ ID NO: 671902 - RNA, 21 nt, Human
ccgcuccuccccgcucccccc

SEQ ID NO: 671903 - RNA, 23 nt, Human
ccucccgucccuccuccccucga

SEQ ID NO: 671904 - RNA, 24 nt, Human
ccucccgucccuccuccccucgaa

SEQ ID NO: 671905 - RNA, 23 nt, Human
ccuccucucucgcuucccccaaa

SEQ ID NO: 671906 - RNA, 21 nt, Human
ccucgaauccaggcuccagcc

SEQ ID NO: 671907 - RNA, 21 nt, Human
cgaaaagaaugagcucccaaa

SEQ ID NO: 671908 - RNA, 25 nt, Human
cgcuccccccucccuucuccuccaa

SEQ ID NO: 671909 - RNA, 18 nt, Human
cggcggcagccacgggag

SEQ ID NO: 671910 - RNA, 18 nt, Human
cggcuccccggcucuccc

SEQ ID NO: 671911 - RNA, 20 nt, Human
cguguguacacaugagcaug

SEQ ID NO: 671912 - RNA, 22 nt, Human
cuacccaaacacgcucaagggc

SEQ ID NO: 671913 - RNA, 21 nt, Human
cucaagggcagacccaugacc

SEQ ID NO: 671914 - RNA, 22 nt, Human
cuccaaaccugcccccacuuau

SEQ ID NO: 671915 - RNA, 21 nt, Human
cuccccgggccucaaggcccc

SEQ ID NO: 671916 - RNA, 21 nt, Human
cuccccuccucucucgcuucc

SEQ ID NO: 671917 - RNA, 18 nt, Human
cuccccucgaauccaggc

SEQ ID NO: 671918 - RNA, 19 nt, Human
cuccuccccgcuccccccu

SEQ ID NO: 671919 - RNA, 19 nt, Human
cucgaauccaggcuccagc

SEQ ID NO: 671920 - RNA, 24 nt, Human
cucgcuucccccaaaccccacccc

SEQ ID NO: 671921 - RNA, 18 nt, Human
cugaguccccugcccuuc

SEQ ID NO: 671922 - RNA, 20 nt, Human
cugugacaaggagagggugu

SEQ ID NO: 671923 - RNA, 19 nt, Human
cuucccagcuggggauggg

SEQ ID NO: 671924 - RNA, 20 nt, Human
cuuccuacggcccccgcggc

SEQ ID NO: 671925 - RNA, 22 nt, Human
cuuggcgaaaagaaugagcucc

SEQ ID NO: 671926 - RNA, 20 nt, Human
gaaaagaaugagcucccaaa

SEQ ID NO: 671927 - RNA, 21 nt, Human
gaaagggacaccaccucccac

SEQ ID NO: 671928 - RNA, 19 nt, Human
gaaucugagcagaaaugga

SEQ ID NO: 671929 - RNA, 21 nt, Human
gaaugcaauggagaugggggg

SEQ ID NO: 671930 - RNA, 20 nt, Human
gagagacccaaaucagccca

SEQ ID NO: 671931 - RNA, 21 nt, Human
gagagcacaugugacugaaca

SEQ ID NO: 671932 - RNA, 20 nt, Human
gagcacaugugacugaacau

SEQ ID NO: 671933 - RNA, 20 nt, Human
gagcagaaauggagauucug

SEQ ID NO: 671934 - RNA, 20 nt, Human
gauuuuguggggaggagggg

SEQ ID NO: 671935 - RNA, 21 nt, Human
gcagugagcagcuucaagcca

SEQ ID NO: 671936 - RNA, 18 nt, Human
gccccaggcccggccgcu

SEQ ID NO: 671937 - RNA, 24 nt, Human
gccccggagaagcagggaagguug

SEQ ID NO: 671938 - RNA, 20 nt, Human
gcucccaaaggaagcaaaau

SEQ ID NO: 671939 - RNA, 22 nt, Human
gcuccccccucccuucuccucc

SEQ ID NO: 671940 - RNA, 24 nt, Human
gcuccccccucccuucuccuccac

SEQ ID NO: 671941 - RNA, 21 nt, Human
gcuuccugaguccccugcccu

SEQ ID NO: 671942 - RNA, 22 nt, Human
ggacaggaacagagcacaaagg

SEQ ID NO: 671943 - RNA, 20 nt, Human
ggcagaggagcugcaggggu

SEQ ID NO: 671944 - RNA, 18 nt, Human
ggcuccagccuggccagg

SEQ ID NO: 671945 - RNA, 21 nt, Human
gggaaucugagcagaaaugga

SEQ ID NO: 671946 - RNA, 18 nt, Human
gggacacuuuuccugggg

SEQ ID NO: 671947 - RNA, 18 nt, Human
gggcgagggccccggaga

SEQ ID NO: 671948 - RNA, 21 nt, Human
ggggaggagggggcgagggcc

SEQ ID NO: 671949 - RNA, 23 nt, Human
gggggcagggguagcuguugggg

SEQ ID NO: 671950 - RNA, 24 nt, Human
ggggggcagggguagcuguugggg

SEQ ID NO: 671951 - RNA, 18 nt, Human
gggguagcuguuggggag

SEQ ID NO: 671952 - RNA, 19 nt, Human
guacaugaaugcaauggag

SEQ ID NO: 671953 - RNA, 20 nt, Human
guacauggaggguacacagg

SEQ ID NO: 671954 - RNA, 22 nt, Human
gugaggcugcugaggaggcagc

SEQ ID NO: 671955 - RNA, 23 nt, Human
gugauacaaaauuacaugaagca

SEQ ID NO: 671956 - RNA, 19 nt, Human
guguguacacaugagcaug

SEQ ID NO: 671957 - RNA, 21 nt, Human
uaagagggugccggggaggcg

SEQ ID NO: 671958 - RNA, 21 nt, Human
uacccaaacacgcucaagggc

SEQ ID NO: 671959 - RNA, 21 nt, Human
uacuggccuguccucccucac

SEQ ID NO: 671960 - RNA, 21 nt, Human
uaggaaagacaugacucagca

SEQ ID NO: 671961 - RNA, 23 nt, Human
uaugagagacccaaaucagccca

SEQ ID NO: 671962 - RNA, 28 nt, Human
ucaaaaaaacacaaaacaaaagggagca

SEQ ID NO: 671963 - RNA, 18 nt, Human
ucaagccagguacgaacu

SEQ ID NO: 671964 - RNA, 19 nt, Human
ucaagccagguacgaacua

SEQ ID NO: 671965 - RNA, 19 nt, Human
ucacagggggacauguauu

SEQ ID NO: 671966 - RNA, 21 nt, Human
uccacuggaagcagcucucca

SEQ ID NO: 671967 - RNA, 20 nt, Human
ucccagagguaugagagacc

SEQ ID NO: 671968 - RNA, 24 nt, Human
ucccagagguaugagagacccaaa

SEQ ID NO: 671969 - RNA, 18 nt, Human
ucccagcuggggaugggg

SEQ ID NO: 671970 - RNA, 18 nt, Human
ucccccaaaccccacccc

SEQ ID NO: 671971 - RNA, 24 nt, Human
uccccgcuccccccucccuucucc

SEQ ID NO: 671972 - RNA, 20 nt, Human
uccccggggcggcggcagcc

SEQ ID NO: 671973 - RNA, 18 nt, Human
uccccugcccuuccccuc

SEQ ID NO: 671974 - RNA, 20 nt, Human
ucccuccuccccucgaaucc

SEQ ID NO: 671975 - RNA, 24 nt, Human
ucccugauuuuguggggaggaggg

SEQ ID NO: 671976 - RNA, 18 nt, Human
uccuccccgcuccccccu

SEQ ID NO: 671977 - RNA, 19 nt, Human
uccucccgucccuccuccc

SEQ ID NO: 671978 - RNA, 19 nt, Human
uccucucucgcuuccccca

SEQ ID NO: 671979 - RNA, 20 nt, Human
ucucccuuucccucccccua

SEQ ID NO: 671980 - RNA, 22 nt, Human
ucucccuuucccucccccuacu

SEQ ID NO: 671981 - RNA, 18 nt, Human
ucuccuccaccuuucucc

SEQ ID NO: 671982 - RNA, 20 nt, Human
ugacucagcaugcuagacaa

SEQ ID NO: 671983 - RNA, 21 nt, Human
ugagaaaguauagaagggcaa

SEQ ID NO: 671984 - RNA, 21 nt, Human
ugagagacccaaaucagccca

SEQ ID NO: 671985 - RNA, 18 nt, Human
ugagcagcuucaagccag

SEQ ID NO: 671986 - RNA, 21 nt, Human
ugaggcugcugaggaggcagc

SEQ ID NO: 671987 - RNA, 25 nt, Human
ugcacagagcagaggcaaggagcau

SEQ ID NO: 671988 - RNA, 25 nt, Human
uggaaagagauuaugacaguggaga

SEQ ID NO: 671989 - RNA, 23 nt, Human
uggaaagagcacuuguugggaga

SEQ ID NO: 671990 - RNA, 18 nt, Human
uggagaaaaggagaggcc

SEQ ID NO: 671991 - RNA, 21 nt, Human
uggagauggggggaaucugag

SEQ ID NO: 671992 - RNA, 19 nt, Human
uggcgaaaagaaugagcuc

SEQ ID NO: 671993 - RNA, 23 nt, Human
uggcgaaaagaaugagcucccaa

SEQ ID NO: 671994 - RNA, 21 nt, Human
ugggaagagaaagaugcagug

SEQ ID NO: 671995 - RNA, 22 nt, Human
ugggagaagaugauugugagug

SEQ ID NO: 671996 - RNA, 19 nt, Human
uggggaggagggggcgagg

SEQ ID NO: 671997 - RNA, 23 nt, Human
uggggaggagggggcgagggccc

SEQ ID NO: 671998 - RNA, 19 nt, Human
uguggauggccccaccaaa

SEQ ID NO: 671999 - RNA, 26 nt, Human
uguggauggccccaccaaacaugaau

SEQ ID NO: 672000 - RNA, 18 nt, Human
uguggggaggagggggcg

SEQ ID NO: 672001 - RNA, 21 nt, Human
uguugggagaccccugcugga

SEQ ID NO: 672002 - RNA, 20 nt, Human
uuccugaguccccugcccuu

SEQ ID NO: 672003 - RNA, 22 nt, Human
uuccugaguccccugcccuucc

SEQ ID NO: 672004 - RNA, 18 nt, Human
uuucuccuccucccgucc

SEQ ID NO: 672005 - RNA, 19 nt, Human
aagcgcuucagcugcacag

SEQ ID NO: 672006 - RNA, 23 nt, Human
aggagguggugcggggacccgag

SEQ ID NO: 672007 - RNA, 20 nt, Human
aggcagcaggagguggugcg

SEQ ID NO: 672008 - RNA, 23 nt, Human
aggcagcaggagguggugcgggg

SEQ ID NO: 672009 - RNA, 19 nt, Human
agggcgcuauuuuccgaaa

SEQ ID NO: 672010 - RNA, 18 nt, Human
aguaauaaauauaaaaga

SEQ ID NO: 672011 - RNA, 21 nt, Human
auaaggcaaaaauaaacaaaa

SEQ ID NO: 672012 - RNA, 21 nt, Human
cccgaggcgccucguacccgg

SEQ ID NO: 672013 - RNA, 24 nt, Human
cccgcuacacacaaagcgcuucag

SEQ ID NO: 672014 - RNA, 21 nt, Human
cgaggcgccucguacccggcc

SEQ ID NO: 672015 - RNA, 21 nt, Human
cgggaaggcagcaggaggugg

SEQ ID NO: 672016 - RNA, 23 nt, Human
cuggaaaagcuucgggagcggcg

SEQ ID NO: 672017 - RNA, 21 nt, Human
uaucaaaacaauacugucagu

SEQ ID NO: 672018 - RNA, 25 nt, Human
ucaguaauaaauauaaaagacaaaa

SEQ ID NO: 672019 - RNA, 24 nt, Human
ucauucauucaauauuuauuuauu

SEQ ID NO: 672020 - RNA, 24 nt, Human
ucuguaucaaaacaauaccggggc

SEQ ID NO: 672021 - RNA, 24 nt, Human
uucgggagcggcgacgggaaggca

SEQ ID NO: 672022 - RNA, 22 nt, Human
acucacucagccccuuggcauc

SEQ ID NO: 672023 - RNA, 22 nt, Human
aguaacugcuugaguaacuaca

SEQ ID NO: 672024 - RNA, 23 nt, Human
caaaaauacccaaacuauggcug

SEQ ID NO: 672025 - RNA, 19 nt, Human
caccccucccgccuugcuu

SEQ ID NO: 672026 - RNA, 25 nt, Human
cagcucaggcccuggcgcucuccgg

SEQ ID NO: 672027 - RNA, 23 nt, Human
cagcuccggccaccccucccgcc

SEQ ID NO: 672028 - RNA, 27 nt, Human
ccaaaaauacccaaacuauggcugcac

SEQ ID NO: 672029 - RNA, 26 nt, Human
cccccagaacauguaguugaacucac

SEQ ID NO: 672030 - RNA, 20 nt, Human
ccccuuggcaucaguuucug

SEQ ID NO: 672031 - RNA, 18 nt, Human
ccgcccgggcuccuccuc

SEQ ID NO: 672032 - RNA, 21 nt, Human
ccucgcccgcccgggcuccuc

SEQ ID NO: 672033 - RNA, 25 nt, Human
ccucgcccgcccgggcuccuccucc

SEQ ID NO: 672034 - RNA, 21 nt, Human
cggcagcucaggcccuggcgc

SEQ ID NO: 672035 - RNA, 20 nt, Human
cggccgccccucgcccgccc

SEQ ID NO: 672036 - RNA, 23 nt, Human
cggccgccccucgcccgcccggg

SEQ ID NO: 672037 - RNA, 18 nt, Human
gccaccccucccgccuug

SEQ ID NO: 672038 - RNA, 18 nt, Human
gcccagggagagagcgcg

SEQ ID NO: 672039 - RNA, 21 nt, Human
gcccccagaacauguaguuga

SEQ ID NO: 672040 - RNA, 21 nt, Human
ggcaucaguuucuguaauccu

SEQ ID NO: 672041 - RNA, 19 nt, Human
gggcccccagaacauguag

SEQ ID NO: 672042 - RNA, 19 nt, Human
uaaauaacuuuucauguca

SEQ ID NO: 672043 - RNA, 24 nt, Human
uaaauaacuuuucaugucauaaaa

SEQ ID NO: 672044 - RNA, 21 nt, Human
uauaaaccaaaaauacccaaa

SEQ ID NO: 672045 - RNA, 21 nt, Human
ucugcacucacucacaggcgc

SEQ ID NO: 672046 - RNA, 22 nt, Human
ucuguuucaacacagcuuccuu

SEQ ID NO: 672047 - RNA, 24 nt, Human
ugagggcauauaaaccaaaaauac

SEQ ID NO: 672048 - RNA, 21 nt, Human
ugccagccgccgcagcuccgg

SEQ ID NO: 672049 - RNA, 25 nt, Human
uuauucauaccaguuuauuguaggu

SEQ ID NO: 672050 - RNA, 22 nt, Human
uucaaaaaauuuauagcauaaa

SEQ ID NO: 672051 - RNA, 18 nt, Human
uugaacucacucagcccc

SEQ ID NO: 672052 - RNA, 24 nt, Human
uuggcaucaguuucuguaauccuu

SEQ ID NO: 672053 - RNA, 18 nt, Human
aacacugugauugcccuu

SEQ ID NO: 672054 - RNA, 23 nt, Human
aacacugugauugcccuucacau

SEQ ID NO: 672055 - RNA, 25 nt, Human
aacuucaaugaagaauuuuccaaca

SEQ ID NO: 672056 - RNA, 19 nt, Human
auaggagcagccugcaaca

SEQ ID NO: 672057 - RNA, 20 nt, Human
auuucagcaugucuucuuuu

SEQ ID NO: 672058 - RNA, 22 nt, Human
cagcaugucuucuuuuaacacu

SEQ ID NO: 672059 - RNA, 23 nt, Human
caguagaggaaaaagaguccgga

SEQ ID NO: 672060 - RNA, 22 nt, Human
cugugauugcccuucacaugcc

SEQ ID NO: 672061 - RNA, 20 nt, Human
gauugcccuucacaugccac

SEQ ID NO: 672062 - RNA, 20 nt, Human
gcuguaaagcuuuauuggga

SEQ ID NO: 672063 - RNA, 21 nt, Human
ugauaggaacuaaacggucuc

SEQ ID NO: 672064 - RNA, 18 nt, Human
ugccacagaugauaggaa

SEQ ID NO: 672065 - RNA, 18 nt, Human
ugccacagaugauaggaa

SEQ ID NO: 672066 - RNA, 25 nt, Human
acacagcacugccucacagcucccu

SEQ ID NO: 672067 - RNA, 25 nt, Human
caaauuuccaacauaggagcagccu

SEQ ID NO: 672068 - RNA, 23 nt, Human
caguagaggaaaaagaguccgga

SEQ ID NO: 672069 - RNA, 19 nt, Human
cggcaggaaccacacagca

SEQ ID NO: 672070 - RNA, 22 nt, Human
cugccucacagcucccuggcgu

SEQ ID NO: 672071 - RNA, 20 nt, Human
gcuguaaagcuuuauuggga

SEQ ID NO: 672072 - RNA, 28 nt, Human
uuuuaaugaacaaauuuccaacauagga

SEQ ID NO: 672073 - RNA, 25 nt, Human
caaauuuccaacauaggagcagccu

SEQ ID NO: 672074 - RNA, 23 nt, Human
caguagaggaaaaagaguccgga

SEQ ID NO: 672075 - RNA, 19 nt, Human
cggcaggaaccacacagca

SEQ ID NO: 672076 - RNA, 20 nt, Human
gcuguaaagcuuuauuggga

SEQ ID NO: 672077 - RNA, 28 nt, Human
uuuuaaugaacaaauuuccaacauagga

SEQ ID NO: 672078 - RNA, 18 nt, Human
uuuuuuuuuuuuucuuug

SEQ ID NO: 672079 - RNA, 18 nt, Human
agugaacaugcacacuga

SEQ ID NO: 672080 - RNA, 21 nt, Human
augcaguccucccuccccucc

SEQ ID NO: 672081 - RNA, 18 nt, Human
cacagcuccccagcgguc

SEQ ID NO: 672082 - RNA, 21 nt, Human
cacagcuccccagcggucacc

SEQ ID NO: 672083 - RNA, 23 nt, Human
cccaccccaucccgcgucaugca

SEQ ID NO: 672084 - RNA, 18 nt, Human
cccgccucgccccacccc

SEQ ID NO: 672085 - RNA, 23 nt, Human
cucacagcuccccagcggucacc

SEQ ID NO: 672086 - RNA, 24 nt, Human
cucgccccaccccaucccgcguca

SEQ ID NO: 672087 - RNA, 23 nt, Human
cucucacagcuccccagcgguca

SEQ ID NO: 672088 - RNA, 20 nt, Human
uaggagagaaagaguccaga

SEQ ID NO: 672089 - RNA, 19 nt, Human
ugcccagugaacaugcaca

SEQ ID NO: 672090 - RNA, 21 nt, Human
ugccugcguugugugcugcag

SEQ ID NO: 672091 - RNA, 18 nt, Human
ugggaggacuggccugcg

SEQ ID NO: 672092 - RNA, 19 nt, Human
cgggcgcaggggcuuccgc

SEQ ID NO: 672093 - RNA, 22 nt, Human
uuguacauccuucaccaccaug

SEQ ID NO: 672094 - RNA, 21 nt, Human
aaauggcaucuugcugccccc

SEQ ID NO: 672095 - RNA, 21 nt, Human
aacauggcugcucuuccaccu

SEQ ID NO: 672096 - RNA, 18 nt, Human
aaucgcuugaaccuggga

SEQ ID NO: 672097 - RNA, 24 nt, Human
aaucgcuugaaccugggaggcaga

SEQ ID NO: 672098 - RNA, 24 nt, Human
aaugaguggaggguggaggaggga

SEQ ID NO: 672099 - RNA, 24 nt, Human
acagagcaagacuccguuucaaaa

SEQ ID NO: 672100 - RNA, 23 nt, Human
acuccagccugggggacagagca

SEQ ID NO: 672101 - RNA, 18 nt, Human
acucuggaggcugaggca

SEQ ID NO: 672102 - RNA, 18 nt, Human
acugcacuccagccuggg

SEQ ID NO: 672103 - RNA, 24 nt, Human
acugcacuccagccugggggacag

SEQ ID NO: 672104 - RNA, 19 nt, Human
agagagaaaugaacagucu

SEQ ID NO: 672105 - RNA, 18 nt, Human
agagguugcagugagccg

SEQ ID NO: 672106 - RNA, 23 nt, Human
agagguugcagugagccgagauc

SEQ ID NO: 672107 - RNA, 24 nt, Human
agagguugcagugagccgagauca

SEQ ID NO: 672108 - RNA, 19 nt, Human
agcacuuugggaggcagag

SEQ ID NO: 672109 - RNA, 20 nt, Human
agcccagcgaagagggggcu

SEQ ID NO: 672110 - RNA, 24 nt, Human
agccugggggacagagcaagacuc

SEQ ID NO: 672111 - RNA, 20 nt, Human
aggagggaagcacugcuggg

SEQ ID NO: 672112 - RNA, 21 nt, Human
aggcagagguugcagugagcc

SEQ ID NO: 672113 - RNA, 24 nt, Human
aggcagagguugcagugagccgag

SEQ ID NO: 672114 - RNA, 22 nt, Human
aggcaggagaaucgcuugaacc

SEQ ID NO: 672115 - RNA, 24 nt, Human
aggcaggagaaucgcuugaaccug

SEQ ID NO: 672116 - RNA, 24 nt, Human
aggccuaguggcucacgccuguaa

SEQ ID NO: 672117 - RNA, 20 nt, Human
aggcugaggcaggagaaucg

SEQ ID NO: 672118 - RNA, 24 nt, Human
aggcugaggcaggagaaucgcuug

SEQ ID NO: 672119 - RNA, 22 nt, Human
agucauguggaucaccugaggu

SEQ ID NO: 672120 - RNA, 22 nt, Human
aguggaggguggaggagggaag

SEQ ID NO: 672121 - RNA, 21 nt, Human
aguggcucacgccuguaaugg

SEQ ID NO: 672122 - RNA, 24 nt, Human
aguggcucacgccuguaauggcag

SEQ ID NO: 672123 - RNA, 24 nt, Human
aucaugccacugcacuccagccug

SEQ ID NO: 672124 - RNA, 21 nt, Human
caacaaacaugucagagagaa

SEQ ID NO: 672125 - RNA, 21 nt, Human
caagacuccguuucaaaaaaa

SEQ ID NO: 672126 - RNA, 24 nt, Human
cacgccuguaauggcagcacuuug

SEQ ID NO: 672127 - RNA, 18 nt, Human
cacugcacuccagccugg

SEQ ID NO: 672128 - RNA, 19 nt, Human
cacugcacuccagccuggg

SEQ ID NO: 672129 - RNA, 22 nt, Human
cacugcacuccagccuggggga

SEQ ID NO: 672130 - RNA, 24 nt, Human
cacugcacuccagccugggggaca

SEQ ID NO: 672131 - RNA, 25 nt, Human
cacugcacuccagccugggggacag

SEQ ID NO: 672132 - RNA, 18 nt, Human
cacuuugggaggcagagu

SEQ ID NO: 672133 - RNA, 22 nt, Human
cagagagauggagccagggcca

SEQ ID NO: 672134 - RNA, 19 nt, Human
cagauuuuugccucuguca

SEQ ID NO: 672135 - RNA, 18 nt, Human
cagcacuuugggaggcag

SEQ ID NO: 672136 - RNA, 18 nt, Human
cagggccaggaagagggg

SEQ ID NO: 672137 - RNA, 23 nt, Human
cagggccaggaagaggggcagag

SEQ ID NO: 672138 - RNA, 24 nt, Human
cauguggaucaccugaggugagga

SEQ ID NO: 672139 - RNA, 22 nt, Human
cauuccaacucaccacgcccca

SEQ ID NO: 672140 - RNA, 20 nt, Human
ccaacucaccacgccccaaa

SEQ ID NO: 672141 - RNA, 22 nt, Human
ccacgccccaaacuuccugugg

SEQ ID NO: 672142 - RNA, 22 nt, Human
ccacucaucacaugugcccuuc

SEQ ID NO: 672143 - RNA, 19 nt, Human
ccacugcacuccagccugg

SEQ ID NO: 672144 - RNA, 20 nt, Human
ccacugcacuccagccuggg

SEQ ID NO: 672145 - RNA, 20 nt, Human
ccacugcacuccagccuggg

SEQ ID NO: 672146 - RNA, 22 nt, Human
ccacugcacuccagccuggggg

SEQ ID NO: 672147 - RNA, 24 nt, Human
ccacugcacuccagccugggggac

SEQ ID NO: 672148 - RNA, 21 nt, Human
ccaggaagaggggcagagaca

SEQ ID NO: 672149 - RNA, 20 nt, Human
ccccaggccugcucacaguc

SEQ ID NO: 672150 - RNA, 25 nt, Human
ccugggaggcagagguugcagugag

SEQ ID NO: 672151 - RNA, 22 nt, Human
ccugggggacagagcaagacuc

SEQ ID NO: 672152 - RNA, 22 nt, Human
cgccccaaacuuccuguggcuc

SEQ ID NO: 672153 - RNA, 23 nt, Human
cgccuguaauggcagcacuuugg

SEQ ID NO: 672154 - RNA, 22 nt, Human
cguaucauuccaacucaccacg

SEQ ID NO: 672155 - RNA, 21 nt, Human
cguaucuguaauccuagcuac

SEQ ID NO: 672156 - RNA, 24 nt, Human
cucacgccuguaauggcagcacuu

SEQ ID NO: 672157 - RNA, 18 nt, Human
cucacuccaucuuuugcc

SEQ ID NO: 672158 - RNA, 22 nt, Human
cucugucagcgucaggccacaa

SEQ ID NO: 672159 - RNA, 24 nt, Human
cugcugggagcccagcgaagaggg

SEQ ID NO: 672160 - RNA, 19 nt, Human
cugguuggagaucgggggg

SEQ ID NO: 672161 - RNA, 18 nt, Human
cuguaauccuagcuacuc

SEQ ID NO: 672162 - RNA, 20 nt, Human
cuguaauccuagcuacucug

SEQ ID NO: 672163 - RNA, 21 nt, Human
cuucaaacauggcugcucuuc

SEQ ID NO: 672164 - RNA, 22 nt, Human
gaaagaacaaaaugaguggagg

SEQ ID NO: 672165 - RNA, 24 nt, Human
gacagagcaagacuccguuucaaa

SEQ ID NO: 672166 - RNA, 23 nt, Human
gagaaucgcuugaaccugggagg

SEQ ID NO: 672167 - RNA, 23 nt, Human
gagaucaugccacugcacuccag

SEQ ID NO: 672168 - RNA, 26 nt, Human
gagccagggccaggaagaggggcaga

SEQ ID NO: 672169 - RNA, 23 nt, Human
gagucauguggaucaccugaggu

SEQ ID NO: 672170 - RNA, 23 nt, Human
gaucaccugaggugaggaguuca

SEQ ID NO: 672171 - RNA, 24 nt, Human
gaucaccugaggugaggaguucaa

SEQ ID NO: 672172 - RNA, 24 nt, Human
gcacuccagccugggggacagagc

SEQ ID NO: 672173 - RNA, 23 nt, Human
gccccaaacuuccuguggcucac

SEQ ID NO: 672174 - RNA, 20 nt, Human
gccgagaucaugccacugca

SEQ ID NO: 672175 - RNA, 22 nt, Human
gcucacuccaucuuuugccccu

SEQ ID NO: 672176 - RNA, 18 nt, Human
ggagcagcaaggccucgu

SEQ ID NO: 672177 - RNA, 23 nt, Human
ggagcccagcgaagagggggcuu

SEQ ID NO: 672178 - RNA, 23 nt, Human
ggcaggaaaggggaaggggaggu

SEQ ID NO: 672179 - RNA, 23 nt, Human
gggcaggaaaggggaaggggagg

SEQ ID NO: 672180 - RNA, 18 nt, Human
ggggaaggggaggucagg

SEQ ID NO: 672181 - RNA, 18 nt, Human
ggggcaggaaaggggaag

SEQ ID NO: 672182 - RNA, 24 nt, Human
guugcagugagccgagaucaugcc

SEQ ID NO: 672183 - RNA, 21 nt, Human
uagcagauuuuugccucuguc

SEQ ID NO: 672184 - RNA, 24 nt, Human
uaucuguaauccuagcuacucugg

SEQ ID NO: 672185 - RNA, 19 nt, Human
ucacagucuugguugaguc

SEQ ID NO: 672186 - RNA, 23 nt, Human
ucaugccacugcacuccagccug

SEQ ID NO: 672187 - RNA, 23 nt, Human
ucccuucugggagaugcagaaau

SEQ ID NO: 672188 - RNA, 18 nt, Human
ucgcuugaaccugggagg

SEQ ID NO: 672189 - RNA, 18 nt, Human
ucugcccccugaguuagc

SEQ ID NO: 672190 - RNA, 23 nt, Human
ucuguaauccuagcuacucugga

SEQ ID NO: 672191 - RNA, 24 nt, Human
ugaaccugggaggcagagguugca

SEQ ID NO: 672192 - RNA, 19 nt, Human
ugaaucccugucucuaaaa

SEQ ID NO: 672193 - RNA, 18 nt, Human
ugacagagagauggagcc

SEQ ID NO: 672194 - RNA, 22 nt, Human
ugagccgagaucaugccacugc

SEQ ID NO: 672195 - RNA, 20 nt, Human
ugaggcaggagaaucgcuug

SEQ ID NO: 672196 - RNA, 24 nt, Human
ugaggcaggagaaucgcuugaacc

SEQ ID NO: 672197 - RNA, 25 nt, Human
ugaggcaggagaaucgcuugaaccu

SEQ ID NO: 672198 - RNA, 22 nt, Human
ugaggugaggaguucaagacca

SEQ ID NO: 672199 - RNA, 19 nt, Human
ugaguggaggguggaggag

SEQ ID NO: 672200 - RNA, 24 nt, Human
uggaucaccugaggugaggaguuc

SEQ ID NO: 672201 - RNA, 21 nt, Human
uggcacagggaagggugaggu

SEQ ID NO: 672202 - RNA, 24 nt, Human
uggcucacgccuguaauggcagca

SEQ ID NO: 672203 - RNA, 21 nt, Human
uggcucacuccaucuuuugcc

SEQ ID NO: 672204 - RNA, 18 nt, Human
ugggagcccagcgaagag

SEQ ID NO: 672205 - RNA, 24 nt, Human
ugggaggcagagguugcagugagc

SEQ ID NO: 672206 - RNA, 21 nt, Human
ugggaggcagagucaugugga

SEQ ID NO: 672207 - RNA, 24 nt, Human
ugggaggcagagucauguggauca

SEQ ID NO: 672208 - RNA, 19 nt, Human
uggggcaggaaaggggaag

SEQ ID NO: 672209 - RNA, 22 nt, Human
ugguggcacguaucuguaaucc

SEQ ID NO: 672210 - RNA, 18 nt, Human
uuagccggguaugguggc

SEQ ID NO: 672211 - RNA, 27 nt, Human
uucaaaaaaaaaaaaguuggggggaaa

SEQ ID NO: 672212 - RNA, 24 nt, Human
uuccaacucaccacgccccaaacu

SEQ ID NO: 672213 - RNA, 24 nt, Human
uugaaccugggaggcagagguugc

SEQ ID NO: 672214 - RNA, 18 nt, Human
uugcagugagccgagauc

SEQ ID NO: 672215 - RNA, 20 nt, Human
uugcagugagccgagaucau

SEQ ID NO: 672216 - RNA, 21 nt, Human
uugcagugagccgagaucaug

SEQ ID NO: 672217 - RNA, 23 nt, Human
uugguugagucugcccccugagu

SEQ ID NO: 672218 - RNA, 18 nt, Human
uuuuuuuuuuuuuuuuug

SEQ ID NO: 672219 - RNA, 19 nt, Human
aaaaggcagggugagcagu

SEQ ID NO: 672220 - RNA, 22 nt, Human
aaccagcugggaaggagagggu

SEQ ID NO: 672221 - RNA, 23 nt, Human
aagguucagcccacgaucgggag

SEQ ID NO: 672222 - RNA, 18 nt, Human
accaaccagcugggaagg

SEQ ID NO: 672223 - RNA, 22 nt, Human
acucaagcccauugaaaagaaa

SEQ ID NO: 672224 - RNA, 22 nt, Human
agaaagggcucucaugggggca

SEQ ID NO: 672225 - RNA, 18 nt, Human
aggcguaccccaaaguuc

SEQ ID NO: 672226 - RNA, 25 nt, Human
caaccaaacaaaaaucccaacccaa

SEQ ID NO: 672227 - RNA, 23 nt, Human
caagcccauugaaaagaaagggc

SEQ ID NO: 672228 - RNA, 24 nt, Human
cacuuggaaaagacagguuguggg

SEQ ID NO: 672229 - RNA, 22 nt, Human
cagaaaaguauagggagccuca

SEQ ID NO: 672230 - RNA, 20 nt, Human
cagccccuggcuggacuccu

SEQ ID NO: 672231 - RNA, 21 nt, Human
caggacccauacuccuggagg

SEQ ID NO: 672232 - RNA, 28 nt, Human
ccaaacaaaaaucccaacccaagaacuc

SEQ ID NO: 672233 - RNA, 22 nt, Human
ccaaccaaacaaaaaucccaac

SEQ ID NO: 672234 - RNA, 18 nt, Human
cccaccccuggaccagcc

SEQ ID NO: 672235 - RNA, 21 nt, Human
cccacgaucgggagcgggggc

SEQ ID NO: 672236 - RNA, 20 nt, Human
ccccagaaaaaggcagggug

SEQ ID NO: 672237 - RNA, 25 nt, Human
cccccagaaaaaggcagggugagca

SEQ ID NO: 672238 - RNA, 21 nt, Human
ccccuggaccagccagggccu

SEQ ID NO: 672239 - RNA, 19 nt, Human
cccugcgcgccgagugccg

SEQ ID NO: 672240 - RNA, 25 nt, Human
cccuucacaggcacucaugggggau

SEQ ID NO: 672241 - RNA, 25 nt, Human
ccgguggcuugccucucagggcgac

SEQ ID NO: 672242 - RNA, 24 nt, Human
ccugcggcucugguagcagggcca

SEQ ID NO: 672243 - RNA, 23 nt, Human
cucagcccccagaaaaaggcagg

SEQ ID NO: 672244 - RNA, 19 nt, Human
cucuggacccuugucucga

SEQ ID NO: 672245 - RNA, 20 nt, Human
cugggagacugggagcagcu

SEQ ID NO: 672246 - RNA, 23 nt, Human
cugguagcagggccaguguuccc

SEQ ID NO: 672247 - RNA, 21 nt, Human
gaaaagaaagggcucucaugg

SEQ ID NO: 672248 - RNA, 18 nt, Human
gaaggagaggguggccca

SEQ ID NO: 672249 - RNA, 18 nt, Human
gagcagccuuucccuagg

SEQ ID NO: 672250 - RNA, 20 nt, Human
gagggugcccggggcccugc

SEQ ID NO: 672251 - RNA, 20 nt, Human
gaucagguggcagcguccgc

SEQ ID NO: 672252 - RNA, 18 nt, Human
gcaggacauggaggcagc

SEQ ID NO: 672253 - RNA, 18 nt, Human
gccccuggcuggacuccu

SEQ ID NO: 672254 - RNA, 19 nt, Human
ggaaggagaggguggccca

SEQ ID NO: 672255 - RNA, 22 nt, Human
ggacucccuucacaggcacucu

SEQ ID NO: 672256 - RNA, 20 nt, Human
ggagaggguggcccagcgcu

SEQ ID NO: 672257 - RNA, 20 nt, Human
ggcagggugagcaguucugg

SEQ ID NO: 672258 - RNA, 20 nt, Human
gggagcagcuuaggucugug

SEQ ID NO: 672259 - RNA, 20 nt, Human
ggggaggguagaaccuggaa

SEQ ID NO: 672260 - RNA, 20 nt, Human
ggggauccugcggcucuggu

SEQ ID NO: 672261 - RNA, 19 nt, Human
uacccaccccuggaccagc

SEQ ID NO: 672262 - RNA, 24 nt, Human
uagcagggccaguguucccgagaa

SEQ ID NO: 672263 - RNA, 22 nt, Human
ucagcgccuggaugggaucagg

SEQ ID NO: 672264 - RNA, 19 nt, Human
ucuguggggaggguagaac

SEQ ID NO: 672265 - RNA, 20 nt, Human
ugaaaagaaagggcucucau

SEQ ID NO: 672266 - RNA, 22 nt, Human
ugcccggggcccugcgcgccga

SEQ ID NO: 672267 - RNA, 21 nt, Human
ugcggcucugguagcagggcc

SEQ ID NO: 672268 - RNA, 19 nt, Human
uggaaaagacagguugugg

SEQ ID NO: 672269 - RNA, 18 nt, Human
uggacuccugggagggca

SEQ ID NO: 672270 - RNA, 22 nt, Human
uggauccagccuaucagcgccg

SEQ ID NO: 672271 - RNA, 20 nt, Human
uggcccagcgcuggauccag

SEQ ID NO: 672272 - RNA, 21 nt, Human
uggcuggacuccugggagggc

SEQ ID NO: 672273 - RNA, 22 nt, Human
ugggagcagcuuaggucugugg

SEQ ID NO: 672274 - RNA, 19 nt, Human
ugggaucagguggcagcgu

SEQ ID NO: 672275 - RNA, 22 nt, Human
ugguucugggagacugggagca

SEQ ID NO: 672276 - RNA, 21 nt, Human
ugucucgaaauccgcacgggg

SEQ ID NO: 672277 - RNA, 22 nt, Human
uucugggagacugggagcagcu

SEQ ID NO: 672278 - RNA, 18 nt, Human
aaaagcagcucuuuucca

SEQ ID NO: 672279 - RNA, 20 nt, Human
aaacauuuuagagcaacucc

SEQ ID NO: 672280 - RNA, 20 nt, Human
aaaguaaaaugccuaagucc

SEQ ID NO: 672281 - RNA, 20 nt, Human
aaaugccuaaguccaaaaua

SEQ ID NO: 672282 - RNA, 21 nt, Human
aagaggcugcuuuagcuaaug

SEQ ID NO: 672283 - RNA, 19 nt, Human
agaaaacaauucaacaguu

SEQ ID NO: 672284 - RNA, 24 nt, Human
agcagcucuuuuccaaacauuuua

SEQ ID NO: 672285 - RNA, 19 nt, Human
aguuguuuacaucuccugu

SEQ ID NO: 672286 - RNA, 19 nt, Human
auuaaaucaagacaacugc

SEQ ID NO: 672287 - RNA, 23 nt, Human
caaaagcagcucuuuuccaaaca

SEQ ID NO: 672288 - RNA, 24 nt, Human
caaaagcagcucuuuuccaaacau

SEQ ID NO: 672289 - RNA, 22 nt, Human
caaaauaucacuucaaaaugga

SEQ ID NO: 672290 - RNA, 21 nt, Human
caauaaauuucaggauauaga

SEQ ID NO: 672291 - RNA, 21 nt, Human
ccgcugccgggcgcuugcagg

SEQ ID NO: 672292 - RNA, 19 nt, Human
ccuaaguccaaaauaucac

SEQ ID NO: 672293 - RNA, 23 nt, Human
cuaaaguaaaaugccuaaguccu

SEQ ID NO: 672294 - RNA, 23 nt, Human
cuccuuauuucagaaucugaaga

SEQ ID NO: 672295 - RNA, 20 nt, Human
cugaagaccacaugauuugu

SEQ ID NO: 672296 - RNA, 21 nt, Human
cugaagaccacaugauuuguu

SEQ ID NO: 672297 - RNA, 25 nt, Human
cuuccaaucuaaaguaaaaugccua

SEQ ID NO: 672298 - RNA, 23 nt, Human
gagaauuauagaaaaauuacagc

SEQ ID NO: 672299 - RNA, 22 nt, Human
gauccuuuuuuccuaccauugc

SEQ ID NO: 672300 - RNA, 24 nt, Human
gcgcagcuucggaggaagggaacc

SEQ ID NO: 672301 - RNA, 23 nt, Human
guuuacaucuccuguaggugauu

SEQ ID NO: 672302 - RNA, 18 nt, Human
uaaaguaaccucgcgggc

SEQ ID NO: 672303 - RNA, 19 nt, Human
uaacuuugugccaauuggu

SEQ ID NO: 672304 - RNA, 23 nt, Human
uaaguccaaaauaucacuucaaa

SEQ ID NO: 672305 - RNA, 21 nt, Human
uaggugauuuuccuauaacuu

SEQ ID NO: 672306 - RNA, 19 nt, Human
uauuguaaaucacauaaug

SEQ ID NO: 672307 - RNA, 23 nt, Human
ucagaaucugaagaccacaugau

SEQ ID NO: 672308 - RNA, 18 nt, Human
uccaggguguaagaaaac

SEQ ID NO: 672309 - RNA, 22 nt, Human
ugcugcuguuccaggagcgcag

SEQ ID NO: 672310 - RNA, 20 nt, Human
uguugugcauuuuuuauugg

SEQ ID NO: 672311 - RNA, 26 nt, Human
uucauaaugcaaaagcagcucuuuuc

SEQ ID NO: 672312 - RNA, 18 nt, Human
uuccaggguguaagaaaa

SEQ ID NO: 672313 - RNA, 19 nt, Human
uugaauauaaaaagccaca

SEQ ID NO: 672314 - RNA, 19 nt, Human
uuuuuuuuuuuuuugcuuu

SEQ ID NO: 672315 - RNA, 18 nt, Human
uuuuuuuuuuuuuuuuug

SEQ ID NO: 672316 - RNA, 23 nt, Human
uuuuuuuuuuuuuuuuuugcuuu

SEQ ID NO: 672317 - RNA, 23 nt, Human
aaaaggauucuuuauuauguaga

SEQ ID NO: 672318 - RNA, 24 nt, Human
aacccaggcuuuccuaaagcccca

SEQ ID NO: 672319 - RNA, 25 nt, Human
aagcaagaaauuccuuaacagcagc

SEQ ID NO: 672320 - RNA, 23 nt, Human
acagggaacugucaucuucucca

SEQ ID NO: 672321 - RNA, 18 nt, Human
acccguggacacucacuu

SEQ ID NO: 672322 - RNA, 18 nt, Human
agccccaaacuccacacc

SEQ ID NO: 672323 - RNA, 22 nt, Human
caaacuccacaccggaggcaac

SEQ ID NO: 672324 - RNA, 19 nt, Human
caacgccugaugaagcaac

SEQ ID NO: 672325 - RNA, 24 nt, Human
cauacucacuucuucacccgugga

SEQ ID NO: 672326 - RNA, 20 nt, Human
ccaaacuccacaccggaggc

SEQ ID NO: 672327 - RNA, 24 nt, Human
ccaauucuagaguuaaaaugauac

SEQ ID NO: 672328 - RNA, 21 nt, Human
ccacagccccaguccgacccg

SEQ ID NO: 672329 - RNA, 24 nt, Human
ccacccaacccaggcuuuccuaaa

SEQ ID NO: 672330 - RNA, 21 nt, Human
cccguggacacucagagcucc

SEQ ID NO: 672331 - RNA, 23 nt, Human
cccguggacacucagagcucccg

SEQ ID NO: 672332 - RNA, 23 nt, Human
ccuaaagccccaaacuccacacc

SEQ ID NO: 672333 - RNA, 18 nt, Human
ccucuauaagcaagaaau

SEQ ID NO: 672334 - RNA, 23 nt, Human
cucaaacaucaccuuaaugucca

SEQ ID NO: 672335 - RNA, 23 nt, Human
gauucaguuuuuuaaaaugaucu

SEQ ID NO: 672336 - RNA, 22 nt, Human
gccacagccccaguccgacccg

SEQ ID NO: 672337 - RNA, 19 nt, Human
uaaaaagaggcauaaauag

SEQ ID NO: 672338 - RNA, 21 nt, Human
uaaagccccaaacuccacacc

SEQ ID NO: 672339 - RNA, 22 nt, Human
uaacagcagcucaaacaucacc

SEQ ID NO: 672340 - RNA, 27 nt, Human
uaacagcagcucaaacaucaccuuaau

SEQ ID NO: 672341 - RNA, 22 nt, Human
uaagcaagaaauuccuuaacag

SEQ ID NO: 672342 - RNA, 19 nt, Human
uaauuuuauaauuaacugc

SEQ ID NO: 672343 - RNA, 23 nt, Human
ucacccguggacacucagagcug

SEQ ID NO: 672344 - RNA, 23 nt, Human
ucacuucuucacccguggacacu

SEQ ID NO: 672345 - RNA, 23 nt, Human
ucacuucuucacccguggacacu

SEQ ID NO: 672346 - RNA, 20 nt, Human
uccgggaggacagggaacug

SEQ ID NO: 672347 - RNA, 23 nt, Human
uccuaaagccccaaacuccacac

SEQ ID NO: 672348 - RNA, 19 nt, Human
ucuccgggaggacagggaa

SEQ ID NO: 672349 - RNA, 20 nt, Human
uuccuggguuuuauccuucu

SEQ ID NO: 672350 - RNA, 23 nt, Human
uuuaaaaugaucuacuuacaaca

SEQ ID NO: 672351 - RNA, 23 nt, Human
aaaauacaucuagaagaucucaa

SEQ ID NO: 672352 - RNA, 23 nt, Human
aacugugguagcaacacauaacc

SEQ ID NO: 672353 - RNA, 21 nt, Human
aagcaaauuguucucugagau

SEQ ID NO: 672354 - RNA, 21 nt, Human
accuugggcagucccgaaagc

SEQ ID NO: 672355 - RNA, 18 nt, Human
agacgcccccagcagccg

SEQ ID NO: 672356 - RNA, 25 nt, Human
agaguccuggcuccacagucuccuu

SEQ ID NO: 672357 - RNA, 22 nt, Human
agcaaauuguucucugagauuu

SEQ ID NO: 672358 - RNA, 22 nt, Human
agucauagugguagaaccagcc

SEQ ID NO: 672359 - RNA, 21 nt, Human
aucuuuuuugcuaaugagagu

SEQ ID NO: 672360 - RNA, 23 nt, Human
augauauaaacauguuuuaaagu

SEQ ID NO: 672361 - RNA, 25 nt, Human
auucauauugacuuaaucagguuga

SEQ ID NO: 672362 - RNA, 23 nt, Human
cacaaauggcaaaaugauugccu

SEQ ID NO: 672363 - RNA, 19 nt, Human
caccaggcccucucucuug

SEQ ID NO: 672364 - RNA, 21 nt, Human
caccaggcccucucucuuguu

SEQ ID NO: 672365 - RNA, 23 nt, Human
cacccaugcagauaucuucguac

SEQ ID NO: 672366 - RNA, 21 nt, Human
caccgggcacaccacugccga

SEQ ID NO: 672367 - RNA, 21 nt, Human
cagccacccuucguggcacuc

SEQ ID NO: 672368 - RNA, 21 nt, Human
cagccgggcucgcaccaggcc

SEQ ID NO: 672369 - RNA, 23 nt, Human
cagcuuaguaaagcaaauuguuc

SEQ ID NO: 672370 - RNA, 22 nt, Human
ccccagcagccgggcucgcacc

SEQ ID NO: 672371 - RNA, 19 nt, Human
cccccagcagccgggcucg

SEQ ID NO: 672372 - RNA, 23 nt, Human
cccgaaagcucauuggccaagcg

SEQ ID NO: 672373 - RNA, 19 nt, Human
ccucgccgcagacgccccc

SEQ ID NO: 672374 - RNA, 27 nt, Human
ccucugcagcagcggcuccagccaccc

SEQ ID NO: 672375 - RNA, 23 nt, Human
cgaucacaucaaucaccgggcac

SEQ ID NO: 672376 - RNA, 22 nt, Human
cgccgcagacgcccccagcagc

SEQ ID NO: 672377 - RNA, 24 nt, Human
cucuucaaagcaaugcagccuagu

SEQ ID NO: 672378 - RNA, 19 nt, Human
cucuuuggcugacaugaac

SEQ ID NO: 672379 - RNA, 19 nt, Human
cugcagcagcggcuccagc

SEQ ID NO: 672380 - RNA, 20 nt, Human
gaguccuggcuccacagucu

SEQ ID NO: 672381 - RNA, 20 nt, Human
gaucauucacaaaucagaaa

SEQ ID NO: 672382 - RNA, 18 nt, Human
gcagcagcacaaacucua

SEQ ID NO: 672383 - RNA, 24 nt, Human
gccgcagacgcccccagcagccgg

SEQ ID NO: 672384 - RNA, 22 nt, Human
uaaaaggcacgacuguaaaaua

SEQ ID NO: 672385 - RNA, 23 nt, Human
uaaauaccaaaauaaaaucuuua

SEQ ID NO: 672386 - RNA, 24 nt, Human
uaaauccaacacaacuuucacaaa

SEQ ID NO: 672387 - RNA, 20 nt, Human
uagcaacacauaaccaaaag

SEQ ID NO: 672388 - RNA, 24 nt, Human
uagcaggauauccggggaugucuc

SEQ ID NO: 672389 - RNA, 22 nt, Human
uauccggggaugucucaaggac

SEQ ID NO: 672390 - RNA, 19 nt, Human
ucaaaauaaguacaaagcu

SEQ ID NO: 672391 - RNA, 20 nt, Human
ucaaucaccgggcacaccac

SEQ ID NO: 672392 - RNA, 22 nt, Human
ucacagcaguugcagcagcaca

SEQ ID NO: 672393 - RNA, 20 nt, Human
ucacuguagucaucuacaag

SEQ ID NO: 672394 - RNA, 18 nt, Human
uccuggcuccacagucuc

SEQ ID NO: 672395 - RNA, 25 nt, Human
ucuaucacuguagucaucuacaagg

SEQ ID NO: 672396 - RNA, 19 nt, Human
ucucaaguugacucagcuu

SEQ ID NO: 672397 - RNA, 21 nt, Human
ucucugagauuucagcuuugg

SEQ ID NO: 672398 - RNA, 20 nt, Human
ucuucuagcaggauauccgg

SEQ ID NO: 672399 - RNA, 23 nt, Human
ugaaaaaggaauuucauauagaa

SEQ ID NO: 672400 - RNA, 19 nt, Human
ugaccugaauaaaucaaua

SEQ ID NO: 672401 - RNA, 18 nt, Human
ugagguauuaucaguuaa

SEQ ID NO: 672402 - RNA, 18 nt, Human
ugcuuagcuaagucuuug

SEQ ID NO: 672403 - RNA, 18 nt, Human
uguaaaauauacaucuug

SEQ ID NO: 672404 - RNA, 20 nt, Human
uguuagaaguucgcucucaa

SEQ ID NO: 672405 - RNA, 22 nt, Human
uuaaccccgcagcugagguauu

SEQ ID NO: 672406 - RNA, 23 nt, Human
uuaaugaacaaacuugaaaaagg

SEQ ID NO: 672407 - RNA, 19 nt, Human
uuccacccaugcagauauc

SEQ ID NO: 672408 - RNA, 22 nt, Human
uugggcagucccgaaagcucau

SEQ ID NO: 672409 - RNA, 25 nt, Human
uugguggguucuggucacugcuuag

SEQ ID NO: 672410 - RNA, 23 nt, Human
uuuuuuuuuuuuuuuuuuguucu

SEQ ID NO: 672411 - RNA, 27 nt, Human
uuuuuuuuuuuuuuuuuuuuuuugggg

SEQ ID NO: 672412 - RNA, 22 nt, Human
acuuuaggaaauauuguuuugg

SEQ ID NO: 672413 - RNA, 19 nt, Human
ccaugagccccucuagcuc

SEQ ID NO: 672414 - RNA, 19 nt, Human
ccucuagcuccaucauccu

SEQ ID NO: 672415 - RNA, 20 nt, Human
cuucccaugagccccucuag

SEQ ID NO: 672416 - RNA, 18 nt, Human
gggucugccuuuugcucu

SEQ ID NO: 672417 - RNA, 24 nt, Human
uaauagauugcuuccuuaagcgau

SEQ ID NO: 672418 - RNA, 24 nt, Human
uuccuggaaauguguuuacuuugg

SEQ ID NO: 672419 - RNA, 19 nt, Human
aaagugcuaggauuacagg

SEQ ID NO: 672420 - RNA, 24 nt, Human
aaagugcuaggauuacagguguga

SEQ ID NO: 672421 - RNA, 24 nt, Human
aaagugcuaggauuucaggcauga

SEQ ID NO: 672422 - RNA, 18 nt, Human
aacuccugggcucaagcc

SEQ ID NO: 672423 - RNA, 25 nt, Human
aagcaauccucccaccucagccuuc

SEQ ID NO: 672424 - RNA, 19 nt, Human
aaguagcugggacugcagg

SEQ ID NO: 672425 - RNA, 20 nt, Human
aaguagcugggacugcaggu

SEQ ID NO: 672426 - RNA, 26 nt, Human
aagugcuaggauuacaggugugagcc

SEQ ID NO: 672427 - RNA, 21 nt, Human
acaaucaaggcucacuguagc

SEQ ID NO: 672428 - RNA, 22 nt, Human
acccucccccagcugccuuccc

SEQ ID NO: 672429 - RNA, 24 nt, Human
accuguugcccaggcuggagugca

SEQ ID NO: 672430 - RNA, 24 nt, Human
acuauguugcucaggccggucuug

SEQ ID NO: 672431 - RNA, 18 nt, Human
acugugcccagccugaag

SEQ ID NO: 672432 - RNA, 22 nt, Human
agagaugggauccucacuaugu

SEQ ID NO: 672433 - RNA, 23 nt, Human
aggaaagaaaaugggcccaaugu

SEQ ID NO: 672434 - RNA, 24 nt, Human
aggugauccaccugccuuggccuc

SEQ ID NO: 672435 - RNA, 23 nt, Human
agguucccagacaucagcaaucc

SEQ ID NO: 672436 - RNA, 22 nt, Human
aguagagauggaguuucaccau

SEQ ID NO: 672437 - RNA, 20 nt, Human
agugauucuccugccucagc

SEQ ID NO: 672438 - RNA, 24 nt, Human
agugauucuccugccucagccucc

SEQ ID NO: 672439 - RNA, 19 nt, Human
auggaguuucaccauguag

SEQ ID NO: 672440 - RNA, 24 nt, Human
auuuuuguacuuuuaguagagaug

SEQ ID NO: 672441 - RNA, 26 nt, Human
caaacuucugaccucaggugauccaa

SEQ ID NO: 672442 - RNA, 24 nt, Human
caaagugcuaggauuacaggugug

SEQ ID NO: 672443 - RNA, 24 nt, Human
caaagugcuaggauuucaggcaug

SEQ ID NO: 672444 - RNA, 27 nt, Human
caagcaauccucccaccucagccuucu

SEQ ID NO: 672445 - RNA, 22 nt, Human
cacaaucaaggcucacuguagc

SEQ ID NO: 672446 - RNA, 21 nt, Human
caccauguaguccaggcuggu

SEQ ID NO: 672447 - RNA, 24 nt, Human
caccauguaguccaggcugguuuc

SEQ ID NO: 672448 - RNA, 24 nt, Human
cacccaguggguuuagaaauccau

SEQ ID NO: 672449 - RNA, 20 nt, Human
caccucagccuucugaguag

SEQ ID NO: 672450 - RNA, 23 nt, Human
caccugccuuggccucccaaagu

SEQ ID NO: 672451 - RNA, 24 nt, Human
caccugccuuggccucccaaagug

SEQ ID NO: 672452 - RNA, 24 nt, Human
cacuauguugcucaggccggucuu

SEQ ID NO: 672453 - RNA, 21 nt, Human
cacugcaaccucugccuccug

SEQ ID NO: 672454 - RNA, 23 nt, Human
cacugcaaccucugccuccuggg

SEQ ID NO: 672455 - RNA, 19 nt, Human
cacugugcccagccagaau

SEQ ID NO: 672456 - RNA, 23 nt, Human
cagagucuuaccuguugcccagg

SEQ ID NO: 672457 - RNA, 21 nt, Human
cagcugccuucccuacuuugg

SEQ ID NO: 672458 - RNA, 25 nt, Human
caggaaaacgcuaggcuaaauagug

SEQ ID NO: 672459 - RNA, 22 nt, Human
caggcaugagccacugugccca

SEQ ID NO: 672460 - RNA, 21 nt, Human
caugcccagcuaauuuuugua

SEQ ID NO: 672461 - RNA, 20 nt, Human
ccaaagugcuaggauuacag

SEQ ID NO: 672462 - RNA, 21 nt, Human
ccaaagugcuaggauuacagg

SEQ ID NO: 672463 - RNA, 24 nt, Human
ccaaagugcuaggauuacaggugu

SEQ ID NO: 672464 - RNA, 24 nt, Human
ccaaagugcuaggauuucaggcau

SEQ ID NO: 672465 - RNA, 19 nt, Human
ccacugugcccagccugaa

SEQ ID NO: 672466 - RNA, 19 nt, Human
ccacugugcccagccugaa

SEQ ID NO: 672467 - RNA, 24 nt, Human
ccagacaucagcaauccuguuucc

SEQ ID NO: 672468 - RNA, 18 nt, Human
ccagagaagcuggugauc

SEQ ID NO: 672469 - RNA, 22 nt, Human
ccagccagaauauaucauuuca

SEQ ID NO: 672470 - RNA, 23 nt, Human
cccaaguagcugggacugcaggu

SEQ ID NO: 672471 - RNA, 24 nt, Human
cccaaguagcugggacugcaggug

SEQ ID NO: 672472 - RNA, 24 nt, Human
cccaccucagccuucugaguagcu

SEQ ID NO: 672473 - RNA, 19 nt, Human
cccaggcuggagugcagug

SEQ ID NO: 672474 - RNA, 23 nt, Human
cccucccccagcugccuucccua

SEQ ID NO: 672475 - RNA, 18 nt, Human
cccugaacccucccccag

SEQ ID NO: 672476 - RNA, 24 nt, Human
ccucccaccucagccuucugagua

SEQ ID NO: 672477 - RNA, 24 nt, Human
ccuccuggguucgagugauucucc

SEQ ID NO: 672478 - RNA, 22 nt, Human
ccucugccuccuggguucgagu

SEQ ID NO: 672479 - RNA, 23 nt, Human
ccugccucagccucccaaguagc

SEQ ID NO: 672480 - RNA, 24 nt, Human
ccugccucagccucccaaguagcu

SEQ ID NO: 672481 - RNA, 24 nt, Human
ccugccuuggccucccaaagugcu

SEQ ID NO: 672482 - RNA, 24 nt, Human
ccuguugcccaggcuggagugcag

SEQ ID NO: 672483 - RNA, 19 nt, Human
cgacuacaggcauaagcca

SEQ ID NO: 672484 - RNA, 27 nt, Human
cgagugauucuccugccucagccuccc

SEQ ID NO: 672485 - RNA, 24 nt, Human
cgcucuuguugcucaggcuggggu

SEQ ID NO: 672486 - RNA, 24 nt, Human
cguagagaugggauccucacuaug

SEQ ID NO: 672487 - RNA, 24 nt, Human
cucaagccauucucccacauuguc

SEQ ID NO: 672488 - RNA, 24 nt, Human
cucacugcaaccucugccuccugg

SEQ ID NO: 672489 - RNA, 23 nt, Human
cucacuguagcuucaaccuccgg

SEQ ID NO: 672490 - RNA, 24 nt, Human
cucagccucccaaguagcugggac

SEQ ID NO: 672491 - RNA, 24 nt, Human
cucaggugauccaccugccuuggc

SEQ ID NO: 672492 - RNA, 25 nt, Human
cuccugccucagccucccaaguagc

SEQ ID NO: 672493 - RNA, 25 nt, Human
cuccugggcucaagccauucuccca

SEQ ID NO: 672494 - RNA, 21 nt, Human
cuccuggguucgagugauucu

SEQ ID NO: 672495 - RNA, 20 nt, Human
cugaccucaggugauccacc

SEQ ID NO: 672496 - RNA, 22 nt, Human
cugaccucaggugauccaccug

SEQ ID NO: 672497 - RNA, 23 nt, Human
cugcaaccucugccuccuggguu

SEQ ID NO: 672498 - RNA, 24 nt, Human
cugcaaccucugccuccuggguuc

SEQ ID NO: 672499 - RNA, 24 nt, Human
cuuaccuguugcccaggcuggagu

SEQ ID NO: 672500 - RNA, 24 nt, Human
cuuguugcucaggcuggggugcaa

SEQ ID NO: 672501 - RNA, 24 nt, Human
cuuuuaguagagauggaguuucac

SEQ ID NO: 672502 - RNA, 19 nt, Human
cuuuuuuuuuugccggggg

SEQ ID NO: 672503 - RNA, 18 nt, Human
gaacaagcaauccuccca

SEQ ID NO: 672504 - RNA, 23 nt, Human
gaacccucccccagcugccuucc

SEQ ID NO: 672505 - RNA, 24 nt, Human
gaccucaggugauccaccugccuu

SEQ ID NO: 672506 - RNA, 18 nt, Human
gacuacaggcauaagcca

SEQ ID NO: 672507 - RNA, 24 nt, Human
gacuacaggcauaagccaccauac

SEQ ID NO: 672508 - RNA, 18 nt, Human
gauuacaggugugagcca

SEQ ID NO: 672509 - RNA, 19 nt, Human
gauuacaggugugagccac

SEQ ID NO: 672510 - RNA, 21 nt, Human
gauuacaggugugagccacug

SEQ ID NO: 672511 - RNA, 21 nt, Human
gauuucaggcaugagccacug

SEQ ID NO: 672512 - RNA, 24 nt, Human
gauuucaggcaugagccacugugc

SEQ ID NO: 672513 - RNA, 22 nt, Human
gcaaccucugccuccuggguuc

SEQ ID NO: 672514 - RNA, 19 nt, Human
gcccaggcuggagugcagu

SEQ ID NO: 672515 - RNA, 24 nt, Human
gcccugaacccucccccagcugcc

SEQ ID NO: 672516 - RNA, 21 nt, Human
gcucacugcaaccucugccuc

SEQ ID NO: 672517 - RNA, 19 nt, Human
gcuggagugcagugacaca

SEQ ID NO: 672518 - RNA, 22 nt, Human
gcuugugggggcucucucuggg

SEQ ID NO: 672519 - RNA, 24 nt, Human
ggacugcaggugcgugccaucaug

SEQ ID NO: 672520 - RNA, 23 nt, Human
ggauccucacuauguugcucagg

SEQ ID NO: 672521 - RNA, 22 nt, Human
ggauuacaggugugagccacug

SEQ ID NO: 672522 - RNA, 22 nt, Human
ggauuucaggcaugagccacug

SEQ ID NO: 672523 - RNA, 18 nt, Human
ggccggucuugaacuccu

SEQ ID NO: 672524 - RNA, 24 nt, Human
ggcugguuucaaacuucugaccuc

SEQ ID NO: 672525 - RNA, 24 nt, Human
gggaacaagcaauccucccaccuc

SEQ ID NO: 672526 - RNA, 24 nt, Human
gggauccucacuauguugcucagg

SEQ ID NO: 672527 - RNA, 19 nt, Human
gguuucaaacuucugaccu

SEQ ID NO: 672528 - RNA, 21 nt, Human
guaguccaggcugguuucaaa

SEQ ID NO: 672529 - RNA, 24 nt, Human
gucuuaccuguugcccaggcugga

SEQ ID NO: 672530 - RNA, 24 nt, Human
gugauccaccugccuuggccuccc

SEQ ID NO: 672531 - RNA, 24 nt, Human
gugauucuccugccucagccuccc

SEQ ID NO: 672532 - RNA, 23 nt, Human
gugcaauggugcugucuuggcuc

SEQ ID NO: 672533 - RNA, 21 nt, Human
gugcgugccaucaugcccagc

SEQ ID NO: 672534 - RNA, 18 nt, Human
gugcugucuuggcucacu

SEQ ID NO: 672535 - RNA, 20 nt, Human
guuuuuuuuuugagacagag

SEQ ID NO: 672536 - RNA, 24 nt, Human
uaauuuuuguacuuuuaguagaga

SEQ ID NO: 672537 - RNA, 24 nt, Human
uacaggcauaagccaccauaccca

SEQ ID NO: 672538 - RNA, 23 nt, Human
uacaggugugagccacugugccc

SEQ ID NO: 672539 - RNA, 24 nt, Human
uacaggugugagccacugugccca

SEQ ID NO: 672540 - RNA, 23 nt, Human
uaccuguugcccaggcuggagug

SEQ ID NO: 672541 - RNA, 22 nt, Human
uagagauggaguuucaccaugu

SEQ ID NO: 672542 - RNA, 21 nt, Human
uaggauuacaggugugagcca

SEQ ID NO: 672543 - RNA, 22 nt, Human
uaggauuacaggugugagccac

SEQ ID NO: 672544 - RNA, 22 nt, Human
uaggauuacaggugugagccac

SEQ ID NO: 672545 - RNA, 22 nt, Human
uaggauuacaggugugagccac

SEQ ID NO: 672546 - RNA, 24 nt, Human
uaggauuacaggugugagccacug

SEQ ID NO: 672547 - RNA, 22 nt, Human
uaggauuucaggcaugagccac

SEQ ID NO: 672548 - RNA, 24 nt, Human
uaggauuucaggcaugagccacug

SEQ ID NO: 672549 - RNA, 26 nt, Human
uaggauuucaggcaugagccacugug

SEQ ID NO: 672550 - RNA, 24 nt, Human
uaguagagauggaguuucaccaug

SEQ ID NO: 672551 - RNA, 25 nt, Human
uaguagagauggaguuucaccaugu

SEQ ID NO: 672552 - RNA, 24 nt, Human
uauguugcucaggccggucuugaa

SEQ ID NO: 672553 - RNA, 24 nt, Human
ucacugcaaccucugccuccuggg

SEQ ID NO: 672554 - RNA, 25 nt, Human
ucacugcaaccucugccuccugggu

SEQ ID NO: 672555 - RNA, 26 nt, Human
ucacugcaaccucugccuccuggguu

SEQ ID NO: 672556 - RNA, 20 nt, Human
ucagccucccaaguagcugg

SEQ ID NO: 672557 - RNA, 21 nt, Human
ucaggcaugagccacugugcc

SEQ ID NO: 672558 - RNA, 24 nt, Human
ucaggccggucuugaacuccuggg

SEQ ID NO: 672559 - RNA, 21 nt, Human
ucaggugauccaccugccuug

SEQ ID NO: 672560 - RNA, 23 nt, Human
ucccaaagugcuaggauuacagg

SEQ ID NO: 672561 - RNA, 24 nt, Human
ucccaaagugcuaggauuucaggc

SEQ ID NO: 672562 - RNA, 24 nt, Human
ucccaaguagcugggacugcaggu

SEQ ID NO: 672563 - RNA, 18 nt, Human
ucccccagcugccuuccc

SEQ ID NO: 672564 - RNA, 21 nt, Human
uccugggcucaagccauucuc

SEQ ID NO: 672565 - RNA, 22 nt, Human
uccugggcucaagccauucucc

SEQ ID NO: 672566 - RNA, 21 nt, Human
uccuggguucgagugauucuc

SEQ ID NO: 672567 - RNA, 24 nt, Human
uccuggguucgagugauucuccug

SEQ ID NO: 672568 - RNA, 22 nt, Human
ucgcucuuguugcucaggcugg

SEQ ID NO: 672569 - RNA, 22 nt, Human
ucgcucuuguugcucaggcugg

SEQ ID NO: 672570 - RNA, 23 nt, Human
ucugaguagcugcgacuacaggc

SEQ ID NO: 672571 - RNA, 24 nt, Human
ucugaguagcugcgacuacaggca

SEQ ID NO: 672572 - RNA, 21 nt, Human
ucuuaccuguugcccaggcug

SEQ ID NO: 672573 - RNA, 22 nt, Human
ucuuaccuguugcccaggcugg

SEQ ID NO: 672574 - RNA, 23 nt, Human
ucuuaccuguugcccaggcugga

SEQ ID NO: 672575 - RNA, 19 nt, Human
ucuugaacuccugggcuca

SEQ ID NO: 672576 - RNA, 23 nt, Human
ucuugaacuccugggcucaagcc

SEQ ID NO: 672577 - RNA, 18 nt, Human
ucuuguugcucaggcugg

SEQ ID NO: 672578 - RNA, 18 nt, Human
ugaaggaaagaaaauggg

SEQ ID NO: 672579 - RNA, 20 nt, Human
ugaaggaaagaaaaugggcc

SEQ ID NO: 672580 - RNA, 20 nt, Human
ugacacaaucaaggcucacu

SEQ ID NO: 672581 - RNA, 24 nt, Human
ugaccucaggugauccaccugccu

SEQ ID NO: 672582 - RNA, 19 nt, Human
ugagacagagucuuaccug

SEQ ID NO: 672583 - RNA, 21 nt, Human
ugagacagagucuuaccuguu

SEQ ID NO: 672584 - RNA, 20 nt, Human
ugauucuccugccucagccu

SEQ ID NO: 672585 - RNA, 18 nt, Human
ugcccaggcuggagugca

SEQ ID NO: 672586 - RNA, 21 nt, Human
ugcccaggcuggagugcagug

SEQ ID NO: 672587 - RNA, 24 nt, Human
ugcccaggcuggagugcagugaca

SEQ ID NO: 672588 - RNA, 21 nt, Human
ugcccugaacccucccccagc

SEQ ID NO: 672589 - RNA, 24 nt, Human
ugccucagccucccaaguagcugg

SEQ ID NO: 672590 - RNA, 23 nt, Human
ugccuuggccucccaaagugcua

SEQ ID NO: 672591 - RNA, 24 nt, Human
ugcgacuacaggcauaagccacca

SEQ ID NO: 672592 - RNA, 19 nt, Human
ugcgugccaucaugcccag

SEQ ID NO: 672593 - RNA, 24 nt, Human
ugcuaggauuacaggugugagcca

SEQ ID NO: 672594 - RNA, 24 nt, Human
ugcucaggccggucuugaacuccu

SEQ ID NO: 672595 - RNA, 20 nt, Human
ugcucaggcuggggugcaau

SEQ ID NO: 672596 - RNA, 24 nt, Human
ugcucaggcuggggugcaauggug

SEQ ID NO: 672597 - RNA, 24 nt, Human
uggagugcagugacacaaucaagg

SEQ ID NO: 672598 - RNA, 24 nt, Human
uggaguuucaccauguaguccagg

SEQ ID NO: 672599 - RNA, 21 nt, Human
ugggacugcaggugcgugcca

SEQ ID NO: 672600 - RNA, 21 nt, Human
ugggggcucucucuggggaug

SEQ ID NO: 672601 - RNA, 28 nt, Human
uggggugcaauggugcuguccuagcacg

SEQ ID NO: 672602 - RNA, 24 nt, Human
uggggugcaauggugcugucuugg

SEQ ID NO: 672603 - RNA, 21 nt, Human
ugugaaggaaagaaaaugggc

SEQ ID NO: 672604 - RNA, 19 nt, Human
ugugcccagccugaaguac

SEQ ID NO: 672605 - RNA, 24 nt, Human
uuaccuguugcccaggcuggagug

SEQ ID NO: 672606 - RNA, 18 nt, Human
uuaguagagauggaguuu

SEQ ID NO: 672607 - RNA, 24 nt, Human
uuaguagagauggaguuucaccau

SEQ ID NO: 672608 - RNA, 18 nt, Human
uuccugaggagcuugugg

SEQ ID NO: 672609 - RNA, 18 nt, Human
uucgagugauucuccugc

SEQ ID NO: 672610 - RNA, 23 nt, Human
uucgagugauucuccugccucag

SEQ ID NO: 672611 - RNA, 24 nt, Human
uucgagugauucuccugccucagc

SEQ ID NO: 672612 - RNA, 24 nt, Human
uucgcucuuguugcucaggcuggg

SEQ ID NO: 672613 - RNA, 24 nt, Human
uugcccaggcuggagugcagugac

SEQ ID NO: 672614 - RNA, 23 nt, Human
uugcucaggcuggggugcaaugg

SEQ ID NO: 672615 - RNA, 24 nt, Human
uugcucaggcuggggugcaauggu

SEQ ID NO: 672616 - RNA, 18 nt, Human
uuggccucccaaagugcu

SEQ ID NO: 672617 - RNA, 22 nt, Human
uuucaccauguaguccaggcug

SEQ ID NO: 672618 - RNA, 24 nt, Human
uuucgcucuuguugcucaggcugg

SEQ ID NO: 672619 - RNA, 21 nt, Human
uuucuagaacaggaaaacgcu

SEQ ID NO: 672620 - RNA, 20 nt, Human
uuuuuguacuuuuaguagag

SEQ ID NO: 672621 - RNA, 18 nt, Human
uuuuuugagacagagucu

SEQ ID NO: 672622 - RNA, 22 nt, Human
uuuuuuuuuugagacagagucu

SEQ ID NO: 672623 - RNA, 18 nt, Human
uuuuuuuuuuuuuuccug

SEQ ID NO: 672624 - RNA, 24 nt, Human
aaacagacauacacaugcuuucuu

SEQ ID NO: 672625 - RNA, 20 nt, Human
aaagaagcugggaguguuaa

SEQ ID NO: 672626 - RNA, 24 nt, Human
agaaucagaaccagccuagcuuuu

SEQ ID NO: 672627 - RNA, 20 nt, Human
caccugaagucgccauaaac

SEQ ID NO: 672628 - RNA, 20 nt, Human
cauaaacagacauacacaug

SEQ ID NO: 672629 - RNA, 20 nt, Human
ccagccuagcuuuuguggga

SEQ ID NO: 672630 - RNA, 23 nt, Human
cugaagucgccauaaacagacau

SEQ ID NO: 672631 - RNA, 23 nt, Human
cuggagcagguuaagaaucagaa

SEQ ID NO: 672632 - RNA, 21 nt, Human
gaugacccagauccagcacca

SEQ ID NO: 672633 - RNA, 20 nt, Human
gcaagaauugaugacccaga

SEQ ID NO: 672634 - RNA, 24 nt, Human
uagaagccauuccacuugcaagaa

SEQ ID NO: 672635 - RNA, 20 nt, Human
uugagaaagaagcugggagu

SEQ ID NO: 672636 - RNA, 19 nt, Human
cccgccgagccucgcccca

SEQ ID NO: 672637 - RNA, 21 nt, Human
ccgagccucgccccaagcgcg

SEQ ID NO: 672638 - RNA, 18 nt, Human
ccgccgagccucgcccca

SEQ ID NO: 672639 - RNA, 18 nt, Human
ccgcgcccgccgagccuc

SEQ ID NO: 672640 - RNA, 19 nt, Human
ccgcgcccgccgagccucg

SEQ ID NO: 672641 - RNA, 28 nt, Human
ccgcgcccgccgagccucgccccaagcg

SEQ ID NO: 672642 - RNA, 20 nt, Human
cgagccucgccccaagcgcg

SEQ ID NO: 672643 - RNA, 18 nt, Human
aaaaaaaaaagguuuaga

SEQ ID NO: 672644 - RNA, 26 nt, Human
aaaaaaagguuuagaaaaaaaaucaa

SEQ ID NO: 672645 - RNA, 23 nt, Human
aaacaugaauaaugccaaaccca

SEQ ID NO: 672646 - RNA, 19 nt, Human
aaacccaaaaccugcacga

SEQ ID NO: 672647 - RNA, 22 nt, Human
aagcaaaauaagauuuguccau

SEQ ID NO: 672648 - RNA, 23 nt, Human
aaugccaaacccaaaaccugcac

SEQ ID NO: 672649 - RNA, 24 nt, Human
acacacacacacacaaacacauua

SEQ ID NO: 672650 - RNA, 25 nt, Human
acacacacacacacacacacaaaca

SEQ ID NO: 672651 - RNA, 23 nt, Human
acacacacacacacacacacaca

SEQ ID NO: 672652 - RNA, 23 nt, Human
acacacacacacacacacacaca

SEQ ID NO: 672653 - RNA, 23 nt, Human
acacacacacacacacacacaca

SEQ ID NO: 672654 - RNA, 23 nt, Human
acacacacacacacacacacaca

SEQ ID NO: 672655 - RNA, 23 nt, Human
acacacacacacacacacacaca

SEQ ID NO: 672656 - RNA, 23 nt, Human
acacacacacacacacacacaca

SEQ ID NO: 672657 - RNA, 24 nt, Human
acacacacacacacacacacacaa

SEQ ID NO: 672658 - RNA, 23 nt, Human
accugggggaccuucugcuggca

SEQ ID NO: 672659 - RNA, 22 nt, Human
acucugaggagggcccaaaggc

SEQ ID NO: 672660 - RNA, 26 nt, Human
agaaaaaaaaucaacagacugaagga

SEQ ID NO: 672661 - RNA, 23 nt, Human
agaaacaugaauaaugccaaacc

SEQ ID NO: 672662 - RNA, 20 nt, Human
agagcagagcccaaugaacc

SEQ ID NO: 672663 - RNA, 20 nt, Human
agauggugucucaucuccuu

SEQ ID NO: 672664 - RNA, 18 nt, Human
agauuuguccauguuaua

SEQ ID NO: 672665 - RNA, 20 nt, Human
agggagcucuguccacagcu

SEQ ID NO: 672666 - RNA, 21 nt, Human
agggaggagagcagagcccaa

SEQ ID NO: 672667 - RNA, 20 nt, Human
agucacagaaucacacaucu

SEQ ID NO: 672668 - RNA, 22 nt, Human
agugagguuuguacccaggcau

SEQ ID NO: 672669 - RNA, 19 nt, Human
auauauauauauauauaua

SEQ ID NO: 672670 - RNA, 19 nt, Human
auauauauauauauauaua

SEQ ID NO: 672671 - RNA, 19 nt, Human
auauauauauauauauaua

SEQ ID NO: 672672 - RNA, 19 nt, Human
auauauauauauauauaua

SEQ ID NO: 672673 - RNA, 19 nt, Human
auauauauauauauauaua

SEQ ID NO: 672674 - RNA, 19 nt, Human
auauauauauauauauaua

SEQ ID NO: 672675 - RNA, 19 nt, Human
auauauauauauauauaua

SEQ ID NO: 672676 - RNA, 19 nt, Human
auauauauauauauauaua

SEQ ID NO: 672677 - RNA, 19 nt, Human
auauauauauauauauaua

SEQ ID NO: 672678 - RNA, 19 nt, Human
auauauauauauauauaua

SEQ ID NO: 672679 - RNA, 19 nt, Human
auauauauauauauauaua

SEQ ID NO: 672680 - RNA, 19 nt, Human
auauauauauauauauaua

SEQ ID NO: 672681 - RNA, 19 nt, Human
auauauauauauauauaua

SEQ ID NO: 672682 - RNA, 19 nt, Human
auauauauauauauauaua

SEQ ID NO: 672683 - RNA, 19 nt, Human
auauauauauauauauaua

SEQ ID NO: 672684 - RNA, 19 nt, Human
auauauauauauauauaua

SEQ ID NO: 672685 - RNA, 19 nt, Human
auauauauauauauauaua

SEQ ID NO: 672686 - RNA, 19 nt, Human
auauauauauauauauaua

SEQ ID NO: 672687 - RNA, 19 nt, Human
auauauauauauauauaua

SEQ ID NO: 672688 - RNA, 19 nt, Human
auauauauauauauauaua

SEQ ID NO: 672689 - RNA, 19 nt, Human
auauauauauauauauaua

SEQ ID NO: 672690 - RNA, 19 nt, Human
auauauauauauauauaua

SEQ ID NO: 672691 - RNA, 19 nt, Human
auauauauauauauauaua

SEQ ID NO: 672692 - RNA, 19 nt, Human
auauauauauauauauaua

SEQ ID NO: 672693 - RNA, 19 nt, Human
auauauauauauauauaua

SEQ ID NO: 672694 - RNA, 19 nt, Human
auauauauauauauauaua

SEQ ID NO: 672695 - RNA, 19 nt, Human
auauauauauauauauaua

SEQ ID NO: 672696 - RNA, 19 nt, Human
auauauauauauauauaua

SEQ ID NO: 672697 - RNA, 19 nt, Human
auauauauauauauauaua

SEQ ID NO: 672698 - RNA, 19 nt, Human
auauauauauauauauaua

SEQ ID NO: 672699 - RNA, 19 nt, Human
auauauauauauauauaua

SEQ ID NO: 672700 - RNA, 19 nt, Human
auauauauauauauauaua

SEQ ID NO: 672701 - RNA, 19 nt, Human
auauauauauauauauaua

SEQ ID NO: 672702 - RNA, 19 nt, Human
auauauauauauauauaua

SEQ ID NO: 672703 - RNA, 19 nt, Human
auauauauauauauauaua

SEQ ID NO: 672704 - RNA, 26 nt, Human
auauauauauauauauauguauauua

SEQ ID NO: 672705 - RNA, 23 nt, Human
caaccuguugugcaaaaacacua

SEQ ID NO: 672706 - RNA, 27 nt, Human
caagucacagaaucacacaucuggcca

SEQ ID NO: 672707 - RNA, 20 nt, Human
cacaaacacauuaagcaaaa

SEQ ID NO: 672708 - RNA, 24 nt, Human
cacacacacacacaaacacauuaa

SEQ ID NO: 672709 - RNA, 25 nt, Human
cacacacacacacacaaacacauua

SEQ ID NO: 672710 - RNA, 18 nt, Human
cacacacacacacacaca

SEQ ID NO: 672711 - RNA, 20 nt, Human
cacacacacacacacacaca

SEQ ID NO: 672712 - RNA, 20 nt, Human
cacacacacacacacacaca

SEQ ID NO: 672713 - RNA, 20 nt, Human
cacacacacacacacacaca

SEQ ID NO: 672714 - RNA, 20 nt, Human
cacacacacacacacacaca

SEQ ID NO: 672715 - RNA, 20 nt, Human
cacacacacacacacacaca

SEQ ID NO: 672716 - RNA, 20 nt, Human
cacacacacacacacacaca

SEQ ID NO: 672717 - RNA, 20 nt, Human
cacacacacacacacacaca

SEQ ID NO: 672718 - RNA, 20 nt, Human
cacacacacacacacacaca

SEQ ID NO: 672719 - RNA, 20 nt, Human
cacacacacacacacacaca

SEQ ID NO: 672720 - RNA, 20 nt, Human
cacacacacacacacacaca

SEQ ID NO: 672721 - RNA, 22 nt, Human
cacacacacacacacacacaca

SEQ ID NO: 672722 - RNA, 22 nt, Human
cacacacacacacacacacaca

SEQ ID NO: 672723 - RNA, 22 nt, Human
cacacacacacacacacacaca

SEQ ID NO: 672724 - RNA, 22 nt, Human
cacacacacacacacacacaca

SEQ ID NO: 672725 - RNA, 22 nt, Human
cacacacacacacacacacaca

SEQ ID NO: 672726 - RNA, 26 nt, Human
cacacacacacacacacacacacaca

SEQ ID NO: 672727 - RNA, 26 nt, Human
cacacacacacacacacacacacaca

SEQ ID NO: 672728 - RNA, 26 nt, Human
cacacacacacacacacacacacaca

SEQ ID NO: 672729 - RNA, 26 nt, Human
cacacacacacacacacacacacaca

SEQ ID NO: 672730 - RNA, 19 nt, Human
cacagucaagucacccacc

SEQ ID NO: 672731 - RNA, 25 nt, Human
cauacacacacacacacacacacac

SEQ ID NO: 672732 - RNA, 23 nt, Human
caugcgucuauggaucugacuua

SEQ ID NO: 672733 - RNA, 19 nt, Human
ccaaacccaaaaccugcac

SEQ ID NO: 672734 - RNA, 24 nt, Human
ccauaacucaagaaugagucucaa

SEQ ID NO: 672735 - RNA, 18 nt, Human
cccaucugggagggacag

SEQ ID NO: 672736 - RNA, 22 nt, Human
cccgaccugccgucuccuccuc

SEQ ID NO: 672737 - RNA, 19 nt, Human
cccgccgcucgccgucccg

SEQ ID NO: 672738 - RNA, 20 nt, Human
ccgcccgccgcucgccgucc

SEQ ID NO: 672739 - RNA, 18 nt, Human
ccgccgcccgccgcucgc

SEQ ID NO: 672740 - RNA, 20 nt, Human
ccgccgcccgccgcucgccg

SEQ ID NO: 672741 - RNA, 20 nt, Human
cgaccugccgucuccuccuc

SEQ ID NO: 672742 - RNA, 19 nt, Human
cgcccgccgcucgccgucc

SEQ ID NO: 672743 - RNA, 19 nt, Human
cuauauauauauauauaua

SEQ ID NO: 672744 - RNA, 19 nt, Human
cuuuuugcagcugcuguuc

SEQ ID NO: 672745 - RNA, 18 nt, Human
gaacuuacagcccaucug

SEQ ID NO: 672746 - RNA, 20 nt, Human
gaauaaugccaaacccaaaa

SEQ ID NO: 672747 - RNA, 20 nt, Human
gaccugccgucuccuccucc

SEQ ID NO: 672748 - RNA, 18 nt, Human
gagcagagcccaaugaac

SEQ ID NO: 672749 - RNA, 21 nt, Human
gcaaaauaagauuuguccaug

SEQ ID NO: 672750 - RNA, 19 nt, Human
gcccggaggauggagaccu

SEQ ID NO: 672751 - RNA, 18 nt, Human
ggagcucuguccacagcu

SEQ ID NO: 672752 - RNA, 19 nt, Human
ggcagggaggagagcagag

SEQ ID NO: 672753 - RNA, 19 nt, Human
ggcauugaagcagaaaaga

SEQ ID NO: 672754 - RNA, 19 nt, Human
gucacagaaucacacaucu

SEQ ID NO: 672755 - RNA, 19 nt, Human
gucuccuccuccgccgccc

SEQ ID NO: 672756 - RNA, 25 nt, Human
uaaauugugcagaucagcaguccua

SEQ ID NO: 672757 - RNA, 25 nt, Human
uacacacacacacacacacacacac

SEQ ID NO: 672758 - RNA, 26 nt, Human
uacauacacacacacacacacacaca

SEQ ID NO: 672759 - RNA, 24 nt, Human
uaccugggggaccuucugcuggca

SEQ ID NO: 672760 - RNA, 20 nt, Human
uagaaaaaaaaucaacagac

SEQ ID NO: 672761 - RNA, 26 nt, Human
uagaaaaaaaaucaacagacugaagg

SEQ ID NO: 672762 - RNA, 26 nt, Human
uauauacauacacacacacacacaca

SEQ ID NO: 672763 - RNA, 25 nt, Human
uauauacauacacacacacacacag

SEQ ID NO: 672764 - RNA, 19 nt, Human
uauauauauauauauauau

SEQ ID NO: 672765 - RNA, 19 nt, Human
uauauauauauauauauau

SEQ ID NO: 672766 - RNA, 19 nt, Human
uauauauauauauauauau

SEQ ID NO: 672767 - RNA, 19 nt, Human
uauauauauauauauauau

SEQ ID NO: 672768 - RNA, 19 nt, Human
uauauauauauauauauau

SEQ ID NO: 672769 - RNA, 19 nt, Human
uauauauauauauauauau

SEQ ID NO: 672770 - RNA, 19 nt, Human
uauauauauauauauauau

SEQ ID NO: 672771 - RNA, 19 nt, Human
uauauauauauauauauau

SEQ ID NO: 672772 - RNA, 19 nt, Human
uauauauauauauauauau

SEQ ID NO: 672773 - RNA, 19 nt, Human
uauauauauauauauauau

SEQ ID NO: 672774 - RNA, 19 nt, Human
uauauauauauauauauau

SEQ ID NO: 672775 - RNA, 19 nt, Human
uauauauauauauauauau

SEQ ID NO: 672776 - RNA, 19 nt, Human
uauauauauauauauauau

SEQ ID NO: 672777 - RNA, 19 nt, Human
uauauauauauauauauau

SEQ ID NO: 672778 - RNA, 19 nt, Human
uauauauauauauauauau

SEQ ID NO: 672779 - RNA, 19 nt, Human
uauauauauauauauauau

SEQ ID NO: 672780 - RNA, 19 nt, Human
uauauauauauauauauau

SEQ ID NO: 672781 - RNA, 19 nt, Human
uauauauauauauauauau

SEQ ID NO: 672782 - RNA, 19 nt, Human
uauauauauauauauauau

SEQ ID NO: 672783 - RNA, 24 nt, Human
uauauauauauauauauauaugua

SEQ ID NO: 672784 - RNA, 19 nt, Human
uauuuauauauauauauau

SEQ ID NO: 672785 - RNA, 21 nt, Human
ucaacagacugaaggaucccc

SEQ ID NO: 672786 - RNA, 26 nt, Human
ucacacaucuggccaaagaaggcaac

SEQ ID NO: 672787 - RNA, 19 nt, Human
ucagaaacaugaauaaugc

SEQ ID NO: 672788 - RNA, 24 nt, Human
ucaguacaucugcuagcucuuuuu

SEQ ID NO: 672789 - RNA, 24 nt, Human
uccagagcgucggcugagcuagca

SEQ ID NO: 672790 - RNA, 18 nt, Human
uccgccgcccgccgcucg

SEQ ID NO: 672791 - RNA, 22 nt, Human
uccuccgccgcccgccgcucgc

SEQ ID NO: 672792 - RNA, 21 nt, Human
ugaagugagaacuuacagccc

SEQ ID NO: 672793 - RNA, 19 nt, Human
ugaggagggcccaaaggcc

SEQ ID NO: 672794 - RNA, 18 nt, Human
ugagguguugacguacac

SEQ ID NO: 672795 - RNA, 21 nt, Human
ugagguguugacguacacggg

SEQ ID NO: 672796 - RNA, 20 nt, Human
ugaucccuugccccaccccc

SEQ ID NO: 672797 - RNA, 18 nt, Human
uggcagcuaaugcuaaaa

SEQ ID NO: 672798 - RNA, 19 nt, Human
uguaaacucagccuuuagg

SEQ ID NO: 672799 - RNA, 24 nt, Human
uguccacagcucccguaauggcag

SEQ ID NO: 672800 - RNA, 22 nt, Human
uguuuucucaucaucacuucca

SEQ ID NO: 672801 - RNA, 19 nt, Human
uucuccaugucuaccuggg

SEQ ID NO: 672802 - RNA, 19 nt, Human
uucugaaggugucgggagg

SEQ ID NO: 672803 - RNA, 23 nt, Human
uugccugcuucacaagcucugga

SEQ ID NO: 672804 - RNA, 19 nt, Human
uuggcagcuaaugcuaaaa

SEQ ID NO: 672805 - RNA, 21 nt, Human
uuuauauauauauauauacau

SEQ ID NO: 672806 - RNA, 22 nt, Human
uuugaagucauuuggcagcuaa

SEQ ID NO: 672807 - RNA, 20 nt, Human
uuuuuuuuuuuuuaaaggug

SEQ ID NO: 672808 - RNA, 22 nt, Human
uuuuuuuuuuuuuuuuuaaagg

SEQ ID NO: 672809 - RNA, 21 nt, Human
gcccuuuuuugcuucccuccu

SEQ ID NO: 672810 - RNA, 21 nt, Human
uuuuuugcuucccuccuaccc

SEQ ID NO: 672811 - RNA, 18 nt, Human
aaggaaaaggagaaggga

SEQ ID NO: 672812 - RNA, 20 nt, Human
aggcagagggggcucccuga

SEQ ID NO: 672813 - RNA, 22 nt, Human
aggcagagggggcucccugaug

SEQ ID NO: 672814 - RNA, 18 nt, Human
agggauggggucugggga

SEQ ID NO: 672815 - RNA, 18 nt, Human
cacugugggcaggaacac

SEQ ID NO: 672816 - RNA, 18 nt, Human
cccggccuccucuaaggc

SEQ ID NO: 672817 - RNA, 25 nt, Human
gagccgggccgggccgccgcaggga

SEQ ID NO: 672818 - RNA, 24 nt, Human
gcagaaggguuaaggccacaaagg

SEQ ID NO: 672819 - RNA, 24 nt, Human
ggauggggucuggggacagcugag

SEQ ID NO: 672820 - RNA, 19 nt, Human
ucccaugaggucugguacu

SEQ ID NO: 672821 - RNA, 18 nt, Human
ugucagaggcucugcugg

SEQ ID NO: 672822 - RNA, 23 nt, Human
ugucagaggcucugcugggccac

SEQ ID NO: 672823 - RNA, 18 nt, Human
uuuuuuuuuuuuuuuuug

SEQ ID NO: 672824 - RNA, 20 nt, Human
uuuuuuuuuuuuuuuuugcu

SEQ ID NO: 672825 - RNA, 22 nt, Human
uuuuuuuuuuuuuuuuugcugg

SEQ ID NO: 672826 - RNA, 23 nt, Human
uuuuuuuuuuuuuuuuuugcugg

SEQ ID NO: 672827 - RNA, 22 nt, Human
aaaaaaaacuccacauugucaa

SEQ ID NO: 672828 - RNA, 23 nt, Human
aaaaagaaacaaaagaaagcuca

SEQ ID NO: 672829 - RNA, 26 nt, Human
aaagaaacaaaagaaagcucaauuua

SEQ ID NO: 672830 - RNA, 18 nt, Human
aacacacuuuaaaaaaug

SEQ ID NO: 672831 - RNA, 26 nt, Human
aaccacuuuuuaaaaaaaaacuccac

SEQ ID NO: 672832 - RNA, 26 nt, Human
aauuuaugaacacuuuacaaauccuu

SEQ ID NO: 672833 - RNA, 20 nt, Human
acgauucacugacaaaugaa

SEQ ID NO: 672834 - RNA, 24 nt, Human
acuuuaaaaaaugucaaagauauu

SEQ ID NO: 672835 - RNA, 25 nt, Human
agaaacaaaagaaagcuccgguacc

SEQ ID NO: 672836 - RNA, 24 nt, Human
agauacgaucaaaccaaaaaauua

SEQ ID NO: 672837 - RNA, 22 nt, Human
auaaacauaacaaauuguauuu

SEQ ID NO: 672838 - RNA, 23 nt, Human
caaaccacuuuuuaaaaaaaaac

SEQ ID NO: 672839 - RNA, 23 nt, Human
caaggaagcucccugucggcacc

SEQ ID NO: 672840 - RNA, 19 nt, Human
cuuaaaacaaauauuugga

SEQ ID NO: 672841 - RNA, 22 nt, Human
uaaaaaaaaacuccacauuguc

SEQ ID NO: 672842 - RNA, 21 nt, Human
uccacauugucaaaauuuuuc

SEQ ID NO: 672843 - RNA, 18 nt, Human
aaagaagccgccuugggg

SEQ ID NO: 672844 - RNA, 18 nt, Human
aacaugauggacacaucu

SEQ ID NO: 672845 - RNA, 21 nt, Human
aauaagugauucuaaugcugc

SEQ ID NO: 672846 - RNA, 18 nt, Human
aauguaccuggggaaauc

SEQ ID NO: 672847 - RNA, 22 nt, Human
acagcaaagaagccgccuuggg

SEQ ID NO: 672848 - RNA, 19 nt, Human
acuggccucuccagccacg

SEQ ID NO: 672849 - RNA, 26 nt, Human
agcacuucccucccacaguugguccc

SEQ ID NO: 672850 - RNA, 24 nt, Human
agccagacagaugcgccagccaaa

SEQ ID NO: 672851 - RNA, 18 nt, Human
agcuuaaaugagcuggug

SEQ ID NO: 672852 - RNA, 23 nt, Human
agcuucguccccuucauuuucca

SEQ ID NO: 672853 - RNA, 21 nt, Human
aggaaagaaauaaauaaguga

SEQ ID NO: 672854 - RNA, 23 nt, Human
aggaaagaaauaaauaagugaag

SEQ ID NO: 672855 - RNA, 22 nt, Human
aggcugggacgccgguucccau

SEQ ID NO: 672856 - RNA, 20 nt, Human
aggggaggagccgcggggcc

SEQ ID NO: 672857 - RNA, 21 nt, Human
agggguacagaauugaucaug

SEQ ID NO: 672858 - RNA, 18 nt, Human
augaugcaggagcagccc

SEQ ID NO: 672859 - RNA, 22 nt, Human
auggacacaucuagagcuucgu

SEQ ID NO: 672860 - RNA, 20 nt, Human
cacaucccacacaaagacuc

SEQ ID NO: 672861 - RNA, 21 nt, Human
caccgggucccccaggauugg

SEQ ID NO: 672862 - RNA, 18 nt, Human
cagaguccuccggauugc

SEQ ID NO: 672863 - RNA, 23 nt, Human
cagcccaccaggcaccgccccgg

SEQ ID NO: 672864 - RNA, 21 nt, Human
cagcgcccgcgcccaggugcc

SEQ ID NO: 672865 - RNA, 21 nt, Human
caucagcugcccagaguccuc

SEQ ID NO: 672866 - RNA, 18 nt, Human
ccacacaaagacuccuac

SEQ ID NO: 672867 - RNA, 19 nt, Human
ccagaguccuccggauugc

SEQ ID NO: 672868 - RNA, 20 nt, Human
ccagcccaccaggcaccgcc

SEQ ID NO: 672869 - RNA, 21 nt, Human
ccagcccgugggaaggugacc

SEQ ID NO: 672870 - RNA, 22 nt, Human
ccaugaccucgauggcgccaag

SEQ ID NO: 672871 - RNA, 25 nt, Human
ccccaugaccucgauggcgccaagg

SEQ ID NO: 672872 - RNA, 23 nt, Human
cccccgggaccucggcccggccc

SEQ ID NO: 672873 - RNA, 18 nt, Human
cccgcagagaggggagga

SEQ ID NO: 672874 - RNA, 21 nt, Human
cccucaacccccauuuacugg

SEQ ID NO: 672875 - RNA, 24 nt, Human
cccugggcgccgggaugacccgag

SEQ ID NO: 672876 - RNA, 18 nt, Human
ccgagcccucggauacua

SEQ ID NO: 672877 - RNA, 19 nt, Human
ccgcauggagaacaugaug

SEQ ID NO: 672878 - RNA, 20 nt, Human
ccgcgcccaggugccagccc

SEQ ID NO: 672879 - RNA, 24 nt, Human
ccggauugcagcaguccgucucuu

SEQ ID NO: 672880 - RNA, 22 nt, Human
ccggccccugggccacggcacc

SEQ ID NO: 672881 - RNA, 19 nt, Human
ccuccggauugcagcaguc

SEQ ID NO: 672882 - RNA, 22 nt, Human
ccuucauuuuccacaucccaca

SEQ ID NO: 672883 - RNA, 23 nt, Human
cgccaggucccgccggccggcuc

SEQ ID NO: 672884 - RNA, 21 nt, Human
cgccccgggacgggcccgcaa

SEQ ID NO: 672885 - RNA, 22 nt, Human
cggcgacagcaaagaagccgcc

SEQ ID NO: 672886 - RNA, 21 nt, Human
cgggcccgcaaggcaccgccc

SEQ ID NO: 672887 - RNA, 22 nt, Human
cggggccagcccaccaggcacc

SEQ ID NO: 672888 - RNA, 18 nt, Human
cucggcccggccccuggg

SEQ ID NO: 672889 - RNA, 18 nt, Human
cucggcccggccccuggg

SEQ ID NO: 672890 - RNA, 24 nt, Human
cucggcccggccccugggccacgg

SEQ ID NO: 672891 - RNA, 21 nt, Human
cuggguccccaugaccucgau

SEQ ID NO: 672892 - RNA, 24 nt, Human
cugguguuucaguggagccgggga

SEQ ID NO: 672893 - RNA, 20 nt, Human
cuuaucugcuccgaggcugg

SEQ ID NO: 672894 - RNA, 24 nt, Human
gaguccuccggauugcagcagucc

SEQ ID NO: 672895 - RNA, 21 nt, Human
gaugcaggagcagcccccgga

SEQ ID NO: 672896 - RNA, 28 nt, Human
gcaccgggucccccaggauugggcgcca

SEQ ID NO: 672897 - RNA, 22 nt, Human
gcagguaccucaagcccaugcc

SEQ ID NO: 672898 - RNA, 20 nt, Human
gcauggagaacaugauggac

SEQ ID NO: 672899 - RNA, 22 nt, Human
gcugccuaggucacccucaacc

SEQ ID NO: 672900 - RNA, 21 nt, Human
ggagacguuguuagcuugaaa

SEQ ID NO: 672901 - RNA, 20 nt, Human
ggagccggggagcucuugcu

SEQ ID NO: 672902 - RNA, 21 nt, Human
ggcggcgacagcaaagaagcc

SEQ ID NO: 672903 - RNA, 20 nt, Human
ggcugggcuguuagcacuuc

SEQ ID NO: 672904 - RNA, 18 nt, Human
gggaggcaccugguagcc

SEQ ID NO: 672905 - RNA, 21 nt, Human
gggcgccaggucccgccggcc

SEQ ID NO: 672906 - RNA, 18 nt, Human
gucggcugucuucgggac

SEQ ID NO: 672907 - RNA, 23 nt, Human
uacagaauugaucaugucgauga

SEQ ID NO: 672908 - RNA, 23 nt, Human
uaggaaaccaucagcugcccaga

SEQ ID NO: 672909 - RNA, 22 nt, Human
uaucauguugcuuagggagacg

SEQ ID NO: 672910 - RNA, 19 nt, Human
uccaccacccaguccauuc

SEQ ID NO: 672911 - RNA, 18 nt, Human
uccagacagaagggcuca

SEQ ID NO: 672912 - RNA, 25 nt, Human
uccagacagaagggcucauuccaca

SEQ ID NO: 672913 - RNA, 18 nt, Human
uccccuucauuuuccaca

SEQ ID NO: 672914 - RNA, 18 nt, Human
ucccgccggccggcuccg

SEQ ID NO: 672915 - RNA, 22 nt, Human
uccgucucuuuugggggucggc

SEQ ID NO: 672916 - RNA, 19 nt, Human
uccuggguccccaugaccu

SEQ ID NO: 672917 - RNA, 25 nt, Human
ucugucuuagggguacagaauugau

SEQ ID NO: 672918 - RNA, 19 nt, Human
ugagccagacagaugcgcc

SEQ ID NO: 672919 - RNA, 24 nt, Human
ugagccagacagaugcgccagcca

SEQ ID NO: 672920 - RNA, 25 nt, Human
ugagccagacagaugcgccagccaa

SEQ ID NO: 672921 - RNA, 20 nt, Human
ugauuguccugauggcucag

SEQ ID NO: 672922 - RNA, 18 nt, Human
uggaaggguuggaugaug

SEQ ID NO: 672923 - RNA, 23 nt, Human
uggauccuggguccccaugaccu

SEQ ID NO: 672924 - RNA, 18 nt, Human
uggcucaggguugcagga

SEQ ID NO: 672925 - RNA, 20 nt, Human
ugggcccgcagagaggggag

SEQ ID NO: 672926 - RNA, 26 nt, Human
uggguggagagaagggaagggguaug

SEQ ID NO: 672927 - RNA, 20 nt, Human
uguacccaugugucugucac

SEQ ID NO: 672928 - RNA, 22 nt, Human
uguuagcacuucccucccacag

SEQ ID NO: 672929 - RNA, 19 nt, Human
uucagaggggaaggaggaa

SEQ ID NO: 672930 - RNA, 18 nt, Human
uuccaggguuaagcugcc

SEQ ID NO: 672931 - RNA, 22 nt, Human
uucccuggauccugggucccca

SEQ ID NO: 672932 - RNA, 21 nt, Human
uuuccacaucccacacaaaga

SEQ ID NO: 672933 - RNA, 19 nt, Human
uuuggaaggguuggaugau

SEQ ID NO: 672934 - RNA, 24 nt, Human
aaggcgccacagggggccaucagg

SEQ ID NO: 672935 - RNA, 21 nt, Human
agacugagcccccgaccuggc

SEQ ID NO: 672936 - RNA, 22 nt, Human
agcccccgaccuggcccagccu

SEQ ID NO: 672937 - RNA, 24 nt, Human
agcuggcgcaggccggcaggggag

SEQ ID NO: 672938 - RNA, 23 nt, Human
aggcuagcccaguccaggagugu

SEQ ID NO: 672939 - RNA, 21 nt, Human
cacaggcuagcccagcacacu

SEQ ID NO: 672940 - RNA, 24 nt, Human
caccagggaggacagcugcuggca

SEQ ID NO: 672941 - RNA, 19 nt, Human
cacuagcuugggggugggc

SEQ ID NO: 672942 - RNA, 20 nt, Human
cagagcaucuuacgggcggc

SEQ ID NO: 672943 - RNA, 22 nt, Human
cagccucagaccccucagcagc

SEQ ID NO: 672944 - RNA, 30 nt, Human
cagccuggcuugggucgagcucugucacaa

SEQ ID NO: 672945 - RNA, 20 nt, Human
cagcugcuggcagggacuaa

SEQ ID NO: 672946 - RNA, 21 nt, Human
cagggggccaucagguccagc

SEQ ID NO: 672947 - RNA, 22 nt, Human
cagugggcuggccaggccaccu

SEQ ID NO: 672948 - RNA, 20 nt, Human
cccccgaccuggcccagccu

SEQ ID NO: 672949 - RNA, 18 nt, Human
cccucggccgacuuuccc

SEQ ID NO: 672950 - RNA, 21 nt, Human
cccucggccgacuuucccagg

SEQ ID NO: 672951 - RNA, 18 nt, Human
cccugaaacgcgggcagg

SEQ ID NO: 672952 - RNA, 23 nt, Human
ccucagcagcuuugggcccucgg

SEQ ID NO: 672953 - RNA, 20 nt, Human
ccucccagacugagcccccg

SEQ ID NO: 672954 - RNA, 21 nt, Human
ccuggcccguccccaauccag

SEQ ID NO: 672955 - RNA, 24 nt, Human
cggcaggggagggucugcucugac

SEQ ID NO: 672956 - RNA, 18 nt, Human
cggccgacuuucccaggc

SEQ ID NO: 672957 - RNA, 19 nt, Human
cuggcccagccuggcccgu

SEQ ID NO: 672958 - RNA, 25 nt, Human
gagccgggccagguuguccgaggaa

SEQ ID NO: 672959 - RNA, 22 nt, Human
gcacuagcuugggggugggcac

SEQ ID NO: 672960 - RNA, 24 nt, Human
gcagucccgaggggucacaggcua

SEQ ID NO: 672961 - RNA, 19 nt, Human
ggccaggcagacaacagcc

SEQ ID NO: 672962 - RNA, 21 nt, Human
gguccagcuggcgcaggccgg

SEQ ID NO: 672963 - RNA, 19 nt, Human
ucacaggcuagcccagcac

SEQ ID NO: 672964 - RNA, 23 nt, Human
ucacaggcuagcccagcacacug

SEQ ID NO: 672965 - RNA, 18 nt, Human
ucagaccccucagcagcu

SEQ ID NO: 672966 - RNA, 22 nt, Human
ucagaccccucagcagcuuugg

SEQ ID NO: 672967 - RNA, 20 nt, Human
uccacacaccagagccgggc

SEQ ID NO: 672968 - RNA, 22 nt, Human
uccagcugccaccaccugcacc

SEQ ID NO: 672969 - RNA, 18 nt, Human
ucccagggcagccuggcc

SEQ ID NO: 672970 - RNA, 21 nt, Human
ucccuccagcugccaccaccu

SEQ ID NO: 672971 - RNA, 21 nt, Human
ucuauggaccgaggcccugaa

SEQ ID NO: 672972 - RNA, 23 nt, Human
ucuauggaccgaggcccugaaac

SEQ ID NO: 672973 - RNA, 19 nt, Human
ucuccagucuccacacacc

SEQ ID NO: 672974 - RNA, 23 nt, Human
ucuugaucucuccagucuccaca

SEQ ID NO: 672975 - RNA, 18 nt, Human
ugaccugggugcugcaug

SEQ ID NO: 672976 - RNA, 21 nt, Human
ugagcccccgaccuggcccag

SEQ ID NO: 672977 - RNA, 24 nt, Human
ugagcccccgaccuggcccagccu

SEQ ID NO: 672978 - RNA, 22 nt, Human
ugcaugggucccuccagcugcc

SEQ ID NO: 672979 - RNA, 24 nt, Human
uggccaggccaccugcaccaggga

SEQ ID NO: 672980 - RNA, 20 nt, Human
uggccaugguggugguguuc

SEQ ID NO: 672981 - RNA, 18 nt, Human
uggcccagccuggcccgu

SEQ ID NO: 672982 - RNA, 19 nt, Human
uggcuugggucgagcucug

SEQ ID NO: 672983 - RNA, 25 nt, Human
uggcuugggucgagcucugucacaa

SEQ ID NO: 672984 - RNA, 22 nt, Human
ugggcccucggccgacuuuccc

SEQ ID NO: 672985 - RNA, 21 nt, Human
ugguggccgccauacucucuc

SEQ ID NO: 672986 - RNA, 18 nt, Human
ugguggugguguucucua

SEQ ID NO: 672987 - RNA, 19 nt, Human
uuguccgaggaagcuggag

SEQ ID NO: 672988 - RNA, 21 nt, Human
uuuuuuuuuuuuuuuucccga

SEQ ID NO: 672989 - RNA, 26 nt, Human
uuuuuuuuuuuuuuuuuuugguuuuu

SEQ ID NO: 672990 - RNA, 28 nt, Human
uuuuuuuuuuuuuuuuuuuuuuuggggg

SEQ ID NO: 672991 - RNA, 24 nt, Human
aacaaaaaugcaugcaucaugauu

SEQ ID NO: 672992 - RNA, 23 nt, Human
aguccuuuuccuccucucuuuuc

SEQ ID NO: 672993 - RNA, 18 nt, Human
ccagguguuguuccccag

SEQ ID NO: 672994 - RNA, 25 nt, Human
cgaguccuuuuccuccucucuuuuc

SEQ ID NO: 672995 - RNA, 25 nt, Human
cuccucuuuuuuucucucacgguaa

SEQ ID NO: 672996 - RNA, 19 nt, Human
cucucuuuucuuccgaguu

SEQ ID NO: 672997 - RNA, 18 nt, Human
cugcacugcuuucuccuc

SEQ ID NO: 672998 - RNA, 32 nt, Human
gcugcacugcuuucuccucuuuuuuucucccc

SEQ ID NO: 672999 - RNA, 21 nt, Human
ggacaggcaaauuuugcuccu

SEQ ID NO: 673000 - RNA, 21 nt, Human
ggggagagggagcuggacagg

SEQ ID NO: 673001 - RNA, 19 nt, Human
uccaaugugaaagucgagu

SEQ ID NO: 673002 - RNA, 23 nt, Human
uccccagaucagagagccuuagc

SEQ ID NO: 673003 - RNA, 21 nt, Human
uggcaguuguuugacacucug

SEQ ID NO: 673004 - RNA, 21 nt, Human
uggggagagggagcuggacag

SEQ ID NO: 673005 - RNA, 22 nt, Human
uuccuccucucuuuucuuccga

SEQ ID NO: 673006 - RNA, 22 nt, Human
uucuccucuuuuuuucucucaa

SEQ ID NO: 673007 - RNA, 20 nt, Human
uuggcugcacugcuuucucc

SEQ ID NO: 673008 - RNA, 18 nt, Human
uuuccuccucucuuuucu

SEQ ID NO: 673009 - RNA, 21 nt, Human
uuucuuccgaguuuggcugca

SEQ ID NO: 673010 - RNA, 22 nt, Human
uuuuccuccucucuuuucuucc

SEQ ID NO: 673011 - RNA, 21 nt, Human
aaaaaacacccagaaccucau

SEQ ID NO: 673012 - RNA, 21 nt, Human
aaaaccuccaucucaccuucc

SEQ ID NO: 673013 - RNA, 18 nt, Human
aacacccagaaccucaug

SEQ ID NO: 673014 - RNA, 22 nt, Human
aacugaaugcugcaacaaccac

SEQ ID NO: 673015 - RNA, 19 nt, Human
aagaaccccagaccgagcc

SEQ ID NO: 673016 - RNA, 24 nt, Human
aagccccuccacgcccauggugcc

SEQ ID NO: 673017 - RNA, 20 nt, Human
aagcuacugccaggacagga

SEQ ID NO: 673018 - RNA, 20 nt, Human
aagggggccaccuccggcuc

SEQ ID NO: 673019 - RNA, 20 nt, Human
aaucucucucucucucucac

SEQ ID NO: 673020 - RNA, 21 nt, Human
acaaacaugcuuguaccaaau

SEQ ID NO: 673021 - RNA, 18 nt, Human
acaaagauucacacagac

SEQ ID NO: 673022 - RNA, 24 nt, Human
acaaagggcagcuuccagccaaca

SEQ ID NO: 673023 - RNA, 23 nt, Human
acacacagguaucuacaacuacc

SEQ ID NO: 673024 - RNA, 26 nt, Human
acacucacacgaacacagaggaaaac

SEQ ID NO: 673025 - RNA, 22 nt, Human
acagaacaaagggcagcuucca

SEQ ID NO: 673026 - RNA, 19 nt, Human
acagaacaggaggguggag

SEQ ID NO: 673027 - RNA, 18 nt, Human
acagacugccacaaaaac

SEQ ID NO: 673028 - RNA, 24 nt, Human
acagaggagagaggugcgucugga

SEQ ID NO: 673029 - RNA, 24 nt, Human
acagccagcgaggaacugaggccu

SEQ ID NO: 673030 - RNA, 20 nt, Human
accaaauaggagaaaaaaga

SEQ ID NO: 673031 - RNA, 18 nt, Human
acccaauaagaccaaaac

SEQ ID NO: 673032 - RNA, 26 nt, Human
acccuguggggucacacgaguguggu

SEQ ID NO: 673033 - RNA, 18 nt, Human
acgggccccacaccccac

SEQ ID NO: 673034 - RNA, 22 nt, Human
acgggccgggugggcuugggug

SEQ ID NO: 673035 - RNA, 23 nt, Human
agaaaaaagaaaaaaauaucuga

SEQ ID NO: 673036 - RNA, 18 nt, Human
agacacaaugccagcucu

SEQ ID NO: 673037 - RNA, 24 nt, Human
agacucucucaaaaaacacccaga

SEQ ID NO: 673038 - RNA, 28 nt, Human
agacugccacaaaaacauaucaccccag

SEQ ID NO: 673039 - RNA, 18 nt, Human
agagagcaggggaggaag

SEQ ID NO: 673040 - RNA, 20 nt, Human
agaggaggaggccgaggagg

SEQ ID NO: 673041 - RNA, 22 nt, Human
agaggaggaggccgaggagggu

SEQ ID NO: 673042 - RNA, 18 nt, Human
agaugcccucucucccca

SEQ ID NO: 673043 - RNA, 21 nt, Human
agaugcccucucuccccaggg

SEQ ID NO: 673044 - RNA, 19 nt, Human
agcaggggaggaagaaaag

SEQ ID NO: 673045 - RNA, 19 nt, Human
agccugggcccgcuggucc

SEQ ID NO: 673046 - RNA, 21 nt, Human
agcggaggggggggcgguggc

SEQ ID NO: 673047 - RNA, 19 nt, Human
agcugcaagaaccccagac

SEQ ID NO: 673048 - RNA, 21 nt, Human
aggaagacuaugucuagagcg

SEQ ID NO: 673049 - RNA, 21 nt, Human
aggaaggaugagagaagagga

SEQ ID NO: 673050 - RNA, 21 nt, Human
aggaaggaugagagaagagga

SEQ ID NO: 673051 - RNA, 23 nt, Human
aggaaggaugagagaagaggagg

SEQ ID NO: 673052 - RNA, 18 nt, Human
aggaggaggccgaggagg

SEQ ID NO: 673053 - RNA, 18 nt, Human
aggagugggcacagauca

SEQ ID NO: 673054 - RNA, 23 nt, Human
aggcagcgggggucagugggggu

SEQ ID NO: 673055 - RNA, 24 nt, Human
aggcaggaugggccagcagccagg

SEQ ID NO: 673056 - RNA, 22 nt, Human
aggccgaggagggugucggugu

SEQ ID NO: 673057 - RNA, 18 nt, Human
aggcuacacagaccccac

SEQ ID NO: 673058 - RNA, 21 nt, Human
aggggggggcgguggccucgg

SEQ ID NO: 673059 - RNA, 21 nt, Human
aggugggagaggccuggaggu

SEQ ID NO: 673060 - RNA, 23 nt, Human
aguagcugacugauacagauuug

SEQ ID NO: 673061 - RNA, 24 nt, Human
agucacccauccgcgcaccccagg

SEQ ID NO: 673062 - RNA, 18 nt, Human
aucccaaguagaggaccc

SEQ ID NO: 673063 - RNA, 21 nt, Human
auccgcgcaccccagguugca

SEQ ID NO: 673064 - RNA, 20 nt, Human
auggaaacggggaaacgcag

SEQ ID NO: 673065 - RNA, 24 nt, Human
auuuucaacuccccccucccccag

SEQ ID NO: 673066 - RNA, 22 nt, Human
caaaaaacacccagaaccucag

SEQ ID NO: 673067 - RNA, 25 nt, Human
caaauacaccauuccauagccacuu

SEQ ID NO: 673068 - RNA, 20 nt, Human
caacacacacgcacgugugc

SEQ ID NO: 673069 - RNA, 26 nt, Human
caacagcaaggaacugaaugcugcaa

SEQ ID NO: 673070 - RNA, 18 nt, Human
caacagccagcgaggaac

SEQ ID NO: 673071 - RNA, 26 nt, Human
caacuacccaccucucuguauacccc

SEQ ID NO: 673072 - RNA, 21 nt, Human
caaucaggacaaacauauuua

SEQ ID NO: 673073 - RNA, 23 nt, Human
cacaaaaacauaucaccccagac

SEQ ID NO: 673074 - RNA, 22 nt, Human
cacacacagacugccacaaaaa

SEQ ID NO: 673075 - RNA, 24 nt, Human
cacacagacaccucacacauaucc

SEQ ID NO: 673076 - RNA, 21 nt, Human
caccccagacagacacacaca

SEQ ID NO: 673077 - RNA, 23 nt, Human
caccccagacagacacacacagg

SEQ ID NO: 673078 - RNA, 22 nt, Human
cacguugcuuccucacacccaa

SEQ ID NO: 673079 - RNA, 20 nt, Human
cacugcugcaggcccugugg

SEQ ID NO: 673080 - RNA, 19 nt, Human
cagaacaaagggcagcuuc

SEQ ID NO: 673081 - RNA, 22 nt, Human
cagaacaaagggcagcuuccag

SEQ ID NO: 673082 - RNA, 24 nt, Human
cagaaucuaugagauaauaagcau

SEQ ID NO: 673083 - RNA, 18 nt, Human
cagacacacacagguaua

SEQ ID NO: 673084 - RNA, 22 nt, Human
cagacacacacagguauacacg

SEQ ID NO: 673085 - RNA, 26 nt, Human
cagacaccucacacauauccagucuu

SEQ ID NO: 673086 - RNA, 18 nt, Human
cagcaccagggaugccca

SEQ ID NO: 673087 - RNA, 18 nt, Human
cagccaggacaggcucgg

SEQ ID NO: 673088 - RNA, 20 nt, Human
cagccuccugagaucccaag

SEQ ID NO: 673089 - RNA, 19 nt, Human
cagcgaggaacugaggccu

SEQ ID NO: 673090 - RNA, 18 nt, Human
cagcggggcaguugugcu

SEQ ID NO: 673091 - RNA, 18 nt, Human
caggacaagggggccacc

SEQ ID NO: 673092 - RNA, 21 nt, Human
cauacaggcacaaagauucac

SEQ ID NO: 673093 - RNA, 21 nt, Human
cauaucacccacuccccaaaa

SEQ ID NO: 673094 - RNA, 20 nt, Human
caucccacgggccccacacc

SEQ ID NO: 673095 - RNA, 21 nt, Human
ccacgcccauggugccucucc

SEQ ID NO: 673096 - RNA, 18 nt, Human
ccagcagccaggacaggc

SEQ ID NO: 673097 - RNA, 23 nt, Human
ccaggacaggagaggaggcaaca

SEQ ID NO: 673098 - RNA, 22 nt, Human
ccauaucacccacuccccaaaa

SEQ ID NO: 673099 - RNA, 21 nt, Human
ccaucccacgggccccacacc

SEQ ID NO: 673100 - RNA, 23 nt, Human
ccaucccacgggccccacacccc

SEQ ID NO: 673101 - RNA, 27 nt, Human
cccacagaaucuaugagauaauaagca

SEQ ID NO: 673102 - RNA, 22 nt, Human
cccacgaugggggagugggggc

SEQ ID NO: 673103 - RNA, 21 nt, Human
cccacuccccaaaauauaguc

SEQ ID NO: 673104 - RNA, 18 nt, Human
cccacugugaagacagag

SEQ ID NO: 673105 - RNA, 19 nt, Human
cccagacagacacacacag

SEQ ID NO: 673106 - RNA, 24 nt, Human
cccagcaccagggaugcccaggca

SEQ ID NO: 673107 - RNA, 18 nt, Human
cccagccccacucucucc

SEQ ID NO: 673108 - RNA, 23 nt, Human
cccagcccugccucggggugggc

SEQ ID NO: 673109 - RNA, 18 nt, Human
cccagggaaagagaugga

SEQ ID NO: 673110 - RNA, 21 nt, Human
ccccagaccgagccugggccc

SEQ ID NO: 673111 - RNA, 23 nt, Human
ccccagaccgagccugggcccgc

SEQ ID NO: 673112 - RNA, 19 nt, Human
ccccagcaccagggaugcc

SEQ ID NO: 673113 - RNA, 22 nt, Human
cccccucccccagaaggucaca

SEQ ID NO: 673114 - RNA, 20 nt, Human
cccggguacccccuccugag

SEQ ID NO: 673115 - RNA, 25 nt, Human
cccucaaucaggacaaaccgggguc

SEQ ID NO: 673116 - RNA, 24 nt, Human
cccugagaaagggccgcagacccc

SEQ ID NO: 673117 - RNA, 25 nt, Human
cccugcucucuggggcacagguggu

SEQ ID NO: 673118 - RNA, 19 nt, Human
ccgcggccgcugcuccugc

SEQ ID NO: 673119 - RNA, 19 nt, Human
ccgggggugggauucgggg

SEQ ID NO: 673120 - RNA, 18 nt, Human
cgaaggcuacacagaccc

SEQ ID NO: 673121 - RNA, 21 nt, Human
cgaggaacugaggccuucagu

SEQ ID NO: 673122 - RNA, 27 nt, Human
cgcacacacacacguugcuuccucaca

SEQ ID NO: 673123 - RNA, 18 nt, Human
cggcgccgcggccgcugc

SEQ ID NO: 673124 - RNA, 18 nt, Human
cggcgccgcggccgcugc

SEQ ID NO: 673125 - RNA, 19 nt, Human
cggcgccgcggccgcugcu

SEQ ID NO: 673126 - RNA, 22 nt, Human
cggggccgggagggcuggugcc

SEQ ID NO: 673127 - RNA, 27 nt, Human
cgugcgcacacacacacguugcuuccu

SEQ ID NO: 673128 - RNA, 21 nt, Human
cuacagagacacaugugugca

SEQ ID NO: 673129 - RNA, 20 nt, Human
cucaaucaggacaaacauau

SEQ ID NO: 673130 - RNA, 23 nt, Human
cuccacgcccauggugccucucc

SEQ ID NO: 673131 - RNA, 23 nt, Human
cuccaggacgccaccuucccggg

SEQ ID NO: 673132 - RNA, 18 nt, Human
cuccugagcaccccaggu

SEQ ID NO: 673133 - RNA, 21 nt, Human
cuccugagcaccccagguccc

SEQ ID NO: 673134 - RNA, 23 nt, Human
cuccugagcaccccaggucccca

SEQ ID NO: 673135 - RNA, 24 nt, Human
cucucucucucucacugcacaaaa

SEQ ID NO: 673136 - RNA, 18 nt, Human
cugcuccugcccgcuccg

SEQ ID NO: 673137 - RNA, 18 nt, Human
cugcuggugggcccuggg

SEQ ID NO: 673138 - RNA, 19 nt, Human
gaagccccuccacgcccau

SEQ ID NO: 673139 - RNA, 26 nt, Human
gaagccccuccacgcccauggugccu

SEQ ID NO: 673140 - RNA, 22 nt, Human
gacccagccaaccugcacccag

SEQ ID NO: 673141 - RNA, 19 nt, Human
gacccagcucugcucagac

SEQ ID NO: 673142 - RNA, 20 nt, Human
gagaagaggaggaggccgag

SEQ ID NO: 673143 - RNA, 20 nt, Human
gagcaggggaggaagaaaag

SEQ ID NO: 673144 - RNA, 27 nt, Human
gaggagggugucgguguugggggaggg

SEQ ID NO: 673145 - RNA, 20 nt, Human
gaggcccaucccacgggccc

SEQ ID NO: 673146 - RNA, 18 nt, Human
gcaccuucagaacccaga

SEQ ID NO: 673147 - RNA, 18 nt, Human
gcacugcugcaggcccug

SEQ ID NO: 673148 - RNA, 18 nt, Human
gcaggggcagcggagggg

SEQ ID NO: 673149 - RNA, 19 nt, Human
gcaggggcagcggaggggg

SEQ ID NO: 673150 - RNA, 24 nt, Human
gcccucggauccugcuggugcugg

SEQ ID NO: 673151 - RNA, 20 nt, Human
gcccugggccagcccaaguu

SEQ ID NO: 673152 - RNA, 24 nt, Human
gcgguggccucgguuuccccagcc

SEQ ID NO: 673153 - RNA, 22 nt, Human
gcgugcgcacacacacacguug

SEQ ID NO: 673154 - RNA, 22 nt, Human
gcuuccucacacccaauaagac

SEQ ID NO: 673155 - RNA, 18 nt, Human
ggaggggggggcgguggc

SEQ ID NO: 673156 - RNA, 24 nt, Human
ggaggguacagacagaacaggagg

SEQ ID NO: 673157 - RNA, 22 nt, Human
ggcagcggaggggggggcggug

SEQ ID NO: 673158 - RNA, 19 nt, Human
ggcaggaugggccagcagc

SEQ ID NO: 673159 - RNA, 18 nt, Human
ggccggggccgggagggc

SEQ ID NO: 673160 - RNA, 18 nt, Human
ggccugaggugggagagg

SEQ ID NO: 673161 - RNA, 21 nt, Human
ggcgugcgcacacacacacgg

SEQ ID NO: 673162 - RNA, 20 nt, Human
ggcucggguccccuccuauu

SEQ ID NO: 673163 - RNA, 19 nt, Human
gggcacugcugcaggcccu

SEQ ID NO: 673164 - RNA, 19 nt, Human
gggcagcggaggggggggc

SEQ ID NO: 673165 - RNA, 24 nt, Human
gggcagcggaggggggggcggugg

SEQ ID NO: 673166 - RNA, 19 nt, Human
gggcagggccugagguggg

SEQ ID NO: 673167 - RNA, 20 nt, Human
gggcagggccugagguggga

SEQ ID NO: 673168 - RNA, 26 nt, Human
gggcaggggcagcggaggggggggcg

SEQ ID NO: 673169 - RNA, 20 nt, Human
gggcggcgugcaggcgggcg

SEQ ID NO: 673170 - RNA, 18 nt, Human
ggggagagggggcagggg

SEQ ID NO: 673171 - RNA, 19 nt, Human
ggggaggaagugggugggg

SEQ ID NO: 673172 - RNA, 22 nt, Human
ggggcuggcaggggcacugcug

SEQ ID NO: 673173 - RNA, 18 nt, Human
gguggagagagagcaggg

SEQ ID NO: 673174 - RNA, 20 nt, Human
gguggagagagagcagggga

SEQ ID NO: 673175 - RNA, 21 nt, Human
ggugggcuuggguguauguua

SEQ ID NO: 673176 - RNA, 20 nt, Human
ggugguggggaggaaguggg

SEQ ID NO: 673177 - RNA, 23 nt, Human
ggugguggggaggaagugggugg

SEQ ID NO: 673178 - RNA, 19 nt, Human
gugcuggcucccaucggcu

SEQ ID NO: 673179 - RNA, 18 nt, Human
guggauguggcugguccc

SEQ ID NO: 673180 - RNA, 21 nt, Human
gugguggggaggaagugggug

SEQ ID NO: 673181 - RNA, 24 nt, Human
guguuguuucugguugcuacauuu

SEQ ID NO: 673182 - RNA, 18 nt, Human
guugcuacauuugugguc

SEQ ID NO: 673183 - RNA, 22 nt, Human
uaaacauuuguugaguaaacac

SEQ ID NO: 673184 - RNA, 26 nt, Human
uacaacuacccaccucucuguauacc

SEQ ID NO: 673185 - RNA, 21 nt, Human
uacacgcagaugcacuuagau

SEQ ID NO: 673186 - RNA, 22 nt, Human
uacagagacacaugugugcaau

SEQ ID NO: 673187 - RNA, 25 nt, Human
uacccccuccugagcaccccagguc

SEQ ID NO: 673188 - RNA, 20 nt, Human
uacccuacaccacuauuaca

SEQ ID NO: 673189 - RNA, 21 nt, Human
uacccuacaccacuauuacac

SEQ ID NO: 673190 - RNA, 25 nt, Human
uaccucuggccggggccccggguac

SEQ ID NO: 673191 - RNA, 23 nt, Human
uagaguggaacacagaucguguc

SEQ ID NO: 673192 - RNA, 22 nt, Human
ucaacuccccccucccccagaa

SEQ ID NO: 673193 - RNA, 19 nt, Human
ucacacccaauaagaccaa

SEQ ID NO: 673194 - RNA, 23 nt, Human
ucacagcaagcauggccuggcac

SEQ ID NO: 673195 - RNA, 18 nt, Human
ucaccccagacagacaca

SEQ ID NO: 673196 - RNA, 18 nt, Human
ucacucagacucucucaa

SEQ ID NO: 673197 - RNA, 23 nt, Human
ucagacacgagcaaucuguuacc

SEQ ID NO: 673198 - RNA, 23 nt, Human
ucccaucggcuguccccccacgg

SEQ ID NO: 673199 - RNA, 24 nt, Human
uccccaaaauauagucaugcucau

SEQ ID NO: 673200 - RNA, 23 nt, Human
uccccagggucgggcagggccug

SEQ ID NO: 673201 - RNA, 20 nt, Human
uccccccucccccagaaggu

SEQ ID NO: 673202 - RNA, 20 nt, Human
uccccgcggcgggugggcgg

SEQ ID NO: 673203 - RNA, 21 nt, Human
ucccgggcaggcccugcucuc

SEQ ID NO: 673204 - RNA, 21 nt, Human
ucccucucucugagugugucc

SEQ ID NO: 673205 - RNA, 27 nt, Human
ucccugagaaagggccgcagaccccug

SEQ ID NO: 673206 - RNA, 20 nt, Human
ucccugcggcgccgcggccg

SEQ ID NO: 673207 - RNA, 26 nt, Human
ucccugcggcgccgcggccgcugcuc

SEQ ID NO: 673208 - RNA, 19 nt, Human
uccggcaccuucagaaccc

SEQ ID NO: 673209 - RNA, 25 nt, Human
ucucucaaaaaacacccagaaccuc

SEQ ID NO: 673210 - RNA, 22 nt, Human
ucucucucucucacugcacaaa

SEQ ID NO: 673211 - RNA, 20 nt, Human
ucugucuugguggaagaggc

SEQ ID NO: 673212 - RNA, 19 nt, Human
ucuugccagcuccccaucc

SEQ ID NO: 673213 - RNA, 21 nt, Human
ugagagaagaggaggaggccg

SEQ ID NO: 673214 - RNA, 25 nt, Human
ugagagaagaggaggaggccgagga

SEQ ID NO: 673215 - RNA, 18 nt, Human
ugagcaccccaggucccc

SEQ ID NO: 673216 - RNA, 23 nt, Human
ugaggugggagaggccuggaggu

SEQ ID NO: 673217 - RNA, 22 nt, Human
ugcaagaaccccagaccgagcc

SEQ ID NO: 673218 - RNA, 18 nt, Human
ugccucggggugggcagg

SEQ ID NO: 673219 - RNA, 19 nt, Human
ugccugguggccugaggcc

SEQ ID NO: 673220 - RNA, 20 nt, Human
ugcggggggagagggggcag

SEQ ID NO: 673221 - RNA, 18 nt, Human
ugcugcaggcccuguggu

SEQ ID NO: 673222 - RNA, 23 nt, Human
uggaaccggaggagugggcacag

SEQ ID NO: 673223 - RNA, 19 nt, Human
uggaagaggcgggucccgg

SEQ ID NO: 673224 - RNA, 21 nt, Human
uggagagagagcaggggagga

SEQ ID NO: 673225 - RNA, 22 nt, Human
uggccugaggcccaucccacgg

SEQ ID NO: 673226 - RNA, 23 nt, Human
uggccuggcacaguccccagcac

SEQ ID NO: 673227 - RNA, 21 nt, Human
ugggcaggggcagcggagggg

SEQ ID NO: 673228 - RNA, 25 nt, Human
ugggcaggggcagcggagggggggg

SEQ ID NO: 673229 - RNA, 22 nt, Human
ugggggagugggggcacccaca

SEQ ID NO: 673230 - RNA, 20 nt, Human
ugggggcacccacaugcggg

SEQ ID NO: 673231 - RNA, 20 nt, Human
uggggucacacgaguguggu

SEQ ID NO: 673232 - RNA, 23 nt, Human
uggugccagcugcaagaacccca

SEQ ID NO: 673233 - RNA, 22 nt, Human
ugguggccugaggcccauccca

SEQ ID NO: 673234 - RNA, 20 nt, Human
ugugaagacagaggagagag

SEQ ID NO: 673235 - RNA, 23 nt, Human
uguggagagacccacaugguaca

SEQ ID NO: 673236 - RNA, 19 nt, Human
uguggcuggucccgggggu

SEQ ID NO: 673237 - RNA, 22 nt, Human
uguugaguaaacacucacacga

SEQ ID NO: 673238 - RNA, 22 nt, Human
uucacacagacaccucacacau

SEQ ID NO: 673239 - RNA, 25 nt, Human
uuccguguauguuggacacaacccu

SEQ ID NO: 673240 - RNA, 21 nt, Human
uugaguaaacacucacacgaa

SEQ ID NO: 673241 - RNA, 26 nt, Human
uugccagcuccccauccuguuuuccc

SEQ ID NO: 673242 - RNA, 19 nt, Human
uuguuucugguugcuacau

SEQ ID NO: 673243 - RNA, 31 nt, Human
aaacacucaaaacauuuuccauuggaaacag

SEQ ID NO: 673244 - RNA, 22 nt, Human
aaaguccguuuacugcagggaa

SEQ ID NO: 673245 - RNA, 18 nt, Human
aagcugcaacguacaugg

SEQ ID NO: 673246 - RNA, 20 nt, Human
acuauucaagaaauucucca

SEQ ID NO: 673247 - RNA, 26 nt, Human
aggaagaggcgaaggaggagggaccc

SEQ ID NO: 673248 - RNA, 25 nt, Human
aggcgaaggaggaggcggaggaaga

SEQ ID NO: 673249 - RNA, 18 nt, Human
augcagaugugaauggaa

SEQ ID NO: 673250 - RNA, 20 nt, Human
auuugggagcauaauugcuc

SEQ ID NO: 673251 - RNA, 18 nt, Human
cagggaaucauuucacaa

SEQ ID NO: 673252 - RNA, 18 nt, Human
ccaaaccggguuuagaga

SEQ ID NO: 673253 - RNA, 21 nt, Human
cccggaucaccuugucaggag

SEQ ID NO: 673254 - RNA, 21 nt, Human
cgcccugggguugggauuagg

SEQ ID NO: 673255 - RNA, 23 nt, Human
cuggaguggcggcggcggaagcc

SEQ ID NO: 673256 - RNA, 24 nt, Human
gaaaaguccguuuacugcagggaa

SEQ ID NO: 673257 - RNA, 20 nt, Human
gagaaaacggaaauaaauaa

SEQ ID NO: 673258 - RNA, 24 nt, Human
gaggaagaggcgagggcgcgagag

SEQ ID NO: 673259 - RNA, 21 nt, Human
gaggcaggaagaggcgaagga

SEQ ID NO: 673260 - RNA, 21 nt, Human
gcccggaucaccuugucagga

SEQ ID NO: 673261 - RNA, 20 nt, Human
ggaaauaaauaagaaaacgc

SEQ ID NO: 673262 - RNA, 19 nt, Human
ggaggaagaggcgagggcg

SEQ ID NO: 673263 - RNA, 20 nt, Human
gggaggaggcaggaagaggc

SEQ ID NO: 673264 - RNA, 21 nt, Human
gggguugggauuaggcuggag

SEQ ID NO: 673265 - RNA, 18 nt, Human
gguugggauuaggcugga

SEQ ID NO: 673266 - RNA, 23 nt, Human
guuuagagaacaaaacuauucaa

SEQ ID NO: 673267 - RNA, 20 nt, Human
uaaacugaacaauaaacacu

SEQ ID NO: 673268 - RNA, 19 nt, Human
uaagaaaacgcuucgcccu

SEQ ID NO: 673269 - RNA, 21 nt, Human
ucuccacguauuuagguucau

SEQ ID NO: 673270 - RNA, 22 nt, Human
uguaaucaugcagaugugaaug

SEQ ID NO: 673271 - RNA, 20 nt, Human
uguaguggcgagaaaacgga

SEQ ID NO: 673272 - RNA, 23 nt, Human
uuuuuuauuguuaagcugcaacu

SEQ ID NO: 673273 - RNA, 18 nt, Human
accuccuuugacccugug

SEQ ID NO: 673274 - RNA, 23 nt, Human
agcccucagcacaggucacgucc

SEQ ID NO: 673275 - RNA, 21 nt, Human
aucgaaaaccuccuuugaccc

SEQ ID NO: 673276 - RNA, 23 nt, Human
caguaggcggaccuuggcucuuc

SEQ ID NO: 673277 - RNA, 22 nt, Human
uaggcggaccuuggcucuucuc

SEQ ID NO: 673278 - RNA, 21 nt, Human
uggcaguaggcggaccuuggc

SEQ ID NO: 673279 - RNA, 22 nt, Human
uggucugggcugaucgaaaacc

SEQ ID NO: 673280 - RNA, 18 nt, Human
aagcaggagggcagcugg

SEQ ID NO: 673281 - RNA, 21 nt, Human
acgcgccagggccgcuggagu

SEQ ID NO: 673282 - RNA, 19 nt, Human
agacggugaggcaggagcu

SEQ ID NO: 673283 - RNA, 22 nt, Human
agcaaggcagacggugaggcag

SEQ ID NO: 673284 - RNA, 23 nt, Human
agcuuggaggucagggcccacag

SEQ ID NO: 673285 - RNA, 19 nt, Human
aggcagacggugaggcagg

SEQ ID NO: 673286 - RNA, 22 nt, Human
aggcagacggugaggcaggagc

SEQ ID NO: 673287 - RNA, 19 nt, Human
aggcaggagcuuggagguc

SEQ ID NO: 673288 - RNA, 22 nt, Human
aggcaggagcuuggaggucagg

SEQ ID NO: 673289 - RNA, 22 nt, Human
cagcagccccuccacaggggug

SEQ ID NO: 673290 - RNA, 19 nt, Human
cagccacucaucacagccc

SEQ ID NO: 673291 - RNA, 18 nt, Human
caggcccgaagcaggagg

SEQ ID NO: 673292 - RNA, 22 nt, Human
caggcccgaagcaggagggcag

SEQ ID NO: 673293 - RNA, 19 nt, Human
ccacagcagccccuccaca

SEQ ID NO: 673294 - RNA, 19 nt, Human
ccagcuccggcccggggca

SEQ ID NO: 673295 - RNA, 23 nt, Human
ccauggcggugaugauuugggaa

SEQ ID NO: 673296 - RNA, 19 nt, Human
cccauggcggugaugauuu

SEQ ID NO: 673297 - RNA, 24 nt, Human
cccgucugcaaaucagcaugagaa

SEQ ID NO: 673298 - RNA, 21 nt, Human
cccucggcccaggcccgaagc

SEQ ID NO: 673299 - RNA, 18 nt, Human
cccuuuggggcugggccc

SEQ ID NO: 673300 - RNA, 19 nt, Human
ccgcuggagugcccagcuc

SEQ ID NO: 673301 - RNA, 19 nt, Human
ccgucugcaaaucagcaug

SEQ ID NO: 673302 - RNA, 20 nt, Human
cggcccggggcagcugcccg

SEQ ID NO: 673303 - RNA, 23 nt, Human
cggccuggcucccaccgggggcu

SEQ ID NO: 673304 - RNA, 18 nt, Human
cggggcagcugcccgagg

SEQ ID NO: 673305 - RNA, 25 nt, Human
gaacauggccuacacaaggcccucg

SEQ ID NO: 673306 - RNA, 21 nt, Human
gagcaaggcagacggugaggc

SEQ ID NO: 673307 - RNA, 19 nt, Human
gaggucagggcccacagca

SEQ ID NO: 673308 - RNA, 26 nt, Human
gcagccccuccacaggggugcccuuc

SEQ ID NO: 673309 - RNA, 19 nt, Human
gcagcugggagcaccaggg

SEQ ID NO: 673310 - RNA, 23 nt, Human
ggccauucacugcccuuuggggc

SEQ ID NO: 673311 - RNA, 20 nt, Human
gggccgcuggagugcccagc

SEQ ID NO: 673312 - RNA, 19 nt, Human
uccacaggggugccccguc

SEQ ID NO: 673313 - RNA, 20 nt, Human
ugaggcaggagcuuggaggu

SEQ ID NO: 673314 - RNA, 22 nt, Human
ugaggcaggagcuuggagguca

SEQ ID NO: 673315 - RNA, 22 nt, Human
ugcccagcuccggcccggggca

SEQ ID NO: 673316 - RNA, 19 nt, Human
ugcccucucccacugcuug

SEQ ID NO: 673317 - RNA, 21 nt, Human
ugggagcaccagggcaccggg

SEQ ID NO: 673318 - RNA, 18 nt, Human
uucacugcccuuuggggc

SEQ ID NO: 673319 - RNA, 19 nt, Human
uuucagagaaggccauuca

SEQ ID NO: 673320 - RNA, 19 nt, Human
aggggcuggggugcacaua

SEQ ID NO: 673321 - RNA, 22 nt, Human
ccaggagauuguuuucuagggc

SEQ ID NO: 673322 - RNA, 23 nt, Human
cuccccucagaaaugcuugagaa

SEQ ID NO: 673323 - RNA, 21 nt, Human
gaaauucuuucagcccuuccc

SEQ ID NO: 673324 - RNA, 23 nt, Human
gauaaggucaggccagccaaggu

SEQ ID NO: 673325 - RNA, 24 nt, Human
ggagaagcagacagcagcgucgac

SEQ ID NO: 673326 - RNA, 24 nt, Human
uccccauuuuugaggggcuggggu

SEQ ID NO: 673327 - RNA, 27 nt, Human
ucugugguuauguuuuaaaaauuauuu

SEQ ID NO: 673328 - RNA, 24 nt, Human
ugaggggcuggggugcacauagug

SEQ ID NO: 673329 - RNA, 19 nt, Human
uggggugcacauagugaaa

SEQ ID NO: 673330 - RNA, 21 nt, Human
aaaaacuaacaaagcucaacu

SEQ ID NO: 673331 - RNA, 19 nt, Human
aaaaauuuuuuuuuucuuu

SEQ ID NO: 673332 - RNA, 23 nt, Human
aaacuccugguuucaagcagucu

SEQ ID NO: 673333 - RNA, 24 nt, Human
aaagugcugggauuaaagguguga

SEQ ID NO: 673334 - RNA, 24 nt, Human
aagcagucuuccugccuuggcuuc

SEQ ID NO: 673335 - RNA, 25 nt, Human
aagcagucuuccugccuuggcuucc

SEQ ID NO: 673336 - RNA, 18 nt, Human
aagugcugggauuaaagg

SEQ ID NO: 673337 - RNA, 19 nt, Human
aagugcugggauuaaaggu

SEQ ID NO: 673338 - RNA, 26 nt, Human
aagugcugggauuaaaggugugagcc

SEQ ID NO: 673339 - RNA, 21 nt, Human
acacaugaaaaacuaacaaag

SEQ ID NO: 673340 - RNA, 18 nt, Human
acagcucacugcagccuc

SEQ ID NO: 673341 - RNA, 18 nt, Human
acugcagccucaaccucc

SEQ ID NO: 673342 - RNA, 19 nt, Human
acuggagugcaguggcgca

SEQ ID NO: 673343 - RNA, 19 nt, Human
acuucuucaccaguuaggc

SEQ ID NO: 673344 - RNA, 22 nt, Human
agccucaaccuccugaggcuca

SEQ ID NO: 673345 - RNA, 21 nt, Human
aggcuggucucaaacuccugg

SEQ ID NO: 673346 - RNA, 21 nt, Human
aggugugagccacugcaccca

SEQ ID NO: 673347 - RNA, 19 nt, Human
aguagcugggacuacaggc

SEQ ID NO: 673348 - RNA, 23 nt, Human
aguagcugggacuacaggcaugu

SEQ ID NO: 673349 - RNA, 21 nt, Human
agugcaguggcgcagucacag

SEQ ID NO: 673350 - RNA, 25 nt, Human
auguacaacauuccauuauuccagu

SEQ ID NO: 673351 - RNA, 24 nt, Human
caaagugcugggauuaaaggugug

SEQ ID NO: 673352 - RNA, 23 nt, Human
caaccuccugaggcucagaugau

SEQ ID NO: 673353 - RNA, 22 nt, Human
caagcagucuuccugccuuggc

SEQ ID NO: 673354 - RNA, 27 nt, Human
caagcagucuuccugccuuggcuuccc

SEQ ID NO: 673355 - RNA, 19 nt, Human
cacaguguuucuuggccag

SEQ ID NO: 673356 - RNA, 22 nt, Human
cagccucaaccuccugaggcuc

SEQ ID NO: 673357 - RNA, 24 nt, Human
cagccucaaccuccugaggcucag

SEQ ID NO: 673358 - RNA, 19 nt, Human
cagcuucuuagaaaaaaau

SEQ ID NO: 673359 - RNA, 19 nt, Human
caggaacuacaucuggaua

SEQ ID NO: 673360 - RNA, 20 nt, Human
caguggcgcagucacagcuc

SEQ ID NO: 673361 - RNA, 21 nt, Human
ccaaagugcugggauuaaagg

SEQ ID NO: 673362 - RNA, 24 nt, Human
ccaaagugcugggauuaaaggugu

SEQ ID NO: 673363 - RNA, 21 nt, Human
cccacaguguuucuuggccag

SEQ ID NO: 673364 - RNA, 22 nt, Human
cccagacuggagugcaguggcg

SEQ ID NO: 673365 - RNA, 18 nt, Human
ccugguuucaagcagucu

SEQ ID NO: 673366 - RNA, 23 nt, Human
ccugguuucaagcagucuuccug

SEQ ID NO: 673367 - RNA, 21 nt, Human
cucagccucuggaguagcugg

SEQ ID NO: 673368 - RNA, 24 nt, Human
cucagccucuggaguagcugggac

SEQ ID NO: 673369 - RNA, 24 nt, Human
cucuucuuagaauuuaauuuuaaa

SEQ ID NO: 673370 - RNA, 23 nt, Human
cugcagccucaaccuccugaggc

SEQ ID NO: 673371 - RNA, 24 nt, Human
cuggaguagcugggacuacaggca

SEQ ID NO: 673372 - RNA, 22 nt, Human
cuugcucuguugucccagacug

SEQ ID NO: 673373 - RNA, 23 nt, Human
cuugcuuuguugcucaggcuggu

SEQ ID NO: 673374 - RNA, 23 nt, Human
cuuuuuuuuuuuaagacaggguc

SEQ ID NO: 673375 - RNA, 24 nt, Human
cuuuuuuuuuuuaagacagggucu

SEQ ID NO: 673376 - RNA, 24 nt, Human
gacuacaggcaugugccaccaugc

SEQ ID NO: 673377 - RNA, 25 nt, Human
gaguagcugggacuacaggcaugug

SEQ ID NO: 673378 - RNA, 24 nt, Human
gagugcaguggcgcagucacagcu

SEQ ID NO: 673379 - RNA, 18 nt, Human
gauuaaaggugugagcca

SEQ ID NO: 673380 - RNA, 22 nt, Human
gauuaaaggugugagccacugc

SEQ ID NO: 673381 - RNA, 23 nt, Human
gauuaaaggugugagccacugca

SEQ ID NO: 673382 - RNA, 22 nt, Human
gccuuggcuucccaaagugcug

SEQ ID NO: 673383 - RNA, 24 nt, Human
gccuuggcuucccaaagugcuggg

SEQ ID NO: 673384 - RNA, 23 nt, Human
gcucaggcuggucucaaacuccu

SEQ ID NO: 673385 - RNA, 24 nt, Human
gcucuguugucccagacuggagug

SEQ ID NO: 673386 - RNA, 24 nt, Human
ggacuacaggcaugugccaccaug

SEQ ID NO: 673387 - RNA, 19 nt, Human
ggcuggucucaaacuccug

SEQ ID NO: 673388 - RNA, 24 nt, Human
gucuugcuuuguugcucaggcugg

SEQ ID NO: 673389 - RNA, 24 nt, Human
gugagccacugcacccagccucuu

SEQ ID NO: 673390 - RNA, 23 nt, Human
guggcgcagucacagcucacugc

SEQ ID NO: 673391 - RNA, 21 nt, Human
gugggcauuuaacccucaaau

SEQ ID NO: 673392 - RNA, 21 nt, Human
uaagacagggucuugcucugu

SEQ ID NO: 673393 - RNA, 22 nt, Human
uaagacagggucuugcucuguu

SEQ ID NO: 673394 - RNA, 24 nt, Human
uacaggcaugugccaccaugccca

SEQ ID NO: 673395 - RNA, 23 nt, Human
uacuucuucaccaguuaggccuu

SEQ ID NO: 673396 - RNA, 24 nt, Human
uagaccuuuggcauuuuuuaacuc

SEQ ID NO: 673397 - RNA, 19 nt, Human
uauagagauggggucuugc

SEQ ID NO: 673398 - RNA, 19 nt, Human
ucacugcagccucaaccuc

SEQ ID NO: 673399 - RNA, 22 nt, Human
ucacugcagccucaaccuccug

SEQ ID NO: 673400 - RNA, 18 nt, Human
ucagccucuggaguagcu

SEQ ID NO: 673401 - RNA, 23 nt, Human
ucccaaagugcugggauuaaagg

SEQ ID NO: 673402 - RNA, 19 nt, Human
ucccagacuggagugcagu

SEQ ID NO: 673403 - RNA, 24 nt, Human
ucucaaacuccugguuucaagcag

SEQ ID NO: 673404 - RNA, 24 nt, Human
ucuggaguagcugggacuacaggc

SEQ ID NO: 673405 - RNA, 23 nt, Human
ucuugcucuguugucccagacug

SEQ ID NO: 673406 - RNA, 25 nt, Human
ucuugcucuguugucccagacugga

SEQ ID NO: 673407 - RNA, 23 nt, Human
ucuugcuuuguugcucaggcugg

SEQ ID NO: 673408 - RNA, 24 nt, Human
ucuugcuuuguugcucaggcuggu

SEQ ID NO: 673409 - RNA, 25 nt, Human
ugaaaaacuaacaaagcucaacuuu

SEQ ID NO: 673410 - RNA, 19 nt, Human
ugaaagcauuuauuauauc

SEQ ID NO: 673411 - RNA, 19 nt, Human
ugccuuggcuucccaaagu

SEQ ID NO: 673412 - RNA, 24 nt, Human
uggagugcaguggcgcagucacag

SEQ ID NO: 673413 - RNA, 28 nt, Human
uggagugcaguggcgcaguccuagcacg

SEQ ID NO: 673414 - RNA, 24 nt, Human
uggcgcagucacagcucacugcag

SEQ ID NO: 673415 - RNA, 21 nt, Human
ugggacuacaggcaugugcca

SEQ ID NO: 673416 - RNA, 22 nt, Human
ugggacuacaggcaugugccac

SEQ ID NO: 673417 - RNA, 24 nt, Human
ugggacuacaggcaugugccacca

SEQ ID NO: 673418 - RNA, 19 nt, Human
ugggauuaaaggugugagc

SEQ ID NO: 673419 - RNA, 22 nt, Human
ugggauuaaaggugugagccac

SEQ ID NO: 673420 - RNA, 22 nt, Human
ugggauuaaaggugugagccac

SEQ ID NO: 673421 - RNA, 24 nt, Human
ugggauuaaaggugugagccacug

SEQ ID NO: 673422 - RNA, 19 nt, Human
uguugcucaggcuggucuc

SEQ ID NO: 673423 - RNA, 20 nt, Human
uguugcucaggcuggucuca

SEQ ID NO: 673424 - RNA, 22 nt, Human
uguugcucaggcuggucucaaa

SEQ ID NO: 673425 - RNA, 22 nt, Human
uuaacucuauuucaggaacuac

SEQ ID NO: 673426 - RNA, 19 nt, Human
uuauagagauggggucuug

SEQ ID NO: 673427 - RNA, 24 nt, Human
uuauagagauggggucuugcuuug

SEQ ID NO: 673428 - RNA, 20 nt, Human
uucaagcagucuuccugccu

SEQ ID NO: 673429 - RNA, 21 nt, Human
uuucuuggccaguucuucuag

SEQ ID NO: 673430 - RNA, 21 nt, Human
uuuggcauuuuuuaacucuau

SEQ ID NO: 673431 - RNA, 24 nt, Human
uuuguugcucaggcuggucucaaa

SEQ ID NO: 673432 - RNA, 18 nt, Human
uuuuuauagagauggggu

SEQ ID NO: 673433 - RNA, 19 nt, Human
uuuuuauagagaugggguc

SEQ ID NO: 673434 - RNA, 24 nt, Human
uuuuuuuuuuaagacagggucuug

SEQ ID NO: 673435 - RNA, 33 nt, Human
uuuuuuuuuucuuuuuuuuuuuaagacaggggg

SEQ ID NO: 673436 - RNA, 27 nt, Human
aaacccaacacauggaccaaaucagaa

SEQ ID NO: 673437 - RNA, 25 nt, Human
aaacucaagguaggaagaggaugau

SEQ ID NO: 673438 - RNA, 20 nt, Human
aagggggggauauugaagga

SEQ ID NO: 673439 - RNA, 21 nt, Human
acaccaagccccaggccuggc

SEQ ID NO: 673440 - RNA, 26 nt, Human
acagagacaccgacagucagacacca

SEQ ID NO: 673441 - RNA, 26 nt, Human
agacaccgacagucagacaccaagcc

SEQ ID NO: 673442 - RNA, 18 nt, Human
agcacagagacaccgaca

SEQ ID NO: 673443 - RNA, 24 nt, Human
aggaagaggaugauggcugcugcc

SEQ ID NO: 673444 - RNA, 19 nt, Human
aggaggcuccggcgcggcg

SEQ ID NO: 673445 - RNA, 24 nt, Human
aggcaggaaagaaggaggcuccgg

SEQ ID NO: 673446 - RNA, 20 nt, Human
agggaaggggaggugagggg

SEQ ID NO: 673447 - RNA, 20 nt, Human
agguaggaagaggaugaugg

SEQ ID NO: 673448 - RNA, 21 nt, Human
aguacagggacagccccggga

SEQ ID NO: 673449 - RNA, 21 nt, Human
agucccaccucacaggguaga

SEQ ID NO: 673450 - RNA, 23 nt, Human
augagcggcagugacaccaagac

SEQ ID NO: 673451 - RNA, 21 nt, Human
caaacccaacacauggaccaa

SEQ ID NO: 673452 - RNA, 18 nt, Human
caagccccaggccuggcc

SEQ ID NO: 673453 - RNA, 20 nt, Human
cacaguuccaucuugagacc

SEQ ID NO: 673454 - RNA, 23 nt, Human
cacauggaccaaaucagaaggac

SEQ ID NO: 673455 - RNA, 18 nt, Human
caccguguaguacaggga

SEQ ID NO: 673456 - RNA, 19 nt, Human
caccucagauccuaaccag

SEQ ID NO: 673457 - RNA, 22 nt, Human
caccucagauccuaaccagucu

SEQ ID NO: 673458 - RNA, 19 nt, Human
cagacaccaagccccaggc

SEQ ID NO: 673459 - RNA, 21 nt, Human
cagagacaccgacagucagac

SEQ ID NO: 673460 - RNA, 18 nt, Human
cagaggcaggaaagaagg

SEQ ID NO: 673461 - RNA, 19 nt, Human
cagcacagagacaccgaca

SEQ ID NO: 673462 - RNA, 20 nt, Human
cagcccggaaucagaggcag

SEQ ID NO: 673463 - RNA, 21 nt, Human
cagggaccucccauggggucu

SEQ ID NO: 673464 - RNA, 18 nt, Human
cagucagacaccaagccc

SEQ ID NO: 673465 - RNA, 23 nt, Human
ccaaacccaacacauggaccaaa

SEQ ID NO: 673466 - RNA, 20 nt, Human
ccaccuccagauccgccccu

SEQ ID NO: 673467 - RNA, 22 nt, Human
ccacugcagccugguuuuuggg

SEQ ID NO: 673468 - RNA, 19 nt, Human
ccuugagucacagcauugg

SEQ ID NO: 673469 - RNA, 20 nt, Human
cgaaacauccugggacucac

SEQ ID NO: 673470 - RNA, 20 nt, Human
cgacagucagacaccaagcc

SEQ ID NO: 673471 - RNA, 22 nt, Human
cucacaggguagaaaaacucaa

SEQ ID NO: 673472 - RNA, 20 nt, Human
cugcagccugguuuuugggu

SEQ ID NO: 673473 - RNA, 20 nt, Human
gacugggguggguggcaugg

SEQ ID NO: 673474 - RNA, 18 nt, Human
gacuuccccgcucucccc

SEQ ID NO: 673475 - RNA, 19 nt, Human
gcaacgucuacuucuaaac

SEQ ID NO: 673476 - RNA, 20 nt, Human
gccaaacccaacacauggac

SEQ ID NO: 673477 - RNA, 23 nt, Human
gccccgggagugacaggaagggg

SEQ ID NO: 673478 - RNA, 21 nt, Human
gcugccuucagagauuucuac

SEQ ID NO: 673479 - RNA, 22 nt, Human
ggaagggggggauauugaagga

SEQ ID NO: 673480 - RNA, 20 nt, Human
ggcaacgucuacuucuaaac

SEQ ID NO: 673481 - RNA, 21 nt, Human
ggcccucugaguccccagcac

SEQ ID NO: 673482 - RNA, 19 nt, Human
gggaaggggaggugagggg

SEQ ID NO: 673483 - RNA, 18 nt, Human
ggggggauauugaaggag

SEQ ID NO: 673484 - RNA, 19 nt, Human
guccaggagaagcgugaag

SEQ ID NO: 673485 - RNA, 18 nt, Human
guguuuucuguuuuuugu

SEQ ID NO: 673486 - RNA, 21 nt, Human
guuuuuucucucucucucucg

SEQ ID NO: 673487 - RNA, 20 nt, Human
uagaggaguugagucuugau

SEQ ID NO: 673488 - RNA, 19 nt, Human
ucagauccuaaccagucuc

SEQ ID NO: 673489 - RNA, 19 nt, Human
uccaggagaagcgugaagc

SEQ ID NO: 673490 - RNA, 22 nt, Human
ucccagaaucugggcccuggug

SEQ ID NO: 673491 - RNA, 25 nt, Human
uccccagcaccucccagaaucuggg

SEQ ID NO: 673492 - RNA, 20 nt, Human
uccccgcucuccccggcucc

SEQ ID NO: 673493 - RNA, 21 nt, Human
ucccugggcaagagggaaggg

SEQ ID NO: 673494 - RNA, 21 nt, Human
uccggcgcggcggcucucucu

SEQ ID NO: 673495 - RNA, 23 nt, Human
uccuguggaagaguucccuggag

SEQ ID NO: 673496 - RNA, 20 nt, Human
ucucgcuuccucucucucuu

SEQ ID NO: 673497 - RNA, 19 nt, Human
ucucucucucgcuuccucu

SEQ ID NO: 673498 - RNA, 19 nt, Human
ugaaggagauggcuuggac

SEQ ID NO: 673499 - RNA, 19 nt, Human
ugacaggaagggggggaua

SEQ ID NO: 673500 - RNA, 21 nt, Human
ugagagggugugcucauggua

SEQ ID NO: 673501 - RNA, 24 nt, Human
ugaguccccagcaccucccagaau

SEQ ID NO: 673502 - RNA, 19 nt, Human
ugcagccugguuuuugggu

SEQ ID NO: 673503 - RNA, 20 nt, Human
uggacgaaacauccugggac

SEQ ID NO: 673504 - RNA, 22 nt, Human
uggacgaaacauccugggacuc

SEQ ID NO: 673505 - RNA, 22 nt, Human
uggcaacgucuacuucuaaacu

SEQ ID NO: 673506 - RNA, 21 nt, Human
uggcucaagcuaguccauguc

SEQ ID NO: 673507 - RNA, 18 nt, Human
uggcuuggacagaggcua

SEQ ID NO: 673508 - RNA, 23 nt, Human
ugggcaagagggaaggggaggug

SEQ ID NO: 673509 - RNA, 21 nt, Human
ugggcuggacugaccuucuga

SEQ ID NO: 673510 - RNA, 20 nt, Human
ugggguggguggcauggaug

SEQ ID NO: 673511 - RNA, 19 nt, Human
uggguggcauggaugcaga

SEQ ID NO: 673512 - RNA, 24 nt, Human
uggguggcauggaugcagagacuu

SEQ ID NO: 673513 - RNA, 21 nt, Human
uguccuguggaagaguucccu

SEQ ID NO: 673514 - RNA, 20 nt, Human
uuacucagaacgaagggcgg

SEQ ID NO: 673515 - RNA, 22 nt, Human
uucagagauuucuacuaaggcc

SEQ ID NO: 673516 - RNA, 22 nt, Human
uuccccgcucuccccggcucca

SEQ ID NO: 673517 - RNA, 19 nt, Human
uuucuacuaaggccaaacc

SEQ ID NO: 673518 - RNA, 20 nt, Human
uuugggugccacugccuugg

SEQ ID NO: 673519 - RNA, 18 nt, Human
uuuguccaccuccagauc

SEQ ID NO: 673520 - RNA, 19 nt, Human
aagauaccccaccacaaca

SEQ ID NO: 673521 - RNA, 21 nt, Human
aaggaaccuuaguccuuaaac

SEQ ID NO: 673522 - RNA, 21 nt, Human
aaggcacaaauagagccugag

SEQ ID NO: 673523 - RNA, 21 nt, Human
aauaucacuucaacagguagc

SEQ ID NO: 673524 - RNA, 21 nt, Human
aauggccuaccauuuuuagau

SEQ ID NO: 673525 - RNA, 20 nt, Human
agacuuagagcacucuggug

SEQ ID NO: 673526 - RNA, 20 nt, Human
agauacucaaaaguugcucc

SEQ ID NO: 673527 - RNA, 18 nt, Human
agcacucuggugguccca

SEQ ID NO: 673528 - RNA, 19 nt, Human
aguccuauguuuugcuaau

SEQ ID NO: 673529 - RNA, 21 nt, Human
augaauaucacuucaacaggu

SEQ ID NO: 673530 - RNA, 29 nt, Human
augauuauaggaaaaaggcugaagauacc

SEQ ID NO: 673531 - RNA, 19 nt, Human
caacacacucucuaaaugc

SEQ ID NO: 673532 - RNA, 23 nt, Human
caacucaagagaugcugcuauga

SEQ ID NO: 673533 - RNA, 22 nt, Human
caagaagcacugaaagauggca

SEQ ID NO: 673534 - RNA, 21 nt, Human
caagagaugcugcuaugaaau

SEQ ID NO: 673535 - RNA, 21 nt, Human
caagaggagugcuguguagca

SEQ ID NO: 673536 - RNA, 23 nt, Human
caccauggaucugaagcaaacaa

SEQ ID NO: 673537 - RNA, 18 nt, Human
ccugggaaccaagaagca

SEQ ID NO: 673538 - RNA, 24 nt, Human
cgagucaaagucccaggagacugg

SEQ ID NO: 673539 - RNA, 21 nt, Human
cucaagagaugcugcuaugaa

SEQ ID NO: 673540 - RNA, 19 nt, Human
cucacugcuggagucuugg

SEQ ID NO: 673541 - RNA, 19 nt, Human
cucauauauauuuauuccc

SEQ ID NO: 673542 - RNA, 20 nt, Human
cugaagauaccccaccacaa

SEQ ID NO: 673543 - RNA, 18 nt, Human
cugugacacacuuccucc

SEQ ID NO: 673544 - RNA, 21 nt, Human
cuucaacagguagcuauucgu

SEQ ID NO: 673545 - RNA, 23 nt, Human
gaagauaccccaccacaacaaag

SEQ ID NO: 673546 - RNA, 22 nt, Human
gacaaaaggcucucuggaucug

SEQ ID NO: 673547 - RNA, 19 nt, Human
gccaauuaucagcucccug

SEQ ID NO: 673548 - RNA, 23 nt, Human
guucacugugacacacuuccucc

SEQ ID NO: 673549 - RNA, 20 nt, Human
uaaaaaaauaccagagaggu

SEQ ID NO: 673550 - RNA, 22 nt, Human
uaaaaugugugcaguucagaau

SEQ ID NO: 673551 - RNA, 26 nt, Human
uaaagauacucaaaaguugcucccca

SEQ ID NO: 673552 - RNA, 26 nt, Human
uaaccaagcuaaggcacaaauagagc

SEQ ID NO: 673553 - RNA, 19 nt, Human
uaacugaagauaccccacc

SEQ ID NO: 673554 - RNA, 21 nt, Human
uacacaaaggaagcgugcaau

SEQ ID NO: 673555 - RNA, 20 nt, Human
uacaugguauuaacaccaug

SEQ ID NO: 673556 - RNA, 19 nt, Human
uagcuaaacaaaaucauuc

SEQ ID NO: 673557 - RNA, 20 nt, Human
uagcuaaacaaaaucauuca

SEQ ID NO: 673558 - RNA, 20 nt, Human
ucaauauucacuggagacuu

SEQ ID NO: 673559 - RNA, 23 nt, Human
ucaauauucacuggagacuuaga

SEQ ID NO: 673560 - RNA, 18 nt, Human
ucagcaggagcgcgccga

SEQ ID NO: 673561 - RNA, 22 nt, Human
uccaugauuauaggaaaaaggc

SEQ ID NO: 673562 - RNA, 26 nt, Human
ucuccggcgacccucagcaggagcug

SEQ ID NO: 673563 - RNA, 21 nt, Human
ugcuaugaaauguccuuagag

SEQ ID NO: 673564 - RNA, 24 nt, Human
ugcugcuaugaaauguccuuagag

SEQ ID NO: 673565 - RNA, 20 nt, Human
uggagucuuggaagaugcuc

SEQ ID NO: 673566 - RNA, 21 nt, Human
uggaucugaagcaaacaaugc

SEQ ID NO: 673567 - RNA, 18 nt, Human
ugucagauacauuuccac

SEQ ID NO: 673568 - RNA, 23 nt, Human
uguucacugugacacacuuccuc

SEQ ID NO: 673569 - RNA, 22 nt, Human
uuccuccacacugaugcaggca

SEQ ID NO: 673570 - RNA, 19 nt, Human
uuuuuuuuuggggaucaag

SEQ ID NO: 673571 - RNA, 20 nt, Human
uuuuuuuuuuuuuggggauc

SEQ ID NO: 673572 - RNA, 23 nt, Human
uuuuuuuuuuuuuuuuuggggau

SEQ ID NO: 673573 - RNA, 25 nt, Human
aaacaccugucagaugcuaaaaaua

SEQ ID NO: 673574 - RNA, 21 nt, Human
aagcagcaacucaagagccca

SEQ ID NO: 673575 - RNA, 27 nt, Human
acacuaccgucaccaaaguuuauaagc

SEQ ID NO: 673576 - RNA, 22 nt, Human
accacuuuuuuguaaacaccug

SEQ ID NO: 673577 - RNA, 18 nt, Human
aggcgggcggggaggggg

SEQ ID NO: 673578 - RNA, 21 nt, Human
agggcugaggcgcugaaggug

SEQ ID NO: 673579 - RNA, 21 nt, Human
agggggcugcuguggccugau

SEQ ID NO: 673580 - RNA, 21 nt, Human
auagccgaguggaacaacgcc

SEQ ID NO: 673581 - RNA, 22 nt, Human
caaaugucuacacggcaauuca

SEQ ID NO: 673582 - RNA, 19 nt, Human
caccaaaguuuauaagcaa

SEQ ID NO: 673583 - RNA, 18 nt, Human
caccgggaaggcgggcgg

SEQ ID NO: 673584 - RNA, 19 nt, Human
cagcggucgccucgccucg

SEQ ID NO: 673585 - RNA, 21 nt, Human
ccaggugagguccacucugcc

SEQ ID NO: 673586 - RNA, 19 nt, Human
ccgccccgccccggcuccc

SEQ ID NO: 673587 - RNA, 22 nt, Human
ccgggccccugaaggucaccgg

SEQ ID NO: 673588 - RNA, 20 nt, Human
ccuucgcugggccgccgccc

SEQ ID NO: 673589 - RNA, 21 nt, Human
ccuucgcugggccgccgcccc

SEQ ID NO: 673590 - RNA, 21 nt, Human
cgccucgccucgugccgaauu

SEQ ID NO: 673591 - RNA, 20 nt, Human
cuaccuccgucaaauaacaa

SEQ ID NO: 673592 - RNA, 21 nt, Human
cugcagcaccucuaacagucc

SEQ ID NO: 673593 - RNA, 20 nt, Human
gcgcccgccacccgggcccc

SEQ ID NO: 673594 - RNA, 22 nt, Human
gcgggcggggagggggcggggc

SEQ ID NO: 673595 - RNA, 19 nt, Human
gcggggccagaccgcccgc

SEQ ID NO: 673596 - RNA, 20 nt, Human
ggccgccgccccgccccggc

SEQ ID NO: 673597 - RNA, 25 nt, Human
ggcgcugaaggugaguuuccaggug

SEQ ID NO: 673598 - RNA, 20 nt, Human
ggcggggagggggcggggcc

SEQ ID NO: 673599 - RNA, 21 nt, Human
ggcggggagggggcggggcca

SEQ ID NO: 673600 - RNA, 20 nt, Human
gggcggggagggggcggggc

SEQ ID NO: 673601 - RNA, 22 nt, Human
gggcggggagggggcggggcca

SEQ ID NO: 673602 - RNA, 19 nt, Human
uaacucuggguugaaaccu

SEQ ID NO: 673603 - RNA, 24 nt, Human
uaccgucaccaaaguuuauaagca

SEQ ID NO: 673604 - RNA, 18 nt, Human
uagccgaguggaacaacg

SEQ ID NO: 673605 - RNA, 20 nt, Human
ugcuaaaaauacggccuuac

SEQ ID NO: 673606 - RNA, 24 nt, Human
ugcuguggccugauagccgagugg

SEQ ID NO: 673607 - RNA, 22 nt, Human
uuuguaaacaccugucagaugc

SEQ ID NO: 673608 - RNA, 24 nt, Human
uuuuuuuuuuuaggaaaagggacu

SEQ ID NO: 673609 - RNA, 18 nt, Human
aacauacacaaucuacag

SEQ ID NO: 673610 - RNA, 22 nt, Human
aacauacacaaucuacaguaua

SEQ ID NO: 673611 - RNA, 20 nt, Human
accacgauuauccuguuuuc

SEQ ID NO: 673612 - RNA, 19 nt, Human
agcgagcgcccuaagauuu

SEQ ID NO: 673613 - RNA, 22 nt, Human
agcggucacagccguccggagc

SEQ ID NO: 673614 - RNA, 21 nt, Human
aggcagcucugcugggcgugg

SEQ ID NO: 673615 - RNA, 19 nt, Human
aggggacccggcugcgcgc

SEQ ID NO: 673616 - RNA, 22 nt, Human
cacauaacauacacaaucuaca

SEQ ID NO: 673617 - RNA, 20 nt, Human
cacugcgcgcccggcccggc

SEQ ID NO: 673618 - RNA, 20 nt, Human
cauuuacaccacgauuaucc

SEQ ID NO: 673619 - RNA, 22 nt, Human
ccacacucagcaugacuaucuc

SEQ ID NO: 673620 - RNA, 25 nt, Human
ccacugcgcgcccggcccggcugcu

SEQ ID NO: 673621 - RNA, 20 nt, Human
cccagugauguugcccauga

SEQ ID NO: 673622 - RNA, 22 nt, Human
cccccggccagcggucacagcc

SEQ ID NO: 673623 - RNA, 25 nt, Human
cccggcugccgugugcgugcgcccg

SEQ ID NO: 673624 - RNA, 18 nt, Human
ccgagaaggcagcucugc

SEQ ID NO: 673625 - RNA, 23 nt, Human
cgagcccccggccagcggucaca

SEQ ID NO: 673626 - RNA, 25 nt, Human
cgccccggaccucuggggcugcagc

SEQ ID NO: 673627 - RNA, 21 nt, Human
cggcccgagcccccggccagc

SEQ ID NO: 673628 - RNA, 25 nt, Human
cggcccgagcccccggccagcgggg

SEQ ID NO: 673629 - RNA, 21 nt, Human
cggcggcccgagcccccggcc

SEQ ID NO: 673630 - RNA, 22 nt, Human
cgggcagcagggcgcuggauac

SEQ ID NO: 673631 - RNA, 18 nt, Human
cguggcuucuuuccaccc

SEQ ID NO: 673632 - RNA, 22 nt, Human
cgugugcgugcgcccgugugug

SEQ ID NO: 673633 - RNA, 26 nt, Human
cuccgagaaggcagcucugcugggcg

SEQ ID NO: 673634 - RNA, 21 nt, Human
cugcgcccucgaggggacccg

SEQ ID NO: 673635 - RNA, 20 nt, Human
cugguugcagaaggcuccga

SEQ ID NO: 673636 - RNA, 20 nt, Human
gaaagacccccuaaugaugc

SEQ ID NO: 673637 - RNA, 22 nt, Human
gaccucuggggcugcagcugac

SEQ ID NO: 673638 - RNA, 22 nt, Human
gaggggcggggcggggcggccc

SEQ ID NO: 673639 - RNA, 21 nt, Human
gcaccacaaguccugguugca

SEQ ID NO: 673640 - RNA, 18 nt, Human
gcgcggggagagcccggg

SEQ ID NO: 673641 - RNA, 19 nt, Human
gcucugugucugcagcugc

SEQ ID NO: 673642 - RNA, 18 nt, Human
gcugcagcugacaggguc

SEQ ID NO: 673643 - RNA, 20 nt, Human
ggaauggugucaacgcccuc

SEQ ID NO: 673644 - RNA, 18 nt, Human
ggcaaagggccgaagucc

SEQ ID NO: 673645 - RNA, 20 nt, Human
ggccccagugauguugccca

SEQ ID NO: 673646 - RNA, 20 nt, Human
gggagagcccgggcagcagg

SEQ ID NO: 673647 - RNA, 22 nt, Human
gggccgaaguccaggaggagga

SEQ ID NO: 673648 - RNA, 20 nt, Human
guuuaaacaacccacacuca

SEQ ID NO: 673649 - RNA, 19 nt, Human
uacaguauagaaaguauaa

SEQ ID NO: 673650 - RNA, 22 nt, Human
uagcaaugaaagacccccuaau

SEQ ID NO: 673651 - RNA, 18 nt, Human
uauuaagaaaaagaaacc

SEQ ID NO: 673652 - RNA, 20 nt, Human
uccgagaaggcagcucugcu

SEQ ID NO: 673653 - RNA, 20 nt, Human
uccgcgcggggcgaggggcu

SEQ ID NO: 673654 - RNA, 19 nt, Human
uccugguugcagaaggcuc

SEQ ID NO: 673655 - RNA, 27 nt, Human
ucuucuugcucaguuaugagaugauga

SEQ ID NO: 673656 - RNA, 19 nt, Human
ugaugcacuggcggacagc

SEQ ID NO: 673657 - RNA, 18 nt, Human
uggcgcaccggaggcugc

SEQ ID NO: 673658 - RNA, 18 nt, Human
ugugcgugcgcccgugug

SEQ ID NO: 673659 - RNA, 18 nt, Human
ugugucugcagcugcacc

SEQ ID NO: 673660 - RNA, 19 nt, Human
ugugucugcagcugcacca

SEQ ID NO: 673661 - RNA, 21 nt, Human
uguuuuguuuucaagccuuca

SEQ ID NO: 673662 - RNA, 24 nt, Human
uuauuagcuuuccauaaaaacaca

SEQ ID NO: 673663 - RNA, 23 nt, Human
uuuauuagcuuuccauaaaaaca

SEQ ID NO: 673664 - RNA, 18 nt, Human
agggucugugggggaggc

SEQ ID NO: 673665 - RNA, 25 nt, Human
augccccugcuuccccuuuccccaa

SEQ ID NO: 673666 - RNA, 21 nt, Human
cacugcugcucuuuuuguucc

SEQ ID NO: 673667 - RNA, 20 nt, Human
cccaaaccccucacccucaa

SEQ ID NO: 673668 - RNA, 22 nt, Human
cccaaaccccucacccucaauu

SEQ ID NO: 673669 - RNA, 23 nt, Human
cccaaaccccucacccucaauuc

SEQ ID NO: 673670 - RNA, 18 nt, Human
ccccaaaccccucacccu

SEQ ID NO: 673671 - RNA, 23 nt, Human
ccccaaaccccucacccucaauu

SEQ ID NO: 673672 - RNA, 24 nt, Human
ccccucacccucaauucccaccug

SEQ ID NO: 673673 - RNA, 19 nt, Human
ccccugcuuccccuuuccc

SEQ ID NO: 673674 - RNA, 27 nt, Human
ccccugcuuccccuuuccccaaacccc

SEQ ID NO: 673675 - RNA, 21 nt, Human
cccucaauucccaccugccuc

SEQ ID NO: 673676 - RNA, 18 nt, Human
cccucuguuguauugcac

SEQ ID NO: 673677 - RNA, 19 nt, Human
cccugcuuccccuuucccc

SEQ ID NO: 673678 - RNA, 20 nt, Human
ccuucucacugcugcucuuu

SEQ ID NO: 673679 - RNA, 19 nt, Human
cggugugauguucgcggga

SEQ ID NO: 673680 - RNA, 23 nt, Human
cucaguguuuugucucugccucg

SEQ ID NO: 673681 - RNA, 23 nt, Human
cuucaaacacuccccacccugac

SEQ ID NO: 673682 - RNA, 23 nt, Human
cuucucacugcugcucuuuuugu

SEQ ID NO: 673683 - RNA, 25 nt, Human
cuuuccccaaaccccucacccucaa

SEQ ID NO: 673684 - RNA, 21 nt, Human
gaagaguggagggagcucuag

SEQ ID NO: 673685 - RNA, 19 nt, Human
ggagggagguacugggggg

SEQ ID NO: 673686 - RNA, 21 nt, Human
ggaggggagggagguacuggg

SEQ ID NO: 673687 - RNA, 25 nt, Human
gggaagaguggagggagccgguacc

SEQ ID NO: 673688 - RNA, 21 nt, Human
gggaugggggcagggcuaggg

SEQ ID NO: 673689 - RNA, 22 nt, Human
gggaugggggcagggcuagggg

SEQ ID NO: 673690 - RNA, 23 nt, Human
gggcagggcuaggggucuugggg

SEQ ID NO: 673691 - RNA, 27 nt, Human
ggggaggggagggagguacuggggggc

SEQ ID NO: 673692 - RNA, 27 nt, Human
ggggaggggagggagguacuggggggc

SEQ ID NO: 673693 - RNA, 23 nt, Human
ggggaugggggcagggcuagggg

SEQ ID NO: 673694 - RNA, 23 nt, Human
guguuuugucucugccucgucug

SEQ ID NO: 673695 - RNA, 19 nt, Human
uccccaaaccccucacccu

SEQ ID NO: 673696 - RNA, 22 nt, Human
ucugcaaacuucaaacacuccc

SEQ ID NO: 673697 - RNA, 19 nt, Human
ucugccucgucugucucuu

SEQ ID NO: 673698 - RNA, 22 nt, Human
ucugccucucucuuugccuucu

SEQ ID NO: 673699 - RNA, 21 nt, Human
ucugucucuucugccucucuc

SEQ ID NO: 673700 - RNA, 21 nt, Human
ugccucgucugucucuucugc

SEQ ID NO: 673701 - RNA, 20 nt, Human
ugcugcucuuuuuguuccuc

SEQ ID NO: 673702 - RNA, 18 nt, Human
ugucucuaucacugucuc

SEQ ID NO: 673703 - RNA, 22 nt, Human
uguuuugucucugccucgucug

SEQ ID NO: 673704 - RNA, 23 nt, Human
uucaaacacuccccacccugacu

SEQ ID NO: 673705 - RNA, 21 nt, Human
uugccuucucacugcugcucu

SEQ ID NO: 673706 - RNA, 22 nt, Human
aaagaggagaauuuuuaugaua

SEQ ID NO: 673707 - RNA, 19 nt, Human
augacuuuuuguggacagu

SEQ ID NO: 673708 - RNA, 20 nt, Human
gccauguugaagcccagcuu

SEQ ID NO: 673709 - RNA, 18 nt, Human
uuuuuuuuuuuuuuuuug

SEQ ID NO: 673710 - RNA, 18 nt, Human
ucaguuaaaaaacuccuc

SEQ ID NO: 673711 - RNA, 25 nt, Human
uuuacauuuaaaacauuuuaugagg

SEQ ID NO: 673712 - RNA, 23 nt, Human
uuuuuuuuuuuuuuuacauuuaa

SEQ ID NO: 673713 - RNA, 19 nt, Human
aaacgacacacaccuuuac

SEQ ID NO: 673714 - RNA, 21 nt, Human
aagcagaaaagugaacacaau

SEQ ID NO: 673715 - RNA, 23 nt, Human
accacgugacccagcacgagcca

SEQ ID NO: 673716 - RNA, 24 nt, Human
acccuaccagccccuaaagaugac

SEQ ID NO: 673717 - RNA, 21 nt, Human
agaagagaggagggagugaag

SEQ ID NO: 673718 - RNA, 19 nt, Human
agacccaggaggucucagg

SEQ ID NO: 673719 - RNA, 21 nt, Human
agcacgagccaccgcccgccc

SEQ ID NO: 673720 - RNA, 22 nt, Human
caaauccuaaucucccaauccc

SEQ ID NO: 673721 - RNA, 19 nt, Human
caacaggaggagcgcuugg

SEQ ID NO: 673722 - RNA, 24 nt, Human
caauugccaggguguggaaccagc

SEQ ID NO: 673723 - RNA, 18 nt, Human
caccgcccgccccaaaau

SEQ ID NO: 673724 - RNA, 18 nt, Human
caccuuuaucuggacucc

SEQ ID NO: 673725 - RNA, 25 nt, Human
cacgagccaccgcccgccccaaaau

SEQ ID NO: 673726 - RNA, 23 nt, Human
cacgugacccagcacgagccacc

SEQ ID NO: 673727 - RNA, 20 nt, Human
cacucgggguccgaccauuc

SEQ ID NO: 673728 - RNA, 18 nt, Human
cagaguucugugagguag

SEQ ID NO: 673729 - RNA, 21 nt, Human
cagccccuaaagaugacuccu

SEQ ID NO: 673730 - RNA, 21 nt, Human
cagcccuuggauaaccacccu

SEQ ID NO: 673731 - RNA, 19 nt, Human
caggaggagcgcuugggca

SEQ ID NO: 673732 - RNA, 20 nt, Human
caguggacaaacauuuggcc

SEQ ID NO: 673733 - RNA, 24 nt, Human
ccauggggcccagaguuccuggcu

SEQ ID NO: 673734 - RNA, 26 nt, Human
cccuuggauaaccacccuaccagccc

SEQ ID NO: 673735 - RNA, 22 nt, Human
ccgcccgccccaaaaugaaauc

SEQ ID NO: 673736 - RNA, 19 nt, Human
ccggucuucaggaaauggc

SEQ ID NO: 673737 - RNA, 19 nt, Human
ccuaaagaugacuccaucc

SEQ ID NO: 673738 - RNA, 26 nt, Human
ccugaacuuaaaggaacuacagaaag

SEQ ID NO: 673739 - RNA, 21 nt, Human
ccugcuggcgaccccccacca

SEQ ID NO: 673740 - RNA, 20 nt, Human
ccugucguacuuggcccagc

SEQ ID NO: 673741 - RNA, 22 nt, Human
cgaaacgacacacaccuuuacu

SEQ ID NO: 673742 - RNA, 23 nt, Human
cgaccacgugacccagcacgagc

SEQ ID NO: 673743 - RNA, 23 nt, Human
cgagccaccgcccgccccaaaau

SEQ ID NO: 673744 - RNA, 21 nt, Human
cgaggggacagcgaaucugcu

SEQ ID NO: 673745 - RNA, 23 nt, Human
cgcgacugagacgaaacgacaca

SEQ ID NO: 673746 - RNA, 23 nt, Human
cuacagaaagggacagaaacugc

SEQ ID NO: 673747 - RNA, 21 nt, Human
cuaccagccccuaaagaugac

SEQ ID NO: 673748 - RNA, 20 nt, Human
cuccagagaggagaucagcu

SEQ ID NO: 673749 - RNA, 19 nt, Human
cucccuccugguggccccg

SEQ ID NO: 673750 - RNA, 26 nt, Human
cuuggcccagcuccacuggauucagc

SEQ ID NO: 673751 - RNA, 19 nt, Human
gacccagcacgagccaccg

SEQ ID NO: 673752 - RNA, 21 nt, Human
gaggucucaggaguccagacu

SEQ ID NO: 673753 - RNA, 19 nt, Human
gaguaucuucaggguggcu

SEQ ID NO: 673754 - RNA, 24 nt, Human
gauaaccacccuaccagccccuaa

SEQ ID NO: 673755 - RNA, 19 nt, Human
gcacuggggugagcgucca

SEQ ID NO: 673756 - RNA, 20 nt, Human
gcagaaaagugaacacaaua

SEQ ID NO: 673757 - RNA, 19 nt, Human
gccagaccucuuuccguca

SEQ ID NO: 673758 - RNA, 27 nt, Human
gccuccaacgaggggacagccgguuuc

SEQ ID NO: 673759 - RNA, 20 nt, Human
gcuccagagaggagaucagc

SEQ ID NO: 673760 - RNA, 20 nt, Human
ggaggccugggauacagugc

SEQ ID NO: 673761 - RNA, 22 nt, Human
ggccgugcagccccuacaccuu

SEQ ID NO: 673762 - RNA, 24 nt, Human
gggacagaaacugcuuucuuuuua

SEQ ID NO: 673763 - RNA, 19 nt, Human
ggggcccagaguuccuggc

SEQ ID NO: 673764 - RNA, 20 nt, Human
gucguacuuggcccagcucc

SEQ ID NO: 673765 - RNA, 23 nt, Human
uaaacaaugcgcuggaagguuac

SEQ ID NO: 673766 - RNA, 22 nt, Human
uaccagccccuaaagaugacuc

SEQ ID NO: 673767 - RNA, 18 nt, Human
uagaauuccuagaguugc

SEQ ID NO: 673768 - RNA, 21 nt, Human
ucaagcagaaaagugaacaca

SEQ ID NO: 673769 - RNA, 22 nt, Human
uccauggggcccagaguuccug

SEQ ID NO: 673770 - RNA, 19 nt, Human
ucccgggguaacugguucu

SEQ ID NO: 673771 - RNA, 19 nt, Human
ugcaguccacagcaaccac

SEQ ID NO: 673772 - RNA, 20 nt, Human
ugccaggguguggaaccagc

SEQ ID NO: 673773 - RNA, 19 nt, Human
uggagagaagagaggaggg

SEQ ID NO: 673774 - RNA, 21 nt, Human
uggcagcaggcccauauuucu

SEQ ID NO: 673775 - RNA, 18 nt, Human
uggcuggacuuugcagcc

SEQ ID NO: 673776 - RNA, 23 nt, Human
ugggaggccugggauacagugcc

SEQ ID NO: 673777 - RNA, 22 nt, Human
uggggccggggagagggaaccu

SEQ ID NO: 673778 - RNA, 20 nt, Human
uggggugagcguccagagcu

SEQ ID NO: 673779 - RNA, 18 nt, Human
ugugaacggccacgcugc

SEQ ID NO: 673780 - RNA, 19 nt, Human
uuccaaugggaucuuagaa

SEQ ID NO: 673781 - RNA, 21 nt, Human
uuccuggcucgggaacauugg

SEQ ID NO: 673782 - RNA, 24 nt, Human
uugcagccucuuuaauaacuuccc

SEQ ID NO: 673783 - RNA, 20 nt, Human
uugccaggguguggaaccag

SEQ ID NO: 673784 - RNA, 25 nt, Human
uuugcagccucuuuaauaacuuccc

SEQ ID NO: 673785 - RNA, 19 nt, Human
uuuuuaaacaaugcgcugg

SEQ ID NO: 673786 - RNA, 21 nt, Human
aaagacguacuugcuacccuc

SEQ ID NO: 673787 - RNA, 24 nt, Human
aagaucaccuaaaggcucaagcuu

SEQ ID NO: 673788 - RNA, 21 nt, Human
aagugcuuuucaagcuguacc

SEQ ID NO: 673789 - RNA, 22 nt, Human
aauucagauggcugaauuugga

SEQ ID NO: 673790 - RNA, 18 nt, Human
acacacauacacacauau

SEQ ID NO: 673791 - RNA, 19 nt, Human
acacacauacacacauaua

SEQ ID NO: 673792 - RNA, 20 nt, Human
accccacucacuuucccuuu

SEQ ID NO: 673793 - RNA, 18 nt, Human
accccgcccgcuccagcc

SEQ ID NO: 673794 - RNA, 23 nt, Human
accucacucagccuaugcccaac

SEQ ID NO: 673795 - RNA, 19 nt, Human
agagaaucaagcccuaaag

SEQ ID NO: 673796 - RNA, 23 nt, Human
agagcaaagauguauuucuguac

SEQ ID NO: 673797 - RNA, 24 nt, Human
aggccaccucacucagccuaugcc

SEQ ID NO: 673798 - RNA, 21 nt, Human
aguaauaauggaucagcacaa

SEQ ID NO: 673799 - RNA, 24 nt, Human
auucaguguguuccacaaccucag

SEQ ID NO: 673800 - RNA, 22 nt, Human
caagcccuaaaguaauaaugga

SEQ ID NO: 673801 - RNA, 22 nt, Human
cacaaccucagccucuuccaca

SEQ ID NO: 673802 - RNA, 22 nt, Human
cacauacacacauauauauuuc

SEQ ID NO: 673803 - RNA, 20 nt, Human
cacgcacacagagccacacc

SEQ ID NO: 673804 - RNA, 19 nt, Human
cagcugguuaauguuuuug

SEQ ID NO: 673805 - RNA, 22 nt, Human
cauucaggccaccucacucagc

SEQ ID NO: 673806 - RNA, 23 nt, Human
ccacaccuaccccgcccgcucca

SEQ ID NO: 673807 - RNA, 20 nt, Human
ccccaagagaaucaagcccu

SEQ ID NO: 673808 - RNA, 18 nt, Human
cccccgcaacugacuucc

SEQ ID NO: 673809 - RNA, 21 nt, Human
cgcuccagccuuuuacgguuu

SEQ ID NO: 673810 - RNA, 23 nt, Human
cucauuaggcccuuuguuucuac

SEQ ID NO: 673811 - RNA, 22 nt, Human
cuccccaagagaaucaagcccu

SEQ ID NO: 673812 - RNA, 25 nt, Human
cugaagcuuagccaagucacucccc

SEQ ID NO: 673813 - RNA, 23 nt, Human
cugugccuguacuucacaguccu

SEQ ID NO: 673814 - RNA, 21 nt, Human
cuuagccaagucacuccccaa

SEQ ID NO: 673815 - RNA, 21 nt, Human
gcgccgggucgacgcggccgc

SEQ ID NO: 673816 - RNA, 18 nt, Human
ggggagaagaagugggag

SEQ ID NO: 673817 - RNA, 21 nt, Human
ggugucauucaggccaccuca

SEQ ID NO: 673818 - RNA, 28 nt, Human
gucacgcacacagagccacaccuacccc

SEQ ID NO: 673819 - RNA, 32 nt, Human
gugugugcauauauauacacacauacacacag

SEQ ID NO: 673820 - RNA, 23 nt, Human
guguuccacaaccucagccucuu

SEQ ID NO: 673821 - RNA, 25 nt, Human
guuaacuuuuuaagcauaaaaugug

SEQ ID NO: 673822 - RNA, 26 nt, Human
uacacacauacacacauauauauuuc

SEQ ID NO: 673823 - RNA, 22 nt, Human
uaccauaguuuaaagaucaccu

SEQ ID NO: 673824 - RNA, 18 nt, Human
uaccccgcccgcuccagc

SEQ ID NO: 673825 - RNA, 24 nt, Human
uaccccgcccgcuccagccuuuua

SEQ ID NO: 673826 - RNA, 25 nt, Human
uagaucauuaagacaaagacguacu

SEQ ID NO: 673827 - RNA, 22 nt, Human
uauacacacauacacacauaua

SEQ ID NO: 673828 - RNA, 25 nt, Human
uauauacacacauacacacauauag

SEQ ID NO: 673829 - RNA, 25 nt, Human
uauauacacacauacacacauauau

SEQ ID NO: 673830 - RNA, 19 nt, Human
uauauauacacacauacac

SEQ ID NO: 673831 - RNA, 20 nt, Human
uaucugugugugugugcaua

SEQ ID NO: 673832 - RNA, 24 nt, Human
uaucugugugugugugcauauaua

SEQ ID NO: 673833 - RNA, 19 nt, Human
ucacaguuucguaucaugu

SEQ ID NO: 673834 - RNA, 19 nt, Human
ucacuuucccuuuccuuau

SEQ ID NO: 673835 - RNA, 21 nt, Human
ucagugccacagggaaaagaa

SEQ ID NO: 673836 - RNA, 22 nt, Human
uccacaaccucagccucuucca

SEQ ID NO: 673837 - RNA, 22 nt, Human
uccacuagcaaauuuaaacaaa

SEQ ID NO: 673838 - RNA, 23 nt, Human
ucccugcagucgggcugugccug

SEQ ID NO: 673839 - RNA, 25 nt, Human
uccgugaccacaguuuacaccugaa

SEQ ID NO: 673840 - RNA, 27 nt, Human
uccgugaccacaguuuacaccugaagc

SEQ ID NO: 673841 - RNA, 18 nt, Human
ucuacaccagccuuagau

SEQ ID NO: 673842 - RNA, 19 nt, Human
ucuggccagaugcgguggg

SEQ ID NO: 673843 - RNA, 18 nt, Human
ugaaaggagagggaagag

SEQ ID NO: 673844 - RNA, 18 nt, Human
ugaaaggagagggaagag

SEQ ID NO: 673845 - RNA, 27 nt, Human
ugaagcuuagccaagucacuccccaag

SEQ ID NO: 673846 - RNA, 25 nt, Human
ugcccaaccccacucacuuucccuu

SEQ ID NO: 673847 - RNA, 22 nt, Human
ugggggaggggagaagaagugg

SEQ ID NO: 673848 - RNA, 21 nt, Human
uguacuucacaguccucuaag

SEQ ID NO: 673849 - RNA, 19 nt, Human
uguccuguauaaauuuguu

SEQ ID NO: 673850 - RNA, 18 nt, Human
ugugugugcauauauaua

SEQ ID NO: 673851 - RNA, 24 nt, Human
ugugugugcauauauauacacaac

SEQ ID NO: 673852 - RNA, 18 nt, Human
ugugugugugugcauaua

SEQ ID NO: 673853 - RNA, 22 nt, Human
ugugugugugugcauauauaua

SEQ ID NO: 673854 - RNA, 21 nt, Human
uucacauucacuggaagcauu

SEQ ID NO: 673855 - RNA, 21 nt, Human
uugaacccugggcagcugguu

SEQ ID NO: 673856 - RNA, 22 nt, Human
uugguucucauuaggcccuuug

SEQ ID NO: 673857 - RNA, 21 nt, Human
aaaagacuacagauacaagga

SEQ ID NO: 673858 - RNA, 24 nt, Human
aaacaaaacagaaacaaauuucaa

SEQ ID NO: 673859 - RNA, 27 nt, Human
aaacaaauuucaaaauaaaucacaucu

SEQ ID NO: 673860 - RNA, 24 nt, Human
aaagaacaagauaaaauaugucau

SEQ ID NO: 673861 - RNA, 27 nt, Human
aauagacaacaagucugagaaacuaag

SEQ ID NO: 673862 - RNA, 20 nt, Human
agacaacaagucugagaaac

SEQ ID NO: 673863 - RNA, 22 nt, Human
agacacggcccgcgaggccagg

SEQ ID NO: 673864 - RNA, 20 nt, Human
augcacuacuguaauauuuc

SEQ ID NO: 673865 - RNA, 20 nt, Human
auugucuucucagauugaag

SEQ ID NO: 673866 - RNA, 23 nt, Human
caaacccuucccuaacuguccaa

SEQ ID NO: 673867 - RNA, 22 nt, Human
caaagcagcuugaauuuaaagu

SEQ ID NO: 673868 - RNA, 24 nt, Human
caaaguaguaggauacccaacaug

SEQ ID NO: 673869 - RNA, 19 nt, Human
caaauuacugggaaaaugu

SEQ ID NO: 673870 - RNA, 18 nt, Human
caacauguacacauccca

SEQ ID NO: 673871 - RNA, 20 nt, Human
cacggcccgcgaggccaggg

SEQ ID NO: 673872 - RNA, 22 nt, Human
cacuuuuaggagaugaaaacac

SEQ ID NO: 673873 - RNA, 20 nt, Human
caucuucucuuaaaacuugg

SEQ ID NO: 673874 - RNA, 18 nt, Human
cauguacacaucccaucu

SEQ ID NO: 673875 - RNA, 26 nt, Human
ccaauauagauuccauuauucaaagu

SEQ ID NO: 673876 - RNA, 20 nt, Human
cccgcgaggccaggggcgag

SEQ ID NO: 673877 - RNA, 25 nt, Human
ccuacagauaauagacaacaagucu

SEQ ID NO: 673878 - RNA, 20 nt, Human
cugcgggcucgggggccggg

SEQ ID NO: 673879 - RNA, 22 nt, Human
cuguaauauuucgcuuccuaaa

SEQ ID NO: 673880 - RNA, 25 nt, Human
gaaaauguaagagguaaccgguacc

SEQ ID NO: 673881 - RNA, 18 nt, Human
gagcuucggugggcaauc

SEQ ID NO: 673882 - RNA, 25 nt, Human
gauaauagacaacaagucugagaaa

SEQ ID NO: 673883 - RNA, 19 nt, Human
gccaggggcgaguggcugg

SEQ ID NO: 673884 - RNA, 19 nt, Human
gcgaggccaggggcgagug

SEQ ID NO: 673885 - RNA, 19 nt, Human
gcuucggugggcaaucugc

SEQ ID NO: 673886 - RNA, 20 nt, Human
ggauacccaacauguacaca

SEQ ID NO: 673887 - RNA, 21 nt, Human
guacacaucccaucuucaaau

SEQ ID NO: 673888 - RNA, 20 nt, Human
uaaaaacaaaacagaaacaa

SEQ ID NO: 673889 - RNA, 26 nt, Human
uaaaaacaaaacagaaacaaauuuca

SEQ ID NO: 673890 - RNA, 24 nt, Human
uaagagguaacuucacaaaaauca

SEQ ID NO: 673891 - RNA, 19 nt, Human
uacacugccacuggcuuua

SEQ ID NO: 673892 - RNA, 23 nt, Human
uagauuccauuauucaaaguccu

SEQ ID NO: 673893 - RNA, 25 nt, Human
uauuucgcuuccuaaauuucuucca

SEQ ID NO: 673894 - RNA, 18 nt, Human
ucacauauugaguggaau

SEQ ID NO: 673895 - RNA, 19 nt, Human
uccauuauucaaaguccuc

SEQ ID NO: 673896 - RNA, 22 nt, Human
ucugcgggcucgggggccgggg

SEQ ID NO: 673897 - RNA, 22 nt, Human
ugaaaacacaaaguaguaggau

SEQ ID NO: 673898 - RNA, 21 nt, Human
ugagaaacuaaggcuaaccag

SEQ ID NO: 673899 - RNA, 21 nt, Human
ugccacuggcuuuagauacuc

SEQ ID NO: 673900 - RNA, 19 nt, Human
uggcgggaucgggggugca

SEQ ID NO: 673901 - RNA, 23 nt, Human
uuaaaacuuggcaaacccuuccc

SEQ ID NO: 673902 - RNA, 23 nt, Human
uuaaagaacaagauaaaauaugu

SEQ ID NO: 673903 - RNA, 24 nt, Human
uuaaagaacaagauaaaauauguc

SEQ ID NO: 673904 - RNA, 23 nt, Human
uuagaaacauauugucuucucag

SEQ ID NO: 673905 - RNA, 25 nt, Human
uucaaaguccuccacaaauuacugg

SEQ ID NO: 673906 - RNA, 23 nt, Human
uucaaggggugauauuuuaaauc

SEQ ID NO: 673907 - RNA, 21 nt, Human
uucacaaaaaucacauauuga

SEQ ID NO: 673908 - RNA, 25 nt, Human
uucagcagucauuuaaaaaauaaaa

SEQ ID NO: 673909 - RNA, 23 nt, Human
uuuaaaaacaaaacagaaacaaa

SEQ ID NO: 673910 - RNA, 21 nt, Human
aaaaaaaaaaaaaaaggcaaa

SEQ ID NO: 673911 - RNA, 26 nt, Human
aaaaaaaaaaaaaaaggcaaauuaua

SEQ ID NO: 673912 - RNA, 23 nt, Human
aaaauccucccuucccucugcua

SEQ ID NO: 673913 - RNA, 21 nt, Human
aaacgaauuuauucuaaacau

SEQ ID NO: 673914 - RNA, 22 nt, Human
aaacuccaaaugagagcuggca

SEQ ID NO: 673915 - RNA, 24 nt, Human
aaacuucccccccgcccccccacc

SEQ ID NO: 673916 - RNA, 19 nt, Human
aaacuucugagagcugcug

SEQ ID NO: 673917 - RNA, 21 nt, Human
aaagagcccacuuagaagugc

SEQ ID NO: 673918 - RNA, 25 nt, Human
aaagagcuuagccaucuucuagacc

SEQ ID NO: 673919 - RNA, 23 nt, Human
aacaguguaauacgaauacaaua

SEQ ID NO: 673920 - RNA, 19 nt, Human
aagacaaggauggaaaagc

SEQ ID NO: 673921 - RNA, 19 nt, Human
aagcaaaucuugacugcac

SEQ ID NO: 673922 - RNA, 18 nt, Human
aagcaggcugaaauuuua

SEQ ID NO: 673923 - RNA, 21 nt, Human
aagcaguuuuaaaaaaaaauu

SEQ ID NO: 673924 - RNA, 21 nt, Human
aagcauggaauaugggaaaga

SEQ ID NO: 673925 - RNA, 21 nt, Human
aaucaguuguacagaaacuaa

SEQ ID NO: 673926 - RNA, 18 nt, Human
aaugcaggucauguguau

SEQ ID NO: 673927 - RNA, 26 nt, Human
acaaagagcaaauucaaaacaccaca

SEQ ID NO: 673928 - RNA, 18 nt, Human
accaggcccuugcauuuu

SEQ ID NO: 673929 - RNA, 20 nt, Human
acccacaggacugucugaga

SEQ ID NO: 673930 - RNA, 20 nt, Human
acccuauaaauguucaggac

SEQ ID NO: 673931 - RNA, 19 nt, Human
accucagcaagcaguuggu

SEQ ID NO: 673932 - RNA, 19 nt, Human
accuguuugugguucucgg

SEQ ID NO: 673933 - RNA, 23 nt, Human
acgaauccaaagacccacaggac

SEQ ID NO: 673934 - RNA, 20 nt, Human
acuucagaaagaugcagaga

SEQ ID NO: 673935 - RNA, 20 nt, Human
agaaauccucuaaccagucc

SEQ ID NO: 673936 - RNA, 24 nt, Human
agaaguuagguagacacccugaug

SEQ ID NO: 673937 - RNA, 21 nt, Human
agacaaggauggaaaagcaaa

SEQ ID NO: 673938 - RNA, 22 nt, Human
agaugcugucucugucaucagg

SEQ ID NO: 673939 - RNA, 19 nt, Human
agcaagguugugauuuugc

SEQ ID NO: 673940 - RNA, 20 nt, Human
agcaguaucucaagcucagu

SEQ ID NO: 673941 - RNA, 19 nt, Human
agcccacuuagaagugccc

SEQ ID NO: 673942 - RNA, 24 nt, Human
aggaccaccuaaccacggcuggag

SEQ ID NO: 673943 - RNA, 21 nt, Human
aguccagggcauaggaaaaag

SEQ ID NO: 673944 - RNA, 23 nt, Human
auagacauucccguagcucaaag

SEQ ID NO: 673945 - RNA, 23 nt, Human
augcugucucugucaucaggugu

SEQ ID NO: 673946 - RNA, 21 nt, Human
caaaaugcaucaucaggcaca

SEQ ID NO: 673947 - RNA, 22 nt, Human
caaaguucucccaaaccuucuc

SEQ ID NO: 673948 - RNA, 30 nt, Human
caaaguucucccaaaccuucucuccacauu

SEQ ID NO: 673949 - RNA, 20 nt, Human
caaaucaguuguacagaaac

SEQ ID NO: 673950 - RNA, 24 nt, Human
caagcaguuggugaguguuugcaa

SEQ ID NO: 673951 - RNA, 19 nt, Human
caccaccuggugccgaagg

SEQ ID NO: 673952 - RNA, 23 nt, Human
cacugcuauaaagaugucaaaaa

SEQ ID NO: 673953 - RNA, 20 nt, Human
cagccuucuccaucucaagg

SEQ ID NO: 673954 - RNA, 21 nt, Human
ccaaaacacuaguaauuacca

SEQ ID NO: 673955 - RNA, 21 nt, Human
ccagccuucuccaucucaaga

SEQ ID NO: 673956 - RNA, 23 nt, Human
cccaccacuguccaccagugaac

SEQ ID NO: 673957 - RNA, 19 nt, Human
ccccccgcccccccaccag

SEQ ID NO: 673958 - RNA, 25 nt, Human
ccccccgcccccccaccaguuuuaa

SEQ ID NO: 673959 - RNA, 18 nt, Human
ccccuaggaccaccuaac

SEQ ID NO: 673960 - RNA, 19 nt, Human
ccccuaggaccaccuaacc

SEQ ID NO: 673961 - RNA, 19 nt, Human
cccguagcucaaagugcug

SEQ ID NO: 673962 - RNA, 19 nt, Human
ccucucugguggcugacau

SEQ ID NO: 673963 - RNA, 21 nt, Human
ccuucuauaaaacccuauaaa

SEQ ID NO: 673964 - RNA, 19 nt, Human
ccuucugccuucuuguccc

SEQ ID NO: 673965 - RNA, 24 nt, Human
ccuugcauuuuagcaaggugacaa

SEQ ID NO: 673966 - RNA, 25 nt, Human
cgaauacaauaaauagacuaugcaa

SEQ ID NO: 673967 - RNA, 20 nt, Human
cuaagcagggcuaguuugcu

SEQ ID NO: 673968 - RNA, 23 nt, Human
cucuccuucugccuucuuguccc

SEQ ID NO: 673969 - RNA, 19 nt, Human
cucugaagucacuguacaa

SEQ ID NO: 673970 - RNA, 22 nt, Human
cugcuaccccuaggaccaccua

SEQ ID NO: 673971 - RNA, 23 nt, Human
cugcugccuggcaaaccucugga

SEQ ID NO: 673972 - RNA, 19 nt, Human
cuggcaaaccucuggagac

SEQ ID NO: 673973 - RNA, 20 nt, Human
cuguuuuguucaugugaagg

SEQ ID NO: 673974 - RNA, 21 nt, Human
cuugacauuguucaucugccc

SEQ ID NO: 673975 - RNA, 21 nt, Human
gaaaaugaauggaccaggccc

SEQ ID NO: 673976 - RNA, 19 nt, Human
gaaaccucucccccucucu

SEQ ID NO: 673977 - RNA, 20 nt, Human
gaaagagcuuucuguugagu

SEQ ID NO: 673978 - RNA, 18 nt, Human
gaacaagcaucauuuucu

SEQ ID NO: 673979 - RNA, 21 nt, Human
gaacgguuacuaacaaaggca

SEQ ID NO: 673980 - RNA, 19 nt, Human
gaauacaauaaauagacua

SEQ ID NO: 673981 - RNA, 18 nt, Human
gaaugaggcguugaugag

SEQ ID NO: 673982 - RNA, 24 nt, Human
gacaguuguuaaacuucagaaaga

SEQ ID NO: 673983 - RNA, 20 nt, Human
gagcacugaccuuauccaca

SEQ ID NO: 673984 - RNA, 22 nt, Human
gcaaaacuggcccacucgcuaa

SEQ ID NO: 673985 - RNA, 21 nt, Human
gcaaaucuugacugcacaaaa

SEQ ID NO: 673986 - RNA, 20 nt, Human
gcugcaguccucacuaacuc

SEQ ID NO: 673987 - RNA, 21 nt, Human
gcuggaaugcugacgaaucca

SEQ ID NO: 673988 - RNA, 22 nt, Human
ggaaaacuaccaaguguagucc

SEQ ID NO: 673989 - RNA, 18 nt, Human
ggagaaaccucucccccu

SEQ ID NO: 673990 - RNA, 22 nt, Human
ggcuggaggaagaggugaacaa

SEQ ID NO: 673991 - RNA, 23 nt, Human
ggcuuuggaggguuugcucagcc

SEQ ID NO: 673992 - RNA, 24 nt, Human
guuuuugcccaguuucugaaaagc

SEQ ID NO: 673993 - RNA, 25 nt, Human
uaaaaacuucccccccgccccccca

SEQ ID NO: 673994 - RNA, 21 nt, Human
uaaaaggcaagauuucuugcu

SEQ ID NO: 673995 - RNA, 22 nt, Human
uaaacauaauuaaggaaacuag

SEQ ID NO: 673996 - RNA, 20 nt, Human
uaaaugguggaaaacuacca

SEQ ID NO: 673997 - RNA, 19 nt, Human
uaacaaaaagagcccacuu

SEQ ID NO: 673998 - RNA, 23 nt, Human
uaagaagcaggcugaaauuuuaa

SEQ ID NO: 673999 - RNA, 23 nt, Human
uaaggacauguuuuugaaacauu

SEQ ID NO: 674000 - RNA, 19 nt, Human
uaauuccagaucuaagauu

SEQ ID NO: 674001 - RNA, 20 nt, Human
uacacagaggcagaaagcau

SEQ ID NO: 674002 - RNA, 22 nt, Human
uacaguaauacauuugcaucua

SEQ ID NO: 674003 - RNA, 25 nt, Human
uacauauauauuauauauauacaca

SEQ ID NO: 674004 - RNA, 22 nt, Human
uagaaaggcucccugcuuuggg

SEQ ID NO: 674005 - RNA, 18 nt, Human
uagcucaaagugcugcag

SEQ ID NO: 674006 - RNA, 20 nt, Human
uagcuucaucuggcuuggug

SEQ ID NO: 674007 - RNA, 20 nt, Human
uauacauauauauuauauaa

SEQ ID NO: 674008 - RNA, 24 nt, Human
ucacaggaaagcaacgugcuuggc

SEQ ID NO: 674009 - RNA, 18 nt, Human
ucagaagacaaggaugga

SEQ ID NO: 674010 - RNA, 19 nt, Human
ucagcaagcaguuggugag

SEQ ID NO: 674011 - RNA, 21 nt, Human
ucaguaaugaggaugaaugag

SEQ ID NO: 674012 - RNA, 21 nt, Human
ucaguaaugaggaugaaugag

SEQ ID NO: 674013 - RNA, 19 nt, Human
ucaguuccggaucugcggu

SEQ ID NO: 674014 - RNA, 25 nt, Human
ucaugugaagguugaaagaaauccu

SEQ ID NO: 674015 - RNA, 18 nt, Human
uccaaagacccacaggac

SEQ ID NO: 674016 - RNA, 18 nt, Human
uccagggauaagaaguca

SEQ ID NO: 674017 - RNA, 19 nt, Human
uccagggauaagaagucau

SEQ ID NO: 674018 - RNA, 20 nt, Human
uccagggauaagaagucauc

SEQ ID NO: 674019 - RNA, 18 nt, Human
ucccguagcucaaagugc

SEQ ID NO: 674020 - RNA, 19 nt, Human
ucccuagacacaaguggcu

SEQ ID NO: 674021 - RNA, 21 nt, Human
uccggaucugcggugucugug

SEQ ID NO: 674022 - RNA, 19 nt, Human
uccuguguuggaccacugc

SEQ ID NO: 674023 - RNA, 18 nt, Human
ucucacggcucugguguc

SEQ ID NO: 674024 - RNA, 24 nt, Human
ucucauauugaaaacuggacugga

SEQ ID NO: 674025 - RNA, 22 nt, Human
ucuccccagccaguuuacaccc

SEQ ID NO: 674026 - RNA, 19 nt, Human
ucucugaauggaccagccc

SEQ ID NO: 674027 - RNA, 26 nt, Human
ugaaaaaaaaaaaaaaaaaggcaaaa

SEQ ID NO: 674028 - RNA, 20 nt, Human
ugaaaauacaagauaaggua

SEQ ID NO: 674029 - RNA, 24 nt, Human
ugaaacacagaaacaaugucagga

SEQ ID NO: 674030 - RNA, 22 nt, Human
ugaauggaccagcccuggagga

SEQ ID NO: 674031 - RNA, 20 nt, Human
ugacaaagagcaaauucaaa

SEQ ID NO: 674032 - RNA, 24 nt, Human
ugacaauaucacagcagcccuaau

SEQ ID NO: 674033 - RNA, 22 nt, Human
ugagaacacgugcuugugcugu

SEQ ID NO: 674034 - RNA, 22 nt, Human
ugaucauaagaaaccagccuuc

SEQ ID NO: 674035 - RNA, 24 nt, Human
ugcagagugagcgaagauuuuaug

SEQ ID NO: 674036 - RNA, 20 nt, Human
ugcugcagauacaggggagg

SEQ ID NO: 674037 - RNA, 18 nt, Human
ugcuggcuagaacagacu

SEQ ID NO: 674038 - RNA, 18 nt, Human
uggcacaucucauauuga

SEQ ID NO: 674039 - RNA, 21 nt, Human
uggcccacucgcuaagaagca

SEQ ID NO: 674040 - RNA, 24 nt, Human
uggcugacaucacuuccugaacac

SEQ ID NO: 674041 - RNA, 18 nt, Human
ugggaaagaaaacacugu

SEQ ID NO: 674042 - RNA, 23 nt, Human
ugguaaaaaugggaauaauaaga

SEQ ID NO: 674043 - RNA, 21 nt, Human
uggugcaaagugaugcacacc

SEQ ID NO: 674044 - RNA, 21 nt, Human
uguacagaaacuaauuucacc

SEQ ID NO: 674045 - RNA, 19 nt, Human
ugucuugucuugaugcugg

SEQ ID NO: 674046 - RNA, 18 nt, Human
uguuuuugcccaguuucu

SEQ ID NO: 674047 - RNA, 23 nt, Human
uuaauggcaauucugguaacuca

SEQ ID NO: 674048 - RNA, 18 nt, Human
uuauuuugacccauaggc

SEQ ID NO: 674049 - RNA, 19 nt, Human
uucaucuggcuuggugggc

SEQ ID NO: 674050 - RNA, 21 nt, Human
uucuaagcagggcuaguuugc

SEQ ID NO: 674051 - RNA, 21 nt, Human
uucucccaaaccuucucucca

SEQ ID NO: 674052 - RNA, 24 nt, Human
uuugccaaaacacuaguaauuacc

SEQ ID NO: 674053 - RNA, 24 nt, Human
uuugcuggaaugcugacgaaucca

SEQ ID NO: 674054 - RNA, 22 nt, Human
uuuggaaacuucugagagcugc

SEQ ID NO: 674055 - RNA, 19 nt, Human
uuuuuaauagcaagguugu

SEQ ID NO: 674056 - RNA, 22 nt, Human
aaggggccaguaggccacagag

SEQ ID NO: 674057 - RNA, 19 nt, Human
aaugguggguaaugcccag

SEQ ID NO: 674058 - RNA, 24 nt, Human
accccaccuugugggagaccccag

SEQ ID NO: 674059 - RNA, 22 nt, Human
acccucuccugaccccaccuug

SEQ ID NO: 674060 - RNA, 23 nt, Human
accugcucuaggggaucuggguc

SEQ ID NO: 674061 - RNA, 22 nt, Human
agcauauggggaacaggaaaga

SEQ ID NO: 674062 - RNA, 20 nt, Human
agcggagugaaagcaccagg

SEQ ID NO: 674063 - RNA, 19 nt, Human
agcugcaggaaaccagggg

SEQ ID NO: 674064 - RNA, 25 nt, Human
aggcaggguggaguagcuggcugug

SEQ ID NO: 674065 - RNA, 21 nt, Human
aggccacagaggcggcccacg

SEQ ID NO: 674066 - RNA, 19 nt, Human
caggaaagacucugccagc

SEQ ID NO: 674067 - RNA, 22 nt, Human
cagggagacgggggcuuuacag

SEQ ID NO: 674068 - RNA, 20 nt, Human
caguaggccacagaggcggc

SEQ ID NO: 674069 - RNA, 22 nt, Human
cagucaggccccagccuacauc

SEQ ID NO: 674070 - RNA, 19 nt, Human
ccacgcaggcaggguggag

SEQ ID NO: 674071 - RNA, 20 nt, Human
ccagggggaagauggccaca

SEQ ID NO: 674072 - RNA, 20 nt, Human
ccuccugacagggagacggg

SEQ ID NO: 674073 - RNA, 23 nt, Human
ccuccugacagggagacgggggc

SEQ ID NO: 674074 - RNA, 20 nt, Human
ccugacagggagacgggggc

SEQ ID NO: 674075 - RNA, 20 nt, Human
cggcuugggggguaagccag

SEQ ID NO: 674076 - RNA, 24 nt, Human
cuaggggaucugggucuccagaga

SEQ ID NO: 674077 - RNA, 22 nt, Human
gaaagacucugccagcaugguc

SEQ ID NO: 674078 - RNA, 21 nt, Human
gaaagcaccagggccggcuug

SEQ ID NO: 674079 - RNA, 21 nt, Human
gagaggucucagcuacaaaag

SEQ ID NO: 674080 - RNA, 20 nt, Human
gauucuggauggucucugac

SEQ ID NO: 674081 - RNA, 24 nt, Human
gcagggcacaggguggggccccuc

SEQ ID NO: 674082 - RNA, 21 nt, Human
gccaaugccaggcagggcaca

SEQ ID NO: 674083 - RNA, 21 nt, Human
ggaucugggucuccagagagg

SEQ ID NO: 674084 - RNA, 25 nt, Human
uacaaagggcagcggagugaaagca

SEQ ID NO: 674085 - RNA, 24 nt, Human
ucagcuacaaaagugacccucucc

SEQ ID NO: 674086 - RNA, 21 nt, Human
ucaggccccagccuacauccc

SEQ ID NO: 674087 - RNA, 22 nt, Human
ucucaaggucugugaauaaagg

SEQ ID NO: 674088 - RNA, 23 nt, Human
ucugggauucuggauggucggua

SEQ ID NO: 674089 - RNA, 21 nt, Human
ucugggauucuggauggucuc

SEQ ID NO: 674090 - RNA, 24 nt, Human
ucugggauucuggauggucucuga

SEQ ID NO: 674091 - RNA, 22 nt, Human
ugaaagcaccagggccggcuug

SEQ ID NO: 674092 - RNA, 23 nt, Human
ugacagggagacgggggcuuuac

SEQ ID NO: 674093 - RNA, 20 nt, Human
ugcaggaaaccagggggaag

SEQ ID NO: 674094 - RNA, 22 nt, Human
uggcuacaaugguggguaaugc

SEQ ID NO: 674095 - RNA, 18 nt, Human
uggguaaugcccaguugg

SEQ ID NO: 674096 - RNA, 21 nt, Human
uugggaggaugcaguguuaga

SEQ ID NO: 674097 - RNA, 20 nt, Human
uuuacagucaggccccagcc

SEQ ID NO: 674098 - RNA, 21 nt, Human
aaauaaaaaagugacauucuu

SEQ ID NO: 674099 - RNA, 31 nt, Human
aaaucuuaucaguuaaauaaaaaagugacaa

SEQ ID NO: 674100 - RNA, 20 nt, Human
aagagaaaguucuuggcauu

SEQ ID NO: 674101 - RNA, 21 nt, Human
aaguaucauugguacuuaaaa

SEQ ID NO: 674102 - RNA, 23 nt, Human
aaucaugaucagucacaaucuua

SEQ ID NO: 674103 - RNA, 18 nt, Human
acaaaauaaacaaaugcc

SEQ ID NO: 674104 - RNA, 20 nt, Human
acauagcaagaaaugaaagu

SEQ ID NO: 674105 - RNA, 25 nt, Human
accacacaaacugcuugaaauacaa

SEQ ID NO: 674106 - RNA, 20 nt, Human
acugcaguucuuuggguguc

SEQ ID NO: 674107 - RNA, 23 nt, Human
auguuagaaauauccaaugugcc

SEQ ID NO: 674108 - RNA, 23 nt, Human
auuauauagaaacaccacacaaa

SEQ ID NO: 674109 - RNA, 18 nt, Human
auuguuucaaugaguuca

SEQ ID NO: 674110 - RNA, 20 nt, Human
caaaaggagcaaugauagca

SEQ ID NO: 674111 - RNA, 19 nt, Human
caaaauaaacaaaugccua

SEQ ID NO: 674112 - RNA, 20 nt, Human
caaaauaaacaaaugccuac

SEQ ID NO: 674113 - RNA, 22 nt, Human
cagcagugcuccaucuucaaau

SEQ ID NO: 674114 - RNA, 24 nt, Human
cauagcaagaaaugaaaguaaauc

SEQ ID NO: 674115 - RNA, 20 nt, Human
cauauacauagcaagaaaug

SEQ ID NO: 674116 - RNA, 23 nt, Human
cauauacauagcaagaaaugaaa

SEQ ID NO: 674117 - RNA, 19 nt, Human
cauuacccaaccacauauc

SEQ ID NO: 674118 - RNA, 21 nt, Human
ccccucauuccccuaaauugu

SEQ ID NO: 674119 - RNA, 24 nt, Human
ccccucauuccccuaaauuguuuc

SEQ ID NO: 674120 - RNA, 20 nt, Human
ccccuuuugccccucauucc

SEQ ID NO: 674121 - RNA, 23 nt, Human
ccugaaugucgaugacucaaucu

SEQ ID NO: 674122 - RNA, 24 nt, Human
gaaugaagauuguuaccuuucuua

SEQ ID NO: 674123 - RNA, 21 nt, Human
ggagacaucuguauuuuucuu

SEQ ID NO: 674124 - RNA, 25 nt, Human
gguuuacuuaucaaaguaaaaaaua

SEQ ID NO: 674125 - RNA, 22 nt, Human
guuaggaagcuuuuaaccagaa

SEQ ID NO: 674126 - RNA, 23 nt, Human
guucuuggcauuuuaagaaaagu

SEQ ID NO: 674127 - RNA, 20 nt, Human
uaaacaaaugccuacuuuau

SEQ ID NO: 674128 - RNA, 19 nt, Human
uaaagucuuucugaaauau

SEQ ID NO: 674129 - RNA, 24 nt, Human
uagcaagaaaugaaaguaaaucaa

SEQ ID NO: 674130 - RNA, 25 nt, Human
uagcaagaaaugaaaguaaaucaaa

SEQ ID NO: 674131 - RNA, 21 nt, Human
uauauagaaacaccacacaaa

SEQ ID NO: 674132 - RNA, 19 nt, Human
uaucaaaguaaaaaauaac

SEQ ID NO: 674133 - RNA, 20 nt, Human
uauccaaugugccaccaaca

SEQ ID NO: 674134 - RNA, 25 nt, Human
uauuaaaaaguccucaggucuggag

SEQ ID NO: 674135 - RNA, 20 nt, Human
uauugcuggugguugggucu

SEQ ID NO: 674136 - RNA, 18 nt, Human
uccuaaggcuuaagaacu

SEQ ID NO: 674137 - RNA, 22 nt, Human
ucgaguggcaacuguucucucc

SEQ ID NO: 674138 - RNA, 19 nt, Human
ucucccauggucuguuacc

SEQ ID NO: 674139 - RNA, 20 nt, Human
ucuccuaaggcuuaagaacu

SEQ ID NO: 674140 - RNA, 21 nt, Human
ucuucaaauaaaacaagccuu

SEQ ID NO: 674141 - RNA, 21 nt, Human
ucuuugggugucuacucaauc

SEQ ID NO: 674142 - RNA, 22 nt, Human
ucuuugggugucuacucaaucu

SEQ ID NO: 674143 - RNA, 22 nt, Human
ugcauuacccaaccacauaucu

SEQ ID NO: 674144 - RNA, 24 nt, Human
ugcuucggagugcauaaugucagg

SEQ ID NO: 674145 - RNA, 20 nt, Human
uggguaaagucuuucugaaa

SEQ ID NO: 674146 - RNA, 20 nt, Human
ugggugucuacucaaucucu

SEQ ID NO: 674147 - RNA, 23 nt, Human
uggucuguuacccguuaggaagc

SEQ ID NO: 674148 - RNA, 27 nt, Human
uguuagaaauauccaaugugccaccaa

SEQ ID NO: 674149 - RNA, 22 nt, Human
uucuuuaucaagccuucuuaaa

SEQ ID NO: 674150 - RNA, 24 nt, Human
uuguauaacuacauuugcauuacc

SEQ ID NO: 674151 - RNA, 23 nt, Human
uuuuuuuuuuuuuugacaaugga

SEQ ID NO: 674152 - RNA, 25 nt, Human
uuuuuuuuuuuuuuuuugacaaugg

SEQ ID NO: 674153 - RNA, 26 nt, Human
aaaaaaaaagcccaaaucagagcagu

SEQ ID NO: 674154 - RNA, 20 nt, Human
aaaaaaacagagacacgggg

SEQ ID NO: 674155 - RNA, 20 nt, Human
aaaaaaacagagacacgggg

SEQ ID NO: 674156 - RNA, 24 nt, Human
aaaaagcccaaaucagagcagugg

SEQ ID NO: 674157 - RNA, 24 nt, Human
aaaaagcccaaaucagagcagugg

SEQ ID NO: 674158 - RNA, 20 nt, Human
aaaacaggccaaaugacaug

SEQ ID NO: 674159 - RNA, 21 nt, Human
aaaaccuccaaccugaggcag

SEQ ID NO: 674160 - RNA, 23 nt, Human
aaaaccuccaaccugaggcaggg

SEQ ID NO: 674161 - RNA, 22 nt, Human
aaaagaucagacuguaaaaaua

SEQ ID NO: 674162 - RNA, 22 nt, Human
aaaagcuacacagaggccgggu

SEQ ID NO: 674163 - RNA, 22 nt, Human
aaaagcuacacagaggccgggu

SEQ ID NO: 674164 - RNA, 24 nt, Human
aaaaugcugggacuacaggcguga

SEQ ID NO: 674165 - RNA, 24 nt, Human
aaaaugcugggacuacaggcguga

SEQ ID NO: 674166 - RNA, 23 nt, Human
aaacaugauaucccaggaccaac

SEQ ID NO: 674167 - RNA, 20 nt, Human
aaaccuccaaccugaggcag

SEQ ID NO: 674168 - RNA, 20 nt, Human
aaaccuccaaccugaggcag

SEQ ID NO: 674169 - RNA, 26 nt, Human
aaagagcagucacggagguaggucac

SEQ ID NO: 674170 - RNA, 24 nt, Human
aaaggcugacaaggcacagagugg

SEQ ID NO: 674171 - RNA, 24 nt, Human
aaaggcugacaaggcacagagugg

SEQ ID NO: 674172 - RNA, 20 nt, Human
aacaaauauccaccucuccu

SEQ ID NO: 674173 - RNA, 20 nt, Human
aacauggugaaauccugucu

SEQ ID NO: 674174 - RNA, 20 nt, Human
aacauggugaaauccugucu

SEQ ID NO: 674175 - RNA, 21 nt, Human
aacauggugaaauccugucuc

SEQ ID NO: 674176 - RNA, 21 nt, Human
aacauggugaaauccugucuc

SEQ ID NO: 674177 - RNA, 21 nt, Human
aaccaggucccuuuuaagguc

SEQ ID NO: 674178 - RNA, 21 nt, Human
aaccaggucccuuuuaagguc

SEQ ID NO: 674179 - RNA, 23 nt, Human
aaccaucacacuuaagagacaga

SEQ ID NO: 674180 - RNA, 25 nt, Human
aagcagcagcaucugagauaucaca

SEQ ID NO: 674181 - RNA, 18 nt, Human
aagcaggaaucagggacc

SEQ ID NO: 674182 - RNA, 23 nt, Human
aagcaggaaucagggacccaaua

SEQ ID NO: 674183 - RNA, 23 nt, Human
aagcaggaaucagggacccaaua

SEQ ID NO: 674184 - RNA, 23 nt, Human
aagccacacagaauacaagcaag

SEQ ID NO: 674185 - RNA, 19 nt, Human
aagccauucagaauuuuuc

SEQ ID NO: 674186 - RNA, 19 nt, Human
aagccauucagaauuuuuc

SEQ ID NO: 674187 - RNA, 24 nt, Human
aagcggucaucccacucagccucc

SEQ ID NO: 674188 - RNA, 24 nt, Human
aagcggucaucccacucagccucc

SEQ ID NO: 674189 - RNA, 21 nt, Human
aagcuccuucaggguggugcc

SEQ ID NO: 674190 - RNA, 21 nt, Human
aagcuccuucaggguggugcc

SEQ ID NO: 674191 - RNA, 25 nt, Human
aaggcaggcggaucaccugagguca

SEQ ID NO: 674192 - RNA, 19 nt, Human
aaguaacugagacugaagc

SEQ ID NO: 674193 - RNA, 23 nt, Human
aauauccaccucuccuguccagc

SEQ ID NO: 674194 - RNA, 23 nt, Human
aauauccaccucuccuguccagc

SEQ ID NO: 674195 - RNA, 20 nt, Human
acaaaaaaaagccacacaga

SEQ ID NO: 674196 - RNA, 20 nt, Human
acaaaaaaaagccacacaga

SEQ ID NO: 674197 - RNA, 24 nt, Human
acaaaaaaaagccacacagaauac

SEQ ID NO: 674198 - RNA, 24 nt, Human
acaaaaaaaagccacacagaauac

SEQ ID NO: 674199 - RNA, 23 nt, Human
acacacacacacacacacacaca

SEQ ID NO: 674200 - RNA, 23 nt, Human
acacacacacacacacacacaca

SEQ ID NO: 674201 - RNA, 23 nt, Human
acacacacacacacacacacaca

SEQ ID NO: 674202 - RNA, 23 nt, Human
acacacacacacacacacacaca

SEQ ID NO: 674203 - RNA, 23 nt, Human
acacacacacacacacacacaca

SEQ ID NO: 674204 - RNA, 23 nt, Human
acacacacacacacacacacaca

SEQ ID NO: 674205 - RNA, 23 nt, Human
acacacacacacacacacacaca

SEQ ID NO: 674206 - RNA, 23 nt, Human
acacacacacacacacacacaca

SEQ ID NO: 674207 - RNA, 23 nt, Human
acacacacacacacacacacaca

SEQ ID NO: 674208 - RNA, 23 nt, Human
acacacacacacacacacacaca

SEQ ID NO: 674209 - RNA, 23 nt, Human
acacacacacacacacacacaca

SEQ ID NO: 674210 - RNA, 23 nt, Human
acacacacacacacacacacaca

SEQ ID NO: 674211 - RNA, 23 nt, Human
acacacacacacacacacacaca

SEQ ID NO: 674212 - RNA, 23 nt, Human
acacacacacacacacacacaca

SEQ ID NO: 674213 - RNA, 23 nt, Human
acacacacacacacacacacaca

SEQ ID NO: 674214 - RNA, 23 nt, Human
acacacacacacacacacacaca

SEQ ID NO: 674215 - RNA, 23 nt, Human
acacacacacacacacacacaca

SEQ ID NO: 674216 - RNA, 23 nt, Human
acacacacacacacacacacaca

SEQ ID NO: 674217 - RNA, 23 nt, Human
acacacacacacacacacacaca

SEQ ID NO: 674218 - RNA, 23 nt, Human
acacacacacacacacacacaca

SEQ ID NO: 674219 - RNA, 23 nt, Human
acacacacacacacacacacaca

SEQ ID NO: 674220 - RNA, 23 nt, Human
acacacacacacacacacacaca

SEQ ID NO: 674221 - RNA, 23 nt, Human
acacacacacacacacacacaca

SEQ ID NO: 674222 - RNA, 23 nt, Human
acacacacacacacacacacaca

SEQ ID NO: 674223 - RNA, 23 nt, Human
acacacacacacacacacacaca

SEQ ID NO: 674224 - RNA, 23 nt, Human
acacacacacacacacacacaca

SEQ ID NO: 674225 - RNA, 23 nt, Human
acacuccacaaaguacacuugcu

SEQ ID NO: 674226 - RNA, 23 nt, Human
acacuccacaaaguacacuugcu

SEQ ID NO: 674227 - RNA, 25 nt, Human
acacugccgauaucccaagcccugu

SEQ ID NO: 674228 - RNA, 25 nt, Human
acacugccgauaucccaagcccugu

SEQ ID NO: 674229 - RNA, 18 nt, Human
acagagccuauaaaagcu

SEQ ID NO: 674230 - RNA, 23 nt, Human
acagagugagauauggccucaaa

SEQ ID NO: 674231 - RNA, 23 nt, Human
acagagugagauauggccucaaa

SEQ ID NO: 674232 - RNA, 24 nt, Human
acagagugagauauggccucaaaa

SEQ ID NO: 674233 - RNA, 24 nt, Human
acagagugagauauggccucaaaa

SEQ ID NO: 674234 - RNA, 24 nt, Human
acaguggugaaggacaugauuggu

SEQ ID NO: 674235 - RNA, 24 nt, Human
acaguggugaaggacaugauuggu

SEQ ID NO: 674236 - RNA, 19 nt, Human
accaccgcacuccagccug

SEQ ID NO: 674237 - RNA, 19 nt, Human
accaucacacuuaagagac

SEQ ID NO: 674238 - RNA, 19 nt, Human
accaucacacuuaagagac

SEQ ID NO: 674239 - RNA, 22 nt, Human
acccucuccccgaacacacaca

SEQ ID NO: 674240 - RNA, 22 nt, Human
acccucuccccgaacacacaca

SEQ ID NO: 674241 - RNA, 18 nt, Human
accgcacuccagccugag

SEQ ID NO: 674242 - RNA, 18 nt, Human
accgcacuccagccugag

SEQ ID NO: 674243 - RNA, 24 nt, Human
accgcacuccagccugagugacag

SEQ ID NO: 674244 - RNA, 24 nt, Human
accgcacuccagccugagugacag

SEQ ID NO: 674245 - RNA, 24 nt, Human
accugaggucaggaguucgagacc

SEQ ID NO: 674246 - RNA, 24 nt, Human
accugaggucaggaguucgagacc

SEQ ID NO: 674247 - RNA, 20 nt, Human
acggagcuggcuguggugag

SEQ ID NO: 674248 - RNA, 21 nt, Human
acuacucugcggauacagacg

SEQ ID NO: 674249 - RNA, 21 nt, Human
acuacucugcggauacagacg

SEQ ID NO: 674250 - RNA, 24 nt, Human
acuccagccugagugacagaguga

SEQ ID NO: 674251 - RNA, 24 nt, Human
acuccagccugagugacagaguga

SEQ ID NO: 674252 - RNA, 25 nt, Human
acuccuugggugaggaggucauuug

SEQ ID NO: 674253 - RNA, 24 nt, Human
acuugaaauccugggcucaagcgg

SEQ ID NO: 674254 - RNA, 23 nt, Human
agaagacaguucccuuuaggccu

SEQ ID NO: 674255 - RNA, 23 nt, Human
agaagacaguucccuuuaggccu

SEQ ID NO: 674256 - RNA, 20 nt, Human
agacacggucucacuaugua

SEQ ID NO: 674257 - RNA, 20 nt, Human
agacacggucucacuaugua

SEQ ID NO: 674258 - RNA, 19 nt, Human
agacagccaggucugggaa

SEQ ID NO: 674259 - RNA, 18 nt, Human
agagaugaugaugaugag

SEQ ID NO: 674260 - RNA, 18 nt, Human
agagaugaugaugaugag

SEQ ID NO: 674261 - RNA, 24 nt, Human
agaggaaaaagagcagucacggag

SEQ ID NO: 674262 - RNA, 24 nt, Human
agaggaaaaagagcagucacggag

SEQ ID NO: 674263 - RNA, 24 nt, Human
agaggccgggugcgguggcucacg

SEQ ID NO: 674264 - RNA, 19 nt, Human
agaggcugagauuauacca

SEQ ID NO: 674265 - RNA, 21 nt, Human
agauaaccccugacagacuga

SEQ ID NO: 674266 - RNA, 19 nt, Human
agcaaaaguaacgccagcc

SEQ ID NO: 674267 - RNA, 19 nt, Human
agcaaaaguaacgccagcc

SEQ ID NO: 674268 - RNA, 22 nt, Human
agccacacagaauacaagcaag

SEQ ID NO: 674269 - RNA, 19 nt, Human
agccugccuccucuccucc

SEQ ID NO: 674270 - RNA, 24 nt, Human
agccuggccaacauggugaaaucc

SEQ ID NO: 674271 - RNA, 24 nt, Human
agccuggccaacauggugaaaucc

SEQ ID NO: 674272 - RNA, 18 nt, Human
agcguccuggcgcucucc

SEQ ID NO: 674273 - RNA, 20 nt, Human
agcuggucaacaacuagcuu

SEQ ID NO: 674274 - RNA, 20 nt, Human
agcuggucaacaacuagcuu

SEQ ID NO: 674275 - RNA, 18 nt, Human
aggaaaaagagcagucac

SEQ ID NO: 674276 - RNA, 20 nt, Human
aggaagccauucagaauuuu

SEQ ID NO: 674277 - RNA, 20 nt, Human
aggaagccauucagaauuuu

SEQ ID NO: 674278 - RNA, 20 nt, Human
aggacagcagccugccuccu

SEQ ID NO: 674279 - RNA, 18 nt, Human
aggcaggcggaucaccug

SEQ ID NO: 674280 - RNA, 18 nt, Human
aggcaggcggaucaccug

SEQ ID NO: 674281 - RNA, 26 nt, Human
aggcaggcggaucaccugaggucagg

SEQ ID NO: 674282 - RNA, 26 nt, Human
aggcaggcggaucaccugaggucagg

SEQ ID NO: 674283 - RNA, 18 nt, Human
aggcccuggucuuggcag

SEQ ID NO: 674284 - RNA, 18 nt, Human
aggcccuggucuuggcag

SEQ ID NO: 674285 - RNA, 22 nt, Human
aggccgggugcgguggcucacg

SEQ ID NO: 674286 - RNA, 23 nt, Human
agggccuccuggucgggcggggc

SEQ ID NO: 674287 - RNA, 20 nt, Human
aguaccugguggcacuuccu

SEQ ID NO: 674288 - RNA, 21 nt, Human
agucccagcuacucgagaggc

SEQ ID NO: 674289 - RNA, 21 nt, Human
agucccagcuacucgagaggc

SEQ ID NO: 674290 - RNA, 19 nt, Human
aucacacuuaagagacaga

SEQ ID NO: 674291 - RNA, 21 nt, Human
aucaccugaggucaggaguuc

SEQ ID NO: 674292 - RNA, 24 nt, Human
aucaccugaggucaggaguucgag

SEQ ID NO: 674293 - RNA, 18 nt, Human
auccaccucuccugucca

SEQ ID NO: 674294 - RNA, 20 nt, Human
augaaaauggagacaagguc

SEQ ID NO: 674295 - RNA, 20 nt, Human
augaaaauggagacaagguc

SEQ ID NO: 674296 - RNA, 20 nt, Human
augaggauccugagaagggc

SEQ ID NO: 674297 - RNA, 20 nt, Human
augaggauccugagaagggc

SEQ ID NO: 674298 - RNA, 23 nt, Human
augggucaacaggacccccgaag

SEQ ID NO: 674299 - RNA, 23 nt, Human
augggucaacaggacccccgaag

SEQ ID NO: 674300 - RNA, 24 nt, Human
auuauaccaccgcacuccagccug

SEQ ID NO: 674301 - RNA, 24 nt, Human
caaaaaacaaaaaaaagccacaca

SEQ ID NO: 674302 - RNA, 24 nt, Human
caaaaaacaaaaaaaagccacaca

SEQ ID NO: 674303 - RNA, 24 nt, Human
caaaaugcugggacuacaggcgug

SEQ ID NO: 674304 - RNA, 24 nt, Human
caacauggugaaauccugucucua

SEQ ID NO: 674305 - RNA, 24 nt, Human
caacauggugaaauccugucucua

SEQ ID NO: 674306 - RNA, 24 nt, Human
caaggcaggcggaucaccugaggu

SEQ ID NO: 674307 - RNA, 24 nt, Human
caaggcaggcggaucaccugaggu

SEQ ID NO: 674308 - RNA, 26 nt, Human
caaggcaggcggaucaccugagguca

SEQ ID NO: 674309 - RNA, 18 nt, Human
caaguuccuagcacacag

SEQ ID NO: 674310 - RNA, 18 nt, Human
caaguuccuagcacacag

SEQ ID NO: 674311 - RNA, 22 nt, Human
cacacaagaagcauugucuaau

SEQ ID NO: 674312 - RNA, 20 nt, Human
cacacacacacacacacaca

SEQ ID NO: 674313 - RNA, 20 nt, Human
cacacacacacacacacaca

SEQ ID NO: 674314 - RNA, 20 nt, Human
cacacacacacacacacaca

SEQ ID NO: 674315 - RNA, 20 nt, Human
cacacacacacacacacaca

SEQ ID NO: 674316 - RNA, 20 nt, Human
cacacacacacacacacaca

SEQ ID NO: 674317 - RNA, 20 nt, Human
cacacacacacacacacaca

SEQ ID NO: 674318 - RNA, 20 nt, Human
cacacacacacacacacaca

SEQ ID NO: 674319 - RNA, 20 nt, Human
cacacacacacacacacaca

SEQ ID NO: 674320 - RNA, 20 nt, Human
cacacacacacacacacaca

SEQ ID NO: 674321 - RNA, 20 nt, Human
cacacacacacacacacaca

SEQ ID NO: 674322 - RNA, 20 nt, Human
cacacacacacacacacaca

SEQ ID NO: 674323 - RNA, 20 nt, Human
cacacacacacacacacaca

SEQ ID NO: 674324 - RNA, 20 nt, Human
cacacacacacacacacaca

SEQ ID NO: 674325 - RNA, 20 nt, Human
cacacacacacacacacaca

SEQ ID NO: 674326 - RNA, 20 nt, Human
cacacacacacacacacaca

SEQ ID NO: 674327 - RNA, 20 nt, Human
cacacacacacacacacaca

SEQ ID NO: 674328 - RNA, 20 nt, Human
cacacacacacacacacaca

SEQ ID NO: 674329 - RNA, 20 nt, Human
cacacacacacacacacaca

SEQ ID NO: 674330 - RNA, 20 nt, Human
cacacacacacacacacaca

SEQ ID NO: 674331 - RNA, 20 nt, Human
cacacacacacacacacaca

SEQ ID NO: 674332 - RNA, 20 nt, Human
cacacacacacacacacaca

SEQ ID NO: 674333 - RNA, 20 nt, Human
cacacacacacacacacaca

SEQ ID NO: 674334 - RNA, 20 nt, Human
cacacacacacacacacaca

SEQ ID NO: 674335 - RNA, 20 nt, Human
cacacacacacacacacaca

SEQ ID NO: 674336 - RNA, 20 nt, Human
cacacacacacacacacaca

SEQ ID NO: 674337 - RNA, 20 nt, Human
cacacacacacacacacaca

SEQ ID NO: 674338 - RNA, 20 nt, Human
cacacacacacacacacaca

SEQ ID NO: 674339 - RNA, 20 nt, Human
cacacacacacacacacaca

SEQ ID NO: 674340 - RNA, 20 nt, Human
cacacacacacacacacaca

SEQ ID NO: 674341 - RNA, 20 nt, Human
cacacacacacacacacaca

SEQ ID NO: 674342 - RNA, 20 nt, Human
cacacacacacacacacaca

SEQ ID NO: 674343 - RNA, 20 nt, Human
cacacacacacacacacaca

SEQ ID NO: 674344 - RNA, 20 nt, Human
cacacacacacacacacaca

SEQ ID NO: 674345 - RNA, 20 nt, Human
cacacacacacacacacaca

SEQ ID NO: 674346 - RNA, 20 nt, Human
cacacacacacacacacaca

SEQ ID NO: 674347 - RNA, 20 nt, Human
cacacacacacacacacaca

SEQ ID NO: 674348 - RNA, 20 nt, Human
cacacacacacacacacaca

SEQ ID NO: 674349 - RNA, 20 nt, Human
cacacacacacacacacaca

SEQ ID NO: 674350 - RNA, 20 nt, Human
cacacacacacacacacaca

SEQ ID NO: 674351 - RNA, 20 nt, Human
cacacacacacacacacaca

SEQ ID NO: 674352 - RNA, 20 nt, Human
cacacacacacacacacaca

SEQ ID NO: 674353 - RNA, 20 nt, Human
cacacacacacacacacaca

SEQ ID NO: 674354 - RNA, 20 nt, Human
cacacacacacacacacaca

SEQ ID NO: 674355 - RNA, 20 nt, Human
cacacacacacacacacaca

SEQ ID NO: 674356 - RNA, 20 nt, Human
cacacacacacacacacaca

SEQ ID NO: 674357 - RNA, 20 nt, Human
cacacacacacacacacaca

SEQ ID NO: 674358 - RNA, 20 nt, Human
cacacacacacacacacaca

SEQ ID NO: 674359 - RNA, 20 nt, Human
cacacacacacacacacaca

SEQ ID NO: 674360 - RNA, 22 nt, Human
cacacacacacacacacacaca

SEQ ID NO: 674361 - RNA, 22 nt, Human
cacacacacacacacacacaca

SEQ ID NO: 674362 - RNA, 22 nt, Human
cacacacacacacacacacaca

SEQ ID NO: 674363 - RNA, 22 nt, Human
cacacacacacacacacacaca

SEQ ID NO: 674364 - RNA, 22 nt, Human
cacacacacacacacacacaca

SEQ ID NO: 674365 - RNA, 22 nt, Human
cacacacacacacacacacaca

SEQ ID NO: 674366 - RNA, 22 nt, Human
cacacacacacacacacacaca

SEQ ID NO: 674367 - RNA, 22 nt, Human
cacacacacacacacacacaca

SEQ ID NO: 674368 - RNA, 22 nt, Human
cacacacacacacacacacaca

SEQ ID NO: 674369 - RNA, 22 nt, Human
cacacacacacacacacacaca

SEQ ID NO: 674370 - RNA, 22 nt, Human
cacacacacacacacacacaca

SEQ ID NO: 674371 - RNA, 22 nt, Human
cacacacacacacacacacaca

SEQ ID NO: 674372 - RNA, 22 nt, Human
cacacacacacacacacacaca

SEQ ID NO: 674373 - RNA, 22 nt, Human
cacacacacacacacacacaca

SEQ ID NO: 674374 - RNA, 22 nt, Human
cacacacacacacacacacaca

SEQ ID NO: 674375 - RNA, 22 nt, Human
cacacacacacacacacacaca

SEQ ID NO: 674376 - RNA, 22 nt, Human
cacacacacacacacacacaca

SEQ ID NO: 674377 - RNA, 22 nt, Human
cacacacacacacacacacaca

SEQ ID NO: 674378 - RNA, 22 nt, Human
cacacacacacacacacacaca

SEQ ID NO: 674379 - RNA, 22 nt, Human
cacacacacacacacacacaca

SEQ ID NO: 674380 - RNA, 25 nt, Human
cacacacacacacagagcaucugca

SEQ ID NO: 674381 - RNA, 21 nt, Human
cacacacagagcaucugcaga

SEQ ID NO: 674382 - RNA, 21 nt, Human
cacacacagagcaucugcaga

SEQ ID NO: 674383 - RNA, 23 nt, Human
cacacacagagcaucugcagaau

SEQ ID NO: 674384 - RNA, 23 nt, Human
cacacacagagcaucugcagaau

SEQ ID NO: 674385 - RNA, 20 nt, Human
cacacagaauacaagcaaga

SEQ ID NO: 674386 - RNA, 20 nt, Human
cacacagaauacaagcaaga

SEQ ID NO: 674387 - RNA, 24 nt, Human
cacagaauacaagcaagaggacau

SEQ ID NO: 674388 - RNA, 24 nt, Human
cacagaauacaagcaagaggacau

SEQ ID NO: 674389 - RNA, 24 nt, Human
cacagccacuugaaacaugauauc

SEQ ID NO: 674390 - RNA, 26 nt, Human
caccaccgccuggcagcgugcuggag

SEQ ID NO: 674391 - RNA, 23 nt, Human
cacccucuccccgaacacacaca

SEQ ID NO: 674392 - RNA, 24 nt, Human
cacccucuccccgaacacacacac

SEQ ID NO: 674393 - RNA, 24 nt, Human
caccgcacuccagccugagugaca

SEQ ID NO: 674394 - RNA, 24 nt, Human
caccgcacuccagccugagugaca

SEQ ID NO: 674395 - RNA, 19 nt, Human
caccucuccuguccagcuu

SEQ ID NO: 674396 - RNA, 19 nt, Human
caccucuccuguccagcuu

SEQ ID NO: 674397 - RNA, 23 nt, Human
caccugaggucaggaguucgaga

SEQ ID NO: 674398 - RNA, 23 nt, Human
caccugaggucaggaguucgaga

SEQ ID NO: 674399 - RNA, 19 nt, Human
caccuucuucuucuugucc

SEQ ID NO: 674400 - RNA, 27 nt, Human
cacgaaaugggucaacaggacccccga

SEQ ID NO: 674401 - RNA, 27 nt, Human
cacgaaaugggucaacaggacccccga

SEQ ID NO: 674402 - RNA, 24 nt, Human
cacgccuguaaucccagcacucug

SEQ ID NO: 674403 - RNA, 24 nt, Human
cacgccuguaaucccagcacucug

SEQ ID NO: 674404 - RNA, 21 nt, Human
cacuauauguagaagucaaaa

SEQ ID NO: 674405 - RNA, 21 nt, Human
cacuauauguagaagucaaaa

SEQ ID NO: 674406 - RNA, 22 nt, Human
cacuauguagcccaggcuggac

SEQ ID NO: 674407 - RNA, 23 nt, Human
cacucagccucccaaaaugcugg

SEQ ID NO: 674408 - RNA, 23 nt, Human
cacucagccucccaaaaugcugg

SEQ ID NO: 674409 - RNA, 22 nt, Human
cacuccagccugagugacagag

SEQ ID NO: 674410 - RNA, 22 nt, Human
cacuccagccugagugacagag

SEQ ID NO: 674411 - RNA, 22 nt, Human
cacuccagccugagugacagag

SEQ ID NO: 674412 - RNA, 22 nt, Human
cacuccagccugagugacagag

SEQ ID NO: 674413 - RNA, 24 nt, Human
cacuccagccugagugacagagug

SEQ ID NO: 674414 - RNA, 24 nt, Human
cacuccagccugagugacagagug

SEQ ID NO: 674415 - RNA, 25 nt, Human
cacucuguuuccaaaggugacccuu

SEQ ID NO: 674416 - RNA, 18 nt, Human
cagaaacaugacuguagc

SEQ ID NO: 674417 - RNA, 18 nt, Human
cagaaacaugacuguagc

SEQ ID NO: 674418 - RNA, 19 nt, Human
cagaacacacacaagaagc

SEQ ID NO: 674419 - RNA, 19 nt, Human
cagaacacacacaagaagc

SEQ ID NO: 674420 - RNA, 19 nt, Human
cagagccuauaaaagcuac

SEQ ID NO: 674421 - RNA, 19 nt, Human
cagagccuauaaaagcuac

SEQ ID NO: 674422 - RNA, 22 nt, Human
cagauaaccccugacagacuga

SEQ ID NO: 674423 - RNA, 24 nt, Human
cagcacucugggaggccaaggcag

SEQ ID NO: 674424 - RNA, 24 nt, Human
cagcacucugggaggccaaggcag

SEQ ID NO: 674425 - RNA, 25 nt, Human
cagcacucugggaggccaaggcagg

SEQ ID NO: 674426 - RNA, 25 nt, Human
cagcacucugggaggccaaggcagg

SEQ ID NO: 674427 - RNA, 22 nt, Human
cagcagccugggagcaaccaag

SEQ ID NO: 674428 - RNA, 22 nt, Human
cagcagccugggagcaaccaag

SEQ ID NO: 674429 - RNA, 21 nt, Human
cagccugccuccucuccuccu

SEQ ID NO: 674430 - RNA, 20 nt, Human
cagcuaagcuucuacaucuu

SEQ ID NO: 674431 - RNA, 18 nt, Human
cagcugcuguagcguccu

SEQ ID NO: 674432 - RNA, 20 nt, Human
cagcuggcaagggcuggcug

SEQ ID NO: 674433 - RNA, 20 nt, Human
cagcuggcaagggcuggcug

SEQ ID NO: 674434 - RNA, 21 nt, Human
cagcuugagagaggucuacaa

SEQ ID NO: 674435 - RNA, 21 nt, Human
cagcuugagagaggucuacaa

SEQ ID NO: 674436 - RNA, 21 nt, Human
caggaaucagggacccaauaa

SEQ ID NO: 674437 - RNA, 21 nt, Human
caggaaucagggacccaauaa

SEQ ID NO: 674438 - RNA, 21 nt, Human
caggacagcagccugccuccu

SEQ ID NO: 674439 - RNA, 21 nt, Human
caggacagcagccugccuccu

SEQ ID NO: 674440 - RNA, 24 nt, Human
caggcggaucaccugaggucagga

SEQ ID NO: 674441 - RNA, 24 nt, Human
caggucuucaugcagccugcugga

SEQ ID NO: 674442 - RNA, 23 nt, Human
cagguucucucuucucugaggca

SEQ ID NO: 674443 - RNA, 23 nt, Human
cagguucucucuucucugaggca

SEQ ID NO: 674444 - RNA, 22 nt, Human
caguaacagagccuauaaaagc

SEQ ID NO: 674445 - RNA, 22 nt, Human
caguaacagagccuauaaaagc

SEQ ID NO: 674446 - RNA, 22 nt, Human
caucaucgucaucagugguguc

SEQ ID NO: 674447 - RNA, 26 nt, Human
caucccacucagccucccaaaaugcu

SEQ ID NO: 674448 - RNA, 26 nt, Human
caucccacucagccucccaaaaugcu

SEQ ID NO: 674449 - RNA, 24 nt, Human
caucuuagacugugacgucagcug

SEQ ID NO: 674450 - RNA, 24 nt, Human
caucuuagacugugacgucagcug

SEQ ID NO: 674451 - RNA, 20 nt, Human
ccaaaaugcugggacuacag

SEQ ID NO: 674452 - RNA, 24 nt, Human
ccaaaaugcugggacuacaggcgu

SEQ ID NO: 674453 - RNA, 24 nt, Human
ccaaaaugcugggacuacaggcgu

SEQ ID NO: 674454 - RNA, 21 nt, Human
ccaacccauggaccugaggcc

SEQ ID NO: 674455 - RNA, 21 nt, Human
ccaacccauggaccugaggcc

SEQ ID NO: 674456 - RNA, 19 nt, Human
ccacacagaauacaagcaa

SEQ ID NO: 674457 - RNA, 19 nt, Human
ccacacagaauacaagcaa

SEQ ID NO: 674458 - RNA, 24 nt, Human
ccacccucuccccgaacacacaca

SEQ ID NO: 674459 - RNA, 24 nt, Human
ccacccucuccccgaacacacaca

SEQ ID NO: 674460 - RNA, 20 nt, Human
ccaccgcacuccagccugag

SEQ ID NO: 674461 - RNA, 20 nt, Human
ccaccgcacuccagccugag

SEQ ID NO: 674462 - RNA, 20 nt, Human
ccaccgcacuccagccugag

SEQ ID NO: 674463 - RNA, 20 nt, Human
ccaccgcacuccagccugag

SEQ ID NO: 674464 - RNA, 24 nt, Human
ccaccgcacuccagccugagugac

SEQ ID NO: 674465 - RNA, 24 nt, Human
ccaccgcacuccagccugagugac

SEQ ID NO: 674466 - RNA, 18 nt, Human
ccacugccucuucagcug

SEQ ID NO: 674467 - RNA, 21 nt, Human
ccagaaaccaugccuguaaca

SEQ ID NO: 674468 - RNA, 23 nt, Human
ccagacuggcugcccaacccaug

SEQ ID NO: 674469 - RNA, 23 nt, Human
ccagacuggcugcccaacccaug

SEQ ID NO: 674470 - RNA, 21 nt, Human
ccaggcuggacuugaaauccu

SEQ ID NO: 674471 - RNA, 21 nt, Human
ccaggcuggacuugaaauccu

SEQ ID NO: 674472 - RNA, 18 nt, Human
ccaucugcgcagguccau

SEQ ID NO: 674473 - RNA, 19 nt, Human
cccaaaaaaaaaaaagccc

SEQ ID NO: 674474 - RNA, 19 nt, Human
cccaaaaaaaaaaaagccc

SEQ ID NO: 674475 - RNA, 23 nt, Human
cccaaaaugcugggacuacaggc

SEQ ID NO: 674476 - RNA, 24 nt, Human
cccaaaaugcugggacuacaggcg

SEQ ID NO: 674477 - RNA, 19 nt, Human
cccaaaucagagcaguggc

SEQ ID NO: 674478 - RNA, 22 nt, Human
cccaaguagauacucucugccc

SEQ ID NO: 674479 - RNA, 22 nt, Human
cccacacugccgauaucccaag

SEQ ID NO: 674480 - RNA, 22 nt, Human
cccacacugccgauaucccaag

SEQ ID NO: 674481 - RNA, 18 nt, Human
cccaggaacucuguccag

SEQ ID NO: 674482 - RNA, 18 nt, Human
cccaggaacucuguccag

SEQ ID NO: 674483 - RNA, 20 nt, Human
ccccgaagaguucaagauac

SEQ ID NO: 674484 - RNA, 20 nt, Human
ccccgaagaguucaagauac

SEQ ID NO: 674485 - RNA, 20 nt, Human
cccugugcuaccacccucuc

SEQ ID NO: 674486 - RNA, 20 nt, Human
cccugugcuaccacccucuc

SEQ ID NO: 674487 - RNA, 26 nt, Human
ccuauccuguccaacaccuaagcaua

SEQ ID NO: 674488 - RNA, 20 nt, Human
ccucaaaaaacaaaaaaaag

SEQ ID NO: 674489 - RNA, 20 nt, Human
ccucaaaaaacaaaaaaaag

SEQ ID NO: 674490 - RNA, 23 nt, Human
ccucaaaaaacaaaaaaaagccc

SEQ ID NO: 674491 - RNA, 25 nt, Human
ccuccaccgcacugacccucuugga

SEQ ID NO: 674492 - RNA, 25 nt, Human
ccuccuaccccuauccuguccaaca

SEQ ID NO: 674493 - RNA, 26 nt, Human
ccuccuaccccuauccuguccaacac

SEQ ID NO: 674494 - RNA, 21 nt, Human
ccuccucuccuccuaccccua

SEQ ID NO: 674495 - RNA, 21 nt, Human
ccuccucuccuccuaccccua

SEQ ID NO: 674496 - RNA, 22 nt, Human
ccugaggucaggaguucgagac

SEQ ID NO: 674497 - RNA, 21 nt, Human
ccugcagcaccuucacauggc

SEQ ID NO: 674498 - RNA, 22 nt, Human
ccuggccaacauggugaaaucc

SEQ ID NO: 674499 - RNA, 22 nt, Human
ccuggccaacauggugaaaucc

SEQ ID NO: 674500 - RNA, 24 nt, Human
ccuggccaacauggugaaauccug

SEQ ID NO: 674501 - RNA, 21 nt, Human
ccugggagcugcuuuccccuc

SEQ ID NO: 674502 - RNA, 21 nt, Human
ccugggagcugcuuuccccuc

SEQ ID NO: 674503 - RNA, 22 nt, Human
ccugggcucaagcggucauccc

SEQ ID NO: 674504 - RNA, 22 nt, Human
ccugggcucaagcggucauccc

SEQ ID NO: 674505 - RNA, 22 nt, Human
ccuggucgggcggggccugccc

SEQ ID NO: 674506 - RNA, 20 nt, Human
ccuguagucccagcuacucg

SEQ ID NO: 674507 - RNA, 22 nt, Human
ccuguagucccagcuacucgag

SEQ ID NO: 674508 - RNA, 22 nt, Human
ccuguagucccagcuacucgag

SEQ ID NO: 674509 - RNA, 22 nt, Human
ccugucucuacuaaaaauacaa

SEQ ID NO: 674510 - RNA, 22 nt, Human
ccugucucuacuaaaaauacaa

SEQ ID NO: 674511 - RNA, 18 nt, Human
ccuugguugaaugucagc

SEQ ID NO: 674512 - RNA, 20 nt, Human
cgaaaugggucaacaggacc

SEQ ID NO: 674513 - RNA, 20 nt, Human
cgaaaugggucaacaggacc

SEQ ID NO: 674514 - RNA, 20 nt, Human
cgaagcaggaaucagggacc

SEQ ID NO: 674515 - RNA, 20 nt, Human
cgaagcaggaaucagggacc

SEQ ID NO: 674516 - RNA, 24 nt, Human
cgagaccagccuggccaacauggu

SEQ ID NO: 674517 - RNA, 24 nt, Human
cgagaccagccuggccaacauggu

SEQ ID NO: 674518 - RNA, 21 nt, Human
cgcacuuccuccaccgcacug

SEQ ID NO: 674519 - RNA, 23 nt, Human
cgccuguaaucccagcacucugg

SEQ ID NO: 674520 - RNA, 23 nt, Human
cgccuguaaucccagcacucugg

SEQ ID NO: 674521 - RNA, 24 nt, Human
cgccuguaaucccagcacucuggg

SEQ ID NO: 674522 - RNA, 24 nt, Human
cgccuguaaucccagcacucuggg

SEQ ID NO: 674523 - RNA, 22 nt, Human
cgccuguagucccagcuacucg

SEQ ID NO: 674524 - RNA, 22 nt, Human
cgccuguagucccagcuacucg

SEQ ID NO: 674525 - RNA, 23 nt, Human
cgccuguagucccagcuacucga

SEQ ID NO: 674526 - RNA, 23 nt, Human
cgccuguagucccagcuacucga

SEQ ID NO: 674527 - RNA, 24 nt, Human
cggaucaccugaggucaggaguuc

SEQ ID NO: 674528 - RNA, 24 nt, Human
cggaucaccugaggucaggaguuc

SEQ ID NO: 674529 - RNA, 27 nt, Human
cggaucaccugaggucaggaguucgag

SEQ ID NO: 674530 - RNA, 27 nt, Human
cggaucaccugaggucaggaguucgag

SEQ ID NO: 674531 - RNA, 20 nt, Human
cggccgcgggcgccacugcc

SEQ ID NO: 674532 - RNA, 21 nt, Human
cuaaguaacugagacugaagc

SEQ ID NO: 674533 - RNA, 22 nt, Human
cuaccacccucuccccgaacac

SEQ ID NO: 674534 - RNA, 22 nt, Human
cuaccacccucuccccgaacac

SEQ ID NO: 674535 - RNA, 23 nt, Human
cuauguagcccaggcuggacuug

SEQ ID NO: 674536 - RNA, 23 nt, Human
cuauguagcccaggcuggacuug

SEQ ID NO: 674537 - RNA, 21 nt, Human
cucaaaaaacaaaaaaaagcc

SEQ ID NO: 674538 - RNA, 21 nt, Human
cucaaaaaacaaaaaaaagcc

SEQ ID NO: 674539 - RNA, 25 nt, Human
cucacagcaauucugaccagaaacc

SEQ ID NO: 674540 - RNA, 23 nt, Human
cucacgccuguaaucccagcacu

SEQ ID NO: 674541 - RNA, 23 nt, Human
cucacgccuguaaucccagcacu

SEQ ID NO: 674542 - RNA, 24 nt, Human
cucacgccuguaaucccagcacuc

SEQ ID NO: 674543 - RNA, 24 nt, Human
cucacgccuguaaucccagcacuc

SEQ ID NO: 674544 - RNA, 20 nt, Human
cucacgccuguagucccagc

SEQ ID NO: 674545 - RNA, 20 nt, Human
cucacgccuguagucccagc

SEQ ID NO: 674546 - RNA, 23 nt, Human
cucacgccuguagucccagcuac

SEQ ID NO: 674547 - RNA, 24 nt, Human
cucacgccuguagucccagcuacu

SEQ ID NO: 674548 - RNA, 19 nt, Human
cucagaucuucagguucuc

SEQ ID NO: 674549 - RNA, 28 nt, Human
cugaagguccucggggugguugcucuuu

SEQ ID NO: 674550 - RNA, 24 nt, Human
cugcagcaccuucacauggcuucg

SEQ ID NO: 674551 - RNA, 24 nt, Human
cuggccaacauggugaaauccugu

SEQ ID NO: 674552 - RNA, 24 nt, Human
cuggccaacauggugaaauccugu

SEQ ID NO: 674553 - RNA, 19 nt, Human
cugucuccucaaaagcaag

SEQ ID NO: 674554 - RNA, 18 nt, Human
cuucaugaaguuuccuuu

SEQ ID NO: 674555 - RNA, 18 nt, Human
cuucaugaaguuuccuuu

SEQ ID NO: 674556 - RNA, 19 nt, Human
cuugaaauccugggcucaa

SEQ ID NO: 674557 - RNA, 19 nt, Human
cuuuauguauaagucucau

SEQ ID NO: 674558 - RNA, 19 nt, Human
cuuuauguauaagucucau

SEQ ID NO: 674559 - RNA, 23 nt, Human
gaaaaagagcagucacggaggua

SEQ ID NO: 674560 - RNA, 23 nt, Human
gaaaaagagcagucacggaggua

SEQ ID NO: 674561 - RNA, 21 nt, Human
gaaaacaggccaaaugacaug

SEQ ID NO: 674562 - RNA, 23 nt, Human
gaaacaugauaucccaggaccaa

SEQ ID NO: 674563 - RNA, 24 nt, Human
gaaaggggcaggacucuggguucc

SEQ ID NO: 674564 - RNA, 18 nt, Human
gaaauccugggcucaagc

SEQ ID NO: 674565 - RNA, 23 nt, Human
gaagcuccuucaggguggugccu

SEQ ID NO: 674566 - RNA, 19 nt, Human
gaaggaagaggaugaggau

SEQ ID NO: 674567 - RNA, 19 nt, Human
gaaggaagaggaugaggau

SEQ ID NO: 674568 - RNA, 18 nt, Human
gacuacaggcgugagcca

SEQ ID NO: 674569 - RNA, 18 nt, Human
gacuacaggcgugagcca

SEQ ID NO: 674570 - RNA, 21 nt, Human
gacuacaggcgugagccacug

SEQ ID NO: 674571 - RNA, 21 nt, Human
gacuacaggcgugagccacug

SEQ ID NO: 674572 - RNA, 24 nt, Human
gacuacaggcgugagccacugugc

SEQ ID NO: 674573 - RNA, 24 nt, Human
gacuacaggcgugagccacugugc

SEQ ID NO: 674574 - RNA, 22 nt, Human
gacuacgcaacaguaacagagc

SEQ ID NO: 674575 - RNA, 20 nt, Human
gaggaggucauuugccugga

SEQ ID NO: 674576 - RNA, 21 nt, Human
gaucaccugaggucaggaguu

SEQ ID NO: 674577 - RNA, 24 nt, Human
gaucaccugaggucaggaguucga

SEQ ID NO: 674578 - RNA, 24 nt, Human
gaucaccugaggucaggaguucga

SEQ ID NO: 674579 - RNA, 23 nt, Human
gcacuccagccugagugacagag

SEQ ID NO: 674580 - RNA, 24 nt, Human
gcacuccagccugagugacagagu

SEQ ID NO: 674581 - RNA, 22 nt, Human
gcagccugccuccucuccuccu

SEQ ID NO: 674582 - RNA, 19 nt, Human
gcagcgugcuggaggaggg

SEQ ID NO: 674583 - RNA, 20 nt, Human
gccaacauggugaaauccug

SEQ ID NO: 674584 - RNA, 20 nt, Human
gccaacauggugaaauccug

SEQ ID NO: 674585 - RNA, 24 nt, Human
gccaacauggugaaauccugucuc

SEQ ID NO: 674586 - RNA, 24 nt, Human
gccaacauggugaaauccugucuc

SEQ ID NO: 674587 - RNA, 21 nt, Human
gcggaucaccugaggucagga

SEQ ID NO: 674588 - RNA, 20 nt, Human
gcgguggcucacgccuguaa

SEQ ID NO: 674589 - RNA, 23 nt, Human
gcugacaugcagaaacaugacug

SEQ ID NO: 674590 - RNA, 23 nt, Human
gcugacaugcagaaacaugacug

SEQ ID NO: 674591 - RNA, 24 nt, Human
gcuggcucacgccuguagucccag

SEQ ID NO: 674592 - RNA, 24 nt, Human
gcuggcucacgccuguagucccag

SEQ ID NO: 674593 - RNA, 23 nt, Human
gcuguggugaagcaggcccuggu

SEQ ID NO: 674594 - RNA, 23 nt, Human
gcuguggugaagcaggcccuggu

SEQ ID NO: 674595 - RNA, 21 nt, Human
ggaaaggggcaggacucuggg

SEQ ID NO: 674596 - RNA, 21 nt, Human
ggaaaggggcaggacucuggg

SEQ ID NO: 674597 - RNA, 24 nt, Human
ggaagccauucagaauuuuucacc

SEQ ID NO: 674598 - RNA, 24 nt, Human
ggaagccauucagaauuuuucacc

SEQ ID NO: 674599 - RNA, 18 nt, Human
ggacccaauaagucucag

SEQ ID NO: 674600 - RNA, 18 nt, Human
ggacccaauaagucucag

SEQ ID NO: 674601 - RNA, 20 nt, Human
ggacuacaggcgugagccac

SEQ ID NO: 674602 - RNA, 20 nt, Human
ggacuacaggcgugagccac

SEQ ID NO: 674603 - RNA, 24 nt, Human
ggacuacaggcgugagccacugug

SEQ ID NO: 674604 - RNA, 21 nt, Human
ggacuucaaagcccuccgccu

SEQ ID NO: 674605 - RNA, 26 nt, Human
ggagaaagccugucuuuccucggaag

SEQ ID NO: 674606 - RNA, 18 nt, Human
ggagucugucuccucaaa

SEQ ID NO: 674607 - RNA, 18 nt, Human
ggagucugucuccucaaa

SEQ ID NO: 674608 - RNA, 22 nt, Human
ggaucaccugaggucaggaguu

SEQ ID NO: 674609 - RNA, 23 nt, Human
ggaucaccugaggucaggaguuc

SEQ ID NO: 674610 - RNA, 23 nt, Human
ggaucaccugaggucaggaguuc

SEQ ID NO: 674611 - RNA, 19 nt, Human
ggauugucaagcagcagca

SEQ ID NO: 674612 - RNA, 24 nt, Human
ggcagcgugcuggaggagggauuc

SEQ ID NO: 674613 - RNA, 22 nt, Human
ggcgugcuggcucacgccugua

SEQ ID NO: 674614 - RNA, 19 nt, Human
gggcggggccugcccuggc

SEQ ID NO: 674615 - RNA, 24 nt, Human
gggcgugcuggcucacgccuguag

SEQ ID NO: 674616 - RNA, 28 nt, Human
ggggagaaagccugucuuuccucggaag

SEQ ID NO: 674617 - RNA, 28 nt, Human
ggggagaaagccugucuuuccucggaag

SEQ ID NO: 674618 - RNA, 24 nt, Human
gggugcgguggcucacgccuguaa

SEQ ID NO: 674619 - RNA, 23 nt, Human
gguggcucacgccuguaauccca

SEQ ID NO: 674620 - RNA, 23 nt, Human
gguggcucacgccuguaauccca

SEQ ID NO: 674621 - RNA, 24 nt, Human
gguggcucacgccuguaaucccag

SEQ ID NO: 674622 - RNA, 24 nt, Human
gguggcucacgccuguaaucccag

SEQ ID NO: 674623 - RNA, 19 nt, Human
guccauuguccaccuccaa

SEQ ID NO: 674624 - RNA, 23 nt, Human
guggcucacgccuguaaucccag

SEQ ID NO: 674625 - RNA, 21 nt, Human
uaagucagagguugacaccca

SEQ ID NO: 674626 - RNA, 18 nt, Human
uacaggcgugagccacug

SEQ ID NO: 674627 - RNA, 19 nt, Human
uacaggcgugagccacugu

SEQ ID NO: 674628 - RNA, 20 nt, Human
uagaaaacaggccaaaugac

SEQ ID NO: 674629 - RNA, 20 nt, Human
uagaaaacaggccaaaugac

SEQ ID NO: 674630 - RNA, 26 nt, Human
uagaaaacaggccaaaugacaugcaa

SEQ ID NO: 674631 - RNA, 26 nt, Human
uagaaaacaggccaaaugacaugcaa

SEQ ID NO: 674632 - RNA, 18 nt, Human
uaggacucuuggcacucc

SEQ ID NO: 674633 - RNA, 18 nt, Human
uaggacucuuggcacucc

SEQ ID NO: 674634 - RNA, 23 nt, Human
uaggucacgaaaugggucaacag

SEQ ID NO: 674635 - RNA, 21 nt, Human
uaucccaagcccugugcuacc

SEQ ID NO: 674636 - RNA, 21 nt, Human
uaucccaagcccugugcuacc

SEQ ID NO: 674637 - RNA, 19 nt, Human
uaucccaggaccaaccugg

SEQ ID NO: 674638 - RNA, 18 nt, Human
uauguagcccaggcugga

SEQ ID NO: 674639 - RNA, 18 nt, Human
uauguagcccaggcugga

SEQ ID NO: 674640 - RNA, 24 nt, Human
uauguagcccaggcuggacuugaa

SEQ ID NO: 674641 - RNA, 24 nt, Human
uauguagcccaggcuggacuugaa

SEQ ID NO: 674642 - RNA, 21 nt, Human
uauuguggcuguggugaagca

SEQ ID NO: 674643 - RNA, 21 nt, Human
uauuguggcuguggugaagca

SEQ ID NO: 674644 - RNA, 19 nt, Human
uauuuagucaccaccucaa

SEQ ID NO: 674645 - RNA, 22 nt, Human
ucaacaaauauccaccucuccu

SEQ ID NO: 674646 - RNA, 20 nt, Human
ucaccugaggucaggaguuc

SEQ ID NO: 674647 - RNA, 20 nt, Human
ucagaauugggacagaggca

SEQ ID NO: 674648 - RNA, 21 nt, Human
ucagagcaguggcaauguaag

SEQ ID NO: 674649 - RNA, 21 nt, Human
ucagagcaguggcaauguaag

SEQ ID NO: 674650 - RNA, 18 nt, Human
ucagccucccaaaaugcu

SEQ ID NO: 674651 - RNA, 18 nt, Human
ucagccucccaaaaugcu

SEQ ID NO: 674652 - RNA, 19 nt, Human
ucaggccaagcaggacuug

SEQ ID NO: 674653 - RNA, 19 nt, Human
ucaggccaagcaggacuug

SEQ ID NO: 674654 - RNA, 22 nt, Human
uccagccccgacgcugcggccg

SEQ ID NO: 674655 - RNA, 24 nt, Human
uccagccccgacgcugcggccgcg

SEQ ID NO: 674656 - RNA, 23 nt, Human
uccagccugagugacagagugag

SEQ ID NO: 674657 - RNA, 23 nt, Human
uccagccugagugacagagugag

SEQ ID NO: 674658 - RNA, 24 nt, Human
uccagccugagugacagagugaga

SEQ ID NO: 674659 - RNA, 24 nt, Human
uccagccugagugacagagugaga

SEQ ID NO: 674660 - RNA, 23 nt, Human
ucccaaaaaaaaaaaagcccaaa

SEQ ID NO: 674661 - RNA, 23 nt, Human
ucccaaaaaaaaaaaagcccaaa

SEQ ID NO: 674662 - RNA, 24 nt, Human
ucccaaaaugcugggacuacaggc

SEQ ID NO: 674663 - RNA, 24 nt, Human
ucccaaaaugcugggacuacaggc

SEQ ID NO: 674664 - RNA, 20 nt, Human
ucccacccaucaggccaagc

SEQ ID NO: 674665 - RNA, 20 nt, Human
ucccacccaucaggccaagc

SEQ ID NO: 674666 - RNA, 19 nt, Human
ucccccaagugugguccuc

SEQ ID NO: 674667 - RNA, 19 nt, Human
ucccccaagugugguccuc

SEQ ID NO: 674668 - RNA, 20 nt, Human
ucccugggucuuggccaccu

SEQ ID NO: 674669 - RNA, 22 nt, Human
ucccugggucuuggccaccuuc

SEQ ID NO: 674670 - RNA, 20 nt, Human
uccucggggugguugcucuu

SEQ ID NO: 674671 - RNA, 20 nt, Human
uccuugggugaggaggucau

SEQ ID NO: 674672 - RNA, 21 nt, Human
uccuugggugaggaggucauu

SEQ ID NO: 674673 - RNA, 24 nt, Human
ucucacuauguagcccaggcugga

SEQ ID NO: 674674 - RNA, 24 nt, Human
ucucacuauguagcccaggcugga

SEQ ID NO: 674675 - RNA, 21 nt, Human
ucucauugacuuuggcacagc

SEQ ID NO: 674676 - RNA, 19 nt, Human
ucucuaaaugcaacuggcu

SEQ ID NO: 674677 - RNA, 19 nt, Human
ucucuaaaugcaacuggcu

SEQ ID NO: 674678 - RNA, 21 nt, Human
ucucuacuaaaaauacaaaaa

SEQ ID NO: 674679 - RNA, 23 nt, Human
ucucuacuaaaaauacaaaaauu

SEQ ID NO: 674680 - RNA, 21 nt, Human
ucugaaagacucuggagacag

SEQ ID NO: 674681 - RNA, 23 nt, Human
ucuggcgacagcaaggagguggc

SEQ ID NO: 674682 - RNA, 23 nt, Human
ucuggcgacagcaaggagguggc

SEQ ID NO: 674683 - RNA, 23 nt, Human
ugaaaggcuguccaccuugguug

SEQ ID NO: 674684 - RNA, 18 nt, Human
ugaagagguaggagcugg

SEQ ID NO: 674685 - RNA, 18 nt, Human
ugaagagguaggagcugg

SEQ ID NO: 674686 - RNA, 20 nt, Human
ugaagcaacaguggaaccuc

SEQ ID NO: 674687 - RNA, 20 nt, Human
ugaagcaacaguggaaccuc

SEQ ID NO: 674688 - RNA, 18 nt, Human
ugaaggaagaggaugagg

SEQ ID NO: 674689 - RNA, 18 nt, Human
ugaaggaagaggaugagg

SEQ ID NO: 674690 - RNA, 19 nt, Human
ugacaugcagaaacaugac

SEQ ID NO: 674691 - RNA, 19 nt, Human
ugacaugcagaaacaugac

SEQ ID NO: 674692 - RNA, 23 nt, Human
ugacuagacagcaaaaguaacgc

SEQ ID NO: 674693 - RNA, 23 nt, Human
ugacuagacagcaaaaguaacgc

SEQ ID NO: 674694 - RNA, 18 nt, Human
ugagagaggucuacaacc

SEQ ID NO: 674695 - RNA, 18 nt, Human
ugagagaggucuacaacc

SEQ ID NO: 674696 - RNA, 18 nt, Human
ugagauaucacagcugga

SEQ ID NO: 674697 - RNA, 23 nt, Human
ugagcuggucacucuguuuccaa

SEQ ID NO: 674698 - RNA, 23 nt, Human
ugaggauggagaugaggauccug

SEQ ID NO: 674699 - RNA, 23 nt, Human
ugaggauggagaugaggauccug

SEQ ID NO: 674700 - RNA, 23 nt, Human
ugauggguaccucuucaagacua

SEQ ID NO: 674701 - RNA, 23 nt, Human
ugauggguaccucuucaagacua

SEQ ID NO: 674702 - RNA, 18 nt, Human
ugcagaauaagucagagg

SEQ ID NO: 674703 - RNA, 18 nt, Human
ugcagaauaagucagagg

SEQ ID NO: 674704 - RNA, 19 nt, Human
ugcagccugaagguccucg

SEQ ID NO: 674705 - RNA, 20 nt, Human
ugcuggauucugaaagacuc

SEQ ID NO: 674706 - RNA, 24 nt, Human
ugcuggcucacgccuguaguccca

SEQ ID NO: 674707 - RNA, 24 nt, Human
ugcuggcucacgccuguaguccca

SEQ ID NO: 674708 - RNA, 24 nt, Human
ugcugggacuacaggcgugagcca

SEQ ID NO: 674709 - RNA, 24 nt, Human
ugcugggacuacaggcgugagcca

SEQ ID NO: 674710 - RNA, 18 nt, Human
uggaaaaccaucacacuu

SEQ ID NO: 674711 - RNA, 18 nt, Human
uggaaaaccaucacacuu

SEQ ID NO: 674712 - RNA, 20 nt, Human
uggaaaggggcaggacucug

SEQ ID NO: 674713 - RNA, 20 nt, Human
uggaaaggggcaggacucug

SEQ ID NO: 674714 - RNA, 22 nt, Human
uggaaaggggcaggacucuggg

SEQ ID NO: 674715 - RNA, 22 nt, Human
uggaaaggggcaggacucuggg

SEQ ID NO: 674716 - RNA, 18 nt, Human
uggaaccuccagauacag

SEQ ID NO: 674717 - RNA, 20 nt, Human
uggaaccuccagauacagau

SEQ ID NO: 674718 - RNA, 18 nt, Human
uggaacgaacgauacaug

SEQ ID NO: 674719 - RNA, 18 nt, Human
uggaacgaacgauacaug

SEQ ID NO: 674720 - RNA, 21 nt, Human
uggacuugaaauccugggccg

SEQ ID NO: 674721 - RNA, 21 nt, Human
uggacuugaaauccugggccg

SEQ ID NO: 674722 - RNA, 20 nt, Human
uggcaagaaccagagcuguu

SEQ ID NO: 674723 - RNA, 20 nt, Human
uggcaagaaccagagcuguu

SEQ ID NO: 674724 - RNA, 19 nt, Human
uggcacagccacuugaaac

SEQ ID NO: 674725 - RNA, 24 nt, Human
uggcagauuuccacuauauguaga

SEQ ID NO: 674726 - RNA, 24 nt, Human
uggcagauuuccacuauauguaga

SEQ ID NO: 674727 - RNA, 24 nt, Human
uggccaacauggugaaauccuguc

SEQ ID NO: 674728 - RNA, 24 nt, Human
uggccaacauggugaaauccuguc

SEQ ID NO: 674729 - RNA, 22 nt, Human
uggccucaaaaaacaaaaaaaa

SEQ ID NO: 674730 - RNA, 22 nt, Human
uggccucaaaaaacaaaaaaaa

SEQ ID NO: 674731 - RNA, 22 nt, Human
uggcucacgccuguaaucccag

SEQ ID NO: 674732 - RNA, 24 nt, Human
uggcucacgccuguaaucccagca

SEQ ID NO: 674733 - RNA, 24 nt, Human
uggcucacgccuguaaucccagca

SEQ ID NO: 674734 - RNA, 21 nt, Human
uggcucacgccuguaguccca

SEQ ID NO: 674735 - RNA, 21 nt, Human
uggcucacgccuguaguccca

SEQ ID NO: 674736 - RNA, 22 nt, Human
uggcucacgccuguagucccag

SEQ ID NO: 674737 - RNA, 22 nt, Human
uggcucacgccuguagucccag

SEQ ID NO: 674738 - RNA, 18 nt, Human
uggcucaggguagcuggu

SEQ ID NO: 674739 - RNA, 18 nt, Human
uggcucaggguagcuggu

SEQ ID NO: 674740 - RNA, 21 nt, Human
ugggacuacaggcgugagcca

SEQ ID NO: 674741 - RNA, 21 nt, Human
ugggacuacaggcgugagcca

SEQ ID NO: 674742 - RNA, 22 nt, Human
ugggacuacaggcgugagccac

SEQ ID NO: 674743 - RNA, 22 nt, Human
ugggacuacaggcgugagccac

SEQ ID NO: 674744 - RNA, 22 nt, Human
ugggacuacaggcgugagccac

SEQ ID NO: 674745 - RNA, 22 nt, Human
ugggacuacaggcgugagccac

SEQ ID NO: 674746 - RNA, 22 nt, Human
ugggacuacaggcgugagccac

SEQ ID NO: 674747 - RNA, 22 nt, Human
ugggacuacaggcgugagccac

SEQ ID NO: 674748 - RNA, 24 nt, Human
ugggacuacaggcgugagccacug

SEQ ID NO: 674749 - RNA, 24 nt, Human
ugggacuacaggcgugagccacug

SEQ ID NO: 674750 - RNA, 25 nt, Human
ugggacuacaggcgugagccacugu

SEQ ID NO: 674751 - RNA, 25 nt, Human
ugggacuacaggcgugagccacugu

SEQ ID NO: 674752 - RNA, 24 nt, Human
ugggaggccaaggcaggcggauca

SEQ ID NO: 674753 - RNA, 24 nt, Human
ugggaggccaaggcaggcggauca

SEQ ID NO: 674754 - RNA, 19 nt, Human
uggugaagcaggcccuggu

SEQ ID NO: 674755 - RNA, 19 nt, Human
uggugaagcaggcccuggu

SEQ ID NO: 674756 - RNA, 23 nt, Human
uggugugucacaaagagcuccaa

SEQ ID NO: 674757 - RNA, 23 nt, Human
uggugugucacaaagagcuccaa

SEQ ID NO: 674758 - RNA, 24 nt, Human
ugugaaggaagaggaugaggaugg

SEQ ID NO: 674759 - RNA, 24 nt, Human
ugugaaggaagaggaugaggaugg

SEQ ID NO: 674760 - RNA, 22 nt, Human
uguggugagaggagguccagcc

SEQ ID NO: 674761 - RNA, 21 nt, Human
uguuaagugaaugaagaggua

SEQ ID NO: 674762 - RNA, 21 nt, Human
uguuaagugaaugaagaggua

SEQ ID NO: 674763 - RNA, 18 nt, Human
uuacucaacacuccacaa

SEQ ID NO: 674764 - RNA, 18 nt, Human
uuacucaacacuccacaa

SEQ ID NO: 674765 - RNA, 18 nt, Human
uuagcugggcgugcuggc

SEQ ID NO: 674766 - RNA, 18 nt, Human
uuagcugggcgugcuggc

SEQ ID NO: 674767 - RNA, 24 nt, Human
uuagcugggcgugcuggcucacgc

SEQ ID NO: 674768 - RNA, 24 nt, Human
uuagcugggcgugcuggcucacgc

SEQ ID NO: 674769 - RNA, 24 nt, Human
uuaguccugacuagacagcaaaag

SEQ ID NO: 674770 - RNA, 24 nt, Human
uuaguccugacuagacagcaaaag

SEQ ID NO: 674771 - RNA, 26 nt, Human
uucaaagcccuccgccuagccaucuc

SEQ ID NO: 674772 - RNA, 26 nt, Human
uucaaagcccuccgccuagccaucuc

SEQ ID NO: 674773 - RNA, 23 nt, Human
uucaaaggcugacaaggcacaga

SEQ ID NO: 674774 - RNA, 20 nt, Human
uucaaagguagaaacccacc

SEQ ID NO: 674775 - RNA, 20 nt, Human
uucaaagguagaaacccacc

SEQ ID NO: 674776 - RNA, 23 nt, Human
uucaaagguagaaacccacccag

SEQ ID NO: 674777 - RNA, 23 nt, Human
uucaaagguagaaacccacccag

SEQ ID NO: 674778 - RNA, 18 nt, Human
uucaaguaagagcaugua

SEQ ID NO: 674779 - RNA, 18 nt, Human
uucaaguaagagcaugua

SEQ ID NO: 674780 - RNA, 21 nt, Human
uucagagggcacggagcuggc

SEQ ID NO: 674781 - RNA, 18 nt, Human
uuccugucugcagaaggg

SEQ ID NO: 674782 - RNA, 21 nt, Human
uugcagccugaagguccucgg

SEQ ID NO: 674783 - RNA, 21 nt, Human
uugcaguuucaaagguagaaa

SEQ ID NO: 674784 - RNA, 21 nt, Human
uugcaguuucaaagguagaaa

SEQ ID NO: 674785 - RNA, 21 nt, Human
uuuaugaguuuuuacauuugc

SEQ ID NO: 674786 - RNA, 21 nt, Human
uuuaugaguuuuuacauuugc

SEQ ID NO: 674787 - RNA, 24 nt, Human
uuucaggacagcagccugccuccu

SEQ ID NO: 674788 - RNA, 24 nt, Human
uuucaggacagcagccugccuccu

SEQ ID NO: 674789 - RNA, 18 nt, Human
aagaaucugugacuuccu

SEQ ID NO: 674790 - RNA, 19 nt, Human
aagcucugcgggcgggcgg

SEQ ID NO: 674791 - RNA, 20 nt, Human
agaaggcuuuuccaugaaaa

SEQ ID NO: 674792 - RNA, 20 nt, Human
caaaagcucugcgggcgggc

SEQ ID NO: 674793 - RNA, 22 nt, Human
ccgccgccuuucaaaagcucug

SEQ ID NO: 674794 - RNA, 18 nt, Human
ccucccgccgccuuucaa

SEQ ID NO: 674795 - RNA, 23 nt, Human
ccucccgccgccuuucaaaagcu

SEQ ID NO: 674796 - RNA, 27 nt, Human
gaaucagagccaggcacauuauagaaa

SEQ ID NO: 674797 - RNA, 24 nt, Human
uagaaaagaaucugugacuuccua

SEQ ID NO: 674798 - RNA, 22 nt, Human
uagcaaguuauucuaacaguuu

SEQ ID NO: 674799 - RNA, 22 nt, Human
uauaagaaggcuuuuccaugaa

SEQ ID NO: 674800 - RNA, 20 nt, Human
ucgccgccucccgccgccuu

SEQ ID NO: 674801 - RNA, 22 nt, Human
ugcgggcgggcgggggcugcgg

SEQ ID NO: 674802 - RNA, 22 nt, Human
ugcucuguuaacaaauugaaga

SEQ ID NO: 674803 - RNA, 21 nt, Human
uuuguauuucaguaaauuuau

SEQ ID NO: 674804 - RNA, 19 nt, Human
uuuuuuguauuucaguaaa

SEQ ID NO: 674805 - RNA, 20 nt, Human
agccuuguccuccuggagca

SEQ ID NO: 674806 - RNA, 18 nt, Human
aguaucuugucccuggau

SEQ ID NO: 674807 - RNA, 19 nt, Human
gaguaucuugucccuggau

SEQ ID NO: 674808 - RNA, 21 nt, Human
ucagccuuguccuccuggagc

SEQ ID NO: 674809 - RNA, 22 nt, Human
uggauugcuugucagccuuguc

SEQ ID NO: 674810 - RNA, 22 nt, Human
ugucagccuuguccuccuggag

SEQ ID NO: 674811 - RNA, 26 nt, Human
uuccugguccuggugaguaucuuguc

SEQ ID NO: 674812 - RNA, 23 nt, Human
aauuggacagauggacaaaaaca

SEQ ID NO: 674813 - RNA, 24 nt, Human
acagagaugggcggacagacagac

SEQ ID NO: 674814 - RNA, 18 nt, Human
acaggacucauggugggg

SEQ ID NO: 674815 - RNA, 18 nt, Human
agccucucaucugcccag

SEQ ID NO: 674816 - RNA, 19 nt, Human
aggaccaccaggggcucug

SEQ ID NO: 674817 - RNA, 21 nt, Human
cacaggacucaugguggggcc

SEQ ID NO: 674818 - RNA, 21 nt, Human
cagacagacaggucugaacaa

SEQ ID NO: 674819 - RNA, 22 nt, Human
cagcccaggaggagaggggcgg

SEQ ID NO: 674820 - RNA, 18 nt, Human
cagcuggacuccccugcc

SEQ ID NO: 674821 - RNA, 19 nt, Human
cagcuggacuccccugcca

SEQ ID NO: 674822 - RNA, 22 nt, Human
ccaccucuuccacucucagcug

SEQ ID NO: 674823 - RNA, 24 nt, Human
cggacagacagacaggucugaaca

SEQ ID NO: 674824 - RNA, 19 nt, Human
cucucagcuggacuccccu

SEQ ID NO: 674825 - RNA, 18 nt, Human
cuggacuccccugccagg

SEQ ID NO: 674826 - RNA, 23 nt, Human
gacaaagaggacaguaagagaaa

SEQ ID NO: 674827 - RNA, 19 nt, Human
gacucaugguggggccaga

SEQ ID NO: 674828 - RNA, 19 nt, Human
gaggggcggcuggugggca

SEQ ID NO: 674829 - RNA, 28 nt, Human
gccaccucuuccacucucagcuggacuc

SEQ ID NO: 674830 - RNA, 19 nt, Human
gcccaggaggagaggggcg

SEQ ID NO: 674831 - RNA, 25 nt, Human
gccugcggagggauagaggggccgg

SEQ ID NO: 674832 - RNA, 18 nt, Human
gcggcuggugggcagacg

SEQ ID NO: 674833 - RNA, 19 nt, Human
ggacaaaaacagguggggg

SEQ ID NO: 674834 - RNA, 21 nt, Human
ggacacaggacucaugguggg

SEQ ID NO: 674835 - RNA, 18 nt, Human
ggagggacggaugggugg

SEQ ID NO: 674836 - RNA, 20 nt, Human
ggcucugggaaaggggguua

SEQ ID NO: 674837 - RNA, 23 nt, Human
ggcuggugggcagacggagggac

SEQ ID NO: 674838 - RNA, 20 nt, Human
ggggccagacuucagcucug

SEQ ID NO: 674839 - RNA, 22 nt, Human
ggugggggcugaagacagacac

SEQ ID NO: 674840 - RNA, 26 nt, Human
uaagagaaagauggucagauagacaa

SEQ ID NO: 674841 - RNA, 19 nt, Human
ucagcuggacuccccugcc

SEQ ID NO: 674842 - RNA, 18 nt, Human
ucccccagccauguccgg

SEQ ID NO: 674843 - RNA, 24 nt, Human
ucugcagcccaggaggagaggggc

SEQ ID NO: 674844 - RNA, 21 nt, Human
ugaauggacagauggcuggca

SEQ ID NO: 674845 - RNA, 21 nt, Human
ugcggagggauagaggggccg

SEQ ID NO: 674846 - RNA, 22 nt, Human
uggacaaaaacaggugggggcu

SEQ ID NO: 674847 - RNA, 19 nt, Human
uggcagcuguggcgagcug

SEQ ID NO: 674848 - RNA, 22 nt, Human
aacccucuggcacccacaaccu

SEQ ID NO: 674849 - RNA, 18 nt, Human
aaggccccugacuguggc

SEQ ID NO: 674850 - RNA, 19 nt, Human
accaccugccgagacccca

SEQ ID NO: 674851 - RNA, 18 nt, Human
agggaggccaccuggagc

SEQ ID NO: 674852 - RNA, 19 nt, Human
agggggcacaggucucaga

SEQ ID NO: 674853 - RNA, 21 nt, Human
aggguggggagggggcacagg

SEQ ID NO: 674854 - RNA, 23 nt, Human
aggguggggagggggcacagguc

SEQ ID NO: 674855 - RNA, 18 nt, Human
aguauuuuguuccuggau

SEQ ID NO: 674856 - RNA, 18 nt, Human
caacccucuggcacccac

SEQ ID NO: 674857 - RNA, 22 nt, Human
cacccacaaccuuccguggcuc

SEQ ID NO: 674858 - RNA, 21 nt, Human
caccugccgagaccccagagc

SEQ ID NO: 674859 - RNA, 23 nt, Human
caggacccaaggcaggcccagga

SEQ ID NO: 674860 - RNA, 23 nt, Human
ccaggacccaaggcaggcccagg

SEQ ID NO: 674861 - RNA, 22 nt, Human
cccaaaguccucuuccucgucc

SEQ ID NO: 674862 - RNA, 24 nt, Human
cccaggacccaaggcaggcccagg

SEQ ID NO: 674863 - RNA, 22 nt, Human
ccccaggacccaaggcaggccc

SEQ ID NO: 674864 - RNA, 19 nt, Human
cucugaccacaacccucug

SEQ ID NO: 674865 - RNA, 19 nt, Human
cuggcacccacaaccuucc

SEQ ID NO: 674866 - RNA, 22 nt, Human
gacuguggcucugaccacaacc

SEQ ID NO: 674867 - RNA, 20 nt, Human
gagaccccagagcuggccua

SEQ ID NO: 674868 - RNA, 18 nt, Human
gaggguggggagggggca

SEQ ID NO: 674869 - RNA, 21 nt, Human
gaggguggggagggggcacag

SEQ ID NO: 674870 - RNA, 19 nt, Human
gaguauuuuguuccuggau

SEQ ID NO: 674871 - RNA, 22 nt, Human
gcccaggaccuugcaugaccag

SEQ ID NO: 674872 - RNA, 22 nt, Human
ggaccaccugccgagaccccag

SEQ ID NO: 674873 - RNA, 23 nt, Human
ggacccaaggcaggcccaggacc

SEQ ID NO: 674874 - RNA, 18 nt, Human
ggagaagccuguccccca

SEQ ID NO: 674875 - RNA, 20 nt, Human
ggaggccaccuggagccugg

SEQ ID NO: 674876 - RNA, 19 nt, Human
ggagggaggguggggaggg

SEQ ID NO: 674877 - RNA, 21 nt, Human
ggagguggggagggagggugg

SEQ ID NO: 674878 - RNA, 26 nt, Human
ggagguggggagggaggguggggagg

SEQ ID NO: 674879 - RNA, 28 nt, Human
ggagguggggagggaggguggggagggg

SEQ ID NO: 674880 - RNA, 21 nt, Human
ggugaguauuuuguuccugga

SEQ ID NO: 674881 - RNA, 19 nt, Human
guggcucugaccacaaccc

SEQ ID NO: 674882 - RNA, 21 nt, Human
ucagccuuguccgccuggagc

SEQ ID NO: 674883 - RNA, 23 nt, Human
ucagccuuguccgccuggagcaa

SEQ ID NO: 674884 - RNA, 20 nt, Human
ucccccaaaguccucuuccu

SEQ ID NO: 674885 - RNA, 24 nt, Human
ucgcggaccaccugccgagacccc

SEQ ID NO: 674886 - RNA, 19 nt, Human
ugaccacaacccucuggca

SEQ ID NO: 674887 - RNA, 21 nt, Human
ugccgagaccccagagcuggc

SEQ ID NO: 674888 - RNA, 22 nt, Human
uggauugcuugucagccuuguc

SEQ ID NO: 674889 - RNA, 22 nt, Human
uggggagggaggguggggaggg

SEQ ID NO: 674890 - RNA, 21 nt, Human
aaaaaaacaaaagacugcagg

SEQ ID NO: 674891 - RNA, 22 nt, Human
aaaaaaaggcagaccugaggca

SEQ ID NO: 674892 - RNA, 19 nt, Human
aaaaaaauaugcaaacaca

SEQ ID NO: 674893 - RNA, 18 nt, Human
aaaaaaggcagaccugag

SEQ ID NO: 674894 - RNA, 20 nt, Human
aaaaucacucaaacaugaga

SEQ ID NO: 674895 - RNA, 23 nt, Human
aaacugcuuucauaauuuccagu

SEQ ID NO: 674896 - RNA, 18 nt, Human
acaugagaauugaaaaug

SEQ ID NO: 674897 - RNA, 23 nt, Human
acuccaaaaaaauaugcaaacaa

SEQ ID NO: 674898 - RNA, 23 nt, Human
agaagccagaagcugagucacuu

SEQ ID NO: 674899 - RNA, 19 nt, Human
agaggauuacugcauuuau

SEQ ID NO: 674900 - RNA, 27 nt, Human
agcaacagcaggagaaugccgguaccc

SEQ ID NO: 674901 - RNA, 22 nt, Human
agccagaagcugagucacuuca

SEQ ID NO: 674902 - RNA, 19 nt, Human
aggcaaugcgagaaaccaa

SEQ ID NO: 674903 - RNA, 22 nt, Human
aguguaagagaaguaaaagucu

SEQ ID NO: 674904 - RNA, 21 nt, Human
auaugcaaaaauaaaaaaaca

SEQ ID NO: 674905 - RNA, 23 nt, Human
auuacaauauucugcacuccaaa

SEQ ID NO: 674906 - RNA, 24 nt, Human
caaaaguaaaacacacauauauaa

SEQ ID NO: 674907 - RNA, 23 nt, Human
cagaugaauguaacaaugaccac

SEQ ID NO: 674908 - RNA, 23 nt, Human
ccaaagcuccaaaucacuuauga

SEQ ID NO: 674909 - RNA, 21 nt, Human
ccggaacauuuaaauaugaug

SEQ ID NO: 674910 - RNA, 22 nt, Human
ccuagcgucggccucaaagagc

SEQ ID NO: 674911 - RNA, 21 nt, Human
ccucaaagagcacaguucucc

SEQ ID NO: 674912 - RNA, 22 nt, Human
cuaccgagcagaucugaaaugc

SEQ ID NO: 674913 - RNA, 21 nt, Human
cuugagaauaguuuuaaaguu

SEQ ID NO: 674914 - RNA, 20 nt, Human
cuuuaguuuucacauucacc

SEQ ID NO: 674915 - RNA, 21 nt, Human
gcauaucugccccauuaaaca

SEQ ID NO: 674916 - RNA, 19 nt, Human
gccccuagcgucggccuca

SEQ ID NO: 674917 - RNA, 23 nt, Human
ggaaaaagcaacauauuucaugc

SEQ ID NO: 674918 - RNA, 19 nt, Human
ggagaaaaacugcuuucau

SEQ ID NO: 674919 - RNA, 18 nt, Human
ggggaaacuaaugaagca

SEQ ID NO: 674920 - RNA, 21 nt, Human
uaaaaaaacaaaagacugcag

SEQ ID NO: 674921 - RNA, 22 nt, Human
uaauuacaauauucugcacucc

SEQ ID NO: 674922 - RNA, 20 nt, Human
uaauuccaucaaggauucuc

SEQ ID NO: 674923 - RNA, 22 nt, Human
uacccagauguuucuuacuggc

SEQ ID NO: 674924 - RNA, 24 nt, Human
uagaaaaaagacuuacauucucau

SEQ ID NO: 674925 - RNA, 23 nt, Human
uagugcuuagucugagaggcaau

SEQ ID NO: 674926 - RNA, 23 nt, Human
uaugacauuaauuacaauauucu

SEQ ID NO: 674927 - RNA, 24 nt, Human
uauuuucucuugagaauaguuuua

SEQ ID NO: 674928 - RNA, 20 nt, Human
ucaugaguauacuguuugua

SEQ ID NO: 674929 - RNA, 23 nt, Human
ucauuucuuucuguugccuccag

SEQ ID NO: 674930 - RNA, 25 nt, Human
uccaguguaagccacaaagaagcuu

SEQ ID NO: 674931 - RNA, 24 nt, Human
uccuucucucuggucccuuuacca

SEQ ID NO: 674932 - RNA, 18 nt, Human
ucuaaacuucaacgaaag

SEQ ID NO: 674933 - RNA, 20 nt, Human
ucucuggucccuuuaccaaa

SEQ ID NO: 674934 - RNA, 18 nt, Human
ugaagcauuuuccucauu

SEQ ID NO: 674935 - RNA, 18 nt, Human
ugaauguaacaaugacca

SEQ ID NO: 674936 - RNA, 23 nt, Human
ugacaagagcaagcuguauucaa

SEQ ID NO: 674937 - RNA, 21 nt, Human
ugcaaacacagguuugcuaaa

SEQ ID NO: 674938 - RNA, 20 nt, Human
ugcuuugcuuuuuagugcuu

SEQ ID NO: 674939 - RNA, 22 nt, Human
uggaaaaagcaacauauuucau

SEQ ID NO: 674940 - RNA, 19 nt, Human
ugugccuguuucaggauga

SEQ ID NO: 674941 - RNA, 22 nt, Human
uuacaaaugucucaagaaagua

SEQ ID NO: 674942 - RNA, 24 nt, Human
uucaccaaaacauuuuaaaaucac

SEQ ID NO: 674943 - RNA, 24 nt, Human
uuccaguguaagccacaagguacc

SEQ ID NO: 674944 - RNA, 23 nt, Human
uuggaaagagagcacugagaagc

SEQ ID NO: 674945 - RNA, 22 nt, Human
uuucaggaugaacaguuuuguu

SEQ ID NO: 674946 - RNA, 20 nt, Human
uuuuccucauuacacuuuug

SEQ ID NO: 674947 - RNA, 21 nt, Human
aagccaccacagaugucccag

SEQ ID NO: 674948 - RNA, 22 nt, Human
aaguucacagccacaucuucaa

SEQ ID NO: 674949 - RNA, 18 nt, Human
acaaaagccaccacagau

SEQ ID NO: 674950 - RNA, 18 nt, Human
acugcucuucaauguucc

SEQ ID NO: 674951 - RNA, 19 nt, Human
agccaccacagauguccca

SEQ ID NO: 674952 - RNA, 22 nt, Human
auuccugacacuuauacaguuu

SEQ ID NO: 674953 - RNA, 25 nt, Human
caaaagccaccacagaugucccagg

SEQ ID NO: 674954 - RNA, 23 nt, Human
cagguuccugaagguuucccaca

SEQ ID NO: 674955 - RNA, 23 nt, Human
ccauucuuuuuguuuuguuccua

SEQ ID NO: 674956 - RNA, 24 nt, Human
cccguagccaggguaggucccagc

SEQ ID NO: 674957 - RNA, 19 nt, Human
cugaagguuucccacauca

SEQ ID NO: 674958 - RNA, 22 nt, Human
cuggcugaaaccuucuccgcca

SEQ ID NO: 674959 - RNA, 21 nt, Human
gcagauaacugaaggguuucc

SEQ ID NO: 674960 - RNA, 19 nt, Human
ggcugugcggugucccggg

SEQ ID NO: 674961 - RNA, 20 nt, Human
uaacugaaggguuucccaca

SEQ ID NO: 674962 - RNA, 18 nt, Human
ucacagagucucucuacc

SEQ ID NO: 674963 - RNA, 21 nt, Human
uccccugguuuuuguacugcu

SEQ ID NO: 674964 - RNA, 19 nt, Human
ucccggguccucccaacuc

SEQ ID NO: 674965 - RNA, 19 nt, Human
uccugacacuuauacaguu

SEQ ID NO: 674966 - RNA, 21 nt, Human
ucugugaaggauccagcaaag

SEQ ID NO: 674967 - RNA, 21 nt, Human
ugauuucugagauuucucccc

SEQ ID NO: 674968 - RNA, 22 nt, Human
uguacugcucuucaauguucca

SEQ ID NO: 674969 - RNA, 18 nt, Human
ugugaaggauccagcaaa

SEQ ID NO: 674970 - RNA, 27 nt, Human
uguuccauucuuuuuguuuuguuccua

SEQ ID NO: 674971 - RNA, 22 nt, Human
uguuuuguuccuauaguggcca

SEQ ID NO: 674972 - RNA, 20 nt, Human
uuccacauacacugcuuucc

SEQ ID NO: 674973 - RNA, 21 nt, Human
uucccacauuucuuacauuua

SEQ ID NO: 674974 - RNA, 27 nt, Human
uuguuuuguuccuauaguggccagguu

SEQ ID NO: 674975 - RNA, 24 nt, Human
uuucuuguucagacugagauuugc

SEQ ID NO: 674976 - RNA, 22 nt, Human
aagcggaggcagauccuccugg

SEQ ID NO: 674977 - RNA, 23 nt, Human
aagguguuugacuucaggcagga

SEQ ID NO: 674978 - RNA, 19 nt, Human
aaucaugguuuccauucug

SEQ ID NO: 674979 - RNA, 22 nt, Human
aaucaugguuuccauucuguga

SEQ ID NO: 674980 - RNA, 21 nt, Human
acuagggcgagcggugaccug

SEQ ID NO: 674981 - RNA, 24 nt, Human
caccgcccggccggccccuugggc

SEQ ID NO: 674982 - RNA, 24 nt, Human
caccguccugcggagccggggccg

SEQ ID NO: 674983 - RNA, 22 nt, Human
cccagccccgcaggcuccgcga

SEQ ID NO: 674984 - RNA, 22 nt, Human
ccccuuggcuaugauuucccug

SEQ ID NO: 674985 - RNA, 21 nt, Human
cccgcgcccgcuugggugccg

SEQ ID NO: 674986 - RNA, 23 nt, Human
cccggagcccagauccgucuccc

SEQ ID NO: 674987 - RNA, 18 nt, Human
ccgccccuucgccuccgc

SEQ ID NO: 674988 - RNA, 20 nt, Human
ccgucgucaccgcccggccg

SEQ ID NO: 674989 - RNA, 21 nt, Human
ccuccgccgucgucaccgccc

SEQ ID NO: 674990 - RNA, 19 nt, Human
ccucugccccaccgcuccc

SEQ ID NO: 674991 - RNA, 24 nt, Human
ccuggggcuccgcagccucugccc

SEQ ID NO: 674992 - RNA, 22 nt, Human
ccuuauacugauagauuucccc

SEQ ID NO: 674993 - RNA, 22 nt, Human
ccuucgccuccgccgucgucac

SEQ ID NO: 674994 - RNA, 21 nt, Human
cgagcggugaccuggggacgc

SEQ ID NO: 674995 - RNA, 20 nt, Human
cgccuccgccgucgucaccg

SEQ ID NO: 674996 - RNA, 21 nt, Human
cgccuccgccgucgucaccgc

SEQ ID NO: 674997 - RNA, 22 nt, Human
cggccccuugggccccagcgcc

SEQ ID NO: 674998 - RNA, 20 nt, Human
cggcgcccagccccgcaggc

SEQ ID NO: 674999 - RNA, 24 nt, Human
cgggacaaauccagacggggcguc

SEQ ID NO: 675000 - RNA, 19 nt, Human
cgucccucccggagcccag

SEQ ID NO: 675001 - RNA, 21 nt, Human
cucccggagcccagauccguc

SEQ ID NO: 675002 - RNA, 25 nt, Human
cuccgcagccucugccccaccgcuc

SEQ ID NO: 675003 - RNA, 21 nt, Human
cuccuggggcuccgcagccuc

SEQ ID NO: 675004 - RNA, 23 nt, Human
cugcugcucuuggaaaaaucugg

SEQ ID NO: 675005 - RNA, 19 nt, Human
cuggcccgcacagccccgc

SEQ ID NO: 675006 - RNA, 18 nt, Human
gagcccagauccgucucc

SEQ ID NO: 675007 - RNA, 19 nt, Human
gaggggcccgggccgggcc

SEQ ID NO: 675008 - RNA, 20 nt, Human
gaggggcccgggccgggccu

SEQ ID NO: 675009 - RNA, 21 nt, Human
gaggucccuuccuguccaccu

SEQ ID NO: 675010 - RNA, 18 nt, Human
gcccgggucccgccgccc

SEQ ID NO: 675011 - RNA, 21 nt, Human
gccggccccuugggccccagc

SEQ ID NO: 675012 - RNA, 23 nt, Human
gccucugccccaccgcucccgac

SEQ ID NO: 675013 - RNA, 25 nt, Human
ggagccggggccgggccgucgagga

SEQ ID NO: 675014 - RNA, 19 nt, Human
ggcccgcacagccccgcgc

SEQ ID NO: 675015 - RNA, 20 nt, Human
ggcucuucggcgcccagccc

SEQ ID NO: 675016 - RNA, 23 nt, Human
gggcccgggccgggccuacggga

SEQ ID NO: 675017 - RNA, 20 nt, Human
gggcccgggucccgccgccc

SEQ ID NO: 675018 - RNA, 18 nt, Human
gggccgggccuacgggac

SEQ ID NO: 675019 - RNA, 18 nt, Human
gggggucgugcucgggga

SEQ ID NO: 675020 - RNA, 24 nt, Human
uaauauuuauaaauuuuuacuugu

SEQ ID NO: 675021 - RNA, 22 nt, Human
ucccuuccuguccaccucacca

SEQ ID NO: 675022 - RNA, 22 nt, Human
uccgcagccucugccccaccgc

SEQ ID NO: 675023 - RNA, 22 nt, Human
uccgccuggcccgcacagcccc

SEQ ID NO: 675024 - RNA, 18 nt, Human
ucuauagucuaguauugu

SEQ ID NO: 675025 - RNA, 21 nt, Human
ucucgcccaccggaggccaaa

SEQ ID NO: 675026 - RNA, 21 nt, Human
ucucugauauaaaaugagguc

SEQ ID NO: 675027 - RNA, 18 nt, Human
ucugcuccagaggggccc

SEQ ID NO: 675028 - RNA, 22 nt, Human
ugagucuucagauuaugagucc

SEQ ID NO: 675029 - RNA, 21 nt, Human
ugccccaccgcucccgacagg

SEQ ID NO: 675030 - RNA, 22 nt, Human
ugccggcccggcucuucggcgc

SEQ ID NO: 675031 - RNA, 19 nt, Human
uggaaaaaucuggaggacu

SEQ ID NO: 675032 - RNA, 25 nt, Human
uguccaccucaccaaggccguucug

SEQ ID NO: 675033 - RNA, 22 nt, Human
uguggucuuguuauaaucaugg

SEQ ID NO: 675034 - RNA, 22 nt, Human
uucugcuccagaggggcccggg

SEQ ID NO: 675035 - RNA, 21 nt, Human
aaaaagugcccagaaaucaaa

SEQ ID NO: 675036 - RNA, 21 nt, Human
aaagagaaaaaaaagaacgau

SEQ ID NO: 675037 - RNA, 19 nt, Human
aagguguccaaaaacagau

SEQ ID NO: 675038 - RNA, 21 nt, Human
acuacaucagcaauguuaaaa

SEQ ID NO: 675039 - RNA, 18 nt, Human
agaaaaaaaagaacgaug

SEQ ID NO: 675040 - RNA, 21 nt, Human
caauguuaaaaagugcccaga

SEQ ID NO: 675041 - RNA, 23 nt, Human
cuuacuuuuaaaaaccuuuugaa

SEQ ID NO: 675042 - RNA, 23 nt, Human
cuuuuuaaaaaagagaaaaaaaa

SEQ ID NO: 675043 - RNA, 18 nt, Human
uacacaugaaauuaaacc

SEQ ID NO: 675044 - RNA, 25 nt, Human
uacuccuuaaaacuuacuuuuaaaa

SEQ ID NO: 675045 - RNA, 21 nt, Human
uccauacacaugaaauuaaac

SEQ ID NO: 675046 - RNA, 23 nt, Human
uccauacacaugaaauuaaacca

SEQ ID NO: 675047 - RNA, 19 nt, Human
uccuaguuuacauuaagau

SEQ ID NO: 675048 - RNA, 20 nt, Human
ugaaaaaaaacuacaaagcu

SEQ ID NO: 675049 - RNA, 21 nt, Human
ugaaaaaaaacuacaaagcua

SEQ ID NO: 675050 - RNA, 24 nt, Human
ugaaaaacaaagcauggguauuaa

SEQ ID NO: 675051 - RNA, 20 nt, Human
ugugaaaaacaaagcauggg

SEQ ID NO: 675052 - RNA, 23 nt, Human
agggcuggguucuggaguugggc

SEQ ID NO: 675053 - RNA, 21 nt, Human
cgggcuggggcugugcugggc

SEQ ID NO: 675054 - RNA, 19 nt, Human
cuagagaagggcuggguuc

SEQ ID NO: 675055 - RNA, 21 nt, Human
cucaaugcugggcuuggucuc

SEQ ID NO: 675056 - RNA, 22 nt, Human
cuccgggcuggggcugugcugg

SEQ ID NO: 675057 - RNA, 23 nt, Human
cuggagcagggccggggcagggg

SEQ ID NO: 675058 - RNA, 18 nt, Human
cugggcccccccagggca

SEQ ID NO: 675059 - RNA, 21 nt, Human
gcgggagaaguucggccaccc

SEQ ID NO: 675060 - RNA, 21 nt, Human
gcugggcuccgggcuggggcu

SEQ ID NO: 675061 - RNA, 21 nt, Human
gcugugcugggcccccccagg

SEQ ID NO: 675062 - RNA, 19 nt, Human
ggauuggguucuagagagg

SEQ ID NO: 675063 - RNA, 19 nt, Human
ggcagggggcugggcuccg

SEQ ID NO: 675064 - RNA, 18 nt, Human
ggccggggcagggggcug

SEQ ID NO: 675065 - RNA, 22 nt, Human
ggccggggcagggggcugggcu

SEQ ID NO: 675066 - RNA, 21 nt, Human
gggcuggguucuggagcaggg

SEQ ID NO: 675067 - RNA, 22 nt, Human
gggggcugggcuccgggcuggg

SEQ ID NO: 675068 - RNA, 18 nt, Human
gugcugggcccccccagg

SEQ ID NO: 675069 - RNA, 24 nt, Human
uagaacagagcuuauucucaaugc

SEQ ID NO: 675070 - RNA, 21 nt, Human
uagagaggaacuuguccuccg

SEQ ID NO: 675071 - RNA, 20 nt, Human
ucugggcuggguucuggagc

SEQ ID NO: 675072 - RNA, 23 nt, Human
uggagcagggccggggcaggggg

SEQ ID NO: 675073 - RNA, 25 nt, Human
uggagcagggccggggcagggggcu

SEQ ID NO: 675074 - RNA, 23 nt, Human
ugggcucuagcacauagcuuggc

SEQ ID NO: 675075 - RNA, 21 nt, Human
uuauucucaaugcugggcuug

SEQ ID NO: 675076 - RNA, 19 nt, Human
uucuggaguugggcugggg

SEQ ID NO: 675077 - RNA, 21 nt, Human
uucuggaguugggcuggggcu

SEQ ID NO: 675078 - RNA, 18 nt, Human
aaaaaaaacagacuuucc

SEQ ID NO: 675079 - RNA, 20 nt, Human
aagaaaaaaaaaaaacagag

SEQ ID NO: 675080 - RNA, 20 nt, Human
aagaagcgggauggggagag

SEQ ID NO: 675081 - RNA, 22 nt, Human
aagcuccugcccccccaaccuc

SEQ ID NO: 675082 - RNA, 23 nt, Human
aagggcacuugugccaguggcuc

SEQ ID NO: 675083 - RNA, 18 nt, Human
aaguucauagagaagggg

SEQ ID NO: 675084 - RNA, 20 nt, Human
acagaggggaggugcaugga

SEQ ID NO: 675085 - RNA, 18 nt, Human
accuggcugcccagggag

SEQ ID NO: 675086 - RNA, 26 nt, Human
agaaaaaaaaaaaacagacuuuccag

SEQ ID NO: 675087 - RNA, 18 nt, Human
agccccaggcucaggugc

SEQ ID NO: 675088 - RNA, 22 nt, Human
agggcagggacauccauggaga

SEQ ID NO: 675089 - RNA, 21 nt, Human
aggggugggcaccagggcacc

SEQ ID NO: 675090 - RNA, 23 nt, Human
agggguggggaagaagaaagaaa

SEQ ID NO: 675091 - RNA, 24 nt, Human
aggugcauggaaugugggggacag

SEQ ID NO: 675092 - RNA, 18 nt, Human
agugagguccuagggugc

SEQ ID NO: 675093 - RNA, 26 nt, Human
caaaacuccagauggaccaggccucc

SEQ ID NO: 675094 - RNA, 20 nt, Human
caccgucugccucuccagcc

SEQ ID NO: 675095 - RNA, 22 nt, Human
cacgcaggcacgcgggggcacu

SEQ ID NO: 675096 - RNA, 23 nt, Human
cagccagguucccaggccuccag

SEQ ID NO: 675097 - RNA, 18 nt, Human
cagggcaccuggcugccc

SEQ ID NO: 675098 - RNA, 18 nt, Human
cauauggcauuaaaggga

SEQ ID NO: 675099 - RNA, 23 nt, Human
cccaggcucaggugcucaguccu

SEQ ID NO: 675100 - RNA, 23 nt, Human
cccaggcugcagccagguuccca

SEQ ID NO: 675101 - RNA, 19 nt, Human
cccagggaagaagcgggau

SEQ ID NO: 675102 - RNA, 23 nt, Human
cccaugcuggucccacugcucug

SEQ ID NO: 675103 - RNA, 18 nt, Human
ccccaaccuccccauccu

SEQ ID NO: 675104 - RNA, 22 nt, Human
ccccaguagggcugaacuggcu

SEQ ID NO: 675105 - RNA, 22 nt, Human
ccccaugcuggucccacugcuc

SEQ ID NO: 675106 - RNA, 21 nt, Human
ccccucaccccucaaaacucc

SEQ ID NO: 675107 - RNA, 19 nt, Human
cccggacagucccuggcuc

SEQ ID NO: 675108 - RNA, 22 nt, Human
cccucaaaacuccagauggacc

SEQ ID NO: 675109 - RNA, 19 nt, Human
cccucaccccucaaaacuc

SEQ ID NO: 675110 - RNA, 23 nt, Human
ccucaaaacuccagauggaccag

SEQ ID NO: 675111 - RNA, 21 nt, Human
ccucaccccucaaaacuccag

SEQ ID NO: 675112 - RNA, 22 nt, Human
ccucaccccucaaaacuccaga

SEQ ID NO: 675113 - RNA, 23 nt, Human
ccucaccccucaaaacuccagaa

SEQ ID NO: 675114 - RNA, 22 nt, Human
ccuccggaaagcacugccgccc

SEQ ID NO: 675115 - RNA, 24 nt, Human
ccuccggaaagcacugccgcccac

SEQ ID NO: 675116 - RNA, 21 nt, Human
ccuuaggggcucgacaggggu

SEQ ID NO: 675117 - RNA, 23 nt, Human
ccuuaggggcucgacaggggugg

SEQ ID NO: 675118 - RNA, 25 nt, Human
cgacaggggugggcaccagggcacc

SEQ ID NO: 675119 - RNA, 21 nt, Human
cggaaagcacugccgcccaca

SEQ ID NO: 675120 - RNA, 19 nt, Human
cggggaccccggggagcca

SEQ ID NO: 675121 - RNA, 18 nt, Human
cuggcaggaccaaaacug

SEQ ID NO: 675122 - RNA, 24 nt, Human
gaagcuccugcccccccaaccucc

SEQ ID NO: 675123 - RNA, 23 nt, Human
gagagcagcaaggggcugguggc

SEQ ID NO: 675124 - RNA, 19 nt, Human
gagccagccccaggcucag

SEQ ID NO: 675125 - RNA, 20 nt, Human
gaggugcauggaaugugggg

SEQ ID NO: 675126 - RNA, 22 nt, Human
gagugaauccuugcaggccccu

SEQ ID NO: 675127 - RNA, 22 nt, Human
gcagcacuaagggcacuugugc

SEQ ID NO: 675128 - RNA, 21 nt, Human
gccucuccagccuucccaggc

SEQ ID NO: 675129 - RNA, 23 nt, Human
gcgagaguggggagggaucaggg

SEQ ID NO: 675130 - RNA, 19 nt, Human
gcucaggugcucaguccuc

SEQ ID NO: 675131 - RNA, 19 nt, Human
gcuccugcccccccaaccu

SEQ ID NO: 675132 - RNA, 18 nt, Human
ggaagaagaaagaaaaaa

SEQ ID NO: 675133 - RNA, 19 nt, Human
ggagagcagcaaggggcug

SEQ ID NO: 675134 - RNA, 20 nt, Human
ggagaugcuauauacagagg

SEQ ID NO: 675135 - RNA, 24 nt, Human
ggagcagggaggagaugggaggga

SEQ ID NO: 675136 - RNA, 23 nt, Human
ggcgagaguggggagggaucagg

SEQ ID NO: 675137 - RNA, 19 nt, Human
gggaagaagaaagaaaaaa

SEQ ID NO: 675138 - RNA, 21 nt, Human
gggagggaucagggaggcagc

SEQ ID NO: 675139 - RNA, 18 nt, Human
gggauggggagagagcug

SEQ ID NO: 675140 - RNA, 20 nt, Human
gggauggggagagagcuggg

SEQ ID NO: 675141 - RNA, 24 nt, Human
gggauggggagagagcuggugggu

SEQ ID NO: 675142 - RNA, 22 nt, Human
ggggaggugcauggaauguggg

SEQ ID NO: 675143 - RNA, 20 nt, Human
gggugcuggccuugcagagg

SEQ ID NO: 675144 - RNA, 19 nt, Human
guccccucaccccucaaaa

SEQ ID NO: 675145 - RNA, 21 nt, Human
gugcucaguccuccacccugg

SEQ ID NO: 675146 - RNA, 18 nt, Human
guggggaagaagaaagaa

SEQ ID NO: 675147 - RNA, 24 nt, Human
guggggagggaucagggaggcagc

SEQ ID NO: 675148 - RNA, 20 nt, Human
uaggaggggggagaugcuau

SEQ ID NO: 675149 - RNA, 18 nt, Human
ucagcccccaguagggcu

SEQ ID NO: 675150 - RNA, 19 nt, Human
ucagggaggcagcuggcag

SEQ ID NO: 675151 - RNA, 20 nt, Human
ucccaccgucugccucucca

SEQ ID NO: 675152 - RNA, 23 nt, Human
uccccaugcuggucccacugcuc

SEQ ID NO: 675153 - RNA, 24 nt, Human
uccugcccccccaaccuccccauc

SEQ ID NO: 675154 - RNA, 18 nt, Human
ucuccagccuucccaggc

SEQ ID NO: 675155 - RNA, 21 nt, Human
ugaacuggcucaugggggugg

SEQ ID NO: 675156 - RNA, 19 nt, Human
ugaggguguggggagagag

SEQ ID NO: 675157 - RNA, 20 nt, Human
ugaggguguggggagagagg

SEQ ID NO: 675158 - RNA, 22 nt, Human
ugccaguggcucuguuggggug

SEQ ID NO: 675159 - RNA, 19 nt, Human
uggaaugugggggacagaa

SEQ ID NO: 675160 - RNA, 21 nt, Human
uggaaugugggggacagaagc

SEQ ID NO: 675161 - RNA, 19 nt, Human
uggaccaggccuccggaaa

SEQ ID NO: 675162 - RNA, 18 nt, Human
uggcagcacuaagggcac

SEQ ID NO: 675163 - RNA, 21 nt, Human
uggcagcacuaagggcacuug

SEQ ID NO: 675164 - RNA, 18 nt, Human
uggcucuguugggguggg

SEQ ID NO: 675165 - RNA, 21 nt, Human
uggcugcccagggaguguggc

SEQ ID NO: 675166 - RNA, 21 nt, Human
uggggagagagcugguggguc

SEQ ID NO: 675167 - RNA, 22 nt, Human
uggggagagagcuggugggucc

SEQ ID NO: 675168 - RNA, 23 nt, Human
uggggagagagcugguggguccc

SEQ ID NO: 675169 - RNA, 18 nt, Human
uggggagggaucagggag

SEQ ID NO: 675170 - RNA, 21 nt, Human
uggggagggaucagggaggca

SEQ ID NO: 675171 - RNA, 21 nt, Human
ugggugcuggccuugcagagg

SEQ ID NO: 675172 - RNA, 25 nt, Human
uugcaggccccugcucacuaggagg

SEQ ID NO: 675173 - RNA, 24 nt, Human
uugugccaguggcucuguuggggu

SEQ ID NO: 675174 - RNA, 23 nt, Human
uuuaaguucauagagaaggggcg

SEQ ID NO: 675175 - RNA, 23 nt, Human
aaaaagaaaaaagagaaaaccgg

SEQ ID NO: 675176 - RNA, 23 nt, Human
aaaaagaacgacguuacugaagg

SEQ ID NO: 675177 - RNA, 18 nt, Human
aaaagcauccacacacgg

SEQ ID NO: 675178 - RNA, 21 nt, Human
aaacaggcgaguuuugcucuu

SEQ ID NO: 675179 - RNA, 23 nt, Human
aaacauuccaaggaaaacacugc

SEQ ID NO: 675180 - RNA, 18 nt, Human
aaaguugaugucuaauuu

SEQ ID NO: 675181 - RNA, 22 nt, Human
aaaugcuguguuugaucuuugg

SEQ ID NO: 675182 - RNA, 18 nt, Human
aacaaguggaagagucuu

SEQ ID NO: 675183 - RNA, 23 nt, Human
aaccaauucauuguuuccuccca

SEQ ID NO: 675184 - RNA, 21 nt, Human
aacgauuuuacaacacuuaaa

SEQ ID NO: 675185 - RNA, 20 nt, Human
aacuuguuuggaguuuugga

SEQ ID NO: 675186 - RNA, 20 nt, Human
aagaaguccuuaaagaugau

SEQ ID NO: 675187 - RNA, 23 nt, Human
aagcuguggccacccuaggccca

SEQ ID NO: 675188 - RNA, 21 nt, Human
aaggggcuuuugaguaacuaa

SEQ ID NO: 675189 - RNA, 23 nt, Human
aaugacgcugauuuuuucuuuuu

SEQ ID NO: 675190 - RNA, 21 nt, Human
aauuggacuuuauaaagccua

SEQ ID NO: 675191 - RNA, 23 nt, Human
acaccagaucucagaugaggcca

SEQ ID NO: 675192 - RNA, 23 nt, Human
acacugcuucaccuccugcagac

SEQ ID NO: 675193 - RNA, 22 nt, Human
acccaaaaaacacgaccucagu

SEQ ID NO: 675194 - RNA, 20 nt, Human
acgauuuuacaacacuuaaa

SEQ ID NO: 675195 - RNA, 21 nt, Human
agaacaagaaggggcuuuuga

SEQ ID NO: 675196 - RNA, 19 nt, Human
agagcuuugggguagcagg

SEQ ID NO: 675197 - RNA, 22 nt, Human
agaggcugcuccaggugugucc

SEQ ID NO: 675198 - RNA, 24 nt, Human
agaggcugcuccagguguguccgg

SEQ ID NO: 675199 - RNA, 26 nt, Human
agcaaaggcggcgguggcggcggcga

SEQ ID NO: 675200 - RNA, 18 nt, Human
agcauccacacacgguga

SEQ ID NO: 675201 - RNA, 21 nt, Human
aggcugcuccauggugcugga

SEQ ID NO: 675202 - RNA, 20 nt, Human
agggcacaauaauuacagga

SEQ ID NO: 675203 - RNA, 21 nt, Human
agggcccuggggugggggcug

SEQ ID NO: 675204 - RNA, 22 nt, Human
agggcugugggacaaacaagug

SEQ ID NO: 675205 - RNA, 26 nt, Human
aggguggcauauggggaggaagggau

SEQ ID NO: 675206 - RNA, 18 nt, Human
aguaacuaaaaaacaauc

SEQ ID NO: 675207 - RNA, 19 nt, Human
auaaagugcaccucugccc

SEQ ID NO: 675208 - RNA, 21 nt, Human
augaagccugcagaaaaggcu

SEQ ID NO: 675209 - RNA, 22 nt, Human
augacgcugauuuuuucuuuuu

SEQ ID NO: 675210 - RNA, 24 nt, Human
augagauguccuguggugggucaa

SEQ ID NO: 675211 - RNA, 18 nt, Human
auuuuaaacaccauucac

SEQ ID NO: 675212 - RNA, 22 nt, Human
caaauaggcacaaaauaaggca

SEQ ID NO: 675213 - RNA, 23 nt, Human
caaauaggcacaaaauaaggcug

SEQ ID NO: 675214 - RNA, 24 nt, Human
caacaggcguggagcugggggcua

SEQ ID NO: 675215 - RNA, 21 nt, Human
caacauuaaauaacagaacau

SEQ ID NO: 675216 - RNA, 22 nt, Human
caaccgaacaucagaaacuaaa

SEQ ID NO: 675217 - RNA, 20 nt, Human
caccacguccauucugcgca

SEQ ID NO: 675218 - RNA, 22 nt, Human
caccagaucucagaugaggcca

SEQ ID NO: 675219 - RNA, 20 nt, Human
cacugcacagcuuacagggc

SEQ ID NO: 675220 - RNA, 21 nt, Human
cagagaagcaagcugacuuuu

SEQ ID NO: 675221 - RNA, 18 nt, Human
cagcaggggcagggguug

SEQ ID NO: 675222 - RNA, 20 nt, Human
cagcuguuuccuucuguuca

SEQ ID NO: 675223 - RNA, 20 nt, Human
caggacaaggaaagaaagaa

SEQ ID NO: 675224 - RNA, 21 nt, Human
caggacaaggaaagaaagaaa

SEQ ID NO: 675225 - RNA, 22 nt, Human
caggguaaaacacugagaagaa

SEQ ID NO: 675226 - RNA, 23 nt, Human
cagguccucaaacauuccaagga

SEQ ID NO: 675227 - RNA, 22 nt, Human
caguuguugacaacacaaccga

SEQ ID NO: 675228 - RNA, 22 nt, Human
caucccgggagcauccaacagc

SEQ ID NO: 675229 - RNA, 20 nt, Human
cauugaggacaaaaacaggc

SEQ ID NO: 675230 - RNA, 22 nt, Human
ccaauggccacgucauuccacc

SEQ ID NO: 675231 - RNA, 20 nt, Human
ccacacacacagaauggcug

SEQ ID NO: 675232 - RNA, 21 nt, Human
cccagaagccucuacagaagc

SEQ ID NO: 675233 - RNA, 19 nt, Human
cccgggagcauccaacagc

SEQ ID NO: 675234 - RNA, 18 nt, Human
cccugcugccguguaccu

SEQ ID NO: 675235 - RNA, 19 nt, Human
ccgugggcuaaccgagcac

SEQ ID NO: 675236 - RNA, 18 nt, Human
ccuggcucccuucacuca

SEQ ID NO: 675237 - RNA, 21 nt, Human
cgaagaaaacuggaaaccuau

SEQ ID NO: 675238 - RNA, 23 nt, Human
cgccugaacuuaaggugggaggc

SEQ ID NO: 675239 - RNA, 23 nt, Human
cgggggacagcaaaggcggcggu

SEQ ID NO: 675240 - RNA, 21 nt, Human
cuacagaagcccguccucccu

SEQ ID NO: 675241 - RNA, 18 nt, Human
cucaguuuuccuaugcag

SEQ ID NO: 675242 - RNA, 21 nt, Human
cugaacuuaaggugggaggcc

SEQ ID NO: 675243 - RNA, 21 nt, Human
cugaauuugaaauuggacuuu

SEQ ID NO: 675244 - RNA, 18 nt, Human
cuugaaaaaucaaagcug

SEQ ID NO: 675245 - RNA, 20 nt, Human
cuuggaggcccugaaugcuc

SEQ ID NO: 675246 - RNA, 18 nt, Human
cuuuuccacauggcaaca

SEQ ID NO: 675247 - RNA, 24 nt, Human
gaaaaagaacgacguuacugaagg

SEQ ID NO: 675248 - RNA, 18 nt, Human
gaaaaauacaccaauagu

SEQ ID NO: 675249 - RNA, 21 nt, Human
gacaagaaaacaucaagagau

SEQ ID NO: 675250 - RNA, 18 nt, Human
gacaaggaaagaaagaaa

SEQ ID NO: 675251 - RNA, 22 nt, Human
gagauguccuguggugggucaa

SEQ ID NO: 675252 - RNA, 20 nt, Human
gaugacaagaaaacaucaag

SEQ ID NO: 675253 - RNA, 24 nt, Human
gcacaaauuccaaaacgauuuuac

SEQ ID NO: 675254 - RNA, 19 nt, Human
gccaaggaaaugcgcgggg

SEQ ID NO: 675255 - RNA, 22 nt, Human
gcggcgguggcggcggcgcuuc

SEQ ID NO: 675256 - RNA, 18 nt, Human
gcugcaguaagcaggaac

SEQ ID NO: 675257 - RNA, 21 nt, Human
gcugcuccauggugcuggaug

SEQ ID NO: 675258 - RNA, 18 nt, Human
gcuguuuccuucuguuca

SEQ ID NO: 675259 - RNA, 21 nt, Human
ggacagcaggggcagggguuu

SEQ ID NO: 675260 - RNA, 20 nt, Human
ggagacguggacccuuuucc

SEQ ID NO: 675261 - RNA, 19 nt, Human
ggagauaccccaaacuuag

SEQ ID NO: 675262 - RNA, 18 nt, Human
ggcaucuggcauuuuaaa

SEQ ID NO: 675263 - RNA, 22 nt, Human
ggccagggcuggaauauuuggc

SEQ ID NO: 675264 - RNA, 18 nt, Human
ggcggcgguggcggcggc

SEQ ID NO: 675265 - RNA, 20 nt, Human
ggcggcgguggcggcggcgc

SEQ ID NO: 675266 - RNA, 20 nt, Human
gggcccuggggugggggcug

SEQ ID NO: 675267 - RNA, 30 nt, Human
ggggacagcaaaggcggcgguggcggcggg

SEQ ID NO: 675268 - RNA, 21 nt, Human
gggggacagcaaaggcggcgg

SEQ ID NO: 675269 - RNA, 22 nt, Human
gggggacagcaaaggcggcggu

SEQ ID NO: 675270 - RNA, 21 nt, Human
ggggugggggcugugagcugg

SEQ ID NO: 675271 - RNA, 20 nt, Human
gggugggggcugugagcugg

SEQ ID NO: 675272 - RNA, 21 nt, Human
gggugggggcugugagcuggc

SEQ ID NO: 675273 - RNA, 20 nt, Human
ggugggggcugugagcuggc

SEQ ID NO: 675274 - RNA, 19 nt, Human
gucaaugcuuuaucucauu

SEQ ID NO: 675275 - RNA, 22 nt, Human
gugaaaggagcuuagagguaca

SEQ ID NO: 675276 - RNA, 23 nt, Human
gugaagcaaaaugcgacaaaagc

SEQ ID NO: 675277 - RNA, 22 nt, Human
gugcaaaagguggcuggaacaa

SEQ ID NO: 675278 - RNA, 19 nt, Human
guggagcuccuacccugaa

SEQ ID NO: 675279 - RNA, 19 nt, Human
guggcacuuagggcugugg

SEQ ID NO: 675280 - RNA, 20 nt, Human
guuuuaagggauggaaaagu

SEQ ID NO: 675281 - RNA, 18 nt, Human
uaaaaaacaaucugagca

SEQ ID NO: 675282 - RNA, 25 nt, Human
uaaaaagcggcaaaguccuuucucu

SEQ ID NO: 675283 - RNA, 22 nt, Human
uaaagcaagcaccgucggggug

SEQ ID NO: 675284 - RNA, 18 nt, Human
uaaagugcaccucugccc

SEQ ID NO: 675285 - RNA, 21 nt, Human
uaacaacauuaaauaacagaa

SEQ ID NO: 675286 - RNA, 19 nt, Human
uaacaggguaaaacacuga

SEQ ID NO: 675287 - RNA, 21 nt, Human
uaacaggguaaaacacugaga

SEQ ID NO: 675288 - RNA, 19 nt, Human
uaacauaucacgaagaaaa

SEQ ID NO: 675289 - RNA, 23 nt, Human
uaacuaaaaaacaaucugagcau

SEQ ID NO: 675290 - RNA, 18 nt, Human
uaacucagaugacugcga

SEQ ID NO: 675291 - RNA, 20 nt, Human
uaagcuggguguggugugag

SEQ ID NO: 675292 - RNA, 22 nt, Human
uaaugagugacagggaucaaac

SEQ ID NO: 675293 - RNA, 19 nt, Human
uacaacacagugucaggga

SEQ ID NO: 675294 - RNA, 20 nt, Human
uacaacacagugucagggag

SEQ ID NO: 675295 - RNA, 21 nt, Human
uacaacacuuaaagggcacaa

SEQ ID NO: 675296 - RNA, 18 nt, Human
uacaugaaaugcuguguu

SEQ ID NO: 675297 - RNA, 19 nt, Human
uacuuugauucuugugucu

SEQ ID NO: 675298 - RNA, 23 nt, Human
uagaaagcaccaaucugugaaaa

SEQ ID NO: 675299 - RNA, 23 nt, Human
uagagguacagcuguuuccuucu

SEQ ID NO: 675300 - RNA, 24 nt, Human
uagagguacagcuguuuccuucug

SEQ ID NO: 675301 - RNA, 24 nt, Human
uagugauaccuaaauggguggcac

SEQ ID NO: 675302 - RNA, 19 nt, Human
uaugguuaaaaacaggagc

SEQ ID NO: 675303 - RNA, 18 nt, Human
uauugcacgaugcuuggc

SEQ ID NO: 675304 - RNA, 21 nt, Human
ucagagcuuugggguagcagg

SEQ ID NO: 675305 - RNA, 23 nt, Human
ucagagcuuugggguagcaggca

SEQ ID NO: 675306 - RNA, 19 nt, Human
ucagaggcugcuccaggug

SEQ ID NO: 675307 - RNA, 30 nt, Human
ucagcacuuuguaaaaaaaaaaagaaaaaa

SEQ ID NO: 675308 - RNA, 22 nt, Human
ucagcuuugggggaaggguggc

SEQ ID NO: 675309 - RNA, 24 nt, Human
ucaguggugucagcuuugaacaug

SEQ ID NO: 675310 - RNA, 24 nt, Human
uccacauggcaacaggcguggagc

SEQ ID NO: 675311 - RNA, 23 nt, Human
ucccugggacagcaggggcaggg

SEQ ID NO: 675312 - RNA, 23 nt, Human
uccucacaugcaggcugcuccau

SEQ ID NO: 675313 - RNA, 19 nt, Human
uccuuaaagaugaugaaaa

SEQ ID NO: 675314 - RNA, 21 nt, Human
ucuacagaagcccguccuccc

SEQ ID NO: 675315 - RNA, 25 nt, Human
ucugaccaaauuccccaccagugcc

SEQ ID NO: 675316 - RNA, 23 nt, Human
ucugcaacugaaucacuugagaa

SEQ ID NO: 675317 - RNA, 20 nt, Human
ucuggcauuuuaaacaccau

SEQ ID NO: 675318 - RNA, 28 nt, Human
ucuuucagagcuuuggggucggaaaucc

SEQ ID NO: 675319 - RNA, 27 nt, Human
ugaaaaagaacgacguuacugaaggua

SEQ ID NO: 675320 - RNA, 21 nt, Human
ugaaaaauacaccaauaguag

SEQ ID NO: 675321 - RNA, 19 nt, Human
ugaaaaaucaaagcugugg

SEQ ID NO: 675322 - RNA, 21 nt, Human
ugaaugcuccuuccauuccuc

SEQ ID NO: 675323 - RNA, 23 nt, Human
ugaccaaauuccccaccagugcc

SEQ ID NO: 675324 - RNA, 18 nt, Human
ugacugcgauacgauaca

SEQ ID NO: 675325 - RNA, 18 nt, Human
ugagaauacagggugaaa

SEQ ID NO: 675326 - RNA, 24 nt, Human
ugaguaacuaaaaaacaaucugag

SEQ ID NO: 675327 - RNA, 24 nt, Human
ugauuacaugaaaugcuguguuug

SEQ ID NO: 675328 - RNA, 21 nt, Human
ugcaaaagguggcuggaacaa

SEQ ID NO: 675329 - RNA, 18 nt, Human
ugccaagguuuaagucca

SEQ ID NO: 675330 - RNA, 25 nt, Human
ugccaagguuuaaguccacaagcaa

SEQ ID NO: 675331 - RNA, 19 nt, Human
ugcgcggggcacauacaga

SEQ ID NO: 675332 - RNA, 18 nt, Human
ugcguggagcuccuaccc

SEQ ID NO: 675333 - RNA, 22 nt, Human
ugcguggagcuccuacccugaa

SEQ ID NO: 675334 - RNA, 18 nt, Human
ugcuaaucugccuggcac

SEQ ID NO: 675335 - RNA, 21 nt, Human
ugcuuggagauaccccaaacu

SEQ ID NO: 675336 - RNA, 18 nt, Human
uggacuuuauaaagccua

SEQ ID NO: 675337 - RNA, 20 nt, Human
uggcaccaccccauuuuaga

SEQ ID NO: 675338 - RNA, 22 nt, Human
uggcagggaacaaaugacgcug

SEQ ID NO: 675339 - RNA, 19 nt, Human
uggcuggaacaaauguuca

SEQ ID NO: 675340 - RNA, 20 nt, Human
uggcuggaacaaauguucag

SEQ ID NO: 675341 - RNA, 19 nt, Human
uggcuucaugagauguccu

SEQ ID NO: 675342 - RNA, 21 nt, Human
uggcuucaugagauguccugu

SEQ ID NO: 675343 - RNA, 21 nt, Human
uggggaggaagggaucauuga

SEQ ID NO: 675344 - RNA, 18 nt, Human
uggggugggggcugugag

SEQ ID NO: 675345 - RNA, 21 nt, Human
uggggugggggcugugagcug

SEQ ID NO: 675346 - RNA, 23 nt, Human
uggggugggggcugugagcuggc

SEQ ID NO: 675347 - RNA, 18 nt, Human
uggguggugaugugcgug

SEQ ID NO: 675348 - RNA, 23 nt, Human
uggguggugaugugcguggagcu

SEQ ID NO: 675349 - RNA, 23 nt, Human
uggguuaaauaguugaaaauugg

SEQ ID NO: 675350 - RNA, 18 nt, Human
uguccggggaagccaggc

SEQ ID NO: 675351 - RNA, 21 nt, Human
ugucucuugaaaaaucaaagc

SEQ ID NO: 675352 - RNA, 20 nt, Human
ugugagaaagcuguaagugg

SEQ ID NO: 675353 - RNA, 20 nt, Human
uguuucuuuuuguagaaauc

SEQ ID NO: 675354 - RNA, 24 nt, Human
uuaaagaugaugaaaaaugugaag

SEQ ID NO: 675355 - RNA, 27 nt, Human
uuaaagggcacaauaauuacaggaaua

SEQ ID NO: 675356 - RNA, 24 nt, Human
uuaacauaucacgaagaaaacugg

SEQ ID NO: 675357 - RNA, 21 nt, Human
uucaagaugacaagaaaacau

SEQ ID NO: 675358 - RNA, 24 nt, Human
uucagaacaagaaggggcuuuuga

SEQ ID NO: 675359 - RNA, 21 nt, Human
uuccauggacauucuauaagc

SEQ ID NO: 675360 - RNA, 22 nt, Human
uuccauggacauucuauaagcc

SEQ ID NO: 675361 - RNA, 19 nt, Human
uuccccaccagugccaagg

SEQ ID NO: 675362 - RNA, 24 nt, Human
uuccuaugcagcauuuucuuuucu

SEQ ID NO: 675363 - RNA, 27 nt, Human
uuccucacaugcaggcugcuccauggu

SEQ ID NO: 675364 - RNA, 20 nt, Human
uucuugugucuucuucacau

SEQ ID NO: 675365 - RNA, 22 nt, Human
uuguuuccucccaagagagacu

SEQ ID NO: 675366 - RNA, 20 nt, Human
uuuaagggauggaaaaguuu

SEQ ID NO: 675367 - RNA, 22 nt, Human
uuugcauuccaaggcagaugac

SEQ ID NO: 675368 - RNA, 20 nt, Human
uuuggccuuucucuccuuug

SEQ ID NO: 675369 - RNA, 23 nt, Human
uuuuaaacaccauucaccacguc

SEQ ID NO: 675370 - RNA, 21 nt, Human
uuuuggagacguggacccuuu

SEQ ID NO: 675371 - RNA, 23 nt, Human
aaaaaagcuguggccgaagccga

SEQ ID NO: 675372 - RNA, 21 nt, Human
aaaaaauacccaccaccccac

SEQ ID NO: 675373 - RNA, 24 nt, Human
aaaaaauacccaccaccccacucc

SEQ ID NO: 675374 - RNA, 22 nt, Human
aaaaagcuguggccgaagccga

SEQ ID NO: 675375 - RNA, 27 nt, Human
aaaaagcuguggccgaagccgaaaccc

SEQ ID NO: 675376 - RNA, 19 nt, Human
aaaaccccaaaccccaaac

SEQ ID NO: 675377 - RNA, 21 nt, Human
aaaaccccaaaccccaaacag

SEQ ID NO: 675378 - RNA, 21 nt, Human
aaaauacccaccaccccacuc

SEQ ID NO: 675379 - RNA, 24 nt, Human
aaaauacccaccaccccacuccca

SEQ ID NO: 675380 - RNA, 21 nt, Human
aaacaaaaagcaacaaucugg

SEQ ID NO: 675381 - RNA, 22 nt, Human
aaagaacauacccagccucaac

SEQ ID NO: 675382 - RNA, 19 nt, Human
aaagauaaaagcagaggga

SEQ ID NO: 675383 - RNA, 18 nt, Human
aaauacccaccaccccac

SEQ ID NO: 675384 - RNA, 23 nt, Human
aaaugcagagaucugaacaagcu

SEQ ID NO: 675385 - RNA, 21 nt, Human
aacccaacccuuacccauccc

SEQ ID NO: 675386 - RNA, 21 nt, Human
aacuuguuauugccucagaac

SEQ ID NO: 675387 - RNA, 19 nt, Human
aagcaacggcacacagcca

SEQ ID NO: 675388 - RNA, 24 nt, Human
aagcaucaacaaaaaauacccacc

SEQ ID NO: 675389 - RNA, 21 nt, Human
acaaaaaauacccaccacccc

SEQ ID NO: 675390 - RNA, 19 nt, Human
acagagcccuuuccaggua

SEQ ID NO: 675391 - RNA, 20 nt, Human
acauacaagaaaacaucaag

SEQ ID NO: 675392 - RNA, 20 nt, Human
acccaacccuuacccauccc

SEQ ID NO: 675393 - RNA, 24 nt, Human
acccaccaccccacucccaccaga

SEQ ID NO: 675394 - RNA, 25 nt, Human
accccacucccaccagaaaacccaa

SEQ ID NO: 675395 - RNA, 21 nt, Human
acugaaguacuaaaagcacug

SEQ ID NO: 675396 - RNA, 21 nt, Human
agagcuucuccaugaacauua

SEQ ID NO: 675397 - RNA, 21 nt, Human
agauaaaagcagagggagaag

SEQ ID NO: 675398 - RNA, 22 nt, Human
agcacaugcuguuuucacagca

SEQ ID NO: 675399 - RNA, 20 nt, Human
auuuauaaaaugcagagauc

SEQ ID NO: 675400 - RNA, 23 nt, Human
caaaaaauacccaccaccccacu

SEQ ID NO: 675401 - RNA, 25 nt, Human
caaaaaauacccaccaccccacucc

SEQ ID NO: 675402 - RNA, 20 nt, Human
caaaccccaaacagaguaga

SEQ ID NO: 675403 - RNA, 18 nt, Human
caaccacuuaaaauacag

SEQ ID NO: 675404 - RNA, 21 nt, Human
caagaguugguuccgcaagag

SEQ ID NO: 675405 - RNA, 21 nt, Human
caagcaaugaccuaaaaaugc

SEQ ID NO: 675406 - RNA, 24 nt, Human
cacagccauaauauagagaacaga

SEQ ID NO: 675407 - RNA, 24 nt, Human
caccagaaaacccaacccuuaccc

SEQ ID NO: 675408 - RNA, 18 nt, Human
caccccacucccaccaga

SEQ ID NO: 675409 - RNA, 23 nt, Human
caccccacucccaccagaaaacc

SEQ ID NO: 675410 - RNA, 18 nt, Human
caccccugcccggccugc

SEQ ID NO: 675411 - RNA, 23 nt, Human
cagcagcacaugcuguuuucaca

SEQ ID NO: 675412 - RNA, 22 nt, Human
caucaacaaaaaauacccacca

SEQ ID NO: 675413 - RNA, 22 nt, Human
ccaccaccccacucccaccaga

SEQ ID NO: 675414 - RNA, 24 nt, Human
ccaccagaaaacccaacccuuacc

SEQ ID NO: 675415 - RNA, 19 nt, Human
ccaccccacucccaccaga

SEQ ID NO: 675416 - RNA, 23 nt, Human
cccaacccuuacccauccccggc

SEQ ID NO: 675417 - RNA, 26 nt, Human
cccaccaccccacucccaccagaaaa

SEQ ID NO: 675418 - RNA, 21 nt, Human
cccaccagaaaacccaacccu

SEQ ID NO: 675419 - RNA, 22 nt, Human
cccacucccaccagaaaaccca

SEQ ID NO: 675420 - RNA, 22 nt, Human
cccacucccaccagaaaaccca

SEQ ID NO: 675421 - RNA, 22 nt, Human
cccaggcugcagcaaccaagaa

SEQ ID NO: 675422 - RNA, 22 nt, Human
ccgaaacccggcccagcgcccu

SEQ ID NO: 675423 - RNA, 23 nt, Human
ccgaaacccggcccagcgcccug

SEQ ID NO: 675424 - RNA, 20 nt, Human
ccgaagccgaaacccggccc

SEQ ID NO: 675425 - RNA, 23 nt, Human
ccgaagccgaaacccggcccagc

SEQ ID NO: 675426 - RNA, 18 nt, Human
ccgccgccuccgcgaucg

SEQ ID NO: 675427 - RNA, 22 nt, Human
ccucucggccuggccgccgccu

SEQ ID NO: 675428 - RNA, 19 nt, Human
ccugcacuaaagcaucaac

SEQ ID NO: 675429 - RNA, 24 nt, Human
ccugcacuaaagcaucaacaaaaa

SEQ ID NO: 675430 - RNA, 26 nt, Human
cggcaaaaauuaccugguacaagcaa

SEQ ID NO: 675431 - RNA, 22 nt, Human
cucagucacgccgcgccucucu

SEQ ID NO: 675432 - RNA, 21 nt, Human
cucaguugcccaagacugucu

SEQ ID NO: 675433 - RNA, 21 nt, Human
cuccaugaacauccacccagg

SEQ ID NO: 675434 - RNA, 19 nt, Human
cucccaccagaaaacccaa

SEQ ID NO: 675435 - RNA, 18 nt, Human
cugcacuaaagcaucaac

SEQ ID NO: 675436 - RNA, 20 nt, Human
cugcccggccugccucucgg

SEQ ID NO: 675437 - RNA, 22 nt, Human
gaaaaaaugaugcuccuguccc

SEQ ID NO: 675438 - RNA, 22 nt, Human
gaaagaacucucaauaguuuag

SEQ ID NO: 675439 - RNA, 19 nt, Human
gaaggaaaaaacauuugug

SEQ ID NO: 675440 - RNA, 18 nt, Human
gacaccccugcccggccu

SEQ ID NO: 675441 - RNA, 23 nt, Human
gcaaugaccuaaaaaugcuuucu

SEQ ID NO: 675442 - RNA, 19 nt, Human
gccauaauauagagaacag

SEQ ID NO: 675443 - RNA, 19 nt, Human
ggaaagcucauuuucaaaa

SEQ ID NO: 675444 - RNA, 21 nt, Human
ggcugcagcaaccaagaagga

SEQ ID NO: 675445 - RNA, 23 nt, Human
guaaaaccccaaaccccaaacag

SEQ ID NO: 675446 - RNA, 25 nt, Human
guaaaaccccaaaccccaaacagag

SEQ ID NO: 675447 - RNA, 20 nt, Human
guugcccaagacugucugaa

SEQ ID NO: 675448 - RNA, 20 nt, Human
uaaaaccccaaaccccaaac

SEQ ID NO: 675449 - RNA, 23 nt, Human
uaaaaccccaaaccccaaacaga

SEQ ID NO: 675450 - RNA, 19 nt, Human
uaaaagcagagggagaagc

SEQ ID NO: 675451 - RNA, 21 nt, Human
uaaaagcagagggagaagcaa

SEQ ID NO: 675452 - RNA, 22 nt, Human
uaaagcaucaacaaaaaauacc

SEQ ID NO: 675453 - RNA, 18 nt, Human
uaacuuggagaaaaaccc

SEQ ID NO: 675454 - RNA, 19 nt, Human
uaauauagagaacagagcu

SEQ ID NO: 675455 - RNA, 23 nt, Human
uacaagcaaugaccuaaaaaugc

SEQ ID NO: 675456 - RNA, 19 nt, Human
uacccaccaccccacuccc

SEQ ID NO: 675457 - RNA, 25 nt, Human
uaccugguacaagcaaugaccuaaa

SEQ ID NO: 675458 - RNA, 20 nt, Human
uacuacauuauguucugggu

SEQ ID NO: 675459 - RNA, 18 nt, Human
uagaugaugaaauaagga

SEQ ID NO: 675460 - RNA, 19 nt, Human
uagauguccauagguaguu

SEQ ID NO: 675461 - RNA, 18 nt, Human
uaucagcaucucccaccu

SEQ ID NO: 675462 - RNA, 27 nt, Human
uaucagguaaggaaaaaaugaugcucc

SEQ ID NO: 675463 - RNA, 24 nt, Human
ucaacaaaaaauacccaccacccc

SEQ ID NO: 675464 - RNA, 22 nt, Human
ucagcaucucccaccuaaaaac

SEQ ID NO: 675465 - RNA, 21 nt, Human
ucauuauuugcagaaucuugg

SEQ ID NO: 675466 - RNA, 24 nt, Human
ucgcagcgguuuuacugccccgga

SEQ ID NO: 675467 - RNA, 21 nt, Human
ucuguaaaaccccaaacccca

SEQ ID NO: 675468 - RNA, 23 nt, Human
ucuguaaaaccccaaaccccaaa

SEQ ID NO: 675469 - RNA, 21 nt, Human
ucuuugaaagaacauacccag

SEQ ID NO: 675470 - RNA, 24 nt, Human
ucuuugaaagaacauacccagccu

SEQ ID NO: 675471 - RNA, 19 nt, Human
ugaaacagagcccuuucca

SEQ ID NO: 675472 - RNA, 22 nt, Human
ugaaacagagcccuuuccaggu

SEQ ID NO: 675473 - RNA, 18 nt, Human
ugagaaaaaaagcugugg

SEQ ID NO: 675474 - RNA, 23 nt, Human
ugcauuuguuacucaagaaaaua

SEQ ID NO: 675475 - RNA, 26 nt, Human
ugccccggaugccucuaggacgcagc

SEQ ID NO: 675476 - RNA, 19 nt, Human
ugccucagaacaggccugc

SEQ ID NO: 675477 - RNA, 24 nt, Human
uguaaaacaaggccacuacuauaa

SEQ ID NO: 675478 - RNA, 25 nt, Human
uuacauauuucuguauuaacuugga

SEQ ID NO: 675479 - RNA, 25 nt, Human
uucacacagaccaaugaucuuaccu

SEQ ID NO: 675480 - RNA, 19 nt, Human
uucaugcauuuguuacuca

SEQ ID NO: 675481 - RNA, 24 nt, Human
uucuguauuaacuuggagaaaaac

SEQ ID NO: 675482 - RNA, 25 nt, Human
uucuugaaacagagcccuuuccagg

SEQ ID NO: 675483 - RNA, 20 nt, Human
uuucacacagaccaaugauc

SEQ ID NO: 675484 - RNA, 23 nt, Human
uuucacagcaacuuguuauugcc

SEQ ID NO: 675485 - RNA, 21 nt, Human
uuuguaaaacaaggccacuac

SEQ ID NO: 675486 - RNA, 22 nt, Human
uuuguauuauaauuuuuaaaau

SEQ ID NO: 675487 - RNA, 18 nt, Human
uuuuuuuuuuuuuuuuug

SEQ ID NO: 675488 - RNA, 21 nt, Human
agaaaccaguacaaauuucga

SEQ ID NO: 675489 - RNA, 19 nt, Human
ugcagaaaccaguacaaau

SEQ ID NO: 675490 - RNA, 24 nt, Human
uugaagacaauaguguuaauuucu

SEQ ID NO: 675491 - RNA, 22 nt, Human
uuuuuuuuuuuuuaaaggcuua

SEQ ID NO: 675492 - RNA, 25 nt, Human
uuuuuuuuuuuuuuuuuuuuaaagg

SEQ ID NO: 675493 - RNA, 22 nt, Human
aaagaaauaaaauuauagacca

SEQ ID NO: 675494 - RNA, 21 nt, Human
aaauccuggaaguuuuaaacu

SEQ ID NO: 675495 - RNA, 19 nt, Human
aagugucggcagagcuggg

SEQ ID NO: 675496 - RNA, 24 nt, Human
acuuuguguugacuucaaaggcua

SEQ ID NO: 675497 - RNA, 24 nt, Human
auccuggaaguuuuaaacuuugug

SEQ ID NO: 675498 - RNA, 19 nt, Human
auuaauuuuauugacugau

SEQ ID NO: 675499 - RNA, 26 nt, Human
caaaaccgggccucccgugccgccgg

SEQ ID NO: 675500 - RNA, 18 nt, Human
caaauuucacccauaggc

SEQ ID NO: 675501 - RNA, 21 nt, Human
caagaaaaacugcauaguuua

SEQ ID NO: 675502 - RNA, 19 nt, Human
ccccccgccgccgccucuc

SEQ ID NO: 675503 - RNA, 22 nt, Human
cccccgccgccgccucucccgc

SEQ ID NO: 675504 - RNA, 23 nt, Human
cccccgccgccgccucucccgcg

SEQ ID NO: 675505 - RNA, 19 nt, Human
ccgccgccgccucucccgc

SEQ ID NO: 675506 - RNA, 19 nt, Human
ccgccggcucggcccuccu

SEQ ID NO: 675507 - RNA, 23 nt, Human
ccuccccccgccgccgccucucc

SEQ ID NO: 675508 - RNA, 21 nt, Human
ccuccuccccccgccgccgcc

SEQ ID NO: 675509 - RNA, 18 nt, Human
cgccgccgccucucccgc

SEQ ID NO: 675510 - RNA, 21 nt, Human
cgccgccgccucucccgcggc

SEQ ID NO: 675511 - RNA, 18 nt, Human
cggcccuccucucccucc

SEQ ID NO: 675512 - RNA, 18 nt, Human
cuccucucccuccucccc

SEQ ID NO: 675513 - RNA, 20 nt, Human
cucucccgcggcuccccggg

SEQ ID NO: 675514 - RNA, 21 nt, Human
cucucccgcggcuccccgggc

SEQ ID NO: 675515 - RNA, 19 nt, Human
gcggaccgcggaggugagc

SEQ ID NO: 675516 - RNA, 24 nt, Human
ggcccuccucucccuccucccccc

SEQ ID NO: 675517 - RNA, 25 nt, Human
ggucaagugucggcagagcuggggg

SEQ ID NO: 675518 - RNA, 22 nt, Human
guggucgcggucggcccgcagg

SEQ ID NO: 675519 - RNA, 24 nt, Human
uaaauauauacaacuuugcaaaau

SEQ ID NO: 675520 - RNA, 20 nt, Human
uaacucgggcagagaagcgg

SEQ ID NO: 675521 - RNA, 24 nt, Human
ucaaaaccgggccucccgugccgc

SEQ ID NO: 675522 - RNA, 24 nt, Human
uccccgggcggccgcacugggcgu

SEQ ID NO: 675523 - RNA, 23 nt, Human
uccucucccuccuccccccgccg

SEQ ID NO: 675524 - RNA, 23 nt, Human
ucugggucaagugucggcagagc

SEQ ID NO: 675525 - RNA, 22 nt, Human
ugaaaaacuaaagugauaagaa

SEQ ID NO: 675526 - RNA, 23 nt, Human
ugaaaaacuaaagugauaagaag

SEQ ID NO: 675527 - RNA, 20 nt, Human
ugcacagcauuaaauauaua

SEQ ID NO: 675528 - RNA, 18 nt, Human
uuugcaaaauccuggaag

SEQ ID NO: 675529 - RNA, 20 nt, Human
uuuuuuuuuuuuuuagugga

SEQ ID NO: 675530 - RNA, 23 nt, Human
uaaaauguuuacaucuugggacu

SEQ ID NO: 675531 - RNA, 21 nt, Human
uaugcuuucauuauguaaaau

SEQ ID NO: 675532 - RNA, 25 nt, Human
aaaaacguacuuuauagaaaaccaa

SEQ ID NO: 675533 - RNA, 18 nt, Human
aaaauacugcuacccugc

SEQ ID NO: 675534 - RNA, 19 nt, Human
aaauauagguccuuccucc

SEQ ID NO: 675535 - RNA, 24 nt, Human
aaugcacauauugcacacauaugg

SEQ ID NO: 675536 - RNA, 23 nt, Human
aaugcagagacagaaacaaagaa

SEQ ID NO: 675537 - RNA, 20 nt, Human
acaaguaccuaaugaagaag

SEQ ID NO: 675538 - RNA, 19 nt, Human
acaaugcagagacagaaac

SEQ ID NO: 675539 - RNA, 22 nt, Human
acacaacaauuccccuacacau

SEQ ID NO: 675540 - RNA, 21 nt, Human
accuaaugaagaagguuauga

SEQ ID NO: 675541 - RNA, 24 nt, Human
acuuugaaaguguuaauguugaag

SEQ ID NO: 675542 - RNA, 19 nt, Human
aggcaaaaaauaaauuccu

SEQ ID NO: 675543 - RNA, 24 nt, Human
augaggcaaaaaauaaauuccuuu

SEQ ID NO: 675544 - RNA, 19 nt, Human
auuuuaagcagguguuacu

SEQ ID NO: 675545 - RNA, 24 nt, Human
caaugcagagacagaaacaaagaa

SEQ ID NO: 675546 - RNA, 21 nt, Human
cacaacaauuccccuacacau

SEQ ID NO: 675547 - RNA, 25 nt, Human
cacaacaauuccccuacacauuuga

SEQ ID NO: 675548 - RNA, 24 nt, Human
cuuuacacaacaauuccccuacac

SEQ ID NO: 675549 - RNA, 19 nt, Human
gcacuaucugcuucugugc

SEQ ID NO: 675550 - RNA, 26 nt, Human
uaaaaacguacuuuauagaaaaccaa

SEQ ID NO: 675551 - RNA, 19 nt, Human
uaaaaugaaagaaugcaca

SEQ ID NO: 675552 - RNA, 19 nt, Human
uaaugaagaagguuaugaa

SEQ ID NO: 675553 - RNA, 23 nt, Human
uagaaaaccaagugcaaaacuaa

SEQ ID NO: 675554 - RNA, 24 nt, Human
uauagaaaaccaagugcaaaacua

SEQ ID NO: 675555 - RNA, 22 nt, Human
uauagguccuuccuccagacuu

SEQ ID NO: 675556 - RNA, 23 nt, Human
ucaauucucuacagacucucucc

SEQ ID NO: 675557 - RNA, 24 nt, Human
uccuccagacuuucuggaagaaau

SEQ ID NO: 675558 - RNA, 21 nt, Human
ucuacagacucucucccauuc

SEQ ID NO: 675559 - RNA, 21 nt, Human
ucuuuuauauuuccagcuguu

SEQ ID NO: 675560 - RNA, 23 nt, Human
ugagacaguauuuuugagggcug

SEQ ID NO: 675561 - RNA, 23 nt, Human
ugcaaaacuaaaaugaaagaaug

SEQ ID NO: 675562 - RNA, 23 nt, Human
ugcaaagggagaauuuuaagcag

SEQ ID NO: 675563 - RNA, 22 nt, Human
ugcagagacagaaacaaagaag

SEQ ID NO: 675564 - RNA, 24 nt, Human
uggacugaugaggcaaaaaauaaa

SEQ ID NO: 675565 - RNA, 23 nt, Human
uucaggguguggacuauaaaaug

SEQ ID NO: 675566 - RNA, 21 nt, Human
uucucuacagacucucuccca

SEQ ID NO: 675567 - RNA, 19 nt, Human
uuuggcacuaucugcuucu

SEQ ID NO: 675568 - RNA, 21 nt, Human
accagguaccaacaucacagc

SEQ ID NO: 675569 - RNA, 20 nt, Human
acccgugaccuagagaugaa

SEQ ID NO: 675570 - RNA, 27 nt, Human
accgcaacgacaccgccaagcggccca

SEQ ID NO: 675571 - RNA, 23 nt, Human
agggagcagcugcccaaauguuu

SEQ ID NO: 675572 - RNA, 22 nt, Human
caacgacaccgccaagcggccc

SEQ ID NO: 675573 - RNA, 18 nt, Human
caacuucaaacagcugaa

SEQ ID NO: 675574 - RNA, 25 nt, Human
cagcagauggcaaaaggagcuuucc

SEQ ID NO: 675575 - RNA, 20 nt, Human
ccagaacccccgaaccccuc

SEQ ID NO: 675576 - RNA, 22 nt, Human
ccagguaccaacaucacagcug

SEQ ID NO: 675577 - RNA, 21 nt, Human
cccagaacccccgaaccccuc

SEQ ID NO: 675578 - RNA, 25 nt, Human
cccagaacccccgaaccccucacgc

SEQ ID NO: 675579 - RNA, 26 nt, Human
cccagaacccccgaaccccucacgcg

SEQ ID NO: 675580 - RNA, 21 nt, Human
cccccgaaccccucacgcgga

SEQ ID NO: 675581 - RNA, 22 nt, Human
cccccgaaccccucacgcggac

SEQ ID NO: 675582 - RNA, 22 nt, Human
ccgccaagcggcccacugaccc

SEQ ID NO: 675583 - RNA, 26 nt, Human
cgaguagaggcaaggacgaagcucau

SEQ ID NO: 675584 - RNA, 20 nt, Human
cuagccaaccaggaauaaau

SEQ ID NO: 675585 - RNA, 18 nt, Human
cuuucauucgaugggaug

SEQ ID NO: 675586 - RNA, 21 nt, Human
gaccacagccugccaagggag

SEQ ID NO: 675587 - RNA, 23 nt, Human
gcuuuccagaacuuuggccuggu

SEQ ID NO: 675588 - RNA, 22 nt, Human
ucaaacagcugaaauuuguuuc

SEQ ID NO: 675589 - RNA, 21 nt, Human
ugauuuauucccuauuuccuu

SEQ ID NO: 675590 - RNA, 19 nt, Human
ugccaagggagcagcugcc

SEQ ID NO: 675591 - RNA, 20 nt, Human
ugccaagggagcagcugccg

SEQ ID NO: 675592 - RNA, 18 nt, Human
ugcccagaacccccgaac

SEQ ID NO: 675593 - RNA, 23 nt, Human
uuaaagaaaaaccucaaaguuca

SEQ ID NO: 675594 - RNA, 19 nt, Human
uuucauagcuguuggucac

SEQ ID NO: 675595 - RNA, 21 nt, Human
uuuggccuggucugcaccagg

SEQ ID NO: 675596 - RNA, 24 nt, Human
aaacaccuggaucaauuguaaaca

SEQ ID NO: 675597 - RNA, 20 nt, Human
aacauaggguggaggccagc

SEQ ID NO: 675598 - RNA, 26 nt, Human
agucuccacuuaaaaugcugaaugac

SEQ ID NO: 675599 - RNA, 19 nt, Human
augcagaugucugaaaucu

SEQ ID NO: 675600 - RNA, 23 nt, Human
caaaaacugcugaauaggaguuc

SEQ ID NO: 675601 - RNA, 24 nt, Human
caaaacacagcaagacauuuucua

SEQ ID NO: 675602 - RNA, 19 nt, Human
caaaacacaggacacagua

SEQ ID NO: 675603 - RNA, 19 nt, Human
cacaauuuauccacuacuu

SEQ ID NO: 675604 - RNA, 20 nt, Human
caccauagaacauaaaaagg

SEQ ID NO: 675605 - RNA, 21 nt, Human
caccauagaacauaaaaagga

SEQ ID NO: 675606 - RNA, 22 nt, Human
caggacacaguacuaaucuguc

SEQ ID NO: 675607 - RNA, 23 nt, Human
cauuacugcuuuccacaaaaacu

SEQ ID NO: 675608 - RNA, 26 nt, Human
ccacaccauagaacauaaaaaggaca

SEQ ID NO: 675609 - RNA, 23 nt, Human
ccacuacugccccuaugcuuuga

SEQ ID NO: 675610 - RNA, 19 nt, Human
cuuuccacaaaaacugcug

SEQ ID NO: 675611 - RNA, 18 nt, Human
gacacaguacuaaucugu

SEQ ID NO: 675612 - RNA, 20 nt, Human
gguaacggugagcuacuccc

SEQ ID NO: 675613 - RNA, 19 nt, Human
gguuugggagaugaagcau

SEQ ID NO: 675614 - RNA, 23 nt, Human
guagcacauuucuucuaaauaaa

SEQ ID NO: 675615 - RNA, 20 nt, Human
gugguggugguguucagaaa

SEQ ID NO: 675616 - RNA, 20 nt, Human
uaaauaaaaacugcaaugca

SEQ ID NO: 675617 - RNA, 22 nt, Human
uaaauuuaaagcaguuauauua

SEQ ID NO: 675618 - RNA, 18 nt, Human
uaagagauacuuuaugau

SEQ ID NO: 675619 - RNA, 22 nt, Human
uacagaaguuagaaacaaacac

SEQ ID NO: 675620 - RNA, 23 nt, Human
ugaaaucuuguuccgaauccaug

SEQ ID NO: 675621 - RNA, 19 nt, Human
ugccacaccauagaacaua

SEQ ID NO: 675622 - RNA, 23 nt, Human
ugccccuaugcuuugaccagucu

SEQ ID NO: 675623 - RNA, 25 nt, Human
uggaacaaaacacaggacacaguac

SEQ ID NO: 675624 - RNA, 21 nt, Human
uggaacauaggguggaggcca

SEQ ID NO: 675625 - RNA, 20 nt, Human
uggaggccagcucccccuuu

SEQ ID NO: 675626 - RNA, 20 nt, Human
uguuugguuugggagaugaa

SEQ ID NO: 675627 - RNA, 24 nt, Human
uuaaagcaguuauauuaacuaguc

SEQ ID NO: 675628 - RNA, 20 nt, Human
uuggugguggugguguucag

SEQ ID NO: 675629 - RNA, 26 nt, Human
uuggugguggugguguucagaaaguu

SEQ ID NO: 675630 - RNA, 18 nt, Human
uuuugcaagcauuacugc

SEQ ID NO: 675631 - RNA, 20 nt, Human
aacuugaaucaaaaccagca

SEQ ID NO: 675632 - RNA, 20 nt, Human
aucaacgagagggacuggag

SEQ ID NO: 675633 - RNA, 23 nt, Human
caaauaucaacgagagggacugg

SEQ ID NO: 675634 - RNA, 21 nt, Human
ccagcagguaauagcacccuu

SEQ ID NO: 675635 - RNA, 22 nt, Human
ccccuucugaccaaacaagccc

SEQ ID NO: 675636 - RNA, 18 nt, Human
cccuuggguaucugaggc

SEQ ID NO: 675637 - RNA, 19 nt, Human
cgccccccuucugaccaaa

SEQ ID NO: 675638 - RNA, 20 nt, Human
gcuaaggggcagcuucucug

SEQ ID NO: 675639 - RNA, 19 nt, Human
uaggaaagaugucauacuu

SEQ ID NO: 675640 - RNA, 27 nt, Human
ucaaaaccagcagguaauagcaccccc

SEQ ID NO: 675641 - RNA, 24 nt, Human
ugaccaaacaagcccucgaaucag

SEQ ID NO: 675642 - RNA, 23 nt, Human
uggcuaaggggcagcuucucuga

SEQ ID NO: 675643 - RNA, 21 nt, Human
uuacuuaauccccugcugucu

SEQ ID NO: 675644 - RNA, 22 nt, Human
aacugcagaaacucugccccca

SEQ ID NO: 675645 - RNA, 18 nt, Human
acccacugaaucauaauc

SEQ ID NO: 675646 - RNA, 20 nt, Human
accccaaagccucuguucuu

SEQ ID NO: 675647 - RNA, 25 nt, Human
agaaacucugcccccaacccacuga

SEQ ID NO: 675648 - RNA, 20 nt, Human
agagggaaauagugugcagu

SEQ ID NO: 675649 - RNA, 20 nt, Human
aggcagccguauugucagcc

SEQ ID NO: 675650 - RNA, 18 nt, Human
auggaacugcagaaacuc

SEQ ID NO: 675651 - RNA, 20 nt, Human
auggaacugcagaaacucug

SEQ ID NO: 675652 - RNA, 22 nt, Human
auggaacugcagaaacucugcc

SEQ ID NO: 675653 - RNA, 22 nt, Human
caaaagggagccaugccagaug

SEQ ID NO: 675654 - RNA, 24 nt, Human
cacugggcuaggaccccaaagccu

SEQ ID NO: 675655 - RNA, 18 nt, Human
cagcaccugcaccugggg

SEQ ID NO: 675656 - RNA, 18 nt, Human
cagccccugccccugggg

SEQ ID NO: 675657 - RNA, 18 nt, Human
ccccagaugaucugcaag

SEQ ID NO: 675658 - RNA, 19 nt, Human
cccccaacccacugaauca

SEQ ID NO: 675659 - RNA, 22 nt, Human
gcagggcacaggaaggacaaaa

SEQ ID NO: 675660 - RNA, 22 nt, Human
ggcacaggaaggacaaaaggga

SEQ ID NO: 675661 - RNA, 21 nt, Human
uaaggcagccguauugucagc

SEQ ID NO: 675662 - RNA, 18 nt, Human
ucccacuuagccgacccc

SEQ ID NO: 675663 - RNA, 18 nt, Human
uccuaaccuggcaugaag

SEQ ID NO: 675664 - RNA, 22 nt, Human
ugggcuaggaccccaaagccuc

SEQ ID NO: 675665 - RNA, 19 nt, Human
acccgggggcugggaggcc

SEQ ID NO: 675666 - RNA, 22 nt, Human
agcgaggcuucagcacccagga

SEQ ID NO: 675667 - RNA, 19 nt, Human
agcugccgggggggcacca

SEQ ID NO: 675668 - RNA, 24 nt, Human
agguggugggggacagacaggagc

SEQ ID NO: 675669 - RNA, 22 nt, Human
caacaaacaauugggcucccaa

SEQ ID NO: 675670 - RNA, 19 nt, Human
cagaagcugagggccaggu

SEQ ID NO: 675671 - RNA, 22 nt, Human
ccagguggugggggacagacag

SEQ ID NO: 675672 - RNA, 18 nt, Human
ccgggagcugccgggggg

SEQ ID NO: 675673 - RNA, 19 nt, Human
cggcgggcugggcuggggc

SEQ ID NO: 675674 - RNA, 18 nt, Human
cucccugcaugacaggcc

SEQ ID NO: 675675 - RNA, 19 nt, Human
ggcuggggcugcccgggca

SEQ ID NO: 675676 - RNA, 20 nt, Human
gggcagugccgggagcugcc

SEQ ID NO: 675677 - RNA, 18 nt, Human
gggcugggcuggggcugc

SEQ ID NO: 675678 - RNA, 20 nt, Human
ggggcugcccgggcaguagg

SEQ ID NO: 675679 - RNA, 24 nt, Human
uagcaccauccuugcucccggcgg

SEQ ID NO: 675680 - RNA, 21 nt, Human
uccuugcucccggcgggcugg

SEQ ID NO: 675681 - RNA, 19 nt, Human
ucucagaagcugagggcca

SEQ ID NO: 675682 - RNA, 18 nt, Human
ugaaggggccggaguugg

SEQ ID NO: 675683 - RNA, 18 nt, Human
ugacaggccaggucccca

SEQ ID NO: 675684 - RNA, 24 nt, Human
ugccgggggggcaccacaacuguc

SEQ ID NO: 675685 - RNA, 25 nt, Human
ugccgggggggcaccacaacugucc

SEQ ID NO: 675686 - RNA, 21 nt, Human
uggggcugcccgggcaguagg

SEQ ID NO: 675687 - RNA, 20 nt, Human
uugcucccggcgggcugggc

SEQ ID NO: 675688 - RNA, 21 nt, Human
aacauuaaaaaagcauggcag

SEQ ID NO: 675689 - RNA, 23 nt, Human
aagaacaucagggaaagaccaac

SEQ ID NO: 675690 - RNA, 20 nt, Human
aagaauggcacgcaggguuu

SEQ ID NO: 675691 - RNA, 23 nt, Human
aagcuagaaaagguuuuccacag

SEQ ID NO: 675692 - RNA, 24 nt, Human
aaugcuaaaggaugccagaaagaa

SEQ ID NO: 675693 - RNA, 21 nt, Human
acaaaguaauaaacagugcuc

SEQ ID NO: 675694 - RNA, 22 nt, Human
acacaccugccagagcaggccc

SEQ ID NO: 675695 - RNA, 19 nt, Human
acucaugugauuaaaacag

SEQ ID NO: 675696 - RNA, 20 nt, Human
acucccauccccaauacaca

SEQ ID NO: 675697 - RNA, 21 nt, Human
acuuuccucuucugugagauu

SEQ ID NO: 675698 - RNA, 24 nt, Human
aggcuguuuccaguucuuggccuu

SEQ ID NO: 675699 - RNA, 23 nt, Human
aguucuuggccuuuaaacaacuc

SEQ ID NO: 675700 - RNA, 22 nt, Human
augagcccagagcacauacaaa

SEQ ID NO: 675701 - RNA, 19 nt, Human
caacugcugcagcucauga

SEQ ID NO: 675702 - RNA, 22 nt, Human
caccagaacaaaugaaacacac

SEQ ID NO: 675703 - RNA, 21 nt, Human
caucaagaaaggguacaacug

SEQ ID NO: 675704 - RNA, 18 nt, Human
caucagggaaagaccaac

SEQ ID NO: 675705 - RNA, 19 nt, Human
cauuuuaucugaauucugg

SEQ ID NO: 675706 - RNA, 21 nt, Human
ccagaaagaacaucagggaaa

SEQ ID NO: 675707 - RNA, 19 nt, Human
ccagaacaaaugaaacaca

SEQ ID NO: 675708 - RNA, 20 nt, Human
ccagaacaaaugaaacacac

SEQ ID NO: 675709 - RNA, 19 nt, Human
ccugcacacaccugccaga

SEQ ID NO: 675710 - RNA, 24 nt, Human
cgauaugcauacuaaugaccuaca

SEQ ID NO: 675711 - RNA, 18 nt, Human
cucccuguucucggcugc

SEQ ID NO: 675712 - RNA, 18 nt, Human
cugcacacaccugccaga

SEQ ID NO: 675713 - RNA, 19 nt, Human
gagcacauacaaauccuaa

SEQ ID NO: 675714 - RNA, 19 nt, Human
gagcccagagcacauacaa

SEQ ID NO: 675715 - RNA, 21 nt, Human
guaauagcagaacauaagcac

SEQ ID NO: 675716 - RNA, 22 nt, Human
uaaauuagaaacacaaauaaau

SEQ ID NO: 675717 - RNA, 27 nt, Human
uaagcuagaaaagguuuuccacaucca

SEQ ID NO: 675718 - RNA, 19 nt, Human
uacaaaguaauaaacagug

SEQ ID NO: 675719 - RNA, 19 nt, Human
uagaagaauggcacgcagg

SEQ ID NO: 675720 - RNA, 20 nt, Human
ucaucaagaaaggguacaac

SEQ ID NO: 675721 - RNA, 19 nt, Human
ucccuuaacuuuuuacaaa

SEQ ID NO: 675722 - RNA, 20 nt, Human
ucugaauucuggaaugaaua

SEQ ID NO: 675723 - RNA, 21 nt, Human
ugaagagcucacugugguuag

SEQ ID NO: 675724 - RNA, 24 nt, Human
ugaauauacaugcugcaauaacau

SEQ ID NO: 675725 - RNA, 20 nt, Human
ugccugguagaagaauggca

SEQ ID NO: 675726 - RNA, 20 nt, Human
uggaaugaauauacaugcug

SEQ ID NO: 675727 - RNA, 18 nt, Human
uggcaccagaacaaauga

SEQ ID NO: 675728 - RNA, 21 nt, Human
uggcaccagaacaaaugaaac

SEQ ID NO: 675729 - RNA, 18 nt, Human
uggccuuuaaacaacucu

SEQ ID NO: 675730 - RNA, 19 nt, Human
ugggagccuuucauuccuc

SEQ ID NO: 675731 - RNA, 22 nt, Human
uuaaaaauaaaaaugcuaaagg

SEQ ID NO: 675732 - RNA, 22 nt, Human
uuggccuuuaaacaacucuaaa

SEQ ID NO: 675733 - RNA, 23 nt, Human
aaaaaacccuaggacuugacuca

SEQ ID NO: 675734 - RNA, 22 nt, Human
aaaacaaaaccaaaaaacccua

SEQ ID NO: 675735 - RNA, 18 nt, Human
aaacaaaaccaaaaaacc

SEQ ID NO: 675736 - RNA, 20 nt, Human
aaacaaaaccaaaaaacccu

SEQ ID NO: 675737 - RNA, 24 nt, Human
aaagugcugggauuacaggcguga

SEQ ID NO: 675738 - RNA, 24 nt, Human
aacaaaaccaaaaaacccuaggac

SEQ ID NO: 675739 - RNA, 19 nt, Human
aagugcugggauuacaggc

SEQ ID NO: 675740 - RNA, 19 nt, Human
aagugcugggauuacaggc

SEQ ID NO: 675741 - RNA, 26 nt, Human
aagugcugggauuacaggcgugagcc

SEQ ID NO: 675742 - RNA, 21 nt, Human
acaaaacaaaaccaaaaaacc

SEQ ID NO: 675743 - RNA, 23 nt, Human
acaaaacaaaaccaaaaaacccu

SEQ ID NO: 675744 - RNA, 18 nt, Human
accauguuggccaggcug

SEQ ID NO: 675745 - RNA, 25 nt, Human
acccgccucagccucccaaagugcu

SEQ ID NO: 675746 - RNA, 22 nt, Human
agacuuaaaaaacgagggcugg

SEQ ID NO: 675747 - RNA, 24 nt, Human
agcgauucuccugccucagccucc

SEQ ID NO: 675748 - RNA, 18 nt, Human
aggacccugggcugcucu

SEQ ID NO: 675749 - RNA, 24 nt, Human
aggugauccacccgccucagccuc

SEQ ID NO: 675750 - RNA, 23 nt, Human
aguagcuggaacuacaggcgugc

SEQ ID NO: 675751 - RNA, 21 nt, Human
agugcaauggugcgaucucag

SEQ ID NO: 675752 - RNA, 18 nt, Human
agugcugggauuacaggc

SEQ ID NO: 675753 - RNA, 18 nt, Human
augggguuucaccauguu

SEQ ID NO: 675754 - RNA, 22 nt, Human
augggguuucaccauguuggcc

SEQ ID NO: 675755 - RNA, 24 nt, Human
augggguuucaccauguuggccag

SEQ ID NO: 675756 - RNA, 21 nt, Human
caaaacaaaaccaaaaaaccc

SEQ ID NO: 675757 - RNA, 24 nt, Human
caaagugcugggauuacaggcgug

SEQ ID NO: 675758 - RNA, 23 nt, Human
caaccuccaccucccggguucaa

SEQ ID NO: 675759 - RNA, 22 nt, Human
caagcgauucuccugccucagc

SEQ ID NO: 675760 - RNA, 21 nt, Human
caccauguuggccaggcuggu

SEQ ID NO: 675761 - RNA, 24 nt, Human
caccauguuggccaggcuggucuc

SEQ ID NO: 675762 - RNA, 27 nt, Human
caccauguuggccaggcuggucucaaa

SEQ ID NO: 675763 - RNA, 23 nt, Human
caccauucccccagagcuguguu

SEQ ID NO: 675764 - RNA, 23 nt, Human
cacccgccucagccucccaaagu

SEQ ID NO: 675765 - RNA, 21 nt, Human
cacugcaaccuccaccucccg

SEQ ID NO: 675766 - RNA, 23 nt, Human
cacugcaaccuccaccucccggg

SEQ ID NO: 675767 - RNA, 19 nt, Human
cagccuccugaguagcugg

SEQ ID NO: 675768 - RNA, 24 nt, Human
cauguuggccaggcuggucucaaa

SEQ ID NO: 675769 - RNA, 22 nt, Human
ccaaagugcugggauuacaggc

SEQ ID NO: 675770 - RNA, 22 nt, Human
ccaaagugcugggauuacaggc

SEQ ID NO: 675771 - RNA, 24 nt, Human
ccaaagugcugggauuacaggcgu

SEQ ID NO: 675772 - RNA, 26 nt, Human
ccacccgccucagccucccaaagugc

SEQ ID NO: 675773 - RNA, 24 nt, Human
ccaccucccggguucaagcgauuc

SEQ ID NO: 675774 - RNA, 22 nt, Human
ccccccggccgccgccgucagc

SEQ ID NO: 675775 - RNA, 22 nt, Human
cccgaccucaggugauccaccc

SEQ ID NO: 675776 - RNA, 23 nt, Human
cccgaccucaggugauccacccg

SEQ ID NO: 675777 - RNA, 20 nt, Human
cccggguucaagcgauucuc

SEQ ID NO: 675778 - RNA, 23 nt, Human
cccggguucaagcgauucuccug

SEQ ID NO: 675779 - RNA, 18 nt, Human
ccgcccgccgcaggcucc

SEQ ID NO: 675780 - RNA, 24 nt, Human
ccgccucagccucccaaagugcug

SEQ ID NO: 675781 - RNA, 24 nt, Human
ccucccggguucaagcgauucucc

SEQ ID NO: 675782 - RNA, 23 nt, Human
ccugccucagccuccugaguagc

SEQ ID NO: 675783 - RNA, 24 nt, Human
ccugccucagccuccugaguagcu

SEQ ID NO: 675784 - RNA, 24 nt, Human
cgaccucaggugauccacccgccu

SEQ ID NO: 675785 - RNA, 22 nt, Human
cgagguggaugacaccauuccc

SEQ ID NO: 675786 - RNA, 30 nt, Human
cgaugggguuucaccauguuggccaggcuu

SEQ ID NO: 675787 - RNA, 24 nt, Human
cgcucuuguugcccaggcuggagu

SEQ ID NO: 675788 - RNA, 24 nt, Human
cucacugcaaccuccaccucccgg

SEQ ID NO: 675789 - RNA, 23 nt, Human
cucguuggcaacaaaacaaaacc

SEQ ID NO: 675790 - RNA, 24 nt, Human
cucuggcaggacccugggcugcuc

SEQ ID NO: 675791 - RNA, 23 nt, Human
cugcaaccuccaccucccggguu

SEQ ID NO: 675792 - RNA, 24 nt, Human
cugcaaccuccaccucccggguuc

SEQ ID NO: 675793 - RNA, 24 nt, Human
cuuguugcccaggcuggagugcaa

SEQ ID NO: 675794 - RNA, 23 nt, Human
gaccucaggugauccacccgccu

SEQ ID NO: 675795 - RNA, 24 nt, Human
gaccucaggugauccacccgccuc

SEQ ID NO: 675796 - RNA, 18 nt, Human
gauuacaggcgugagcca

SEQ ID NO: 675797 - RNA, 19 nt, Human
gauuacaggcgugagccac

SEQ ID NO: 675798 - RNA, 24 nt, Human
gauuacaggcgugagccacggugc

SEQ ID NO: 675799 - RNA, 23 nt, Human
gccaggggcaguucaccgacuug

SEQ ID NO: 675800 - RNA, 23 nt, Human
gcccagcuaauuuuuuauauuuu

SEQ ID NO: 675801 - RNA, 19 nt, Human
gcccaggcuggagugcaau

SEQ ID NO: 675802 - RNA, 21 nt, Human
gcccgcggugaugccccagcc

SEQ ID NO: 675803 - RNA, 23 nt, Human
gccucagccucccaaagugcugg

SEQ ID NO: 675804 - RNA, 24 nt, Human
gcgauucuccugccucagccuccu

SEQ ID NO: 675805 - RNA, 20 nt, Human
gcgggcgucgacaccgcccc

SEQ ID NO: 675806 - RNA, 24 nt, Human
gcucuuguugcccaggcuggagug

SEQ ID NO: 675807 - RNA, 18 nt, Human
gcugcucugggggacaca

SEQ ID NO: 675808 - RNA, 23 nt, Human
gcuggucucaaacucccgaccuc

SEQ ID NO: 675809 - RNA, 23 nt, Human
ggcaacaaaacaaaaccaaaaaa

SEQ ID NO: 675810 - RNA, 19 nt, Human
gggggacacaggccagggg

SEQ ID NO: 675811 - RNA, 22 nt, Human
gggguuucaccauguuggccag

SEQ ID NO: 675812 - RNA, 18 nt, Human
ggguuucaccauguuggc

SEQ ID NO: 675813 - RNA, 21 nt, Human
ggucgaggcccgcggugaugc

SEQ ID NO: 675814 - RNA, 24 nt, Human
gugauccacccgccucagccuccc

SEQ ID NO: 675815 - RNA, 21 nt, Human
uaaagcgagguggaugacacc

SEQ ID NO: 675816 - RNA, 22 nt, Human
uaauuuuuuauauuuuuaguag

SEQ ID NO: 675817 - RNA, 24 nt, Human
uacaggcgugagccacggugccca

SEQ ID NO: 675818 - RNA, 24 nt, Human
uaguagcgaugggguuucaccaug

SEQ ID NO: 675819 - RNA, 23 nt, Human
ucacugcaaccuccaccucccgg

SEQ ID NO: 675820 - RNA, 24 nt, Human
ucacugcaaccuccaccucccggg

SEQ ID NO: 675821 - RNA, 25 nt, Human
ucacugcaaccuccaccucccgggu

SEQ ID NO: 675822 - RNA, 27 nt, Human
ucacugcaaccuccaccucccggguuc

SEQ ID NO: 675823 - RNA, 23 nt, Human
ucagccuccugaguagcuggaac

SEQ ID NO: 675824 - RNA, 21 nt, Human
uccacccgccucagccuccca

SEQ ID NO: 675825 - RNA, 24 nt, Human
ucccaaagugcugggauuacaggc

SEQ ID NO: 675826 - RNA, 22 nt, Human
ucccccagagcuguguuccucg

SEQ ID NO: 675827 - RNA, 21 nt, Human
ucccggguucaagcgauucuc

SEQ ID NO: 675828 - RNA, 24 nt, Human
ucccggguucaagcgauucuccug

SEQ ID NO: 675829 - RNA, 24 nt, Human
uccugaguagcuggaacuacaggc

SEQ ID NO: 675830 - RNA, 21 nt, Human
ucgcucuuguugcccaggcug

SEQ ID NO: 675831 - RNA, 22 nt, Human
ucgcucuuguugcccaggcugg

SEQ ID NO: 675832 - RNA, 23 nt, Human
ucgcucuuguugcccaggcugga

SEQ ID NO: 675833 - RNA, 24 nt, Human
ucuccugccucagccuccugagua

SEQ ID NO: 675834 - RNA, 18 nt, Human
ucuggcaggacccugggc

SEQ ID NO: 675835 - RNA, 22 nt, Human
ucuuguugcccaggcuggagug

SEQ ID NO: 675836 - RNA, 21 nt, Human
ugaaaugaagguauaaaguca

SEQ ID NO: 675837 - RNA, 23 nt, Human
ugagacagaguuucgcucuuguu

SEQ ID NO: 675838 - RNA, 23 nt, Human
ugcaauggugcgaucucagcucc

SEQ ID NO: 675839 - RNA, 18 nt, Human
ugcccaggcuggagugca

SEQ ID NO: 675840 - RNA, 21 nt, Human
ugcccaggcuggagugcaaug

SEQ ID NO: 675841 - RNA, 24 nt, Human
ugcccaggcuggagugcaauggug

SEQ ID NO: 675842 - RNA, 21 nt, Human
ugccccagccggcgccgcggg

SEQ ID NO: 675843 - RNA, 24 nt, Human
ugccucagccuccugaguagcugg

SEQ ID NO: 675844 - RNA, 24 nt, Human
ugcugggauuacaggcgugagcca

SEQ ID NO: 675845 - RNA, 21 nt, Human
uggaacuacaggcgugcgcca

SEQ ID NO: 675846 - RNA, 24 nt, Human
uggaacuacaggcgugcgccacca

SEQ ID NO: 675847 - RNA, 23 nt, Human
uggagugcaauggugcgaucuca

SEQ ID NO: 675848 - RNA, 24 nt, Human
uggagugcaauggugcgaucucag

SEQ ID NO: 675849 - RNA, 18 nt, Human
uggcaacaaaacaaaacc

SEQ ID NO: 675850 - RNA, 21 nt, Human
uggcaacaaaacaaaaccaaa

SEQ ID NO: 675851 - RNA, 22 nt, Human
uggcaggacccugggcugcucu

SEQ ID NO: 675852 - RNA, 21 nt, Human
uggccaggcuggucucaaacu

SEQ ID NO: 675853 - RNA, 18 nt, Human
ugggauuacaggcgugag

SEQ ID NO: 675854 - RNA, 19 nt, Human
ugggauuacaggcgugagc

SEQ ID NO: 675855 - RNA, 21 nt, Human
ugggauuacaggcgugagcca

SEQ ID NO: 675856 - RNA, 22 nt, Human
ugggauuacaggcgugagccac

SEQ ID NO: 675857 - RNA, 22 nt, Human
ugggauuacaggcgugagccac

SEQ ID NO: 675858 - RNA, 23 nt, Human
ugggauuacaggcgugagccacg

SEQ ID NO: 675859 - RNA, 24 nt, Human
ugggauuacaggcgugagccacgg

SEQ ID NO: 675860 - RNA, 26 nt, Human
ugggauuacaggcgugagccacggug

SEQ ID NO: 675861 - RNA, 27 nt, Human
ugggauuacaggcgugagccacggugc

SEQ ID NO: 675862 - RNA, 18 nt, Human
ugggggacacaggccagg

SEQ ID NO: 675863 - RNA, 24 nt, Human
ugggguuucaccauguuggccagg

SEQ ID NO: 675864 - RNA, 19 nt, Human
uggucucaaacucccgacc

SEQ ID NO: 675865 - RNA, 24 nt, Human
uggugcgaucucagcucacugcaa

SEQ ID NO: 675866 - RNA, 20 nt, Human
uguugcccaggcuggagugc

SEQ ID NO: 675867 - RNA, 31 nt, Human
uuagaauagaccaaaaaaaaaaaaaaaaaaa

SEQ ID NO: 675868 - RNA, 18 nt, Human
uuaguagcgaugggguuu

SEQ ID NO: 675869 - RNA, 24 nt, Human
uuaguagcgaugggguuucaccau

SEQ ID NO: 675870 - RNA, 21 nt, Human
uucaagcgauucuccugccuc

SEQ ID NO: 675871 - RNA, 23 nt, Human
uucaagcgauucuccugccucag

SEQ ID NO: 675872 - RNA, 24 nt, Human
uucaagcgauucuccugccucagc

SEQ ID NO: 675873 - RNA, 24 nt, Human
uucgcucuuguugcccaggcugga

SEQ ID NO: 675874 - RNA, 18 nt, Human
uugccuguuucuccaugu

SEQ ID NO: 675875 - RNA, 24 nt, Human
uuggcaacaaaacaaaaccaaaaa

SEQ ID NO: 675876 - RNA, 24 nt, Human
uuucaccauguuggccaggcuggu

SEQ ID NO: 675877 - RNA, 24 nt, Human
uuucgcucuuguugcccaggcugg

SEQ ID NO: 675878 - RNA, 24 nt, Human
uuuuuaguagcgaugggguuucac

SEQ ID NO: 675879 - RNA, 21 nt, Human
aaaaauuauggaucacauggc

SEQ ID NO: 675880 - RNA, 19 nt, Human
aaagaaguaaguugagauu

SEQ ID NO: 675881 - RNA, 23 nt, Human
aagcagauuuccuuuccaaaagc

SEQ ID NO: 675882 - RNA, 23 nt, Human
aagcugucuacugggaucuucag

SEQ ID NO: 675883 - RNA, 22 nt, Human
aaucaugguuguaucaucuuua

SEQ ID NO: 675884 - RNA, 18 nt, Human
accuaagcaaaaacagcu

SEQ ID NO: 675885 - RNA, 21 nt, Human
auuuccuuuccaaaagcagac

SEQ ID NO: 675886 - RNA, 21 nt, Human
cagaauaauuaaguucacaaa

SEQ ID NO: 675887 - RNA, 18 nt, Human
cagaccuuuuaaucacag

SEQ ID NO: 675888 - RNA, 18 nt, Human
cauuaggcaaaagggaga

SEQ ID NO: 675889 - RNA, 23 nt, Human
ccaaaagcagacgccucuccugu

SEQ ID NO: 675890 - RNA, 22 nt, Human
ccaaacacacaaaauaugggcc

SEQ ID NO: 675891 - RNA, 23 nt, Human
ccuaagcaaaaacagcuuaugga

SEQ ID NO: 675892 - RNA, 24 nt, Human
cugucuacugggaucuucagcugc

SEQ ID NO: 675893 - RNA, 20 nt, Human
gaaaaaugucuaaggauuua

SEQ ID NO: 675894 - RNA, 23 nt, Human
gugguuuucucuuccauuuuuuu

SEQ ID NO: 675895 - RNA, 24 nt, Human
uaagcaaaaacagcuuauggaauc

SEQ ID NO: 675896 - RNA, 21 nt, Human
uagugguuuucucuuccauuu

SEQ ID NO: 675897 - RNA, 18 nt, Human
ucauuaggcaaaagggag

SEQ ID NO: 675898 - RNA, 21 nt, Human
uccaaaagcagacgccucucc

SEQ ID NO: 675899 - RNA, 21 nt, Human
uccaaauacaaauaaaggcca

SEQ ID NO: 675900 - RNA, 23 nt, Human
ucuacugggaucuucagcugcca

SEQ ID NO: 675901 - RNA, 21 nt, Human
ucuccuguuacaguugcaaau

SEQ ID NO: 675902 - RNA, 20 nt, Human
ucugauuuugcaauacaaaa

SEQ ID NO: 675903 - RNA, 23 nt, Human
uucagaccuuuuaaucacagauc

SEQ ID NO: 675904 - RNA, 22 nt, Human
uuccaggucuaucugauuuugc

SEQ ID NO: 675905 - RNA, 23 nt, Human
uucucuuccauuuuuuuuaaaaa

SEQ ID NO: 675906 - RNA, 20 nt, Human
uuuaaaaaccucauugaucc

SEQ ID NO: 675907 - RNA, 20 nt, Human
uuuuuuuuuuuuuuuugcca

SEQ ID NO: 675908 - RNA, 18 nt, Human
uuuuuuuuuuuuuuuuug

SEQ ID NO: 675909 - RNA, 23 nt, Human
uuuuuuuuuuuuuuuuugccauu

SEQ ID NO: 675910 - RNA, 19 nt, Human
aagcuagucucugcagaug

SEQ ID NO: 675911 - RNA, 18 nt, Human
acaccaccuccagaaauu

SEQ ID NO: 675912 - RNA, 20 nt, Human
agccugaaaagcuagucucu

SEQ ID NO: 675913 - RNA, 19 nt, Human
aggauaccuuagccugaaa

SEQ ID NO: 675914 - RNA, 24 nt, Human
caaauuauacgcccagaccugccc

SEQ ID NO: 675915 - RNA, 21 nt, Human
cacccuucugggagaugaaaa

SEQ ID NO: 675916 - RNA, 26 nt, Human
cccaacacugucuuauguucaggauu

SEQ ID NO: 675917 - RNA, 20 nt, Human
cgggaagaaacgaugagcaa

SEQ ID NO: 675918 - RNA, 21 nt, Human
cuccuuuacugcugauuacaa

SEQ ID NO: 675919 - RNA, 19 nt, Human
cuuuucauccaccauccac

SEQ ID NO: 675920 - RNA, 21 nt, Human
gaaacgaugagcaacacccuu

SEQ ID NO: 675921 - RNA, 18 nt, Human
gcugauuacaauuuauua

SEQ ID NO: 675922 - RNA, 19 nt, Human
uacgcccagaccugcccaa

SEQ ID NO: 675923 - RNA, 21 nt, Human
uccaccauccacuccucaaau

SEQ ID NO: 675924 - RNA, 19 nt, Human
ugauacaccaccuccagaa

SEQ ID NO: 675925 - RNA, 18 nt, Human
ugcccaacacugucuuau

SEQ ID NO: 675926 - RNA, 19 nt, Human
uucauccaccauccacucc

SEQ ID NO: 675927 - RNA, 21 nt, Human
uugauacaccaccuccagaaa

SEQ ID NO: 675928 - RNA, 19 nt, Human
aaaaagaauucuauagugg

SEQ ID NO: 675929 - RNA, 21 nt, Human
aaaacucucaaagcaugucac

SEQ ID NO: 675930 - RNA, 22 nt, Human
aaacauucaaauguuaauguua

SEQ ID NO: 675931 - RNA, 25 nt, Human
aaagcaccuggaacacaggaggcac

SEQ ID NO: 675932 - RNA, 21 nt, Human
aaauaggguacuugucacaga

SEQ ID NO: 675933 - RNA, 20 nt, Human
aauacauacauguuuuaaau

SEQ ID NO: 675934 - RNA, 24 nt, Human
aauuuuauuuccaugaucuauuua

SEQ ID NO: 675935 - RNA, 23 nt, Human
acaaagacuguugaaaagcaccc

SEQ ID NO: 675936 - RNA, 21 nt, Human
agacaaacauucaaauguuaa

SEQ ID NO: 675937 - RNA, 24 nt, Human
agacaaacauucaaauguuaaugu

SEQ ID NO: 675938 - RNA, 23 nt, Human
agacaagcuacucaagcacucuu

SEQ ID NO: 675939 - RNA, 18 nt, Human
agauguggcauaauaacc

SEQ ID NO: 675940 - RNA, 21 nt, Human
caaaacucucaaagcauguca

SEQ ID NO: 675941 - RNA, 23 nt, Human
caaacauucaaauguuaauguua

SEQ ID NO: 675942 - RNA, 19 nt, Human
caaagcaccuggaacacag

SEQ ID NO: 675943 - RNA, 25 nt, Human
caaagcaccuggaacacaggaggca

SEQ ID NO: 675944 - RNA, 25 nt, Human
cacagacaaacauucaaauguuaau

SEQ ID NO: 675945 - RNA, 20 nt, Human
caugucaacaugugacaaaa

SEQ ID NO: 675946 - RNA, 18 nt, Human
uacaaguucacaguacau

SEQ ID NO: 675947 - RNA, 21 nt, Human
uagcaguacagaaauucuggu

SEQ ID NO: 675948 - RNA, 19 nt, Human
uauaaaaugagaauacuaa

SEQ ID NO: 675949 - RNA, 24 nt, Human
uaugcauuuucauggagauguggc

SEQ ID NO: 675950 - RNA, 18 nt, Human
ucacacgacaaauagggu

SEQ ID NO: 675951 - RNA, 28 nt, Human
ucauggagauguggcauaauaacccaca

SEQ ID NO: 675952 - RNA, 24 nt, Human
ucuauaguggaaaguucuugaggc

SEQ ID NO: 675953 - RNA, 18 nt, Human
ugacaaaacucucaaagc

SEQ ID NO: 675954 - RNA, 19 nt, Human
ugagagcaagaaugcaucc

SEQ ID NO: 675955 - RNA, 22 nt, Human
ugagagcaagaaugcauccaag

SEQ ID NO: 675956 - RNA, 24 nt, Human
ugagagcaagaaugcauccaagug

SEQ ID NO: 675957 - RNA, 20 nt, Human
uggaaaguucuugaggcaau

SEQ ID NO: 675958 - RNA, 21 nt, Human
uggaacacaggaggcacucuu

SEQ ID NO: 675959 - RNA, 24 nt, Human
uggcauaauaacccacaauaucaa

SEQ ID NO: 675960 - RNA, 21 nt, Human
ugucacacgacaaauagggua

SEQ ID NO: 675961 - RNA, 20 nt, Human
ugugacaaaacucucaaagc

SEQ ID NO: 675962 - RNA, 20 nt, Human
aaaaaaggguccuaugugga

SEQ ID NO: 675963 - RNA, 24 nt, Human
aaauuccaaaucaaaacauaacuc

SEQ ID NO: 675964 - RNA, 24 nt, Human
acaaauaauuaaaauuccaaauca

SEQ ID NO: 675965 - RNA, 18 nt, Human
accgccaccgccgccgcc

SEQ ID NO: 675966 - RNA, 22 nt, Human
caaugauaaaaauaaacaaaua

SEQ ID NO: 675967 - RNA, 24 nt, Human
ccgccaccgccgccgccaggccgg

SEQ ID NO: 675968 - RNA, 19 nt, Human
cgccacggcagcuaccgcc

SEQ ID NO: 675969 - RNA, 19 nt, Human
cggcagcuaccgccaccgc

SEQ ID NO: 675970 - RNA, 22 nt, Human
cggccagggcgggcaggcgacg

SEQ ID NO: 675971 - RNA, 20 nt, Human
cgucuccgucgggcgggcgg

SEQ ID NO: 675972 - RNA, 22 nt, Human
cuaccgccaccgccgccgccag

SEQ ID NO: 675973 - RNA, 20 nt, Human
gaagucagauagcugggacu

SEQ ID NO: 675974 - RNA, 22 nt, Human
gagcggccagggcgggcaggcg

SEQ ID NO: 675975 - RNA, 18 nt, Human
gaggccgccacggcagcu

SEQ ID NO: 675976 - RNA, 20 nt, Human
gccacggcagcuaccgccac

SEQ ID NO: 675977 - RNA, 20 nt, Human
gcuaccgccaccgccgccgc

SEQ ID NO: 675978 - RNA, 22 nt, Human
uaacuccuggcccugagauccc

SEQ ID NO: 675979 - RNA, 23 nt, Human
uaauuaaaauuccaaaucaaaac

SEQ ID NO: 675980 - RNA, 20 nt, Human
uaccgccaccgccgccgccc

SEQ ID NO: 675981 - RNA, 18 nt, Human
ucaaaacauaacuccugg

SEQ ID NO: 675982 - RNA, 22 nt, Human
ugaagucagauagcugggacgu

SEQ ID NO: 675983 - RNA, 21 nt, Human
ugaagucagauagcugggacu

SEQ ID NO: 675984 - RNA, 23 nt, Human
ugggacugcgucuccgucgggcg

SEQ ID NO: 675985 - RNA, 24 nt, Human
uuuuaaaaaaggguccuaugugga

SEQ ID NO: 675986 - RNA, 23 nt, Human
uuuuuuuuuuuuaaaaaaggguc

SEQ ID NO: 675987 - RNA, 26 nt, Human
uuuuuuuuuuuuuuuuuaaaaaaggg

SEQ ID NO: 675988 - RNA, 18 nt, Human
aaaaacacccucaguaca

SEQ ID NO: 675989 - RNA, 22 nt, Human
aaaaacgagcggcaacagaagg

SEQ ID NO: 675990 - RNA, 20 nt, Human
aaaacaaacaagacacagcc

SEQ ID NO: 675991 - RNA, 19 nt, Human
aaaaccaaaccaaaggcag

SEQ ID NO: 675992 - RNA, 21 nt, Human
aaaagaaaggaaaugaaccca

SEQ ID NO: 675993 - RNA, 21 nt, Human
aaacaaaaauguaacagagaa

SEQ ID NO: 675994 - RNA, 22 nt, Human
aaacaaaaauguaacagagaaa

SEQ ID NO: 675995 - RNA, 25 nt, Human
aaacaaaaauguaacagagaaaaca

SEQ ID NO: 675996 - RNA, 21 nt, Human
aaacaaacaagacacagccuc

SEQ ID NO: 675997 - RNA, 22 nt, Human
aaagcacagagccacucccucc

SEQ ID NO: 675998 - RNA, 24 nt, Human
aaaugaacccacaacccacuggaa

SEQ ID NO: 675999 - RNA, 21 nt, Human
aaaugcuauaaaucugacucu

SEQ ID NO: 676000 - RNA, 20 nt, Human
aacagagaaaacaaacaaga

SEQ ID NO: 676001 - RNA, 25 nt, Human
aaccaaaccaaaggcagccaugaaa

SEQ ID NO: 676002 - RNA, 22 nt, Human
aacugaguuucaggugcagaaa

SEQ ID NO: 676003 - RNA, 22 nt, Human
aagcaaaacucaaacauggccc

SEQ ID NO: 676004 - RNA, 18 nt, Human
aagcaaaacucaaacauu

SEQ ID NO: 676005 - RNA, 24 nt, Human
aagcaacagauggaaaaagggacc

SEQ ID NO: 676006 - RNA, 25 nt, Human
aagccagccccaaucccugaacuga

SEQ ID NO: 676007 - RNA, 20 nt, Human
aagcugaagggcccacaugg

SEQ ID NO: 676008 - RNA, 21 nt, Human
acaaaaacgagcggcaacaga

SEQ ID NO: 676009 - RNA, 18 nt, Human
acaaagcaaaacucaaac

SEQ ID NO: 676010 - RNA, 26 nt, Human
acaaagcaaaacucaaacauggcccu

SEQ ID NO: 676011 - RNA, 23 nt, Human
acaaccuuccccacccacugcag

SEQ ID NO: 676012 - RNA, 21 nt, Human
acagguucugagcuggugggu

SEQ ID NO: 676013 - RNA, 22 nt, Human
acauacaaagcaaaacucaaac

SEQ ID NO: 676014 - RNA, 25 nt, Human
acauagcacucacaaaggcaucucu

SEQ ID NO: 676015 - RNA, 18 nt, Human
acaucacgccgaaaccag

SEQ ID NO: 676016 - RNA, 26 nt, Human
acauggcccuucccuagggcgccucu

SEQ ID NO: 676017 - RNA, 24 nt, Human
acccaaagagcuaacucgggaagc

SEQ ID NO: 676018 - RNA, 21 nt, Human
accugagcaccggcugggggc

SEQ ID NO: 676019 - RNA, 25 nt, Human
acuccaggcucugguuccgagggcg

SEQ ID NO: 676020 - RNA, 24 nt, Human
acuugcaaaacaacauacaaagca

SEQ ID NO: 676021 - RNA, 22 nt, Human
agaaaacugugggaagaaacca

SEQ ID NO: 676022 - RNA, 21 nt, Human
agaaagcacuccaagaagucc

SEQ ID NO: 676023 - RNA, 23 nt, Human
agaacucaacuagaguggaaaug

SEQ ID NO: 676024 - RNA, 24 nt, Human
agacaugggggccucgugaccugc

SEQ ID NO: 676025 - RNA, 23 nt, Human
agagcaggaggacaggaggggcc

SEQ ID NO: 676026 - RNA, 21 nt, Human
agauacuugcaaaacaacaua

SEQ ID NO: 676027 - RNA, 19 nt, Human
agcagcccacccggggcag

SEQ ID NO: 676028 - RNA, 24 nt, Human
agccacagacagcccuuccagaca

SEQ ID NO: 676029 - RNA, 18 nt, Human
agcuaacucgggaagccu

SEQ ID NO: 676030 - RNA, 21 nt, Human
agcuggugggugggggccgca

SEQ ID NO: 676031 - RNA, 23 nt, Human
aggagccgggggcggugcugaca

SEQ ID NO: 676032 - RNA, 21 nt, Human
aggagcguccaggggaaucug

SEQ ID NO: 676033 - RNA, 18 nt, Human
aggaggacaggaggggcc

SEQ ID NO: 676034 - RNA, 19 nt, Human
aggaggacaggaggggccu

SEQ ID NO: 676035 - RNA, 23 nt, Human
aggcacucaccauuauuuugguu

SEQ ID NO: 676036 - RNA, 31 nt, Human
aggcacucaccauuauuuugguugaaaaugg

SEQ ID NO: 676037 - RNA, 23 nt, Human
aggcagccaugaaaacccguguu

SEQ ID NO: 676038 - RNA, 19 nt, Human
aggcaggcacccaucagga

SEQ ID NO: 676039 - RNA, 21 nt, Human
aggcucccccuagcccccgcc

SEQ ID NO: 676040 - RNA, 22 nt, Human
aggcucccccuagcccccgccc

SEQ ID NO: 676041 - RNA, 21 nt, Human
aggcucccggcuugccaguuc

SEQ ID NO: 676042 - RNA, 19 nt, Human
agggccuugggaagcacug

SEQ ID NO: 676043 - RNA, 18 nt, Human
aggggccacccaaagagc

SEQ ID NO: 676044 - RNA, 23 nt, Human
aggucucaggacagccacagaca

SEQ ID NO: 676045 - RNA, 22 nt, Human
aguccaaggccaggucucagga

SEQ ID NO: 676046 - RNA, 18 nt, Human
auagcacucacaaaggca

SEQ ID NO: 676047 - RNA, 22 nt, Human
auccacacaacauagcacucac

SEQ ID NO: 676048 - RNA, 21 nt, Human
auccagagguuucacacuugg

SEQ ID NO: 676049 - RNA, 22 nt, Human
auccagagguuucacacuuggg

SEQ ID NO: 676050 - RNA, 26 nt, Human
auucugaagcugguuguggcuuauuu

SEQ ID NO: 676051 - RNA, 23 nt, Human
caaacaaaaauguaacagagaaa

SEQ ID NO: 676052 - RNA, 21 nt, Human
caaagggaagcagcuggaagg

SEQ ID NO: 676053 - RNA, 19 nt, Human
caacagauggaaaaauaua

SEQ ID NO: 676054 - RNA, 22 nt, Human
caacauagcacucacaaaggca

SEQ ID NO: 676055 - RNA, 20 nt, Human
caccaagggccagcccaggg

SEQ ID NO: 676056 - RNA, 22 nt, Human
cacccaucaggaucugcacccc

SEQ ID NO: 676057 - RNA, 26 nt, Human
cacccggucaagugcacucacagggg

SEQ ID NO: 676058 - RNA, 22 nt, Human
cacucccuccacguggggcuca

SEQ ID NO: 676059 - RNA, 18 nt, Human
cacugcagugugguuccc

SEQ ID NO: 676060 - RNA, 20 nt, Human
cacuggacggacagccagcc

SEQ ID NO: 676061 - RNA, 19 nt, Human
cagccaugaaaacccgugu

SEQ ID NO: 676062 - RNA, 24 nt, Human
cagcccaggggcugcaugggggcc

SEQ ID NO: 676063 - RNA, 24 nt, Human
cagccccaaucccugaacugaguu

SEQ ID NO: 676064 - RNA, 23 nt, Human
caggacccucgcauugcggggcc

SEQ ID NO: 676065 - RNA, 24 nt, Human
caggacccuggccuggaggggccu

SEQ ID NO: 676066 - RNA, 20 nt, Human
caggaccuggaggagccggg

SEQ ID NO: 676067 - RNA, 23 nt, Human
caggacugaagcccuagggacac

SEQ ID NO: 676068 - RNA, 25 nt, Human
caggcacccaucaggaucugcaccc

SEQ ID NO: 676069 - RNA, 18 nt, Human
caggcucccccuagcccc

SEQ ID NO: 676070 - RNA, 22 nt, Human
cagggaacccugcccccgagga

SEQ ID NO: 676071 - RNA, 19 nt, Human
caggggccucgcccuccug

SEQ ID NO: 676072 - RNA, 21 nt, Human
caggugcagaaagcacuccaa

SEQ ID NO: 676073 - RNA, 20 nt, Human
cauugcggggccucagacgg

SEQ ID NO: 676074 - RNA, 19 nt, Human
ccaaaccaaaggcagccau

SEQ ID NO: 676075 - RNA, 20 nt, Human
ccaagaaaaaagggggagga

SEQ ID NO: 676076 - RNA, 19 nt, Human
ccaagcugaagggcccaca

SEQ ID NO: 676077 - RNA, 21 nt, Human
ccagacugcuaccuccugaca

SEQ ID NO: 676078 - RNA, 18 nt, Human
ccagcccugcggccucug

SEQ ID NO: 676079 - RNA, 19 nt, Human
ccagcccugcggccucuga

SEQ ID NO: 676080 - RNA, 24 nt, Human
ccagcccuguccgucccaggggcc

SEQ ID NO: 676081 - RNA, 19 nt, Human
ccagggcccuuccccacgc

SEQ ID NO: 676082 - RNA, 18 nt, Human
ccaggggccucgcccucc

SEQ ID NO: 676083 - RNA, 19 nt, Human
ccagguugcucucgcuguu

SEQ ID NO: 676084 - RNA, 19 nt, Human
cccacgcuggggcuuggag

SEQ ID NO: 676085 - RNA, 22 nt, Human
cccaggacugaagcccuaggga

SEQ ID NO: 676086 - RNA, 24 nt, Human
ccccacgcuggggcuuggagcccc

SEQ ID NO: 676087 - RNA, 20 nt, Human
ccccaggacccuggccugga

SEQ ID NO: 676088 - RNA, 20 nt, Human
ccccaggacugaagcccuag

SEQ ID NO: 676089 - RNA, 30 nt, Human
ccccaggacugaagcccuagggacacaccu

SEQ ID NO: 676090 - RNA, 24 nt, Human
ccccagggaccuggcugggugcag

SEQ ID NO: 676091 - RNA, 21 nt, Human
cccccgaggagccagcaggac

SEQ ID NO: 676092 - RNA, 18 nt, Human
ccccgaggagccagcagg

SEQ ID NO: 676093 - RNA, 20 nt, Human
ccccugggaggggccggcuc

SEQ ID NO: 676094 - RNA, 20 nt, Human
cccggcuugccaguucuucc

SEQ ID NO: 676095 - RNA, 18 nt, Human
cccuggccuggaggggcc

SEQ ID NO: 676096 - RNA, 19 nt, Human
ccgggacaugcccuguugg

SEQ ID NO: 676097 - RNA, 20 nt, Human
ccgggugcauguucccaacu

SEQ ID NO: 676098 - RNA, 22 nt, Human
ccuaugccucaguagcuaaggg

SEQ ID NO: 676099 - RNA, 25 nt, Human
ccucugagcaggcacagagaaguuc

SEQ ID NO: 676100 - RNA, 24 nt, Human
ccugacaaaaacgagcggcaacag

SEQ ID NO: 676101 - RNA, 20 nt, Human
ccugccccaggacccuggcc

SEQ ID NO: 676102 - RNA, 23 nt, Human
ccugcggccucugcccgcucccu

SEQ ID NO: 676103 - RNA, 22 nt, Human
ccuggaggggccucagccuggu

SEQ ID NO: 676104 - RNA, 22 nt, Human
ccuggccuggaggggccucagc

SEQ ID NO: 676105 - RNA, 19 nt, Human
ccuucggcagcugcccuga

SEQ ID NO: 676106 - RNA, 21 nt, Human
ccuugagucccagacugcuac

SEQ ID NO: 676107 - RNA, 18 nt, Human
cggaaggggacgcccagg

SEQ ID NO: 676108 - RNA, 21 nt, Human
cgggggaggcaggcacccauc

SEQ ID NO: 676109 - RNA, 24 nt, Human
cuaagcaauucacuuaaaaacacc

SEQ ID NO: 676110 - RNA, 19 nt, Human
cucagagcaggaggacagg

SEQ ID NO: 676111 - RNA, 24 nt, Human
cuccacauccacacaacauagcac

SEQ ID NO: 676112 - RNA, 21 nt, Human
cucccccuagcccccgcccac

SEQ ID NO: 676113 - RNA, 19 nt, Human
cucccuaugccucaguagc

SEQ ID NO: 676114 - RNA, 21 nt, Human
cuccgggugcauguucccaac

SEQ ID NO: 676115 - RNA, 23 nt, Human
cucugggcuccaccuucggcagc

SEQ ID NO: 676116 - RNA, 24 nt, Human
cugaacucaaagccagccccaauc

SEQ ID NO: 676117 - RNA, 20 nt, Human
cugacaaaaacgagcggcaa

SEQ ID NO: 676118 - RNA, 24 nt, Human
cugacaaaaacgagcggcaacaga

SEQ ID NO: 676119 - RNA, 27 nt, Human
cugccccaggacugaagcccuagggac

SEQ ID NO: 676120 - RNA, 18 nt, Human
cugcccgcucccugcugc

SEQ ID NO: 676121 - RNA, 23 nt, Human
cugcugcacccaggcucccccua

SEQ ID NO: 676122 - RNA, 21 nt, Human
cuggcugggugcagacauggg

SEQ ID NO: 676123 - RNA, 21 nt, Human
cugggugcagacaugggggcc

SEQ ID NO: 676124 - RNA, 24 nt, Human
cuggugggugggggccgcagggga

SEQ ID NO: 676125 - RNA, 18 nt, Human
cuguccccuucucucuuc

SEQ ID NO: 676126 - RNA, 19 nt, Human
cuuccucugucucugcugc

SEQ ID NO: 676127 - RNA, 18 nt, Human
cuucucagaaaaccaaac

SEQ ID NO: 676128 - RNA, 18 nt, Human
gaaaggaaaugaacccac

SEQ ID NO: 676129 - RNA, 22 nt, Human
gaagaaaccaaauccauagggg

SEQ ID NO: 676130 - RNA, 20 nt, Human
gaagguugcgggucccaggg

SEQ ID NO: 676131 - RNA, 19 nt, Human
gaauuccaagcaacuuccc

SEQ ID NO: 676132 - RNA, 21 nt, Human
gaccacgugacccaccugccc

SEQ ID NO: 676133 - RNA, 19 nt, Human
gacgcacucgugacuuuga

SEQ ID NO: 676134 - RNA, 20 nt, Human
gaggagaacggggcgccagc

SEQ ID NO: 676135 - RNA, 20 nt, Human
gaggcaggcacccaucagga

SEQ ID NO: 676136 - RNA, 23 nt, Human
gaggggccucagccuggucuucc

SEQ ID NO: 676137 - RNA, 20 nt, Human
gcaacagaagggcuacucca

SEQ ID NO: 676138 - RNA, 23 nt, Human
gcacccaggcucccccuagcccc

SEQ ID NO: 676139 - RNA, 21 nt, Human
gcacucaccauuauuuugguu

SEQ ID NO: 676140 - RNA, 19 nt, Human
gcagcgucaguccuccagg

SEQ ID NO: 676141 - RNA, 21 nt, Human
gcaggaggccugggcuggcug

SEQ ID NO: 676142 - RNA, 19 nt, Human
gcaggggcagaaaaggucc

SEQ ID NO: 676143 - RNA, 18 nt, Human
gcccaggaccuccgcacc

SEQ ID NO: 676144 - RNA, 19 nt, Human
gcgcagagguggggucugg

SEQ ID NO: 676145 - RNA, 19 nt, Human
gcucagagcaggaggacag

SEQ ID NO: 676146 - RNA, 18 nt, Human
ggacaggaggggccugga

SEQ ID NO: 676147 - RNA, 23 nt, Human
ggacaggcugcccaggaccuccg

SEQ ID NO: 676148 - RNA, 21 nt, Human
ggaggaaacgugggaccugaa

SEQ ID NO: 676149 - RNA, 18 nt, Human
ggaggcaggcacccauca

SEQ ID NO: 676150 - RNA, 19 nt, Human
ggaggccugggcuggcugc

SEQ ID NO: 676151 - RNA, 20 nt, Human
ggcgccagccacacuaaacc

SEQ ID NO: 676152 - RNA, 21 nt, Human
ggcucugggcuccaccuucgg

SEQ ID NO: 676153 - RNA, 21 nt, Human
gggaagccuaggcacucacca

SEQ ID NO: 676154 - RNA, 18 nt, Human
gggccgggggccagggag

SEQ ID NO: 676155 - RNA, 22 nt, Human
gggcucucccuuggacagagac

SEQ ID NO: 676156 - RNA, 22 nt, Human
ggggcaggggcagaaaaggucc

SEQ ID NO: 676157 - RNA, 20 nt, Human
gggggaggaaacgugggacc

SEQ ID NO: 676158 - RNA, 18 nt, Human
ggugcagacaugggggcc

SEQ ID NO: 676159 - RNA, 24 nt, Human
gguggggucugggccgcucacugg

SEQ ID NO: 676160 - RNA, 22 nt, Human
guccccuucucucuucucguga

SEQ ID NO: 676161 - RNA, 18 nt, Human
gugacaacagcaaacaaa

SEQ ID NO: 676162 - RNA, 19 nt, Human
gugcauguucccaacugga

SEQ ID NO: 676163 - RNA, 22 nt, Human
guugaaaaugcuauaaaucuga

SEQ ID NO: 676164 - RNA, 18 nt, Human
uaagcaacagauggaaaa

SEQ ID NO: 676165 - RNA, 24 nt, Human
uaagcaauucacuuaaaaacaccc

SEQ ID NO: 676166 - RNA, 24 nt, Human
uaagcgcacuccacccguuuuucc

SEQ ID NO: 676167 - RNA, 24 nt, Human
uagaaagcacagagccacucccuu

SEQ ID NO: 676168 - RNA, 18 nt, Human
ucaaagccagccccaauc

SEQ ID NO: 676169 - RNA, 25 nt, Human
ucacuuaaaaacacccucaguacau

SEQ ID NO: 676170 - RNA, 18 nt, Human
ucagagcaggaggacagg

SEQ ID NO: 676171 - RNA, 20 nt, Human
ucagagcaggaggacaggag

SEQ ID NO: 676172 - RNA, 19 nt, Human
ucaggaucugcaccccaag

SEQ ID NO: 676173 - RNA, 23 nt, Human
uccacauccacacaacauagcac

SEQ ID NO: 676174 - RNA, 23 nt, Human
uccagggaacccugcccccgagg

SEQ ID NO: 676175 - RNA, 23 nt, Human
ucccaacuggaggagaacggggc

SEQ ID NO: 676176 - RNA, 22 nt, Human
ucccagggucacaggcagccgu

SEQ ID NO: 676177 - RNA, 22 nt, Human
ucccagggucacaggcagcugu

SEQ ID NO: 676178 - RNA, 22 nt, Human
ucccccuagcccccgcccaccu

SEQ ID NO: 676179 - RNA, 21 nt, Human
ucccgggacaugcccuguugg

SEQ ID NO: 676180 - RNA, 21 nt, Human
ucccugagaugccugccccag

SEQ ID NO: 676181 - RNA, 24 nt, Human
ucccuggacgcaggcucccggcuu

SEQ ID NO: 676182 - RNA, 18 nt, Human
uccgggugcauguuccca

SEQ ID NO: 676183 - RNA, 21 nt, Human
uccguggccaagcagcccaag

SEQ ID NO: 676184 - RNA, 22 nt, Human
uccucugucucugcugcaccca

SEQ ID NO: 676185 - RNA, 20 nt, Human
uccugaacacccaggggcuc

SEQ ID NO: 676186 - RNA, 24 nt, Human
ucucaggacagccacagacagccc

SEQ ID NO: 676187 - RNA, 22 nt, Human
ucucccuaugccucaguagcua

SEQ ID NO: 676188 - RNA, 21 nt, Human
ucucugaguacuggcuggccc

SEQ ID NO: 676189 - RNA, 24 nt, Human
ucugaagcugguuguggcuuauuu

SEQ ID NO: 676190 - RNA, 19 nt, Human
ucuguacgugguugagaag

SEQ ID NO: 676191 - RNA, 23 nt, Human
ucuguccccuucucucuucucgu

SEQ ID NO: 676192 - RNA, 19 nt, Human
ucuguugacgagggcuguc

SEQ ID NO: 676193 - RNA, 23 nt, Human
ucuucucagaaaaccaaaccaaa

SEQ ID NO: 676194 - RNA, 19 nt, Human
ucuuugguucugcagaccu

SEQ ID NO: 676195 - RNA, 19 nt, Human
ugaacccacaacccacugg

SEQ ID NO: 676196 - RNA, 18 nt, Human
ugaagaccgguuuuccag

SEQ ID NO: 676197 - RNA, 19 nt, Human
ugaagugggacacaggacc

SEQ ID NO: 676198 - RNA, 21 nt, Human
ugacaaaaacgagcggcaaca

SEQ ID NO: 676199 - RNA, 23 nt, Human
ugacaaaaacgagcggcaacaga

SEQ ID NO: 676200 - RNA, 18 nt, Human
ugacaacagcaaacaaaa

SEQ ID NO: 676201 - RNA, 20 nt, Human
ugacaacagcaaacaaaaau

SEQ ID NO: 676202 - RNA, 18 nt, Human
ugacugugacaacagcaa

SEQ ID NO: 676203 - RNA, 25 nt, Human
ugagcaggcacagagaaguucucac

SEQ ID NO: 676204 - RNA, 18 nt, Human
ugagcugguggguggggg

SEQ ID NO: 676205 - RNA, 19 nt, Human
ugagcuggugggugggggc

SEQ ID NO: 676206 - RNA, 23 nt, Human
ugagcuggugggugggggccgca

SEQ ID NO: 676207 - RNA, 24 nt, Human
ugagcuggugggugggggccgcag

SEQ ID NO: 676208 - RNA, 19 nt, Human
ugagggcagccaggacagg

SEQ ID NO: 676209 - RNA, 20 nt, Human
ugcaaaacaacauacaaagc

SEQ ID NO: 676210 - RNA, 22 nt, Human
ugcaaaacaacauacaaagcaa

SEQ ID NO: 676211 - RNA, 19 nt, Human
ugccccaggacugaagccc

SEQ ID NO: 676212 - RNA, 22 nt, Human
uggaaguucuguugacgagggc

SEQ ID NO: 676213 - RNA, 21 nt, Human
uggaauuccaagcaacuuccc

SEQ ID NO: 676214 - RNA, 26 nt, Human
uggaggagaacggggcgccagccaca

SEQ ID NO: 676215 - RNA, 18 nt, Human
uggccugaacucaaagcc

SEQ ID NO: 676216 - RNA, 25 nt, Human
uggccuggaggggccucagccuggu

SEQ ID NO: 676217 - RNA, 19 nt, Human
uggcugggugcagacaugg

SEQ ID NO: 676218 - RNA, 21 nt, Human
uggcugggugcagacaugggg

SEQ ID NO: 676219 - RNA, 18 nt, Human
uggcuuauuuuuguaugg

SEQ ID NO: 676220 - RNA, 25 nt, Human
ugggaagaaaccaaauccauaggaa

SEQ ID NO: 676221 - RNA, 21 nt, Human
ugggaagcacugggaaugggc

SEQ ID NO: 676222 - RNA, 18 nt, Human
ugggaggggccggcucag

SEQ ID NO: 676223 - RNA, 19 nt, Human
ugggaggggccggcucagg

SEQ ID NO: 676224 - RNA, 23 nt, Human
ugggagguccagggaacccugcc

SEQ ID NO: 676225 - RNA, 19 nt, Human
ugggggcgggggaggcagg

SEQ ID NO: 676226 - RNA, 23 nt, Human
uggugggugggggccgcagggcu

SEQ ID NO: 676227 - RNA, 22 nt, Human
uguucuguccccuucucucuuc

SEQ ID NO: 676228 - RNA, 20 nt, Human
uguuuuggcgauuccucucu

SEQ ID NO: 676229 - RNA, 21 nt, Human
uucccuggacgcaggcucccg

SEQ ID NO: 676230 - RNA, 22 nt, Human
uuccucugucucugcugcaccc

SEQ ID NO: 676231 - RNA, 23 nt, Human
uuccucugucucugcugcaccca

SEQ ID NO: 676232 - RNA, 20 nt, Human
uuggacagagaccaccaagg

SEQ ID NO: 676233 - RNA, 19 nt, Human
aaaaaagacaguaaauacg

SEQ ID NO: 676234 - RNA, 24 nt, Human
aaaacaaacaccuacucuagcacu

SEQ ID NO: 676235 - RNA, 21 nt, Human
aaaagauacaggaaaccaaag

SEQ ID NO: 676236 - RNA, 20 nt, Human
aaaauguccuacugauccuc

SEQ ID NO: 676237 - RNA, 25 nt, Human
aaacauacuugaaaagaacaaugca

SEQ ID NO: 676238 - RNA, 23 nt, Human
aaacugcuaauauccaguauuug

SEQ ID NO: 676239 - RNA, 19 nt, Human
aacaggugaaacaaaaccu

SEQ ID NO: 676240 - RNA, 20 nt, Human
aacaggugaaacaaaaccuc

SEQ ID NO: 676241 - RNA, 23 nt, Human
aacaggugaaacaaaaccucauu

SEQ ID NO: 676242 - RNA, 18 nt, Human
aacccaccaauuucuaag

SEQ ID NO: 676243 - RNA, 21 nt, Human
aagaauggccacggcggccgc

SEQ ID NO: 676244 - RNA, 20 nt, Human
aagaguaccaucaucuaacc

SEQ ID NO: 676245 - RNA, 20 nt, Human
aagcaauaaaauacaauuuc

SEQ ID NO: 676246 - RNA, 23 nt, Human
aauaucuauucaucacuagucca

SEQ ID NO: 676247 - RNA, 24 nt, Human
aauggcagaaaaaaagacaguaaa

SEQ ID NO: 676248 - RNA, 21 nt, Human
aauggcauaauaaaaaacaaa

SEQ ID NO: 676249 - RNA, 18 nt, Human
acaaaacuaaccacaagu

SEQ ID NO: 676250 - RNA, 22 nt, Human
acaagagugcaaaaagucccug

SEQ ID NO: 676251 - RNA, 24 nt, Human
accacagcuuaaggaguuguguca

SEQ ID NO: 676252 - RNA, 21 nt, Human
accaugcuuaacaaaagacug

SEQ ID NO: 676253 - RNA, 20 nt, Human
accucauuuccuucauucaa

SEQ ID NO: 676254 - RNA, 21 nt, Human
acgaaacauacuugaaaagaa

SEQ ID NO: 676255 - RNA, 24 nt, Human
acucagacauuuuggaauuucagc

SEQ ID NO: 676256 - RNA, 20 nt, Human
acugcacuaggcauuuagua

SEQ ID NO: 676257 - RNA, 23 nt, Human
acuugauuaaaaagauacaggaa

SEQ ID NO: 676258 - RNA, 25 nt, Human
agaaaaaaagacaguaaauacgaaa

SEQ ID NO: 676259 - RNA, 25 nt, Human
agaaauacaaaauaagauuugucca

SEQ ID NO: 676260 - RNA, 21 nt, Human
agacaagcucaaaaaagcaac

SEQ ID NO: 676261 - RNA, 24 nt, Human
aggaaaaaaguugcugcuaaaaag

SEQ ID NO: 676262 - RNA, 19 nt, Human
aggagauaaaaaaggaggg

SEQ ID NO: 676263 - RNA, 20 nt, Human
aggauauaagaugugauugc

SEQ ID NO: 676264 - RNA, 19 nt, Human
auacaguuuauggcuacau

SEQ ID NO: 676265 - RNA, 19 nt, Human
auacuuuagaaacacagaa

SEQ ID NO: 676266 - RNA, 21 nt, Human
augaucucaaacaauauucaa

SEQ ID NO: 676267 - RNA, 21 nt, Human
caaaaauuucaaaacuaacac

SEQ ID NO: 676268 - RNA, 19 nt, Human
caaaacaggugaaacaaaa

SEQ ID NO: 676269 - RNA, 21 nt, Human
caaaacaggugaaacaaaacc

SEQ ID NO: 676270 - RNA, 21 nt, Human
caaaacucagacauuuuggaa

SEQ ID NO: 676271 - RNA, 18 nt, Human
caaaaggaggcaacuguu

SEQ ID NO: 676272 - RNA, 20 nt, Human
caacccaccaauuucuaaga

SEQ ID NO: 676273 - RNA, 19 nt, Human
caaguaugccaaauaucag

SEQ ID NO: 676274 - RNA, 22 nt, Human
caaguaugccaaauaucagaau

SEQ ID NO: 676275 - RNA, 27 nt, Human
cacaaaacuaaccacaaguauacccaa

SEQ ID NO: 676276 - RNA, 23 nt, Human
cacagaaaccucaaaaauaaaau

SEQ ID NO: 676277 - RNA, 22 nt, Human
cacaguauuaacacauuuaaaa

SEQ ID NO: 676278 - RNA, 19 nt, Human
cacauccucacaaaaguug

SEQ ID NO: 676279 - RNA, 19 nt, Human
cacggcggccgccucccuu

SEQ ID NO: 676280 - RNA, 21 nt, Human
cacuuccucaucuccaacuuu

SEQ ID NO: 676281 - RNA, 28 nt, Human
cagaaagauaacggaauguaaaaacugg

SEQ ID NO: 676282 - RNA, 21 nt, Human
cagauggaauaaaaauguccu

SEQ ID NO: 676283 - RNA, 24 nt, Human
caggaaaaaaguugcugcuaaaaa

SEQ ID NO: 676284 - RNA, 18 nt, Human
caggugaaacaaaaccuc

SEQ ID NO: 676285 - RNA, 20 nt, Human
cagguuaauacauaaauacu

SEQ ID NO: 676286 - RNA, 22 nt, Human
caguaaaaaauuuagcaacaca

SEQ ID NO: 676287 - RNA, 21 nt, Human
caguagcggaacuaagagugc

SEQ ID NO: 676288 - RNA, 27 nt, Human
caucuaaaucagugggaacugcccugg

SEQ ID NO: 676289 - RNA, 23 nt, Human
cauuccuacagaauuauaugcau

SEQ ID NO: 676290 - RNA, 22 nt, Human
ccaaauaucagaauccuacgcu

SEQ ID NO: 676291 - RNA, 19 nt, Human
ccacggcggccgccucccu

SEQ ID NO: 676292 - RNA, 23 nt, Human
ccgccgucagcggccugucgccu

SEQ ID NO: 676293 - RNA, 21 nt, Human
ccugggugaguuuucucuucu

SEQ ID NO: 676294 - RNA, 23 nt, Human
cgaaccauaaguuauagaaauua

SEQ ID NO: 676295 - RNA, 18 nt, Human
cggaacuaagagugcuaa

SEQ ID NO: 676296 - RNA, 22 nt, Human
cuaaauaauacugugauuacca

SEQ ID NO: 676297 - RNA, 21 nt, Human
cuagcagagacugaaaccaca

SEQ ID NO: 676298 - RNA, 18 nt, Human
cucacagaaaccucaaaa

SEQ ID NO: 676299 - RNA, 24 nt, Human
cuccugaaaauaggagauaaaaaa

SEQ ID NO: 676300 - RNA, 22 nt, Human
cucucuggaaauuggaauaaag

SEQ ID NO: 676301 - RNA, 24 nt, Human
cugaaaccacagcuuaaggaguug

SEQ ID NO: 676302 - RNA, 24 nt, Human
cugcaggaaacaaacuguaaguaa

SEQ ID NO: 676303 - RNA, 22 nt, Human
gaaacauacuugaaaagaacaa

SEQ ID NO: 676304 - RNA, 22 nt, Human
ggccgccucccuuccugccccg

SEQ ID NO: 676305 - RNA, 19 nt, Human
ggguuggggggaacagcca

SEQ ID NO: 676306 - RNA, 25 nt, Human
guaaacuuuuagaacuagacaauuu

SEQ ID NO: 676307 - RNA, 23 nt, Human
gugaaacaaaaccucauuuccuu

SEQ ID NO: 676308 - RNA, 24 nt, Human
gugaaacaaaaccucauuuccuuc

SEQ ID NO: 676309 - RNA, 18 nt, Human
guguugggaacagaagau

SEQ ID NO: 676310 - RNA, 19 nt, Human
uaaaaaauacauucuugca

SEQ ID NO: 676311 - RNA, 22 nt, Human
uaaaaaauacauucuugcagca

SEQ ID NO: 676312 - RNA, 24 nt, Human
uaaaaagauacaggaaaccaaaga

SEQ ID NO: 676313 - RNA, 22 nt, Human
uaaaaauaagcaaaacuaaaac

SEQ ID NO: 676314 - RNA, 22 nt, Human
uaaacuccccuaacuggaaauu

SEQ ID NO: 676315 - RNA, 21 nt, Human
uaaagacaguagcggaacuaa

SEQ ID NO: 676316 - RNA, 25 nt, Human
uaaagcuaacaaaucaaaggcacaa

SEQ ID NO: 676317 - RNA, 23 nt, Human
uaaaguguuauuaaccuagauuc

SEQ ID NO: 676318 - RNA, 24 nt, Human
uaagaauggccacggcggccgccu

SEQ ID NO: 676319 - RNA, 19 nt, Human
uaaggaguugugucaguug

SEQ ID NO: 676320 - RNA, 22 nt, Human
uaauugcgucaauaccagaaca

SEQ ID NO: 676321 - RNA, 18 nt, Human
uacaaaguuucauuacua

SEQ ID NO: 676322 - RNA, 24 nt, Human
uacugcaggaaacaaacuguaagu

SEQ ID NO: 676323 - RNA, 25 nt, Human
uacugcugcaaaacaggugaaacaa

SEQ ID NO: 676324 - RNA, 20 nt, Human
uacugugauuaccaguuggu

SEQ ID NO: 676325 - RNA, 18 nt, Human
uagaaacacagaaguuca

SEQ ID NO: 676326 - RNA, 24 nt, Human
uagaugcuaugcagaacuuaugca

SEQ ID NO: 676327 - RNA, 26 nt, Human
uaucauaaaaucuaacucccgaccuu

SEQ ID NO: 676328 - RNA, 25 nt, Human
uaucuauucaucacuaguccacaua

SEQ ID NO: 676329 - RNA, 21 nt, Human
uaugaagaugauuuccucuuu

SEQ ID NO: 676330 - RNA, 20 nt, Human
uaugcagggccaaaaauuuc

SEQ ID NO: 676331 - RNA, 20 nt, Human
uaugccaaauaucagaaucc

SEQ ID NO: 676332 - RNA, 19 nt, Human
uaugccaagaguaccauca

SEQ ID NO: 676333 - RNA, 20 nt, Human
ucaauaccagaacaaaguga

SEQ ID NO: 676334 - RNA, 18 nt, Human
ucacagaaaccucaaaaa

SEQ ID NO: 676335 - RNA, 22 nt, Human
uccagaaauguuugaaacacau

SEQ ID NO: 676336 - RNA, 23 nt, Human
uccagaaauguuugaaacacauc

SEQ ID NO: 676337 - RNA, 18 nt, Human
ucccaggaaaaaaguugc

SEQ ID NO: 676338 - RNA, 18 nt, Human
uccugggugaguuuucuc

SEQ ID NO: 676339 - RNA, 22 nt, Human
uccuucccgccgucagcggccu

SEQ ID NO: 676340 - RNA, 21 nt, Human
ucuagacuugauuaaaaagau

SEQ ID NO: 676341 - RNA, 23 nt, Human
ucuagcacuuccucaucuccaac

SEQ ID NO: 676342 - RNA, 20 nt, Human
ucugauuccaguauggucag

SEQ ID NO: 676343 - RNA, 19 nt, Human
ugaaacacauccucacaaa

SEQ ID NO: 676344 - RNA, 25 nt, Human
ugaacuagcagagacugaagggagc

SEQ ID NO: 676345 - RNA, 19 nt, Human
ugacauuuaggauauaaga

SEQ ID NO: 676346 - RNA, 21 nt, Human
ugagugacugaugaacauagu

SEQ ID NO: 676347 - RNA, 19 nt, Human
ugcaaaacaggugaaacaa

SEQ ID NO: 676348 - RNA, 23 nt, Human
ugcaaagaacauaugaauggaaa

SEQ ID NO: 676349 - RNA, 21 nt, Human
ugcauguuauucuccaauauc

SEQ ID NO: 676350 - RNA, 25 nt, Human
uggaccaucuaaaucagugggaacu

SEQ ID NO: 676351 - RNA, 20 nt, Human
uggcaauaaacuccccuaac

SEQ ID NO: 676352 - RNA, 18 nt, Human
uggcacaaaacuaaccac

SEQ ID NO: 676353 - RNA, 20 nt, Human
ugggagcauugguuuuaagc

SEQ ID NO: 676354 - RNA, 21 nt, Human
ugguuuaguuaacuauucagg

SEQ ID NO: 676355 - RNA, 24 nt, Human
uguccagaaauguuugaaacacau

SEQ ID NO: 676356 - RNA, 30 nt, Human
uuaaaaauaagcaaaacuaaaacaugcaaa

SEQ ID NO: 676357 - RNA, 22 nt, Human
uuaaacuaacuuuaaagcuaac

SEQ ID NO: 676358 - RNA, 23 nt, Human
uuacacuaaauuauucauggcuc

SEQ ID NO: 676359 - RNA, 23 nt, Human
uuggacccuuuaaaaaaguauua

SEQ ID NO: 676360 - RNA, 21 nt, Human
aaagcccugcuaacuccgcuc

SEQ ID NO: 676361 - RNA, 22 nt, Human
aacugagaaaauccuauucaca

SEQ ID NO: 676362 - RNA, 22 nt, Human
agaacuaguggagguaaacuuc

SEQ ID NO: 676363 - RNA, 23 nt, Human
aggccacagcucaccuacgcuga

SEQ ID NO: 676364 - RNA, 21 nt, Human
cccaggauucaaacaaggaaa

SEQ ID NO: 676365 - RNA, 21 nt, Human
ccccacggucgcuggagugcc

SEQ ID NO: 676366 - RNA, 27 nt, Human
ccccugcguacccacuuccugccgccu

SEQ ID NO: 676367 - RNA, 23 nt, Human
cgccuugcgccccugcguaccca

SEQ ID NO: 676368 - RNA, 19 nt, Human
cguagcuauggcugcagca

SEQ ID NO: 676369 - RNA, 21 nt, Human
cugcagcaccucgcaaaaggc

SEQ ID NO: 676370 - RNA, 21 nt, Human
cugccgccucuugcccacuua

SEQ ID NO: 676371 - RNA, 24 nt, Human
cugcguacccacuuccugccgccu

SEQ ID NO: 676372 - RNA, 24 nt, Human
gaccaggccgcggcccugcagcug

SEQ ID NO: 676373 - RNA, 25 nt, Human
uaaaauucucaacagucaaauauua

SEQ ID NO: 676374 - RNA, 18 nt, Human
uacaaagaacuaguggag

SEQ ID NO: 676375 - RNA, 24 nt, Human
uauguaguuauguacucugcuaca

SEQ ID NO: 676376 - RNA, 22 nt, Human
ucgcaaaaggccacagcucacc

SEQ ID NO: 676377 - RNA, 22 nt, Human
uuuuuuuuuuuuuuccacagga

SEQ ID NO: 676378 - RNA, 23 nt, Human
uuuuuuuuuuuuuuuuccacagg

SEQ ID NO: 676379 - RNA, 19 nt, Human
aaaacccaggaguccccag

SEQ ID NO: 676380 - RNA, 18 nt, Human
aagacaaaggucugaagc

SEQ ID NO: 676381 - RNA, 19 nt, Human
aaugagcagaaucuccugc

SEQ ID NO: 676382 - RNA, 21 nt, Human
acuagcucccuucacuccagc

SEQ ID NO: 676383 - RNA, 25 nt, Human
agcagccucaaggggaggggaacgc

SEQ ID NO: 676384 - RNA, 21 nt, Human
agcgaguucccuuuugagggc

SEQ ID NO: 676385 - RNA, 19 nt, Human
aggaucuggucucgaaaau

SEQ ID NO: 676386 - RNA, 19 nt, Human
aucagguugguagaagcca

SEQ ID NO: 676387 - RNA, 20 nt, Human
cacccccugugccuaggggg

SEQ ID NO: 676388 - RNA, 24 nt, Human
caccucaaaagacaaaggucugaa

SEQ ID NO: 676389 - RNA, 21 nt, Human
cacuccagcucugccgcccgc

SEQ ID NO: 676390 - RNA, 20 nt, Human
cagcagccucaaggggagug

SEQ ID NO: 676391 - RNA, 20 nt, Human
caggaguccccaggccaucc

SEQ ID NO: 676392 - RNA, 20 nt, Human
ccacauugcuccccggcaug

SEQ ID NO: 676393 - RNA, 18 nt, Human
ccugcagguaccugacug

SEQ ID NO: 676394 - RNA, 19 nt, Human
ccugcagguaccugacugg

SEQ ID NO: 676395 - RNA, 19 nt, Human
ccugcauuccagggaccug

SEQ ID NO: 676396 - RNA, 21 nt, Human
cgaaaaugguaaagaccaccc

SEQ ID NO: 676397 - RNA, 22 nt, Human
cuaaacacuagcucccuucacu

SEQ ID NO: 676398 - RNA, 19 nt, Human
cuccacauagugcaauacc

SEQ ID NO: 676399 - RNA, 23 nt, Human
cuccccggcaugugacgauccag

SEQ ID NO: 676400 - RNA, 20 nt, Human
cugccgcccgcuacugcaag

SEQ ID NO: 676401 - RNA, 20 nt, Human
gaaaaugguaaagaccaccc

SEQ ID NO: 676402 - RNA, 19 nt, Human
gcuuucucugguccuuucu

SEQ ID NO: 676403 - RNA, 21 nt, Human
gggcaccucaaaagacaaagg

SEQ ID NO: 676404 - RNA, 20 nt, Human
gggcuuccaacauagcacuc

SEQ ID NO: 676405 - RNA, 18 nt, Human
gugacgauccagccuggc

SEQ ID NO: 676406 - RNA, 21 nt, Human
uaagaaagggugacgcuggcg

SEQ ID NO: 676407 - RNA, 22 nt, Human
uagcucccuucacuccagcucc

SEQ ID NO: 676408 - RNA, 20 nt, Human
uaugguguuggaucauaggg

SEQ ID NO: 676409 - RNA, 18 nt, Human
uauuagggagucgggagg

SEQ ID NO: 676410 - RNA, 21 nt, Human
uccccaggccauccacauugc

SEQ ID NO: 676411 - RNA, 24 nt, Human
ucugaagcgaguucccuuuugagg

SEQ ID NO: 676412 - RNA, 20 nt, Human
ugagcagaaucuccugcauu

SEQ ID NO: 676413 - RNA, 20 nt, Human
ugcaauaccucgugugucug

SEQ ID NO: 676414 - RNA, 18 nt, Human
ugccgcaguugaugaugu

SEQ ID NO: 676415 - RNA, 22 nt, Human
ugccuaggggggcaaauuccug

SEQ ID NO: 676416 - RNA, 18 nt, Human
ugccucggggcucccagc

SEQ ID NO: 676417 - RNA, 19 nt, Human
ugccucggggcucccagcc

SEQ ID NO: 676418 - RNA, 26 nt, Human
uggauucucaacgaugcagccguagu

SEQ ID NO: 676419 - RNA, 21 nt, Human
ugggcuuccaacauagcacuc

SEQ ID NO: 676420 - RNA, 20 nt, Human
uggguuucuccacauagugc

SEQ ID NO: 676421 - RNA, 26 nt, Human
ugugacgauccagccuggcuuucucu

SEQ ID NO: 676422 - RNA, 19 nt, Human
uucccuuuugagggccucc

SEQ ID NO: 676423 - RNA, 21 nt, Human
uugggcaccucaaaagacaaa

SEQ ID NO: 676424 - RNA, 19 nt, Human
aaaaaaaaaaaaaacaggc

SEQ ID NO: 676425 - RNA, 23 nt, Human
aaaaaaaaacaggcuguguggca

SEQ ID NO: 676426 - RNA, 23 nt, Human
aacccagagccaggcugggcccu

SEQ ID NO: 676427 - RNA, 22 nt, Human
aaccuccaccuuugaacccaga

SEQ ID NO: 676428 - RNA, 20 nt, Human
aaccuggugaaacccugucu

SEQ ID NO: 676429 - RNA, 21 nt, Human
aaccuggugaaacccugucuc

SEQ ID NO: 676430 - RNA, 19 nt, Human
aagaugggcuuauugcaga

SEQ ID NO: 676431 - RNA, 18 nt, Human
aagcaggagaaucacuug

SEQ ID NO: 676432 - RNA, 24 nt, Human
aagcaggagaaucacuugaacccg

SEQ ID NO: 676433 - RNA, 25 nt, Human
aagcaggagaaucacuugaacccgg

SEQ ID NO: 676434 - RNA, 27 nt, Human
aagcagggagacggaaaggaugcaggg

SEQ ID NO: 676435 - RNA, 26 nt, Human
aagcagggagcagggcgagcagcaag

SEQ ID NO: 676436 - RNA, 25 nt, Human
aaggcagguggaucaccugagguca

SEQ ID NO: 676437 - RNA, 23 nt, Human
aaggcagguuggggaccacaacc

SEQ ID NO: 676438 - RNA, 22 nt, Human
aauacaggacuugggguuuggg

SEQ ID NO: 676439 - RNA, 24 nt, Human
aaucacuugaacccgggaggugga

SEQ ID NO: 676440 - RNA, 21 nt, Human
aaugcaggacucaagccagga

SEQ ID NO: 676441 - RNA, 19 nt, Human
acaaccccugucucuacca

SEQ ID NO: 676442 - RNA, 18 nt, Human
acaccaccacauccaacc

SEQ ID NO: 676443 - RNA, 21 nt, Human
acagagcgagacucgucucaa

SEQ ID NO: 676444 - RNA, 22 nt, Human
acauagccaggcauccaacucc

SEQ ID NO: 676445 - RNA, 21 nt, Human
acauccacauagccaggcauc

SEQ ID NO: 676446 - RNA, 18 nt, Human
accaccacaccguacuug

SEQ ID NO: 676447 - RNA, 21 nt, Human
accagcaccugaugaacaaca

SEQ ID NO: 676448 - RNA, 22 nt, Human
acccagagccaggcugggcccu

SEQ ID NO: 676449 - RNA, 23 nt, Human
accccaaaguccccgucagccuu

SEQ ID NO: 676450 - RNA, 23 nt, Human
accccaucucugcuguguuccag

SEQ ID NO: 676451 - RNA, 24 nt, Human
acccugucucuacuaaaaauacaa

SEQ ID NO: 676452 - RNA, 20 nt, Human
accggacucugcgugaaguu

SEQ ID NO: 676453 - RNA, 18 nt, Human
accuguggcuucuccacg

SEQ ID NO: 676454 - RNA, 18 nt, Human
acgggccagcgccagggg

SEQ ID NO: 676455 - RNA, 22 nt, Human
acggugcacagguccaugccac

SEQ ID NO: 676456 - RNA, 18 nt, Human
acuagaauacaggacuug

SEQ ID NO: 676457 - RNA, 20 nt, Human
acugacccacgcggcagcgc

SEQ ID NO: 676458 - RNA, 25 nt, Human
acugcugaaaagcaggggugcaggg

SEQ ID NO: 676459 - RNA, 21 nt, Human
agaaggcagguuggggaccac

SEQ ID NO: 676460 - RNA, 23 nt, Human
agacuuuuagccaggccccaagc

SEQ ID NO: 676461 - RNA, 19 nt, Human
agagccgccuucuuuuccc

SEQ ID NO: 676462 - RNA, 19 nt, Human
agaggacugggagaaggga

SEQ ID NO: 676463 - RNA, 27 nt, Human
agcagaaggcagguugggaggucgacc

SEQ ID NO: 676464 - RNA, 23 nt, Human
agccaggaaugggaacggauccg

SEQ ID NO: 676465 - RNA, 23 nt, Human
agccccugaccggaagcgcuucu

SEQ ID NO: 676466 - RNA, 20 nt, Human
agccuggccaaccuggugaa

SEQ ID NO: 676467 - RNA, 24 nt, Human
agccuggccaaccuggugaaaccc

SEQ ID NO: 676468 - RNA, 24 nt, Human
agccugggcaacagagcgagacuc

SEQ ID NO: 676469 - RNA, 21 nt, Human
agcugugcuguguugaaagcc

SEQ ID NO: 676470 - RNA, 24 nt, Human
aggaauucgagaccagccuggcca

SEQ ID NO: 676471 - RNA, 19 nt, Human
aggagccuuuccugccugg

SEQ ID NO: 676472 - RNA, 21 nt, Human
aggcagcagcugccucccugg

SEQ ID NO: 676473 - RNA, 18 nt, Human
aggcagguggaucaccug

SEQ ID NO: 676474 - RNA, 22 nt, Human
aggcagguggaucaccugaggu

SEQ ID NO: 676475 - RNA, 26 nt, Human
aggcagguggaucaccugaggucagg

SEQ ID NO: 676476 - RNA, 24 nt, Human
aggcagguguccaacagcuucagc

SEQ ID NO: 676477 - RNA, 24 nt, Human
aggcagguguccaacagcuucagc

SEQ ID NO: 676478 - RNA, 19 nt, Human
agggagugggguuuguggg

SEQ ID NO: 676479 - RNA, 19 nt, Human
agggagugggguuuguggg

SEQ ID NO: 676480 - RNA, 20 nt, Human
agggagugggguuugugggg

SEQ ID NO: 676481 - RNA, 20 nt, Human
agggagugggguuugugggg

SEQ ID NO: 676482 - RNA, 19 nt, Human
agggggggugaucauguac

SEQ ID NO: 676483 - RNA, 21 nt, Human
agguggagguugcagugagcc

SEQ ID NO: 676484 - RNA, 24 nt, Human
agguggagguugcagugagccgag

SEQ ID NO: 676485 - RNA, 22 nt, Human
agguguccaacagcuucagcuu

SEQ ID NO: 676486 - RNA, 22 nt, Human
agguguccaacagcuucagcuu

SEQ ID NO: 676487 - RNA, 20 nt, Human
aguaaaagggggagucugga

SEQ ID NO: 676488 - RNA, 22 nt, Human
aguacuaccuccucagcugccu

SEQ ID NO: 676489 - RNA, 18 nt, Human
auagccaggcauccaacu

SEQ ID NO: 676490 - RNA, 26 nt, Human
auagccaggcauccaacuccagccca

SEQ ID NO: 676491 - RNA, 25 nt, Human
aucacauccucagcuaccucugacu

SEQ ID NO: 676492 - RNA, 18 nt, Human
auccagaagcccuguaac

SEQ ID NO: 676493 - RNA, 23 nt, Human
auccuggaaccuccaccuuugaa

SEQ ID NO: 676494 - RNA, 24 nt, Human
aucgcacuccagccugggcaacag

SEQ ID NO: 676495 - RNA, 24 nt, Human
aucgugccaucgcacuccagccug

SEQ ID NO: 676496 - RNA, 21 nt, Human
augaagggcucccagaccccc

SEQ ID NO: 676497 - RNA, 23 nt, Human
augaugauacgaggcucuggcac

SEQ ID NO: 676498 - RNA, 21 nt, Human
augcagggggggugaucaugu

SEQ ID NO: 676499 - RNA, 24 nt, Human
auuccauacagcccuggcccuggc

SEQ ID NO: 676500 - RNA, 24 nt, Human
auuccauacagcccuggcccuggc

SEQ ID NO: 676501 - RNA, 24 nt, Human
caaccuggugaaacccugucucua

SEQ ID NO: 676502 - RNA, 24 nt, Human
caagagagacuuuuagccaggccc

SEQ ID NO: 676503 - RNA, 24 nt, Human
caaggcagguggaucaccugaggu

SEQ ID NO: 676504 - RNA, 23 nt, Human
caaucccaagagagacuuuuagc

SEQ ID NO: 676505 - RNA, 18 nt, Human
cacaacacagaacgcgac

SEQ ID NO: 676506 - RNA, 23 nt, Human
cacagccgcucaggcugcuucug

SEQ ID NO: 676507 - RNA, 23 nt, Human
caccagggacaguacagagcagc

SEQ ID NO: 676508 - RNA, 20 nt, Human
cacccuucacucuccucccu

SEQ ID NO: 676509 - RNA, 18 nt, Human
caccgugcaccgccggau

SEQ ID NO: 676510 - RNA, 20 nt, Human
caccugaggucaggaauucg

SEQ ID NO: 676511 - RNA, 24 nt, Human
cacgccuguaaucccagcacuuug

SEQ ID NO: 676512 - RNA, 23 nt, Human
cacuccagccugggcaacagagc

SEQ ID NO: 676513 - RNA, 24 nt, Human
cacuccagccugggcaacagagcg

SEQ ID NO: 676514 - RNA, 21 nt, Human
cacuccucauuggcaauccca

SEQ ID NO: 676515 - RNA, 19 nt, Human
cacuccucgagagcugucu

SEQ ID NO: 676516 - RNA, 18 nt, Human
cacuuggugcagcaagau

SEQ ID NO: 676517 - RNA, 18 nt, Human
cagcaccuggcacugcuc

SEQ ID NO: 676518 - RNA, 24 nt, Human
cagcacuuugggaagccaaggcag

SEQ ID NO: 676519 - RNA, 25 nt, Human
cagcacuuugggaagccaaggcagg

SEQ ID NO: 676520 - RNA, 18 nt, Human
cagcccacccuucacucu

SEQ ID NO: 676521 - RNA, 21 nt, Human
cagcccacccuucacucuccu

SEQ ID NO: 676522 - RNA, 21 nt, Human
cagcucuugagcaccacuccu

SEQ ID NO: 676523 - RNA, 19 nt, Human
cagcugccucccuggugag

SEQ ID NO: 676524 - RNA, 19 nt, Human
caggcugcuucugccucag

SEQ ID NO: 676525 - RNA, 23 nt, Human
caggucccaggcucacauugggg

SEQ ID NO: 676526 - RNA, 24 nt, Human
cagguggaucaccugaggucagga

SEQ ID NO: 676527 - RNA, 20 nt, Human
cauacagcccuggcccuggc

SEQ ID NO: 676528 - RNA, 20 nt, Human
cauacagcccuggcccuggc

SEQ ID NO: 676529 - RNA, 19 nt, Human
cauccaaccuccuugccug

SEQ ID NO: 676530 - RNA, 21 nt, Human
cauccagaagcccuguaacuc

SEQ ID NO: 676531 - RNA, 18 nt, Human
caucgcacuccagccugg

SEQ ID NO: 676532 - RNA, 19 nt, Human
caucgcacuccagccuggg

SEQ ID NO: 676533 - RNA, 23 nt, Human
caucgcacuccagccugggcaac

SEQ ID NO: 676534 - RNA, 24 nt, Human
caucgcacuccagccugggcaaca

SEQ ID NO: 676535 - RNA, 18 nt, Human
caucugcuaugcccaccc

SEQ ID NO: 676536 - RNA, 21 nt, Human
caugccacuugaauaugugug

SEQ ID NO: 676537 - RNA, 19 nt, Human
cauggcccuaauugugccu

SEQ ID NO: 676538 - RNA, 23 nt, Human
ccaaccccaaaguccccgucagc

SEQ ID NO: 676539 - RNA, 21 nt, Human
ccacaccaccacauccaaccu

SEQ ID NO: 676540 - RNA, 20 nt, Human
ccacauagccaggcauccaa

SEQ ID NO: 676541 - RNA, 18 nt, Human
ccaccagggacaguacag

SEQ ID NO: 676542 - RNA, 19 nt, Human
ccaccccaucucugcugug

SEQ ID NO: 676543 - RNA, 23 nt, Human
ccacgccaggucccaggcucaca

SEQ ID NO: 676544 - RNA, 22 nt, Human
ccagagcccccagcaccuggca

SEQ ID NO: 676545 - RNA, 22 nt, Human
ccagcaccugaugaacaacaag

SEQ ID NO: 676546 - RNA, 21 nt, Human
ccagccccugaccggaagcgc

SEQ ID NO: 676547 - RNA, 21 nt, Human
ccaggcagcagcugccucccu

SEQ ID NO: 676548 - RNA, 25 nt, Human
ccaggccgggcgcgguggcucacgc

SEQ ID NO: 676549 - RNA, 23 nt, Human
ccaguucucuggaccgaagcagg

SEQ ID NO: 676550 - RNA, 21 nt, Human
ccauacagcccuggcccuggc

SEQ ID NO: 676551 - RNA, 20 nt, Human
ccaucgcacuccagccuggg

SEQ ID NO: 676552 - RNA, 21 nt, Human
ccaucgcacuccagccugggc

SEQ ID NO: 676553 - RNA, 24 nt, Human
ccaucgcacuccagccugggcaac

SEQ ID NO: 676554 - RNA, 18 nt, Human
ccaucugcuaugcccacc

SEQ ID NO: 676555 - RNA, 20 nt, Human
cccaagccuucugacugccc

SEQ ID NO: 676556 - RNA, 21 nt, Human
cccacaaugcaggacucaagc

SEQ ID NO: 676557 - RNA, 21 nt, Human
cccacaccaccacauccaacc

SEQ ID NO: 676558 - RNA, 20 nt, Human
cccacgcggcagcgccagcc

SEQ ID NO: 676559 - RNA, 21 nt, Human
cccagagccaggcugggcccu

SEQ ID NO: 676560 - RNA, 23 nt, Human
cccagccauggcccuaauugugc

SEQ ID NO: 676561 - RNA, 22 nt, Human
cccaggccagagagagcagggc

SEQ ID NO: 676562 - RNA, 23 nt, Human
cccccacacaugaagggcuccca

SEQ ID NO: 676563 - RNA, 19 nt, Human
ccccgcaugaccgccagau

SEQ ID NO: 676564 - RNA, 24 nt, Human
cccggccccgcgcccuucaccaac

SEQ ID NO: 676565 - RNA, 21 nt, Human
cccgggagguggagguugcag

SEQ ID NO: 676566 - RNA, 25 nt, Human
cccucccagcucggccaugcucgcc

SEQ ID NO: 676567 - RNA, 19 nt, Human
cccuggugagugggaacac

SEQ ID NO: 676568 - RNA, 19 nt, Human
ccucacacaccaccacacc

SEQ ID NO: 676569 - RNA, 19 nt, Human
ccucccagcucggccaugc

SEQ ID NO: 676570 - RNA, 18 nt, Human
ccucccugcagcccacca

SEQ ID NO: 676571 - RNA, 20 nt, Human
ccuccuggccauggugccgg

SEQ ID NO: 676572 - RNA, 20 nt, Human
ccucggggaguaaaaggggg

SEQ ID NO: 676573 - RNA, 19 nt, Human
ccucuggcuggggcuuagg

SEQ ID NO: 676574 - RNA, 22 nt, Human
ccucuucaugggacauggagau

SEQ ID NO: 676575 - RNA, 22 nt, Human
ccugaggucaggaauucgagac

SEQ ID NO: 676576 - RNA, 22 nt, Human
ccugcagagcugugagugggcu

SEQ ID NO: 676577 - RNA, 22 nt, Human
ccuggccaaccuggugaaaccc

SEQ ID NO: 676578 - RNA, 24 nt, Human
ccuggccaaccuggugaaacccug

SEQ ID NO: 676579 - RNA, 22 nt, Human
ccugggcaacagagcgagacuc

SEQ ID NO: 676580 - RNA, 18 nt, Human
ccugggucucucagccuc

SEQ ID NO: 676581 - RNA, 22 nt, Human
ccuguaaucccagcacuuuggg

SEQ ID NO: 676582 - RNA, 24 nt, Human
cgagaccagccuggccaaccuggu

SEQ ID NO: 676583 - RNA, 22 nt, Human
cgcacuccagccugggcaacag

SEQ ID NO: 676584 - RNA, 22 nt, Human
cgcacuccagccugggcaacag

SEQ ID NO: 676585 - RNA, 21 nt, Human
cgccaauagacuuguggggca

SEQ ID NO: 676586 - RNA, 18 nt, Human
cgccaggcuuuucgggcu

SEQ ID NO: 676587 - RNA, 23 nt, Human
cgccuguaaucccagcacuuugg

SEQ ID NO: 676588 - RNA, 23 nt, Human
cggcggguucuugccagccgacg

SEQ ID NO: 676589 - RNA, 21 nt, Human
cggcuccuaaauacucccccc

SEQ ID NO: 676590 - RNA, 24 nt, Human
cgggaggcuaaagcaggagaauca

SEQ ID NO: 676591 - RNA, 29 nt, Human
cgggagguggagguugcagugacaacggu

SEQ ID NO: 676592 - RNA, 24 nt, Human
cgggagguggagguugcagugagc

SEQ ID NO: 676593 - RNA, 19 nt, Human
cggggaguaaaagggggag

SEQ ID NO: 676594 - RNA, 23 nt, Human
cgucugcaauuccagcuacucgg

SEQ ID NO: 676595 - RNA, 24 nt, Human
cgucugcaauuccagcuacucggg

SEQ ID NO: 676596 - RNA, 22 nt, Human
cucaagaaaaaaaaaaaaaaaa

SEQ ID NO: 676597 - RNA, 25 nt, Human
cucacacaccaccacaccguacuug

SEQ ID NO: 676598 - RNA, 22 nt, Human
cucacgccuguaaucccagcac

SEQ ID NO: 676599 - RNA, 24 nt, Human
cucacgccuguaaucccagcacuu

SEQ ID NO: 676600 - RNA, 24 nt, Human
cucagccucacagggcauuugggc

SEQ ID NO: 676601 - RNA, 21 nt, Human
cuccauggcauauagcugccc

SEQ ID NO: 676602 - RNA, 23 nt, Human
cuccuauugguucccguuugagg

SEQ ID NO: 676603 - RNA, 23 nt, Human
cucgucucaagaaaaaaaaaaaa

SEQ ID NO: 676604 - RNA, 19 nt, Human
cugacgccggauccagggc

SEQ ID NO: 676605 - RNA, 19 nt, Human
cugacgccggauccagggc

SEQ ID NO: 676606 - RNA, 19 nt, Human
cugacugcccuugcacccu

SEQ ID NO: 676607 - RNA, 20 nt, Human
cugcaauuccagcuacucgg

SEQ ID NO: 676608 - RNA, 21 nt, Human
cugcaauuccagcuacucggg

SEQ ID NO: 676609 - RNA, 20 nt, Human
cugccccaucugcuaugccc

SEQ ID NO: 676610 - RNA, 21 nt, Human
cugccgcgcacucccaacgcc

SEQ ID NO: 676611 - RNA, 21 nt, Human
cugcuguguuccagcccugug

SEQ ID NO: 676612 - RNA, 22 nt, Human
cugcuguguuccagcccugugg

SEQ ID NO: 676613 - RNA, 23 nt, Human
cugcuguguuccagcccuguggc

SEQ ID NO: 676614 - RNA, 24 nt, Human
cuggaaccuccaccuuugaaccca

SEQ ID NO: 676615 - RNA, 24 nt, Human
cuggccaaccuggugaaacccugu

SEQ ID NO: 676616 - RNA, 21 nt, Human
cuggggccuuuggguccugug

SEQ ID NO: 676617 - RNA, 23 nt, Human
cuucacccagugccccccagaca

SEQ ID NO: 676618 - RNA, 24 nt, Human
cuucagagccgccuucuuuucccu

SEQ ID NO: 676619 - RNA, 22 nt, Human
cuucagcuucacccagugcccc

SEQ ID NO: 676620 - RNA, 21 nt, Human
cuugaacccgggagguggagg

SEQ ID NO: 676621 - RNA, 19 nt, Human
cuugagcaccacuccucga

SEQ ID NO: 676622 - RNA, 20 nt, Human
cuugcacccuccccuaccua

SEQ ID NO: 676623 - RNA, 19 nt, Human
gaaacccugucucuacuaa

SEQ ID NO: 676624 - RNA, 21 nt, Human
gaaagcaggaacuagcacacc

SEQ ID NO: 676625 - RNA, 23 nt, Human
gaacacggugcacagguccaugc

SEQ ID NO: 676626 - RNA, 19 nt, Human
gacaaauaaugacaagucc

SEQ ID NO: 676627 - RNA, 19 nt, Human
gacaaauaaugacaagucc

SEQ ID NO: 676628 - RNA, 22 nt, Human
gacauggagauucggauuccca

SEQ ID NO: 676629 - RNA, 18 nt, Human
gaccccccuucccugccc

SEQ ID NO: 676630 - RNA, 19 nt, Human
gaccucugcaucugcccag

SEQ ID NO: 676631 - RNA, 25 nt, Human
gacugcaggaagaggcacaugccag

SEQ ID NO: 676632 - RNA, 24 nt, Human
gacugcccuugcacccuccccuac

SEQ ID NO: 676633 - RNA, 23 nt, Human
gagaaucacuugaacccgggagg

SEQ ID NO: 676634 - RNA, 23 nt, Human
gagaucgugccaucgcacuccag

SEQ ID NO: 676635 - RNA, 18 nt, Human
gagcagaaggcagguugg

SEQ ID NO: 676636 - RNA, 18 nt, Human
gagcagcaagaggguggg

SEQ ID NO: 676637 - RNA, 20 nt, Human
gagcagcgagguccaggaug

SEQ ID NO: 676638 - RNA, 22 nt, Human
gagcagcgagguccaggauggc

SEQ ID NO: 676639 - RNA, 18 nt, Human
gagcucccuuugcccuuc

SEQ ID NO: 676640 - RNA, 19 nt, Human
gaggagccuuuccugccug

SEQ ID NO: 676641 - RNA, 19 nt, Human
gagggggugucccgggcuc

SEQ ID NO: 676642 - RNA, 20 nt, Human
gagggugggggccugggugg

SEQ ID NO: 676643 - RNA, 23 nt, Human
gagguugcagugagccgagaucg

SEQ ID NO: 676644 - RNA, 18 nt, Human
gaucaccugaggucagga

SEQ ID NO: 676645 - RNA, 24 nt, Human
gaucaccugaggucaggaauucga

SEQ ID NO: 676646 - RNA, 18 nt, Human
gaugagcuggcccaagug

SEQ ID NO: 676647 - RNA, 21 nt, Human
gcaaguaagugggccccacag

SEQ ID NO: 676648 - RNA, 24 nt, Human
gcacuccagccugggcaacagagc

SEQ ID NO: 676649 - RNA, 19 nt, Human
gcagcagcugccucccugg

SEQ ID NO: 676650 - RNA, 23 nt, Human
gcauauagcugccccuccuuggc

SEQ ID NO: 676651 - RNA, 24 nt, Human
gccaaccuggugaaacccugucuc

SEQ ID NO: 676652 - RNA, 19 nt, Human
gccacaacacagaacgcga

SEQ ID NO: 676653 - RNA, 21 nt, Human
gccagagcccccagcaccugg

SEQ ID NO: 676654 - RNA, 22 nt, Human
gccaucgcacuccagccugggc

SEQ ID NO: 676655 - RNA, 23 nt, Human
gccccaagccuucugacugcccu

SEQ ID NO: 676656 - RNA, 23 nt, Human
gcccugacgccggauccagggcc

SEQ ID NO: 676657 - RNA, 24 nt, Human
gcccugacgccggauccagggccg

SEQ ID NO: 676658 - RNA, 24 nt, Human
gcccugacgccggauccagggccg

SEQ ID NO: 676659 - RNA, 22 nt, Human
gcccuggcccuggcccuucuug

SEQ ID NO: 676660 - RNA, 22 nt, Human
gcccuggcccuggcccuucuug

SEQ ID NO: 676661 - RNA, 18 nt, Human
gcccuguaacuccauggc

SEQ ID NO: 676662 - RNA, 19 nt, Human
gcgggaaagcaggaacuag

SEQ ID NO: 676663 - RNA, 18 nt, Human
gcuagcgccuccacuugg

SEQ ID NO: 676664 - RNA, 22 nt, Human
gcuccuggcagaucccugcuuc

SEQ ID NO: 676665 - RNA, 22 nt, Human
gcugaaaagcaggggugcaggg

SEQ ID NO: 676666 - RNA, 22 nt, Human
gcuguagaagaacacagccacu

SEQ ID NO: 676667 - RNA, 23 nt, Human
gcuucagcuucacccagugcccc

SEQ ID NO: 676668 - RNA, 23 nt, Human
ggaacagaugcuggcgcaccuga

SEQ ID NO: 676669 - RNA, 20 nt, Human
ggaagaggcacaugccagug

SEQ ID NO: 676670 - RNA, 21 nt, Human
ggacagccagagcccccagca

SEQ ID NO: 676671 - RNA, 19 nt, Human
ggacugggagaagggagcc

SEQ ID NO: 676672 - RNA, 23 nt, Human
ggagacggaaaggaugcaggggg

SEQ ID NO: 676673 - RNA, 20 nt, Human
ggagguugcagugagccgag

SEQ ID NO: 676674 - RNA, 22 nt, Human
ggagguugcagugagccgagau

SEQ ID NO: 676675 - RNA, 24 nt, Human
ggagguugcagugagccgagaucg

SEQ ID NO: 676676 - RNA, 23 nt, Human
ggagguuggguguugguggaugg

SEQ ID NO: 676677 - RNA, 23 nt, Human
ggauacacacaccaucuucgacc

SEQ ID NO: 676678 - RNA, 20 nt, Human
ggcaccggauggcccuugcc

SEQ ID NO: 676679 - RNA, 19 nt, Human
ggccauaauggggaagacc

SEQ ID NO: 676680 - RNA, 20 nt, Human
ggccauggugccgguggaac

SEQ ID NO: 676681 - RNA, 21 nt, Human
ggcccacucccucccaccccc

SEQ ID NO: 676682 - RNA, 23 nt, Human
ggccguagccgcgucccauagcc

SEQ ID NO: 676683 - RNA, 23 nt, Human
gggcacuaggaaguccgcgggaa

SEQ ID NO: 676684 - RNA, 24 nt, Human
gggccugggugggggagcccuggg

SEQ ID NO: 676685 - RNA, 24 nt, Human
gggcgcgguggcucacgccuguaa

SEQ ID NO: 676686 - RNA, 20 nt, Human
gggcugggucgggucaggag

SEQ ID NO: 676687 - RNA, 22 nt, Human
gggcugggucgggucaggagcc

SEQ ID NO: 676688 - RNA, 19 nt, Human
gggugggggagcccugggc

SEQ ID NO: 676689 - RNA, 20 nt, Human
gggugggggccugggugggg

SEQ ID NO: 676690 - RNA, 19 nt, Human
gggugugggcgagaucuuc

SEQ ID NO: 676691 - RNA, 21 nt, Human
gguaccccaggccgggcgcgg

SEQ ID NO: 676692 - RNA, 24 nt, Human
ggucagggaaaucuggggcugggu

SEQ ID NO: 676693 - RNA, 21 nt, Human
ggugcacagguccaugccacu

SEQ ID NO: 676694 - RNA, 23 nt, Human
gguggcucacgccuguaauccca

SEQ ID NO: 676695 - RNA, 24 nt, Human
gguggcucacgccuguaaucccag

SEQ ID NO: 676696 - RNA, 19 nt, Human
ggugugggcgagaucuucc

SEQ ID NO: 676697 - RNA, 20 nt, Human
guacagagcagcucugugca

SEQ ID NO: 676698 - RNA, 18 nt, Human
guagagcucaucauuaac

SEQ ID NO: 676699 - RNA, 21 nt, Human
gucacguucuccaugcguacc

SEQ ID NO: 676700 - RNA, 20 nt, Human
gucagccuuuggcuggcagc

SEQ ID NO: 676701 - RNA, 22 nt, Human
guccaacagcuucagcuucacc

SEQ ID NO: 676702 - RNA, 22 nt, Human
guccaacagcuucagcuucacc

SEQ ID NO: 676703 - RNA, 22 nt, Human
guggauggagggagucccauuu

SEQ ID NO: 676704 - RNA, 23 nt, Human
guggcucacgccuguaaucccag

SEQ ID NO: 676705 - RNA, 25 nt, Human
guguuccagcccuguggccacaagu

SEQ ID NO: 676706 - RNA, 24 nt, Human
guugcagugagccgagaucgugcc

SEQ ID NO: 676707 - RNA, 18 nt, Human
uaaacucuggagcagcga

SEQ ID NO: 676708 - RNA, 24 nt, Human
uaaagcaggagaaucacuugaacc

SEQ ID NO: 676709 - RNA, 24 nt, Human
uaagaacagcaaaguccuaggcug

SEQ ID NO: 676710 - RNA, 20 nt, Human
uaagaggcuccugcucucga

SEQ ID NO: 676711 - RNA, 21 nt, Human
uaccucugacuugacacuacc

SEQ ID NO: 676712 - RNA, 19 nt, Human
uacucgggaggcuaaagca

SEQ ID NO: 676713 - RNA, 24 nt, Human
uagaagaacacagccacuuccaca

SEQ ID NO: 676714 - RNA, 21 nt, Human
uagcacaccuugcagggccug

SEQ ID NO: 676715 - RNA, 26 nt, Human
uauuccauacagcccuggcccuggcc

SEQ ID NO: 676716 - RNA, 20 nt, Human
ucaagccaggaaugggaacg

SEQ ID NO: 676717 - RNA, 19 nt, Human
ucacauccucagcuaccuc

SEQ ID NO: 676718 - RNA, 24 nt, Human
ucacuugaacccgggagguggagg

SEQ ID NO: 676719 - RNA, 21 nt, Human
uccaacuccagcccacccuuc

SEQ ID NO: 676720 - RNA, 19 nt, Human
uccacauagccaggcaucc

SEQ ID NO: 676721 - RNA, 19 nt, Human
uccacaugagaaggcaggu

SEQ ID NO: 676722 - RNA, 19 nt, Human
uccacaugagaaggcaggu

SEQ ID NO: 676723 - RNA, 20 nt, Human
uccagaagcccuguaacucc

SEQ ID NO: 676724 - RNA, 23 nt, Human
uccagccugggcaacagagcgag

SEQ ID NO: 676725 - RNA, 24 nt, Human
uccagccugggcaacagagcgaga

SEQ ID NO: 676726 - RNA, 26 nt, Human
uccaggacucacccucuucugcucua

SEQ ID NO: 676727 - RNA, 20 nt, Human
uccauacagcccuggcccug

SEQ ID NO: 676728 - RNA, 20 nt, Human
uccauacagcccuggcccug

SEQ ID NO: 676729 - RNA, 23 nt, Human
uccauacagcccuggcccuggcc

SEQ ID NO: 676730 - RNA, 23 nt, Human
ucccaacgccgugcccggccccg

SEQ ID NO: 676731 - RNA, 19 nt, Human
ucccaagagagacuuuuag

SEQ ID NO: 676732 - RNA, 24 nt, Human
ucccacaccaccacauccaaccuc

SEQ ID NO: 676733 - RNA, 24 nt, Human
ucccaccaguaucugccaguucuc

SEQ ID NO: 676734 - RNA, 20 nt, Human
ucccugcagagcugugagug

SEQ ID NO: 676735 - RNA, 21 nt, Human
ucccuucggcuucgcuagccc

SEQ ID NO: 676736 - RNA, 22 nt, Human
uccgccgcucguuuuuccucgg

SEQ ID NO: 676737 - RNA, 20 nt, Human
uccggcucggcccucccagc

SEQ ID NO: 676738 - RNA, 25 nt, Human
uccuacacaggcacaacggacaucc

SEQ ID NO: 676739 - RNA, 23 nt, Human
uccucauccccuccccuguugua

SEQ ID NO: 676740 - RNA, 18 nt, Human
uccuggaaccuccaccuu

SEQ ID NO: 676741 - RNA, 20 nt, Human
uccuucagagccgccuucuu

SEQ ID NO: 676742 - RNA, 25 nt, Human
ucucagagaguaggucacgggccag

SEQ ID NO: 676743 - RNA, 20 nt, Human
ucucagccccugagggugga

SEQ ID NO: 676744 - RNA, 25 nt, Human
ucuccaagcgaguuccugaucggcu

SEQ ID NO: 676745 - RNA, 19 nt, Human
ucuccgccgcucguuuuuc

SEQ ID NO: 676746 - RNA, 23 nt, Human
ucucuacuaaaaauacaacaauu

SEQ ID NO: 676747 - RNA, 20 nt, Human
ucugccaguucucuggaccg

SEQ ID NO: 676748 - RNA, 23 nt, Human
ucugcuguguuccagcccugugg

SEQ ID NO: 676749 - RNA, 25 nt, Human
ucuggaccgaagcagggagcagggc

SEQ ID NO: 676750 - RNA, 24 nt, Human
ucuggcacugacucgccaauagac

SEQ ID NO: 676751 - RNA, 18 nt, Human
ucuuagccgcgcucccuu

SEQ ID NO: 676752 - RNA, 19 nt, Human
ugaacccagagccaggcug

SEQ ID NO: 676753 - RNA, 26 nt, Human
ugaacccagagccaggcugggccccu

SEQ ID NO: 676754 - RNA, 19 nt, Human
ugaaggacugauaauauua

SEQ ID NO: 676755 - RNA, 18 nt, Human
ugaagggcucccagaccc

SEQ ID NO: 676756 - RNA, 18 nt, Human
ugaccucugcaucugccc

SEQ ID NO: 676757 - RNA, 18 nt, Human
ugagaaggcaggugucca

SEQ ID NO: 676758 - RNA, 20 nt, Human
ugagaaggcagguguccaaa

SEQ ID NO: 676759 - RNA, 20 nt, Human
ugagaaggcagguguccaaa

SEQ ID NO: 676760 - RNA, 25 nt, Human
ugagaaggcagguguccaacagcuu

SEQ ID NO: 676761 - RNA, 25 nt, Human
ugagaaggcagguguccaacagcuu

SEQ ID NO: 676762 - RNA, 21 nt, Human
ugagaugcauaugaagccagg

SEQ ID NO: 676763 - RNA, 21 nt, Human
ugagcacagccgcucaggcug

SEQ ID NO: 676764 - RNA, 22 nt, Human
ugagccgagaucgugccaucgc

SEQ ID NO: 676765 - RNA, 19 nt, Human
ugagcuggcccaaguggaa

SEQ ID NO: 676766 - RNA, 19 nt, Human
ugagggagugggguuugug

SEQ ID NO: 676767 - RNA, 19 nt, Human
ugagggagugggguuugug

SEQ ID NO: 676768 - RNA, 21 nt, Human
ugagggagugggguuuguggg

SEQ ID NO: 676769 - RNA, 21 nt, Human
ugagggagugggguuuguggg

SEQ ID NO: 676770 - RNA, 22 nt, Human
ugagggagugggguuugugggg

SEQ ID NO: 676771 - RNA, 22 nt, Human
ugagggagugggguuugugggg

SEQ ID NO: 676772 - RNA, 21 nt, Human
ugauaauauuauggggcaggc

SEQ ID NO: 676773 - RNA, 18 nt, Human
ugcaaguaagugggcccc

SEQ ID NO: 676774 - RNA, 22 nt, Human
ugcaaguaagugggccccacag

SEQ ID NO: 676775 - RNA, 19 nt, Human
ugcagggccuggggccuuu

SEQ ID NO: 676776 - RNA, 23 nt, Human
ugccagggccugagcacagccgc

SEQ ID NO: 676777 - RNA, 24 nt, Human
ugccaucgcacuccagccugggca

SEQ ID NO: 676778 - RNA, 23 nt, Human
ugcccaauguccauccagaagcc

SEQ ID NO: 676779 - RNA, 22 nt, Human
ugcccaccccaucucugcugug

SEQ ID NO: 676780 - RNA, 20 nt, Human
ugccccaggccagagagagc

SEQ ID NO: 676781 - RNA, 18 nt, Human
ugccccaucugcuaugcc

SEQ ID NO: 676782 - RNA, 20 nt, Human
ugccugcagcccgccuggcc

SEQ ID NO: 676783 - RNA, 20 nt, Human
ugccugcccaccggacucug

SEQ ID NO: 676784 - RNA, 21 nt, Human
ugcggccugugucagccucac

SEQ ID NO: 676785 - RNA, 22 nt, Human
ugcguacccacugacccacgcg

SEQ ID NO: 676786 - RNA, 22 nt, Human
ugcuccugugccuucauuuccu

SEQ ID NO: 676787 - RNA, 20 nt, Human
uggaccgaagcagggagcag

SEQ ID NO: 676788 - RNA, 23 nt, Human
uggacgggaggcucugcuacagg

SEQ ID NO: 676789 - RNA, 24 nt, Human
uggaucaccugaggucaggaauuc

SEQ ID NO: 676790 - RNA, 27 nt, Human
uggaucaccugaggucaggaauucgag

SEQ ID NO: 676791 - RNA, 19 nt, Human
uggcagcucuccgccgcuc

SEQ ID NO: 676792 - RNA, 24 nt, Human
uggccaaccuggugaaacccuguc

SEQ ID NO: 676793 - RNA, 24 nt, Human
uggcucacgccuguaaucccagca

SEQ ID NO: 676794 - RNA, 19 nt, Human
ugggaacacggugcacagg

SEQ ID NO: 676795 - RNA, 22 nt, Human
ugggaacacggugcacaggucc

SEQ ID NO: 676796 - RNA, 20 nt, Human
ugggaagcagggagacggaa

SEQ ID NO: 676797 - RNA, 24 nt, Human
ugggaagccaaggcagguggauca

SEQ ID NO: 676798 - RNA, 23 nt, Human
uggggaccacaaccccugucucu

SEQ ID NO: 676799 - RNA, 20 nt, Human
uggggcugggucgggucagg

SEQ ID NO: 676800 - RNA, 23 nt, Human
uggggcugggucgggucaggagc

SEQ ID NO: 676801 - RNA, 20 nt, Human
uggggggccaggcacagugc

SEQ ID NO: 676802 - RNA, 18 nt, Human
ugggucgggucaggagcc

SEQ ID NO: 676803 - RNA, 21 nt, Human
ugguaccccaggccgggcgcg

SEQ ID NO: 676804 - RNA, 24 nt, Human
ugguaccccaggccgggcgcggug

SEQ ID NO: 676805 - RNA, 25 nt, Human
ugguccacgccugccgcggcuagcg

SEQ ID NO: 676806 - RNA, 20 nt, Human
uggugagugggaacacggug

SEQ ID NO: 676807 - RNA, 21 nt, Human
ugguggggcaggucagggaaa

SEQ ID NO: 676808 - RNA, 25 nt, Human
uggugguggggagagcaguagguac

SEQ ID NO: 676809 - RNA, 18 nt, Human
uguagaagaacacagcca

SEQ ID NO: 676810 - RNA, 24 nt, Human
uguagaagaacacagccacuucca

SEQ ID NO: 676811 - RNA, 24 nt, Human
uguaucccacaccaccacauccaa

SEQ ID NO: 676812 - RNA, 22 nt, Human
uguugaaagccacaggggccug

SEQ ID NO: 676813 - RNA, 18 nt, Human
uuagccgggcgugguggu

SEQ ID NO: 676814 - RNA, 23 nt, Human
uuagccgggcgugguggugggcg

SEQ ID NO: 676815 - RNA, 24 nt, Human
uuagccgggcgugguggugggcgu

SEQ ID NO: 676816 - RNA, 22 nt, Human
uucacccagugccccccagaca

SEQ ID NO: 676817 - RNA, 24 nt, Human
uuccacagcugugcuguguugaaa

SEQ ID NO: 676818 - RNA, 22 nt, Human
uuccucuuucuguccuggggug

SEQ ID NO: 676819 - RNA, 20 nt, Human
uucuccaugcguacccacug

SEQ ID NO: 676820 - RNA, 24 nt, Human
uucuugagggagugggguuugugg

SEQ ID NO: 676821 - RNA, 24 nt, Human
uucuugagggagugggguuugugg

SEQ ID NO: 676822 - RNA, 22 nt, Human
uugaaagccacaggggccuggg

SEQ ID NO: 676823 - RNA, 24 nt, Human
uugaacccgggagguggagguugc

SEQ ID NO: 676824 - RNA, 23 nt, Human
uugaaggacugauaauauuaugg

SEQ ID NO: 676825 - RNA, 18 nt, Human
uugcacccuccccuaccu

SEQ ID NO: 676826 - RNA, 21 nt, Human
uugcagugagccgagaucgug

SEQ ID NO: 676827 - RNA, 22 nt, Human
uugcagugagccgagaucgugc

SEQ ID NO: 676828 - RNA, 25 nt, Human
uuggugcagcaagaugggcuuauug

SEQ ID NO: 676829 - RNA, 18 nt, Human
uuggugguggggagagca

SEQ ID NO: 676830 - RNA, 22 nt, Human
uuucaccagagggcgggcuugu

SEQ ID NO: 676831 - RNA, 19 nt, Human
uuugaagugacuuugaagg

SEQ ID NO: 676832 - RNA, 22 nt, Human
uuuuuuuuuuuuuuuuucacag

SEQ ID NO: 676833 - RNA, 23 nt, Human
uuuuuuuuuuuuuuuuucacagu

SEQ ID NO: 676834 - RNA, 21 nt, Human
aaaaaacaaaacaaacagaaa

SEQ ID NO: 676835 - RNA, 19 nt, Human
aaaacaaaacaaacagaaa

SEQ ID NO: 676836 - RNA, 21 nt, Human
aaaacaaaacaaacagaaaac

SEQ ID NO: 676837 - RNA, 23 nt, Human
aaacaaacagaaaacaucaaaaa

SEQ ID NO: 676838 - RNA, 25 nt, Human
aaacaucaaaaacacaaaaagauau

SEQ ID NO: 676839 - RNA, 22 nt, Human
aacagcuuucagccacaaacca

SEQ ID NO: 676840 - RNA, 24 nt, Human
aacaucaaaaacacaaaaagauau

SEQ ID NO: 676841 - RNA, 22 nt, Human
aaggccgcagaaaaaguacuaa

SEQ ID NO: 676842 - RNA, 21 nt, Human
acaaaaagauauuaaaacagc

SEQ ID NO: 676843 - RNA, 26 nt, Human
acaaaacaaacagaaaacaucaaaaa

SEQ ID NO: 676844 - RNA, 25 nt, Human
acaaacagaaaacaucaaaaacaca

SEQ ID NO: 676845 - RNA, 25 nt, Human
caaaaacacaaaaagauauuaaaac

SEQ ID NO: 676846 - RNA, 22 nt, Human
cagccacaaaccaaaggccgca

SEQ ID NO: 676847 - RNA, 18 nt, Human
ccacaaaccaaaggccgc

SEQ ID NO: 676848 - RNA, 19 nt, Human
ccacaaaccaaaggccgcg

SEQ ID NO: 676849 - RNA, 22 nt, Human
ccgccgccgccgccucgccgcc

SEQ ID NO: 676850 - RNA, 23 nt, Human
ccgccgccgccgccucgccgccu

SEQ ID NO: 676851 - RNA, 18 nt, Human
ccgccgccgccgccucgg

SEQ ID NO: 676852 - RNA, 21 nt, Human
ccgccucgccgccucuccggc

SEQ ID NO: 676853 - RNA, 24 nt, Human
cgccucgccgccucuccggcccca

SEQ ID NO: 676854 - RNA, 21 nt, Human
cugcuauuuuaaaaaacaaaa

SEQ ID NO: 676855 - RNA, 22 nt, Human
cuugccgccgccgccgccgccu

SEQ ID NO: 676856 - RNA, 18 nt, Human
gccgccgccgccgccgcc

SEQ ID NO: 676857 - RNA, 24 nt, Human
gccgccgccgccgccgccucgccg

SEQ ID NO: 676858 - RNA, 22 nt, Human
uuacagcaaaucuuggcgauga

SEQ ID NO: 676859 - RNA, 20 nt, Human
uucaagaaguuaaacguaga

SEQ ID NO: 676860 - RNA, 18 nt, Human
uugccgccgccgccgccg

SEQ ID NO: 676861 - RNA, 23 nt, Human
uuggcgaugagucacucaacagc

SEQ ID NO: 676862 - RNA, 26 nt, Human
uuucagccacaaaccaaaggccgcag

SEQ ID NO: 676863 - RNA, 21 nt, Human
aaaaggaaauaccaaccucau

SEQ ID NO: 676864 - RNA, 26 nt, Human
aaauaccaaccucaugaagacagcgg

SEQ ID NO: 676865 - RNA, 22 nt, Human
accgugggacgggccucccucu

SEQ ID NO: 676866 - RNA, 23 nt, Human
accugaggcuacgcgaaucgccc

SEQ ID NO: 676867 - RNA, 22 nt, Human
aggcacuccacaaaaggaaaua

SEQ ID NO: 676868 - RNA, 21 nt, Human
auuacaucgcgcagccacgcc

SEQ ID NO: 676869 - RNA, 25 nt, Human
caaccucaugaagacagcggggacu

SEQ ID NO: 676870 - RNA, 23 nt, Human
cacccucuugccggagucgggaa

SEQ ID NO: 676871 - RNA, 21 nt, Human
cagcaggcccaagccaacguc

SEQ ID NO: 676872 - RNA, 21 nt, Human
cagggcucuggcuggcccccc

SEQ ID NO: 676873 - RNA, 24 nt, Human
caucgcgcagccacgcccccagcg

SEQ ID NO: 676874 - RNA, 23 nt, Human
ccacagaccgugggacgggccuc

SEQ ID NO: 676875 - RNA, 22 nt, Human
ccagagaccgauuacaucgcgc

SEQ ID NO: 676876 - RNA, 19 nt, Human
cccagcgugcgcgcggccg

SEQ ID NO: 676877 - RNA, 24 nt, Human
cccgcccuccucgucucccgggaa

SEQ ID NO: 676878 - RNA, 21 nt, Human
ccucccugcccgcccuccucg

SEQ ID NO: 676879 - RNA, 22 nt, Human
ccucccugcccgcccuccucgu

SEQ ID NO: 676880 - RNA, 19 nt, Human
ccucggacggccagggcuc

SEQ ID NO: 676881 - RNA, 19 nt, Human
ccucuugccggagucggga

SEQ ID NO: 676882 - RNA, 18 nt, Human
cgcccgcgaagagggucc

SEQ ID NO: 676883 - RNA, 19 nt, Human
cgccgcgcagcguccagag

SEQ ID NO: 676884 - RNA, 21 nt, Human
cggccgccguguacgacccgg

SEQ ID NO: 676885 - RNA, 19 nt, Human
cucccugcccgcccuccuc

SEQ ID NO: 676886 - RNA, 23 nt, Human
cugcccgcccuccucgucucccg

SEQ ID NO: 676887 - RNA, 24 nt, Human
gccacgcccccagcgugcgcgcgg

SEQ ID NO: 676888 - RNA, 22 nt, Human
ggauccguagccacagaccgug

SEQ ID NO: 676889 - RNA, 24 nt, Human
ggcucuggcuggcccccagaguca

SEQ ID NO: 676890 - RNA, 23 nt, Human
gugggacgggccucccucugagg

SEQ ID NO: 676891 - RNA, 24 nt, Human
ucccugcccgcccuccucgucucc

SEQ ID NO: 676892 - RNA, 23 nt, Human
uccguagccacagaccgugggac

SEQ ID NO: 676893 - RNA, 19 nt, Human
ugacuugcugguccucaga

SEQ ID NO: 676894 - RNA, 22 nt, Human
uggcccccagagucaccguccu

SEQ ID NO: 676895 - RNA, 24 nt, Human
ugggauccguagccacagaccgug

SEQ ID NO: 676896 - RNA, 22 nt, Human
uuacaucgcgcagccacgcccc

SEQ ID NO: 676897 - RNA, 23 nt, Human
uuuuuuuuuuuuuuggcaaugga

SEQ ID NO: 676898 - RNA, 18 nt, Human
uuuuuuuuuuuuuuuuug

SEQ ID NO: 676899 - RNA, 25 nt, Human
uuuuuuuuuuuuuuuuuggcaaugg

SEQ ID NO: 676900 - RNA, 19 nt, Human
aaagcucugccauaaacuu

SEQ ID NO: 676901 - RNA, 18 nt, Human
caccacaaccucuccugc

SEQ ID NO: 676902 - RNA, 21 nt, Human
ccucuccugccgccgccuugc

SEQ ID NO: 676903 - RNA, 21 nt, Human
cuuagagaaacuagcaccaca

SEQ ID NO: 676904 - RNA, 18 nt, Human
ggcuuagagaaacuagca

SEQ ID NO: 676905 - RNA, 26 nt, Human
aaaaugucaagaaccauuuauaugcc

SEQ ID NO: 676906 - RNA, 20 nt, Human
aaaccaguauuuugugcuaa

SEQ ID NO: 676907 - RNA, 23 nt, Human
aaagcuuaaagguuuaagaaauu

SEQ ID NO: 676908 - RNA, 25 nt, Human
aacagaacaaaaagcuuaaagguuu

SEQ ID NO: 676909 - RNA, 27 nt, Human
aaggcgccuuugccuuuuuuccuccag

SEQ ID NO: 676910 - RNA, 24 nt, Human
aagugaucugcccaccuuggccuc

SEQ ID NO: 676911 - RNA, 24 nt, Human
acaaagaaaauacacucugaguac

SEQ ID NO: 676912 - RNA, 18 nt, Human
acauugcauuuccucucu

SEQ ID NO: 676913 - RNA, 22 nt, Human
accauguuggguaggcuggucg

SEQ ID NO: 676914 - RNA, 25 nt, Human
acucugucgccuaggcuggagugca

SEQ ID NO: 676915 - RNA, 19 nt, Human
agaacaaaaagcuuaaagg

SEQ ID NO: 676916 - RNA, 22 nt, Human
agaagagaugggguuucaccau

SEQ ID NO: 676917 - RNA, 22 nt, Human
agcagccaacuccgcggcgcgc

SEQ ID NO: 676918 - RNA, 18 nt, Human
agccggcguggagagcgc

SEQ ID NO: 676919 - RNA, 19 nt, Human
aggaauuuuuauuuuggcu

SEQ ID NO: 676920 - RNA, 22 nt, Human
aggcgccuuugccuuuuuuccu

SEQ ID NO: 676921 - RNA, 25 nt, Human
aggcuggagugcaguggcacaaucu

SEQ ID NO: 676922 - RNA, 21 nt, Human
agguguaagccacucugccca

SEQ ID NO: 676923 - RNA, 23 nt, Human
aguagcugggauuacaggaaugu

SEQ ID NO: 676924 - RNA, 20 nt, Human
agugcaguggcacaaucucg

SEQ ID NO: 676925 - RNA, 24 nt, Human
agugcaguggcacaaucucggcuc

SEQ ID NO: 676926 - RNA, 22 nt, Human
aguggaaucacuuacaucuaga

SEQ ID NO: 676927 - RNA, 22 nt, Human
augggguuucaccauguugggu

SEQ ID NO: 676928 - RNA, 24 nt, Human
augggguuucaccauguuggguag

SEQ ID NO: 676929 - RNA, 21 nt, Human
auucaaggggacuuucuucag

SEQ ID NO: 676930 - RNA, 21 nt, Human
caaaggacugaaagcaagcac

SEQ ID NO: 676931 - RNA, 24 nt, Human
caaauugcugggauuauaggugua

SEQ ID NO: 676932 - RNA, 24 nt, Human
cacacaacaauucaccaagguuaa

SEQ ID NO: 676933 - RNA, 22 nt, Human
caccauguuggguaggcugguc

SEQ ID NO: 676934 - RNA, 22 nt, Human
cacucugucgccuaggcuggag

SEQ ID NO: 676935 - RNA, 21 nt, Human
cacugcaaccucugccucccg

SEQ ID NO: 676936 - RNA, 23 nt, Human
cacugcaaccucugccucccggg

SEQ ID NO: 676937 - RNA, 19 nt, Human
cacuuuuuuuuugguaguu

SEQ ID NO: 676938 - RNA, 20 nt, Human
caggagcuaaugagugaaaa

SEQ ID NO: 676939 - RNA, 22 nt, Human
caggcgaaucuccugccucagc

SEQ ID NO: 676940 - RNA, 23 nt, Human
cauccuuugaagcaaaaccacuu

SEQ ID NO: 676941 - RNA, 24 nt, Human
cauguuggguaggcuggucgcgaa

SEQ ID NO: 676942 - RNA, 20 nt, Human
cauuacaaaacucaaaaaua

SEQ ID NO: 676943 - RNA, 21 nt, Human
cauuacaaaacucaaaaauau

SEQ ID NO: 676944 - RNA, 20 nt, Human
cauucauaacugccaucuac

SEQ ID NO: 676945 - RNA, 21 nt, Human
ccaaauugcugggauuauagg

SEQ ID NO: 676946 - RNA, 24 nt, Human
ccaaauugcugggauuauaggugu

SEQ ID NO: 676947 - RNA, 22 nt, Human
ccagagccgccggccacaccca

SEQ ID NO: 676948 - RNA, 22 nt, Human
ccauuacaaaacucaaaaauau

SEQ ID NO: 676949 - RNA, 23 nt, Human
cccgaguagcugggauuacagga

SEQ ID NO: 676950 - RNA, 23 nt, Human
cccggguucaggcgaaucuccug

SEQ ID NO: 676951 - RNA, 27 nt, Human
ccgagaccagagccgccggccacaccc

SEQ ID NO: 676952 - RNA, 20 nt, Human
ccgccggccacacccagucc

SEQ ID NO: 676953 - RNA, 20 nt, Human
ccgcgucgaccgcgcgcugc

SEQ ID NO: 676954 - RNA, 18 nt, Human
ccucccagcagccaacuc

SEQ ID NO: 676955 - RNA, 19 nt, Human
ccugaccucaagugaucug

SEQ ID NO: 676956 - RNA, 24 nt, Human
ccugaccucaagugaucugcccac

SEQ ID NO: 676957 - RNA, 22 nt, Human
cgccggagccggggcggggacg

SEQ ID NO: 676958 - RNA, 22 nt, Human
cgccggccacacccagucccgc

SEQ ID NO: 676959 - RNA, 19 nt, Human
cgcgccggagccggggcgg

SEQ ID NO: 676960 - RNA, 21 nt, Human
cgcgcgggcccggcggggacg

SEQ ID NO: 676961 - RNA, 22 nt, Human
cggcgcgccggagccggggcgg

SEQ ID NO: 676962 - RNA, 21 nt, Human
cucaaaggacugaaagcaagc

SEQ ID NO: 676963 - RNA, 24 nt, Human
cucaagugaucugcccaccuuggc

SEQ ID NO: 676964 - RNA, 24 nt, Human
cucacucugucgccuaggcuggag

SEQ ID NO: 676965 - RNA, 24 nt, Human
cucacugcaaccucugccucccgg

SEQ ID NO: 676966 - RNA, 24 nt, Human
cucagccucccgaguagcugggau

SEQ ID NO: 676967 - RNA, 20 nt, Human
cucccagcagccaacuccgc

SEQ ID NO: 676968 - RNA, 24 nt, Human
cucugaguacacacaacaauucac

SEQ ID NO: 676969 - RNA, 23 nt, Human
cugcaaccucugccucccggguu

SEQ ID NO: 676970 - RNA, 24 nt, Human
cugcaaccucugccucccggguuc

SEQ ID NO: 676971 - RNA, 21 nt, Human
cugcccagccaaaaaguuaau

SEQ ID NO: 676972 - RNA, 23 nt, Human
cugccucagccucccgaguagcu

SEQ ID NO: 676973 - RNA, 21 nt, Human
cugggauuauagguguaagcc

SEQ ID NO: 676974 - RNA, 22 nt, Human
cugggcgcucagcagccccugg

SEQ ID NO: 676975 - RNA, 25 nt, Human
cuuuacaguugaugcacauauuagc

SEQ ID NO: 676976 - RNA, 19 nt, Human
gaaaacagcuggagggagc

SEQ ID NO: 676977 - RNA, 24 nt, Human
gaaaacagcuggagggagcucagg

SEQ ID NO: 676978 - RNA, 25 nt, Human
gaaaacagcuggagggagcucaggc

SEQ ID NO: 676979 - RNA, 24 nt, Human
gaccucaagugaucugcccaccuu

SEQ ID NO: 676980 - RNA, 20 nt, Human
gagaugggguuucaccaugu

SEQ ID NO: 676981 - RNA, 25 nt, Human
gagaugggguuucaccauguugggu

SEQ ID NO: 676982 - RNA, 23 nt, Human
gaguacacacaacaauucacccc

SEQ ID NO: 676983 - RNA, 25 nt, Human
gaguagcugggauuacaggaaugug

SEQ ID NO: 676984 - RNA, 18 nt, Human
gauuacaggaaugugcca

SEQ ID NO: 676985 - RNA, 18 nt, Human
gauuauagguguaagcca

SEQ ID NO: 676986 - RNA, 20 nt, Human
gauuauagguguaagccacu

SEQ ID NO: 676987 - RNA, 19 nt, Human
gccaaaaaguuaauagaaa

SEQ ID NO: 676988 - RNA, 28 nt, Human
gcccggcuaauguuuguauuuuuagaag

SEQ ID NO: 676989 - RNA, 21 nt, Human
gccuaggcuggagugcagugg

SEQ ID NO: 676990 - RNA, 23 nt, Human
gccuaggcuggagugcaguggca

SEQ ID NO: 676991 - RNA, 20 nt, Human
gccucagccucccgaguagc

SEQ ID NO: 676992 - RNA, 24 nt, Human
gcgaaucuccugccucagccuccc

SEQ ID NO: 676993 - RNA, 19 nt, Human
gcgaggcgcgaggcacgag

SEQ ID NO: 676994 - RNA, 23 nt, Human
gcgcgcgggcccggcggggacgu

SEQ ID NO: 676995 - RNA, 19 nt, Human
gcgcggagccggcguggag

SEQ ID NO: 676996 - RNA, 21 nt, Human
gcgcugccgguguccgcuggg

SEQ ID NO: 676997 - RNA, 18 nt, Human
gcggcgcgccggagccgg

SEQ ID NO: 676998 - RNA, 19 nt, Human
gcuggagugcaguggcaca

SEQ ID NO: 676999 - RNA, 23 nt, Human
gcuggucgcgaacuccugaccuc

SEQ ID NO: 677000 - RNA, 22 nt, Human
ggagccggcguggagagcgcag

SEQ ID NO: 677001 - RNA, 19 nt, Human
ggauuauagguguaagcca

SEQ ID NO: 677002 - RNA, 24 nt, Human
ggcuggucgcgaacuccugaccuc

SEQ ID NO: 677003 - RNA, 18 nt, Human
gggguuucaccauguugg

SEQ ID NO: 677004 - RNA, 22 nt, Human
ggguuucaccauguuggguagg

SEQ ID NO: 677005 - RNA, 22 nt, Human
guagcugggauuacaggaaugu

SEQ ID NO: 677006 - RNA, 23 nt, Human
uaaaauaacccaaccccucaaau

SEQ ID NO: 677007 - RNA, 23 nt, Human
uaagagacacauuauuauaccac

SEQ ID NO: 677008 - RNA, 26 nt, Human
uaagguagaauuuuuucacagcuaua

SEQ ID NO: 677009 - RNA, 22 nt, Human
uaaguggaaucacuuacaucua

SEQ ID NO: 677010 - RNA, 23 nt, Human
uaaguuacacauguucaaaaguu

SEQ ID NO: 677011 - RNA, 24 nt, Human
uaauguuuguauuuuuagaagaga

SEQ ID NO: 677012 - RNA, 23 nt, Human
uacaggaaugugccaccacgccc

SEQ ID NO: 677013 - RNA, 24 nt, Human
uagaagagaugggguuucaccaug

SEQ ID NO: 677014 - RNA, 21 nt, Human
uaguuuacugaaagcuuguuu

SEQ ID NO: 677015 - RNA, 20 nt, Human
uauaauguguacauucuguu

SEQ ID NO: 677016 - RNA, 23 nt, Human
uaugcaaacaugaaauaaaccac

SEQ ID NO: 677017 - RNA, 24 nt, Human
ucacucugucgccuaggcuggagu

SEQ ID NO: 677018 - RNA, 24 nt, Human
ucacugcaaccucugccucccggg

SEQ ID NO: 677019 - RNA, 25 nt, Human
ucacugcaaccucugccucccgggu

SEQ ID NO: 677020 - RNA, 18 nt, Human
ucagaggugccccaccug

SEQ ID NO: 677021 - RNA, 21 nt, Human
ucagcagccccuggagcgcgg

SEQ ID NO: 677022 - RNA, 20 nt, Human
ucagccucccgaguagcugg

SEQ ID NO: 677023 - RNA, 21 nt, Human
ucaggcccgcgucgaccgcgc

SEQ ID NO: 677024 - RNA, 23 nt, Human
ucccaaauugcugggauuauagg

SEQ ID NO: 677025 - RNA, 18 nt, Human
ucccgaguagcugggauu

SEQ ID NO: 677026 - RNA, 24 nt, Human
ucccggguucaggcgaaucuccug

SEQ ID NO: 677027 - RNA, 24 nt, Human
ucgccuaggcuggagugcaguggc

SEQ ID NO: 677028 - RNA, 23 nt, Human
ucucacucugucgccuaggcugg

SEQ ID NO: 677029 - RNA, 24 nt, Human
ucucacucugucgccuaggcugga

SEQ ID NO: 677030 - RNA, 24 nt, Human
ucuccugccucagccucccgagua

SEQ ID NO: 677031 - RNA, 24 nt, Human
ucugucgccuaggcuggagugcag

SEQ ID NO: 677032 - RNA, 19 nt, Human
ugaaaacagcuggagggag

SEQ ID NO: 677033 - RNA, 20 nt, Human
ugaaaaguaacuaaguuaca

SEQ ID NO: 677034 - RNA, 22 nt, Human
ugaagcaaaaccacuuagaaac

SEQ ID NO: 677035 - RNA, 18 nt, Human
ugaccucaagugaucugc

SEQ ID NO: 677036 - RNA, 20 nt, Human
ugagaaacaaugaacucccc

SEQ ID NO: 677037 - RNA, 22 nt, Human
ugagauggagucucacucuguc

SEQ ID NO: 677038 - RNA, 24 nt, Human
ugaguacacacaacaauucaccaa

SEQ ID NO: 677039 - RNA, 24 nt, Human
ugaucugcccaccuuggccuccca

SEQ ID NO: 677040 - RNA, 20 nt, Human
ugcaaaacagaacaaaaagc

SEQ ID NO: 677041 - RNA, 24 nt, Human
ugcaaaacagaacaaaaagcuuaa

SEQ ID NO: 677042 - RNA, 24 nt, Human
ugccucagccucccgaguagcugg

SEQ ID NO: 677043 - RNA, 23 nt, Human
uggagugcaguggcacaaucucg

SEQ ID NO: 677044 - RNA, 24 nt, Human
uggagugcaguggcacaaucucgg

SEQ ID NO: 677045 - RNA, 24 nt, Human
uggcacaaucucggcucacugcaa

SEQ ID NO: 677046 - RNA, 22 nt, Human
ugggaaagauguucagaugcag

SEQ ID NO: 677047 - RNA, 18 nt, Human
ugggauuacaggaaugug

SEQ ID NO: 677048 - RNA, 22 nt, Human
ugggauuacaggaaugugccac

SEQ ID NO: 677049 - RNA, 24 nt, Human
ugggauuacaggaaugugccacca

SEQ ID NO: 677050 - RNA, 18 nt, Human
ugggauuauagguguaag

SEQ ID NO: 677051 - RNA, 19 nt, Human
ugggauuauagguguaagc

SEQ ID NO: 677052 - RNA, 21 nt, Human
ugggauuauagguguaagcca

SEQ ID NO: 677053 - RNA, 22 nt, Human
ugggauuauagguguaagccac

SEQ ID NO: 677054 - RNA, 24 nt, Human
ugggguuucaccauguuggguagg

SEQ ID NO: 677055 - RNA, 24 nt, Human
uggguaggcuggucgcgaacuccu

SEQ ID NO: 677056 - RNA, 24 nt, Human
uguauguccaaaauaucagugaaa

SEQ ID NO: 677057 - RNA, 21 nt, Human
uguccaaaauaucagugaaau

SEQ ID NO: 677058 - RNA, 20 nt, Human
ugucgccuaggcuggagugc

SEQ ID NO: 677059 - RNA, 23 nt, Human
uguuuguauuuuuagaagagaug

SEQ ID NO: 677060 - RNA, 18 nt, Human
uuagaagagaugggguuu

SEQ ID NO: 677061 - RNA, 24 nt, Human
uuagaagagaugggguuucaccau

SEQ ID NO: 677062 - RNA, 20 nt, Human
uuagagguaaaguuugggag

SEQ ID NO: 677063 - RNA, 20 nt, Human
uuauuauucuaauugucaac

SEQ ID NO: 677064 - RNA, 22 nt, Human
uucacaacauaaaaacaaaaau

SEQ ID NO: 677065 - RNA, 20 nt, Human
uuccuccacccccacuuuuu

SEQ ID NO: 677066 - RNA, 20 nt, Human
uucuguuuugguccuauauc

SEQ ID NO: 677067 - RNA, 19 nt, Human
uucuuccauuacaaaacuc

SEQ ID NO: 677068 - RNA, 24 nt, Human
uugaagcaaaaccacuuagaaacc

SEQ ID NO: 677069 - RNA, 21 nt, Human
uuucaccauguuggguaggcu

SEQ ID NO: 677070 - RNA, 26 nt, Human
uuuuccuccacccccacuuuuuuuuu

SEQ ID NO: 677071 - RNA, 22 nt, Human
uuuugaucucagaaggcgccuu

SEQ ID NO: 677072 - RNA, 24 nt, Human
uuuuuagaagagaugggguuucac

SEQ ID NO: 677073 - RNA, 19 nt, Human
aacuacaaagcagagaaac

SEQ ID NO: 677074 - RNA, 22 nt, Human
aagaauacaaaaaucaaaucug

SEQ ID NO: 677075 - RNA, 22 nt, Human
aagcagaaauuuuauuuccaag

SEQ ID NO: 677076 - RNA, 24 nt, Human
aaguacagccacaacuacaaagca

SEQ ID NO: 677077 - RNA, 21 nt, Human
aauaucucuaaaaguuaggga

SEQ ID NO: 677078 - RNA, 20 nt, Human
acaaaaaaaacaagcaguua

SEQ ID NO: 677079 - RNA, 21 nt, Human
acaaagcagagaaacguaaga

SEQ ID NO: 677080 - RNA, 22 nt, Human
acaaagcagagaaacguaagaa

SEQ ID NO: 677081 - RNA, 19 nt, Human
agcaaacuucucucgaguc

SEQ ID NO: 677082 - RNA, 22 nt, Human
agguauagaaaucuuaguaacu

SEQ ID NO: 677083 - RNA, 20 nt, Human
aggugcauuuugguauguuu

SEQ ID NO: 677084 - RNA, 22 nt, Human
aucaaaucugcuucauuuauau

SEQ ID NO: 677085 - RNA, 21 nt, Human
caaagcagagaaacguaagaa

SEQ ID NO: 677086 - RNA, 19 nt, Human
caaauuaaaucaaaggcac

SEQ ID NO: 677087 - RNA, 21 nt, Human
caggccacaggaaagggcuga

SEQ ID NO: 677088 - RNA, 24 nt, Human
caguuguuuaaauaaacaaaacua

SEQ ID NO: 677089 - RNA, 22 nt, Human
ccacaacuacaaagcagagaaa

SEQ ID NO: 677090 - RNA, 25 nt, Human
ccucccagcaauuuguacuuucugg

SEQ ID NO: 677091 - RNA, 23 nt, Human
cuuugugcuugaaggcauuccuc

SEQ ID NO: 677092 - RNA, 20 nt, Human
ggaaaaguguuuucuugaga

SEQ ID NO: 677093 - RNA, 25 nt, Human
gguaagguuuuuguuuaucuuaugu

SEQ ID NO: 677094 - RNA, 20 nt, Human
uaaaaauaaagcaaucuucc

SEQ ID NO: 677095 - RNA, 22 nt, Human
uaaaaauaaagcaaucuuccca

SEQ ID NO: 677096 - RNA, 20 nt, Human
uaaacaaaacuauuuuccuu

SEQ ID NO: 677097 - RNA, 18 nt, Human
uaaauaacuuccaggaac

SEQ ID NO: 677098 - RNA, 19 nt, Human
uaacuuccaggaacaacag

SEQ ID NO: 677099 - RNA, 23 nt, Human
uaacuuccaggaacaacaguuua

SEQ ID NO: 677100 - RNA, 20 nt, Human
uacaaagcagagaaacguaa

SEQ ID NO: 677101 - RNA, 25 nt, Human
uacaaagcagagaaacguaagaaua

SEQ ID NO: 677102 - RNA, 23 nt, Human
uacagccacaacuacaaagcaga

SEQ ID NO: 677103 - RNA, 20 nt, Human
uauaaaaguacuugcacaaa

SEQ ID NO: 677104 - RNA, 24 nt, Human
uaucucuaaaaguuagggaaaagu

SEQ ID NO: 677105 - RNA, 23 nt, Human
uauucuuccucccagcaauuugu

SEQ ID NO: 677106 - RNA, 22 nt, Human
uccuucacccaguuuucucacu

SEQ ID NO: 677107 - RNA, 25 nt, Human
ucuauuccuucacccaguuuucuca

SEQ ID NO: 677108 - RNA, 23 nt, Human
uggaauaaauaacuuccaggaac

SEQ ID NO: 677109 - RNA, 22 nt, Human
uuagggaaaaguguuuucuuga

SEQ ID NO: 677110 - RNA, 18 nt, Human
uuccagguauagaaaucu

SEQ ID NO: 677111 - RNA, 21 nt, Human
uuugcuaagaaucugcuccca

SEQ ID NO: 677112 - RNA, 18 nt, Human
uuuuuuuuuuuuuuuuug

SEQ ID NO: 677113 - RNA, 22 nt, Human
aacuaguucuuccacuuaggau

SEQ ID NO: 677114 - RNA, 19 nt, Human
aagcaucaagcaauauacu

SEQ ID NO: 677115 - RNA, 18 nt, Human
augcucaaguaauguucu

SEQ ID NO: 677116 - RNA, 19 nt, Human
auuguacaucugauacucu

SEQ ID NO: 677117 - RNA, 21 nt, Human
caacccaggaggccugcccgg

SEQ ID NO: 677118 - RNA, 23 nt, Human
caagacaaaacuuuauuugaagc

SEQ ID NO: 677119 - RNA, 19 nt, Human
caaguaauguucuuauuuc

SEQ ID NO: 677120 - RNA, 19 nt, Human
cagcagggaugcuggccac

SEQ ID NO: 677121 - RNA, 19 nt, Human
caggaugugacugcagccc

SEQ ID NO: 677122 - RNA, 19 nt, Human
cccugcaacccaggaggcc

SEQ ID NO: 677123 - RNA, 19 nt, Human
ccgagggcuuggcuuucuc

SEQ ID NO: 677124 - RNA, 19 nt, Human
gcuuggcuuucuccgggac

SEQ ID NO: 677125 - RNA, 18 nt, Human
gcuuuuauacauaacccu

SEQ ID NO: 677126 - RNA, 26 nt, Human
ggaaaacuaaaacaacuaguucuucc

SEQ ID NO: 677127 - RNA, 19 nt, Human
uaaaaaagacugcauagug

SEQ ID NO: 677128 - RNA, 19 nt, Human
uccaagcagcuucccgcug

SEQ ID NO: 677129 - RNA, 23 nt, Human
uccccagcuccccgagggcuugg

SEQ ID NO: 677130 - RNA, 23 nt, Human
uccccagcuccccgagggcuugg

SEQ ID NO: 677131 - RNA, 24 nt, Human
uccccagcuccccgagggcuuggc

SEQ ID NO: 677132 - RNA, 25 nt, Human
uccccgagggcuuggcuuucuccgg

SEQ ID NO: 677133 - RNA, 19 nt, Human
uccuaggaccugagaacuc

SEQ ID NO: 677134 - RNA, 18 nt, Human
ucuccgggacgcuuguca

SEQ ID NO: 677135 - RNA, 21 nt, Human
ugaaggccuggcccgccgccc

SEQ ID NO: 677136 - RNA, 23 nt, Human
ugccccagcuuccuaggaccuga

SEQ ID NO: 677137 - RNA, 19 nt, Human
uggcagcggagccgcugga

SEQ ID NO: 677138 - RNA, 18 nt, Human
uggcccgccgcccacccg

SEQ ID NO: 677139 - RNA, 19 nt, Human
ugggaaaacuaaaacaacu

SEQ ID NO: 677140 - RNA, 24 nt, Human
uuccauaauuguacaucugauacu

SEQ ID NO: 677141 - RNA, 24 nt, Human
uuuauacauaacccuaucuauaug

SEQ ID NO: 677142 - RNA, 21 nt, Human
uuuuauacauaacccuaucua

SEQ ID NO: 677143 - RNA, 19 nt, Human
uuuucucaagucccugcaa

SEQ ID NO: 677144 - RNA, 20 nt, Human
uuuuuuuuuuuuuuucccaa

SEQ ID NO: 677145 - RNA, 22 nt, Human
uuuuuuuuuuuuuuuucccaag

SEQ ID NO: 677146 - RNA, 21 nt, Human
aaaaccuucugccugaaaugg

SEQ ID NO: 677147 - RNA, 20 nt, Human
accugaaggaugaaggaugc

SEQ ID NO: 677148 - RNA, 23 nt, Human
acggggcccugcuguggguggag

SEQ ID NO: 677149 - RNA, 19 nt, Human
agacugagagcaagaaccu

SEQ ID NO: 677150 - RNA, 22 nt, Human
agauaggugagggugggccuug

SEQ ID NO: 677151 - RNA, 23 nt, Human
agccacaagcggcaguagcagcc

SEQ ID NO: 677152 - RNA, 19 nt, Human
agggaugggaugcaaggag

SEQ ID NO: 677153 - RNA, 19 nt, Human
caaagggugccucauaucu

SEQ ID NO: 677154 - RNA, 19 nt, Human
caaauggcuuuacccuccc

SEQ ID NO: 677155 - RNA, 21 nt, Human
ccacccaguagggaguugcag

SEQ ID NO: 677156 - RNA, 22 nt, Human
ccaggagagggaaaagggagga

SEQ ID NO: 677157 - RNA, 20 nt, Human
ccaguagggaguugcagcug

SEQ ID NO: 677158 - RNA, 22 nt, Human
ccccuggggagggccaggccag

SEQ ID NO: 677159 - RNA, 22 nt, Human
ccucacauggucaggcaagggu

SEQ ID NO: 677160 - RNA, 18 nt, Human
ccuggcccaucccucucc

SEQ ID NO: 677161 - RNA, 23 nt, Human
cucacaacaauuacugaccuaag

SEQ ID NO: 677162 - RNA, 20 nt, Human
cucuggggugcuuggggucg

SEQ ID NO: 677163 - RNA, 21 nt, Human
cugaagccacaagcggcagua

SEQ ID NO: 677164 - RNA, 18 nt, Human
gagagggaaaagggagga

SEQ ID NO: 677165 - RNA, 23 nt, Human
gaguugcagcugaaaguaucuga

SEQ ID NO: 677166 - RNA, 22 nt, Human
gaugcuagaaggagcugcucag

SEQ ID NO: 677167 - RNA, 19 nt, Human
gcaaggagccuaaggggcu

SEQ ID NO: 677168 - RNA, 22 nt, Human
gcucacaacaauuacugaccua

SEQ ID NO: 677169 - RNA, 18 nt, Human
ggaggccccuggggaggg

SEQ ID NO: 677170 - RNA, 19 nt, Human
ggaggccccuggggagggc

SEQ ID NO: 677171 - RNA, 24 nt, Human
ggcuuuacccucccaguagcucca

SEQ ID NO: 677172 - RNA, 18 nt, Human
gucuggauggcugguacc

SEQ ID NO: 677173 - RNA, 21 nt, Human
uacugaccuaaggaagggccc

SEQ ID NO: 677174 - RNA, 18 nt, Human
uagaaggagcugcucaga

SEQ ID NO: 677175 - RNA, 19 nt, Human
uagaaggagcugcucagau

SEQ ID NO: 677176 - RNA, 21 nt, Human
ucugccugaaaugggugcccc

SEQ ID NO: 677177 - RNA, 23 nt, Human
ugacggggcccugcugugggugg

SEQ ID NO: 677178 - RNA, 18 nt, Human
ugagagcaagaaccuggc

SEQ ID NO: 677179 - RNA, 21 nt, Human
ugagagcaagaaccuggccca

SEQ ID NO: 677180 - RNA, 22 nt, Human
uggaggguaccaaaaccuucug

SEQ ID NO: 677181 - RNA, 24 nt, Human
uggcuuuacccucccaguagcucc

SEQ ID NO: 677182 - RNA, 18 nt, Human
uguggguggagcaaaggg

SEQ ID NO: 677183 - RNA, 18 nt, Human
uuuuuuuuggggcucugg

SEQ ID NO: 677184 - RNA, 19 nt, Human
uuuuuuuuuuuuggggcuc

SEQ ID NO: 677185 - RNA, 23 nt, Human
uuuuuuuuuuuuuuuuuggggcu

SEQ ID NO: 677186 - RNA, 25 nt, Human
aaaaaaaacaaaagaaaaccauucc

SEQ ID NO: 677187 - RNA, 25 nt, Human
aaaaaaacaaaagaaaaccauucca

SEQ ID NO: 677188 - RNA, 23 nt, Human
aaaacaacaacaacaacaaaaaa

SEQ ID NO: 677189 - RNA, 23 nt, Human
aaaaugaaauugaaugccacgaa

SEQ ID NO: 677190 - RNA, 19 nt, Human
aaacaaaagaaaaccauuc

SEQ ID NO: 677191 - RNA, 20 nt, Human
aaagaaaaccauuccaaucc

SEQ ID NO: 677192 - RNA, 25 nt, Human
aacaacaacaacaaaaaaaaaacaa

SEQ ID NO: 677193 - RNA, 23 nt, Human
aacaacaacaacaacaaaaaaaa

SEQ ID NO: 677194 - RNA, 19 nt, Human
aacauggugaaaccccguc

SEQ ID NO: 677195 - RNA, 20 nt, Human
aacauggugaaaccccgucu

SEQ ID NO: 677196 - RNA, 21 nt, Human
aacauggugaaaccccgucuu

SEQ ID NO: 677197 - RNA, 24 nt, Human
aaucgcuugaacccaggaggugga

SEQ ID NO: 677198 - RNA, 24 nt, Human
aaugcacaccaaugcucagaugac

SEQ ID NO: 677199 - RNA, 23 nt, Human
aaugcucagaugacuugggggca

SEQ ID NO: 677200 - RNA, 27 nt, Human
acaacaaaaaaaaaacaaaagaaaacc

SEQ ID NO: 677201 - RNA, 24 nt, Human
acaacaacaaaaaaaaaacaaaag

SEQ ID NO: 677202 - RNA, 26 nt, Human
acaacaacaacaaaaaaaaaacaaaa

SEQ ID NO: 677203 - RNA, 26 nt, Human
acaacaacaacaacaaaaaaaaaaca

SEQ ID NO: 677204 - RNA, 30 nt, Human
acaacaacaacaacaaaaaaaaaacaaaag

SEQ ID NO: 677205 - RNA, 19 nt, Human
acaagggacauccaccacg

SEQ ID NO: 677206 - RNA, 24 nt, Human
acagagcgagacuccaucucaaaa

SEQ ID NO: 677207 - RNA, 23 nt, Human
accaacauggugaaaccccgucu

SEQ ID NO: 677208 - RNA, 24 nt, Human
accccgucuuuacuaaaaauacaa

SEQ ID NO: 677209 - RNA, 19 nt, Human
acugaaacaagggacaucc

SEQ ID NO: 677210 - RNA, 22 nt, Human
acugcagcccacaauggaacuu

SEQ ID NO: 677211 - RNA, 19 nt, Human
agaaaacagauggaaacau

SEQ ID NO: 677212 - RNA, 22 nt, Human
agcaugcauggucucuacaggg

SEQ ID NO: 677213 - RNA, 24 nt, Human
agccugaccaacauggugaaaccc

SEQ ID NO: 677214 - RNA, 24 nt, Human
agccugggugacagagcgagacuc

SEQ ID NO: 677215 - RNA, 24 nt, Human
agcgcuuugggaggccgaggcggg

SEQ ID NO: 677216 - RNA, 23 nt, Human
agcugggugugguggcgcgugcc

SEQ ID NO: 677217 - RNA, 19 nt, Human
aggaaaggagaugaaaacg

SEQ ID NO: 677218 - RNA, 19 nt, Human
aggagccaaaagaggaggg

SEQ ID NO: 677219 - RNA, 20 nt, Human
aggaguuugagaccagccug

SEQ ID NO: 677220 - RNA, 23 nt, Human
aggcaggagaaucgcuugaaccc

SEQ ID NO: 677221 - RNA, 24 nt, Human
aggcaggagaaucgcuugaaccca

SEQ ID NO: 677222 - RNA, 21 nt, Human
aggccgaggcggguggaucac

SEQ ID NO: 677223 - RNA, 24 nt, Human
aggcggguggaucacgaggucagg

SEQ ID NO: 677224 - RNA, 20 nt, Human
aggcugaggcaggagaaucg

SEQ ID NO: 677225 - RNA, 24 nt, Human
aggcugaggcaggagaaucgcuug

SEQ ID NO: 677226 - RNA, 23 nt, Human
agguccuuauauuacugcagccc

SEQ ID NO: 677227 - RNA, 20 nt, Human
agguggaggucgcagugagc

SEQ ID NO: 677228 - RNA, 24 nt, Human
agguggaggucgcagugagcugag

SEQ ID NO: 677229 - RNA, 20 nt, Human
aguaggagccaaaagaggag

SEQ ID NO: 677230 - RNA, 21 nt, Human
aucacgaggucaggaguuuga

SEQ ID NO: 677231 - RNA, 21 nt, Human
auugcacuccagccuggguga

SEQ ID NO: 677232 - RNA, 24 nt, Human
auugcacuccagccugggugacag

SEQ ID NO: 677233 - RNA, 22 nt, Human
caaaacaacaacaacaacaaaa

SEQ ID NO: 677234 - RNA, 24 nt, Human
caacaaaaaaaaaacaaaagaaaa

SEQ ID NO: 677235 - RNA, 21 nt, Human
caacauggugaaaccccgucu

SEQ ID NO: 677236 - RNA, 24 nt, Human
caacauggugaaaccccgucuuua

SEQ ID NO: 677237 - RNA, 23 nt, Human
caagggacauccaccacggccca

SEQ ID NO: 677238 - RNA, 19 nt, Human
caccacggcccacagccug

SEQ ID NO: 677239 - RNA, 21 nt, Human
caccaugccucacuccugcag

SEQ ID NO: 677240 - RNA, 24 nt, Human
cacgaggucaggaguuugagacca

SEQ ID NO: 677241 - RNA, 24 nt, Human
cacgccuguaaucccagcgcuuug

SEQ ID NO: 677242 - RNA, 24 nt, Human
cacggccgggugugguggcucacg

SEQ ID NO: 677243 - RNA, 22 nt, Human
cacuccagccugggugacagag

SEQ ID NO: 677244 - RNA, 24 nt, Human
cacuccagccugggugacagagcg

SEQ ID NO: 677245 - RNA, 21 nt, Human
cacugaaacaagggacaucca

SEQ ID NO: 677246 - RNA, 21 nt, Human
cagcccacaauggaacuacug

SEQ ID NO: 677247 - RNA, 22 nt, Human
cagcgcuuugggaggccgaggc

SEQ ID NO: 677248 - RNA, 24 nt, Human
cagcgcuuugggaggccgaggcgg

SEQ ID NO: 677249 - RNA, 24 nt, Human
cagcuacucaggaggcugaggcag

SEQ ID NO: 677250 - RNA, 18 nt, Human
cagcugcuuucuccagga

SEQ ID NO: 677251 - RNA, 29 nt, Human
caggagguggaggucgcagugacaacggu

SEQ ID NO: 677252 - RNA, 22 nt, Human
caucucaaaacaacaacaacaa

SEQ ID NO: 677253 - RNA, 23 nt, Human
caucucaaaacaacaacaacaac

SEQ ID NO: 677254 - RNA, 18 nt, Human
caugcauggucucuacag

SEQ ID NO: 677255 - RNA, 19 nt, Human
cauugcacuccagccuggg

SEQ ID NO: 677256 - RNA, 21 nt, Human
cauugcacuccagccugggug

SEQ ID NO: 677257 - RNA, 22 nt, Human
cauugcacuccagccuggguga

SEQ ID NO: 677258 - RNA, 24 nt, Human
cauugcacuccagccugggugaca

SEQ ID NO: 677259 - RNA, 25 nt, Human
cauugcacuccagccugggugacag

SEQ ID NO: 677260 - RNA, 21 nt, Human
ccaauaaugaaaauaacauga

SEQ ID NO: 677261 - RNA, 26 nt, Human
ccacagccugggcgccacggccccag

SEQ ID NO: 677262 - RNA, 19 nt, Human
ccagacuuacuuuuacaug

SEQ ID NO: 677263 - RNA, 22 nt, Human
ccaggaggauaugcuaagaaaa

SEQ ID NO: 677264 - RNA, 18 nt, Human
ccaucucaaaacaacaac

SEQ ID NO: 677265 - RNA, 20 nt, Human
ccauugcacuccagccuggg

SEQ ID NO: 677266 - RNA, 21 nt, Human
ccauugcacuccagccugggu

SEQ ID NO: 677267 - RNA, 21 nt, Human
ccauugcacuccagccugggu

SEQ ID NO: 677268 - RNA, 22 nt, Human
ccauugcacuccagccugggug

SEQ ID NO: 677269 - RNA, 23 nt, Human
ccauugcacuccagccuggguga

SEQ ID NO: 677270 - RNA, 24 nt, Human
ccauugcacuccagccugggugac

SEQ ID NO: 677271 - RNA, 21 nt, Human
cccacaauggaacuacugagu

SEQ ID NO: 677272 - RNA, 21 nt, Human
ccgcacccacaggucugccac

SEQ ID NO: 677273 - RNA, 23 nt, Human
ccuacuaaaaccccagcgggccc

SEQ ID NO: 677274 - RNA, 21 nt, Human
ccuaugaucccagcuacucag

SEQ ID NO: 677275 - RNA, 22 nt, Human
ccuaugaucccagcuacucagg

SEQ ID NO: 677276 - RNA, 23 nt, Human
ccugaccaacauggugaaacccc

SEQ ID NO: 677277 - RNA, 24 nt, Human
ccugaccaacauggugaaaccccg

SEQ ID NO: 677278 - RNA, 22 nt, Human
ccugggugacagagcgagacuc

SEQ ID NO: 677279 - RNA, 19 nt, Human
cgaggccgggagggcggag

SEQ ID NO: 677280 - RNA, 24 nt, Human
cgccuguaaucccagcgcuuuggg

SEQ ID NO: 677281 - RNA, 19 nt, Human
cuaaaaccccagcgggccc

SEQ ID NO: 677282 - RNA, 22 nt, Human
cuacuaaaaccccagcgggccc

SEQ ID NO: 677283 - RNA, 25 nt, Human
cucaaaacaacaacaacaacaaaaa

SEQ ID NO: 677284 - RNA, 20 nt, Human
cucacgccuguaaucccagc

SEQ ID NO: 677285 - RNA, 24 nt, Human
cucacgccuguaaucccagcgcuu

SEQ ID NO: 677286 - RNA, 18 nt, Human
gaaccucugcagcugcuu

SEQ ID NO: 677287 - RNA, 22 nt, Human
gaagagguggcauuuggagagg

SEQ ID NO: 677288 - RNA, 23 nt, Human
gagaaucgcuugaacccaggagg

SEQ ID NO: 677289 - RNA, 18 nt, Human
gagcaggaagagguggca

SEQ ID NO: 677290 - RNA, 21 nt, Human
gagcaggaagagguggcauuu

SEQ ID NO: 677291 - RNA, 23 nt, Human
gaggcggguggaucacgagguca

SEQ ID NO: 677292 - RNA, 23 nt, Human
gaggucacgccauugcacuccag

SEQ ID NO: 677293 - RNA, 23 nt, Human
gaguaggagccaaaagaggaggg

SEQ ID NO: 677294 - RNA, 21 nt, Human
gaucacgaggucaggaguuug

SEQ ID NO: 677295 - RNA, 22 nt, Human
gaucacgaggucaggaguuuga

SEQ ID NO: 677296 - RNA, 24 nt, Human
gaucacgaggucaggaguuugaga

SEQ ID NO: 677297 - RNA, 24 nt, Human
gcacuccagccugggugacagagc

SEQ ID NO: 677298 - RNA, 19 nt, Human
gcagcugcuuucuccagga

SEQ ID NO: 677299 - RNA, 22 nt, Human
gcaggagaaucgcuugaaccca

SEQ ID NO: 677300 - RNA, 19 nt, Human
gccauugcacuccagccug

SEQ ID NO: 677301 - RNA, 24 nt, Human
gccauugcacuccagccuggguga

SEQ ID NO: 677302 - RNA, 23 nt, Human
gcccacagccugggcgccacggc

SEQ ID NO: 677303 - RNA, 23 nt, Human
gcgggggugcccuucgcgccccg

SEQ ID NO: 677304 - RNA, 21 nt, Human
ggagccaaaagaggagggagc

SEQ ID NO: 677305 - RNA, 20 nt, Human
ggaggucgcagugagcugag

SEQ ID NO: 677306 - RNA, 24 nt, Human
ggaggucgcagugagcugagguca

SEQ ID NO: 677307 - RNA, 20 nt, Human
ggaggucgcagugagcuggc

SEQ ID NO: 677308 - RNA, 23 nt, Human
ggaucacgaggucaggaguuuga

SEQ ID NO: 677309 - RNA, 21 nt, Human
ggcauuuggagaggggagacc

SEQ ID NO: 677310 - RNA, 22 nt, Human
gggaaggggcugcccuacuaaa

SEQ ID NO: 677311 - RNA, 21 nt, Human
gggcagggauggguguugguc

SEQ ID NO: 677312 - RNA, 23 nt, Human
gggcgcgugcuggaggcgggggu

SEQ ID NO: 677313 - RNA, 18 nt, Human
gggcggagggcgcgugcu

SEQ ID NO: 677314 - RNA, 21 nt, Human
gggcugcccuacuaaaacccc

SEQ ID NO: 677315 - RNA, 19 nt, Human
gguggaggucgcagugagc

SEQ ID NO: 677316 - RNA, 23 nt, Human
gguggaucacgaggucaggaguu

SEQ ID NO: 677317 - RNA, 24 nt, Human
gguggcucacgccuguaaucccag

SEQ ID NO: 677318 - RNA, 23 nt, Human
ggugugguggcucacgccuguaa

SEQ ID NO: 677319 - RNA, 22 nt, Human
gguuguugucuuuuuacuagga

SEQ ID NO: 677320 - RNA, 24 nt, Human
gucacgccauugcacuccagccug

SEQ ID NO: 677321 - RNA, 20 nt, Human
guggaggucgcagugagcug

SEQ ID NO: 677322 - RNA, 23 nt, Human
guggaucacgaggucaggaguuu

SEQ ID NO: 677323 - RNA, 25 nt, Human
uaaaaccccagcgggcccagugcug

SEQ ID NO: 677324 - RNA, 21 nt, Human
uaaauaaauuauccacugaaa

SEQ ID NO: 677325 - RNA, 22 nt, Human
uaagaaaaccauuccacggccg

SEQ ID NO: 677326 - RNA, 22 nt, Human
uaaguccagacuuacuuuuaca

SEQ ID NO: 677327 - RNA, 25 nt, Human
uaccuuaaugcacaccaaugcucag

SEQ ID NO: 677328 - RNA, 18 nt, Human
uacuaaaaauacaaaaaa

SEQ ID NO: 677329 - RNA, 21 nt, Human
uacugaguaggagccaaaaga

SEQ ID NO: 677330 - RNA, 23 nt, Human
ucaaaacaacaacaacaacaaaa

SEQ ID NO: 677331 - RNA, 24 nt, Human
ucacgaggucaggaguuugagacc

SEQ ID NO: 677332 - RNA, 23 nt, Human
ucacgccauugcacuccagccug

SEQ ID NO: 677333 - RNA, 22 nt, Human
ucacgccuguaaucccagcgcu

SEQ ID NO: 677334 - RNA, 23 nt, Human
uccagccugggugacagagcgag

SEQ ID NO: 677335 - RNA, 24 nt, Human
uccagccugggugacagagcgaga

SEQ ID NO: 677336 - RNA, 20 nt, Human
ucgcagugagcugaggucac

SEQ ID NO: 677337 - RNA, 21 nt, Human
ucgcagugagcugaggucacg

SEQ ID NO: 677338 - RNA, 24 nt, Human
ucgcuugaacccaggagguggagg

SEQ ID NO: 677339 - RNA, 22 nt, Human
ucugcagcugcuuucuccagga

SEQ ID NO: 677340 - RNA, 23 nt, Human
ucugcagcugcuuucuccaggaa

SEQ ID NO: 677341 - RNA, 24 nt, Human
ugaccaacauggugaaaccccguc

SEQ ID NO: 677342 - RNA, 23 nt, Human
ugagaccagccugaccaacaugg

SEQ ID NO: 677343 - RNA, 24 nt, Human
ugagaccagccugaccaacauggu

SEQ ID NO: 677344 - RNA, 22 nt, Human
ugagcugaggucacgccauugc

SEQ ID NO: 677345 - RNA, 20 nt, Human
ugaggcaggagaaucgcuug

SEQ ID NO: 677346 - RNA, 24 nt, Human
ugaggcaggagaaucgcuugaacc

SEQ ID NO: 677347 - RNA, 25 nt, Human
ugaggcaggagaaucgcuugaaccc

SEQ ID NO: 677348 - RNA, 22 nt, Human
ugaguaccuuaaugcacaccaa

SEQ ID NO: 677349 - RNA, 24 nt, Human
ugcacuccagccugggugacagag

SEQ ID NO: 677350 - RNA, 20 nt, Human
ugcccuacuaaaaccccagc

SEQ ID NO: 677351 - RNA, 18 nt, Human
ugccuaugaucccagcua

SEQ ID NO: 677352 - RNA, 24 nt, Human
ugccuaugaucccagcuacucagg

SEQ ID NO: 677353 - RNA, 21 nt, Human
ugcuaagaaaaccauuccacg

SEQ ID NO: 677354 - RNA, 18 nt, Human
ugcuggaggcgggggugc

SEQ ID NO: 677355 - RNA, 18 nt, Human
uggaggucgcagugagcu

SEQ ID NO: 677356 - RNA, 21 nt, Human
uggaucacgaggucaggaguu

SEQ ID NO: 677357 - RNA, 24 nt, Human
uggcgcgugccuaugaucccagcu

SEQ ID NO: 677358 - RNA, 22 nt, Human
uggcucacgccuguaaucccag

SEQ ID NO: 677359 - RNA, 23 nt, Human
uggcucacgccuguaaucccagc

SEQ ID NO: 677360 - RNA, 24 nt, Human
uggcucacgccuguaaucccagcg

SEQ ID NO: 677361 - RNA, 18 nt, Human
uggcugggcagggauggg

SEQ ID NO: 677362 - RNA, 23 nt, Human
ugggaggccgaggcggguggauc

SEQ ID NO: 677363 - RNA, 24 nt, Human
ugggaggccgaggcggguggauca

SEQ ID NO: 677364 - RNA, 18 nt, Human
ugggugugguggcgcgug

SEQ ID NO: 677365 - RNA, 23 nt, Human
uggucaaaaugcucuaauuugau

SEQ ID NO: 677366 - RNA, 24 nt, Human
ugguggcgcgugccuaugauccca

SEQ ID NO: 677367 - RNA, 24 nt, Human
ugguggcucacgccuguaauccca

SEQ ID NO: 677368 - RNA, 19 nt, Human
uguggguuguugucuuuuu

SEQ ID NO: 677369 - RNA, 22 nt, Human
uuaaugcacaccaaugcucaga

SEQ ID NO: 677370 - RNA, 22 nt, Human
uuacagucaaguugacuucggu

SEQ ID NO: 677371 - RNA, 20 nt, Human
uuagcugggugugguggcgc

SEQ ID NO: 677372 - RNA, 20 nt, Human
uuagcugggugugguggcgc

SEQ ID NO: 677373 - RNA, 24 nt, Human
uuagcugggugugguggcgcgugc

SEQ ID NO: 677374 - RNA, 25 nt, Human
uugggaggccgaggcggguggauca

SEQ ID NO: 677375 - RNA, 18 nt, Human
uuuuuuuuuuuuuuugca

SEQ ID NO: 677376 - RNA, 20 nt, Human
uuuuuuuuuuuuuuugcacu

SEQ ID NO: 677377 - RNA, 23 nt, Human
acuaggagagcaggaguagaagu

SEQ ID NO: 677378 - RNA, 20 nt, Human
auuucuuuuuuggggggaac

SEQ ID NO: 677379 - RNA, 20 nt, Human
cuaaagacuuacuauucugu

SEQ ID NO: 677380 - RNA, 21 nt, Human
cuaaagacuuacuauucuguu

SEQ ID NO: 677381 - RNA, 19 nt, Human
gggaacuaggagagcagga

SEQ ID NO: 677382 - RNA, 19 nt, Human
ugaggaggaugaagugugg

SEQ ID NO: 677383 - RNA, 18 nt, Human
uggccuggagagaaacug

SEQ ID NO: 677384 - RNA, 19 nt, Human
uuauggcacuaaagacuua

SEQ ID NO: 677385 - RNA, 19 nt, Human
uuggggggaacuaggagag

SEQ ID NO: 677386 - RNA, 22 nt, Human
uuggggggaacuaggagagcag

SEQ ID NO: 677387 - RNA, 22 nt, Human
acacagcacccucuugacaccu

SEQ ID NO: 677388 - RNA, 23 nt, Human
ccagcaccugcucacaaugggug

SEQ ID NO: 677389 - RNA, 23 nt, Human
ccucgcccagcaccugcucacaa

SEQ ID NO: 677390 - RNA, 20 nt, Human
ccucgguccagggcacccuc

SEQ ID NO: 677391 - RNA, 26 nt, Human
uaggacacagcacccucuugacaccu

SEQ ID NO: 677392 - RNA, 20 nt, Human
aaaagccacucccauagagu

SEQ ID NO: 677393 - RNA, 18 nt, Human
aacaggaauccuaguuuu

SEQ ID NO: 677394 - RNA, 21 nt, Human
aacccacggagcuccauccuu

SEQ ID NO: 677395 - RNA, 18 nt, Human
aagcggccucuggaaggc

SEQ ID NO: 677396 - RNA, 19 nt, Human
aagggccgucucuaccucc

SEQ ID NO: 677397 - RNA, 22 nt, Human
acaccugaaacugccgaggagu

SEQ ID NO: 677398 - RNA, 20 nt, Human
acacuuguacaaaauacugc

SEQ ID NO: 677399 - RNA, 19 nt, Human
acagaaaguuuuauacaag

SEQ ID NO: 677400 - RNA, 18 nt, Human
acaguugaaaaaggaaau

SEQ ID NO: 677401 - RNA, 20 nt, Human
acuagauuuaaaacagcuug

SEQ ID NO: 677402 - RNA, 20 nt, Human
acugccgaggaguggggccc

SEQ ID NO: 677403 - RNA, 20 nt, Human
agagagcagcuccacagaca

SEQ ID NO: 677404 - RNA, 19 nt, Human
agaugcugauggcuucagc

SEQ ID NO: 677405 - RNA, 18 nt, Human
agaugcugcccugacuug

SEQ ID NO: 677406 - RNA, 22 nt, Human
agcacagaaucaagacaaagca

SEQ ID NO: 677407 - RNA, 18 nt, Human
agccuagucagugaagcc

SEQ ID NO: 677408 - RNA, 22 nt, Human
aggaggagccagaggaggaggu

SEQ ID NO: 677409 - RNA, 19 nt, Human
aggcagacugccccaaugu

SEQ ID NO: 677410 - RNA, 21 nt, Human
aggcagagagccugagcuggg

SEQ ID NO: 677411 - RNA, 18 nt, Human
aggugguuugagagacag

SEQ ID NO: 677412 - RNA, 18 nt, Human
aguagaagacaggugguc

SEQ ID NO: 677413 - RNA, 23 nt, Human
agugagaagacaaaggaacagga

SEQ ID NO: 677414 - RNA, 19 nt, Human
auaaagggcuauagauacc

SEQ ID NO: 677415 - RNA, 23 nt, Human
aucagcuacccccugagguucag

SEQ ID NO: 677416 - RNA, 24 nt, Human
auugcaccacagaugaauuugcua

SEQ ID NO: 677417 - RNA, 24 nt, Human
caaagcacacgagaucccacugca

SEQ ID NO: 677418 - RNA, 25 nt, Human
caaagccccgccucccgggccucuc

SEQ ID NO: 677419 - RNA, 19 nt, Human
caacccccaccgcccagcc

SEQ ID NO: 677420 - RNA, 23 nt, Human
caagacaaagcacacgagauccc

SEQ ID NO: 677421 - RNA, 20 nt, Human
cacacgagaucccacugcac

SEQ ID NO: 677422 - RNA, 21 nt, Human
caccaucucaaagggccgucu

SEQ ID NO: 677423 - RNA, 20 nt, Human
caccgcccagccggcgagcc

SEQ ID NO: 677424 - RNA, 21 nt, Human
caccgcccagccggcgagccg

SEQ ID NO: 677425 - RNA, 19 nt, Human
cacucccauagaguuccca

SEQ ID NO: 677426 - RNA, 22 nt, Human
cacugcacuucagagggagcag

SEQ ID NO: 677427 - RNA, 23 nt, Human
cacugcacuucagagggagcagu

SEQ ID NO: 677428 - RNA, 21 nt, Human
cagaaucaagacaaagcacac

SEQ ID NO: 677429 - RNA, 20 nt, Human
cagagagccugagcugggac

SEQ ID NO: 677430 - RNA, 24 nt, Human
cagaugacgagcucucaguagucc

SEQ ID NO: 677431 - RNA, 24 nt, Human
cagggugaaagaauauuuucuuga

SEQ ID NO: 677432 - RNA, 18 nt, Human
caggugcagauggggugc

SEQ ID NO: 677433 - RNA, 19 nt, Human
cagguggucugcaucgccc

SEQ ID NO: 677434 - RNA, 24 nt, Human
cagguggucugcaucgcccagcgg

SEQ ID NO: 677435 - RNA, 21 nt, Human
caucgaggcugggggacagcu

SEQ ID NO: 677436 - RNA, 22 nt, Human
caugcuacaagugcugcagcca

SEQ ID NO: 677437 - RNA, 23 nt, Human
caugugcaugcuacaagugcugc

SEQ ID NO: 677438 - RNA, 21 nt, Human
ccacggaggcagcggacgggc

SEQ ID NO: 677439 - RNA, 19 nt, Human
ccacugcacuucagaggga

SEQ ID NO: 677440 - RNA, 24 nt, Human
ccacugcacuucagagggagcagu

SEQ ID NO: 677441 - RNA, 21 nt, Human
ccacuggagacagcggacugu

SEQ ID NO: 677442 - RNA, 23 nt, Human
ccagcaaagccccgccucccggg

SEQ ID NO: 677443 - RNA, 19 nt, Human
ccauagaguucccauggag

SEQ ID NO: 677444 - RNA, 20 nt, Human
cccacagcuacaccugaaac

SEQ ID NO: 677445 - RNA, 19 nt, Human
cccagcggcagcgcagcac

SEQ ID NO: 677446 - RNA, 20 nt, Human
cccuaaagugaguacagacc

SEQ ID NO: 677447 - RNA, 19 nt, Human
cccuuuccucaguaaacga

SEQ ID NO: 677448 - RNA, 19 nt, Human
ccuacaaaguuucagacag

SEQ ID NO: 677449 - RNA, 22 nt, Human
ccuacaaaguuucagacaucca

SEQ ID NO: 677450 - RNA, 22 nt, Human
ccugcagggaagugggccuuag

SEQ ID NO: 677451 - RNA, 23 nt, Human
ccuggaacaguugaaaaaggaaa

SEQ ID NO: 677452 - RNA, 18 nt, Human
cgagccgagcagcgaccc

SEQ ID NO: 677453 - RNA, 21 nt, Human
cgugugggaccaguucaaugg

SEQ ID NO: 677454 - RNA, 23 nt, Human
cucaguaguccuggugccugugu

SEQ ID NO: 677455 - RNA, 19 nt, Human
cugcaaggaggagccagag

SEQ ID NO: 677456 - RNA, 21 nt, Human
cugccgaggaguggggccugg

SEQ ID NO: 677457 - RNA, 19 nt, Human
cuggaacaguugaaaaagg

SEQ ID NO: 677458 - RNA, 26 nt, Human
cuggacgcucugauuuuaagaacacc

SEQ ID NO: 677459 - RNA, 18 nt, Human
cugggaagccagcaaagc

SEQ ID NO: 677460 - RNA, 22 nt, Human
gaacaggaauccuaguuuuagg

SEQ ID NO: 677461 - RNA, 18 nt, Human
gacuugguucuucaugga

SEQ ID NO: 677462 - RNA, 29 nt, Human
gagagcucaagauccaucgcuccgagggg

SEQ ID NO: 677463 - RNA, 20 nt, Human
gagaucccacugcacuucag

SEQ ID NO: 677464 - RNA, 18 nt, Human
gaggcgccuacaaaguuu

SEQ ID NO: 677465 - RNA, 18 nt, Human
gaguuggcuguuccuggc

SEQ ID NO: 677466 - RNA, 18 nt, Human
gcaaggaggagccagagg

SEQ ID NO: 677467 - RNA, 18 nt, Human
gcagcgcagcacagaauc

SEQ ID NO: 677468 - RNA, 25 nt, Human
gccggcccgcgucaccaacccccac

SEQ ID NO: 677469 - RNA, 18 nt, Human
gccuggggugcguguggg

SEQ ID NO: 677470 - RNA, 20 nt, Human
gcugcagccagcugggcgcc

SEQ ID NO: 677471 - RNA, 21 nt, Human
gcuggagaagccacggaggca

SEQ ID NO: 677472 - RNA, 19 nt, Human
ggaaggcagagagccugag

SEQ ID NO: 677473 - RNA, 18 nt, Human
ggagccagaggaggaggu

SEQ ID NO: 677474 - RNA, 18 nt, Human
ggaggagccagaggagga

SEQ ID NO: 677475 - RNA, 22 nt, Human
ggggugggaugagggagagaga

SEQ ID NO: 677476 - RNA, 20 nt, Human
ggugcagauggggugcuggc

SEQ ID NO: 677477 - RNA, 23 nt, Human
guaaacgaggaauccauaaaaca

SEQ ID NO: 677478 - RNA, 24 nt, Human
guccugccucucucugggaagcca

SEQ ID NO: 677479 - RNA, 23 nt, Human
guuacagugauuaaaaacccacc

SEQ ID NO: 677480 - RNA, 24 nt, Human
uaaaacaaguuuuuguugguuacu

SEQ ID NO: 677481 - RNA, 21 nt, Human
uaaaguggagauacugucaga

SEQ ID NO: 677482 - RNA, 21 nt, Human
uaagugcuaccgugaaguuag

SEQ ID NO: 677483 - RNA, 18 nt, Human
uacaaaauacugcaguua

SEQ ID NO: 677484 - RNA, 19 nt, Human
uacaaaauacugcaguuac

SEQ ID NO: 677485 - RNA, 18 nt, Human
uacauggugacucaggug

SEQ ID NO: 677486 - RNA, 24 nt, Human
uacccaucaaacuugcagaacaga

SEQ ID NO: 677487 - RNA, 20 nt, Human
uacuaccagagucaugugca

SEQ ID NO: 677488 - RNA, 19 nt, Human
uagaagacagguggucugc

SEQ ID NO: 677489 - RNA, 22 nt, Human
uagaagacagguggucugcauc

SEQ ID NO: 677490 - RNA, 26 nt, Human
uagcagcgcuacauggugacucaggu

SEQ ID NO: 677491 - RNA, 22 nt, Human
uaguuuuaggaagaauuuccuc

SEQ ID NO: 677492 - RNA, 20 nt, Human
uauacaagucaaagugcauu

SEQ ID NO: 677493 - RNA, 21 nt, Human
ucaacccacggagcuccaucc

SEQ ID NO: 677494 - RNA, 22 nt, Human
ucaccaacccccaccgcccagc

SEQ ID NO: 677495 - RNA, 23 nt, Human
ucagaaaggugcauuuucucauu

SEQ ID NO: 677496 - RNA, 22 nt, Human
uccaagcuagcugcauucccac

SEQ ID NO: 677497 - RNA, 25 nt, Human
uccacagacaaggcagaccgggguc

SEQ ID NO: 677498 - RNA, 22 nt, Human
uccacagacaaggcagacugcc

SEQ ID NO: 677499 - RNA, 19 nt, Human
ucccacuuaaaugugggcc

SEQ ID NO: 677500 - RNA, 19 nt, Human
ucccauagaguucccaugg

SEQ ID NO: 677501 - RNA, 23 nt, Human
uccucaguaaacgaggaauccau

SEQ ID NO: 677502 - RNA, 21 nt, Human
ucucaaagggccgucucuacc

SEQ ID NO: 677503 - RNA, 19 nt, Human
ucucugggaagccagcaaa

SEQ ID NO: 677504 - RNA, 23 nt, Human
ucucugggaagccagcaaagccc

SEQ ID NO: 677505 - RNA, 18 nt, Human
ucugggaagccagcaaag

SEQ ID NO: 677506 - RNA, 19 nt, Human
ucuguccugccucucucug

SEQ ID NO: 677507 - RNA, 23 nt, Human
ucuguccugccucucucugggaa

SEQ ID NO: 677508 - RNA, 19 nt, Human
ucuuaaguaaaguggagau

SEQ ID NO: 677509 - RNA, 21 nt, Human
ucuuacccaucaaacuugcag

SEQ ID NO: 677510 - RNA, 21 nt, Human
ucuuagagauucuuuccugga

SEQ ID NO: 677511 - RNA, 23 nt, Human
ugaagaacuucagcuauaaaaaa

SEQ ID NO: 677512 - RNA, 18 nt, Human
ugacgagcucucaguagu

SEQ ID NO: 677513 - RNA, 21 nt, Human
ugagaagacaaaggaacagga

SEQ ID NO: 677514 - RNA, 21 nt, Human
ugagggagagagagcagcucc

SEQ ID NO: 677515 - RNA, 24 nt, Human
ugagggagagagagcagcuccaca

SEQ ID NO: 677516 - RNA, 20 nt, Human
ugcaaggaggagccagagga

SEQ ID NO: 677517 - RNA, 21 nt, Human
ugcuacagcaguuuucaagaa

SEQ ID NO: 677518 - RNA, 23 nt, Human
uggaaggagagcucaagauccau

SEQ ID NO: 677519 - RNA, 20 nt, Human
uggcagaggcagguggguuu

SEQ ID NO: 677520 - RNA, 20 nt, Human
uggcuggagcugggauauua

SEQ ID NO: 677521 - RNA, 22 nt, Human
uggcuucagcuguaagugcuac

SEQ ID NO: 677522 - RNA, 18 nt, Human
ugggccaagggcuuaugg

SEQ ID NO: 677523 - RNA, 25 nt, Human
ugggggacagcugcugcccccacug

SEQ ID NO: 677524 - RNA, 18 nt, Human
uggguuuggccugcuggg

SEQ ID NO: 677525 - RNA, 24 nt, Human
uguagugucauuuuaaguauuugg

SEQ ID NO: 677526 - RNA, 20 nt, Human
uguccugccucucucuggga

SEQ ID NO: 677527 - RNA, 23 nt, Human
uuaaaugugggccaagggcuuau

SEQ ID NO: 677528 - RNA, 21 nt, Human
uuagacacuuguacaaaauac

SEQ ID NO: 677529 - RNA, 19 nt, Human
uuccuggaacaguugaaaa

SEQ ID NO: 677530 - RNA, 18 nt, Human
uugaaaaaaggcuaccuc

SEQ ID NO: 677531 - RNA, 23 nt, Human
uuggcccuaagcaugauugagaa

SEQ ID NO: 677532 - RNA, 18 nt, Human
uuuaaucaaaaaguguau

SEQ ID NO: 677533 - RNA, 18 nt, Human
uuucuugagaggaaggga

SEQ ID NO: 677534 - RNA, 21 nt, Human
uuugcuacagcaguuuucaag

SEQ ID NO: 677535 - RNA, 24 nt, Human
uuugcuaguuuucuuaaguaaagu

SEQ ID NO: 677536 - RNA, 18 nt, Human
uuuuuuuuuuuuuuuuug

SEQ ID NO: 677537 - RNA, 25 nt, Human
uuuuuuuuuuuuuuuuugcaucugg

SEQ ID NO: 677538 - RNA, 24 nt, Human
aaauccacugcagauuaggggugg

SEQ ID NO: 677539 - RNA, 20 nt, Human
accccuuguccagcagccuc

SEQ ID NO: 677540 - RNA, 21 nt, Human
acugcccccuggcugauguac

SEQ ID NO: 677541 - RNA, 23 nt, Human
agugcugcgucuuuggcacugcc

SEQ ID NO: 677542 - RNA, 24 nt, Human
auccugcuccugaagccucuccug

SEQ ID NO: 677543 - RNA, 20 nt, Human
cacacucuccagcuccuucc

SEQ ID NO: 677544 - RNA, 19 nt, Human
caccagaaguggcuguguc

SEQ ID NO: 677545 - RNA, 22 nt, Human
cacugaguugacugauuauugc

SEQ ID NO: 677546 - RNA, 21 nt, Human
cagauccuccaggguagcaga

SEQ ID NO: 677547 - RNA, 22 nt, Human
cagaugaugcauggccuucccc

SEQ ID NO: 677548 - RNA, 21 nt, Human
cagccucucauccugcuccug

SEQ ID NO: 677549 - RNA, 22 nt, Human
caucuccuccugguccugggcc

SEQ ID NO: 677550 - RNA, 21 nt, Human
ccagaaguggcugugucaggg

SEQ ID NO: 677551 - RNA, 21 nt, Human
ccagcagccucuccuguuccu

SEQ ID NO: 677552 - RNA, 21 nt, Human
ccagcagccucuccuguuccu

SEQ ID NO: 677553 - RNA, 20 nt, Human
ccccaggugagugguaacca

SEQ ID NO: 677554 - RNA, 18 nt, Human
cccguagauaccuguugc

SEQ ID NO: 677555 - RNA, 21 nt, Human
cccguagauaccuguugcuga

SEQ ID NO: 677556 - RNA, 22 nt, Human
cccguagauaccuguugcugaa

SEQ ID NO: 677557 - RNA, 22 nt, Human
ccuccugucuccuguucaggag

SEQ ID NO: 677558 - RNA, 23 nt, Human
ccucuccagcucccacagagucu

SEQ ID NO: 677559 - RNA, 18 nt, Human
ccugacgauguccuccuc

SEQ ID NO: 677560 - RNA, 23 nt, Human
ccugcagccucuccuccugucuc

SEQ ID NO: 677561 - RNA, 25 nt, Human
ccugcagccucuccuccugucuccu

SEQ ID NO: 677562 - RNA, 23 nt, Human
ccuguuagcuccugcuggaaugc

SEQ ID NO: 677563 - RNA, 20 nt, Human
ccuuguccagcagccucucc

SEQ ID NO: 677564 - RNA, 22 nt, Human
cgucuuuggcacugcccccugg

SEQ ID NO: 677565 - RNA, 27 nt, Human
cuccagcuccuuccuuagggggccgcc

SEQ ID NO: 677566 - RNA, 24 nt, Human
cugaagccucuccuguuccagcag

SEQ ID NO: 677567 - RNA, 19 nt, Human
cugcagccucuccuccugu

SEQ ID NO: 677568 - RNA, 23 nt, Human
cugcagccucuccuccugucucc

SEQ ID NO: 677569 - RNA, 19 nt, Human
gccacagccucucauccug

SEQ ID NO: 677570 - RNA, 21 nt, Human
gcccccuggcugauguacuuu

SEQ ID NO: 677571 - RNA, 22 nt, Human
gccuggagcugucuucccacac

SEQ ID NO: 677572 - RNA, 21 nt, Human
gcuccugaagccucuccuguu

SEQ ID NO: 677573 - RNA, 19 nt, Human
gcuggaaugccagggcucu

SEQ ID NO: 677574 - RNA, 19 nt, Human
ggcucuggggccagggguu

SEQ ID NO: 677575 - RNA, 25 nt, Human
gggggcucuggggccagggguucag

SEQ ID NO: 677576 - RNA, 22 nt, Human
ggucucaucuuguagcugcucc

SEQ ID NO: 677577 - RNA, 23 nt, Human
uagcagaugaugcauggccuucc

SEQ ID NO: 677578 - RNA, 23 nt, Human
uauugcggagcuugagugcaggg

SEQ ID NO: 677579 - RNA, 24 nt, Human
ucaguggugaucuucaucuccucc

SEQ ID NO: 677580 - RNA, 23 nt, Human
uccugcuccugaagccucuccug

SEQ ID NO: 677581 - RNA, 20 nt, Human
ucucaucuuguagcugcucc

SEQ ID NO: 677582 - RNA, 20 nt, Human
ucuccagcucccacagaguc

SEQ ID NO: 677583 - RNA, 24 nt, Human
ucuccugcugccacagccucucau

SEQ ID NO: 677584 - RNA, 18 nt, Human
ugaagcucuaguuucucc

SEQ ID NO: 677585 - RNA, 21 nt, Human
ugagugguaaccaccagaagu

SEQ ID NO: 677586 - RNA, 22 nt, Human
ugaguugacugauuauugcgga

SEQ ID NO: 677587 - RNA, 20 nt, Human
ugcgucuuuggcacugcccu

SEQ ID NO: 677588 - RNA, 21 nt, Human
ugcugcgucuuuggcacugcc

SEQ ID NO: 677589 - RNA, 24 nt, Human
uggagcugucuucccacacucucc

SEQ ID NO: 677590 - RNA, 21 nt, Human
uggcacugcccccuggcugau

SEQ ID NO: 677591 - RNA, 22 nt, Human
uggcugauguacuuucucaugg

SEQ ID NO: 677592 - RNA, 19 nt, Human
uguccagcagccucuccug

SEQ ID NO: 677593 - RNA, 24 nt, Human
uguucaggagacucaacaucugau

SEQ ID NO: 677594 - RNA, 24 nt, Human
uuaggggugguagucagggucccu

SEQ ID NO: 677595 - RNA, 19 nt, Human
uucaguggugaucuucauc

SEQ ID NO: 677596 - RNA, 19 nt, Human
uuccaccucagccuggagc

SEQ ID NO: 677597 - RNA, 19 nt, Human
uuccugcagccucuccucc

SEQ ID NO: 677598 - RNA, 24 nt, Human
uuggcacugcccccuggcugaugu

SEQ ID NO: 677599 - RNA, 22 nt, Human
aaaaaaaaaaaaaaaaacaaag

SEQ ID NO: 677600 - RNA, 23 nt, Human
aaaaaaaaaaaaaaaaacaaaga

SEQ ID NO: 677601 - RNA, 25 nt, Human
aaaaaaaacaaguaaaaagccaaag

SEQ ID NO: 677602 - RNA, 19 nt, Human
aaaaaacaaguaaaaagcc

SEQ ID NO: 677603 - RNA, 19 nt, Human
aaaaaacaaguaaaaagcc

SEQ ID NO: 677604 - RNA, 21 nt, Human
aaaaagccaaagguacagaua

SEQ ID NO: 677605 - RNA, 20 nt, Human
aaagcacugaauuuuccaga

SEQ ID NO: 677606 - RNA, 24 nt, Human
aacaaagcgagacucugucucaaa

SEQ ID NO: 677607 - RNA, 20 nt, Human
aacaaguaacucaaaagcac

SEQ ID NO: 677608 - RNA, 24 nt, Human
aacacgccacauaaugcacuggug

SEQ ID NO: 677609 - RNA, 19 nt, Human
aacauggugaaaccccauu

SEQ ID NO: 677610 - RNA, 21 nt, Human
aacauggugaaaccccauugc

SEQ ID NO: 677611 - RNA, 22 nt, Human
aagacaaacaaggaaguacacg

SEQ ID NO: 677612 - RNA, 20 nt, Human
aagcacugaauuuuccagac

SEQ ID NO: 677613 - RNA, 24 nt, Human
aaucgcaugaaccugggaggcgga

SEQ ID NO: 677614 - RNA, 19 nt, Human
acaaacaaggaaguacacg

SEQ ID NO: 677615 - RNA, 21 nt, Human
acaaagcgagacucugucuca

SEQ ID NO: 677616 - RNA, 24 nt, Human
acaaagcgagacucugucucaaaa

SEQ ID NO: 677617 - RNA, 23 nt, Human
acagcacggacuguguucuggug

SEQ ID NO: 677618 - RNA, 20 nt, Human
accauggaaaaacacaugaa

SEQ ID NO: 677619 - RNA, 19 nt, Human
acccuguuuuguaagcagu

SEQ ID NO: 677620 - RNA, 21 nt, Human
acgacaccagcugagcugacg

SEQ ID NO: 677621 - RNA, 25 nt, Human
acuaaaaauacaaacauuagccugg

SEQ ID NO: 677622 - RNA, 28 nt, Human
acucugucucaaaaaaaaaaaaaaaaaa

SEQ ID NO: 677623 - RNA, 20 nt, Human
acugaaguaacucuggaagg

SEQ ID NO: 677624 - RNA, 18 nt, Human
acugcacuccagccuggg

SEQ ID NO: 677625 - RNA, 23 nt, Human
acugcacuccagccugggcaaca

SEQ ID NO: 677626 - RNA, 18 nt, Human
acugcagccgggggcggu

SEQ ID NO: 677627 - RNA, 24 nt, Human
acuugaggucaggagaucgagacc

SEQ ID NO: 677628 - RNA, 18 nt, Human
agaacagccacaacuuga

SEQ ID NO: 677629 - RNA, 18 nt, Human
agaagccacgaccuacaa

SEQ ID NO: 677630 - RNA, 25 nt, Human
agaguugagggccagcuccuuagcg

SEQ ID NO: 677631 - RNA, 25 nt, Human
agaucacuugaggucaggagaucga

SEQ ID NO: 677632 - RNA, 22 nt, Human
agaugggcagaucacuugaggu

SEQ ID NO: 677633 - RNA, 26 nt, Human
agaugggcagaucacuugaggucagg

SEQ ID NO: 677634 - RNA, 24 nt, Human
agcacuuugggaggcugagauggg

SEQ ID NO: 677635 - RNA, 24 nt, Human
agccugggcaacaaagcgagacuc

SEQ ID NO: 677636 - RNA, 22 nt, Human
agcgacaaagacaaacaaggaa

SEQ ID NO: 677637 - RNA, 20 nt, Human
aggagaguugagggccagcu

SEQ ID NO: 677638 - RNA, 22 nt, Human
aggcaggagaaucgcaugaacc

SEQ ID NO: 677639 - RNA, 24 nt, Human
aggcaggagaaucgcaugaaccug

SEQ ID NO: 677640 - RNA, 24 nt, Human
aggcggagcuugcagugagcggag

SEQ ID NO: 677641 - RNA, 21 nt, Human
aggcugagaugggcagaucac

SEQ ID NO: 677642 - RNA, 20 nt, Human
aggcugaggcaggagaaucg

SEQ ID NO: 677643 - RNA, 20 nt, Human
aggcugaggcaggagaaucg

SEQ ID NO: 677644 - RNA, 21 nt, Human
aggggcuacaagugaaccuug

SEQ ID NO: 677645 - RNA, 24 nt, Human
aguggcgcacgccuguaaucccag

SEQ ID NO: 677646 - RNA, 24 nt, Human
agugugccacugcacuccagccug

SEQ ID NO: 677647 - RNA, 21 nt, Human
auccuggccaacauggugaaa

SEQ ID NO: 677648 - RNA, 18 nt, Human
augaagacaagucggcca

SEQ ID NO: 677649 - RNA, 19 nt, Human
augauacccgugacaacgc

SEQ ID NO: 677650 - RNA, 26 nt, Human
caaaaaaaaaaaaaaaaaaacaaaga

SEQ ID NO: 677651 - RNA, 21 nt, Human
caacauggugaaaccccauug

SEQ ID NO: 677652 - RNA, 21 nt, Human
caaguaaaaagccaaagguac

SEQ ID NO: 677653 - RNA, 18 nt, Human
caaguaacccuucagaca

SEQ ID NO: 677654 - RNA, 25 nt, Human
cacaaaauuuaaggaauucccaagg

SEQ ID NO: 677655 - RNA, 23 nt, Human
cacacagcugcucccaguuacgc

SEQ ID NO: 677656 - RNA, 22 nt, Human
cacacggcguggggaugaacac

SEQ ID NO: 677657 - RNA, 22 nt, Human
cacacgguguggggaugaacac

SEQ ID NO: 677658 - RNA, 23 nt, Human
cacauauaccauggaaaaacaca

SEQ ID NO: 677659 - RNA, 19 nt, Human
caccacagcgucacucaac

SEQ ID NO: 677660 - RNA, 24 nt, Human
cacgccuauaauuccagcacuuug

SEQ ID NO: 677661 - RNA, 18 nt, Human
cacgccuguaaucccagc

SEQ ID NO: 677662 - RNA, 19 nt, Human
cacgccuguaaucccagcu

SEQ ID NO: 677663 - RNA, 18 nt, Human
cacugcacuccagccugg

SEQ ID NO: 677664 - RNA, 19 nt, Human
cacugcacuccagccuggg

SEQ ID NO: 677665 - RNA, 21 nt, Human
cacugcacuccagccugggca

SEQ ID NO: 677666 - RNA, 23 nt, Human
cacugcacuccagccugggcaac

SEQ ID NO: 677667 - RNA, 24 nt, Human
cacugcacuccagccugggcaaca

SEQ ID NO: 677668 - RNA, 21 nt, Human
cacuucugcccacaagaaggg

SEQ ID NO: 677669 - RNA, 19 nt, Human
cagaagccacgaccuacaa

SEQ ID NO: 677670 - RNA, 24 nt, Human
cagcacuuugggaggcugagaugg

SEQ ID NO: 677671 - RNA, 24 nt, Human
cagcuacucgagaggcugaggcag

SEQ ID NO: 677672 - RNA, 19 nt, Human
cagggaagugagaaacugc

SEQ ID NO: 677673 - RNA, 21 nt, Human
caugaaccugggaggcggagc

SEQ ID NO: 677674 - RNA, 18 nt, Human
ccaacugcagccgggggc

SEQ ID NO: 677675 - RNA, 20 nt, Human
ccaccuggaaugaagacaag

SEQ ID NO: 677676 - RNA, 20 nt, Human
ccacugcacuccagccuggg

SEQ ID NO: 677677 - RNA, 20 nt, Human
ccacugcacuccagccuggg

SEQ ID NO: 677678 - RNA, 21 nt, Human
ccacugcacuccagccugggc

SEQ ID NO: 677679 - RNA, 22 nt, Human
ccacugcacuccagccugggca

SEQ ID NO: 677680 - RNA, 23 nt, Human
ccacugcacuccagccugggcaa

SEQ ID NO: 677681 - RNA, 24 nt, Human
ccacugcacuccagccugggcaac

SEQ ID NO: 677682 - RNA, 25 nt, Human
ccagcuaauaucaugauacccguga

SEQ ID NO: 677683 - RNA, 21 nt, Human
ccagcugagcugacgcugagg

SEQ ID NO: 677684 - RNA, 18 nt, Human
cccaagaacagccacaac

SEQ ID NO: 677685 - RNA, 24 nt, Human
cccacaagaacaaaauaauucaaa

SEQ ID NO: 677686 - RNA, 25 nt, Human
cccgugacaacgcccggccccacuc

SEQ ID NO: 677687 - RNA, 18 nt, Human
cccuccccuccuagaauc

SEQ ID NO: 677688 - RNA, 19 nt, Human
cccugcuggacccacccga

SEQ ID NO: 677689 - RNA, 18 nt, Human
ccgagagccuaucaggcu

SEQ ID NO: 677690 - RNA, 19 nt, Human
ccgcagagagcagcaucgg

SEQ ID NO: 677691 - RNA, 21 nt, Human
ccggccccacucgcucuggcc

SEQ ID NO: 677692 - RNA, 22 nt, Human
ccuauaauuccagcacuuuggg

SEQ ID NO: 677693 - RNA, 20 nt, Human
ccucacaucagagggcuccu

SEQ ID NO: 677694 - RNA, 22 nt, Human
ccucgccgagagccuaucaggc

SEQ ID NO: 677695 - RNA, 21 nt, Human
ccucucccugucacccgcaga

SEQ ID NO: 677696 - RNA, 22 nt, Human
ccuggccaacauggugaaaccc

SEQ ID NO: 677697 - RNA, 23 nt, Human
ccuggccaacauggugaaacccc

SEQ ID NO: 677698 - RNA, 24 nt, Human
ccuggccaacauggugaaacccca

SEQ ID NO: 677699 - RNA, 20 nt, Human
ccuguaaucccagcuacucg

SEQ ID NO: 677700 - RNA, 22 nt, Human
ccuguaaucccagcuacucgag

SEQ ID NO: 677701 - RNA, 20 nt, Human
cgaccuacaaguaacccuuc

SEQ ID NO: 677702 - RNA, 24 nt, Human
cgagaccauccuggccaacauggu

SEQ ID NO: 677703 - RNA, 22 nt, Human
cgaggagaguccauuucacauc

SEQ ID NO: 677704 - RNA, 23 nt, Human
cgccuguaaucccagcuacucga

SEQ ID NO: 677705 - RNA, 22 nt, Human
cgguguggggaugaacacgccg

SEQ ID NO: 677706 - RNA, 22 nt, Human
cgucagaaaaacaaguagugac

SEQ ID NO: 677707 - RNA, 18 nt, Human
cucaaaaaaaaaaaaaaa

SEQ ID NO: 677708 - RNA, 18 nt, Human
cucgccgagagccuauca

SEQ ID NO: 677709 - RNA, 19 nt, Human
cucugucucaaaaaaaaaa

SEQ ID NO: 677710 - RNA, 24 nt, Human
cugaggggcuacaagugaaccuug

SEQ ID NO: 677711 - RNA, 23 nt, Human
cuggccaacauggugaaacccca

SEQ ID NO: 677712 - RNA, 20 nt, Human
cugugagagccugagaucac

SEQ ID NO: 677713 - RNA, 24 nt, Human
cuugcagugagcggagagugugcc

SEQ ID NO: 677714 - RNA, 19 nt, Human
gacaaagacaaacaaggaa

SEQ ID NO: 677715 - RNA, 21 nt, Human
gaccuacaaguaacccuucag

SEQ ID NO: 677716 - RNA, 23 nt, Human
gagaaacugcagccggccuggcc

SEQ ID NO: 677717 - RNA, 23 nt, Human
gagaugggcagaucacuugaggu

SEQ ID NO: 677718 - RNA, 18 nt, Human
gaguugagggccagcucc

SEQ ID NO: 677719 - RNA, 18 nt, Human
gaucacuugaggucagga

SEQ ID NO: 677720 - RNA, 24 nt, Human
gaucacuugaggucaggagaucga

SEQ ID NO: 677721 - RNA, 19 nt, Human
gauuugcuggucccucccc

SEQ ID NO: 677722 - RNA, 24 nt, Human
gcaacaaagcgagacucugucuca

SEQ ID NO: 677723 - RNA, 21 nt, Human
gccaacauggugaaaccccau

SEQ ID NO: 677724 - RNA, 22 nt, Human
gccacugcacuccagccugggc

SEQ ID NO: 677725 - RNA, 24 nt, Human
gccacugcacuccagccugggcaa

SEQ ID NO: 677726 - RNA, 18 nt, Human
ggaaaaacacaugaaaac

SEQ ID NO: 677727 - RNA, 24 nt, Human
ggagagugugccacugcacuccag

SEQ ID NO: 677728 - RNA, 18 nt, Human
ggagcuugcagugagcgg

SEQ ID NO: 677729 - RNA, 23 nt, Human
ggcauaguggcgcacgccuguaa

SEQ ID NO: 677730 - RNA, 18 nt, Human
gggaacccugcaccaagg

SEQ ID NO: 677731 - RNA, 19 nt, Human
gggaggggcccuacugugu

SEQ ID NO: 677732 - RNA, 21 nt, Human
gggggcggugguucacgccua

SEQ ID NO: 677733 - RNA, 18 nt, Human
ggugggcagggccccugc

SEQ ID NO: 677734 - RNA, 24 nt, Human
ggugguucacgccuauaauuccag

SEQ ID NO: 677735 - RNA, 24 nt, Human
guaaaaagccaaagguacagauaa

SEQ ID NO: 677736 - RNA, 24 nt, Human
uaaaaaaugaacgugcuuuuuaaa

SEQ ID NO: 677737 - RNA, 23 nt, Human
uaaaaacaaguaacucaaaagca

SEQ ID NO: 677738 - RNA, 20 nt, Human
uaaaaauacaaacauuagcc

SEQ ID NO: 677739 - RNA, 24 nt, Human
uaaaaauacaaacauuagccuggc

SEQ ID NO: 677740 - RNA, 18 nt, Human
uaaggaauucccaagcac

SEQ ID NO: 677741 - RNA, 19 nt, Human
uaaggaauucccaagcaca

SEQ ID NO: 677742 - RNA, 19 nt, Human
uaccauggaaaaacacaug

SEQ ID NO: 677743 - RNA, 24 nt, Human
uaccauggaaaaacacaugaaaac

SEQ ID NO: 677744 - RNA, 20 nt, Human
uacuaaaaauacaaacauua

SEQ ID NO: 677745 - RNA, 24 nt, Human
uaguggcgcacgccuguaauccca

SEQ ID NO: 677746 - RNA, 21 nt, Human
ucaaaaaaaaaaaaaaaaaaa

SEQ ID NO: 677747 - RNA, 23 nt, Human
ucacaaaugacuugaugucaaac

SEQ ID NO: 677748 - RNA, 24 nt, Human
ucacacagcugcucccaguuacgc

SEQ ID NO: 677749 - RNA, 22 nt, Human
ucacgccuauaauuccagcacu

SEQ ID NO: 677750 - RNA, 23 nt, Human
ucacgccuauaauuccagcacuu

SEQ ID NO: 677751 - RNA, 21 nt, Human
ucagaaacacugccugaucca

SEQ ID NO: 677752 - RNA, 22 nt, Human
ucagaaacacugccugauccau

SEQ ID NO: 677753 - RNA, 24 nt, Human
uccagccugggcaacaaagcgaga

SEQ ID NO: 677754 - RNA, 18 nt, Human
ucccuuggagauaaaaaa

SEQ ID NO: 677755 - RNA, 19 nt, Human
ucccuuggagauaaaaaaa

SEQ ID NO: 677756 - RNA, 19 nt, Human
uccucacaucagagggcuc

SEQ ID NO: 677757 - RNA, 23 nt, Human
ucugucucaaaaaaaaaaaaaaa

SEQ ID NO: 677758 - RNA, 21 nt, Human
ugaaaaccaaguuacguuguu

SEQ ID NO: 677759 - RNA, 20 nt, Human
ugaagugcccuagccuguug

SEQ ID NO: 677760 - RNA, 26 nt, Human
ugaauuuuccagacccucuaacacau

SEQ ID NO: 677761 - RNA, 21 nt, Human
ugagaaacugcagccggccug

SEQ ID NO: 677762 - RNA, 24 nt, Human
ugagaugggcagaucacuugaggu

SEQ ID NO: 677763 - RNA, 26 nt, Human
ugagaugggcagaucacuugagguca

SEQ ID NO: 677764 - RNA, 20 nt, Human
ugagcggagagugugccacu

SEQ ID NO: 677765 - RNA, 18 nt, Human
ugagcugacgcugagggg

SEQ ID NO: 677766 - RNA, 24 nt, Human
ugaggcaggagaaucgcaugaacc

SEQ ID NO: 677767 - RNA, 25 nt, Human
ugaggcaggagaaucgcaugaaccu

SEQ ID NO: 677768 - RNA, 28 nt, Human
ugcacaaaauuuaaggaauucccaagca

SEQ ID NO: 677769 - RNA, 24 nt, Human
ugcacugaaguaacucuggaaggu

SEQ ID NO: 677770 - RNA, 19 nt, Human
ugcccacaagaacaaaaua

SEQ ID NO: 677771 - RNA, 23 nt, Human
ugccgcagacccugucacacagc

SEQ ID NO: 677772 - RNA, 22 nt, Human
ugcuacuaaaaauacaaacauu

SEQ ID NO: 677773 - RNA, 18 nt, Human
uggaaaaacacaugaaaa

SEQ ID NO: 677774 - RNA, 21 nt, Human
uggaaaaacacaugaaaacca

SEQ ID NO: 677775 - RNA, 28 nt, Human
uggaacgucagaaaaacaaguagugaca

SEQ ID NO: 677776 - RNA, 21 nt, Human
uggaagguagaagugccggga

SEQ ID NO: 677777 - RNA, 24 nt, Human
uggccaacauggugaaaccccauu

SEQ ID NO: 677778 - RNA, 21 nt, Human
uggcgcacgccuguaauccca

SEQ ID NO: 677779 - RNA, 22 nt, Human
ugggaacccugcaccaaggaga

SEQ ID NO: 677780 - RNA, 26 nt, Human
ugggaacccugcaccaaggagaguug

SEQ ID NO: 677781 - RNA, 29 nt, Human
ugggaggcggagcuugcagugacaacggu

SEQ ID NO: 677782 - RNA, 24 nt, Human
ugggaggcggagcuugcagugagc

SEQ ID NO: 677783 - RNA, 20 nt, Human
ugggaggcugagaugggcag

SEQ ID NO: 677784 - RNA, 24 nt, Human
ugggaggcugagaugggcagauca

SEQ ID NO: 677785 - RNA, 21 nt, Human
ugggauggcuaucaaaaaaaa

SEQ ID NO: 677786 - RNA, 24 nt, Human
ugggcaacaaagcgagacucuguc

SEQ ID NO: 677787 - RNA, 24 nt, Human
ugggcagaucacuugaggucagga

SEQ ID NO: 677788 - RNA, 22 nt, Human
uggugggcagggccccugcugg

SEQ ID NO: 677789 - RNA, 21 nt, Human
ugguucacgccuauaauucca

SEQ ID NO: 677790 - RNA, 22 nt, Human
ugguucacgccuauaauuccag

SEQ ID NO: 677791 - RNA, 24 nt, Human
ugguucacgccuauaauuccagca

SEQ ID NO: 677792 - RNA, 21 nt, Human
ugucagacacggugaccccuu

SEQ ID NO: 677793 - RNA, 21 nt, Human
uuauugcacaaaauuuaagga

SEQ ID NO: 677794 - RNA, 18 nt, Human
uugcagagagugggaacg

SEQ ID NO: 677795 - RNA, 19 nt, Human
uugcagugagcggagagug

SEQ ID NO: 677796 - RNA, 22 nt, Human
uugcagugagcggagagugugc

SEQ ID NO: 677797 - RNA, 25 nt, Human
uugggaggcugagaugggcagauca

SEQ ID NO: 677798 - RNA, 23 nt, Human
uuggucauuccaugugaaaagcu

SEQ ID NO: 677799 - RNA, 22 nt, Human
uugucagacacggugaccccuu

SEQ ID NO: 677800 - RNA, 19 nt, Human
uuuaaggaauucccaagca

SEQ ID NO: 677801 - RNA, 24 nt, Human
uuugucagacacggugaccccuuu

SEQ ID NO: 677802 - RNA, 22 nt, Human
aaaaaaaaaaaaaaaagcugaa

SEQ ID NO: 677803 - RNA, 21 nt, Human
aaaaaaaaaaagcugaacuuc

SEQ ID NO: 677804 - RNA, 21 nt, Human
acaaaccaaaugugauucuca

SEQ ID NO: 677805 - RNA, 20 nt, Human
agaagaaagcagacucgcca

SEQ ID NO: 677806 - RNA, 22 nt, Human
aguuggagagaagaccuguaaa

SEQ ID NO: 677807 - RNA, 19 nt, Human
auugaaaccauccucuugg

SEQ ID NO: 677808 - RNA, 18 nt, Human
caccucuguuuuugcagg

SEQ ID NO: 677809 - RNA, 24 nt, Human
cagcugccccccucccaauucaag

SEQ ID NO: 677810 - RNA, 23 nt, Human
ccacaaaagaucaggguccugca

SEQ ID NO: 677811 - RNA, 18 nt, Human
ccccccucccaauucaag

SEQ ID NO: 677812 - RNA, 23 nt, Human
cccguacgcgacaccuuccaccg

SEQ ID NO: 677813 - RNA, 22 nt, Human
ccgccgcgccccgccagggacu

SEQ ID NO: 677814 - RNA, 20 nt, Human
ccgccugaggcuccagcugc

SEQ ID NO: 677815 - RNA, 24 nt, Human
cgacaccuuccaccgccgcgcccc

SEQ ID NO: 677816 - RNA, 19 nt, Human
cgccugaggcuccagcugc

SEQ ID NO: 677817 - RNA, 21 nt, Human
cgccugaggcuccagcugccc

SEQ ID NO: 677818 - RNA, 18 nt, Human
cguauccaccucuguuuu

SEQ ID NO: 677819 - RNA, 24 nt, Human
cucagggcaguagaagaaagcaga

SEQ ID NO: 677820 - RNA, 21 nt, Human
cugccccccucccaauucaag

SEQ ID NO: 677821 - RNA, 24 nt, Human
gcacuuuccgugaagaguuggaga

SEQ ID NO: 677822 - RNA, 23 nt, Human
ggagagaagaccuguaaauggga

SEQ ID NO: 677823 - RNA, 18 nt, Human
uccaaagaguaacaacuu

SEQ ID NO: 677824 - RNA, 24 nt, Human
ucccugcagcuccaaccuguccuc

SEQ ID NO: 677825 - RNA, 19 nt, Human
uccucaguaucuuuuacag

SEQ ID NO: 677826 - RNA, 22 nt, Human
ucgccagucccugcagcuccaa

SEQ ID NO: 677827 - RNA, 18 nt, Human
ugaagggagugguccaaa

SEQ ID NO: 677828 - RNA, 18 nt, Human
uuccucaguaucuuuuac

SEQ ID NO: 677829 - RNA, 21 nt, Human
aaaaaagaaaaaugcugaagg

SEQ ID NO: 677830 - RNA, 22 nt, Human
aaaaaagaaaaaugcugaagga

SEQ ID NO: 677831 - RNA, 19 nt, Human
aaauaaacuuaaacuauaa

SEQ ID NO: 677832 - RNA, 21 nt, Human
acaaaguaauaaacagugcac

SEQ ID NO: 677833 - RNA, 27 nt, Human
acacagaaaauggaggaaaggggaccc

SEQ ID NO: 677834 - RNA, 18 nt, Human
accgcauauugagcuaua

SEQ ID NO: 677835 - RNA, 21 nt, Human
acuuuccucuucugugagauu

SEQ ID NO: 677836 - RNA, 18 nt, Human
agagcucacugugauuaa

SEQ ID NO: 677837 - RNA, 23 nt, Human
aguucucggccuuuaaacagcuc

SEQ ID NO: 677838 - RNA, 23 nt, Human
augccagagugaacaucagugag

SEQ ID NO: 677839 - RNA, 19 nt, Human
auuuagaaagcucccccaa

SEQ ID NO: 677840 - RNA, 20 nt, Human
cacuuuccucuucugugaga

SEQ ID NO: 677841 - RNA, 26 nt, Human
ccuacaauuaugaaaugaaaaaagaa

SEQ ID NO: 677842 - RNA, 22 nt, Human
ccuccaagucgcucuguggcuc

SEQ ID NO: 677843 - RNA, 19 nt, Human
ccuggcccagcuucuccug

SEQ ID NO: 677844 - RNA, 27 nt, Human
cuacaauuaugaaaugaaaaaagaaaa

SEQ ID NO: 677845 - RNA, 21 nt, Human
cucccaucaccaauacacaga

SEQ ID NO: 677846 - RNA, 18 nt, Human
cugcacauaccugccaga

SEQ ID NO: 677847 - RNA, 22 nt, Human
cuuaaacuauaaauuagaaaca

SEQ ID NO: 677848 - RNA, 18 nt, Human
gagccuauuccaaaccag

SEQ ID NO: 677849 - RNA, 24 nt, Human
gcagugcgcucuuguucucgugcu

SEQ ID NO: 677850 - RNA, 18 nt, Human
ggcccagcuucuccugca

SEQ ID NO: 677851 - RNA, 22 nt, Human
gggagccuauuccaaaccagcg

SEQ ID NO: 677852 - RNA, 22 nt, Human
uaaauuagaaacacaaauaauc

SEQ ID NO: 677853 - RNA, 19 nt, Human
uacaaaguaauaaacagug

SEQ ID NO: 677854 - RNA, 21 nt, Human
uagaaacacaaauaaucauga

SEQ ID NO: 677855 - RNA, 19 nt, Human
uagaaagcucccccaaaag

SEQ ID NO: 677856 - RNA, 18 nt, Human
uagaagagcucacuguga

SEQ ID NO: 677857 - RNA, 21 nt, Human
uagcaaauuuuaucugaauuc

SEQ ID NO: 677858 - RNA, 21 nt, Human
uccaacugcagugcgcucuug

SEQ ID NO: 677859 - RNA, 24 nt, Human
uccaugcugcaauaacauuagaaa

SEQ ID NO: 677860 - RNA, 26 nt, Human
uccugcagcuccuuuacuugcugcuc

SEQ ID NO: 677861 - RNA, 22 nt, Human
ucggccuuuaaacagcucuaaa

SEQ ID NO: 677862 - RNA, 19 nt, Human
ucucgugcuucagcuccuc

SEQ ID NO: 677863 - RNA, 23 nt, Human
ugaaaaaagaaaaaugcugaagg

SEQ ID NO: 677864 - RNA, 28 nt, Human
ugaacucccaccacguaagggcaaacuc

SEQ ID NO: 677865 - RNA, 27 nt, Human
ugcuccaacugcagugcgcucuuguug

SEQ ID NO: 677866 - RNA, 20 nt, Human
uuaagaugagaucaaacauc

SEQ ID NO: 677867 - RNA, 21 nt, Human
uugagcuauagaagagcucac

SEQ ID NO: 677868 - RNA, 20 nt, Human
uuuaaaaauuucuugagcag

SEQ ID NO: 677869 - RNA, 18 nt, Human
uuuccaguucucggccuu

SEQ ID NO: 677870 - RNA, 26 nt, Human
aaacaugagaugaauagaggggaccc

SEQ ID NO: 677871 - RNA, 19 nt, Human
aaauguucaaauucuaagc

SEQ ID NO: 677872 - RNA, 18 nt, Human
aagaaccaacucaaguca

SEQ ID NO: 677873 - RNA, 18 nt, Human
aaggacaucacauaugaa

SEQ ID NO: 677874 - RNA, 24 nt, Human
aaggacaucacauaugaagaaugu

SEQ ID NO: 677875 - RNA, 18 nt, Human
aaggagaacuauguucca

SEQ ID NO: 677876 - RNA, 18 nt, Human
aaguugccuuuucugggu

SEQ ID NO: 677877 - RNA, 22 nt, Human
aaucaguuuugugagucauuua

SEQ ID NO: 677878 - RNA, 22 nt, Human
accuuagugacuaaggacauca

SEQ ID NO: 677879 - RNA, 24 nt, Human
acgacggaacccagaguucucugu

SEQ ID NO: 677880 - RNA, 20 nt, Human
agaaucaggaagccccgcug

SEQ ID NO: 677881 - RNA, 18 nt, Human
agaggacuuagaagagua

SEQ ID NO: 677882 - RNA, 19 nt, Human
agaguucucugucucuccu

SEQ ID NO: 677883 - RNA, 23 nt, Human
agcaucucaaauccuguggaucc

SEQ ID NO: 677884 - RNA, 19 nt, Human
agcgcugagaaucucuuuu

SEQ ID NO: 677885 - RNA, 21 nt, Human
agcuacucgggagucugugug

SEQ ID NO: 677886 - RNA, 21 nt, Human
aggaagccccgcugucgccaa

SEQ ID NO: 677887 - RNA, 19 nt, Human
aggccauugauugauugau

SEQ ID NO: 677888 - RNA, 18 nt, Human
aggcuggaagaggacuua

SEQ ID NO: 677889 - RNA, 23 nt, Human
auaaaaacaaccauuguauuccu

SEQ ID NO: 677890 - RNA, 20 nt, Human
caaaguacccccccaaaagc

SEQ ID NO: 677891 - RNA, 19 nt, Human
caacgugaauugcaaacag

SEQ ID NO: 677892 - RNA, 23 nt, Human
caagcuaaauguguacacuauga

SEQ ID NO: 677893 - RNA, 25 nt, Human
cacacacgaagcaaaguaaauaaag

SEQ ID NO: 677894 - RNA, 23 nt, Human
cacagaucuguccacaacaaacu

SEQ ID NO: 677895 - RNA, 21 nt, Human
caccaugcucugcuccagguc

SEQ ID NO: 677896 - RNA, 19 nt, Human
cagaguucucugucucucc

SEQ ID NO: 677897 - RNA, 18 nt, Human
ccagaguucucugucucu

SEQ ID NO: 677898 - RNA, 23 nt, Human
ccaguuuugguguugaacuucuc

SEQ ID NO: 677899 - RNA, 19 nt, Human
cccacacacgaagcaaagu

SEQ ID NO: 677900 - RNA, 21 nt, Human
cccccccaaaagcuguuuaaa

SEQ ID NO: 677901 - RNA, 24 nt, Human
cccccccaaaagcuguuuaaaaga

SEQ ID NO: 677902 - RNA, 18 nt, Human
ccgccgccgccggccucg

SEQ ID NO: 677903 - RNA, 26 nt, Human
ccgccgccgccggccucgagcuccgg

SEQ ID NO: 677904 - RNA, 20 nt, Human
ccgcuacgaggccgcccggg

SEQ ID NO: 677905 - RNA, 19 nt, Human
ccuguagucccagcuacuc

SEQ ID NO: 677906 - RNA, 21 nt, Human
ccuguagucccagcuacucgg

SEQ ID NO: 677907 - RNA, 22 nt, Human
ccuguagucccagcuacucggg

SEQ ID NO: 677908 - RNA, 22 nt, Human
ccuuuuggccuguuuguuuugu

SEQ ID NO: 677909 - RNA, 23 nt, Human
cgaagcaaaguaaauaaagacca

SEQ ID NO: 677910 - RNA, 19 nt, Human
cuacucgggagucugugug

SEQ ID NO: 677911 - RNA, 22 nt, Human
cucaaaaucagcgcugagaauc

SEQ ID NO: 677912 - RNA, 23 nt, Human
cuccaguaauaaaguaggcacag

SEQ ID NO: 677913 - RNA, 21 nt, Human
cucucccgccgccgccggccu

SEQ ID NO: 677914 - RNA, 18 nt, Human
cucuuuucgaggcuccgg

SEQ ID NO: 677915 - RNA, 18 nt, Human
cugugugaggccaggggu

SEQ ID NO: 677916 - RNA, 24 nt, Human
cuuccaaaguacccccccaaaagc

SEQ ID NO: 677917 - RNA, 24 nt, Human
gaagcaaaguaaauaaagaccaca

SEQ ID NO: 677918 - RNA, 19 nt, Human
gacugugugccuguagucc

SEQ ID NO: 677919 - RNA, 18 nt, Human
gaggcuggaagaggacuu

SEQ ID NO: 677920 - RNA, 22 nt, Human
gccaggggugccagcgcaccag

SEQ ID NO: 677921 - RNA, 18 nt, Human
gccgugcgcccagcgccu

SEQ ID NO: 677922 - RNA, 18 nt, Human
gcuucagugacugugugc

SEQ ID NO: 677923 - RNA, 22 nt, Human
ggaagauguugcuuugcccaca

SEQ ID NO: 677924 - RNA, 19 nt, Human
ggacuuagaagaguaugaa

SEQ ID NO: 677925 - RNA, 23 nt, Human
gugacugugugccuguaguccca

SEQ ID NO: 677926 - RNA, 21 nt, Human
uaaaguaggcacagaucuguc

SEQ ID NO: 677927 - RNA, 25 nt, Human
uaacuucuaggccccauuuuccccu

SEQ ID NO: 677928 - RNA, 22 nt, Human
uaagaaccaacucaagucaaac

SEQ ID NO: 677929 - RNA, 21 nt, Human
uaccaaaaauugugacaccuu

SEQ ID NO: 677930 - RNA, 23 nt, Human
uagacacuuccaaaguacccccc

SEQ ID NO: 677931 - RNA, 18 nt, Human
uagagagccuuacuggga

SEQ ID NO: 677932 - RNA, 22 nt, Human
uaguacauuucacaguuuucag

SEQ ID NO: 677933 - RNA, 22 nt, Human
uaugauaaaaacaaccauugua

SEQ ID NO: 677934 - RNA, 21 nt, Human
ucaaaaaccuaaucugcuucu

SEQ ID NO: 677935 - RNA, 19 nt, Human
ucagcgcugagaaucucuu

SEQ ID NO: 677936 - RNA, 18 nt, Human
ucagugacugugugccug

SEQ ID NO: 677937 - RNA, 20 nt, Human
uccaguaauaaaguaggcac

SEQ ID NO: 677938 - RNA, 22 nt, Human
ucccagcuacucgggagucugu

SEQ ID NO: 677939 - RNA, 21 nt, Human
uccuaucaaccccaaggagga

SEQ ID NO: 677940 - RNA, 20 nt, Human
ucgcucucccgccgccgccg

SEQ ID NO: 677941 - RNA, 25 nt, Human
ucucccgccgccgccggccucgagc

SEQ ID NO: 677942 - RNA, 19 nt, Human
ucucuuuucgaggcuccgg

SEQ ID NO: 677943 - RNA, 24 nt, Human
ugccuguagucccagcuacucggg

SEQ ID NO: 677944 - RNA, 19 nt, Human
ugcucuguaacuucuaggc

SEQ ID NO: 677945 - RNA, 20 nt, Human
uggccuguuuguuuugucaa

SEQ ID NO: 677946 - RNA, 23 nt, Human
uguccacaacaaacuugcccucu

SEQ ID NO: 677947 - RNA, 21 nt, Human
ugugaaauaugugauuccagu

SEQ ID NO: 677948 - RNA, 24 nt, Human
uguuuuucuaaacaguccuaauuu

SEQ ID NO: 677949 - RNA, 22 nt, Human
uuccccucugaaaauaagaggg

SEQ ID NO: 677950 - RNA, 19 nt, Human
uucucacacagaacagcuu

SEQ ID NO: 677951 - RNA, 20 nt, Human
uucucacgaaauaccuacua

SEQ ID NO: 677952 - RNA, 21 nt, Human
uucucugucucuccuucacag

SEQ ID NO: 677953 - RNA, 21 nt, Human
uugcccacacacgaagcaaag

SEQ ID NO: 677954 - RNA, 19 nt, Human
uugccucucaccaugcucu

SEQ ID NO: 677955 - RNA, 23 nt, Human
uugccuuuucugggugggaaagu

SEQ ID NO: 677956 - RNA, 19 nt, Human
uuucacaauaaucaucuuc

SEQ ID NO: 677957 - RNA, 21 nt, Human
uuuuuuuuuuuuuuuuuuaag

SEQ ID NO: 677958 - RNA, 28 nt, Human
aaaaacagaaagaggaaggccgguaccc

SEQ ID NO: 677959 - RNA, 18 nt, Human
aaaaagaaacucaagauu

SEQ ID NO: 677960 - RNA, 20 nt, Human
aaaacagaaagaggaaggcc

SEQ ID NO: 677961 - RNA, 22 nt, Human
aaaaccagaagucaacagaaga

SEQ ID NO: 677962 - RNA, 20 nt, Human
aacaaaaaaaaucucuaaac

SEQ ID NO: 677963 - RNA, 19 nt, Human
aacagguaacagugaggau

SEQ ID NO: 677964 - RNA, 19 nt, Human
aaccaauggugaugauaca

SEQ ID NO: 677965 - RNA, 22 nt, Human
aaguagaccagaaacccaaaac

SEQ ID NO: 677966 - RNA, 20 nt, Human
aagugauaaagaaauaguaa

SEQ ID NO: 677967 - RNA, 18 nt, Human
acacacaucuuuucucuc

SEQ ID NO: 677968 - RNA, 21 nt, Human
accaugauugaagcaagcgag

SEQ ID NO: 677969 - RNA, 21 nt, Human
agaaacccaaaacagguaaca

SEQ ID NO: 677970 - RNA, 19 nt, Human
agaaaggagaaugguucac

SEQ ID NO: 677971 - RNA, 25 nt, Human
agaaauuauaaaaacaguaagauaa

SEQ ID NO: 677972 - RNA, 22 nt, Human
aggagaggagcgccuuccugcc

SEQ ID NO: 677973 - RNA, 19 nt, Human
aggcagaaugcuagaugua

SEQ ID NO: 677974 - RNA, 23 nt, Human
agggacauuuuauauuaaguauu

SEQ ID NO: 677975 - RNA, 21 nt, Human
agguaacagugaggauggaac

SEQ ID NO: 677976 - RNA, 24 nt, Human
agucaugaggaaacaggucagggc

SEQ ID NO: 677977 - RNA, 22 nt, Human
augcuaauuauccuaauuguau

SEQ ID NO: 677978 - RNA, 19 nt, Human
auggaaugcagcccauccc

SEQ ID NO: 677979 - RNA, 23 nt, Human
auggcaacagggaauggaaugcc

SEQ ID NO: 677980 - RNA, 21 nt, Human
caaaaaaaaucucuaaacacc

SEQ ID NO: 677981 - RNA, 19 nt, Human
caaaaaagaaaaagccacc

SEQ ID NO: 677982 - RNA, 21 nt, Human
caaaauacuaagaugggagca

SEQ ID NO: 677983 - RNA, 22 nt, Human
caaaguagaccagaaacccaaa

SEQ ID NO: 677984 - RNA, 19 nt, Human
caaauuacagaaaaccaga

SEQ ID NO: 677985 - RNA, 23 nt, Human
caagcugaggucauccaaaagcu

SEQ ID NO: 677986 - RNA, 23 nt, Human
cacagcucaaaaaaucccaggac

SEQ ID NO: 677987 - RNA, 22 nt, Human
cacaucuuuucucucuccuuca

SEQ ID NO: 677988 - RNA, 25 nt, Human
cacguacaaaaaagaaaaagccacc

SEQ ID NO: 677989 - RNA, 19 nt, Human
cagaaaaagaaacucaaga

SEQ ID NO: 677990 - RNA, 18 nt, Human
cagaagccaauuauagug

SEQ ID NO: 677991 - RNA, 21 nt, Human
cagcagaauccuguacacgua

SEQ ID NO: 677992 - RNA, 19 nt, Human
caggcacuuucaagaucau

SEQ ID NO: 677993 - RNA, 18 nt, Human
caggucagggcgaagcgg

SEQ ID NO: 677994 - RNA, 18 nt, Human
caucucaacugaagucua

SEQ ID NO: 677995 - RNA, 24 nt, Human
ccaugauugaagcaagcgaggggc

SEQ ID NO: 677996 - RNA, 18 nt, Human
ccuccgauccggguuucc

SEQ ID NO: 677997 - RNA, 25 nt, Human
ccuucagcgacaagaggucggaauc

SEQ ID NO: 677998 - RNA, 24 nt, Human
cuaaacaccugaaagccccacuuc

SEQ ID NO: 677999 - RNA, 23 nt, Human
cuccuccccgcgcggccuccgau

SEQ ID NO: 678000 - RNA, 18 nt, Human
cucucguaccagcagaau

SEQ ID NO: 678001 - RNA, 18 nt, Human
gaccgggucgcccuccuc

SEQ ID NO: 678002 - RNA, 20 nt, Human
gagcagggguggccagaaga

SEQ ID NO: 678003 - RNA, 23 nt, Human
gagcagggguggccagaagaagg

SEQ ID NO: 678004 - RNA, 18 nt, Human
gaggauggcaacagggaa

SEQ ID NO: 678005 - RNA, 24 nt, Human
gaggcgccgagccgggccgagagg

SEQ ID NO: 678006 - RNA, 19 nt, Human
ggcacagcucaaaaaaucc

SEQ ID NO: 678007 - RNA, 21 nt, Human
gggcaggagaggagcgccuuc

SEQ ID NO: 678008 - RNA, 23 nt, Human
gggccgggggcagucaugaggaa

SEQ ID NO: 678009 - RNA, 19 nt, Human
gguaacagugaggauggcc

SEQ ID NO: 678010 - RNA, 23 nt, Human
guacaaaaaagaaaaagccaccc

SEQ ID NO: 678011 - RNA, 18 nt, Human
guacacguacaaaaaaga

SEQ ID NO: 678012 - RNA, 21 nt, Human
uacaaaaaagaaaaagccacc

SEQ ID NO: 678013 - RNA, 21 nt, Human
uacaauaaagugauaaagaaa

SEQ ID NO: 678014 - RNA, 18 nt, Human
uaccauaaauggcacagc

SEQ ID NO: 678015 - RNA, 19 nt, Human
uaccuuuggugaguugaag

SEQ ID NO: 678016 - RNA, 23 nt, Human
uaguauacauauuagggaauccc

SEQ ID NO: 678017 - RNA, 25 nt, Human
ucaaaaaaucccaggaccaaucaga

SEQ ID NO: 678018 - RNA, 18 nt, Human
ucaaaguagaccagaaac

SEQ ID NO: 678019 - RNA, 21 nt, Human
ucaaaguagaccagaaaccca

SEQ ID NO: 678020 - RNA, 21 nt, Human
ucaaauaaccaugauugaagc

SEQ ID NO: 678021 - RNA, 23 nt, Human
ucaaauaaccaugauugaagcaa

SEQ ID NO: 678022 - RNA, 26 nt, Human
ucaaauaaccaugauugaagcaagcg

SEQ ID NO: 678023 - RNA, 18 nt, Human
ucccaaacuggcucugug

SEQ ID NO: 678024 - RNA, 21 nt, Human
ucccuuaaaauucaacucuag

SEQ ID NO: 678025 - RNA, 22 nt, Human
ucuaaaaaggggaugcauaggc

SEQ ID NO: 678026 - RNA, 21 nt, Human
ucuaaacaccugaaagcccca

SEQ ID NO: 678027 - RNA, 21 nt, Human
ucucuaaacaccugaaagccc

SEQ ID NO: 678028 - RNA, 26 nt, Human
ugaaagucaaaguagaccagaaaccc

SEQ ID NO: 678029 - RNA, 27 nt, Human
ugcaaugaauguuaacaacaacaaaaa

SEQ ID NO: 678030 - RNA, 24 nt, Human
uggaaugccaauauggcaguaaaa

SEQ ID NO: 678031 - RNA, 20 nt, Human
uggagaaacucaagcugagg

SEQ ID NO: 678032 - RNA, 21 nt, Human
uggcacagcucaaaaaauccc

SEQ ID NO: 678033 - RNA, 21 nt, Human
uggccagaagaagggguaauu

SEQ ID NO: 678034 - RNA, 19 nt, Human
uggccgggcgucggcgggg

SEQ ID NO: 678035 - RNA, 18 nt, Human
ugggaagcaaaauccaag

SEQ ID NO: 678036 - RNA, 18 nt, Human
ugggagcagggguggcca

SEQ ID NO: 678037 - RNA, 18 nt, Human
uguaaaacagaagccaau

SEQ ID NO: 678038 - RNA, 18 nt, Human
uguggacagaaaaagaaa

SEQ ID NO: 678039 - RNA, 18 nt, Human
uuacuucagauaaaaaga

SEQ ID NO: 678040 - RNA, 23 nt, Human
uugcaaugaauguuaacaacaac

SEQ ID NO: 678041 - RNA, 23 nt, Human
uuuacuuguggacagaaaaagaa

SEQ ID NO: 678042 - RNA, 23 nt, Human
uuuuuuuuuuuuuuuuuuucagg

SEQ ID NO: 678043 - RNA, 20 nt, Human
aaacauauacaaaucaauga

SEQ ID NO: 678044 - RNA, 21 nt, Human
agauuuauguuugagcagcuu

SEQ ID NO: 678045 - RNA, 21 nt, Human
aggcaaacaaagaacaccugg

SEQ ID NO: 678046 - RNA, 20 nt, Human
gaacuggaagccagaaaggu

SEQ ID NO: 678047 - RNA, 20 nt, Human
uaaaaaaauugggacguggg

SEQ ID NO: 678048 - RNA, 21 nt, Human
uagcuugaauauaaaagaagc

SEQ ID NO: 678049 - RNA, 23 nt, Human
uagcuugaauauaaaagaagcuc

SEQ ID NO: 678050 - RNA, 27 nt, Human
ucaaugagcuuuccaacaucacauaau

SEQ ID NO: 678051 - RNA, 21 nt, Human
ucuucuuuuucauguuuagcu

SEQ ID NO: 678052 - RNA, 24 nt, Human
ugagcagcuugaaaagaauccguu

SEQ ID NO: 678053 - RNA, 24 nt, Human
uuggcugagcguugucuagaaauu

SEQ ID NO: 678054 - RNA, 25 nt, Human
uuuuucuucuuuuucauguuuagcu

SEQ ID NO: 678055 - RNA, 20 nt, Human
aaaaacagggauaucugcau

SEQ ID NO: 678056 - RNA, 19 nt, Human
aaaucaauuccaguuaacu

SEQ ID NO: 678057 - RNA, 20 nt, Human
aacuuaccaucucuuaaaaa

SEQ ID NO: 678058 - RNA, 18 nt, Human
aagcaacagcagcaguua

SEQ ID NO: 678059 - RNA, 23 nt, Human
aagcaacagcagcaguuacaaaa

SEQ ID NO: 678060 - RNA, 23 nt, Human
aagcgcuuucugacaucucaccc

SEQ ID NO: 678061 - RNA, 19 nt, Human
acagugcgcgcuguagaac

SEQ ID NO: 678062 - RNA, 23 nt, Human
acuuuauaagguguauguagaaa

SEQ ID NO: 678063 - RNA, 23 nt, Human
agaaagcaaacauaggacgugaa

SEQ ID NO: 678064 - RNA, 25 nt, Human
agaaagcaaacauaggacgugaaaa

SEQ ID NO: 678065 - RNA, 26 nt, Human
agaaagcaaacauaggacgugaaaaa

SEQ ID NO: 678066 - RNA, 24 nt, Human
agagugccaccuucugguuuaaaa

SEQ ID NO: 678067 - RNA, 20 nt, Human
agaugcacacccccaggaac

SEQ ID NO: 678068 - RNA, 23 nt, Human
aggauacaacccacguccucguu

SEQ ID NO: 678069 - RNA, 19 nt, Human
aguuaacagugcgcgcugu

SEQ ID NO: 678070 - RNA, 22 nt, Human
auguaacacaagaaaaaaagua

SEQ ID NO: 678071 - RNA, 25 nt, Human
auuucauuuucuuacggaaggagca

SEQ ID NO: 678072 - RNA, 26 nt, Human
auuucauuuucuuacggaaggagcag

SEQ ID NO: 678073 - RNA, 23 nt, Human
caaaguacaagaaauguugcgug

SEQ ID NO: 678074 - RNA, 20 nt, Human
caacagcagcaguuacaaaa

SEQ ID NO: 678075 - RNA, 20 nt, Human
cacacccccaggaacggcag

SEQ ID NO: 678076 - RNA, 23 nt, Human
caucucuuaaaaaugggagaaag

SEQ ID NO: 678077 - RNA, 19 nt, Human
ccaccuucugguuuaaaac

SEQ ID NO: 678078 - RNA, 18 nt, Human
ccaguauagcuauaauac

SEQ ID NO: 678079 - RNA, 20 nt, Human
ccccgccaccaccuuucccg

SEQ ID NO: 678080 - RNA, 21 nt, Human
ccccgccaccaccuuucccga

SEQ ID NO: 678081 - RNA, 19 nt, Human
cccuagcgugugagcccca

SEQ ID NO: 678082 - RNA, 18 nt, Human
ccgaagaugcacaccccc

SEQ ID NO: 678083 - RNA, 21 nt, Human
cgaagaugcacacccccagga

SEQ ID NO: 678084 - RNA, 20 nt, Human
cgccccgccaccaccuuucc

SEQ ID NO: 678085 - RNA, 21 nt, Human
cuuucugacaucucacccuag

SEQ ID NO: 678086 - RNA, 22 nt, Human
gaagaugcacacccccaggaac

SEQ ID NO: 678087 - RNA, 21 nt, Human
gcaacagcagcaguuacaaaa

SEQ ID NO: 678088 - RNA, 21 nt, Human
gcacacccccaggaacggcag

SEQ ID NO: 678089 - RNA, 26 nt, Human
gcacacccccaggaacgggggaacgc

SEQ ID NO: 678090 - RNA, 22 nt, Human
gccaccuucugguuuaaaacug

SEQ ID NO: 678091 - RNA, 19 nt, Human
gccccgccaccaccuuucc

SEQ ID NO: 678092 - RNA, 24 nt, Human
gcuguagaacuuuaacacaagucu

SEQ ID NO: 678093 - RNA, 18 nt, Human
ggcagugcaagccuggca

SEQ ID NO: 678094 - RNA, 21 nt, Human
uacaaaguacaagaaauguug

SEQ ID NO: 678095 - RNA, 20 nt, Human
uacaguuuagugaggugguc

SEQ ID NO: 678096 - RNA, 20 nt, Human
uaguagagaugcgacucacg

SEQ ID NO: 678097 - RNA, 24 nt, Human
uaguagagaugcgacucacggaga

SEQ ID NO: 678098 - RNA, 26 nt, Human
ucaguaaaucaauuccaguuaacuua

SEQ ID NO: 678099 - RNA, 20 nt, Human
ugaagaaaaagacguucagu

SEQ ID NO: 678100 - RNA, 20 nt, Human
ugcaagccuggcagcaagcc

SEQ ID NO: 678101 - RNA, 19 nt, Human
ugcacacccccaggaacgg

SEQ ID NO: 678102 - RNA, 21 nt, Human
ugggagaaagcaaacauagga

SEQ ID NO: 678103 - RNA, 26 nt, Human
uguuuaaaauacaagcgcuuucugac

SEQ ID NO: 678104 - RNA, 21 nt, Human
uuucccgaagaugcacacccc

SEQ ID NO: 678105 - RNA, 26 nt, Human
uuuuuuuuuuauuucaaaaacagggg

SEQ ID NO: 678106 - RNA, 21 nt, Human
uuuuuuuuuuuuuuuuuauuu

SEQ ID NO: 678107 - RNA, 25 nt, Human
aaaauguacuaaaaauaaaugcuug

SEQ ID NO: 678108 - RNA, 19 nt, Human
acagcccagaugaucagca

SEQ ID NO: 678109 - RNA, 18 nt, Human
acuacagcaacugcauug

SEQ ID NO: 678110 - RNA, 19 nt, Human
agccgggcagggcccgccc

SEQ ID NO: 678111 - RNA, 22 nt, Human
agcuuuggcauuagcaauuuua

SEQ ID NO: 678112 - RNA, 18 nt, Human
aggagggacaaagaaccg

SEQ ID NO: 678113 - RNA, 19 nt, Human
aggagggacaaagaaccgg

SEQ ID NO: 678114 - RNA, 22 nt, Human
aucacagcccagaugaucagca

SEQ ID NO: 678115 - RNA, 19 nt, Human
cagcccagaugaucagcaa

SEQ ID NO: 678116 - RNA, 19 nt, Human
ccagcaccuggccgcggac

SEQ ID NO: 678117 - RNA, 21 nt, Human
ccgugccggccacaggcugca

SEQ ID NO: 678118 - RNA, 20 nt, Human
ccuggccgcggaccucggcc

SEQ ID NO: 678119 - RNA, 21 nt, Human
cuccguggaggggcagcggcg

SEQ ID NO: 678120 - RNA, 21 nt, Human
cucgcguugucugcccgugcc

SEQ ID NO: 678121 - RNA, 20 nt, Human
gaucagcaacuccguggagg

SEQ ID NO: 678122 - RNA, 18 nt, Human
gcagcggcgccagcaccu

SEQ ID NO: 678123 - RNA, 18 nt, Human
gcccagaugaucagcaac

SEQ ID NO: 678124 - RNA, 22 nt, Human
ggcagcggcgccagcaccuggc

SEQ ID NO: 678125 - RNA, 21 nt, Human
ggccgggcuccugcaccguca

SEQ ID NO: 678126 - RNA, 23 nt, Human
gggcagcggcgccagcaccuggc

SEQ ID NO: 678127 - RNA, 20 nt, Human
gggcgccgcggccgggcucc

SEQ ID NO: 678128 - RNA, 19 nt, Human
guggaggggcagcggcgcc

SEQ ID NO: 678129 - RNA, 24 nt, Human
uaacuggcuccucuuuggauuuau

SEQ ID NO: 678130 - RNA, 22 nt, Human
uaggagggacaaagaaccgggu

SEQ ID NO: 678131 - RNA, 21 nt, Human
uauuucuuuuaauacaaagcu

SEQ ID NO: 678132 - RNA, 20 nt, Human
ucugcagcaaggcaauccac

SEQ ID NO: 678133 - RNA, 22 nt, Human
uggcaugauugguaaaugaugc

SEQ ID NO: 678134 - RNA, 24 nt, Human
uuucuuuuaauacaaagcuuuggc

SEQ ID NO: 678135 - RNA, 23 nt, Human
uuuuuuuuuuuuuuuuuuauuuu

SEQ ID NO: 678136 - RNA, 23 nt, Human
aacuucauuucuucggugacugu

SEQ ID NO: 678137 - RNA, 24 nt, Human
accucaaaggcagagacaaaagga

SEQ ID NO: 678138 - RNA, 20 nt, Human
acugugaagcugagggcaga

SEQ ID NO: 678139 - RNA, 18 nt, Human
aggcagagacaaaaggac

SEQ ID NO: 678140 - RNA, 20 nt, Human
aggcagggugcggcuguggg

SEQ ID NO: 678141 - RNA, 22 nt, Human
aggcagggugcggcuguggggc

SEQ ID NO: 678142 - RNA, 20 nt, Human
aggggacagucgaggcuuga

SEQ ID NO: 678143 - RNA, 23 nt, Human
caacgccccagaagcccugcaag

SEQ ID NO: 678144 - RNA, 24 nt, Human
caacgccccagaagcccugcaagg

SEQ ID NO: 678145 - RNA, 18 nt, Human
caccgccucggccccugc

SEQ ID NO: 678146 - RNA, 24 nt, Human
cagggugcggcuguggggcaggug

SEQ ID NO: 678147 - RNA, 18 nt, Human
cccaacgccccagaagcc

SEQ ID NO: 678148 - RNA, 23 nt, Human
ccccagaagcccugcaaggaucc

SEQ ID NO: 678149 - RNA, 19 nt, Human
cccccgaggucccaccgcc

SEQ ID NO: 678150 - RNA, 20 nt, Human
cccccgaggucccaccgccu

SEQ ID NO: 678151 - RNA, 24 nt, Human
cccgccaaccucaaaggcagagac

SEQ ID NO: 678152 - RNA, 23 nt, Human
ccucaaaggcagagacaaaagga

SEQ ID NO: 678153 - RNA, 19 nt, Human
ccucuggccuccagcgagg

SEQ ID NO: 678154 - RNA, 25 nt, Human
ccuggguuucccaacgccccagaag

SEQ ID NO: 678155 - RNA, 19 nt, Human
cgccucggccccugccggc

SEQ ID NO: 678156 - RNA, 21 nt, Human
cgccucggccccugccggcuc

SEQ ID NO: 678157 - RNA, 21 nt, Human
cggagagaggagcuggugucc

SEQ ID NO: 678158 - RNA, 20 nt, Human
cggccccugccggcucuggg

SEQ ID NO: 678159 - RNA, 19 nt, Human
cggcgggccuggguuuccc

SEQ ID NO: 678160 - RNA, 21 nt, Human
cuuggccucuggccuccagcc

SEQ ID NO: 678161 - RNA, 26 nt, Human
gccaaccucaaaggcagagacaaaag

SEQ ID NO: 678162 - RNA, 25 nt, Human
gccccagaagcccugcaaggauccu

SEQ ID NO: 678163 - RNA, 22 nt, Human
ggacggugugccccuccuguaa

SEQ ID NO: 678164 - RNA, 21 nt, Human
ggugacugugaagcugagggc

SEQ ID NO: 678165 - RNA, 18 nt, Human
gugcggcuguggggcagg

SEQ ID NO: 678166 - RNA, 24 nt, Human
uaacuucauuucuucggugacugu

SEQ ID NO: 678167 - RNA, 21 nt, Human
ucaaaggcagagacaaaagga

SEQ ID NO: 678168 - RNA, 21 nt, Human
ucccaacgccccagaagcccu

SEQ ID NO: 678169 - RNA, 18 nt, Human
ucccaccgccucggcccc

SEQ ID NO: 678170 - RNA, 22 nt, Human
uccucggccuccccggugacgg

SEQ ID NO: 678171 - RNA, 20 nt, Human
ugacggcggagagaggagcu

SEQ ID NO: 678172 - RNA, 22 nt, Human
ugacggcggagagaggagcugg

SEQ ID NO: 678173 - RNA, 23 nt, Human
ugagggcagagucguggccggcg

SEQ ID NO: 678174 - RNA, 22 nt, Human
uggccggcgggccuggguuucc

SEQ ID NO: 678175 - RNA, 18 nt, Human
uggccucuggccuccagc

SEQ ID NO: 678176 - RNA, 19 nt, Human
uucccaacgccccagaagc

SEQ ID NO: 678177 - RNA, 21 nt, Human
uucccaacgccccagaagccc

SEQ ID NO: 678178 - RNA, 23 nt, Human
aaaaaauucuaaaacaucacuga

SEQ ID NO: 678179 - RNA, 18 nt, Human
aaaaagaugccaucuaca

SEQ ID NO: 678180 - RNA, 22 nt, Human
aaaacaaaaacaaaaaauuaga

SEQ ID NO: 678181 - RNA, 21 nt, Human
aaacaaaaacaaaaaauuaga

SEQ ID NO: 678182 - RNA, 22 nt, Human
aaacaagguggagagaugaccc

SEQ ID NO: 678183 - RNA, 24 nt, Human
aaagugcugggauuacaggcguga

SEQ ID NO: 678184 - RNA, 18 nt, Human
aacacaguccagcccccc

SEQ ID NO: 678185 - RNA, 23 nt, Human
aacacuaucccucucccagccac

SEQ ID NO: 678186 - RNA, 25 nt, Human
aaccaacucccaacugcagaaccca

SEQ ID NO: 678187 - RNA, 23 nt, Human
aaccacaguuuacaaacgucaag

SEQ ID NO: 678188 - RNA, 19 nt, Human
aaccuggagggcggaggcu

SEQ ID NO: 678189 - RNA, 24 nt, Human
aacugcagaacccagaaacaaaug

SEQ ID NO: 678190 - RNA, 19 nt, Human
aagaagaaaaaugauauga

SEQ ID NO: 678191 - RNA, 20 nt, Human
aagaggaagaagagaggagg

SEQ ID NO: 678192 - RNA, 23 nt, Human
aagaggaagaagagaggaggagu

SEQ ID NO: 678193 - RNA, 19 nt, Human
aagccaagagcagugggga

SEQ ID NO: 678194 - RNA, 22 nt, Human
aaggauggguccaacacagucc

SEQ ID NO: 678195 - RNA, 19 nt, Human
aaguagcugggacuacagg

SEQ ID NO: 678196 - RNA, 20 nt, Human
aaguagcugggacuacaggc

SEQ ID NO: 678197 - RNA, 25 nt, Human
aaguagcugggacuacaggcaccug

SEQ ID NO: 678198 - RNA, 19 nt, Human
aagugcugggauuacaggc

SEQ ID NO: 678199 - RNA, 19 nt, Human
aagugcugggauuacaggc

SEQ ID NO: 678200 - RNA, 20 nt, Human
aaucaagcuuaucauuauau

SEQ ID NO: 678201 - RNA, 24 nt, Human
acacugggcaccuggagggaaggc

SEQ ID NO: 678202 - RNA, 25 nt, Human
acacugggcaccuggagggaaggcu

SEQ ID NO: 678203 - RNA, 21 nt, Human
acagauucuuccccaaauuag

SEQ ID NO: 678204 - RNA, 18 nt, Human
acgggguuucaccaucuu

SEQ ID NO: 678205 - RNA, 20 nt, Human
acgggguuucaccaucuugg

SEQ ID NO: 678206 - RNA, 24 nt, Human
acgggguuucaccaucuuggccag

SEQ ID NO: 678207 - RNA, 18 nt, Human
acugcacgccagccuggg

SEQ ID NO: 678208 - RNA, 20 nt, Human
acuguccaaaaacaaaaaca

SEQ ID NO: 678209 - RNA, 18 nt, Human
agaaaaacaagguggaga

SEQ ID NO: 678210 - RNA, 20 nt, Human
agaaaccaacucccaacugc

SEQ ID NO: 678211 - RNA, 25 nt, Human
agaaaccaacucccaacugcagaac

SEQ ID NO: 678212 - RNA, 19 nt, Human
agaaaucaugaugccaaua

SEQ ID NO: 678213 - RNA, 20 nt, Human
agaacccagaaacaaaugcc

SEQ ID NO: 678214 - RNA, 22 nt, Human
agaagaaaaacaagguggagag

SEQ ID NO: 678215 - RNA, 21 nt, Human
agacaaguagaccaauggaga

SEQ ID NO: 678216 - RNA, 21 nt, Human
agacuagaaacaucacauuua

SEQ ID NO: 678217 - RNA, 26 nt, Human
agacuguccaaaaacaaaaacaaagc

SEQ ID NO: 678218 - RNA, 20 nt, Human
agagaggaggaguggggagg

SEQ ID NO: 678219 - RNA, 21 nt, Human
agagaggaggaguggggaggg

SEQ ID NO: 678220 - RNA, 27 nt, Human
agagaggaggaguggggaggggaggga

SEQ ID NO: 678221 - RNA, 20 nt, Human
agaggaagaagagaggagga

SEQ ID NO: 678222 - RNA, 21 nt, Human
agaggaagaagagaggaggag

SEQ ID NO: 678223 - RNA, 19 nt, Human
agagggggaggaggaggga

SEQ ID NO: 678224 - RNA, 21 nt, Human
agcaaguggaaacucacagga

SEQ ID NO: 678225 - RNA, 20 nt, Human
agcacuuugggaggcuaagg

SEQ ID NO: 678226 - RNA, 19 nt, Human
agccccccggcagugucag

SEQ ID NO: 678227 - RNA, 23 nt, Human
agccggguguaguggcacacgcc

SEQ ID NO: 678228 - RNA, 22 nt, Human
aggaagaagcaaauuaucagaa

SEQ ID NO: 678229 - RNA, 21 nt, Human
aggaagagggugguauccuug

SEQ ID NO: 678230 - RNA, 20 nt, Human
aggagggguugcgggcccgu

SEQ ID NO: 678231 - RNA, 22 nt, Human
aggcaugagaaucacuugaacc

SEQ ID NO: 678232 - RNA, 24 nt, Human
aggcaugagaaucacuugaaccug

SEQ ID NO: 678233 - RNA, 21 nt, Human
aggcgggcagaucacuugugg

SEQ ID NO: 678234 - RNA, 26 nt, Human
aggcgggcagaucacuuguggccagg

SEQ ID NO: 678235 - RNA, 23 nt, Human
agggggaggaggagggaaaggaa

SEQ ID NO: 678236 - RNA, 24 nt, Human
agguguaguggcuugcgccuguaa

SEQ ID NO: 678237 - RNA, 21 nt, Human
aguagaccaauggagaaccca

SEQ ID NO: 678238 - RNA, 20 nt, Human
agugcaguggcacgaucucg

SEQ ID NO: 678239 - RNA, 23 nt, Human
agugcaguggcacgaucucggcu

SEQ ID NO: 678240 - RNA, 24 nt, Human
agugcaguggcacgaucucggcuc

SEQ ID NO: 678241 - RNA, 18 nt, Human
agugcugggauuacaggc

SEQ ID NO: 678242 - RNA, 24 nt, Human
aguggcuugcgccuguaaucccag

SEQ ID NO: 678243 - RNA, 22 nt, Human
auagagcaacagccuauccuuu

SEQ ID NO: 678244 - RNA, 23 nt, Human
aucacuuguggccaggaguucaa

SEQ ID NO: 678245 - RNA, 25 nt, Human
aucccucucccagccacccccccaa

SEQ ID NO: 678246 - RNA, 24 nt, Human
auuuacugcaauuuucuuuuucuu

SEQ ID NO: 678247 - RNA, 24 nt, Human
auuuuuguauuuuuaguagagacg

SEQ ID NO: 678248 - RNA, 26 nt, Human
caaaaacaaaaaauuagauagagcaa

SEQ ID NO: 678249 - RNA, 20 nt, Human
caaaguaacugaaagacuua

SEQ ID NO: 678250 - RNA, 24 nt, Human
caaagugcugggauuacaggcgug

SEQ ID NO: 678251 - RNA, 18 nt, Human
caacacaguccagccccc

SEQ ID NO: 678252 - RNA, 24 nt, Human
caacucccaacugcagaacccaga

SEQ ID NO: 678253 - RNA, 22 nt, Human
caagaccaggaguuugagauca

SEQ ID NO: 678254 - RNA, 19 nt, Human
caagugauucuccugccuc

SEQ ID NO: 678255 - RNA, 28 nt, Human
caagugauucuccugccucgguguccca

SEQ ID NO: 678256 - RNA, 22 nt, Human
caauagcaaugacaaaucaaaa

SEQ ID NO: 678257 - RNA, 21 nt, Human
caccaucuuggccagcuguuc

SEQ ID NO: 678258 - RNA, 23 nt, Human
caccaucuuggccagcuguucuc

SEQ ID NO: 678259 - RNA, 22 nt, Human
cacccaccucagccucccaaag

SEQ ID NO: 678260 - RNA, 23 nt, Human
cacccaccucagccucccaaagu

SEQ ID NO: 678261 - RNA, 23 nt, Human
cacccagggcugaggccauccgc

SEQ ID NO: 678262 - RNA, 21 nt, Human
cacccccccaacaguccaggc

SEQ ID NO: 678263 - RNA, 24 nt, Human
caccgcacccagcuaauuuuugua

SEQ ID NO: 678264 - RNA, 24 nt, Human
caccucagccucccaaagugcugg

SEQ ID NO: 678265 - RNA, 23 nt, Human
cacgccagccugggccacagagc

SEQ ID NO: 678266 - RNA, 19 nt, Human
cacgccucuaaucccagcu

SEQ ID NO: 678267 - RNA, 21 nt, Human
cacuaucccucucccagccac

SEQ ID NO: 678268 - RNA, 21 nt, Human
cacugcaaccuccgccucccg

SEQ ID NO: 678269 - RNA, 23 nt, Human
cacugcaaccuccgccucccggg

SEQ ID NO: 678270 - RNA, 20 nt, Human
cacugcacgccagccugggc

SEQ ID NO: 678271 - RNA, 24 nt, Human
cacugcacgccagccugggccaca

SEQ ID NO: 678272 - RNA, 19 nt, Human
cacuuguggccaggaguuc

SEQ ID NO: 678273 - RNA, 19 nt, Human
cagaaaauguuuuaaccac

SEQ ID NO: 678274 - RNA, 21 nt, Human
cagaaaccaacucccaacugc

SEQ ID NO: 678275 - RNA, 24 nt, Human
cagaaaccaacucccaacugcaga

SEQ ID NO: 678276 - RNA, 24 nt, Human
cagaacgcugaggcaugagaauca

SEQ ID NO: 678277 - RNA, 21 nt, Human
cagagaaaaauaccaacucaa

SEQ ID NO: 678278 - RNA, 24 nt, Human
cagaucacuuguggccaggaguuc

SEQ ID NO: 678279 - RNA, 19 nt, Human
cagauucuuccccaaauua

SEQ ID NO: 678280 - RNA, 22 nt, Human
cagcacuuugggaggcuaaggc

SEQ ID NO: 678281 - RNA, 24 nt, Human
cagcacuuugggaggcuaaggcgg

SEQ ID NO: 678282 - RNA, 21 nt, Human
cagccacccccccaacagucc

SEQ ID NO: 678283 - RNA, 18 nt, Human
cagccccccggcaguguc

SEQ ID NO: 678284 - RNA, 19 nt, Human
caggagacagccccggccu

SEQ ID NO: 678285 - RNA, 23 nt, Human
caucuggucagguucuaaguaau

SEQ ID NO: 678286 - RNA, 22 nt, Human
ccaaagugcugggauuacaggc

SEQ ID NO: 678287 - RNA, 22 nt, Human
ccaaagugcugggauuacaggc

SEQ ID NO: 678288 - RNA, 24 nt, Human
ccaaagugcugggauuacaggcgu

SEQ ID NO: 678289 - RNA, 25 nt, Human
ccaagccaggcacagcggggcaagg

SEQ ID NO: 678290 - RNA, 26 nt, Human
ccacccaccucagccucccaaagugc

SEQ ID NO: 678291 - RNA, 22 nt, Human
ccacccccccaacaguccaggc

SEQ ID NO: 678292 - RNA, 20 nt, Human
ccacugcacgccagccuggg

SEQ ID NO: 678293 - RNA, 21 nt, Human
ccacugcacgccagccugggc

SEQ ID NO: 678294 - RNA, 24 nt, Human
ccacugcacgccagccugggccac

SEQ ID NO: 678295 - RNA, 19 nt, Human
ccagagacgggcggggaca

SEQ ID NO: 678296 - RNA, 21 nt, Human
ccagccccccggcagugucag

SEQ ID NO: 678297 - RNA, 23 nt, Human
ccaggccaauauggcaaagcccg

SEQ ID NO: 678298 - RNA, 21 nt, Human
cccaacugcagaacccagaaa

SEQ ID NO: 678299 - RNA, 23 nt, Human
cccaaguagcugggacuacaggc

SEQ ID NO: 678300 - RNA, 24 nt, Human
cccaaguagcugggacuacaggca

SEQ ID NO: 678301 - RNA, 24 nt, Human
cccacugcacgccagccugggcca

SEQ ID NO: 678302 - RNA, 26 nt, Human
cccacugcacgccagccugggccaca

SEQ ID NO: 678303 - RNA, 18 nt, Human
cccagaaacaaaugccac

SEQ ID NO: 678304 - RNA, 21 nt, Human
cccggguucaagugauucucc

SEQ ID NO: 678305 - RNA, 23 nt, Human
cccggguucaagugauucuccug

SEQ ID NO: 678306 - RNA, 24 nt, Human
cccucucccagccacccccccaac

SEQ ID NO: 678307 - RNA, 24 nt, Human
ccgccucccggguucaagugauuc

SEQ ID NO: 678308 - RNA, 22 nt, Human
ccgcugggcuaagucauuauau

SEQ ID NO: 678309 - RNA, 19 nt, Human
ccggcagugucagcgcaca

SEQ ID NO: 678310 - RNA, 23 nt, Human
ccuacacugggcaccuggaggga

SEQ ID NO: 678311 - RNA, 28 nt, Human
ccuacugucaaagccaagaagguuuucc

SEQ ID NO: 678312 - RNA, 21 nt, Human
ccuacugucaaagccaagagc

SEQ ID NO: 678313 - RNA, 24 nt, Human
ccucccggguucaagugauucucc

SEQ ID NO: 678314 - RNA, 24 nt, Human
ccuccgagccacaucuggucaggu

SEQ ID NO: 678315 - RNA, 20 nt, Human
ccugaaaaugcucaugcaug

SEQ ID NO: 678316 - RNA, 23 nt, Human
ccugaaauauucauagaauugca

SEQ ID NO: 678317 - RNA, 21 nt, Human
ccugaccugugauccacccac

SEQ ID NO: 678318 - RNA, 22 nt, Human
cgccagaaaauguuuuaaccac

SEQ ID NO: 678319 - RNA, 25 nt, Human
cgcccuguguccaaguguucucauu

SEQ ID NO: 678320 - RNA, 18 nt, Human
cgccucuaaucccagcua

SEQ ID NO: 678321 - RNA, 20 nt, Human
cgccuguaaucccagcacuu

SEQ ID NO: 678322 - RNA, 23 nt, Human
cgccuguaaucccagcacuuugg

SEQ ID NO: 678323 - RNA, 24 nt, Human
cgccuguaaucccagcacuuuggg

SEQ ID NO: 678324 - RNA, 24 nt, Human
cgcucugucgcccaggcuagagug

SEQ ID NO: 678325 - RNA, 21 nt, Human
cggcccacugcacgccagccu

SEQ ID NO: 678326 - RNA, 24 nt, Human
cgggcagaucacuuguggccagga

SEQ ID NO: 678327 - RNA, 19 nt, Human
cggggacagagagaggagg

SEQ ID NO: 678328 - RNA, 23 nt, Human
cgggguuucaccaucuuggccag

SEQ ID NO: 678329 - RNA, 23 nt, Human
cuaauuuuuguauuuuuaguaga

SEQ ID NO: 678330 - RNA, 25 nt, Human
cuauaccaaaaauuauuaaagcucc

SEQ ID NO: 678331 - RNA, 24 nt, Human
cuaugagugagaacaugcgguguu

SEQ ID NO: 678332 - RNA, 24 nt, Human
cucacugcaaccuccgccucccgg

SEQ ID NO: 678333 - RNA, 20 nt, Human
cucccggguucaagugauuc

SEQ ID NO: 678334 - RNA, 23 nt, Human
cucugucgcccaggcuagagugc

SEQ ID NO: 678335 - RNA, 21 nt, Human
cucugugcaggagacagcccc

SEQ ID NO: 678336 - RNA, 23 nt, Human
cugaaaaugcucaugcaugaaug

SEQ ID NO: 678337 - RNA, 19 nt, Human
cugacccugaaauauucau

SEQ ID NO: 678338 - RNA, 18 nt, Human
cugagacggcccacugca

SEQ ID NO: 678339 - RNA, 23 nt, Human
cugcaaccuccgccucccggguu

SEQ ID NO: 678340 - RNA, 18 nt, Human
cugcaauuuucuuuuucu

SEQ ID NO: 678341 - RNA, 24 nt, Human
cugcacuccaaaguaacugaaaga

SEQ ID NO: 678342 - RNA, 19 nt, Human
cuuacccaaagucccaugc

SEQ ID NO: 678343 - RNA, 23 nt, Human
cuuguggccaggaguucaagacc

SEQ ID NO: 678344 - RNA, 21 nt, Human
gaaaccaaggcuuagagaaug

SEQ ID NO: 678345 - RNA, 23 nt, Human
gaaaggaaggcguggcagugaga

SEQ ID NO: 678346 - RNA, 21 nt, Human
gaacccagaaaccaacuccca

SEQ ID NO: 678347 - RNA, 20 nt, Human
gaagaggaagaagagaggag

SEQ ID NO: 678348 - RNA, 21 nt, Human
gaagaggaagaagagaggagg

SEQ ID NO: 678349 - RNA, 18 nt, Human
gacagcagcgggucugga

SEQ ID NO: 678350 - RNA, 24 nt, Human
gacagcagcgggucuggauucccc

SEQ ID NO: 678351 - RNA, 23 nt, Human
gaccugugauccacccaccucag

SEQ ID NO: 678352 - RNA, 24 nt, Human
gagacgggguuucaccaucuuggc

SEQ ID NO: 678353 - RNA, 23 nt, Human
gagaggaggaguggggaggggag

SEQ ID NO: 678354 - RNA, 25 nt, Human
gagaguuuuuccauaaauggcacaa

SEQ ID NO: 678355 - RNA, 18 nt, Human
gaguggggaggggaggga

SEQ ID NO: 678356 - RNA, 24 nt, Human
gaucacuuguggccaggaguucaa

SEQ ID NO: 678357 - RNA, 19 nt, Human
gauccagcucuccugcucc

SEQ ID NO: 678358 - RNA, 27 nt, Human
gauccagcucuccugcuccacauccac

SEQ ID NO: 678359 - RNA, 18 nt, Human
gauuacaggcgugagcug

SEQ ID NO: 678360 - RNA, 19 nt, Human
gauuacaggcgugagcugu

SEQ ID NO: 678361 - RNA, 24 nt, Human
gauuccuacugucaaagccaagag

SEQ ID NO: 678362 - RNA, 22 nt, Human
gcaaccacaguuuacaaacguc

SEQ ID NO: 678363 - RNA, 22 nt, Human
gcaaccuccgccucccggguuc

SEQ ID NO: 678364 - RNA, 20 nt, Human
gcauccugaggauaaagacu

SEQ ID NO: 678365 - RNA, 23 nt, Human
gccaagccaggcacagcggggca

SEQ ID NO: 678366 - RNA, 24 nt, Human
gccucggugucccaaguagcuggg

SEQ ID NO: 678367 - RNA, 19 nt, Human
gcuagagugcaguggcacg

SEQ ID NO: 678368 - RNA, 24 nt, Human
gcuccguguuuucuuccucucuca

SEQ ID NO: 678369 - RNA, 19 nt, Human
gcugcagugaacugagacg

SEQ ID NO: 678370 - RNA, 22 nt, Human
ggaaaagccaucaucacuugga

SEQ ID NO: 678371 - RNA, 23 nt, Human
ggaggaggagggaaaggaaggcg

SEQ ID NO: 678372 - RNA, 20 nt, Human
ggaggaguggggaggggagg

SEQ ID NO: 678373 - RNA, 21 nt, Human
ggaggaguggggaggggaggg

SEQ ID NO: 678374 - RNA, 23 nt, Human
ggagucucgcucugucgcccagg

SEQ ID NO: 678375 - RNA, 19 nt, Human
ggaguugacaugcugaccc

SEQ ID NO: 678376 - RNA, 19 nt, Human
ggcagguguaguggcuugc

SEQ ID NO: 678377 - RNA, 19 nt, Human
ggcggaggcugcagugaac

SEQ ID NO: 678378 - RNA, 22 nt, Human
ggcggggacagagagaggaggg

SEQ ID NO: 678379 - RNA, 23 nt, Human
gggaagaugaaccaugcuuacug

SEQ ID NO: 678380 - RNA, 19 nt, Human
gggacagagagaggagggg

SEQ ID NO: 678381 - RNA, 20 nt, Human
gggaggaggagggaaaggaa

SEQ ID NO: 678382 - RNA, 22 nt, Human
gggcaccuggagggaaggcucc

SEQ ID NO: 678383 - RNA, 24 nt, Human
gggcggaggcugcagugaacugag

SEQ ID NO: 678384 - RNA, 19 nt, Human
ggggaggaggagggaaagg

SEQ ID NO: 678385 - RNA, 22 nt, Human
ggguucaagugauucuccugcc

SEQ ID NO: 678386 - RNA, 23 nt, Human
ggguucaagugauucuccugccu

SEQ ID NO: 678387 - RNA, 22 nt, Human
ggucaggaaaggacccuaucuc

SEQ ID NO: 678388 - RNA, 24 nt, Human
gugauccacccaccucagccuccc

SEQ ID NO: 678389 - RNA, 21 nt, Human
guggagguuuuagccagugca

SEQ ID NO: 678390 - RNA, 22 nt, Human
guucaagaccaggaguuugaga

SEQ ID NO: 678391 - RNA, 19 nt, Human
uaaaaagaugccaucuaca

SEQ ID NO: 678392 - RNA, 19 nt, Human
uaaaacagaaaaauaaauc

SEQ ID NO: 678393 - RNA, 24 nt, Human
uaacaaaaucagugccaagguuuc

SEQ ID NO: 678394 - RNA, 25 nt, Human
uaacauguauugucugcaggccgcu

SEQ ID NO: 678395 - RNA, 18 nt, Human
uaaccugauuccuacugu

SEQ ID NO: 678396 - RNA, 20 nt, Human
uaaggcgggcagaucacuug

SEQ ID NO: 678397 - RNA, 26 nt, Human
uaaggcgggcagaucacuuguggcca

SEQ ID NO: 678398 - RNA, 24 nt, Human
uaauuuuuguauuuuuaguagaga

SEQ ID NO: 678399 - RNA, 24 nt, Human
uacaggcaccugccaccgcaccca

SEQ ID NO: 678400 - RNA, 21 nt, Human
uacugcaauuuucuuuuucuu

SEQ ID NO: 678401 - RNA, 23 nt, Human
uagaagaaaaacaagguggagag

SEQ ID NO: 678402 - RNA, 23 nt, Human
uagagugcaguggcacgaucucg

SEQ ID NO: 678403 - RNA, 24 nt, Human
uagagugcaguggcacgaucucgg

SEQ ID NO: 678404 - RNA, 22 nt, Human
uagccggguguaguggcacacg

SEQ ID NO: 678405 - RNA, 23 nt, Human
uaguagagacgggguuucaccau

SEQ ID NO: 678406 - RNA, 24 nt, Human
uaguggcuugcgccuguaauccca

SEQ ID NO: 678407 - RNA, 26 nt, Human
uauacuuagcaaacucagacuagaaa

SEQ ID NO: 678408 - RNA, 27 nt, Human
uauacuuagcaaacucagacuagaaac

SEQ ID NO: 678409 - RNA, 20 nt, Human
uauugaugaaacauuagaga

SEQ ID NO: 678410 - RNA, 28 nt, Human
uauuucuccuaacacuaucccucuccca

SEQ ID NO: 678411 - RNA, 19 nt, Human
ucaaacuccugaccuguga

SEQ ID NO: 678412 - RNA, 23 nt, Human
ucaaagcucuucuuuagaaauca

SEQ ID NO: 678413 - RNA, 19 nt, Human
ucaagugauucuccugccu

SEQ ID NO: 678414 - RNA, 23 nt, Human
ucacugcaaccuccgccucccgg

SEQ ID NO: 678415 - RNA, 24 nt, Human
ucacugcaaccuccgccucccggg

SEQ ID NO: 678416 - RNA, 25 nt, Human
ucacugcaaccuccgccucccgggu

SEQ ID NO: 678417 - RNA, 27 nt, Human
ucacugcaaccuccgccucccggguuc

SEQ ID NO: 678418 - RNA, 23 nt, Human
ucacuuguggccaggaguucaag

SEQ ID NO: 678419 - RNA, 21 nt, Human
ucagccaggccaauauggcaa

SEQ ID NO: 678420 - RNA, 19 nt, Human
ucagccucacagaagucgc

SEQ ID NO: 678421 - RNA, 18 nt, Human
ucagccucccaaagugcu

SEQ ID NO: 678422 - RNA, 18 nt, Human
ucagugccaagguuucuu

SEQ ID NO: 678423 - RNA, 23 nt, Human
ucaugaauaccagucacauguua

SEQ ID NO: 678424 - RNA, 26 nt, Human
uccaaaaacaaaaacaaaaaauuaga

SEQ ID NO: 678425 - RNA, 24 nt, Human
uccaccagaggccaagccaggcac

SEQ ID NO: 678426 - RNA, 21 nt, Human
uccacccaccucagccuccca

SEQ ID NO: 678427 - RNA, 24 nt, Human
ucccaaagugcugggauuacaggc

SEQ ID NO: 678428 - RNA, 24 nt, Human
ucccaaguagcugggacuacaggc

SEQ ID NO: 678429 - RNA, 22 nt, Human
ucccagcaggguuuuucaaugg

SEQ ID NO: 678430 - RNA, 21 nt, Human
ucccggguucaagugauucuc

SEQ ID NO: 678431 - RNA, 24 nt, Human
ucccggguucaagugauucuccug

SEQ ID NO: 678432 - RNA, 22 nt, Human
ucccucucccagccaccccccc

SEQ ID NO: 678433 - RNA, 21 nt, Human
uccuugcauccugaggauaaa

SEQ ID NO: 678434 - RNA, 24 nt, Human
uccuugcauccugaggauaaagac

SEQ ID NO: 678435 - RNA, 18 nt, Human
ucgcccaggcuagagugc

SEQ ID NO: 678436 - RNA, 28 nt, Human
ucuccaccagaggccaagccaggcacag

SEQ ID NO: 678437 - RNA, 18 nt, Human
ucucgcucugucgcccag

SEQ ID NO: 678438 - RNA, 19 nt, Human
ucucgcucugucgcccagg

SEQ ID NO: 678439 - RNA, 22 nt, Human
ucucgcucugucgcccaggcua

SEQ ID NO: 678440 - RNA, 24 nt, Human
ucucgcucugucgcccaggcuaga

SEQ ID NO: 678441 - RNA, 26 nt, Human
ucucgcucugucgcccaggcuagagu

SEQ ID NO: 678442 - RNA, 24 nt, Human
ucugucgcccaggcuagagugcag

SEQ ID NO: 678443 - RNA, 22 nt, Human
ucuuuuuuuuugagauggaguc

SEQ ID NO: 678444 - RNA, 18 nt, Human
ugaaagacuuagagcucu

SEQ ID NO: 678445 - RNA, 20 nt, Human
ugaaauauucauagaauugc

SEQ ID NO: 678446 - RNA, 22 nt, Human
ugaccugugauccacccaccuc

SEQ ID NO: 678447 - RNA, 19 nt, Human
ugagacugugacagcagcu

SEQ ID NO: 678448 - RNA, 21 nt, Human
ugagcacagagccuggccacc

SEQ ID NO: 678449 - RNA, 20 nt, Human
ugaggcaugagaaucacuug

SEQ ID NO: 678450 - RNA, 24 nt, Human
ugaggcaugagaaucacuugaacc

SEQ ID NO: 678451 - RNA, 24 nt, Human
ugagugagaacaugcgguguuugg

SEQ ID NO: 678452 - RNA, 24 nt, Human
ugauccacccaccucagccuccca

SEQ ID NO: 678453 - RNA, 25 nt, Human
ugcacgccagccugggccacagagc

SEQ ID NO: 678454 - RNA, 22 nt, Human
ugcaguggcacgaucucggcuc

SEQ ID NO: 678455 - RNA, 21 nt, Human
ugccucggugucccaaguagc

SEQ ID NO: 678456 - RNA, 20 nt, Human
ugcgccuguaaucccagcac

SEQ ID NO: 678457 - RNA, 24 nt, Human
ugcgccuguaaucccagcacuuug

SEQ ID NO: 678458 - RNA, 20 nt, Human
ugcugggauuacaggcguga

SEQ ID NO: 678459 - RNA, 22 nt, Human
uggcacacgccucuaaucccag

SEQ ID NO: 678460 - RNA, 20 nt, Human
uggcauguguuccuuuaucc

SEQ ID NO: 678461 - RNA, 27 nt, Human
uggccaggaguucaagaccaggaguuu

SEQ ID NO: 678462 - RNA, 24 nt, Human
uggcuugcgccuguaaucccagca

SEQ ID NO: 678463 - RNA, 25 nt, Human
ugggaaggcaggcaaccacaguuua

SEQ ID NO: 678464 - RNA, 21 nt, Human
ugggacuacaggcaccugcca

SEQ ID NO: 678465 - RNA, 22 nt, Human
ugggacuacaggcaccugccac

SEQ ID NO: 678466 - RNA, 23 nt, Human
ugggacuacaggcaccugccacc

SEQ ID NO: 678467 - RNA, 24 nt, Human
ugggacuacaggcaccugccaccg

SEQ ID NO: 678468 - RNA, 20 nt, Human
ugggaggcuaaggcgggcag

SEQ ID NO: 678469 - RNA, 24 nt, Human
ugggaggcuaaggcgggcagauca

SEQ ID NO: 678470 - RNA, 19 nt, Human
ugggauuacaggcgugagc

SEQ ID NO: 678471 - RNA, 19 nt, Human
ugggauuacaggcgugagc

SEQ ID NO: 678472 - RNA, 21 nt, Human
ugggauuacaggcgugagcug

SEQ ID NO: 678473 - RNA, 22 nt, Human
ugggauuacaggcgugagcugu

SEQ ID NO: 678474 - RNA, 23 nt, Human
ugggauuacaggcgugagcugua

SEQ ID NO: 678475 - RNA, 21 nt, Human
uguaaagcaaguggaaacuca

SEQ ID NO: 678476 - RNA, 20 nt, Human
uguaagcaggugucuuaccc

SEQ ID NO: 678477 - RNA, 23 nt, Human
uguaagcaggugucuuacccaaa

SEQ ID NO: 678478 - RNA, 21 nt, Human
uguauuuuuaguagagacggg

SEQ ID NO: 678479 - RNA, 20 nt, Human
uguccaaaaacaaaaacaaa

SEQ ID NO: 678480 - RNA, 23 nt, Human
uguccaaaaacaaaaacaaaaaa

SEQ ID NO: 678481 - RNA, 23 nt, Human
uguccccuuacucaguagacacu

SEQ ID NO: 678482 - RNA, 21 nt, Human
ugugagcacagagccuggcca

SEQ ID NO: 678483 - RNA, 24 nt, Human
ugugauccacccaccucagccucc

SEQ ID NO: 678484 - RNA, 24 nt, Human
uuacuagacauaagauaauuaugu

SEQ ID NO: 678485 - RNA, 18 nt, Human
uuaguagagacgggguuu

SEQ ID NO: 678486 - RNA, 22 nt, Human
uuaguagagacgggguuucacc

SEQ ID NO: 678487 - RNA, 24 nt, Human
uuaguagagacgggguuucaccau

SEQ ID NO: 678488 - RNA, 23 nt, Human
uucaagaccaggaguuugagauc

SEQ ID NO: 678489 - RNA, 21 nt, Human
uucaagugauucuccugccuc

SEQ ID NO: 678490 - RNA, 23 nt, Human
uucaagugauucuccugccucgg

SEQ ID NO: 678491 - RNA, 25 nt, Human
uucaagugauucuccugccucggug

SEQ ID NO: 678492 - RNA, 25 nt, Human
uugggaggcuaaggcgggcagauca

SEQ ID NO: 678493 - RNA, 23 nt, Human
uuguauuuuuaguagagacgggg

SEQ ID NO: 678494 - RNA, 20 nt, Human
uuucaccaucuuggccagcu

SEQ ID NO: 678495 - RNA, 23 nt, Human
uuucaccaucuuggccagcuguu

SEQ ID NO: 678496 - RNA, 20 nt, Human
uuucccuccaggaaaagcca

SEQ ID NO: 678497 - RNA, 20 nt, Human
uuucuuuuuuuuugagaugg

SEQ ID NO: 678498 - RNA, 24 nt, Human
uuuuuaguagagacgggguuucac

SEQ ID NO: 678499 - RNA, 20 nt, Human
uuuuuguauuuuuaguagag

SEQ ID NO: 678500 - RNA, 19 nt, Human
aaaaaaucgcaaguagaca

SEQ ID NO: 678501 - RNA, 24 nt, Human
aaaaccagagcccaaaugggcugg

SEQ ID NO: 678502 - RNA, 23 nt, Human
aaacccuccaccuggugccccuc

SEQ ID NO: 678503 - RNA, 24 nt, Human
aaagcaaaagccaugaggcccagg

SEQ ID NO: 678504 - RNA, 23 nt, Human
aacagaaggaggcugugggaggg

SEQ ID NO: 678505 - RNA, 23 nt, Human
aacccuuccuccgccgcccucug

SEQ ID NO: 678506 - RNA, 21 nt, Human
aagcaaaagccaugaggccca

SEQ ID NO: 678507 - RNA, 19 nt, Human
aagcagcccuaacgcugcc

SEQ ID NO: 678508 - RNA, 26 nt, Human
aaggagaagggaggccaggaagcggg

SEQ ID NO: 678509 - RNA, 25 nt, Human
aaguuccccuuaaaccagccaccuc

SEQ ID NO: 678510 - RNA, 23 nt, Human
aaugggcugggcagggccagggc

SEQ ID NO: 678511 - RNA, 20 nt, Human
acacaagaacucagaccauc

SEQ ID NO: 678512 - RNA, 18 nt, Human
acagcccccaccccccaa

SEQ ID NO: 678513 - RNA, 28 nt, Human
accaggacacaagaacucagaccaucug

SEQ ID NO: 678514 - RNA, 22 nt, Human
acuccaaaggucccaagaggag

SEQ ID NO: 678515 - RNA, 19 nt, Human
agaaaaccagagcccaaau

SEQ ID NO: 678516 - RNA, 24 nt, Human
agaagaaaugcucgacaaacagaa

SEQ ID NO: 678517 - RNA, 19 nt, Human
agaaggaggcugugggagg

SEQ ID NO: 678518 - RNA, 22 nt, Human
agcaggacagcccccacccccc

SEQ ID NO: 678519 - RNA, 24 nt, Human
agcuggauuggcaggugagcuggg

SEQ ID NO: 678520 - RNA, 20 nt, Human
aggagaagggaggccaggaa

SEQ ID NO: 678521 - RNA, 24 nt, Human
aggcagagauggaaaguguguggg

SEQ ID NO: 678522 - RNA, 18 nt, Human
agggagugggagcuggag

SEQ ID NO: 678523 - RNA, 21 nt, Human
aggugcugggcacacagguga

SEQ ID NO: 678524 - RNA, 21 nt, Human
caaccaaucaaagcaguuucc

SEQ ID NO: 678525 - RNA, 24 nt, Human
caagaggagucuucccuacuuccc

SEQ ID NO: 678526 - RNA, 20 nt, Human
caagcauacucacuuauucu

SEQ ID NO: 678527 - RNA, 21 nt, Human
caaucaaagcaguuuccccaa

SEQ ID NO: 678528 - RNA, 18 nt, Human
caccagaaaaccagagcc

SEQ ID NO: 678529 - RNA, 24 nt, Human
caccuccccugccuucucccuacu

SEQ ID NO: 678530 - RNA, 21 nt, Human
cagcaggacagccccaccaga

SEQ ID NO: 678531 - RNA, 20 nt, Human
cagcaggaucagcacaggga

SEQ ID NO: 678532 - RNA, 18 nt, Human
cagcccccaccccccaag

SEQ ID NO: 678533 - RNA, 18 nt, Human
cagccuccagacaggucu

SEQ ID NO: 678534 - RNA, 18 nt, Human
cagcgcugugcuuccagg

SEQ ID NO: 678535 - RNA, 19 nt, Human
cagcuucuggccuggccca

SEQ ID NO: 678536 - RNA, 21 nt, Human
caggaacaaccaggaacccca

SEQ ID NO: 678537 - RNA, 21 nt, Human
caggacagcccccacccccca

SEQ ID NO: 678538 - RNA, 18 nt, Human
cagggaaagcaaaagcca

SEQ ID NO: 678539 - RNA, 21 nt, Human
cagggcuuagaaaggagaagg

SEQ ID NO: 678540 - RNA, 21 nt, Human
cauccagaaaagauagcaaua

SEQ ID NO: 678541 - RNA, 23 nt, Human
ccaggccagccauguuccccaca

SEQ ID NO: 678542 - RNA, 22 nt, Human
cccaccucugcccagccucagc

SEQ ID NO: 678543 - RNA, 21 nt, Human
cccagccucagcuggauuggc

SEQ ID NO: 678544 - RNA, 19 nt, Human
cccaugauuggacguggga

SEQ ID NO: 678545 - RNA, 28 nt, Human
cccaugcucagcgcugugcuuccaggag

SEQ ID NO: 678546 - RNA, 20 nt, Human
ccccaaggagcuggcgcucu

SEQ ID NO: 678547 - RNA, 24 nt, Human
ccccaaggcuggcaucgccucccu

SEQ ID NO: 678548 - RNA, 21 nt, Human
cccccaaggcuggcaucgccu

SEQ ID NO: 678549 - RNA, 22 nt, Human
cccgcaccaggugucacagcca

SEQ ID NO: 678550 - RNA, 26 nt, Human
cccgcaccaggugucacagccaggag

SEQ ID NO: 678551 - RNA, 23 nt, Human
cccuaacccuuccuccgccgccc

SEQ ID NO: 678552 - RNA, 24 nt, Human
cccucaaguuccccuuaaaccagc

SEQ ID NO: 678553 - RNA, 21 nt, Human
cccugugucuacgaucaucuc

SEQ ID NO: 678554 - RNA, 22 nt, Human
ccgccgcccucugcugcuggcc

SEQ ID NO: 678555 - RNA, 23 nt, Human
ccgccgcccucugcugcuggccu

SEQ ID NO: 678556 - RNA, 23 nt, Human
ccuaaaccuaaccugucacuggc

SEQ ID NO: 678557 - RNA, 26 nt, Human
ccuacuucccucaaguuccccuuaaa

SEQ ID NO: 678558 - RNA, 21 nt, Human
ccuggcccaacuggagguccc

SEQ ID NO: 678559 - RNA, 23 nt, Human
ccuuccuccgccgcccucugcug

SEQ ID NO: 678560 - RNA, 22 nt, Human
cgccgcccucugcugcuggccu

SEQ ID NO: 678561 - RNA, 21 nt, Human
cuaacccuuccuccgccgccc

SEQ ID NO: 678562 - RNA, 19 nt, Human
cuccgccgcccucugcugc

SEQ ID NO: 678563 - RNA, 19 nt, Human
cucugcccuaaaccuaacc

SEQ ID NO: 678564 - RNA, 21 nt, Human
cugcagccuggucuugaguga

SEQ ID NO: 678565 - RNA, 20 nt, Human
cuggagggacagguacgaua

SEQ ID NO: 678566 - RNA, 24 nt, Human
cuggaggucccugcaauuuucccu

SEQ ID NO: 678567 - RNA, 23 nt, Human
cuggugccccuccaggugcuggg

SEQ ID NO: 678568 - RNA, 22 nt, Human
cuucccucaaguuccccuuaaa

SEQ ID NO: 678569 - RNA, 21 nt, Human
gagaacagggcuuagaaagga

SEQ ID NO: 678570 - RNA, 18 nt, Human
gaggccaggaagcgggag

SEQ ID NO: 678571 - RNA, 24 nt, Human
gagugggagguggccuucccagga

SEQ ID NO: 678572 - RNA, 24 nt, Human
gaugcaggaacaaccaggaacccc

SEQ ID NO: 678573 - RNA, 26 nt, Human
gauuugagaugggccuggagggacag

SEQ ID NO: 678574 - RNA, 26 nt, Human
gcaaacccuccaccuggugccccucc

SEQ ID NO: 678575 - RNA, 19 nt, Human
gcagccuggucuugaguga

SEQ ID NO: 678576 - RNA, 18 nt, Human
gcaggacagccccaccag

SEQ ID NO: 678577 - RNA, 21 nt, Human
gcaggacagcccccacccccc

SEQ ID NO: 678578 - RNA, 20 nt, Human
gccauguuccccacagcuga

SEQ ID NO: 678579 - RNA, 21 nt, Human
gcuacagcagcuucuggccug

SEQ ID NO: 678580 - RNA, 25 nt, Human
gcuggauuggcaggugagcuccuuc

SEQ ID NO: 678581 - RNA, 22 nt, Human
ggaaguggaggcugcagccugg

SEQ ID NO: 678582 - RNA, 22 nt, Human
ggacagcccccaccccccaagg

SEQ ID NO: 678583 - RNA, 22 nt, Human
ggacaggagaacagggcuuaga

SEQ ID NO: 678584 - RNA, 21 nt, Human
ggagggacaggagaacagggc

SEQ ID NO: 678585 - RNA, 19 nt, Human
ggagguggccuucccagga

SEQ ID NO: 678586 - RNA, 21 nt, Human
ggagguggccuucccaggagg

SEQ ID NO: 678587 - RNA, 22 nt, Human
ggccagccauguuccccacagc

SEQ ID NO: 678588 - RNA, 20 nt, Human
ggccaggccaaugcagggcc

SEQ ID NO: 678589 - RNA, 19 nt, Human
ggcugggcagggccagggc

SEQ ID NO: 678590 - RNA, 24 nt, Human
gggaaguggaggcugcagccuggu

SEQ ID NO: 678591 - RNA, 21 nt, Human
gggcagggccagggcugaggu

SEQ ID NO: 678592 - RNA, 23 nt, Human
gggccagggcugagguaucggga

SEQ ID NO: 678593 - RNA, 21 nt, Human
ggugagcuggggcugggcuca

SEQ ID NO: 678594 - RNA, 18 nt, Human
gguggccuucccaggagg

SEQ ID NO: 678595 - RNA, 18 nt, Human
gugccccuccaggugcug

SEQ ID NO: 678596 - RNA, 18 nt, Human
guguuuaacucacugaau

SEQ ID NO: 678597 - RNA, 18 nt, Human
uaaaccagccaccucccc

SEQ ID NO: 678598 - RNA, 24 nt, Human
uaaccugucacuggcagccuccag

SEQ ID NO: 678599 - RNA, 21 nt, Human
uaagugcccacuaggaugggc

SEQ ID NO: 678600 - RNA, 27 nt, Human
uacaaaguccuagacugcucacaaagg

SEQ ID NO: 678601 - RNA, 21 nt, Human
uaccaggccagccauguuccc

SEQ ID NO: 678602 - RNA, 19 nt, Human
uauacauuuuuuaaaaaau

SEQ ID NO: 678603 - RNA, 21 nt, Human
ucagcaggaucagcacaggga

SEQ ID NO: 678604 - RNA, 21 nt, Human
uccaggugcugggcacacagg

SEQ ID NO: 678605 - RNA, 24 nt, Human
uccccacagcugacacuggggaag

SEQ ID NO: 678606 - RNA, 24 nt, Human
uccccugccuucucccuacuuaaa

SEQ ID NO: 678607 - RNA, 24 nt, Human
uccccuuaaaccagccaccucccc

SEQ ID NO: 678608 - RNA, 21 nt, Human
ucccuacuucccucaaguucc

SEQ ID NO: 678609 - RNA, 25 nt, Human
ucucacccaccucugcccagccuca

SEQ ID NO: 678610 - RNA, 20 nt, Human
ugaaccccuaacccuuccuc

SEQ ID NO: 678611 - RNA, 24 nt, Human
ugaauacguggguuugggugggaa

SEQ ID NO: 678612 - RNA, 23 nt, Human
ugagaccagccacugguccauga

SEQ ID NO: 678613 - RNA, 24 nt, Human
ugagagcacucgcucagaagacug

SEQ ID NO: 678614 - RNA, 24 nt, Human
ugagcaggacagcccccacccccc

SEQ ID NO: 678615 - RNA, 22 nt, Human
ugaggcccaggcccugccccaa

SEQ ID NO: 678616 - RNA, 22 nt, Human
ugagggccaggcccgcaccagg

SEQ ID NO: 678617 - RNA, 24 nt, Human
ugcaaacccuccaccuggugccuc

SEQ ID NO: 678618 - RNA, 19 nt, Human
ugcaagcaagcucccuugu

SEQ ID NO: 678619 - RNA, 18 nt, Human
uggaaagggagugggagc

SEQ ID NO: 678620 - RNA, 24 nt, Human
uggagggacaggagaacagggcuu

SEQ ID NO: 678621 - RNA, 21 nt, Human
uggcagccuccagacaggucu

SEQ ID NO: 678622 - RNA, 22 nt, Human
uggcagccuccagacaggucug

SEQ ID NO: 678623 - RNA, 21 nt, Human
uggcaggugagcuccucagcu

SEQ ID NO: 678624 - RNA, 20 nt, Human
ugggcacacaggugagcagg

SEQ ID NO: 678625 - RNA, 23 nt, Human
ugggcacacaggugagcaggaca

SEQ ID NO: 678626 - RNA, 20 nt, Human
ugggugagaccagccacugg

SEQ ID NO: 678627 - RNA, 19 nt, Human
uggguugaggagacaugcc

SEQ ID NO: 678628 - RNA, 19 nt, Human
uggugccccuccaggugcu

SEQ ID NO: 678629 - RNA, 18 nt, Human
ugugcagcaggaguggga

SEQ ID NO: 678630 - RNA, 19 nt, Human
cucccggggcacaguuggg

SEQ ID NO: 678631 - RNA, 18 nt, Human
gagcaggcuccgcaguca

SEQ ID NO: 678632 - RNA, 18 nt, Human
acugaugaucuuccuauu

SEQ ID NO: 678633 - RNA, 25 nt, Human
agccgaaccugccuccggaggcccg

SEQ ID NO: 678634 - RNA, 21 nt, Human
auccaguaguuuuuuugagua

SEQ ID NO: 678635 - RNA, 23 nt, Human
cacugcuucauuuucuguccucu

SEQ ID NO: 678636 - RNA, 26 nt, Human
cagauuuacauaacaguuugcaucca

SEQ ID NO: 678637 - RNA, 23 nt, Human
cagccgaaccugccuccggaggc

SEQ ID NO: 678638 - RNA, 22 nt, Human
caucaguauagccaaauguuaa

SEQ ID NO: 678639 - RNA, 19 nt, Human
ccuuccagccgaaccugcc

SEQ ID NO: 678640 - RNA, 21 nt, Human
cuucauuuucuguccucucca

SEQ ID NO: 678641 - RNA, 19 nt, Human
gcguucgucuccggacugc

SEQ ID NO: 678642 - RNA, 23 nt, Human
gcugaaauacacaugauaaaaca

SEQ ID NO: 678643 - RNA, 22 nt, Human
uaacacaaacaucaguauagcc

SEQ ID NO: 678644 - RNA, 18 nt, Human
uauagccaaauguuaacu

SEQ ID NO: 678645 - RNA, 19 nt, Human
uauagccaaauguuaacuc

SEQ ID NO: 678646 - RNA, 21 nt, Human
uauuuuuuaauauguccugag

SEQ ID NO: 678647 - RNA, 18 nt, Human
ucaaaagacacauucuga

SEQ ID NO: 678648 - RNA, 24 nt, Human
ucucagauuuacauaacaguuugc

SEQ ID NO: 678649 - RNA, 25 nt, Human
ucuccagugggucuuccuucccaag

SEQ ID NO: 678650 - RNA, 24 nt, Human
ugcugaaauacacaugauaaaaca

SEQ ID NO: 678651 - RNA, 22 nt, Human
uuaauaacugguauagcccuuc

SEQ ID NO: 678652 - RNA, 19 nt, Human
uuauuuuguuuuuaaaaua

SEQ ID NO: 678653 - RNA, 22 nt, Human
uuuuaauauguccugaguucuu

SEQ ID NO: 678654 - RNA, 26 nt, Human
cagcgcagucaccgcacugacaggag

SEQ ID NO: 678655 - RNA, 23 nt, Human
cgcagucaccgcacugacaggag

SEQ ID NO: 678656 - RNA, 19 nt, Human
uucccagcgcagucaccgc

SEQ ID NO: 678657 - RNA, 27 nt, Human
aaaaauaaugaaaagaagccgguaccc

SEQ ID NO: 678658 - RNA, 24 nt, Human
aaguaucccgccucuucuugcagu

SEQ ID NO: 678659 - RNA, 18 nt, Human
aagugugcacaucauacc

SEQ ID NO: 678660 - RNA, 20 nt, Human
agaagccuugcuaaguugcu

SEQ ID NO: 678661 - RNA, 19 nt, Human
auaaaaaauaaugaaaaga

SEQ ID NO: 678662 - RNA, 19 nt, Human
aucaaguugccaugaaaaa

SEQ ID NO: 678663 - RNA, 21 nt, Human
caaguugccaugaaaaaccag

SEQ ID NO: 678664 - RNA, 22 nt, Human
caugaaaaaccagggaccucau

SEQ ID NO: 678665 - RNA, 22 nt, Human
ccaagagcaacaguguucuucu

SEQ ID NO: 678666 - RNA, 19 nt, Human
ccaucucuaaaaugacauu

SEQ ID NO: 678667 - RNA, 23 nt, Human
ccaucucuaaaaugacauuuaac

SEQ ID NO: 678668 - RNA, 19 nt, Human
ccaugaaaaaccagggacc

SEQ ID NO: 678669 - RNA, 19 nt, Human
ccguccaccaagagcaacg

SEQ ID NO: 678670 - RNA, 18 nt, Human
ccucugggcccguccacc

SEQ ID NO: 678671 - RNA, 18 nt, Human
ccugcaguauaaucccuc

SEQ ID NO: 678672 - RNA, 25 nt, Human
cugaaaguaucccgccucuucuugc

SEQ ID NO: 678673 - RNA, 18 nt, Human
cugggcccguccaccaag

SEQ ID NO: 678674 - RNA, 21 nt, Human
gcccguccaccaagagcaaca

SEQ ID NO: 678675 - RNA, 24 nt, Human
guaucccgccucuucuugcaguua

SEQ ID NO: 678676 - RNA, 25 nt, Human
uaaccuauaaaaaauucaacuuccu

SEQ ID NO: 678677 - RNA, 20 nt, Human
uaaguugcuuuuaucaguuu

SEQ ID NO: 678678 - RNA, 19 nt, Human
uaaucccucuccccaucuc

SEQ ID NO: 678679 - RNA, 21 nt, Human
uaguagcuucucuccuuacuc

SEQ ID NO: 678680 - RNA, 24 nt, Human
uauaaucccucuccccaucucuaa

SEQ ID NO: 678681 - RNA, 18 nt, Human
uaugcauacaguuacaug

SEQ ID NO: 678682 - RNA, 22 nt, Human
ucaugaguguguauugaagugg

SEQ ID NO: 678683 - RNA, 18 nt, Human
ucuugcaguuaaccuggg

SEQ ID NO: 678684 - RNA, 20 nt, Human
ugccaugaaaaaccagggac

SEQ ID NO: 678685 - RNA, 20 nt, Human
uggaauaaaugaauauauga

SEQ ID NO: 678686 - RNA, 23 nt, Human
uggaauaaaugaauauaugaaua

SEQ ID NO: 678687 - RNA, 24 nt, Human
ugucaccaaaauacucccacccau

SEQ ID NO: 678688 - RNA, 19 nt, Human
ugugcacaucauaccacag

SEQ ID NO: 678689 - RNA, 19 nt, Human
uguuccaucaggaguucau

SEQ ID NO: 678690 - RNA, 21 nt, Human
uucaggaaggagagaaaaaga

SEQ ID NO: 678691 - RNA, 18 nt, Human
uugucucuucccacacuu

SEQ ID NO: 678692 - RNA, 24 nt, Human
uuuucugagucuagcaagugugca

SEQ ID NO: 678693 - RNA, 20 nt, Human
uuuugucucuucccacacuu

SEQ ID NO: 678694 - RNA, 22 nt, Human
aaacacagaaggaggcauucga

SEQ ID NO: 678695 - RNA, 28 nt, Human
aaagaggacacuggauuuuccuuaauag

SEQ ID NO: 678696 - RNA, 23 nt, Human
aacugcccagcucuuguccccac

SEQ ID NO: 678697 - RNA, 19 nt, Human
aagcaucuggcccauauug

SEQ ID NO: 678698 - RNA, 21 nt, Human
aagugcacaugggguacccac

SEQ ID NO: 678699 - RNA, 18 nt, Human
aaugcccacgccgagugg

SEQ ID NO: 678700 - RNA, 19 nt, Human
acaucgccaaccccggcgc

SEQ ID NO: 678701 - RNA, 18 nt, Human
acgcgcgggcgccuggcg

SEQ ID NO: 678702 - RNA, 22 nt, Human
agagugcuccugcucccugcuc

SEQ ID NO: 678703 - RNA, 23 nt, Human
aggaauggaaacacagaaggagg

SEQ ID NO: 678704 - RNA, 21 nt, Human
aggcgcggcugcgccccaugc

SEQ ID NO: 678705 - RNA, 19 nt, Human
agggagggaggcgcggcug

SEQ ID NO: 678706 - RNA, 25 nt, Human
augcccacucccuccuggaucccag

SEQ ID NO: 678707 - RNA, 23 nt, Human
caaccgcggguccuccgccccuc

SEQ ID NO: 678708 - RNA, 19 nt, Human
cacauggccacagcauucc

SEQ ID NO: 678709 - RNA, 18 nt, Human
cagcucuuguccccacag

SEQ ID NO: 678710 - RNA, 20 nt, Human
cauucaaaagcaucuggccc

SEQ ID NO: 678711 - RNA, 18 nt, Human
ccacagagaauaaugugg

SEQ ID NO: 678712 - RNA, 21 nt, Human
cccacucccuccuggauccca

SEQ ID NO: 678713 - RNA, 22 nt, Human
cccaugcccacucccuccugga

SEQ ID NO: 678714 - RNA, 18 nt, Human
cccauggcuuggguggaa

SEQ ID NO: 678715 - RNA, 23 nt, Human
ccccagcagccuggcccugcgcc

SEQ ID NO: 678716 - RNA, 21 nt, Human
cccccuuucuuagccccccuc

SEQ ID NO: 678717 - RNA, 22 nt, Human
ccccgagugcccgacagcgccc

SEQ ID NO: 678718 - RNA, 21 nt, Human
ccccgcgcggagccucuccuc

SEQ ID NO: 678719 - RNA, 20 nt, Human
cccuaucauucaaaagcauc

SEQ ID NO: 678720 - RNA, 18 nt, Human
cccucacuuguggcuccg

SEQ ID NO: 678721 - RNA, 19 nt, Human
ccgcgcgccgcccgccucg

SEQ ID NO: 678722 - RNA, 19 nt, Human
ccgcgcggagccucuccuc

SEQ ID NO: 678723 - RNA, 23 nt, Human
ccgcgcggagccucuccuccucc

SEQ ID NO: 678724 - RNA, 20 nt, Human
ccgcugccuccuucaaccgc

SEQ ID NO: 678725 - RNA, 23 nt, Human
ccggagccacgaggggacccccg

SEQ ID NO: 678726 - RNA, 19 nt, Human
ccuccugccucagcacugg

SEQ ID NO: 678727 - RNA, 23 nt, Human
ccucgggcugacgcacucgaccc

SEQ ID NO: 678728 - RNA, 18 nt, Human
ccuggcccugcgcccggc

SEQ ID NO: 678729 - RNA, 19 nt, Human
ccuggcccugcgcccggcc

SEQ ID NO: 678730 - RNA, 20 nt, Human
cgacaggaauggaaacacag

SEQ ID NO: 678731 - RNA, 19 nt, Human
cgaccccucuccuuagcgg

SEQ ID NO: 678732 - RNA, 20 nt, Human
cgccucggagccccgcgcgg

SEQ ID NO: 678733 - RNA, 22 nt, Human
cgccucggagccccgcgcggag

SEQ ID NO: 678734 - RNA, 18 nt, Human
cgcgcggagccucuccuc

SEQ ID NO: 678735 - RNA, 20 nt, Human
cggcgcccgggaggcgggga

SEQ ID NO: 678736 - RNA, 18 nt, Human
cgggcggggacgaaggag

SEQ ID NO: 678737 - RNA, 25 nt, Human
cguccccagcagccuggcccugcgc

SEQ ID NO: 678738 - RNA, 24 nt, Human
cucaagacccauucaaaacugccc

SEQ ID NO: 678739 - RNA, 23 nt, Human
cucgacaggaauggaaacacaga

SEQ ID NO: 678740 - RNA, 23 nt, Human
cucgaccccucuccuuagcggga

SEQ ID NO: 678741 - RNA, 26 nt, Human
cucuccgcucccgcugccuccuucaa

SEQ ID NO: 678742 - RNA, 21 nt, Human
cucugcauggcugggcgcccc

SEQ ID NO: 678743 - RNA, 24 nt, Human
cugcccagcucuuguccccacaga

SEQ ID NO: 678744 - RNA, 22 nt, Human
cugcgcccggccgccugccaag

SEQ ID NO: 678745 - RNA, 18 nt, Human
cugugagcucugaaaguc

SEQ ID NO: 678746 - RNA, 19 nt, Human
gaggcggggagggagggag

SEQ ID NO: 678747 - RNA, 23 nt, Human
gcccacucgacaggaauggaaac

SEQ ID NO: 678748 - RNA, 19 nt, Human
gcccagcccacucgacagg

SEQ ID NO: 678749 - RNA, 23 nt, Human
gcccagggaagugaggcauccuc

SEQ ID NO: 678750 - RNA, 21 nt, Human
gcccugagcguccccagcagc

SEQ ID NO: 678751 - RNA, 18 nt, Human
gcuagaacacagcuugac

SEQ ID NO: 678752 - RNA, 21 nt, Human
gcuccugugagcucugaaagu

SEQ ID NO: 678753 - RNA, 22 nt, Human
gcuccugugagcucugaaaguc

SEQ ID NO: 678754 - RNA, 18 nt, Human
gcuuggguggaaagcccu

SEQ ID NO: 678755 - RNA, 18 nt, Human
ggaaacacagaaggaggc

SEQ ID NO: 678756 - RNA, 20 nt, Human
ggaauggaaacacagaagga

SEQ ID NO: 678757 - RNA, 18 nt, Human
ggauacauauacucccuc

SEQ ID NO: 678758 - RNA, 23 nt, Human
ggcuucgaggcuggauggcgaug

SEQ ID NO: 678759 - RNA, 18 nt, Human
ggggacccccgagugccc

SEQ ID NO: 678760 - RNA, 21 nt, Human
gugcuggguccugcuucccag

SEQ ID NO: 678761 - RNA, 21 nt, Human
guggacuucacuaaggacaug

SEQ ID NO: 678762 - RNA, 24 nt, Human
uaaugcccacgccgaguggccgga

SEQ ID NO: 678763 - RNA, 26 nt, Human
uacccaccucaagacccauucaaaac

SEQ ID NO: 678764 - RNA, 18 nt, Human
uagagugcuccugcuccc

SEQ ID NO: 678765 - RNA, 22 nt, Human
uagggcaucccucuccaguccc

SEQ ID NO: 678766 - RNA, 20 nt, Human
uccccagcagccuggcccug

SEQ ID NO: 678767 - RNA, 24 nt, Human
uccgcagcgccuuuuugccucugc

SEQ ID NO: 678768 - RNA, 22 nt, Human
uccuccgggugaggagggacgc

SEQ ID NO: 678769 - RNA, 21 nt, Human
ucggucccucggccgcuagaa

SEQ ID NO: 678770 - RNA, 23 nt, Human
ucguccgucccuccuccagggug

SEQ ID NO: 678771 - RNA, 20 nt, Human
ucuccacaucgccaaccccg

SEQ ID NO: 678772 - RNA, 21 nt, Human
ucugcauggcugggcgccccc

SEQ ID NO: 678773 - RNA, 18 nt, Human
ucuggugggaauauggaa

SEQ ID NO: 678774 - RNA, 19 nt, Human
ugcaaggagaucauacaau

SEQ ID NO: 678775 - RNA, 21 nt, Human
ugcccagcucuuguccccaca

SEQ ID NO: 678776 - RNA, 20 nt, Human
ugcgccccaugcccacuccc

SEQ ID NO: 678777 - RNA, 19 nt, Human
uggaaacacagaaggaggc

SEQ ID NO: 678778 - RNA, 21 nt, Human
uggaaagcccugagcgucccc

SEQ ID NO: 678779 - RNA, 20 nt, Human
uggaagccccccguugcuuc

SEQ ID NO: 678780 - RNA, 23 nt, Human
uggccacagcauucccacacucu

SEQ ID NO: 678781 - RNA, 22 nt, Human
uguggcuccgaccuccugccuc

SEQ ID NO: 678782 - RNA, 23 nt, Human
uuagccccccucggucccucggc

SEQ ID NO: 678783 - RNA, 21 nt, Human
uucccacacucuggugggaau

SEQ ID NO: 678784 - RNA, 19 nt, Human
uucccagccccucacuugu

SEQ ID NO: 678785 - RNA, 24 nt, Human
uucccagccccucacuuguggcuc

SEQ ID NO: 678786 - RNA, 18 nt, Human
uucgauggucaaggaggg

SEQ ID NO: 678787 - RNA, 19 nt, Human
agacaaugggauuacagau

SEQ ID NO: 678788 - RNA, 20 nt, Human
agauggaguuggaaaaucca

SEQ ID NO: 678789 - RNA, 22 nt, Human
caaaaaucaucuugauugugac

SEQ ID NO: 678790 - RNA, 19 nt, Human
ggaguuggaaaauccaaua

SEQ ID NO: 678791 - RNA, 24 nt, Human
uggaaaauccaauaauuugcacga

SEQ ID NO: 678792 - RNA, 20 nt, Human
ugggauuacagauggaguug

SEQ ID NO: 678793 - RNA, 20 nt, Human
uucauaaaugcauagacaau

SEQ ID NO: 678794 - RNA, 18 nt, Human
uuugaaguuuucauucau

SEQ ID NO: 678795 - RNA, 24 nt, Human
acaguguugaaaacaauuacauac

SEQ ID NO: 678796 - RNA, 19 nt, Human
agugcuaucagaaaaaaaa

SEQ ID NO: 678797 - RNA, 22 nt, Human
auccgucuguuuuccagaaaaa

SEQ ID NO: 678798 - RNA, 22 nt, Human
caccagaaccccaggcucauua

SEQ ID NO: 678799 - RNA, 24 nt, Human
cagaggccucuuaagauuuuuuuu

SEQ ID NO: 678800 - RNA, 22 nt, Human
cagugaagguguuuugcccagu

SEQ ID NO: 678801 - RNA, 19 nt, Human
caucuuauuuuucccauac

SEQ ID NO: 678802 - RNA, 21 nt, Human
cauuaaaugacguaagucuuu

SEQ ID NO: 678803 - RNA, 21 nt, Human
ccguaugccaugucuccagaa

SEQ ID NO: 678804 - RNA, 25 nt, Human
cucauuguaggcuccaagggguucc

SEQ ID NO: 678805 - RNA, 23 nt, Human
cugaaggcagaggccucuuaaga

SEQ ID NO: 678806 - RNA, 18 nt, Human
cugugccugcuuucaagu

SEQ ID NO: 678807 - RNA, 18 nt, Human
cuuguaacuucugaaggc

SEQ ID NO: 678808 - RNA, 20 nt, Human
cuuugcagugccaugaaaua

SEQ ID NO: 678809 - RNA, 19 nt, Human
gaaguaaaauccgucuguu

SEQ ID NO: 678810 - RNA, 24 nt, Human
gacaguaaagcaugaaauagauac

SEQ ID NO: 678811 - RNA, 23 nt, Human
gauuucuguuauguaauugaaga

SEQ ID NO: 678812 - RNA, 18 nt, Human
gcauguaucuaauauccu

SEQ ID NO: 678813 - RNA, 22 nt, Human
gucuuuguagaaaacauauuua

SEQ ID NO: 678814 - RNA, 18 nt, Human
gugugucuuuuucccagu

SEQ ID NO: 678815 - RNA, 18 nt, Human
guguuuugcccagugagc

SEQ ID NO: 678816 - RNA, 20 nt, Human
uaaaaauguuuugaaagaac

SEQ ID NO: 678817 - RNA, 21 nt, Human
uaauagcagagaaagaauuua

SEQ ID NO: 678818 - RNA, 19 nt, Human
uaauuuuuuauuaauagag

SEQ ID NO: 678819 - RNA, 19 nt, Human
uagagaaagaagaugccug

SEQ ID NO: 678820 - RNA, 24 nt, Human
uagcagagaaagaauuuaguuuug

SEQ ID NO: 678821 - RNA, 21 nt, Human
uagcauguaucuaauauccuc

SEQ ID NO: 678822 - RNA, 24 nt, Human
uagccaguuaauagcagagaaaga

SEQ ID NO: 678823 - RNA, 21 nt, Human
uaugaugagggcacauaucuu

SEQ ID NO: 678824 - RNA, 22 nt, Human
uauucuaacaccagaaccccag

SEQ ID NO: 678825 - RNA, 22 nt, Human
ucaaaucaggaaaaaaaccuga

SEQ ID NO: 678826 - RNA, 23 nt, Human
ucagugaagguguuuugcccagu

SEQ ID NO: 678827 - RNA, 18 nt, Human
uccagaaaaaugugaugu

SEQ ID NO: 678828 - RNA, 20 nt, Human
ucccauucgccaguagauua

SEQ ID NO: 678829 - RNA, 18 nt, Human
ugaaagaacauuugaaaa

SEQ ID NO: 678830 - RNA, 19 nt, Human
ugaaauagauacaaacauu

SEQ ID NO: 678831 - RNA, 23 nt, Human
ugacaacaugcacacguggucuu

SEQ ID NO: 678832 - RNA, 23 nt, Human
ugacuuuuuauugcaaacagcuc

SEQ ID NO: 678833 - RNA, 23 nt, Human
ugccaugaaauacaucaauaagg

SEQ ID NO: 678834 - RNA, 18 nt, Human
ugccaugucuccagaagu

SEQ ID NO: 678835 - RNA, 24 nt, Human
ugccugagugaguugucuuugauu

SEQ ID NO: 678836 - RNA, 18 nt, Human
ugcuagagaugauauuua

SEQ ID NO: 678837 - RNA, 28 nt, Human
ugcuucacucauuuugaaauaccucuca

SEQ ID NO: 678838 - RNA, 23 nt, Human
uggcagugcuagagaugauauuu

SEQ ID NO: 678839 - RNA, 21 nt, Human
uguaacuucugaaggcagagg

SEQ ID NO: 678840 - RNA, 20 nt, Human
uguuguguuuuauuuacuau

SEQ ID NO: 678841 - RNA, 20 nt, Human
uucaaaucaggaaaaaaacc

SEQ ID NO: 678842 - RNA, 23 nt, Human
uucaaaucaggaaaaaaaccuga

SEQ ID NO: 678843 - RNA, 20 nt, Human
uugaauaauuguauguauua

SEQ ID NO: 678844 - RNA, 21 nt, Human
uugcagugccaugaaauacau

SEQ ID NO: 678845 - RNA, 20 nt, Human
uuuuauguguuauuuugcac

SEQ ID NO: 678846 - RNA, 21 nt, Human
uuuuuauugcaaacagcucuc

SEQ ID NO: 678847 - RNA, 22 nt, Human
aaauaagcccagaaccacacaa

SEQ ID NO: 678848 - RNA, 23 nt, Human
acaacacaacaggucgaccagaa

SEQ ID NO: 678849 - RNA, 23 nt, Human
acaaucaugaagaucuuuuuguc

SEQ ID NO: 678850 - RNA, 23 nt, Human
accacaccacugggaagaggaug

SEQ ID NO: 678851 - RNA, 24 nt, Human
acugacucaacaccuccuucucca

SEQ ID NO: 678852 - RNA, 22 nt, Human
agaguccuuccacaagccauau

SEQ ID NO: 678853 - RNA, 22 nt, Human
agcagcagucacccccaaccuc

SEQ ID NO: 678854 - RNA, 23 nt, Human
aguggaaugacaaucaugaagau

SEQ ID NO: 678855 - RNA, 19 nt, Human
caaauaagcccagaaccac

SEQ ID NO: 678856 - RNA, 22 nt, Human
caacugacucaacaccuccuuc

SEQ ID NO: 678857 - RNA, 23 nt, Human
cacauagccaucuccaauccauu

SEQ ID NO: 678858 - RNA, 19 nt, Human
caccuccuucuccaaacua

SEQ ID NO: 678859 - RNA, 21 nt, Human
cagaaauagagaguccuuccc

SEQ ID NO: 678860 - RNA, 18 nt, Human
caugacuggaaagucaag

SEQ ID NO: 678861 - RNA, 19 nt, Human
cauggauccagagaccguu

SEQ ID NO: 678862 - RNA, 21 nt, Human
cauuaucccuccuguucucac

SEQ ID NO: 678863 - RNA, 23 nt, Human
ccacaagccauauucagucgugc

SEQ ID NO: 678864 - RNA, 19 nt, Human
ccacgaguggaaaugaaau

SEQ ID NO: 678865 - RNA, 23 nt, Human
ccagaaccacacaaaacauuuuc

SEQ ID NO: 678866 - RNA, 26 nt, Human
ccccaaccuccuccuuauacaacuga

SEQ ID NO: 678867 - RNA, 22 nt, Human
cccuggcugcugaugcuucuug

SEQ ID NO: 678868 - RNA, 22 nt, Human
ccuggcugcugaugcuucuugu

SEQ ID NO: 678869 - RNA, 21 nt, Human
cucaacaccuccuucuccaaa

SEQ ID NO: 678870 - RNA, 20 nt, Human
cuccaaacuaccccuggcug

SEQ ID NO: 678871 - RNA, 23 nt, Human
cuccucgguggacucuaugauga

SEQ ID NO: 678872 - RNA, 22 nt, Human
cuccuuauacaacugacucaac

SEQ ID NO: 678873 - RNA, 20 nt, Human
cuccuucuccaaacuacccc

SEQ ID NO: 678874 - RNA, 22 nt, Human
cugcauuaaagaauguuaauau

SEQ ID NO: 678875 - RNA, 20 nt, Human
gcauuaaagaauguuaauau

SEQ ID NO: 678876 - RNA, 19 nt, Human
gcccagaaccacacaaaac

SEQ ID NO: 678877 - RNA, 18 nt, Human
uaagacaagauuuucucu

SEQ ID NO: 678878 - RNA, 18 nt, Human
uaagcccagaaccacaca

SEQ ID NO: 678879 - RNA, 21 nt, Human
uaccccuggcugcugaugcuu

SEQ ID NO: 678880 - RNA, 20 nt, Human
uacgauaccauggauccaga

SEQ ID NO: 678881 - RNA, 19 nt, Human
ucaaauaagcccagaacca

SEQ ID NO: 678882 - RNA, 19 nt, Human
ucacccccaaccuccuccu

SEQ ID NO: 678883 - RNA, 22 nt, Human
ucuccaaacuaccccuggcugc

SEQ ID NO: 678884 - RNA, 30 nt, Human
ugaccacaccacugggaagaggauggcacc

SEQ ID NO: 678885 - RNA, 19 nt, Human
ugagagaagagagcacugc

SEQ ID NO: 678886 - RNA, 20 nt, Human
ugauugaccacaccacuggg

SEQ ID NO: 678887 - RNA, 19 nt, Human
ugcuauggcagccuguggu

SEQ ID NO: 678888 - RNA, 23 nt, Human
ugcuauggcagccuguggucaug

SEQ ID NO: 678889 - RNA, 25 nt, Human
ugcugaugcuucuuguaaaugucug

SEQ ID NO: 678890 - RNA, 24 nt, Human
uggaaagucaaggagaugcaaaag

SEQ ID NO: 678891 - RNA, 21 nt, Human
uggauccagagaccguucuga

SEQ ID NO: 678892 - RNA, 23 nt, Human
uguggucugaaauucucacuugu

SEQ ID NO: 678893 - RNA, 19 nt, Human
uuauacaacugacucaaca

SEQ ID NO: 678894 - RNA, 19 nt, Human
uucuaagacaagauuuucu

SEQ ID NO: 678895 - RNA, 23 nt, Human
uucuuugcagcuuuucuucugau

SEQ ID NO: 678896 - RNA, 23 nt, Human
uuuacacauagccaucuccaauc

SEQ ID NO: 678897 - RNA, 19 nt, Human
uuugccaggaccuggagug

SEQ ID NO: 678898 - RNA, 18 nt, Human
aaaaggcaagacaacggc

SEQ ID NO: 678899 - RNA, 21 nt, Human
aaagacacggacccugugccc

SEQ ID NO: 678900 - RNA, 25 nt, Human
acacggacccugugcccgcgccccc

SEQ ID NO: 678901 - RNA, 22 nt, Human
acauggacccccuccaccuccc

SEQ ID NO: 678902 - RNA, 23 nt, Human
acauggacccccuccaccucccc

SEQ ID NO: 678903 - RNA, 25 nt, Human
acccuuuggucugagauguggaggu

SEQ ID NO: 678904 - RNA, 22 nt, Human
acggacccugugcccgcgcccc

SEQ ID NO: 678905 - RNA, 21 nt, Human
auauuuggggggaggaaggga

SEQ ID NO: 678906 - RNA, 21 nt, Human
caaaaaggcaagacaacggcg

SEQ ID NO: 678907 - RNA, 20 nt, Human
caacccccaaaaaggcaaga

SEQ ID NO: 678908 - RNA, 22 nt, Human
caacccccaaaaaggcaagaca

SEQ ID NO: 678909 - RNA, 19 nt, Human
caaccuccguguagacccc

SEQ ID NO: 678910 - RNA, 25 nt, Human
caaccuccguguagaccccaacccc

SEQ ID NO: 678911 - RNA, 22 nt, Human
caagacaacggcguagccaaac

SEQ ID NO: 678912 - RNA, 23 nt, Human
cacaaccuccguguagaccccaa

SEQ ID NO: 678913 - RNA, 21 nt, Human
cacacagcgaaaacagguuuc

SEQ ID NO: 678914 - RNA, 18 nt, Human
caccuccccacauacgcu

SEQ ID NO: 678915 - RNA, 23 nt, Human
cacggacccugugcccgcgcccc

SEQ ID NO: 678916 - RNA, 22 nt, Human
cauggacccccuccaccucccc

SEQ ID NO: 678917 - RNA, 27 nt, Human
ccacacacagcgaaaacaguggaccuc

SEQ ID NO: 678918 - RNA, 19 nt, Human
cccaacccccaaaaaggca

SEQ ID NO: 678919 - RNA, 22 nt, Human
cccaacccccaaaaaggcaaga

SEQ ID NO: 678920 - RNA, 21 nt, Human
ccccaaaaaggcaagacaacg

SEQ ID NO: 678921 - RNA, 23 nt, Human
ccccaacccccaaaaaggcaaga

SEQ ID NO: 678922 - RNA, 23 nt, Human
cccgccacacacagcgaaaacag

SEQ ID NO: 678923 - RNA, 21 nt, Human
ccgcgcccccgccacacacag

SEQ ID NO: 678924 - RNA, 21 nt, Human
ccuccguguagaccccaaccc

SEQ ID NO: 678925 - RNA, 21 nt, Human
cuccguguagaccccaacccc

SEQ ID NO: 678926 - RNA, 22 nt, Human
cugaaugaauauuuauugaaua

SEQ ID NO: 678927 - RNA, 20 nt, Human
cugugcccgcgcccccgccu

SEQ ID NO: 678928 - RNA, 20 nt, Human
gaaccggggucccggggagc

SEQ ID NO: 678929 - RNA, 22 nt, Human
gcccgcgcccccgccacacaca

SEQ ID NO: 678930 - RNA, 22 nt, Human
gccugguccacauggacccccu

SEQ ID NO: 678931 - RNA, 22 nt, Human
gcugggggaggacgacccuuug

SEQ ID NO: 678932 - RNA, 19 nt, Human
ggacagggcugcccaauau

SEQ ID NO: 678933 - RNA, 19 nt, Human
gguggucccgggguaagga

SEQ ID NO: 678934 - RNA, 21 nt, Human
guacacauagcuggaagggag

SEQ ID NO: 678935 - RNA, 21 nt, Human
uaaacacaaccuccguguaga

SEQ ID NO: 678936 - RNA, 26 nt, Human
uaaacacaaccuccguguagacccca

SEQ ID NO: 678937 - RNA, 20 nt, Human
uacacauagcuggaagggag

SEQ ID NO: 678938 - RNA, 26 nt, Human
uagaccccaacccccaaaaaggcaag

SEQ ID NO: 678939 - RNA, 24 nt, Human
ugcugggggaggacgacccuuugg

SEQ ID NO: 678940 - RNA, 20 nt, Human
uggaagaagggcaggaguga

SEQ ID NO: 678941 - RNA, 19 nt, Human
uggaagggagggguggucc

SEQ ID NO: 678942 - RNA, 22 nt, Human
uggacccccuccaccuccccac

SEQ ID NO: 678943 - RNA, 21 nt, Human
uguaaacacaaccuccgugua

SEQ ID NO: 678944 - RNA, 19 nt, Human
uguggaagaagggcaggag

SEQ ID NO: 678945 - RNA, 23 nt, Human
auccgagugguccugagaggcca

SEQ ID NO: 678946 - RNA, 18 nt, Human
ccaccugagugccauccg

SEQ ID NO: 678947 - RNA, 22 nt, Human
ccauggugcccagcuucuccgc

SEQ ID NO: 678948 - RNA, 19 nt, Human
cccagcuucuccgcagcca

SEQ ID NO: 678949 - RNA, 20 nt, Human
ccccgggcccaggccuccca

SEQ ID NO: 678950 - RNA, 21 nt, Human
ccgggcccaggccucccaccc

SEQ ID NO: 678951 - RNA, 22 nt, Human
cguccuguccaccugagugcca

SEQ ID NO: 678952 - RNA, 26 nt, Human
cucugcccagugugguucugucacgg

SEQ ID NO: 678953 - RNA, 23 nt, Human
ggucaggugccaagucucccccu

SEQ ID NO: 678954 - RNA, 18 nt, Human
ucccagcgccuccuuguu

SEQ ID NO: 678955 - RNA, 22 nt, Human
ucugcagcagaccccucugccc

SEQ ID NO: 678956 - RNA, 20 nt, Human
ucuuugugaagaaauaagga

SEQ ID NO: 678957 - RNA, 21 nt, Human
ugccaagucucccccugcccc

SEQ ID NO: 678958 - RNA, 22 nt, Human
ugcccagcuucuccgcagccag

SEQ ID NO: 678959 - RNA, 18 nt, Human
uguuaaggaagacguccc

SEQ ID NO: 678960 - RNA, 25 nt, Human
uguuuuuuuuuuuuuuuugcaaguu

SEQ ID NO: 678961 - RNA, 28 nt, Human
uguuuuuuuuuuuuuuuugcaaguuuga

SEQ ID NO: 678962 - RNA, 23 nt, Human
uugugaagaaauaaggacuucac

SEQ ID NO: 678963 - RNA, 30 nt, Human
uuuuuuuuuuuuuuguuuuguuuuuuuuuu

SEQ ID NO: 678964 - RNA, 22 nt, Human
uuuuuuuuuuuuuuuuuguuuu

SEQ ID NO: 678965 - RNA, 20 nt, Human
uuuuuuuuuuuuuuuuuugg

SEQ ID NO: 678966 - RNA, 23 nt, Human
uuuuuuuuuuuuuuuuuuguuuu

SEQ ID NO: 678967 - RNA, 20 nt, Human
aaacaucuuggugcagauuc

SEQ ID NO: 678968 - RNA, 19 nt, Human
aaaugaaagauaagaaacc

SEQ ID NO: 678969 - RNA, 22 nt, Human
aacaaucaacaauguaccaugc

SEQ ID NO: 678970 - RNA, 22 nt, Human
aacuaaacucaccaacaggcug

SEQ ID NO: 678971 - RNA, 26 nt, Human
aagcagauguagguaggaagcaagau

SEQ ID NO: 678972 - RNA, 18 nt, Human
acaacaaaggcaugcaca

SEQ ID NO: 678973 - RNA, 21 nt, Human
agaaaagaaauauugcaaaga

SEQ ID NO: 678974 - RNA, 24 nt, Human
agaaaagaaauauugcaaagacaa

SEQ ID NO: 678975 - RNA, 23 nt, Human
agaaaauaaauacaaaaaaaugu

SEQ ID NO: 678976 - RNA, 22 nt, Human
agccucuuuaaaagguagcuga

SEQ ID NO: 678977 - RNA, 23 nt, Human
auccuauaucaucuccaaaagga

SEQ ID NO: 678978 - RNA, 22 nt, Human
auguaccucaucuacguucaca

SEQ ID NO: 678979 - RNA, 21 nt, Human
caacaaaggcaugcacaacua

SEQ ID NO: 678980 - RNA, 25 nt, Human
caacuaaacucaccaacaggcugaa

SEQ ID NO: 678981 - RNA, 22 nt, Human
cagaaaagaaauauugcaaaga

SEQ ID NO: 678982 - RNA, 24 nt, Human
caugcacaacuaaacucaccaaca

SEQ ID NO: 678983 - RNA, 23 nt, Human
caugcuuugauuuuagaagaaag

SEQ ID NO: 678984 - RNA, 24 nt, Human
ccaaaucagaaaugucuaaaaacc

SEQ ID NO: 678985 - RNA, 24 nt, Human
ccaaccuucuuauaaaaugaaaga

SEQ ID NO: 678986 - RNA, 20 nt, Human
ccucuuuaaaagguagcuga

SEQ ID NO: 678987 - RNA, 21 nt, Human
cuagucuacucuccuguuccu

SEQ ID NO: 678988 - RNA, 24 nt, Human
cugaccgcgaguucagaaaacaaa

SEQ ID NO: 678989 - RNA, 24 nt, Human
cuguacaggucgugcacccaagag

SEQ ID NO: 678990 - RNA, 20 nt, Human
gaaaugucuaaaaaccaugg

SEQ ID NO: 678991 - RNA, 24 nt, Human
gagauccaacauucacuugaaaua

SEQ ID NO: 678992 - RNA, 19 nt, Human
gcucgcguccucgggcugg

SEQ ID NO: 678993 - RNA, 25 nt, Human
ggacauuucacacugucaagcauca

SEQ ID NO: 678994 - RNA, 18 nt, Human
uaaaagggguuugaaaug

SEQ ID NO: 678995 - RNA, 18 nt, Human
uaaggauguacuugaggc

SEQ ID NO: 678996 - RNA, 22 nt, Human
uaggacaguucccuguucccaa

SEQ ID NO: 678997 - RNA, 20 nt, Human
uagggcugugucugcccagu

SEQ ID NO: 678998 - RNA, 22 nt, Human
uauaacuaggagcaaucaaggc

SEQ ID NO: 678999 - RNA, 19 nt, Human
uauagcucuggcugggcca

SEQ ID NO: 679000 - RNA, 23 nt, Human
uauauacaacaaaggcaugcaca

SEQ ID NO: 679001 - RNA, 18 nt, Human
uauaucaucuccaaaagg

SEQ ID NO: 679002 - RNA, 27 nt, Human
uauuucacauccuauaucaucuccaaa

SEQ ID NO: 679003 - RNA, 22 nt, Human
ucaagacacauuuaaaaaacaa

SEQ ID NO: 679004 - RNA, 20 nt, Human
ucacacugucaagcaucaug

SEQ ID NO: 679005 - RNA, 24 nt, Human
ucacauccuauaucaucuccaaaa

SEQ ID NO: 679006 - RNA, 25 nt, Human
ucagaaaagaaauauugcaaagaca

SEQ ID NO: 679007 - RNA, 25 nt, Human
ucagaaaugucuaaaaaccauggug

SEQ ID NO: 679008 - RNA, 21 nt, Human
ucccaauagcuacuccccuug

SEQ ID NO: 679009 - RNA, 23 nt, Human
ucuauaaucugacuacuggggau

SEQ ID NO: 679010 - RNA, 21 nt, Human
ucugugcacaccugccgcucg

SEQ ID NO: 679011 - RNA, 21 nt, Human
ucuguggccaagguauaaagc

SEQ ID NO: 679012 - RNA, 25 nt, Human
ugacuacuggggaugcggucagggg

SEQ ID NO: 679013 - RNA, 18 nt, Human
ugagacaaaacaaccaug

SEQ ID NO: 679014 - RNA, 28 nt, Human
ugagacaaaacaaccaugauucuacaaa

SEQ ID NO: 679015 - RNA, 25 nt, Human
ugcggaacgagcaaggauuuucuga

SEQ ID NO: 679016 - RNA, 19 nt, Human
uggccaagguauaaagcua

SEQ ID NO: 679017 - RNA, 22 nt, Human
uggcugggaucauuauuucuug

SEQ ID NO: 679018 - RNA, 21 nt, Human
uggggauuugagaagcggcag

SEQ ID NO: 679019 - RNA, 21 nt, Human
uguugccgagaauaaaaugag

SEQ ID NO: 679020 - RNA, 19 nt, Human
uuaaagaacggcaauauga

SEQ ID NO: 679021 - RNA, 18 nt, Human
uucucagucuggcuggga

SEQ ID NO: 679022 - RNA, 18 nt, Human
uugacacaugggucacua

SEQ ID NO: 679023 - RNA, 23 nt, Human
uugauuuuaacauauaaauacaa

SEQ ID NO: 679024 - RNA, 26 nt, Human
uuucacauccuauaucaucuccaaaa

SEQ ID NO: 679025 - RNA, 20 nt, Human
uuuccugacacauggucugg

SEQ ID NO: 679026 - RNA, 18 nt, Human
uuucuugauuucacugag

SEQ ID NO: 679027 - RNA, 22 nt, Human
uuuuugauuuuaacauauaaau

SEQ ID NO: 679028 - RNA, 21 nt, Human
acauggggcuaggaggcugga

SEQ ID NO: 679029 - RNA, 18 nt, Human
accccucccacucccucu

SEQ ID NO: 679030 - RNA, 22 nt, Human
acucugaagaucaugugugaga

SEQ ID NO: 679031 - RNA, 28 nt, Human
agagauacaggcugcugugacgucgccg

SEQ ID NO: 679032 - RNA, 18 nt, Human
aggcucucuuucccugcc

SEQ ID NO: 679033 - RNA, 19 nt, Human
caagcagagcucugugcau

SEQ ID NO: 679034 - RNA, 26 nt, Human
cagaccccucccacucccucuuccca

SEQ ID NO: 679035 - RNA, 19 nt, Human
cagcaguaggaagggcugu

SEQ ID NO: 679036 - RNA, 20 nt, Human
caucugggccaacguugucc

SEQ ID NO: 679037 - RNA, 21 nt, Human
ccacucccucuucccaaccuc

SEQ ID NO: 679038 - RNA, 18 nt, Human
cccacagauggaggcagu

SEQ ID NO: 679039 - RNA, 24 nt, Human
ccguguaccuguuucaagcagagc

SEQ ID NO: 679040 - RNA, 19 nt, Human
ccucccacucccucuuccc

SEQ ID NO: 679041 - RNA, 23 nt, Human
cguguaccuguuucaagcagagc

SEQ ID NO: 679042 - RNA, 19 nt, Human
cuaguugguggugccuuuu

SEQ ID NO: 679043 - RNA, 19 nt, Human
cucccacucccucuuccca

SEQ ID NO: 679044 - RNA, 21 nt, Human
cugcaggaguguguuuccagc

SEQ ID NO: 679045 - RNA, 25 nt, Human
cuuuuaguuuucacaucacaugggg

SEQ ID NO: 679046 - RNA, 23 nt, Human
gaauaggcucucuuucccugccu

SEQ ID NO: 679047 - RNA, 21 nt, Human
gcaucugggucaccacaccca

SEQ ID NO: 679048 - RNA, 22 nt, Human
gccucagguggagacagacccc

SEQ ID NO: 679049 - RNA, 19 nt, Human
ggaggcuggacaguuuccu

SEQ ID NO: 679050 - RNA, 18 nt, Human
ggcuaggaggcuggacag

SEQ ID NO: 679051 - RNA, 21 nt, Human
ggcuguaaggcagcagcugcc

SEQ ID NO: 679052 - RNA, 21 nt, Human
uacaggcugcugugccuccca

SEQ ID NO: 679053 - RNA, 21 nt, Human
uaggaagggcuguaaggcagc

SEQ ID NO: 679054 - RNA, 22 nt, Human
uaggaagggcuguaaggcagca

SEQ ID NO: 679055 - RNA, 20 nt, Human
ucaccacacccaaaguauga

SEQ ID NO: 679056 - RNA, 23 nt, Human
ucccacucccucuucccaaccuc

SEQ ID NO: 679057 - RNA, 18 nt, Human
ucccucuucccaaccucu

SEQ ID NO: 679058 - RNA, 18 nt, Human
ucccugccucagguggag

SEQ ID NO: 679059 - RNA, 26 nt, Human
ucugaagaucaugugugagaauaggc

SEQ ID NO: 679060 - RNA, 19 nt, Human
ugagaauaggcucucuuuc

SEQ ID NO: 679061 - RNA, 23 nt, Human
ugcaucugggucaccacacccaa

SEQ ID NO: 679062 - RNA, 25 nt, Human
uggagacagaccccucccacucccu

SEQ ID NO: 679063 - RNA, 20 nt, Human
ugugccucccaguguuucuu

SEQ ID NO: 679064 - RNA, 19 nt, Human
uuccagcacucugaagauc

SEQ ID NO: 679065 - RNA, 21 nt, Human
uuuucacaucacauggggcua

SEQ ID NO: 679066 - RNA, 21 nt, Human
aagcagaagagaagagguggg

SEQ ID NO: 679067 - RNA, 18 nt, Human
agagaagaggugggcaga

SEQ ID NO: 679068 - RNA, 24 nt, Human
gaagugcaaagccacaaaaagcaa

SEQ ID NO: 679069 - RNA, 20 nt, Human
uagaguuaggauuaucacac

SEQ ID NO: 679070 - RNA, 22 nt, Human
uaguagaguuaggauuaucaca

SEQ ID NO: 679071 - RNA, 19 nt, Human
ucucuagaaauauauuuau

SEQ ID NO: 679072 - RNA, 18 nt, Human
ugcaaagccacaaaaagc

SEQ ID NO: 679073 - RNA, 18 nt, Human
ugcaaagccacaaaaagc

SEQ ID NO: 679074 - RNA, 23 nt, Human
uuaauuuuuuugccagagagggc

SEQ ID NO: 679075 - RNA, 18 nt, Human
aaaaggccuugcacauag

SEQ ID NO: 679076 - RNA, 21 nt, Human
cauugagcuccuggauccagc

SEQ ID NO: 679077 - RNA, 22 nt, Human
cauugagcuccuggauccagcu

SEQ ID NO: 679078 - RNA, 23 nt, Human
cuaaaaaggccuugcacauagca

SEQ ID NO: 679079 - RNA, 18 nt, Human
cucugguuuugggagucc

SEQ ID NO: 679080 - RNA, 19 nt, Human
cuugaggaguuaagauuug

SEQ ID NO: 679081 - RNA, 24 nt, Human
gaagauacacacccacaaugucuc

SEQ ID NO: 679082 - RNA, 23 nt, Human
gauccagcuaugccugaagccag

SEQ ID NO: 679083 - RNA, 22 nt, Human
gguuuugggaguccuugaggag

SEQ ID NO: 679084 - RNA, 23 nt, Human
ucaggcuccuggugucucuggag

SEQ ID NO: 679085 - RNA, 23 nt, Human
ugccugaagccagucuugugaaa

SEQ ID NO: 679086 - RNA, 21 nt, Human
aaacaaaggguaaaaaucagg

SEQ ID NO: 679087 - RNA, 20 nt, Human
aacaggagaaacucagcugg

SEQ ID NO: 679088 - RNA, 18 nt, Human
aagcugcaaucacauuca

SEQ ID NO: 679089 - RNA, 21 nt, Human
aaggacgucggaagccgggga

SEQ ID NO: 679090 - RNA, 23 nt, Human
aagugguccuaauguccuggcug

SEQ ID NO: 679091 - RNA, 19 nt, Human
aauacuuucuacauauugu

SEQ ID NO: 679092 - RNA, 18 nt, Human
agaaauggugcaugcaca

SEQ ID NO: 679093 - RNA, 19 nt, Human
agacaggaagaacucuagg

SEQ ID NO: 679094 - RNA, 24 nt, Human
agcaacagcaucagugguccagaa

SEQ ID NO: 679095 - RNA, 25 nt, Human
aggaaaaugugaacagaugaaacug

SEQ ID NO: 679096 - RNA, 26 nt, Human
aguacagaauguucaaagcugcaauc

SEQ ID NO: 679097 - RNA, 23 nt, Human
agugcccgcuucucccaagcagc

SEQ ID NO: 679098 - RNA, 20 nt, Human
augguaagagaagcaucauc

SEQ ID NO: 679099 - RNA, 24 nt, Human
caaaaacaaacuguguggaaauaa

SEQ ID NO: 679100 - RNA, 20 nt, Human
caaggaaaaugugaacagau

SEQ ID NO: 679101 - RNA, 24 nt, Human
cacccugugcucagaagcaggagu

SEQ ID NO: 679102 - RNA, 20 nt, Human
caccuagggcuucacugccc

SEQ ID NO: 679103 - RNA, 18 nt, Human
cacuauauaugacugagu

SEQ ID NO: 679104 - RNA, 23 nt, Human
cagaagcaggagugguggcugau

SEQ ID NO: 679105 - RNA, 22 nt, Human
cagaauguucaaagcugcaauc

SEQ ID NO: 679106 - RNA, 24 nt, Human
cagcagcagcaagaaugcuuggcu

SEQ ID NO: 679107 - RNA, 23 nt, Human
cagcaucagugguccagaaauca

SEQ ID NO: 679108 - RNA, 22 nt, Human
cagcgcgguccauccugacacu

SEQ ID NO: 679109 - RNA, 26 nt, Human
caggaagaacucuagguagccagagg

SEQ ID NO: 679110 - RNA, 24 nt, Human
caggcgggugggcaggcaggcagc

SEQ ID NO: 679111 - RNA, 20 nt, Human
caguauaccacaugcccaau

SEQ ID NO: 679112 - RNA, 22 nt, Human
caugcuauagaaaaugugaaac

SEQ ID NO: 679113 - RNA, 20 nt, Human
ccacacacaugguccugggc

SEQ ID NO: 679114 - RNA, 21 nt, Human
ccaggaaauaccuccucagca

SEQ ID NO: 679115 - RNA, 22 nt, Human
cccgcuggggucgaaggcccca

SEQ ID NO: 679116 - RNA, 19 nt, Human
ccgcuggggucgaaggccc

SEQ ID NO: 679117 - RNA, 23 nt, Human
ccugaauuaugcaguuaacugag

SEQ ID NO: 679118 - RNA, 19 nt, Human
ccugugcucagaagcagga

SEQ ID NO: 679119 - RNA, 18 nt, Human
cuaaaauagauaaucacc

SEQ ID NO: 679120 - RNA, 19 nt, Human
cucuagguagccagaggug

SEQ ID NO: 679121 - RNA, 20 nt, Human
cuugaggucuuaauggcaac

SEQ ID NO: 679122 - RNA, 20 nt, Human
gacuuauucuucuuagcaac

SEQ ID NO: 679123 - RNA, 19 nt, Human
gagaagcaucaucaaagac

SEQ ID NO: 679124 - RNA, 18 nt, Human
gagggaaggaggcgacgg

SEQ ID NO: 679125 - RNA, 24 nt, Human
gauaaucaccuuauuuguuuucaa

SEQ ID NO: 679126 - RNA, 18 nt, Human
gcgaaaaaaaaggagcau

SEQ ID NO: 679127 - RNA, 18 nt, Human
gcucaagaggagagcacc

SEQ ID NO: 679128 - RNA, 20 nt, Human
gggcugcaagcccaggcggg

SEQ ID NO: 679129 - RNA, 21 nt, Human
gguccagaaaucaacaggaga

SEQ ID NO: 679130 - RNA, 25 nt, Human
gguuacuuucuaaaauacuuucuac

SEQ ID NO: 679131 - RNA, 19 nt, Human
gucaagacaggaagaacuc

SEQ ID NO: 679132 - RNA, 18 nt, Human
guccaaaaugacuucggg

SEQ ID NO: 679133 - RNA, 20 nt, Human
uaaaauagauaaucaccuua

SEQ ID NO: 679134 - RNA, 21 nt, Human
uaaagucccaacugggagcuu

SEQ ID NO: 679135 - RNA, 21 nt, Human
uaagagaagcaucaucaaaga

SEQ ID NO: 679136 - RNA, 21 nt, Human
uaagagugcgaaaaaaaagga

SEQ ID NO: 679137 - RNA, 25 nt, Human
uacaaaaacuaaaugguaagagaag

SEQ ID NO: 679138 - RNA, 19 nt, Human
uagagagacgccuugguuc

SEQ ID NO: 679139 - RNA, 23 nt, Human
uagauuaauaaaaugacagcuga

SEQ ID NO: 679140 - RNA, 22 nt, Human
uagcagcuaauauuagcuaugc

SEQ ID NO: 679141 - RNA, 22 nt, Human
uagcagcugcagggagacuucu

SEQ ID NO: 679142 - RNA, 18 nt, Human
uagcccgcuggggucgaa

SEQ ID NO: 679143 - RNA, 24 nt, Human
ucaacauauacaauauugauguua

SEQ ID NO: 679144 - RNA, 22 nt, Human
ucaacgccaauuuucagucuua

SEQ ID NO: 679145 - RNA, 21 nt, Human
ucagucuuaagagugcgaaaa

SEQ ID NO: 679146 - RNA, 18 nt, Human
ucagugccaggagcaagu

SEQ ID NO: 679147 - RNA, 22 nt, Human
uccacacacaugguccugggca

SEQ ID NO: 679148 - RNA, 23 nt, Human
ucccccgaucuaucgggcuucgc

SEQ ID NO: 679149 - RNA, 21 nt, Human
ucucagcugguaucagggcug

SEQ ID NO: 679150 - RNA, 23 nt, Human
ucucugugucucuuuucaaauaa

SEQ ID NO: 679151 - RNA, 18 nt, Human
ucugguguuuugacuuua

SEQ ID NO: 679152 - RNA, 22 nt, Human
ugacaaaccucaaauaauaugu

SEQ ID NO: 679153 - RNA, 20 nt, Human
ugagauaaagucccaacugg

SEQ ID NO: 679154 - RNA, 22 nt, Human
ugagauaaagucccaacuggga

SEQ ID NO: 679155 - RNA, 18 nt, Human
ugaggcuguuugggccca

SEQ ID NO: 679156 - RNA, 22 nt, Human
ugcccaggcgugcaacaaagca

SEQ ID NO: 679157 - RNA, 18 nt, Human
ugcuauagaaaaugugaa

SEQ ID NO: 679158 - RNA, 20 nt, Human
ugggcaggaacuagcagcug

SEQ ID NO: 679159 - RNA, 18 nt, Human
ugguaaguagucagaaug

SEQ ID NO: 679160 - RNA, 20 nt, Human
uggugcaugcacaaaaggga

SEQ ID NO: 679161 - RNA, 23 nt, Human
uguccugccuugcguuuaggcug

SEQ ID NO: 679162 - RNA, 24 nt, Human
ugucucagggggagggaugccagg

SEQ ID NO: 679163 - RNA, 18 nt, Human
ugucuggaagaaguaaaa

SEQ ID NO: 679164 - RNA, 21 nt, Human
ugugcaugcuauagaaaaugu

SEQ ID NO: 679165 - RNA, 21 nt, Human
uugcugagccaaccauauuau

SEQ ID NO: 679166 - RNA, 23 nt, Human
uuggcugcaaaaucagaagcuga

SEQ ID NO: 679167 - RNA, 23 nt, Human
uugugagauaaagucccaacugg

SEQ ID NO: 679168 - RNA, 19 nt, Human
uuucacacaauuuugcauu

SEQ ID NO: 679169 - RNA, 27 nt, Human
uuuuuuuuuuuuuuuuuuuuucugggg

SEQ ID NO: 679170 - RNA, 18 nt, Human
acccucuacgccaugccu

SEQ ID NO: 679171 - RNA, 22 nt, Human
agacauaaaaauaaaagagcaa

SEQ ID NO: 679172 - RNA, 22 nt, Human
agagccagagccggcagaggga

SEQ ID NO: 679173 - RNA, 19 nt, Human
agggaggagccuggaaugg

SEQ ID NO: 679174 - RNA, 18 nt, Human
aguuuccaaaugagaagg

SEQ ID NO: 679175 - RNA, 21 nt, Human
augaaguuuuaguuuccaaau

SEQ ID NO: 679176 - RNA, 23 nt, Human
caaauauagaggucuuggggacc

SEQ ID NO: 679177 - RNA, 18 nt, Human
cacccucuacgccaugcc

SEQ ID NO: 679178 - RNA, 18 nt, Human
caccucgggcggcaggau

SEQ ID NO: 679179 - RNA, 20 nt, Human
cacugcugagcuggaggccu

SEQ ID NO: 679180 - RNA, 18 nt, Human
cagagccggcagagggag

SEQ ID NO: 679181 - RNA, 23 nt, Human
ccccucugcuuuggugcuugugg

SEQ ID NO: 679182 - RNA, 27 nt, Human
ccucuacgccaugccuuguacuccccg

SEQ ID NO: 679183 - RNA, 23 nt, Human
ccugccccucugcuuuggugcuu

SEQ ID NO: 679184 - RNA, 25 nt, Human
cucuacgccaugccuuguacucccc

SEQ ID NO: 679185 - RNA, 20 nt, Human
cucugcuuuggugcuugugg

SEQ ID NO: 679186 - RNA, 22 nt, Human
cucuggcugcuggguggugugc

SEQ ID NO: 679187 - RNA, 19 nt, Human
cugagcuggaggccugggc

SEQ ID NO: 679188 - RNA, 20 nt, Human
cugccccucugcuuuggugc

SEQ ID NO: 679189 - RNA, 22 nt, Human
cugcuuuggugcuugugguugg

SEQ ID NO: 679190 - RNA, 21 nt, Human
cugguggugcuggggcugcca

SEQ ID NO: 679191 - RNA, 18 nt, Human
gaccauggccacagucac

SEQ ID NO: 679192 - RNA, 24 nt, Human
gagccagagccggcagagggaggg

SEQ ID NO: 679193 - RNA, 24 nt, Human
gagccggcagagggagggaggagc

SEQ ID NO: 679194 - RNA, 25 nt, Human
gagcugggaggguggcuucccgggg

SEQ ID NO: 679195 - RNA, 21 nt, Human
gcugagcuggaggccugggcu

SEQ ID NO: 679196 - RNA, 20 nt, Human
ggcggcaggauggggcuugg

SEQ ID NO: 679197 - RNA, 19 nt, Human
guggugugcugccugcccc

SEQ ID NO: 679198 - RNA, 19 nt, Human
ugagcuggaggccugggcu

SEQ ID NO: 679199 - RNA, 19 nt, Human
ugcucuggcugcugggugg

SEQ ID NO: 679200 - RNA, 18 nt, Human
uggaggccugggcugugg

SEQ ID NO: 679201 - RNA, 22 nt, Human
uggcuucccgggagaccuggug

SEQ ID NO: 679202 - RNA, 19 nt, Human
uggggcuuggcagcuaagg

SEQ ID NO: 679203 - RNA, 20 nt, Human
uggugcaguccucagagcug

SEQ ID NO: 679204 - RNA, 21 nt, Human
uggugcaguccucagagcugg

SEQ ID NO: 679205 - RNA, 23 nt, Human
uuauugaaaaguuuuaagcagga

SEQ ID NO: 679206 - RNA, 24 nt, Human
uucccgggagaccugguggugcug

SEQ ID NO: 679207 - RNA, 23 nt, Human
uuuagacauaaaaauaaaagagc

SEQ ID NO: 679208 - RNA, 18 nt, Human
uuuuugguccugacgauc

SEQ ID NO: 679209 - RNA, 18 nt, Human
uuuuuuuuuuuuuuuuug

SEQ ID NO: 679210 - RNA, 28 nt, Human
uuuuuuuuuuuuuuuuuuuuuuuggggg

SEQ ID NO: 679211 - RNA, 23 nt, Human
acccacagggucgagcccugcag

SEQ ID NO: 679212 - RNA, 21 nt, Human
acccaguggccaggccccuua

SEQ ID NO: 679213 - RNA, 20 nt, Human
aggaagggccacaacuagca

SEQ ID NO: 679214 - RNA, 21 nt, Human
agguccgagguccguggaggu

SEQ ID NO: 679215 - RNA, 23 nt, Human
caccugacugaggcgggaacagg

SEQ ID NO: 679216 - RNA, 23 nt, Human
caggaggggucugggaaauggug

SEQ ID NO: 679217 - RNA, 19 nt, Human
ccacaacuagcagccgccu

SEQ ID NO: 679218 - RNA, 21 nt, Human
ccacugggccugggugccgca

SEQ ID NO: 679219 - RNA, 24 nt, Human
ccaguggccaggccccuuagcugg

SEQ ID NO: 679220 - RNA, 20 nt, Human
ccccagggagggcacacagg

SEQ ID NO: 679221 - RNA, 19 nt, Human
ccuccucagccccagggag

SEQ ID NO: 679222 - RNA, 21 nt, Human
cuagcagccgccugccuccuc

SEQ ID NO: 679223 - RNA, 18 nt, Human
cuccuuccaggaagggcc

SEQ ID NO: 679224 - RNA, 22 nt, Human
cuccuuccaggaagggccacaa

SEQ ID NO: 679225 - RNA, 18 nt, Human
gagcccugcaggccucuc

SEQ ID NO: 679226 - RNA, 21 nt, Human
gagccgccuggagguccgagg

SEQ ID NO: 679227 - RNA, 19 nt, Human
gaggcgggaacaggagggg

SEQ ID NO: 679228 - RNA, 18 nt, Human
gcacacaggcuggguggc

SEQ ID NO: 679229 - RNA, 20 nt, Human
gccgccugccuccucagccc

SEQ ID NO: 679230 - RNA, 20 nt, Human
gggaacaggaggggucuggg

SEQ ID NO: 679231 - RNA, 27 nt, Human
gucugcucuuuaauggacaccgcccac

SEQ ID NO: 679232 - RNA, 19 nt, Human
uaauggacaccgcccacuu

SEQ ID NO: 679233 - RNA, 23 nt, Human
uagcagccgccugccuccucagc

SEQ ID NO: 679234 - RNA, 21 nt, Human
uccgagguccguggagguggg

SEQ ID NO: 679235 - RNA, 19 nt, Human
ucgagcccugcaggccucu

SEQ ID NO: 679236 - RNA, 19 nt, Human
ucugcucccuggggacaga

SEQ ID NO: 679237 - RNA, 24 nt, Human
ugacugaggcgggaacaggagggg

SEQ ID NO: 679238 - RNA, 22 nt, Human
uggagguggggagggggugcag

SEQ ID NO: 679239 - RNA, 20 nt, Human
uggcacccaguggccaggcc

SEQ ID NO: 679240 - RNA, 19 nt, Human
ugggaaauggugccacugg

SEQ ID NO: 679241 - RNA, 20 nt, Human
uggggacagaaacccacagg

SEQ ID NO: 679242 - RNA, 20 nt, Human
aaagacuuccucagcccuca

SEQ ID NO: 679243 - RNA, 27 nt, Human
aaccagaaacaaaaacggaaauaaauu

SEQ ID NO: 679244 - RNA, 23 nt, Human
aaccugcaccagccaaagggcag

SEQ ID NO: 679245 - RNA, 31 nt, Human
aaccugcccacuucucaucuagcucuuccag

SEQ ID NO: 679246 - RNA, 19 nt, Human
aagaccccacggccccgcc

SEQ ID NO: 679247 - RNA, 20 nt, Human
aagcagcaggaguucuugga

SEQ ID NO: 679248 - RNA, 20 nt, Human
aauacccacuucauucuggc

SEQ ID NO: 679249 - RNA, 18 nt, Human
acacggcuccccaccccc

SEQ ID NO: 679250 - RNA, 21 nt, Human
acagggagagacuccucugga

SEQ ID NO: 679251 - RNA, 21 nt, Human
acgacuccucccaucagacgg

SEQ ID NO: 679252 - RNA, 22 nt, Human
acucagcauccaugugucauag

SEQ ID NO: 679253 - RNA, 21 nt, Human
acuggccuuggcauccucagc

SEQ ID NO: 679254 - RNA, 19 nt, Human
agacaaggccaugagcaua

SEQ ID NO: 679255 - RNA, 22 nt, Human
agcacuuuucccacuggcagcc

SEQ ID NO: 679256 - RNA, 22 nt, Human
agcaggaguucuuggaagcgag

SEQ ID NO: 679257 - RNA, 24 nt, Human
agccugaccagcgguccaccaucu

SEQ ID NO: 679258 - RNA, 18 nt, Human
agccuggugcguccgcug

SEQ ID NO: 679259 - RNA, 21 nt, Human
agcugcccaucacgccucacu

SEQ ID NO: 679260 - RNA, 18 nt, Human
agcuggauaccauccaag

SEQ ID NO: 679261 - RNA, 21 nt, Human
agcuuccggcaagacucacag

SEQ ID NO: 679262 - RNA, 24 nt, Human
aggaagcagcaggaguucuuggaa

SEQ ID NO: 679263 - RNA, 20 nt, Human
aggcagcgccuugguccugg

SEQ ID NO: 679264 - RNA, 20 nt, Human
aggcaguaccugcucccagc

SEQ ID NO: 679265 - RNA, 23 nt, Human
aggccgaggcggaggcucugaga

SEQ ID NO: 679266 - RNA, 19 nt, Human
aggcuccucgaacccuacc

SEQ ID NO: 679267 - RNA, 21 nt, Human
agggcuggggcacaucuggca

SEQ ID NO: 679268 - RNA, 21 nt, Human
agggguaccagggccuggagc

SEQ ID NO: 679269 - RNA, 19 nt, Human
aggugcacaguucucgcca

SEQ ID NO: 679270 - RNA, 18 nt, Human
aucacgccucacuucaca

SEQ ID NO: 679271 - RNA, 19 nt, Human
caaagacuuccucagcccu

SEQ ID NO: 679272 - RNA, 23 nt, Human
cacccacacggcuccccaccccc

SEQ ID NO: 679273 - RNA, 23 nt, Human
caccucaaagacuuccucagccc

SEQ ID NO: 679274 - RNA, 19 nt, Human
cacgccucacuucacagcu

SEQ ID NO: 679275 - RNA, 21 nt, Human
cacggccccgcagcagccagg

SEQ ID NO: 679276 - RNA, 21 nt, Human
cacguguccagauugggccca

SEQ ID NO: 679277 - RNA, 25 nt, Human
cacucagcauccaugugucauaguc

SEQ ID NO: 679278 - RNA, 19 nt, Human
cacuccagccucaauggag

SEQ ID NO: 679279 - RNA, 21 nt, Human
cacuucuugguuaguguccca

SEQ ID NO: 679280 - RNA, 18 nt, Human
cagcacaggagggggcug

SEQ ID NO: 679281 - RNA, 23 nt, Human
cagcagccaggcugcccguuuga

SEQ ID NO: 679282 - RNA, 24 nt, Human
cagccaggcugcccguuugagggc

SEQ ID NO: 679283 - RNA, 21 nt, Human
cagcggcacgcacugcccucg

SEQ ID NO: 679284 - RNA, 21 nt, Human
cagcuacccccugguccaccc

SEQ ID NO: 679285 - RNA, 23 nt, Human
cagcuggauaccauccaaguggu

SEQ ID NO: 679286 - RNA, 22 nt, Human
caggauggaggcaguaccugcu

SEQ ID NO: 679287 - RNA, 20 nt, Human
caggccccauauccucucca

SEQ ID NO: 679288 - RNA, 20 nt, Human
caggugaugacucccaggac

SEQ ID NO: 679289 - RNA, 18 nt, Human
caguggcagguagauuuu

SEQ ID NO: 679290 - RNA, 24 nt, Human
cauagagguccacaagcgcauggc

SEQ ID NO: 679291 - RNA, 18 nt, Human
caugucugcuuucuccaa

SEQ ID NO: 679292 - RNA, 24 nt, Human
caugucugcuuucuccaugucccc

SEQ ID NO: 679293 - RNA, 23 nt, Human
ccaagcuccagcaccugcgcaug

SEQ ID NO: 679294 - RNA, 22 nt, Human
ccaaugcgugcaccugugccca

SEQ ID NO: 679295 - RNA, 22 nt, Human
ccaccuacaucugagagccugc

SEQ ID NO: 679296 - RNA, 26 nt, Human
ccacucccgcccgguggccccggaaa

SEQ ID NO: 679297 - RNA, 22 nt, Human
ccacuggggagugcagugggaa

SEQ ID NO: 679298 - RNA, 22 nt, Human
ccagagcuguccagccgcaguc

SEQ ID NO: 679299 - RNA, 20 nt, Human
ccagcgguccaccaucuucu

SEQ ID NO: 679300 - RNA, 20 nt, Human
ccauauccucuccauccacc

SEQ ID NO: 679301 - RNA, 23 nt, Human
ccaucuucugaaugacaauuuuu

SEQ ID NO: 679302 - RNA, 22 nt, Human
ccaugagcauagccagcggcac

SEQ ID NO: 679303 - RNA, 22 nt, Human
cccacacggcuccccaccccca

SEQ ID NO: 679304 - RNA, 23 nt, Human
cccacccccagccucucuagguu

SEQ ID NO: 679305 - RNA, 27 nt, Human
cccacucccgcccgguggccccggaaa

SEQ ID NO: 679306 - RNA, 22 nt, Human
cccacuggcagccccuggcuca

SEQ ID NO: 679307 - RNA, 19 nt, Human
cccaggccaugcuccucgc

SEQ ID NO: 679308 - RNA, 25 nt, Human
ccccacggccccgcagcagccaggg

SEQ ID NO: 679309 - RNA, 21 nt, Human
ccccagcacacacucucuuug

SEQ ID NO: 679310 - RNA, 19 nt, Human
ccccgacgaacacccacac

SEQ ID NO: 679311 - RNA, 22 nt, Human
ccccggaaaaagcagcuucaug

SEQ ID NO: 679312 - RNA, 22 nt, Human
ccccggaaaaagcagcuucaug

SEQ ID NO: 679313 - RNA, 19 nt, Human
cccucgugccauccuccuc

SEQ ID NO: 679314 - RNA, 23 nt, Human
cccugggccaccaccgccugccc

SEQ ID NO: 679315 - RNA, 24 nt, Human
cccugggccaccaccgccugcccc

SEQ ID NO: 679316 - RNA, 18 nt, Human
ccgcggcccgacugugcu

SEQ ID NO: 679317 - RNA, 24 nt, Human
ccuaccccagguucucccuucaaa

SEQ ID NO: 679318 - RNA, 21 nt, Human
ccucaaagacuuccucagccc

SEQ ID NO: 679319 - RNA, 18 nt, Human
ccucagacggggcccgcc

SEQ ID NO: 679320 - RNA, 26 nt, Human
ccucgcccucacugccggugucugaa

SEQ ID NO: 679321 - RNA, 18 nt, Human
ccucgugccauccuccuc

SEQ ID NO: 679322 - RNA, 23 nt, Human
ccucuggaacgccaccugagccu

SEQ ID NO: 679323 - RNA, 18 nt, Human
ccuggagcugggcuccca

SEQ ID NO: 679324 - RNA, 23 nt, Human
ccugugcccagcgcauccagguc

SEQ ID NO: 679325 - RNA, 22 nt, Human
cgagcaggcagcgccuuggucc

SEQ ID NO: 679326 - RNA, 21 nt, Human
cgcagcuuccggcaagacuca

SEQ ID NO: 679327 - RNA, 21 nt, Human
cgcaucaugccaaugcgugca

SEQ ID NO: 679328 - RNA, 25 nt, Human
cgccaggcuccucgaacccuacccc

SEQ ID NO: 679329 - RNA, 21 nt, Human
cgccgggaacgugagcgacga

SEQ ID NO: 679330 - RNA, 24 nt, Human
cgcgcgagagagaggccgaggcgg

SEQ ID NO: 679331 - RNA, 20 nt, Human
cggcaggugguggaccccag

SEQ ID NO: 679332 - RNA, 22 nt, Human
cggcugccaagcuccagcaccu

SEQ ID NO: 679333 - RNA, 19 nt, Human
cgggaaugagguggaggca

SEQ ID NO: 679334 - RNA, 21 nt, Human
cgguggcaguguugcuggucg

SEQ ID NO: 679335 - RNA, 20 nt, Human
cguccggagcucuggcaggg

SEQ ID NO: 679336 - RNA, 21 nt, Human
cucacaggugaaagaaggcgg

SEQ ID NO: 679337 - RNA, 18 nt, Human
cucagaguccaugggccc

SEQ ID NO: 679338 - RNA, 20 nt, Human
cuccagcaccugcgcaugcc

SEQ ID NO: 679339 - RNA, 18 nt, Human
cuccagccucaauggagc

SEQ ID NO: 679340 - RNA, 22 nt, Human
cucgcagcucuuuagaggacua

SEQ ID NO: 679341 - RNA, 20 nt, Human
cucgcagcuuccggcaagac

SEQ ID NO: 679342 - RNA, 18 nt, Human
cucuuccacuuucaccuc

SEQ ID NO: 679343 - RNA, 21 nt, Human
cugaacugggggaaggaggcu

SEQ ID NO: 679344 - RNA, 21 nt, Human
cuggccccugcgucacauccg

SEQ ID NO: 679345 - RNA, 21 nt, Human
cuucaaaggacggcagcucag

SEQ ID NO: 679346 - RNA, 20 nt, Human
cuuccgugcgcccacccuuc

SEQ ID NO: 679347 - RNA, 20 nt, Human
gaacacccacacggcucccc

SEQ ID NO: 679348 - RNA, 23 nt, Human
gaagagggguaccagggccugga

SEQ ID NO: 679349 - RNA, 21 nt, Human
gaccucagacggggcccgccu

SEQ ID NO: 679350 - RNA, 18 nt, Human
gacuaccgcauacaccuc

SEQ ID NO: 679351 - RNA, 19 nt, Human
gacucccaggacaagggaa

SEQ ID NO: 679352 - RNA, 22 nt, Human
gagcauagccagcggcacgcac

SEQ ID NO: 679353 - RNA, 24 nt, Human
gaggcagucgccacucagagucca

SEQ ID NO: 679354 - RNA, 19 nt, Human
gcacaguucucgccaggcu

SEQ ID NO: 679355 - RNA, 24 nt, Human
gcagcaggaguucuuggaagcgag

SEQ ID NO: 679356 - RNA, 23 nt, Human
gcgcaggugaugacucccaggac

SEQ ID NO: 679357 - RNA, 20 nt, Human
gcguccgcugggauuugggg

SEQ ID NO: 679358 - RNA, 18 nt, Human
gcucccacgacuccuccc

SEQ ID NO: 679359 - RNA, 20 nt, Human
gcuccccacccccagccucu

SEQ ID NO: 679360 - RNA, 18 nt, Human
gcugccaagcuccagcac

SEQ ID NO: 679361 - RNA, 24 nt, Human
gcugcuccucccgaggaggugcac

SEQ ID NO: 679362 - RNA, 24 nt, Human
ggaaggaggcugggugccuucuga

SEQ ID NO: 679363 - RNA, 22 nt, Human
ggaggcaugaaauaaucuucag

SEQ ID NO: 679364 - RNA, 21 nt, Human
ggcagggaaggaggcagcccu

SEQ ID NO: 679365 - RNA, 21 nt, Human
ggccaccaccgccugccccgg

SEQ ID NO: 679366 - RNA, 19 nt, Human
gggaauuccaggucuucag

SEQ ID NO: 679367 - RNA, 18 nt, Human
gggcacaucuggcacagc

SEQ ID NO: 679368 - RNA, 22 nt, Human
ggggccgguggcauuggugaug

SEQ ID NO: 679369 - RNA, 23 nt, Human
ggggcugcuccucccgaggaggu

SEQ ID NO: 679370 - RNA, 21 nt, Human
gggguaggggaguaaaaggga

SEQ ID NO: 679371 - RNA, 21 nt, Human
gguguugaagauauaaucuga

SEQ ID NO: 679372 - RNA, 19 nt, Human
guccggagcucuggcaggg

SEQ ID NO: 679373 - RNA, 25 nt, Human
gugcaccugugcccagcgcauccag

SEQ ID NO: 679374 - RNA, 24 nt, Human
gugcugggccuccggacauggagc

SEQ ID NO: 679375 - RNA, 21 nt, Human
guugaagauauaaucugaugg

SEQ ID NO: 679376 - RNA, 22 nt, Human
uaacaugaagaugcagcccccc

SEQ ID NO: 679377 - RNA, 25 nt, Human
uaccagggccuggagcugggcuccc

SEQ ID NO: 679378 - RNA, 19 nt, Human
uagcacaggcuucgcuuug

SEQ ID NO: 679379 - RNA, 18 nt, Human
uagcggcaggugguggac

SEQ ID NO: 679380 - RNA, 19 nt, Human
ucacccacgaugggguggg

SEQ ID NO: 679381 - RNA, 19 nt, Human
ucaggccgaauagcaguca

SEQ ID NO: 679382 - RNA, 20 nt, Human
uccacuuucaccucaaagaa

SEQ ID NO: 679383 - RNA, 18 nt, Human
uccauggggccgguggca

SEQ ID NO: 679384 - RNA, 20 nt, Human
uccauggggccgguggcauu

SEQ ID NO: 679385 - RNA, 22 nt, Human
ucccacuggcagccccuggcuc

SEQ ID NO: 679386 - RNA, 18 nt, Human
ucccggggaggcuccccu

SEQ ID NO: 679387 - RNA, 18 nt, Human
uccgugcgcccacccuuc

SEQ ID NO: 679388 - RNA, 20 nt, Human
uccucagcccucagcuccuu

SEQ ID NO: 679389 - RNA, 20 nt, Human
uccucuggaacgccaccuga

SEQ ID NO: 679390 - RNA, 21 nt, Human
uccucuggaacgccaccuggu

SEQ ID NO: 679391 - RNA, 23 nt, Human
ucgcagcuuccggcaagacucaa

SEQ ID NO: 679392 - RNA, 22 nt, Human
ucgguggcaguguugcuggucg

SEQ ID NO: 679393 - RNA, 21 nt, Human
ucugaacugggggaaggaggc

SEQ ID NO: 679394 - RNA, 22 nt, Human
ucugaacugggggaaggaggcu

SEQ ID NO: 679395 - RNA, 19 nt, Human
ucugccccccgacgaacac

SEQ ID NO: 679396 - RNA, 18 nt, Human
ucuggccucccaggccau

SEQ ID NO: 679397 - RNA, 19 nt, Human
ugaagaugcagccccccag

SEQ ID NO: 679398 - RNA, 20 nt, Human
ugagcgacgacggcugcaga

SEQ ID NO: 679399 - RNA, 21 nt, Human
ugagcgacgacggcugcagac

SEQ ID NO: 679400 - RNA, 18 nt, Human
ugagggcacaggcagaag

SEQ ID NO: 679401 - RNA, 23 nt, Human
ugccagaccucagacggggcccg

SEQ ID NO: 679402 - RNA, 21 nt, Human
ugcccucgugccauccuccuc

SEQ ID NO: 679403 - RNA, 19 nt, Human
ugccuacaugcuccugcgc

SEQ ID NO: 679404 - RNA, 22 nt, Human
ugcugggccuccggacauggag

SEQ ID NO: 679405 - RNA, 21 nt, Human
uggaacugacaauugacacac

SEQ ID NO: 679406 - RNA, 19 nt, Human
uggccccugcgucacaucc

SEQ ID NO: 679407 - RNA, 22 nt, Human
uggccucccaggccaugcuccu

SEQ ID NO: 679408 - RNA, 19 nt, Human
uggccuuggcauccucagc

SEQ ID NO: 679409 - RNA, 24 nt, Human
uggcggaggcaugaaauaaucuuc

SEQ ID NO: 679410 - RNA, 18 nt, Human
uggggucccggaauugca

SEQ ID NO: 679411 - RNA, 23 nt, Human
ugggugccuucugacuccuccag

SEQ ID NO: 679412 - RNA, 22 nt, Human
uguaccacucagcauccaugug

SEQ ID NO: 679413 - RNA, 20 nt, Human
uguccauggggccgguggca

SEQ ID NO: 679414 - RNA, 22 nt, Human
uguggucagccccagccgcagg

SEQ ID NO: 679415 - RNA, 20 nt, Human
uguugaagauauaaucugau

SEQ ID NO: 679416 - RNA, 20 nt, Human
uuccggagucacggcggcgg

SEQ ID NO: 679417 - RNA, 19 nt, Human
uuccucagcccucagcucc

SEQ ID NO: 679418 - RNA, 22 nt, Human
uuccucagcccucagcuccuug

SEQ ID NO: 679419 - RNA, 19 nt, Human
uucuccauguccccuuggg

SEQ ID NO: 679420 - RNA, 19 nt, Human
uuggcuccuuagaaaucag

SEQ ID NO: 679421 - RNA, 19 nt, Human
uuggcuccuuagaaaucag

SEQ ID NO: 679422 - RNA, 20 nt, Human
uuggcuccuuagaaaucaga

SEQ ID NO: 679423 - RNA, 24 nt, Human
uuucccacuggcagccccuggcuc

SEQ ID NO: 679424 - RNA, 18 nt, Human
uuuuuuuuuuuuucucug

SEQ ID NO: 679425 - RNA, 22 nt, Human
uuuuuuuuuuuuuuuucagugg

SEQ ID NO: 679426 - RNA, 23 nt, Human
uuuuuuuuuuuuuuuuuuuucag

SEQ ID NO: 679427 - RNA, 18 nt, Human
agaaugccaccggguuga

SEQ ID NO: 679428 - RNA, 21 nt, Human
agagcugugggccccacuccu

SEQ ID NO: 679429 - RNA, 19 nt, Human
ccacuccucccccagaauc

SEQ ID NO: 679430 - RNA, 18 nt, Human
ccccacuccucccccaga

SEQ ID NO: 679431 - RNA, 18 nt, Human
ccucagcaggggugagcu

SEQ ID NO: 679432 - RNA, 19 nt, Human
ccucccccagaaugccacc

SEQ ID NO: 679433 - RNA, 18 nt, Human
ggggcugagccucagcag

SEQ ID NO: 679434 - RNA, 24 nt, Human
uccgggugcuggagagcugugggc

SEQ ID NO: 679435 - RNA, 24 nt, Human
uuuuuuuuuuuuguuccgacuggg

SEQ ID NO: 679436 - RNA, 19 nt, Human
uuuuuuuuuuuuuuguucc

SEQ ID NO: 679437 - RNA, 21 nt, Human
uuuuuuuuuuuuuuguuccga

SEQ ID NO: 679438 - RNA, 18 nt, Human
uuuuuuuuuuuuuuuuug

SEQ ID NO: 679439 - RNA, 20 nt, Human
uuuuuuuuuuuuuuuuuguu

SEQ ID NO: 679440 - RNA, 22 nt, Human
aaacaucucacccaacacaucc

SEQ ID NO: 679441 - RNA, 19 nt, Human
aacacuccacacacaccag

SEQ ID NO: 679442 - RNA, 23 nt, Human
aacaucucacccaacacauccua

SEQ ID NO: 679443 - RNA, 25 nt, Human
aagcaaaaacaauaacagauucaga

SEQ ID NO: 679444 - RNA, 24 nt, Human
aagcacggcaaugaaccuccaacc

SEQ ID NO: 679445 - RNA, 21 nt, Human
aaguuuuuaggggcuguuuau

SEQ ID NO: 679446 - RNA, 24 nt, Human
aauacuaaccccgccucccccaug

SEQ ID NO: 679447 - RNA, 24 nt, Human
acagaaucuguagaaaaccaaacc

SEQ ID NO: 679448 - RNA, 20 nt, Human
acagucucuuuuuaaaaaac

SEQ ID NO: 679449 - RNA, 21 nt, Human
accagauucagcucgccacca

SEQ ID NO: 679450 - RNA, 21 nt, Human
accccgccucccccaugaaaa

SEQ ID NO: 679451 - RNA, 22 nt, Human
acccugucgccccugguaggcc

SEQ ID NO: 679452 - RNA, 19 nt, Human
accucacgacccugggacu

SEQ ID NO: 679453 - RNA, 18 nt, Human
acgaagugaccagcggcc

SEQ ID NO: 679454 - RNA, 18 nt, Human
acuaaccccgccuccccc

SEQ ID NO: 679455 - RNA, 21 nt, Human
acuccacacacaccagaacag

SEQ ID NO: 679456 - RNA, 23 nt, Human
agaaaccucacgacccugggacu

SEQ ID NO: 679457 - RNA, 18 nt, Human
agaaaggacagggccuug

SEQ ID NO: 679458 - RNA, 18 nt, Human
agaggcgcucucaacauc

SEQ ID NO: 679459 - RNA, 21 nt, Human
agcauagaggcugcugccuca

SEQ ID NO: 679460 - RNA, 21 nt, Human
agcccguagcaccgcagccuc

SEQ ID NO: 679461 - RNA, 24 nt, Human
agccugggaggggagccggaagcu

SEQ ID NO: 679462 - RNA, 21 nt, Human
aggaaaggcaccggaacagaa

SEQ ID NO: 679463 - RNA, 20 nt, Human
aggaagaaaaaguuuuagaa

SEQ ID NO: 679464 - RNA, 24 nt, Human
aggcacaaagaaagacgucuccag

SEQ ID NO: 679465 - RNA, 18 nt, Human
aggcagggaggaugggga

SEQ ID NO: 679466 - RNA, 23 nt, Human
auaaauacuaaccccgccucccc

SEQ ID NO: 679467 - RNA, 19 nt, Human
aucaaggcacaaagaaaga

SEQ ID NO: 679468 - RNA, 22 nt, Human
aucugcaucuguuccuccccaa

SEQ ID NO: 679469 - RNA, 24 nt, Human
augaaaaaagcaauuguuacaaaa

SEQ ID NO: 679470 - RNA, 23 nt, Human
caaaaacaauaacagauucagag

SEQ ID NO: 679471 - RNA, 21 nt, Human
caaaacacucugcaugaaagc

SEQ ID NO: 679472 - RNA, 24 nt, Human
caacacuccacacacaccagaaca

SEQ ID NO: 679473 - RNA, 23 nt, Human
caacaucaaggcacaaagaaaga

SEQ ID NO: 679474 - RNA, 20 nt, Human
cacagcccagcacgugcuuc

SEQ ID NO: 679475 - RNA, 23 nt, Human
cacaugcuacacacacagaucug

SEQ ID NO: 679476 - RNA, 21 nt, Human
caccagaacaggaauagccag

SEQ ID NO: 679477 - RNA, 18 nt, Human
cacgacugacuccuccac

SEQ ID NO: 679478 - RNA, 23 nt, Human
cacgacugacuccuccacggcag

SEQ ID NO: 679479 - RNA, 22 nt, Human
cacuccacacacaccagaacag

SEQ ID NO: 679480 - RNA, 22 nt, Human
cacucugcaugaaagcacggca

SEQ ID NO: 679481 - RNA, 21 nt, Human
cacugucugaggcacagccca

SEQ ID NO: 679482 - RNA, 21 nt, Human
cacuuuuaccaccuaaaagcu

SEQ ID NO: 679483 - RNA, 26 nt, Human
cagaaacuucacagauguaacuucca

SEQ ID NO: 679484 - RNA, 22 nt, Human
cagauucagcucgccaccauuc

SEQ ID NO: 679485 - RNA, 22 nt, Human
cagccacagguugaucugcauc

SEQ ID NO: 679486 - RNA, 19 nt, Human
cagcccucaccacgguuaa

SEQ ID NO: 679487 - RNA, 24 nt, Human
cauucccaaagcccgccgggcgca

SEQ ID NO: 679488 - RNA, 18 nt, Human
ccaggcacuuuuaccacc

SEQ ID NO: 679489 - RNA, 19 nt, Human
ccaggcacuuuuaccaccu

SEQ ID NO: 679490 - RNA, 23 nt, Human
ccaggggccuuccaggcccuucu

SEQ ID NO: 679491 - RNA, 21 nt, Human
cccaaaugaacuuuccagaag

SEQ ID NO: 679492 - RNA, 20 nt, Human
cccacgccucacaguggggc

SEQ ID NO: 679493 - RNA, 21 nt, Human
ccccaacacuccacacacacc

SEQ ID NO: 679494 - RNA, 21 nt, Human
ccccagcaucuaccccaagcu

SEQ ID NO: 679495 - RNA, 24 nt, Human
cccccaugaaaaaagcaauuguua

SEQ ID NO: 679496 - RNA, 25 nt, Human
cccgacguuaaccuccuagacuagc

SEQ ID NO: 679497 - RNA, 21 nt, Human
cccgccucccccaugaaaaaa

SEQ ID NO: 679498 - RNA, 26 nt, Human
ccgcaugcugggggauggcacccucc

SEQ ID NO: 679499 - RNA, 22 nt, Human
ccuagacgggaaaacagccaca

SEQ ID NO: 679500 - RNA, 20 nt, Human
ccuccuagacuagcugaccu

SEQ ID NO: 679501 - RNA, 21 nt, Human
ccuggagcagcuacccggccc

SEQ ID NO: 679502 - RNA, 21 nt, Human
ccuggauaggaaaggcaccgg

SEQ ID NO: 679503 - RNA, 23 nt, Human
cgacaccugcucauuucuccaga

SEQ ID NO: 679504 - RNA, 24 nt, Human
cgaccagauucagcucgccaccau

SEQ ID NO: 679505 - RNA, 18 nt, Human
cgaggcagagucacgggg

SEQ ID NO: 679506 - RNA, 20 nt, Human
cgaguucagccugacgggca

SEQ ID NO: 679507 - RNA, 19 nt, Human
cgcuugcggagagaaaccc

SEQ ID NO: 679508 - RNA, 19 nt, Human
cuaaccccgccucccccau

SEQ ID NO: 679509 - RNA, 18 nt, Human
cuccacacacaccagaac

SEQ ID NO: 679510 - RNA, 21 nt, Human
cuccacggcagccaagcugcc

SEQ ID NO: 679511 - RNA, 19 nt, Human
cugcgcucccggcgccugc

SEQ ID NO: 679512 - RNA, 19 nt, Human
cugggggauggcacccucc

SEQ ID NO: 679513 - RNA, 21 nt, Human
cuguuccuccccaacacucca

SEQ ID NO: 679514 - RNA, 20 nt, Human
cuguuuccucugcacggacc

SEQ ID NO: 679515 - RNA, 23 nt, Human
cuucacaccgcuaagggcuuuau

SEQ ID NO: 679516 - RNA, 19 nt, Human
gaacaggcaccggucaccc

SEQ ID NO: 679517 - RNA, 24 nt, Human
gagaacccuggucacaccugcuga

SEQ ID NO: 679518 - RNA, 18 nt, Human
gagcagcuacccggcccc

SEQ ID NO: 679519 - RNA, 21 nt, Human
gccuacgcauguucaagggaa

SEQ ID NO: 679520 - RNA, 18 nt, Human
gcggagagaaacccuguc

SEQ ID NO: 679521 - RNA, 18 nt, Human
gcugggaagcggaggccc

SEQ ID NO: 679522 - RNA, 23 nt, Human
ggagauaccugugagaaccuaga

SEQ ID NO: 679523 - RNA, 19 nt, Human
ggaggauauuuucagcccu

SEQ ID NO: 679524 - RNA, 19 nt, Human
ggcaagccucugggugccc

SEQ ID NO: 679525 - RNA, 19 nt, Human
gggcugugaugucgguggg

SEQ ID NO: 679526 - RNA, 26 nt, Human
uaaaccccaaaugaacuuuccagaag

SEQ ID NO: 679527 - RNA, 21 nt, Human
uaacaugaaggcaaaacacuc

SEQ ID NO: 679528 - RNA, 20 nt, Human
uaaccuuuucaccagaaacc

SEQ ID NO: 679529 - RNA, 22 nt, Human
uaacuuccaagugcgaccucaa

SEQ ID NO: 679530 - RNA, 20 nt, Human
uaagggcuuuauuucacaga

SEQ ID NO: 679531 - RNA, 20 nt, Human
uagcuucuacgauuuaaccu

SEQ ID NO: 679532 - RNA, 20 nt, Human
uagugcaacauccugcccag

SEQ ID NO: 679533 - RNA, 19 nt, Human
uauuucacagaucauggug

SEQ ID NO: 679534 - RNA, 20 nt, Human
ucaagaaaggacagggccuu

SEQ ID NO: 679535 - RNA, 18 nt, Human
ucacagauguaacuucca

SEQ ID NO: 679536 - RNA, 21 nt, Human
ucaccagaaaccucacgaccc

SEQ ID NO: 679537 - RNA, 27 nt, Human
ucagcauuccuacccgacguuaaccuc

SEQ ID NO: 679538 - RNA, 25 nt, Human
ucauucccaaagcccgccgggcgca

SEQ ID NO: 679539 - RNA, 20 nt, Human
ucauuuccccgcugucgcca

SEQ ID NO: 679540 - RNA, 23 nt, Human
uccagaagcaaaaacaauaacag

SEQ ID NO: 679541 - RNA, 21 nt, Human
uccauuuuuuaaggaagaaaa

SEQ ID NO: 679542 - RNA, 21 nt, Human
ucccaaagcccgccgggcgca

SEQ ID NO: 679543 - RNA, 22 nt, Human
ucucaggccuggcugcguugcu

SEQ ID NO: 679544 - RNA, 20 nt, Human
ucuccagcuucuccaauccc

SEQ ID NO: 679545 - RNA, 21 nt, Human
ucugaaacaucucacccaaca

SEQ ID NO: 679546 - RNA, 20 nt, Human
ucugcagccugggaggggag

SEQ ID NO: 679547 - RNA, 24 nt, Human
ugaaaaaagcaauuguuacaaaaa

SEQ ID NO: 679548 - RNA, 18 nt, Human
ugaaacaucucacccaac

SEQ ID NO: 679549 - RNA, 22 nt, Human
ugaaagcacggcaaugaaccuc

SEQ ID NO: 679550 - RNA, 22 nt, Human
ugacagaaacuucacagaugua

SEQ ID NO: 679551 - RNA, 23 nt, Human
ugagggaggcgagggcuaagccc

SEQ ID NO: 679552 - RNA, 22 nt, Human
ugaucugcaucuguuccucccc

SEQ ID NO: 679553 - RNA, 22 nt, Human
ugcagccugggaggggagccgg

SEQ ID NO: 679554 - RNA, 18 nt, Human
ugccacaggucagagucu

SEQ ID NO: 679555 - RNA, 24 nt, Human
ugcccaguccacgugcuacugcgc

SEQ ID NO: 679556 - RNA, 19 nt, Human
ugcugggggauggcacccu

SEQ ID NO: 679557 - RNA, 21 nt, Human
ugcugggggauggcacccucc

SEQ ID NO: 679558 - RNA, 21 nt, Human
uggcagagaagccgcaugcug

SEQ ID NO: 679559 - RNA, 23 nt, Human
uggcagagaagccgcaugcuggg

SEQ ID NO: 679560 - RNA, 18 nt, Human
uggccgcagcccccagca

SEQ ID NO: 679561 - RNA, 21 nt, Human
ugggaggaagagccaaggaca

SEQ ID NO: 679562 - RNA, 22 nt, Human
ugggaggaagagccaaggacag

SEQ ID NO: 679563 - RNA, 21 nt, Human
ugggaguuucuguuuccucug

SEQ ID NO: 679564 - RNA, 22 nt, Human
uggggaaggcagggaggauggg

SEQ ID NO: 679565 - RNA, 22 nt, Human
uggggaggauauuuucagcccu

SEQ ID NO: 679566 - RNA, 22 nt, Human
ugguaggcccucgccgcacucg

SEQ ID NO: 679567 - RNA, 21 nt, Human
uggucggcccgcccagggcug

SEQ ID NO: 679568 - RNA, 22 nt, Human
uguggucggcccgcccagggcu

SEQ ID NO: 679569 - RNA, 19 nt, Human
uguuaaguaccucugucag

SEQ ID NO: 679570 - RNA, 18 nt, Human
uguuuccucugcacggac

SEQ ID NO: 679571 - RNA, 24 nt, Human
uguuugcucaaaagagaggcgcuc

SEQ ID NO: 679572 - RNA, 18 nt, Human
uucccgacaccugcucau

SEQ ID NO: 679573 - RNA, 18 nt, Human
uucucagguggugccugg

SEQ ID NO: 679574 - RNA, 23 nt, Human
uuuuaaaaaacuguguaaacguu

SEQ ID NO: 679575 - RNA, 19 nt, Human
agagggaugaggacaggag

SEQ ID NO: 679576 - RNA, 23 nt, Human
caggagugcuucaagaaacugaa

SEQ ID NO: 679577 - RNA, 21 nt, Human
ccaucaggccccaccaggaac

SEQ ID NO: 679578 - RNA, 24 nt, Human
cugaagacuuucuguucuuuuuca

SEQ ID NO: 679579 - RNA, 23 nt, Human
uauagauuugaaugugcccaaaa

SEQ ID NO: 679580 - RNA, 18 nt, Human
ucagagggaugaggacag

SEQ ID NO: 679581 - RNA, 19 nt, Human
ucugucuugacugagcuga

SEQ ID NO: 679582 - RNA, 20 nt, Human
ugcccaaaaucucagaggga

SEQ ID NO: 679583 - RNA, 26 nt, Human
ugcuucaaguacgccaggaugucugu

SEQ ID NO: 679584 - RNA, 22 nt, Human
aaacagagcugaggcuccaccc

SEQ ID NO: 679585 - RNA, 18 nt, Human
aaaguugugaucaggugg

SEQ ID NO: 679586 - RNA, 23 nt, Human
aacccccccuccuuuucccucug

SEQ ID NO: 679587 - RNA, 18 nt, Human
aagcuccccaggcaccuc

SEQ ID NO: 679588 - RNA, 23 nt, Human
aaucccuucucacagaaagcaga

SEQ ID NO: 679589 - RNA, 23 nt, Human
aauugcuugaaccgggaggcaga

SEQ ID NO: 679590 - RNA, 19 nt, Human
acacccauucauucagggc

SEQ ID NO: 679591 - RNA, 21 nt, Human
acccaggagcuccauggccac

SEQ ID NO: 679592 - RNA, 20 nt, Human
acccgccccacccagccacc

SEQ ID NO: 679593 - RNA, 23 nt, Human
acccgugcacccgccccacccag

SEQ ID NO: 679594 - RNA, 18 nt, Human
accgcaggcuagcccagg

SEQ ID NO: 679595 - RNA, 20 nt, Human
accuauggguuuggcacaaa

SEQ ID NO: 679596 - RNA, 19 nt, Human
accucacucuuaucaucca

SEQ ID NO: 679597 - RNA, 27 nt, Human
acucauccuuccuccgaggaguccccu

SEQ ID NO: 679598 - RNA, 20 nt, Human
acucuuaucauccaaaagcc

SEQ ID NO: 679599 - RNA, 24 nt, Human
acugcauuccagccugggugacag

SEQ ID NO: 679600 - RNA, 26 nt, Human
acugcauuccagccugggugacagag

SEQ ID NO: 679601 - RNA, 25 nt, Human
agaaagaaacagagcugaggcucca

SEQ ID NO: 679602 - RNA, 24 nt, Human
agaacccuucauucaaaugaagcc

SEQ ID NO: 679603 - RNA, 19 nt, Human
agaaguaaggcucaccugc

SEQ ID NO: 679604 - RNA, 21 nt, Human
agaauugcuugaaccgggagg

SEQ ID NO: 679605 - RNA, 20 nt, Human
agagguuucagugagccaag

SEQ ID NO: 679606 - RNA, 19 nt, Human
agaguagaggaugcuagaa

SEQ ID NO: 679607 - RNA, 21 nt, Human
agcagcugcucacccaggagc

SEQ ID NO: 679608 - RNA, 24 nt, Human
agccugggugacagagcaagacuc

SEQ ID NO: 679609 - RNA, 19 nt, Human
agccuuggggucaggggcc

SEQ ID NO: 679610 - RNA, 18 nt, Human
agcuggaggcuccugaga

SEQ ID NO: 679611 - RNA, 21 nt, Human
aggaagcacaucugggcagag

SEQ ID NO: 679612 - RNA, 24 nt, Human
aggcagagguuucagugagccaag

SEQ ID NO: 679613 - RNA, 22 nt, Human
aggcaggagaauugcuugaacc

SEQ ID NO: 679614 - RNA, 23 nt, Human
aggcaggagaauugcuugaaccg

SEQ ID NO: 679615 - RNA, 18 nt, Human
aggccuggaaucuacacu

SEQ ID NO: 679616 - RNA, 21 nt, Human
aggcugaggcaggagaauugc

SEQ ID NO: 679617 - RNA, 24 nt, Human
aggcugaggcaggagaauugcuug

SEQ ID NO: 679618 - RNA, 18 nt, Human
agggcauacugacuguga

SEQ ID NO: 679619 - RNA, 21 nt, Human
aggugugugcgugugggagcc

SEQ ID NO: 679620 - RNA, 24 nt, Human
aucaugccacugcauuccagccug

SEQ ID NO: 679621 - RNA, 20 nt, Human
auccaaaagccuugccccuu

SEQ ID NO: 679622 - RNA, 22 nt, Human
augccacugcauuccagccugg

SEQ ID NO: 679623 - RNA, 24 nt, Human
caagaucaugccacugcauuccag

SEQ ID NO: 679624 - RNA, 22 nt, Human
caagugcacauguguuuccugc

SEQ ID NO: 679625 - RNA, 19 nt, Human
cacagucucuaaggguaag

SEQ ID NO: 679626 - RNA, 21 nt, Human
cacagucucuaaggguaagga

SEQ ID NO: 679627 - RNA, 23 nt, Human
cacccgccccacccagccaccca

SEQ ID NO: 679628 - RNA, 19 nt, Human
cacugcauuccagccuggg

SEQ ID NO: 679629 - RNA, 22 nt, Human
cacugcauuccagccuggguga

SEQ ID NO: 679630 - RNA, 23 nt, Human
cacugcauuccagccugggugac

SEQ ID NO: 679631 - RNA, 24 nt, Human
cacugcauuccagccugggugaca

SEQ ID NO: 679632 - RNA, 25 nt, Human
cacugcauuccagccugggugacag

SEQ ID NO: 679633 - RNA, 20 nt, Human
cacugccugcugugugacug

SEQ ID NO: 679634 - RNA, 19 nt, Human
cacuuuagcucugaaaaau

SEQ ID NO: 679635 - RNA, 27 nt, Human
cagaacccuucauucaaaugaagccuu

SEQ ID NO: 679636 - RNA, 23 nt, Human
cagaauggugcuuugggaacccc

SEQ ID NO: 679637 - RNA, 21 nt, Human
cagagcaagacuccaucugug

SEQ ID NO: 679638 - RNA, 18 nt, Human
cagagugaaggcucccag

SEQ ID NO: 679639 - RNA, 24 nt, Human
cagagugaaggcucccagggcuca

SEQ ID NO: 679640 - RNA, 24 nt, Human
cagcuacucaggaggcugaggcag

SEQ ID NO: 679641 - RNA, 23 nt, Human
cagcuggcacuggcugagaggug

SEQ ID NO: 679642 - RNA, 20 nt, Human
cagguccagaaagagcugga

SEQ ID NO: 679643 - RNA, 24 nt, Human
caucucggcugaccucgcuggaaa

SEQ ID NO: 679644 - RNA, 22 nt, Human
cauuccagccugggugacagag

SEQ ID NO: 679645 - RNA, 19 nt, Human
ccacagggaugcccaggac

SEQ ID NO: 679646 - RNA, 20 nt, Human
ccacugcauuccagccuggg

SEQ ID NO: 679647 - RNA, 20 nt, Human
ccacugcauuccagccuggg

SEQ ID NO: 679648 - RNA, 20 nt, Human
ccacugcauuccagccuggg

SEQ ID NO: 679649 - RNA, 21 nt, Human
ccacugcauuccagccugggu

SEQ ID NO: 679650 - RNA, 21 nt, Human
ccacugcauuccagccugggu

SEQ ID NO: 679651 - RNA, 24 nt, Human
ccacugcauuccagccugggugac

SEQ ID NO: 679652 - RNA, 23 nt, Human
ccagaaagagcuggaggcuccug

SEQ ID NO: 679653 - RNA, 22 nt, Human
ccaggaagagaaguaaggcuca

SEQ ID NO: 679654 - RNA, 21 nt, Human
ccaggcaccucugaauaccca

SEQ ID NO: 679655 - RNA, 22 nt, Human
ccaggcaccucugaauacccaa

SEQ ID NO: 679656 - RNA, 20 nt, Human
cccagagaaagaaacagagc

SEQ ID NO: 679657 - RNA, 21 nt, Human
cccagagaaagaaacagagcu

SEQ ID NO: 679658 - RNA, 20 nt, Human
cccaggaagagaaguaaggc

SEQ ID NO: 679659 - RNA, 21 nt, Human
cccaggaagagaaguaaggcu

SEQ ID NO: 679660 - RNA, 21 nt, Human
cccagguauacaauccauaga

SEQ ID NO: 679661 - RNA, 18 nt, Human
ccccacccagccacccag

SEQ ID NO: 679662 - RNA, 20 nt, Human
ccccacccagccacccagca

SEQ ID NO: 679663 - RNA, 21 nt, Human
ccccagagagcugagagcggg

SEQ ID NO: 679664 - RNA, 21 nt, Human
cccccuccuuuucccucugcc

SEQ ID NO: 679665 - RNA, 21 nt, Human
cccgccccacccagccaccca

SEQ ID NO: 679666 - RNA, 26 nt, Human
cccgccccacccagccacccagcacg

SEQ ID NO: 679667 - RNA, 22 nt, Human
cccgugcacccgccccacccag

SEQ ID NO: 679668 - RNA, 23 nt, Human
cccuccuuuucccucugccaccc

SEQ ID NO: 679669 - RNA, 22 nt, Human
cccucggccucacccacugcuc

SEQ ID NO: 679670 - RNA, 18 nt, Human
ccucacccacugcucaga

SEQ ID NO: 679671 - RNA, 20 nt, Human
ccucacucuuaucauccaaa

SEQ ID NO: 679672 - RNA, 23 nt, Human
ccugaccgcaggcuagcccagga

SEQ ID NO: 679673 - RNA, 24 nt, Human
ccugaccgcaggcuagcccaggaa

SEQ ID NO: 679674 - RNA, 19 nt, Human
ccugccacugccugcugug

SEQ ID NO: 679675 - RNA, 22 nt, Human
ccugcgcauggcagccaccggg

SEQ ID NO: 679676 - RNA, 19 nt, Human
ccuggaaucuacacuuuua

SEQ ID NO: 679677 - RNA, 22 nt, Human
ccugggugacagagcaagacuc

SEQ ID NO: 679678 - RNA, 19 nt, Human
cgagccacgcgccaagggc

SEQ ID NO: 679679 - RNA, 21 nt, Human
cgcacaccgcaggugugugcg

SEQ ID NO: 679680 - RNA, 18 nt, Human
cuacugccugccacugcc

SEQ ID NO: 679681 - RNA, 18 nt, Human
cuccccagagagcugaga

SEQ ID NO: 679682 - RNA, 21 nt, Human
cuccccaggcaccucugaaua

SEQ ID NO: 679683 - RNA, 21 nt, Human
cucugggcagucccucggccu

SEQ ID NO: 679684 - RNA, 21 nt, Human
cugagucaccggagggccucu

SEQ ID NO: 679685 - RNA, 21 nt, Human
cugcaguuaggauucgagagc

SEQ ID NO: 679686 - RNA, 19 nt, Human
cuggaaaggcagcucucug

SEQ ID NO: 679687 - RNA, 19 nt, Human
cugggcagagugaaggcuc

SEQ ID NO: 679688 - RNA, 23 nt, Human
cugggcccugccccggauacuga

SEQ ID NO: 679689 - RNA, 18 nt, Human
cuucacaggggaccuccc

SEQ ID NO: 679690 - RNA, 21 nt, Human
cuuccacaggaagcacaucug

SEQ ID NO: 679691 - RNA, 18 nt, Human
gaacccucagacucaucc

SEQ ID NO: 679692 - RNA, 19 nt, Human
gaagaugccugggcccugc

SEQ ID NO: 679693 - RNA, 23 nt, Human
gaagcacuuucuguucccaauug

SEQ ID NO: 679694 - RNA, 20 nt, Human
gaccuuggguggucucaggc

SEQ ID NO: 679695 - RNA, 20 nt, Human
gagcagcugcucacccagga

SEQ ID NO: 679696 - RNA, 19 nt, Human
gaggagcccagguauacaa

SEQ ID NO: 679697 - RNA, 26 nt, Human
gaggaugcuagaauagggcaauggga

SEQ ID NO: 679698 - RNA, 18 nt, Human
gagguccuuaucucucac

SEQ ID NO: 679699 - RNA, 21 nt, Human
gcaaaacaaaauagcugccuu

SEQ ID NO: 679700 - RNA, 25 nt, Human
gcagaauggugcuuugggaaccccc

SEQ ID NO: 679701 - RNA, 21 nt, Human
gcaguggggacacuacccaga

SEQ ID NO: 679702 - RNA, 24 nt, Human
gcauuccagccugggugacagagc

SEQ ID NO: 679703 - RNA, 20 nt, Human
gccaagaucaugccacugca

SEQ ID NO: 679704 - RNA, 19 nt, Human
gccacugcauuccagccug

SEQ ID NO: 679705 - RNA, 24 nt, Human
gccacugcauuccagccuggguga

SEQ ID NO: 679706 - RNA, 19 nt, Human
gccggggcccaccaggcug

SEQ ID NO: 679707 - RNA, 22 nt, Human
gcucccgcacagagggcuccau

SEQ ID NO: 679708 - RNA, 20 nt, Human
gcugcaguuaggauucgaga

SEQ ID NO: 679709 - RNA, 21 nt, Human
ggaaacgccugagucaccgga

SEQ ID NO: 679710 - RNA, 22 nt, Human
ggaaagacaggcccuucacagg

SEQ ID NO: 679711 - RNA, 21 nt, Human
ggaacccccccuccuuuuccc

SEQ ID NO: 679712 - RNA, 20 nt, Human
ggacagaaguuguugagggg

SEQ ID NO: 679713 - RNA, 21 nt, Human
ggacgugaaaaacucucagug

SEQ ID NO: 679714 - RNA, 22 nt, Human
ggacguggauguggcuugucac

SEQ ID NO: 679715 - RNA, 26 nt, Human
ggcaguggggacacuacccagagaaa

SEQ ID NO: 679716 - RNA, 26 nt, Human
ggcucagguccagaaagagcuggagg

SEQ ID NO: 679717 - RNA, 18 nt, Human
gggacacuacccagagaa

SEQ ID NO: 679718 - RNA, 21 nt, Human
gggacagaaguuguugagggg

SEQ ID NO: 679719 - RNA, 21 nt, Human
gggcagagugaaggcucccag

SEQ ID NO: 679720 - RNA, 18 nt, Human
ggggaccuccccagagag

SEQ ID NO: 679721 - RNA, 23 nt, Human
gguccagaaagagcuggaggcuc

SEQ ID NO: 679722 - RNA, 18 nt, Human
uaacaagcuccccaggca

SEQ ID NO: 679723 - RNA, 21 nt, Human
uagaaaguugugaucaggugg

SEQ ID NO: 679724 - RNA, 23 nt, Human
uagaaaguugugaucaggugguu

SEQ ID NO: 679725 - RNA, 19 nt, Human
uagacacguccucauccuc

SEQ ID NO: 679726 - RNA, 22 nt, Human
uaucauccaaaagccuugcccc

SEQ ID NO: 679727 - RNA, 22 nt, Human
ucagagcagcugcucacccagg

SEQ ID NO: 679728 - RNA, 23 nt, Human
ucagguccagaaagagcuggagg

SEQ ID NO: 679729 - RNA, 24 nt, Human
ucaguuccaaauaggacgugaaaa

SEQ ID NO: 679730 - RNA, 24 nt, Human
ucauccaaaagccuugccccugac

SEQ ID NO: 679731 - RNA, 27 nt, Human
ucauccaaaagccuugccccugaccgc

SEQ ID NO: 679732 - RNA, 23 nt, Human
ucaugccacugcauuccagccug

SEQ ID NO: 679733 - RNA, 22 nt, Human
uccaaaagccuugccccugacc

SEQ ID NO: 679734 - RNA, 22 nt, Human
uccagaaagagcuggaggcucc

SEQ ID NO: 679735 - RNA, 19 nt, Human
uccagccugggugacagag

SEQ ID NO: 679736 - RNA, 24 nt, Human
uccagccugggugacagagcaaga

SEQ ID NO: 679737 - RNA, 26 nt, Human
uccauggccacagggaugcccaggac

SEQ ID NO: 679738 - RNA, 18 nt, Human
uccccaggcaccucugaa

SEQ ID NO: 679739 - RNA, 28 nt, Human
uccccaggcaccucugaauacccaaccu

SEQ ID NO: 679740 - RNA, 31 nt, Human
uccccaggcaccucugaauacccaaccugcu

SEQ ID NO: 679741 - RNA, 18 nt, Human
uccccuccggggacuaca

SEQ ID NO: 679742 - RNA, 23 nt, Human
ucccucggccucacccacugcuc

SEQ ID NO: 679743 - RNA, 18 nt, Human
ucccucugccacccccaa

SEQ ID NO: 679744 - RNA, 19 nt, Human
ucucaguuucagaccuaug

SEQ ID NO: 679745 - RNA, 25 nt, Human
ucucauugcaaaacaaaauagcugc

SEQ ID NO: 679746 - RNA, 21 nt, Human
ucuguaaucccagcuacucag

SEQ ID NO: 679747 - RNA, 22 nt, Human
ucuguggccaggucaagagggc

SEQ ID NO: 679748 - RNA, 26 nt, Human
ucuugcuguguggcuuugagaaaacc

SEQ ID NO: 679749 - RNA, 26 nt, Human
ucuuugauuccgacagcccaaucacu

SEQ ID NO: 679750 - RNA, 24 nt, Human
ugaggcaggagaauugcuugaacc

SEQ ID NO: 679751 - RNA, 23 nt, Human
ugagguccuuaucucucacuagg

SEQ ID NO: 679752 - RNA, 21 nt, Human
ugcaaaacaaaauagcugccu

SEQ ID NO: 679753 - RNA, 23 nt, Human
ugcaaaacaaaauagcugccuua

SEQ ID NO: 679754 - RNA, 18 nt, Human
ugcacccgccccacccag

SEQ ID NO: 679755 - RNA, 23 nt, Human
ugccaaaucuugcuguguggcuu

SEQ ID NO: 679756 - RNA, 18 nt, Human
ugcccaggacagggacga

SEQ ID NO: 679757 - RNA, 19 nt, Human
ugcccaggacagggacgac

SEQ ID NO: 679758 - RNA, 23 nt, Human
ugccccugaccgcaggcuagccc

SEQ ID NO: 679759 - RNA, 18 nt, Human
ugcugugugacugugagc

SEQ ID NO: 679760 - RNA, 19 nt, Human
ugcuguguggcuuugagaa

SEQ ID NO: 679761 - RNA, 21 nt, Human
uggcacaaaagcgcuuauguu

SEQ ID NO: 679762 - RNA, 24 nt, Human
uggccaggucaagagggcugggga

SEQ ID NO: 679763 - RNA, 22 nt, Human
ugggaagggcuuguuuugaggg

SEQ ID NO: 679764 - RNA, 19 nt, Human
ugggagagacccacccagc

SEQ ID NO: 679765 - RNA, 22 nt, Human
ugggagagacccacccagcugg

SEQ ID NO: 679766 - RNA, 22 nt, Human
ugggagagacccacccagcugg

SEQ ID NO: 679767 - RNA, 22 nt, Human
uggggacacuacccagagaaag

SEQ ID NO: 679768 - RNA, 21 nt, Human
uggggcucugggcagucccuc

SEQ ID NO: 679769 - RNA, 21 nt, Human
ugggggucuccuuccacagga

SEQ ID NO: 679770 - RNA, 24 nt, Human
ugugggagccucuuccugaagccu

SEQ ID NO: 679771 - RNA, 22 nt, Human
uguuccuaaaaccugccugcgc

SEQ ID NO: 679772 - RNA, 18 nt, Human
uuucuguaaucccagcua

SEQ ID NO: 679773 - RNA, 24 nt, Human
uuucuguaaucccagcuacucagg

SEQ ID NO: 679774 - RNA, 23 nt, Human
uuuuuuuuuuagcagcagaaccc

SEQ ID NO: 679775 - RNA, 20 nt, Human
acucugacagagcugggggu

SEQ ID NO: 679776 - RNA, 20 nt, Human
cacugagccccgugugacuc

SEQ ID NO: 679777 - RNA, 23 nt, Human
ccaguuugugcagagcggccgga

SEQ ID NO: 679778 - RNA, 20 nt, Human
ccgugugacucugacagagc

SEQ ID NO: 679779 - RNA, 23 nt, Human
cggccggaggcaguuaggagccc

SEQ ID NO: 679780 - RNA, 19 nt, Human
cugcucggggcuccagcag

SEQ ID NO: 679781 - RNA, 23 nt, Human
cuggggguguccauguccucucu

SEQ ID NO: 679782 - RNA, 23 nt, Human
gaccugggccaucccaguuugug

SEQ ID NO: 679783 - RNA, 24 nt, Human
gcucggggcuccagcagcugggcu

SEQ ID NO: 679784 - RNA, 19 nt, Human
ggccguccacugagccccg

SEQ ID NO: 679785 - RNA, 20 nt, Human
gggcuccagcagcugggcuc

SEQ ID NO: 679786 - RNA, 24 nt, Human
guccauguccucucuggaccucag

SEQ ID NO: 679787 - RNA, 20 nt, Human
ucucuggaccucaguuccug

SEQ ID NO: 679788 - RNA, 21 nt, Human
ucucuggaccucaguuccugu

SEQ ID NO: 679789 - RNA, 19 nt, Human
ugcucggggcuccagcagc

SEQ ID NO: 679790 - RNA, 22 nt, Human
ugugcagagcggccggaggcag

SEQ ID NO: 679791 - RNA, 25 nt, Human
aaaaaauaaaauaaaauaaaaaaga

SEQ ID NO: 679792 - RNA, 24 nt, Human
aaaaauaaaauaaaauaaaaaaga

SEQ ID NO: 679793 - RNA, 18 nt, Human
aagaaggagaaaucccug

SEQ ID NO: 679794 - RNA, 24 nt, Human
acauggaccacacacccacccagc

SEQ ID NO: 679795 - RNA, 18 nt, Human
acccagcauccccaaucc

SEQ ID NO: 679796 - RNA, 18 nt, Human
aggugggugcagccugca

SEQ ID NO: 679797 - RNA, 26 nt, Human
cacacacacacacacacguguugcua

SEQ ID NO: 679798 - RNA, 21 nt, Human
cacacccacccagcaucccca

SEQ ID NO: 679799 - RNA, 23 nt, Human
cacccagcauccccaaucccaaa

SEQ ID NO: 679800 - RNA, 24 nt, Human
ccacacacccacccagcaucccca

SEQ ID NO: 679801 - RNA, 22 nt, Human
ccaggaccaagaagaaggagaa

SEQ ID NO: 679802 - RNA, 20 nt, Human
cccaaucccaaaugcagagu

SEQ ID NO: 679803 - RNA, 21 nt, Human
ccccuucccucaggaucccca

SEQ ID NO: 679804 - RNA, 20 nt, Human
ccucguacucagccugcugc

SEQ ID NO: 679805 - RNA, 19 nt, Human
gaacauggaccacacaccc

SEQ ID NO: 679806 - RNA, 23 nt, Human
gaccaagaagaaggagaaauccc

SEQ ID NO: 679807 - RNA, 21 nt, Human
gaguagccaggcuccagacau

SEQ ID NO: 679808 - RNA, 18 nt, Human
gccugcugcugcugcaac

SEQ ID NO: 679809 - RNA, 18 nt, Human
gcucaugcagagaugaag

SEQ ID NO: 679810 - RNA, 21 nt, Human
gcugcaacucagcugccagcc

SEQ ID NO: 679811 - RNA, 23 nt, Human
gcugcaacucagcugccagccca

SEQ ID NO: 679812 - RNA, 23 nt, Human
ggagccaggaccaagaagaagga

SEQ ID NO: 679813 - RNA, 20 nt, Human
gggaaggagagcucaugcag

SEQ ID NO: 679814 - RNA, 19 nt, Human
gugggcccgucuggccaga

SEQ ID NO: 679815 - RNA, 18 nt, Human
uacacacacacacacaca

SEQ ID NO: 679816 - RNA, 24 nt, Human
uacacacacacacacacacguggg

SEQ ID NO: 679817 - RNA, 24 nt, Human
uacacacacacacacacacguguu

SEQ ID NO: 679818 - RNA, 23 nt, Human
uagccaggcuccagacauaaauu

SEQ ID NO: 679819 - RNA, 18 nt, Human
uaggaaggggaggaggug

SEQ ID NO: 679820 - RNA, 21 nt, Human
uaggaaggggaggaggugggu

SEQ ID NO: 679821 - RNA, 20 nt, Human
uccaccacagcccaagggaa

SEQ ID NO: 679822 - RNA, 22 nt, Human
uccaccacagcccaagggaaua

SEQ ID NO: 679823 - RNA, 18 nt, Human
ucccugguggccucugcc

SEQ ID NO: 679824 - RNA, 22 nt, Human
uccuaggggguaggaaggggag

SEQ ID NO: 679825 - RNA, 19 nt, Human
ucucugggaaggagagcuc

SEQ ID NO: 679826 - RNA, 24 nt, Human
ucucugggaaggagagcucaugca

SEQ ID NO: 679827 - RNA, 18 nt, Human
ucugcccuaagacaggau

SEQ ID NO: 679828 - RNA, 19 nt, Human
ugaacauggaccacacacc

SEQ ID NO: 679829 - RNA, 23 nt, Human
ugauuuuggcuccagcccucauu

SEQ ID NO: 679830 - RNA, 21 nt, Human
uugggagccaggaccaagaag

SEQ ID NO: 679831 - RNA, 21 nt, Human
uuuuuuuugugggugggcccg

SEQ ID NO: 679832 - RNA, 20 nt, Human
uuuuuuuuuuuuuuuguggg

SEQ ID NO: 679833 - RNA, 19 nt, Human
uuuuuuuuuuuuuuuuugu

SEQ ID NO: 679834 - RNA, 22 nt, Human
uuuuuuuuuuuuuuuuuguggg

SEQ ID NO: 679835 - RNA, 27 nt, Human
uuuuuuuuuuuuuuuuuuuuuuugggg

SEQ ID NO: 679836 - RNA, 22 nt, Human
agcuggucuaggccagcagugc

SEQ ID NO: 679837 - RNA, 23 nt, Human
agcuggucuaggccagcagugcc

SEQ ID NO: 679838 - RNA, 22 nt, Human
cagcagugccuccccaccuccc

SEQ ID NO: 679839 - RNA, 19 nt, Human
cagcuuucagcagcugguc

SEQ ID NO: 679840 - RNA, 23 nt, Human
cccuggaggucgccgggccucug

SEQ ID NO: 679841 - RNA, 19 nt, Human
ccucagcacagucuguggu

SEQ ID NO: 679842 - RNA, 27 nt, Human
cgucuuucucuucugaaaguugagcuc

SEQ ID NO: 679843 - RNA, 22 nt, Human
cucagccucaccagcuuucagc

SEQ ID NO: 679844 - RNA, 21 nt, Human
cuccccaccuccccaagggga

SEQ ID NO: 679845 - RNA, 21 nt, Human
cucccuuucuuccucccucca

SEQ ID NO: 679846 - RNA, 23 nt, Human
cucccuuucuuccucccuccaag

SEQ ID NO: 679847 - RNA, 21 nt, Human
cuggaagggagcucgguugac

SEQ ID NO: 679848 - RNA, 21 nt, Human
gaccuggaagggagcucgguu

SEQ ID NO: 679849 - RNA, 23 nt, Human
gcguagcagacugucauagccuu

SEQ ID NO: 679850 - RNA, 22 nt, Human
ggugguggcaagaccucagcac

SEQ ID NO: 679851 - RNA, 24 nt, Human
uagaggacuccccgaaagaggcuu

SEQ ID NO: 679852 - RNA, 20 nt, Human
uccaaguggcucuggggcug

SEQ ID NO: 679853 - RNA, 20 nt, Human
uccccaaggggagggguggu

SEQ ID NO: 679854 - RNA, 21 nt, Human
ugaccuggaagggagcucggu

SEQ ID NO: 679855 - RNA, 23 nt, Human
uggggcgucuuucucuucugaaa

SEQ ID NO: 679856 - RNA, 18 nt, Human
uggguugggguaggggcu

SEQ ID NO: 679857 - RNA, 19 nt, Human
uugcuggggcgucuuucuc

SEQ ID NO: 679858 - RNA, 21 nt, Human
aaagaugaaaagcauugcaga

SEQ ID NO: 679859 - RNA, 20 nt, Human
aagaugaaaagcauugcaga

SEQ ID NO: 679860 - RNA, 23 nt, Human
acagcaauugaguuauuagacgu

SEQ ID NO: 679861 - RNA, 18 nt, Human
accucagcccacuauaca

SEQ ID NO: 679862 - RNA, 20 nt, Human
accuguggucauuuguuggu

SEQ ID NO: 679863 - RNA, 18 nt, Human
agaugucaucuuccaaaa

SEQ ID NO: 679864 - RNA, 21 nt, Human
augguuuuauuugauauugaa

SEQ ID NO: 679865 - RNA, 20 nt, Human
auuauggccacacuggaauc

SEQ ID NO: 679866 - RNA, 20 nt, Human
caccucagcccacuauacac

SEQ ID NO: 679867 - RNA, 21 nt, Human
cagaaaggcuugccguuggua

SEQ ID NO: 679868 - RNA, 24 nt, Human
ccucuuauaccucagcaggaguug

SEQ ID NO: 679869 - RNA, 19 nt, Human
gaauucacaugugcuuuuc

SEQ ID NO: 679870 - RNA, 18 nt, Human
ggagaggaaccuuuggug

SEQ ID NO: 679871 - RNA, 18 nt, Human
uaguaaguucaccugccc

SEQ ID NO: 679872 - RNA, 23 nt, Human
uaguccacugaaaguccagugau

SEQ ID NO: 679873 - RNA, 20 nt, Human
uauacacgaauucacaugug

SEQ ID NO: 679874 - RNA, 22 nt, Human
ugaaaaggcaaggaaagaguug

SEQ ID NO: 679875 - RNA, 19 nt, Human
ugaggagaggaaccuuugg

SEQ ID NO: 679876 - RNA, 18 nt, Human
ugcagaaaggcuugccgu

SEQ ID NO: 679877 - RNA, 19 nt, Human
ugcugugcucucugugcag

SEQ ID NO: 679878 - RNA, 21 nt, Human
uggaaugcagugacaggagcc

SEQ ID NO: 679879 - RNA, 19 nt, Human
ugguagauaguacagcugc

SEQ ID NO: 679880 - RNA, 24 nt, Human
uggugcuguccucagcaugguugg

SEQ ID NO: 679881 - RNA, 23 nt, Human
ugugaguguuucuauuucaugga

SEQ ID NO: 679882 - RNA, 20 nt, Human
uguggggugaggagaggaac

SEQ ID NO: 679883 - RNA, 19 nt, Human
uguggucauuuguuggugg

SEQ ID NO: 679884 - RNA, 22 nt, Human
uucaccugcccgggcggccgcu

SEQ ID NO: 679885 - RNA, 21 nt, Human
uugcagaugucaucuuccaaa

SEQ ID NO: 679886 - RNA, 23 nt, Human
aaaaacaaaacaaaacaaaacaa

SEQ ID NO: 679887 - RNA, 18 nt, Human
aaaauuagcugggcaugg

SEQ ID NO: 679888 - RNA, 18 nt, Human
aaacaaaacaaaacaaaa

SEQ ID NO: 679889 - RNA, 22 nt, Human
aaacaaaacaaaacaaaacaaa

SEQ ID NO: 679890 - RNA, 22 nt, Human
aaacaaaacaaaacaaaacaaa

SEQ ID NO: 679891 - RNA, 22 nt, Human
aaacaaaacaaaacaaaacaaa

SEQ ID NO: 679892 - RNA, 22 nt, Human
aaaccccaucucuacuaaaaaa

SEQ ID NO: 679893 - RNA, 22 nt, Human
aaaccccgucucuacuaaaaaa

SEQ ID NO: 679894 - RNA, 19 nt, Human
aaauuugaugccuuugggc

SEQ ID NO: 679895 - RNA, 19 nt, Human
aacauggugaaaccccguc

SEQ ID NO: 679896 - RNA, 20 nt, Human
aacauggugaaaccccgucu

SEQ ID NO: 679897 - RNA, 21 nt, Human
aacauggugaaaccccgucuc

SEQ ID NO: 679898 - RNA, 19 nt, Human
aaccuggcgaaaccccauc

SEQ ID NO: 679899 - RNA, 20 nt, Human
aaccuggcgaaaccccaucu

SEQ ID NO: 679900 - RNA, 21 nt, Human
aaccuggcgaaaccccaucuc

SEQ ID NO: 679901 - RNA, 21 nt, Human
aacuccccccccaaaaaaccc

SEQ ID NO: 679902 - RNA, 18 nt, Human
aacuuuuccuucaaguua

SEQ ID NO: 679903 - RNA, 22 nt, Human
aaggucuuuaaacagaauucag

SEQ ID NO: 679904 - RNA, 24 nt, Human
aaucacuugaacccaggaggcaga

SEQ ID NO: 679905 - RNA, 21 nt, Human
acaaaacaaaacaaaacaaaa

SEQ ID NO: 679906 - RNA, 21 nt, Human
acaaaacaaaacaaaacaaaa

SEQ ID NO: 679907 - RNA, 21 nt, Human
acaaaacaaaacaaaacaaaa

SEQ ID NO: 679908 - RNA, 23 nt, Human
acaaaacaaaacaaaacaaaacc

SEQ ID NO: 679909 - RNA, 18 nt, Human
acaaaacaaaacaaaacc

SEQ ID NO: 679910 - RNA, 24 nt, Human
acagagcuagaguccaucucaaaa

SEQ ID NO: 679911 - RNA, 19 nt, Human
accacugcacuccagccug

SEQ ID NO: 679912 - RNA, 24 nt, Human
accacugcacuccagccuggguga

SEQ ID NO: 679913 - RNA, 22 nt, Human
accauugcacuccagccugggc

SEQ ID NO: 679914 - RNA, 24 nt, Human
acccaggaggcagagguugcagug

SEQ ID NO: 679915 - RNA, 18 nt, Human
accccaucucuacuaaaa

SEQ ID NO: 679916 - RNA, 25 nt, Human
accccgucucuacuaaaaaauacaa

SEQ ID NO: 679917 - RNA, 25 nt, Human
acuccagccugggcagcaagaguga

SEQ ID NO: 679918 - RNA, 24 nt, Human
acugcacuccagccugggugacag

SEQ ID NO: 679919 - RNA, 26 nt, Human
acugcacuccagccugggugacagag

SEQ ID NO: 679920 - RNA, 27 nt, Human
agaaaaaaaucagguuuguccauggaa

SEQ ID NO: 679921 - RNA, 23 nt, Human
agaaauacaucucccugccuccu

SEQ ID NO: 679922 - RNA, 22 nt, Human
agaacuaagagaaaaaaaucag

SEQ ID NO: 679923 - RNA, 19 nt, Human
agacagguuacacuguccc

SEQ ID NO: 679924 - RNA, 18 nt, Human
agagguugcagugagccg

SEQ ID NO: 679925 - RNA, 23 nt, Human
agagguugcagugagccgagauc

SEQ ID NO: 679926 - RNA, 24 nt, Human
agagguugcagugagccgagauca

SEQ ID NO: 679927 - RNA, 26 nt, Human
agcacucaucucuucaggaccuuugg

SEQ ID NO: 679928 - RNA, 24 nt, Human
agcacuuugggaggccgaggcggg

SEQ ID NO: 679929 - RNA, 24 nt, Human
agcacuuuuggaggaugagguggg

SEQ ID NO: 679930 - RNA, 20 nt, Human
agccauguccuuccacacaa

SEQ ID NO: 679931 - RNA, 23 nt, Human
agccgggcgugguggugggcgcc

SEQ ID NO: 679932 - RNA, 19 nt, Human
agccugggaauauaggcuu

SEQ ID NO: 679933 - RNA, 23 nt, Human
agcugggcaugguggugggcgcc

SEQ ID NO: 679934 - RNA, 21 nt, Human
aggaugaggugggcagaucac

SEQ ID NO: 679935 - RNA, 24 nt, Human
aggcacgguggcucacgccuguaa

SEQ ID NO: 679936 - RNA, 21 nt, Human
aggcagagguugcagugagcc

SEQ ID NO: 679937 - RNA, 24 nt, Human
aggcagagguugcagugagccgag

SEQ ID NO: 679938 - RNA, 18 nt, Human
aggcaggagaauggugag

SEQ ID NO: 679939 - RNA, 24 nt, Human
aggcaggagaauggugagaacccg

SEQ ID NO: 679940 - RNA, 22 nt, Human
aggccaggcgcaguggcucaug

SEQ ID NO: 679941 - RNA, 21 nt, Human
aggccgaggcgggcggaucac

SEQ ID NO: 679942 - RNA, 23 nt, Human
aggccgaggcgggcggaucacga

SEQ ID NO: 679943 - RNA, 24 nt, Human
aggcgcaguggcucaugccuguaa

SEQ ID NO: 679944 - RNA, 24 nt, Human
aggcggagcuugcagugagccgag

SEQ ID NO: 679945 - RNA, 24 nt, Human
aggcgggcggaucacgaggucagg

SEQ ID NO: 679946 - RNA, 19 nt, Human
aggcugaggcaggagaaug

SEQ ID NO: 679947 - RNA, 24 nt, Human
aggcugaggcuggagaaucacuug

SEQ ID NO: 679948 - RNA, 18 nt, Human
aggcuggagaaucacuug

SEQ ID NO: 679949 - RNA, 23 nt, Human
aggcuggagaaucacuugaaccc

SEQ ID NO: 679950 - RNA, 26 nt, Human
agguagaaggugaaacagcugcaagg

SEQ ID NO: 679951 - RNA, 21 nt, Human
aggugggcagaucaccugagg

SEQ ID NO: 679952 - RNA, 22 nt, Human
aggugggcagaucaccugaggg

SEQ ID NO: 679953 - RNA, 23 nt, Human
aguggcucaugccuguaauccca

SEQ ID NO: 679954 - RNA, 24 nt, Human
aguggcucaugccuguaaucccag

SEQ ID NO: 679955 - RNA, 24 nt, Human
aucgcaccacugcacuccagccug

SEQ ID NO: 679956 - RNA, 22 nt, Human
aucucaaaaacaaaacaaaaca

SEQ ID NO: 679957 - RNA, 20 nt, Human
augacccuaucaucaguuuc

SEQ ID NO: 679958 - RNA, 19 nt, Human
augccuguaaucccagcac

SEQ ID NO: 679959 - RNA, 21 nt, Human
auggaagcacacgaauggcag

SEQ ID NO: 679960 - RNA, 24 nt, Human
auugcaccauugcacuccagccug

SEQ ID NO: 679961 - RNA, 21 nt, Human
auugcacuccagccugggcag

SEQ ID NO: 679962 - RNA, 24 nt, Human
auugcacuccagccugggcagcaa

SEQ ID NO: 679963 - RNA, 21 nt, Human
caaaacaaaacaaaacaaaac

SEQ ID NO: 679964 - RNA, 24 nt, Human
caaaacaaaacaaaacaaaacaaa

SEQ ID NO: 679965 - RNA, 24 nt, Human
caaaacaaaacaaaacaaaacaaa

SEQ ID NO: 679966 - RNA, 27 nt, Human
caaaacaaaacaaaacaaaacaaaacc

SEQ ID NO: 679967 - RNA, 22 nt, Human
caaaacaaaacaaaacaaaacc

SEQ ID NO: 679968 - RNA, 23 nt, Human
caaaacaaaacaaaacaaaacca

SEQ ID NO: 679969 - RNA, 25 nt, Human
caaaagacaaguauaugauuaaaga

SEQ ID NO: 679970 - RNA, 25 nt, Human
caaaggggaugaauaauuccaauca

SEQ ID NO: 679971 - RNA, 19 nt, Human
caaauaagcacaccaucca

SEQ ID NO: 679972 - RNA, 22 nt, Human
caacuccccccccaaaaaaccc

SEQ ID NO: 679973 - RNA, 26 nt, Human
caagaugaacaagaugaucacugucc

SEQ ID NO: 679974 - RNA, 21 nt, Human
cacaagaccagccuggccaac

SEQ ID NO: 679975 - RNA, 22 nt, Human
cacacaagaaaggacugaacag

SEQ ID NO: 679976 - RNA, 21 nt, Human
caccacacguguuaaaagcca

SEQ ID NO: 679977 - RNA, 26 nt, Human
caccacugcacuccagccugggugac

SEQ ID NO: 679978 - RNA, 20 nt, Human
caccauugcacuccagccug

SEQ ID NO: 679979 - RNA, 21 nt, Human
caccgcuacaaaauaacccaa

SEQ ID NO: 679980 - RNA, 23 nt, Human
caccgcuacaaaauaacccaaga

SEQ ID NO: 679981 - RNA, 20 nt, Human
caccguuuacuuagcaaggu

SEQ ID NO: 679982 - RNA, 19 nt, Human
caccuccucucuagucaag

SEQ ID NO: 679983 - RNA, 24 nt, Human
cacgccuguaaucccagcacuuug

SEQ ID NO: 679984 - RNA, 23 nt, Human
cacuccagccugggcagcaagag

SEQ ID NO: 679985 - RNA, 24 nt, Human
cacuccagccugggcagcaagagu

SEQ ID NO: 679986 - RNA, 25 nt, Human
cacuccagccugggcagcaagagug

SEQ ID NO: 679987 - RNA, 22 nt, Human
cacuccagccugggugacagag

SEQ ID NO: 679988 - RNA, 23 nt, Human
cacuccagccugggugacagagc

SEQ ID NO: 679989 - RNA, 19 nt, Human
cacugcacuccagccuggg

SEQ ID NO: 679990 - RNA, 19 nt, Human
cacugcacuccagccuggg

SEQ ID NO: 679991 - RNA, 21 nt, Human
cacugcacuccagccugggug

SEQ ID NO: 679992 - RNA, 22 nt, Human
cacugcacuccagccuggguga

SEQ ID NO: 679993 - RNA, 24 nt, Human
cacugcacuccagccugggugaca

SEQ ID NO: 679994 - RNA, 24 nt, Human
cacugcacuccagccugggugaca

SEQ ID NO: 679995 - RNA, 19 nt, Human
cagaaaguuaggacuggaa

SEQ ID NO: 679996 - RNA, 19 nt, Human
cagaagccagaacuuugaa

SEQ ID NO: 679997 - RNA, 18 nt, Human
cagagcaaugggcuggcc

SEQ ID NO: 679998 - RNA, 24 nt, Human
cagaucaccugaggccaggaguuc

SEQ ID NO: 679999 - RNA, 24 nt, Human
cagcacuuugggaggccgaggcgg

SEQ ID NO: 680000 - RNA, 21 nt, Human
cagcacuuuuggaggaugagg

SEQ ID NO: 680001 - RNA, 24 nt, Human
cagcacuuuuggaggaugaggugg

SEQ ID NO: 680002 - RNA, 21 nt, Human
cagcagagacgaagaaagggu

SEQ ID NO: 680003 - RNA, 19 nt, Human
cagccuggccaaccuggcg

SEQ ID NO: 680004 - RNA, 24 nt, Human
cagcuacucgggaggcugaggcag

SEQ ID NO: 680005 - RNA, 19 nt, Human
cauagggcuccaggucucu

SEQ ID NO: 680006 - RNA, 22 nt, Human
caucucaaaaacaaaacaaaac

SEQ ID NO: 680007 - RNA, 25 nt, Human
cauggugucagaacuuuccauaggg

SEQ ID NO: 680008 - RNA, 21 nt, Human
cauguccuuccacacauggug

SEQ ID NO: 680009 - RNA, 19 nt, Human
cauugcacuccagccuggg

SEQ ID NO: 680010 - RNA, 21 nt, Human
cauugcacuccagccugggca

SEQ ID NO: 680011 - RNA, 24 nt, Human
cauugcacuccagccugggcagca

SEQ ID NO: 680012 - RNA, 19 nt, Human
ccaacuccccccccaaaaa

SEQ ID NO: 680013 - RNA, 19 nt, Human
ccacggccucgggggccca

SEQ ID NO: 680014 - RNA, 20 nt, Human
ccacugcacuccagccuggg

SEQ ID NO: 680015 - RNA, 20 nt, Human
ccacugcacuccagccuggg

SEQ ID NO: 680016 - RNA, 21 nt, Human
ccacugcacuccagccugggu

SEQ ID NO: 680017 - RNA, 21 nt, Human
ccacugcacuccagccugggu

SEQ ID NO: 680018 - RNA, 24 nt, Human
ccacugcacuccagccugggugac

SEQ ID NO: 680019 - RNA, 25 nt, Human
ccacugcacuccagccugggugaca

SEQ ID NO: 680020 - RNA, 24 nt, Human
ccagagcaaugggcuggcccagaa

SEQ ID NO: 680021 - RNA, 22 nt, Human
ccaggacagggaauaaaaacaa

SEQ ID NO: 680022 - RNA, 23 nt, Human
ccaggccucccuuuagccucaac

SEQ ID NO: 680023 - RNA, 22 nt, Human
ccagucaccacacguguuaaaa

SEQ ID NO: 680024 - RNA, 20 nt, Human
ccauugcacuccagccuggg

SEQ ID NO: 680025 - RNA, 21 nt, Human
ccauugcacuccagccugggc

SEQ ID NO: 680026 - RNA, 23 nt, Human
ccauugcacuccagccugggcaa

SEQ ID NO: 680027 - RNA, 23 nt, Human
ccauugcacuccagccugggcag

SEQ ID NO: 680028 - RNA, 24 nt, Human
ccauugcacuccagccugggcagc

SEQ ID NO: 680029 - RNA, 25 nt, Human
ccauugcacuccagccugggcagca

SEQ ID NO: 680030 - RNA, 18 nt, Human
cccaagagccugaaugcg

SEQ ID NO: 680031 - RNA, 19 nt, Human
cccaggaccacggccucgg

SEQ ID NO: 680032 - RNA, 23 nt, Human
cccccaaaaaacccuuuuaguuu

SEQ ID NO: 680033 - RNA, 19 nt, Human
ccccgccaacucccccccc

SEQ ID NO: 680034 - RNA, 24 nt, Human
ccccgccaacuccccccccaaaaa

SEQ ID NO: 680035 - RNA, 24 nt, Human
ccguuccaggccucccuuuagccu

SEQ ID NO: 680036 - RNA, 20 nt, Human
ccuaaauucucaaaggugga

SEQ ID NO: 680037 - RNA, 21 nt, Human
ccucaacagcaugagggcucu

SEQ ID NO: 680038 - RNA, 19 nt, Human
ccucaagagcugcaagccu

SEQ ID NO: 680039 - RNA, 21 nt, Human
ccuccuucucucuucuguucc

SEQ ID NO: 680040 - RNA, 24 nt, Human
ccugaggccaggaguucacaagac

SEQ ID NO: 680041 - RNA, 18 nt, Human
ccugccuccuucucucuu

SEQ ID NO: 680042 - RNA, 19 nt, Human
ccugccuccuucucucuuc

SEQ ID NO: 680043 - RNA, 22 nt, Human
ccuggacugcagaguccagaag

SEQ ID NO: 680044 - RNA, 24 nt, Human
ccuggccaaccuggcgaaacccca

SEQ ID NO: 680045 - RNA, 22 nt, Human
ccuggcuaacauggugaaaccc

SEQ ID NO: 680046 - RNA, 23 nt, Human
ccuggcuaacauggugaaacccc

SEQ ID NO: 680047 - RNA, 24 nt, Human
ccuggcuaacauggugaaaccccg

SEQ ID NO: 680048 - RNA, 19 nt, Human
ccuguaaucccagcacuuu

SEQ ID NO: 680049 - RNA, 21 nt, Human
ccuguagucccagcuacucgg

SEQ ID NO: 680050 - RNA, 22 nt, Human
ccuguagucccagcuacucggg

SEQ ID NO: 680051 - RNA, 20 nt, Human
ccuucucucuucuguuccca

SEQ ID NO: 680052 - RNA, 22 nt, Human
ccuucucucuucuguucccacc

SEQ ID NO: 680053 - RNA, 25 nt, Human
ccuuuagccucaacagcaugagggc

SEQ ID NO: 680054 - RNA, 19 nt, Human
cgaaaccccaucucuacua

SEQ ID NO: 680055 - RNA, 24 nt, Human
cgagaccauccuggcuaacauggu

SEQ ID NO: 680056 - RNA, 24 nt, Human
cgaggcgggcggaucacgagguca

SEQ ID NO: 680057 - RNA, 21 nt, Human
cgcaccacugcacuccagccu

SEQ ID NO: 680058 - RNA, 24 nt, Human
cgcccauaaucccagcuacucggg

SEQ ID NO: 680059 - RNA, 23 nt, Human
cgccuguaaucccagcacuuugg

SEQ ID NO: 680060 - RNA, 24 nt, Human
cgccuguaaucccagcacuuuggg

SEQ ID NO: 680061 - RNA, 23 nt, Human
cgccuguagucccagcuacucgg

SEQ ID NO: 680062 - RNA, 24 nt, Human
cgccuguagucccagcuacucggg

SEQ ID NO: 680063 - RNA, 24 nt, Human
cgggaggcugaggcuggagaauca

SEQ ID NO: 680064 - RNA, 22 nt, Human
cguuuacuuagcaaggucucua

SEQ ID NO: 680065 - RNA, 21 nt, Human
cuaaaaaauacaaaaaauuag

SEQ ID NO: 680066 - RNA, 19 nt, Human
cuacuaaaaaauacaaaaa

SEQ ID NO: 680067 - RNA, 22 nt, Human
cucacgccuguaaucccagcac

SEQ ID NO: 680068 - RNA, 24 nt, Human
cucacgccuguaaucccagcacuu

SEQ ID NO: 680069 - RNA, 23 nt, Human
cucaugccuguaaucccagcacu

SEQ ID NO: 680070 - RNA, 24 nt, Human
cucaugccuguaaucccagcacuu

SEQ ID NO: 680071 - RNA, 25 nt, Human
cucccaggaccacggccucgggggc

SEQ ID NO: 680072 - RNA, 21 nt, Human
cuccccgccaacucccccccc

SEQ ID NO: 680073 - RNA, 23 nt, Human
cuccccgccaacuccccccccaa

SEQ ID NO: 680074 - RNA, 20 nt, Human
cucccuuuagccucaacagc

SEQ ID NO: 680075 - RNA, 18 nt, Human
cucuacuaaaaaaaaaaa

SEQ ID NO: 680076 - RNA, 22 nt, Human
cucuacuaaaaaaaaaaaauac

SEQ ID NO: 680077 - RNA, 18 nt, Human
cugccuccuucucucuuc

SEQ ID NO: 680078 - RNA, 24 nt, Human
cuggggcaggcacgguggcucacg

SEQ ID NO: 680079 - RNA, 18 nt, Human
cuucaagaggauggaguc

SEQ ID NO: 680080 - RNA, 18 nt, Human
cuucucaucuuucaaagg

SEQ ID NO: 680081 - RNA, 21 nt, Human
cuugcagugagccgagaucgc

SEQ ID NO: 680082 - RNA, 22 nt, Human
cuuuccagcagugagaacuugg

SEQ ID NO: 680083 - RNA, 23 nt, Human
cuuuuggaggaugaggugggcag

SEQ ID NO: 680084 - RNA, 19 nt, Human
gaaaggguggcuguccuca

SEQ ID NO: 680085 - RNA, 18 nt, Human
gaacauucagccugggaa

SEQ ID NO: 680086 - RNA, 23 nt, Human
gagaaucacuugaacccaggagg

SEQ ID NO: 680087 - RNA, 23 nt, Human
gagaucgcaccacugcacuccag

SEQ ID NO: 680088 - RNA, 18 nt, Human
gagcuugcagugagccga

SEQ ID NO: 680089 - RNA, 23 nt, Human
gagcuugcagugagccgagaucg

SEQ ID NO: 680090 - RNA, 21 nt, Human
gaggcagagguugcagugagc

SEQ ID NO: 680091 - RNA, 18 nt, Human
gaggcugaggcuggagaa

SEQ ID NO: 680092 - RNA, 18 nt, Human
gaggugggcagaucaccu

SEQ ID NO: 680093 - RNA, 21 nt, Human
gagugagacugaauacuuuuc

SEQ ID NO: 680094 - RNA, 18 nt, Human
gaucaccugaggccagga

SEQ ID NO: 680095 - RNA, 24 nt, Human
gaucaccugaggccaggaguucac

SEQ ID NO: 680096 - RNA, 20 nt, Human
gauuagccagccagagcaug

SEQ ID NO: 680097 - RNA, 21 nt, Human
gcaagguagaaggugaaacag

SEQ ID NO: 680098 - RNA, 20 nt, Human
gcaccacugcacuccagccu

SEQ ID NO: 680099 - RNA, 24 nt, Human
gcacuccagccugggugacagagc

SEQ ID NO: 680100 - RNA, 25 nt, Human
gccaacuccccccccaaaaaacccu

SEQ ID NO: 680101 - RNA, 23 nt, Human
gccaccguauuuucagucggcua

SEQ ID NO: 680102 - RNA, 20 nt, Human
gccgagaucgcaccacugca

SEQ ID NO: 680103 - RNA, 24 nt, Human
gcuaacauggugaaaccccgucuc

SEQ ID NO: 680104 - RNA, 21 nt, Human
gcuacucgggaggcugaggcu

SEQ ID NO: 680105 - RNA, 22 nt, Human
gcuggagaaucacuugaaccca

SEQ ID NO: 680106 - RNA, 24 nt, Human
ggagcuugcagugagccgagaucg

SEQ ID NO: 680107 - RNA, 22 nt, Human
ggaggaugaggugggcagauca

SEQ ID NO: 680108 - RNA, 19 nt, Human
ggcagguccucaagagcug

SEQ ID NO: 680109 - RNA, 22 nt, Human
ggcccagaacuugggagucuca

SEQ ID NO: 680110 - RNA, 21 nt, Human
ggcggaucacgaggucaggag

SEQ ID NO: 680111 - RNA, 22 nt, Human
ggcgugguggugggcgccugua

SEQ ID NO: 680112 - RNA, 21 nt, Human
ggcucacgccuguaaucccag

SEQ ID NO: 680113 - RNA, 18 nt, Human
ggcuuuaaaacagcccag

SEQ ID NO: 680114 - RNA, 22 nt, Human
gggcagcaagagugaaacuccg

SEQ ID NO: 680115 - RNA, 20 nt, Human
gggcuggcccagaacuuggg

SEQ ID NO: 680116 - RNA, 24 nt, Human
gggucuugcauucuuuccuuaacc

SEQ ID NO: 680117 - RNA, 23 nt, Human
gguccuuucuccuuuguaaggcu

SEQ ID NO: 680118 - RNA, 23 nt, Human
gguggcucacgccuguaauccca

SEQ ID NO: 680119 - RNA, 24 nt, Human
gguggcucacgccuguaaucccag

SEQ ID NO: 680120 - RNA, 18 nt, Human
gucagucugugaaggggu

SEQ ID NO: 680121 - RNA, 21 nt, Human
gugagauucuucccugaggaa

SEQ ID NO: 680122 - RNA, 23 nt, Human
guggugggcgccuguagucccag

SEQ ID NO: 680123 - RNA, 21 nt, Human
gugucagaacuuuccauaggg

SEQ ID NO: 680124 - RNA, 19 nt, Human
guugcagugagccgagauc

SEQ ID NO: 680125 - RNA, 22 nt, Human
uaacauggugaaaccccgucuc

SEQ ID NO: 680126 - RNA, 24 nt, Human
uaacauggugaaaccccgucucua

SEQ ID NO: 680127 - RNA, 20 nt, Human
uaagacuggaacagacaaga

SEQ ID NO: 680128 - RNA, 24 nt, Human
uaagcaccacuggguaccaucauu

SEQ ID NO: 680129 - RNA, 18 nt, Human
uaauucagaaaaagauga

SEQ ID NO: 680130 - RNA, 21 nt, Human
uacaaaagacaaguauaugau

SEQ ID NO: 680131 - RNA, 22 nt, Human
uagacugcaaauaagcacacca

SEQ ID NO: 680132 - RNA, 22 nt, Human
uagccagccagagcauguccaa

SEQ ID NO: 680133 - RNA, 24 nt, Human
uagccucugaaacagcaaacuuau

SEQ ID NO: 680134 - RNA, 23 nt, Human
uagucaagugagauucuucccug

SEQ ID NO: 680135 - RNA, 19 nt, Human
uauaggcuuucuccuacuc

SEQ ID NO: 680136 - RNA, 26 nt, Human
ucaaaaacaaaacaaaacaaaacaaa

SEQ ID NO: 680137 - RNA, 19 nt, Human
ucaccugaggccaggaguu

SEQ ID NO: 680138 - RNA, 18 nt, Human
ucacgaggucaggagauc

SEQ ID NO: 680139 - RNA, 24 nt, Human
ucacgaggucaggagaucgagacc

SEQ ID NO: 680140 - RNA, 20 nt, Human
ucagaaaaagaugacuugau

SEQ ID NO: 680141 - RNA, 21 nt, Human
ucagcagagacgaagaaaggg

SEQ ID NO: 680142 - RNA, 20 nt, Human
ucagccaacauaaagagugc

SEQ ID NO: 680143 - RNA, 19 nt, Human
ucagcugcagcuacuccag

SEQ ID NO: 680144 - RNA, 20 nt, Human
ucagucggcuagaacaugga

SEQ ID NO: 680145 - RNA, 19 nt, Human
ucaucaguuucagugccau

SEQ ID NO: 680146 - RNA, 18 nt, Human
ucaucucuucagaaaacu

SEQ ID NO: 680147 - RNA, 19 nt, Human
uccacacauggugucagaa

SEQ ID NO: 680148 - RNA, 23 nt, Human
uccagaagccagaacuuugaacu

SEQ ID NO: 680149 - RNA, 24 nt, Human
uccagccugggugacagagcuaga

SEQ ID NO: 680150 - RNA, 22 nt, Human
uccauagggcuccaggucucug

SEQ ID NO: 680151 - RNA, 21 nt, Human
uccaucucaaaaacaaaacaa

SEQ ID NO: 680152 - RNA, 29 nt, Human
uccccccccaaaaaacccuuuuaguuuua

SEQ ID NO: 680153 - RNA, 21 nt, Human
uccuuccacacauggugucag

SEQ ID NO: 680154 - RNA, 20 nt, Human
uccuuucuccuuuguaaggc

SEQ ID NO: 680155 - RNA, 23 nt, Human
ucgcaccacugcacuccagccug

SEQ ID NO: 680156 - RNA, 25 nt, Human
ucgggaggcugaggcuggagaauca

SEQ ID NO: 680157 - RNA, 25 nt, Human
ucucaaguuuucauucucacccacu

SEQ ID NO: 680158 - RNA, 20 nt, Human
ucucuacuaaaaaaaaaaaa

SEQ ID NO: 680159 - RNA, 23 nt, Human
ucucuacuaaaaaauacaaaaaa

SEQ ID NO: 680160 - RNA, 23 nt, Human
ucuuuguuccucgugaaaugggc

SEQ ID NO: 680161 - RNA, 24 nt, Human
ugaaacagcaaacuuauaggcaau

SEQ ID NO: 680162 - RNA, 22 nt, Human
ugaacugugcuucuagcucuuu

SEQ ID NO: 680163 - RNA, 19 nt, Human
ugacaucaacucuucggca

SEQ ID NO: 680164 - RNA, 25 nt, Human
ugagaacccgggaggcggagcuugc

SEQ ID NO: 680165 - RNA, 20 nt, Human
ugagaacuuggaaagguaga

SEQ ID NO: 680166 - RNA, 22 nt, Human
ugagccgagaucgcaccacugc

SEQ ID NO: 680167 - RNA, 24 nt, Human
ugaggcaggagaauggugagaacc

SEQ ID NO: 680168 - RNA, 25 nt, Human
ugaggcaggagaauggugagaaccc

SEQ ID NO: 680169 - RNA, 24 nt, Human
ugaggccaggaguucacaagacca

SEQ ID NO: 680170 - RNA, 20 nt, Human
ugaggcuggagaaucacuug

SEQ ID NO: 680171 - RNA, 24 nt, Human
ugaggcuggagaaucacuugaacc

SEQ ID NO: 680172 - RNA, 19 nt, Human
ugagggcucugagcacuca

SEQ ID NO: 680173 - RNA, 20 nt, Human
ugaggugggcagaucaccug

SEQ ID NO: 680174 - RNA, 26 nt, Human
ugaggugggcagaucaccugaggcca

SEQ ID NO: 680175 - RNA, 19 nt, Human
ugauugucaguauaaacuu

SEQ ID NO: 680176 - RNA, 21 nt, Human
ugcaccauugcacuccagccu

SEQ ID NO: 680177 - RNA, 22 nt, Human
ugcacuccagccugggcagcaa

SEQ ID NO: 680178 - RNA, 25 nt, Human
ugcacuccagccugggcagcaagag

SEQ ID NO: 680179 - RNA, 23 nt, Human
ugccuccuucucucuucuguucc

SEQ ID NO: 680180 - RNA, 18 nt, Human
ugccuguaaucccagcac

SEQ ID NO: 680181 - RNA, 23 nt, Human
ugccuguaaucccagcacuuuug

SEQ ID NO: 680182 - RNA, 24 nt, Human
uggaagcacacgaauggcaggaca

SEQ ID NO: 680183 - RNA, 22 nt, Human
uggcucacgccuguaaucccag

SEQ ID NO: 680184 - RNA, 24 nt, Human
uggcucacgccuguaaucccagca

SEQ ID NO: 680185 - RNA, 22 nt, Human
uggcucaugccuguaaucccag

SEQ ID NO: 680186 - RNA, 24 nt, Human
uggcucaugccuguaaucccagca

SEQ ID NO: 680187 - RNA, 21 nt, Human
uggcucccaggaccacggccu

SEQ ID NO: 680188 - RNA, 20 nt, Human
uggcugaaaucccaucuacu

SEQ ID NO: 680189 - RNA, 18 nt, Human
ugggagaagggagaccug

SEQ ID NO: 680190 - RNA, 21 nt, Human
ugggagaagggagaccuggac

SEQ ID NO: 680191 - RNA, 19 nt, Human
ugggaggccgaggcgggcg

SEQ ID NO: 680192 - RNA, 24 nt, Human
ugggaggccgaggcgggcggauca

SEQ ID NO: 680193 - RNA, 24 nt, Human
ugggcagaucaccugaggccagga

SEQ ID NO: 680194 - RNA, 23 nt, Human
ugggcuagccucugaaacagcaa

SEQ ID NO: 680195 - RNA, 23 nt, Human
ugggcuggcccagaacuugggag

SEQ ID NO: 680196 - RNA, 23 nt, Human
ugggcuuuaaaacagcccagagc

SEQ ID NO: 680197 - RNA, 26 nt, Human
ugguauuuucucuuuuaugaauuguc

SEQ ID NO: 680198 - RNA, 19 nt, Human
uggugagaacccgggaggc

SEQ ID NO: 680199 - RNA, 24 nt, Human
ugguggugggcgccuguaguccca

SEQ ID NO: 680200 - RNA, 21 nt, Human
uguccuucuuccauuuggcag

SEQ ID NO: 680201 - RNA, 23 nt, Human
ugucuguuucaaguaagcaaugu

SEQ ID NO: 680202 - RNA, 21 nt, Human
uuacacugucccuaugugcau

SEQ ID NO: 680203 - RNA, 18 nt, Human
uuagccgggcgugguggu

SEQ ID NO: 680204 - RNA, 24 nt, Human
uuagccgggcgugguggugggcgc

SEQ ID NO: 680205 - RNA, 18 nt, Human
uuagccucaacagcauga

SEQ ID NO: 680206 - RNA, 18 nt, Human
uuagcugggcaugguggu

SEQ ID NO: 680207 - RNA, 24 nt, Human
uuagcugggcaugguggugggcgc

SEQ ID NO: 680208 - RNA, 23 nt, Human
uucaagaggauggagucuucugu

SEQ ID NO: 680209 - RNA, 18 nt, Human
uuccuccccgccaacucc

SEQ ID NO: 680210 - RNA, 22 nt, Human
uugcagugagccgagaucauug

SEQ ID NO: 680211 - RNA, 25 nt, Human
uugcagugagccgagaucauugcac

SEQ ID NO: 680212 - RNA, 19 nt, Human
uugcagugagccgagaucg

SEQ ID NO: 680213 - RNA, 22 nt, Human
uugcagugagccgagaucgcac

SEQ ID NO: 680214 - RNA, 25 nt, Human
uugggaggccgaggcgggcggauca

SEQ ID NO: 680215 - RNA, 19 nt, Human
uugggucuugcauucuuuc

SEQ ID NO: 680216 - RNA, 24 nt, Human
uuuccuucaaguuaugggccacuu

SEQ ID NO: 680217 - RNA, 21 nt, Human
uuuccuucugguauuuucucu

SEQ ID NO: 680218 - RNA, 24 nt, Human
uuuccuucugguauuuucucuuuu

SEQ ID NO: 680219 - RNA, 22 nt, Human
uuugcauuuuugcccuuucuaa

SEQ ID NO: 680220 - RNA, 20 nt, Human
uuuucauucucacccacugc

SEQ ID NO: 680221 - RNA, 21 nt, Human
aaaagaaaaugaaaaacaagg

SEQ ID NO: 680222 - RNA, 28 nt, Human
aaaauauauauauauauauauaaacaug

SEQ ID NO: 680223 - RNA, 22 nt, Human
aaacaaagccugcucuuccucg

SEQ ID NO: 680224 - RNA, 19 nt, Human
aaacaaggccaacaguaug

SEQ ID NO: 680225 - RNA, 23 nt, Human
aaacacauccuccaucucccucu

SEQ ID NO: 680226 - RNA, 19 nt, Human
aaacucacucuuuaucaag

SEQ ID NO: 680227 - RNA, 19 nt, Human
aaacugggcuucccugcag

SEQ ID NO: 680228 - RNA, 22 nt, Human
aaccauccaagaagacauccaa

SEQ ID NO: 680229 - RNA, 18 nt, Human
aaccccaccuccgcccag

SEQ ID NO: 680230 - RNA, 23 nt, Human
aacucccugcccccauggaccuu

SEQ ID NO: 680231 - RNA, 21 nt, Human
aagcagaaccauccaagaaga

SEQ ID NO: 680232 - RNA, 26 nt, Human
aagcaugaaaaaaagauacauucuga

SEQ ID NO: 680233 - RNA, 18 nt, Human
acaaagucauucauacag

SEQ ID NO: 680234 - RNA, 19 nt, Human
acaaggcuauagaagaagc

SEQ ID NO: 680235 - RNA, 28 nt, Human
acacacacaaacacacacacacaggcgc

SEQ ID NO: 680236 - RNA, 25 nt, Human
acacacacacacaaacacacacaca

SEQ ID NO: 680237 - RNA, 27 nt, Human
acacacacacacacacacaaacacaca

SEQ ID NO: 680238 - RNA, 30 nt, Human
acacacacacacacacacaaacacacacaa

SEQ ID NO: 680239 - RNA, 21 nt, Human
acacacacacacaggcgcaca

SEQ ID NO: 680240 - RNA, 19 nt, Human
acacacacacaggcgcaca

SEQ ID NO: 680241 - RNA, 31 nt, Human
acacacacacaggcgcacaaacacauccucu

SEQ ID NO: 680242 - RNA, 21 nt, Human
acacacacaggcgcacaaaca

SEQ ID NO: 680243 - RNA, 23 nt, Human
acaggcgcacaaacacauccucu

SEQ ID NO: 680244 - RNA, 18 nt, Human
acccaaauaaacaugguc

SEQ ID NO: 680245 - RNA, 20 nt, Human
acccaaauaaacauggucuc

SEQ ID NO: 680246 - RNA, 18 nt, Human
accucgcaacucccugcc

SEQ ID NO: 680247 - RNA, 18 nt, Human
agaaaucaauccugggcu

SEQ ID NO: 680248 - RNA, 22 nt, Human
agacaggacaggauagcccuga

SEQ ID NO: 680249 - RNA, 21 nt, Human
agauucccccaguuccacucc

SEQ ID NO: 680250 - RNA, 22 nt, Human
agcaagcugugggacaaggcag

SEQ ID NO: 680251 - RNA, 21 nt, Human
aggaaugggggggcuccuuug

SEQ ID NO: 680252 - RNA, 18 nt, Human
aggccuggaaaucucaga

SEQ ID NO: 680253 - RNA, 18 nt, Human
aggcuuccuccuacccaa

SEQ ID NO: 680254 - RNA, 21 nt, Human
agucugcccuccuucccccaa

SEQ ID NO: 680255 - RNA, 21 nt, Human
aguggcaugugggguuccucg

SEQ ID NO: 680256 - RNA, 19 nt, Human
auauauauauauauauaua

SEQ ID NO: 680257 - RNA, 23 nt, Human
aucaaagcccucaauuaccuccu

SEQ ID NO: 680258 - RNA, 18 nt, Human
aucagaccauucucagca

SEQ ID NO: 680259 - RNA, 20 nt, Human
aucuauggccucacuuccuu

SEQ ID NO: 680260 - RNA, 19 nt, Human
auggggcagcaagcugugg

SEQ ID NO: 680261 - RNA, 22 nt, Human
augugugugugugcgagugugu

SEQ ID NO: 680262 - RNA, 19 nt, Human
caaagcccucaauuaccuc

SEQ ID NO: 680263 - RNA, 23 nt, Human
cacaaacacauccuccaucuccc

SEQ ID NO: 680264 - RNA, 18 nt, Human
cacaacucagauuccccc

SEQ ID NO: 680265 - RNA, 20 nt, Human
cacacaaacacacacacaca

SEQ ID NO: 680266 - RNA, 21 nt, Human
cacacacaaacacacacacac

SEQ ID NO: 680267 - RNA, 22 nt, Human
cacacacacaaacacacacaca

SEQ ID NO: 680268 - RNA, 23 nt, Human
cacacacacaggcgcacaaacac

SEQ ID NO: 680269 - RNA, 21 nt, Human
cacagcaacccagugggccag

SEQ ID NO: 680270 - RNA, 21 nt, Human
cacagcggugacuaacucguc

SEQ ID NO: 680271 - RNA, 23 nt, Human
caccuccucagccccaggcuacc

SEQ ID NO: 680272 - RNA, 19 nt, Human
caccucgcaacucccugcc

SEQ ID NO: 680273 - RNA, 25 nt, Human
caccuggaguacugguccacccacc

SEQ ID NO: 680274 - RNA, 18 nt, Human
cagaaagggcaacugaag

SEQ ID NO: 680275 - RNA, 23 nt, Human
cagaacagccgaucacccuacag

SEQ ID NO: 680276 - RNA, 18 nt, Human
cagaaccauccaagaaga

SEQ ID NO: 680277 - RNA, 23 nt, Human
cagauucccccaguuccacuccu

SEQ ID NO: 680278 - RNA, 22 nt, Human
cagcacagcaacccagugggcc

SEQ ID NO: 680279 - RNA, 20 nt, Human
cagcagagaggggcuccuua

SEQ ID NO: 680280 - RNA, 19 nt, Human
cagcccaaugcgggcucca

SEQ ID NO: 680281 - RNA, 20 nt, Human
cagcgaguggcauguggggu

SEQ ID NO: 680282 - RNA, 24 nt, Human
caugcaacuaaccccaccucgcaa

SEQ ID NO: 680283 - RNA, 21 nt, Human
ccagaagacaggccaucucag

SEQ ID NO: 680284 - RNA, 20 nt, Human
ccagggcaccuccucagccc

SEQ ID NO: 680285 - RNA, 22 nt, Human
ccauggguccaaacccaaggga

SEQ ID NO: 680286 - RNA, 24 nt, Human
cccaagggaauauucuuccucuac

SEQ ID NO: 680287 - RNA, 23 nt, Human
cccauggggcagaggcacacugc

SEQ ID NO: 680288 - RNA, 23 nt, Human
ccccaccucgcaacucccugccc

SEQ ID NO: 680289 - RNA, 22 nt, Human
ccccaggcuacccagaacagcc

SEQ ID NO: 680290 - RNA, 21 nt, Human
ccccauggaccuucuuccaga

SEQ ID NO: 680291 - RNA, 18 nt, Human
ccccuccugcccucagaa

SEQ ID NO: 680292 - RNA, 18 nt, Human
ccuccaucucccucucuu

SEQ ID NO: 680293 - RNA, 22 nt, Human
ccucgucuucccuucuccccca

SEQ ID NO: 680294 - RNA, 22 nt, Human
ccucuaccuggccuuuuguucc

SEQ ID NO: 680295 - RNA, 26 nt, Human
ccugggaccauggguccaaacccaag

SEQ ID NO: 680296 - RNA, 19 nt, Human
ccuuaucuggucgccccuc

SEQ ID NO: 680297 - RNA, 22 nt, Human
ccuuaucuggucgccccuccug

SEQ ID NO: 680298 - RNA, 24 nt, Human
ccuuaucuggucgccccuccugcc

SEQ ID NO: 680299 - RNA, 22 nt, Human
cggugacuaacucgucccgcaa

SEQ ID NO: 680300 - RNA, 23 nt, Human
cuaaugguucuuucccugauucu

SEQ ID NO: 680301 - RNA, 21 nt, Human
cucacacacacacacacacac

SEQ ID NO: 680302 - RNA, 29 nt, Human
cucacacacacacacacacacaaacacac

SEQ ID NO: 680303 - RNA, 24 nt, Human
cucagauucccccaguuccacucc

SEQ ID NO: 680304 - RNA, 21 nt, Human
cuccugcccucagaaaggccc

SEQ ID NO: 680305 - RNA, 20 nt, Human
cuccuugacacucauucuaa

SEQ ID NO: 680306 - RNA, 18 nt, Human
cucucucucucuccgggc

SEQ ID NO: 680307 - RNA, 22 nt, Human
cugcccccauggaccuucuucc

SEQ ID NO: 680308 - RNA, 24 nt, Human
cuuccagaccaaccccaccuccgc

SEQ ID NO: 680309 - RNA, 26 nt, Human
cuuccagaccaaccccaccuccgccc

SEQ ID NO: 680310 - RNA, 19 nt, Human
cuuuguauuucuccaugau

SEQ ID NO: 680311 - RNA, 19 nt, Human
gaaaaugaaaaacaaggcc

SEQ ID NO: 680312 - RNA, 18 nt, Human
gagggugggcaggagggc

SEQ ID NO: 680313 - RNA, 19 nt, Human
gagugugugugguuugugu

SEQ ID NO: 680314 - RNA, 19 nt, Human
gcaaggcaaggcuuccucc

SEQ ID NO: 680315 - RNA, 19 nt, Human
gcuugaagaggacuccagg

SEQ ID NO: 680316 - RNA, 24 nt, Human
ggaaguuuuuuuuuuuccuagaga

SEQ ID NO: 680317 - RNA, 23 nt, Human
ggcaccucccccaacucuuacua

SEQ ID NO: 680318 - RNA, 24 nt, Human
ggcuaguuaucacccucauaaaua

SEQ ID NO: 680319 - RNA, 22 nt, Human
gggcagcaagcugugggacaag

SEQ ID NO: 680320 - RNA, 19 nt, Human
gggcagggcccccaacgug

SEQ ID NO: 680321 - RNA, 21 nt, Human
ggggggcuccuuuggcacuuc

SEQ ID NO: 680322 - RNA, 22 nt, Human
ggggggcuccuuuggcacuuca

SEQ ID NO: 680323 - RNA, 23 nt, Human
gggggggcuccuuuggcacuuca

SEQ ID NO: 680324 - RNA, 19 nt, Human
gucucuguguaugugugug

SEQ ID NO: 680325 - RNA, 25 nt, Human
gugcgagugugugugguuuguguug

SEQ ID NO: 680326 - RNA, 20 nt, Human
gugggugggagggugggcag

SEQ ID NO: 680327 - RNA, 25 nt, Human
uaaaagggacgaggugccaggagca

SEQ ID NO: 680328 - RNA, 20 nt, Human
uacaaggcuauagaagaagc

SEQ ID NO: 680329 - RNA, 22 nt, Human
uacacuuaugcuucucaccuaa

SEQ ID NO: 680330 - RNA, 21 nt, Human
uacauucugagcugacacaga

SEQ ID NO: 680331 - RNA, 22 nt, Human
uagcccugaguccagggcaccu

SEQ ID NO: 680332 - RNA, 23 nt, Human
uaggcuucucugagcaugccugg

SEQ ID NO: 680333 - RNA, 23 nt, Human
uaugugugugugugcgagugugu

SEQ ID NO: 680334 - RNA, 23 nt, Human
uaugugugugugugcgagugugu

SEQ ID NO: 680335 - RNA, 21 nt, Human
ucacacacacacacacacaca

SEQ ID NO: 680336 - RNA, 23 nt, Human
ucacacacacacacacacacaaa

SEQ ID NO: 680337 - RNA, 29 nt, Human
ucacacacacacacacacacaaacacaca

SEQ ID NO: 680338 - RNA, 21 nt, Human
uccaagaagacauccaagcua

SEQ ID NO: 680339 - RNA, 24 nt, Human
uccaagaagacauccaagcuauac

SEQ ID NO: 680340 - RNA, 23 nt, Human
uccaagacaggacaggauagccc

SEQ ID NO: 680341 - RNA, 20 nt, Human
uccagcaauaaauaacauaa

SEQ ID NO: 680342 - RNA, 22 nt, Human
uccaugcaacuaaccccaccuc

SEQ ID NO: 680343 - RNA, 22 nt, Human
uccauucugacgggucuggaga

SEQ ID NO: 680344 - RNA, 18 nt, Human
ucccccaguuccacuccu

SEQ ID NO: 680345 - RNA, 19 nt, Human
ucccugcagcuguaccugc

SEQ ID NO: 680346 - RNA, 22 nt, Human
ucccugcagcuguaccugcaca

SEQ ID NO: 680347 - RNA, 20 nt, Human
uccucagccccaggcuaccc

SEQ ID NO: 680348 - RNA, 19 nt, Human
uccuccaucucccucucuu

SEQ ID NO: 680349 - RNA, 18 nt, Human
uccugcccucagaaaggc

SEQ ID NO: 680350 - RNA, 24 nt, Human
ucgggugggugggagggugggcag

SEQ ID NO: 680351 - RNA, 18 nt, Human
ucuagaaacucuacaagg

SEQ ID NO: 680352 - RNA, 21 nt, Human
ucucacacacacacacacaca

SEQ ID NO: 680353 - RNA, 21 nt, Human
ucucagcaugccccaucaccu

SEQ ID NO: 680354 - RNA, 18 nt, Human
ucucccucucuuuccucc

SEQ ID NO: 680355 - RNA, 27 nt, Human
ucucucacacacacacacacacacaaa

SEQ ID NO: 680356 - RNA, 21 nt, Human
ucucucucucucucucucaca

SEQ ID NO: 680357 - RNA, 21 nt, Human
ucucucucucucucucucuca

SEQ ID NO: 680358 - RNA, 18 nt, Human
ucucuguguaugugugug

SEQ ID NO: 680359 - RNA, 23 nt, Human
ucucuuccccacagugcuuuuag

SEQ ID NO: 680360 - RNA, 24 nt, Human
ucugucauuauuuacacauaugua

SEQ ID NO: 680361 - RNA, 18 nt, Human
ugaaaagaaaaugaaaaa

SEQ ID NO: 680362 - RNA, 21 nt, Human
ugaaaagaaaaugaaaaacaa

SEQ ID NO: 680363 - RNA, 20 nt, Human
ugaagaggacuccaggucug

SEQ ID NO: 680364 - RNA, 21 nt, Human
ugaauaucaaucauuuccccu

SEQ ID NO: 680365 - RNA, 22 nt, Human
ugacacaacucagauuccccca

SEQ ID NO: 680366 - RNA, 25 nt, Human
ugagaacagcucaguaucaaagccc

SEQ ID NO: 680367 - RNA, 24 nt, Human
ugaggaaacagaguuggugugaga

SEQ ID NO: 680368 - RNA, 18 nt, Human
ugaguggggagggccccu

SEQ ID NO: 680369 - RNA, 19 nt, Human
ugaguggggagggccccug

SEQ ID NO: 680370 - RNA, 20 nt, Human
ugccugaguggggagggccc

SEQ ID NO: 680371 - RNA, 23 nt, Human
ugccuggcuccaagguccacaug

SEQ ID NO: 680372 - RNA, 22 nt, Human
uggaagggagaguuugugcugg

SEQ ID NO: 680373 - RNA, 24 nt, Human
uggaccuucuuccagaccaacccc

SEQ ID NO: 680374 - RNA, 20 nt, Human
uggccuuuuguuccaccacc

SEQ ID NO: 680375 - RNA, 18 nt, Human
ugggaaguuuuuuuuuuu

SEQ ID NO: 680376 - RNA, 24 nt, Human
uguacaagaaaaaugaaagagucu

SEQ ID NO: 680377 - RNA, 25 nt, Human
uguacaagaaaaaugaaagagucuc

SEQ ID NO: 680378 - RNA, 22 nt, Human
ugucauuauuuacacauaugua

SEQ ID NO: 680379 - RNA, 24 nt, Human
ugucuuuaggagaggaacugaagu

SEQ ID NO: 680380 - RNA, 23 nt, Human
ugugcuggagccagcccuguuug

SEQ ID NO: 680381 - RNA, 18 nt, Human
uguguaugugugugugug

SEQ ID NO: 680382 - RNA, 23 nt, Human
ugugugcgagugugugugguuug

SEQ ID NO: 680383 - RNA, 20 nt, Human
ugugugugugcgagugugug

SEQ ID NO: 680384 - RNA, 22 nt, Human
ugugugugugugcgagugugug

SEQ ID NO: 680385 - RNA, 21 nt, Human
uuacacuuaugcuucucaccu

SEQ ID NO: 680386 - RNA, 20 nt, Human
uucauacaguuuuuguguuu

SEQ ID NO: 680387 - RNA, 23 nt, Human
uuccagaccaaccccaccuccgc

SEQ ID NO: 680388 - RNA, 21 nt, Human
uucccccaguuccacuccuaa

SEQ ID NO: 680389 - RNA, 24 nt, Human
uugccugacaccacaaagcuucua

SEQ ID NO: 680390 - RNA, 25 nt, Human
uuguguuuuuuuacugacuucgaaa

SEQ ID NO: 680391 - RNA, 24 nt, Human
uuugaaaagaaaaugaaaaacaag

SEQ ID NO: 680392 - RNA, 24 nt, Human
uuuuggggcuacaagcaacuuccc

SEQ ID NO: 680393 - RNA, 18 nt, Human
caccuugccucuggggug

SEQ ID NO: 680394 - RNA, 24 nt, Human
cagggcuccacgucagucacuggg

SEQ ID NO: 680395 - RNA, 21 nt, Human
ccccuuuucccguuuucgccc

SEQ ID NO: 680396 - RNA, 23 nt, Human
cucuacgcgaagcccagggcucc

SEQ ID NO: 680397 - RNA, 19 nt, Human
gacucuacgcgaagcccag

SEQ ID NO: 680398 - RNA, 19 nt, Human
gcccagggcuccacgucag

SEQ ID NO: 680399 - RNA, 22 nt, Human
gggguguugcgcaguccaguca

SEQ ID NO: 680400 - RNA, 18 nt, Human
uccaggucugcagagcau

SEQ ID NO: 680401 - RNA, 18 nt, Human
uccgucccaguggggagg

SEQ ID NO: 680402 - RNA, 18 nt, Human
ucuacgcgaagcccaggg

SEQ ID NO: 680403 - RNA, 23 nt, Human
ugaugcuuggggggcagcugcug

SEQ ID NO: 680404 - RNA, 18 nt, Human
uggccggagggcacaggg

SEQ ID NO: 680405 - RNA, 19 nt, Human
uggggaggggcagggaucc

SEQ ID NO: 680406 - RNA, 20 nt, Human
uggggggcagcugcugcuac

SEQ ID NO: 680407 - RNA, 19 nt, Human
uuccaggucugcagagcau

SEQ ID NO: 680408 - RNA, 22 nt, Human
uuggggggcagcugcugcuacg

SEQ ID NO: 680409 - RNA, 20 nt, Human
uuuuuuuuuuuuuuuuccag

SEQ ID NO: 680410 - RNA, 23 nt, Human
uuuuuuuuuuuuuuuuuuccagg

SEQ ID NO: 680411 - RNA, 23 nt, Human
uuuuuuuuuuuuuuuuuuuucca

SEQ ID NO: 680412 - RNA, 24 nt, Human
uuuuuuuuuuuuuuuuuuuuuccu

SEQ ID NO: 680413 - RNA, 24 nt, Human
aaaacacaauacacuguuucacaa

SEQ ID NO: 680414 - RNA, 18 nt, Human
aaacaaaacaaaacaaaa

SEQ ID NO: 680415 - RNA, 24 nt, Human
aaacacaauacacuguuucacaaa

SEQ ID NO: 680416 - RNA, 23 nt, Human
aaacagguuuucucuucaugcuu

SEQ ID NO: 680417 - RNA, 21 nt, Human
aaagaagccaaauccaccuuc

SEQ ID NO: 680418 - RNA, 19 nt, Human
aaagcaaaacaaaacaaaa

SEQ ID NO: 680419 - RNA, 22 nt, Human
aacacuccuacccuggagaccu

SEQ ID NO: 680420 - RNA, 21 nt, Human
aacccgauauacaaaaaugca

SEQ ID NO: 680421 - RNA, 26 nt, Human
aacuuccagaaugguguuucuaggau

SEQ ID NO: 680422 - RNA, 18 nt, Human
aagaggaaagugcuuggc

SEQ ID NO: 680423 - RNA, 21 nt, Human
aagcaaaacaaaacaaaacaa

SEQ ID NO: 680424 - RNA, 22 nt, Human
aagcaaaacaaaacaaaacaaa

SEQ ID NO: 680425 - RNA, 20 nt, Human
aagcagaggggagguuacuu

SEQ ID NO: 680426 - RNA, 25 nt, Human
aagcagcagcucuugauaggguuug

SEQ ID NO: 680427 - RNA, 21 nt, Human
aagcauacacacucuggggcc

SEQ ID NO: 680428 - RNA, 21 nt, Human
aaggcuucugaucuuuguguu

SEQ ID NO: 680429 - RNA, 20 nt, Human
aauuucugaagaacuggaug

SEQ ID NO: 680430 - RNA, 23 nt, Human
acauccccuccccuuuucacagu

SEQ ID NO: 680431 - RNA, 18 nt, Human
acccacaccaaggaagug

SEQ ID NO: 680432 - RNA, 19 nt, Human
acccccagugggaggugcu

SEQ ID NO: 680433 - RNA, 26 nt, Human
acccuagauaaccucguucuguguua

SEQ ID NO: 680434 - RNA, 20 nt, Human
acccuccugcaggcuccccc

SEQ ID NO: 680435 - RNA, 23 nt, Human
accuccacccccaaccccauaau

SEQ ID NO: 680436 - RNA, 20 nt, Human
agaaacugaagauggaaaag

SEQ ID NO: 680437 - RNA, 22 nt, Human
agaaagugacaccuaagcagag

SEQ ID NO: 680438 - RNA, 22 nt, Human
agaaagugacaccuaagcagag

SEQ ID NO: 680439 - RNA, 23 nt, Human
agaaagugacaccuaagcagagg

SEQ ID NO: 680440 - RNA, 21 nt, Human
agagcccucccacauccauau

SEQ ID NO: 680441 - RNA, 21 nt, Human
agaggaaagugcuuggcacag

SEQ ID NO: 680442 - RNA, 18 nt, Human
agaugaggcuggaggauc

SEQ ID NO: 680443 - RNA, 22 nt, Human
agauuccccuuucuccuccacc

SEQ ID NO: 680444 - RNA, 21 nt, Human
agcaaaacagcccguucacuu

SEQ ID NO: 680445 - RNA, 19 nt, Human
agcaggcaggcgggcgggc

SEQ ID NO: 680446 - RNA, 18 nt, Human
agcauacacacucugggg

SEQ ID NO: 680447 - RNA, 19 nt, Human
agccccugcugcugcuugc

SEQ ID NO: 680448 - RNA, 23 nt, Human
agccggaguuccucgggggcagc

SEQ ID NO: 680449 - RNA, 22 nt, Human
aggagcuggagcggucucuagg

SEQ ID NO: 680450 - RNA, 20 nt, Human
aggcaggcgggcgggccggc

SEQ ID NO: 680451 - RNA, 21 nt, Human
aggcauuucaagcaauguuga

SEQ ID NO: 680452 - RNA, 19 nt, Human
aggccaugcaaguuggagc

SEQ ID NO: 680453 - RNA, 19 nt, Human
aggcggccgggaugagaag

SEQ ID NO: 680454 - RNA, 23 nt, Human
aggcucuaacagacacagcacca

SEQ ID NO: 680455 - RNA, 28 nt, Human
aggucccuccgccuggcauccucugccc

SEQ ID NO: 680456 - RNA, 21 nt, Human
agucuguuacccagaugauaa

SEQ ID NO: 680457 - RNA, 21 nt, Human
auccagaaccuucucaaaaac

SEQ ID NO: 680458 - RNA, 22 nt, Human
aucccgcucccaggucccuccg

SEQ ID NO: 680459 - RNA, 21 nt, Human
auggccuaguguguggugugu

SEQ ID NO: 680460 - RNA, 22 nt, Human
caaaacaaaacaaaacaaaacu

SEQ ID NO: 680461 - RNA, 23 nt, Human
caaaacaaaacaaaacaaaacuu

SEQ ID NO: 680462 - RNA, 22 nt, Human
caaaacaaaacuucucaaacag

SEQ ID NO: 680463 - RNA, 21 nt, Human
caaaacagcccguucacuuca

SEQ ID NO: 680464 - RNA, 21 nt, Human
caaauugcaaaacacuguuca

SEQ ID NO: 680465 - RNA, 22 nt, Human
caacacagaacuguccuuuugu

SEQ ID NO: 680466 - RNA, 23 nt, Human
caacccuagauaaccucguucug

SEQ ID NO: 680467 - RNA, 20 nt, Human
cacaaccuugcuuugccuuu

SEQ ID NO: 680468 - RNA, 19 nt, Human
caccaaggaagugcuuaac

SEQ ID NO: 680469 - RNA, 19 nt, Human
cacccccaaccccauaauc

SEQ ID NO: 680470 - RNA, 21 nt, Human
caccugugucagucacuuggg

SEQ ID NO: 680471 - RNA, 18 nt, Human
cacgcagagcaugguggc

SEQ ID NO: 680472 - RNA, 21 nt, Human
cagagagucaucuccaggcac

SEQ ID NO: 680473 - RNA, 21 nt, Human
cagccggaguuccucgggggc

SEQ ID NO: 680474 - RNA, 20 nt, Human
cagggcucaccuguuuccuc

SEQ ID NO: 680475 - RNA, 19 nt, Human
cagugacagaggagcgacg

SEQ ID NO: 680476 - RNA, 20 nt, Human
ccagaauaccacccucuauc

SEQ ID NO: 680477 - RNA, 21 nt, Human
cccccaaccccauaaucucug

SEQ ID NO: 680478 - RNA, 20 nt, Human
cccccagcgccgacuucauu

SEQ ID NO: 680479 - RNA, 18 nt, Human
ccccuuucuccuccaccu

SEQ ID NO: 680480 - RNA, 25 nt, Human
cccgcagcuggagcgcccguucccu

SEQ ID NO: 680481 - RNA, 19 nt, Human
cccgccccaucugcagggc

SEQ ID NO: 680482 - RNA, 19 nt, Human
cccuccugcaggcuccccc

SEQ ID NO: 680483 - RNA, 22 nt, Human
cccucugcagccgcugccugag

SEQ ID NO: 680484 - RNA, 21 nt, Human
cccugcccgccccaucugcag

SEQ ID NO: 680485 - RNA, 19 nt, Human
cccugcugcugcuugcugc

SEQ ID NO: 680486 - RNA, 22 nt, Human
ccgcucccaggucccuccgccu

SEQ ID NO: 680487 - RNA, 18 nt, Human
ccgcugccugaggucucc

SEQ ID NO: 680488 - RNA, 25 nt, Human
ccuaaacuugauaugcugagaaagu

SEQ ID NO: 680489 - RNA, 22 nt, Human
ccuccaaagauguuugaggagc

SEQ ID NO: 680490 - RNA, 23 nt, Human
ccuccacuguuggccacccuccu

SEQ ID NO: 680491 - RNA, 19 nt, Human
ccucccacauccauaucag

SEQ ID NO: 680492 - RNA, 23 nt, Human
ccucugcugccugucuucuguuu

SEQ ID NO: 680493 - RNA, 23 nt, Human
ccugcaggcucccccagcgccga

SEQ ID NO: 680494 - RNA, 18 nt, Human
ccugcgcccggcucgccc

SEQ ID NO: 680495 - RNA, 20 nt, Human
ccuggggugagaacgugagg

SEQ ID NO: 680496 - RNA, 19 nt, Human
ccugugggcagccaaacuu

SEQ ID NO: 680497 - RNA, 24 nt, Human
ccugugggcagccaaacuuccaga

SEQ ID NO: 680498 - RNA, 23 nt, Human
cgggggcagcagugacagaggag

SEQ ID NO: 680499 - RNA, 24 nt, Human
cguagcgcgccuccggcagucuca

SEQ ID NO: 680500 - RNA, 23 nt, Human
cuaaaaaaaaagagugagggaau

SEQ ID NO: 680501 - RNA, 26 nt, Human
cuaaacagucaggauggagucagaga

SEQ ID NO: 680502 - RNA, 21 nt, Human
cuaaggcucuaacagacacag

SEQ ID NO: 680503 - RNA, 22 nt, Human
cuacuagaugacucuuaucuac

SEQ ID NO: 680504 - RNA, 20 nt, Human
cuagaccucagcuuccccac

SEQ ID NO: 680505 - RNA, 19 nt, Human
cucacaagacagcauuucc

SEQ ID NO: 680506 - RNA, 26 nt, Human
cucaccucuagaccuccacccccaaa

SEQ ID NO: 680507 - RNA, 21 nt, Human
cuccacuguuggccacccucc

SEQ ID NO: 680508 - RNA, 20 nt, Human
cuccugcgcccggcucgccc

SEQ ID NO: 680509 - RNA, 21 nt, Human
cucugcucuuaccugcucccc

SEQ ID NO: 680510 - RNA, 20 nt, Human
cugcacuuuaggcgagggag

SEQ ID NO: 680511 - RNA, 22 nt, Human
cuucacuccacucggugaagcg

SEQ ID NO: 680512 - RNA, 19 nt, Human
cuucuuuaccagaauacca

SEQ ID NO: 680513 - RNA, 19 nt, Human
cuuggcacuugcuccgcuu

SEQ ID NO: 680514 - RNA, 22 nt, Human
gaacggaaaggagguuuccaag

SEQ ID NO: 680515 - RNA, 19 nt, Human
gaccuccacccccaacccc

SEQ ID NO: 680516 - RNA, 21 nt, Human
gaccuccacccccaaccccau

SEQ ID NO: 680517 - RNA, 24 nt, Human
gagauuccccuuucuccuccaccu

SEQ ID NO: 680518 - RNA, 19 nt, Human
gagccucccuccacuccag

SEQ ID NO: 680519 - RNA, 23 nt, Human
gcaaaacaaaacaaaacaaaacu

SEQ ID NO: 680520 - RNA, 20 nt, Human
gcaccuggugaaaagguuaa

SEQ ID NO: 680521 - RNA, 25 nt, Human
gcagagaaagggcuaaaaaccagaa

SEQ ID NO: 680522 - RNA, 20 nt, Human
gcaugugaucaccacugcuc

SEQ ID NO: 680523 - RNA, 22 nt, Human
gcccggcucgccccucugcagc

SEQ ID NO: 680524 - RNA, 24 nt, Human
gcccggcucgccccucugcagccg

SEQ ID NO: 680525 - RNA, 19 nt, Human
gccuuuuucucucuuuucc

SEQ ID NO: 680526 - RNA, 20 nt, Human
ggcacugcguccggccccgc

SEQ ID NO: 680527 - RNA, 21 nt, Human
ggcagggcgaucuggcaugug

SEQ ID NO: 680528 - RNA, 25 nt, Human
ggcccagagcuuuuguucugaaagc

SEQ ID NO: 680529 - RNA, 23 nt, Human
gggaugagaagcagccggaguuc

SEQ ID NO: 680530 - RNA, 20 nt, Human
gggaugggggugaggauguu

SEQ ID NO: 680531 - RNA, 19 nt, Human
gggcagcagugacagagga

SEQ ID NO: 680532 - RNA, 20 nt, Human
gggcagcagugacagaggag

SEQ ID NO: 680533 - RNA, 21 nt, Human
gggcagcagugacagaggagc

SEQ ID NO: 680534 - RNA, 18 nt, Human
gggcauuagaugaggcug

SEQ ID NO: 680535 - RNA, 19 nt, Human
gggcgccucgggcacugcg

SEQ ID NO: 680536 - RNA, 23 nt, Human
ggggaugggguguuucaacacag

SEQ ID NO: 680537 - RNA, 18 nt, Human
gggggcagcagugacaga

SEQ ID NO: 680538 - RNA, 18 nt, Human
ggggugagaacgugaggg

SEQ ID NO: 680539 - RNA, 18 nt, Human
gucccgcgcgcagcuuca

SEQ ID NO: 680540 - RNA, 21 nt, Human
gugacugcugaucugaaaaug

SEQ ID NO: 680541 - RNA, 21 nt, Human
guguagaacauuucacccaca

SEQ ID NO: 680542 - RNA, 24 nt, Human
guucugcuuggcacuugcuccgcu

SEQ ID NO: 680543 - RNA, 21 nt, Human
guuuagguggguaaagaaagg

SEQ ID NO: 680544 - RNA, 25 nt, Human
uaaaaagcaaaacaaaacaaaacaa

SEQ ID NO: 680545 - RNA, 26 nt, Human
uaaaaagcaaaacaaaacaaaacaaa

SEQ ID NO: 680546 - RNA, 24 nt, Human
uaacuugcucuaaggcucuaacag

SEQ ID NO: 680547 - RNA, 18 nt, Human
uaacuuuagagcccuccc

SEQ ID NO: 680548 - RNA, 23 nt, Human
uaagcagaggggagguuacuugu

SEQ ID NO: 680549 - RNA, 22 nt, Human
uacaaaaaugcagacuuacaaa

SEQ ID NO: 680550 - RNA, 26 nt, Human
uacaaaacacaauacacuguuucaca

SEQ ID NO: 680551 - RNA, 24 nt, Human
uaccacauccccuccccuuuucac

SEQ ID NO: 680552 - RNA, 21 nt, Human
uaccugcuccccauucagaau

SEQ ID NO: 680553 - RNA, 18 nt, Human
uagauggauaguuuaggu

SEQ ID NO: 680554 - RNA, 24 nt, Human
uagcagagagucaucuccaggcac

SEQ ID NO: 680555 - RNA, 23 nt, Human
uauaguguucccgggcuggaggu

SEQ ID NO: 680556 - RNA, 18 nt, Human
uaugcaaagugcagggca

SEQ ID NO: 680557 - RNA, 22 nt, Human
uauuaaaaagcaaaacaaaaca

SEQ ID NO: 680558 - RNA, 20 nt, Human
uauuacuguggcaccuggug

SEQ ID NO: 680559 - RNA, 22 nt, Human
ucaccucuagaccuccaccccc

SEQ ID NO: 680560 - RNA, 20 nt, Human
ucagccaauuaaucacuagg

SEQ ID NO: 680561 - RNA, 23 nt, Human
ucagccuuccgggcugcacagag

SEQ ID NO: 680562 - RNA, 21 nt, Human
ucauuagagggaccaaaacca

SEQ ID NO: 680563 - RNA, 21 nt, Human
uccaaaggcaguugcaaccua

SEQ ID NO: 680564 - RNA, 18 nt, Human
ucccaggagcuggagcgg

SEQ ID NO: 680565 - RNA, 21 nt, Human
ucccaggagcuggagcggucu

SEQ ID NO: 680566 - RNA, 25 nt, Human
ucccaggucccuccgccuggcaucc

SEQ ID NO: 680567 - RNA, 23 nt, Human
ucccccagcgccgacuucauuuu

SEQ ID NO: 680568 - RNA, 18 nt, Human
uccccuccccuuuucaca

SEQ ID NO: 680569 - RNA, 21 nt, Human
uccgccuggcauccucugccc

SEQ ID NO: 680570 - RNA, 22 nt, Human
uccuccacuguuggccacccuc

SEQ ID NO: 680571 - RNA, 23 nt, Human
uccuccacuguuggccacccucc

SEQ ID NO: 680572 - RNA, 19 nt, Human
uccuggccaguguuuuggc

SEQ ID NO: 680573 - RNA, 20 nt, Human
ucgccuggauucuuuuccuu

SEQ ID NO: 680574 - RNA, 22 nt, Human
ucucucuucucucgcuacuucc

SEQ ID NO: 680575 - RNA, 18 nt, Human
ucucugagccucccucca

SEQ ID NO: 680576 - RNA, 20 nt, Human
ucucuucucucgcuacuucc

SEQ ID NO: 680577 - RNA, 21 nt, Human
ucugcuuggcacuugcuccgc

SEQ ID NO: 680578 - RNA, 19 nt, Human
ucuguuccagcuccucuga

SEQ ID NO: 680579 - RNA, 23 nt, Human
ugaaagaacagaggcagagcuga

SEQ ID NO: 680580 - RNA, 25 nt, Human
ugaagaacuggauggguuuucuguu

SEQ ID NO: 680581 - RNA, 19 nt, Human
ugaagauggaaaagaccug

SEQ ID NO: 680582 - RNA, 20 nt, Human
ugacccauauuccuuucccu

SEQ ID NO: 680583 - RNA, 22 nt, Human
ugaccucuaacuuuagagcccu

SEQ ID NO: 680584 - RNA, 20 nt, Human
ugagaacgugaggggauggg

SEQ ID NO: 680585 - RNA, 19 nt, Human
ugagacaccuuuccaguga

SEQ ID NO: 680586 - RNA, 21 nt, Human
ugagcaugcuuuaucaugugc

SEQ ID NO: 680587 - RNA, 19 nt, Human
ugagccucaaaggaguuga

SEQ ID NO: 680588 - RNA, 21 nt, Human
ugagcuugagaggagcugcug

SEQ ID NO: 680589 - RNA, 22 nt, Human
ugaggaugggggauugacuuga

SEQ ID NO: 680590 - RNA, 22 nt, Human
ugaguaacaauuuuaucucuug

SEQ ID NO: 680591 - RNA, 21 nt, Human
ugagugggugugaggaugggg

SEQ ID NO: 680592 - RNA, 24 nt, Human
ugcaaaacacuguucaguuacuac

SEQ ID NO: 680593 - RNA, 19 nt, Human
ugccugaggucuccgccuc

SEQ ID NO: 680594 - RNA, 18 nt, Human
uggcacagcuccugaacu

SEQ ID NO: 680595 - RNA, 26 nt, Human
uggcaguaagccugcuguuguccgga

SEQ ID NO: 680596 - RNA, 20 nt, Human
uggcaugugaucaccacugc

SEQ ID NO: 680597 - RNA, 23 nt, Human
uggccagguaguuccuccaaaga

SEQ ID NO: 680598 - RNA, 22 nt, Human
uggcucuugccugguccaauca

SEQ ID NO: 680599 - RNA, 26 nt, Human
uggcuggagcaaaacagcccguucac

SEQ ID NO: 680600 - RNA, 21 nt, Human
uggggguggaacaaugagucc

SEQ ID NO: 680601 - RNA, 18 nt, Human
uggguggggauggcuaag

SEQ ID NO: 680602 - RNA, 25 nt, Human
uguaauguggauugagguacaccug

SEQ ID NO: 680603 - RNA, 23 nt, Human
ugugcuaaaauuauuaaaaagca

SEQ ID NO: 680604 - RNA, 18 nt, Human
uguguagaacauuucacc

SEQ ID NO: 680605 - RNA, 21 nt, Human
uguuucugcuuaccacauccc

SEQ ID NO: 680606 - RNA, 19 nt, Human
uucacaaauugcaaaacac

SEQ ID NO: 680607 - RNA, 18 nt, Human
uucaucuguggaguuggu

SEQ ID NO: 680608 - RNA, 21 nt, Human
uuccugaauggucgaagcuua

SEQ ID NO: 680609 - RNA, 26 nt, Human
uuccuggggucgcguuggagagggcu

SEQ ID NO: 680610 - RNA, 21 nt, Human
uucugggccuggggugagaac

SEQ ID NO: 680611 - RNA, 19 nt, Human
uugcaaacacauuaaaaug

SEQ ID NO: 680612 - RNA, 21 nt, Human
uugcuccgcuuaccacuuuuc

SEQ ID NO: 680613 - RNA, 19 nt, Human
uuguacaagaaaaguggcu

SEQ ID NO: 680614 - RNA, 24 nt, Human
uuguguuuucagggcucaccuguu

SEQ ID NO: 680615 - RNA, 18 nt, Human
uuuaagaagaccuagacc

SEQ ID NO: 680616 - RNA, 23 nt, Human
uuuuuaaugccucugcugccugu

SEQ ID NO: 680617 - RNA, 18 nt, Human
aacaugagccaugagaga

SEQ ID NO: 680618 - RNA, 18 nt, Human
aaguucuccucuuguucu

SEQ ID NO: 680619 - RNA, 18 nt, Human
agggaagugaacaugagc

SEQ ID NO: 680620 - RNA, 23 nt, Human
cacgccugucagcuuucuccucc

SEQ ID NO: 680621 - RNA, 20 nt, Human
cauaacucagccccacaucu

SEQ ID NO: 680622 - RNA, 19 nt, Human
ccaaaaaagaaaccucuuc

SEQ ID NO: 680623 - RNA, 23 nt, Human
ccagcgcuugagaccagaaguuc

SEQ ID NO: 680624 - RNA, 25 nt, Human
ccagucuucauaacucagccccaca

SEQ ID NO: 680625 - RNA, 22 nt, Human
ccugacuguccgcagguuucca

SEQ ID NO: 680626 - RNA, 25 nt, Human
ccugcaaaaccacuggcuguggacc

SEQ ID NO: 680627 - RNA, 25 nt, Human
cggcagccccugcaaaaccacuggc

SEQ ID NO: 680628 - RNA, 20 nt, Human
cucagaauuccugacugucc

SEQ ID NO: 680629 - RNA, 20 nt, Human
cucuguuuuggacuccucca

SEQ ID NO: 680630 - RNA, 18 nt, Human
cugucagcuuucuccucc

SEQ ID NO: 680631 - RNA, 21 nt, Human
gccugucagcuuucuccucca

SEQ ID NO: 680632 - RNA, 21 nt, Human
uaaaagaccccugugcuugca

SEQ ID NO: 680633 - RNA, 26 nt, Human
ucaacuugaaaagggaagugaacaug

SEQ ID NO: 680634 - RNA, 24 nt, Human
ucagcuuucuccuccaguucucuc

SEQ ID NO: 680635 - RNA, 25 nt, Human
ucagcuuucuccuccaguucucuca

SEQ ID NO: 680636 - RNA, 18 nt, Human
ugcaaaaccacuggcugu

SEQ ID NO: 680637 - RNA, 25 nt, Human
agcaugguggggaaaauucaggagg

SEQ ID NO: 680638 - RNA, 24 nt, Human
aggugcgcgcccugagccuugcgc

SEQ ID NO: 680639 - RNA, 19 nt, Human
auggaggcagcggugacag

SEQ ID NO: 680640 - RNA, 23 nt, Human
auuuuguccccauguaccauuua

SEQ ID NO: 680641 - RNA, 18 nt, Human
caagccaauaaagauagc

SEQ ID NO: 680642 - RNA, 19 nt, Human
cauuuuguccccauguacc

SEQ ID NO: 680643 - RNA, 20 nt, Human
ccacuagaagaaaaucugcc

SEQ ID NO: 680644 - RNA, 22 nt, Human
cccaggcagccgcuccucgagg

SEQ ID NO: 680645 - RNA, 26 nt, Human
cccgcggcgguggcgcucgcucucuc

SEQ ID NO: 680646 - RNA, 24 nt, Human
ccuugcgcccccaggcagccgcuc

SEQ ID NO: 680647 - RNA, 21 nt, Human
cgcacugcuucccuagagcaa

SEQ ID NO: 680648 - RNA, 18 nt, Human
cgcgcaggccggcgugcu

SEQ ID NO: 680649 - RNA, 21 nt, Human
cggcgguggcgcucgcucucu

SEQ ID NO: 680650 - RNA, 18 nt, Human
cggcugcggggcccgcgg

SEQ ID NO: 680651 - RNA, 19 nt, Human
cgguugucaugagauagca

SEQ ID NO: 680652 - RNA, 24 nt, Human
cguaaccaggcgacuaugcuugcc

SEQ ID NO: 680653 - RNA, 22 nt, Human
cuagaagaaaaucugccaaaag

SEQ ID NO: 680654 - RNA, 24 nt, Human
cucguagcggccuuggcugcagcu

SEQ ID NO: 680655 - RNA, 19 nt, Human
gaagagacgccuugucagc

SEQ ID NO: 680656 - RNA, 23 nt, Human
gaagagacgccuugucagcccuc

SEQ ID NO: 680657 - RNA, 19 nt, Human
gauagcacuacugaucucg

SEQ ID NO: 680658 - RNA, 20 nt, Human
gcagaacggcugcggggccc

SEQ ID NO: 680659 - RNA, 23 nt, Human
gcgcaggccggcgugcuuuccag

SEQ ID NO: 680660 - RNA, 20 nt, Human
ggcgauggaggcagcgguga

SEQ ID NO: 680661 - RNA, 20 nt, Human
gggccguaaccaggcgacua

SEQ ID NO: 680662 - RNA, 22 nt, Human
ggggaaaauucaggaggguucu

SEQ ID NO: 680663 - RNA, 23 nt, Human
guaaccaggcgacuaugcuugcc

SEQ ID NO: 680664 - RNA, 18 nt, Human
gucaugaucuucuaaacc

SEQ ID NO: 680665 - RNA, 21 nt, Human
uaaaagcccauguuuucuaag

SEQ ID NO: 680666 - RNA, 18 nt, Human
uaaccaggcgacuaugcu

SEQ ID NO: 680667 - RNA, 21 nt, Human
uaccauuuaguuagaugaucc

SEQ ID NO: 680668 - RNA, 20 nt, Human
uagcuacgaacaagcgaugu

SEQ ID NO: 680669 - RNA, 24 nt, Human
uagugucggcgauggaggcagcgg

SEQ ID NO: 680670 - RNA, 20 nt, Human
ucacacgcacugcuucccuu

SEQ ID NO: 680671 - RNA, 22 nt, Human
ugagucgcaaaucaagaaauua

SEQ ID NO: 680672 - RNA, 19 nt, Human
ugcccuuggcaucuucccc

SEQ ID NO: 680673 - RNA, 23 nt, Human
ugcgcccccaggcagccgcuccu

SEQ ID NO: 680674 - RNA, 21 nt, Human
uucuucgucgguugucaugag

SEQ ID NO: 680675 - RNA, 21 nt, Human
uugaagagacgccuugucagc

SEQ ID NO: 680676 - RNA, 23 nt, Human
uugcgcccccaggcagccgcucc

SEQ ID NO: 680677 - RNA, 26 nt, Human
uuuuacaguugcuuauuaacuaugcu

SEQ ID NO: 680678 - RNA, 18 nt, Human
uuuucuaaggccacuaga

SEQ ID NO: 680679 - RNA, 23 nt, Human
aaauagacacacauacauuuccc

SEQ ID NO: 680680 - RNA, 26 nt, Human
aacaaaugacuagagaauaucugcaa

SEQ ID NO: 680681 - RNA, 21 nt, Human
aacauuuuaguucuuaaagcu

SEQ ID NO: 680682 - RNA, 19 nt, Human
aagcuucaacaugagaaau

SEQ ID NO: 680683 - RNA, 22 nt, Human
aaggagcugccuguggcccggg

SEQ ID NO: 680684 - RNA, 20 nt, Human
acauagaaucuucuaaaaca

SEQ ID NO: 680685 - RNA, 21 nt, Human
agaaauguugaccacacacug

SEQ ID NO: 680686 - RNA, 19 nt, Human
agacacacauacauuuccc

SEQ ID NO: 680687 - RNA, 18 nt, Human
agacauaaaauguccaag

SEQ ID NO: 680688 - RNA, 19 nt, Human
agcaggcgguucgagcggc

SEQ ID NO: 680689 - RNA, 24 nt, Human
auaaauaaauagaagacuucuccu

SEQ ID NO: 680690 - RNA, 19 nt, Human
auccagguggccucugcag

SEQ ID NO: 680691 - RNA, 26 nt, Human
auuccucagccucuaucacaguggcu

SEQ ID NO: 680692 - RNA, 24 nt, Human
caaaauagacacacauacauuucc

SEQ ID NO: 680693 - RNA, 22 nt, Human
caauaagcuuccuccuuccuuc

SEQ ID NO: 680694 - RNA, 23 nt, Human
cacuggccauuuucuuggauucc

SEQ ID NO: 680695 - RNA, 22 nt, Human
ccucucugcucuaacacagagg

SEQ ID NO: 680696 - RNA, 18 nt, Human
ccuguggcccgggcucug

SEQ ID NO: 680697 - RNA, 18 nt, Human
ccuucaggaacagccacc

SEQ ID NO: 680698 - RNA, 21 nt, Human
cuaucuucaaauuaaauauga

SEQ ID NO: 680699 - RNA, 20 nt, Human
cucuucuguuccuguaaggg

SEQ ID NO: 680700 - RNA, 19 nt, Human
cucuuuccucuucuguucc

SEQ ID NO: 680701 - RNA, 21 nt, Human
cugcaaaccuucuaucuucaa

SEQ ID NO: 680702 - RNA, 20 nt, Human
cugugaaaucauuucaauaa

SEQ ID NO: 680703 - RNA, 24 nt, Human
cuucuccuaagugaugcucaaaca

SEQ ID NO: 680704 - RNA, 25 nt, Human
gaggagagcuggcaaggagcugccc

SEQ ID NO: 680705 - RNA, 21 nt, Human
gcaaaccuucuaucuucaaau

SEQ ID NO: 680706 - RNA, 22 nt, Human
gcaaaccuucuaucuucaaauu

SEQ ID NO: 680707 - RNA, 21 nt, Human
gcaauccagguggccucugca

SEQ ID NO: 680708 - RNA, 19 nt, Human
gcagggccuccuucaggaa

SEQ ID NO: 680709 - RNA, 24 nt, Human
gcucuaacacagagggaaacacug

SEQ ID NO: 680710 - RNA, 23 nt, Human
gucucucuuuccucuucuguucc

SEQ ID NO: 680711 - RNA, 23 nt, Human
guuacaaaauagacacacauaca

SEQ ID NO: 680712 - RNA, 18 nt, Human
uauuuuauuuuccuguuc

SEQ ID NO: 680713 - RNA, 20 nt, Human
ucaaauuaaauaugaaucag

SEQ ID NO: 680714 - RNA, 22 nt, Human
ucaauaaauaucgaaaccucuc

SEQ ID NO: 680715 - RNA, 19 nt, Human
ucaggaacagccaccaaua

SEQ ID NO: 680716 - RNA, 21 nt, Human
uccuucaggaacagccaccaa

SEQ ID NO: 680717 - RNA, 18 nt, Human
ucugcagcugugucucuc

SEQ ID NO: 680718 - RNA, 25 nt, Human
ugaaucaggauugaacuaacuuggg

SEQ ID NO: 680719 - RNA, 25 nt, Human
ugagaaauguugaccacacacugug

SEQ ID NO: 680720 - RNA, 19 nt, Human
ugcagcugugucucucuuu

SEQ ID NO: 680721 - RNA, 18 nt, Human
ugccuuacaagaaagaca

SEQ ID NO: 680722 - RNA, 19 nt, Human
uggcaaggagcugccugug

SEQ ID NO: 680723 - RNA, 20 nt, Human
uggcaaggagcugccugugg

SEQ ID NO: 680724 - RNA, 18 nt, Human
uuaggcgcaauccaggug

SEQ ID NO: 680725 - RNA, 21 nt, Human
uuucccugccgucacauugau

SEQ ID NO: 680726 - RNA, 18 nt, Human
uuucuuggauuccucagc

SEQ ID NO: 680727 - RNA, 21 nt, Human
aagcaagacauaaaaugucua

SEQ ID NO: 680728 - RNA, 24 nt, Human
aagcaagacauaaaaugucuaagg

SEQ ID NO: 680729 - RNA, 19 nt, Human
aaguagaacccucguaaga

SEQ ID NO: 680730 - RNA, 23 nt, Human
acgcugcagaauggacauuaaac

SEQ ID NO: 680731 - RNA, 20 nt, Human
caagacauaaaaugucuaag

SEQ ID NO: 680732 - RNA, 19 nt, Human
cacaucuuuaaauaacagc

SEQ ID NO: 680733 - RNA, 20 nt, Human
cacauuaaguccuuuccagc

SEQ ID NO: 680734 - RNA, 25 nt, Human
cacauuuaaaacccaucauauucca

SEQ ID NO: 680735 - RNA, 20 nt, Human
cacccuccaguuccccaccc

SEQ ID NO: 680736 - RNA, 21 nt, Human
cacccuccaguuccccacccu

SEQ ID NO: 680737 - RNA, 20 nt, Human
cacccuccaguuccccaccu

SEQ ID NO: 680738 - RNA, 18 nt, Human
cagcagacgcgucgggaa

SEQ ID NO: 680739 - RNA, 21 nt, Human
cauuuaaaacccaucauauuc

SEQ ID NO: 680740 - RNA, 23 nt, Human
cauuucaauccccccacccucca

SEQ ID NO: 680741 - RNA, 22 nt, Human
cccccacccuccaguuccccac

SEQ ID NO: 680742 - RNA, 19 nt, Human
gcugcuguucucuuuuuca

SEQ ID NO: 680743 - RNA, 22 nt, Human
gucauuuguacaaauguaacag

SEQ ID NO: 680744 - RNA, 23 nt, Human
gucauuuguacaaauguaacagu

SEQ ID NO: 680745 - RNA, 23 nt, Human
uaagaaauagucaaacacauuaa

SEQ ID NO: 680746 - RNA, 19 nt, Human
uacaagcaagacauaaaau

SEQ ID NO: 680747 - RNA, 20 nt, Human
uagauguguacauacauucc

SEQ ID NO: 680748 - RNA, 19 nt, Human
ucuaagggaaacuucagca

SEQ ID NO: 680749 - RNA, 20 nt, Human
ugaaacacacucacaucuuu

SEQ ID NO: 680750 - RNA, 24 nt, Human
ugcccuacaagcaagacauaaaau

SEQ ID NO: 680751 - RNA, 20 nt, Human
uggcugacacauuauggucu

SEQ ID NO: 680752 - RNA, 24 nt, Human
ugucauuuaucaagguggcugaca

SEQ ID NO: 680753 - RNA, 22 nt, Human
ugugcgagaagcgggagagcug

SEQ ID NO: 680754 - RNA, 24 nt, Human
uguguacauacauucccuuacccu

SEQ ID NO: 680755 - RNA, 19 nt, Human
uugaauaaauaacaacuga

SEQ ID NO: 680756 - RNA, 18 nt, Human
aggaccaucucuucuggg

SEQ ID NO: 680757 - RNA, 19 nt, Human
agguucgggggggcccugc

SEQ ID NO: 680758 - RNA, 21 nt, Human
auccagggggugcggugucug

SEQ ID NO: 680759 - RNA, 19 nt, Human
caaggacaaaccccugccc

SEQ ID NO: 680760 - RNA, 21 nt, Human
cagggggugcggugucugguc

SEQ ID NO: 680761 - RNA, 23 nt, Human
cagguucgggggggcccugcugg

SEQ ID NO: 680762 - RNA, 20 nt, Human
cauguccacuccaagagcag

SEQ ID NO: 680763 - RNA, 20 nt, Human
ccagggggugcggugucugg

SEQ ID NO: 680764 - RNA, 22 nt, Human
ccagggggugcggugucugguc

SEQ ID NO: 680765 - RNA, 20 nt, Human
ccaggucaucugccugcacc

SEQ ID NO: 680766 - RNA, 22 nt, Human
cggaaccgccagccacccgcca

SEQ ID NO: 680767 - RNA, 18 nt, Human
cggccuguggaggccccu

SEQ ID NO: 680768 - RNA, 24 nt, Human
cucagaccuaacggaaccgccagc

SEQ ID NO: 680769 - RNA, 19 nt, Human
gaggccccuggggguggcu

SEQ ID NO: 680770 - RNA, 22 nt, Human
gccccgaggggcuggccagcuc

SEQ ID NO: 680771 - RNA, 26 nt, Human
gccuguggaggccccuggggguggcu

SEQ ID NO: 680772 - RNA, 21 nt, Human
ggaaccgccagccacccgcca

SEQ ID NO: 680773 - RNA, 18 nt, Human
ggaggccccugggggugg

SEQ ID NO: 680774 - RNA, 19 nt, Human
ucaccaggucaucugccug

SEQ ID NO: 680775 - RNA, 22 nt, Human
ucacccauccgucugaccugga

SEQ ID NO: 680776 - RNA, 22 nt, Human
ucagaccuaacggaaccgccag

SEQ ID NO: 680777 - RNA, 18 nt, Human
uccaagagcaguagcacc

SEQ ID NO: 680778 - RNA, 22 nt, Human
uccacuccaagagcaguagcac

SEQ ID NO: 680779 - RNA, 18 nt, Human
ucgggggggcccugcugg

SEQ ID NO: 680780 - RNA, 18 nt, Human
ucucuucugggcugaaga

SEQ ID NO: 680781 - RNA, 20 nt, Human
ugagcaggguccccucggcu

SEQ ID NO: 680782 - RNA, 21 nt, Human
uggaggccccuggggguggcu

SEQ ID NO: 680783 - RNA, 26 nt, Human
uggcugggccuguguccugagcccuc

SEQ ID NO: 680784 - RNA, 24 nt, Human
ugggcugaagagcaucuucaccag

SEQ ID NO: 680785 - RNA, 20 nt, Human
ugugcagguucgggggggcc

SEQ ID NO: 680786 - RNA, 20 nt, Human
uucagagaggccuccgcucc

SEQ ID NO: 680787 - RNA, 23 nt, Human
aaaacaaaaaaugaaaaaaaccc

SEQ ID NO: 680788 - RNA, 23 nt, Human
aaaacaaaacaaaacaaaacaag

SEQ ID NO: 680789 - RNA, 23 nt, Human
aaaacaaaacaagaaaaacaaaa

SEQ ID NO: 680790 - RNA, 25 nt, Human
aaacaaaacaaaacaaaacaagaaa

SEQ ID NO: 680791 - RNA, 22 nt, Human
aagaaaacuccaaaaccaugca

SEQ ID NO: 680792 - RNA, 25 nt, Human
aagaacaaaacaaaacaaaacaaaa

SEQ ID NO: 680793 - RNA, 23 nt, Human
aagaagaacaaaacaaaacaaaa

SEQ ID NO: 680794 - RNA, 19 nt, Human
aagcacaccaagaagaaca

SEQ ID NO: 680795 - RNA, 20 nt, Human
aagcauggauaucacaaacc

SEQ ID NO: 680796 - RNA, 18 nt, Human
aaguacaugcaaaaaagc

SEQ ID NO: 680797 - RNA, 21 nt, Human
acaaaaaaugaaaaaaacccc

SEQ ID NO: 680798 - RNA, 21 nt, Human
acaaaacaaaacaaaacaaaa

SEQ ID NO: 680799 - RNA, 28 nt, Human
acaaaacaaaacaagaaaaacaaaaaag

SEQ ID NO: 680800 - RNA, 23 nt, Human
acaaaacaagaaaaacaaaaaau

SEQ ID NO: 680801 - RNA, 22 nt, Human
acaagaaaaacaaaaaaugaaa

SEQ ID NO: 680802 - RNA, 20 nt, Human
acaccaagaagaacaaaaca

SEQ ID NO: 680803 - RNA, 19 nt, Human
accaagaagaacaaaacaa

SEQ ID NO: 680804 - RNA, 21 nt, Human
acugaagacugccccaaauac

SEQ ID NO: 680805 - RNA, 23 nt, Human
agaaaaacaaaaaaugaaaaaaa

SEQ ID NO: 680806 - RNA, 22 nt, Human
agaaaacuccaaaaccaugcaa

SEQ ID NO: 680807 - RNA, 23 nt, Human
aucaaguacaugcaaaaaagcuu

SEQ ID NO: 680808 - RNA, 23 nt, Human
aucccacagugucccaaggcagu

SEQ ID NO: 680809 - RNA, 21 nt, Human
caaaaaagcuuucauuucacc

SEQ ID NO: 680810 - RNA, 23 nt, Human
caaaaagcacaccaagaagaaca

SEQ ID NO: 680811 - RNA, 23 nt, Human
caaaaagcacaccaagaagaaca

SEQ ID NO: 680812 - RNA, 21 nt, Human
caaaacaaaacaaaacaaaac

SEQ ID NO: 680813 - RNA, 25 nt, Human
caaaacaaaacaaaacaaaacaaga

SEQ ID NO: 680814 - RNA, 22 nt, Human
caaaacaaaacaagaaaaacaa

SEQ ID NO: 680815 - RNA, 21 nt, Human
cacaaaaaaagcaaagucuga

SEQ ID NO: 680816 - RNA, 27 nt, Human
cacaccaagaagaacaaaacaaaacaa

SEQ ID NO: 680817 - RNA, 19 nt, Human
cacagcacacacaaaaguu

SEQ ID NO: 680818 - RNA, 22 nt, Human
cacagcacacacaaaaguuuau

SEQ ID NO: 680819 - RNA, 21 nt, Human
cacaucaucugcaguauuucc

SEQ ID NO: 680820 - RNA, 19 nt, Human
caccaagaagaacaaaaca

SEQ ID NO: 680821 - RNA, 23 nt, Human
caccaagaagaacaaaacaaaac

SEQ ID NO: 680822 - RNA, 24 nt, Human
caccaagaagaacaaaacaaaaca

SEQ ID NO: 680823 - RNA, 21 nt, Human
cacugcauuccagugucugac

SEQ ID NO: 680824 - RNA, 21 nt, Human
cagcaucagauagaccaucuc

SEQ ID NO: 680825 - RNA, 24 nt, Human
caggaaaauguuaaguucuggucc

SEQ ID NO: 680826 - RNA, 21 nt, Human
caucuagggauggcugccuuc

SEQ ID NO: 680827 - RNA, 21 nt, Human
caugggcugucagcucccaag

SEQ ID NO: 680828 - RNA, 23 nt, Human
ccaaaaagcacaccaagaagaac

SEQ ID NO: 680829 - RNA, 24 nt, Human
ccaaaaagcacaccaagaagaaca

SEQ ID NO: 680830 - RNA, 24 nt, Human
ccaagaagaacaaaacaaaacaaa

SEQ ID NO: 680831 - RNA, 19 nt, Human
ccauccaaaaagcacacca

SEQ ID NO: 680832 - RNA, 25 nt, Human
cccaaauacaaacaaauuccauuuu

SEQ ID NO: 680833 - RNA, 18 nt, Human
cccacagugucccaaggc

SEQ ID NO: 680834 - RNA, 21 nt, Human
cccaugggcugucagcuccca

SEQ ID NO: 680835 - RNA, 24 nt, Human
ccuccaacugauaacuucacauca

SEQ ID NO: 680836 - RNA, 19 nt, Human
cucaggaaaauguuaaguu

SEQ ID NO: 680837 - RNA, 18 nt, Human
cuccauaaucaugcaagu

SEQ ID NO: 680838 - RNA, 18 nt, Human
cuccuccaacugauaacu

SEQ ID NO: 680839 - RNA, 21 nt, Human
cugccacagcacacacaaaag

SEQ ID NO: 680840 - RNA, 24 nt, Human
cugcccagaacagguacucaacaa

SEQ ID NO: 680841 - RNA, 22 nt, Human
cuggaacuacuuugccuuaaug

SEQ ID NO: 680842 - RNA, 19 nt, Human
gaaauguuaaucaaauaug

SEQ ID NO: 680843 - RNA, 22 nt, Human
gaacaaaacaaaacaaaacaaa

SEQ ID NO: 680844 - RNA, 18 nt, Human
gaagaaauagacccauaa

SEQ ID NO: 680845 - RNA, 18 nt, Human
gcacaccaagaagaacaa

SEQ ID NO: 680846 - RNA, 23 nt, Human
gcacaccaagaagaacaaaacaa

SEQ ID NO: 680847 - RNA, 22 nt, Human
gccccaaauacaaacaaauucc

SEQ ID NO: 680848 - RNA, 23 nt, Human
ggaauauauacacuuuagccccc

SEQ ID NO: 680849 - RNA, 18 nt, Human
ggacaagcauaauuuucu

SEQ ID NO: 680850 - RNA, 23 nt, Human
ggacaagcauaauuuucuuccau

SEQ ID NO: 680851 - RNA, 21 nt, Human
guaucuuuccagauaacuucc

SEQ ID NO: 680852 - RNA, 20 nt, Human
gucagagcuuucuucagagg

SEQ ID NO: 680853 - RNA, 22 nt, Human
guggaaggcaguuucuuaggaa

SEQ ID NO: 680854 - RNA, 23 nt, Human
uaaacaguuucuccuugcaguug

SEQ ID NO: 680855 - RNA, 23 nt, Human
uaacuuugugcauauagcguggg

SEQ ID NO: 680856 - RNA, 23 nt, Human
uacaaacaaauuccauuuuaaau

SEQ ID NO: 680857 - RNA, 21 nt, Human
uacuucaagaaaacuccaaaa

SEQ ID NO: 680858 - RNA, 20 nt, Human
uacuuugccuuaaugcccau

SEQ ID NO: 680859 - RNA, 21 nt, Human
uaggaagggaacaaggguucu

SEQ ID NO: 680860 - RNA, 21 nt, Human
uaggagagcuuucacgaccau

SEQ ID NO: 680861 - RNA, 23 nt, Human
uaguuauuuuggguaaaugggag

SEQ ID NO: 680862 - RNA, 20 nt, Human
uauuuuaaaucacuggaacu

SEQ ID NO: 680863 - RNA, 20 nt, Human
ucaagaaaacuccaaaacca

SEQ ID NO: 680864 - RNA, 20 nt, Human
ucaauggagaaaagaaagga

SEQ ID NO: 680865 - RNA, 21 nt, Human
ucacugcauuccagugucuga

SEQ ID NO: 680866 - RNA, 22 nt, Human
ucacugcauuccagugucugau

SEQ ID NO: 680867 - RNA, 18 nt, Human
ucagauagaccaucucca

SEQ ID NO: 680868 - RNA, 25 nt, Human
uccaaaaagcacaccaagaagaaca

SEQ ID NO: 680869 - RNA, 25 nt, Human
uccaaucuguaaaucugguuggcac

SEQ ID NO: 680870 - RNA, 18 nt, Human
ucccaagggcuaagacca

SEQ ID NO: 680871 - RNA, 21 nt, Human
ucccugccacagcacacacaa

SEQ ID NO: 680872 - RNA, 24 nt, Human
ucccugccacagcacacacaaaag

SEQ ID NO: 680873 - RNA, 20 nt, Human
ucucacaaaaaaagcaaagu

SEQ ID NO: 680874 - RNA, 21 nt, Human
ucucacaaaaaaagcaaaguc

SEQ ID NO: 680875 - RNA, 19 nt, Human
ucugguuggcacaaguugg

SEQ ID NO: 680876 - RNA, 24 nt, Human
ugaccuguccuuaguuguacuuca

SEQ ID NO: 680877 - RNA, 21 nt, Human
ugagaaaaguacugacuacau

SEQ ID NO: 680878 - RNA, 23 nt, Human
ugagaagcaaaagaacaguacaa

SEQ ID NO: 680879 - RNA, 18 nt, Human
ugagagucagagcuuucu

SEQ ID NO: 680880 - RNA, 18 nt, Human
ugagcuuccuaguccuca

SEQ ID NO: 680881 - RNA, 19 nt, Human
ugauuuaugauuauuuucu

SEQ ID NO: 680882 - RNA, 20 nt, Human
ugccacagcacacacaaaag

SEQ ID NO: 680883 - RNA, 21 nt, Human
ugcccagaacagguacucaac

SEQ ID NO: 680884 - RNA, 18 nt, Human
uggaagaaauagacccau

SEQ ID NO: 680885 - RNA, 19 nt, Human
uggauaguaguagauagug

SEQ ID NO: 680886 - RNA, 27 nt, Human
ugggaaggauguaaacagucgaccucc

SEQ ID NO: 680887 - RNA, 22 nt, Human
uguaauauacaugaaaccaaca

SEQ ID NO: 680888 - RNA, 19 nt, Human
ugugauauauacaugugug

SEQ ID NO: 680889 - RNA, 18 nt, Human
ugugugauauauacaugu

SEQ ID NO: 680890 - RNA, 19 nt, Human
ugugugauauauacaugug

SEQ ID NO: 680891 - RNA, 23 nt, Human
ugugugauauauacaugugugac

SEQ ID NO: 680892 - RNA, 21 nt, Human
uucacccguauauaaaugguc

SEQ ID NO: 680893 - RNA, 22 nt, Human
uuccugagagucagagcuuucu

SEQ ID NO: 680894 - RNA, 18 nt, Human
uucuuaggaagggaacaa

SEQ ID NO: 680895 - RNA, 27 nt, Human
uugaaucaaguucucucuccucuaauc

SEQ ID NO: 680896 - RNA, 19 nt, Human
uuuacugaagacugcccca

SEQ ID NO: 680897 - RNA, 21 nt, Human
uuucacgaccaugcuauagcu

SEQ ID NO: 680898 - RNA, 19 nt, Human
aaaaagccagggagggaca

SEQ ID NO: 680899 - RNA, 21 nt, Human
aaaccgccaaauugucauuua

SEQ ID NO: 680900 - RNA, 18 nt, Human
aaagcaaaugaggagacu

SEQ ID NO: 680901 - RNA, 22 nt, Human
aaauugucauuuacacuaagcu

SEQ ID NO: 680902 - RNA, 21 nt, Human
aagaugugcaaaugaaaugcu

SEQ ID NO: 680903 - RNA, 24 nt, Human
aaguacagcuuuauccauaaaccc

SEQ ID NO: 680904 - RNA, 18 nt, Human
accagucuggacuguucu

SEQ ID NO: 680905 - RNA, 20 nt, Human
acccaaaacaccaaaaucau

SEQ ID NO: 680906 - RNA, 22 nt, Human
acccuuauuaucuggagccccu

SEQ ID NO: 680907 - RNA, 21 nt, Human
accugucagaaaccugggcaa

SEQ ID NO: 680908 - RNA, 24 nt, Human
acugauuuuuuuccuaucuagagc

SEQ ID NO: 680909 - RNA, 21 nt, Human
acugccacauugugacagaag

SEQ ID NO: 680910 - RNA, 23 nt, Human
agaagacauagucucucuuccag

SEQ ID NO: 680911 - RNA, 19 nt, Human
agaagcaauuaacccaaaa

SEQ ID NO: 680912 - RNA, 20 nt, Human
agaagcaauuaacccaaaac

SEQ ID NO: 680913 - RNA, 18 nt, Human
agagcacucaauucacag

SEQ ID NO: 680914 - RNA, 19 nt, Human
auaucccaaguccaagaaa

SEQ ID NO: 680915 - RNA, 19 nt, Human
aucagagcacucaauucac

SEQ ID NO: 680916 - RNA, 20 nt, Human
cagcugcuccagcagcgaug

SEQ ID NO: 680917 - RNA, 24 nt, Human
caguccacuaugaaacuuuucuua

SEQ ID NO: 680918 - RNA, 23 nt, Human
ccaaaaaaagccagggagggaca

SEQ ID NO: 680919 - RNA, 23 nt, Human
ccaaaacaccaaaaucauuuccc

SEQ ID NO: 680920 - RNA, 20 nt, Human
ccaaaccauaccaguucaaa

SEQ ID NO: 680921 - RNA, 19 nt, Human
ccagcagcgauggugcucg

SEQ ID NO: 680922 - RNA, 20 nt, Human
ccaguucaaaggucugaaac

SEQ ID NO: 680923 - RNA, 21 nt, Human
ccaguucaaaggucugaaacc

SEQ ID NO: 680924 - RNA, 20 nt, Human
cccaaaccaaaaaaagccag

SEQ ID NO: 680925 - RNA, 19 nt, Human
cccugagaacaggaacaag

SEQ ID NO: 680926 - RNA, 24 nt, Human
cccuuaggucuaccccaaaccaaa

SEQ ID NO: 680927 - RNA, 20 nt, Human
ccuagcaguugcugcuaaua

SEQ ID NO: 680928 - RNA, 23 nt, Human
ccugggcaaauuuaauuuuaaga

SEQ ID NO: 680929 - RNA, 25 nt, Human
cuaccccaaaccaaaaaaagccagg

SEQ ID NO: 680930 - RNA, 21 nt, Human
cucaauucacaggcaaaaaaa

SEQ ID NO: 680931 - RNA, 25 nt, Human
cuccagcagcgauggugcucgugcc

SEQ ID NO: 680932 - RNA, 23 nt, Human
cugauuuuuuuccuaucuagagc

SEQ ID NO: 680933 - RNA, 23 nt, Human
cugguggcagucgucacccugag

SEQ ID NO: 680934 - RNA, 22 nt, Human
cuuugcuuuggugaauguuugg

SEQ ID NO: 680935 - RNA, 21 nt, Human
gaacaggaacaaggcaaagaa

SEQ ID NO: 680936 - RNA, 22 nt, Human
gagaacaggaacaaggcaaaga

SEQ ID NO: 680937 - RNA, 22 nt, Human
gagaacaggaacaaggcaaaga

SEQ ID NO: 680938 - RNA, 24 nt, Human
gcgcagggccugaaggcagcugcu

SEQ ID NO: 680939 - RNA, 20 nt, Human
gcuuuauccauaaacccuuc

SEQ ID NO: 680940 - RNA, 21 nt, Human
ggaacuguauaucccaagucc

SEQ ID NO: 680941 - RNA, 22 nt, Human
ggucugaaaccguucuuugcuu

SEQ ID NO: 680942 - RNA, 23 nt, Human
guuuugagacuaacaaacacccu

SEQ ID NO: 680943 - RNA, 21 nt, Human
uaaaaagcaaaugaggagacu

SEQ ID NO: 680944 - RNA, 18 nt, Human
uaaaaccgccaaauuguc

SEQ ID NO: 680945 - RNA, 21 nt, Human
uacgccuuuagcacaaggcuu

SEQ ID NO: 680946 - RNA, 20 nt, Human
uagaagcaauuaacccaaaa

SEQ ID NO: 680947 - RNA, 21 nt, Human
uaggucuaccccaaaccaaaa

SEQ ID NO: 680948 - RNA, 25 nt, Human
uauaaaacaaagaccauauuuuuaa

SEQ ID NO: 680949 - RNA, 22 nt, Human
uaucccaaguccaagaaagaug

SEQ ID NO: 680950 - RNA, 21 nt, Human
ucaauucacaggcaaaaaaaa

SEQ ID NO: 680951 - RNA, 20 nt, Human
ucacccugagaacaggaacu

SEQ ID NO: 680952 - RNA, 19 nt, Human
ucagagcacucaauucaca

SEQ ID NO: 680953 - RNA, 19 nt, Human
uccaagaaagaugugcaaa

SEQ ID NO: 680954 - RNA, 22 nt, Human
ucccaaguccaagaaagaugug

SEQ ID NO: 680955 - RNA, 22 nt, Human
ucucucuuccagguaucaccug

SEQ ID NO: 680956 - RNA, 24 nt, Human
ugaaaugcuucuugcuucacccuu

SEQ ID NO: 680957 - RNA, 19 nt, Human
ugaaggcagcugcuccagc

SEQ ID NO: 680958 - RNA, 24 nt, Human
ugaggagacugauuuuuuuccuau

SEQ ID NO: 680959 - RNA, 18 nt, Human
uggaacuguauaucccaa

SEQ ID NO: 680960 - RNA, 24 nt, Human
uguuucacuccaugagaaguuuua

SEQ ID NO: 680961 - RNA, 26 nt, Human
uuaaagaacacugcugaauaaaaaua

SEQ ID NO: 680962 - RNA, 25 nt, Human
uugguuaaaauaaaucacuguuuca

SEQ ID NO: 680963 - RNA, 25 nt, Human
uuuaaauucaagugaagccauuaau

SEQ ID NO: 680964 - RNA, 24 nt, Human
uuuauccauaaacccuucacacaa

SEQ ID NO: 680965 - RNA, 20 nt, Human
aaacagaauccaucacggca

SEQ ID NO: 680966 - RNA, 19 nt, Human
aaagucagggaggagggga

SEQ ID NO: 680967 - RNA, 19 nt, Human
aacauggugaaaccccguc

SEQ ID NO: 680968 - RNA, 20 nt, Human
aacauggugaaaccccgucu

SEQ ID NO: 680969 - RNA, 21 nt, Human
aacauggugaaaccccgucuc

SEQ ID NO: 680970 - RNA, 23 nt, Human
aagaucgugcuacugcacuccag

SEQ ID NO: 680971 - RNA, 19 nt, Human
aagcaggaagcaagaucag

SEQ ID NO: 680972 - RNA, 21 nt, Human
aagcaggaagcaagaucagag

SEQ ID NO: 680973 - RNA, 25 nt, Human
aagcaggaagcaagaucagagccag

SEQ ID NO: 680974 - RNA, 24 nt, Human
aaucacuuuaacccaggaggcgga

SEQ ID NO: 680975 - RNA, 25 nt, Human
aaugaaccccuuccaggggagccca

SEQ ID NO: 680976 - RNA, 18 nt, Human
acacaggccacaccaggc

SEQ ID NO: 680977 - RNA, 23 nt, Human
acagaccaagacuccgucucaaa

SEQ ID NO: 680978 - RNA, 23 nt, Human
acccacaccuccaauuuggugca

SEQ ID NO: 680979 - RNA, 24 nt, Human
acccaggaggcggagguugcagug

SEQ ID NO: 680980 - RNA, 24 nt, Human
accccgucucuacuaaaaauacaa

SEQ ID NO: 680981 - RNA, 22 nt, Human
acuccgucucaaacaaacaaac

SEQ ID NO: 680982 - RNA, 18 nt, Human
acugcacuccagccuggg

SEQ ID NO: 680983 - RNA, 18 nt, Human
acugcacuccagccuggg

SEQ ID NO: 680984 - RNA, 19 nt, Human
acugcacuccagccugggc

SEQ ID NO: 680985 - RNA, 19 nt, Human
acugcacuccagccugggc

SEQ ID NO: 680986 - RNA, 19 nt, Human
acugcacuccagccugggc

SEQ ID NO: 680987 - RNA, 21 nt, Human
acugcacuccagccugggcga

SEQ ID NO: 680988 - RNA, 22 nt, Human
acugcacuccagccugggcgac

SEQ ID NO: 680989 - RNA, 23 nt, Human
acugcacuccagccugggcgaca

SEQ ID NO: 680990 - RNA, 24 nt, Human
acugcacuccagccugggcgacag

SEQ ID NO: 680991 - RNA, 19 nt, Human
agcacucugggaggccggg

SEQ ID NO: 680992 - RNA, 22 nt, Human
agccuggccaacauggugaaac

SEQ ID NO: 680993 - RNA, 24 nt, Human
agccuggccaacauggugaaaccc

SEQ ID NO: 680994 - RNA, 24 nt, Human
agccugggcgacagaccaagacuc

SEQ ID NO: 680995 - RNA, 19 nt, Human
aggaagacaacgggcagaa

SEQ ID NO: 680996 - RNA, 19 nt, Human
aggaaggaauccgacacac

SEQ ID NO: 680997 - RNA, 18 nt, Human
aggaauccgacacacagg

SEQ ID NO: 680998 - RNA, 24 nt, Human
aggcggagguugcagugagccaag

SEQ ID NO: 680999 - RNA, 24 nt, Human
aucgugcuacugcacuccagccug

SEQ ID NO: 681000 - RNA, 19 nt, Human
caaaaaacuggguucuggg

SEQ ID NO: 681001 - RNA, 19 nt, Human
caaacaaaaaacuggguuc

SEQ ID NO: 681002 - RNA, 24 nt, Human
caacauggugaaaccccgucucua

SEQ ID NO: 681003 - RNA, 22 nt, Human
cacagcaccagccucuaaaguc

SEQ ID NO: 681004 - RNA, 23 nt, Human
caccaggccacacaagucucugg

SEQ ID NO: 681005 - RNA, 23 nt, Human
cacgccuguaaucccaacccagc

SEQ ID NO: 681006 - RNA, 19 nt, Human
cacuguauaucccccgagu

SEQ ID NO: 681007 - RNA, 24 nt, Human
cagaauccaucacggcagcccaca

SEQ ID NO: 681008 - RNA, 22 nt, Human
cagaccaagacuccgucucaaa

SEQ ID NO: 681009 - RNA, 23 nt, Human
cagaccaagacuccgucucaaac

SEQ ID NO: 681010 - RNA, 27 nt, Human
cagaucacuugagaucaagaauuugag

SEQ ID NO: 681011 - RNA, 24 nt, Human
cagcacucugggaggccggggcgg

SEQ ID NO: 681012 - RNA, 23 nt, Human
cagcagccaaaacuggguccuga

SEQ ID NO: 681013 - RNA, 21 nt, Human
cagccucuaaagucagggagg

SEQ ID NO: 681014 - RNA, 19 nt, Human
ccagccucuaaagucaggg

SEQ ID NO: 681015 - RNA, 21 nt, Human
cccacacggagaaauccuggc

SEQ ID NO: 681016 - RNA, 20 nt, Human
cccccgaguccccugcuggg

SEQ ID NO: 681017 - RNA, 23 nt, Human
ccgucucaaacaaacaaacaaaa

SEQ ID NO: 681018 - RNA, 23 nt, Human
ccuggccaacauggugaaacccc

SEQ ID NO: 681019 - RNA, 24 nt, Human
ccuggccaacauggugaaaccccg

SEQ ID NO: 681020 - RNA, 19 nt, Human
ccuguaaucccagcuaccu

SEQ ID NO: 681021 - RNA, 21 nt, Human
ccuguaaucccagcuaccugg

SEQ ID NO: 681022 - RNA, 22 nt, Human
cgacacacaggccacaccaggc

SEQ ID NO: 681023 - RNA, 20 nt, Human
cgccuguaaucccaacccag

SEQ ID NO: 681024 - RNA, 24 nt, Human
cggacagaucacuugagaucaaga

SEQ ID NO: 681025 - RNA, 26 nt, Human
cggggcggacagaucacuugagauca

SEQ ID NO: 681026 - RNA, 25 nt, Human
cgucucaaacaaacaaacaaaaaac

SEQ ID NO: 681027 - RNA, 21 nt, Human
cuacugcacuccagccugggc

SEQ ID NO: 681028 - RNA, 24 nt, Human
cuacugcacuccagccugggcgac

SEQ ID NO: 681029 - RNA, 23 nt, Human
cucaaacaaacaaacaaaaaacc

SEQ ID NO: 681030 - RNA, 19 nt, Human
cucacgccuguaaucccaa

SEQ ID NO: 681031 - RNA, 26 nt, Human
cucacgccuguaaucccaacccagca

SEQ ID NO: 681032 - RNA, 24 nt, Human
cugagccggacgcgguggcucacg

SEQ ID NO: 681033 - RNA, 19 nt, Human
cuggguucuggggacacag

SEQ ID NO: 681034 - RNA, 19 nt, Human
gaaccagcagccaaaacug

SEQ ID NO: 681035 - RNA, 20 nt, Human
gaaccagcagccaaaacugg

SEQ ID NO: 681036 - RNA, 21 nt, Human
gacagaccaagacuccgucuc

SEQ ID NO: 681037 - RNA, 21 nt, Human
gaggcggagguugcagugagc

SEQ ID NO: 681038 - RNA, 23 nt, Human
gagguugcagugagccaagaucg

SEQ ID NO: 681039 - RNA, 24 nt, Human
gaucacuugagaucaagaauuuga

SEQ ID NO: 681040 - RNA, 20 nt, Human
gcagccacuguauauccccc

SEQ ID NO: 681041 - RNA, 18 nt, Human
gcaggaagcaagaucaga

SEQ ID NO: 681042 - RNA, 24 nt, Human
gccaacauggugaaaccccgucuc

SEQ ID NO: 681043 - RNA, 20 nt, Human
gcccugguuaaaccgaguuc

SEQ ID NO: 681044 - RNA, 22 nt, Human
gcuacugcacuccagccugggc

SEQ ID NO: 681045 - RNA, 24 nt, Human
gcuacugcacuccagccugggcga

SEQ ID NO: 681046 - RNA, 20 nt, Human
ggaaggaauccgacacacag

SEQ ID NO: 681047 - RNA, 24 nt, Human
ggacgcgguggcucacgccuguaa

SEQ ID NO: 681048 - RNA, 20 nt, Human
ggagguugcagugagccaag

SEQ ID NO: 681049 - RNA, 23 nt, Human
ggagguugcagugagccaagauc

SEQ ID NO: 681050 - RNA, 24 nt, Human
ggagguugcagugagccaagaucg

SEQ ID NO: 681051 - RNA, 26 nt, Human
ggaucagagccaggccuucuagagaa

SEQ ID NO: 681052 - RNA, 19 nt, Human
gggaguggucuuacagagc

SEQ ID NO: 681053 - RNA, 23 nt, Human
gggugggaguggucuuacagagc

SEQ ID NO: 681054 - RNA, 24 nt, Human
gggugugguggcacaugccuguaa

SEQ ID NO: 681055 - RNA, 24 nt, Human
gguggcacaugccuguaaucccag

SEQ ID NO: 681056 - RNA, 23 nt, Human
gguggcucacgccuguaauccca

SEQ ID NO: 681057 - RNA, 23 nt, Human
gucagggaggaggggagaggguc

SEQ ID NO: 681058 - RNA, 22 nt, Human
guggcucacgccuguaauccca

SEQ ID NO: 681059 - RNA, 20 nt, Human
gugggaguggucuuacagag

SEQ ID NO: 681060 - RNA, 25 nt, Human
gugggaguggucuuacagagcccug

SEQ ID NO: 681061 - RNA, 20 nt, Human
uaaagucagggaggagggga

SEQ ID NO: 681062 - RNA, 22 nt, Human
uacugcacuccagccugggcga

SEQ ID NO: 681063 - RNA, 23 nt, Human
uacugcacuccagccugggcgac

SEQ ID NO: 681064 - RNA, 24 nt, Human
uacugcacuccagccugggcgaca

SEQ ID NO: 681065 - RNA, 19 nt, Human
ucaaaugggucacagcuga

SEQ ID NO: 681066 - RNA, 19 nt, Human
ucaacagaccugaaugaac

SEQ ID NO: 681067 - RNA, 19 nt, Human
ucagagccagugggacgcc

SEQ ID NO: 681068 - RNA, 22 nt, Human
ucaggccucuuccugguccuuu

SEQ ID NO: 681069 - RNA, 18 nt, Human
uccagccugggcgacaga

SEQ ID NO: 681070 - RNA, 23 nt, Human
ucgugcuacugcacuccagccug

SEQ ID NO: 681071 - RNA, 21 nt, Human
ucucuacuaaaaauacaaaaa

SEQ ID NO: 681072 - RNA, 22 nt, Human
ucuuuggugagaggggucacug

SEQ ID NO: 681073 - RNA, 24 nt, Human
ucuuuggugagaggggucacugga

SEQ ID NO: 681074 - RNA, 23 nt, Human
ugagaccagccuggccaacaugg

SEQ ID NO: 681075 - RNA, 24 nt, Human
ugagaccagccuggccaacauggu

SEQ ID NO: 681076 - RNA, 22 nt, Human
ugagccaagaucgugcuacugc

SEQ ID NO: 681077 - RNA, 21 nt, Human
ugagccggacgcgguggcuca

SEQ ID NO: 681078 - RNA, 23 nt, Human
ugccuguaaucccagcuaccugg

SEQ ID NO: 681079 - RNA, 24 nt, Human
ugccuguaaucccagcuaccuggg

SEQ ID NO: 681080 - RNA, 21 nt, Human
uggcacaugccuguaauccca

SEQ ID NO: 681081 - RNA, 24 nt, Human
uggccaacauggugaaaccccguc

SEQ ID NO: 681082 - RNA, 21 nt, Human
uggcucacgccuguaauccca

SEQ ID NO: 681083 - RNA, 27 nt, Human
uggcucacgccuguaaucccaacccag

SEQ ID NO: 681084 - RNA, 24 nt, Human
ugggagacugagcugagagaauca

SEQ ID NO: 681085 - RNA, 20 nt, Human
ugggaggccggggcggacag

SEQ ID NO: 681086 - RNA, 24 nt, Human
ugggaggccggggcggacagauca

SEQ ID NO: 681087 - RNA, 21 nt, Human
uggggacacaggucaaauggg

SEQ ID NO: 681088 - RNA, 19 nt, Human
uggugagaggggucacugg

SEQ ID NO: 681089 - RNA, 24 nt, Human
ugguggcacaugccuguaauccca

SEQ ID NO: 681090 - RNA, 20 nt, Human
uuaacggggugugguggcac

SEQ ID NO: 681091 - RNA, 22 nt, Human
uugcagugagccaagaucgugc

SEQ ID NO: 681092 - RNA, 21 nt, Human
uuggaggaacccacaccucca

SEQ ID NO: 681093 - RNA, 24 nt, Human
uuuaacccaggaggcggagguugc

SEQ ID NO: 681094 - RNA, 18 nt, Human
uuuuuuuuuuuuuuuuug

SEQ ID NO: 681095 - RNA, 20 nt, Human
uuuuuuuuuuuuuuuuuguu

SEQ ID NO: 681096 - RNA, 19 nt, Human
aaaaaaagaaaaauugcaa

SEQ ID NO: 681097 - RNA, 24 nt, Human
aaaaauugcaagggagcauuuaac

SEQ ID NO: 681098 - RNA, 22 nt, Human
aaaaugaaaagugggguaggcg

SEQ ID NO: 681099 - RNA, 26 nt, Human
aaacaaaaaaaagaaaaauugcaagg

SEQ ID NO: 681100 - RNA, 22 nt, Human
aaacaaaaagagaaaggaaaca

SEQ ID NO: 681101 - RNA, 23 nt, Human
aaacaaaaagagaaaggaaacaa

SEQ ID NO: 681102 - RNA, 27 nt, Human
aaacccucauuguucaaaagcaaaaca

SEQ ID NO: 681103 - RNA, 21 nt, Human
aaagugggguaggcggaagug

SEQ ID NO: 681104 - RNA, 23 nt, Human
aacaaacaaacaaaaaaaagaaa

SEQ ID NO: 681105 - RNA, 21 nt, Human
aaccuucucuccuuucuaucu

SEQ ID NO: 681106 - RNA, 23 nt, Human
aacuguuccuucccugaauccua

SEQ ID NO: 681107 - RNA, 22 nt, Human
aagcaccagaggccauagaucc

SEQ ID NO: 681108 - RNA, 20 nt, Human
aagccaaacaaaaagagaaa

SEQ ID NO: 681109 - RNA, 25 nt, Human
aaggaaacaagcacgggucuaccgg

SEQ ID NO: 681110 - RNA, 19 nt, Human
aagugagguacugggaaca

SEQ ID NO: 681111 - RNA, 20 nt, Human
aauaggggagaggggaaaaa

SEQ ID NO: 681112 - RNA, 24 nt, Human
aaucaccccgucucccccuacccc

SEQ ID NO: 681113 - RNA, 23 nt, Human
aauccccaucccacgccucuugc

SEQ ID NO: 681114 - RNA, 19 nt, Human
acaaaaaaaaacccgcugg

SEQ ID NO: 681115 - RNA, 20 nt, Human
acaaaaaaaaacccgcugga

SEQ ID NO: 681116 - RNA, 22 nt, Human
acaaaaaaaaacccgcuggaga

SEQ ID NO: 681117 - RNA, 22 nt, Human
acaaaaaaaagaaaaauugcaa

SEQ ID NO: 681118 - RNA, 30 nt, Human
acaaaacagaauagcuuguuaaaggacagg

SEQ ID NO: 681119 - RNA, 25 nt, Human
acaaacaaaaaaaagaaaaauugca

SEQ ID NO: 681120 - RNA, 21 nt, Human
acagaagaggggcugcgugga

SEQ ID NO: 681121 - RNA, 25 nt, Human
acggggcggaggagcccgcgguagu

SEQ ID NO: 681122 - RNA, 20 nt, Human
agaaaagccguaauaaaaaa

SEQ ID NO: 681123 - RNA, 20 nt, Human
agaaaggaaacaagcacggg

SEQ ID NO: 681124 - RNA, 23 nt, Human
agaacuggaucucguccuggaau

SEQ ID NO: 681125 - RNA, 22 nt, Human
agacaaauguuuaguugcgauc

SEQ ID NO: 681126 - RNA, 22 nt, Human
agagacagaaauacucaaacaa

SEQ ID NO: 681127 - RNA, 22 nt, Human
agaggggaggggacagaagagg

SEQ ID NO: 681128 - RNA, 18 nt, Human
agccagaauccgcgcugc

SEQ ID NO: 681129 - RNA, 19 nt, Human
agccagaauccgcgcugca

SEQ ID NO: 681130 - RNA, 24 nt, Human
agccguaauaaaaaacauuuugcc

SEQ ID NO: 681131 - RNA, 23 nt, Human
agcuccagcgggcucccauccau

SEQ ID NO: 681132 - RNA, 18 nt, Human
agcugcguacccuggccc

SEQ ID NO: 681133 - RNA, 21 nt, Human
aggaaaaagaauuauaaaugu

SEQ ID NO: 681134 - RNA, 21 nt, Human
aggagcccgcgguaguuugug

SEQ ID NO: 681135 - RNA, 21 nt, Human
aggcauaaagcauccaagagu

SEQ ID NO: 681136 - RNA, 18 nt, Human
aggggagaggggaaaaaa

SEQ ID NO: 681137 - RNA, 19 nt, Human
aggggcugcguggagaaag

SEQ ID NO: 681138 - RNA, 25 nt, Human
aggguggggggcguguaaggggggg

SEQ ID NO: 681139 - RNA, 21 nt, Human
auccaucucaccccaaucccc

SEQ ID NO: 681140 - RNA, 23 nt, Human
auguuaaaaaaaaaaaaaaaccc

SEQ ID NO: 681141 - RNA, 19 nt, Human
caaaaagagaaaggaaaca

SEQ ID NO: 681142 - RNA, 22 nt, Human
caaaaagagaaaggaaacaagc

SEQ ID NO: 681143 - RNA, 28 nt, Human
caaaaauuaaacaaacaaacaaaaaaaa

SEQ ID NO: 681144 - RNA, 18 nt, Human
caaaauagaaucaagggc

SEQ ID NO: 681145 - RNA, 24 nt, Human
caaaauagaaucaagggcaaaucu

SEQ ID NO: 681146 - RNA, 24 nt, Human
caaagcaccagaggccauagaucc

SEQ ID NO: 681147 - RNA, 23 nt, Human
caacaaaagauugcaaaagcugg

SEQ ID NO: 681148 - RNA, 19 nt, Human
caagggcaaauccauggcc

SEQ ID NO: 681149 - RNA, 20 nt, Human
cacagcaccaucuucagaau

SEQ ID NO: 681150 - RNA, 19 nt, Human
caccccaauccccauccca

SEQ ID NO: 681151 - RNA, 21 nt, Human
caccccgucucccccuacccc

SEQ ID NO: 681152 - RNA, 23 nt, Human
cacggacccaauugacacaaaac

SEQ ID NO: 681153 - RNA, 24 nt, Human
cagaaauacucaaacaaggaaaaa

SEQ ID NO: 681154 - RNA, 21 nt, Human
cagaauagcuuguuaaaggac

SEQ ID NO: 681155 - RNA, 21 nt, Human
cagaauccgcgcugcaccccc

SEQ ID NO: 681156 - RNA, 21 nt, Human
cagcuccuugaagguuuuccu

SEQ ID NO: 681157 - RNA, 18 nt, Human
cagguaaugcauccugga

SEQ ID NO: 681158 - RNA, 19 nt, Human
cauaaagcauccaagaguc

SEQ ID NO: 681159 - RNA, 22 nt, Human
caugaaaaaggaguuggauuuc

SEQ ID NO: 681160 - RNA, 24 nt, Human
cauuuacauacuagaguccacgug

SEQ ID NO: 681161 - RNA, 21 nt, Human
ccaaaaacaggaccauuucac

SEQ ID NO: 681162 - RNA, 20 nt, Human
ccaaacaaaaagagaaagga

SEQ ID NO: 681163 - RNA, 20 nt, Human
ccaucuucagaauguuaaaa

SEQ ID NO: 681164 - RNA, 19 nt, Human
cccaacgcguuagaagcca

SEQ ID NO: 681165 - RNA, 22 nt, Human
cccauccaucucaccccaaucc

SEQ ID NO: 681166 - RNA, 22 nt, Human
ccccaaaugggcgccgccggau

SEQ ID NO: 681167 - RNA, 21 nt, Human
ccccaauccccaucccacgcc

SEQ ID NO: 681168 - RNA, 21 nt, Human
ccccagagaaaagaggggacc

SEQ ID NO: 681169 - RNA, 21 nt, Human
cccccagagaaaagaggggac

SEQ ID NO: 681170 - RNA, 23 nt, Human
cccccagagaaaagaggggaccg

SEQ ID NO: 681171 - RNA, 18 nt, Human
ccccccagagaaaagagg

SEQ ID NO: 681172 - RNA, 22 nt, Human
cccccggaagaacuccuuuccg

SEQ ID NO: 681173 - RNA, 20 nt, Human
cccccuucagggagcaaagc

SEQ ID NO: 681174 - RNA, 19 nt, Human
cccguaauugaaguacugg

SEQ ID NO: 681175 - RNA, 18 nt, Human
cccgucucccccuacccc

SEQ ID NO: 681176 - RNA, 25 nt, Human
ccgagcccggcucccggggguccuc

SEQ ID NO: 681177 - RNA, 20 nt, Human
ccgcacuuuuaguuacucug

SEQ ID NO: 681178 - RNA, 24 nt, Human
ccgccgcgcggaggucagcacagg

SEQ ID NO: 681179 - RNA, 18 nt, Human
ccgccuugucuccugguu

SEQ ID NO: 681180 - RNA, 23 nt, Human
ccugcgggcgcugcaaggggagc

SEQ ID NO: 681181 - RNA, 22 nt, Human
cgccgcacuuuuaguuacucug

SEQ ID NO: 681182 - RNA, 22 nt, Human
cgccggauaccucgucugcucc

SEQ ID NO: 681183 - RNA, 23 nt, Human
cucagcaaagaggaaugccuguc

SEQ ID NO: 681184 - RNA, 23 nt, Human
cucagucccaacgcguuagaagc

SEQ ID NO: 681185 - RNA, 22 nt, Human
cuccaaaaauuaaacaaacaaa

SEQ ID NO: 681186 - RNA, 25 nt, Human
cuccaaaaauuaaacaaacaaacaa

SEQ ID NO: 681187 - RNA, 21 nt, Human
cucccauccaucucaccccaa

SEQ ID NO: 681188 - RNA, 22 nt, Human
cucccgacgcgacccccaggcc

SEQ ID NO: 681189 - RNA, 23 nt, Human
cucuccuuucuaucuuccauuuu

SEQ ID NO: 681190 - RNA, 24 nt, Human
cugcaggcgccucggugccacuga

SEQ ID NO: 681191 - RNA, 30 nt, Human
cuucagaauguuaaaaaaaaaaaaaaaccc

SEQ ID NO: 681192 - RNA, 19 nt, Human
cuucuugacacagcaccau

SEQ ID NO: 681193 - RNA, 20 nt, Human
cuugcuaaaaucucaggcca

SEQ ID NO: 681194 - RNA, 21 nt, Human
cuuucuucuucccuuuucuuu

SEQ ID NO: 681195 - RNA, 23 nt, Human
cuuuuccuuucuucuucccuuuu

SEQ ID NO: 681196 - RNA, 18 nt, Human
gaaagaguuagaagcccc

SEQ ID NO: 681197 - RNA, 22 nt, Human
gacccccaggccggcuuccgaa

SEQ ID NO: 681198 - RNA, 24 nt, Human
gaccguguauuuaaaaauuaaagg

SEQ ID NO: 681199 - RNA, 21 nt, Human
gagcugcagcgcagggcuccc

SEQ ID NO: 681200 - RNA, 19 nt, Human
gagcugcguacccuggccc

SEQ ID NO: 681201 - RNA, 22 nt, Human
gcaauagaaaagccguaauaaa

SEQ ID NO: 681202 - RNA, 21 nt, Human
gcacacgacaaacaaaaaaaa

SEQ ID NO: 681203 - RNA, 22 nt, Human
gcacacgacaaacaaaaaaaaa

SEQ ID NO: 681204 - RNA, 20 nt, Human
gcugcagcgcagggcucccg

SEQ ID NO: 681205 - RNA, 21 nt, Human
ggaccguguauuuaaaaauua

SEQ ID NO: 681206 - RNA, 21 nt, Human
ggagcugcguacccuggcccu

SEQ ID NO: 681207 - RNA, 22 nt, Human
ggaggggacagaagaggggcug

SEQ ID NO: 681208 - RNA, 22 nt, Human
gggcacagaguugcggcgcggg

SEQ ID NO: 681209 - RNA, 18 nt, Human
gggcgccgccggauaccu

SEQ ID NO: 681210 - RNA, 20 nt, Human
gggcucccgacgcgaccccc

SEQ ID NO: 681211 - RNA, 19 nt, Human
ggggcguguaagggggggg

SEQ ID NO: 681212 - RNA, 20 nt, Human
ggggggcguguaaggggggg

SEQ ID NO: 681213 - RNA, 19 nt, Human
ggggugcgggagagggcag

SEQ ID NO: 681214 - RNA, 20 nt, Human
ggggugcgggagagggcagu

SEQ ID NO: 681215 - RNA, 22 nt, Human
ggguaggcggaaguggcccaag

SEQ ID NO: 681216 - RNA, 19 nt, Human
gguggaaaggguggggggc

SEQ ID NO: 681217 - RNA, 26 nt, Human
gguuggcuuguuuaaaagaaaaaaaa

SEQ ID NO: 681218 - RNA, 21 nt, Human
guguguguguccccggcgugg

SEQ ID NO: 681219 - RNA, 18 nt, Human
guuaaaaaaaaaaaaaaa

SEQ ID NO: 681220 - RNA, 19 nt, Human
uaaaaaauaggggagaggg

SEQ ID NO: 681221 - RNA, 18 nt, Human
uaaaaggaucauucucug

SEQ ID NO: 681222 - RNA, 24 nt, Human
uaaaaggaucauucucuguaaaga

SEQ ID NO: 681223 - RNA, 18 nt, Human
uaaggggggggugcggga

SEQ ID NO: 681224 - RNA, 27 nt, Human
uaauuugcaaucaccccgucucccccu

SEQ ID NO: 681225 - RNA, 20 nt, Human
uaccccaaagcagucggcga

SEQ ID NO: 681226 - RNA, 25 nt, Human
uacugggaacacaaauauuuaugcc

SEQ ID NO: 681227 - RNA, 22 nt, Human
uagaaaagccguaauaaaaaac

SEQ ID NO: 681228 - RNA, 21 nt, Human
uagaagaaaugaguugaagug

SEQ ID NO: 681229 - RNA, 22 nt, Human
uagaagcccccaaaugggcgcc

SEQ ID NO: 681230 - RNA, 18 nt, Human
uagauggcgucugaggcu

SEQ ID NO: 681231 - RNA, 19 nt, Human
uagcuuccuugccacggac

SEQ ID NO: 681232 - RNA, 23 nt, Human
uaggacaaaaacauuaaaccaaa

SEQ ID NO: 681233 - RNA, 19 nt, Human
uaggcggaaguggcccaag

SEQ ID NO: 681234 - RNA, 19 nt, Human
uagggaagacaagcuccag

SEQ ID NO: 681235 - RNA, 20 nt, Human
uaucauacagcaauagaaaa

SEQ ID NO: 681236 - RNA, 23 nt, Human
uaucauacagcaauagaaaagcc

SEQ ID NO: 681237 - RNA, 19 nt, Human
ucagagacagaaauacuca

SEQ ID NO: 681238 - RNA, 19 nt, Human
ucagccaggcaauucgugu

SEQ ID NO: 681239 - RNA, 22 nt, Human
ucagccaggcaauucguguccc

SEQ ID NO: 681240 - RNA, 18 nt, Human
ucccauccaucucacccc

SEQ ID NO: 681241 - RNA, 23 nt, Human
uccccaccaugcaugucaccaac

SEQ ID NO: 681242 - RNA, 18 nt, Human
ucccccggaagaacuccu

SEQ ID NO: 681243 - RNA, 23 nt, Human
ucccugaauccuaacaagaaguu

SEQ ID NO: 681244 - RNA, 18 nt, Human
ucccuuuucuuucccccu

SEQ ID NO: 681245 - RNA, 23 nt, Human
uccuggaaccugcuaagucuccg

SEQ ID NO: 681246 - RNA, 19 nt, Human
ucgcacacgacaaacaaaa

SEQ ID NO: 681247 - RNA, 19 nt, Human
ucgcucacuccuggaaccu

SEQ ID NO: 681248 - RNA, 21 nt, Human
ucgugucccccggaagaacuc

SEQ ID NO: 681249 - RNA, 23 nt, Human
ucucccccuaccccgagaccaaa

SEQ ID NO: 681250 - RNA, 23 nt, Human
ucucuacugaggguuuuuguccc

SEQ ID NO: 681251 - RNA, 22 nt, Human
ucugucaggaucugcaacuauu

SEQ ID NO: 681252 - RNA, 18 nt, Human
ucuugcuugcccccccca

SEQ ID NO: 681253 - RNA, 23 nt, Human
ugaagccgcccuccugggaacgu

SEQ ID NO: 681254 - RNA, 22 nt, Human
ugacacagcaccaucuucagaa

SEQ ID NO: 681255 - RNA, 18 nt, Human
ugaccaggauauuaaaua

SEQ ID NO: 681256 - RNA, 18 nt, Human
ugaggcagagaguuuuga

SEQ ID NO: 681257 - RNA, 25 nt, Human
ugccacggacccaauugacacaaaa

SEQ ID NO: 681258 - RNA, 21 nt, Human
ugcuaaggugcggagcugccg

SEQ ID NO: 681259 - RNA, 26 nt, Human
ugcuacguggucagucagcuccuuga

SEQ ID NO: 681260 - RNA, 23 nt, Human
ugcuaucaucucagcaaagagga

SEQ ID NO: 681261 - RNA, 18 nt, Human
uggaaaggguggggggcg

SEQ ID NO: 681262 - RNA, 21 nt, Human
uggaauaauuugcaaucaccc

SEQ ID NO: 681263 - RNA, 19 nt, Human
uggaugaguacccgggcug

SEQ ID NO: 681264 - RNA, 24 nt, Human
uggcaagggguggucucccaggcu

SEQ ID NO: 681265 - RNA, 23 nt, Human
ugggaacacaaauauuuaugcca

SEQ ID NO: 681266 - RNA, 22 nt, Human
ugggaacgugaggacagggcuc

SEQ ID NO: 681267 - RNA, 22 nt, Human
uguaaagaaaacuaaauagcug

SEQ ID NO: 681268 - RNA, 20 nt, Human
uguaaggggggggugcggga

SEQ ID NO: 681269 - RNA, 23 nt, Human
ugucaccaaccucuccuccucca

SEQ ID NO: 681270 - RNA, 20 nt, Human
ugucccccggaagaacuccu

SEQ ID NO: 681271 - RNA, 24 nt, Human
ugucucuacugaggguuuuugucc

SEQ ID NO: 681272 - RNA, 25 nt, Human
uguuagggaagacaagcuccagcgg

SEQ ID NO: 681273 - RNA, 18 nt, Human
uucacaaaacauauacag

SEQ ID NO: 681274 - RNA, 23 nt, Human
uucccgcuugucucuacugaggg

SEQ ID NO: 681275 - RNA, 26 nt, Human
uugaagguuuuccugcucugaaccaa

SEQ ID NO: 681276 - RNA, 27 nt, Human
uuuauacaugugggacaaccugcuuug

SEQ ID NO: 681277 - RNA, 23 nt, Human
uuuccuuucuucuucccuuuucu

SEQ ID NO: 681278 - RNA, 21 nt, Human
uuuguuuuggagaaaauugac

SEQ ID NO: 681279 - RNA, 24 nt, Human
uuuguuuuggagaaaauugacggc

SEQ ID NO: 681280 - RNA, 22 nt, Human
acuggccacuccugggcagcag

SEQ ID NO: 681281 - RNA, 19 nt, Human
aggccuggggucagcaguc

SEQ ID NO: 681282 - RNA, 22 nt, Human
aggcggccagggagaagucagc

SEQ ID NO: 681283 - RNA, 22 nt, Human
cacuggccacuccugggcagca

SEQ ID NO: 681284 - RNA, 22 nt, Human
ccucagcaggcggccagggaga

SEQ ID NO: 681285 - RNA, 19 nt, Human
cuggccacuccugggcagc

SEQ ID NO: 681286 - RNA, 20 nt, Human
cuggcgauggagagcuccuc

SEQ ID NO: 681287 - RNA, 23 nt, Human
gaaucaccaggccuggggucagc

SEQ ID NO: 681288 - RNA, 18 nt, Human
ggguauggaggaggggcc

SEQ ID NO: 681289 - RNA, 20 nt, Human
ggguauggaggaggggccca

SEQ ID NO: 681290 - RNA, 21 nt, Human
guaucuugaaucccgagcaac

SEQ ID NO: 681291 - RNA, 20 nt, Human
uaucuugaaucccgagcaac

SEQ ID NO: 681292 - RNA, 23 nt, Human
ucaauagcaaggccaaggccaag

SEQ ID NO: 681293 - RNA, 20 nt, Human
ugaaucccgagcaacgccgg

SEQ ID NO: 681294 - RNA, 20 nt, Human
uuuuuuuuuuuuuuucccag

SEQ ID NO: 681295 - RNA, 23 nt, Human
uuuuuuuuuuuuuuuuucccagg

SEQ ID NO: 681296 - RNA, 18 nt, Human
acuucuuucagaacauuu

SEQ ID NO: 681297 - RNA, 18 nt, Human
agcugacuggaaaccugu

SEQ ID NO: 681298 - RNA, 20 nt, Human
agcugacuggaaaccuguga

SEQ ID NO: 681299 - RNA, 24 nt, Human
aggggucuugcuauguugaccagg

SEQ ID NO: 681300 - RNA, 18 nt, Human
aguagcugggacuacagg

SEQ ID NO: 681301 - RNA, 19 nt, Human
aguagcugggacuacaggc

SEQ ID NO: 681302 - RNA, 23 nt, Human
aguuuauuuauuuaaaaaaauag

SEQ ID NO: 681303 - RNA, 20 nt, Human
caagcgauccuccugccuca

SEQ ID NO: 681304 - RNA, 22 nt, Human
caagcgauccuccugccucagc

SEQ ID NO: 681305 - RNA, 27 nt, Human
caagcgauccuccugccucagccuccc

SEQ ID NO: 681306 - RNA, 20 nt, Human
caccagaggcuucaagacca

SEQ ID NO: 681307 - RNA, 19 nt, Human
cagaacauuuguuaucagc

SEQ ID NO: 681308 - RNA, 20 nt, Human
cagcaccagaggcuucaaga

SEQ ID NO: 681309 - RNA, 23 nt, Human
cccgaguagcugggacuacaggc

SEQ ID NO: 681310 - RNA, 24 nt, Human
cccgaguagcugggacuacaggcg

SEQ ID NO: 681311 - RNA, 24 nt, Human
ccuccugccucagccucccgagua

SEQ ID NO: 681312 - RNA, 20 nt, Human
ccuccuguggggacggaggu

SEQ ID NO: 681313 - RNA, 23 nt, Human
ccugccucagccucccgaguagc

SEQ ID NO: 681314 - RNA, 24 nt, Human
cucaagcgauccuccugccucagc

SEQ ID NO: 681315 - RNA, 24 nt, Human
cucagccucccgaguagcugggac

SEQ ID NO: 681316 - RNA, 25 nt, Human
cucuugggcucaagcgauccuccug

SEQ ID NO: 681317 - RNA, 23 nt, Human
cugccucagccucccgaguagcu

SEQ ID NO: 681318 - RNA, 20 nt, Human
cuugggcucaagcgauccuc

SEQ ID NO: 681319 - RNA, 22 nt, Human
gacuacaggcgcacgccacugc

SEQ ID NO: 681320 - RNA, 26 nt, Human
gaguagcugggacuacaggcgcacgc

SEQ ID NO: 681321 - RNA, 21 nt, Human
gcaccagaggcuucaagacca

SEQ ID NO: 681322 - RNA, 24 nt, Human
gcgauccuccugccucagccuccc

SEQ ID NO: 681323 - RNA, 19 nt, Human
ggcucaagcgauccuccug

SEQ ID NO: 681324 - RNA, 20 nt, Human
gggcucaagcgauccuccug

SEQ ID NO: 681325 - RNA, 22 nt, Human
gggcucaagcgauccuccugcc

SEQ ID NO: 681326 - RNA, 22 nt, Human
gggucuugcuauguugaccagg

SEQ ID NO: 681327 - RNA, 23 nt, Human
uagagacaggggucuugcuaugu

SEQ ID NO: 681328 - RNA, 21 nt, Human
uagauaugaacucuugggcuc

SEQ ID NO: 681329 - RNA, 18 nt, Human
uauguugaccaggcuaga

SEQ ID NO: 681330 - RNA, 24 nt, Human
uauguugaccaggcuagauaugaa

SEQ ID NO: 681331 - RNA, 23 nt, Human
ucagccucccgaguagcugggac

SEQ ID NO: 681332 - RNA, 24 nt, Human
ucccgaguagcugggacuacaggc

SEQ ID NO: 681333 - RNA, 23 nt, Human
ucggggcaguaagauacauuuag

SEQ ID NO: 681334 - RNA, 19 nt, Human
ucuugcuauguugaccagg

SEQ ID NO: 681335 - RNA, 22 nt, Human
ucuugggcucaagcgauccucc

SEQ ID NO: 681336 - RNA, 28 nt, Human
ugaaaagcugacuggaaaccugugagaa

SEQ ID NO: 681337 - RNA, 24 nt, Human
ugaccaggcuagauaugaacucuu

SEQ ID NO: 681338 - RNA, 24 nt, Human
ugagaaugggaguuccacccuccu

SEQ ID NO: 681339 - RNA, 24 nt, Human
ugccucagccucccgaguagcugg

SEQ ID NO: 681340 - RNA, 26 nt, Human
uggaaaccugugagaaugggaguucc

SEQ ID NO: 681341 - RNA, 21 nt, Human
ugggacuacaggcgcacgcca

SEQ ID NO: 681342 - RNA, 22 nt, Human
ugggacuacaggcgcacgccac

SEQ ID NO: 681343 - RNA, 22 nt, Human
ugggacuacaggcgcacgccac

SEQ ID NO: 681344 - RNA, 24 nt, Human
ugggacuacaggcgcacgccacug

SEQ ID NO: 681345 - RNA, 18 nt, Human
ugggaguuccacccuccu

SEQ ID NO: 681346 - RNA, 24 nt, Human
ugggcucaagcgauccuccugccu

SEQ ID NO: 681347 - RNA, 18 nt, Human
uuuuuuuuuuuuguuuuc

SEQ ID NO: 681348 - RNA, 23 nt, Human
uuuuuuuuuuuuuuuuguuuuca

SEQ ID NO: 681349 - RNA, 24 nt, Human
uuuuuuuuuuuuuuuuuuuguuuu

SEQ ID NO: 681350 - RNA, 27 nt, Human
uuuuuuuuuuuuuuuuuuuuuuugggg

SEQ ID NO: 681351 - RNA, 18 nt, Human
ccccgcagccagcccgcc

SEQ ID NO: 681352 - RNA, 18 nt, Human
aacaaagggguccccgga

SEQ ID NO: 681353 - RNA, 18 nt, Human
acacgggcagucaagccc

SEQ ID NO: 681354 - RNA, 19 nt, Human
cagucaagcccuuggggac

SEQ ID NO: 681355 - RNA, 18 nt, Human
cccggagagggcuggucc

SEQ ID NO: 681356 - RNA, 19 nt, Human
cccugggagccgcgcagac

SEQ ID NO: 681357 - RNA, 19 nt, Human
ccgcucggcucaggcuccu

SEQ ID NO: 681358 - RNA, 25 nt, Human
ccggcaguucgcggcgaccccucuc

SEQ ID NO: 681359 - RNA, 18 nt, Human
cucuaguguucuaagcuu

SEQ ID NO: 681360 - RNA, 23 nt, Human
gggcagucaagcccuuggggacg

SEQ ID NO: 681361 - RNA, 20 nt, Human
uccucuucacgccgcacccu

SEQ ID NO: 681362 - RNA, 21 nt, Human
ugcccgagucacaacagaagc

SEQ ID NO: 681363 - RNA, 26 nt, Human
uggcgucugggcugggaacaaagggg

SEQ ID NO: 681364 - RNA, 22 nt, Human
ugggaacaaagggguccccgga

SEQ ID NO: 681365 - RNA, 19 nt, Human
ugggcugggaacaaagggg

SEQ ID NO: 681366 - RNA, 23 nt, Human
aaaagcccaccacaggggugagg

SEQ ID NO: 681367 - RNA, 21 nt, Human
aaaccuuacuguggaaacuaa

SEQ ID NO: 681368 - RNA, 18 nt, Human
aagaggagacgggcuggg

SEQ ID NO: 681369 - RNA, 24 nt, Human
acccuguccuucucuucccucccc

SEQ ID NO: 681370 - RNA, 18 nt, Human
acucauuuaccucugccc

SEQ ID NO: 681371 - RNA, 23 nt, Human
agcuguaggaggggcggggccag

SEQ ID NO: 681372 - RNA, 19 nt, Human
aggaggggcggggccaggu

SEQ ID NO: 681373 - RNA, 20 nt, Human
agggaagggaagaggagacg

SEQ ID NO: 681374 - RNA, 23 nt, Human
agggacucauuuaccucugcccu

SEQ ID NO: 681375 - RNA, 19 nt, Human
aggggugaggcuggugagg

SEQ ID NO: 681376 - RNA, 18 nt, Human
aggucugggggaggggag

SEQ ID NO: 681377 - RNA, 26 nt, Human
cacccuguccuucucuucccucccca

SEQ ID NO: 681378 - RNA, 22 nt, Human
cagccagggcaggagcuugaug

SEQ ID NO: 681379 - RNA, 24 nt, Human
caucaggagcucucuccacucccc

SEQ ID NO: 681380 - RNA, 25 nt, Human
ccagccgccgccgcugccgccgccu

SEQ ID NO: 681381 - RNA, 21 nt, Human
cccagccccucuuggggcucc

SEQ ID NO: 681382 - RNA, 19 nt, Human
ccccaacacccuguccuuc

SEQ ID NO: 681383 - RNA, 23 nt, Human
ccccacaaccaguuaaaauccuc

SEQ ID NO: 681384 - RNA, 26 nt, Human
ccccccuucccagccccucuuggggc

SEQ ID NO: 681385 - RNA, 18 nt, Human
cccuguccuucucuuccc

SEQ ID NO: 681386 - RNA, 18 nt, Human
ccgccgccgcugccgccg

SEQ ID NO: 681387 - RNA, 20 nt, Human
ccgccgccucccccgggccc

SEQ ID NO: 681388 - RNA, 21 nt, Human
ccgccgccucccccgggcccu

SEQ ID NO: 681389 - RNA, 24 nt, Human
ccgccgcugccgccgccucccccg

SEQ ID NO: 681390 - RNA, 21 nt, Human
ccgggcccuggccucuuccag

SEQ ID NO: 681391 - RNA, 20 nt, Human
ccuucucuucccuccccaca

SEQ ID NO: 681392 - RNA, 20 nt, Human
cgagcacaggcccaggcugc

SEQ ID NO: 681393 - RNA, 21 nt, Human
cgagcacaggcccaggcugcg

SEQ ID NO: 681394 - RNA, 20 nt, Human
cggggccagguuggacggug

SEQ ID NO: 681395 - RNA, 20 nt, Human
cuccacuccccuggcccucc

SEQ ID NO: 681396 - RNA, 23 nt, Human
cucuccacuccccuggcccucca

SEQ ID NO: 681397 - RNA, 18 nt, Human
cuguccuucucuucccuc

SEQ ID NO: 681398 - RNA, 18 nt, Human
gaagggugcuuggugggg

SEQ ID NO: 681399 - RNA, 21 nt, Human
gagcucucuccacuccccugg

SEQ ID NO: 681400 - RNA, 25 nt, Human
gccccagccgccgccgcugccgccg

SEQ ID NO: 681401 - RNA, 21 nt, Human
gccgccgccucccccgggccc

SEQ ID NO: 681402 - RNA, 18 nt, Human
ggagcucucuccacuccc

SEQ ID NO: 681403 - RNA, 21 nt, Human
ggaggagguggaggucugggg

SEQ ID NO: 681404 - RNA, 25 nt, Human
ggaggucugggggaggggagggggc

SEQ ID NO: 681405 - RNA, 21 nt, Human
ggcagaggacaggaggggagu

SEQ ID NO: 681406 - RNA, 18 nt, Human
ggccccccuucccagccc

SEQ ID NO: 681407 - RNA, 24 nt, Human
gggacacaggaggggagggggucu

SEQ ID NO: 681408 - RNA, 21 nt, Human
gggacuggagguggggacagg

SEQ ID NO: 681409 - RNA, 19 nt, Human
gggcaggagcuugaugggc

SEQ ID NO: 681410 - RNA, 19 nt, Human
gggcccuggccucuuccag

SEQ ID NO: 681411 - RNA, 22 nt, Human
ggggaggggagggggccaaggg

SEQ ID NO: 681412 - RNA, 23 nt, Human
ggggaggggagggggccaagggg

SEQ ID NO: 681413 - RNA, 24 nt, Human
ggggaggggagggggccaaggggg

SEQ ID NO: 681414 - RNA, 25 nt, Human
ggggaggggagggggccaagggggu

SEQ ID NO: 681415 - RNA, 24 nt, Human
ggucuggaggagguggaggucugg

SEQ ID NO: 681416 - RNA, 18 nt, Human
ggugagggagggacugga

SEQ ID NO: 681417 - RNA, 22 nt, Human
uaaaaagcccaccacaggggug

SEQ ID NO: 681418 - RNA, 24 nt, Human
uaccucugcccucuagucuagggg

SEQ ID NO: 681419 - RNA, 24 nt, Human
ucccagauggaaguggaagggugc

SEQ ID NO: 681420 - RNA, 18 nt, Human
uccucauccccccaacac

SEQ ID NO: 681421 - RNA, 18 nt, Human
ucucuucccuccccacaa

SEQ ID NO: 681422 - RNA, 22 nt, Human
ugaggagggaguagaccuuggg

SEQ ID NO: 681423 - RNA, 24 nt, Human
ugaggcuggugagggagggacugg

SEQ ID NO: 681424 - RNA, 19 nt, Human
ugcccgggcugccccagcc

SEQ ID NO: 681425 - RNA, 18 nt, Human
uggaaacuaagacaucaa

SEQ ID NO: 681426 - RNA, 26 nt, Human
uggaggagguggaggucugggggagg

SEQ ID NO: 681427 - RNA, 20 nt, Human
uggccccccuucccagcccc

SEQ ID NO: 681428 - RNA, 19 nt, Human
ugggggaggggagggggcc

SEQ ID NO: 681429 - RNA, 19 nt, Human
ugggggaggggagggggcc

SEQ ID NO: 681430 - RNA, 23 nt, Human
ugggggaggggagggggccaagg

SEQ ID NO: 681431 - RNA, 22 nt, Human
uugaugggcuauggccccccuu

SEQ ID NO: 681432 - RNA, 18 nt, Human
uuggacggugcgaaucga

SEQ ID NO: 681433 - RNA, 21 nt, Human
uuggggcucccagauggaagu

SEQ ID NO: 681434 - RNA, 21 nt, Human
aaagcugacaaaacaugaauu

SEQ ID NO: 681435 - RNA, 23 nt, Human
aacagaucucaacaugagaaagc

SEQ ID NO: 681436 - RNA, 18 nt, Human
acugcggcggcagcagcu

SEQ ID NO: 681437 - RNA, 20 nt, Human
acuguaggcaauuacgucca

SEQ ID NO: 681438 - RNA, 18 nt, Human
agcgacacgaaccuuagc

SEQ ID NO: 681439 - RNA, 18 nt, Human
aggaaggaaacuugaggg

SEQ ID NO: 681440 - RNA, 21 nt, Human
aggcagcuaagcgccgaugcu

SEQ ID NO: 681441 - RNA, 19 nt, Human
caacaugagaaagcugaca

SEQ ID NO: 681442 - RNA, 24 nt, Human
cacacacaaacacugacacacucu

SEQ ID NO: 681443 - RNA, 22 nt, Human
cauaacagaucucaacaugaga

SEQ ID NO: 681444 - RNA, 18 nt, Human
ccuaaaagaaaaugaaaa

SEQ ID NO: 681445 - RNA, 22 nt, Human
cucaacaugagaaagcugacaa

SEQ ID NO: 681446 - RNA, 19 nt, Human
cugcauucgcaacugcggc

SEQ ID NO: 681447 - RNA, 20 nt, Human
cugucaauucuccucacagu

SEQ ID NO: 681448 - RNA, 22 nt, Human
cuuuugcugucaauucuccuca

SEQ ID NO: 681449 - RNA, 19 nt, Human
gagcgggcucaacaggcca

SEQ ID NO: 681450 - RNA, 21 nt, Human
gagcgggcuccaccggcgggg

SEQ ID NO: 681451 - RNA, 21 nt, Human
ggcagugagggagcgggcuca

SEQ ID NO: 681452 - RNA, 21 nt, Human
gggcaguaaauaagaguaggu

SEQ ID NO: 681453 - RNA, 21 nt, Human
uaacacacacacaaacacuga

SEQ ID NO: 681454 - RNA, 18 nt, Human
uagguggugaacuuuugc

SEQ ID NO: 681455 - RNA, 20 nt, Human
uauccuaaaagaaaaugaaa

SEQ ID NO: 681456 - RNA, 20 nt, Human
ucacaguaucuugcagaggc

SEQ ID NO: 681457 - RNA, 19 nt, Human
uccuaaaagaaaaugaaaa

SEQ ID NO: 681458 - RNA, 21 nt, Human
ugacacacucugguuugcgug

SEQ ID NO: 681459 - RNA, 18 nt, Human
ugcuguguggcagugagg

SEQ ID NO: 681460 - RNA, 18 nt, Human
uggaacaaggguggucua

SEQ ID NO: 681461 - RNA, 20 nt, Human
uggaacaaggguggucuaaa

SEQ ID NO: 681462 - RNA, 22 nt, Human
uggaguauuuuauucacauguu

SEQ ID NO: 681463 - RNA, 23 nt, Human
uguggcagugagggagcgggcuc

SEQ ID NO: 681464 - RNA, 20 nt, Human
uuaaggcagcaagagcgaag

SEQ ID NO: 681465 - RNA, 23 nt, Human
uuagcugcaccgcggaggcagcu

SEQ ID NO: 681466 - RNA, 21 nt, Human
uucaucagugacauaacagau

SEQ ID NO: 681467 - RNA, 20 nt, Human
aaaaaaccugaaaacacuca

SEQ ID NO: 681468 - RNA, 25 nt, Human
aaaaaaccugaaaacacucauuugc

SEQ ID NO: 681469 - RNA, 20 nt, Human
aaaacaccaauuaacuguga

SEQ ID NO: 681470 - RNA, 26 nt, Human
aaacacagaagaauuaauaaacccga

SEQ ID NO: 681471 - RNA, 22 nt, Human
aaaccccucucuucuucaauuu

SEQ ID NO: 681472 - RNA, 20 nt, Human
aacacauaggaucccaucuc

SEQ ID NO: 681473 - RNA, 18 nt, Human
aacauuaugaaauguauu

SEQ ID NO: 681474 - RNA, 18 nt, Human
aacauuccaacuucuuaa

SEQ ID NO: 681475 - RNA, 24 nt, Human
aacugagcguauugcgggaacccg

SEQ ID NO: 681476 - RNA, 21 nt, Human
aagauuuuccucgcaccauac

SEQ ID NO: 681477 - RNA, 21 nt, Human
aagcaccucucugggcgauac

SEQ ID NO: 681478 - RNA, 19 nt, Human
aagguccuuuucaagaaaa

SEQ ID NO: 681479 - RNA, 23 nt, Human
aaucaugaucauucuugacagcc

SEQ ID NO: 681480 - RNA, 18 nt, Human
aaucucuauuauggauga

SEQ ID NO: 681481 - RNA, 23 nt, Human
acaguggagagauggggcccaga

SEQ ID NO: 681482 - RNA, 22 nt, Human
acccccccauuugcuuuaagga

SEQ ID NO: 681483 - RNA, 18 nt, Human
acggagccagucacaugc

SEQ ID NO: 681484 - RNA, 24 nt, Human
agaagccuuuaaauagcaaauuag

SEQ ID NO: 681485 - RNA, 22 nt, Human
agagauggggcccagagccacu

SEQ ID NO: 681486 - RNA, 21 nt, Human
agauggugcaucugucaccga

SEQ ID NO: 681487 - RNA, 20 nt, Human
agcgagagguaucgcuucug

SEQ ID NO: 681488 - RNA, 22 nt, Human
aggggcucccuuuggcugugaa

SEQ ID NO: 681489 - RNA, 21 nt, Human
augcagaaucucaggcccagc

SEQ ID NO: 681490 - RNA, 24 nt, Human
auguacauaugcuauacauacauu

SEQ ID NO: 681491 - RNA, 20 nt, Human
auuacaauaaaaagcacauu

SEQ ID NO: 681492 - RNA, 18 nt, Human
caaaaaaaccugaaaaca

SEQ ID NO: 681493 - RNA, 25 nt, Human
caaaaacaaaaaagucagauaauuc

SEQ ID NO: 681494 - RNA, 24 nt, Human
caauaauaaauaagguugggucaa

SEQ ID NO: 681495 - RNA, 24 nt, Human
cacauaggaucccaucucaggagc

SEQ ID NO: 681496 - RNA, 23 nt, Human
caguaaagauggagauauacaca

SEQ ID NO: 681497 - RNA, 27 nt, Human
cauaugcuauacauacauuuauuuaca

SEQ ID NO: 681498 - RNA, 24 nt, Human
cauauguacauaugcuauacauac

SEQ ID NO: 681499 - RNA, 19 nt, Human
caugcacacucucugccac

SEQ ID NO: 681500 - RNA, 19 nt, Human
cauuacauaaaugcauaua

SEQ ID NO: 681501 - RNA, 19 nt, Human
cccaaaagguaaauuaugg

SEQ ID NO: 681502 - RNA, 20 nt, Human
ccuacacauaacaaaauaug

SEQ ID NO: 681503 - RNA, 20 nt, Human
ccucgcaccauaccaaacuc

SEQ ID NO: 681504 - RNA, 21 nt, Human
ccuuuuuuucccuuuuccuug

SEQ ID NO: 681505 - RNA, 22 nt, Human
ccuuuuuuucccuuuuccuugu

SEQ ID NO: 681506 - RNA, 22 nt, Human
ccuuuuuuucccuuuuccuugu

SEQ ID NO: 681507 - RNA, 18 nt, Human
cuagauuaaacuucacug

SEQ ID NO: 681508 - RNA, 19 nt, Human
cucacaaagcauugcccaa

SEQ ID NO: 681509 - RNA, 24 nt, Human
cucacaugcacacucucugccaca

SEQ ID NO: 681510 - RNA, 18 nt, Human
cuccaacauuccaacuuc

SEQ ID NO: 681511 - RNA, 27 nt, Human
cuccuuuuuuucccuuuuccuuguuuu

SEQ ID NO: 681512 - RNA, 23 nt, Human
cucugccacacucgucacuuuag

SEQ ID NO: 681513 - RNA, 25 nt, Human
cucuucguuaucucugccagcuaau

SEQ ID NO: 681514 - RNA, 20 nt, Human
cugcacagcuuacaggacag

SEQ ID NO: 681515 - RNA, 19 nt, Human
cuugaaaacugcuccucag

SEQ ID NO: 681516 - RNA, 21 nt, Human
cuuggaaauucuugcaucucc

SEQ ID NO: 681517 - RNA, 18 nt, Human
cuuggagcagagucugca

SEQ ID NO: 681518 - RNA, 22 nt, Human
gaagagagggagaaucagaaau

SEQ ID NO: 681519 - RNA, 18 nt, Human
gaauagcagaaacaaagc

SEQ ID NO: 681520 - RNA, 24 nt, Human
gauauacacacauauguacauaug

SEQ ID NO: 681521 - RNA, 19 nt, Human
gcacuguguuguuaugcag

SEQ ID NO: 681522 - RNA, 24 nt, Human
gccacuuggaaagaacugugugag

SEQ ID NO: 681523 - RNA, 18 nt, Human
gcuuuuuuauuccucuca

SEQ ID NO: 681524 - RNA, 20 nt, Human
ggacaguggagagauggggc

SEQ ID NO: 681525 - RNA, 18 nt, Human
ggcaacuccucaucuagc

SEQ ID NO: 681526 - RNA, 22 nt, Human
ggcccagagccacuuggaaaga

SEQ ID NO: 681527 - RNA, 19 nt, Human
gggucuguagugaugggca

SEQ ID NO: 681528 - RNA, 24 nt, Human
ggugucuggaguugaauucagugc

SEQ ID NO: 681529 - RNA, 18 nt, Human
guacauaugcuauacaua

SEQ ID NO: 681530 - RNA, 23 nt, Human
guuuagcuagauuaaacuucacu

SEQ ID NO: 681531 - RNA, 22 nt, Human
guuuuuucuccuuuuuuucccu

SEQ ID NO: 681532 - RNA, 22 nt, Human
uaaaaacuugagacaacacagg

SEQ ID NO: 681533 - RNA, 20 nt, Human
uaaaauuauauuaguaggga

SEQ ID NO: 681534 - RNA, 22 nt, Human
uaacaaaauaugaauucccuga

SEQ ID NO: 681535 - RNA, 19 nt, Human
uaagaaaguucuuggaaau

SEQ ID NO: 681536 - RNA, 21 nt, Human
uacauaaaugcauauaaugca

SEQ ID NO: 681537 - RNA, 24 nt, Human
uagcagaaacaaagcguuaacaca

SEQ ID NO: 681538 - RNA, 18 nt, Human
uaguuaaaaacccugucu

SEQ ID NO: 681539 - RNA, 22 nt, Human
uaucacguuuuccaaacacaua

SEQ ID NO: 681540 - RNA, 19 nt, Human
uauuauggaugaccaaaga

SEQ ID NO: 681541 - RNA, 18 nt, Human
ucacaaagcauugcccaa

SEQ ID NO: 681542 - RNA, 23 nt, Human
ucagggcauguucacaccuuggu

SEQ ID NO: 681543 - RNA, 21 nt, Human
uccauuagcaguuggcuaaag

SEQ ID NO: 681544 - RNA, 22 nt, Human
uccauuggcaagauaacaauga

SEQ ID NO: 681545 - RNA, 21 nt, Human
ucccugagacuccuuagaaau

SEQ ID NO: 681546 - RNA, 20 nt, Human
uccucagaaacugacagaug

SEQ ID NO: 681547 - RNA, 21 nt, Human
uccucauauaacugagcguau

SEQ ID NO: 681548 - RNA, 23 nt, Human
uccucgugugccuaucacguuuu

SEQ ID NO: 681549 - RNA, 24 nt, Human
uccucuuucucucgcuuucucaca

SEQ ID NO: 681550 - RNA, 19 nt, Human
ucucgcugacuccgguggu

SEQ ID NO: 681551 - RNA, 21 nt, Human
ucucugccacacucgucacuu

SEQ ID NO: 681552 - RNA, 20 nt, Human
ucucugggcgauacaaagcc

SEQ ID NO: 681553 - RNA, 24 nt, Human
ucugagugugguuuuaggccagca

SEQ ID NO: 681554 - RNA, 19 nt, Human
ucuuucucucuauagcugu

SEQ ID NO: 681555 - RNA, 21 nt, Human
ucuuugguuaggcaucagggc

SEQ ID NO: 681556 - RNA, 25 nt, Human
ucuuugguuaggcaucagggcauca

SEQ ID NO: 681557 - RNA, 19 nt, Human
ugaagaaacacagaagaau

SEQ ID NO: 681558 - RNA, 18 nt, Human
ugaagaaguaaaggcuau

SEQ ID NO: 681559 - RNA, 20 nt, Human
ugacuuggggucuguaguga

SEQ ID NO: 681560 - RNA, 19 nt, Human
ugaugcauauaaaguaauc

SEQ ID NO: 681561 - RNA, 20 nt, Human
ugcaaaaaaaccugaaaaca

SEQ ID NO: 681562 - RNA, 24 nt, Human
ugcacaaaaacaaaaaagucagau

SEQ ID NO: 681563 - RNA, 22 nt, Human
ugcucacaaagcauugcccaaa

SEQ ID NO: 681564 - RNA, 19 nt, Human
ugcuguaccuuucaaacaa

SEQ ID NO: 681565 - RNA, 21 nt, Human
ugcuguaccuuucaaacaaaa

SEQ ID NO: 681566 - RNA, 18 nt, Human
uggcaagauaacaaugaa

SEQ ID NO: 681567 - RNA, 23 nt, Human
uggcuagugaagaaacacagaag

SEQ ID NO: 681568 - RNA, 18 nt, Human
ugggucaaaugcauaggu

SEQ ID NO: 681569 - RNA, 22 nt, Human
ugguaaugacuucucacccccc

SEQ ID NO: 681570 - RNA, 20 nt, Human
ugguauuugacaaacaagcu

SEQ ID NO: 681571 - RNA, 19 nt, Human
ugugaagaaguaaaggcua

SEQ ID NO: 681572 - RNA, 18 nt, Human
uugguuaacucaucuuug

SEQ ID NO: 681573 - RNA, 23 nt, Human
uuguugaugcauauaaaguaauc

SEQ ID NO: 681574 - RNA, 22 nt, Human
uuuacauauauacaguaaagau

SEQ ID NO: 681575 - RNA, 31 nt, Human
uuucaaacaaaaccccucucuucuucaauuu

SEQ ID NO: 681576 - RNA, 18 nt, Human
uuuugccucaauuuuuug

SEQ ID NO: 681577 - RNA, 24 nt, Human
uuuuuucuccuuuuuuucccuuuu

SEQ ID NO: 681578 - RNA, 20 nt, Human
uuuuuuguuuaaaauugucc

SEQ ID NO: 681579 - RNA, 25 nt, Human
aaaaaaaaaaaaacuauuaacaccc

SEQ ID NO: 681580 - RNA, 24 nt, Human
aaaacaaaaccaaaaaaaaaaaaa

SEQ ID NO: 681581 - RNA, 21 nt, Human
aaacaagagggggcaacccca

SEQ ID NO: 681582 - RNA, 24 nt, Human
aaacaagagggggcaaccccaaga

SEQ ID NO: 681583 - RNA, 24 nt, Human
aaacaagauaaaaacaaaaccaaa

SEQ ID NO: 681584 - RNA, 25 nt, Human
aaacaagauaaaaacaaaaccaaaa

SEQ ID NO: 681585 - RNA, 27 nt, Human
aaaucaccgcaagauuggggaaaaaau

SEQ ID NO: 681586 - RNA, 21 nt, Human
aacaagauaaaaacaaaacca

SEQ ID NO: 681587 - RNA, 24 nt, Human
aacaagauaaaaacaaaaccaaaa

SEQ ID NO: 681588 - RNA, 19 nt, Human
acaaaaccaaaaaaaaaaa

SEQ ID NO: 681589 - RNA, 19 nt, Human
accccaagaaaacaagaua

SEQ ID NO: 681590 - RNA, 24 nt, Human
accccaagaaaacaagauaaaaac

SEQ ID NO: 681591 - RNA, 24 nt, Human
accccaagaaaacaagauaaaaac

SEQ ID NO: 681592 - RNA, 26 nt, Human
accucgagaaucgccuuaaaaaaaaa

SEQ ID NO: 681593 - RNA, 23 nt, Human
agaaaacaagauaaaaacaaaac

SEQ ID NO: 681594 - RNA, 20 nt, Human
agagaggaggaggagggggg

SEQ ID NO: 681595 - RNA, 27 nt, Human
agagcggagagaggaggaggagggggg

SEQ ID NO: 681596 - RNA, 19 nt, Human
agaggaggaggaggggggc

SEQ ID NO: 681597 - RNA, 19 nt, Human
agaggaggaggaggggggc

SEQ ID NO: 681598 - RNA, 22 nt, Human
agcggagagaggaggaggaggg

SEQ ID NO: 681599 - RNA, 20 nt, Human
auuuuaaacaaaaucaaucc

SEQ ID NO: 681600 - RNA, 23 nt, Human
caacacaaacaagagggggcaac

SEQ ID NO: 681601 - RNA, 20 nt, Human
caaccccaagaaaacaagau

SEQ ID NO: 681602 - RNA, 26 nt, Human
caagaaaacaagauaaaaacaaaacc

SEQ ID NO: 681603 - RNA, 22 nt, Human
cacacaacacaaacaagagggg

SEQ ID NO: 681604 - RNA, 20 nt, Human
cacacacaacacaaacaaga

SEQ ID NO: 681605 - RNA, 23 nt, Human
caccggucaccgcucccugcgcc

SEQ ID NO: 681606 - RNA, 18 nt, Human
ccaaggagggaaaccacc

SEQ ID NO: 681607 - RNA, 21 nt, Human
ccacacacaacacaaacaaga

SEQ ID NO: 681608 - RNA, 23 nt, Human
cccaccccgcgccaaggagggaa

SEQ ID NO: 681609 - RNA, 18 nt, Human
ccccaccccgcgccaagg

SEQ ID NO: 681610 - RNA, 18 nt, Human
ccgcagcugaaaaccucg

SEQ ID NO: 681611 - RNA, 18 nt, Human
ccgccgcugccgccaccg

SEQ ID NO: 681612 - RNA, 20 nt, Human
ccgcugccgccaccggcugc

SEQ ID NO: 681613 - RNA, 28 nt, Human
ccucccgcagcugaaaaccucgagaauc

SEQ ID NO: 681614 - RNA, 24 nt, Human
ccuuaaaaaaaaaaaaaagccacg

SEQ ID NO: 681615 - RNA, 20 nt, Human
cgccaaggagggaaaccacc

SEQ ID NO: 681616 - RNA, 22 nt, Human
cuccucccgcagcugaaaaccu

SEQ ID NO: 681617 - RNA, 24 nt, Human
cugcagcuccagccguccgguccg

SEQ ID NO: 681618 - RNA, 25 nt, Human
cugccgccaccggcugcagcuccag

SEQ ID NO: 681619 - RNA, 18 nt, Human
cuuaaaaaaaaaaaaaag

SEQ ID NO: 681620 - RNA, 18 nt, Human
gaaggaguaggggagagc

SEQ ID NO: 681621 - RNA, 23 nt, Human
gagcggagagaggaggaggaggg

SEQ ID NO: 681622 - RNA, 23 nt, Human
gauaaaaacaaaaccaaaaaaaa

SEQ ID NO: 681623 - RNA, 21 nt, Human
gcagcuccagccguccggucc

SEQ ID NO: 681624 - RNA, 21 nt, Human
gcccgcuccccaccccgcgcc

SEQ ID NO: 681625 - RNA, 21 nt, Human
gcgccgccgcugccgccaccg

SEQ ID NO: 681626 - RNA, 20 nt, Human
ggaaaaaauuuuaaacaaaa

SEQ ID NO: 681627 - RNA, 19 nt, Human
ggagagcggagagaggagg

SEQ ID NO: 681628 - RNA, 18 nt, Human
ggaggaggggggcacucc

SEQ ID NO: 681629 - RNA, 18 nt, Human
gggcaaccccaagaaaac

SEQ ID NO: 681630 - RNA, 22 nt, Human
gggcaaccccaagaaaacaaga

SEQ ID NO: 681631 - RNA, 22 nt, Human
ggggagagcggagagaggagga

SEQ ID NO: 681632 - RNA, 27 nt, Human
ucaccgcucccugcgccgccgcugccg

SEQ ID NO: 681633 - RNA, 23 nt, Human
uccacacacaacacaaacaagag

SEQ ID NO: 681634 - RNA, 18 nt, Human
ucccugcgccgccgcugc

SEQ ID NO: 681635 - RNA, 18 nt, Human
ugacccaaaucaccgcaa

SEQ ID NO: 681636 - RNA, 22 nt, Human
ugccgccaccggcugcagcucc

SEQ ID NO: 681637 - RNA, 22 nt, Human
uuccacacacaacacaaacaag

SEQ ID NO: 681638 - RNA, 23 nt, Human
uuccacacacaacacaaacaaga

SEQ ID NO: 681639 - RNA, 20 nt, Human
uugcccgcuccccaccccgc

SEQ ID NO: 681640 - RNA, 21 nt, Human
uugcccgcuccccaccccgcg

SEQ ID NO: 681641 - RNA, 20 nt, Human
aaaaagucauauuuuuucua

SEQ ID NO: 681642 - RNA, 24 nt, Human
agguucuuaggaaggcaacaacuu

SEQ ID NO: 681643 - RNA, 21 nt, Human
caaaagcaaugaauaacagaa

SEQ ID NO: 681644 - RNA, 22 nt, Human
caggagguuccuacuucuccga

SEQ ID NO: 681645 - RNA, 21 nt, Human
ccuguggggaaggcgcuuccc

SEQ ID NO: 681646 - RNA, 22 nt, Human
gacagaagccgccacgagcccg

SEQ ID NO: 681647 - RNA, 21 nt, Human
ggcuuaggaggaagaauuugu

SEQ ID NO: 681648 - RNA, 20 nt, Human
guuccuacuucuccgaccac

SEQ ID NO: 681649 - RNA, 24 nt, Human
uaagaggcuacagaguuacaaguu

SEQ ID NO: 681650 - RNA, 24 nt, Human
ucccuccgcggagcggacagaagc

SEQ ID NO: 681651 - RNA, 19 nt, Human
uccuacuucuccgaccacc

SEQ ID NO: 681652 - RNA, 19 nt, Human
ucuacuggaauucucuggu

SEQ ID NO: 681653 - RNA, 18 nt, Human
ucucugguauagcacagu

SEQ ID NO: 681654 - RNA, 24 nt, Human
uguagucauuucugcaauucuaga

SEQ ID NO: 681655 - RNA, 18 nt, Human
uguccuguggggaaggcg

SEQ ID NO: 681656 - RNA, 22 nt, Human
uuaaaaaaaaguuaugguuuuu

SEQ ID NO: 681657 - RNA, 26 nt, Human
uuacaaguuucuuucuacuggaauuc

SEQ ID NO: 681658 - RNA, 22 nt, Human
agaaauuugauaagaaauuuaa

SEQ ID NO: 681659 - RNA, 23 nt, Human
augucuuuuguuuuuccucauga

SEQ ID NO: 681660 - RNA, 19 nt, Human
caagcaauaguauucagcc

SEQ ID NO: 681661 - RNA, 18 nt, Human
ccgcaacaagacacaaca

SEQ ID NO: 681662 - RNA, 18 nt, Human
uaguauauacauacagaa

SEQ ID NO: 681663 - RNA, 23 nt, Human
uauauacauacagaaugccaagc

SEQ ID NO: 681664 - RNA, 18 nt, Human
uauguacaacaggcaaag

SEQ ID NO: 681665 - RNA, 26 nt, Human
ucaaauaucuuccaaaauacaguuuc

SEQ ID NO: 681666 - RNA, 21 nt, Human
uccaaaauacaguuuccuaga

SEQ ID NO: 681667 - RNA, 22 nt, Human
ucuuuuguuuuuccucaugaaa

SEQ ID NO: 681668 - RNA, 23 nt, Human
ucuuuuguuuuuccucaugaaag

SEQ ID NO: 681669 - RNA, 24 nt, Human
aaaaaaaaaaaaaaaagaaaagaa

SEQ ID NO: 681670 - RNA, 22 nt, Human
aaaaaaaucagauaagaaaaua

SEQ ID NO: 681671 - RNA, 24 nt, Human
aaaagaaaauacaguaaaauauua

SEQ ID NO: 681672 - RNA, 21 nt, Human
aaagccacuuaaauacuuuuc

SEQ ID NO: 681673 - RNA, 18 nt, Human
aacauggugaaacccugc

SEQ ID NO: 681674 - RNA, 20 nt, Human
aacauggugaaacccugccu

SEQ ID NO: 681675 - RNA, 21 nt, Human
aacauggugaaacccugccuc

SEQ ID NO: 681676 - RNA, 22 nt, Human
aacgaacuccaacuuuaaauau

SEQ ID NO: 681677 - RNA, 23 nt, Human
aagaaaaaaaucagauaagaaaa

SEQ ID NO: 681678 - RNA, 25 nt, Human
aagaaaagaaaauacaguaaaauau

SEQ ID NO: 681679 - RNA, 23 nt, Human
aauaaggcaagaaaaaaaucaga

SEQ ID NO: 681680 - RNA, 24 nt, Human
aaucgcuugaacccaggaggcaga

SEQ ID NO: 681681 - RNA, 22 nt, Human
aaugaaacaucacuccauacaa

SEQ ID NO: 681682 - RNA, 18 nt, Human
aauuagccaggcauggug

SEQ ID NO: 681683 - RNA, 18 nt, Human
acauauugauccaucuca

SEQ ID NO: 681684 - RNA, 27 nt, Human
accaauuauacuucuguuuucuaucau

SEQ ID NO: 681685 - RNA, 24 nt, Human
acccaggaggcagagguugcagug

SEQ ID NO: 681686 - RNA, 24 nt, Human
acccugccucuacuaaaaauacaa

SEQ ID NO: 681687 - RNA, 25 nt, Human
acuccagccugggguacaagaguga

SEQ ID NO: 681688 - RNA, 22 nt, Human
agaaaagaaaauacaguaaaag

SEQ ID NO: 681689 - RNA, 27 nt, Human
agaaaagaaaauacaguaaaauauuaa

SEQ ID NO: 681690 - RNA, 22 nt, Human
agaaucgcuugaacccaggagg

SEQ ID NO: 681691 - RNA, 25 nt, Human
agacuaacugacacaguucuaaggc

SEQ ID NO: 681692 - RNA, 18 nt, Human
agagguugcagugagccg

SEQ ID NO: 681693 - RNA, 23 nt, Human
agagguugcagugagccgagauc

SEQ ID NO: 681694 - RNA, 24 nt, Human
agagguugcagugagccgagauca

SEQ ID NO: 681695 - RNA, 26 nt, Human
agauaagaaaauacagcacuuuggga

SEQ ID NO: 681696 - RNA, 24 nt, Human
agcacuuugggaggccgaggcggg

SEQ ID NO: 681697 - RNA, 25 nt, Human
agccugggguacaagagugagacuu

SEQ ID NO: 681698 - RNA, 20 nt, Human
aggcaagaaaaaaaucagau

SEQ ID NO: 681699 - RNA, 22 nt, Human
aggcaagaaaaaaaucagauaa

SEQ ID NO: 681700 - RNA, 21 nt, Human
aggcagagguugcagugagcc

SEQ ID NO: 681701 - RNA, 24 nt, Human
aggcagagguugcagugagccgag

SEQ ID NO: 681702 - RNA, 23 nt, Human
aggcaggagaaucgcuugaaccc

SEQ ID NO: 681703 - RNA, 24 nt, Human
aggcaggagaaucgcuugaaccca

SEQ ID NO: 681704 - RNA, 24 nt, Human
aggcaugguggcaggcaccuguaa

SEQ ID NO: 681705 - RNA, 20 nt, Human
aggccgaggcggguggauca

SEQ ID NO: 681706 - RNA, 24 nt, Human
aggcggguggaucaugaggucagg

SEQ ID NO: 681707 - RNA, 20 nt, Human
aggcugaggcaggagaaucg

SEQ ID NO: 681708 - RNA, 24 nt, Human
aggcugaggcaggagaaucgcuug

SEQ ID NO: 681709 - RNA, 20 nt, Human
agggagagugacagagagag

SEQ ID NO: 681710 - RNA, 24 nt, Human
aucacgccauugcacuccagccug

SEQ ID NO: 681711 - RNA, 23 nt, Human
aucauccuaaauccaaaccaaaa

SEQ ID NO: 681712 - RNA, 18 nt, Human
auugcacuccagccuggg

SEQ ID NO: 681713 - RNA, 24 nt, Human
caaaaccaggaccagucucagcug

SEQ ID NO: 681714 - RNA, 19 nt, Human
caaagggaacaaaaccagg

SEQ ID NO: 681715 - RNA, 21 nt, Human
caaagggaacaaaaccaggac

SEQ ID NO: 681716 - RNA, 19 nt, Human
caagaaaaaaaucagauaa

SEQ ID NO: 681717 - RNA, 24 nt, Human
caagaaaaaaaucagauaagaaaa

SEQ ID NO: 681718 - RNA, 22 nt, Human
caccuccccuuacauauugauc

SEQ ID NO: 681719 - RNA, 23 nt, Human
caccuguaaucccagcuacucgg

SEQ ID NO: 681720 - RNA, 24 nt, Human
caccuguaaucccagcuacucggg

SEQ ID NO: 681721 - RNA, 23 nt, Human
cacuccagccugggguacaagag

SEQ ID NO: 681722 - RNA, 24 nt, Human
cacuccagccugggguacaagagu

SEQ ID NO: 681723 - RNA, 25 nt, Human
cacuccagccugggguacaagagug

SEQ ID NO: 681724 - RNA, 18 nt, Human
cagaacccaaaauaaacu

SEQ ID NO: 681725 - RNA, 19 nt, Human
cagauggaugggaaggauu

SEQ ID NO: 681726 - RNA, 18 nt, Human
cagcacccuaccuugcug

SEQ ID NO: 681727 - RNA, 21 nt, Human
cagcacccuaccuugcuggga

SEQ ID NO: 681728 - RNA, 24 nt, Human
cagcacuuugggaggccgaggcgg

SEQ ID NO: 681729 - RNA, 24 nt, Human
cagcuacucgggaggcugaggcag

SEQ ID NO: 681730 - RNA, 23 nt, Human
caguauaaaacagauuuauuguc

SEQ ID NO: 681731 - RNA, 24 nt, Human
cauucagucauuaacacaacccag

SEQ ID NO: 681732 - RNA, 18 nt, Human
cauugcacuccagccugg

SEQ ID NO: 681733 - RNA, 19 nt, Human
cauugcacuccagccuggg

SEQ ID NO: 681734 - RNA, 19 nt, Human
cauugcacuccagccuggg

SEQ ID NO: 681735 - RNA, 19 nt, Human
cauugcacuccagccuggg

SEQ ID NO: 681736 - RNA, 22 nt, Human
cauugcacuccagccuggggua

SEQ ID NO: 681737 - RNA, 24 nt, Human
cauugcacuccagccugggguaca

SEQ ID NO: 681738 - RNA, 22 nt, Human
ccaaaaaaaaaaaaaaaagaaa

SEQ ID NO: 681739 - RNA, 22 nt, Human
ccagguaaaugaaacaucacuc

SEQ ID NO: 681740 - RNA, 20 nt, Human
ccauugcacuccagccuggg

SEQ ID NO: 681741 - RNA, 21 nt, Human
ccauugcacuccagccugggg

SEQ ID NO: 681742 - RNA, 22 nt, Human
ccauugcacuccagccuggggu

SEQ ID NO: 681743 - RNA, 24 nt, Human
ccauugcacuccagccugggguac

SEQ ID NO: 681744 - RNA, 23 nt, Human
cccccaaucagugauuugacugu

SEQ ID NO: 681745 - RNA, 22 nt, Human
cccuugugugaaaguucuuuau

SEQ ID NO: 681746 - RNA, 18 nt, Human
ccucauuaaacaauuuau

SEQ ID NO: 681747 - RNA, 22 nt, Human
ccuggcuaacauggugaaaccc

SEQ ID NO: 681748 - RNA, 22 nt, Human
ccuggcuaacauggugaaaccc

SEQ ID NO: 681749 - RNA, 24 nt, Human
ccuggcuaacauggugaaacccug

SEQ ID NO: 681750 - RNA, 21 nt, Human
ccuguaaucccagcuacucgg

SEQ ID NO: 681751 - RNA, 24 nt, Human
cgagaucacgccauugcacuccag

SEQ ID NO: 681752 - RNA, 24 nt, Human
cgagaucauccuggcuaacauggu

SEQ ID NO: 681753 - RNA, 22 nt, Human
cgaggcggguggaucaugaggu

SEQ ID NO: 681754 - RNA, 24 nt, Human
cgaggcggguggaucaugagguca

SEQ ID NO: 681755 - RNA, 26 nt, Human
cgccauugcacuccagccugggguac

SEQ ID NO: 681756 - RNA, 26 nt, Human
cucaaguauaucucucccccuuccac

SEQ ID NO: 681757 - RNA, 21 nt, Human
cucccccuuccacacacgcuc

SEQ ID NO: 681758 - RNA, 20 nt, Human
cucuacuaaaaauacaaaaa

SEQ ID NO: 681759 - RNA, 23 nt, Human
cuggcuagaacagauaaaaugga

SEQ ID NO: 681760 - RNA, 21 nt, Human
cuguaaucccagcuacucggg

SEQ ID NO: 681761 - RNA, 28 nt, Human
cuguaccaaagggaacaaaaccaggacc

SEQ ID NO: 681762 - RNA, 21 nt, Human
cuucaaagaugagacauuccu

SEQ ID NO: 681763 - RNA, 19 nt, Human
cuuuagcaacgaacuccaa

SEQ ID NO: 681764 - RNA, 18 nt, Human
gaacagauaaaauggaug

SEQ ID NO: 681765 - RNA, 22 nt, Human
gcaggagaaucgcuugaaccca

SEQ ID NO: 681766 - RNA, 22 nt, Human
gcuaacauggugaaacccugcc

SEQ ID NO: 681767 - RNA, 24 nt, Human
gcuaacauggugaaacccugccuc

SEQ ID NO: 681768 - RNA, 20 nt, Human
gcuugucacucuucaacccu

SEQ ID NO: 681769 - RNA, 22 nt, Human
ggaggcagagguugcagugagc

SEQ ID NO: 681770 - RNA, 21 nt, Human
ggcaagcugcuuuggugggca

SEQ ID NO: 681771 - RNA, 19 nt, Human
ggcaccuguaaucccagcu

SEQ ID NO: 681772 - RNA, 21 nt, Human
ggcaggcaccuguaaucccag

SEQ ID NO: 681773 - RNA, 23 nt, Human
ggcggguggaucaugaggucagg

SEQ ID NO: 681774 - RNA, 19 nt, Human
ggcuagaacagauaaaaug

SEQ ID NO: 681775 - RNA, 21 nt, Human
gguggaucaugaggucaggag

SEQ ID NO: 681776 - RNA, 21 nt, Human
gugaaacccugccucuacuaa

SEQ ID NO: 681777 - RNA, 19 nt, Human
guugcagugagccgagauc

SEQ ID NO: 681778 - RNA, 21 nt, Human
uaaaaauacaaaaauuagcca

SEQ ID NO: 681779 - RNA, 18 nt, Human
uaacacaacccagguaaa

SEQ ID NO: 681780 - RNA, 21 nt, Human
uaacauggugaaacccugccu

SEQ ID NO: 681781 - RNA, 22 nt, Human
uaacauggugaaacccugccuc

SEQ ID NO: 681782 - RNA, 24 nt, Human
uaacauggugaaacccugccucua

SEQ ID NO: 681783 - RNA, 22 nt, Human
uaagauauacaauuguuacaga

SEQ ID NO: 681784 - RNA, 20 nt, Human
uaaggcacuguuaccaaugc

SEQ ID NO: 681785 - RNA, 19 nt, Human
uaauaaggcaagaaaaaaa

SEQ ID NO: 681786 - RNA, 27 nt, Human
uacagcacuuugggaggccgaggcggg

SEQ ID NO: 681787 - RNA, 23 nt, Human
uacauaucagaacccaaaauaaa

SEQ ID NO: 681788 - RNA, 18 nt, Human
uaccaaugcuugucacuc

SEQ ID NO: 681789 - RNA, 18 nt, Human
uacugugucugacaaaau

SEQ ID NO: 681790 - RNA, 22 nt, Human
uagagaaaggagaaagaauuag

SEQ ID NO: 681791 - RNA, 21 nt, Human
uagcacugacaagaggucugu

SEQ ID NO: 681792 - RNA, 24 nt, Human
uaugaacuucccucacucauuuca

SEQ ID NO: 681793 - RNA, 23 nt, Human
uaugucuuaauaaggcaagaaaa

SEQ ID NO: 681794 - RNA, 20 nt, Human
uauuguaguaaacagaugga

SEQ ID NO: 681795 - RNA, 22 nt, Human
ucaaauucuaagcaaaauuuca

SEQ ID NO: 681796 - RNA, 23 nt, Human
ucacgccauugcacuccagccug

SEQ ID NO: 681797 - RNA, 23 nt, Human
ucaucuccaaaaaaaaaaaaaaa

SEQ ID NO: 681798 - RNA, 18 nt, Human
ucaugaggucaggagauc

SEQ ID NO: 681799 - RNA, 24 nt, Human
ucaugaggucaggagaucgagauc

SEQ ID NO: 681800 - RNA, 24 nt, Human
uccaaaaaaaaaaaaaaaagaaaa

SEQ ID NO: 681801 - RNA, 26 nt, Human
uccaaaaaaaaaaaaaaaagaaaaga

SEQ ID NO: 681802 - RNA, 24 nt, Human
uccagccugggguacaagagugag

SEQ ID NO: 681803 - RNA, 25 nt, Human
uccagccugggguacaagagugaga

SEQ ID NO: 681804 - RNA, 24 nt, Human
ucgggaggcugaggcaggagaauc

SEQ ID NO: 681805 - RNA, 20 nt, Human
ucuccaaaaaaaaaaaaaaa

SEQ ID NO: 681806 - RNA, 22 nt, Human
ugagccgagaucacgccauugc

SEQ ID NO: 681807 - RNA, 20 nt, Human
ugaggcaggagaaucgcuug

SEQ ID NO: 681808 - RNA, 24 nt, Human
ugaggcaggagaaucgcuugaacc

SEQ ID NO: 681809 - RNA, 25 nt, Human
ugaggcaggagaaucgcuugaaccc

SEQ ID NO: 681810 - RNA, 23 nt, Human
uggcaagcugcuuuggugggcag

SEQ ID NO: 681811 - RNA, 22 nt, Human
uggcaggcaccuguaaucccag

SEQ ID NO: 681812 - RNA, 23 nt, Human
ugggaggccgaggcggguggauc

SEQ ID NO: 681813 - RNA, 24 nt, Human
ugggaggccgaggcggguggauca

SEQ ID NO: 681814 - RNA, 24 nt, Human
ugguggcaggcaccuguaauccca

SEQ ID NO: 681815 - RNA, 26 nt, Human
uuaacacaacccagguaaaugaaaca

SEQ ID NO: 681816 - RNA, 21 nt, Human
uuaaucauaagacucaaguau

SEQ ID NO: 681817 - RNA, 23 nt, Human
uuccaaaucagacuaacugacac

SEQ ID NO: 681818 - RNA, 19 nt, Human
uuccacacacgcucccacc

SEQ ID NO: 681819 - RNA, 20 nt, Human
uuccacacacgcucccaccu

SEQ ID NO: 681820 - RNA, 23 nt, Human
uuccacacacgcucccaccuccc

SEQ ID NO: 681821 - RNA, 18 nt, Human
uugcagugagccgagauc

SEQ ID NO: 681822 - RNA, 20 nt, Human
uugcagugagccgagaucac

SEQ ID NO: 681823 - RNA, 21 nt, Human
uugcagugagccgagaucacg

SEQ ID NO: 681824 - RNA, 25 nt, Human
uugggaggccgaggcggguggauca

SEQ ID NO: 681825 - RNA, 26 nt, Human
aaaaacaguuaagaaacuuuacaagc

SEQ ID NO: 681826 - RNA, 24 nt, Human
aaagcuaauauuuaagaaaaaccc

SEQ ID NO: 681827 - RNA, 18 nt, Human
aaucuguucuuucuccuc

SEQ ID NO: 681828 - RNA, 21 nt, Human
acgcagggcugaggagcgggc

SEQ ID NO: 681829 - RNA, 23 nt, Human
agaaaaacccucuuaauccucca

SEQ ID NO: 681830 - RNA, 21 nt, Human
agcgaccccaggacgcagggc

SEQ ID NO: 681831 - RNA, 23 nt, Human
aggcgugcgggaugcagcagcga

SEQ ID NO: 681832 - RNA, 21 nt, Human
caaaggacaagccgccgcuga

SEQ ID NO: 681833 - RNA, 19 nt, Human
cagcagcgaccccaggacg

SEQ ID NO: 681834 - RNA, 22 nt, Human
cagcagcgaccccaggacgcag

SEQ ID NO: 681835 - RNA, 21 nt, Human
cagcgccuuuugcauagcauc

SEQ ID NO: 681836 - RNA, 19 nt, Human
cagggcugaggagcgggcg

SEQ ID NO: 681837 - RNA, 20 nt, Human
ccaggacgcagggcugagga

SEQ ID NO: 681838 - RNA, 23 nt, Human
ccguuuguucuuugacaauuuca

SEQ ID NO: 681839 - RNA, 25 nt, Human
cuauacaauucuccuuggaucugua

SEQ ID NO: 681840 - RNA, 19 nt, Human
uacagguuuaaaaaauuua

SEQ ID NO: 681841 - RNA, 24 nt, Human
uacagguuuaaaaaauuuaccgag

SEQ ID NO: 681842 - RNA, 22 nt, Human
uaccucagcuccuuagauacgg

SEQ ID NO: 681843 - RNA, 20 nt, Human
uagagaguccucacuuaaaa

SEQ ID NO: 681844 - RNA, 18 nt, Human
uagcaugcuggcuaggag

SEQ ID NO: 681845 - RNA, 18 nt, Human
uccggaacaaaggacaag

SEQ ID NO: 681846 - RNA, 22 nt, Human
ucuguucuuucuccucaaaaaa

SEQ ID NO: 681847 - RNA, 19 nt, Human
ugaaaagaaacgugaucac

SEQ ID NO: 681848 - RNA, 22 nt, Human
ugaaaagaaacgugaucaccug

SEQ ID NO: 681849 - RNA, 18 nt, Human
ugcuggcuaggagucuuc

SEQ ID NO: 681850 - RNA, 21 nt, Human
uguaguugacuguuuuuuucu

SEQ ID NO: 681851 - RNA, 20 nt, Human
uuccuacugugaauaaucug

SEQ ID NO: 681852 - RNA, 19 nt, Human
uuuaagaguuucuguaguu

SEQ ID NO: 681853 - RNA, 20 nt, Human
uuuuaagaguuucuguaguu

SEQ ID NO: 681854 - RNA, 19 nt, Human
aaaaaaacaaacaagggcc

SEQ ID NO: 681855 - RNA, 26 nt, Human
aaaaaaacaaacaagggccgggugcg

SEQ ID NO: 681856 - RNA, 18 nt, Human
aaacaagggccgggugcg

SEQ ID NO: 681857 - RNA, 20 nt, Human
aacaaaucaguccuccagaa

SEQ ID NO: 681858 - RNA, 23 nt, Human
aaccugggcaauguagugagacc

SEQ ID NO: 681859 - RNA, 24 nt, Human
aaccugggcaauguagugagaccu

SEQ ID NO: 681860 - RNA, 22 nt, Human
aagcaaacccaaauguguauua

SEQ ID NO: 681861 - RNA, 21 nt, Human
acaaaaaguaaauaucugcaa

SEQ ID NO: 681862 - RNA, 18 nt, Human
acaaacaagggccgggug

SEQ ID NO: 681863 - RNA, 22 nt, Human
acacuuuaggaggccaaggugg

SEQ ID NO: 681864 - RNA, 25 nt, Human
accuugucucuacuuaaaaaaacaa

SEQ ID NO: 681865 - RNA, 21 nt, Human
agacaaaaaguaaauaucugc

SEQ ID NO: 681866 - RNA, 19 nt, Human
agagguugauaggacugac

SEQ ID NO: 681867 - RNA, 20 nt, Human
aggaguuugagaccaaccug

SEQ ID NO: 681868 - RNA, 24 nt, Human
agucaucccauuaaaaaaaugaaa

SEQ ID NO: 681869 - RNA, 22 nt, Human
caaacaaaucaguccuccagaa

SEQ ID NO: 681870 - RNA, 22 nt, Human
caaacaagggccgggugcggug

SEQ ID NO: 681871 - RNA, 24 nt, Human
cacacuuuaggaggccaagguggg

SEQ ID NO: 681872 - RNA, 24 nt, Human
cacgccuguaaucccagcacuuug

SEQ ID NO: 681873 - RNA, 22 nt, Human
cagcucuaaaagauggggaaaa

SEQ ID NO: 681874 - RNA, 23 nt, Human
cagcucuaaaagauggggaaaau

SEQ ID NO: 681875 - RNA, 18 nt, Human
cccagcaccucagcgccc

SEQ ID NO: 681876 - RNA, 28 nt, Human
ccuaucuuuauuuuuuucagucuuccca

SEQ ID NO: 681877 - RNA, 21 nt, Human
ccuccagaagcacaggaugaa

SEQ ID NO: 681878 - RNA, 18 nt, Human
cgccuguaaucccagcac

SEQ ID NO: 681879 - RNA, 24 nt, Human
cucacgccuguaaucccagcacuu

SEQ ID NO: 681880 - RNA, 26 nt, Human
cucacgccuguaaucccagcacuuug

SEQ ID NO: 681881 - RNA, 18 nt, Human
cucagacuuacuuggagg

SEQ ID NO: 681882 - RNA, 23 nt, Human
cugcuugagcucaggaguuugag

SEQ ID NO: 681883 - RNA, 19 nt, Human
cuucccaacaaagaaucug

SEQ ID NO: 681884 - RNA, 23 nt, Human
cuugagcucaggaguuugagacc

SEQ ID NO: 681885 - RNA, 24 nt, Human
gaccuugucucuacuuaaaaaaac

SEQ ID NO: 681886 - RNA, 22 nt, Human
gauguuagagguugauaggacu

SEQ ID NO: 681887 - RNA, 18 nt, Human
ggccgggugcgguggcuc

SEQ ID NO: 681888 - RNA, 21 nt, Human
ggccgggugcgguggcucacg

SEQ ID NO: 681889 - RNA, 21 nt, Human
ggcucacgccuguaaucccag

SEQ ID NO: 681890 - RNA, 24 nt, Human
gggugcgguggcucacgccuguaa

SEQ ID NO: 681891 - RNA, 23 nt, Human
gguggcucacgccuguaauccca

SEQ ID NO: 681892 - RNA, 24 nt, Human
gguggcucacgccuguaaucccag

SEQ ID NO: 681893 - RNA, 18 nt, Human
gugcgaggauguuagagg

SEQ ID NO: 681894 - RNA, 25 nt, Human
uaaaaaaacaaacaagggccgggug

SEQ ID NO: 681895 - RNA, 22 nt, Human
ucaaacaaaucaguccuccaga

SEQ ID NO: 681896 - RNA, 19 nt, Human
ucagucuucccaacaaaga

SEQ ID NO: 681897 - RNA, 24 nt, Human
ucaucccauuaaaaaaaugaaagc

SEQ ID NO: 681898 - RNA, 23 nt, Human
uccacacuuuaggaggccaaggu

SEQ ID NO: 681899 - RNA, 24 nt, Human
uccacacuuuaggaggccaaggug

SEQ ID NO: 681900 - RNA, 18 nt, Human
ucccagcaccucagcgcc

SEQ ID NO: 681901 - RNA, 22 nt, Human
ucugcaaauaucugaggcuguc

SEQ ID NO: 681902 - RNA, 22 nt, Human
uggcucacgccuguaaucccag

SEQ ID NO: 681903 - RNA, 24 nt, Human
uggcucacgccuguaaucccagca

SEQ ID NO: 681904 - RNA, 18 nt, Human
ugggaagacugcuugagc

SEQ ID NO: 681905 - RNA, 18 nt, Human
uggugcgaggauguuaga

SEQ ID NO: 681906 - RNA, 21 nt, Human
uucaauacagacaccuguccu

SEQ ID NO: 681907 - RNA, 23 nt, Human
uucccaacaaagaaucugcuaua

SEQ ID NO: 681908 - RNA, 18 nt, Human
uuucucagacuuacuugg

SEQ ID NO: 681909 - RNA, 24 nt, Human
uuucucagacuuacuuggagguua

SEQ ID NO: 681910 - RNA, 18 nt, Human
aaaagggagccgcuccgc

SEQ ID NO: 681911 - RNA, 20 nt, Human
acaggcggggcaaacucugg

SEQ ID NO: 681912 - RNA, 19 nt, Human
acagugggaaacgugucag

SEQ ID NO: 681913 - RNA, 21 nt, Human
acucacaaggcugaaaaggga

SEQ ID NO: 681914 - RNA, 22 nt, Human
acucuggagacccagagacaag

SEQ ID NO: 681915 - RNA, 24 nt, Human
agaagagccugggggaugggcagg

SEQ ID NO: 681916 - RNA, 18 nt, Human
agcacccguccccugcug

SEQ ID NO: 681917 - RNA, 21 nt, Human
agccagcccagcuggggccug

SEQ ID NO: 681918 - RNA, 25 nt, Human
agccaggagauccugccgagauggc

SEQ ID NO: 681919 - RNA, 27 nt, Human
agccugggggaugggcaggucggggag

SEQ ID NO: 681920 - RNA, 22 nt, Human
aggcucggcagacccaaggcca

SEQ ID NO: 681921 - RNA, 19 nt, Human
caacgcaccgccaagggcc

SEQ ID NO: 681922 - RNA, 18 nt, Human
caagaagcaccaacuccc

SEQ ID NO: 681923 - RNA, 22 nt, Human
caagaagcaccaacucccagug

SEQ ID NO: 681924 - RNA, 20 nt, Human
cagcggggcacaccgauccc

SEQ ID NO: 681925 - RNA, 25 nt, Human
caggcaggagugguguggcaggcgg

SEQ ID NO: 681926 - RNA, 19 nt, Human
ccacagcccccaugggggg

SEQ ID NO: 681927 - RNA, 21 nt, Human
ccagcccagcuggggccugcc

SEQ ID NO: 681928 - RNA, 30 nt, Human
cuggccaaagcacccguccccugcugcagg

SEQ ID NO: 681929 - RNA, 21 nt, Human
gaggggccacagcccccaugg

SEQ ID NO: 681930 - RNA, 20 nt, Human
gcagacccaaggccagggca

SEQ ID NO: 681931 - RNA, 20 nt, Human
gcccagaagagccuggggga

SEQ ID NO: 681932 - RNA, 22 nt, Human
ggagacccagagacaagaagca

SEQ ID NO: 681933 - RNA, 22 nt, Human
ggcaggcgguggcugggaggga

SEQ ID NO: 681934 - RNA, 21 nt, Human
ggggaugggcaggucggggag

SEQ ID NO: 681935 - RNA, 21 nt, Human
gggggaugggcaggucgggga

SEQ ID NO: 681936 - RNA, 20 nt, Human
ggggggccccucgcagcggg

SEQ ID NO: 681937 - RNA, 21 nt, Human
ggugguucagucccagccagg

SEQ ID NO: 681938 - RNA, 21 nt, Human
gugacucuggccaaagcaccc

SEQ ID NO: 681939 - RNA, 20 nt, Human
gugguguggcaggcgguggc

SEQ ID NO: 681940 - RNA, 19 nt, Human
guugggauguccugccugc

SEQ ID NO: 681941 - RNA, 19 nt, Human
ucagucgcggcgccccggg

SEQ ID NO: 681942 - RNA, 18 nt, Human
ugagggacacggacagcc

SEQ ID NO: 681943 - RNA, 24 nt, Human
ugagggacacggacagccagccca

SEQ ID NO: 681944 - RNA, 22 nt, Human
ugcggaggggccacagccccca

SEQ ID NO: 681945 - RNA, 23 nt, Human
uggcaggcgguggcugggaggga

SEQ ID NO: 681946 - RNA, 24 nt, Human
ugggauguccugccugcggagggg

SEQ ID NO: 681947 - RNA, 23 nt, Human
ugggggaugggcaggucggggag

SEQ ID NO: 681948 - RNA, 19 nt, Human
uggggucugccgagcacca

SEQ ID NO: 681949 - RNA, 23 nt, Human
ugguucagucccagccagggguu

SEQ ID NO: 681950 - RNA, 20 nt, Human
ugucagucugugacucuggc

SEQ ID NO: 681951 - RNA, 18 nt, Human
uucccaaggggaaggccc

SEQ ID NO: 681952 - RNA, 22 nt, Human
aagcaggagcaaguaagaucug

SEQ ID NO: 681953 - RNA, 18 nt, Human
aaucuagagaagauuugg

SEQ ID NO: 681954 - RNA, 24 nt, Human
acccuaaagaggaaguuucagaag

SEQ ID NO: 681955 - RNA, 19 nt, Human
agacaggagccuucaugca

SEQ ID NO: 681956 - RNA, 20 nt, Human
cacuguccagggaaggcccc

SEQ ID NO: 681957 - RNA, 21 nt, Human
cagaagucuguagaaagagug

SEQ ID NO: 681958 - RNA, 21 nt, Human
cagacaggagccuucaugcag

SEQ ID NO: 681959 - RNA, 20 nt, Human
cagggaaggcccccaguucc

SEQ ID NO: 681960 - RNA, 19 nt, Human
caguaccuuuacuuggcuu

SEQ ID NO: 681961 - RNA, 21 nt, Human
ccccaaaauggcugcccccuc

SEQ ID NO: 681962 - RNA, 21 nt, Human
ccccccaaaauggcugccccc

SEQ ID NO: 681963 - RNA, 23 nt, Human
ccccccaaaauggcugcccccuc

SEQ ID NO: 681964 - RNA, 22 nt, Human
cccuaaagaggaaguuucagaa

SEQ ID NO: 681965 - RNA, 22 nt, Human
cuccauacacccauucacaagu

SEQ ID NO: 681966 - RNA, 20 nt, Human
cucugugcauaggggccauu

SEQ ID NO: 681967 - RNA, 20 nt, Human
cugcccccucgccaaagucc

SEQ ID NO: 681968 - RNA, 20 nt, Human
cugcccccucgccaaagucc

SEQ ID NO: 681969 - RNA, 18 nt, Human
cuguagaaagagugggau

SEQ ID NO: 681970 - RNA, 20 nt, Human
gaaacacaugauagcuaugg

SEQ ID NO: 681971 - RNA, 24 nt, Human
gcaugaucacuguccagggaaggc

SEQ ID NO: 681972 - RNA, 18 nt, Human
ggaauagucagacaggag

SEQ ID NO: 681973 - RNA, 19 nt, Human
ggaucuaaggaguccuggg

SEQ ID NO: 681974 - RNA, 18 nt, Human
ggccuggcaugaucacug

SEQ ID NO: 681975 - RNA, 21 nt, Human
uaacagggcaaucacagggaa

SEQ ID NO: 681976 - RNA, 21 nt, Human
uacccuaaagaggaaguuuca

SEQ ID NO: 681977 - RNA, 19 nt, Human
uagaaguauacucucugac

SEQ ID NO: 681978 - RNA, 28 nt, Human
uauaaaggaagauuuuaaaaaacaugac

SEQ ID NO: 681979 - RNA, 20 nt, Human
ucacagggaagaugacuaga

SEQ ID NO: 681980 - RNA, 19 nt, Human
ugaguguuucucaugagcc

SEQ ID NO: 681981 - RNA, 22 nt, Human
ugcagauacccuuuucaguucu

SEQ ID NO: 681982 - RNA, 20 nt, Human
ugcauaggggccauuuguuc

SEQ ID NO: 681983 - RNA, 24 nt, Human
uggcugcccccucgccaaaguccu

SEQ ID NO: 681984 - RNA, 20 nt, Human
ugggaaacacaugauagcua

SEQ ID NO: 681985 - RNA, 23 nt, Human
uggggaggcaggccuaaaggucc

SEQ ID NO: 681986 - RNA, 21 nt, Human
ugugaucacagaagucuguag

SEQ ID NO: 681987 - RNA, 21 nt, Human
uuaaaaaacaugacuguucag

SEQ ID NO: 681988 - RNA, 21 nt, Human
uugauauaaaggaagauuuua

SEQ ID NO: 681989 - RNA, 24 nt, Human
uuuucaguucuccauacacccauu

SEQ ID NO: 681990 - RNA, 20 nt, Human
cagcgccuuccagaagcuac

SEQ ID NO: 681991 - RNA, 22 nt, Human
cagcugccauugcucuguucuc

SEQ ID NO: 681992 - RNA, 24 nt, Human
cugagacagaagacacugguccuc

SEQ ID NO: 681993 - RNA, 24 nt, Human
gaaccgggacagagaaccggaaga

SEQ ID NO: 681994 - RNA, 26 nt, Human
gugcaaccccaggaaccgggacagag

SEQ ID NO: 681995 - RNA, 21 nt, Human
ugucugugcaaccccaggaac

SEQ ID NO: 681996 - RNA, 20 nt, Human
uuuuuuuuuuuuuuguagga

SEQ ID NO: 681997 - RNA, 19 nt, Human
uuuuuuuuuuuuuuuuugu

SEQ ID NO: 681998 - RNA, 22 nt, Human
uuuuuuuuuuuuuuuuuguagg

SEQ ID NO: 681999 - RNA, 27 nt, Human
uuuuuuuuuuuuuuuuuuuuuuugggg

SEQ ID NO: 682000 - RNA, 19 nt, Human
aaccuaacucaacccagca

SEQ ID NO: 682001 - RNA, 22 nt, Human
aacugccuguccagaaaaagga

SEQ ID NO: 682002 - RNA, 23 nt, Human
aaggcaguuccaaaccaaggcaa

SEQ ID NO: 682003 - RNA, 19 nt, Human
acccccuuuucccugccca

SEQ ID NO: 682004 - RNA, 20 nt, Human
agcgccgccgagccaagaag

SEQ ID NO: 682005 - RNA, 22 nt, Human
agcgccgccgagccaagaagga

SEQ ID NO: 682006 - RNA, 21 nt, Human
aggacccccuuuucccugccc

SEQ ID NO: 682007 - RNA, 22 nt, Human
agguggagaccuggcuccagca

SEQ ID NO: 682008 - RNA, 28 nt, Human
caccucccggaccgugccgccacccccu

SEQ ID NO: 682009 - RNA, 20 nt, Human
cacuguguucaaauugcuuc

SEQ ID NO: 682010 - RNA, 20 nt, Human
cagaguucaucaugcccuuc

SEQ ID NO: 682011 - RNA, 28 nt, Human
caggccccgagcgccgccgagccaagaa

SEQ ID NO: 682012 - RNA, 23 nt, Human
cauccuucucuucaggcuggagg

SEQ ID NO: 682013 - RNA, 24 nt, Human
ccaaggcaaggauuaaaaccuaac

SEQ ID NO: 682014 - RNA, 25 nt, Human
ccagugcccuccgcggcgguuuucu

SEQ ID NO: 682015 - RNA, 20 nt, Human
cccccuuuucccugcccagg

SEQ ID NO: 682016 - RNA, 18 nt, Human
ccccgagcgccgccgagc

SEQ ID NO: 682017 - RNA, 23 nt, Human
cccgaaggcaguuccaaaccaag

SEQ ID NO: 682018 - RNA, 20 nt, Human
cccgaggacccccuuuuccc

SEQ ID NO: 682019 - RNA, 25 nt, Human
cccgaggacccccuuuucccugccc

SEQ ID NO: 682020 - RNA, 21 nt, Human
cccuaccagguggccaaggaa

SEQ ID NO: 682021 - RNA, 21 nt, Human
ccgagccaagaaggacccugc

SEQ ID NO: 682022 - RNA, 21 nt, Human
ccgccgagccaagaaggaccc

SEQ ID NO: 682023 - RNA, 18 nt, Human
ccucaggccccgagcgcc

SEQ ID NO: 682024 - RNA, 21 nt, Human
ccucaggccccgagcgccgcc

SEQ ID NO: 682025 - RNA, 23 nt, Human
ccucccggaccgugccgccaccc

SEQ ID NO: 682026 - RNA, 21 nt, Human
ccuuuagucucuggaaaugga

SEQ ID NO: 682027 - RNA, 23 nt, Human
cucaggccccgagcgccgccgag

SEQ ID NO: 682028 - RNA, 22 nt, Human
cucuccacucgugaggguccgg

SEQ ID NO: 682029 - RNA, 30 nt, Human
cucuucaggcuggaggaaguuuucuauggg

SEQ ID NO: 682030 - RNA, 20 nt, Human
gacagcgagcggggagcccc

SEQ ID NO: 682031 - RNA, 19 nt, Human
gacccccuuuucccugccc

SEQ ID NO: 682032 - RNA, 22 nt, Human
ggacccccuuuucccugcccag

SEQ ID NO: 682033 - RNA, 19 nt, Human
ucaucaugcccuuccaucu

SEQ ID NO: 682034 - RNA, 24 nt, Human
uccaaaccaaggcaaggauuaaaa

SEQ ID NO: 682035 - RNA, 24 nt, Human
uccaacucucugaguccagccauu

SEQ ID NO: 682036 - RNA, 22 nt, Human
ucccggaccgugccgccacccc

SEQ ID NO: 682037 - RNA, 18 nt, Human
uccuucucuucaggcugg

SEQ ID NO: 682038 - RNA, 20 nt, Human
ucuucaggcuggaggaaguu

SEQ ID NO: 682039 - RNA, 23 nt, Human
ugaaaagcacuccaacucucuga

SEQ ID NO: 682040 - RNA, 20 nt, Human
ugcagagguggagaccuggc

SEQ ID NO: 682041 - RNA, 22 nt, Human
ugcagagguggagaccuggcuc

SEQ ID NO: 682042 - RNA, 21 nt, Human
ugcgauucagaaaugagcucc

SEQ ID NO: 682043 - RNA, 23 nt, Human
uggagcccgaaggcaguuccaaa

SEQ ID NO: 682044 - RNA, 20 nt, Human
uguccagaaaaaggacagcg

SEQ ID NO: 682045 - RNA, 25 nt, Human
uucucucaggugcagagguggagac

SEQ ID NO: 682046 - RNA, 22 nt, Human
uugguuacaaagcuggggcuaa

SEQ ID NO: 682047 - RNA, 26 nt, Human
aaaaaacuacgaaacaaauauacuga

SEQ ID NO: 682048 - RNA, 23 nt, Human
aaaaaagaaaaaaauuagccggg

SEQ ID NO: 682049 - RNA, 20 nt, Human
aaaaacuacgaaacaaauau

SEQ ID NO: 682050 - RNA, 23 nt, Human
aaaaacuacgaaacaaauauacu

SEQ ID NO: 682051 - RNA, 22 nt, Human
aaacaaauauacugagauccuc

SEQ ID NO: 682052 - RNA, 21 nt, Human
aaacuguuuccagaucccccg

SEQ ID NO: 682053 - RNA, 25 nt, Human
aaagggaaagggaaaaggaaaggga

SEQ ID NO: 682054 - RNA, 19 nt, Human
aaagggaagggaagggaag

SEQ ID NO: 682055 - RNA, 20 nt, Human
aacauggugaaaccuugucu

SEQ ID NO: 682056 - RNA, 21 nt, Human
aacauggugaaaccuugucuc

SEQ ID NO: 682057 - RNA, 22 nt, Human
aacuccagccugggugacagag

SEQ ID NO: 682058 - RNA, 23 nt, Human
aacuccagccugggugacagagc

SEQ ID NO: 682059 - RNA, 23 nt, Human
aagacacacauuaagccaugaca

SEQ ID NO: 682060 - RNA, 23 nt, Human
aagaggcugaggcaggagaauca

SEQ ID NO: 682061 - RNA, 24 nt, Human
aaguaugcaaacauucaaaguucu

SEQ ID NO: 682062 - RNA, 24 nt, Human
aaucacuugaacccgggaggugga

SEQ ID NO: 682063 - RNA, 24 nt, Human
acagagcgagacucugucucaaaa

SEQ ID NO: 682064 - RNA, 22 nt, Human
acauuaagccaugacaaccaca

SEQ ID NO: 682065 - RNA, 22 nt, Human
accacugcacuccagccugggc

SEQ ID NO: 682066 - RNA, 24 nt, Human
accuugucucuacuaaaaauacaa

SEQ ID NO: 682067 - RNA, 23 nt, Human
acuccagccugggugacagagcg

SEQ ID NO: 682068 - RNA, 24 nt, Human
acugaacuccagccugggugacag

SEQ ID NO: 682069 - RNA, 26 nt, Human
acugaacuccagccugggugacagag

SEQ ID NO: 682070 - RNA, 21 nt, Human
acugcacuccagccugggcaa

SEQ ID NO: 682071 - RNA, 24 nt, Human
acugcacuccagccugggcaauag

SEQ ID NO: 682072 - RNA, 19 nt, Human
agacagaggagggaagggu

SEQ ID NO: 682073 - RNA, 19 nt, Human
agaggagggaaggguaggg

SEQ ID NO: 682074 - RNA, 19 nt, Human
agaggagggaaggguaggg

SEQ ID NO: 682075 - RNA, 24 nt, Human
agauggagguugcagugagccaag

SEQ ID NO: 682076 - RNA, 23 nt, Human
agccgggcaugcuggcacaugcc

SEQ ID NO: 682077 - RNA, 23 nt, Human
agccuggcgugguggugugcgcc

SEQ ID NO: 682078 - RNA, 24 nt, Human
agccugggugacagagcgagacuc

SEQ ID NO: 682079 - RNA, 23 nt, Human
agccuggucaacauggugaaacc

SEQ ID NO: 682080 - RNA, 25 nt, Human
agccuggucaacauggugaaaccuu

SEQ ID NO: 682081 - RNA, 18 nt, Human
agcuguguugcuucacua

SEQ ID NO: 682082 - RNA, 25 nt, Human
aggagggaaggguaggggaagggga

SEQ ID NO: 682083 - RNA, 21 nt, Human
aggaguucaagaccagccugg

SEQ ID NO: 682084 - RNA, 18 nt, Human
aggcaggagaagcgcuug

SEQ ID NO: 682085 - RNA, 18 nt, Human
aggcaggagaaucacuug

SEQ ID NO: 682086 - RNA, 24 nt, Human
aggcaggagaaucacuugaacccg

SEQ ID NO: 682087 - RNA, 18 nt, Human
aggccaagguaggcagau

SEQ ID NO: 682088 - RNA, 24 nt, Human
aggcugaggcaggagaagcgcuug

SEQ ID NO: 682089 - RNA, 24 nt, Human
aggcugaggcaggagaaucacuug

SEQ ID NO: 682090 - RNA, 22 nt, Human
agggaaaaggaaagggaaggga

SEQ ID NO: 682091 - RNA, 19 nt, Human
agggaaggguaggggaagg

SEQ ID NO: 682092 - RNA, 26 nt, Human
agguaggcagauuaccugaggucaag

SEQ ID NO: 682093 - RNA, 21 nt, Human
agguggagguugcaguaagcc

SEQ ID NO: 682094 - RNA, 24 nt, Human
agguggagguugcaguaagccgag

SEQ ID NO: 682095 - RNA, 24 nt, Human
aggugugauagcucacgccuguga

SEQ ID NO: 682096 - RNA, 23 nt, Human
auagcucacgccugugaucccag

SEQ ID NO: 682097 - RNA, 20 nt, Human
caacauggugaaaccuuguc

SEQ ID NO: 682098 - RNA, 22 nt, Human
caacauggugaaaccuugucuc

SEQ ID NO: 682099 - RNA, 24 nt, Human
caacauggugaaaccuugucucua

SEQ ID NO: 682100 - RNA, 24 nt, Human
caagaccagccuggucaacauggu

SEQ ID NO: 682101 - RNA, 24 nt, Human
caagguaggcagauuaccugaggu

SEQ ID NO: 682102 - RNA, 26 nt, Human
caagguaggcagauuaccugagguca

SEQ ID NO: 682103 - RNA, 24 nt, Human
cacgccugugaucccagcacuuug

SEQ ID NO: 682104 - RNA, 22 nt, Human
cacuauuugagaaucaaguucu

SEQ ID NO: 682105 - RNA, 24 nt, Human
cacuauuugagaaucaaguucuuu

SEQ ID NO: 682106 - RNA, 24 nt, Human
cacugaacuccagccugggugaca

SEQ ID NO: 682107 - RNA, 19 nt, Human
cacugcacuccagccuggg

SEQ ID NO: 682108 - RNA, 21 nt, Human
cacugcacuccagccugggca

SEQ ID NO: 682109 - RNA, 22 nt, Human
cacugcacuccagccugggcaa

SEQ ID NO: 682110 - RNA, 23 nt, Human
cacugcacuccagccugggcaau

SEQ ID NO: 682111 - RNA, 24 nt, Human
cacugcacuccagccugggcaaua

SEQ ID NO: 682112 - RNA, 26 nt, Human
cacugcacuccagccugggcaauaga

SEQ ID NO: 682113 - RNA, 25 nt, Human
cagaucccccgaggcuccugggucu

SEQ ID NO: 682114 - RNA, 25 nt, Human
cagauuaccugaggucaaggaguuc

SEQ ID NO: 682115 - RNA, 21 nt, Human
cagcacuuugggaggccaagg

SEQ ID NO: 682116 - RNA, 25 nt, Human
cagcacuuugggaggccaagguagg

SEQ ID NO: 682117 - RNA, 20 nt, Human
cagcaucaagggucgaacgg

SEQ ID NO: 682118 - RNA, 24 nt, Human
cagcuacucaagaggcugaggcag

SEQ ID NO: 682119 - RNA, 24 nt, Human
cagcuacucaggaggcugaggcag

SEQ ID NO: 682120 - RNA, 22 nt, Human
caggagaagcgcuugagccccg

SEQ ID NO: 682121 - RNA, 19 nt, Human
caucccaacccggaugccc

SEQ ID NO: 682122 - RNA, 22 nt, Human
cauuuauauaugauacacaaga

SEQ ID NO: 682123 - RNA, 20 nt, Human
ccacugaacuccagccuggg

SEQ ID NO: 682124 - RNA, 20 nt, Human
ccacugaacuccagccuggg

SEQ ID NO: 682125 - RNA, 23 nt, Human
ccacugaacuccagccuggguga

SEQ ID NO: 682126 - RNA, 24 nt, Human
ccacugaacuccagccugggugac

SEQ ID NO: 682127 - RNA, 20 nt, Human
ccacugcacuccagccuggg

SEQ ID NO: 682128 - RNA, 20 nt, Human
ccacugcacuccagccuggg

SEQ ID NO: 682129 - RNA, 20 nt, Human
ccacugcacuccagccuggg

SEQ ID NO: 682130 - RNA, 21 nt, Human
ccacugcacuccagccugggc

SEQ ID NO: 682131 - RNA, 22 nt, Human
ccacugcacuccagccugggca

SEQ ID NO: 682132 - RNA, 23 nt, Human
ccacugcacuccagccugggcaa

SEQ ID NO: 682133 - RNA, 23 nt, Human
ccacugcacuccagccugggcaa

SEQ ID NO: 682134 - RNA, 24 nt, Human
ccacugcacuccagccugggcaau

SEQ ID NO: 682135 - RNA, 18 nt, Human
cccccgaggcuccugggg

SEQ ID NO: 682136 - RNA, 23 nt, Human
ccccgaggcuccugggucuccac

SEQ ID NO: 682137 - RNA, 20 nt, Human
cccggagauggagguugcag

SEQ ID NO: 682138 - RNA, 21 nt, Human
cccgggagguggagguugcag

SEQ ID NO: 682139 - RNA, 21 nt, Human
ccuccuaucuccaucccaacc

SEQ ID NO: 682140 - RNA, 18 nt, Human
ccucucagcuguguugcu

SEQ ID NO: 682141 - RNA, 23 nt, Human
ccucucagcuguguugcuucacu

SEQ ID NO: 682142 - RNA, 23 nt, Human
ccugaggucaaggaguucaagac

SEQ ID NO: 682143 - RNA, 23 nt, Human
ccugggucuccacgcagcuuggg

SEQ ID NO: 682144 - RNA, 22 nt, Human
ccugggugacagagcgagacuc

SEQ ID NO: 682145 - RNA, 21 nt, Human
ccuggucaacauggugaaacc

SEQ ID NO: 682146 - RNA, 24 nt, Human
ccuggucaacauggugaaaccuug

SEQ ID NO: 682147 - RNA, 19 nt, Human
ccuguaaucccagcuacuc

SEQ ID NO: 682148 - RNA, 21 nt, Human
ccuguaaucccagcuacucag

SEQ ID NO: 682149 - RNA, 22 nt, Human
ccuguagucccagcuacucaag

SEQ ID NO: 682150 - RNA, 22 nt, Human
ccugugaucccagcacuuuggg

SEQ ID NO: 682151 - RNA, 23 nt, Human
cgagacucugucucaaaaaaaga

SEQ ID NO: 682152 - RNA, 21 nt, Human
cgcaccacugcacuccagccu

SEQ ID NO: 682153 - RNA, 19 nt, Human
cgccuguagucccagcuac

SEQ ID NO: 682154 - RNA, 22 nt, Human
cgccuguagucccagcuacuca

SEQ ID NO: 682155 - RNA, 23 nt, Human
cgccugugaucccagcacuuugg

SEQ ID NO: 682156 - RNA, 23 nt, Human
cggagauggagguugcagugagc

SEQ ID NO: 682157 - RNA, 29 nt, Human
cgggagguggagguugcaguaacaacggu

SEQ ID NO: 682158 - RNA, 24 nt, Human
cgggagguggagguugcaguaagc

SEQ ID NO: 682159 - RNA, 22 nt, Human
cucacgccugugaucccagcac

SEQ ID NO: 682160 - RNA, 24 nt, Human
cucacgccugugaucccagcacuu

SEQ ID NO: 682161 - RNA, 21 nt, Human
cuccugggucuccacgcagcu

SEQ ID NO: 682162 - RNA, 20 nt, Human
cugaaucuccagggaguccc

SEQ ID NO: 682163 - RNA, 21 nt, Human
cuggcacaugccuguaauccc

SEQ ID NO: 682164 - RNA, 18 nt, Human
cugggucuccacgcagcu

SEQ ID NO: 682165 - RNA, 24 nt, Human
cuggucaacauggugaaaccuugu

SEQ ID NO: 682166 - RNA, 21 nt, Human
cuugaacccgggagguggagg

SEQ ID NO: 682167 - RNA, 19 nt, Human
cuugagccccggagaugga

SEQ ID NO: 682168 - RNA, 18 nt, Human
gaaaaggaaagggaaggg

SEQ ID NO: 682169 - RNA, 23 nt, Human
gaaagggaaagggaaaaggaaag

SEQ ID NO: 682170 - RNA, 24 nt, Human
gaacuccagccugggugacagagc

SEQ ID NO: 682171 - RNA, 24 nt, Human
gacagagcgagacucugucucaaa

SEQ ID NO: 682172 - RNA, 19 nt, Human
gacccgccugcccgaccug

SEQ ID NO: 682173 - RNA, 23 nt, Human
gagaaucacuugaacccgggagg

SEQ ID NO: 682174 - RNA, 23 nt, Human
gagguugcaguaagccgaggucg

SEQ ID NO: 682175 - RNA, 23 nt, Human
gagguugcagugagccaaggucg

SEQ ID NO: 682176 - RNA, 24 nt, Human
gauagcucacgccugugaucccag

SEQ ID NO: 682177 - RNA, 24 nt, Human
gauuaccugaggucaaggaguuca

SEQ ID NO: 682178 - RNA, 25 nt, Human
gauuaccugaggucaaggaguucaa

SEQ ID NO: 682179 - RNA, 18 nt, Human
gcaauagacagaggaggg

SEQ ID NO: 682180 - RNA, 20 nt, Human
gcaccacugcacuccagccu

SEQ ID NO: 682181 - RNA, 23 nt, Human
gcaggagaaucacuugaacccgg

SEQ ID NO: 682182 - RNA, 24 nt, Human
gcuggcacaugccuguaaucccag

SEQ ID NO: 682183 - RNA, 20 nt, Human
ggaaagggaaaaggaaaggg

SEQ ID NO: 682184 - RNA, 19 nt, Human
ggaaagggaagggaaggga

SEQ ID NO: 682185 - RNA, 24 nt, Human
ggagguugcaguaagccgaggucg

SEQ ID NO: 682186 - RNA, 20 nt, Human
ggagguugcagugagccaag

SEQ ID NO: 682187 - RNA, 20 nt, Human
ggagguugcagugagccaag

SEQ ID NO: 682188 - RNA, 24 nt, Human
ggagguugcagugagccaaggucg

SEQ ID NO: 682189 - RNA, 21 nt, Human
ggccaggugugauagcucacg

SEQ ID NO: 682190 - RNA, 22 nt, Human
ggcgugguggugugcgccugua

SEQ ID NO: 682191 - RNA, 24 nt, Human
gggcaugcuggcacaugccuguaa

SEQ ID NO: 682192 - RNA, 24 nt, Human
gggccaggugugauagcucacgcc

SEQ ID NO: 682193 - RNA, 24 nt, Human
gguggugugcgccuguagucccag

SEQ ID NO: 682194 - RNA, 24 nt, Human
gucgcaccacugcacuccagccug

SEQ ID NO: 682195 - RNA, 21 nt, Human
gugaaaccuugucucuacuaa

SEQ ID NO: 682196 - RNA, 24 nt, Human
gugacagagcgagacucugucuca

SEQ ID NO: 682197 - RNA, 18 nt, Human
guggugugcgccuguagu

SEQ ID NO: 682198 - RNA, 20 nt, Human
uaaaaauacaaaaauuagcc

SEQ ID NO: 682199 - RNA, 21 nt, Human
uaaaaauacaaaaauuagccu

SEQ ID NO: 682200 - RNA, 19 nt, Human
uagacagaggagggaaggg

SEQ ID NO: 682201 - RNA, 24 nt, Human
uagcucacgccugugaucccagca

SEQ ID NO: 682202 - RNA, 18 nt, Human
uaggcagauuaccugagg

SEQ ID NO: 682203 - RNA, 24 nt, Human
uauacugagauccuccuaucucca

SEQ ID NO: 682204 - RNA, 18 nt, Human
ucaaggaguucaagacca

SEQ ID NO: 682205 - RNA, 22 nt, Human
ucacgccugugaucccagcacu

SEQ ID NO: 682206 - RNA, 24 nt, Human
ucacuugaacccgggagguggagg

SEQ ID NO: 682207 - RNA, 20 nt, Human
ucagccccauuccagggccu

SEQ ID NO: 682208 - RNA, 23 nt, Human
uccagccugggugacagagcgag

SEQ ID NO: 682209 - RNA, 24 nt, Human
uccagccugggugacagagcgaga

SEQ ID NO: 682210 - RNA, 21 nt, Human
uccauguugaaacacuucugg

SEQ ID NO: 682211 - RNA, 24 nt, Human
uccauguugaaacacuucuggggc

SEQ ID NO: 682212 - RNA, 24 nt, Human
ucccccgaggcuccugggucucca

SEQ ID NO: 682213 - RNA, 23 nt, Human
ucccugcagggaucucacuaccu

SEQ ID NO: 682214 - RNA, 18 nt, Human
ucgcaccacugaacucca

SEQ ID NO: 682215 - RNA, 23 nt, Human
ucgcaccacugaacuccagccug

SEQ ID NO: 682216 - RNA, 23 nt, Human
ucgcaccacugcacuccagccug

SEQ ID NO: 682217 - RNA, 23 nt, Human
ucucuacuaaaaauacaaaaauu

SEQ ID NO: 682218 - RNA, 21 nt, Human
ucugucucaaaaaaagaaaaa

SEQ ID NO: 682219 - RNA, 23 nt, Human
ucugucucaaaaaaagaaaaaaa

SEQ ID NO: 682220 - RNA, 23 nt, Human
ugagccaaggucgcaccacugca

SEQ ID NO: 682221 - RNA, 25 nt, Human
ugaggcaggagaagcgcuugagccc

SEQ ID NO: 682222 - RNA, 20 nt, Human
ugaggcaggagaaucacuug

SEQ ID NO: 682223 - RNA, 24 nt, Human
ugaggcaggagaaucacuugaacc

SEQ ID NO: 682224 - RNA, 25 nt, Human
ugaggcaggagaaucacuugaaccc

SEQ ID NO: 682225 - RNA, 24 nt, Human
ugccuguaaucccagcuacucagg

SEQ ID NO: 682226 - RNA, 24 nt, Human
ugcuggcacaugccuguaauccca

SEQ ID NO: 682227 - RNA, 22 nt, Human
uggaaagacacacauuaagcca

SEQ ID NO: 682228 - RNA, 21 nt, Human
uggcacaugccuguaauccca

SEQ ID NO: 682229 - RNA, 22 nt, Human
uggcacaugccuguaaucccag

SEQ ID NO: 682230 - RNA, 22 nt, Human
ugggaggccaagguaggcagau

SEQ ID NO: 682231 - RNA, 21 nt, Human
ugggcaauagacagaggaggg

SEQ ID NO: 682232 - RNA, 21 nt, Human
ugggugcgacuucccuggauc

SEQ ID NO: 682233 - RNA, 24 nt, Human
ugguggugugcgccuguaguccca

SEQ ID NO: 682234 - RNA, 18 nt, Human
uggugugcgccuguaguc

SEQ ID NO: 682235 - RNA, 21 nt, Human
uggugugcgccuguaguccca

SEQ ID NO: 682236 - RNA, 24 nt, Human
uggugugcgccuguagucccagcu

SEQ ID NO: 682237 - RNA, 24 nt, Human
uuagccuggcgugguggugugcgc

SEQ ID NO: 682238 - RNA, 20 nt, Human
uuccagaucccccgaggcuc

SEQ ID NO: 682239 - RNA, 25 nt, Human
uucccaggcgaaugagaaucccaau

SEQ ID NO: 682240 - RNA, 24 nt, Human
uugaacccgggagguggagguugc

SEQ ID NO: 682241 - RNA, 22 nt, Human
uugcaguaagccgaggucgcac

SEQ ID NO: 682242 - RNA, 22 nt, Human
uugcagugagccaaggucgcac

SEQ ID NO: 682243 - RNA, 25 nt, Human
uuucccaggcgaaugagaaucccaa

SEQ ID NO: 682244 - RNA, 24 nt, Human
aaacagaauaaaaacuaagggccc

SEQ ID NO: 682245 - RNA, 25 nt, Human
aaacagaauaaaaacuaagggccca

SEQ ID NO: 682246 - RNA, 21 nt, Human
aaacccaccagcugucuuugg

SEQ ID NO: 682247 - RNA, 24 nt, Human
aaaggaggagagagagaaaaggga

SEQ ID NO: 682248 - RNA, 18 nt, Human
aaccccccuggaaaaugg

SEQ ID NO: 682249 - RNA, 24 nt, Human
aaccccccuggaaaaugggggugg

SEQ ID NO: 682250 - RNA, 20 nt, Human
aagaagcggggugaugggag

SEQ ID NO: 682251 - RNA, 20 nt, Human
aagaagguggggaggacagu

SEQ ID NO: 682252 - RNA, 27 nt, Human
aagcaggaggaaaggaaaggggacccc

SEQ ID NO: 682253 - RNA, 21 nt, Human
aagccccuccacccggucugg

SEQ ID NO: 682254 - RNA, 19 nt, Human
aagcggggugaugggaggc

SEQ ID NO: 682255 - RNA, 23 nt, Human
acacacacacacacacacacaca

SEQ ID NO: 682256 - RNA, 23 nt, Human
acacacacacacacacacacaca

SEQ ID NO: 682257 - RNA, 23 nt, Human
acacacacacacacacacacaca

SEQ ID NO: 682258 - RNA, 23 nt, Human
acacacacacacacacacacaca

SEQ ID NO: 682259 - RNA, 24 nt, Human
acacacacacacacacacacacaa

SEQ ID NO: 682260 - RNA, 19 nt, Human
acaccaaaucccagaagcc

SEQ ID NO: 682261 - RNA, 18 nt, Human
acagggcccugggggugg

SEQ ID NO: 682262 - RNA, 22 nt, Human
acaugucuccagguuacaacca

SEQ ID NO: 682263 - RNA, 22 nt, Human
accaaaucccagaagccccucc

SEQ ID NO: 682264 - RNA, 24 nt, Human
accacacacacacacacacacaca

SEQ ID NO: 682265 - RNA, 27 nt, Human
acccccacccaccagccuacccuccau

SEQ ID NO: 682266 - RNA, 25 nt, Human
agacagagacauauaauaaacagaa

SEQ ID NO: 682267 - RNA, 18 nt, Human
agacagauacgcaggcag

SEQ ID NO: 682268 - RNA, 23 nt, Human
agagagcuuuuggcaugaccuga

SEQ ID NO: 682269 - RNA, 23 nt, Human
agaggggaccagcaguccgcaag

SEQ ID NO: 682270 - RNA, 22 nt, Human
agagguugacagggcccugggg

SEQ ID NO: 682271 - RNA, 19 nt, Human
agcagcaagauagggaggg

SEQ ID NO: 682272 - RNA, 23 nt, Human
agccacagggguggcgugguggg

SEQ ID NO: 682273 - RNA, 18 nt, Human
aggaagaagguggggagg

SEQ ID NO: 682274 - RNA, 20 nt, Human
aggaagaagguggggaggac

SEQ ID NO: 682275 - RNA, 21 nt, Human
aggaggaaaggaaaggguugg

SEQ ID NO: 682276 - RNA, 21 nt, Human
aggaggaggcaaggcugagga

SEQ ID NO: 682277 - RNA, 22 nt, Human
aggcaaggcugaggaaggaccc

SEQ ID NO: 682278 - RNA, 19 nt, Human
aggccgggaccggcgaguc

SEQ ID NO: 682279 - RNA, 25 nt, Human
aguguccuuucacuaaccccugccu

SEQ ID NO: 682280 - RNA, 22 nt, Human
aucccaucgccauuccccucca

SEQ ID NO: 682281 - RNA, 28 nt, Human
aucgccauuccccuccacaugucuccag

SEQ ID NO: 682282 - RNA, 19 nt, Human
aucuguggcuucagugcag

SEQ ID NO: 682283 - RNA, 18 nt, Human
caaaacaugauccugagc

SEQ ID NO: 682284 - RNA, 23 nt, Human
caaggggaaacccaccagcuguc

SEQ ID NO: 682285 - RNA, 20 nt, Human
cacacacacacacacacaca

SEQ ID NO: 682286 - RNA, 20 nt, Human
cacacacacacacacacaca

SEQ ID NO: 682287 - RNA, 20 nt, Human
cacacacacacacacacaca

SEQ ID NO: 682288 - RNA, 20 nt, Human
cacacacacacacacacaca

SEQ ID NO: 682289 - RNA, 20 nt, Human
cacacacacacacacacaca

SEQ ID NO: 682290 - RNA, 20 nt, Human
cacacacacacacacacaca

SEQ ID NO: 682291 - RNA, 20 nt, Human
cacacacacacacacacaca

SEQ ID NO: 682292 - RNA, 20 nt, Human
cacacacacacacacacaca

SEQ ID NO: 682293 - RNA, 20 nt, Human
cacacacacacacacacaca

SEQ ID NO: 682294 - RNA, 20 nt, Human
cacacacacacacacacaca

SEQ ID NO: 682295 - RNA, 20 nt, Human
cacacacacacacacacaca

SEQ ID NO: 682296 - RNA, 22 nt, Human
cacacacacacacacacacaca

SEQ ID NO: 682297 - RNA, 22 nt, Human
cacacacacacacacacacaca

SEQ ID NO: 682298 - RNA, 22 nt, Human
cacacacacacacacacacaca

SEQ ID NO: 682299 - RNA, 22 nt, Human
cacacacacacacacacacaca

SEQ ID NO: 682300 - RNA, 22 nt, Human
cacacacacacacacacacaca

SEQ ID NO: 682301 - RNA, 22 nt, Human
cacacacacacacacacacaca

SEQ ID NO: 682302 - RNA, 26 nt, Human
cacacacacacacacacacacacaca

SEQ ID NO: 682303 - RNA, 26 nt, Human
cacacacacacacacacacacacaca

SEQ ID NO: 682304 - RNA, 26 nt, Human
cacacacacacacacacacacacaca

SEQ ID NO: 682305 - RNA, 26 nt, Human
cacacacacacacacacacacacaca

SEQ ID NO: 682306 - RNA, 26 nt, Human
cacacacacacacacacacacacaca

SEQ ID NO: 682307 - RNA, 26 nt, Human
cacacacacacacacacacacacaca

SEQ ID NO: 682308 - RNA, 20 nt, Human
caccaaaucccagaagcccc

SEQ ID NO: 682309 - RNA, 21 nt, Human
caccacacacacacacacaca

SEQ ID NO: 682310 - RNA, 23 nt, Human
caccacacacacacacacacaca

SEQ ID NO: 682311 - RNA, 18 nt, Human
cacccaccagccuacccu

SEQ ID NO: 682312 - RNA, 22 nt, Human
cagaaggcuaaaugcucugucc

SEQ ID NO: 682313 - RNA, 18 nt, Human
cagaagucaguccaggug

SEQ ID NO: 682314 - RNA, 18 nt, Human
cagcagacaccaaauccc

SEQ ID NO: 682315 - RNA, 23 nt, Human
cagcagcagacaccaaaucccag

SEQ ID NO: 682316 - RNA, 19 nt, Human
cagccuacccuccaucugu

SEQ ID NO: 682317 - RNA, 20 nt, Human
caggaggugcuacaaaacau

SEQ ID NO: 682318 - RNA, 21 nt, Human
cagucccaccccaggcagggg

SEQ ID NO: 682319 - RNA, 21 nt, Human
ccacacacacacacacacaca

SEQ ID NO: 682320 - RNA, 22 nt, Human
ccaccagccuacccuccaucug

SEQ ID NO: 682321 - RNA, 21 nt, Human
ccacccaccagccuacccucc

SEQ ID NO: 682322 - RNA, 25 nt, Human
ccagaagccccuccacccggucugg

SEQ ID NO: 682323 - RNA, 24 nt, Human
ccagccuacccuccaucuguggcu

SEQ ID NO: 682324 - RNA, 18 nt, Human
cccaacaagaagcggggu

SEQ ID NO: 682325 - RNA, 26 nt, Human
ccccccuggaaaaugggggugggggc

SEQ ID NO: 682326 - RNA, 24 nt, Human
cccccggggagcugggcucggggg

SEQ ID NO: 682327 - RNA, 25 nt, Human
ccccggggagcugggcucgggggcg

SEQ ID NO: 682328 - RNA, 19 nt, Human
ccccugagugccaagagga

SEQ ID NO: 682329 - RNA, 18 nt, Human
ccccuuggguggugaggg

SEQ ID NO: 682330 - RNA, 20 nt, Human
cccugagugccaagaggagc

SEQ ID NO: 682331 - RNA, 21 nt, Human
ccgccgcggcccuggccgccc

SEQ ID NO: 682332 - RNA, 19 nt, Human
ccuagacuggggguuccug

SEQ ID NO: 682333 - RNA, 24 nt, Human
ccucgccguccucgcugcaguccg

SEQ ID NO: 682334 - RNA, 26 nt, Human
ccugcaccacacacacacacacacag

SEQ ID NO: 682335 - RNA, 20 nt, Human
ccuggcucagggaagauggg

SEQ ID NO: 682336 - RNA, 23 nt, Human
ccuggcucagggaagaugggguu

SEQ ID NO: 682337 - RNA, 28 nt, Human
cuaacccuggaaguguccuuucacuaac

SEQ ID NO: 682338 - RNA, 19 nt, Human
cuccacccggucuggcucc

SEQ ID NO: 682339 - RNA, 31 nt, Human
cugcaccacacacacacacacacacacacag

SEQ ID NO: 682340 - RNA, 22 nt, Human
cuggaaaaugggggugggggca

SEQ ID NO: 682341 - RNA, 23 nt, Human
cuggaaggagggaaggagagggg

SEQ ID NO: 682342 - RNA, 21 nt, Human
cuggaaguguccuuucacuaa

SEQ ID NO: 682343 - RNA, 27 nt, Human
cuggagcucaggccuucacuacugugc

SEQ ID NO: 682344 - RNA, 20 nt, Human
cugguggagugguggccaga

SEQ ID NO: 682345 - RNA, 18 nt, Human
cuguagcagccacagggg

SEQ ID NO: 682346 - RNA, 22 nt, Human
cuucugguaaccagugccugag

SEQ ID NO: 682347 - RNA, 25 nt, Human
gaagccccuccacccggucuggcuc

SEQ ID NO: 682348 - RNA, 20 nt, Human
gaaggcuaaaugcucugucc

SEQ ID NO: 682349 - RNA, 19 nt, Human
gaagguggggaggacagug

SEQ ID NO: 682350 - RNA, 21 nt, Human
gacaccaaaucccagaagccc

SEQ ID NO: 682351 - RNA, 21 nt, Human
gaccagcaguccgcaagcagg

SEQ ID NO: 682352 - RNA, 20 nt, Human
gagcagcaagauagggaggg

SEQ ID NO: 682353 - RNA, 22 nt, Human
gagcgggagggcuggguggcgg

SEQ ID NO: 682354 - RNA, 24 nt, Human
gagcuuuuggcaugaccugaaucu

SEQ ID NO: 682355 - RNA, 18 nt, Human
gaggagagagagaaaagg

SEQ ID NO: 682356 - RNA, 21 nt, Human
gaggagcagcaagauagggag

SEQ ID NO: 682357 - RNA, 22 nt, Human
gagggaaggagaggggaccagc

SEQ ID NO: 682358 - RNA, 19 nt, Human
gcacuccugcaccacacac

SEQ ID NO: 682359 - RNA, 21 nt, Human
gcacuccugcaccacacacac

SEQ ID NO: 682360 - RNA, 21 nt, Human
gccccgaggauucucagagac

SEQ ID NO: 682361 - RNA, 23 nt, Human
gccccgaggauucucagagacag

SEQ ID NO: 682362 - RNA, 18 nt, Human
gccgccgcggcccuggcc

SEQ ID NO: 682363 - RNA, 18 nt, Human
gcggagcgacugcgcucc

SEQ ID NO: 682364 - RNA, 19 nt, Human
ggaaacccaccagcugucu

SEQ ID NO: 682365 - RNA, 18 nt, Human
ggaaaggaaaggguuggg

SEQ ID NO: 682366 - RNA, 19 nt, Human
ggaaggagggaaggagagg

SEQ ID NO: 682367 - RNA, 21 nt, Human
ggaggaaaggaaaggguuggg

SEQ ID NO: 682368 - RNA, 18 nt, Human
ggagugguggccagagau

SEQ ID NO: 682369 - RNA, 18 nt, Human
ggcggcuccuuccccucc

SEQ ID NO: 682370 - RNA, 20 nt, Human
ggcgugguggggaagauggg

SEQ ID NO: 682371 - RNA, 23 nt, Human
ggcuguggccugagcgggagggc

SEQ ID NO: 682372 - RNA, 24 nt, Human
ggcuguggccugagcgggagggcu

SEQ ID NO: 682373 - RNA, 18 nt, Human
gggaacaucccuccaccc

SEQ ID NO: 682374 - RNA, 24 nt, Human
gggcaaugcggaggcuccggcugu

SEQ ID NO: 682375 - RNA, 23 nt, Human
gggcagccagggccggcccaggc

SEQ ID NO: 682376 - RNA, 18 nt, Human
ggggagcugggcucgggg

SEQ ID NO: 682377 - RNA, 22 nt, Human
gggggugggggcaaugcggagg

SEQ ID NO: 682378 - RNA, 23 nt, Human
gggggugggggcaaugcggaggc

SEQ ID NO: 682379 - RNA, 23 nt, Human
ggggugggggcaaugcggaggcu

SEQ ID NO: 682380 - RNA, 19 nt, Human
ggugagggugggccagggg

SEQ ID NO: 682381 - RNA, 18 nt, Human
gguggagugguggccaga

SEQ ID NO: 682382 - RNA, 21 nt, Human
gguggagugguggccagagau

SEQ ID NO: 682383 - RNA, 22 nt, Human
gguggugagggugggccagggg

SEQ ID NO: 682384 - RNA, 19 nt, Human
ucagcgaaagcugagggca

SEQ ID NO: 682385 - RNA, 20 nt, Human
ucagugcagaagucagucca

SEQ ID NO: 682386 - RNA, 19 nt, Human
uccagguuacaaccagaga

SEQ ID NO: 682387 - RNA, 20 nt, Human
ucccaucgccauuccccucc

SEQ ID NO: 682388 - RNA, 20 nt, Human
uccccuccugacauccccug

SEQ ID NO: 682389 - RNA, 26 nt, Human
uccuauaaucccaucgccauuccccu

SEQ ID NO: 682390 - RNA, 18 nt, Human
uccuccggaagucuggcu

SEQ ID NO: 682391 - RNA, 21 nt, Human
uccugagcagacccagacccc

SEQ ID NO: 682392 - RNA, 19 nt, Human
uccuguagcagccacaggg

SEQ ID NO: 682393 - RNA, 22 nt, Human
ucugguaaccagugccugaggc

SEQ ID NO: 682394 - RNA, 18 nt, Human
ucugugggcuuaaaggga

SEQ ID NO: 682395 - RNA, 18 nt, Human
ugaggaagaaggugggga

SEQ ID NO: 682396 - RNA, 18 nt, Human
ugaggaaggacccagcca

SEQ ID NO: 682397 - RNA, 23 nt, Human
ugaggaaggacccagccagcugg

SEQ ID NO: 682398 - RNA, 28 nt, Human
ugcaccacacacacacacacacacacag

SEQ ID NO: 682399 - RNA, 26 nt, Human
ugcaccacacacacacacacacacag

SEQ ID NO: 682400 - RNA, 24 nt, Human
ugcuccuguagcagccacaggggu

SEQ ID NO: 682401 - RNA, 20 nt, Human
ugcucugcccaucuggugga

SEQ ID NO: 682402 - RNA, 20 nt, Human
uggaaggagggaaggagagg

SEQ ID NO: 682403 - RNA, 24 nt, Human
uggaaguguccuuucacuaacccc

SEQ ID NO: 682404 - RNA, 21 nt, Human
uggccugagcgggagggcugg

SEQ ID NO: 682405 - RNA, 23 nt, Human
uggcgugguggggaagauggggu

SEQ ID NO: 682406 - RNA, 26 nt, Human
ugggaggcuccaggccgggcagauca

SEQ ID NO: 682407 - RNA, 21 nt, Human
ugggguucuagucucagccug

SEQ ID NO: 682408 - RNA, 21 nt, Human
ugggguucuagucucagccug

SEQ ID NO: 682409 - RNA, 18 nt, Human
uggguucaggcccaugcc

SEQ ID NO: 682410 - RNA, 19 nt, Human
ugguggagugguggccaga

SEQ ID NO: 682411 - RNA, 23 nt, Human
ugguggagugguggccagagaug

SEQ ID NO: 682412 - RNA, 22 nt, Human
uguagcagccacagggguggcg

SEQ ID NO: 682413 - RNA, 20 nt, Human
ugugagugaggaagaaggug

SEQ ID NO: 682414 - RNA, 18 nt, Human
uucuuccagaaggcuaaa

SEQ ID NO: 682415 - RNA, 18 nt, Human
uuuuuuuuuuuuuuuuug

SEQ ID NO: 682416 - RNA, 21 nt, Human
aaaagaccagacugaugggca

SEQ ID NO: 682417 - RNA, 19 nt, Human
aagaguaggaaauauggca

SEQ ID NO: 682418 - RNA, 21 nt, Human
aagugcagagaccacaccagc

SEQ ID NO: 682419 - RNA, 24 nt, Human
acaacaaauagcaccuguggggcc

SEQ ID NO: 682420 - RNA, 21 nt, Human
acaccagcaaaacaugcccag

SEQ ID NO: 682421 - RNA, 18 nt, Human
agagggaagggaacaguc

SEQ ID NO: 682422 - RNA, 21 nt, Human
agcaugaaagccaacaugacc

SEQ ID NO: 682423 - RNA, 21 nt, Human
aggaaaguggggugagagugg

SEQ ID NO: 682424 - RNA, 21 nt, Human
aggccucaggccucagcacag

SEQ ID NO: 682425 - RNA, 20 nt, Human
aggggaugggggagauaggg

SEQ ID NO: 682426 - RNA, 25 nt, Human
agugcagagaccacaccagcaaaac

SEQ ID NO: 682427 - RNA, 20 nt, Human
auguauauauauauauauga

SEQ ID NO: 682428 - RNA, 24 nt, Human
auuucuucagacucugggccgcca

SEQ ID NO: 682429 - RNA, 21 nt, Human
caacaugaccgcagaggaaaa

SEQ ID NO: 682430 - RNA, 23 nt, Human
caagccuuugcuugguagcccca

SEQ ID NO: 682431 - RNA, 21 nt, Human
caauuuauauucaauguuucc

SEQ ID NO: 682432 - RNA, 21 nt, Human
cacagcuucggagcacugccc

SEQ ID NO: 682433 - RNA, 19 nt, Human
caccccucucucccuagcc

SEQ ID NO: 682434 - RNA, 19 nt, Human
cagaaaguuggcagggagc

SEQ ID NO: 682435 - RNA, 22 nt, Human
cagacaggccacaggguugcca

SEQ ID NO: 682436 - RNA, 20 nt, Human
cagcaaaacaugcccagucu

SEQ ID NO: 682437 - RNA, 20 nt, Human
cauauguauauauauauaua

SEQ ID NO: 682438 - RNA, 24 nt, Human
cauauguauauauauauauaugca

SEQ ID NO: 682439 - RNA, 18 nt, Human
ccacaccagcaaaacaug

SEQ ID NO: 682440 - RNA, 22 nt, Human
ccaccagauggccaagagcaga

SEQ ID NO: 682441 - RNA, 24 nt, Human
ccagcaaaacaugcccagucuuag

SEQ ID NO: 682442 - RNA, 22 nt, Human
ccagcacaacaaauagcaccug

SEQ ID NO: 682443 - RNA, 21 nt, Human
ccaggacacuaacaaagggaa

SEQ ID NO: 682444 - RNA, 22 nt, Human
cccacgccugggccagcacaac

SEQ ID NO: 682445 - RNA, 21 nt, Human
ccccucuguuccuuccguucu

SEQ ID NO: 682446 - RNA, 18 nt, Human
ccgcagaggaaaaagacc

SEQ ID NO: 682447 - RNA, 22 nt, Human
ccgccaccaccaccagauggcc

SEQ ID NO: 682448 - RNA, 19 nt, Human
ccucaggccucagcacagg

SEQ ID NO: 682449 - RNA, 23 nt, Human
ccugaagugcagagaccacacca

SEQ ID NO: 682450 - RNA, 24 nt, Human
cucucucucucucucucucgucga

SEQ ID NO: 682451 - RNA, 22 nt, Human
cuucuucuuucccuuuggcccc

SEQ ID NO: 682452 - RNA, 30 nt, Human
cuuuccuggccacaccaaguuuggcaccuu

SEQ ID NO: 682453 - RNA, 19 nt, Human
gaacccaggacacuaacaa

SEQ ID NO: 682454 - RNA, 23 nt, Human
gacagcaccccucucucccuagc

SEQ ID NO: 682455 - RNA, 22 nt, Human
gaccacaccagcaaaacaugcc

SEQ ID NO: 682456 - RNA, 18 nt, Human
gacucugggccgccacca

SEQ ID NO: 682457 - RNA, 20 nt, Human
gauaaagcugaggaagaggc

SEQ ID NO: 682458 - RNA, 21 nt, Human
gcagauaaccuuuuguccaca

SEQ ID NO: 682459 - RNA, 19 nt, Human
gccccacgccugggccagc

SEQ ID NO: 682460 - RNA, 21 nt, Human
gccgccaauggcagggcagca

SEQ ID NO: 682461 - RNA, 25 nt, Human
gccgccaccaccaccagauggccaa

SEQ ID NO: 682462 - RNA, 20 nt, Human
ggaaaaagaccagacugaug

SEQ ID NO: 682463 - RNA, 24 nt, Human
gggaacucagaugccaccagucug

SEQ ID NO: 682464 - RNA, 19 nt, Human
gggcaggaaagugggguga

SEQ ID NO: 682465 - RNA, 22 nt, Human
gggcaugcagcuggccuuuggu

SEQ ID NO: 682466 - RNA, 23 nt, Human
gguagccccacgccugggccagc

SEQ ID NO: 682467 - RNA, 23 nt, Human
guauauauauauauaugcacaga

SEQ ID NO: 682468 - RNA, 24 nt, Human
guccaugggaacccaggacacuaa

SEQ ID NO: 682469 - RNA, 22 nt, Human
uaaauauauauacauauguaua

SEQ ID NO: 682470 - RNA, 21 nt, Human
uacgggggguuguuggcuuug

SEQ ID NO: 682471 - RNA, 18 nt, Human
uauacauauguauauaua

SEQ ID NO: 682472 - RNA, 19 nt, Human
uauacauauguauauauau

SEQ ID NO: 682473 - RNA, 20 nt, Human
uauacauauguauauauaua

SEQ ID NO: 682474 - RNA, 23 nt, Human
uauacauauguauauauauauau

SEQ ID NO: 682475 - RNA, 23 nt, Human
uauagaaaaaggagugcuuuuga

SEQ ID NO: 682476 - RNA, 18 nt, Human
uauauacauauguauaua

SEQ ID NO: 682477 - RNA, 24 nt, Human
uauauauacauauguauauauaua

SEQ ID NO: 682478 - RNA, 19 nt, Human
uauauauauauauaugcac

SEQ ID NO: 682479 - RNA, 28 nt, Human
uauauauguguauuuaaauauauauaca

SEQ ID NO: 682480 - RNA, 19 nt, Human
uauaugccaagccuuugcu

SEQ ID NO: 682481 - RNA, 18 nt, Human
uauguauauauauauaua

SEQ ID NO: 682482 - RNA, 24 nt, Human
uauguguauuuaaauauauauaca

SEQ ID NO: 682483 - RNA, 21 nt, Human
ucaccagcuucaauuuauauu

SEQ ID NO: 682484 - RNA, 24 nt, Human
ucaggccucagcacaggguggcaa

SEQ ID NO: 682485 - RNA, 21 nt, Human
ucccugaguccaugggaaccc

SEQ ID NO: 682486 - RNA, 24 nt, Human
ucccugcaacagagggaagggaac

SEQ ID NO: 682487 - RNA, 19 nt, Human
ucccuuuggccccccgaga

SEQ ID NO: 682488 - RNA, 23 nt, Human
ucuccagaaaguuggcagggagc

SEQ ID NO: 682489 - RNA, 19 nt, Human
ucuguuccuuccguucuuc

SEQ ID NO: 682490 - RNA, 23 nt, Human
ugaccgcagaggaaaaagaccag

SEQ ID NO: 682491 - RNA, 24 nt, Human
ugagccaaccaggugagcacacag

SEQ ID NO: 682492 - RNA, 19 nt, Human
ugaggaagaggccucaggc

SEQ ID NO: 682493 - RNA, 21 nt, Human
ugagggcuacccccuguugug

SEQ ID NO: 682494 - RNA, 18 nt, Human
ugaugggcaugcagcugg

SEQ ID NO: 682495 - RNA, 30 nt, Human
ugcacagagaaaccuuagccaacaaauccc

SEQ ID NO: 682496 - RNA, 24 nt, Human
ugcagagaccacaccagcaaaaca

SEQ ID NO: 682497 - RNA, 25 nt, Human
ugccaagccuuugcuugguagcccc

SEQ ID NO: 682498 - RNA, 18 nt, Human
ugccauuucuucagacuc

SEQ ID NO: 682499 - RNA, 23 nt, Human
ugccauuucuucagacucugggc

SEQ ID NO: 682500 - RNA, 18 nt, Human
ugcccccucuguuccuuc

SEQ ID NO: 682501 - RNA, 25 nt, Human
uggcagacagcaccccucucucccu

SEQ ID NO: 682502 - RNA, 26 nt, Human
uggcagacagcaccccucucucccua

SEQ ID NO: 682503 - RNA, 22 nt, Human
uggcagggcagcauggccagaa

SEQ ID NO: 682504 - RNA, 20 nt, Human
ugggaacccaggacacuaac

SEQ ID NO: 682505 - RNA, 23 nt, Human
ugggaacccaggacacuaacaaa

SEQ ID NO: 682506 - RNA, 25 nt, Human
ugggaacccaggacacuaacaaagg

SEQ ID NO: 682507 - RNA, 22 nt, Human
ugggauggauucaccagcuuca

SEQ ID NO: 682508 - RNA, 23 nt, Human
ugggauggauucaccagcuucaa

SEQ ID NO: 682509 - RNA, 18 nt, Human
uguacaauauauaugugu

SEQ ID NO: 682510 - RNA, 18 nt, Human
uguauauauauauauaug

SEQ ID NO: 682511 - RNA, 22 nt, Human
uguauauauauauauaugcaca

SEQ ID NO: 682512 - RNA, 24 nt, Human
uguguauuuaaauauauauacaua

SEQ ID NO: 682513 - RNA, 24 nt, Human
uguugugaccauuccugaagugca

SEQ ID NO: 682514 - RNA, 20 nt, Human
uucccuuuggccccccgaga

SEQ ID NO: 682515 - RNA, 18 nt, Human
uuccuggccacaccaagu

SEQ ID NO: 682516 - RNA, 18 nt, Human
uucucucucucucucucu

SEQ ID NO: 682517 - RNA, 22 nt, Human
uugaugagccaaccaggugagc

SEQ ID NO: 682518 - RNA, 20 nt, Human
uugaugaguggauccaguca

SEQ ID NO: 682519 - RNA, 19 nt, Human
uugcccccucuguuccuuc

SEQ ID NO: 682520 - RNA, 21 nt, Human
aaaccaccgaauucacaccca

SEQ ID NO: 682521 - RNA, 19 nt, Human
aaagacuuaaaccacagaa

SEQ ID NO: 682522 - RNA, 24 nt, Human
aaagugcugggacuacaggcauga

SEQ ID NO: 682523 - RNA, 18 nt, Human
aaaugagcaacuggcuca

SEQ ID NO: 682524 - RNA, 24 nt, Human
aagcagcuggccucacugcucuuc

SEQ ID NO: 682525 - RNA, 19 nt, Human
aagugcugggacuacaggc

SEQ ID NO: 682526 - RNA, 26 nt, Human
aagugcugggacuacaggcaugagcc

SEQ ID NO: 682527 - RNA, 19 nt, Human
acaggaaaggcgcugcugc

SEQ ID NO: 682528 - RNA, 20 nt, Human
acaggugcaggaaauacgga

SEQ ID NO: 682529 - RNA, 20 nt, Human
acccagaagcaccacaacuc

SEQ ID NO: 682530 - RNA, 18 nt, Human
accccaaccccuuauuag

SEQ ID NO: 682531 - RNA, 22 nt, Human
accccguuaugggcaccccaac

SEQ ID NO: 682532 - RNA, 24 nt, Human
acgcagccaggucggauauugggu

SEQ ID NO: 682533 - RNA, 21 nt, Human
acggcagcccagccagaaaca

SEQ ID NO: 682534 - RNA, 18 nt, Human
acgggguuucacuguguu

SEQ ID NO: 682535 - RNA, 19 nt, Human
acgggguuucacuguguua

SEQ ID NO: 682536 - RNA, 20 nt, Human
acgggguuucacuguguuag

SEQ ID NO: 682537 - RNA, 24 nt, Human
acgggguuucacuguguuagccag

SEQ ID NO: 682538 - RNA, 23 nt, Human
acucaggcuggagugcaguggug

SEQ ID NO: 682539 - RNA, 23 nt, Human
acugagcacagagaaguguucug

SEQ ID NO: 682540 - RNA, 18 nt, Human
acugaggggcgaaggccc

SEQ ID NO: 682541 - RNA, 21 nt, Human
acugcaagcuccgccucccag

SEQ ID NO: 682542 - RNA, 19 nt, Human
acuugacugcaaagacuua

SEQ ID NO: 682543 - RNA, 20 nt, Human
agacaggaaaggcgcugcug

SEQ ID NO: 682544 - RNA, 22 nt, Human
agcaggcggggcccagagaccc

SEQ ID NO: 682545 - RNA, 20 nt, Human
agccccaguguggauccaga

SEQ ID NO: 682546 - RNA, 18 nt, Human
aggcaggcugccagcagc

SEQ ID NO: 682547 - RNA, 18 nt, Human
aggcaugggccuggcuug

SEQ ID NO: 682548 - RNA, 25 nt, Human
aggcuggagugcaguggugugaucu

SEQ ID NO: 682549 - RNA, 19 nt, Human
aguagagacgggguuucac

SEQ ID NO: 682550 - RNA, 18 nt, Human
aguagcugggacuacagg

SEQ ID NO: 682551 - RNA, 20 nt, Human
agugcaguggugcaaucacg

SEQ ID NO: 682552 - RNA, 19 nt, Human
agugcaguggugugaucuc

SEQ ID NO: 682553 - RNA, 20 nt, Human
agugcaguggugugaucucg

SEQ ID NO: 682554 - RNA, 23 nt, Human
agugcaguggugugaucucggcu

SEQ ID NO: 682555 - RNA, 24 nt, Human
agugcaguggugugaucucggcuc

SEQ ID NO: 682556 - RNA, 21 nt, Human
auggagcugaguggaaauucc

SEQ ID NO: 682557 - RNA, 24 nt, Human
caaagugcugggacuacaggcaug

SEQ ID NO: 682558 - RNA, 20 nt, Human
caccccguuaugggcacccc

SEQ ID NO: 682559 - RNA, 22 nt, Human
cacgccauucuccugcuucagc

SEQ ID NO: 682560 - RNA, 23 nt, Human
cacggcagcccagccagaaacac

SEQ ID NO: 682561 - RNA, 20 nt, Human
cacuauacccugcccaugcc

SEQ ID NO: 682562 - RNA, 24 nt, Human
cacucaggcuggagugcaguggug

SEQ ID NO: 682563 - RNA, 22 nt, Human
cacugcagccuugaccucccag

SEQ ID NO: 682564 - RNA, 22 nt, Human
cacuggugccugggcuugcggu

SEQ ID NO: 682565 - RNA, 18 nt, Human
cacuguguuagccaggau

SEQ ID NO: 682566 - RNA, 19 nt, Human
cacuguguuagccaggaug

SEQ ID NO: 682567 - RNA, 24 nt, Human
cacuguguuagccaggauggucuc

SEQ ID NO: 682568 - RNA, 23 nt, Human
cagagacccagaagcaccacaac

SEQ ID NO: 682569 - RNA, 21 nt, Human
cagaggcccagaggcgacccc

SEQ ID NO: 682570 - RNA, 24 nt, Human
cagccccaguguggauccagaggu

SEQ ID NO: 682571 - RNA, 20 nt, Human
cagccucuggaguguccccu

SEQ ID NO: 682572 - RNA, 20 nt, Human
cagccuugaccucccaggcu

SEQ ID NO: 682573 - RNA, 20 nt, Human
cagcugccaucccacugagg

SEQ ID NO: 682574 - RNA, 22 nt, Human
cagcugccugcgccgcucugcc

SEQ ID NO: 682575 - RNA, 19 nt, Human
caggaaaggcgcugcugca

SEQ ID NO: 682576 - RNA, 18 nt, Human
caggaagcagcuggccuc

SEQ ID NO: 682577 - RNA, 19 nt, Human
caggcggggcccagagacc

SEQ ID NO: 682578 - RNA, 25 nt, Human
cagggccaccccguuaugggcaccc

SEQ ID NO: 682579 - RNA, 19 nt, Human
cauccucggccccaccccu

SEQ ID NO: 682580 - RNA, 24 nt, Human
cauucaaaaccaccgaauucacac

SEQ ID NO: 682581 - RNA, 19 nt, Human
ccaaagugcugggacuaca

SEQ ID NO: 682582 - RNA, 24 nt, Human
ccaaagugcugggacuacaggcau

SEQ ID NO: 682583 - RNA, 24 nt, Human
ccacaaggcacuuuaugcauucaa

SEQ ID NO: 682584 - RNA, 22 nt, Human
ccacagccccucuaguuaacuu

SEQ ID NO: 682585 - RNA, 20 nt, Human
ccacugaggggcgaaggccc

SEQ ID NO: 682586 - RNA, 24 nt, Human
cccaaagugcugggacuacaggca

SEQ ID NO: 682587 - RNA, 20 nt, Human
cccagagacccagaagcacc

SEQ ID NO: 682588 - RNA, 23 nt, Human
cccaggcucacaugauccuccca

SEQ ID NO: 682589 - RNA, 20 nt, Human
cccagguucacgccauucuc

SEQ ID NO: 682590 - RNA, 25 nt, Human
cccaugccacggccgccuucugaga

SEQ ID NO: 682591 - RNA, 24 nt, Human
ccccuccacuuucuuucuuagggg

SEQ ID NO: 682592 - RNA, 23 nt, Human
cccgaguagcugggacuacaggu

SEQ ID NO: 682593 - RNA, 24 nt, Human
cccgaguagcugggacuacaggug

SEQ ID NO: 682594 - RNA, 19 nt, Human
cccucagcugccaucccac

SEQ ID NO: 682595 - RNA, 20 nt, Human
cccugcccaugccacggccg

SEQ ID NO: 682596 - RNA, 21 nt, Human
ccgccuucugagaauaacgcu

SEQ ID NO: 682597 - RNA, 28 nt, Human
ccugaccuugugauccaccagccucggc

SEQ ID NO: 682598 - RNA, 19 nt, Human
cgccucccagguucacgcc

SEQ ID NO: 682599 - RNA, 24 nt, Human
cgcucaggcuggagugcaguggug

SEQ ID NO: 682600 - RNA, 24 nt, Human
cgcucugucacucaggcuggagug

SEQ ID NO: 682601 - RNA, 23 nt, Human
cggccgccuucugagaauaacgc

SEQ ID NO: 682602 - RNA, 24 nt, Human
cggcucacugcagccuugaccucc

SEQ ID NO: 682603 - RNA, 24 nt, Human
cgggguuucacuguguuagccagg

SEQ ID NO: 682604 - RNA, 21 nt, Human
cguuaugggcaccccaacccc

SEQ ID NO: 682605 - RNA, 18 nt, Human
cucacaugauccucccac

SEQ ID NO: 682606 - RNA, 22 nt, Human
cucacuauacccugcccaugcc

SEQ ID NO: 682607 - RNA, 18 nt, Human
cuccugaccuugugaucc

SEQ ID NO: 682608 - RNA, 24 nt, Human
cucgcucugucacucaggcuggag

SEQ ID NO: 682609 - RNA, 23 nt, Human
cucggccccaccccuugcgcagc

SEQ ID NO: 682610 - RNA, 22 nt, Human
cucugccuggacuugcauccuc

SEQ ID NO: 682611 - RNA, 24 nt, Human
cugcaagcuccgccucccagguuc

SEQ ID NO: 682612 - RNA, 22 nt, Human
cugcagccuugaccucccaggc

SEQ ID NO: 682613 - RNA, 23 nt, Human
cugcagccuugaccucccaggcu

SEQ ID NO: 682614 - RNA, 27 nt, Human
cugcugagcucauccgagaguccacgc

SEQ ID NO: 682615 - RNA, 23 nt, Human
cugcuucagccucccgaguagcu

SEQ ID NO: 682616 - RNA, 21 nt, Human
cuggggcuccucugcagucag

SEQ ID NO: 682617 - RNA, 18 nt, Human
cugucgcucaggcuggag

SEQ ID NO: 682618 - RNA, 19 nt, Human
cugucgcucaggcuggagu

SEQ ID NO: 682619 - RNA, 18 nt, Human
gacaggaaaggcgcugcu

SEQ ID NO: 682620 - RNA, 19 nt, Human
gaccuugugauccaccagc

SEQ ID NO: 682621 - RNA, 22 nt, Human
gaccuugugauccaccagccuc

SEQ ID NO: 682622 - RNA, 22 nt, Human
gaccuugugauccaccagccuc

SEQ ID NO: 682623 - RNA, 24 nt, Human
gaccuugugauccaccagccucgg

SEQ ID NO: 682624 - RNA, 21 nt, Human
gacuacaggcaugagccaccg

SEQ ID NO: 682625 - RNA, 24 nt, Human
gacuacaggcaugagccaccgugc

SEQ ID NO: 682626 - RNA, 19 nt, Human
gagacacuggugccugggc

SEQ ID NO: 682627 - RNA, 21 nt, Human
gagauggagucuugcucuguc

SEQ ID NO: 682628 - RNA, 18 nt, Human
gagggcaggcgggguagg

SEQ ID NO: 682629 - RNA, 26 nt, Human
gaguagcugggacuacaggugaccgc

SEQ ID NO: 682630 - RNA, 24 nt, Human
gagugcaguggugcaaucacggcu

SEQ ID NO: 682631 - RNA, 22 nt, Human
gcacacgucuccuuccacuccu

SEQ ID NO: 682632 - RNA, 20 nt, Human
gcacagagaaguguucugaa

SEQ ID NO: 682633 - RNA, 19 nt, Human
gccagcagcugagcugucc

SEQ ID NO: 682634 - RNA, 25 nt, Human
gccucccagguucacgccauucucc

SEQ ID NO: 682635 - RNA, 24 nt, Human
gccuggcuaauuuuuuuguauuuu

SEQ ID NO: 682636 - RNA, 19 nt, Human
gccuugaccucccaggcuc

SEQ ID NO: 682637 - RNA, 22 nt, Human
gcucacagcugccugcgccgcu

SEQ ID NO: 682638 - RNA, 20 nt, Human
gcucaggcuggagugcagug

SEQ ID NO: 682639 - RNA, 23 nt, Human
gcucaggcuggagugcaguggug

SEQ ID NO: 682640 - RNA, 24 nt, Human
gcucaggcuggagugcaguggugu

SEQ ID NO: 682641 - RNA, 18 nt, Human
ggaaauacggagggcagg

SEQ ID NO: 682642 - RNA, 21 nt, Human
ggacuacaggcaugagccacc

SEQ ID NO: 682643 - RNA, 24 nt, Human
ggacuacaggcaugagccaccgug

SEQ ID NO: 682644 - RNA, 19 nt, Human
ggagcugaguggaaauucc

SEQ ID NO: 682645 - RNA, 19 nt, Human
ggcccagagacccagaagc

SEQ ID NO: 682646 - RNA, 20 nt, Human
ggcucgguaacugccuggcg

SEQ ID NO: 682647 - RNA, 22 nt, Human
ggcuggagugcaguggugugau

SEQ ID NO: 682648 - RNA, 20 nt, Human
gggcaggcgggguagggggc

SEQ ID NO: 682649 - RNA, 23 nt, Human
gggccaggcaggcugccagcagc

SEQ ID NO: 682650 - RNA, 23 nt, Human
gggguuucacuguguuagccagg

SEQ ID NO: 682651 - RNA, 19 nt, Human
ggucucaaucuccugaccu

SEQ ID NO: 682652 - RNA, 23 nt, Human
guagagacgggguuucacugugu

SEQ ID NO: 682653 - RNA, 24 nt, Human
gugauccaccagccucggccuccc

SEQ ID NO: 682654 - RNA, 21 nt, Human
gugaucucggcucacugcaag

SEQ ID NO: 682655 - RNA, 20 nt, Human
guguccccuccacuuucuuu

SEQ ID NO: 682656 - RNA, 21 nt, Human
uaaaccacagacaggaaaggc

SEQ ID NO: 682657 - RNA, 24 nt, Human
uacaggcaugagccaccgugccca

SEQ ID NO: 682658 - RNA, 22 nt, Human
uacaggugaccgccaccacgcc

SEQ ID NO: 682659 - RNA, 23 nt, Human
uaccgcagggcugcuggacaacg

SEQ ID NO: 682660 - RNA, 20 nt, Human
uaguagagacgggguuucac

SEQ ID NO: 682661 - RNA, 23 nt, Human
uaguagagacgggguuucacugu

SEQ ID NO: 682662 - RNA, 24 nt, Human
uaguagagacgggguuucacugug

SEQ ID NO: 682663 - RNA, 25 nt, Human
uauuagggguguuaaucagcacaaa

SEQ ID NO: 682664 - RNA, 24 nt, Human
ucaaaaccaccgaauucacacccc

SEQ ID NO: 682665 - RNA, 19 nt, Human
ucaaucuccugaccuugug

SEQ ID NO: 682666 - RNA, 20 nt, Human
ucaaucuccugaccuuguga

SEQ ID NO: 682667 - RNA, 24 nt, Human
ucacucaggcuggagugcaguggu

SEQ ID NO: 682668 - RNA, 18 nt, Human
ucacugcaagcuccgccu

SEQ ID NO: 682669 - RNA, 19 nt, Human
ucacugcaagcuccgccuc

SEQ ID NO: 682670 - RNA, 19 nt, Human
ucacugcaagcuccgccuc

SEQ ID NO: 682671 - RNA, 24 nt, Human
ucacugcaagcuccgccucccagg

SEQ ID NO: 682672 - RNA, 19 nt, Human
ucacugcagccuugaccuc

SEQ ID NO: 682673 - RNA, 23 nt, Human
ucacugcagccuugaccucccag

SEQ ID NO: 682674 - RNA, 24 nt, Human
ucacugcagccuugaccucccagg

SEQ ID NO: 682675 - RNA, 24 nt, Human
ucacuguguuagccaggauggucu

SEQ ID NO: 682676 - RNA, 23 nt, Human
ucagccucccgaguagcugggac

SEQ ID NO: 682677 - RNA, 25 nt, Human
uccacuccucacuauacccugccca

SEQ ID NO: 682678 - RNA, 24 nt, Human
ucccaaagugcugggacuacaggc

SEQ ID NO: 682679 - RNA, 19 nt, Human
ucccagguucacgccauuc

SEQ ID NO: 682680 - RNA, 20 nt, Human
ucccagguucacgccauucu

SEQ ID NO: 682681 - RNA, 21 nt, Human
ucccagguucacgccauucuc

SEQ ID NO: 682682 - RNA, 24 nt, Human
ucccagguucacgccauucuccug

SEQ ID NO: 682683 - RNA, 23 nt, Human
ucccgaguagcugggacuacagg

SEQ ID NO: 682684 - RNA, 24 nt, Human
ucccgaguagcugggacuacaggu

SEQ ID NO: 682685 - RNA, 24 nt, Human
ucgcucaggcuggagugcaguggu

SEQ ID NO: 682686 - RNA, 24 nt, Human
ucgcucugucacucaggcuggagu

SEQ ID NO: 682687 - RNA, 18 nt, Human
ucggccucccaaagugcu

SEQ ID NO: 682688 - RNA, 19 nt, Human
ucucgcucugucacucagg

SEQ ID NO: 682689 - RNA, 22 nt, Human
ucucgcucugucacucaggcug

SEQ ID NO: 682690 - RNA, 23 nt, Human
ucucgcucugucacucaggcugg

SEQ ID NO: 682691 - RNA, 24 nt, Human
ucucgcucugucacucaggcugga

SEQ ID NO: 682692 - RNA, 21 nt, Human
ucugcacuucugaccuggggc

SEQ ID NO: 682693 - RNA, 28 nt, Human
ucuggaguguccccuccacuuucuuucu

SEQ ID NO: 682694 - RNA, 24 nt, Human
ucugucacucaggcuggagugcag

SEQ ID NO: 682695 - RNA, 24 nt, Human
ucugucgcucaggcuggagugcag

SEQ ID NO: 682696 - RNA, 20 nt, Human
ucuugcucugucgcucaggc

SEQ ID NO: 682697 - RNA, 22 nt, Human
ucuugcucugucgcucaggcug

SEQ ID NO: 682698 - RNA, 23 nt, Human
ucuugcucugucgcucaggcugg

SEQ ID NO: 682699 - RNA, 24 nt, Human
ucuugcucugucgcucaggcugga

SEQ ID NO: 682700 - RNA, 24 nt, Human
ugacaggugcaggaaauacggagg

SEQ ID NO: 682701 - RNA, 25 nt, Human
ugaccucccaggcucacaugauccu

SEQ ID NO: 682702 - RNA, 19 nt, Human
ugaccuugugauccaccag

SEQ ID NO: 682703 - RNA, 27 nt, Human
ugacugcaaagacuuaaaccacagaca

SEQ ID NO: 682704 - RNA, 22 nt, Human
ugagacagggucucgcucuguc

SEQ ID NO: 682705 - RNA, 22 nt, Human
ugcaguggugcaaucacggcuc

SEQ ID NO: 682706 - RNA, 22 nt, Human
ugcaguggugugaucucggcuc

SEQ ID NO: 682707 - RNA, 19 nt, Human
ugcccaugccacggccgcc

SEQ ID NO: 682708 - RNA, 19 nt, Human
ugcccuggggcuccucugc

SEQ ID NO: 682709 - RNA, 20 nt, Human
ugccugcgccgcucugccug

SEQ ID NO: 682710 - RNA, 19 nt, Human
ugccuggcguagcacaagg

SEQ ID NO: 682711 - RNA, 22 nt, Human
ugccugggcuugcgguaccgca

SEQ ID NO: 682712 - RNA, 24 nt, Human
ugcucugucgcucaggcuggagug

SEQ ID NO: 682713 - RNA, 23 nt, Human
ugcugagaacccuggucugcacu

SEQ ID NO: 682714 - RNA, 24 nt, Human
ugcugagcucauccgagaguccac

SEQ ID NO: 682715 - RNA, 24 nt, Human
ugcuucagccucccgaguagcugg

SEQ ID NO: 682716 - RNA, 23 nt, Human
uggagucuugcucugucgcucag

SEQ ID NO: 682717 - RNA, 21 nt, Human
uggagugcaguggugcaauca

SEQ ID NO: 682718 - RNA, 24 nt, Human
uggagugcaguggugcaaucacgg

SEQ ID NO: 682719 - RNA, 19 nt, Human
uggagugcaguggugugau

SEQ ID NO: 682720 - RNA, 23 nt, Human
uggagugcaguggugugaucucg

SEQ ID NO: 682721 - RNA, 24 nt, Human
uggagugcaguggugugaucucgg

SEQ ID NO: 682722 - RNA, 18 nt, Human
uggcuuggaugcaucagu

SEQ ID NO: 682723 - RNA, 18 nt, Human
ugggacuacaggcaugag

SEQ ID NO: 682724 - RNA, 21 nt, Human
ugggacuacaggcaugagcca

SEQ ID NO: 682725 - RNA, 22 nt, Human
ugggacuacaggcaugagccac

SEQ ID NO: 682726 - RNA, 23 nt, Human
ugggacuacaggcaugagccacc

SEQ ID NO: 682727 - RNA, 24 nt, Human
ugggacuacaggcaugagccaccg

SEQ ID NO: 682728 - RNA, 26 nt, Human
ugggacuacaggcaugagccaccgug

SEQ ID NO: 682729 - RNA, 21 nt, Human
ugggacuacaggugaccgcca

SEQ ID NO: 682730 - RNA, 22 nt, Human
ugggacuacaggugaccgccac

SEQ ID NO: 682731 - RNA, 24 nt, Human
ugggacuacaggugaccgccacca

SEQ ID NO: 682732 - RNA, 24 nt, Human
uggugcaaucacggcucacugcag

SEQ ID NO: 682733 - RNA, 21 nt, Human
uguauuuuuaguagagacggg

SEQ ID NO: 682734 - RNA, 22 nt, Human
uguccacaaggcacuuuaugca

SEQ ID NO: 682735 - RNA, 18 nt, Human
uguccccuccacuuucuu

SEQ ID NO: 682736 - RNA, 24 nt, Human
uguuuguuuuuugagacagggucu

SEQ ID NO: 682737 - RNA, 24 nt, Human
uuaccaggcacacgucuccuucca

SEQ ID NO: 682738 - RNA, 18 nt, Human
uuaguagagacgggguuu

SEQ ID NO: 682739 - RNA, 21 nt, Human
uuaguagagacgggguuucac

SEQ ID NO: 682740 - RNA, 21 nt, Human
uuaguagagacgggguuucac

SEQ ID NO: 682741 - RNA, 24 nt, Human
uuaguagagacgggguuucacugu

SEQ ID NO: 682742 - RNA, 21 nt, Human
uucacuguguuagccaggaug

SEQ ID NO: 682743 - RNA, 24 nt, Human
uucagccucccgaguagcugggac

SEQ ID NO: 682744 - RNA, 22 nt, Human
uucucuuuaaauccccagcaaa

SEQ ID NO: 682745 - RNA, 22 nt, Human
uugagacagggucucgcucugu

SEQ ID NO: 682746 - RNA, 23 nt, Human
uuguauuuuuaguagagacgggg

SEQ ID NO: 682747 - RNA, 25 nt, Human
uugugauccaccagccucggccucc

SEQ ID NO: 682748 - RNA, 21 nt, Human
uuguuuguuuguuuguuuuuu

SEQ ID NO: 682749 - RNA, 19 nt, Human
uuucacuguguuagccagg

SEQ ID NO: 682750 - RNA, 24 nt, Human
uuuuuaguagagacgggguuucac

SEQ ID NO: 682751 - RNA, 21 nt, Human
uuuuuguauuuuuaguagaga

SEQ ID NO: 682752 - RNA, 21 nt, Human
uuuuuuguauuuuuaguagag

SEQ ID NO: 682753 - RNA, 24 nt, Human
uuuuuuguauuuuuaguagagacg

SEQ ID NO: 682754 - RNA, 21 nt, Human
aagcagcagcucccauguccu

SEQ ID NO: 682755 - RNA, 19 nt, Human
aagcuggcacagagccccg

SEQ ID NO: 682756 - RNA, 22 nt, Human
agauucccacaagcagcagcuc

SEQ ID NO: 682757 - RNA, 20 nt, Human
caggcaccagauucccacaa

SEQ ID NO: 682758 - RNA, 21 nt, Human
cccacaagcagcagcucccau

SEQ ID NO: 682759 - RNA, 24 nt, Human
ccgacccuggagugaagaguaagc

SEQ ID NO: 682760 - RNA, 21 nt, Human
gaacaggcaccagauucccac

SEQ ID NO: 682761 - RNA, 24 nt, Human
guggaacaggcaccagauucccac

SEQ ID NO: 682762 - RNA, 22 nt, Human
ugagaaacucuaccccuugucu

SEQ ID NO: 682763 - RNA, 24 nt, Human
uggcacagagccccgacgcuggga

SEQ ID NO: 682764 - RNA, 18 nt, Human
uggcauccgacccuggag

SEQ ID NO: 682765 - RNA, 20 nt, Human
uguccuguagcacguggcau

SEQ ID NO: 682766 - RNA, 22 nt, Human
aaguaauccgcccaccucagcc

SEQ ID NO: 682767 - RNA, 20 nt, Human
aaguagcugggacuacaggc

SEQ ID NO: 682768 - RNA, 22 nt, Human
aaguagcugggacuacaggcau

SEQ ID NO: 682769 - RNA, 24 nt, Human
aaguagcugggacuacaggcaugc

SEQ ID NO: 682770 - RNA, 20 nt, Human
aaguguaagccacugcgacc

SEQ ID NO: 682771 - RNA, 20 nt, Human
acaaaacauucaaaagaaaa

SEQ ID NO: 682772 - RNA, 23 nt, Human
accacacccggcuaauuuuugua

SEQ ID NO: 682773 - RNA, 19 nt, Human
acugcagccugcaucuccu

SEQ ID NO: 682774 - RNA, 21 nt, Human
aggaggguggcggcgggaagc

SEQ ID NO: 682775 - RNA, 19 nt, Human
aggcuggagugcaguggca

SEQ ID NO: 682776 - RNA, 21 nt, Human
agugcaguggcacaaucacag

SEQ ID NO: 682777 - RNA, 25 nt, Human
aucacagcccacugcagccugcauc

SEQ ID NO: 682778 - RNA, 19 nt, Human
auggcagcgaggagggugg

SEQ ID NO: 682779 - RNA, 22 nt, Human
auuccagcccagagaauggcag

SEQ ID NO: 682780 - RNA, 24 nt, Human
cacauuggugcccaggcuggagug

SEQ ID NO: 682781 - RNA, 23 nt, Human
caccucagccucccaaguucuag

SEQ ID NO: 682782 - RNA, 24 nt, Human
cacuucagccucccaaguagcugg

SEQ ID NO: 682783 - RNA, 21 nt, Human
cagcccacugcagccugcauc

SEQ ID NO: 682784 - RNA, 21 nt, Human
cagcccagagaauggcagcga

SEQ ID NO: 682785 - RNA, 20 nt, Human
cagcgaggaggguggcggcg

SEQ ID NO: 682786 - RNA, 23 nt, Human
cauuggugcccaggcuggagugc

SEQ ID NO: 682787 - RNA, 23 nt, Human
cccaaguagcugggacuacaggc

SEQ ID NO: 682788 - RNA, 24 nt, Human
cccaaguagcugggacuacaggca

SEQ ID NO: 682789 - RNA, 23 nt, Human
cccacccucuccagcacugggaa

SEQ ID NO: 682790 - RNA, 20 nt, Human
cccacuucagccucccaagu

SEQ ID NO: 682791 - RNA, 23 nt, Human
ccgcccaccucagccucccaagu

SEQ ID NO: 682792 - RNA, 25 nt, Human
ccgcccaccucagccucccaaguuc

SEQ ID NO: 682793 - RNA, 18 nt, Human
ccucagcccacccucucc

SEQ ID NO: 682794 - RNA, 26 nt, Human
ccucccacuucagccucccaaguagc

SEQ ID NO: 682795 - RNA, 18 nt, Human
ccugggcucaaguaaucc

SEQ ID NO: 682796 - RNA, 24 nt, Human
ccugggcucaaguaauccgcccac

SEQ ID NO: 682797 - RNA, 24 nt, Human
cucaaguaauccgcccaccucagc

SEQ ID NO: 682798 - RNA, 21 nt, Human
cuccugggcucaaguaauccg

SEQ ID NO: 682799 - RNA, 23 nt, Human
gaaaauucuucauuuagagugac

SEQ ID NO: 682800 - RNA, 21 nt, Human
gcacugggaauauauuuaugc

SEQ ID NO: 682801 - RNA, 19 nt, Human
gcccaggcuggagugcagu

SEQ ID NO: 682802 - RNA, 19 nt, Human
gcuggagugcaguggcaca

SEQ ID NO: 682803 - RNA, 19 nt, Human
gcuggucccgaacuccugg

SEQ ID NO: 682804 - RNA, 18 nt, Human
ggaggguggcggcgggaa

SEQ ID NO: 682805 - RNA, 18 nt, Human
ggcaggcugaaggcucau

SEQ ID NO: 682806 - RNA, 24 nt, Human
gggcucaaguaauccgcccaccuc

SEQ ID NO: 682807 - RNA, 22 nt, Human
ggguuacaaguguaagccacug

SEQ ID NO: 682808 - RNA, 24 nt, Human
guaauccgcccaccucagccuccc

SEQ ID NO: 682809 - RNA, 24 nt, Human
gugcccaggcuggagugcaguggc

SEQ ID NO: 682810 - RNA, 24 nt, Human
uaauuuuuguacuuuuuguaggga

SEQ ID NO: 682811 - RNA, 23 nt, Human
uacaggcaugcacuaccacaccc

SEQ ID NO: 682812 - RNA, 22 nt, Human
uaggguuacaaguguaagccac

SEQ ID NO: 682813 - RNA, 24 nt, Human
uaggguuacaaguguaagccacug

SEQ ID NO: 682814 - RNA, 24 nt, Human
uauauuucccaggcuggucccgaa

SEQ ID NO: 682815 - RNA, 22 nt, Human
uauuuuacauacaaaacauuca

SEQ ID NO: 682816 - RNA, 20 nt, Human
ucaaaagaaaauucuucauu

SEQ ID NO: 682817 - RNA, 24 nt, Human
ucacauuggugcccaggcuggagu

SEQ ID NO: 682818 - RNA, 22 nt, Human
ucagcccacccucuccagcacu

SEQ ID NO: 682819 - RNA, 18 nt, Human
ucagccucccaaguagcu

SEQ ID NO: 682820 - RNA, 20 nt, Human
ucagccucccaaguagcugg

SEQ ID NO: 682821 - RNA, 23 nt, Human
ucagccucccaaguagcugggac

SEQ ID NO: 682822 - RNA, 21 nt, Human
ucagccucccaaguucuaggg

SEQ ID NO: 682823 - RNA, 25 nt, Human
ucaggccauccucccacuucagccu

SEQ ID NO: 682824 - RNA, 24 nt, Human
ucccaaguagcugggacuacaggc

SEQ ID NO: 682825 - RNA, 18 nt, Human
ucccgaacuccugggcuc

SEQ ID NO: 682826 - RNA, 23 nt, Human
ucccgaacuccugggcucaagua

SEQ ID NO: 682827 - RNA, 18 nt, Human
ucccucagcccacccucu

SEQ ID NO: 682828 - RNA, 21 nt, Human
uccgcccaccucagccuccca

SEQ ID NO: 682829 - RNA, 20 nt, Human
uccugggcucaaguaauccg

SEQ ID NO: 682830 - RNA, 18 nt, Human
ucgcggccgccgcccucg

SEQ ID NO: 682831 - RNA, 24 nt, Human
ucucacauuggugcccaggcugga

SEQ ID NO: 682832 - RNA, 18 nt, Human
ugcccaggcuggagugca

SEQ ID NO: 682833 - RNA, 21 nt, Human
ugcccaggcuggagugcagug

SEQ ID NO: 682834 - RNA, 22 nt, Human
ugcccaggcuggagugcagugg

SEQ ID NO: 682835 - RNA, 24 nt, Human
ugcccaggcuggagugcaguggca

SEQ ID NO: 682836 - RNA, 18 nt, Human
uggagugcaguggcacaa

SEQ ID NO: 682837 - RNA, 19 nt, Human
uggagugcaguggcacaau

SEQ ID NO: 682838 - RNA, 21 nt, Human
uggagugcaguggcacaauca

SEQ ID NO: 682839 - RNA, 20 nt, Human
uggcacaaucacagcccacu

SEQ ID NO: 682840 - RNA, 23 nt, Human
uggcacaaucacagcccacugca

SEQ ID NO: 682841 - RNA, 18 nt, Human
uggcagcgaggagggugg

SEQ ID NO: 682842 - RNA, 20 nt, Human
uggcggcgggaagcagaggc

SEQ ID NO: 682843 - RNA, 19 nt, Human
ugggacuacaggcaugcac

SEQ ID NO: 682844 - RNA, 24 nt, Human
ugggacuacaggcaugcacuacca

SEQ ID NO: 682845 - RNA, 27 nt, Human
uguuucuuuuuuuuuuuuuuuccaaga

SEQ ID NO: 682846 - RNA, 20 nt, Human
uuacaaguguaagccacugc

SEQ ID NO: 682847 - RNA, 21 nt, Human
uuccagcccagagaauggcag

SEQ ID NO: 682848 - RNA, 23 nt, Human
uucucacauuggugcccaggcug

SEQ ID NO: 682849 - RNA, 24 nt, Human
uuguagggacaggaguuucacuau

SEQ ID NO: 682850 - RNA, 24 nt, Human
uuucuuuuuuuuuuuuuuuccaag

SEQ ID NO: 682851 - RNA, 24 nt, Human
uuuuuguagggacaggaguuucac

SEQ ID NO: 682852 - RNA, 22 nt, Human
uuuuuuuuuuuuuuuuaugcuu

SEQ ID NO: 682853 - RNA, 18 nt, Human
aaaggaagcgggggcaag

SEQ ID NO: 682854 - RNA, 20 nt, Human
agacacauaccucaacuaug

SEQ ID NO: 682855 - RNA, 22 nt, Human
aggcagaaauaggcaagcucac

SEQ ID NO: 682856 - RNA, 20 nt, Human
cgggcacaguggccacaacc

SEQ ID NO: 682857 - RNA, 20 nt, Human
gaaaagagacaauaaaagga

SEQ ID NO: 682858 - RNA, 21 nt, Human
ggccacaaccaccuacgggca

SEQ ID NO: 682859 - RNA, 21 nt, Human
ggccaccgccgccucccuccg

SEQ ID NO: 682860 - RNA, 20 nt, Human
ggccgcccggccuuggccau

SEQ ID NO: 682861 - RNA, 19 nt, Human
uauaacuggauaaguagau

SEQ ID NO: 682862 - RNA, 20 nt, Human
uaugaugaccuaauuuuugg

SEQ ID NO: 682863 - RNA, 19 nt, Human
ugaaaagagacaauaaaag

SEQ ID NO: 682864 - RNA, 21 nt, Human
ugaaaagagacaauaaaagga

SEQ ID NO: 682865 - RNA, 27 nt, Human
uguuccauucuugugaaauacuuuuua

SEQ ID NO: 682866 - RNA, 22 nt, Human
uuuuuuuuuuuugaaaagagac

SEQ ID NO: 682867 - RNA, 18 nt, Human
uuuuuuuuuuuuuuuuug

SEQ ID NO: 682868 - RNA, 23 nt, Human
aaaaagcaggugccucaucuaca

SEQ ID NO: 682869 - RNA, 24 nt, Human
aaaaaggccucucuccauaaaacu

SEQ ID NO: 682870 - RNA, 26 nt, Human
aaaaauagacaaagacuagaugauaa

SEQ ID NO: 682871 - RNA, 22 nt, Human
aaaagcacagaagcacaucaca

SEQ ID NO: 682872 - RNA, 21 nt, Human
aaaauagacaaagacuagaug

SEQ ID NO: 682873 - RNA, 23 nt, Human
aaaaucucuucuguucugguguu

SEQ ID NO: 682874 - RNA, 21 nt, Human
aaaauuacaugcaacaacuga

SEQ ID NO: 682875 - RNA, 25 nt, Human
aaacaaaggcaaaaauuacaugcag

SEQ ID NO: 682876 - RNA, 23 nt, Human
aaacaacugggacacagaaccuc

SEQ ID NO: 682877 - RNA, 25 nt, Human
aaacuaauuaauuggacauauuccc

SEQ ID NO: 682878 - RNA, 19 nt, Human
aaaguucuuucucaaacuu

SEQ ID NO: 682879 - RNA, 20 nt, Human
aacaccugggaaagagcuga

SEQ ID NO: 682880 - RNA, 22 nt, Human
aacagaagggcuaggagaaaug

SEQ ID NO: 682881 - RNA, 23 nt, Human
aagaacagaagggcuaggagaaa

SEQ ID NO: 682882 - RNA, 23 nt, Human
aagcauuuaaacugccaauccua

SEQ ID NO: 682883 - RNA, 22 nt, Human
aaugagagaaaagaaaaagcag

SEQ ID NO: 682884 - RNA, 18 nt, Human
aauuggaggucccacauc

SEQ ID NO: 682885 - RNA, 23 nt, Human
acaaacauuuucucuuucacccu

SEQ ID NO: 682886 - RNA, 21 nt, Human
acagagcacuggcagguccca

SEQ ID NO: 682887 - RNA, 18 nt, Human
acauuguaaugcauaaga

SEQ ID NO: 682888 - RNA, 20 nt, Human
acugggacacagaaccuccg

SEQ ID NO: 682889 - RNA, 24 nt, Human
agaacagaagggcuaggagaaaug

SEQ ID NO: 682890 - RNA, 24 nt, Human
agaagagauuuuuuacuauuauga

SEQ ID NO: 682891 - RNA, 20 nt, Human
agaauauauaagcaugccaa

SEQ ID NO: 682892 - RNA, 31 nt, Human
aggaaaaagugcagagcauuaacuauaaccc

SEQ ID NO: 682893 - RNA, 23 nt, Human
aggcaaaaauuacaugcaacaac

SEQ ID NO: 682894 - RNA, 21 nt, Human
aggcaguagaaggggguuggu

SEQ ID NO: 682895 - RNA, 22 nt, Human
aggcaguagaaggggguuggug

SEQ ID NO: 682896 - RNA, 20 nt, Human
aguaggcaguagaagggggu

SEQ ID NO: 682897 - RNA, 18 nt, Human
auaucugcagauaucuaa

SEQ ID NO: 682898 - RNA, 19 nt, Human
caaaagcacagaagcacau

SEQ ID NO: 682899 - RNA, 19 nt, Human
caaagaaucccuauacgcc

SEQ ID NO: 682900 - RNA, 19 nt, Human
caacaccugggaaagagcu

SEQ ID NO: 682901 - RNA, 22 nt, Human
caacaccugggaaagagcugaa

SEQ ID NO: 682902 - RNA, 18 nt, Human
cacaaacacagggaaaga

SEQ ID NO: 682903 - RNA, 19 nt, Human
cacagggaaagagggcaaa

SEQ ID NO: 682904 - RNA, 18 nt, Human
cacauaccaugaaggcgu

SEQ ID NO: 682905 - RNA, 22 nt, Human
caccauguuaaccagugcuggc

SEQ ID NO: 682906 - RNA, 22 nt, Human
cacccuaacuccuaaacagcuu

SEQ ID NO: 682907 - RNA, 21 nt, Human
caccugggaaagagcugaagc

SEQ ID NO: 682908 - RNA, 22 nt, Human
cagaaagaucauaauucagaag

SEQ ID NO: 682909 - RNA, 19 nt, Human
caucuacagauccuucugg

SEQ ID NO: 682910 - RNA, 26 nt, Human
cauucaaaagcacagaagcacaucac

SEQ ID NO: 682911 - RNA, 21 nt, Human
cccacaauccauucucaucca

SEQ ID NO: 682912 - RNA, 18 nt, Human
cccacauaccaugaaggc

SEQ ID NO: 682913 - RNA, 24 nt, Human
cccaugaugucaauucggacaguu

SEQ ID NO: 682914 - RNA, 22 nt, Human
cccuaacuccuaaacagcuuac

SEQ ID NO: 682915 - RNA, 19 nt, Human
ccuaaacagcuuacugggg

SEQ ID NO: 682916 - RNA, 22 nt, Human
ccuggagcuggagcugaagcug

SEQ ID NO: 682917 - RNA, 26 nt, Human
ccuggagcuggagcugaagcuggagc

SEQ ID NO: 682918 - RNA, 19 nt, Human
cgaccuggagcuggagcug

SEQ ID NO: 682919 - RNA, 18 nt, Human
cggggcugggaauuggag

SEQ ID NO: 682920 - RNA, 18 nt, Human
cuaagcugcggcuggagc

SEQ ID NO: 682921 - RNA, 20 nt, Human
cugaagcuggagcuggaguc

SEQ ID NO: 682922 - RNA, 20 nt, Human
cuggagcccgaccuggagcu

SEQ ID NO: 682923 - RNA, 21 nt, Human
cuggagcugaagcuggagcug

SEQ ID NO: 682924 - RNA, 20 nt, Human
cuuuuaguaagguggacaau

SEQ ID NO: 682925 - RNA, 23 nt, Human
gaaauuggaaaacaacugggaca

SEQ ID NO: 682926 - RNA, 21 nt, Human
gaagcacaucacauacaccag

SEQ ID NO: 682927 - RNA, 23 nt, Human
gaaucccuauacgccaaacagaa

SEQ ID NO: 682928 - RNA, 21 nt, Human
gacaaugagagaaaagaaaaa

SEQ ID NO: 682929 - RNA, 22 nt, Human
gagcugaagccggggcugggaa

SEQ ID NO: 682930 - RNA, 19 nt, Human
gaggggaaaaaaaaguugg

SEQ ID NO: 682931 - RNA, 20 nt, Human
gaggggaaaaaaaaguugga

SEQ ID NO: 682932 - RNA, 25 nt, Human
gagucaacaccugggaaagagcuga

SEQ ID NO: 682933 - RNA, 21 nt, Human
gcuggagucaacaccugggaa

SEQ ID NO: 682934 - RNA, 20 nt, Human
ggaaaaauagacaaagacua

SEQ ID NO: 682935 - RNA, 20 nt, Human
guagaauauauaagcaugcc

SEQ ID NO: 682936 - RNA, 20 nt, Human
gugaaauuggaaaacaacug

SEQ ID NO: 682937 - RNA, 22 nt, Human
guuagguuuaacaguuucuuuu

SEQ ID NO: 682938 - RNA, 23 nt, Human
uaaauaacccacaauccauucuc

SEQ ID NO: 682939 - RNA, 22 nt, Human
uaacccuuuugaccagaaacuu

SEQ ID NO: 682940 - RNA, 21 nt, Human
uaacuauaacccuuuugacca

SEQ ID NO: 682941 - RNA, 21 nt, Human
uaagaaauguauccuucuccc

SEQ ID NO: 682942 - RNA, 21 nt, Human
uacaaugucuaguuugcccuc

SEQ ID NO: 682943 - RNA, 19 nt, Human
uacagaaccccacauacca

SEQ ID NO: 682944 - RNA, 18 nt, Human
uacauggaugaggacuag

SEQ ID NO: 682945 - RNA, 19 nt, Human
uacgccaaacagaagagau

SEQ ID NO: 682946 - RNA, 21 nt, Human
uacuggggcuucugcaagaca

SEQ ID NO: 682947 - RNA, 22 nt, Human
uagauacucucaauagcuuuuc

SEQ ID NO: 682948 - RNA, 18 nt, Human
uagcaccugaaguguggu

SEQ ID NO: 682949 - RNA, 22 nt, Human
uagcaccugaagugugguguca

SEQ ID NO: 682950 - RNA, 21 nt, Human
uaggcaguagaaggggguugg

SEQ ID NO: 682951 - RNA, 21 nt, Human
uauuaugacacaaacacaggg

SEQ ID NO: 682952 - RNA, 25 nt, Human
uauuuuuucaacaaacauuuucucu

SEQ ID NO: 682953 - RNA, 22 nt, Human
ucaaacuucugagaaagaacau

SEQ ID NO: 682954 - RNA, 24 nt, Human
ucaaaggaaaaauagacaaagacu

SEQ ID NO: 682955 - RNA, 24 nt, Human
ucacuuuggaaaguucuuucucaa

SEQ ID NO: 682956 - RNA, 22 nt, Human
uccaggcuuaaacaaaggcaaa

SEQ ID NO: 682957 - RNA, 22 nt, Human
ucccacggucauccacggagcc

SEQ ID NO: 682958 - RNA, 18 nt, Human
ucccuauacgccaaacag

SEQ ID NO: 682959 - RNA, 20 nt, Human
uccgcugccuaagcugcggc

SEQ ID NO: 682960 - RNA, 20 nt, Human
uccgcugccuaagcugcggc

SEQ ID NO: 682961 - RNA, 22 nt, Human
uccgcugccuaagcugcggcug

SEQ ID NO: 682962 - RNA, 18 nt, Human
ucggacaguuagguuuaa

SEQ ID NO: 682963 - RNA, 22 nt, Human
ucugaauuaugaucuuucuguc

SEQ ID NO: 682964 - RNA, 23 nt, Human
ugaauaaauaacccacaauccau

SEQ ID NO: 682965 - RNA, 25 nt, Human
ugaccagaaacuuuaugucuauaac

SEQ ID NO: 682966 - RNA, 23 nt, Human
ugagagaaaagaaaaagcaggug

SEQ ID NO: 682967 - RNA, 21 nt, Human
ugaggacuagucauugggcaa

SEQ ID NO: 682968 - RNA, 22 nt, Human
ugaggggaaaaaaaaguuggag

SEQ ID NO: 682969 - RNA, 26 nt, Human
ugcaagacagaaagaucauaauucag

SEQ ID NO: 682970 - RNA, 21 nt, Human
ugcagaagccccaguaagcug

SEQ ID NO: 682971 - RNA, 19 nt, Human
ugccuaagcugcggcugga

SEQ ID NO: 682972 - RNA, 21 nt, Human
ugccuaagcugcggcuggagc

SEQ ID NO: 682973 - RNA, 24 nt, Human
ugccuaagcugcggcuggagcugg

SEQ ID NO: 682974 - RNA, 20 nt, Human
uggaaaacaacugggacaca

SEQ ID NO: 682975 - RNA, 22 nt, Human
uggagcuggagcugaagcugga

SEQ ID NO: 682976 - RNA, 23 nt, Human
uggagcuggagcugaagcuggag

SEQ ID NO: 682977 - RNA, 18 nt, Human
ugggaaagagcugaagcc

SEQ ID NO: 682978 - RNA, 19 nt, Human
ugggaaagagcugaagccg

SEQ ID NO: 682979 - RNA, 20 nt, Human
ugggaaagagcugaagccgg

SEQ ID NO: 682980 - RNA, 22 nt, Human
ugggaauuggaggucccacauc

SEQ ID NO: 682981 - RNA, 19 nt, Human
uggugggggguggaauugg

SEQ ID NO: 682982 - RNA, 20 nt, Human
uggugggggguggaauuggu

SEQ ID NO: 682983 - RNA, 19 nt, Human
ugucuauaacgaugguuac

SEQ ID NO: 682984 - RNA, 22 nt, Human
uuaaaguaggcaguagaagggg

SEQ ID NO: 682985 - RNA, 28 nt, Human
uuaucugccacauacaaagcaucauucc

SEQ ID NO: 682986 - RNA, 25 nt, Human
uuauuugccauguacaauuuaaugc

SEQ ID NO: 682987 - RNA, 24 nt, Human
uucuuauagucuuagagucaugua

SEQ ID NO: 682988 - RNA, 21 nt, Human
uugaccagaaacuuuaugucu

SEQ ID NO: 682989 - RNA, 20 nt, Human
uugcacauaugcuccaaggu

SEQ ID NO: 682990 - RNA, 18 nt, Human
uuggaggucccacauccc

SEQ ID NO: 682991 - RNA, 18 nt, Human
uuuuuuuuuuuuuuuucg

SEQ ID NO: 682992 - RNA, 25 nt, Human
aaaaagaagcaagugcauccaauaa

SEQ ID NO: 682993 - RNA, 21 nt, Human
aaccagcaugguagaaauaca

SEQ ID NO: 682994 - RNA, 18 nt, Human
aacuugauuccuuaauaa

SEQ ID NO: 682995 - RNA, 18 nt, Human
aagaagcccagaugaaau

SEQ ID NO: 682996 - RNA, 18 nt, Human
aagaagcccagaugaaau

SEQ ID NO: 682997 - RNA, 26 nt, Human
aggaaaaaagaagcaagugcauccaa

SEQ ID NO: 682998 - RNA, 19 nt, Human
agugauacaagugaaaaag

SEQ ID NO: 682999 - RNA, 20 nt, Human
auauuaggaaaaaagaagca

SEQ ID NO: 683000 - RNA, 18 nt, Human
uaaaaccagcaugguaga

SEQ ID NO: 683001 - RNA, 21 nt, Human
uagaauaaaaccagcauggua

SEQ ID NO: 683002 - RNA, 20 nt, Human
ugaaaaagaacuugauuccu

SEQ ID NO: 683003 - RNA, 18 nt, Human
ugacuuacaagugcaaaa

SEQ ID NO: 683004 - RNA, 20 nt, Human
ugcuuuacuuacacccaacc

SEQ ID NO: 683005 - RNA, 18 nt, Human
aagaggagauggguaaug

SEQ ID NO: 683006 - RNA, 21 nt, Human
aauguagacaauucuuugagg

SEQ ID NO: 683007 - RNA, 22 nt, Human
acagaauauuaccccaaccccc

SEQ ID NO: 683008 - RNA, 19 nt, Human
agaauauuaccccaacccc

SEQ ID NO: 683009 - RNA, 18 nt, Human
aggcaaaagaggagaugg

SEQ ID NO: 683010 - RNA, 19 nt, Human
ccagagaaagucccuccuu

SEQ ID NO: 683011 - RNA, 24 nt, Human
ccccccagugggguacagaagcug

SEQ ID NO: 683012 - RNA, 23 nt, Human
ccgaaggcaauugugcuucuuuu

SEQ ID NO: 683013 - RNA, 19 nt, Human
cuuguggaaaaguccaucu

SEQ ID NO: 683014 - RNA, 20 nt, Human
gagccugagacgagcagcag

SEQ ID NO: 683015 - RNA, 27 nt, Human
uaccccaaccccccagugggguacaga

SEQ ID NO: 683016 - RNA, 24 nt, Human
uacgagccugagacgagcagcaga

SEQ ID NO: 683017 - RNA, 18 nt, Human
uauuaccccaacccccca

SEQ ID NO: 683018 - RNA, 19 nt, Human
ucaggaaauuccagagaaa

SEQ ID NO: 683019 - RNA, 18 nt, Human
ugagaucaagaggccagc

SEQ ID NO: 683020 - RNA, 18 nt, Human
uuucuuggucauaucagg

SEQ ID NO: 683021 - RNA, 23 nt, Human
aaacccauuuuaucuccauuuua

SEQ ID NO: 683022 - RNA, 23 nt, Human
aagcuacaccagccaaacccuca

SEQ ID NO: 683023 - RNA, 24 nt, Human
acagugaccccggcucugucuccc

SEQ ID NO: 683024 - RNA, 19 nt, Human
acccagacugucuccaaag

SEQ ID NO: 683025 - RNA, 21 nt, Human
accccggcucugucucccacu

SEQ ID NO: 683026 - RNA, 19 nt, Human
agcuacaccagccaaaccc

SEQ ID NO: 683027 - RNA, 22 nt, Human
aggcucagagacaguaaacagg

SEQ ID NO: 683028 - RNA, 24 nt, Human
auucaucauuuccaaugcucacaa

SEQ ID NO: 683029 - RNA, 22 nt, Human
caagaagauguaggcucagaga

SEQ ID NO: 683030 - RNA, 24 nt, Human
caagcuacaccagccaaacccuca

SEQ ID NO: 683031 - RNA, 25 nt, Human
caagguagaccucauuaaacccauu

SEQ ID NO: 683032 - RNA, 23 nt, Human
cacaguccagacuagagucuucc

SEQ ID NO: 683033 - RNA, 20 nt, Human
cacuccaggcuacgccccca

SEQ ID NO: 683034 - RNA, 18 nt, Human
cacucugcacuugcaccu

SEQ ID NO: 683035 - RNA, 20 nt, Human
cacucugcacuugcaccuua

SEQ ID NO: 683036 - RNA, 22 nt, Human
cacucugcacuugcaccuuacc

SEQ ID NO: 683037 - RNA, 22 nt, Human
caggaugccuuuuccuuccuga

SEQ ID NO: 683038 - RNA, 23 nt, Human
cauauaacaucuagguuugugua

SEQ ID NO: 683039 - RNA, 20 nt, Human
cauucaaaauacacuuuaau

SEQ ID NO: 683040 - RNA, 24 nt, Human
ccagcucacgcccucagcaggccu

SEQ ID NO: 683041 - RNA, 21 nt, Human
ccccaagcugggccacagucc

SEQ ID NO: 683042 - RNA, 22 nt, Human
cccccaagcaccugcggggucc

SEQ ID NO: 683043 - RNA, 18 nt, Human
ccucaagacuccacgcca

SEQ ID NO: 683044 - RNA, 22 nt, Human
ccucacuccaggcuacgccccc

SEQ ID NO: 683045 - RNA, 24 nt, Human
ccuccauaauauugcucuauuaua

SEQ ID NO: 683046 - RNA, 19 nt, Human
ccuuagcagaagugacgcu

SEQ ID NO: 683047 - RNA, 21 nt, Human
cucccacucugcacuugcacc

SEQ ID NO: 683048 - RNA, 18 nt, Human
cugugucauucaaaauac

SEQ ID NO: 683049 - RNA, 19 nt, Human
cuugcaguaaaucacaaua

SEQ ID NO: 683050 - RNA, 20 nt, Human
gaaaccugauacauggcccu

SEQ ID NO: 683051 - RNA, 20 nt, Human
gaacauauacagaaaccuga

SEQ ID NO: 683052 - RNA, 20 nt, Human
gcaaagcuaaguuuggcaag

SEQ ID NO: 683053 - RNA, 22 nt, Human
ggaacauauacagaaaccugaa

SEQ ID NO: 683054 - RNA, 20 nt, Human
ggcccuugauauuggcauug

SEQ ID NO: 683055 - RNA, 23 nt, Human
gggaaaaaaguacacuuuaauau

SEQ ID NO: 683056 - RNA, 23 nt, Human
uaaauaaaaauacauauaacauc

SEQ ID NO: 683057 - RNA, 23 nt, Human
uacacaaugacagaauugccuag

SEQ ID NO: 683058 - RNA, 21 nt, Human
uacagaaaccugauacauggc

SEQ ID NO: 683059 - RNA, 22 nt, Human
uagagagcagaggagugaaugg

SEQ ID NO: 683060 - RNA, 18 nt, Human
uaucacuggcaaagcuaa

SEQ ID NO: 683061 - RNA, 24 nt, Human
uauccccaucguuaagcaaugcau

SEQ ID NO: 683062 - RNA, 21 nt, Human
uaucugugucauucaaaauac

SEQ ID NO: 683063 - RNA, 19 nt, Human
ucaaaacugguguuuauug

SEQ ID NO: 683064 - RNA, 26 nt, Human
ugacagaacugggauuuaaacccaga

SEQ ID NO: 683065 - RNA, 21 nt, Human
ugacgcuggggagggcaccug

SEQ ID NO: 683066 - RNA, 18 nt, Human
ugacuauucuugccuggu

SEQ ID NO: 683067 - RNA, 19 nt, Human
ugaguggguagagagcaga

SEQ ID NO: 683068 - RNA, 22 nt, Human
ugaguggguagagagcagagga

SEQ ID NO: 683069 - RNA, 20 nt, Human
ugccuagugacacauuucua

SEQ ID NO: 683070 - RNA, 24 nt, Human
uggggcaacacgggucccuccuua

SEQ ID NO: 683071 - RNA, 22 nt, Human
uuacacaaugacagaauugccu

SEQ ID NO: 683072 - RNA, 19 nt, Human
uuccugaagaugaucugag

SEQ ID NO: 683073 - RNA, 19 nt, Human
uuccugccgucuuaaggac

SEQ ID NO: 683074 - RNA, 21 nt, Human
uugcagaucaaguaggggaaa

SEQ ID NO: 683075 - RNA, 18 nt, Human
uuuuuuuuuuuuuuuuug

SEQ ID NO: 683076 - RNA, 23 nt, Human
uuuuuuuuuuuuuuuuugucauu

SEQ ID NO: 683077 - RNA, 18 nt, Human
aaaaagaaaaccaaaaac

SEQ ID NO: 683078 - RNA, 19 nt, Human
aaacaacaacaacaacaaa

SEQ ID NO: 683079 - RNA, 22 nt, Human
aaagaaaaacaagaacuuacaa

SEQ ID NO: 683080 - RNA, 18 nt, Human
aaagaagacauacaugug

SEQ ID NO: 683081 - RNA, 23 nt, Human
aaagaauaauguuauggggagag

SEQ ID NO: 683082 - RNA, 21 nt, Human
aaaguuuaagagaaagcauca

SEQ ID NO: 683083 - RNA, 25 nt, Human
aacaaaaagaaaaccaaaaaccuaa

SEQ ID NO: 683084 - RNA, 23 nt, Human
aacaacaacaacaacaaaaagaa

SEQ ID NO: 683085 - RNA, 22 nt, Human
aacaggaagguuuuauuuaggu

SEQ ID NO: 683086 - RNA, 21 nt, Human
aacuuguuuuucucaucccug

SEQ ID NO: 683087 - RNA, 23 nt, Human
aagaaaaacaagaacuuacaaaa

SEQ ID NO: 683088 - RNA, 23 nt, Human
aagaaucaucugaaccugggagg

SEQ ID NO: 683089 - RNA, 21 nt, Human
aagcaaaaacaugaacagaua

SEQ ID NO: 683090 - RNA, 18 nt, Human
aagcagaagaaucaucug

SEQ ID NO: 683091 - RNA, 24 nt, Human
aagcagaagaaucaucugaaccug

SEQ ID NO: 683092 - RNA, 25 nt, Human
aagcagaagaaucaucugaaccugg

SEQ ID NO: 683093 - RNA, 21 nt, Human
aaguaagcaaaaacaugaaca

SEQ ID NO: 683094 - RNA, 25 nt, Human
aaguguugaagauugguuaaaagcu

SEQ ID NO: 683095 - RNA, 24 nt, Human
aaucaucugaaccugggaggugga

SEQ ID NO: 683096 - RNA, 19 nt, Human
aauggucccugugauccca

SEQ ID NO: 683097 - RNA, 19 nt, Human
aauggucccugugauccca

SEQ ID NO: 683098 - RNA, 24 nt, Human
acaaaaagaaaaccaaaaaccuaa

SEQ ID NO: 683099 - RNA, 28 nt, Human
acaacaacaaaaagaaaaccaaaaaccu

SEQ ID NO: 683100 - RNA, 22 nt, Human
acaacaacaacaacaaaaagaa

SEQ ID NO: 683101 - RNA, 28 nt, Human
acaacaacaacaacaaaaagaaaaccaa

SEQ ID NO: 683102 - RNA, 22 nt, Human
acaacaggauuugcaacaugag

SEQ ID NO: 683103 - RNA, 19 nt, Human
acacagcaagacuccaucu

SEQ ID NO: 683104 - RNA, 20 nt, Human
acacagcaagacuccaucuc

SEQ ID NO: 683105 - RNA, 24 nt, Human
acacagcaagacuccaucucagaa

SEQ ID NO: 683106 - RNA, 24 nt, Human
acaugagccuaccuuacuuaaaca

SEQ ID NO: 683107 - RNA, 22 nt, Human
acugaagcagaagaaucaucug

SEQ ID NO: 683108 - RNA, 25 nt, Human
acugcacuccauccuggugacacag

SEQ ID NO: 683109 - RNA, 21 nt, Human
agaaaaacaagaacuuacaaa

SEQ ID NO: 683110 - RNA, 18 nt, Human
agaaaacaacaacaacaa

SEQ ID NO: 683111 - RNA, 23 nt, Human
agaaaacaacaacaacaacaaaa

SEQ ID NO: 683112 - RNA, 25 nt, Human
agaaaacaacaacaacaacaaaaag

SEQ ID NO: 683113 - RNA, 27 nt, Human
agaaaacaacaacaacaacaaaaagaa

SEQ ID NO: 683114 - RNA, 20 nt, Human
agaaugccuauuguucaaaa

SEQ ID NO: 683115 - RNA, 18 nt, Human
agacagguaaucaggucu

SEQ ID NO: 683116 - RNA, 19 nt, Human
agagaauucuauggccaca

SEQ ID NO: 683117 - RNA, 19 nt, Human
agaggaaguagcucuuuuc

SEQ ID NO: 683118 - RNA, 19 nt, Human
agcagaagaaucaucugaa

SEQ ID NO: 683119 - RNA, 25 nt, Human
aggcaggggcaagucggggggaggc

SEQ ID NO: 683120 - RNA, 21 nt, Human
aggcaggggcaagucggguuu

SEQ ID NO: 683121 - RNA, 19 nt, Human
agguggagguugcagugag

SEQ ID NO: 683122 - RNA, 24 nt, Human
agguggagguugcagugagucgag

SEQ ID NO: 683123 - RNA, 19 nt, Human
auaccaucucauccaguca

SEQ ID NO: 683124 - RNA, 24 nt, Human
aucaugccacugcacuccauccug

SEQ ID NO: 683125 - RNA, 24 nt, Human
aucucagaaaacaacaacaacaac

SEQ ID NO: 683126 - RNA, 22 nt, Human
augccacugcacuccauccugg

SEQ ID NO: 683127 - RNA, 20 nt, Human
auuuacuucaagaggaagua

SEQ ID NO: 683128 - RNA, 22 nt, Human
caaaaagaaaaccaaaaaccua

SEQ ID NO: 683129 - RNA, 18 nt, Human
caaaggcugagcccggaa

SEQ ID NO: 683130 - RNA, 23 nt, Human
caacaaaaagaaaaccaaaaacc

SEQ ID NO: 683131 - RNA, 19 nt, Human
caacaacaaaaagaaaacc

SEQ ID NO: 683132 - RNA, 20 nt, Human
caacaacaaaaagaaaacca

SEQ ID NO: 683133 - RNA, 22 nt, Human
caacaacaaaaagaaaacccca

SEQ ID NO: 683134 - RNA, 25 nt, Human
caacaacaacaaaaagaaaaccaaa

SEQ ID NO: 683135 - RNA, 27 nt, Human
caacaacaacaacaaaaagaaaaccaa

SEQ ID NO: 683136 - RNA, 27 nt, Human
caacaacaacaacaaaaagaaaaccaa

SEQ ID NO: 683137 - RNA, 26 nt, Human
caacaggaagguuuuauuuaggucga

SEQ ID NO: 683138 - RNA, 19 nt, Human
cacagugagauaccaucuc

SEQ ID NO: 683139 - RNA, 18 nt, Human
cacaucacaugccuauau

SEQ ID NO: 683140 - RNA, 21 nt, Human
cacugcacuccauccugguga

SEQ ID NO: 683141 - RNA, 22 nt, Human
cacugcacuccauccuggugac

SEQ ID NO: 683142 - RNA, 23 nt, Human
cacugcacuccauccuggugaca

SEQ ID NO: 683143 - RNA, 24 nt, Human
cagaaaacaacaacaacaacaaaa

SEQ ID NO: 683144 - RNA, 19 nt, Human
cagaagcagaacaaaggca

SEQ ID NO: 683145 - RNA, 21 nt, Human
cagcaggacuuuggagugagu

SEQ ID NO: 683146 - RNA, 18 nt, Human
cagcggauuaacauccaa

SEQ ID NO: 683147 - RNA, 24 nt, Human
caggagacugaagcagaagaauca

SEQ ID NO: 683148 - RNA, 20 nt, Human
caguaugaauuaucuuaugu

SEQ ID NO: 683149 - RNA, 18 nt, Human
caucucagaaaacaacaa

SEQ ID NO: 683150 - RNA, 21 nt, Human
caucugaaccugggaggugga

SEQ ID NO: 683151 - RNA, 22 nt, Human
cauuccccccuuugaugcuuuu

SEQ ID NO: 683152 - RNA, 19 nt, Human
ccacugcacuccauccugg

SEQ ID NO: 683153 - RNA, 19 nt, Human
ccacugcacuccauccugg

SEQ ID NO: 683154 - RNA, 20 nt, Human
ccacugcacuccauccuggu

SEQ ID NO: 683155 - RNA, 23 nt, Human
ccacugcacuccauccuggugac

SEQ ID NO: 683156 - RNA, 19 nt, Human
ccagggcucuuuuccuugc

SEQ ID NO: 683157 - RNA, 19 nt, Human
cccggaacaaagacagggc

SEQ ID NO: 683158 - RNA, 21 nt, Human
ccugggagguggagguugcag

SEQ ID NO: 683159 - RNA, 23 nt, Human
ccuggugacacagcaagacucca

SEQ ID NO: 683160 - RNA, 21 nt, Human
ccugugaucccagcuacucag

SEQ ID NO: 683161 - RNA, 23 nt, Human
cggagccccugccuggccuugca

SEQ ID NO: 683162 - RNA, 22 nt, Human
cgggcuagguugcagagaaaag

SEQ ID NO: 683163 - RNA, 19 nt, Human
cuccaaagagaauucuaug

SEQ ID NO: 683164 - RNA, 20 nt, Human
cugaaccugggagguggagg

SEQ ID NO: 683165 - RNA, 24 nt, Human
cugaaccugggagguggagguugc

SEQ ID NO: 683166 - RNA, 19 nt, Human
cugcuccuggagcccuccu

SEQ ID NO: 683167 - RNA, 18 nt, Human
cuguaguucucucacauc

SEQ ID NO: 683168 - RNA, 18 nt, Human
cuuacagaagcagaacaa

SEQ ID NO: 683169 - RNA, 19 nt, Human
cuuguaagguuucucucca

SEQ ID NO: 683170 - RNA, 25 nt, Human
gaacaaagacagggcuugacuuuua

SEQ ID NO: 683171 - RNA, 22 nt, Human
gagaaaaggaaugcuuauaugu

SEQ ID NO: 683172 - RNA, 18 nt, Human
gagaucaugccacugcac

SEQ ID NO: 683173 - RNA, 22 nt, Human
gagguugcagugagucgagauc

SEQ ID NO: 683174 - RNA, 20 nt, Human
gcaagucggguuuuuggcgc

SEQ ID NO: 683175 - RNA, 21 nt, Human
gcagagaaaaaccacagugag

SEQ ID NO: 683176 - RNA, 18 nt, Human
ggagguugcagugagucg

SEQ ID NO: 683177 - RNA, 20 nt, Human
ggagguugcagugagucgag

SEQ ID NO: 683178 - RNA, 23 nt, Human
ggagguugcagugagucgagauc

SEQ ID NO: 683179 - RNA, 24 nt, Human
ggagguugcagugagucgagauca

SEQ ID NO: 683180 - RNA, 22 nt, Human
ggccggagagaucacugggugc

SEQ ID NO: 683181 - RNA, 24 nt, Human
guaguucucucacaucacaugccu

SEQ ID NO: 683182 - RNA, 24 nt, Human
guugcagugagucgagaucaugcc

SEQ ID NO: 683183 - RNA, 23 nt, Human
uaaaaaguaagcaaaaacaugaa

SEQ ID NO: 683184 - RNA, 21 nt, Human
uaagcaaaaacaugaacagau

SEQ ID NO: 683185 - RNA, 22 nt, Human
uacagaagcagaacaaaggcag

SEQ ID NO: 683186 - RNA, 21 nt, Human
uacaugcaucaggcaggggca

SEQ ID NO: 683187 - RNA, 21 nt, Human
uagcuccagcaggacuuugga

SEQ ID NO: 683188 - RNA, 18 nt, Human
ucaauggucccugugauc

SEQ ID NO: 683189 - RNA, 19 nt, Human
ucacugggugcaacaggaa

SEQ ID NO: 683190 - RNA, 19 nt, Human
ucaucugaaccugggaggu

SEQ ID NO: 683191 - RNA, 22 nt, Human
ucaucuuauguuuaguaaaggu

SEQ ID NO: 683192 - RNA, 23 nt, Human
ucaugccacugcacuccauccug

SEQ ID NO: 683193 - RNA, 24 nt, Human
uccauaaaugucaauggucccugu

SEQ ID NO: 683194 - RNA, 24 nt, Human
ucccugugaucccagcuacucagg

SEQ ID NO: 683195 - RNA, 20 nt, Human
ucucuccaguaugaaucauc

SEQ ID NO: 683196 - RNA, 21 nt, Human
ucucuuauguccaauaagggu

SEQ ID NO: 683197 - RNA, 18 nt, Human
ucugaaccugggaggugg

SEQ ID NO: 683198 - RNA, 18 nt, Human
ucugcugugcagugucca

SEQ ID NO: 683199 - RNA, 19 nt, Human
ucuuacagaagcagaacaa

SEQ ID NO: 683200 - RNA, 24 nt, Human
ugaaccugggagguggagguugca

SEQ ID NO: 683201 - RNA, 20 nt, Human
ugaagcagaagaaucaucug

SEQ ID NO: 683202 - RNA, 24 nt, Human
ugaagcagaagaaucaucugaacc

SEQ ID NO: 683203 - RNA, 19 nt, Human
ugacaagcacaugaaaaca

SEQ ID NO: 683204 - RNA, 24 nt, Human
ugagaaagcagucuuacagaagca

SEQ ID NO: 683205 - RNA, 19 nt, Human
ugagagcagaacaaagaau

SEQ ID NO: 683206 - RNA, 20 nt, Human
ugagcccggaacaaagacag

SEQ ID NO: 683207 - RNA, 23 nt, Human
ugagucagacuggucaggaaagg

SEQ ID NO: 683208 - RNA, 22 nt, Human
ugagucgagaucaugccacugc

SEQ ID NO: 683209 - RNA, 24 nt, Human
ugcaucaggcaggggcaagucggg

SEQ ID NO: 683210 - RNA, 22 nt, Human
ugccacauucuucacacuugua

SEQ ID NO: 683211 - RNA, 22 nt, Human
ugccacauucuucacauuugua

SEQ ID NO: 683212 - RNA, 21 nt, Human
ugccacugcacuccauccugg

SEQ ID NO: 683213 - RNA, 19 nt, Human
ugccaugcuacagaaagaa

SEQ ID NO: 683214 - RNA, 24 nt, Human
ugccaugcuacagaaagaaaaaca

SEQ ID NO: 683215 - RNA, 20 nt, Human
ugccuuagagacagcaauac

SEQ ID NO: 683216 - RNA, 23 nt, Human
ugccuuagagacagcaauaccuu

SEQ ID NO: 683217 - RNA, 21 nt, Human
ugcgaggugagaaagcagucu

SEQ ID NO: 683218 - RNA, 20 nt, Human
ugcuacagaaagaaaaacaa

SEQ ID NO: 683219 - RNA, 19 nt, Human
ugcuccuggagcccuccuu

SEQ ID NO: 683220 - RNA, 23 nt, Human
uggagcccuccuucggagccccu

SEQ ID NO: 683221 - RNA, 18 nt, Human
ugggagguggagguugca

SEQ ID NO: 683222 - RNA, 29 nt, Human
ugggagguggagguugcagugacaacggu

SEQ ID NO: 683223 - RNA, 24 nt, Human
ugggagguggagguugcagugagu

SEQ ID NO: 683224 - RNA, 22 nt, Human
ugggugcaacaggaagguuuua

SEQ ID NO: 683225 - RNA, 23 nt, Human
uguaggguuucucuccaguauga

SEQ ID NO: 683226 - RNA, 21 nt, Human
ugugcaguguccaggcauugc

SEQ ID NO: 683227 - RNA, 19 nt, Human
ugugggaaccaggaggccg

SEQ ID NO: 683228 - RNA, 21 nt, Human
uguuauggggagagaauuuca

SEQ ID NO: 683229 - RNA, 20 nt, Human
uuaguaaagguugagaaaug

SEQ ID NO: 683230 - RNA, 22 nt, Human
uucaaaaagucaaugacagaag

SEQ ID NO: 683231 - RNA, 24 nt, Human
uucaaacagggaaacugauaagga

SEQ ID NO: 683232 - RNA, 25 nt, Human
uucacacuuguaagguuucucucca

SEQ ID NO: 683233 - RNA, 19 nt, Human
uuccagggcucuuuuccuu

SEQ ID NO: 683234 - RNA, 22 nt, Human
uucuauggccacauccauaaau

SEQ ID NO: 683235 - RNA, 18 nt, Human
uugcagugagucgagauc

SEQ ID NO: 683236 - RNA, 20 nt, Human
uugcagugagucgagaucau

SEQ ID NO: 683237 - RNA, 21 nt, Human
uugcagugagucgagaucaug

SEQ ID NO: 683238 - RNA, 18 nt, Human
uuguacuguuucucuuca

SEQ ID NO: 683239 - RNA, 21 nt, Human
uuucucaucccugcuccugga

SEQ ID NO: 683240 - RNA, 18 nt, Human
uuuguacuguuucucuuc

SEQ ID NO: 683241 - RNA, 19 nt, Human
uuuguaggguuucucucca

SEQ ID NO: 683242 - RNA, 21 nt, Human
uuuuuauaaguaaaguuuaag

SEQ ID NO: 683243 - RNA, 18 nt, Human
aaaaaaauaaaacagaag

SEQ ID NO: 683244 - RNA, 20 nt, Human
aaaacagaaggaagucaaaa

SEQ ID NO: 683245 - RNA, 24 nt, Human
aaauccugaaaauaaauaugagcu

SEQ ID NO: 683246 - RNA, 20 nt, Human
aagaaaaaaaaagguauggg

SEQ ID NO: 683247 - RNA, 23 nt, Human
aagacaacauuuccauaauaacu

SEQ ID NO: 683248 - RNA, 24 nt, Human
aagcaccaaagcguuucccaagcu

SEQ ID NO: 683249 - RNA, 22 nt, Human
aagccagucuuugaagaacuga

SEQ ID NO: 683250 - RNA, 23 nt, Human
aagguaugggaaaggcugugugu

SEQ ID NO: 683251 - RNA, 21 nt, Human
acaccacagcacaaacucaac

SEQ ID NO: 683252 - RNA, 21 nt, Human
acagcacaaacucaacaugag

SEQ ID NO: 683253 - RNA, 20 nt, Human
accacagcacaaacucaaca

SEQ ID NO: 683254 - RNA, 23 nt, Human
agaaaaaaaaagguaugggaaag

SEQ ID NO: 683255 - RNA, 22 nt, Human
agaaaacuggagaaaagcacca

SEQ ID NO: 683256 - RNA, 21 nt, Human
agaaggaagucaaaagggacc

SEQ ID NO: 683257 - RNA, 20 nt, Human
aggaagucaaaaugaauagu

SEQ ID NO: 683258 - RNA, 18 nt, Human
aggccaggucugauggug

SEQ ID NO: 683259 - RNA, 23 nt, Human
agggaaaaaaauaaaacagaagg

SEQ ID NO: 683260 - RNA, 19 nt, Human
aguaaauagggagccuaag

SEQ ID NO: 683261 - RNA, 24 nt, Human
aguaaauagggagccuaagaaaaa

SEQ ID NO: 683262 - RNA, 23 nt, Human
aguaagaaaaaaaaagguaugga

SEQ ID NO: 683263 - RNA, 19 nt, Human
auaaaagacaacauuucca

SEQ ID NO: 683264 - RNA, 22 nt, Human
auaaaagacaacauuuccauaa

SEQ ID NO: 683265 - RNA, 22 nt, Human
augcuaaagggaaaaaaauaaa

SEQ ID NO: 683266 - RNA, 22 nt, Human
ccagucuuugaagaacugagga

SEQ ID NO: 683267 - RNA, 22 nt, Human
ccucauaaauccugaaaauaaa

SEQ ID NO: 683268 - RNA, 20 nt, Human
cuaaagggaaaaaaauaaaa

SEQ ID NO: 683269 - RNA, 21 nt, Human
cugggcauuagcaaguggacc

SEQ ID NO: 683270 - RNA, 26 nt, Human
gaaaagcaccaaagcguuucccaguc

SEQ ID NO: 683271 - RNA, 19 nt, Human
gaagagaugcucgguggua

SEQ ID NO: 683272 - RNA, 21 nt, Human
gguaccagaaaacuggagaaa

SEQ ID NO: 683273 - RNA, 19 nt, Human
gucuuugaagaacugagga

SEQ ID NO: 683274 - RNA, 19 nt, Human
guggaccaagaggaggaga

SEQ ID NO: 683275 - RNA, 21 nt, Human
uaaaagaaaggacgcauggua

SEQ ID NO: 683276 - RNA, 20 nt, Human
uaacuaaguauaaaagacaa

SEQ ID NO: 683277 - RNA, 22 nt, Human
uaagaaaaaaaaagguauggga

SEQ ID NO: 683278 - RNA, 21 nt, Human
uagguauaccucauuuuagcu

SEQ ID NO: 683279 - RNA, 18 nt, Human
ucaauguuucaggcaaag

SEQ ID NO: 683280 - RNA, 23 nt, Human
uccucauucagguaaaugagauc

SEQ ID NO: 683281 - RNA, 18 nt, Human
ucuucuuggaggccaggu

SEQ ID NO: 683282 - RNA, 19 nt, Human
ugaagagaugcucgguggu

SEQ ID NO: 683283 - RNA, 20 nt, Human
ugacaucuagguauaccuca

SEQ ID NO: 683284 - RNA, 22 nt, Human
uggaaauggagaagaaaacugg

SEQ ID NO: 683285 - RNA, 18 nt, Human
uggaauucuggugacacc

SEQ ID NO: 683286 - RNA, 23 nt, Human
uggagaagaaaacugggcauuag

SEQ ID NO: 683287 - RNA, 21 nt, Human
ugguaccagaaaacuggagaa

SEQ ID NO: 683288 - RNA, 18 nt, Human
ugucaaaagauuuccuac

SEQ ID NO: 683289 - RNA, 28 nt, Human
uucccaagcugauagauauuaauugcau

SEQ ID NO: 683290 - RNA, 18 nt, Human
uugaagaacugaggaguc

SEQ ID NO: 683291 - RNA, 20 nt, Human
aaauccaguuccaugaaggg

SEQ ID NO: 683292 - RNA, 20 nt, Human
agaaauccaaauccaguucc

SEQ ID NO: 683293 - RNA, 22 nt, Human
agagcccagccuccaguguccc

SEQ ID NO: 683294 - RNA, 24 nt, Human
aguagggugcgcucucugccuagc

SEQ ID NO: 683295 - RNA, 23 nt, Human
caauccacaggggaaggagugac

SEQ ID NO: 683296 - RNA, 19 nt, Human
cacccuuuacuccccuccc

SEQ ID NO: 683297 - RNA, 18 nt, Human
cagaaggagucacaggcu

SEQ ID NO: 683298 - RNA, 21 nt, Human
ccacugaacuccaggcccgga

SEQ ID NO: 683299 - RNA, 22 nt, Human
ccacugaacuccaggcccggac

SEQ ID NO: 683300 - RNA, 23 nt, Human
ccaugaaggaagaaaugucuguu

SEQ ID NO: 683301 - RNA, 21 nt, Human
cccucccgcgugagccgagaa

SEQ ID NO: 683302 - RNA, 22 nt, Human
ccuagcagaaggagucacaggc

SEQ ID NO: 683303 - RNA, 21 nt, Human
ccucccgcgugagccgagaau

SEQ ID NO: 683304 - RNA, 22 nt, Human
cuagcagaaggagucacaggcu

SEQ ID NO: 683305 - RNA, 21 nt, Human
cugcacccacugaacuccagg

SEQ ID NO: 683306 - RNA, 19 nt, Human
gagcuuccuccaccaagag

SEQ ID NO: 683307 - RNA, 21 nt, Human
gccccccugucuggccucagc

SEQ ID NO: 683308 - RNA, 20 nt, Human
ggaaagaguagggugcgcuc

SEQ ID NO: 683309 - RNA, 18 nt, Human
gggaaggagugacuggcu

SEQ ID NO: 683310 - RNA, 19 nt, Human
guccguaggcgccccccug

SEQ ID NO: 683311 - RNA, 23 nt, Human
uaggcgccccccugucuggccuc

SEQ ID NO: 683312 - RNA, 25 nt, Human
uauaauaugaagcugccugcuucaa

SEQ ID NO: 683313 - RNA, 21 nt, Human
ucagagcaaacucauucaaag

SEQ ID NO: 683314 - RNA, 23 nt, Human
uccguaggcgccccccugucugg

SEQ ID NO: 683315 - RNA, 19 nt, Human
ugaagcugccugcuucaag

SEQ ID NO: 683316 - RNA, 23 nt, Human
ugaaggaagaaaugucuguuuuu

SEQ ID NO: 683317 - RNA, 23 nt, Human
uggcugagcaacgugucgagaga

SEQ ID NO: 683318 - RNA, 22 nt, Human
ugucgagagagcccagccucca

SEQ ID NO: 683319 - RNA, 20 nt, Human
aaacacaggggacagaagaa

SEQ ID NO: 683320 - RNA, 21 nt, Human
aacacaggggacagaagaaag

SEQ ID NO: 683321 - RNA, 21 nt, Human
aacuucuucuggcuccuucug

SEQ ID NO: 683322 - RNA, 18 nt, Human
aaucuguggucaguccuc

SEQ ID NO: 683323 - RNA, 20 nt, Human
acagaccggcaagccaccgu

SEQ ID NO: 683324 - RNA, 23 nt, Human
acuguuauuuaccccuaaacaac

SEQ ID NO: 683325 - RNA, 19 nt, Human
acuuugagaacgugcugga

SEQ ID NO: 683326 - RNA, 23 nt, Human
agaaaaguaacccuugcauucac

SEQ ID NO: 683327 - RNA, 19 nt, Human
agaaacagaggcucagaga

SEQ ID NO: 683328 - RNA, 21 nt, Human
agaaacagaggcucagagaga

SEQ ID NO: 683329 - RNA, 21 nt, Human
agaagaaaggggggaccuagg

SEQ ID NO: 683330 - RNA, 21 nt, Human
agaagaaaggggggaccuagg

SEQ ID NO: 683331 - RNA, 22 nt, Human
agccaugggaaucgggagcccc

SEQ ID NO: 683332 - RNA, 19 nt, Human
agcucagagagaaacagag

SEQ ID NO: 683333 - RNA, 19 nt, Human
agcuccuuuauuauuauua

SEQ ID NO: 683334 - RNA, 20 nt, Human
aggaaccugggugauggggg

SEQ ID NO: 683335 - RNA, 20 nt, Human
aggcuucccaggcugcccag

SEQ ID NO: 683336 - RNA, 19 nt, Human
aggggacagaagaaagggg

SEQ ID NO: 683337 - RNA, 25 nt, Human
aggggacagaagaaaggggggaccu

SEQ ID NO: 683338 - RNA, 23 nt, Human
agugcuaauguggaaacuuugag

SEQ ID NO: 683339 - RNA, 23 nt, Human
caacgugaaauguuaaguccccu

SEQ ID NO: 683340 - RNA, 19 nt, Human
cagaaucccagaggguccc

SEQ ID NO: 683341 - RNA, 19 nt, Human
cagaaucccagaggguccc

SEQ ID NO: 683342 - RNA, 19 nt, Human
cagagagacagaaccaccu

SEQ ID NO: 683343 - RNA, 19 nt, Human
cagcauaacucaaauaaua

SEQ ID NO: 683344 - RNA, 18 nt, Human
cagcucagagagaaacag

SEQ ID NO: 683345 - RNA, 24 nt, Human
ccaaagguaacccccggggcagau

SEQ ID NO: 683346 - RNA, 22 nt, Human
ccagcccccaaagguaaccccc

SEQ ID NO: 683347 - RNA, 22 nt, Human
ccagggacgguuguguccccuc

SEQ ID NO: 683348 - RNA, 21 nt, Human
ccccuaaacaacagcauaacu

SEQ ID NO: 683349 - RNA, 22 nt, Human
ccccuaaacaacagcauaacuc

SEQ ID NO: 683350 - RNA, 18 nt, Human
cccguccgcacugccuca

SEQ ID NO: 683351 - RNA, 20 nt, Human
cccguccgcacugccucacg

SEQ ID NO: 683352 - RNA, 21 nt, Human
cccguccgcacugccucacgg

SEQ ID NO: 683353 - RNA, 28 nt, Human
ccuaggguuggggacaaaaccggggucc

SEQ ID NO: 683354 - RNA, 22 nt, Human
ccucgugccuagaaacuucuuc

SEQ ID NO: 683355 - RNA, 24 nt, Human
ccucuguaaaaaucccgacuuaaa

SEQ ID NO: 683356 - RNA, 21 nt, Human
cgcugaggucuagagcggagc

SEQ ID NO: 683357 - RNA, 21 nt, Human
cggggcagauccagcagaauc

SEQ ID NO: 683358 - RNA, 24 nt, Human
cuaaacaacagcauaacucaaaua

SEQ ID NO: 683359 - RNA, 21 nt, Human
cucacccccgcacccucuaac

SEQ ID NO: 683360 - RNA, 23 nt, Human
cucccagcguccuuagggagugc

SEQ ID NO: 683361 - RNA, 21 nt, Human
cuccuuuauuauuauuauuau

SEQ ID NO: 683362 - RNA, 24 nt, Human
cugcuggaggcuggaggcggguuu

SEQ ID NO: 683363 - RNA, 21 nt, Human
cuggaggcggguuuugcaagc

SEQ ID NO: 683364 - RNA, 21 nt, Human
cuguggucaguccucaccccc

SEQ ID NO: 683365 - RNA, 18 nt, Human
gacuggggucccagcccc

SEQ ID NO: 683366 - RNA, 23 nt, Human
gagaagcagaaccaaccacugcc

SEQ ID NO: 683367 - RNA, 20 nt, Human
gaggugaugaaccagccccg

SEQ ID NO: 683368 - RNA, 18 nt, Human
gccaccguccucccaggc

SEQ ID NO: 683369 - RNA, 26 nt, Human
gcggagccaggagcuuaauaaaccca

SEQ ID NO: 683370 - RNA, 23 nt, Human
gcugcccaggcuggcagccagaa

SEQ ID NO: 683371 - RNA, 19 nt, Human
gcugcuggaggcuggaggc

SEQ ID NO: 683372 - RNA, 18 nt, Human
gcuggaggcuggaggcgg

SEQ ID NO: 683373 - RNA, 19 nt, Human
gguaaagaaagcaaaacua

SEQ ID NO: 683374 - RNA, 22 nt, Human
ggugaugggggagguccccaga

SEQ ID NO: 683375 - RNA, 26 nt, Human
ggugaugggggagguccccagagaaa

SEQ ID NO: 683376 - RNA, 23 nt, Human
gucaguccucacccccgcacccu

SEQ ID NO: 683377 - RNA, 18 nt, Human
gugaaauguuaagucccc

SEQ ID NO: 683378 - RNA, 24 nt, Human
uaaccaaaccaugcggcaugguuu

SEQ ID NO: 683379 - RNA, 19 nt, Human
uagagcggagccaggagcu

SEQ ID NO: 683380 - RNA, 18 nt, Human
uaggucagaucauaaacu

SEQ ID NO: 683381 - RNA, 21 nt, Human
uaggucagaucauaaacugac

SEQ ID NO: 683382 - RNA, 23 nt, Human
uauccuggaaucagagaagcccu

SEQ ID NO: 683383 - RNA, 19 nt, Human
ucaaauaauaaugacacac

SEQ ID NO: 683384 - RNA, 21 nt, Human
ucaagauagaaaagguaaaga

SEQ ID NO: 683385 - RNA, 23 nt, Human
ucagagagaaacagaggcucaga

SEQ ID NO: 683386 - RNA, 19 nt, Human
ucccagaggguccccgucc

SEQ ID NO: 683387 - RNA, 22 nt, Human
ucccagcccccaaagguaaccc

SEQ ID NO: 683388 - RNA, 21 nt, Human
uccccagagaaaaguaacccu

SEQ ID NO: 683389 - RNA, 21 nt, Human
uccgcggagggaacagcuggg

SEQ ID NO: 683390 - RNA, 22 nt, Human
uccuuagggagugcuaaugugg

SEQ ID NO: 683391 - RNA, 25 nt, Human
uccuuuauuauuauuauuauuauua

SEQ ID NO: 683392 - RNA, 23 nt, Human
ucuaccacuacacuauccaggga

SEQ ID NO: 683393 - RNA, 18 nt, Human
ucuucuggcuccuucugg

SEQ ID NO: 683394 - RNA, 25 nt, Human
ugagaacgugcuggacacaucuggg

SEQ ID NO: 683395 - RNA, 24 nt, Human
ugaggucuagagcggagccaggag

SEQ ID NO: 683396 - RNA, 23 nt, Human
ugccaauugcgcuauccugugga

SEQ ID NO: 683397 - RNA, 20 nt, Human
ugcuggacacaucugggcag

SEQ ID NO: 683398 - RNA, 23 nt, Human
uggaaacuuugagaacgugcugg

SEQ ID NO: 683399 - RNA, 22 nt, Human
uggacacaucugggcagagggc

SEQ ID NO: 683400 - RNA, 20 nt, Human
ugguguggcugggcuagcuu

SEQ ID NO: 683401 - RNA, 23 nt, Human
ugguuccugauggagcugucugg

SEQ ID NO: 683402 - RNA, 23 nt, Human
uuaccccuaaacaacagcauaac

SEQ ID NO: 683403 - RNA, 21 nt, Human
uugcugcuggaggcuggaggc

SEQ ID NO: 683404 - RNA, 24 nt, Human
uuuaccccuaaacaacagcauaac

SEQ ID NO: 683405 - RNA, 19 nt, Human
uuuacuugcacuaaaucug

SEQ ID NO: 683406 - RNA, 25 nt, Human
uuuugcaacuauagaaugugcaaca

SEQ ID NO: 683407 - RNA, 23 nt, Human
aaacagacgaaaaucaauaaacc

SEQ ID NO: 683408 - RNA, 18 nt, Human
aagcugcacugcugccuc

SEQ ID NO: 683409 - RNA, 22 nt, Human
acaguacuggggaagauggaag

SEQ ID NO: 683410 - RNA, 25 nt, Human
agacgaaaaucaauaaaccugagcc

SEQ ID NO: 683411 - RNA, 24 nt, Human
agaggagaggacacuggggagggg

SEQ ID NO: 683412 - RNA, 23 nt, Human
agagugcucccaugccugggcuc

SEQ ID NO: 683413 - RNA, 19 nt, Human
agcccggacccucugaaag

SEQ ID NO: 683414 - RNA, 21 nt, Human
auuggccucggccucacugcc

SEQ ID NO: 683415 - RNA, 20 nt, Human
caauggccugccugagagga

SEQ ID NO: 683416 - RNA, 23 nt, Human
cagcaaacaaggcugugaacaca

SEQ ID NO: 683417 - RNA, 19 nt, Human
cagccaggaugcaagccag

SEQ ID NO: 683418 - RNA, 20 nt, Human
caguccugggccagggugcu

SEQ ID NO: 683419 - RNA, 21 nt, Human
caguccugggccagggugcuc

SEQ ID NO: 683420 - RNA, 19 nt, Human
ccaguggagccagugcaga

SEQ ID NO: 683421 - RNA, 24 nt, Human
ccucugaaagcugcacugcugccu

SEQ ID NO: 683422 - RNA, 22 nt, Human
cugagaggagaggacacugggg

SEQ ID NO: 683423 - RNA, 18 nt, Human
gaacacagccaggaugcc

SEQ ID NO: 683424 - RNA, 24 nt, Human
gacacuggggagggggagaaggcc

SEQ ID NO: 683425 - RNA, 23 nt, Human
gagaggacacuggggagggggaa

SEQ ID NO: 683426 - RNA, 19 nt, Human
gcagucuuuccuggucagu

SEQ ID NO: 683427 - RNA, 18 nt, Human
gccugccugagaggagag

SEQ ID NO: 683428 - RNA, 20 nt, Human
ggagaggacacuggggaggg

SEQ ID NO: 683429 - RNA, 21 nt, Human
gggccagggugcucaggccuc

SEQ ID NO: 683430 - RNA, 18 nt, Human
ggggagggggagaaggcc

SEQ ID NO: 683431 - RNA, 22 nt, Human
uaggguaaacagacgaaaauca

SEQ ID NO: 683432 - RNA, 18 nt, Human
ugcaauggccugccugag

SEQ ID NO: 683433 - RNA, 23 nt, Human
ugcccuggugggugacaucagca

SEQ ID NO: 683434 - RNA, 20 nt, Human
ugccugugccugcccagcca

SEQ ID NO: 683435 - RNA, 22 nt, Human
uggaagcagcaaacaaggcugu

SEQ ID NO: 683436 - RNA, 18 nt, Human
uuuuuuuuuuuuggaggg

SEQ ID NO: 683437 - RNA, 19 nt, Human
uuuuuuuuuuuuuuggagg

SEQ ID NO: 683438 - RNA, 23 nt, Human
uuuuuuuuuuuuuuuuuggaggg

SEQ ID NO: 683439 - RNA, 28 nt, Human
aaagaaaauuaaaaaaaaaaaaaaaaaa

SEQ ID NO: 683440 - RNA, 26 nt, Human
aagaaggaaggaaguguguccucugg

SEQ ID NO: 683441 - RNA, 22 nt, Human
aaugacacugucacaugucccu

SEQ ID NO: 683442 - RNA, 20 nt, Human
acacugcagaacuguaaaac

SEQ ID NO: 683443 - RNA, 23 nt, Human
acuccucagacaccaaagaagga

SEQ ID NO: 683444 - RNA, 20 nt, Human
aggaaaaguauaauacagua

SEQ ID NO: 683445 - RNA, 21 nt, Human
aggaaguguguccucugguua

SEQ ID NO: 683446 - RNA, 21 nt, Human
aggcggccaaggucaccggcg

SEQ ID NO: 683447 - RNA, 19 nt, Human
aggucaccggcgagggggc

SEQ ID NO: 683448 - RNA, 22 nt, Human
aguuauguugggucuuaacuga

SEQ ID NO: 683449 - RNA, 19 nt, Human
auuacacugcagaacugua

SEQ ID NO: 683450 - RNA, 23 nt, Human
caaguuagagcgagccgcgugga

SEQ ID NO: 683451 - RNA, 19 nt, Human
cacacuccucagacaccaa

SEQ ID NO: 683452 - RNA, 21 nt, Human
caccaaagaaggaaggaagug

SEQ ID NO: 683453 - RNA, 19 nt, Human
caugcacguugcccguccu

SEQ ID NO: 683454 - RNA, 22 nt, Human
ccggcgagggggcuggaggggg

SEQ ID NO: 683455 - RNA, 21 nt, Human
ccucuugcagguaaguguggu

SEQ ID NO: 683456 - RNA, 19 nt, Human
cggccaaggucaccggcga

SEQ ID NO: 683457 - RNA, 20 nt, Human
cguggaaucagagcauccga

SEQ ID NO: 683458 - RNA, 19 nt, Human
cugugugugugauccuacu

SEQ ID NO: 683459 - RNA, 19 nt, Human
gaaggaaguguguccucug

SEQ ID NO: 683460 - RNA, 23 nt, Human
gauccuacucuucucacaaacac

SEQ ID NO: 683461 - RNA, 20 nt, Human
gggcuggagggggcgucuuu

SEQ ID NO: 683462 - RNA, 20 nt, Human
gguugaaaggcaaacaacag

SEQ ID NO: 683463 - RNA, 19 nt, Human
gugagccugcacaugcacg

SEQ ID NO: 683464 - RNA, 21 nt, Human
uaacugaccccaacaguucac

SEQ ID NO: 683465 - RNA, 22 nt, Human
uaauacaguaaaucaucuugua

SEQ ID NO: 683466 - RNA, 25 nt, Human
uaucaaaaaauuaaacacaaauucu

SEQ ID NO: 683467 - RNA, 24 nt, Human
ucagacaccaaagaaggaaggaag

SEQ ID NO: 683468 - RNA, 19 nt, Human
ucagaggccugggaguggu

SEQ ID NO: 683469 - RNA, 20 nt, Human
ugauagaguuauguuggguc

SEQ ID NO: 683470 - RNA, 26 nt, Human
ugggucuuaacugaccccaacaguuc

SEQ ID NO: 683471 - RNA, 21 nt, Human
uggugagccugcacaugcacg

SEQ ID NO: 683472 - RNA, 20 nt, Human
uuaaaaaaaaaaaaaaaaaa

SEQ ID NO: 683473 - RNA, 20 nt, Human
aacaacagagaaacgcaaga

SEQ ID NO: 683474 - RNA, 22 nt, Human
cagagaaacgcaagauguaaua

SEQ ID NO: 683475 - RNA, 22 nt, Human
gcucuuaaaagagccuuugggu

SEQ ID NO: 683476 - RNA, 22 nt, Human
caacgcuacugccagaccucaa

SEQ ID NO: 683477 - RNA, 20 nt, Human
cugccacagcugcugagcgc

SEQ ID NO: 683478 - RNA, 20 nt, Human
cuuuaauugcaaacaacuug

SEQ ID NO: 683479 - RNA, 22 nt, Human
ugccacagcugcugagcgccca

SEQ ID NO: 683480 - RNA, 18 nt, Human
ugcugagcgcccaacugc

SEQ ID NO: 683481 - RNA, 18 nt, Human
cagcagaagaacuaacaa

SEQ ID NO: 683482 - RNA, 23 nt, Human
cagcagaagaacuaacaauccac

SEQ ID NO: 683483 - RNA, 22 nt, Human
ccuuugguuucugggacucggg

SEQ ID NO: 683484 - RNA, 20 nt, Human
ggacucgggaucacugacgg

SEQ ID NO: 683485 - RNA, 21 nt, Human
ucguauguguauuccagcacu

SEQ ID NO: 683486 - RNA, 21 nt, Human
uggguggcucugaaaagagcc

SEQ ID NO: 683487 - RNA, 27 nt, Human
ccuuugguuccuuuggggggcuccggc

SEQ ID NO: 683488 - RNA, 26 nt, Human
ugaguugcugcaaacuaauccaggcu

SEQ ID NO: 683489 - RNA, 21 nt, Human
gaaguggcucugaaaagagcc

SEQ ID NO: 683490 - RNA, 22 nt, Human
ugaaguggcucugaaaagagcc

SEQ ID NO: 683491 - RNA, 22 nt, Human
agacugcuuccuuaaaaagcca

SEQ ID NO: 683492 - RNA, 23 nt, Human
ugaaaagagccuuuguuaagacu

SEQ ID NO: 683493 - RNA, 21 nt, Human
uggguggcucugaaaagagcc

SEQ ID NO: 683494 - RNA, 26 nt, Human
aaaaaaauaugaacauaaaagugcua

SEQ ID NO: 683495 - RNA, 18 nt, Human
aaaagcaagagguuuuug

SEQ ID NO: 683496 - RNA, 19 nt, Human
aaacccauacccccauuga

SEQ ID NO: 683497 - RNA, 24 nt, Human
aaacccauacccccauugaacaug

SEQ ID NO: 683498 - RNA, 21 nt, Human
aaagauaucugauauccaaag

SEQ ID NO: 683499 - RNA, 23 nt, Human
aaagucaaaccgauucucaaagu

SEQ ID NO: 683500 - RNA, 19 nt, Human
aaauacuggggacaaaaua

SEQ ID NO: 683501 - RNA, 19 nt, Human
aagaaccccuaaaagcaag

SEQ ID NO: 683502 - RNA, 23 nt, Human
aaugcaacucccaaagacauuac

SEQ ID NO: 683503 - RNA, 21 nt, Human
aauuugccuccuaacagaggu

SEQ ID NO: 683504 - RNA, 27 nt, Human
acaaaaccacagaguaaauagcagaac

SEQ ID NO: 683505 - RNA, 21 nt, Human
acauagaaauaaaaacagcua

SEQ ID NO: 683506 - RNA, 20 nt, Human
acccauacccccauugaaca

SEQ ID NO: 683507 - RNA, 20 nt, Human
acuccagagacggagacaaa

SEQ ID NO: 683508 - RNA, 25 nt, Human
aggaaccaauaaaaauaaagugagc

SEQ ID NO: 683509 - RNA, 18 nt, Human
agguaaacuauuaugccc

SEQ ID NO: 683510 - RNA, 23 nt, Human
aguaaauagcagaacaucucgaa

SEQ ID NO: 683511 - RNA, 18 nt, Human
augaaauaaauaggagug

SEQ ID NO: 683512 - RNA, 25 nt, Human
auuugccuccuaacagaggugugua

SEQ ID NO: 683513 - RNA, 22 nt, Human
caacaucacuuuaaaagcucaa

SEQ ID NO: 683514 - RNA, 20 nt, Human
caacucccaaagacauuacu

SEQ ID NO: 683515 - RNA, 18 nt, Human
caaguacuaacagaagcu

SEQ ID NO: 683516 - RNA, 21 nt, Human
caaguacuaacagaagcugau

SEQ ID NO: 683517 - RNA, 22 nt, Human
caauaaaaauaaagugagcucc

SEQ ID NO: 683518 - RNA, 23 nt, Human
caccucaaaaauggcaacauggg

SEQ ID NO: 683519 - RNA, 23 nt, Human
caggaaagaugaauccaaagaug

SEQ ID NO: 683520 - RNA, 18 nt, Human
cauugcuucaggcuagug

SEQ ID NO: 683521 - RNA, 24 nt, Human
ccacugaccccaagugguaacugu

SEQ ID NO: 683522 - RNA, 21 nt, Human
ccauauaugcauuuuguuccu

SEQ ID NO: 683523 - RNA, 19 nt, Human
cgagagaguggaaaucugg

SEQ ID NO: 683524 - RNA, 21 nt, Human
cgccuacaacuccagagacgg

SEQ ID NO: 683525 - RNA, 22 nt, Human
cgccuacaacuccagagacgga

SEQ ID NO: 683526 - RNA, 25 nt, Human
cgccuacaacuccagagacggagac

SEQ ID NO: 683527 - RNA, 21 nt, Human
cuaggaagaaucucaaguuga

SEQ ID NO: 683528 - RNA, 22 nt, Human
cucauucacagcucuacuccua

SEQ ID NO: 683529 - RNA, 21 nt, Human
cuccagagacggagacaaacc

SEQ ID NO: 683530 - RNA, 19 nt, Human
cucccaaagacauuacugg

SEQ ID NO: 683531 - RNA, 18 nt, Human
cuuuguacagagccuggc

SEQ ID NO: 683532 - RNA, 20 nt, Human
ggagugucaauuaagggcag

SEQ ID NO: 683533 - RNA, 20 nt, Human
guaaacuauuaugcccauuu

SEQ ID NO: 683534 - RNA, 20 nt, Human
uaaaaaaaaaauaugaacau

SEQ ID NO: 683535 - RNA, 19 nt, Human
uaaaugaacaaucucaauc

SEQ ID NO: 683536 - RNA, 26 nt, Human
uaacguauguauuuguuccuuguccc

SEQ ID NO: 683537 - RNA, 21 nt, Human
uaagagaguucaaacagguua

SEQ ID NO: 683538 - RNA, 21 nt, Human
uacaaguacuaacagaagcug

SEQ ID NO: 683539 - RNA, 24 nt, Human
uacauagaaauaaaaacagcuacu

SEQ ID NO: 683540 - RNA, 22 nt, Human
uacauugaauuguggauguccu

SEQ ID NO: 683541 - RNA, 20 nt, Human
uacuggaaugaggucauugc

SEQ ID NO: 683542 - RNA, 19 nt, Human
uagaaauaaaaacagcuac

SEQ ID NO: 683543 - RNA, 20 nt, Human
uagaaugcuguuuaccuguu

SEQ ID NO: 683544 - RNA, 22 nt, Human
uagacucaaaugucaaaaccau

SEQ ID NO: 683545 - RNA, 24 nt, Human
uauauacauauauuuuuggggaag

SEQ ID NO: 683546 - RNA, 19 nt, Human
ucaaaaauggcaacauggg

SEQ ID NO: 683547 - RNA, 21 nt, Human
ucaauucuccccaaacucuau

SEQ ID NO: 683548 - RNA, 22 nt, Human
ucacaaaagucgaaggauugcu

SEQ ID NO: 683549 - RNA, 20 nt, Human
ucacacacauuaauucacuc

SEQ ID NO: 683550 - RNA, 20 nt, Human
uccacacacagcagagaggu

SEQ ID NO: 683551 - RNA, 19 nt, Human
ucccaaagacauuacugga

SEQ ID NO: 683552 - RNA, 24 nt, Human
uccccaaacucuaugagguaaacu

SEQ ID NO: 683553 - RNA, 26 nt, Human
ucgccuacaacuccagagacggagac

SEQ ID NO: 683554 - RNA, 18 nt, Human
ugaaagcaaagucaaacc

SEQ ID NO: 683555 - RNA, 23 nt, Human
ugaaagcacagcagcuacuaggc

SEQ ID NO: 683556 - RNA, 22 nt, Human
uggaaugaggucauugcuucag

SEQ ID NO: 683557 - RNA, 19 nt, Human
ugggaaucuuaguguccuc

SEQ ID NO: 683558 - RNA, 24 nt, Human
uggguaagaaccccuaaaagcaag

SEQ ID NO: 683559 - RNA, 21 nt, Human
uuaauguuuaccuauaauuua

SEQ ID NO: 683560 - RNA, 22 nt, Human
uuaauucacucaauucucccca

SEQ ID NO: 683561 - RNA, 18 nt, Human
uucacucaauucucccca

SEQ ID NO: 683562 - RNA, 21 nt, Human
uuccuggucugaaauguguuu

SEQ ID NO: 683563 - RNA, 23 nt, Human
uugcugaggaugaaauaaauagg

SEQ ID NO: 683564 - RNA, 23 nt, Human
uugguccuaucuuuccuuacaug

SEQ ID NO: 683565 - RNA, 23 nt, Human
aaucaccaaaaccagcggccuaa

SEQ ID NO: 683566 - RNA, 23 nt, Human
agaaaacaaacaaaaucaagaaa

SEQ ID NO: 683567 - RNA, 21 nt, Human
caaaaaucaccaaaaccagcg

SEQ ID NO: 683568 - RNA, 19 nt, Human
caaaaccagcggccuaagc

SEQ ID NO: 683569 - RNA, 19 nt, Human
ccaaaaccagcggccuaag

SEQ ID NO: 683570 - RNA, 23 nt, Human
cgagaaaacaaacaaaaucaaga

SEQ ID NO: 683571 - RNA, 21 nt, Human
cucacgagaaaacaaacaaaa

SEQ ID NO: 683572 - RNA, 24 nt, Human
cucacgagaaaacaaacaaaauca

SEQ ID NO: 683573 - RNA, 19 nt, Human
gagaaaacaaacaaaauca

SEQ ID NO: 683574 - RNA, 20 nt, Human
gagaaaacaaacaaaaucaa

SEQ ID NO: 683575 - RNA, 22 nt, Human
gcucugaaaagagccuuugggu

SEQ ID NO: 683576 - RNA, 22 nt, Human
ucagacaaaaaucaccaaaacc

SEQ ID NO: 683577 - RNA, 21 nt, Human
aaaacagcagugcaugaagcg

SEQ ID NO: 683578 - RNA, 24 nt, Human
agaaaaacagcagugcaugaagcg

SEQ ID NO: 683579 - RNA, 22 nt, Human
ugacagaaaaacagcagugcau

SEQ ID NO: 683580 - RNA, 22 nt, Human
cugaaaagagccuuuugucuug

SEQ ID NO: 683581 - RNA, 20 nt, Human
cuuguaaguuuacauuuuua

SEQ ID NO: 683582 - RNA, 21 nt, Human
gaccuguggccuaagucagaa

SEQ ID NO: 683583 - RNA, 19 nt, Human
ugaaaagagccuuuugucu

SEQ ID NO: 683584 - RNA, 21 nt, Human
uggguggcucugaaaagagcc

SEQ ID NO: 683585 - RNA, 22 nt, Human
ugagcugccacaaacuaguaca

SEQ ID NO: 683586 - RNA, 21 nt, Human
uggguggcccugaaaagagcc

SEQ ID NO: 683587 - RNA, 21 nt, Human
aaaugaaaggggucccaccuc

SEQ ID NO: 683588 - RNA, 18 nt, Human
aacggggcuuccuggcuu

SEQ ID NO: 683589 - RNA, 22 nt, Human
aagaacauuagaguaaaaagaa

SEQ ID NO: 683590 - RNA, 22 nt, Human
aagacgcuguucuccccacugc

SEQ ID NO: 683591 - RNA, 26 nt, Human
aagcaccacaacacacgcuuacaaac

SEQ ID NO: 683592 - RNA, 18 nt, Human
aaggugucucggccugag

SEQ ID NO: 683593 - RNA, 23 nt, Human
aaugccaacuaucagugcuaaca

SEQ ID NO: 683594 - RNA, 18 nt, Human
agacaaaaaguaaccaaa

SEQ ID NO: 683595 - RNA, 30 nt, Human
agacaaaaaguaaccaaaaauuaggucugg

SEQ ID NO: 683596 - RNA, 24 nt, Human
agcaaaaguucacuuucggaccca

SEQ ID NO: 683597 - RNA, 25 nt, Human
agcggcggcucgguggcggcggcgg

SEQ ID NO: 683598 - RNA, 22 nt, Human
aggggauuuuuuuuuucuuuua

SEQ ID NO: 683599 - RNA, 23 nt, Human
agugagcacagcggcggcucggu

SEQ ID NO: 683600 - RNA, 19 nt, Human
auaaaacuauaaaaucucc

SEQ ID NO: 683601 - RNA, 23 nt, Human
auaaaacuauaaaaucuccuagg

SEQ ID NO: 683602 - RNA, 20 nt, Human
auaagacaaaaaguaaccaa

SEQ ID NO: 683603 - RNA, 22 nt, Human
auaagacaaaaaguaaccaaaa

SEQ ID NO: 683604 - RNA, 19 nt, Human
augagcaaaacugaaaaug

SEQ ID NO: 683605 - RNA, 22 nt, Human
caaauauaauuaaggacaacag

SEQ ID NO: 683606 - RNA, 23 nt, Human
caccgguuccccugggguccuuc

SEQ ID NO: 683607 - RNA, 27 nt, Human
cagugcuaacauaaaaacauuuuagaa

SEQ ID NO: 683608 - RNA, 27 nt, Human
caguuaauccuccucaccccgaagucu

SEQ ID NO: 683609 - RNA, 24 nt, Human
caucaauaagacaaaaaguaacca

SEQ ID NO: 683610 - RNA, 18 nt, Human
ccaaaagaacauuagagu

SEQ ID NO: 683611 - RNA, 18 nt, Human
cccaguaggagugaaggg

SEQ ID NO: 683612 - RNA, 21 nt, Human
ccccgaagucuggaaccugcc

SEQ ID NO: 683613 - RNA, 22 nt, Human
ccuagaugagcaaaacugaaaa

SEQ ID NO: 683614 - RNA, 23 nt, Human
ccucaccccgaagucuggaaccu

SEQ ID NO: 683615 - RNA, 21 nt, Human
ccucuucgcuucccgcccgcg

SEQ ID NO: 683616 - RNA, 24 nt, Human
ccuggccgcucgcgccuuuucucu

SEQ ID NO: 683617 - RNA, 22 nt, Human
cggcucgguggcggcggcggca

SEQ ID NO: 683618 - RNA, 19 nt, Human
cgguggcggcggcggcagc

SEQ ID NO: 683619 - RNA, 22 nt, Human
cuccccacugcugugcgucaau

SEQ ID NO: 683620 - RNA, 22 nt, Human
cucgguggcggcggcggcagcu

SEQ ID NO: 683621 - RNA, 24 nt, Human
cuugcacauggaagcgguuagcua

SEQ ID NO: 683622 - RNA, 22 nt, Human
gagcacaccgguuccccugggg

SEQ ID NO: 683623 - RNA, 23 nt, Human
gagcacagcggcggcucgguggc

SEQ ID NO: 683624 - RNA, 20 nt, Human
gccugagcccuccuggccgc

SEQ ID NO: 683625 - RNA, 26 nt, Human
gcggcggcucgguggcggcggcggca

SEQ ID NO: 683626 - RNA, 27 nt, Human
gcggcggcucgguggcggcggcggcaa

SEQ ID NO: 683627 - RNA, 18 nt, Human
gcggcucgguggcggcgg

SEQ ID NO: 683628 - RNA, 20 nt, Human
ggcccuggaggcggaucagu

SEQ ID NO: 683629 - RNA, 20 nt, Human
ggcccuggaggcggaucagu

SEQ ID NO: 683630 - RNA, 22 nt, Human
guaaaaagaacgccacuggagg

SEQ ID NO: 683631 - RNA, 20 nt, Human
guggcggcggcggcagcugc

SEQ ID NO: 683632 - RNA, 21 nt, Human
guggcggcggcggcagcugca

SEQ ID NO: 683633 - RNA, 21 nt, Human
uaaaaagaacgccacuggagg

SEQ ID NO: 683634 - RNA, 22 nt, Human
uaaaacuauaaaaucuccuagg

SEQ ID NO: 683635 - RNA, 22 nt, Human
uaaaagacgcuguucuccccac

SEQ ID NO: 683636 - RNA, 25 nt, Human
uaaaagacgcuguucuccccacugc

SEQ ID NO: 683637 - RNA, 20 nt, Human
uaaaaucuccuagguuacac

SEQ ID NO: 683638 - RNA, 18 nt, Human
uaaacuggaaaccaaagc

SEQ ID NO: 683639 - RNA, 23 nt, Human
uaaacuggaaaccaaagccuuaa

SEQ ID NO: 683640 - RNA, 21 nt, Human
uaacaacaguaaugccaacua

SEQ ID NO: 683641 - RNA, 23 nt, Human
uaagucagacacggucuggaaca

SEQ ID NO: 683642 - RNA, 22 nt, Human
uagaaggucaaaaacaauuaaa

SEQ ID NO: 683643 - RNA, 18 nt, Human
uagaguaaaaagaacgcc

SEQ ID NO: 683644 - RNA, 22 nt, Human
uagaugagcaaaacugaaaaug

SEQ ID NO: 683645 - RNA, 23 nt, Human
ucaaauccaucaauaagacaaaa

SEQ ID NO: 683646 - RNA, 23 nt, Human
ucacacaaauuccaaauugcaaa

SEQ ID NO: 683647 - RNA, 22 nt, Human
ucagacacggucuggaacacag

SEQ ID NO: 683648 - RNA, 19 nt, Human
ucaguuaauccuccucacc

SEQ ID NO: 683649 - RNA, 23 nt, Human
ucccaguaggagugaaggggauu

SEQ ID NO: 683650 - RNA, 18 nt, Human
uccccugggguccuucag

SEQ ID NO: 683651 - RNA, 23 nt, Human
ucggccugagcccuccuggccgc

SEQ ID NO: 683652 - RNA, 25 nt, Human
ucuccuagguuacacuaagucagac

SEQ ID NO: 683653 - RNA, 21 nt, Human
ugaaaaugaaaggggucccac

SEQ ID NO: 683654 - RNA, 23 nt, Human
ugaaaaugaaaggggucccaccu

SEQ ID NO: 683655 - RNA, 18 nt, Human
ugagcaaaacugaaaaug

SEQ ID NO: 683656 - RNA, 24 nt, Human
ugagcaaaacugaaaaugaaaggg

SEQ ID NO: 683657 - RNA, 24 nt, Human
ugcuuugccuuauuaaaucuuuca

SEQ ID NO: 683658 - RNA, 23 nt, Human
uggcggcggcggcagcugcaagg

SEQ ID NO: 683659 - RNA, 21 nt, Human
ugggguccuucaguuaauccu

SEQ ID NO: 683660 - RNA, 22 nt, Human
uuaacaacaguaaugccaacua

SEQ ID NO: 683661 - RNA, 20 nt, Human
uucaguuaauccuccucacc

SEQ ID NO: 683662 - RNA, 24 nt, Human
uucuccccacugcugugcgucaau

SEQ ID NO: 683663 - RNA, 19 nt, Human
uuuuuuuuuuuuuuaacgg

SEQ ID NO: 683664 - RNA, 22 nt, Human
uuuuuuuuuuuuuuuuuaacgg

SEQ ID NO: 683665 - RNA, 23 nt, Human
aaaaaaaagccugaaucaaaacc

SEQ ID NO: 683666 - RNA, 24 nt, Human
aaaaaaguucuuuuaacaacagga

SEQ ID NO: 683667 - RNA, 19 nt, Human
aaaaagccugaaucaaaac

SEQ ID NO: 683668 - RNA, 18 nt, Human
aaaagcaaaaccccacuc

SEQ ID NO: 683669 - RNA, 23 nt, Human
aaaaugaaaccaaaaaaaagccu

SEQ ID NO: 683670 - RNA, 21 nt, Human
aaagaaaccccucgcggagac

SEQ ID NO: 683671 - RNA, 20 nt, Human
aaagagaaaagcaccaguga

SEQ ID NO: 683672 - RNA, 21 nt, Human
aaagagaaaagcaccagugag

SEQ ID NO: 683673 - RNA, 25 nt, Human
aaaugaaaccaaaaaaaagccugaa

SEQ ID NO: 683674 - RNA, 26 nt, Human
aacaaaaugaaaccaaaaaaaagccu

SEQ ID NO: 683675 - RNA, 18 nt, Human
aacaggaggaaaacacau

SEQ ID NO: 683676 - RNA, 18 nt, Human
acaaaagagaaaagcacc

SEQ ID NO: 683677 - RNA, 24 nt, Human
accaaaaaaaagccugaaucaaaa

SEQ ID NO: 683678 - RNA, 23 nt, Human
acggaacacgcacaccaacagag

SEQ ID NO: 683679 - RNA, 19 nt, Human
agagaaaagcaccagugag

SEQ ID NO: 683680 - RNA, 23 nt, Human
agauauuauagggaugggggcgg

SEQ ID NO: 683681 - RNA, 20 nt, Human
aggagagugugaagggcaga

SEQ ID NO: 683682 - RNA, 23 nt, Human
aggaggaaaacacauggaaagaa

SEQ ID NO: 683683 - RNA, 18 nt, Human
agggaugggggcgggggg

SEQ ID NO: 683684 - RNA, 18 nt, Human
agggaugggggcgggggg

SEQ ID NO: 683685 - RNA, 23 nt, Human
agucaaugcuauaaaucuaaaac

SEQ ID NO: 683686 - RNA, 22 nt, Human
caaaaaaaagccugaaucaaaa

SEQ ID NO: 683687 - RNA, 23 nt, Human
caaaaaaaagccugaaucaaaac

SEQ ID NO: 683688 - RNA, 23 nt, Human
caaaaugaaaccaaaaaaaagcc

SEQ ID NO: 683689 - RNA, 19 nt, Human
caacaggaggaaaacacau

SEQ ID NO: 683690 - RNA, 21 nt, Human
caacaggaggaaaacacaugg

SEQ ID NO: 683691 - RNA, 21 nt, Human
cacaccaacagagcccaggcc

SEQ ID NO: 683692 - RNA, 20 nt, Human
cacccuccacuccccugcca

SEQ ID NO: 683693 - RNA, 18 nt, Human
cacgcacaccaacagagc

SEQ ID NO: 683694 - RNA, 26 nt, Human
cacgcacaccaacagagcccaggcca

SEQ ID NO: 683695 - RNA, 22 nt, Human
cacuaaaacaaaagagaaaagc

SEQ ID NO: 683696 - RNA, 24 nt, Human
cagagcccaggccacuuuuugccc

SEQ ID NO: 683697 - RNA, 27 nt, Human
caucaccccuccucucuccuuuuaaaa

SEQ ID NO: 683698 - RNA, 20 nt, Human
cccacgcggcgccggugccg

SEQ ID NO: 683699 - RNA, 20 nt, Human
cccggcacuaacacaaugcu

SEQ ID NO: 683700 - RNA, 27 nt, Human
cccuccucucuccuuuuaaaaagcaaa

SEQ ID NO: 683701 - RNA, 26 nt, Human
ccgcaggaauuuuuuuuuuuuuuuuu

SEQ ID NO: 683702 - RNA, 26 nt, Human
ccuccucucuccuuuuaaaaagcaaa

SEQ ID NO: 683703 - RNA, 24 nt, Human
ccucucuccuuuuaaaaagcaaaa

SEQ ID NO: 683704 - RNA, 19 nt, Human
ccugcccggccacccucca

SEQ ID NO: 683705 - RNA, 25 nt, Human
cggcacuaacacaaugcuggugcug

SEQ ID NO: 683706 - RNA, 18 nt, Human
cggccacccuccacuccc

SEQ ID NO: 683707 - RNA, 31 nt, Human
cggccacccuccacuccccugccaucacccc

SEQ ID NO: 683708 - RNA, 21 nt, Human
cuaaaacaaaagagaaaagca

SEQ ID NO: 683709 - RNA, 22 nt, Human
cucccggcacuaacacaaugcu

SEQ ID NO: 683710 - RNA, 18 nt, Human
cucucagcuugcugacac

SEQ ID NO: 683711 - RNA, 28 nt, Human
gaaaacacauggaaagaaaccgguaccc

SEQ ID NO: 683712 - RNA, 22 nt, Human
gaacacgcacaccaacagagcc

SEQ ID NO: 683713 - RNA, 21 nt, Human
gagagugugaagggcagaggg

SEQ ID NO: 683714 - RNA, 23 nt, Human
gcccggugcccucugcgcgcccc

SEQ ID NO: 683715 - RNA, 22 nt, Human
gccgccugcucccggcgcccgg

SEQ ID NO: 683716 - RNA, 18 nt, Human
gcggccucgugccaagcu

SEQ ID NO: 683717 - RNA, 19 nt, Human
ggaaagaaaccccucgcgg

SEQ ID NO: 683718 - RNA, 19 nt, Human
gggaugggggcggggggca

SEQ ID NO: 683719 - RNA, 20 nt, Human
gggcaggacucuuugccuuu

SEQ ID NO: 683720 - RNA, 18 nt, Human
ggugcugcgccgccugcu

SEQ ID NO: 683721 - RNA, 24 nt, Human
uaaaaaaacaaaaugaaaccaaaa

SEQ ID NO: 683722 - RNA, 23 nt, Human
uaaaaagcaaaaccccacucuug

SEQ ID NO: 683723 - RNA, 22 nt, Human
uaaaacaaaagagaaaagcacc

SEQ ID NO: 683724 - RNA, 25 nt, Human
ucaccccuccucucuccuuuuaaaa

SEQ ID NO: 683725 - RNA, 23 nt, Human
uccacgggcgcagguuuggccca

SEQ ID NO: 683726 - RNA, 21 nt, Human
uccuuucauuuucuuuuucuu

SEQ ID NO: 683727 - RNA, 22 nt, Human
uggaaagaaaccccucgcggag

SEQ ID NO: 683728 - RNA, 23 nt, Human
uggaaagaaaccccucgcggaga

SEQ ID NO: 683729 - RNA, 24 nt, Human
uggugcugcgccgccugcucccgg

SEQ ID NO: 683730 - RNA, 23 nt, Human
uguguaaaagucaaugcuauaaa

SEQ ID NO: 683731 - RNA, 21 nt, Human
ugugugaauguguguaaaagu

SEQ ID NO: 683732 - RNA, 19 nt, Human
uuaaaaagcaaaaccccac

SEQ ID NO: 683733 - RNA, 19 nt, Human
uugcuucaguuucccucuc

SEQ ID NO: 683734 - RNA, 22 nt, Human
uuuuuuuuuuuuuuuuuccuuu

SEQ ID NO: 683735 - RNA, 23 nt, Human
uuuuuuuuuuuuuuuuuuccuuu

SEQ ID NO: 683736 - RNA, 23 nt, Human
aaauagaauuacaaaaaggcaaa

SEQ ID NO: 683737 - RNA, 23 nt, Human
aagcaaggcagagaaaaggcuaa

SEQ ID NO: 683738 - RNA, 20 nt, Human
acuuauccaccagaguggaa

SEQ ID NO: 683739 - RNA, 21 nt, Human
auacaguccacuggaaucacc

SEQ ID NO: 683740 - RNA, 19 nt, Human
caaggcagagaaaaggcua

SEQ ID NO: 683741 - RNA, 19 nt, Human
caccagaguggaaauaaug

SEQ ID NO: 683742 - RNA, 24 nt, Human
cacuggaaucaccaacacuggaca

SEQ ID NO: 683743 - RNA, 21 nt, Human
gcagagaaaaggcuaaucgga

SEQ ID NO: 683744 - RNA, 18 nt, Human
uacuauaacuucugcauc

SEQ ID NO: 683745 - RNA, 21 nt, Human
uccaccagaguggaaauaaug

SEQ ID NO: 683746 - RNA, 21 nt, Human
ugagaucccaccaccuacucc

SEQ ID NO: 683747 - RNA, 20 nt, Human
uggaaucaccaacacuggac

SEQ ID NO: 683748 - RNA, 23 nt, Human
uguacaaaaccaaauguuuguua

SEQ ID NO: 683749 - RNA, 28 nt, Human
uuaaaaacagucaacucaaucaaaaccc

SEQ ID NO: 683750 - RNA, 22 nt, Human
aaaaaaaaaaaaaaaagcuaag

SEQ ID NO: 683751 - RNA, 23 nt, Human
aaaaauacauaucuuuggcaggc

SEQ ID NO: 683752 - RNA, 20 nt, Human
aaaaggucaaacauaaauag

SEQ ID NO: 683753 - RNA, 18 nt, Human
aaaauuagcugggcaugg

SEQ ID NO: 683754 - RNA, 18 nt, Human
aaacacacgggagaaacc

SEQ ID NO: 683755 - RNA, 18 nt, Human
aaaugucaaaggucuacu

SEQ ID NO: 683756 - RNA, 20 nt, Human
aacauggugaaaccccacgu

SEQ ID NO: 683757 - RNA, 21 nt, Human
aacauggugaaaccccacguc

SEQ ID NO: 683758 - RNA, 21 nt, Human
aacauggugaaaccccacguc

SEQ ID NO: 683759 - RNA, 22 nt, Human
aacauggugaaaccccacgucu

SEQ ID NO: 683760 - RNA, 22 nt, Human
aaccuagccaaucaacacacaa

SEQ ID NO: 683761 - RNA, 20 nt, Human
aagaaucugagccaaacugg

SEQ ID NO: 683762 - RNA, 18 nt, Human
aagacagaggcuuaaagc

SEQ ID NO: 683763 - RNA, 23 nt, Human
aagaugaauagagcuaauuguca

SEQ ID NO: 683764 - RNA, 22 nt, Human
aagcuuuugugaaacuaugccc

SEQ ID NO: 683765 - RNA, 21 nt, Human
aagguacuuuuaucaaacuuc

SEQ ID NO: 683766 - RNA, 19 nt, Human
aaggucccaaagaacagga

SEQ ID NO: 683767 - RNA, 20 nt, Human
aaggugcucucuuccaagcu

SEQ ID NO: 683768 - RNA, 24 nt, Human
aauuuuuuaaaauuuuaaaagguu

SEQ ID NO: 683769 - RNA, 23 nt, Human
acaaaacccgaaaaaugaacacu

SEQ ID NO: 683770 - RNA, 19 nt, Human
acaaacagggccauggugc

SEQ ID NO: 683771 - RNA, 21 nt, Human
acagcacccaaggcaaaaugc

SEQ ID NO: 683772 - RNA, 22 nt, Human
acagccagggacuggccaacaa

SEQ ID NO: 683773 - RNA, 20 nt, Human
acaugguauuccugacucua

SEQ ID NO: 683774 - RNA, 20 nt, Human
accaacacugcagcaacaca

SEQ ID NO: 683775 - RNA, 19 nt, Human
acccagguagauaggacuc

SEQ ID NO: 683776 - RNA, 21 nt, Human
acucccagguucucacucuuu

SEQ ID NO: 683777 - RNA, 24 nt, Human
acugaaaaacaaacagggccaugg

SEQ ID NO: 683778 - RNA, 22 nt, Human
agacgggcggaucgccugaggu

SEQ ID NO: 683779 - RNA, 26 nt, Human
agacgggcggaucgccugaggucagg

SEQ ID NO: 683780 - RNA, 21 nt, Human
agcaauagcaccuugggccuu

SEQ ID NO: 683781 - RNA, 18 nt, Human
agcaccaggaacugugcu

SEQ ID NO: 683782 - RNA, 24 nt, Human
agcacuuuggaaggcuuagacggg

SEQ ID NO: 683783 - RNA, 21 nt, Human
agcucacuggaaggauucacu

SEQ ID NO: 683784 - RNA, 23 nt, Human
agcugggcaugguggcgugcgcc

SEQ ID NO: 683785 - RNA, 18 nt, Human
aggagggccuguuuugua

SEQ ID NO: 683786 - RNA, 20 nt, Human
aggaguuugagaccagucug

SEQ ID NO: 683787 - RNA, 24 nt, Human
aggcaggagaaucgcuggaacccg

SEQ ID NO: 683788 - RNA, 22 nt, Human
aggcaucagguaaggccaagcu

SEQ ID NO: 683789 - RNA, 20 nt, Human
aggcugaggcaggagaaucg

SEQ ID NO: 683790 - RNA, 23 nt, Human
aggcugaggcaggagaaucgcug

SEQ ID NO: 683791 - RNA, 18 nt, Human
agggaggguugcagugag

SEQ ID NO: 683792 - RNA, 23 nt, Human
agggaggguugcagugagccaag

SEQ ID NO: 683793 - RNA, 19 nt, Human
aggguugcagugagccaag

SEQ ID NO: 683794 - RNA, 25 nt, Human
aguagaaucuuguuccacuaaauca

SEQ ID NO: 683795 - RNA, 22 nt, Human
agucuggccaacauggugaaac

SEQ ID NO: 683796 - RNA, 24 nt, Human
agucuggccaacauggugaaaccc

SEQ ID NO: 683797 - RNA, 20 nt, Human
aucaacaggaaacagggcca

SEQ ID NO: 683798 - RNA, 20 nt, Human
aucacccccuccuggaaccu

SEQ ID NO: 683799 - RNA, 20 nt, Human
aucagguaaggccaagcuuc

SEQ ID NO: 683800 - RNA, 25 nt, Human
aucgcacuccagucugggugacaag

SEQ ID NO: 683801 - RNA, 24 nt, Human
aucgugccaucgcacuccagucug

SEQ ID NO: 683802 - RNA, 19 nt, Human
augaacacuaacuauaacc

SEQ ID NO: 683803 - RNA, 18 nt, Human
augcaggaauaaaggacu

SEQ ID NO: 683804 - RNA, 19 nt, Human
auggccccucuaucuucaa

SEQ ID NO: 683805 - RNA, 20 nt, Human
auugucaggcacuccuauuu

SEQ ID NO: 683806 - RNA, 23 nt, Human
caaaauucugccuaucacccccu

SEQ ID NO: 683807 - RNA, 18 nt, Human
caaagaucugaacccagg

SEQ ID NO: 683808 - RNA, 21 nt, Human
caaagcccaacucuccacugc

SEQ ID NO: 683809 - RNA, 24 nt, Human
caacauggugaaaccccacgucua

SEQ ID NO: 683810 - RNA, 19 nt, Human
caagcucacuggaaggauu

SEQ ID NO: 683811 - RNA, 21 nt, Human
caaggcaaaaugcugucuccc

SEQ ID NO: 683812 - RNA, 20 nt, Human
cacaacugucaccacaugaa

SEQ ID NO: 683813 - RNA, 18 nt, Human
cacacaucccaguagaau

SEQ ID NO: 683814 - RNA, 28 nt, Human
cacauaauguaacacauucauaggcaua

SEQ ID NO: 683815 - RNA, 19 nt, Human
caccauaucaacaggaaac

SEQ ID NO: 683816 - RNA, 22 nt, Human
caccauaucaacaggaaacagg

SEQ ID NO: 683817 - RNA, 24 nt, Human
caccauaucaacaggaaacagggc

SEQ ID NO: 683818 - RNA, 23 nt, Human
cacgucuacuaaaaauacaaaaa

SEQ ID NO: 683819 - RNA, 18 nt, Human
cacuccagucugggugac

SEQ ID NO: 683820 - RNA, 20 nt, Human
cacuccagucugggugacaa

SEQ ID NO: 683821 - RNA, 21 nt, Human
cacuccagucugggugacaag

SEQ ID NO: 683822 - RNA, 18 nt, Human
cacuuuggaaggcuuaga

SEQ ID NO: 683823 - RNA, 22 nt, Human
cagcacccaaggcaaaaugcug

SEQ ID NO: 683824 - RNA, 22 nt, Human
cagcaccgaccgccgccgccgg

SEQ ID NO: 683825 - RNA, 20 nt, Human
cagcacuuuggaaggcuuag

SEQ ID NO: 683826 - RNA, 24 nt, Human
cagcacuuuggaaggcuuagacgg

SEQ ID NO: 683827 - RNA, 24 nt, Human
cagcuacuugggaggcugaggcag

SEQ ID NO: 683828 - RNA, 26 nt, Human
caggaaacagggccaugccaccaggg

SEQ ID NO: 683829 - RNA, 18 nt, Human
caggaaacaugcaggaau

SEQ ID NO: 683830 - RNA, 23 nt, Human
cagggccaugccaccagggagga

SEQ ID NO: 683831 - RNA, 20 nt, Human
cauaggcauaacacugggca

SEQ ID NO: 683832 - RNA, 19 nt, Human
caucgcacuccagucuggg

SEQ ID NO: 683833 - RNA, 23 nt, Human
caucgcacuccagucugggugac

SEQ ID NO: 683834 - RNA, 24 nt, Human
caucgcacuccagucugggugaca

SEQ ID NO: 683835 - RNA, 25 nt, Human
caucgcacuccagucugggugacaa

SEQ ID NO: 683836 - RNA, 19 nt, Human
caugcaggaauaaaggacu

SEQ ID NO: 683837 - RNA, 24 nt, Human
cauucagaaaauuacucaugcaag

SEQ ID NO: 683838 - RNA, 23 nt, Human
ccaacacugcagcaacacaguuu

SEQ ID NO: 683839 - RNA, 18 nt, Human
ccaagcaguuauagcagc

SEQ ID NO: 683840 - RNA, 20 nt, Human
ccaagcuucucaucugugcc

SEQ ID NO: 683841 - RNA, 26 nt, Human
ccacugcucucuacuugucggugggc

SEQ ID NO: 683842 - RNA, 22 nt, Human
ccagggacuggccaacaaagau

SEQ ID NO: 683843 - RNA, 20 nt, Human
ccaucgcacuccagucuggg

SEQ ID NO: 683844 - RNA, 21 nt, Human
ccaucgcacuccagucugggu

SEQ ID NO: 683845 - RNA, 21 nt, Human
ccaucgcacuccagucugggu

SEQ ID NO: 683846 - RNA, 23 nt, Human
ccaucgcacuccagucuggguga

SEQ ID NO: 683847 - RNA, 24 nt, Human
ccaucgcacuccagucugggugac

SEQ ID NO: 683848 - RNA, 19 nt, Human
cccgccucgcgcugcugug

SEQ ID NO: 683849 - RNA, 21 nt, Human
cccgcgccgccgccgccgcuc

SEQ ID NO: 683850 - RNA, 19 nt, Human
cccuccuggaaccucucuu

SEQ ID NO: 683851 - RNA, 22 nt, Human
ccgccgccgcucucgcagcacc

SEQ ID NO: 683852 - RNA, 24 nt, Human
ccgccuccgcucggccgcgcgccc

SEQ ID NO: 683853 - RNA, 18 nt, Human
ccgcgccgccgccgccgc

SEQ ID NO: 683854 - RNA, 19 nt, Human
ccgcgccgccgccgccgcu

SEQ ID NO: 683855 - RNA, 21 nt, Human
ccgcgccgccgccgccgcucu

SEQ ID NO: 683856 - RNA, 21 nt, Human
ccgcgccgccgccgccgcucu

SEQ ID NO: 683857 - RNA, 25 nt, Human
ccgcugccgacccgcgccgccgccg

SEQ ID NO: 683858 - RNA, 20 nt, Human
ccgugcccgccucgcgcugc

SEQ ID NO: 683859 - RNA, 18 nt, Human
ccucccgcugccgacccg

SEQ ID NO: 683860 - RNA, 22 nt, Human
ccucccgcugccgacccgcgcc

SEQ ID NO: 683861 - RNA, 21 nt, Human
ccucgcgcugcuguggccaau

SEQ ID NO: 683862 - RNA, 22 nt, Human
ccugaggucaggaguuugagac

SEQ ID NO: 683863 - RNA, 24 nt, Human
ccugccaguaaucccagcacuuug

SEQ ID NO: 683864 - RNA, 18 nt, Human
ccuguaaucccagcuacu

SEQ ID NO: 683865 - RNA, 21 nt, Human
ccuguaaucccagcuacuugg

SEQ ID NO: 683866 - RNA, 23 nt, Human
cgcacuccagucugggugacaag

SEQ ID NO: 683867 - RNA, 23 nt, Human
cgccugaggucaggaguuugaga

SEQ ID NO: 683868 - RNA, 21 nt, Human
cgccuguaaucccagcuacuu

SEQ ID NO: 683869 - RNA, 24 nt, Human
cgccuguaaucccagcuacuuggg

SEQ ID NO: 683870 - RNA, 24 nt, Human
cggaucgccugaggucaggaguuu

SEQ ID NO: 683871 - RNA, 19 nt, Human
cgggagggaggguugcagu

SEQ ID NO: 683872 - RNA, 23 nt, Human
cgggagggaggguugcagugagc

SEQ ID NO: 683873 - RNA, 24 nt, Human
cgggcggaucgccugaggucagga

SEQ ID NO: 683874 - RNA, 21 nt, Human
cuaaagccaacaaauuaccac

SEQ ID NO: 683875 - RNA, 20 nt, Human
cuagccaaucaacacacaag

SEQ ID NO: 683876 - RNA, 19 nt, Human
cucagggauaacaauacau

SEQ ID NO: 683877 - RNA, 20 nt, Human
cugagaagcaaauguccuug

SEQ ID NO: 683878 - RNA, 23 nt, Human
cuggccaacauggugaaacccca

SEQ ID NO: 683879 - RNA, 22 nt, Human
cugggugacaagaaugagacuc

SEQ ID NO: 683880 - RNA, 20 nt, Human
cuguccucugccaagugucc

SEQ ID NO: 683881 - RNA, 24 nt, Human
cugugccucaaggugcucucuucc

SEQ ID NO: 683882 - RNA, 18 nt, Human
cuucuaagugacuggucu

SEQ ID NO: 683883 - RNA, 23 nt, Human
cuugaaagaauuacaaagcccaa

SEQ ID NO: 683884 - RNA, 24 nt, Human
cuuuuaucaugucuacaguaauug

SEQ ID NO: 683885 - RNA, 23 nt, Human
gaaaggccuauuuuuacugggga

SEQ ID NO: 683886 - RNA, 18 nt, Human
gagaagcaaauguccuug

SEQ ID NO: 683887 - RNA, 23 nt, Human
gagaaucgcuggaacccgggagg

SEQ ID NO: 683888 - RNA, 24 nt, Human
gaggguugcagugagccaagaucg

SEQ ID NO: 683889 - RNA, 24 nt, Human
gaucgccugaggucaggaguuuga

SEQ ID NO: 683890 - RNA, 18 nt, Human
gccaacauggugaaaccc

SEQ ID NO: 683891 - RNA, 19 nt, Human
gccaucgcacuccagucug

SEQ ID NO: 683892 - RNA, 23 nt, Human
gccgacccgcgccgccgccgccg

SEQ ID NO: 683893 - RNA, 19 nt, Human
gccgccgccgccgcucucg

SEQ ID NO: 683894 - RNA, 25 nt, Human
gccuaucacccccuccuggaaccuc

SEQ ID NO: 683895 - RNA, 24 nt, Human
gccugaggucaggaguuugagacc

SEQ ID NO: 683896 - RNA, 23 nt, Human
gccuguaaucccagcuacuuggg

SEQ ID NO: 683897 - RNA, 21 nt, Human
ggagaaucgcuggaacccggg

SEQ ID NO: 683898 - RNA, 22 nt, Human
ggaucgccugaggucaggaguu

SEQ ID NO: 683899 - RNA, 23 nt, Human
ggcaugguggcgugcgccuguaa

SEQ ID NO: 683900 - RNA, 20 nt, Human
ggccauggugcuuucaggug

SEQ ID NO: 683901 - RNA, 21 nt, Human
ggcgugcgccuguaaucccag

SEQ ID NO: 683902 - RNA, 19 nt, Human
ggucaggaguuugagacca

SEQ ID NO: 683903 - RNA, 24 nt, Human
gguggcgugcgccuguaaucccag

SEQ ID NO: 683904 - RNA, 21 nt, Human
gguuccugccaguaaucccag

SEQ ID NO: 683905 - RNA, 23 nt, Human
gugguuccugccaguaaucccag

SEQ ID NO: 683906 - RNA, 24 nt, Human
gugguuccugccaguaaucccagc

SEQ ID NO: 683907 - RNA, 20 nt, Human
uaaaaauuccacauaucccc

SEQ ID NO: 683908 - RNA, 19 nt, Human
uaaaacacacgggagaaac

SEQ ID NO: 683909 - RNA, 21 nt, Human
uaaagccaacaaauuaccaca

SEQ ID NO: 683910 - RNA, 23 nt, Human
uaaagccaacaaauuaccacaaa

SEQ ID NO: 683911 - RNA, 19 nt, Human
uaaggccaagcuucucauc

SEQ ID NO: 683912 - RNA, 21 nt, Human
uacaaugacggggaggaagag

SEQ ID NO: 683913 - RNA, 20 nt, Human
uacagaguuuacaaauaagc

SEQ ID NO: 683914 - RNA, 18 nt, Human
uagcuccuaaaggucccu

SEQ ID NO: 683915 - RNA, 21 nt, Human
uaggaaugggaugaucuucaa

SEQ ID NO: 683916 - RNA, 19 nt, Human
uagggugcuuacagcuagg

SEQ ID NO: 683917 - RNA, 21 nt, Human
uauaaaacacacgggagaaac

SEQ ID NO: 683918 - RNA, 21 nt, Human
uaugaaacaaaacccgaaaaa

SEQ ID NO: 683919 - RNA, 24 nt, Human
uaugaaacaaaacccgaaaaauga

SEQ ID NO: 683920 - RNA, 22 nt, Human
ucaaagcugcucugaagcagau

SEQ ID NO: 683921 - RNA, 23 nt, Human
ucaaaggucuacuucucaacauu

SEQ ID NO: 683922 - RNA, 18 nt, Human
ucaccaggcuaaaaucaa

SEQ ID NO: 683923 - RNA, 20 nt, Human
ucacucaaaauauaaauuaa

SEQ ID NO: 683924 - RNA, 18 nt, Human
ucagcucagcacacaucc

SEQ ID NO: 683925 - RNA, 19 nt, Human
ucagggauaacaauacaua

SEQ ID NO: 683926 - RNA, 18 nt, Human
ucagguuaccccacucag

SEQ ID NO: 683927 - RNA, 21 nt, Human
ucauggggcccuuguaucacu

SEQ ID NO: 683928 - RNA, 23 nt, Human
ucauguauccauuucaaaggccu

SEQ ID NO: 683929 - RNA, 24 nt, Human
uccaaaaggucaaacauaaauaga

SEQ ID NO: 683930 - RNA, 22 nt, Human
ucccaaagaacaggaaacaugc

SEQ ID NO: 683931 - RNA, 18 nt, Human
ucccaguuuuuauguucu

SEQ ID NO: 683932 - RNA, 19 nt, Human
ucccugaagaaucugagcc

SEQ ID NO: 683933 - RNA, 23 nt, Human
uccugccaguaaucccagcacuu

SEQ ID NO: 683934 - RNA, 24 nt, Human
ucgcagcaccgaccgccgccgccg

SEQ ID NO: 683935 - RNA, 19 nt, Human
ucgccugaggucaggaguu

SEQ ID NO: 683936 - RNA, 21 nt, Human
ucgcgcugcuguggccaaugc

SEQ ID NO: 683937 - RNA, 19 nt, Human
ucuagggugcuuacagcua

SEQ ID NO: 683938 - RNA, 23 nt, Human
ucuggccaacauggugaaacccc

SEQ ID NO: 683939 - RNA, 24 nt, Human
ucuggccaacauggugaaacccca

SEQ ID NO: 683940 - RNA, 18 nt, Human
ugaaaaacaaacagggcc

SEQ ID NO: 683941 - RNA, 19 nt, Human
ugaaaaacaaacagggcca

SEQ ID NO: 683942 - RNA, 20 nt, Human
ugaaacaaaacccgaaaaau

SEQ ID NO: 683943 - RNA, 24 nt, Human
ugaaacaaaacccgaaaaaugaac

SEQ ID NO: 683944 - RNA, 25 nt, Human
ugaaacaaaacccgaaaaaugaaca

SEQ ID NO: 683945 - RNA, 21 nt, Human
ugaacacuaacuauaacccuu

SEQ ID NO: 683946 - RNA, 22 nt, Human
ugaagacagaggcuuaaagcag

SEQ ID NO: 683947 - RNA, 18 nt, Human
ugaagagcaggugggagc

SEQ ID NO: 683948 - RNA, 19 nt, Human
ugaagcagaucaagaaucu

SEQ ID NO: 683949 - RNA, 23 nt, Human
ugacggggaggaagaggguuggu

SEQ ID NO: 683950 - RNA, 23 nt, Human
ugacugaaaaacaaacagggcca

SEQ ID NO: 683951 - RNA, 23 nt, Human
ugagaccagucuggccaacaugg

SEQ ID NO: 683952 - RNA, 24 nt, Human
ugagaccagucuggccaacauggu

SEQ ID NO: 683953 - RNA, 22 nt, Human
ugagauauacauuuuucugaaa

SEQ ID NO: 683954 - RNA, 23 nt, Human
ugagccaaacuggaagaaaccag

SEQ ID NO: 683955 - RNA, 22 nt, Human
ugagccaagaucgugccaucgc

SEQ ID NO: 683956 - RNA, 19 nt, Human
ugaggcaggagaaucgcug

SEQ ID NO: 683957 - RNA, 24 nt, Human
ugaggcaggagaaucgcuggaacc

SEQ ID NO: 683958 - RNA, 25 nt, Human
ugaggcaggagaaucgcuggaaccc

SEQ ID NO: 683959 - RNA, 18 nt, Human
ugaggucaggaguuugag

SEQ ID NO: 683960 - RNA, 27 nt, Human
ugcagcagucuucuaagugacuggggu

SEQ ID NO: 683961 - RNA, 24 nt, Human
ugccaucgcacuccagucugggug

SEQ ID NO: 683962 - RNA, 22 nt, Human
ugcccgcuugucuugcugguuc

SEQ ID NO: 683963 - RNA, 22 nt, Human
ugccgacccgcgccgccgccgc

SEQ ID NO: 683964 - RNA, 24 nt, Human
ugcgccuguaaucccagcuacuug

SEQ ID NO: 683965 - RNA, 19 nt, Human
uggaaaggccuauuuuuac

SEQ ID NO: 683966 - RNA, 19 nt, Human
uggaagaaaccagccucau

SEQ ID NO: 683967 - RNA, 21 nt, Human
uggaaggauucacuuccuucu

SEQ ID NO: 683968 - RNA, 23 nt, Human
uggaaggcuuagacgggcggauc

SEQ ID NO: 683969 - RNA, 22 nt, Human
uggaccaacacugcagcaacac

SEQ ID NO: 683970 - RNA, 18 nt, Human
uggccaacauggugaaac

SEQ ID NO: 683971 - RNA, 21 nt, Human
uggccauggagcucauggggc

SEQ ID NO: 683972 - RNA, 21 nt, Human
uggcgugcgccuguaauccca

SEQ ID NO: 683973 - RNA, 22 nt, Human
uggcgugcgccuguaaucccag

SEQ ID NO: 683974 - RNA, 24 nt, Human
uggcgugcgccuguaaucccagcu

SEQ ID NO: 683975 - RNA, 19 nt, Human
ugggaggcugaggcaggag

SEQ ID NO: 683976 - RNA, 23 nt, Human
ugggaggcugaggcaggagaauc

SEQ ID NO: 683977 - RNA, 24 nt, Human
ugguggcgugcgccuguaauccca

SEQ ID NO: 683978 - RNA, 24 nt, Human
uggugguuccugccaguaauccca

SEQ ID NO: 683979 - RNA, 22 nt, Human
ugguuccugccaguaaucccag

SEQ ID NO: 683980 - RNA, 24 nt, Human
ugguuccugccaguaaucccagca

SEQ ID NO: 683981 - RNA, 19 nt, Human
ugguuggcugggccuggug

SEQ ID NO: 683982 - RNA, 20 nt, Human
uguaauuacacuggguuccc

SEQ ID NO: 683983 - RNA, 23 nt, Human
uguacagauguggccauggagcu

SEQ ID NO: 683984 - RNA, 23 nt, Human
ugucuuaacugggcuucccuggc

SEQ ID NO: 683985 - RNA, 20 nt, Human
uguggccaaugcccgcuugu

SEQ ID NO: 683986 - RNA, 21 nt, Human
uguggccaaugcccgcuuguc

SEQ ID NO: 683987 - RNA, 20 nt, Human
uguucucacugaaccucugg

SEQ ID NO: 683988 - RNA, 27 nt, Human
uuaaggaaaaaaaaaaaaaaaagcuug

SEQ ID NO: 683989 - RNA, 26 nt, Human
uuagacgggcggaucgccugagguca

SEQ ID NO: 683990 - RNA, 19 nt, Human
uuagcugggcaugguggcg

SEQ ID NO: 683991 - RNA, 22 nt, Human
uuagcugggcaugguggcgugc

SEQ ID NO: 683992 - RNA, 23 nt, Human
uuaguuuucuaggugcauaauuu

SEQ ID NO: 683993 - RNA, 21 nt, Human
uucacauauuaccagcaauua

SEQ ID NO: 683994 - RNA, 18 nt, Human
uuccaagcucacuggaag

SEQ ID NO: 683995 - RNA, 20 nt, Human
uucucggcgccgacuccgcc

SEQ ID NO: 683996 - RNA, 18 nt, Human
uugaagcuuuugugaaac

SEQ ID NO: 683997 - RNA, 24 nt, Human
uugaguuuacccugcccauguucu

SEQ ID NO: 683998 - RNA, 22 nt, Human
uugcagugagccaagaucgugc

SEQ ID NO: 683999 - RNA, 22 nt, Human
uugcucucucgagaccaguucc

SEQ ID NO: 684000 - RNA, 24 nt, Human
uugggaggcugaggcaggagaauc

SEQ ID NO: 684001 - RNA, 21 nt, Human
uuuuguguaaucauuaaccag

SEQ ID NO: 684002 - RNA, 24 nt, Human
uuuuuuuuuuuuuuuuuuaauuuu

SEQ ID NO: 684003 - RNA, 26 nt, Human
ucugaaaagagccuuugaguuuuaaa

SEQ ID NO: 684004 - RNA, 22 nt, Human
uugaguggcucugaaaagagcc

SEQ ID NO: 684005 - RNA, 23 nt, Human
aaaaaguaacaugaagugcaaac

SEQ ID NO: 684006 - RNA, 21 nt, Human
aggaugaguuggauuugggug

SEQ ID NO: 684007 - RNA, 22 nt, Human
caaaaaguaacaugaagugcaa

SEQ ID NO: 684008 - RNA, 20 nt, Human
caacucauuuauugaaaaca

SEQ ID NO: 684009 - RNA, 21 nt, Human
cagugugcagcaaaccaggau

SEQ ID NO: 684010 - RNA, 21 nt, Human
ccauggcaaguaaugaauucc

SEQ ID NO: 684011 - RNA, 18 nt, Human
ccccucgguaaccuucuu

SEQ ID NO: 684012 - RNA, 21 nt, Human
ccuuuaguuccuuccccucgg

SEQ ID NO: 684013 - RNA, 20 nt, Human
cuuuuuuuuucagacguccu

SEQ ID NO: 684014 - RNA, 23 nt, Human
gaaccagugugcagcaaaccagg

SEQ ID NO: 684015 - RNA, 20 nt, Human
gccaucuucucauucagacu

SEQ ID NO: 684016 - RNA, 21 nt, Human
guccugccaucuucucauuca

SEQ ID NO: 684017 - RNA, 18 nt, Human
uaacaugaagugcaaaca

SEQ ID NO: 684018 - RNA, 21 nt, Human
uaauaguuagaacacuguugc

SEQ ID NO: 684019 - RNA, 21 nt, Human
uacaacucauuuauugaaaac

SEQ ID NO: 684020 - RNA, 24 nt, Human
uauguuuauaaacucaaaaaguaa

SEQ ID NO: 684021 - RNA, 25 nt, Human
uauguuuauaaacucaaaaaguaac

SEQ ID NO: 684022 - RNA, 21 nt, Human
ugaauucccaguaacuagguc

SEQ ID NO: 684023 - RNA, 18 nt, Human
uuaugcauucauuucucc

SEQ ID NO: 684024 - RNA, 24 nt, Human
uucaggcagaugagacuuccuaag

SEQ ID NO: 684025 - RNA, 21 nt, Human
uucucauucagacuuuucuua

SEQ ID NO: 684026 - RNA, 26 nt, Human
uugaaugaaaugauuacaacucauuu

SEQ ID NO: 684027 - RNA, 20 nt, Human
aacaauaguggcaaaaccaa

SEQ ID NO: 684028 - RNA, 22 nt, Human
gcucugaaaagagccuuugggu

SEQ ID NO: 684029 - RNA, 21 nt, Human
ugaguggcucugaaaagagcc

SEQ ID NO: 684030 - RNA, 22 nt, Human
cuuuggggugugggccgagacu

SEQ ID NO: 684031 - RNA, 20 nt, Human
gaguggcucugaaaagagcc

SEQ ID NO: 684032 - RNA, 20 nt, Human
ugaaaagagccuuuggggug

SEQ ID NO: 684033 - RNA, 22 nt, Human
gcucugaaaagagccuuugggu

SEQ ID NO: 684034 - RNA, 20 nt, Human
ccuuuggguuuacuaaggca

SEQ ID NO: 684035 - RNA, 22 nt, Human
gcucugaaaagagccuuugggu

SEQ ID NO: 684036 - RNA, 18 nt, Human
uaaggcaguugcagggac

SEQ ID NO: 684037 - RNA, 21 nt, Human
ugaguggcucugaaaagagcc

SEQ ID NO: 684038 - RNA, 22 nt, Human
gcucugaaaagagccuuugggu

SEQ ID NO: 684039 - RNA, 24 nt, Human
aggagagugaaagagcacucaaau

SEQ ID NO: 684040 - RNA, 21 nt, Human
ugaguggcucugaaaagagcc

SEQ ID NO: 684041 - RNA, 21 nt, Human
aaaagcaaauccaaugacgca

SEQ ID NO: 684042 - RNA, 21 nt, Human
aaaagggugggauggaaaaau

SEQ ID NO: 684043 - RNA, 21 nt, Human
aaacaagaaaacagacgaacc

SEQ ID NO: 684044 - RNA, 23 nt, Human
aaacaagaaaacagacgaaccaa

SEQ ID NO: 684045 - RNA, 22 nt, Human
aaacagacccaaggagccacca

SEQ ID NO: 684046 - RNA, 22 nt, Human
aaacagacgaaccaauuucaga

SEQ ID NO: 684047 - RNA, 23 nt, Human
aaacagcugaaucacucaucaaa

SEQ ID NO: 684048 - RNA, 20 nt, Human
aacaagaaaacagacgaacc

SEQ ID NO: 684049 - RNA, 22 nt, Human
aacacggcccccucccagcugu

SEQ ID NO: 684050 - RNA, 20 nt, Human
aacagccuaauugagaaccg

SEQ ID NO: 684051 - RNA, 20 nt, Human
aagcaaauccaaugacgcac

SEQ ID NO: 684052 - RNA, 22 nt, Human
aagcagcacaaugaguaaagac

SEQ ID NO: 684053 - RNA, 19 nt, Human
aagcagccggcgacucgag

SEQ ID NO: 684054 - RNA, 27 nt, Human
aaugaaacagacccaaggagccaccag

SEQ ID NO: 684055 - RNA, 21 nt, Human
acagacccaaggagccaccag

SEQ ID NO: 684056 - RNA, 22 nt, Human
acagacccaaggagccaccagg

SEQ ID NO: 684057 - RNA, 19 nt, Human
accagggcgcguguggggc

SEQ ID NO: 684058 - RNA, 25 nt, Human
accccugccaucagcuccaaaagcc

SEQ ID NO: 684059 - RNA, 19 nt, Human
agaaaagcaaaugaggugg

SEQ ID NO: 684060 - RNA, 22 nt, Human
agaaaagcaaaugaggugguaa

SEQ ID NO: 684061 - RNA, 19 nt, Human
agaacggcugguauccaca

SEQ ID NO: 684062 - RNA, 22 nt, Human
agacacaguacaaacgcggcuu

SEQ ID NO: 684063 - RNA, 23 nt, Human
agcacccuucauccauccacgga

SEQ ID NO: 684064 - RNA, 20 nt, Human
agccuuuggagucaagcagc

SEQ ID NO: 684065 - RNA, 22 nt, Human
agccuuuggagucaagcagccg

SEQ ID NO: 684066 - RNA, 24 nt, Human
agccuuuggagucaagcagccgac

SEQ ID NO: 684067 - RNA, 21 nt, Human
aggucucugagaggugacuuu

SEQ ID NO: 684068 - RNA, 23 nt, Human
auaaacaagaaaacagacgaacc

SEQ ID NO: 684069 - RNA, 21 nt, Human
caaaagcccuuagccaaaaac

SEQ ID NO: 684070 - RNA, 22 nt, Human
caaaagcccuuagccaaaaaca

SEQ ID NO: 684071 - RNA, 20 nt, Human
caagaaaacagacgaaccaa

SEQ ID NO: 684072 - RNA, 21 nt, Human
cagaaagaguaaauauucugc

SEQ ID NO: 684073 - RNA, 23 nt, Human
cagaccauuaaaugcagaaauua

SEQ ID NO: 684074 - RNA, 18 nt, Human
cagccuaauugagaaccg

SEQ ID NO: 684075 - RNA, 21 nt, Human
cauacagagcugucacgcagu

SEQ ID NO: 684076 - RNA, 21 nt, Human
cauggccuccagaaaagcaaa

SEQ ID NO: 684077 - RNA, 27 nt, Human
ccaaaaacagcugaaucacucaucaaa

SEQ ID NO: 684078 - RNA, 24 nt, Human
ccacaaaauaaaacuaaaaugcaa

SEQ ID NO: 684079 - RNA, 20 nt, Human
ccagaaaagcaaaugaggug

SEQ ID NO: 684080 - RNA, 24 nt, Human
ccuauauugcauggccuccagaaa

SEQ ID NO: 684081 - RNA, 22 nt, Human
cgagcgagcgagcgccaggucc

SEQ ID NO: 684082 - RNA, 21 nt, Human
cggcagaacuggugaccggac

SEQ ID NO: 684083 - RNA, 20 nt, Human
cguaugccauuucccaugac

SEQ ID NO: 684084 - RNA, 21 nt, Human
cguguggggcgggaguggggg

SEQ ID NO: 684085 - RNA, 25 nt, Human
cuacguaugccauuucccaugaccu

SEQ ID NO: 684086 - RNA, 24 nt, Human
cuagagcucauuuggauucaucaa

SEQ ID NO: 684087 - RNA, 19 nt, Human
cucgcagugaccuggggcc

SEQ ID NO: 684088 - RNA, 18 nt, Human
gaaacugaaaucuacaaa

SEQ ID NO: 684089 - RNA, 21 nt, Human
gaaccaauuucagacagcugc

SEQ ID NO: 684090 - RNA, 22 nt, Human
gaagaugcacgggaaaaccaca

SEQ ID NO: 684091 - RNA, 18 nt, Human
gagaaggaaaaggcucuu

SEQ ID NO: 684092 - RNA, 23 nt, Human
gagaaggaaaaggcucuuuccag

SEQ ID NO: 684093 - RNA, 21 nt, Human
gcagcacaaugaguaaagaca

SEQ ID NO: 684094 - RNA, 20 nt, Human
gccuccagaaaagcaaauga

SEQ ID NO: 684095 - RNA, 24 nt, Human
ggaaaugaacagcacccuucaucc

SEQ ID NO: 684096 - RNA, 18 nt, Human
ggcgggagugggggcggg

SEQ ID NO: 684097 - RNA, 20 nt, Human
gggcgcguguggggcgggag

SEQ ID NO: 684098 - RNA, 19 nt, Human
ggggcgggagugggggcgg

SEQ ID NO: 684099 - RNA, 19 nt, Human
guaugccauuucccaugac

SEQ ID NO: 684100 - RNA, 21 nt, Human
gugaccggacacaaaagcugc

SEQ ID NO: 684101 - RNA, 21 nt, Human
guguggggcgggagugggggc

SEQ ID NO: 684102 - RNA, 22 nt, Human
uaaaagcuccucuccuuuaaga

SEQ ID NO: 684103 - RNA, 20 nt, Human
uaaaaugagacaggcaagua

SEQ ID NO: 684104 - RNA, 18 nt, Human
uaccauaaacaagaaaac

SEQ ID NO: 684105 - RNA, 21 nt, Human
uagauucaaaagcaaauccaa

SEQ ID NO: 684106 - RNA, 25 nt, Human
uagauucaaaagcaaauccaaugac

SEQ ID NO: 684107 - RNA, 28 nt, Human
uauacacauuugaaaacacacauguagu

SEQ ID NO: 684108 - RNA, 24 nt, Human
uauucugcaccuccacaaaauaaa

SEQ ID NO: 684109 - RNA, 24 nt, Human
ucacugugccuucacauacaucua

SEQ ID NO: 684110 - RNA, 19 nt, Human
uccucggcagaaucaaggg

SEQ ID NO: 684111 - RNA, 26 nt, Human
ucuagauucaaaagcaaauccaauga

SEQ ID NO: 684112 - RNA, 21 nt, Human
ugaaaacacacauguaggaga

SEQ ID NO: 684113 - RNA, 22 nt, Human
ugaaaacacacauguaggagac

SEQ ID NO: 684114 - RNA, 21 nt, Human
ugaaaagaaacuaagggaaua

SEQ ID NO: 684115 - RNA, 22 nt, Human
ugaaaucuacaaauuagaaaaa

SEQ ID NO: 684116 - RNA, 19 nt, Human
ugaauauucuugucgccca

SEQ ID NO: 684117 - RNA, 26 nt, Human
ugaccggacacaaaagcugcugccaa

SEQ ID NO: 684118 - RNA, 23 nt, Human
ugagaaccgacuccugggaaggc

SEQ ID NO: 684119 - RNA, 19 nt, Human
ugagaagcauaagggugga

SEQ ID NO: 684120 - RNA, 21 nt, Human
ugaggggagaguaagaaaagg

SEQ ID NO: 684121 - RNA, 20 nt, Human
ugaggugacuaaggauacau

SEQ ID NO: 684122 - RNA, 19 nt, Human
ugccaucagcuccaaaagc

SEQ ID NO: 684123 - RNA, 20 nt, Human
ugggggcggguaaagaggcg

SEQ ID NO: 684124 - RNA, 21 nt, Human
uggguggcucugaaaagagcc

SEQ ID NO: 684125 - RNA, 20 nt, Human
uguccuggaguucucuuaaa

SEQ ID NO: 684126 - RNA, 22 nt, Human
uguccuggaguucucuuaaaug

SEQ ID NO: 684127 - RNA, 24 nt, Human
uuaaaugacagccgaacucagcca

SEQ ID NO: 684128 - RNA, 26 nt, Human
uuagccaaaaacagcugaaucacuca

SEQ ID NO: 684129 - RNA, 23 nt, Human
uucaaagucucaaagugaacgac

SEQ ID NO: 684130 - RNA, 26 nt, Human
uuguagcaaaaaaaaucuuaacacgg

SEQ ID NO: 684131 - RNA, 22 nt, Human
uuuaugaaaagaaacuaaggga

SEQ ID NO: 684132 - RNA, 19 nt, Human
uuucacugugccuucacau

SEQ ID NO: 684133 - RNA, 19 nt, Human
aaagcgccaacgaaaagga

SEQ ID NO: 684134 - RNA, 21 nt, Human
auaaagcgccaacgaaaagga

SEQ ID NO: 684135 - RNA, 26 nt, Human
auaaagcgccaacgaaaaggaaaaac

SEQ ID NO: 684136 - RNA, 20 nt, Human
caacgaaaaggaaaaacagc

SEQ ID NO: 684137 - RNA, 19 nt, Human
acugaaguaaggaccaggc

SEQ ID NO: 684138 - RNA, 19 nt, Human
cccagcgaugacuucgggu

SEQ ID NO: 684139 - RNA, 21 nt, Human
cggaaggaaaagaccugagcg

SEQ ID NO: 684140 - RNA, 21 nt, Human
cucuguagauucacugaagga

SEQ ID NO: 684141 - RNA, 20 nt, Human
uagccagccuuuccuccuuu

SEQ ID NO: 684142 - RNA, 27 nt, Human
ucacugaaggacugaggaaagggcaac

SEQ ID NO: 684143 - RNA, 21 nt, Human
ugaaguaaggaccaggcugag

SEQ ID NO: 684144 - RNA, 20 nt, Human
ugaggaaagggcaaccagua

SEQ ID NO: 684145 - RNA, 20 nt, Human
ugaggaaauaggcucuguag

SEQ ID NO: 684146 - RNA, 23 nt, Human
aaaaaauccaaaugcuggcauug

SEQ ID NO: 684147 - RNA, 21 nt, Human
aaaaauaucuaacguucagaa

SEQ ID NO: 684148 - RNA, 24 nt, Human
aagacagacaacauuaaaaacaug

SEQ ID NO: 684149 - RNA, 20 nt, Human
aaguauagugaauggaugga

SEQ ID NO: 684150 - RNA, 20 nt, Human
aaugaaaauggaaaaacugc

SEQ ID NO: 684151 - RNA, 18 nt, Human
agaagacagacaacauua

SEQ ID NO: 684152 - RNA, 24 nt, Human
agaagacagacaacauuaaaaaca

SEQ ID NO: 684153 - RNA, 25 nt, Human
aggaacagcacagaagacagacaac

SEQ ID NO: 684154 - RNA, 22 nt, Human
auggaaaaaaaauaucuaacgu

SEQ ID NO: 684155 - RNA, 20 nt, Human
auguaggacaacucaguuag

SEQ ID NO: 684156 - RNA, 24 nt, Human
cacacacaaaugaaaauggaaaaa

SEQ ID NO: 684157 - RNA, 20 nt, Human
cagcacagaagacagacaac

SEQ ID NO: 684158 - RNA, 21 nt, Human
ccuuacuuaccccccuucucc

SEQ ID NO: 684159 - RNA, 23 nt, Human
ccuucggcuggagcucggcgagc

SEQ ID NO: 684160 - RNA, 20 nt, Human
cguucagaacuaccaauaac

SEQ ID NO: 684161 - RNA, 19 nt, Human
cugaaacauuuuaacuugc

SEQ ID NO: 684162 - RNA, 18 nt, Human
gagaccuccuuacuuacc

SEQ ID NO: 684163 - RNA, 20 nt, Human
gcggcggcggcugcgaacac

SEQ ID NO: 684164 - RNA, 22 nt, Human
uaaaaaaauccaaaugcuggca

SEQ ID NO: 684165 - RNA, 18 nt, Human
uaaaaaugcuacaaacac

SEQ ID NO: 684166 - RNA, 21 nt, Human
uaaaaaugcuacaaacaccau

SEQ ID NO: 684167 - RNA, 21 nt, Human
uaauagcaaacuuacaggaac

SEQ ID NO: 684168 - RNA, 26 nt, Human
uagcaaacuuacaggaacagcacaga

SEQ ID NO: 684169 - RNA, 22 nt, Human
uaugauaaaaaugcuacaaaca

SEQ ID NO: 684170 - RNA, 23 nt, Human
uccgcauuuauauuaaaaauuca

SEQ ID NO: 684171 - RNA, 22 nt, Human
ucggcgagcgagaggcggcgcu

SEQ ID NO: 684172 - RNA, 26 nt, Human
ugaaaauggaaaaacugccaauaccu

SEQ ID NO: 684173 - RNA, 26 nt, Human
uucacacacaaaugaaaauggaaaaa

SEQ ID NO: 684174 - RNA, 22 nt, Human
uuuacuuguuuuaaaaaaaucc

SEQ ID NO: 684175 - RNA, 27 nt, Human
aaaagagccuuuggguuuugguuaauu

SEQ ID NO: 684176 - RNA, 22 nt, Human
gcucugaaaagagccuuugggu

SEQ ID NO: 684177 - RNA, 20 nt, Human
uggguuuugguuagcacaca

SEQ ID NO: 684178 - RNA, 18 nt, Human
aaguuggcgcacacccuc

SEQ ID NO: 684179 - RNA, 21 nt, Human
uuuaaguuggcgcacacccuc

SEQ ID NO: 684180 - RNA, 18 nt, Human
aaacccaagauagagcag

SEQ ID NO: 684181 - RNA, 22 nt, Human
aaacccaagauagagcagggga

SEQ ID NO: 684182 - RNA, 25 nt, Human
agccuuuggaagcuuggaagcaauu

SEQ ID NO: 684183 - RNA, 24 nt, Human
gaaaagagccuuuggaagcuugga

SEQ ID NO: 684184 - RNA, 23 nt, Human
gcaauuaagaaacccaagauaga

SEQ ID NO: 684185 - RNA, 19 nt, Human
uuggaagcuuggaagcaau

SEQ ID NO: 684186 - RNA, 18 nt, Human
acugugggauagaagguu

SEQ ID NO: 684187 - RNA, 19 nt, Human
agaagggagggaagacacg

SEQ ID NO: 684188 - RNA, 21 nt, Human
agagccagggcacgcugggca

SEQ ID NO: 684189 - RNA, 22 nt, Human
aggagcgaagcgggcaaggggc

SEQ ID NO: 684190 - RNA, 18 nt, Human
agggagggaagacacggg

SEQ ID NO: 684191 - RNA, 19 nt, Human
agggcacgcugggcaggug

SEQ ID NO: 684192 - RNA, 25 nt, Human
caaggccagcccggccgccaccccu

SEQ ID NO: 684193 - RNA, 21 nt, Human
cacagagcugccggucaaagg

SEQ ID NO: 684194 - RNA, 21 nt, Human
caccuccucuuccgcagggcc

SEQ ID NO: 684195 - RNA, 18 nt, Human
cacgcggccacgcgccgc

SEQ ID NO: 684196 - RNA, 23 nt, Human
cacgcugggcagguggcggggcc

SEQ ID NO: 684197 - RNA, 18 nt, Human
cagggcacgcugggcagg

SEQ ID NO: 684198 - RNA, 20 nt, Human
ccacccgccccaggccucag

SEQ ID NO: 684199 - RNA, 20 nt, Human
ccagcccggccgccacccgc

SEQ ID NO: 684200 - RNA, 19 nt, Human
cccugggccgcaccuccuc

SEQ ID NO: 684201 - RNA, 18 nt, Human
ccgagaagggagggaaga

SEQ ID NO: 684202 - RNA, 20 nt, Human
ccgagaagggagggaagaca

SEQ ID NO: 684203 - RNA, 21 nt, Human
ccgcaccuccucuuccgcagg

SEQ ID NO: 684204 - RNA, 19 nt, Human
ccgccacccgccccaggcc

SEQ ID NO: 684205 - RNA, 20 nt, Human
ccggccgccacccgccccag

SEQ ID NO: 684206 - RNA, 18 nt, Human
cgagggcuccccugcgcc

SEQ ID NO: 684207 - RNA, 25 nt, Human
cgcaccuccucuuccgcagggcccg

SEQ ID NO: 684208 - RNA, 19 nt, Human
cgcaggccgcuccuccggg

SEQ ID NO: 684209 - RNA, 20 nt, Human
cggccgccacccgccccagg

SEQ ID NO: 684210 - RNA, 24 nt, Human
cggccggggcggcgcugagggccg

SEQ ID NO: 684211 - RNA, 25 nt, Human
cggccggggcggcgcugagggccgg

SEQ ID NO: 684212 - RNA, 18 nt, Human
cgggacacggccggggcg

SEQ ID NO: 684213 - RNA, 18 nt, Human
cgggcaaggggcacaggc

SEQ ID NO: 684214 - RNA, 18 nt, Human
cugcgcccugggccgcac

SEQ ID NO: 684215 - RNA, 21 nt, Human
gagaagggagggaagacacgg

SEQ ID NO: 684216 - RNA, 21 nt, Human
gcaucuauccaccaauacaca

SEQ ID NO: 684217 - RNA, 23 nt, Human
gccggggcggcgcugagggccgg

SEQ ID NO: 684218 - RNA, 22 nt, Human
ggagagccagggcacgcugggc

SEQ ID NO: 684219 - RNA, 22 nt, Human
ggccggggcggcgcugagggcc

SEQ ID NO: 684220 - RNA, 19 nt, Human
gguggcggggccgagaagg

SEQ ID NO: 684221 - RNA, 20 nt, Human
uacacagagcugccggucaa

SEQ ID NO: 684222 - RNA, 27 nt, Human
ucuggggccugacugugggauagaagg

SEQ ID NO: 684223 - RNA, 22 nt, Human
ucuuccgcagggcccgucacuc

SEQ ID NO: 684224 - RNA, 22 nt, Human
uggagagccagggcacgcuggg

SEQ ID NO: 684225 - RNA, 18 nt, Human
ugggcagguggcggggcc

SEQ ID NO: 684226 - RNA, 22 nt, Human
acuuuaugguccaguaaggcca

SEQ ID NO: 684227 - RNA, 25 nt, Human
caaaacacuggggcuaucuucugug

SEQ ID NO: 684228 - RNA, 25 nt, Human
caaaacacuggggcuaucuucugug

SEQ ID NO: 684229 - RNA, 22 nt, Human
cagcaagccuugcugcaagucu

SEQ ID NO: 684230 - RNA, 22 nt, Human
cagcaagccuugcugcaagucu

SEQ ID NO: 684231 - RNA, 18 nt, Human
cagucugaucucagaauc

SEQ ID NO: 684232 - RNA, 18 nt, Human
cagucugaucucagaauc

SEQ ID NO: 684233 - RNA, 23 nt, Human
cauaggccucuuuggccgaauuc

SEQ ID NO: 684234 - RNA, 21 nt, Human
cucagaaucacauucaaaacc

SEQ ID NO: 684235 - RNA, 21 nt, Human
cucagaaucacauucaaaacc

SEQ ID NO: 684236 - RNA, 18 nt, Human
cuccaagguuguguagcu

SEQ ID NO: 684237 - RNA, 18 nt, Human
cugcaagucuucagagaa

SEQ ID NO: 684238 - RNA, 22 nt, Human
gccaggauuccagcucagucag

SEQ ID NO: 684239 - RNA, 22 nt, Human
gccaggauuccagcucagucag

SEQ ID NO: 684240 - RNA, 21 nt, Human
ggccgcuuuuuuuuuuuuuuu

SEQ ID NO: 684241 - RNA, 18 nt, Human
gggaaaguaaggaugacc

SEQ ID NO: 684242 - RNA, 23 nt, Human
uaugguccaguaaggccagaauu

SEQ ID NO: 684243 - RNA, 24 nt, Human
ucagaaucacauucaaaaccacuc

SEQ ID NO: 684244 - RNA, 24 nt, Human
ucagaaucacauucaaaaccacuc

SEQ ID NO: 684245 - RNA, 24 nt, Human
ugagggaaaguaaggaugacugcu

SEQ ID NO: 684246 - RNA, 24 nt, Human
ugagggaaaguaaggaugacugcu

SEQ ID NO: 684247 - RNA, 19 nt, Human
ugguaagauauaaagccag

SEQ ID NO: 684248 - RNA, 19 nt, Human
ugguaagauauaaagccag

SEQ ID NO: 684249 - RNA, 21 nt, Human
ugguaagauauaaagccagga

SEQ ID NO: 684250 - RNA, 21 nt, Human
ugguaagauauaaagccagga

SEQ ID NO: 684251 - RNA, 22 nt, Human
uugguagcacaaaaaauccugu

SEQ ID NO: 684252 - RNA, 21 nt, Human
uuuuuuuuuuuuuuuaucuuu

SEQ ID NO: 684253 - RNA, 19 nt, Human
aaaccccagcuccgccccc

SEQ ID NO: 684254 - RNA, 21 nt, Human
aaccacacgguggcuuccgag

SEQ ID NO: 684255 - RNA, 24 nt, Human
aaccccagcuccgcccccauccac

SEQ ID NO: 684256 - RNA, 30 nt, Human
aacugcaccaaaccccagcuccgcccccaa

SEQ ID NO: 684257 - RNA, 21 nt, Human
aagccaccuguggucccagcc

SEQ ID NO: 684258 - RNA, 25 nt, Human
acacgguggcuuccgagagacccca

SEQ ID NO: 684259 - RNA, 21 nt, Human
accaaaccccagcuccgcccc

SEQ ID NO: 684260 - RNA, 22 nt, Human
accaacaaggccacugugacuu

SEQ ID NO: 684261 - RNA, 18 nt, Human
agagagaagccaccugug

SEQ ID NO: 684262 - RNA, 22 nt, Human
agccaccuguggucccagcccc

SEQ ID NO: 684263 - RNA, 18 nt, Human
aggagagggcagggcagg

SEQ ID NO: 684264 - RNA, 24 nt, Human
agggacaggagcaggcaagagaga

SEQ ID NO: 684265 - RNA, 27 nt, Human
caaaauaaacgugccugugaaagaacc

SEQ ID NO: 684266 - RNA, 18 nt, Human
caaaccccagcuccgccc

SEQ ID NO: 684267 - RNA, 24 nt, Human
cacagcccugugggcaccaacaag

SEQ ID NO: 684268 - RNA, 23 nt, Human
caccaaaccccagcuccgccccc

SEQ ID NO: 684269 - RNA, 21 nt, Human
cagaaugguuucuggaguccc

SEQ ID NO: 684270 - RNA, 19 nt, Human
cagcgaccccaggacggcg

SEQ ID NO: 684271 - RNA, 18 nt, Human
cagguggccacaccuggu

SEQ ID NO: 684272 - RNA, 22 nt, Human
ccacgugacaggcccggccguc

SEQ ID NO: 684273 - RNA, 20 nt, Human
cccauccacggcucccagaa

SEQ ID NO: 684274 - RNA, 21 nt, Human
cccauccacggcucccagaau

SEQ ID NO: 684275 - RNA, 23 nt, Human
ccccagguggccacaccuggugu

SEQ ID NO: 684276 - RNA, 18 nt, Human
cccccaacaggaaaaggc

SEQ ID NO: 684277 - RNA, 21 nt, Human
cccccuccccagcugucaggc

SEQ ID NO: 684278 - RNA, 21 nt, Human
cccugugggcaccaacaaggc

SEQ ID NO: 684279 - RNA, 19 nt, Human
ccuccauccacacagcccu

SEQ ID NO: 684280 - RNA, 21 nt, Human
cggcagcgaccccaggacggc

SEQ ID NO: 684281 - RNA, 18 nt, Human
cgucgaaguccaggcgcu

SEQ ID NO: 684282 - RNA, 24 nt, Human
cguggugcaggggacgugcuggag

SEQ ID NO: 684283 - RNA, 19 nt, Human
cuccugcguccccgugaug

SEQ ID NO: 684284 - RNA, 22 nt, Human
cugcguccccgugaugaccugg

SEQ ID NO: 684285 - RNA, 23 nt, Human
cugcguccccgugaugaccuggg

SEQ ID NO: 684286 - RNA, 18 nt, Human
cugcuguacugcacccug

SEQ ID NO: 684287 - RNA, 23 nt, Human
cugcuguacugcacccuggaaac

SEQ ID NO: 684288 - RNA, 21 nt, Human
cuguacugcacccuggaaacu

SEQ ID NO: 684289 - RNA, 25 nt, Human
gacagcacagggcacaguccugugc

SEQ ID NO: 684290 - RNA, 19 nt, Human
gagggcagggcagggccug

SEQ ID NO: 684291 - RNA, 24 nt, Human
gcacccuggaaacugcaccaaacc

SEQ ID NO: 684292 - RNA, 25 nt, Human
gcagggacagcuuccuccauccaca

SEQ ID NO: 684293 - RNA, 26 nt, Human
gcccacgugacaggcccggccgucac

SEQ ID NO: 684294 - RNA, 20 nt, Human
gcucucggcagcgaccccag

SEQ ID NO: 684295 - RNA, 22 nt, Human
ggcagggcagggccugccuccu

SEQ ID NO: 684296 - RNA, 22 nt, Human
ggccacccccuccccagcuguc

SEQ ID NO: 684297 - RNA, 19 nt, Human
ggccgggagcccgaggggg

SEQ ID NO: 684298 - RNA, 22 nt, Human
ggcugggggucucagcgcugca

SEQ ID NO: 684299 - RNA, 21 nt, Human
gggacaggagcaggcaagaga

SEQ ID NO: 684300 - RNA, 21 nt, Human
gggcagggccugccuccugcg

SEQ ID NO: 684301 - RNA, 21 nt, Human
gggcgggcugggggucucagc

SEQ ID NO: 684302 - RNA, 19 nt, Human
ggggaugcacugggcaggg

SEQ ID NO: 684303 - RNA, 18 nt, Human
ggggccccggccgggagc

SEQ ID NO: 684304 - RNA, 23 nt, Human
gucacuggcgggcccucccccca

SEQ ID NO: 684305 - RNA, 19 nt, Human
guggugcaggggacgugcu

SEQ ID NO: 684306 - RNA, 26 nt, Human
uaaaaacuuuuuauuucagcaaaaua

SEQ ID NO: 684307 - RNA, 20 nt, Human
uaccugagccccagguggcc

SEQ ID NO: 684308 - RNA, 22 nt, Human
ucacacgacagcaguguucccc

SEQ ID NO: 684309 - RNA, 21 nt, Human
ucacuggcgggcccucccccc

SEQ ID NO: 684310 - RNA, 18 nt, Human
uccccagcugucaggccc

SEQ ID NO: 684311 - RNA, 18 nt, Human
ucccugcaacagaccugu

SEQ ID NO: 684312 - RNA, 22 nt, Human
ucugggaggaggcgcccgcugg

SEQ ID NO: 684313 - RNA, 23 nt, Human
ugccguggugcaggggacgugcu

SEQ ID NO: 684314 - RNA, 19 nt, Human
uggaaacugcaccaaaccc

SEQ ID NO: 684315 - RNA, 19 nt, Human
uggccacaccugguguucu

SEQ ID NO: 684316 - RNA, 18 nt, Human
uggcuuccgagagacccc

SEQ ID NO: 684317 - RNA, 19 nt, Human
ugggaggaggcgcccgcug

SEQ ID NO: 684318 - RNA, 22 nt, Human
ugggaggaggcgcccgcuggug

SEQ ID NO: 684319 - RNA, 22 nt, Human
ugggggucucagcgcugcagcu

SEQ ID NO: 684320 - RNA, 23 nt, Human
ugucgccggccacccccucccca

SEQ ID NO: 684321 - RNA, 20 nt, Human
ugugaaagaaccacacggug

SEQ ID NO: 684322 - RNA, 21 nt, Human
ugugaaagaaccacacggugg

SEQ ID NO: 684323 - RNA, 25 nt, Human
ugugggcaccaacaaggcuggagac

SEQ ID NO: 684324 - RNA, 19 nt, Human
agaagggcaggaggguggg

SEQ ID NO: 684325 - RNA, 19 nt, Human
agagaagauggggagcugc

SEQ ID NO: 684326 - RNA, 18 nt, Human
agaguuguuuggcaggga

SEQ ID NO: 684327 - RNA, 21 nt, Human
agaguuguuuggcagggaugg

SEQ ID NO: 684328 - RNA, 22 nt, Human
agaguuguuuggcagggauggc

SEQ ID NO: 684329 - RNA, 19 nt, Human
aggcagugggcugagucug

SEQ ID NO: 684330 - RNA, 24 nt, Human
aggcagugggcugagucugccaga

SEQ ID NO: 684331 - RNA, 19 nt, Human
cacucgagggugcuuggca

SEQ ID NO: 684332 - RNA, 24 nt, Human
cacucgagggugcuuggcacaccu

SEQ ID NO: 684333 - RNA, 20 nt, Human
ccgcccaggggcauggcauc

SEQ ID NO: 684334 - RNA, 24 nt, Human
cuugguguggaagugcugcacuga

SEQ ID NO: 684335 - RNA, 20 nt, Human
gagaagauggggagcugcug

SEQ ID NO: 684336 - RNA, 20 nt, Human
ggcaggagcggggccggggg

SEQ ID NO: 684337 - RNA, 20 nt, Human
ggccuucuugguguggaagu

SEQ ID NO: 684338 - RNA, 22 nt, Human
gggacagaggaaugggcaggag

SEQ ID NO: 684339 - RNA, 18 nt, Human
gggagcugcugcccgccc

SEQ ID NO: 684340 - RNA, 20 nt, Human
gggagcugcugcccgcccag

SEQ ID NO: 684341 - RNA, 27 nt, Human
gggcaggagggugggugacaacaaugu

SEQ ID NO: 684342 - RNA, 19 nt, Human
ugagaagggcaggagggug

SEQ ID NO: 684343 - RNA, 19 nt, Human
uggcaaggcagugggcuga

SEQ ID NO: 684344 - RNA, 20 nt, Human
aaaauaauaacucugaaagc

SEQ ID NO: 684345 - RNA, 19 nt, Human
aaagaagaaggcccugcug

SEQ ID NO: 684346 - RNA, 18 nt, Human
aagaagccaggucuaaau

SEQ ID NO: 684347 - RNA, 20 nt, Human
aaggcccuuuuucuugggga

SEQ ID NO: 684348 - RNA, 22 nt, Human
acucugaaagcagauggagaau

SEQ ID NO: 684349 - RNA, 18 nt, Human
acuuuguucagaagaaag

SEQ ID NO: 684350 - RNA, 23 nt, Human
agaaagaagccaggucuaaauga

SEQ ID NO: 684351 - RNA, 19 nt, Human
agacaggcuucagauggcu

SEQ ID NO: 684352 - RNA, 18 nt, Human
agaggggaaaaggaaagg

SEQ ID NO: 684353 - RNA, 19 nt, Human
cagaagaagccuggugaua

SEQ ID NO: 684354 - RNA, 21 nt, Human
caucagaguggggaggugaac

SEQ ID NO: 684355 - RNA, 19 nt, Human
ccaccagcccaucccagau

SEQ ID NO: 684356 - RNA, 18 nt, Human
cccaucccagaucuuccu

SEQ ID NO: 684357 - RNA, 25 nt, Human
cccgggccagggcagcccaggcugu

SEQ ID NO: 684358 - RNA, 21 nt, Human
cccugcuguugugagccaugc

SEQ ID NO: 684359 - RNA, 21 nt, Human
cccuggaggcucuggaggugu

SEQ ID NO: 684360 - RNA, 20 nt, Human
ccuuuaggggggaaaaaugu

SEQ ID NO: 684361 - RNA, 23 nt, Human
ccuuuaggggggaaaaaugucag

SEQ ID NO: 684362 - RNA, 19 nt, Human
cucccggugucagggugcc

SEQ ID NO: 684363 - RNA, 21 nt, Human
cugcagaggcaaaccuaccgg

SEQ ID NO: 684364 - RNA, 22 nt, Human
cuuugauuucggcaagcuggaa

SEQ ID NO: 684365 - RNA, 25 nt, Human
cuuugauuucggcaagcuggaaugg

SEQ ID NO: 684366 - RNA, 21 nt, Human
cuuugcaguuuaaggacuugu

SEQ ID NO: 684367 - RNA, 22 nt, Human
cuuuucaaaguuuauuuuuggc

SEQ ID NO: 684368 - RNA, 20 nt, Human
gaggcucuggagguguccau

SEQ ID NO: 684369 - RNA, 26 nt, Human
gaggggaaaaggaaagggagggugag

SEQ ID NO: 684370 - RNA, 27 nt, Human
gagugggcucugagguccagaagacca

SEQ ID NO: 684371 - RNA, 24 nt, Human
gagugggggugggggagcuucauu

SEQ ID NO: 684372 - RNA, 22 nt, Human
gcagaagcaguggaggcuggaa

SEQ ID NO: 684373 - RNA, 18 nt, Human
gcaguuuaaggacuugug

SEQ ID NO: 684374 - RNA, 24 nt, Human
gccacccugauuccugagaggcca

SEQ ID NO: 684375 - RNA, 20 nt, Human
gccagggcagcccaggcugu

SEQ ID NO: 684376 - RNA, 18 nt, Human
gcccaggcuggguggcag

SEQ ID NO: 684377 - RNA, 20 nt, Human
gcggggggcagaagcagugg

SEQ ID NO: 684378 - RNA, 18 nt, Human
ggccgggagugggggugg

SEQ ID NO: 684379 - RNA, 20 nt, Human
gggagugggggugggggagc

SEQ ID NO: 684380 - RNA, 18 nt, Human
gggcagaagcaguggagg

SEQ ID NO: 684381 - RNA, 23 nt, Human
gggcugaggaauaaagaugugau

SEQ ID NO: 684382 - RNA, 23 nt, Human
gggcuuucucugaagucacagcc

SEQ ID NO: 684383 - RNA, 21 nt, Human
ggggaaaaggaaagggagggu

SEQ ID NO: 684384 - RNA, 19 nt, Human
gucuacugugugguccccu

SEQ ID NO: 684385 - RNA, 20 nt, Human
gugaacccagaugccacuga

SEQ ID NO: 684386 - RNA, 23 nt, Human
uaccuagacguggauggcugauu

SEQ ID NO: 684387 - RNA, 23 nt, Human
uagaagguacaauuggguaagga

SEQ ID NO: 684388 - RNA, 20 nt, Human
uaugccuuuaggggggaaaa

SEQ ID NO: 684389 - RNA, 19 nt, Human
ucagggugccaaggagagu

SEQ ID NO: 684390 - RNA, 23 nt, Human
ucgcuggauaugacagucugcau

SEQ ID NO: 684391 - RNA, 21 nt, Human
ucuaaaugagagauuggcuuu

SEQ ID NO: 684392 - RNA, 19 nt, Human
ucucugcuuagaguaggga

SEQ ID NO: 684393 - RNA, 19 nt, Human
ucugcacgucaaaaagaag

SEQ ID NO: 684394 - RNA, 19 nt, Human
ucugggaaggcccaggcug

SEQ ID NO: 684395 - RNA, 23 nt, Human
ucugugaacacugauuuucuaga

SEQ ID NO: 684396 - RNA, 23 nt, Human
ucuuggggaggguagaagagggg

SEQ ID NO: 684397 - RNA, 22 nt, Human
ugagagauuggcuuugcuuucu

SEQ ID NO: 684398 - RNA, 19 nt, Human
ugagaggccagagaggaag

SEQ ID NO: 684399 - RNA, 18 nt, Human
ugaggaauaaagauguga

SEQ ID NO: 684400 - RNA, 20 nt, Human
ugaggaauaaagaugugaug

SEQ ID NO: 684401 - RNA, 25 nt, Human
ugccaaggagagugggcucugaggu

SEQ ID NO: 684402 - RNA, 20 nt, Human
ugggaaggcccaggcugggu

SEQ ID NO: 684403 - RNA, 22 nt, Human
ugggaaggcccaggcugggugg

SEQ ID NO: 684404 - RNA, 23 nt, Human
ugggaaggcccaggcuggguggc

SEQ ID NO: 684405 - RNA, 18 nt, Human
uggggaggguagaagagg

SEQ ID NO: 684406 - RNA, 19 nt, Human
uggggaggguagaagaggg

SEQ ID NO: 684407 - RNA, 20 nt, Human
ugggggugggggagcuucau

SEQ ID NO: 684408 - RNA, 19 nt, Human
ugugaaacgcagcucaaac

SEQ ID NO: 684409 - RNA, 22 nt, Human
ugugauggugguucccgcugau

SEQ ID NO: 684410 - RNA, 22 nt, Human
uuccuuggguuaccaagggagg

SEQ ID NO: 684411 - RNA, 18 nt, Human
uugcaggaugccuguggu

SEQ ID NO: 684412 - RNA, 19 nt, Human
aaaacucagcugugacugc

SEQ ID NO: 684413 - RNA, 28 nt, Human
aaaccagaacucaaaauauuccaggaga

SEQ ID NO: 684414 - RNA, 18 nt, Human
aacagcucagcccaaaaa

SEQ ID NO: 684415 - RNA, 21 nt, Human
aagccaccuuagacagugugg

SEQ ID NO: 684416 - RNA, 21 nt, Human
acacacagaaaccacgaggua

SEQ ID NO: 684417 - RNA, 24 nt, Human
acaccccagcuucuagcagcucua

SEQ ID NO: 684418 - RNA, 21 nt, Human
acagcucagcccaaaaaagug

SEQ ID NO: 684419 - RNA, 18 nt, Human
acucaaaauauuccagga

SEQ ID NO: 684420 - RNA, 20 nt, Human
agaacuggagccaggacuaa

SEQ ID NO: 684421 - RNA, 21 nt, Human
agcuggaaaagucuccccaca

SEQ ID NO: 684422 - RNA, 18 nt, Human
agugcagcuccgcggugc

SEQ ID NO: 684423 - RNA, 24 nt, Human
caaagugggaaaaagcacagaucc

SEQ ID NO: 684424 - RNA, 24 nt, Human
caaccuccuuucccuccaugcuuc

SEQ ID NO: 684425 - RNA, 20 nt, Human
caauaaaaacacagucacca

SEQ ID NO: 684426 - RNA, 23 nt, Human
cacacacacagaaaccacgaggu

SEQ ID NO: 684427 - RNA, 18 nt, Human
cacagcccccgggaaucu

SEQ ID NO: 684428 - RNA, 21 nt, Human
caccccagcuucuagcagcuc

SEQ ID NO: 684429 - RNA, 20 nt, Human
cacgggaaaagcaacaucua

SEQ ID NO: 684430 - RNA, 20 nt, Human
cacugcgggcccgggagggc

SEQ ID NO: 684431 - RNA, 22 nt, Human
cacuuggguuccaguucaaagc

SEQ ID NO: 684432 - RNA, 22 nt, Human
cauaugaacugugugacaacag

SEQ ID NO: 684433 - RNA, 21 nt, Human
caucuucuugggaaauggccu

SEQ ID NO: 684434 - RNA, 21 nt, Human
ccagcacaguguguguucccg

SEQ ID NO: 684435 - RNA, 21 nt, Human
ccagcuggaaaagucucccca

SEQ ID NO: 684436 - RNA, 24 nt, Human
cccaaccccaaacuuucaccaaaa

SEQ ID NO: 684437 - RNA, 23 nt, Human
ccccacaggugugcagugcagcu

SEQ ID NO: 684438 - RNA, 19 nt, Human
cccccgggaaucuacugcu

SEQ ID NO: 684439 - RNA, 20 nt, Human
ccuaaaaaccacccaaacac

SEQ ID NO: 684440 - RNA, 23 nt, Human
ccuaaaaaccacccaaacacuag

SEQ ID NO: 684441 - RNA, 18 nt, Human
ccucuaacagcucagccc

SEQ ID NO: 684442 - RNA, 24 nt, Human
ccucugagguguacccccaacccu

SEQ ID NO: 684443 - RNA, 19 nt, Human
cgcuaaaggcacagccccc

SEQ ID NO: 684444 - RNA, 21 nt, Human
cugagguguacccccaacccc

SEQ ID NO: 684445 - RNA, 21 nt, Human
gaaccucugagguguaccccc

SEQ ID NO: 684446 - RNA, 21 nt, Human
gagccaggacuaagugagaaa

SEQ ID NO: 684447 - RNA, 20 nt, Human
gagccucuggagaagccccu

SEQ ID NO: 684448 - RNA, 21 nt, Human
gagucuauuuuacaaccuccu

SEQ ID NO: 684449 - RNA, 18 nt, Human
gauccugggaccaagguu

SEQ ID NO: 684450 - RNA, 21 nt, Human
gcaauaaagaggaacucuaga

SEQ ID NO: 684451 - RNA, 21 nt, Human
gcggaagaaaaggaugcggua

SEQ ID NO: 684452 - RNA, 22 nt, Human
gcucuauguguuuccucuaacg

SEQ ID NO: 684453 - RNA, 21 nt, Human
gggaaaagcaacaucuauugu

SEQ ID NO: 684454 - RNA, 21 nt, Human
ggggagagcaacaccccagcu

SEQ ID NO: 684455 - RNA, 24 nt, Human
ggguccagcucuguucaggguggg

SEQ ID NO: 684456 - RNA, 19 nt, Human
gguauuugcuuuugccaug

SEQ ID NO: 684457 - RNA, 26 nt, Human
gugugugcacacacacagaaaccacg

SEQ ID NO: 684458 - RNA, 23 nt, Human
uaacgcuaaaggcacagcccccg

SEQ ID NO: 684459 - RNA, 18 nt, Human
uaagugaaaaccagaacu

SEQ ID NO: 684460 - RNA, 23 nt, Human
uacugcuuccuaagagucuccau

SEQ ID NO: 684461 - RNA, 22 nt, Human
ucagcccaaaaaagugcaacaa

SEQ ID NO: 684462 - RNA, 22 nt, Human
uccagcucuguucaggguggga

SEQ ID NO: 684463 - RNA, 23 nt, Human
uccgaaaacucagcugugacugc

SEQ ID NO: 684464 - RNA, 24 nt, Human
uccuucaauaaaaacacagucacc

SEQ ID NO: 684465 - RNA, 19 nt, Human
ucuaacagcucagcccaaa

SEQ ID NO: 684466 - RNA, 18 nt, Human
ucuaugagaaagcgggga

SEQ ID NO: 684467 - RNA, 18 nt, Human
ucuccgaaaacucagcug

SEQ ID NO: 684468 - RNA, 23 nt, Human
ucucgagccucuggagaagcccc

SEQ ID NO: 684469 - RNA, 21 nt, Human
ucuuccuaaaaaccacccaaa

SEQ ID NO: 684470 - RNA, 21 nt, Human
ugagaaaaacugcuuauaagu

SEQ ID NO: 684471 - RNA, 22 nt, Human
ugagaaaaacugcuuauaagug

SEQ ID NO: 684472 - RNA, 23 nt, Human
ugagaaagcggggagagcaacac

SEQ ID NO: 684473 - RNA, 24 nt, Human
ugagaaagcggggagagcaacacc

SEQ ID NO: 684474 - RNA, 18 nt, Human
ugccgaacucugacucua

SEQ ID NO: 684475 - RNA, 22 nt, Human
ugcucaagccgagggcagaggc

SEQ ID NO: 684476 - RNA, 21 nt, Human
ugggaaaaagcacagauccug

SEQ ID NO: 684477 - RNA, 21 nt, Human
ugggaaauggccugcucucga

SEQ ID NO: 684478 - RNA, 23 nt, Human
ugugcacacacacagaaaccacg

SEQ ID NO: 684479 - RNA, 21 nt, Human
ugugugugugcacacacacag

SEQ ID NO: 684480 - RNA, 22 nt, Human
uucaccaaaagcaauaaagagg

SEQ ID NO: 684481 - RNA, 24 nt, Human
uuccuaaaaaccacccaaacacua

SEQ ID NO: 684482 - RNA, 24 nt, Human
uuugccaugaucccuuuccauuug

SEQ ID NO: 684483 - RNA, 21 nt, Human
caagaaggggcgcguccgacg

SEQ ID NO: 684484 - RNA, 25 nt, Human
cacuauuauuuuaagaaucagucaa

SEQ ID NO: 684485 - RNA, 20 nt, Human
uagcccccccgcccacgcuc

SEQ ID NO: 684486 - RNA, 21 nt, Human
ucaaaucaguccggucucuuc

SEQ ID NO: 684487 - RNA, 19 nt, Human
uccaagaaggggcgcgucc

SEQ ID NO: 684488 - RNA, 23 nt, Human
ucuucauacugccaacaugucca

SEQ ID NO: 684489 - RNA, 23 nt, Human
ugcaccaccugaccgugacgucg

SEQ ID NO: 684490 - RNA, 19 nt, Human
uuuuuuuuuuuuuuuuuaa

SEQ ID NO: 684491 - RNA, 23 nt, Human
aaaaauaaaaguuucugagucug

SEQ ID NO: 684492 - RNA, 24 nt, Human
aaccaaacaacccuggccugcgcu

SEQ ID NO: 684493 - RNA, 19 nt, Human
aacccggagguguggccca

SEQ ID NO: 684494 - RNA, 19 nt, Human
aaggacuuuccuuggggga

SEQ ID NO: 684495 - RNA, 21 nt, Human
acccggagguguggcccacga

SEQ ID NO: 684496 - RNA, 24 nt, Human
accgcagaacugagccgccccaga

SEQ ID NO: 684497 - RNA, 23 nt, Human
aguuucugagucugauaauucca

SEQ ID NO: 684498 - RNA, 20 nt, Human
caaaaccaaacaacccuggc

SEQ ID NO: 684499 - RNA, 20 nt, Human
caaagugccccugggccuuc

SEQ ID NO: 684500 - RNA, 25 nt, Human
caccucaaaaccaaacaacccuggc

SEQ ID NO: 684501 - RNA, 23 nt, Human
cagaaaaaaaaaauaaaaguuuc

SEQ ID NO: 684502 - RNA, 18 nt, Human
cagcacaccucaaaacca

SEQ ID NO: 684503 - RNA, 22 nt, Human
cagcacaccucaaaaccaaaca

SEQ ID NO: 684504 - RNA, 21 nt, Human
caucccagcacaccucaaaac

SEQ ID NO: 684505 - RNA, 22 nt, Human
caucccagcacaccucaaaacc

SEQ ID NO: 684506 - RNA, 24 nt, Human
ccaaagugccccugggccuucgca

SEQ ID NO: 684507 - RNA, 18 nt, Human
cccaucuguguuugggac

SEQ ID NO: 684508 - RNA, 19 nt, Human
cccucauaaacucgcacuu

SEQ ID NO: 684509 - RNA, 23 nt, Human
cgcacuuugauuagaaaagugca

SEQ ID NO: 684510 - RNA, 22 nt, Human
cucccuggcaccgcagaacuga

SEQ ID NO: 684511 - RNA, 23 nt, Human
cugcuccacucccuggcaccgca

SEQ ID NO: 684512 - RNA, 20 nt, Human
gaaaguagagcuuuacccuc

SEQ ID NO: 684513 - RNA, 22 nt, Human
gagccgccccagacugcccugg

SEQ ID NO: 684514 - RNA, 24 nt, Human
gcucauuuaccuuccacuuccagg

SEQ ID NO: 684515 - RNA, 25 nt, Human
ggguauugggcucagguaucuuucu

SEQ ID NO: 684516 - RNA, 23 nt, Human
gggugccuuucaucccagcacac

SEQ ID NO: 684517 - RNA, 19 nt, Human
guuugcuuccucccuuccc

SEQ ID NO: 684518 - RNA, 24 nt, Human
uaauuccaaggguaucuuuuagaa

SEQ ID NO: 684519 - RNA, 24 nt, Human
ucaauaugacaguuugcuuccucc

SEQ ID NO: 684520 - RNA, 21 nt, Human
ucauugugcaacuuguguuuc

SEQ ID NO: 684521 - RNA, 22 nt, Human
ucccaaagugccccugggccuu

SEQ ID NO: 684522 - RNA, 21 nt, Human
ugagaagucuggugagacagu

SEQ ID NO: 684523 - RNA, 21 nt, Human
ugagaagucuggugagacagu

SEQ ID NO: 684524 - RNA, 18 nt, Human
ugccccugggccuucgca

SEQ ID NO: 684525 - RNA, 23 nt, Human
ugcucauuuaccuuccacuucca

SEQ ID NO: 684526 - RNA, 22 nt, Human
ugcuccacucccuggcaccgca

SEQ ID NO: 684527 - RNA, 20 nt, Human
uggcccacgacaucaggcgg

SEQ ID NO: 684528 - RNA, 18 nt, Human
ugggccuucgcacacugu

SEQ ID NO: 684529 - RNA, 23 nt, Human
uggugucugugcaaggacuuucc

SEQ ID NO: 684530 - RNA, 22 nt, Human
uguuuccucuuggucaauccca

SEQ ID NO: 684531 - RNA, 25 nt, Human
uuagaacucacucacuggugucugu

SEQ ID NO: 684532 - RNA, 23 nt, Human
uuuccuugggggaaaauagauuu

SEQ ID NO: 684533 - RNA, 19 nt, Human
uuuuuuuuuuuuuuuugcu

SEQ ID NO: 684534 - RNA, 21 nt, Human
uuuuuuuuuuuuuuuugcuag

SEQ ID NO: 684535 - RNA, 19 nt, Human
aacuugauccagugagcga

SEQ ID NO: 684536 - RNA, 20 nt, Human
acagugggaagaauuuuggc

SEQ ID NO: 684537 - RNA, 23 nt, Human
augacagugggaagaauuuuggc

SEQ ID NO: 684538 - RNA, 22 nt, Human
cagcaggaugugucuagaaauc

SEQ ID NO: 684539 - RNA, 19 nt, Human
caguggaacaacuugaucu

SEQ ID NO: 684540 - RNA, 18 nt, Human
cauuagguuacccaggga

SEQ ID NO: 684541 - RNA, 24 nt, Human
ccaaucguugauucaaucucccca

SEQ ID NO: 684542 - RNA, 20 nt, Human
ccccauaaaccuggucgcaa

SEQ ID NO: 684543 - RNA, 19 nt, Human
ccugucuuugagaccaauc

SEQ ID NO: 684544 - RNA, 24 nt, Human
cgaccagucgcugcugcuguggug

SEQ ID NO: 684545 - RNA, 21 nt, Human
cuccccauaaaccuggucgca

SEQ ID NO: 684546 - RNA, 21 nt, Human
cuguguggccucagauuuucc

SEQ ID NO: 684547 - RNA, 23 nt, Human
cuguguggccucagauuuucccu

SEQ ID NO: 684548 - RNA, 20 nt, Human
cuugcucugccuggguugaa

SEQ ID NO: 684549 - RNA, 21 nt, Human
gauugugugcugcuagccagu

SEQ ID NO: 684550 - RNA, 20 nt, Human
ggcgcacagucggcuggggg

SEQ ID NO: 684551 - RNA, 19 nt, Human
uacaucacagcaggaugug

SEQ ID NO: 684552 - RNA, 23 nt, Human
uagcacauucucuugcaucagca

SEQ ID NO: 684553 - RNA, 19 nt, Human
uauuagacaccaguggaac

SEQ ID NO: 684554 - RNA, 25 nt, Human
ucccuugcaauuuguguugccuucu

SEQ ID NO: 684555 - RNA, 23 nt, Human
ucucucuuuuaucacucuggguu

SEQ ID NO: 684556 - RNA, 19 nt, Human
ucuugcucugccuggguug

SEQ ID NO: 684557 - RNA, 21 nt, Human
ucuugcucugccuggguugaa

SEQ ID NO: 684558 - RNA, 21 nt, Human
ucuuugagaccaaucguugau

SEQ ID NO: 684559 - RNA, 22 nt, Human
ugaacagacucuucucagcacc

SEQ ID NO: 684560 - RNA, 19 nt, Human
ugccacgcacucucugcag

SEQ ID NO: 684561 - RNA, 24 nt, Human
uggggguaaggauugccacgcacu

SEQ ID NO: 684562 - RNA, 24 nt, Human
ugugcaaauacacaaauauacaca

SEQ ID NO: 684563 - RNA, 21 nt, Human
uguugccuucuuuggagacug

SEQ ID NO: 684564 - RNA, 23 nt, Human
uuggcugugaacagacucuucuc

SEQ ID NO: 684565 - RNA, 20 nt, Human
aaucuuaaaacucagcccug

SEQ ID NO: 684566 - RNA, 23 nt, Human
agacauacuggccacuggaaaca

SEQ ID NO: 684567 - RNA, 21 nt, Human
aggaaaggagagaaaaucuua

SEQ ID NO: 684568 - RNA, 22 nt, Human
aggcaggaaauacaaaagggac

SEQ ID NO: 684569 - RNA, 19 nt, Human
caaagcaaugaaagacaua

SEQ ID NO: 684570 - RNA, 22 nt, Human
gcaaagcaaugaaagacauacu

SEQ ID NO: 684571 - RNA, 21 nt, Human
gcccugggcuaggagggcgcc

SEQ ID NO: 684572 - RNA, 23 nt, Human
gggccgggucaacagugggcugc

SEQ ID NO: 684573 - RNA, 23 nt, Human
guuucuucuuacuuugggggugg

SEQ ID NO: 684574 - RNA, 20 nt, Human
uaggagggcgccacacagca

SEQ ID NO: 684575 - RNA, 24 nt, Human
ugccacagagggcgauggggugac

SEQ ID NO: 684576 - RNA, 21 nt, Human
uggccaggaacuccuagagca

SEQ ID NO: 684577 - RNA, 19 nt, Human
ugguaacagugggugcaaa

SEQ ID NO: 684578 - RNA, 19 nt, Human
uugaggaaccaaaggagaa

SEQ ID NO: 684579 - RNA, 26 nt, Human
aaacaaaaaggaaggaaaagggaccc

SEQ ID NO: 684580 - RNA, 23 nt, Human
aagagccagauagggaaauggag

SEQ ID NO: 684581 - RNA, 26 nt, Human
aauaaaauaaaaccaccacgauucga

SEQ ID NO: 684582 - RNA, 21 nt, Human
agaaaagagagagacagagaa

SEQ ID NO: 684583 - RNA, 21 nt, Human
agaaaaggguuggggauggca

SEQ ID NO: 684584 - RNA, 18 nt, Human
agagacagagaaagagag

SEQ ID NO: 684585 - RNA, 22 nt, Human
aggaaaagaaggaagaaaagag

SEQ ID NO: 684586 - RNA, 21 nt, Human
aggaagaaaagagagagacag

SEQ ID NO: 684587 - RNA, 23 nt, Human
aggaaggaaaagaaggaagaaaa

SEQ ID NO: 684588 - RNA, 25 nt, Human
aggaaggaaaagaaggaagaaaaga

SEQ ID NO: 684589 - RNA, 24 nt, Human
aggcaagaaaagaauugauuccuu

SEQ ID NO: 684590 - RNA, 25 nt, Human
aggcaagaaaagaauugauuccuua

SEQ ID NO: 684591 - RNA, 23 nt, Human
agggacaagagagaaagagccag

SEQ ID NO: 684592 - RNA, 22 nt, Human
augcgccccagagacugccggg

SEQ ID NO: 684593 - RNA, 20 nt, Human
augguagguaguuuaaauac

SEQ ID NO: 684594 - RNA, 21 nt, Human
caccacgauucgaagaacaaa

SEQ ID NO: 684595 - RNA, 23 nt, Human
caccagucgccggagcccagagc

SEQ ID NO: 684596 - RNA, 20 nt, Human
cagagccuggcguucgccgc

SEQ ID NO: 684597 - RNA, 24 nt, Human
caggaugaacaaacaccugagcac

SEQ ID NO: 684598 - RNA, 19 nt, Human
caugcgccccagagacugc

SEQ ID NO: 684599 - RNA, 22 nt, Human
ccaccacgauucgaagaacaaa

SEQ ID NO: 684600 - RNA, 23 nt, Human
ccaccacgauucgaagaacaaag

SEQ ID NO: 684601 - RNA, 23 nt, Human
ccagagccuggcguucgccgcuu

SEQ ID NO: 684602 - RNA, 25 nt, Human
ccccagagacugccgggggccaccu

SEQ ID NO: 684603 - RNA, 22 nt, Human
ccucgguugggcugggggugga

SEQ ID NO: 684604 - RNA, 20 nt, Human
ccugugggcucuggagccaa

SEQ ID NO: 684605 - RNA, 18 nt, Human
ccuguuuaacccuucugc

SEQ ID NO: 684606 - RNA, 22 nt, Human
cgaggucgccgaagcccaaaga

SEQ ID NO: 684607 - RNA, 19 nt, Human
cuccaaaaggguggaagag

SEQ ID NO: 684608 - RNA, 19 nt, Human
cucccggggcuucaggagu

SEQ ID NO: 684609 - RNA, 25 nt, Human
cuucuugcauguugccgccaagggc

SEQ ID NO: 684610 - RNA, 21 nt, Human
gaagaaaagagagagacagag

SEQ ID NO: 684611 - RNA, 20 nt, Human
gaagggaggggggcugugag

SEQ ID NO: 684612 - RNA, 21 nt, Human
gaagggaggggggcugugagu

SEQ ID NO: 684613 - RNA, 25 nt, Human
gagagagacagagaaagagagaaag

SEQ ID NO: 684614 - RNA, 22 nt, Human
gaggucgccgaagcccaaagac

SEQ ID NO: 684615 - RNA, 19 nt, Human
gccgaagcccaaagaccug

SEQ ID NO: 684616 - RNA, 18 nt, Human
gccggagcccagagccug

SEQ ID NO: 684617 - RNA, 21 nt, Human
gccuggcguucgccgcugccu

SEQ ID NO: 684618 - RNA, 18 nt, Human
gcgauccaaguguguggu

SEQ ID NO: 684619 - RNA, 19 nt, Human
gcgcagcccacugucuucu

SEQ ID NO: 684620 - RNA, 24 nt, Human
gcgcucagcagaagcuccgcggga

SEQ ID NO: 684621 - RNA, 21 nt, Human
ggagcccagagccuggcguuc

SEQ ID NO: 684622 - RNA, 21 nt, Human
ggaugaacaaacaccugagca

SEQ ID NO: 684623 - RNA, 20 nt, Human
ggcucuggagccacuacugg

SEQ ID NO: 684624 - RNA, 23 nt, Human
gggguggauauauauauauuucu

SEQ ID NO: 684625 - RNA, 18 nt, Human
gguucucuuucucaggca

SEQ ID NO: 684626 - RNA, 25 nt, Human
uacauaaaaacuuuccaacacaggg

SEQ ID NO: 684627 - RNA, 23 nt, Human
uacuggccugcgccgccagcccu

SEQ ID NO: 684628 - RNA, 33 nt, Human
uacuggccugcgccgccagcccuauuaacgccg

SEQ ID NO: 684629 - RNA, 19 nt, Human
uacugggcgccggcuuugg

SEQ ID NO: 684630 - RNA, 21 nt, Human
uacugggcgccggcuuuggga

SEQ ID NO: 684631 - RNA, 27 nt, Human
uagaaacaaaaaggaaggaaaagaagg

SEQ ID NO: 684632 - RNA, 24 nt, Human
uagacacugcuuuggcgaagggag

SEQ ID NO: 684633 - RNA, 22 nt, Human
uagagaagacggcgucggggcg

SEQ ID NO: 684634 - RNA, 18 nt, Human
ucgccgaagcccaaagac

SEQ ID NO: 684635 - RNA, 21 nt, Human
ucucuuucucaggcaagaaaa

SEQ ID NO: 684636 - RNA, 19 nt, Human
ugaacaaacaccugagcac

SEQ ID NO: 684637 - RNA, 20 nt, Human
ugaacaaacaccugagcaca

SEQ ID NO: 684638 - RNA, 21 nt, Human
ugaacaaacaccugagcacaa

SEQ ID NO: 684639 - RNA, 22 nt, Human
ugaacaaacaccugagcacaac

SEQ ID NO: 684640 - RNA, 23 nt, Human
ugagcccuuggguucgacagucc

SEQ ID NO: 684641 - RNA, 23 nt, Human
ugauuucagaaaauguuuuauua

SEQ ID NO: 684642 - RNA, 23 nt, Human
ugcagcgacaaaaagaaaaauaa

SEQ ID NO: 684643 - RNA, 21 nt, Human
ugcauuuuaauuagagaagac

SEQ ID NO: 684644 - RNA, 24 nt, Human
ugccggcgcucagcagaagcuccg

SEQ ID NO: 684645 - RNA, 21 nt, Human
ugcgccccagagacugccggg

SEQ ID NO: 684646 - RNA, 22 nt, Human
ugcguagcaccagucgccggag

SEQ ID NO: 684647 - RNA, 26 nt, Human
uggccagguccucggcgcgggccucg

SEQ ID NO: 684648 - RNA, 21 nt, Human
uggccuggccagguccucggc

SEQ ID NO: 684649 - RNA, 18 nt, Human
uggcuggccuggccaggu

SEQ ID NO: 684650 - RNA, 19 nt, Human
ugguagguaguuuaaauac

SEQ ID NO: 684651 - RNA, 22 nt, Human
uuagauagaaacaaaaaggaag

SEQ ID NO: 684652 - RNA, 22 nt, Human
uucaucuuccugcgucugguuc

SEQ ID NO: 684653 - RNA, 20 nt, Human
uuccucuccucccggggcuu

SEQ ID NO: 684654 - RNA, 23 nt, Human
uucuuaccgguuucugccgcggg

SEQ ID NO: 684655 - RNA, 19 nt, Human
uuuggcgaagggagggggg

SEQ ID NO: 684656 - RNA, 19 nt, Human
aacgcucggcguccucccc

SEQ ID NO: 684657 - RNA, 19 nt, Human
acgggaguguccucuucgg

SEQ ID NO: 684658 - RNA, 21 nt, Human
agcccccgggcgcccgggccc

SEQ ID NO: 684659 - RNA, 20 nt, Human
caccccccagcccccgggcg

SEQ ID NO: 684660 - RNA, 22 nt, Human
cacgcgccccaucgugcgcgca

SEQ ID NO: 684661 - RNA, 20 nt, Human
cacuuuuuuuuuggaggggg

SEQ ID NO: 684662 - RNA, 20 nt, Human
cagagcggagcgcggacggc

SEQ ID NO: 684663 - RNA, 23 nt, Human
cagcggcagccgcagagggggcu

SEQ ID NO: 684664 - RNA, 24 nt, Human
ccccagcccccgggcgcccgggcc

SEQ ID NO: 684665 - RNA, 19 nt, Human
cccccgggcgcccgggccc

SEQ ID NO: 684666 - RNA, 22 nt, Human
cccccgggcgcccgggcccgcc

SEQ ID NO: 684667 - RNA, 21 nt, Human
ccccgccgcgcccucggcccg

SEQ ID NO: 684668 - RNA, 22 nt, Human
ccccgggcgcccgggcccgccc

SEQ ID NO: 684669 - RNA, 19 nt, Human
ccccucgcccucgcgguug

SEQ ID NO: 684670 - RNA, 18 nt, Human
cccgcagaaguccgcaga

SEQ ID NO: 684671 - RNA, 18 nt, Human
cccgccgcgcccucggcc

SEQ ID NO: 684672 - RNA, 22 nt, Human
cccucggcccgggccccugccu

SEQ ID NO: 684673 - RNA, 18 nt, Human
cccugccucaacgcucgg

SEQ ID NO: 684674 - RNA, 25 nt, Human
cccugcucacucgcgcucuccuccu

SEQ ID NO: 684675 - RNA, 22 nt, Human
ccgcccggcagcggcagccgca

SEQ ID NO: 684676 - RNA, 25 nt, Human
ccgccgcgcccucggcccgggcccc

SEQ ID NO: 684677 - RNA, 20 nt, Human
ccuccacgcgccccaucgug

SEQ ID NO: 684678 - RNA, 23 nt, Human
ccuccgcgccccuccacgcgccc

SEQ ID NO: 684679 - RNA, 20 nt, Human
ccucgcgguugucaccgccc

SEQ ID NO: 684680 - RNA, 18 nt, Human
cgcagccccgccgcgccc

SEQ ID NO: 684681 - RNA, 19 nt, Human
cggcagcggcagccgcaga

SEQ ID NO: 684682 - RNA, 22 nt, Human
cggcccgggccccugccucaac

SEQ ID NO: 684683 - RNA, 20 nt, Human
cggcguccucccccaccccc

SEQ ID NO: 684684 - RNA, 21 nt, Human
cggcguccucccccacccccc

SEQ ID NO: 684685 - RNA, 21 nt, Human
cgggcgcccgggcccgcccgg

SEQ ID NO: 684686 - RNA, 22 nt, Human
cucaaagggggucaaagagagg

SEQ ID NO: 684687 - RNA, 24 nt, Human
cucggcccgggccccugccucaac

SEQ ID NO: 684688 - RNA, 18 nt, Human
gcccuccgcgccccucca

SEQ ID NO: 684689 - RNA, 21 nt, Human
gccugcacacgggaguguccu

SEQ ID NO: 684690 - RNA, 20 nt, Human
gcgcagccccgccgcgcccu

SEQ ID NO: 684691 - RNA, 23 nt, Human
gcggagcgcggacggcuuuuccg

SEQ ID NO: 684692 - RNA, 21 nt, Human
gcucacucgcgcucuccuccu

SEQ ID NO: 684693 - RNA, 20 nt, Human
ggcccgcccggcagcggcag

SEQ ID NO: 684694 - RNA, 20 nt, Human
uaaaauauggaaugcuuuuc

SEQ ID NO: 684695 - RNA, 18 nt, Human
ucagagcggagcgcggac

SEQ ID NO: 684696 - RNA, 19 nt, Human
ucccccaccccccagcccc

SEQ ID NO: 684697 - RNA, 18 nt, Human
uccgcagagccucuagcu

SEQ ID NO: 684698 - RNA, 26 nt, Human
ucgugcgcgcagccccgccgcgcccu

SEQ ID NO: 684699 - RNA, 20 nt, Human
ucuccuccuccuccuucucc

SEQ ID NO: 684700 - RNA, 20 nt, Human
ugcaaggaguccucagagcg

SEQ ID NO: 684701 - RNA, 20 nt, Human
ugcucacucgcgcucuccuc

SEQ ID NO: 684702 - RNA, 21 nt, Human
uggaaugcuuuucuucaaaua

SEQ ID NO: 684703 - RNA, 22 nt, Human
uggccccugcucacucgcgcuc

SEQ ID NO: 684704 - RNA, 22 nt, Human
ugguaggcuccuucucccacgu

SEQ ID NO: 684705 - RNA, 24 nt, Human
ugguaggcuccuucucccacgucu

SEQ ID NO: 684706 - RNA, 21 nt, Human
aaaccugaaaaaaucugagua

SEQ ID NO: 684707 - RNA, 22 nt, Human
aaguggggagaaugguauaaug

SEQ ID NO: 684708 - RNA, 22 nt, Human
acaggucccuacugccccacca

SEQ ID NO: 684709 - RNA, 24 nt, Human
acccucaacaggauaaccugaagc

SEQ ID NO: 684710 - RNA, 19 nt, Human
agaaguggggagaauggua

SEQ ID NO: 684711 - RNA, 18 nt, Human
agacuuuggagagaagcu

SEQ ID NO: 684712 - RNA, 20 nt, Human
agagaagaagggagccccga

SEQ ID NO: 684713 - RNA, 21 nt, Human
agagaagaagggagccccgag

SEQ ID NO: 684714 - RNA, 22 nt, Human
agagaagcucagcaaccucgaa

SEQ ID NO: 684715 - RNA, 18 nt, Human
aggaagugguuguugcca

SEQ ID NO: 684716 - RNA, 24 nt, Human
aggaagugguuguugccaguguuu

SEQ ID NO: 684717 - RNA, 18 nt, Human
aggaucccuuuacccugc

SEQ ID NO: 684718 - RNA, 24 nt, Human
agugggccuuuaaaaaaaguuaga

SEQ ID NO: 684719 - RNA, 22 nt, Human
caaaugcccguguuaaaguucu

SEQ ID NO: 684720 - RNA, 30 nt, Human
caauuaucaacauguggccaguuuuucauu

SEQ ID NO: 684721 - RNA, 21 nt, Human
cacauccucacaauaagauug

SEQ ID NO: 684722 - RNA, 19 nt, Human
caccccacaccagcccugc

SEQ ID NO: 684723 - RNA, 18 nt, Human
cacucuucccacccaccc

SEQ ID NO: 684724 - RNA, 24 nt, Human
cagccaguccccucggcagagccu

SEQ ID NO: 684725 - RNA, 19 nt, Human
cagugggccuuuaaaaaaa

SEQ ID NO: 684726 - RNA, 21 nt, Human
ccacccucaacaggauaaccu

SEQ ID NO: 684727 - RNA, 21 nt, Human
ccaguguuugggaaaggcuaa

SEQ ID NO: 684728 - RNA, 18 nt, Human
ccccacaccagcccugcc

SEQ ID NO: 684729 - RNA, 23 nt, Human
ccucucacaggucccuacugccc

SEQ ID NO: 684730 - RNA, 21 nt, Human
ccuuuacccugcccuccccca

SEQ ID NO: 684731 - RNA, 18 nt, Human
cuagaaaaaccugaaaaa

SEQ ID NO: 684732 - RNA, 19 nt, Human
cugcaccccacaccagccc

SEQ ID NO: 684733 - RNA, 27 nt, Human
cugcaccccacaccagcccugccagag

SEQ ID NO: 684734 - RNA, 24 nt, Human
gagaaaaacuucagagauaagugu

SEQ ID NO: 684735 - RNA, 22 nt, Human
gagaaugacacuuugcauugag

SEQ ID NO: 684736 - RNA, 23 nt, Human
gaggagcuagaaaaaccugaaaa

SEQ ID NO: 684737 - RNA, 24 nt, Human
gcaaauaggggcugguaggguggu

SEQ ID NO: 684738 - RNA, 19 nt, Human
gcagaccucuagggcagca

SEQ ID NO: 684739 - RNA, 21 nt, Human
gcagugggccuuuaaaaaaag

SEQ ID NO: 684740 - RNA, 21 nt, Human
gcugcaccccacaccagcccu

SEQ ID NO: 684741 - RNA, 21 nt, Human
ggaggagcuagaaaaaccuga

SEQ ID NO: 684742 - RNA, 22 nt, Human
ggaggagcuagaaaaaccugaa

SEQ ID NO: 684743 - RNA, 18 nt, Human
ggaucccuuuacccugcc

SEQ ID NO: 684744 - RNA, 22 nt, Human
gggagaaugguauaaugaaugu

SEQ ID NO: 684745 - RNA, 20 nt, Human
gggcagcaggagccugggcg

SEQ ID NO: 684746 - RNA, 21 nt, Human
gugauuggaguccugguggga

SEQ ID NO: 684747 - RNA, 26 nt, Human
uacccugcccucccccauaacccagc

SEQ ID NO: 684748 - RNA, 23 nt, Human
uaccugcuguucugagugggauc

SEQ ID NO: 684749 - RNA, 22 nt, Human
uagaaaaaccugaaaaaaucug

SEQ ID NO: 684750 - RNA, 23 nt, Human
uagaaaaaccugaaaaaaucuga

SEQ ID NO: 684751 - RNA, 21 nt, Human
uagaacacauucaagaaagug

SEQ ID NO: 684752 - RNA, 22 nt, Human
uaggggccacugauaauagaaa

SEQ ID NO: 684753 - RNA, 21 nt, Human
uauaaugaauguccacguacc

SEQ ID NO: 684754 - RNA, 21 nt, Human
uaugaaauggaaucaucaucu

SEQ ID NO: 684755 - RNA, 19 nt, Human
ucacucuucccacccaccc

SEQ ID NO: 684756 - RNA, 20 nt, Human
ucagaacacugaacaaguca

SEQ ID NO: 684757 - RNA, 19 nt, Human
ucaggaccucucagaaauc

SEQ ID NO: 684758 - RNA, 23 nt, Human
ucaucccaccaccgcugucucgg

SEQ ID NO: 684759 - RNA, 20 nt, Human
ucaucccuucuucuucuucc

SEQ ID NO: 684760 - RNA, 18 nt, Human
ucccuucuucuucuuccc

SEQ ID NO: 684761 - RNA, 18 nt, Human
ucucacaggucccuacug

SEQ ID NO: 684762 - RNA, 25 nt, Human
ugaaaauaaagcagugggccuuuaa

SEQ ID NO: 684763 - RNA, 24 nt, Human
ugaaauggaaucaucaucucugcc

SEQ ID NO: 684764 - RNA, 19 nt, Human
ugcaaacaaauacagaagu

SEQ ID NO: 684765 - RNA, 21 nt, Human
ugcccucccccauaacccagc

SEQ ID NO: 684766 - RNA, 18 nt, Human
ugggaaaggcuaaaguua

SEQ ID NO: 684767 - RNA, 19 nt, Human
ugggaggucccaacggugc

SEQ ID NO: 684768 - RNA, 18 nt, Human
ugggggaaguacauuggg

SEQ ID NO: 684769 - RNA, 19 nt, Human
uguuaaaguucuccauugg

SEQ ID NO: 684770 - RNA, 26 nt, Human
uuaaggaucccuuuacccugcccucc

SEQ ID NO: 684771 - RNA, 21 nt, Human
uucaagaaagugacauacgga

SEQ ID NO: 684772 - RNA, 24 nt, Human
uuccaugaaacucuguguuugggg

SEQ ID NO: 684773 - RNA, 21 nt, Human
uugcagaccucuagggcagca

SEQ ID NO: 684774 - RNA, 26 nt, Human
uuggugugggguuuccaugaaacucu

SEQ ID NO: 684775 - RNA, 19 nt, Human
uuuaaggaucccuuuaccc

SEQ ID NO: 684776 - RNA, 22 nt, Human
aaaauagcacuuggccucagca

SEQ ID NO: 684777 - RNA, 19 nt, Human
aaacaaaaaaccuagcagc

SEQ ID NO: 684778 - RNA, 22 nt, Human
aaacaaaaaaccuagcagcaca

SEQ ID NO: 684779 - RNA, 25 nt, Human
aacaaaaauaaagugcagcacccau

SEQ ID NO: 684780 - RNA, 22 nt, Human
acaaaaauaaagugcagcaccc

SEQ ID NO: 684781 - RNA, 21 nt, Human
acaaaacaaaaaaccuagcag

SEQ ID NO: 684782 - RNA, 19 nt, Human
acaaaacaaaacaaaaaac

SEQ ID NO: 684783 - RNA, 22 nt, Human
acaaaacaaaacaaaaaaccua

SEQ ID NO: 684784 - RNA, 23 nt, Human
acccauaaaagugucaagaaaau

SEQ ID NO: 684785 - RNA, 21 nt, Human
agaacaaaacaaaacaaaaaa

SEQ ID NO: 684786 - RNA, 27 nt, Human
agcacccauaaaagugucaagaaaaua

SEQ ID NO: 684787 - RNA, 20 nt, Human
agcagaugccucccagaauc

SEQ ID NO: 684788 - RNA, 19 nt, Human
augccucccagaaucaacc

SEQ ID NO: 684789 - RNA, 23 nt, Human
auuucaguacucuuucccuccca

SEQ ID NO: 684790 - RNA, 24 nt, Human
caaaaaccaaacaaaaauaaagug

SEQ ID NO: 684791 - RNA, 21 nt, Human
caacugccacugccaacagac

SEQ ID NO: 684792 - RNA, 19 nt, Human
cagcacccauaaaaguguc

SEQ ID NO: 684793 - RNA, 26 nt, Human
cagcacccauaaaagugucaagaaaa

SEQ ID NO: 684794 - RNA, 20 nt, Human
caucaaaaaccaaacaaaaa

SEQ ID NO: 684795 - RNA, 21 nt, Human
ccaaacaaaaauaaagugcag

SEQ ID NO: 684796 - RNA, 25 nt, Human
ccaaacaaaaauaaagugcagcacc

SEQ ID NO: 684797 - RNA, 20 nt, Human
ccacugccaacagacuuggc

SEQ ID NO: 684798 - RNA, 21 nt, Human
cccauaaaagugucaagaaaa

SEQ ID NO: 684799 - RNA, 19 nt, Human
cgcccuuggcccuacaacu

SEQ ID NO: 684800 - RNA, 21 nt, Human
cugccacugccaacagacuug

SEQ ID NO: 684801 - RNA, 20 nt, Human
cugcgccgagccagaagccc

SEQ ID NO: 684802 - RNA, 21 nt, Human
cuuggccucagcagucuuaac

SEQ ID NO: 684803 - RNA, 19 nt, Human
gaacaaaacaaaacaaaaa

SEQ ID NO: 684804 - RNA, 22 nt, Human
gcacuuggccucagcagucuua

SEQ ID NO: 684805 - RNA, 23 nt, Human
uacaaccgcccuuggcccuacaa

SEQ ID NO: 684806 - RNA, 20 nt, Human
uagcagcacauuaaaaaaaa

SEQ ID NO: 684807 - RNA, 23 nt, Human
uauccauauaaaaagagacugua

SEQ ID NO: 684808 - RNA, 20 nt, Human
uaugguaccacucuucucuu

SEQ ID NO: 684809 - RNA, 18 nt, Human
ucagaacaaaacaaaaca

SEQ ID NO: 684810 - RNA, 25 nt, Human
ucagaacaaaacaaaacaaaaaacc

SEQ ID NO: 684811 - RNA, 22 nt, Human
uccaaaauugagaacaauaaga

SEQ ID NO: 684812 - RNA, 24 nt, Human
ucccucccaucaaaaaccaaacaa

SEQ ID NO: 684813 - RNA, 23 nt, Human
uccugcaacauaugguaccacuc

SEQ ID NO: 684814 - RNA, 23 nt, Human
ugagaacaauaagauuaaaggca

SEQ ID NO: 684815 - RNA, 19 nt, Human
uggcgugaauggaaccugc

SEQ ID NO: 684816 - RNA, 21 nt, Human
uguaaacauugcauuugugca

SEQ ID NO: 684817 - RNA, 18 nt, Human
uguagaauaggacaugua

SEQ ID NO: 684818 - RNA, 19 nt, Human
uguagcagaugccucccag

SEQ ID NO: 684819 - RNA, 27 nt, Human
uuaaaaaaaauuuacaaaacauuucag

SEQ ID NO: 684820 - RNA, 23 nt, Human
uucagaacaaaacaaaacaaaaa

SEQ ID NO: 684821 - RNA, 19 nt, Human
uuggccucagcagucuuaa

SEQ ID NO: 684822 - RNA, 18 nt, Human
uuuuuuuuuuuuuuuuug

SEQ ID NO: 684823 - RNA, 19 nt, Human
uuuuuuuuuuuuuuuuugu

SEQ ID NO: 684824 - RNA, 22 nt, Human
acacaagagaaacaaagucaaa

SEQ ID NO: 684825 - RNA, 20 nt, Human
acagcaaaucucaauaagca

SEQ ID NO: 684826 - RNA, 20 nt, Human
accacuacacaagagaaaca

SEQ ID NO: 684827 - RNA, 22 nt, Human
caaaagaauuauauauuaaugc

SEQ ID NO: 684828 - RNA, 20 nt, Human
caagagaaacaaagucaaaa

SEQ ID NO: 684829 - RNA, 20 nt, Human
cacuacacaagagaaacaaa

SEQ ID NO: 684830 - RNA, 20 nt, Human
cauacuuuguacaauuugcu

SEQ ID NO: 684831 - RNA, 22 nt, Human
ccacuacacaagagaaacaaag

SEQ ID NO: 684832 - RNA, 25 nt, Human
cuuccacuauaguccucuauaacaa

SEQ ID NO: 684833 - RNA, 18 nt, Human
gcggggcggggccggggc

SEQ ID NO: 684834 - RNA, 21 nt, Human
uauaacaaaacauccuacaua

SEQ ID NO: 684835 - RNA, 24 nt, Human
uauauuaaugcaaagaguaaacac

SEQ ID NO: 684836 - RNA, 23 nt, Human
uccacuauaguccucuauaacaa

SEQ ID NO: 684837 - RNA, 20 nt, Human
ugcaaagaguaaacacagaa

SEQ ID NO: 684838 - RNA, 18 nt, Human
uuaaauauuugauaugaa

SEQ ID NO: 684839 - RNA, 20 nt, Human
aaacaagaagaggguacugg

SEQ ID NO: 684840 - RNA, 26 nt, Human
aaagcaaugugaggucacuggggccc

SEQ ID NO: 684841 - RNA, 19 nt, Human
aacaugguaaaaccccguc

SEQ ID NO: 684842 - RNA, 20 nt, Human
aacaugguaaaaccccgucu

SEQ ID NO: 684843 - RNA, 21 nt, Human
aacaugguaaaaccccgucuc

SEQ ID NO: 684844 - RNA, 29 nt, Human
aacccagagagaaugacgucccccgaggg

SEQ ID NO: 684845 - RNA, 22 nt, Human
aagaggacagaggcuuccagga

SEQ ID NO: 684846 - RNA, 21 nt, Human
aagcagaaaugacaacuaaau

SEQ ID NO: 684847 - RNA, 25 nt, Human
aagcagaaaugacaacuaaaugccg

SEQ ID NO: 684848 - RNA, 20 nt, Human
aagcagaauaauaacuaaaa

SEQ ID NO: 684849 - RNA, 20 nt, Human
aaggcaaaauguacuauucu

SEQ ID NO: 684850 - RNA, 23 nt, Human
acagacccaaggacacuguggca

SEQ ID NO: 684851 - RNA, 18 nt, Human
acccaaugggauaagaug

SEQ ID NO: 684852 - RNA, 22 nt, Human
acuaugaagggcacaagaucac

SEQ ID NO: 684853 - RNA, 21 nt, Human
agaaaaaagacauuuaaaaaa

SEQ ID NO: 684854 - RNA, 22 nt, Human
agaaaacccaaagugagaaaca

SEQ ID NO: 684855 - RNA, 23 nt, Human
agaaccaacaagaggacagaggc

SEQ ID NO: 684856 - RNA, 19 nt, Human
agaggacagaggcuuccag

SEQ ID NO: 684857 - RNA, 24 nt, Human
agcacuuugggaggccgaggcggg

SEQ ID NO: 684858 - RNA, 30 nt, Human
agcagaaaaaagacauuuaaaaaaccuagg

SEQ ID NO: 684859 - RNA, 23 nt, Human
agccagaggcaagacaaaaaccc

SEQ ID NO: 684860 - RNA, 24 nt, Human
agccagaggcaagacaaaaaccca

SEQ ID NO: 684861 - RNA, 20 nt, Human
aggacagacaaggggaaagg

SEQ ID NO: 684862 - RNA, 21 nt, Human
aggcagacagaaccaacaagg

SEQ ID NO: 684863 - RNA, 21 nt, Human
aggccgaggcggguggaucac

SEQ ID NO: 684864 - RNA, 19 nt, Human
aggcggguggaucaccagg

SEQ ID NO: 684865 - RNA, 21 nt, Human
aggggccccacauuuucauuu

SEQ ID NO: 684866 - RNA, 21 nt, Human
aggggccccaccuuucguuuu

SEQ ID NO: 684867 - RNA, 21 nt, Human
agggggauagagaagcagagu

SEQ ID NO: 684868 - RNA, 25 nt, Human
auggaauaaugaucaaauaaaacca

SEQ ID NO: 684869 - RNA, 23 nt, Human
caaaucaauaccacauaccuccu

SEQ ID NO: 684870 - RNA, 24 nt, Human
caacaagaggacagaggcuuccag

SEQ ID NO: 684871 - RNA, 24 nt, Human
cacaccuguaaucccagcacuuug

SEQ ID NO: 684872 - RNA, 24 nt, Human
cacagccgagcagucacacaggcc

SEQ ID NO: 684873 - RNA, 21 nt, Human
caccugaaccaaguaauaagg

SEQ ID NO: 684874 - RNA, 22 nt, Human
caccugaaccaaguaauaaggc

SEQ ID NO: 684875 - RNA, 19 nt, Human
caccuguaaucccagcacu

SEQ ID NO: 684876 - RNA, 24 nt, Human
caccuguaaucccagcacuuuggg

SEQ ID NO: 684877 - RNA, 22 nt, Human
cagaaaaaagacauuuaaaaaa

SEQ ID NO: 684878 - RNA, 26 nt, Human
cagaaaaaagacauuuaaaaaaccua

SEQ ID NO: 684879 - RNA, 24 nt, Human
cagcacuuugggaggccgaggcgg

SEQ ID NO: 684880 - RNA, 20 nt, Human
caugaaauaaagcaauguga

SEQ ID NO: 684881 - RNA, 20 nt, Human
cauuuaaaaaaccuagugaa

SEQ ID NO: 684882 - RNA, 20 nt, Human
cauuuucauuuuacacuggg

SEQ ID NO: 684883 - RNA, 25 nt, Human
cccacagccgagcagucacacaggc

SEQ ID NO: 684884 - RNA, 19 nt, Human
ccugcauuaucccggagca

SEQ ID NO: 684885 - RNA, 23 nt, Human
ccuggccccagggagaggcugga

SEQ ID NO: 684886 - RNA, 23 nt, Human
ccuggcuaacaugguaaaacccc

SEQ ID NO: 684887 - RNA, 24 nt, Human
ccuggcuaacaugguaaaaccccg

SEQ ID NO: 684888 - RNA, 24 nt, Human
cgagaccauccuggcuaacauggu

SEQ ID NO: 684889 - RNA, 18 nt, Human
cggguggaucaccagggc

SEQ ID NO: 684890 - RNA, 19 nt, Human
cggguggaucaccagggca

SEQ ID NO: 684891 - RNA, 22 nt, Human
cguguggaauccugcauuaucc

SEQ ID NO: 684892 - RNA, 18 nt, Human
cugcuggcuucuuucccu

SEQ ID NO: 684893 - RNA, 19 nt, Human
cugggcgcgguaguucaca

SEQ ID NO: 684894 - RNA, 20 nt, Human
gaaccaacaagaggacagag

SEQ ID NO: 684895 - RNA, 22 nt, Human
gacagacaaggggaaagagguu

SEQ ID NO: 684896 - RNA, 24 nt, Human
gagaaccuuuacagacccaaggac

SEQ ID NO: 684897 - RNA, 27 nt, Human
gagcagaaaaaagacauuuaaaaaacc

SEQ ID NO: 684898 - RNA, 23 nt, Human
gaggcggguggaucaccagggca

SEQ ID NO: 684899 - RNA, 19 nt, Human
gaucaaauaaaaccagagg

SEQ ID NO: 684900 - RNA, 20 nt, Human
gcaaaauguacuauucuacc

SEQ ID NO: 684901 - RNA, 21 nt, Human
gcggguggaucaccagggcag

SEQ ID NO: 684902 - RNA, 24 nt, Human
gcuaacaugguaaaaccccgucuc

SEQ ID NO: 684903 - RNA, 20 nt, Human
gcucuaugucaccaccuuga

SEQ ID NO: 684904 - RNA, 20 nt, Human
gcuggggcgaguggggcggc

SEQ ID NO: 684905 - RNA, 18 nt, Human
ggaaaggguagcucugcu

SEQ ID NO: 684906 - RNA, 20 nt, Human
ggaggcuccgcagccggcgc

SEQ ID NO: 684907 - RNA, 23 nt, Human
ggcgcgguaguucacaccuguaa

SEQ ID NO: 684908 - RNA, 22 nt, Human
gggaagggcuccaaagcccagg

SEQ ID NO: 684909 - RNA, 23 nt, Human
gggaggcuccgcagccggcgccc

SEQ ID NO: 684910 - RNA, 18 nt, Human
gggauagagaagcagagu

SEQ ID NO: 684911 - RNA, 24 nt, Human
gguaguucacaccuguaaucccag

SEQ ID NO: 684912 - RNA, 24 nt, Human
uaaagcagaauaauaacuaaaaac

SEQ ID NO: 684913 - RNA, 24 nt, Human
uaacaugguaaaaccccgucucua

SEQ ID NO: 684914 - RNA, 27 nt, Human
uacaaaacaguagacuaguacucuuga

SEQ ID NO: 684915 - RNA, 19 nt, Human
uacauacacauagugaagu

SEQ ID NO: 684916 - RNA, 19 nt, Human
uacugguugaaagaaaggu

SEQ ID NO: 684917 - RNA, 18 nt, Human
uagccagaggcaagacaa

SEQ ID NO: 684918 - RNA, 24 nt, Human
uaguucacaccuguaaucccagca

SEQ ID NO: 684919 - RNA, 26 nt, Human
uauggaauaaugaucaaauaaaacca

SEQ ID NO: 684920 - RNA, 23 nt, Human
ucacaccuguaaucccagcacuu

SEQ ID NO: 684921 - RNA, 24 nt, Human
ucaccagggcaggagaucgagacc

SEQ ID NO: 684922 - RNA, 25 nt, Human
uccaaagcccaggucagucuagacc

SEQ ID NO: 684923 - RNA, 21 nt, Human
uccaggaagcugcugaggagg

SEQ ID NO: 684924 - RNA, 23 nt, Human
uccaggaagcugcugaggaggug

SEQ ID NO: 684925 - RNA, 21 nt, Human
ucgcgacucugagggaggcuc

SEQ ID NO: 684926 - RNA, 24 nt, Human
ucuccaaauagaguuaaagcagaa

SEQ ID NO: 684927 - RNA, 18 nt, Human
ucugaucuacauacacau

SEQ ID NO: 684928 - RNA, 21 nt, Human
ucugcuggcuucuuucccugc

SEQ ID NO: 684929 - RNA, 24 nt, Human
ugaaaaaaagacuaaaauuuuucu

SEQ ID NO: 684930 - RNA, 28 nt, Human
ugaacaaggggccccacauuguaaugac

SEQ ID NO: 684931 - RNA, 19 nt, Human
ugagaaacauucuacaaaa

SEQ ID NO: 684932 - RNA, 18 nt, Human
ugagaaccuuuacagacc

SEQ ID NO: 684933 - RNA, 18 nt, Human
ugagaaccuuuacagacc

SEQ ID NO: 684934 - RNA, 20 nt, Human
ugagaggcagacagaaccaa

SEQ ID NO: 684935 - RNA, 23 nt, Human
ugcacaauaugauacugcacucc

SEQ ID NO: 684936 - RNA, 20 nt, Human
ugcguccggccucgcgacuc

SEQ ID NO: 684937 - RNA, 24 nt, Human
ugcuaccacgguggcagaaggggg

SEQ ID NO: 684938 - RNA, 23 nt, Human
ugggaggccgaggcggguggauc

SEQ ID NO: 684939 - RNA, 24 nt, Human
ugggaggccgaggcggguggauca

SEQ ID NO: 684940 - RNA, 21 nt, Human
ugggcagcaguggcaagaaaa

SEQ ID NO: 684941 - RNA, 21 nt, Human
ugugaaugagccagaggacag

SEQ ID NO: 684942 - RNA, 18 nt, Human
ugugagaggcagacagaa

SEQ ID NO: 684943 - RNA, 19 nt, Human
uuacacugggccucucaaa

SEQ ID NO: 684944 - RNA, 24 nt, Human
uucagaggggccccaccuuucguu

SEQ ID NO: 684945 - RNA, 25 nt, Human
uugggaggccgaggcggguggauca

SEQ ID NO: 684946 - RNA, 21 nt, Human
uuucauuuuacacugggccuc

SEQ ID NO: 684947 - RNA, 21 nt, Human
uuugaccuaaacaagaagagg

SEQ ID NO: 684948 - RNA, 22 nt, Human
uuugaccuaaacaagaagaggg

SEQ ID NO: 684949 - RNA, 21 nt, Human
uuuuuuuuuuuuuugauuugg

SEQ ID NO: 684950 - RNA, 26 nt, Human
uuuuuuuuuuuuuuuuugauuugggg

SEQ ID NO: 684951 - RNA, 24 nt, Human
aaccacuucuaaaacagccuccau

SEQ ID NO: 684952 - RNA, 24 nt, Human
aagauuaucaagcauacagcccca

SEQ ID NO: 684953 - RNA, 26 nt, Human
aagguacuugucacccuuccuggcua

SEQ ID NO: 684954 - RNA, 19 nt, Human
acccaggaagaauggagga

SEQ ID NO: 684955 - RNA, 24 nt, Human
acccaggaagaauggaggaggcag

SEQ ID NO: 684956 - RNA, 22 nt, Human
agcaauggaugggcuagagaga

SEQ ID NO: 684957 - RNA, 18 nt, Human
agcccaggaguccucagg

SEQ ID NO: 684958 - RNA, 25 nt, Human
agccuugcucacagcaacaaucuca

SEQ ID NO: 684959 - RNA, 18 nt, Human
agcugcucacacuagccc

SEQ ID NO: 684960 - RNA, 19 nt, Human
aggaagaauggaggaggcc

SEQ ID NO: 684961 - RNA, 24 nt, Human
aggcagaagguacuugucacccuu

SEQ ID NO: 684962 - RNA, 21 nt, Human
agucacgaaggcugagguggg

SEQ ID NO: 684963 - RNA, 21 nt, Human
caagauuaucaagcauacagc

SEQ ID NO: 684964 - RNA, 21 nt, Human
cacauccagccaucugcaccc

SEQ ID NO: 684965 - RNA, 21 nt, Human
caccaggaaggguggagggca

SEQ ID NO: 684966 - RNA, 23 nt, Human
cacuaccucuugacaacguuccg

SEQ ID NO: 684967 - RNA, 19 nt, Human
ccaaccacuucuaaaacag

SEQ ID NO: 684968 - RNA, 21 nt, Human
ccaucugcacccaugcagaau

SEQ ID NO: 684969 - RNA, 21 nt, Human
cuacaguucugcacccaggaa

SEQ ID NO: 684970 - RNA, 20 nt, Human
cugaaagcagccauugcccc

SEQ ID NO: 684971 - RNA, 19 nt, Human
cugagccugaggugacucu

SEQ ID NO: 684972 - RNA, 20 nt, Human
cugaucucaaugguucagaa

SEQ ID NO: 684973 - RNA, 23 nt, Human
cugguuucugaucucaaugguuc

SEQ ID NO: 684974 - RNA, 19 nt, Human
cuucggcacuuccgggagg

SEQ ID NO: 684975 - RNA, 18 nt, Human
gacaggaacaaaaggccu

SEQ ID NO: 684976 - RNA, 24 nt, Human
gagccuugcucacagcaacaaucu

SEQ ID NO: 684977 - RNA, 20 nt, Human
gaggcagaagguacuuguca

SEQ ID NO: 684978 - RNA, 20 nt, Human
gcacuuccgggaggagccgg

SEQ ID NO: 684979 - RNA, 23 nt, Human
gcacuuccgggaggagccggaaa

SEQ ID NO: 684980 - RNA, 21 nt, Human
gcugcucacacuagcccagga

SEQ ID NO: 684981 - RNA, 20 nt, Human
ggaagaauggaggaggcaga

SEQ ID NO: 684982 - RNA, 21 nt, Human
ggaaggguggagggcacugca

SEQ ID NO: 684983 - RNA, 21 nt, Human
guuguugugaaguccaucacu

SEQ ID NO: 684984 - RNA, 20 nt, Human
uagaaggcuaaguaucuggu

SEQ ID NO: 684985 - RNA, 19 nt, Human
uagagcaugucucuuucac

SEQ ID NO: 684986 - RNA, 21 nt, Human
uagucacgaaggcugaggugg

SEQ ID NO: 684987 - RNA, 18 nt, Human
uauggaauagagcaguga

SEQ ID NO: 684988 - RNA, 24 nt, Human
ucaacauggguacugccaugcccu

SEQ ID NO: 684989 - RNA, 23 nt, Human
ucacuagucacgaaggcugaggu

SEQ ID NO: 684990 - RNA, 23 nt, Human
ucagggucuucuacaguucugca

SEQ ID NO: 684991 - RNA, 24 nt, Human
uccauggcacgguauggaauagag

SEQ ID NO: 684992 - RNA, 21 nt, Human
uccguagcuacaguagaaggc

SEQ ID NO: 684993 - RNA, 20 nt, Human
ucuacuguaagcaauggauu

SEQ ID NO: 684994 - RNA, 18 nt, Human
ucuccaaaaucucaaaau

SEQ ID NO: 684995 - RNA, 19 nt, Human
ucucccagagccuugcuca

SEQ ID NO: 684996 - RNA, 23 nt, Human
ucugcagcuagagcaugucucuu

SEQ ID NO: 684997 - RNA, 24 nt, Human
ucuggcacaggaaauggucuccaa

SEQ ID NO: 684998 - RNA, 22 nt, Human
uggaggaggcagaagguacuug

SEQ ID NO: 684999 - RNA, 21 nt, Human
uggcacgguauggaauagagc

SEQ ID NO: 685000 - RNA, 18 nt, Human
uucuacaguucugcaccc

SEQ ID NO: 685001 - RNA, 26 nt, Human
uuuuuuuuuuuuuuuuuuacacuuaa

SEQ ID NO: 685002 - RNA, 20 nt, Human
aacugcuuugagauucccac

SEQ ID NO: 685003 - RNA, 21 nt, Human
agaaaauagaaaaccuuuaau

SEQ ID NO: 685004 - RNA, 18 nt, Human
agagguucuuuuuucugc

SEQ ID NO: 685005 - RNA, 22 nt, Human
caccugcauacagacuuugcaa

SEQ ID NO: 685006 - RNA, 19 nt, Human
cuuuaauaauaaagaaagg

SEQ ID NO: 685007 - RNA, 18 nt, Human
gaaaauagaaaaccuuua

SEQ ID NO: 685008 - RNA, 20 nt, Human
uaauaaagaaagguuaaaca

SEQ ID NO: 685009 - RNA, 22 nt, Human
uggaauuuaagacaggcacacc

SEQ ID NO: 685010 - RNA, 19 nt, Human
uuaaugaagagguucuuuu

SEQ ID NO: 685011 - RNA, 20 nt, Human
aaacucucaaagagcaccac

SEQ ID NO: 685012 - RNA, 22 nt, Human
acucucaaagagcaccacuggg

SEQ ID NO: 685013 - RNA, 19 nt, Human
agcguucagauccaggcuc

SEQ ID NO: 685014 - RNA, 21 nt, Human
cagcguucagauccaggcucu

SEQ ID NO: 685015 - RNA, 19 nt, Human
ccagaugaaacugaaacag

SEQ ID NO: 685016 - RNA, 24 nt, Human
uaaaaagaacauacaauuauaaag

SEQ ID NO: 685017 - RNA, 19 nt, Human
uaaacucucaaagagcacc

SEQ ID NO: 685018 - RNA, 21 nt, Human
uaaacucucaaagagcaccac

SEQ ID NO: 685019 - RNA, 21 nt, Human
ucagcguucagauccaggcuc

SEQ ID NO: 685020 - RNA, 23 nt, Human
ugaaacugaaacagaaaaauugu

SEQ ID NO: 685021 - RNA, 18 nt, Human
ugagagaaaacugcaaug

SEQ ID NO: 685022 - RNA, 23 nt, Human
ugcaaugaucagaaggauugagc

SEQ ID NO: 685023 - RNA, 21 nt, Human
ugccagaugaaacugaaacag

SEQ ID NO: 685024 - RNA, 19 nt, Human
aagggcauauguuccacuu

SEQ ID NO: 685025 - RNA, 19 nt, Human
cacugugcagagcagaggc

SEQ ID NO: 685026 - RNA, 23 nt, Human
cgccucggccuccugggaugugg

SEQ ID NO: 685027 - RNA, 18 nt, Human
ggcaagccgccucggccu

SEQ ID NO: 685028 - RNA, 18 nt, Human
gggcaagccgccucggcc

SEQ ID NO: 685029 - RNA, 22 nt, Human
ggucagaaggcucagggccugc

SEQ ID NO: 685030 - RNA, 20 nt, Human
ucagggccugcccggcuucu

SEQ ID NO: 685031 - RNA, 20 nt, Human
uggcagaggaugugagguca

SEQ ID NO: 685032 - RNA, 23 nt, Human
uggcagaggaugugaggucagaa

SEQ ID NO: 685033 - RNA, 20 nt, Human
ugugguguggcagaggaugu

SEQ ID NO: 685034 - RNA, 18 nt, Human
uugucccugcucauccac

SEQ ID NO: 685035 - RNA, 23 nt, Human
uuugucccugcucauccacacca

SEQ ID NO: 685036 - RNA, 21 nt, Human
uuuuuuuuuuuucaaagguug

SEQ ID NO: 685037 - RNA, 21 nt, Human
uuuuuuuuuuuuuuucaaagg

SEQ ID NO: 685038 - RNA, 19 nt, Human
aaagcaagauggaacccaa

SEQ ID NO: 685039 - RNA, 21 nt, Human
aacaccaaaaauagaagacca

SEQ ID NO: 685040 - RNA, 22 nt, Human
aaucacaagagcaacagagaaa

SEQ ID NO: 685041 - RNA, 18 nt, Human
acaagagaaaggcacaaa

SEQ ID NO: 685042 - RNA, 24 nt, Human
acacaaaggucggagccaggacag

SEQ ID NO: 685043 - RNA, 26 nt, Human
acaccaaaaauagaagaccagagaau

SEQ ID NO: 685044 - RNA, 19 nt, Human
accacauguggggaagggu

SEQ ID NO: 685045 - RNA, 28 nt, Human
accacgcuuagaagacacaacacaaccu

SEQ ID NO: 685046 - RNA, 18 nt, Human
accugcaaacguaaaaag

SEQ ID NO: 685047 - RNA, 21 nt, Human
acugcccacugcccacugccc

SEQ ID NO: 685048 - RNA, 19 nt, Human
acugcugggguucgcuggc

SEQ ID NO: 685049 - RNA, 21 nt, Human
agaagcaaacuuuggcagggg

SEQ ID NO: 685050 - RNA, 19 nt, Human
agaaggauggugacaaauc

SEQ ID NO: 685051 - RNA, 19 nt, Human
agagagaaauuagagggaa

SEQ ID NO: 685052 - RNA, 24 nt, Human
aguguacagagaugacaagagaaa

SEQ ID NO: 685053 - RNA, 23 nt, Human
aucccauccaggcaaccucacug

SEQ ID NO: 685054 - RNA, 22 nt, Human
aucccuaggguacggauuccua

SEQ ID NO: 685055 - RNA, 18 nt, Human
caaacccagaaccaccac

SEQ ID NO: 685056 - RNA, 24 nt, Human
caaaucccaaaaaggaaauggagg

SEQ ID NO: 685057 - RNA, 24 nt, Human
caacaccaaaaauagaagaccaga

SEQ ID NO: 685058 - RNA, 19 nt, Human
caacagagaaaugacagac

SEQ ID NO: 685059 - RNA, 19 nt, Human
caaccucacugaggccgaa

SEQ ID NO: 685060 - RNA, 24 nt, Human
caaccucacugaggccgaaacaac

SEQ ID NO: 685061 - RNA, 18 nt, Human
caagagaaaggcacaaau

SEQ ID NO: 685062 - RNA, 26 nt, Human
caagagcaacagagaaauuggagacc

SEQ ID NO: 685063 - RNA, 19 nt, Human
cacaaccucauggggcgag

SEQ ID NO: 685064 - RNA, 26 nt, Human
caccccuucauucuucucuccaucuc

SEQ ID NO: 685065 - RNA, 18 nt, Human
cacugaggccgaaacaac

SEQ ID NO: 685066 - RNA, 23 nt, Human
cagaacuccuugggucagugcug

SEQ ID NO: 685067 - RNA, 20 nt, Human
caggacaguccugaggggga

SEQ ID NO: 685068 - RNA, 24 nt, Human
cagugcugagagaccugcacucaa

SEQ ID NO: 685069 - RNA, 21 nt, Human
cauguuggaggagaccaaguu

SEQ ID NO: 685070 - RNA, 24 nt, Human
ccaaagugaauggacccccugcca

SEQ ID NO: 685071 - RNA, 25 nt, Human
ccaagacacugcccacugcccacua

SEQ ID NO: 685072 - RNA, 20 nt, Human
ccaauccacacacacucaca

SEQ ID NO: 685073 - RNA, 23 nt, Human
ccacaggugaacucaaaucaaac

SEQ ID NO: 685074 - RNA, 22 nt, Human
ccaggacaguccugagggggau

SEQ ID NO: 685075 - RNA, 24 nt, Human
cccaaaaaggaaauggaggaggag

SEQ ID NO: 685076 - RNA, 25 nt, Human
ccccugccaauccacacacacucac

SEQ ID NO: 685077 - RNA, 20 nt, Human
ccugccccuccauagaacac

SEQ ID NO: 685078 - RNA, 21 nt, Human
cuacugcugggguucgcuggc

SEQ ID NO: 685079 - RNA, 18 nt, Human
cucacugaggccgaaaca

SEQ ID NO: 685080 - RNA, 22 nt, Human
cucccccaacccacagugaaua

SEQ ID NO: 685081 - RNA, 22 nt, Human
cucuccaucucauucagaucaa

SEQ ID NO: 685082 - RNA, 18 nt, Human
cugccaauccacacacac

SEQ ID NO: 685083 - RNA, 25 nt, Human
cuucucuccaucucauucagaucaa

SEQ ID NO: 685084 - RNA, 28 nt, Human
gagaauagaaggauggugaccgguaccc

SEQ ID NO: 685085 - RNA, 22 nt, Human
gaggacaugaggagagaaccag

SEQ ID NO: 685086 - RNA, 24 nt, Human
gaggaggaguucguggaagggcag

SEQ ID NO: 685087 - RNA, 24 nt, Human
gaucccuaggguacggauuccuac

SEQ ID NO: 685088 - RNA, 19 nt, Human
gcaaccucacugaggccga

SEQ ID NO: 685089 - RNA, 20 nt, Human
gcaagcacuaguaccacgcu

SEQ ID NO: 685090 - RNA, 21 nt, Human
gcagagaacaugcuuuauuga

SEQ ID NO: 685091 - RNA, 19 nt, Human
gccaaucacaagagcaacg

SEQ ID NO: 685092 - RNA, 22 nt, Human
gccaccuuuucccugccccucc

SEQ ID NO: 685093 - RNA, 19 nt, Human
gcuuuauugaggaguagau

SEQ ID NO: 685094 - RNA, 22 nt, Human
ggcgagaggacaugaggagaga

SEQ ID NO: 685095 - RNA, 26 nt, Human
ggggauggccuucccaaaggauacug

SEQ ID NO: 685096 - RNA, 27 nt, Human
ggggauggccuucccaaaggauacugu

SEQ ID NO: 685097 - RNA, 18 nt, Human
ggguucgcuggcucggaa

SEQ ID NO: 685098 - RNA, 25 nt, Human
gguccuggugguggcagccauauuu

SEQ ID NO: 685099 - RNA, 27 nt, Human
ggugaccagguggcaagcacuaguacc

SEQ ID NO: 685100 - RNA, 21 nt, Human
uaaaauuagcucccccaaccc

SEQ ID NO: 685101 - RNA, 21 nt, Human
uaaagcaagauggaacccaaa

SEQ ID NO: 685102 - RNA, 20 nt, Human
uagaagacacaacacaaccu

SEQ ID NO: 685103 - RNA, 22 nt, Human
uagaagagcacauucuaccaca

SEQ ID NO: 685104 - RNA, 19 nt, Human
uagcccaauacagaucaaa

SEQ ID NO: 685105 - RNA, 21 nt, Human
uagcccaauacagaucaaaaa

SEQ ID NO: 685106 - RNA, 21 nt, Human
ucaaaucaaacccagaaccac

SEQ ID NO: 685107 - RNA, 22 nt, Human
ucacaagagcaacagagaaaug

SEQ ID NO: 685108 - RNA, 22 nt, Human
ucagaaccagcgucugcagugu

SEQ ID NO: 685109 - RNA, 18 nt, Human
uccauagaacacacauau

SEQ ID NO: 685110 - RNA, 23 nt, Human
ucccaaaggauacuguacuugcc

SEQ ID NO: 685111 - RNA, 19 nt, Human
ucugcaguguacacaaagg

SEQ ID NO: 685112 - RNA, 21 nt, Human
ucuguaaaaggccuuuauccc

SEQ ID NO: 685113 - RNA, 18 nt, Human
ugaaaagagaagcaaacu

SEQ ID NO: 685114 - RNA, 18 nt, Human
ugaauggacccccugcca

SEQ ID NO: 685115 - RNA, 21 nt, Human
ugacaaaucccaaaaaggaaa

SEQ ID NO: 685116 - RNA, 21 nt, Human
ugaggcaaaaaguaguauccc

SEQ ID NO: 685117 - RNA, 23 nt, Human
ugcccacugcccacaggugaacu

SEQ ID NO: 685118 - RNA, 24 nt, Human
ugcccacugcccacaggugaacuc

SEQ ID NO: 685119 - RNA, 19 nt, Human
uggaaagguccugguggug

SEQ ID NO: 685120 - RNA, 24 nt, Human
uggaacccaaagugaauggacccc

SEQ ID NO: 685121 - RNA, 20 nt, Human
uggcaccugcaaacguaaaa

SEQ ID NO: 685122 - RNA, 24 nt, Human
ugggaaacucuucaaaaguauuug

SEQ ID NO: 685123 - RNA, 19 nt, Human
ugggaguaaagagagaagg

SEQ ID NO: 685124 - RNA, 24 nt, Human
ugggcuagagagaaauuagaggga

SEQ ID NO: 685125 - RNA, 22 nt, Human
uggugacaaaucccaaaaagga

SEQ ID NO: 685126 - RNA, 18 nt, Human
uuaaagcaagauggaacc

SEQ ID NO: 685127 - RNA, 19 nt, Human
uuaaagcaagauggaaccc

SEQ ID NO: 685128 - RNA, 20 nt, Human
uucuaccacauguggggaag

SEQ ID NO: 685129 - RNA, 22 nt, Human
uuugagcagagaacaugcuuua

SEQ ID NO: 685130 - RNA, 25 nt, Human
uuuuuuuuuuugagcagagaacaug

SEQ ID NO: 685131 - RNA, 27 nt, Human
uuuuuuuuuuuuuuuuuuuuuuugggg

SEQ ID NO: 685132 - RNA, 24 nt, Human
aaaagcagcuguauugccaaugua

SEQ ID NO: 685133 - RNA, 19 nt, Human
aaauguugauaguuuuagc

SEQ ID NO: 685134 - RNA, 18 nt, Human
accuuggccugggcuagg

SEQ ID NO: 685135 - RNA, 18 nt, Human
acgacaacaccaccagca

SEQ ID NO: 685136 - RNA, 20 nt, Human
agcaacuuuuuuuuccauuu

SEQ ID NO: 685137 - RNA, 23 nt, Human
agcagcucucguacccccucucc

SEQ ID NO: 685138 - RNA, 19 nt, Human
aggcugggacaccaacacc

SEQ ID NO: 685139 - RNA, 20 nt, Human
agguggcucuuaggcuggga

SEQ ID NO: 685140 - RNA, 22 nt, Human
auaauaacggauggcugcugcc

SEQ ID NO: 685141 - RNA, 22 nt, Human
aucuucuuaagucuuuccauca

SEQ ID NO: 685142 - RNA, 21 nt, Human
auggcugaggagauacagaac

SEQ ID NO: 685143 - RNA, 19 nt, Human
caaauccucacucauauua

SEQ ID NO: 685144 - RNA, 21 nt, Human
caccaacaccagccaccugcc

SEQ ID NO: 685145 - RNA, 21 nt, Human
caccagcagcucucguacccc

SEQ ID NO: 685146 - RNA, 20 nt, Human
cagcagcucucguacccccu

SEQ ID NO: 685147 - RNA, 20 nt, Human
cagcagcucucguacccccu

SEQ ID NO: 685148 - RNA, 22 nt, Human
ccaccagcagcucucguacccc

SEQ ID NO: 685149 - RNA, 23 nt, Human
ccauaaagaaagauuaugaugac

SEQ ID NO: 685150 - RNA, 20 nt, Human
cccaaugcuauuaacuaacu

SEQ ID NO: 685151 - RNA, 21 nt, Human
ccccgcgcggguuacugcucc

SEQ ID NO: 685152 - RNA, 22 nt, Human
cccgcgcggguuacugcucccg

SEQ ID NO: 685153 - RNA, 24 nt, Human
cccgcgcggguuacugcucccgcg

SEQ ID NO: 685154 - RNA, 19 nt, Human
ccgcggcagcucuuacucc

SEQ ID NO: 685155 - RNA, 22 nt, Human
cgacaacaccaccagcagcucu

SEQ ID NO: 685156 - RNA, 23 nt, Human
cgacaacaccaccagcagcucuc

SEQ ID NO: 685157 - RNA, 19 nt, Human
cggccacgacaacaccacc

SEQ ID NO: 685158 - RNA, 22 nt, Human
cucccagcuucugcuucauuuc

SEQ ID NO: 685159 - RNA, 27 nt, Human
cuccucaaccgaaacuuuccuacuuac

SEQ ID NO: 685160 - RNA, 25 nt, Human
cucguacccccucuccgaccgacgu

SEQ ID NO: 685161 - RNA, 18 nt, Human
cuucuccucucuuucuac

SEQ ID NO: 685162 - RNA, 25 nt, Human
gacucaaugcuaucaguaucuuaug

SEQ ID NO: 685163 - RNA, 24 nt, Human
gcaaagucugcccccaccauaaag

SEQ ID NO: 685164 - RNA, 20 nt, Human
gcacagaugcugagccaugu

SEQ ID NO: 685165 - RNA, 19 nt, Human
gcugagccauguggugguu

SEQ ID NO: 685166 - RNA, 18 nt, Human
ggaaauaauaacggaugg

SEQ ID NO: 685167 - RNA, 18 nt, Human
guacccccucuccgaccg

SEQ ID NO: 685168 - RNA, 24 nt, Human
uaagugcaaagucugcccccaguu

SEQ ID NO: 685169 - RNA, 20 nt, Human
uacagcugugauuccuaacc

SEQ ID NO: 685170 - RNA, 25 nt, Human
uaggcugggacaccaacaccagcca

SEQ ID NO: 685171 - RNA, 27 nt, Human
uaugaugacaaaauauauuuaagauac

SEQ ID NO: 685172 - RNA, 20 nt, Human
ucccgcggcagcucuuacuc

SEQ ID NO: 685173 - RNA, 21 nt, Human
ucguacccccucuccgaccga

SEQ ID NO: 685174 - RNA, 23 nt, Human
ucuacuguacuuuagcaccacag

SEQ ID NO: 685175 - RNA, 24 nt, Human
ucuacuguacuuuagcaccacagg

SEQ ID NO: 685176 - RNA, 24 nt, Human
ucuccgaccgacgucggccucccc

SEQ ID NO: 685177 - RNA, 19 nt, Human
ugaaaagccaugauuguag

SEQ ID NO: 685178 - RNA, 21 nt, Human
ugaggacaaauggugagaccu

SEQ ID NO: 685179 - RNA, 21 nt, Human
ugccccauguucugguagccu

SEQ ID NO: 685180 - RNA, 18 nt, Human
uguggugguuacuagagg

SEQ ID NO: 685181 - RNA, 25 nt, Human
uucuccucucuuucuacuguacuuu

SEQ ID NO: 685182 - RNA, 22 nt, Human
uugcacugcaguaagugcaaag

SEQ ID NO: 685183 - RNA, 24 nt, Human
uuggcacagaugcugagccaugug

SEQ ID NO: 685184 - RNA, 18 nt, Human
uuuuacagcugugauucc

SEQ ID NO: 685185 - RNA, 19 nt, Human
uuuucagagauaagcaacu

SEQ ID NO: 685186 - RNA, 24 nt, Human
uuuuuuuuuuuuuuuuuuuuucag

SEQ ID NO: 685187 - RNA, 24 nt, Human
aaaacacaaaagcaaaaaauacaa

SEQ ID NO: 685188 - RNA, 28 nt, Human
aaaauaaggcaaauuccaaaacacaaaa

SEQ ID NO: 685189 - RNA, 22 nt, Human
aacacaaaagcaaaaaauacaa

SEQ ID NO: 685190 - RNA, 23 nt, Human
aacacaaaagcaaaaaauacaaa

SEQ ID NO: 685191 - RNA, 20 nt, Human
aagcaaaaaauacaaaacuu

SEQ ID NO: 685192 - RNA, 26 nt, Human
aaggcaaauuccaaaacacaaaagca

SEQ ID NO: 685193 - RNA, 24 nt, Human
acacaaaagcaaaaaauacaaaac

SEQ ID NO: 685194 - RNA, 20 nt, Human
acuguagagagcuuuaaagu

SEQ ID NO: 685195 - RNA, 19 nt, Human
aguucauauuuugggggga

SEQ ID NO: 685196 - RNA, 18 nt, Human
caaaacacaaaagcaaaa

SEQ ID NO: 685197 - RNA, 20 nt, Human
caaaacacaaaagcaaaaaa

SEQ ID NO: 685198 - RNA, 23 nt, Human
caaaacacaaaagcaaaaaauac

SEQ ID NO: 685199 - RNA, 22 nt, Human
cagagggacuuacgacaugaca

SEQ ID NO: 685200 - RNA, 22 nt, Human
cagaguuuuauuaccauuaauu

SEQ ID NO: 685201 - RNA, 21 nt, Human
cagccucugaacaucgcaucc

SEQ ID NO: 685202 - RNA, 26 nt, Human
cauccaagaaaaauaaggcaaauucc

SEQ ID NO: 685203 - RNA, 18 nt, Human
cauggaaauacaugcugc

SEQ ID NO: 685204 - RNA, 18 nt, Human
ccaaaacacaaaagcaaa

SEQ ID NO: 685205 - RNA, 23 nt, Human
ccucugaacaucgcauccaagaa

SEQ ID NO: 685206 - RNA, 19 nt, Human
cgcugcucaaacacauagc

SEQ ID NO: 685207 - RNA, 18 nt, Human
cguugcacucacuaagca

SEQ ID NO: 685208 - RNA, 18 nt, Human
cucaaagacucuucgcug

SEQ ID NO: 685209 - RNA, 22 nt, Human
cugcucaaacacauagcugugu

SEQ ID NO: 685210 - RNA, 25 nt, Human
uacgacaugacaucucuuaaaggaa

SEQ ID NO: 685211 - RNA, 22 nt, Human
ucaaagacucuucgcugcucaa

SEQ ID NO: 685212 - RNA, 24 nt, Human
uccaaaacacaaaagcaaaaaaua

SEQ ID NO: 685213 - RNA, 18 nt, Human
uccagugcaaucccaggc

SEQ ID NO: 685214 - RNA, 19 nt, Human
ugcacugaaauuaucacuc

SEQ ID NO: 685215 - RNA, 23 nt, Human
ugcagcugggcguucaccuuguu

SEQ ID NO: 685216 - RNA, 23 nt, Human
uuaaaguauacagagggacuuac

SEQ ID NO: 685217 - RNA, 18 nt, Human
uucaccuuguucugagca

SEQ ID NO: 685218 - RNA, 23 nt, Human
uucauauuuuggggggacuguag

SEQ ID NO: 685219 - RNA, 18 nt, Human
uuuuuuuuuuuuuuuuug

SEQ ID NO: 685220 - RNA, 18 nt, Human
agccuggagaaccccuau

SEQ ID NO: 685221 - RNA, 22 nt, Human
auugcacauuguuccuuugacu

SEQ ID NO: 685222 - RNA, 19 nt, Human
caccgcgcgacggcaaugc

SEQ ID NO: 685223 - RNA, 19 nt, Human
cagccccuuaacuccuucc

SEQ ID NO: 685224 - RNA, 25 nt, Human
ccaaaacacuccgcuuagauacuga

SEQ ID NO: 685225 - RNA, 21 nt, Human
cccgcaggccucugcgccgag

SEQ ID NO: 685226 - RNA, 18 nt, Human
cgacggcaaugccucaga

SEQ ID NO: 685227 - RNA, 19 nt, Human
cucugcgccgagcgccugc

SEQ ID NO: 685228 - RNA, 19 nt, Human
cuugaaacagagguuagcu

SEQ ID NO: 685229 - RNA, 20 nt, Human
gcuuuaauuuuucucucuca

SEQ ID NO: 685230 - RNA, 23 nt, Human
uaaauccauuuauuaacguuuca

SEQ ID NO: 685231 - RNA, 18 nt, Human
uaacuccuuccaaaacac

SEQ ID NO: 685232 - RNA, 19 nt, Human
uaaggcgccaacugcagcc

SEQ ID NO: 685233 - RNA, 22 nt, Human
uauccagaaacgugguagaaau

SEQ ID NO: 685234 - RNA, 22 nt, Human
uauuucacuguauccagaaacg

SEQ ID NO: 685235 - RNA, 23 nt, Human
ucaucuaaaaacauaucaauugc

SEQ ID NO: 685236 - RNA, 18 nt, Human
ugcgccgagcgccugcgc

SEQ ID NO: 685237 - RNA, 24 nt, Human
uugaaacagagguuagcuauuuca

SEQ ID NO: 685238 - RNA, 18 nt, Human
aaaaaccuaauucuaaac

SEQ ID NO: 685239 - RNA, 27 nt, Human
aaaaauaaaaucugacaaugaagaaaa

SEQ ID NO: 685240 - RNA, 23 nt, Human
aaaaauauagaaagacaaaaagc

SEQ ID NO: 685241 - RNA, 19 nt, Human
aaacaaaguuuuacugaga

SEQ ID NO: 685242 - RNA, 24 nt, Human
aaauuagcacaaaaauggaaaaaa

SEQ ID NO: 685243 - RNA, 23 nt, Human
aacaagaaacucugcuauaacaa

SEQ ID NO: 685244 - RNA, 25 nt, Human
aauuagcacaaaaauggaaaaaaag

SEQ ID NO: 685245 - RNA, 19 nt, Human
accaugaaccuggaaaaag

SEQ ID NO: 685246 - RNA, 21 nt, Human
acccuuuuucacaaagucagg

SEQ ID NO: 685247 - RNA, 21 nt, Human
acuacuaauuuuacguacauu

SEQ ID NO: 685248 - RNA, 19 nt, Human
agaauucauugacuacuaa

SEQ ID NO: 685249 - RNA, 22 nt, Human
agacaaaaagcccauauccuau

SEQ ID NO: 685250 - RNA, 20 nt, Human
agcacaaaaauggaaaaaaa

SEQ ID NO: 685251 - RNA, 18 nt, Human
aggaaauauaaagucaaa

SEQ ID NO: 685252 - RNA, 23 nt, Human
aggagagcucaggaaauauaaag

SEQ ID NO: 685253 - RNA, 22 nt, Human
aguaaaaaauaaaaucugacaa

SEQ ID NO: 685254 - RNA, 18 nt, Human
agucauucuguaguggag

SEQ ID NO: 685255 - RNA, 24 nt, Human
aguuucuauuuuaaaagagguggc

SEQ ID NO: 685256 - RNA, 20 nt, Human
auaaagucaaaaauauacaa

SEQ ID NO: 685257 - RNA, 20 nt, Human
aucuuuguuguuauuauaau

SEQ ID NO: 685258 - RNA, 24 nt, Human
auguauauuuccauuuaaaguuuc

SEQ ID NO: 685259 - RNA, 25 nt, Human
caagugcuuucacccaccccuaaau

SEQ ID NO: 685260 - RNA, 24 nt, Human
cacccuuuuucacaaagucaggag

SEQ ID NO: 685261 - RNA, 18 nt, Human
caccuuauccuugcuacu

SEQ ID NO: 685262 - RNA, 21 nt, Human
cacggcagugggaaaaugaaa

SEQ ID NO: 685263 - RNA, 25 nt, Human
cagaaaaagcuuaauuacaugaaua

SEQ ID NO: 685264 - RNA, 20 nt, Human
ccaccacugaacauuucaga

SEQ ID NO: 685265 - RNA, 23 nt, Human
ccagaagacuauauuuguuuuaa

SEQ ID NO: 685266 - RNA, 22 nt, Human
cccauauccuauuacccagagg

SEQ ID NO: 685267 - RNA, 20 nt, Human
ccccuaaauucuguuuuggg

SEQ ID NO: 685268 - RNA, 25 nt, Human
ccccuaaauucuguuuugggcccuc

SEQ ID NO: 685269 - RNA, 18 nt, Human
cggcagugggaaaaugaa

SEQ ID NO: 685270 - RNA, 18 nt, Human
cuaaaacauuuccagaag

SEQ ID NO: 685271 - RNA, 23 nt, Human
cucaaacuguaacaguacagacu

SEQ ID NO: 685272 - RNA, 22 nt, Human
cuggcccgcuggugugagagcu

SEQ ID NO: 685273 - RNA, 24 nt, Human
cuguuccucuaaaaaucagaaaaa

SEQ ID NO: 685274 - RNA, 25 nt, Human
cuucuggucuuguauauuuuucacu

SEQ ID NO: 685275 - RNA, 21 nt, Human
cuuucuguuccucuaaaaauc

SEQ ID NO: 685276 - RNA, 22 nt, Human
cuuucuguuccucuaaaaauca

SEQ ID NO: 685277 - RNA, 19 nt, Human
gaaaaagaaaaucaaaagg

SEQ ID NO: 685278 - RNA, 26 nt, Human
gaaaaagcuaaagcacaagugcuuuc

SEQ ID NO: 685279 - RNA, 22 nt, Human
gaaccuggaaaaagaaaaucaa

SEQ ID NO: 685280 - RNA, 25 nt, Human
gacauaaauuuuuuuccuaaaauuu

SEQ ID NO: 685281 - RNA, 25 nt, Human
gcuaaagcacaagugcuuucaccca

SEQ ID NO: 685282 - RNA, 27 nt, Human
gcuacugaaaaaccuaauucuaaacaa

SEQ ID NO: 685283 - RNA, 22 nt, Human
ggauauuugacaguaaaaaaua

SEQ ID NO: 685284 - RNA, 18 nt, Human
guaauauuuuagguuacu

SEQ ID NO: 685285 - RNA, 23 nt, Human
uaaaaacauaaaauugaaaaugc

SEQ ID NO: 685286 - RNA, 20 nt, Human
uaaaaacugacaacuguuag

SEQ ID NO: 685287 - RNA, 18 nt, Human
uaacuggcccgcuggugu

SEQ ID NO: 685288 - RNA, 23 nt, Human
uaagugugguuaucuccaauagu

SEQ ID NO: 685289 - RNA, 21 nt, Human
uagaaagacaaaaagcccaua

SEQ ID NO: 685290 - RNA, 18 nt, Human
uauacaaaucuuuguugu

SEQ ID NO: 685291 - RNA, 25 nt, Human
uauagaaagacaaaaagcccauauc

SEQ ID NO: 685292 - RNA, 24 nt, Human
uauuuaucuucaaaguucagaacu

SEQ ID NO: 685293 - RNA, 18 nt, Human
ucacaaagucaggagagc

SEQ ID NO: 685294 - RNA, 19 nt, Human
ucacaaagucaggagagcu

SEQ ID NO: 685295 - RNA, 20 nt, Human
ucacaaagucaggagagcuc

SEQ ID NO: 685296 - RNA, 23 nt, Human
uccaugaaugaaauuaccaagga

SEQ ID NO: 685297 - RNA, 23 nt, Human
ucuccaauaguaaacaaguucau

SEQ ID NO: 685298 - RNA, 19 nt, Human
ucuggucuuguauauuuuu

SEQ ID NO: 685299 - RNA, 19 nt, Human
ucuucuuuauaccuuauug

SEQ ID NO: 685300 - RNA, 23 nt, Human
ugaaaaaccuaauucuaaacaaa

SEQ ID NO: 685301 - RNA, 20 nt, Human
ugaaaaagcuaaagcacaag

SEQ ID NO: 685302 - RNA, 22 nt, Human
ugaaaaagcuaaagcacaagug

SEQ ID NO: 685303 - RNA, 19 nt, Human
ugaaccuggaaaaagaaaa

SEQ ID NO: 685304 - RNA, 21 nt, Human
ugaaccuggaaaaagaaaauc

SEQ ID NO: 685305 - RNA, 18 nt, Human
ugaagaaaauuacaaaaa

SEQ ID NO: 685306 - RNA, 21 nt, Human
uggaaaaagaaaaucaaaagg

SEQ ID NO: 685307 - RNA, 24 nt, Human
uggaaaaagaaaaucaaaaggaau

SEQ ID NO: 685308 - RNA, 23 nt, Human
uggaauaaauuagcacaaaaaug

SEQ ID NO: 685309 - RNA, 20 nt, Human
uggaguuuucuaggaaaaau

SEQ ID NO: 685310 - RNA, 21 nt, Human
uggcuuaaaaacauaaaauug

SEQ ID NO: 685311 - RNA, 22 nt, Human
uuagcacaaaaauggaaaaaaa

SEQ ID NO: 685312 - RNA, 20 nt, Human
uucaagagauggcuuaaaaa

SEQ ID NO: 685313 - RNA, 18 nt, Human
uucacuuucuuucuguuc

SEQ ID NO: 685314 - RNA, 28 nt, Human
uucuuuauuaagugugguuaucuccaau

SEQ ID NO: 685315 - RNA, 18 nt, Human
uuuccaugaaugaaauua

SEQ ID NO: 685316 - RNA, 25 nt, Human
uuucuguuccucuaaaaaucagaaa

SEQ ID NO: 685317 - RNA, 18 nt, Human
uuuuccaugaaugaaauu

SEQ ID NO: 685318 - RNA, 18 nt, Human
aaugaauggccuaacuac

SEQ ID NO: 685319 - RNA, 21 nt, Human
aaugcacauuaaaugaauggc

SEQ ID NO: 685320 - RNA, 23 nt, Human
caccgaccacuccggcucagaac

SEQ ID NO: 685321 - RNA, 24 nt, Human
ccagcggcacggcacguccuucuc

SEQ ID NO: 685322 - RNA, 18 nt, Human
cggcucagaacccagcgg

SEQ ID NO: 685323 - RNA, 23 nt, Human
cuacuggaacuuuaguaguucua

SEQ ID NO: 685324 - RNA, 19 nt, Human
gguccauagagcauuagaa

SEQ ID NO: 685325 - RNA, 19 nt, Human
uaaauaaacagaaaagugc

SEQ ID NO: 685326 - RNA, 18 nt, Human
ugaauacagcaaaauucu

SEQ ID NO: 685327 - RNA, 19 nt, Human
agcagggcuguggccacgg

SEQ ID NO: 685328 - RNA, 22 nt, Human
agcagucagaugcagggacgcc

SEQ ID NO: 685329 - RNA, 22 nt, Human
cacagucugcgcuccucgggac

SEQ ID NO: 685330 - RNA, 19 nt, Human
caggaggggacaugaagcg

SEQ ID NO: 685331 - RNA, 18 nt, Human
caggauggggaaggggug

SEQ ID NO: 685332 - RNA, 18 nt, Human
cccggugcagaagcacca

SEQ ID NO: 685333 - RNA, 18 nt, Human
ccucagucugguucuucu

SEQ ID NO: 685334 - RNA, 22 nt, Human
cgcccggugcagaagcaccagg

SEQ ID NO: 685335 - RNA, 19 nt, Human
gagcaggauggggaagggg

SEQ ID NO: 685336 - RNA, 21 nt, Human
gcagucagaugcagggacgcc

SEQ ID NO: 685337 - RNA, 21 nt, Human
ggacacagucugcgcuccucg

SEQ ID NO: 685338 - RNA, 18 nt, Human
ggacaugaagcggagcag

SEQ ID NO: 685339 - RNA, 19 nt, Human
ggggaagggguguaaggaa

SEQ ID NO: 685340 - RNA, 19 nt, Human
ggggaagggguguaaggaa

SEQ ID NO: 685341 - RNA, 22 nt, Human
gucugguucuucuuccagcagu

SEQ ID NO: 685342 - RNA, 20 nt, Human
ucagggacacagucugcgcu

SEQ ID NO: 685343 - RNA, 24 nt, Human
ucuuuuccucagucugguucuucu

SEQ ID NO: 685344 - RNA, 18 nt, Human
ugcugcuggagcagggcg

SEQ ID NO: 685345 - RNA, 19 nt, Human
ugggaacaauaacaugaga

SEQ ID NO: 685346 - RNA, 18 nt, Human
uggggccaggauaacugg

SEQ ID NO: 685347 - RNA, 22 nt, Human
uggggcuguugaaaagccucuu

SEQ ID NO: 685348 - RNA, 18 nt, Human
uuuuuuuuuuuuuuuuug

SEQ ID NO: 685349 - RNA, 20 nt, Human
uuuuuuuuuuuuuuuuugcu

SEQ ID NO: 685350 - RNA, 23 nt, Human
uuuuuuuuuuuuuuuuuugcugg

SEQ ID NO: 685351 - RNA, 25 nt, Human
uuuuuuuuuuuuuuuuuuugcuggg

SEQ ID NO: 685352 - RNA, 20 nt, Human
aaauaggagcaaagugagga

SEQ ID NO: 685353 - RNA, 22 nt, Human
aaccuaaggcaaaaguacaagg

SEQ ID NO: 685354 - RNA, 19 nt, Human
aagaucccaagacacacag

SEQ ID NO: 685355 - RNA, 21 nt, Human
aagaucccaagacacacagcc

SEQ ID NO: 685356 - RNA, 23 nt, Human
aaggaaaaauaucccccucccca

SEQ ID NO: 685357 - RNA, 22 nt, Human
accacaucucuuccuaaaccag

SEQ ID NO: 685358 - RNA, 18 nt, Human
agaaagcuaaagaauuac

SEQ ID NO: 685359 - RNA, 23 nt, Human
agaaauaggagcaaagugagaga

SEQ ID NO: 685360 - RNA, 23 nt, Human
agacagaaguggagaaaggggac

SEQ ID NO: 685361 - RNA, 21 nt, Human
agacuagauauuggggaaagg

SEQ ID NO: 685362 - RNA, 21 nt, Human
agagauguacaaauacaccag

SEQ ID NO: 685363 - RNA, 20 nt, Human
agaugaggguaggaguaggg

SEQ ID NO: 685364 - RNA, 21 nt, Human
agcccucagcccuaaugacuu

SEQ ID NO: 685365 - RNA, 21 nt, Human
aggcaggagauguagaguugg

SEQ ID NO: 685366 - RNA, 23 nt, Human
aucuacuccucuccucccugcaa

SEQ ID NO: 685367 - RNA, 20 nt, Human
caaagcuucaugugcucucc

SEQ ID NO: 685368 - RNA, 23 nt, Human
caacaugaagacuauugucccuu

SEQ ID NO: 685369 - RNA, 27 nt, Human
caagacacacagccuaguaccuaagaa

SEQ ID NO: 685370 - RNA, 22 nt, Human
caagauaugggccuccccugcc

SEQ ID NO: 685371 - RNA, 24 nt, Human
caaggaggggaaauacuggguccu

SEQ ID NO: 685372 - RNA, 20 nt, Human
caauacacaguagauacuca

SEQ ID NO: 685373 - RNA, 22 nt, Human
cacaacacucuuacuuucaaag

SEQ ID NO: 685374 - RNA, 18 nt, Human
cacaauguagccacgaga

SEQ ID NO: 685375 - RNA, 20 nt, Human
cacaauguagccacgagaac

SEQ ID NO: 685376 - RNA, 21 nt, Human
cacagccuaguaccuaagaau

SEQ ID NO: 685377 - RNA, 23 nt, Human
cacagccuaguaccuaagaauuu

SEQ ID NO: 685378 - RNA, 23 nt, Human
cacauacacacuguggcaaugua

SEQ ID NO: 685379 - RNA, 25 nt, Human
cacucuuacuuucaaagagcagagg

SEQ ID NO: 685380 - RNA, 21 nt, Human
cacugucaauuucacgucccg

SEQ ID NO: 685381 - RNA, 18 nt, Human
cacuguuuagcaccugaa

SEQ ID NO: 685382 - RNA, 18 nt, Human
cagaaagaaauaggagca

SEQ ID NO: 685383 - RNA, 21 nt, Human
cagaaagaaauaggagcaaag

SEQ ID NO: 685384 - RNA, 22 nt, Human
cagaggaacauuuuauauagug

SEQ ID NO: 685385 - RNA, 27 nt, Human
cagaggaacauuuuauauagugaacac

SEQ ID NO: 685386 - RNA, 23 nt, Human
cagaguaaugguucugaacaaaa

SEQ ID NO: 685387 - RNA, 22 nt, Human
cagcuccuuaggcuccaggccu

SEQ ID NO: 685388 - RNA, 18 nt, Human
caucaggacaucaaugac

SEQ ID NO: 685389 - RNA, 18 nt, Human
ccagaaaucccaagagca

SEQ ID NO: 685390 - RNA, 23 nt, Human
ccagcagcuauccugagcugagg

SEQ ID NO: 685391 - RNA, 19 nt, Human
cccaagagcagaaagaaau

SEQ ID NO: 685392 - RNA, 19 nt, Human
cccaagagcagaaagaaau

SEQ ID NO: 685393 - RNA, 23 nt, Human
ccccugccccucagacccuacag

SEQ ID NO: 685394 - RNA, 20 nt, Human
cccucagacccuacagcucc

SEQ ID NO: 685395 - RNA, 21 nt, Human
cccuuaucuucgagugaccuu

SEQ ID NO: 685396 - RNA, 22 nt, Human
ccugaaccacaucucuuccuaa

SEQ ID NO: 685397 - RNA, 24 nt, Human
ccuuuucuuuugggaggaaaggcc

SEQ ID NO: 685398 - RNA, 24 nt, Human
ccuuuugcccuucccuuagcucca

SEQ ID NO: 685399 - RNA, 20 nt, Human
cuccccugccccucagaccc

SEQ ID NO: 685400 - RNA, 19 nt, Human
cugagccuuuugcccuucc

SEQ ID NO: 685401 - RNA, 20 nt, Human
cuuaccaggaaaccuggcuu

SEQ ID NO: 685402 - RNA, 21 nt, Human
gaaaggccaccugcacaaucc

SEQ ID NO: 685403 - RNA, 22 nt, Human
gaaccacaucucuuccuaaacc

SEQ ID NO: 685404 - RNA, 22 nt, Human
gaauuacagccaugccucccaa

SEQ ID NO: 685405 - RNA, 22 nt, Human
gagagauguacaaauacaccag

SEQ ID NO: 685406 - RNA, 18 nt, Human
gaggaaaggccaccugca

SEQ ID NO: 685407 - RNA, 21 nt, Human
gcccccauccccaucccuuau

SEQ ID NO: 685408 - RNA, 20 nt, Human
ggaaagcuguggggcuuggg

SEQ ID NO: 685409 - RNA, 21 nt, Human
guggagaaagcuaaagaauua

SEQ ID NO: 685410 - RNA, 21 nt, Human
uaaaccagaaaucccaagagc

SEQ ID NO: 685411 - RNA, 21 nt, Human
uacaauagacacaauguagcc

SEQ ID NO: 685412 - RNA, 20 nt, Human
uacagccgagcccucagccc

SEQ ID NO: 685413 - RNA, 21 nt, Human
uacagccgagcccucagcccu

SEQ ID NO: 685414 - RNA, 21 nt, Human
uaccugaaacaagauaugggc

SEQ ID NO: 685415 - RNA, 19 nt, Human
uagcaccugaaccacaucu

SEQ ID NO: 685416 - RNA, 22 nt, Human
uaggagacuucgugggguuggg

SEQ ID NO: 685417 - RNA, 22 nt, Human
uaucugagccuuuugcccuucc

SEQ ID NO: 685418 - RNA, 24 nt, Human
uaugaaaaggagggcuuguccaag

SEQ ID NO: 685419 - RNA, 21 nt, Human
ucacugucaauuucacguccc

SEQ ID NO: 685420 - RNA, 26 nt, Human
ucagacccuacagcuccuuaggcucc

SEQ ID NO: 685421 - RNA, 19 nt, Human
ucagauccaagagagcaag

SEQ ID NO: 685422 - RNA, 21 nt, Human
uccaagcuaccucugggccuu

SEQ ID NO: 685423 - RNA, 21 nt, Human
uccccagccagguacugagac

SEQ ID NO: 685424 - RNA, 29 nt, Human
ucccuuagcuccaaacaagggcagggguu

SEQ ID NO: 685425 - RNA, 18 nt, Human
ugagugggagagaaggga

SEQ ID NO: 685426 - RNA, 21 nt, Human
uggaaggaaagucccacccac

SEQ ID NO: 685427 - RNA, 23 nt, Human
ugggggcacucucagccuaagga

SEQ ID NO: 685428 - RNA, 19 nt, Human
ugucagccugggggcacuc

SEQ ID NO: 685429 - RNA, 18 nt, Human
uguggggcuuggggagcc

SEQ ID NO: 685430 - RNA, 19 nt, Human
uguggggcuuggggagccu

SEQ ID NO: 685431 - RNA, 22 nt, Human
uuacucaaaucuaaaucuacuc

SEQ ID NO: 685432 - RNA, 24 nt, Human
uucauugaucuuaagaucccaaga

SEQ ID NO: 685433 - RNA, 25 nt, Human
uuccuaaaccagaaaucccaagagc

SEQ ID NO: 685434 - RNA, 22 nt, Human
uugaucuuaagaucccaagaca

SEQ ID NO: 685435 - RNA, 23 nt, Human
uugaucuuaagaucccaagacac

SEQ ID NO: 685436 - RNA, 20 nt, Human
uuuguauuauccaauacaca

SEQ ID NO: 685437 - RNA, 23 nt, Human
uuuuuuuuuuuuuuuuuuaaaug

SEQ ID NO: 685438 - RNA, 21 nt, Human
aucuuucuacacaagugcugg

SEQ ID NO: 685439 - RNA, 20 nt, Human
cccgagacccuggagcugga

SEQ ID NO: 685440 - RNA, 22 nt, Human
ccucggcacaaagcugaagccc

SEQ ID NO: 685441 - RNA, 21 nt, Human
cgagacccuggagcuggaagg

SEQ ID NO: 685442 - RNA, 18 nt, Human
ggagacaggagcgggaac

SEQ ID NO: 685443 - RNA, 22 nt, Human
ggagcuggaaggaucaaaagug

SEQ ID NO: 685444 - RNA, 18 nt, Human
ggcacaaagcugaagccc

SEQ ID NO: 685445 - RNA, 22 nt, Human
ugccucggcacaaagcugaagc

SEQ ID NO: 685446 - RNA, 23 nt, Human
uuccaggagacaggagcgggaac

SEQ ID NO: 685447 - RNA, 22 nt, Human
aaaaacaaaacaaaacuguaua

SEQ ID NO: 685448 - RNA, 23 nt, Human
aaaaaggcagaaaacauauuuac

SEQ ID NO: 685449 - RNA, 21 nt, Human
aaaaccuacccccacaaccac

SEQ ID NO: 685450 - RNA, 25 nt, Human
aaacaaaaacaaaacaaaacuguau

SEQ ID NO: 685451 - RNA, 22 nt, Human
aaacacauccuaaagcuacaca

SEQ ID NO: 685452 - RNA, 24 nt, Human
aaagaauuauaggcugggcgaggu

SEQ ID NO: 685453 - RNA, 24 nt, Human
aaauaaaauucuccacaucacgga

SEQ ID NO: 685454 - RNA, 18 nt, Human
aaauagcccaauaaaagg

SEQ ID NO: 685455 - RNA, 23 nt, Human
aacacuuagggaaaaaaggcaga

SEQ ID NO: 685456 - RNA, 20 nt, Human
aacauggcaaaaccccgucu

SEQ ID NO: 685457 - RNA, 21 nt, Human
aacauggcaaaaccccgucuc

SEQ ID NO: 685458 - RNA, 21 nt, Human
aacuggugcuaggcuauccau

SEQ ID NO: 685459 - RNA, 20 nt, Human
aagaaaaaaacgaaguggaa

SEQ ID NO: 685460 - RNA, 21 nt, Human
aagaaaaaaacgaaguggaac

SEQ ID NO: 685461 - RNA, 22 nt, Human
aagaagaaaaaaacgaagugga

SEQ ID NO: 685462 - RNA, 23 nt, Human
aagagcaagacuccgucucaaaa

SEQ ID NO: 685463 - RNA, 19 nt, Human
aaggggaccaggaggcagg

SEQ ID NO: 685464 - RNA, 24 nt, Human
aaucgcuugaauccaggaggcaga

SEQ ID NO: 685465 - RNA, 18 nt, Human
aaugcacuccagccuggg

SEQ ID NO: 685466 - RNA, 25 nt, Human
acacucaccauacacguuauauuuc

SEQ ID NO: 685467 - RNA, 23 nt, Human
acagcaauaugcucccuggguuc

SEQ ID NO: 685468 - RNA, 24 nt, Human
accccgucucuacuaaaaguacaa

SEQ ID NO: 685469 - RNA, 18 nt, Human
accuacccccacaaccac

SEQ ID NO: 685470 - RNA, 19 nt, Human
accuacccccacaaccacc

SEQ ID NO: 685471 - RNA, 19 nt, Human
acuaaaauaaaaggcuuua

SEQ ID NO: 685472 - RNA, 22 nt, Human
acuacguguuuagcagcagagc

SEQ ID NO: 685473 - RNA, 19 nt, Human
agaaacucacacaugugcc

SEQ ID NO: 685474 - RNA, 18 nt, Human
agaacauauaaagauguc

SEQ ID NO: 685475 - RNA, 24 nt, Human
agagauugcacugagccaagauug

SEQ ID NO: 685476 - RNA, 21 nt, Human
agaucaagaagaaaugccugu

SEQ ID NO: 685477 - RNA, 18 nt, Human
agcaagacuccgucucaa

SEQ ID NO: 685478 - RNA, 21 nt, Human
agcacuuuaggaggccgaggc

SEQ ID NO: 685479 - RNA, 25 nt, Human
agccugggcgacaagagcaagacuc

SEQ ID NO: 685480 - RNA, 26 nt, Human
aggcagaaaacauauuuuuccuuagg

SEQ ID NO: 685481 - RNA, 24 nt, Human
aggcagagauugcacugagccaag

SEQ ID NO: 685482 - RNA, 23 nt, Human
aggcaggagaaucgcuugaaucc

SEQ ID NO: 685483 - RNA, 21 nt, Human
aggccgaggcgggcagauuac

SEQ ID NO: 685484 - RNA, 20 nt, Human
aggcugaggcaggagaaucg

SEQ ID NO: 685485 - RNA, 24 nt, Human
aggcugaggcaggagaaucgcuug

SEQ ID NO: 685486 - RNA, 20 nt, Human
agggagguaaggggaccagg

SEQ ID NO: 685487 - RNA, 22 nt, Human
agggauugguaaacaaaaacaa

SEQ ID NO: 685488 - RNA, 18 nt, Human
agguaaggggaccaggag

SEQ ID NO: 685489 - RNA, 24 nt, Human
aguaaccuaucacauuccuccaua

SEQ ID NO: 685490 - RNA, 26 nt, Human
auaguccuugauugcuccauuuguuu

SEQ ID NO: 685491 - RNA, 19 nt, Human
augccuguaauccuagcac

SEQ ID NO: 685492 - RNA, 19 nt, Human
auguccugcucuuauguuc

SEQ ID NO: 685493 - RNA, 24 nt, Human
auuaccuaaagucaggaguuugag

SEQ ID NO: 685494 - RNA, 21 nt, Human
auugcuccauuuguuucuggc

SEQ ID NO: 685495 - RNA, 24 nt, Human
auugugccaaugcacuccagccug

SEQ ID NO: 685496 - RNA, 20 nt, Human
auuuaaaaaacacacaaugc

SEQ ID NO: 685497 - RNA, 18 nt, Human
caaaacaaaacuguauaa

SEQ ID NO: 685498 - RNA, 22 nt, Human
caaaacaaaacuguauaaaaug

SEQ ID NO: 685499 - RNA, 23 nt, Human
caaaacaaaugcuccuuuguuua

SEQ ID NO: 685500 - RNA, 23 nt, Human
caaaacagcauugaccuuaauau

SEQ ID NO: 685501 - RNA, 23 nt, Human
caaaauaacacaacauuaaaaaa

SEQ ID NO: 685502 - RNA, 22 nt, Human
caaacaucacacucuauggcaa

SEQ ID NO: 685503 - RNA, 20 nt, Human
caaaugcaaaucccaauuca

SEQ ID NO: 685504 - RNA, 24 nt, Human
caacauggcaaaaccccgucucua

SEQ ID NO: 685505 - RNA, 19 nt, Human
caagaaacaucugcauaca

SEQ ID NO: 685506 - RNA, 19 nt, Human
caaugcacuccagccuggg

SEQ ID NO: 685507 - RNA, 22 nt, Human
caaugcacuccagccugggcga

SEQ ID NO: 685508 - RNA, 23 nt, Human
caaugcacuccagccugggcgac

SEQ ID NO: 685509 - RNA, 24 nt, Human
caaugcacuccagccugggcgaca

SEQ ID NO: 685510 - RNA, 22 nt, Human
cacagggggugaagguggaggg

SEQ ID NO: 685511 - RNA, 22 nt, Human
cacagugagaaauauauuucac

SEQ ID NO: 685512 - RNA, 18 nt, Human
caccaaagcaacuuacuu

SEQ ID NO: 685513 - RNA, 21 nt, Human
caccuguaaucccagcuacuc

SEQ ID NO: 685514 - RNA, 24 nt, Human
caccuguaaucccagcuacucagg

SEQ ID NO: 685515 - RNA, 19 nt, Human
cacguaacaccgcuuauau

SEQ ID NO: 685516 - RNA, 18 nt, Human
cacguuauauuuccccau

SEQ ID NO: 685517 - RNA, 22 nt, Human
cacuauacacaaauguagcucu

SEQ ID NO: 685518 - RNA, 24 nt, Human
cacuccagccugggcgacaagagc

SEQ ID NO: 685519 - RNA, 24 nt, Human
cagauuaccuaaagucaggaguuu

SEQ ID NO: 685520 - RNA, 24 nt, Human
cagcuacucaggaggcugaggcag

SEQ ID NO: 685521 - RNA, 25 nt, Human
caggucaagaaacaucugcauacaa

SEQ ID NO: 685522 - RNA, 23 nt, Human
cauacccuuuucccuauaccuaa

SEQ ID NO: 685523 - RNA, 20 nt, Human
cauauuccacugaugaaaca

SEQ ID NO: 685524 - RNA, 21 nt, Human
caucacggacuaaaaccauuu

SEQ ID NO: 685525 - RNA, 23 nt, Human
caugccuguaauccuagcacuuu

SEQ ID NO: 685526 - RNA, 20 nt, Human
cauuacuaguaagcaacagg

SEQ ID NO: 685527 - RNA, 21 nt, Human
ccaaugcacuccagccugggc

SEQ ID NO: 685528 - RNA, 22 nt, Human
ccaaugcacuccagccugggcg

SEQ ID NO: 685529 - RNA, 23 nt, Human
ccaaugcacuccagccugggcga

SEQ ID NO: 685530 - RNA, 24 nt, Human
ccaaugcacuccagccugggcgac

SEQ ID NO: 685531 - RNA, 21 nt, Human
ccacugaugaaacaaaugcaa

SEQ ID NO: 685532 - RNA, 25 nt, Human
ccagacaguccgauucccaaacagg

SEQ ID NO: 685533 - RNA, 18 nt, Human
ccauaccucacaucauac

SEQ ID NO: 685534 - RNA, 18 nt, Human
cccacaaccaccaugcug

SEQ ID NO: 685535 - RNA, 19 nt, Human
ccgauucccaaacaggcau

SEQ ID NO: 685536 - RNA, 18 nt, Human
ccuaaagcuacacacauu

SEQ ID NO: 685537 - RNA, 22 nt, Human
ccuaaagucaggaguuugagac

SEQ ID NO: 685538 - RNA, 23 nt, Human
ccuaaagucaggaguuugagacc

SEQ ID NO: 685539 - RNA, 22 nt, Human
ccucacaucauacacaaaagca

SEQ ID NO: 685540 - RNA, 21 nt, Human
ccucugagaaaagcgggggga

SEQ ID NO: 685541 - RNA, 23 nt, Human
ccuggccaacauggcaaaacccc

SEQ ID NO: 685542 - RNA, 24 nt, Human
ccuggccaacauggcaaaaccccg

SEQ ID NO: 685543 - RNA, 23 nt, Human
ccugggcgacaagagcaagacuc

SEQ ID NO: 685544 - RNA, 21 nt, Human
ccuguaaucccagcuacucag

SEQ ID NO: 685545 - RNA, 21 nt, Human
cgacccgcuaacgccggugcc

SEQ ID NO: 685546 - RNA, 18 nt, Human
cgauucccaaacaggcau

SEQ ID NO: 685547 - RNA, 19 nt, Human
cgcuugaauccaggaggca

SEQ ID NO: 685548 - RNA, 23 nt, Human
cggcaggugccggcgcacacucc

SEQ ID NO: 685549 - RNA, 24 nt, Human
cgggcagauuaccuaaagucagga

SEQ ID NO: 685550 - RNA, 23 nt, Human
cgggucggcgacccgcuaacgcc

SEQ ID NO: 685551 - RNA, 18 nt, Human
cuagaggacuaucuuuug

SEQ ID NO: 685552 - RNA, 21 nt, Human
cuagauagauagagcagacca

SEQ ID NO: 685553 - RNA, 21 nt, Human
cucacuauagacucuuuuaaa

SEQ ID NO: 685554 - RNA, 18 nt, Human
cucagacccuugucccgg

SEQ ID NO: 685555 - RNA, 19 nt, Human
cucaugauccugauuuugu

SEQ ID NO: 685556 - RNA, 24 nt, Human
cucaugccuguaauccuagcacuu

SEQ ID NO: 685557 - RNA, 19 nt, Human
cuguaacugcuucuuuuca

SEQ ID NO: 685558 - RNA, 21 nt, Human
cuguaaucccagcuacucagg

SEQ ID NO: 685559 - RNA, 24 nt, Human
gaaauucucucaugacccacgauu

SEQ ID NO: 685560 - RNA, 21 nt, Human
gacccgcuaacgccggugccu

SEQ ID NO: 685561 - RNA, 23 nt, Human
gacgugguggcgggcaccuguaa

SEQ ID NO: 685562 - RNA, 23 nt, Human
gagaaucgcuugaauccaggagg

SEQ ID NO: 685563 - RNA, 22 nt, Human
gaggaggagaaagcugagucag

SEQ ID NO: 685564 - RNA, 25 nt, Human
gaggcgggcagauuaccuaaaguca

SEQ ID NO: 685565 - RNA, 26 nt, Human
gaucauagucaaguuuuccaauucgg

SEQ ID NO: 685566 - RNA, 24 nt, Human
gauuaccuaaagucaggaguuuga

SEQ ID NO: 685567 - RNA, 23 nt, Human
gauugguaaacaaaaacaaaaca

SEQ ID NO: 685568 - RNA, 20 nt, Human
gcaaaaaagacuaaaauaaa

SEQ ID NO: 685569 - RNA, 23 nt, Human
gcacacucaccauacacguuaau

SEQ ID NO: 685570 - RNA, 25 nt, Human
gcagaaaacauauuuacaauuuuag

SEQ ID NO: 685571 - RNA, 18 nt, Human
gcagauacuuaacauuac

SEQ ID NO: 685572 - RNA, 21 nt, Human
gccaacauggcaaaaccccgu

SEQ ID NO: 685573 - RNA, 22 nt, Human
gccaaugcacuccagccugggc

SEQ ID NO: 685574 - RNA, 18 nt, Human
gcgcagugucgcggacgc

SEQ ID NO: 685575 - RNA, 20 nt, Human
gcgggcaccuguaaucccag

SEQ ID NO: 685576 - RNA, 23 nt, Human
ggaaaaaaacucuuaacagcaaa

SEQ ID NO: 685577 - RNA, 19 nt, Human
ggaccaggaggcaggaagg

SEQ ID NO: 685578 - RNA, 19 nt, Human
ggcaccuguaaucccagcu

SEQ ID NO: 685579 - RNA, 19 nt, Human
ggccucugauguuucauau

SEQ ID NO: 685580 - RNA, 19 nt, Human
gggcaugaggaggagaaag

SEQ ID NO: 685581 - RNA, 24 nt, Human
gggcgagguggcucaugccuguaa

SEQ ID NO: 685582 - RNA, 19 nt, Human
gggucucagacccuugucc

SEQ ID NO: 685583 - RNA, 24 nt, Human
gguggcgggcaccuguaaucccag

SEQ ID NO: 685584 - RNA, 21 nt, Human
gguggcucaugccuguaaucc

SEQ ID NO: 685585 - RNA, 24 nt, Human
gguggcucaugccuguaauccuag

SEQ ID NO: 685586 - RNA, 21 nt, Human
guccccgaugacgugcuucag

SEQ ID NO: 685587 - RNA, 18 nt, Human
gucucagacccuuguccc

SEQ ID NO: 685588 - RNA, 22 nt, Human
gugaagaucaaaacuuugaaca

SEQ ID NO: 685589 - RNA, 21 nt, Human
guucguucucccuucccccaa

SEQ ID NO: 685590 - RNA, 22 nt, Human
uaaaaccuacccccacaaccac

SEQ ID NO: 685591 - RNA, 20 nt, Human
uaaaaugagugaaucagguc

SEQ ID NO: 685592 - RNA, 19 nt, Human
uaaaaugcagaucaagaag

SEQ ID NO: 685593 - RNA, 22 nt, Human
uaaacaaaaacaaaacaaaacu

SEQ ID NO: 685594 - RNA, 24 nt, Human
uaaauguccagacauuaaggaaug

SEQ ID NO: 685595 - RNA, 21 nt, Human
uaacuacaguagcaagaagaa

SEQ ID NO: 685596 - RNA, 23 nt, Human
uaacugcuucuuuucaauaauau

SEQ ID NO: 685597 - RNA, 19 nt, Human
uaacugguggugacugcug

SEQ ID NO: 685598 - RNA, 23 nt, Human
uaagcaagcuaggacugaagggg

SEQ ID NO: 685599 - RNA, 19 nt, Human
uacaaaucaauagaaauag

SEQ ID NO: 685600 - RNA, 20 nt, Human
uacacguaauggaggaacac

SEQ ID NO: 685601 - RNA, 23 nt, Human
uaccuaaagucaggaguuugaga

SEQ ID NO: 685602 - RNA, 21 nt, Human
uacuuaacauuacuaguaagc

SEQ ID NO: 685603 - RNA, 20 nt, Human
uagaacauauaaagaugucu

SEQ ID NO: 685604 - RNA, 24 nt, Human
uagcacuuuaggaggccgaggcgg

SEQ ID NO: 685605 - RNA, 18 nt, Human
uagccggacgugguggcg

SEQ ID NO: 685606 - RNA, 22 nt, Human
uaggaggccgaggcgggcagau

SEQ ID NO: 685607 - RNA, 25 nt, Human
uauaaaugaugaaaaacuggugcua

SEQ ID NO: 685608 - RNA, 27 nt, Human
uauacccgaagacguacuggaggcgcu

SEQ ID NO: 685609 - RNA, 20 nt, Human
uauguauauauacauguaua

SEQ ID NO: 685610 - RNA, 19 nt, Human
ucaaaaaggagugagagca

SEQ ID NO: 685611 - RNA, 25 nt, Human
ucaaaaauacaguauuuauuguaau

SEQ ID NO: 685612 - RNA, 18 nt, Human
ucacaucauacacaaaag

SEQ ID NO: 685613 - RNA, 21 nt, Human
uccagaccaaggagaauaaaa

SEQ ID NO: 685614 - RNA, 19 nt, Human
uccagccugggcgacaaga

SEQ ID NO: 685615 - RNA, 18 nt, Human
uccuugauugcuccauuu

SEQ ID NO: 685616 - RNA, 18 nt, Human
ucggcauccuccuccaca

SEQ ID NO: 685617 - RNA, 23 nt, Human
ucguucucccuucccccaauccu

SEQ ID NO: 685618 - RNA, 18 nt, Human
ucucaaaaagaaaaaaag

SEQ ID NO: 685619 - RNA, 21 nt, Human
ucucuaagcaagcuaggacug

SEQ ID NO: 685620 - RNA, 21 nt, Human
ucucuacuaaaaguacaaaaa

SEQ ID NO: 685621 - RNA, 24 nt, Human
ugaaaaugugggagaagguauuug

SEQ ID NO: 685622 - RNA, 19 nt, Human
ugaaacaacuucuacaaaa

SEQ ID NO: 685623 - RNA, 22 nt, Human
ugaccuuaauauguagcaaaaa

SEQ ID NO: 685624 - RNA, 23 nt, Human
ugagaaaagcggggggaauuuug

SEQ ID NO: 685625 - RNA, 21 nt, Human
ugagaccacccuggccaacau

SEQ ID NO: 685626 - RNA, 21 nt, Human
ugagauucagagagcuuaaaa

SEQ ID NO: 685627 - RNA, 22 nt, Human
ugagccaagauugugccaaugc

SEQ ID NO: 685628 - RNA, 20 nt, Human
ugaggcaggagaaucgcuug

SEQ ID NO: 685629 - RNA, 24 nt, Human
ugaggcaggagaaucgcuugaauc

SEQ ID NO: 685630 - RNA, 25 nt, Human
ugaggcaggagaaucgcuugaaucc

SEQ ID NO: 685631 - RNA, 22 nt, Human
ugagugucauaaaucagugugg

SEQ ID NO: 685632 - RNA, 19 nt, Human
ugauguggccucugauguu

SEQ ID NO: 685633 - RNA, 23 nt, Human
ugcagcaccucccccuaaaacaa

SEQ ID NO: 685634 - RNA, 26 nt, Human
ugcauacaaacuaaggaaccuaugua

SEQ ID NO: 685635 - RNA, 28 nt, Human
ugccagacagccccaagacccauacccu

SEQ ID NO: 685636 - RNA, 23 nt, Human
ugccggcgcacacuccgguaggc

SEQ ID NO: 685637 - RNA, 19 nt, Human
ugccuggaggcgcgcgcag

SEQ ID NO: 685638 - RNA, 22 nt, Human
ugccuguaauccuagcacuuua

SEQ ID NO: 685639 - RNA, 24 nt, Human
ugccuguaauccuagcacuuuagg

SEQ ID NO: 685640 - RNA, 22 nt, Human
uggcgggcaccuguaaucccag

SEQ ID NO: 685641 - RNA, 19 nt, Human
uggcucaugccuguaaucc

SEQ ID NO: 685642 - RNA, 24 nt, Human
uggcucaugccuguaauccuagca

SEQ ID NO: 685643 - RNA, 21 nt, Human
ugggagaagguauuugcacua

SEQ ID NO: 685644 - RNA, 19 nt, Human
uggggagggugagaaggaa

SEQ ID NO: 685645 - RNA, 21 nt, Human
ugguaaacaaaaacaaaacaa

SEQ ID NO: 685646 - RNA, 24 nt, Human
ugguggcgggcaccuguaauccca

SEQ ID NO: 685647 - RNA, 18 nt, Human
ugugaagaucaaaacuuu

SEQ ID NO: 685648 - RNA, 22 nt, Human
uuaaaaaacacacaaugcuuaa

SEQ ID NO: 685649 - RNA, 22 nt, Human
uuauaccaaaaagaguaaaauc

SEQ ID NO: 685650 - RNA, 24 nt, Human
uugaagcguuuacagcaauaugcu

SEQ ID NO: 685651 - RNA, 22 nt, Human
uugcacugagccaagauugugc

SEQ ID NO: 685652 - RNA, 22 nt, Human
uugccagacagccccaagaccc

SEQ ID NO: 685653 - RNA, 23 nt, Human
uuuaaaaaacacacaaugcuuaa

SEQ ID NO: 685654 - RNA, 21 nt, Human
uuuauaggggaaaaaaacucu

SEQ ID NO: 685655 - RNA, 24 nt, Human
uuucacacuguaccagaauggcug

SEQ ID NO: 685656 - RNA, 24 nt, Human
uuuuuuuuuuuuuuuuuuaauuuu

SEQ ID NO: 685657 - RNA, 23 nt, Human
aaaauuaaagugugucucaaaac

SEQ ID NO: 685658 - RNA, 20 nt, Human
acucaauacaaauuugcccc

SEQ ID NO: 685659 - RNA, 23 nt, Human
caaguuaacauaaaauuaaagug

SEQ ID NO: 685660 - RNA, 21 nt, Human
ugcuugcaauacuauuucaca

SEQ ID NO: 685661 - RNA, 18 nt, Human
ugucucaaaaccagacag

SEQ ID NO: 685662 - RNA, 25 nt, Human
agaggcagcgcucuccgaggagucu

SEQ ID NO: 685663 - RNA, 21 nt, Human
agcccgccaacccagaggcag

SEQ ID NO: 685664 - RNA, 22 nt, Human
cagcgcucuccgaggagucuuc

SEQ ID NO: 685665 - RNA, 20 nt, Human
ccaacccagaggcagcgcuc

SEQ ID NO: 685666 - RNA, 19 nt, Human
cccgcgagacugccguaag

SEQ ID NO: 685667 - RNA, 19 nt, Human
ccugccagcccgccaaccc

SEQ ID NO: 685668 - RNA, 18 nt, Human
gcuacagccugccagccc

SEQ ID NO: 685669 - RNA, 24 nt, Human
uaaagcaaauaacuggacauaauc

SEQ ID NO: 685670 - RNA, 18 nt, Human
ucuucuaugacagcccca

SEQ ID NO: 685671 - RNA, 23 nt, Human
uggacauaaucuuaaaggauucc

SEQ ID NO: 685672 - RNA, 21 nt, Human
uuaaagcaaauaacuggacau

SEQ ID NO: 685673 - RNA, 21 nt, Human
uuaccgcucgaacguucaaau

SEQ ID NO: 685674 - RNA, 22 nt, Human
uuugacaaggguaacuucuucu

SEQ ID NO: 685675 - RNA, 23 nt, Human
uuuuucucugauuuugacaaggg

SEQ ID NO: 685676 - RNA, 18 nt, Human
uuuuuuuuuuuuucucug

SEQ ID NO: 685677 - RNA, 25 nt, Human
uuuuuuuuuuuuuuuucucugauuu

SEQ ID NO: 685678 - RNA, 26 nt, Human
uuuuuuuuuuuuuuuucucugauuuu

SEQ ID NO: 685679 - RNA, 18 nt, Human
accuccaaugaacagcug

SEQ ID NO: 685680 - RNA, 21 nt, Human
agauuccugcccgaacagcuu

SEQ ID NO: 685681 - RNA, 25 nt, Human
augaaaccugugcaccauccaguga

SEQ ID NO: 685682 - RNA, 25 nt, Human
ccauccagugacaccuccaaugaac

SEQ ID NO: 685683 - RNA, 20 nt, Human
ccuccaaugaacagcugggu

SEQ ID NO: 685684 - RNA, 24 nt, Human
ccucccacagcuguugcagccaac

SEQ ID NO: 685685 - RNA, 20 nt, Human
cgaacagcuuacgccaccau

SEQ ID NO: 685686 - RNA, 24 nt, Human
cugcugaagguccagauuccugcc

SEQ ID NO: 685687 - RNA, 24 nt, Human
gccaacuuuccaaccuucuggaau

SEQ ID NO: 685688 - RNA, 18 nt, Human
ucccacagcuguugcagc

SEQ ID NO: 685689 - RNA, 19 nt, Human
ucccacagcuguugcagcc

SEQ ID NO: 685690 - RNA, 20 nt, Human
uccuucuccacucguugcca

SEQ ID NO: 685691 - RNA, 30 nt, Human
uucuccacucguugccagucaacuuugauu

SEQ ID NO: 685692 - RNA, 19 nt, Human
aaaaaaaugaaacaaaaac

SEQ ID NO: 685693 - RNA, 22 nt, Human
aaaaaggcacauucuccuaacc

SEQ ID NO: 685694 - RNA, 18 nt, Human
aaaacaaaaacaaaaaca

SEQ ID NO: 685695 - RNA, 23 nt, Human
aaaaggucuuucuucauaaauua

SEQ ID NO: 685696 - RNA, 23 nt, Human
aaacagaaaagcuaacaaucuga

SEQ ID NO: 685697 - RNA, 23 nt, Human
aaagaaauaaaacagaaaagcua

SEQ ID NO: 685698 - RNA, 19 nt, Human
aacacauuucucuuaugac

SEQ ID NO: 685699 - RNA, 20 nt, Human
aaccggacaaauaaguuacc

SEQ ID NO: 685700 - RNA, 24 nt, Human
aaggcacauucuccuaaccgcaaa

SEQ ID NO: 685701 - RNA, 18 nt, Human
aauaccacaacuuuaaaa

SEQ ID NO: 685702 - RNA, 18 nt, Human
acaaaaacaaaaacaaaa

SEQ ID NO: 685703 - RNA, 21 nt, Human
aggauuuggucuguggaaaca

SEQ ID NO: 685704 - RNA, 18 nt, Human
agggagcauagaaccaau

SEQ ID NO: 685705 - RNA, 22 nt, Human
agggugcugcguucagucugga

SEQ ID NO: 685706 - RNA, 24 nt, Human
agucauuuuuauuuuucaaauuua

SEQ ID NO: 685707 - RNA, 23 nt, Human
auaaaacagaaaagcuaacaauc

SEQ ID NO: 685708 - RNA, 24 nt, Human
caaaaauaaagagcacagaagaug

SEQ ID NO: 685709 - RNA, 22 nt, Human
caaagcaguaauauuccaggga

SEQ ID NO: 685710 - RNA, 19 nt, Human
caaguccuaggaaagaaaa

SEQ ID NO: 685711 - RNA, 22 nt, Human
cagcacaaaagaaaauagacuc

SEQ ID NO: 685712 - RNA, 22 nt, Human
cagggagggccagcaaccuguc

SEQ ID NO: 685713 - RNA, 24 nt, Human
cauaauucucauucuaaagcacua

SEQ ID NO: 685714 - RNA, 18 nt, Human
ccagacgaguauggcacu

SEQ ID NO: 685715 - RNA, 20 nt, Human
ccagcacaaaagaaaauaga

SEQ ID NO: 685716 - RNA, 21 nt, Human
cccagcacaaaagaaaauaga

SEQ ID NO: 685717 - RNA, 18 nt, Human
ccggcaaaaauaaagagc

SEQ ID NO: 685718 - RNA, 20 nt, Human
ccuaaccgcaaacugguccg

SEQ ID NO: 685719 - RNA, 25 nt, Human
cuaaccgcaaacugguccggcaaaa

SEQ ID NO: 685720 - RNA, 20 nt, Human
cuagguacacagagggugcu

SEQ ID NO: 685721 - RNA, 25 nt, Human
cucaaaagaaauaaaacagaaaagc

SEQ ID NO: 685722 - RNA, 20 nt, Human
cuccuaaccgcaaacugguc

SEQ ID NO: 685723 - RNA, 21 nt, Human
cugaccagacaaguacacagu

SEQ ID NO: 685724 - RNA, 27 nt, Human
cuuagcccuagcuccugagccgguucc

SEQ ID NO: 685725 - RNA, 24 nt, Human
gaaacaaaaacaaaaacaaaaaca

SEQ ID NO: 685726 - RNA, 23 nt, Human
gaaccaauaauaccacaacuuua

SEQ ID NO: 685727 - RNA, 21 nt, Human
gacaaguacacaguuuuggaa

SEQ ID NO: 685728 - RNA, 20 nt, Human
gcacaaaagaaaauagacuc

SEQ ID NO: 685729 - RNA, 24 nt, Human
gcagauuuccccuccccucuaacc

SEQ ID NO: 685730 - RNA, 23 nt, Human
ggaaggacaaaacgguuucgcga

SEQ ID NO: 685731 - RNA, 20 nt, Human
ggcaaaaauaaagagcacag

SEQ ID NO: 685732 - RNA, 21 nt, Human
ggcaaaaauaaagagcacaga

SEQ ID NO: 685733 - RNA, 28 nt, Human
uaaaaaaaugaaacaaaaacaaaaacaa

SEQ ID NO: 685734 - RNA, 24 nt, Human
uaacaaucugaucaaauguacagu

SEQ ID NO: 685735 - RNA, 24 nt, Human
uaacuaaugcaaaaauaucaagua

SEQ ID NO: 685736 - RNA, 23 nt, Human
uacaaaaggucuuucuucauaaa

SEQ ID NO: 685737 - RNA, 18 nt, Human
uacacuucucagagcagc

SEQ ID NO: 685738 - RNA, 26 nt, Human
uaccacaacuuuaaaaaaaugaaaca

SEQ ID NO: 685739 - RNA, 20 nt, Human
uauaaaggaaggacaaaacg

SEQ ID NO: 685740 - RNA, 27 nt, Human
uauaaaggaaggacaaaacgguuucgc

SEQ ID NO: 685741 - RNA, 26 nt, Human
ucaaauguacaguucaaaaaugucuu

SEQ ID NO: 685742 - RNA, 25 nt, Human
ucacaaagcaguaauauuccaggga

SEQ ID NO: 685743 - RNA, 18 nt, Human
ucccaaaucuuacccaga

SEQ ID NO: 685744 - RNA, 19 nt, Human
ucccaaaucuuacccagac

SEQ ID NO: 685745 - RNA, 24 nt, Human
uccggcaaaaauaaagagcacaga

SEQ ID NO: 685746 - RNA, 22 nt, Human
ucuaucaucaaauacaagcauu

SEQ ID NO: 685747 - RNA, 24 nt, Human
ucuuaugacuauguaauuuucacu

SEQ ID NO: 685748 - RNA, 18 nt, Human
ucuugaaccggacaaaua

SEQ ID NO: 685749 - RNA, 20 nt, Human
ugaaacaaaaacaaaaacaa

SEQ ID NO: 685750 - RNA, 24 nt, Human
ugaaacaaaaacaaaaacaaaaac

SEQ ID NO: 685751 - RNA, 29 nt, Human
ugaaacaaaaacaaaaacaaaaacacauu

SEQ ID NO: 685752 - RNA, 23 nt, Human
ugaaacuaugaaaugucacugac

SEQ ID NO: 685753 - RNA, 20 nt, Human
ugaaccggacaaauaaguua

SEQ ID NO: 685754 - RNA, 27 nt, Human
ugaagauaaauccuuacuuuuagcuuu

SEQ ID NO: 685755 - RNA, 21 nt, Human
ugagacaaguuggagcuacug

SEQ ID NO: 685756 - RNA, 22 nt, Human
ugagguagauaacugaucaacu

SEQ ID NO: 685757 - RNA, 24 nt, Human
uggaagacaacuuaauuuaccauu

SEQ ID NO: 685758 - RNA, 24 nt, Human
uguggaaacagggagggccagcaa

SEQ ID NO: 685759 - RNA, 22 nt, Human
uguggcacuaguaaaacaaaaa

SEQ ID NO: 685760 - RNA, 18 nt, Human
uuccccuccccucuaacc

SEQ ID NO: 685761 - RNA, 24 nt, Human
uucuccuaaccgcaaacugguccg

SEQ ID NO: 685762 - RNA, 24 nt, Human
uuucgcgauugguaauggccgucg

SEQ ID NO: 685763 - RNA, 23 nt, Human
uuuuauguacagagguuauguuu

SEQ ID NO: 685764 - RNA, 20 nt, Human
uuuuucaaauuuaccuaaua

SEQ ID NO: 685765 - RNA, 23 nt, Human
aggaugacaucaccucuucugcu

SEQ ID NO: 685766 - RNA, 23 nt, Human
agucuguuuccagagagaaugaa

SEQ ID NO: 685767 - RNA, 19 nt, Human
auacuuuccuuuuucccuu

SEQ ID NO: 685768 - RNA, 21 nt, Human
aucaguuaccccucacuguag

SEQ ID NO: 685769 - RNA, 18 nt, Human
augcacaaaaaugacauu

SEQ ID NO: 685770 - RNA, 23 nt, Human
caccccaguucacuuuggguuuc

SEQ ID NO: 685771 - RNA, 19 nt, Human
caccucuucugcucccaaa

SEQ ID NO: 685772 - RNA, 23 nt, Human
caccugaucaguuaccccucacu

SEQ ID NO: 685773 - RNA, 24 nt, Human
cauaacaaacacaucccaugguca

SEQ ID NO: 685774 - RNA, 26 nt, Human
cccacugaauccaguuucccaacacu

SEQ ID NO: 685775 - RNA, 18 nt, Human
ccucacuguaggaugcac

SEQ ID NO: 685776 - RNA, 26 nt, Human
ccucacuguaggaugcacaaaaauug

SEQ ID NO: 685777 - RNA, 18 nt, Human
gaauccaguuucccaaca

SEQ ID NO: 685778 - RNA, 23 nt, Human
ggucagaugaacuacccaguuuc

SEQ ID NO: 685779 - RNA, 22 nt, Human
uaacaaacacaucccaugguca

SEQ ID NO: 685780 - RNA, 25 nt, Human
uaacaaacacaucccauggucagau

SEQ ID NO: 685781 - RNA, 24 nt, Human
uacuuuccuuuuucccuuccccca

SEQ ID NO: 685782 - RNA, 20 nt, Human
uauaaaguauacagagcauu

SEQ ID NO: 685783 - RNA, 22 nt, Human
uauagaaagaucuguaaaaaaa

SEQ ID NO: 685784 - RNA, 22 nt, Human
ucccauggucagaugaacuacc

SEQ ID NO: 685785 - RNA, 18 nt, Human
uggaagaaaugcaaagca

SEQ ID NO: 685786 - RNA, 21 nt, Human
uguuauagacaccugaucagu

SEQ ID NO: 685787 - RNA, 24 nt, Human
uucaaacagcuuuacuuucauaga

SEQ ID NO: 685788 - RNA, 22 nt, Human
uuucccaggaugacaucaccuc

SEQ ID NO: 685789 - RNA, 24 nt, Human
uuuccuuuuucccuucccccaccc

SEQ ID NO: 685790 - RNA, 26 nt, Human
uuugguccaaagaaaccugagucugu

SEQ ID NO: 685791 - RNA, 20 nt, Human
aagcccgcccagcacucucc

SEQ ID NO: 685792 - RNA, 18 nt, Human
aaugucccaaccugauga

SEQ ID NO: 685793 - RNA, 25 nt, Human
acagaacaaugggaaagaggaccgg

SEQ ID NO: 685794 - RNA, 18 nt, Human
agagaaaccaaacuggga

SEQ ID NO: 685795 - RNA, 19 nt, Human
cacuagacagugcccuccc

SEQ ID NO: 685796 - RNA, 24 nt, Human
cagcacucucccuuucugcccucc

SEQ ID NO: 685797 - RNA, 20 nt, Human
cagcguaaaggagaaguggg

SEQ ID NO: 685798 - RNA, 25 nt, Human
ccagcacucucccuuucugcccucc

SEQ ID NO: 685799 - RNA, 18 nt, Human
ccccacuuaucccccucc

SEQ ID NO: 685800 - RNA, 20 nt, Human
ccccacuuaucccccuccuc

SEQ ID NO: 685801 - RNA, 24 nt, Human
ccccacuuaucccccuccucgcga

SEQ ID NO: 685802 - RNA, 20 nt, Human
cccgcccagcacucucccuu

SEQ ID NO: 685803 - RNA, 21 nt, Human
ccucccggaagcggauuccca

SEQ ID NO: 685804 - RNA, 20 nt, Human
ccuugagacaauaaggugga

SEQ ID NO: 685805 - RNA, 21 nt, Human
cucccggaagcggauucccag

SEQ ID NO: 685806 - RNA, 23 nt, Human
cucccuuucugcccucccucacc

SEQ ID NO: 685807 - RNA, 23 nt, Human
cuccgacuaagcccgcccagcac

SEQ ID NO: 685808 - RNA, 23 nt, Human
cugacaccagacuucuccccacu

SEQ ID NO: 685809 - RNA, 23 nt, Human
cugugcacuagacagugcccucc

SEQ ID NO: 685810 - RNA, 23 nt, Human
cuuaucccccuccucgcgaugca

SEQ ID NO: 685811 - RNA, 19 nt, Human
gaaagaggacugggagagg

SEQ ID NO: 685812 - RNA, 21 nt, Human
gagaaguggggcagcugcagg

SEQ ID NO: 685813 - RNA, 23 nt, Human
gagcaacagaacaaugggaaaga

SEQ ID NO: 685814 - RNA, 23 nt, Human
gagcugagccuauucacagugcc

SEQ ID NO: 685815 - RNA, 24 nt, Human
gcaacagaacaaugggaaagagga

SEQ ID NO: 685816 - RNA, 21 nt, Human
ggaaagaggacugggagagga

SEQ ID NO: 685817 - RNA, 22 nt, Human
gggaaagaggacugggagagga

SEQ ID NO: 685818 - RNA, 24 nt, Human
gguggagcaacagaacaaugggaa

SEQ ID NO: 685819 - RNA, 20 nt, Human
uacggccuugagacaauaag

SEQ ID NO: 685820 - RNA, 18 nt, Human
uaggaggcgaaggccagg

SEQ ID NO: 685821 - RNA, 19 nt, Human
ucacagugccuaaccugga

SEQ ID NO: 685822 - RNA, 20 nt, Human
ucccaaccugaugagauuac

SEQ ID NO: 685823 - RNA, 27 nt, Human
ucccaguccucaaucuccgacuaagcc

SEQ ID NO: 685824 - RNA, 18 nt, Human
uccucgcgaugcagaggu

SEQ ID NO: 685825 - RNA, 22 nt, Human
ucucccuuucugcccucccuca

SEQ ID NO: 685826 - RNA, 18 nt, Human
ucuccgacuaagcccgcc

SEQ ID NO: 685827 - RNA, 19 nt, Human
ugacaccagacuucucccc

SEQ ID NO: 685828 - RNA, 26 nt, Human
ugagacaauaagguggagcaacagaa

SEQ ID NO: 685829 - RNA, 24 nt, Human
uggagcaacagaacaaugggaaag

SEQ ID NO: 685830 - RNA, 19 nt, Human
ugggagaggaaucuaagaa

SEQ ID NO: 685831 - RNA, 22 nt, Human
aauagcuucaguaaaaaaacca

SEQ ID NO: 685832 - RNA, 22 nt, Human
acaaaucuucauaaccaguuac

SEQ ID NO: 685833 - RNA, 21 nt, Human
cuggaaauacagccagagaau

SEQ ID NO: 685834 - RNA, 21 nt, Human
ugacaaaucuucauaaccagu

SEQ ID NO: 685835 - RNA, 24 nt, Human
uuuggaucuauaauucagcaaaua

SEQ ID NO: 685836 - RNA, 21 nt, Human
aaacaaacaaacaacaacaac

SEQ ID NO: 685837 - RNA, 22 nt, Human
aaacaacaacaacaaaaaaccc

SEQ ID NO: 685838 - RNA, 20 nt, Human
aaacaggcagugcaugagca

SEQ ID NO: 685839 - RNA, 24 nt, Human
aaacuggucucuauucgugacaca

SEQ ID NO: 685840 - RNA, 23 nt, Human
aaacuggucucuauucuaucuca

SEQ ID NO: 685841 - RNA, 20 nt, Human
aacaaacaaacaacaacaac

SEQ ID NO: 685842 - RNA, 25 nt, Human
aacaaacaaacaacaacaacaaaaa

SEQ ID NO: 685843 - RNA, 25 nt, Human
aacaaacaaacaacaacaacaaaaa

SEQ ID NO: 685844 - RNA, 20 nt, Human
aacaacaaaaaacccugucu

SEQ ID NO: 685845 - RNA, 21 nt, Human
aacaacaaaaaacccugucuc

SEQ ID NO: 685846 - RNA, 22 nt, Human
aacaacaacaacaaaaaacccu

SEQ ID NO: 685847 - RNA, 19 nt, Human
acaacaacaacaaaaaacc

SEQ ID NO: 685848 - RNA, 18 nt, Human
acuaaguguucauauaaa

SEQ ID NO: 685849 - RNA, 19 nt, Human
aggcagugcaugagcacug

SEQ ID NO: 685850 - RNA, 19 nt, Human
aucagguuuaaaaaauacu

SEQ ID NO: 685851 - RNA, 24 nt, Human
auuacaucguccugaacgaggacc

SEQ ID NO: 685852 - RNA, 19 nt, Human
caacaaaaaacccugucuc

SEQ ID NO: 685853 - RNA, 24 nt, Human
caacaaaaaacccugucucuacac

SEQ ID NO: 685854 - RNA, 25 nt, Human
caacaaaaaacccugucucuacacc

SEQ ID NO: 685855 - RNA, 24 nt, Human
caacaacaaaaaacccugucucua

SEQ ID NO: 685856 - RNA, 25 nt, Human
caacaacaaaaaacccugucucuac

SEQ ID NO: 685857 - RNA, 23 nt, Human
caacaacaacaaaaaacccuguc

SEQ ID NO: 685858 - RNA, 21 nt, Human
cacggaccgcccgggucuccc

SEQ ID NO: 685859 - RNA, 22 nt, Human
cacucaggcacaacuuuuccag

SEQ ID NO: 685860 - RNA, 18 nt, Human
caggagccguuacccggu

SEQ ID NO: 685861 - RNA, 27 nt, Human
caggagccguuacccggucgaccuggu

SEQ ID NO: 685862 - RNA, 20 nt, Human
cccgggucuccccgagucuc

SEQ ID NO: 685863 - RNA, 18 nt, Human
ccguacuggcuccugguu

SEQ ID NO: 685864 - RNA, 21 nt, Human
ccuccauucccagggcaagcu

SEQ ID NO: 685865 - RNA, 22 nt, Human
cgggagaggcccaggagccguu

SEQ ID NO: 685866 - RNA, 24 nt, Human
cggggccagggucucacacccauc

SEQ ID NO: 685867 - RNA, 19 nt, Human
cucacucucuggcaacaag

SEQ ID NO: 685868 - RNA, 18 nt, Human
cuccccgagucucugggu

SEQ ID NO: 685869 - RNA, 23 nt, Human
cucucuggcaacaagcucccugg

SEQ ID NO: 685870 - RNA, 19 nt, Human
cuggcaacaagcucccugg

SEQ ID NO: 685871 - RNA, 21 nt, Human
gagacccuugacccgggagag

SEQ ID NO: 685872 - RNA, 25 nt, Human
gagggcggggcucggugggcggggc

SEQ ID NO: 685873 - RNA, 18 nt, Human
gcggggcuggccgcgggg

SEQ ID NO: 685874 - RNA, 22 nt, Human
uaaaaaacaaacaaacaacaac

SEQ ID NO: 685875 - RNA, 21 nt, Human
uaaaaaauacuaaguguucau

SEQ ID NO: 685876 - RNA, 20 nt, Human
uaaaauacuacaagcgggag

SEQ ID NO: 685877 - RNA, 20 nt, Human
uacaucguccugaacgagga

SEQ ID NO: 685878 - RNA, 22 nt, Human
uauggaaugaagguaaauuuaa

SEQ ID NO: 685879 - RNA, 18 nt, Human
ucaagggaccaaagucac

SEQ ID NO: 685880 - RNA, 20 nt, Human
uccagauuuaaaaaacaaac

SEQ ID NO: 685881 - RNA, 19 nt, Human
ucccagggcaagcucacuc

SEQ ID NO: 685882 - RNA, 22 nt, Human
ucccagggcaagcucacucucu

SEQ ID NO: 685883 - RNA, 19 nt, Human
ucuacagagccuugcaggg

SEQ ID NO: 685884 - RNA, 25 nt, Human
ucucuggcaacaagcucccuggggu

SEQ ID NO: 685885 - RNA, 23 nt, Human
ugcaugagcacuggugaggggca

SEQ ID NO: 685886 - RNA, 20 nt, Human
uggcaacaagcucccugggg

SEQ ID NO: 685887 - RNA, 19 nt, Human
uggccgauuagauuccuga

SEQ ID NO: 685888 - RNA, 24 nt, Human
uggccgcgggggcggggccagggu

SEQ ID NO: 685889 - RNA, 20 nt, Human
uguauuaggagauguccugg

SEQ ID NO: 685890 - RNA, 24 nt, Human
ugucaagggaccaaagucacauuu

SEQ ID NO: 685891 - RNA, 23 nt, Human
uuaggagcuuugugauuccuguu

SEQ ID NO: 685892 - RNA, 21 nt, Human
uuccagauuuaaaaaacaaac

SEQ ID NO: 685893 - RNA, 23 nt, Human
uuccagauuuaaaaaacaaacaa

SEQ ID NO: 685894 - RNA, 20 nt, Human
uugguccuggcgagggcggg

SEQ ID NO: 685895 - RNA, 21 nt, Human
uuuaauacaucaaucuacaga

SEQ ID NO: 685896 - RNA, 25 nt, Human
uuuuccagauuuaaaaaacaaacaa

SEQ ID NO: 685897 - RNA, 23 nt, Human
acccaggcuggaguguaguggug

SEQ ID NO: 685898 - RNA, 24 nt, Human
agagcugggauuacaggccugagc

SEQ ID NO: 685899 - RNA, 18 nt, Human
auagcucacugcagccuc

SEQ ID NO: 685900 - RNA, 19 nt, Human
auuuuauuuauuuauuucu

SEQ ID NO: 685901 - RNA, 24 nt, Human
cacccaggcuggaguguaguggug

SEQ ID NO: 685902 - RNA, 27 nt, Human
cagagcugggauuacaggccugagcca

SEQ ID NO: 685903 - RNA, 24 nt, Human
cagccucgaacuccugggcucaag

SEQ ID NO: 685904 - RNA, 20 nt, Human
caggcucucuccuccgccuc

SEQ ID NO: 685905 - RNA, 22 nt, Human
cccuggcacaucuggagguaga

SEQ ID NO: 685906 - RNA, 18 nt, Human
cccuggguuccugggcug

SEQ ID NO: 685907 - RNA, 22 nt, Human
ccucgaacuccugggcucaagc

SEQ ID NO: 685908 - RNA, 23 nt, Human
ccucgaacuccugggcucaagcu

SEQ ID NO: 685909 - RNA, 20 nt, Human
ccugggcucaagcuauccuu

SEQ ID NO: 685910 - RNA, 25 nt, Human
cgaacuccugggcucaagcuauccu

SEQ ID NO: 685911 - RNA, 24 nt, Human
cgagggcccuuccagcucugccgc

SEQ ID NO: 685912 - RNA, 21 nt, Human
cgccuggccaaaauccaaguu

SEQ ID NO: 685913 - RNA, 21 nt, Human
cucacugcagccucgaacucc

SEQ ID NO: 685914 - RNA, 24 nt, Human
cucacugcagccucgaacuccugg

SEQ ID NO: 685915 - RNA, 23 nt, Human
cucuugcugucacccaggcugga

SEQ ID NO: 685916 - RNA, 24 nt, Human
cucuugcugucacccaggcuggag

SEQ ID NO: 685917 - RNA, 23 nt, Human
cugcagccucgaacuccugggcu

SEQ ID NO: 685918 - RNA, 18 nt, Human
cugucacccaggcuggag

SEQ ID NO: 685919 - RNA, 21 nt, Human
cuuuucggacaaaccuucuga

SEQ ID NO: 685920 - RNA, 19 nt, Human
gaucauagcucacugcagc

SEQ ID NO: 685921 - RNA, 18 nt, Human
gauuacaggccugagcca

SEQ ID NO: 685922 - RNA, 22 nt, Human
gauuacaggccugagccaccgc

SEQ ID NO: 685923 - RNA, 24 nt, Human
gcugucacccaggcuggaguguag

SEQ ID NO: 685924 - RNA, 24 nt, Human
gcuuccagagcugggauuacaggc

SEQ ID NO: 685925 - RNA, 23 nt, Human
guucucugcagcuugaccucgca

SEQ ID NO: 685926 - RNA, 22 nt, Human
uacaggccugagccaccgcgcc

SEQ ID NO: 685927 - RNA, 24 nt, Human
uagcucacugcagccucgaacucc

SEQ ID NO: 685928 - RNA, 24 nt, Human
ucacccaggcuggaguguaguggu

SEQ ID NO: 685929 - RNA, 24 nt, Human
ucacugcagccucgaacuccuggg

SEQ ID NO: 685930 - RNA, 21 nt, Human
uccagagcugggauuacaggc

SEQ ID NO: 685931 - RNA, 20 nt, Human
uccugggcucaagcuauccu

SEQ ID NO: 685932 - RNA, 23 nt, Human
ucucuugcugucacccaggcugg

SEQ ID NO: 685933 - RNA, 24 nt, Human
ucucuugcugucacccaggcugga

SEQ ID NO: 685934 - RNA, 18 nt, Human
ucugaagucccuggguuc

SEQ ID NO: 685935 - RNA, 26 nt, Human
ucugcagcuugaccucgcaggcucuc

SEQ ID NO: 685936 - RNA, 21 nt, Human
ucuugcugucacccaggcugg

SEQ ID NO: 685937 - RNA, 21 nt, Human
ucuugcugucacccaggcugg

SEQ ID NO: 685938 - RNA, 22 nt, Human
ucuugcugucacccaggcugga

SEQ ID NO: 685939 - RNA, 23 nt, Human
ucuugcugucacccaggcuggag

SEQ ID NO: 685940 - RNA, 24 nt, Human
ucuugcugucacccaggcuggagu

SEQ ID NO: 685941 - RNA, 18 nt, Human
ugaagucccuggguuccu

SEQ ID NO: 685942 - RNA, 22 nt, Human
ugagacaagaucucuugcuguc

SEQ ID NO: 685943 - RNA, 20 nt, Human
uggaguguaguggugagauc

SEQ ID NO: 685944 - RNA, 18 nt, Human
ugggauuacaggccugag

SEQ ID NO: 685945 - RNA, 19 nt, Human
ugggauuacaggccugagc

SEQ ID NO: 685946 - RNA, 21 nt, Human
ugggauuacaggccugagcca

SEQ ID NO: 685947 - RNA, 22 nt, Human
ugggauuacaggccugagccac

SEQ ID NO: 685948 - RNA, 23 nt, Human
ugggauuacaggccugagccacc

SEQ ID NO: 685949 - RNA, 24 nt, Human
ugggauuacaggccugagccaccg

SEQ ID NO: 685950 - RNA, 24 nt, Human
uggugagaucauagcucacugcag

SEQ ID NO: 685951 - RNA, 25 nt, Human
uuuuuuuuuuuuuuuuuuuauuuuu

SEQ ID NO: 685952 - RNA, 22 nt, Human
aaaagccuuccugggugugucc

SEQ ID NO: 685953 - RNA, 21 nt, Human
aaacagaaugcaggagaggcc

SEQ ID NO: 685954 - RNA, 25 nt, Human
aaacauccacagugcccuuggccaa

SEQ ID NO: 685955 - RNA, 19 nt, Human
aaacuggcuugacuucaaa

SEQ ID NO: 685956 - RNA, 28 nt, Human
aaccaccuuucuaaaccucugcccaccc

SEQ ID NO: 685957 - RNA, 19 nt, Human
aagagguaagaauacggca

SEQ ID NO: 685958 - RNA, 23 nt, Human
aagcaacacggcccuucacagcc

SEQ ID NO: 685959 - RNA, 26 nt, Human
aagccccaucgaggaaggggugagaa

SEQ ID NO: 685960 - RNA, 18 nt, Human
aagcuccucucagguggc

SEQ ID NO: 685961 - RNA, 18 nt, Human
aagggugggguggcagga

SEQ ID NO: 685962 - RNA, 18 nt, Human
aagggugggguggcagga

SEQ ID NO: 685963 - RNA, 19 nt, Human
aagugcacucaagggagca

SEQ ID NO: 685964 - RNA, 22 nt, Human
aagugcacucaagggagcacag

SEQ ID NO: 685965 - RNA, 18 nt, Human
acaaugagcugccgccuc

SEQ ID NO: 685966 - RNA, 20 nt, Human
acagcgccuggcucccgugc

SEQ ID NO: 685967 - RNA, 23 nt, Human
acccacugaaagcaacacggccc

SEQ ID NO: 685968 - RNA, 19 nt, Human
acucccgccuguccaugcc

SEQ ID NO: 685969 - RNA, 20 nt, Human
agagaagaaacaggcuuaca

SEQ ID NO: 685970 - RNA, 24 nt, Human
agaggaagggugggguggcaggag

SEQ ID NO: 685971 - RNA, 26 nt, Human
agcccuggccaggcgcugacgccucc

SEQ ID NO: 685972 - RNA, 20 nt, Human
agcugccgccucgccaaggc

SEQ ID NO: 685973 - RNA, 19 nt, Human
aggaagccuuuucacaguc

SEQ ID NO: 685974 - RNA, 18 nt, Human
aggaagggugggguggca

SEQ ID NO: 685975 - RNA, 21 nt, Human
aggacuggggcagcccuggcc

SEQ ID NO: 685976 - RNA, 18 nt, Human
aggagcccucccaggagc

SEQ ID NO: 685977 - RNA, 22 nt, Human
auccacagugcccuuggccaau

SEQ ID NO: 685978 - RNA, 23 nt, Human
caaaacauccacagugcccuugg

SEQ ID NO: 685979 - RNA, 18 nt, Human
caaacagaagcuccucuc

SEQ ID NO: 685980 - RNA, 18 nt, Human
caagaguaccaggugcca

SEQ ID NO: 685981 - RNA, 21 nt, Human
caagggagcacagcuccacca

SEQ ID NO: 685982 - RNA, 24 nt, Human
cacacagaggaagggugggguggc

SEQ ID NO: 685983 - RNA, 23 nt, Human
cacagcccuuccgcuccagugga

SEQ ID NO: 685984 - RNA, 18 nt, Human
caccaaaggacuggggca

SEQ ID NO: 685985 - RNA, 23 nt, Human
cacccacugaaagcaacacggcc

SEQ ID NO: 685986 - RNA, 21 nt, Human
caccccagcccuucuggaaac

SEQ ID NO: 685987 - RNA, 22 nt, Human
caggaggugauucaucuccccc

SEQ ID NO: 685988 - RNA, 23 nt, Human
caugugagcugaagcauuugccu

SEQ ID NO: 685989 - RNA, 21 nt, Human
ccaaccaucuuacgacgcuuu

SEQ ID NO: 685990 - RNA, 25 nt, Human
ccacugggcaguggucacugggcuu

SEQ ID NO: 685991 - RNA, 22 nt, Human
ccaggucccacaagaguaccag

SEQ ID NO: 685992 - RNA, 23 nt, Human
ccaguggagaaucgccaaagauc

SEQ ID NO: 685993 - RNA, 19 nt, Human
ccaucacccgagaacuggc

SEQ ID NO: 685994 - RNA, 22 nt, Human
ccccaggucccacaagaguacc

SEQ ID NO: 685995 - RNA, 22 nt, Human
cccgccuguccaugcccagagg

SEQ ID NO: 685996 - RNA, 25 nt, Human
cccuucacagccuggcuuccuucuu

SEQ ID NO: 685997 - RNA, 20 nt, Human
ccucccaggagcagggcuug

SEQ ID NO: 685998 - RNA, 19 nt, Human
ccuggccaggcgcugacgc

SEQ ID NO: 685999 - RNA, 19 nt, Human
ccuguugucaacccugagg

SEQ ID NO: 686000 - RNA, 22 nt, Human
ccuuccgcuccaguggagaauc

SEQ ID NO: 686001 - RNA, 22 nt, Human
ccuuccuggguguguccaaaaa

SEQ ID NO: 686002 - RNA, 20 nt, Human
cggcagaccccagguggugc

SEQ ID NO: 686003 - RNA, 21 nt, Human
cggggggagcccaguggccac

SEQ ID NO: 686004 - RNA, 22 nt, Human
cggggggagcccaguggccacu

SEQ ID NO: 686005 - RNA, 22 nt, Human
cucaagggagcacagcuccacc

SEQ ID NO: 686006 - RNA, 19 nt, Human
cucaccccagcccuucugg

SEQ ID NO: 686007 - RNA, 19 nt, Human
cucaccccagcccuucugg

SEQ ID NO: 686008 - RNA, 23 nt, Human
cucugcacaggucaggaucucac

SEQ ID NO: 686009 - RNA, 18 nt, Human
cugcucagcuccugcugg

SEQ ID NO: 686010 - RNA, 24 nt, Human
cuucuugggucaccccucugaaca

SEQ ID NO: 686011 - RNA, 18 nt, Human
gaagaaacaggcuuacag

SEQ ID NO: 686012 - RNA, 21 nt, Human
gagcugccgccucgccaaggc

SEQ ID NO: 686013 - RNA, 24 nt, Human
gaguaggucccaguccugaaauau

SEQ ID NO: 686014 - RNA, 18 nt, Human
gcagauggggcauacgug

SEQ ID NO: 686015 - RNA, 22 nt, Human
gccaaagaucaugaaggguaaa

SEQ ID NO: 686016 - RNA, 22 nt, Human
gccaugcugccucccacaaaac

SEQ ID NO: 686017 - RNA, 21 nt, Human
gcccacccacugaaagcaaca

SEQ ID NO: 686018 - RNA, 24 nt, Human
gcccgaguguguguguacggggag

SEQ ID NO: 686019 - RNA, 18 nt, Human
gcucuucuccccagagcu

SEQ ID NO: 686020 - RNA, 19 nt, Human
ggcauacguggggcucggg

SEQ ID NO: 686021 - RNA, 24 nt, Human
ggggcauacguggggcucggggac

SEQ ID NO: 686022 - RNA, 23 nt, Human
gugcugcccaggggcugcugugg

SEQ ID NO: 686023 - RNA, 22 nt, Human
gugcugccuguccuuccaucug

SEQ ID NO: 686024 - RNA, 20 nt, Human
guggacagacccuguccaca

SEQ ID NO: 686025 - RNA, 19 nt, Human
guggcaucuggggaguagg

SEQ ID NO: 686026 - RNA, 22 nt, Human
uaaauagucuccucugaacccc

SEQ ID NO: 686027 - RNA, 19 nt, Human
uaagaauacggcacuuuua

SEQ ID NO: 686028 - RNA, 18 nt, Human
uacguggggcucggggac

SEQ ID NO: 686029 - RNA, 24 nt, Human
uacugcccuuuccacggugccaug

SEQ ID NO: 686030 - RNA, 20 nt, Human
ucaaguccuaggguggcccc

SEQ ID NO: 686031 - RNA, 18 nt, Human
ucaccgggcaccaaagga

SEQ ID NO: 686032 - RNA, 24 nt, Human
ucaccgggcaccaaaggacugggg

SEQ ID NO: 686033 - RNA, 18 nt, Human
ucaucucccccgcugcuc

SEQ ID NO: 686034 - RNA, 24 nt, Human
uccacagcgccuggcucccgugcu

SEQ ID NO: 686035 - RNA, 20 nt, Human
uccacagugcccuuggccaa

SEQ ID NO: 686036 - RNA, 21 nt, Human
uccacagugcccuuggccaau

SEQ ID NO: 686037 - RNA, 20 nt, Human
uccacggugccaugcugccu

SEQ ID NO: 686038 - RNA, 23 nt, Human
uccacggugccaugcugccuccc

SEQ ID NO: 686039 - RNA, 24 nt, Human
uccccagagcuuuaaagccccauc

SEQ ID NO: 686040 - RNA, 19 nt, Human
ucccccgcugcucagcucc

SEQ ID NO: 686041 - RNA, 21 nt, Human
ucccccgcugcucagcuccug

SEQ ID NO: 686042 - RNA, 23 nt, Human
uccuuauauuccccaggucccac

SEQ ID NO: 686043 - RNA, 20 nt, Human
ucgccaaagaucaugaaggg

SEQ ID NO: 686044 - RNA, 22 nt, Human
ugaaagcaacacggcccuucac

SEQ ID NO: 686045 - RNA, 19 nt, Human
ugacgccuccccacucucu

SEQ ID NO: 686046 - RNA, 20 nt, Human
ugacuucuugggucaccccu

SEQ ID NO: 686047 - RNA, 18 nt, Human
ugagaugccaagagguaa

SEQ ID NO: 686048 - RNA, 20 nt, Human
ugaguggggagcagcucuuc

SEQ ID NO: 686049 - RNA, 19 nt, Human
ugcccagaggcauacacgg

SEQ ID NO: 686050 - RNA, 23 nt, Human
ugcuggcugcgcucaccgggcac

SEQ ID NO: 686051 - RNA, 22 nt, Human
uggcucccgugcugccuguccu

SEQ ID NO: 686052 - RNA, 19 nt, Human
uggggcagcccuggccagg

SEQ ID NO: 686053 - RNA, 24 nt, Human
ugggguggcaggagcccucccagg

SEQ ID NO: 686054 - RNA, 21 nt, Human
uggguuuugggaucaaggcgg

SEQ ID NO: 686055 - RNA, 27 nt, Human
uggugcugcccaggggcugcugugggg

SEQ ID NO: 686056 - RNA, 26 nt, Human
ugugagcugaagcauuugccugcaaa

SEQ ID NO: 686057 - RNA, 24 nt, Human
ggaggggggaugggggagggacgg

SEQ ID NO: 686058 - RNA, 18 nt, Human
gggaggggguggggaggg

SEQ ID NO: 686059 - RNA, 20 nt, Human
ggggaggggguggggagggg

SEQ ID NO: 686060 - RNA, 24 nt, Human
ggggaggggguggggaggggggau

SEQ ID NO: 686061 - RNA, 18 nt, Human
ggggaugggggagggacg

SEQ ID NO: 686062 - RNA, 21 nt, Human
ggggguggggaggggggaugg

SEQ ID NO: 686063 - RNA, 27 nt, Human
ggggguggggaggggggaugggggagg

SEQ ID NO: 686064 - RNA, 27 nt, Human
ggguggggaggggggaugggggaggga

SEQ ID NO: 686065 - RNA, 19 nt, Human
uacaaacguagcuguauug

SEQ ID NO: 686066 - RNA, 18 nt, Human
uagcuguauuggggaggg

SEQ ID NO: 686067 - RNA, 23 nt, Human
uagcuguauuggggagggggugg

SEQ ID NO: 686068 - RNA, 19 nt, Human
uggaugcccagguacagga

SEQ ID NO: 686069 - RNA, 21 nt, Human
uggggaggggggaugggggag

SEQ ID NO: 686070 - RNA, 23 nt, Human
uggggaggggggaugggggaggg

SEQ ID NO: 686071 - RNA, 18 nt, Human
uggggaggggguggggag

SEQ ID NO: 686072 - RNA, 25 nt, Human
uguacaaacguagcuguauugggga

SEQ ID NO: 686073 - RNA, 23 nt, Human
aacccaggacugaagccacagcc

SEQ ID NO: 686074 - RNA, 21 nt, Human
agaggagggagcuugggccag

SEQ ID NO: 686075 - RNA, 18 nt, Human
agagggagaggagggagc

SEQ ID NO: 686076 - RNA, 26 nt, Human
agagggagaggagggagcuugggccg

SEQ ID NO: 686077 - RNA, 18 nt, Human
agccacagccuuucacca

SEQ ID NO: 686078 - RNA, 24 nt, Human
aggcagaaacccaggacugaagcc

SEQ ID NO: 686079 - RNA, 25 nt, Human
aggcagaaacccaggacugaagcca

SEQ ID NO: 686080 - RNA, 22 nt, Human
agggagaggagggagcuugggc

SEQ ID NO: 686081 - RNA, 18 nt, Human
aggggcauccuaggcucu

SEQ ID NO: 686082 - RNA, 24 nt, Human
cagaucccccgagccggagccucc

SEQ ID NO: 686083 - RNA, 19 nt, Human
cagcccucagcccacuccc

SEQ ID NO: 686084 - RNA, 19 nt, Human
cagccucaaacuuccugaa

SEQ ID NO: 686085 - RNA, 19 nt, Human
cagccuuucaccacaucca

SEQ ID NO: 686086 - RNA, 20 nt, Human
caggagccgcugcagcagag

SEQ ID NO: 686087 - RNA, 24 nt, Human
caggagccgcugcagcagaggggc

SEQ ID NO: 686088 - RNA, 22 nt, Human
cccgagccggagccuccagggc

SEQ ID NO: 686089 - RNA, 18 nt, Human
ccucagcccacucccuuc

SEQ ID NO: 686090 - RNA, 20 nt, Human
cgagccggagccuccagggc

SEQ ID NO: 686091 - RNA, 19 nt, Human
cucagcccacucccuucag

SEQ ID NO: 686092 - RNA, 18 nt, Human
cucaggagccgcugcagc

SEQ ID NO: 686093 - RNA, 23 nt, Human
gagcucaggagccgcugcagcag

SEQ ID NO: 686094 - RNA, 19 nt, Human
ggagcuugggccagcccuc

SEQ ID NO: 686095 - RNA, 19 nt, Human
gguaggggcagaucccccg

SEQ ID NO: 686096 - RNA, 24 nt, Human
uaggcucuacagagggagaggagg

SEQ ID NO: 686097 - RNA, 22 nt, Human
ucagcccacucccuucagggug

SEQ ID NO: 686098 - RNA, 25 nt, Human
ucagcccacucccuucagggugccu

SEQ ID NO: 686099 - RNA, 19 nt, Human
ucaggagccgcugcagcag

SEQ ID NO: 686100 - RNA, 19 nt, Human
ucccccgagccggagccuc

SEQ ID NO: 686101 - RNA, 20 nt, Human
ucccccgagccggagccucc

SEQ ID NO: 686102 - RNA, 19 nt, Human
ucucagccucaaacuuccu

SEQ ID NO: 686103 - RNA, 18 nt, Human
uucaccacauccagcugu

SEQ ID NO: 686104 - RNA, 21 nt, Human
uugcacccaggucuuuucggg

SEQ ID NO: 686105 - RNA, 25 nt, Human
aaaaaaagauccacaaguaauuuua

SEQ ID NO: 686106 - RNA, 18 nt, Human
aaggauaguuuuacucag

SEQ ID NO: 686107 - RNA, 18 nt, Human
acucagguauccuuguca

SEQ ID NO: 686108 - RNA, 20 nt, Human
aggcuagaaggggcucccga

SEQ ID NO: 686109 - RNA, 19 nt, Human
aggcugcagcaaugacacc

SEQ ID NO: 686110 - RNA, 28 nt, Human
caaagagcaauagauuaaaaaaaaaaaa

SEQ ID NO: 686111 - RNA, 20 nt, Human
caagcuccucuccgccugcc

SEQ ID NO: 686112 - RNA, 19 nt, Human
caaguaauuuuagcuucac

SEQ ID NO: 686113 - RNA, 24 nt, Human
caccaggaggagaaagcuacgucc

SEQ ID NO: 686114 - RNA, 20 nt, Human
ccggagucuucugccgggca

SEQ ID NO: 686115 - RNA, 22 nt, Human
cuccggagucuucugccgggca

SEQ ID NO: 686116 - RNA, 19 nt, Human
gcagcaaugacaccaggag

SEQ ID NO: 686117 - RNA, 22 nt, Human
gcagcugaggaacuagggaccc

SEQ ID NO: 686118 - RNA, 21 nt, Human
ggaagauaggcagcugaggaa

SEQ ID NO: 686119 - RNA, 21 nt, Human
ggcucccgagcagaaaaugac

SEQ ID NO: 686120 - RNA, 21 nt, Human
gugauuugcggugggaaaggc

SEQ ID NO: 686121 - RNA, 20 nt, Human
uaauaaaauuucuguuccca

SEQ ID NO: 686122 - RNA, 24 nt, Human
uacugagccaaugccuccggaguc

SEQ ID NO: 686123 - RNA, 22 nt, Human
uagcuucacaucauaggauaau

SEQ ID NO: 686124 - RNA, 19 nt, Human
uccaaagagcaauagauua

SEQ ID NO: 686125 - RNA, 25 nt, Human
ucccgagcagaaaaugacgugaaaa

SEQ ID NO: 686126 - RNA, 18 nt, Human
ucuucugccgggcaacuu

SEQ ID NO: 686127 - RNA, 20 nt, Human
ugcgguggcuuugcugucuu

SEQ ID NO: 686128 - RNA, 18 nt, Human
ugggaaaggcugcgcgga

SEQ ID NO: 686129 - RNA, 21 nt, Human
uuucuguucccagugauuuua

SEQ ID NO: 686130 - RNA, 23 nt, Human
uuuuuuuuuuuuuuuuucauuuu

SEQ ID NO: 686131 - RNA, 22 nt, Human
accugggucccgccccgcgccc

SEQ ID NO: 686132 - RNA, 20 nt, Human
agccggaggccugggaccug

SEQ ID NO: 686133 - RNA, 18 nt, Human
cacagaaccuaggcaggc

SEQ ID NO: 686134 - RNA, 26 nt, Human
caccuucggccgggagcagccggagg

SEQ ID NO: 686135 - RNA, 19 nt, Human
cagcgggcgcggaagccuc

SEQ ID NO: 686136 - RNA, 20 nt, Human
cccuggguucccaaacgccc

SEQ ID NO: 686137 - RNA, 20 nt, Human
ccgccccgcgcccugcuccc

SEQ ID NO: 686138 - RNA, 22 nt, Human
ccugccacugccuguccccacc

SEQ ID NO: 686139 - RNA, 23 nt, Human
ccugccacugccuguccccaccu

SEQ ID NO: 686140 - RNA, 24 nt, Human
ccuguccccaccuucggccgggag

SEQ ID NO: 686141 - RNA, 24 nt, Human
cgaggaaccagcgggcgcggaagc

SEQ ID NO: 686142 - RNA, 24 nt, Human
cgccccggagcgaggaaccagcgg

SEQ ID NO: 686143 - RNA, 22 nt, Human
cgggagcagccggaggccuggg

SEQ ID NO: 686144 - RNA, 21 nt, Human
cucccggucgcuaucgcgagc

SEQ ID NO: 686145 - RNA, 19 nt, Human
gcaccggccugggcgggag

SEQ ID NO: 686146 - RNA, 24 nt, Human
gcaccggccugggcgggagcgcac

SEQ ID NO: 686147 - RNA, 19 nt, Human
gccccgcgcccugcucccg

SEQ ID NO: 686148 - RNA, 18 nt, Human
gccuggggcgcaggcggg

SEQ ID NO: 686149 - RNA, 22 nt, Human
gcgggcaccggccugggcggga

SEQ ID NO: 686150 - RNA, 19 nt, Human
ggagcagccggaggccugg

SEQ ID NO: 686151 - RNA, 18 nt, Human
ggcugcagucgaaggggg

SEQ ID NO: 686152 - RNA, 19 nt, Human
gggcaccggccugggcggg

SEQ ID NO: 686153 - RNA, 18 nt, Human
ucccaaacgcccucgcua

SEQ ID NO: 686154 - RNA, 18 nt, Human
uccccgcgccuggcuucc

SEQ ID NO: 686155 - RNA, 23 nt, Human
ucccgccccgcgcccugcucccg

SEQ ID NO: 686156 - RNA, 18 nt, Human
ucgcgagcuccgccccgg

SEQ ID NO: 686157 - RNA, 20 nt, Human
ugccuggggcgcaggcgggc

SEQ ID NO: 686158 - RNA, 21 nt, Human
uggcuuccggcuuccucgccu

SEQ ID NO: 686159 - RNA, 19 nt, Human
uggggcgcaggcgggcggc

SEQ ID NO: 686160 - RNA, 22 nt, Human
uguaaaugcucccaccuuggcc

SEQ ID NO: 686161 - RNA, 25 nt, Human
aaccaggcccaccuggagaccuagc

SEQ ID NO: 686162 - RNA, 18 nt, Human
aacugccugccucccugg

SEQ ID NO: 686163 - RNA, 21 nt, Human
accuagccuguccucuccaau

SEQ ID NO: 686164 - RNA, 19 nt, Human
agaaaacaaaaagcacuaa

SEQ ID NO: 686165 - RNA, 22 nt, Human
agaaaacaaaaagcacuaaggg

SEQ ID NO: 686166 - RNA, 25 nt, Human
agcccuucuggcuuccagcagggaa

SEQ ID NO: 686167 - RNA, 21 nt, Human
agggagggaggcccaguuagg

SEQ ID NO: 686168 - RNA, 21 nt, Human
caaaaccagaacaccccaagc

SEQ ID NO: 686169 - RNA, 24 nt, Human
caaaaccagaacaccccaagccca

SEQ ID NO: 686170 - RNA, 19 nt, Human
caagcccagggcccucgcu

SEQ ID NO: 686171 - RNA, 24 nt, Human
cacauccaggcccaggguucccac

SEQ ID NO: 686172 - RNA, 27 nt, Human
cacccauagaggccucaagcccuucug

SEQ ID NO: 686173 - RNA, 26 nt, Human
cagaacaccccaagcccagggcccuc

SEQ ID NO: 686174 - RNA, 19 nt, Human
ccaagcccagggcccucgc

SEQ ID NO: 686175 - RNA, 19 nt, Human
ccaaggggagggagggagg

SEQ ID NO: 686176 - RNA, 20 nt, Human
ccauagaggccucaagcccu

SEQ ID NO: 686177 - RNA, 18 nt, Human
cccaccugcugccuggga

SEQ ID NO: 686178 - RNA, 20 nt, Human
cccauagaggccucaagccc

SEQ ID NO: 686179 - RNA, 21 nt, Human
cccggggccggcccucccaaa

SEQ ID NO: 686180 - RNA, 21 nt, Human
cccugggacacaggcucugcc

SEQ ID NO: 686181 - RNA, 20 nt, Human
ccuccugggccauccacacc

SEQ ID NO: 686182 - RNA, 25 nt, Human
ccuguaccccuuccugaccgccccu

SEQ ID NO: 686183 - RNA, 23 nt, Human
cguucucaaaaccagaacacccc

SEQ ID NO: 686184 - RNA, 29 nt, Human
cuccagcaccuccugggccauccacaccc

SEQ ID NO: 686185 - RNA, 22 nt, Human
cucccuggaccuaugggcuggu

SEQ ID NO: 686186 - RNA, 23 nt, Human
gccagggauggcccugccccucc

SEQ ID NO: 686187 - RNA, 20 nt, Human
gccugggaccuagccugucc

SEQ ID NO: 686188 - RNA, 19 nt, Human
gcuccagcaccuccugggc

SEQ ID NO: 686189 - RNA, 22 nt, Human
ggacacaggcucugccuucugc

SEQ ID NO: 686190 - RNA, 23 nt, Human
ggagggagggaggcccaguuagg

SEQ ID NO: 686191 - RNA, 19 nt, Human
gggaacccaccuguacccc

SEQ ID NO: 686192 - RNA, 24 nt, Human
ggguucccaccugcugccugggaa

SEQ ID NO: 686193 - RNA, 20 nt, Human
uagaggccucaagcccuucu

SEQ ID NO: 686194 - RNA, 21 nt, Human
uagccuguccucuccaauucu

SEQ ID NO: 686195 - RNA, 19 nt, Human
uaggcagggccacgugaca

SEQ ID NO: 686196 - RNA, 20 nt, Human
ucaaaaccagaacaccccaa

SEQ ID NO: 686197 - RNA, 21 nt, Human
ucacuccgaccugggucugcc

SEQ ID NO: 686198 - RNA, 18 nt, Human
ucccaccugcugccuggg

SEQ ID NO: 686199 - RNA, 21 nt, Human
ucccaugaccaaggggaggga

SEQ ID NO: 686200 - RNA, 18 nt, Human
ucccccugggacacaggc

SEQ ID NO: 686201 - RNA, 21 nt, Human
ucccuggaccuaugggcuggu

SEQ ID NO: 686202 - RNA, 23 nt, Human
ucuggcuuccagcagggaaaagu

SEQ ID NO: 686203 - RNA, 21 nt, Human
ugacuucgugugggucccccu

SEQ ID NO: 686204 - RNA, 24 nt, Human
ugccugggaaccaggcccaccugg

SEQ ID NO: 686205 - RNA, 21 nt, Human
ugggccauccacaccagugcc

SEQ ID NO: 686206 - RNA, 18 nt, Human
uucucaaaaccagaacac

SEQ ID NO: 686207 - RNA, 20 nt, Human
uuuuuuuuuuuugcaggucc

SEQ ID NO: 686208 - RNA, 18 nt, Human
uuuuuuuuuuuuuuuuug

SEQ ID NO: 686209 - RNA, 21 nt, Human
uuuuuuuuuuuuuuuuugcag

SEQ ID NO: 686210 - RNA, 22 nt, Human
uuuuuuuuuuuuuuuuugcagg

SEQ ID NO: 686211 - RNA, 23 nt, Human
uuuuuuuuuuuuuuuuugcaggu

SEQ ID NO: 686212 - RNA, 23 nt, Human
aaaaagucauuuuaauaugaagg

SEQ ID NO: 686213 - RNA, 20 nt, Human
aaaacaagagaucaccuuca

SEQ ID NO: 686214 - RNA, 21 nt, Human
aaacaagagaucaccuucaag

SEQ ID NO: 686215 - RNA, 22 nt, Human
aaacaagagaucaccuucaagg

SEQ ID NO: 686216 - RNA, 22 nt, Human
aaagacuaucaaauucaaacaa

SEQ ID NO: 686217 - RNA, 22 nt, Human
aacagcaggaaccugacaaaga

SEQ ID NO: 686218 - RNA, 21 nt, Human
aaguggcuccagccggugccc

SEQ ID NO: 686219 - RNA, 19 nt, Human
acaaaacaagagaucaccu

SEQ ID NO: 686220 - RNA, 22 nt, Human
acaaaauaaaaguaaaaugagc

SEQ ID NO: 686221 - RNA, 18 nt, Human
agacaauaaaucaauuca

SEQ ID NO: 686222 - RNA, 20 nt, Human
agcaaaauguaaacaacacg

SEQ ID NO: 686223 - RNA, 23 nt, Human
aggaagagacuuauaacagaagg

SEQ ID NO: 686224 - RNA, 23 nt, Human
aggcaagaagggaaacauacaaa

SEQ ID NO: 686225 - RNA, 21 nt, Human
aguaaagcacuauccucagau

SEQ ID NO: 686226 - RNA, 26 nt, Human
auagagugcccuuuaaaaacagaaag

SEQ ID NO: 686227 - RNA, 20 nt, Human
aucugcuucauuugcucuuu

SEQ ID NO: 686228 - RNA, 22 nt, Human
auuuaaagccuauuaacugcuc

SEQ ID NO: 686229 - RNA, 24 nt, Human
auuugcucuuuuuugauagacagu

SEQ ID NO: 686230 - RNA, 27 nt, Human
caaaacaacugacaaaaagucauuuua

SEQ ID NO: 686231 - RNA, 20 nt, Human
caaaacaagagaucaccuuc

SEQ ID NO: 686232 - RNA, 22 nt, Human
caaaagggaauaugaaggaaau

SEQ ID NO: 686233 - RNA, 25 nt, Human
caaacaauauauuuacaacacaaaa

SEQ ID NO: 686234 - RNA, 28 nt, Human
caaccuacacaauaaccuaggacuacug

SEQ ID NO: 686235 - RNA, 22 nt, Human
cacaauaaccuaggacuacugg

SEQ ID NO: 686236 - RNA, 20 nt, Human
caggcugcuaggguuuuguu

SEQ ID NO: 686237 - RNA, 21 nt, Human
cauuacuucucacuaacauuu

SEQ ID NO: 686238 - RNA, 22 nt, Human
cauuauggaauuauacuuaaga

SEQ ID NO: 686239 - RNA, 23 nt, Human
ccagaacauuucuacuuaacuaa

SEQ ID NO: 686240 - RNA, 18 nt, Human
ccuacauuccucaguaca

SEQ ID NO: 686241 - RNA, 21 nt, Human
ccugcaaguggcuccagccgg

SEQ ID NO: 686242 - RNA, 21 nt, Human
ccuuuaacaguguucaagacu

SEQ ID NO: 686243 - RNA, 23 nt, Human
cuagauguugcaaaaaaucaaaa

SEQ ID NO: 686244 - RNA, 20 nt, Human
cuauauagauauauacauaa

SEQ ID NO: 686245 - RNA, 20 nt, Human
cuccuaucugugucugugcc

SEQ ID NO: 686246 - RNA, 18 nt, Human
cugagccaagagcugcuc

SEQ ID NO: 686247 - RNA, 22 nt, Human
cugugucugugccucucuuccc

SEQ ID NO: 686248 - RNA, 20 nt, Human
gacuacuggcauggugacca

SEQ ID NO: 686249 - RNA, 20 nt, Human
gauacaccuucuuuucaaac

SEQ ID NO: 686250 - RNA, 23 nt, Human
gcaaaacaacugacaaaaaguca

SEQ ID NO: 686251 - RNA, 22 nt, Human
ggaaaacuuuuaaacuuucuaa

SEQ ID NO: 686252 - RNA, 25 nt, Human
ggagaacagcaggaaccugacaaag

SEQ ID NO: 686253 - RNA, 21 nt, Human
ggcaagaagggaaacauacaa

SEQ ID NO: 686254 - RNA, 18 nt, Human
gggagacuauccagcagu

SEQ ID NO: 686255 - RNA, 24 nt, Human
gugccaauaacauacaguugaaca

SEQ ID NO: 686256 - RNA, 20 nt, Human
guugcaaaaacccucagucc

SEQ ID NO: 686257 - RNA, 20 nt, Human
uaaaaaaagagagaggaagg

SEQ ID NO: 686258 - RNA, 21 nt, Human
uaaagccuauuaacugcucag

SEQ ID NO: 686259 - RNA, 20 nt, Human
uaaaugucacagcaaaaugu

SEQ ID NO: 686260 - RNA, 21 nt, Human
uaacagaaggcaagaagggaa

SEQ ID NO: 686261 - RNA, 19 nt, Human
uacaacacaaaacaagaga

SEQ ID NO: 686262 - RNA, 21 nt, Human
uacacaaaauaaaaguaaaau

SEQ ID NO: 686263 - RNA, 19 nt, Human
uacauuauguacagugaug

SEQ ID NO: 686264 - RNA, 21 nt, Human
uagaaguaauugguguagcag

SEQ ID NO: 686265 - RNA, 23 nt, Human
uaggacuacuggcauggugacca

SEQ ID NO: 686266 - RNA, 20 nt, Human
uaggauacuacaccuugaaa

SEQ ID NO: 686267 - RNA, 23 nt, Human
uauaacagaaggcaagaagggaa

SEQ ID NO: 686268 - RNA, 21 nt, Human
uauaacagguauuuccuuacc

SEQ ID NO: 686269 - RNA, 26 nt, Human
uauccagcagucacugaucucaacac

SEQ ID NO: 686270 - RNA, 23 nt, Human
uauccauuuaccaaaccugcaau

SEQ ID NO: 686271 - RNA, 22 nt, Human
uaugaaggaauauacuaaccaa

SEQ ID NO: 686272 - RNA, 23 nt, Human
uaugaaggaauauacuaaccaaa

SEQ ID NO: 686273 - RNA, 19 nt, Human
uauguaucauaauuuuagu

SEQ ID NO: 686274 - RNA, 19 nt, Human
ucacuuuucuguaggagaa

SEQ ID NO: 686275 - RNA, 20 nt, Human
ucagaaggacuuucauuaug

SEQ ID NO: 686276 - RNA, 22 nt, Human
ucagccacauguuccuccccaa

SEQ ID NO: 686277 - RNA, 19 nt, Human
ucauccuguuacuguguuu

SEQ ID NO: 686278 - RNA, 19 nt, Human
uccaccaacuguacugaug

SEQ ID NO: 686279 - RNA, 21 nt, Human
uccguaacaauuucccuacuu

SEQ ID NO: 686280 - RNA, 23 nt, Human
uccuguucacccucacagaauca

SEQ ID NO: 686281 - RNA, 18 nt, Human
ucgaaugcuucauugauc

SEQ ID NO: 686282 - RNA, 21 nt, Human
ucuauauauuuaaaaccaccu

SEQ ID NO: 686283 - RNA, 27 nt, Human
ucuggcuuagaguucuucaggcugcua

SEQ ID NO: 686284 - RNA, 22 nt, Human
ugaaaaaagacuuugaagaaaa

SEQ ID NO: 686285 - RNA, 23 nt, Human
ugaaucacuuggacuuccuguuu

SEQ ID NO: 686286 - RNA, 22 nt, Human
ugagacauaaucuaauauuuaa

SEQ ID NO: 686287 - RNA, 19 nt, Human
ugcaaaaaaucaaaaacua

SEQ ID NO: 686288 - RNA, 21 nt, Human
ugcaaguggcuccagccggug

SEQ ID NO: 686289 - RNA, 19 nt, Human
ugguguagcaggcuuuggg

SEQ ID NO: 686290 - RNA, 23 nt, Human
uguuauuugccagaauguuacgg

SEQ ID NO: 686291 - RNA, 20 nt, Human
uguucacccucacagaauca

SEQ ID NO: 686292 - RNA, 23 nt, Human
uucauagagugcccuuuaaaaac

SEQ ID NO: 686293 - RNA, 18 nt, Human
uucuucaggcugcuaggg

SEQ ID NO: 686294 - RNA, 19 nt, Human
uugcaaaaacccucagucc

SEQ ID NO: 686295 - RNA, 18 nt, Human
uugcaaccuacacaauaa

SEQ ID NO: 686296 - RNA, 21 nt, Human
uugcaaccuacacaauaaccu

SEQ ID NO: 686297 - RNA, 23 nt, Human
uugcaucugcuucauuugcucuu

SEQ ID NO: 686298 - RNA, 19 nt, Human
uuuccacaaggcauuuccu

SEQ ID NO: 686299 - RNA, 19 nt, Human
uuucuaacuucuaguuaug

SEQ ID NO: 686300 - RNA, 20 nt, Human
uuucuaauuguuauuugcca

SEQ ID NO: 686301 - RNA, 25 nt, Human
uuucuuagacaauaaaucaauucau

SEQ ID NO: 686302 - RNA, 23 nt, Human
uuugauagacagugucaucaaau

SEQ ID NO: 686303 - RNA, 21 nt, Human
aaacaacauugccacauuucc

SEQ ID NO: 686304 - RNA, 23 nt, Human
aaaucaagcucuacaacagcuga

SEQ ID NO: 686305 - RNA, 22 nt, Human
aagcuucugccuuucuucuucu

SEQ ID NO: 686306 - RNA, 23 nt, Human
aaucaccugacacugacaucuaa

SEQ ID NO: 686307 - RNA, 18 nt, Human
acucuuaaggcuggaaug

SEQ ID NO: 686308 - RNA, 27 nt, Human
auccucauccuuuggucuuucccccag

SEQ ID NO: 686309 - RNA, 22 nt, Human
caaaccccuuuggaucuccagu

SEQ ID NO: 686310 - RNA, 22 nt, Human
caacauugccacauuucccaaa

SEQ ID NO: 686311 - RNA, 23 nt, Human
caauccagcugugauuaacauuu

SEQ ID NO: 686312 - RNA, 22 nt, Human
ccccagagguuuuuuccuccgg

SEQ ID NO: 686313 - RNA, 22 nt, Human
ccuuccaaaucaagcucuacaa

SEQ ID NO: 686314 - RNA, 21 nt, Human
ccuuuuccucuucaguagaga

SEQ ID NO: 686315 - RNA, 22 nt, Human
cuaaaucaccugacacugacau

SEQ ID NO: 686316 - RNA, 24 nt, Human
cuggugccuuccaaaucaagcucu

SEQ ID NO: 686317 - RNA, 19 nt, Human
cuucuucuuuuucuuuuuc

SEQ ID NO: 686318 - RNA, 18 nt, Human
cuuucuucuucuuuuucu

SEQ ID NO: 686319 - RNA, 18 nt, Human
cuuucuucuucuuuuucu

SEQ ID NO: 686320 - RNA, 20 nt, Human
gcuaccauaauaaaagugaa

SEQ ID NO: 686321 - RNA, 21 nt, Human
ggaagcuucugccuuucuucu

SEQ ID NO: 686322 - RNA, 24 nt, Human
ggaagcuucugccuuucuucuucu

SEQ ID NO: 686323 - RNA, 22 nt, Human
uaaaucaccugacacugacauc

SEQ ID NO: 686324 - RNA, 23 nt, Human
uaccauaauaaaagugaaucucc

SEQ ID NO: 686325 - RNA, 24 nt, Human
uauccuuuuccucuucaguagaga

SEQ ID NO: 686326 - RNA, 23 nt, Human
uccaaaucaagcucuacaacagc

SEQ ID NO: 686327 - RNA, 21 nt, Human
ucucccaagaacagcucaagu

SEQ ID NO: 686328 - RNA, 19 nt, Human
ucuucuucuuuuucuuuuu

SEQ ID NO: 686329 - RNA, 19 nt, Human
ucuucuuuuucuuuuucuu

SEQ ID NO: 686330 - RNA, 24 nt, Human
ucuuuuucuucucuuccacaacuc

SEQ ID NO: 686331 - RNA, 21 nt, Human
ucuuuuucuuuuucuucucuu

SEQ ID NO: 686332 - RNA, 19 nt, Human
ugauuaacauuuuugggaa

SEQ ID NO: 686333 - RNA, 21 nt, Human
ugccacauuucccaaauacuc

SEQ ID NO: 686334 - RNA, 18 nt, Human
ugcugcuuguucuuuugu

SEQ ID NO: 686335 - RNA, 26 nt, Human
ugcuuguucuuuuguuucaaauucca

SEQ ID NO: 686336 - RNA, 22 nt, Human
uggaaugggcuuauuuuucacu

SEQ ID NO: 686337 - RNA, 20 nt, Human
ugugcguucauccucauccu

SEQ ID NO: 686338 - RNA, 24 nt, Human
uuauuuacaaguuaaggaacaaag

SEQ ID NO: 686339 - RNA, 22 nt, Human
uucuuuuucuucucuuccacaa

SEQ ID NO: 686340 - RNA, 22 nt, Human
uuucuuauguuuccuuuuuguu

SEQ ID NO: 686341 - RNA, 24 nt, Human
uuuuucuuuuucuucucuuccccu

SEQ ID NO: 686342 - RNA, 19 nt, Human
aagcacugaauacucuacc

SEQ ID NO: 686343 - RNA, 26 nt, Human
agaaaccacacaaagauuugguauca

SEQ ID NO: 686344 - RNA, 21 nt, Human
aggggcuauugauggaggcag

SEQ ID NO: 686345 - RNA, 23 nt, Human
auguaagcggggaguggcagggg

SEQ ID NO: 686346 - RNA, 20 nt, Human
cagauacagaaaccacacaa

SEQ ID NO: 686347 - RNA, 20 nt, Human
caggucacugauuguagugg

SEQ ID NO: 686348 - RNA, 18 nt, Human
uacagauacagaaaccac

SEQ ID NO: 686349 - RNA, 20 nt, Human
uauaaagagagucaauauca

SEQ ID NO: 686350 - RNA, 18 nt, Human
uaucaagaaaucacgagg

SEQ ID NO: 686351 - RNA, 19 nt, Human
uaucaagaaaucacgaggu

SEQ ID NO: 686352 - RNA, 20 nt, Human
uauuuaagaaaaggaggguc

SEQ ID NO: 686353 - RNA, 24 nt, Human
uauuuuauuuaagaaaaggagggu

SEQ ID NO: 686354 - RNA, 25 nt, Human
ucaccacguccaccugcguguccua

SEQ ID NO: 686355 - RNA, 19 nt, Human
ucaggaaagucuuagguua

SEQ ID NO: 686356 - RNA, 22 nt, Human
ugacacauaaauguaagcgggg

SEQ ID NO: 686357 - RNA, 23 nt, Human
ugccauaugagcugaaucuugga

SEQ ID NO: 686358 - RNA, 18 nt, Human
uggcaggggcuauugaug

SEQ ID NO: 686359 - RNA, 23 nt, Human
uggguagguauaaagagagucaa

SEQ ID NO: 686360 - RNA, 26 nt, Human
uggguguaaauuaggcaaauuaggac

SEQ ID NO: 686361 - RNA, 20 nt, Human
uuggaaaaaaugugggugua

SEQ ID NO: 686362 - RNA, 19 nt, Human
caggcagagaaacaacaca

SEQ ID NO: 686363 - RNA, 20 nt, Human
cagucaccggggccgcccua

SEQ ID NO: 686364 - RNA, 19 nt, Human
ccaggcagagaaacaacac

SEQ ID NO: 686365 - RNA, 18 nt, Human
cccuacucagacucccuc

SEQ ID NO: 686366 - RNA, 18 nt, Human
cgacaaaaguauaagagu

SEQ ID NO: 686367 - RNA, 24 nt, Human
gaagggaagauuguucagcuuggg

SEQ ID NO: 686368 - RNA, 22 nt, Human
uaagaguaaauuagguaaauga

SEQ ID NO: 686369 - RNA, 20 nt, Human
uaggacuauugauggaggca

SEQ ID NO: 686370 - RNA, 23 nt, Human
uaucaagagagucaauaucagga

SEQ ID NO: 686371 - RNA, 20 nt, Human
ucaagaacagaugccauaug

SEQ ID NO: 686372 - RNA, 19 nt, Human
ucaggaaagucuuggguua

SEQ ID NO: 686373 - RNA, 20 nt, Human
ucauaacucuaaguauuugg

SEQ ID NO: 686374 - RNA, 25 nt, Human
ugacaaauaaaugcaagaaggguuc

SEQ ID NO: 686375 - RNA, 19 nt, Human
ugucgacaaaaguauaaga

SEQ ID NO: 686376 - RNA, 22 nt, Human
aaacucagaagguccucccgug

SEQ ID NO: 686377 - RNA, 22 nt, Human
aaaggugggaggggcggcuguu

SEQ ID NO: 686378 - RNA, 22 nt, Human
aaccacauaguagcacagugaa

SEQ ID NO: 686379 - RNA, 19 nt, Human
aagaaccacauauggaaua

SEQ ID NO: 686380 - RNA, 18 nt, Human
aagccgcucggccuucug

SEQ ID NO: 686381 - RNA, 26 nt, Human
acaaaauccuuuuuaggcagggggaa

SEQ ID NO: 686382 - RNA, 18 nt, Human
agaaaugcaauucuccag

SEQ ID NO: 686383 - RNA, 23 nt, Human
agaauuuaaaccaaacuacaagc

SEQ ID NO: 686384 - RNA, 19 nt, Human
agccaggagcccaacaggu

SEQ ID NO: 686385 - RNA, 23 nt, Human
agccaggagcccaacagguaaac

SEQ ID NO: 686386 - RNA, 22 nt, Human
agggauagagaaagcggaggaa

SEQ ID NO: 686387 - RNA, 19 nt, Human
caagccacgaagcacaaaa

SEQ ID NO: 686388 - RNA, 23 nt, Human
caagcgguucuugcccggaccca

SEQ ID NO: 686389 - RNA, 24 nt, Human
caccaagcugucaucucccaccug

SEQ ID NO: 686390 - RNA, 22 nt, Human
cagcaaggcuuccugcugaucu

SEQ ID NO: 686391 - RNA, 23 nt, Human
cagccugacagagguuucaccaa

SEQ ID NO: 686392 - RNA, 26 nt, Human
ccaauuacagucucaugguuuuccuu

SEQ ID NO: 686393 - RNA, 22 nt, Human
ccaccugacacagugcuuggca

SEQ ID NO: 686394 - RNA, 23 nt, Human
ccagggauagagaaagcggagga

SEQ ID NO: 686395 - RNA, 18 nt, Human
cccccgcgcugggcaggg

SEQ ID NO: 686396 - RNA, 23 nt, Human
cccgugcagaauuuaaaccaaac

SEQ ID NO: 686397 - RNA, 19 nt, Human
ccggagcagccgagagcgg

SEQ ID NO: 686398 - RNA, 18 nt, Human
cgcuaagccgcucggccu

SEQ ID NO: 686399 - RNA, 21 nt, Human
cuaguccacaguuuacugguc

SEQ ID NO: 686400 - RNA, 21 nt, Human
cucagcccaucugccucuagg

SEQ ID NO: 686401 - RNA, 22 nt, Human
cucccaccugacacagugcuug

SEQ ID NO: 686402 - RNA, 20 nt, Human
gaagggaggcccgggagaaa

SEQ ID NO: 686403 - RNA, 21 nt, Human
gagaaagcggaggaagacagc

SEQ ID NO: 686404 - RNA, 19 nt, Human
gaggcccgggagaaagaga

SEQ ID NO: 686405 - RNA, 19 nt, Human
gcagccaggagcccaacag

SEQ ID NO: 686406 - RNA, 22 nt, Human
gcccgggagaaagagagacuca

SEQ ID NO: 686407 - RNA, 18 nt, Human
gccucuagggguggccag

SEQ ID NO: 686408 - RNA, 19 nt, Human
ggaaacagaagggaggccc

SEQ ID NO: 686409 - RNA, 18 nt, Human
ggagucccucuaauucac

SEQ ID NO: 686410 - RNA, 18 nt, Human
ggcagggacaggucgagg

SEQ ID NO: 686411 - RNA, 21 nt, Human
guggcgguugcgcccccgcgc

SEQ ID NO: 686412 - RNA, 19 nt, Human
uaaacucagaagguccucc

SEQ ID NO: 686413 - RNA, 18 nt, Human
uaagaaccacauauggaa

SEQ ID NO: 686414 - RNA, 19 nt, Human
uacuaguccacaguuuacu

SEQ ID NO: 686415 - RNA, 18 nt, Human
uccgaugauuucuuccag

SEQ ID NO: 686416 - RNA, 25 nt, Human
ugcagaauuuaaaccaaacuacaag

SEQ ID NO: 686417 - RNA, 19 nt, Human
ugcccggacccacgccgga

SEQ ID NO: 686418 - RNA, 22 nt, Human
ugcccggacccacgccggaaac

SEQ ID NO: 686419 - RNA, 20 nt, Human
ugccuggacaagccacgaag

SEQ ID NO: 686420 - RNA, 20 nt, Human
uggucagguggccccaacag

SEQ ID NO: 686421 - RNA, 19 nt, Human
uuauucgugcagccggagg

SEQ ID NO: 686422 - RNA, 18 nt, Human
uuuaucucagcccaucug

SEQ ID NO: 686423 - RNA, 22 nt, Human
uuuccugcuccccugcagccca

SEQ ID NO: 686424 - RNA, 20 nt, Human
cugcuagacaggacagcggg

SEQ ID NO: 686425 - RNA, 25 nt, Human
cuuaugaccuuuuuuccaguuuccu

SEQ ID NO: 686426 - RNA, 25 nt, Human
ggaccgaauuucuguaaaccgugca

SEQ ID NO: 686427 - RNA, 19 nt, Human
uuuuuuuuuuuuacugaga

SEQ ID NO: 686428 - RNA, 23 nt, Human
uuuuuuuuuuuuuuuuuuacuga

SEQ ID NO: 686429 - RNA, 19 nt, Human
aaaaugcagcauuagaagg

SEQ ID NO: 686430 - RNA, 21 nt, Human
aaaggccucuacuugcaacug

SEQ ID NO: 686431 - RNA, 22 nt, Human
aaaugcagaagauugaacagcc

SEQ ID NO: 686432 - RNA, 23 nt, Human
aagcacugcggugcccgccccuc

SEQ ID NO: 686433 - RNA, 18 nt, Human
aaggaccuggccaguucc

SEQ ID NO: 686434 - RNA, 19 nt, Human
aaucauagucugauacgcc

SEQ ID NO: 686435 - RNA, 23 nt, Human
acaaaaaccagacaguauuucca

SEQ ID NO: 686436 - RNA, 19 nt, Human
acaaggacguggagaacaa

SEQ ID NO: 686437 - RNA, 20 nt, Human
accacucacaaaugcagaag

SEQ ID NO: 686438 - RNA, 18 nt, Human
agucugauacgccuuugu

SEQ ID NO: 686439 - RNA, 25 nt, Human
augacugaaccacucacaaaugcag

SEQ ID NO: 686440 - RNA, 20 nt, Human
augauuuggaaggugaacac

SEQ ID NO: 686441 - RNA, 22 nt, Human
augcagcauuagaaggugcuua

SEQ ID NO: 686442 - RNA, 20 nt, Human
caaacaucuacaaacaaaaa

SEQ ID NO: 686443 - RNA, 19 nt, Human
caagaauaagucaugcuau

SEQ ID NO: 686444 - RNA, 18 nt, Human
caagagggcuuuguggca

SEQ ID NO: 686445 - RNA, 20 nt, Human
cacugcggugcccgccccuc

SEQ ID NO: 686446 - RNA, 19 nt, Human
caugaucaaggaccuggcc

SEQ ID NO: 686447 - RNA, 19 nt, Human
ccaacgccuaacuaucgag

SEQ ID NO: 686448 - RNA, 26 nt, Human
ccaacgccuaacuaucgagacuugga

SEQ ID NO: 686449 - RNA, 21 nt, Human
ccagggaggcaauugcucucc

SEQ ID NO: 686450 - RNA, 21 nt, Human
cccgccccuccauugagugca

SEQ ID NO: 686451 - RNA, 18 nt, Human
cccuuccucuuuuuuuuc

SEQ ID NO: 686452 - RNA, 21 nt, Human
ccucaugauuuggaaggugaa

SEQ ID NO: 686453 - RNA, 21 nt, Human
cgcaguccccuuccucuuuuu

SEQ ID NO: 686454 - RNA, 24 nt, Human
cggugcccgccccuccauugagug

SEQ ID NO: 686455 - RNA, 21 nt, Human
cucuggucucucuucccucca

SEQ ID NO: 686456 - RNA, 20 nt, Human
cuggccucuaaacucucugg

SEQ ID NO: 686457 - RNA, 18 nt, Human
cuucccagauucccagug

SEQ ID NO: 686458 - RNA, 26 nt, Human
cuuggccaucauguguuuaagauggu

SEQ ID NO: 686459 - RNA, 21 nt, Human
gacaaacaucuacaaacaaaa

SEQ ID NO: 686460 - RNA, 26 nt, Human
gacagcauuaagcacugcggugcccc

SEQ ID NO: 686461 - RNA, 18 nt, Human
gagcaggauaugucuggu

SEQ ID NO: 686462 - RNA, 23 nt, Human
gauguuuuuaacaacaacaaaaa

SEQ ID NO: 686463 - RNA, 19 nt, Human
gcaguccccuuccucuuuu

SEQ ID NO: 686464 - RNA, 20 nt, Human
gccccagggaggcaauugcu

SEQ ID NO: 686465 - RNA, 18 nt, Human
gcccgccccuccauugag

SEQ ID NO: 686466 - RNA, 18 nt, Human
gccucccucaagucucuc

SEQ ID NO: 686467 - RNA, 18 nt, Human
ggaaaaccucaugacuga

SEQ ID NO: 686468 - RNA, 18 nt, Human
guccccuuccucuuuuuu

SEQ ID NO: 686469 - RNA, 18 nt, Human
uaaaaacaucuuuuggaa

SEQ ID NO: 686470 - RNA, 24 nt, Human
uaagaacacucaggggggaaaaaa

SEQ ID NO: 686471 - RNA, 21 nt, Human
uacaaacaaaaacaugaauac

SEQ ID NO: 686472 - RNA, 24 nt, Human
uacaaacaaaaacaugaauacaug

SEQ ID NO: 686473 - RNA, 21 nt, Human
uauuaagagucagaaaggccu

SEQ ID NO: 686474 - RNA, 25 nt, Human
ucaaaacaagaauaagucaugcuau

SEQ ID NO: 686475 - RNA, 26 nt, Human
ucagacaaacaucuacaaacaaaaac

SEQ ID NO: 686476 - RNA, 21 nt, Human
ucagucgcagcgccucccuca

SEQ ID NO: 686477 - RNA, 20 nt, Human
uccagcucccugaauuucug

SEQ ID NO: 686478 - RNA, 19 nt, Human
uccaugaucaaggaccugg

SEQ ID NO: 686479 - RNA, 24 nt, Human
ucccagauucccagugccaggcuc

SEQ ID NO: 686480 - RNA, 19 nt, Human
ucccucuccagcucccuga

SEQ ID NO: 686481 - RNA, 23 nt, Human
ucccugaauuucugaaaguuguc

SEQ ID NO: 686482 - RNA, 19 nt, Human
ucuccagcucccugaauuu

SEQ ID NO: 686483 - RNA, 21 nt, Human
ugaacagccccagggaggcaa

SEQ ID NO: 686484 - RNA, 21 nt, Human
ugacugaaccacucacaaaug

SEQ ID NO: 686485 - RNA, 21 nt, Human
uguaaaucuuugcugcaaaua

SEQ ID NO: 686486 - RNA, 23 nt, Human
uguagcugucucucaguauugaa

SEQ ID NO: 686487 - RNA, 24 nt, Human
uguggcacuuggccaucauguguu

SEQ ID NO: 686488 - RNA, 18 nt, Human
uuagagagcaggauaugu

SEQ ID NO: 686489 - RNA, 20 nt, Human
uuccaugaucaaggaccugg

SEQ ID NO: 686490 - RNA, 22 nt, Human
uugcaaauaaacuaugcuuccc

SEQ ID NO: 686491 - RNA, 19 nt, Human
uuuggaaaaccucaugacu

SEQ ID NO: 686492 - RNA, 23 nt, Human
aaaaacgcaguacucaucuacag

SEQ ID NO: 686493 - RNA, 19 nt, Human
aagaaaaacgcaguacuca

SEQ ID NO: 686494 - RNA, 24 nt, Human
aagcccauaugauuuucagggggu

SEQ ID NO: 686495 - RNA, 24 nt, Human
aaguagcugggaucacaggugcgu

SEQ ID NO: 686496 - RNA, 25 nt, Human
aaguagcugggaucacaggugcgug

SEQ ID NO: 686497 - RNA, 21 nt, Human
aauuuuacuccucuggcauca

SEQ ID NO: 686498 - RNA, 25 nt, Human
acucuguugcccaggcuggagugca

SEQ ID NO: 686499 - RNA, 20 nt, Human
agagggaaagaaaguggagc

SEQ ID NO: 686500 - RNA, 23 nt, Human
agccucaaccuccuaaguagcug

SEQ ID NO: 686501 - RNA, 25 nt, Human
aggcuggagugcaguggcaugaucu

SEQ ID NO: 686502 - RNA, 18 nt, Human
agugcaguggcaugaucu

SEQ ID NO: 686503 - RNA, 19 nt, Human
agugcaguggcaugaucuu

SEQ ID NO: 686504 - RNA, 21 nt, Human
agugcaguggcaugaucuuag

SEQ ID NO: 686505 - RNA, 18 nt, Human
aucaauuaucuaggauca

SEQ ID NO: 686506 - RNA, 21 nt, Human
aucuugaucaaaauucaagua

SEQ ID NO: 686507 - RNA, 23 nt, Human
caaagagguccagacuggaacag

SEQ ID NO: 686508 - RNA, 24 nt, Human
caagugauccucccagccucaacc

SEQ ID NO: 686509 - RNA, 24 nt, Human
cacucuguugcccaggcuggagug

SEQ ID NO: 686510 - RNA, 25 nt, Human
cagacuccugggcucaagugauccu

SEQ ID NO: 686511 - RNA, 18 nt, Human
cagcccaccaaaacggag

SEQ ID NO: 686512 - RNA, 24 nt, Human
cagccucaaccuccuaaguagcug

SEQ ID NO: 686513 - RNA, 25 nt, Human
cagccucaaccuccuaaguagcugg

SEQ ID NO: 686514 - RNA, 19 nt, Human
cagcuccaaagagguccag

SEQ ID NO: 686515 - RNA, 21 nt, Human
cagggggucuacagaugggcc

SEQ ID NO: 686516 - RNA, 24 nt, Human
cagggucucacucuguugcccagg

SEQ ID NO: 686517 - RNA, 26 nt, Human
caguggauuucaucuccaaccagccc

SEQ ID NO: 686518 - RNA, 20 nt, Human
ccaaaacggagagggaaaga

SEQ ID NO: 686519 - RNA, 22 nt, Human
ccagccucaaccuccuaaguag

SEQ ID NO: 686520 - RNA, 19 nt, Human
ccagcuucuaucuagaaau

SEQ ID NO: 686521 - RNA, 22 nt, Human
cccaccaaaacggagagggaaa

SEQ ID NO: 686522 - RNA, 24 nt, Human
cccagccucaaccuccuaaguagc

SEQ ID NO: 686523 - RNA, 19 nt, Human
ccuaaguagcugggaucac

SEQ ID NO: 686524 - RNA, 20 nt, Human
ccucccagccucaaccuccu

SEQ ID NO: 686525 - RNA, 21 nt, Human
ccucccagccucaaccuccua

SEQ ID NO: 686526 - RNA, 26 nt, Human
ccucccagccucaaccuccuaaguag

SEQ ID NO: 686527 - RNA, 22 nt, Human
ccugggcucaagugauccuccc

SEQ ID NO: 686528 - RNA, 25 nt, Human
cucaagugauccucccagccucaac

SEQ ID NO: 686529 - RNA, 24 nt, Human
cucacucuguugcccaggcuggag

SEQ ID NO: 686530 - RNA, 27 nt, Human
cuccagaagcugaagagaguccauaaa

SEQ ID NO: 686531 - RNA, 23 nt, Human
cuccugggcucaagugauccucc

SEQ ID NO: 686532 - RNA, 24 nt, Human
cuggagugcaguggcaugaucuua

SEQ ID NO: 686533 - RNA, 23 nt, Human
gaaaaacgcaguacucaucuaca

SEQ ID NO: 686534 - RNA, 24 nt, Human
gaucacuaaagccucagacuccug

SEQ ID NO: 686535 - RNA, 23 nt, Human
gauuucaucuccaaccagcccac

SEQ ID NO: 686536 - RNA, 24 nt, Human
gcccaggcuggagugcaguggcau

SEQ ID NO: 686537 - RNA, 20 nt, Human
gccucaaccuccuaaguagc

SEQ ID NO: 686538 - RNA, 18 nt, Human
gcuuuagguaccaucagc

SEQ ID NO: 686539 - RNA, 23 nt, Human
gggcucaagugauccucccagcc

SEQ ID NO: 686540 - RNA, 24 nt, Human
gugcuggacuucccuccucagucg

SEQ ID NO: 686541 - RNA, 23 nt, Human
uaaaagaaaaacgcaguacucau

SEQ ID NO: 686542 - RNA, 22 nt, Human
uagaaacagggucucacucugu

SEQ ID NO: 686543 - RNA, 23 nt, Human
uagaucacuaaagccucagacuc

SEQ ID NO: 686544 - RNA, 19 nt, Human
uagugaggucuccagaagc

SEQ ID NO: 686545 - RNA, 21 nt, Human
uaucuugaucaaaauucaagu

SEQ ID NO: 686546 - RNA, 23 nt, Human
ucaaguaccaggcuuuagguacc

SEQ ID NO: 686547 - RNA, 24 nt, Human
ucacucuguugcccaggcuggagu

SEQ ID NO: 686548 - RNA, 21 nt, Human
uccagacuggaacagcgaaac

SEQ ID NO: 686549 - RNA, 23 nt, Human
uccaggauuuacagcuccaaaga

SEQ ID NO: 686550 - RNA, 24 nt, Human
ucccagccucaaccuccuaaguag

SEQ ID NO: 686551 - RNA, 24 nt, Human
uccuaaguagcugggaucacaggu

SEQ ID NO: 686552 - RNA, 24 nt, Human
uccucuggcaucacaugaauccag

SEQ ID NO: 686553 - RNA, 21 nt, Human
uccugggcucaagugauccuc

SEQ ID NO: 686554 - RNA, 24 nt, Human
uccugggcucaagugauccuccca

SEQ ID NO: 686555 - RNA, 22 nt, Human
ucucacucuguugcccaggcug

SEQ ID NO: 686556 - RNA, 23 nt, Human
ucucacucuguugcccaggcugg

SEQ ID NO: 686557 - RNA, 24 nt, Human
ucucacucuguugcccaggcugga

SEQ ID NO: 686558 - RNA, 26 nt, Human
ucucacucuguugcccaggcuggagu

SEQ ID NO: 686559 - RNA, 25 nt, Human
ucuccagaagcugaagagaguccau

SEQ ID NO: 686560 - RNA, 22 nt, Human
ucucuugaaauuuuacuccucu

SEQ ID NO: 686561 - RNA, 18 nt, Human
ucuguugcccaggcugga

SEQ ID NO: 686562 - RNA, 24 nt, Human
ucuguugcccaggcuggagugcag

SEQ ID NO: 686563 - RNA, 18 nt, Human
ugcccaggcuggagugca

SEQ ID NO: 686564 - RNA, 21 nt, Human
ugcccaggcuggagugcagug

SEQ ID NO: 686565 - RNA, 22 nt, Human
ugcccaggcuggagugcagugg

SEQ ID NO: 686566 - RNA, 24 nt, Human
ugcccaggcuggagugcaguggca

SEQ ID NO: 686567 - RNA, 18 nt, Human
ugcgugacacuaugcgug

SEQ ID NO: 686568 - RNA, 19 nt, Human
uggagugcaguggcaugau

SEQ ID NO: 686569 - RNA, 24 nt, Human
uggagugcaguggcaugaucuuag

SEQ ID NO: 686570 - RNA, 21 nt, Human
ugggaucacaggugcgugaca

SEQ ID NO: 686571 - RNA, 22 nt, Human
ugggaucacaggugcgugacac

SEQ ID NO: 686572 - RNA, 24 nt, Human
ugggaucacaggugcgugacacua

SEQ ID NO: 686573 - RNA, 19 nt, Human
ugggcucaagugauccucc

SEQ ID NO: 686574 - RNA, 24 nt, Human
uugcccaggcuggagugcaguggc

SEQ ID NO: 686575 - RNA, 18 nt, Human
uuucaucuccaaccagcc

SEQ ID NO: 686576 - RNA, 19 nt, Human
uuuuuuuuuagaaacaggg

SEQ ID NO: 686577 - RNA, 24 nt, Human
uuuuuuuuuagaaacagggucuca

SEQ ID NO: 686578 - RNA, 18 nt, Human
uuuuuuuuuuuuuuuuug

SEQ ID NO: 686579 - RNA, 19 nt, Human
caccuugggaaaagacccc

SEQ ID NO: 686580 - RNA, 22 nt, Human
caccuugggaaaagaccccaag

SEQ ID NO: 686581 - RNA, 24 nt, Human
cauguacaauaaauaauucauaua

SEQ ID NO: 686582 - RNA, 19 nt, Human
gagcccgcuucuacaucca

SEQ ID NO: 686583 - RNA, 23 nt, Human
gcccgcuucuacauccaccccgc

SEQ ID NO: 686584 - RNA, 18 nt, Human
ggagagugggacgccgga

SEQ ID NO: 686585 - RNA, 22 nt, Human
ugggaaaagaccccaaguuagc

SEQ ID NO: 686586 - RNA, 20 nt, Human
uuuuuuuuuuuuuuuugcug

SEQ ID NO: 686587 - RNA, 18 nt, Human
uuuuuuuuuuuuuuuuug

SEQ ID NO: 686588 - RNA, 20 nt, Human
uuuuuuuuuuuuuuuuugcu

SEQ ID NO: 686589 - RNA, 23 nt, Human
uccaauagaaaaacauaguuacu

SEQ ID NO: 686590 - RNA, 18 nt, Human
ugucuccaauagaaaaac

SEQ ID NO: 686591 - RNA, 22 nt, Human
uuacgauguucauuuugucucc

SEQ ID NO: 686592 - RNA, 23 nt, Human
aaaaaaaaaguuuggauuacagu

SEQ ID NO: 686593 - RNA, 18 nt, Human
aaacaagagguucuaaac

SEQ ID NO: 686594 - RNA, 18 nt, Human
aaacaagagguucuaaac

SEQ ID NO: 686595 - RNA, 25 nt, Human
aaacacuuagcacuucagaaauuaa

SEQ ID NO: 686596 - RNA, 19 nt, Human
aaacagaaaacccacaaga

SEQ ID NO: 686597 - RNA, 20 nt, Human
aaacagaaaacccacaagac

SEQ ID NO: 686598 - RNA, 19 nt, Human
aaacagauaacagugcaua

SEQ ID NO: 686599 - RNA, 19 nt, Human
aaacagaugccaugacucc

SEQ ID NO: 686600 - RNA, 18 nt, Human
aaaccuuuuagcccaagg

SEQ ID NO: 686601 - RNA, 21 nt, Human
aacagaaaacccacaagacua

SEQ ID NO: 686602 - RNA, 21 nt, Human
aagccaauaguacaaaacuga

SEQ ID NO: 686603 - RNA, 20 nt, Human
aaggcgccggcuaucuacaa

SEQ ID NO: 686604 - RNA, 20 nt, Human
aagguccuuucccccccuuu

SEQ ID NO: 686605 - RNA, 20 nt, Human
aaucaagcgcuaugauguca

SEQ ID NO: 686606 - RNA, 22 nt, Human
acaaggaaaucugugucaaaac

SEQ ID NO: 686607 - RNA, 19 nt, Human
acucacccuacacccuucc

SEQ ID NO: 686608 - RNA, 23 nt, Human
agacauuuaacaauguagguaua

SEQ ID NO: 686609 - RNA, 18 nt, Human
aggcggcggcggcggagg

SEQ ID NO: 686610 - RNA, 18 nt, Human
augacacacaucauaggc

SEQ ID NO: 686611 - RNA, 26 nt, Human
caaacagaaaacccacaagacuaaua

SEQ ID NO: 686612 - RNA, 20 nt, Human
caagacuaauagagaaccaa

SEQ ID NO: 686613 - RNA, 21 nt, Human
cacaagacuaauagagaacca

SEQ ID NO: 686614 - RNA, 19 nt, Human
cacuauuguaggccagacu

SEQ ID NO: 686615 - RNA, 19 nt, Human
cacugguggaaagcaaaau

SEQ ID NO: 686616 - RNA, 24 nt, Human
cacuucagaaauuaaaaauggccu

SEQ ID NO: 686617 - RNA, 19 nt, Human
cagaaaacccacaagacua

SEQ ID NO: 686618 - RNA, 23 nt, Human
cagcagcuuugagcagcagcaag

SEQ ID NO: 686619 - RNA, 19 nt, Human
cauuuuacaaggaaaucug

SEQ ID NO: 686620 - RNA, 18 nt, Human
cccagaaauguuagaaau

SEQ ID NO: 686621 - RNA, 19 nt, Human
cccuacuuauauaaucugu

SEQ ID NO: 686622 - RNA, 23 nt, Human
cuacucacccuacacccuuccua

SEQ ID NO: 686623 - RNA, 20 nt, Human
cucaaaauaaaaaaauaaga

SEQ ID NO: 686624 - RNA, 23 nt, Human
cucacccuacacccuuccuaaaa

SEQ ID NO: 686625 - RNA, 19 nt, Human
gagcagcagcaaggcggcg

SEQ ID NO: 686626 - RNA, 23 nt, Human
gagccugcuugauucaaagccaa

SEQ ID NO: 686627 - RNA, 22 nt, Human
gcacugguggaaagcaaaauug

SEQ ID NO: 686628 - RNA, 19 nt, Human
gcgaugggaagaggaaggc

SEQ ID NO: 686629 - RNA, 21 nt, Human
ggaaggcgccggcuaucuaca

SEQ ID NO: 686630 - RNA, 20 nt, Human
ggcacaacucauauugugcu

SEQ ID NO: 686631 - RNA, 20 nt, Human
ggcccgggagccaaucgcgg

SEQ ID NO: 686632 - RNA, 21 nt, Human
gguaaauaggcaaucaucucu

SEQ ID NO: 686633 - RNA, 23 nt, Human
gucagagagcccagaaauguuag

SEQ ID NO: 686634 - RNA, 28 nt, Human
guccuuucccccccuuuguuaauuucuu

SEQ ID NO: 686635 - RNA, 19 nt, Human
uaacaauguagguauaucc

SEQ ID NO: 686636 - RNA, 21 nt, Human
uaagguccuuucccccccuuu

SEQ ID NO: 686637 - RNA, 18 nt, Human
uaaguuucaucacgacug

SEQ ID NO: 686638 - RNA, 23 nt, Human
uaaucuguauacguuuucuaggg

SEQ ID NO: 686639 - RNA, 22 nt, Human
uacaaucagaacgugggcugac

SEQ ID NO: 686640 - RNA, 26 nt, Human
uacacccuuccuaaaaucucgaggac

SEQ ID NO: 686641 - RNA, 26 nt, Human
uaccauaacaacauuguacaaauuua

SEQ ID NO: 686642 - RNA, 20 nt, Human
uagaaggagacaccgguggc

SEQ ID NO: 686643 - RNA, 18 nt, Human
uagcccaaggggcggcag

SEQ ID NO: 686644 - RNA, 21 nt, Human
uauaguuucuguauugaaaua

SEQ ID NO: 686645 - RNA, 21 nt, Human
ucacccuacacccuuccuaaa

SEQ ID NO: 686646 - RNA, 21 nt, Human
ucauggucuuugauuuuuucu

SEQ ID NO: 686647 - RNA, 19 nt, Human
ucgcacugguggaaagcaa

SEQ ID NO: 686648 - RNA, 19 nt, Human
ugacagcacacuauugaau

SEQ ID NO: 686649 - RNA, 22 nt, Human
ugccgugucugauuucacauca

SEQ ID NO: 686650 - RNA, 20 nt, Human
ugcuguagagccccccccuu

SEQ ID NO: 686651 - RNA, 22 nt, Human
uggcagccggcgcagaggcgga

SEQ ID NO: 686652 - RNA, 21 nt, Human
uguagaaggagacaccggugg

SEQ ID NO: 686653 - RNA, 21 nt, Human
ugugugagaugugauuuuaug

SEQ ID NO: 686654 - RNA, 24 nt, Human
uuaaaaugacacacaucauaggcu

SEQ ID NO: 686655 - RNA, 24 nt, Human
uuaaacaaguuaccucuaucaaau

SEQ ID NO: 686656 - RNA, 24 nt, Human
uuaauaguggcacucaaaauaaaa

SEQ ID NO: 686657 - RNA, 22 nt, Human
uuaauuuugguaaacuaggcac

SEQ ID NO: 686658 - RNA, 23 nt, Human
uuaauuuugguaaacuaggcaca

SEQ ID NO: 686659 - RNA, 24 nt, Human
uuauauaaucuguauacguuuucu

SEQ ID NO: 686660 - RNA, 23 nt, Human
uucaaacagaaaacccacaagac

SEQ ID NO: 686661 - RNA, 20 nt, Human
uuccagaauccgaugcggug

SEQ ID NO: 686662 - RNA, 19 nt, Human
uucuaagcagaaagaaauu

SEQ ID NO: 686663 - RNA, 20 nt, Human
uuuacauuuacaaucacaug

SEQ ID NO: 686664 - RNA, 25 nt, Human
uuuagacauuuaacaauguagguau

SEQ ID NO: 686665 - RNA, 21 nt, Human
uuucaaacagaaaacccacaa

SEQ ID NO: 686666 - RNA, 25 nt, Human
uuucacaucaacaagucacuggaaa

SEQ ID NO: 686667 - RNA, 21 nt, Human
uuuuuuuuuuuuuuucacagg

SEQ ID NO: 686668 - RNA, 23 nt, Human
uuuuuuuuuuuuuuuuucacagg

SEQ ID NO: 686669 - RNA, 23 nt, Human
aaaagagucaacuaaagccugaa

SEQ ID NO: 686670 - RNA, 21 nt, Human
aaccaauuauccaguccuccc

SEQ ID NO: 686671 - RNA, 23 nt, Human
acacacacacacacacacacaca

SEQ ID NO: 686672 - RNA, 23 nt, Human
acacacacacacacacacacaca

SEQ ID NO: 686673 - RNA, 23 nt, Human
acacacacacacacacacacaca

SEQ ID NO: 686674 - RNA, 25 nt, Human
acacacacacacacacacacauucu

SEQ ID NO: 686675 - RNA, 25 nt, Human
acacacacacacacacacacauucu

SEQ ID NO: 686676 - RNA, 27 nt, Human
acacacacacacacauucuagcauggu

SEQ ID NO: 686677 - RNA, 18 nt, Human
accaauuauccaguccuc

SEQ ID NO: 686678 - RNA, 21 nt, Human
accaauuauccaguccucccc

SEQ ID NO: 686679 - RNA, 19 nt, Human
agaaaacuauauacuccac

SEQ ID NO: 686680 - RNA, 23 nt, Human
auacaaaaguaaacuacauucau

SEQ ID NO: 686681 - RNA, 21 nt, Human
caagcagccuagaugcuuccc

SEQ ID NO: 686682 - RNA, 20 nt, Human
cacacacacacacacacaca

SEQ ID NO: 686683 - RNA, 20 nt, Human
cacacacacacacacacaca

SEQ ID NO: 686684 - RNA, 20 nt, Human
cacacacacacacacacaca

SEQ ID NO: 686685 - RNA, 20 nt, Human
cacacacacacacacacaca

SEQ ID NO: 686686 - RNA, 20 nt, Human
cacacacacacacacacaca

SEQ ID NO: 686687 - RNA, 22 nt, Human
cacacacacacacacacacaca

SEQ ID NO: 686688 - RNA, 26 nt, Human
cacacacacacacacacacacacaca

SEQ ID NO: 686689 - RNA, 26 nt, Human
cacacacacacacacacacacacaca

SEQ ID NO: 686690 - RNA, 25 nt, Human
cauacacacacacacacacacacac

SEQ ID NO: 686691 - RNA, 18 nt, Human
ccaaauagccauugugau

SEQ ID NO: 686692 - RNA, 24 nt, Human
cccaccacuauccucuccccgacc

SEQ ID NO: 686693 - RNA, 31 nt, Human
ccccgaccuauacauacauacacacacacag

SEQ ID NO: 686694 - RNA, 22 nt, Human
cccgaccuauacauacauacac

SEQ ID NO: 686695 - RNA, 23 nt, Human
ccuuccugcuauuuuggucugac

SEQ ID NO: 686696 - RNA, 24 nt, Human
cuccaaaauaucuuuuaaggagaa

SEQ ID NO: 686697 - RNA, 21 nt, Human
cuuagucacuuaucugcucuu

SEQ ID NO: 686698 - RNA, 19 nt, Human
cuucuugaugagggucagg

SEQ ID NO: 686699 - RNA, 19 nt, Human
cuugcugcaauaccuuccu

SEQ ID NO: 686700 - RNA, 24 nt, Human
gaaaaucaaaauucaaauacaaaa

SEQ ID NO: 686701 - RNA, 29 nt, Human
gaccuauacauacauacacacacacacac

SEQ ID NO: 686702 - RNA, 19 nt, Human
gcauguuucagaagaaugg

SEQ ID NO: 686703 - RNA, 20 nt, Human
uacacacacacacacacaca

SEQ ID NO: 686704 - RNA, 25 nt, Human
uacacacacacacacacacacacac

SEQ ID NO: 686705 - RNA, 26 nt, Human
uacauacacacacacacacacacaca

SEQ ID NO: 686706 - RNA, 26 nt, Human
uacauacauacacacacacacacaca

SEQ ID NO: 686707 - RNA, 20 nt, Human
uauauacuccacaaaaugua

SEQ ID NO: 686708 - RNA, 24 nt, Human
uauccaguccuccccgcuuccuua

SEQ ID NO: 686709 - RNA, 27 nt, Human
uauguuacuuucuugacauauuucaga

SEQ ID NO: 686710 - RNA, 18 nt, Human
uauuuuggucugacuucc

SEQ ID NO: 686711 - RNA, 23 nt, Human
ucacuccaaaauaucuuuuaagg

SEQ ID NO: 686712 - RNA, 23 nt, Human
ucaggcacaacuuuuugcgggga

SEQ ID NO: 686713 - RNA, 18 nt, Human
ucagguucagacacaugu

SEQ ID NO: 686714 - RNA, 20 nt, Human
uccaaaauaucuuuuaagga

SEQ ID NO: 686715 - RNA, 22 nt, Human
ucccaccacuauccucuccccg

SEQ ID NO: 686716 - RNA, 25 nt, Human
ucuacaaauagaaaaaauaauauua

SEQ ID NO: 686717 - RNA, 20 nt, Human
ucucaaacuccagguuccaa

SEQ ID NO: 686718 - RNA, 24 nt, Human
ucuccaaauagccauugugauguu

SEQ ID NO: 686719 - RNA, 18 nt, Human
ucugccucuucgauuucc

SEQ ID NO: 686720 - RNA, 23 nt, Human
ugagggucaggugucugauggug

SEQ ID NO: 686721 - RNA, 21 nt, Human
uggcauguuucagaagaaugg

SEQ ID NO: 686722 - RNA, 27 nt, Human
uguucccaccacuauccucuccccgac

SEQ ID NO: 686723 - RNA, 20 nt, Human
uucaucacuccaaaauaucu

SEQ ID NO: 686724 - RNA, 22 nt, Human
uuccucaggcacaacuuuuugc

SEQ ID NO: 686725 - RNA, 18 nt, Human
uuguacugcuauuucuug

SEQ ID NO: 686726 - RNA, 19 nt, Human
uuuccuguucucugcugcu

SEQ ID NO: 686727 - RNA, 20 nt, Human
uuuccuguucucugcugcuu

SEQ ID NO: 686728 - RNA, 19 nt, Human
uuuguuguuucuuucugcc

SEQ ID NO: 686729 - RNA, 19 nt, Human
aaaaggaaacaccccucac

SEQ ID NO: 686730 - RNA, 24 nt, Human
aaaauucuuccagccucugcccau

SEQ ID NO: 686731 - RNA, 18 nt, Human
aaacaccccucacuggcu

SEQ ID NO: 686732 - RNA, 22 nt, Human
aaacaccccucacuggcucaag

SEQ ID NO: 686733 - RNA, 19 nt, Human
aaccuggcgccugcuccua

SEQ ID NO: 686734 - RNA, 20 nt, Human
aacucagcucucccagcuga

SEQ ID NO: 686735 - RNA, 26 nt, Human
aagcaggcagucauccuugagccaaa

SEQ ID NO: 686736 - RNA, 22 nt, Human
aaggccucaguuuccccaacua

SEQ ID NO: 686737 - RNA, 20 nt, Human
aauauaggcuccccaaaggg

SEQ ID NO: 686738 - RNA, 24 nt, Human
acaacagcgaggagucaagagccc

SEQ ID NO: 686739 - RNA, 23 nt, Human
acagagcaggcauccuaaaggag

SEQ ID NO: 686740 - RNA, 22 nt, Human
acagcagcacucuaauuugggc

SEQ ID NO: 686741 - RNA, 23 nt, Human
acaucaccagcacucaccaaccu

SEQ ID NO: 686742 - RNA, 19 nt, Human
acccccuucgcccucccca

SEQ ID NO: 686743 - RNA, 21 nt, Human
accggaauacaugggcugcca

SEQ ID NO: 686744 - RNA, 24 nt, Human
accucaagccagcaguucucaaac

SEQ ID NO: 686745 - RNA, 18 nt, Human
accuucucuugcucucca

SEQ ID NO: 686746 - RNA, 18 nt, Human
acgggccagcccugcugg

SEQ ID NO: 686747 - RNA, 23 nt, Human
acuggcugcccuggccugggccu

SEQ ID NO: 686748 - RNA, 25 nt, Human
agaaagacagaaagggcaauacugg

SEQ ID NO: 686749 - RNA, 19 nt, Human
agaaucgaagguggauagg

SEQ ID NO: 686750 - RNA, 19 nt, Human
agagccaaagggcacaagg

SEQ ID NO: 686751 - RNA, 21 nt, Human
agaguccaugcagcuggggcu

SEQ ID NO: 686752 - RNA, 19 nt, Human
agaguggccccuggaccca

SEQ ID NO: 686753 - RNA, 20 nt, Human
agcaagggaggggauagggc

SEQ ID NO: 686754 - RNA, 18 nt, Human
agcacugauggggccuug

SEQ ID NO: 686755 - RNA, 25 nt, Human
agccaagagcuccaggaaaccuggc

SEQ ID NO: 686756 - RNA, 23 nt, Human
agccaggacucuggcugggggcu

SEQ ID NO: 686757 - RNA, 19 nt, Human
agccaggacuggcugaggu

SEQ ID NO: 686758 - RNA, 21 nt, Human
agccauagugcagggcaacac

SEQ ID NO: 686759 - RNA, 20 nt, Human
aggaagccaggggcagcuca

SEQ ID NO: 686760 - RNA, 20 nt, Human
aggagcaagggaggggauag

SEQ ID NO: 686761 - RNA, 23 nt, Human
agggggcuuguccagggcagaag

SEQ ID NO: 686762 - RNA, 26 nt, Human
agggguucucaccucaagccagcagu

SEQ ID NO: 686763 - RNA, 18 nt, Human
agucccagcucuauucua

SEQ ID NO: 686764 - RNA, 23 nt, Human
auacaugggcugccaggucagau

SEQ ID NO: 686765 - RNA, 19 nt, Human
auagcccaggguccaggug

SEQ ID NO: 686766 - RNA, 22 nt, Human
augccacaaugugccaagccag

SEQ ID NO: 686767 - RNA, 21 nt, Human
augggccugaggccaggaggg

SEQ ID NO: 686768 - RNA, 22 nt, Human
caacacagagcaacugcccuca

SEQ ID NO: 686769 - RNA, 18 nt, Human
caacugcccucagccacu

SEQ ID NO: 686770 - RNA, 23 nt, Human
caagaccucaggggcuugcacag

SEQ ID NO: 686771 - RNA, 22 nt, Human
caagagccaaagggcacaagga

SEQ ID NO: 686772 - RNA, 20 nt, Human
cacagaccagagcuggggug

SEQ ID NO: 686773 - RNA, 24 nt, Human
cacaucaccagcacucaccaaccu

SEQ ID NO: 686774 - RNA, 18 nt, Human
caccagcacucaccaacc

SEQ ID NO: 686775 - RNA, 19 nt, Human
cacccagguuccuucugga

SEQ ID NO: 686776 - RNA, 22 nt, Human
cacccccuucgcccuccccacc

SEQ ID NO: 686777 - RNA, 21 nt, Human
cacuggguccuuccucccugu

SEQ ID NO: 686778 - RNA, 20 nt, Human
cagaagagccagcuucucau

SEQ ID NO: 686779 - RNA, 25 nt, Human
cagaggaugcugccuauuggaccau

SEQ ID NO: 686780 - RNA, 20 nt, Human
cagaguccaugcagcugggg

SEQ ID NO: 686781 - RNA, 20 nt, Human
cagcacucaccaaccuagag

SEQ ID NO: 686782 - RNA, 18 nt, Human
cagcugccccgacagugu

SEQ ID NO: 686783 - RNA, 23 nt, Human
cagcugccccgacagugucacuc

SEQ ID NO: 686784 - RNA, 23 nt, Human
cagggcaguggaggacuaaucaa

SEQ ID NO: 686785 - RNA, 26 nt, Human
caucagaccauacugccaggcccugg

SEQ ID NO: 686786 - RNA, 19 nt, Human
caucagcuccauguccucc

SEQ ID NO: 686787 - RNA, 19 nt, Human
caucgagaguacugcacaa

SEQ ID NO: 686788 - RNA, 18 nt, Human
caucugggcucaacgucc

SEQ ID NO: 686789 - RNA, 24 nt, Human
caugcagcuggggcugggcacagg

SEQ ID NO: 686790 - RNA, 20 nt, Human
cauggagaaacccacugaca

SEQ ID NO: 686791 - RNA, 24 nt, Human
cauggagaaacccacugacaacug

SEQ ID NO: 686792 - RNA, 23 nt, Human
cauuuuggggggucacuguucag

SEQ ID NO: 686793 - RNA, 20 nt, Human
ccacacugcacccccacacc

SEQ ID NO: 686794 - RNA, 19 nt, Human
ccacucugaugugauggag

SEQ ID NO: 686795 - RNA, 19 nt, Human
ccagacccuccccuccaga

SEQ ID NO: 686796 - RNA, 24 nt, Human
ccagagcagggguagaguugcuuu

SEQ ID NO: 686797 - RNA, 22 nt, Human
ccagcaauauaggcuccccaaa

SEQ ID NO: 686798 - RNA, 18 nt, Human
ccagcucuauucuagaaa

SEQ ID NO: 686799 - RNA, 20 nt, Human
ccaggacucuggcugggggc

SEQ ID NO: 686800 - RNA, 24 nt, Human
ccauaagaaccugggcucuggaaa

SEQ ID NO: 686801 - RNA, 25 nt, Human
ccauaucccccgauacccccacagc

SEQ ID NO: 686802 - RNA, 23 nt, Human
cccacagcaauuucaccaacaca

SEQ ID NO: 686803 - RNA, 20 nt, Human
ccccacaccacuaccaagca

SEQ ID NO: 686804 - RNA, 22 nt, Human
ccccacagcaauuucaccaaca

SEQ ID NO: 686805 - RNA, 23 nt, Human
cccccacaccacuaccaagcagg

SEQ ID NO: 686806 - RNA, 20 nt, Human
cccccagggcuuuucccaca

SEQ ID NO: 686807 - RNA, 19 nt, Human
ccucauggcuucccauccc

SEQ ID NO: 686808 - RNA, 19 nt, Human
ccuccagacccuccccucc

SEQ ID NO: 686809 - RNA, 18 nt, Human
ccuuagaagccaaggcug

SEQ ID NO: 686810 - RNA, 18 nt, Human
ccuugagccaaaacgcag

SEQ ID NO: 686811 - RNA, 22 nt, Human
cgagaguacugcacaaaggcug

SEQ ID NO: 686812 - RNA, 24 nt, Human
cgaggagucaagagcccaagacug

SEQ ID NO: 686813 - RNA, 21 nt, Human
cucaauacuuuacuggccaua

SEQ ID NO: 686814 - RNA, 18 nt, Human
cucacucuccccagcccc

SEQ ID NO: 686815 - RNA, 18 nt, Human
cucacucuccccagcccc

SEQ ID NO: 686816 - RNA, 19 nt, Human
cucauggcuucccaucccu

SEQ ID NO: 686817 - RNA, 22 nt, Human
cuccacacugcacccccacacc

SEQ ID NO: 686818 - RNA, 18 nt, Human
cuccagaaagcaggcagu

SEQ ID NO: 686819 - RNA, 21 nt, Human
cuccagcaauugcaucacucu

SEQ ID NO: 686820 - RNA, 21 nt, Human
cucccauucugccugcaagug

SEQ ID NO: 686821 - RNA, 19 nt, Human
cucccugugucugcccucc

SEQ ID NO: 686822 - RNA, 21 nt, Human
cuccuacacuccugucuaugc

SEQ ID NO: 686823 - RNA, 22 nt, Human
cugaagacagcaagagccaaag

SEQ ID NO: 686824 - RNA, 21 nt, Human
cugaaggaggcugcacgggca

SEQ ID NO: 686825 - RNA, 18 nt, Human
cugaaggcaugguacaga

SEQ ID NO: 686826 - RNA, 24 nt, Human
cugcacccccacaccacuaccaag

SEQ ID NO: 686827 - RNA, 20 nt, Human
cugcuccuacugccgccaag

SEQ ID NO: 686828 - RNA, 21 nt, Human
cugcuggcuccaucucuagac

SEQ ID NO: 686829 - RNA, 18 nt, Human
cuggcugaaggaggcugc

SEQ ID NO: 686830 - RNA, 21 nt, Human
cuggcugcccuggccugggcc

SEQ ID NO: 686831 - RNA, 19 nt, Human
cugggccucaaggcacugg

SEQ ID NO: 686832 - RNA, 23 nt, Human
cugggcucaacguccagggccca

SEQ ID NO: 686833 - RNA, 18 nt, Human
cuuccagccucugcccau

SEQ ID NO: 686834 - RNA, 20 nt, Human
cuugagccaaaacgcagaug

SEQ ID NO: 686835 - RNA, 25 nt, Human
cuuguggccccagcugccccgacag

SEQ ID NO: 686836 - RNA, 18 nt, Human
cuuuaugaugucagcugc

SEQ ID NO: 686837 - RNA, 21 nt, Human
gaaagguucuccagagugcuu

SEQ ID NO: 686838 - RNA, 20 nt, Human
gaaaugccauaagaaccugg

SEQ ID NO: 686839 - RNA, 21 nt, Human
gaacucagcucucccagcugc

SEQ ID NO: 686840 - RNA, 22 nt, Human
gaagaaaaaaaagagaaaagaa

SEQ ID NO: 686841 - RNA, 20 nt, Human
gaagacagcaagagccaaag

SEQ ID NO: 686842 - RNA, 20 nt, Human
gaagaggcugucugcauucc

SEQ ID NO: 686843 - RNA, 23 nt, Human
gacccuccccuccagaaagcaac

SEQ ID NO: 686844 - RNA, 18 nt, Human
gacucacgugccuuccuc

SEQ ID NO: 686845 - RNA, 18 nt, Human
gagaaagacagaaagggc

SEQ ID NO: 686846 - RNA, 19 nt, Human
gagaauccacuaagaagga

SEQ ID NO: 686847 - RNA, 25 nt, Human
gagcccuuuuguucugaugacagcc

SEQ ID NO: 686848 - RNA, 23 nt, Human
gagucugcacagaccagagcugg

SEQ ID NO: 686849 - RNA, 19 nt, Human
gauacuccuuccaucucaa

SEQ ID NO: 686850 - RNA, 18 nt, Human
gcaaagggaaggugugug

SEQ ID NO: 686851 - RNA, 18 nt, Human
gcaggacacuggggcacu

SEQ ID NO: 686852 - RNA, 24 nt, Human
gccaaaacgcagaugagcuuccug

SEQ ID NO: 686853 - RNA, 19 nt, Human
gccacaaugugccaagcca

SEQ ID NO: 686854 - RNA, 19 nt, Human
gccagcagagguaugggcu

SEQ ID NO: 686855 - RNA, 18 nt, Human
gcccaaggucacauccug

SEQ ID NO: 686856 - RNA, 19 nt, Human
gcccuccccacccagguuc

SEQ ID NO: 686857 - RNA, 20 nt, Human
gcccuggacucagaagagcc

SEQ ID NO: 686858 - RNA, 18 nt, Human
gcccuugugauuauacuc

SEQ ID NO: 686859 - RNA, 22 nt, Human
gcuaccagccugcuggcuccau

SEQ ID NO: 686860 - RNA, 18 nt, Human
gcugaagcccagggcagu

SEQ ID NO: 686861 - RNA, 20 nt, Human
gcugguggugguggggaggc

SEQ ID NO: 686862 - RNA, 25 nt, Human
ggacucuggcugggggcuggcugaa

SEQ ID NO: 686863 - RNA, 20 nt, Human
ggagaucaggucacuguccu

SEQ ID NO: 686864 - RNA, 19 nt, Human
ggagcagccaauagcccag

SEQ ID NO: 686865 - RNA, 19 nt, Human
ggagcugcagugugaccuc

SEQ ID NO: 686866 - RNA, 18 nt, Human
ggauagggcaggugggcc

SEQ ID NO: 686867 - RNA, 18 nt, Human
ggccucaguuuccccaac

SEQ ID NO: 686868 - RNA, 19 nt, Human
ggcugggggcuggcugaag

SEQ ID NO: 686869 - RNA, 24 nt, Human
ggcugggggcuggcugaagccaag

SEQ ID NO: 686870 - RNA, 21 nt, Human
ggcuuguccagggcagaaggu

SEQ ID NO: 686871 - RNA, 19 nt, Human
gggaaaugccauaagaacc

SEQ ID NO: 686872 - RNA, 20 nt, Human
gggcaaggauugggagcagc

SEQ ID NO: 686873 - RNA, 21 nt, Human
gggcacuggguccuuccuccc

SEQ ID NO: 686874 - RNA, 22 nt, Human
gggcaggugggccuggcuuucc

SEQ ID NO: 686875 - RNA, 20 nt, Human
gggccauagugaggagaggc

SEQ ID NO: 686876 - RNA, 26 nt, Human
gggcccccagggcuuuucccacaguu

SEQ ID NO: 686877 - RNA, 18 nt, Human
gggccugaggccaggagg

SEQ ID NO: 686878 - RNA, 24 nt, Human
ggggcuggcugaagccaagagcuc

SEQ ID NO: 686879 - RNA, 18 nt, Human
ggggcugggcacagggca

SEQ ID NO: 686880 - RNA, 19 nt, Human
ggucacauccuggugaggg

SEQ ID NO: 686881 - RNA, 23 nt, Human
guccuccagccauagugcagggc

SEQ ID NO: 686882 - RNA, 19 nt, Human
gugaggggcagauucuggg

SEQ ID NO: 686883 - RNA, 21 nt, Human
guggauagggaaagacaugcu

SEQ ID NO: 686884 - RNA, 18 nt, Human
guggugguggggaggcug

SEQ ID NO: 686885 - RNA, 23 nt, Human
uaaaauaaaaaagcauuaagucc

SEQ ID NO: 686886 - RNA, 20 nt, Human
uaacuuacugucuccacuug

SEQ ID NO: 686887 - RNA, 19 nt, Human
uaaggcagcuguaugagac

SEQ ID NO: 686888 - RNA, 21 nt, Human
uacccccacagcaauuucacc

SEQ ID NO: 686889 - RNA, 23 nt, Human
uaccugggaguaagggggucagg

SEQ ID NO: 686890 - RNA, 20 nt, Human
uacugcacaaaggcugaagc

SEQ ID NO: 686891 - RNA, 19 nt, Human
uagaaaaugcauguaccau

SEQ ID NO: 686892 - RNA, 24 nt, Human
uaggugauuaagacacugccauuu

SEQ ID NO: 686893 - RNA, 19 nt, Human
ucacucuccaacacugcac

SEQ ID NO: 686894 - RNA, 19 nt, Human
ucacucugaccucugcuuc

SEQ ID NO: 686895 - RNA, 18 nt, Human
ucacugucaugugaccuc

SEQ ID NO: 686896 - RNA, 19 nt, Human
ucagagcacugauggggcc

SEQ ID NO: 686897 - RNA, 23 nt, Human
ucagaguccaugcagcuggggcu

SEQ ID NO: 686898 - RNA, 21 nt, Human
ucagccuuagaagccaaggcu

SEQ ID NO: 686899 - RNA, 22 nt, Human
ucagggcagcuacccugagaug

SEQ ID NO: 686900 - RNA, 23 nt, Human
uccacacugcacccccacaccac

SEQ ID NO: 686901 - RNA, 22 nt, Human
uccagggcagaaggucaugagg

SEQ ID NO: 686902 - RNA, 21 nt, Human
uccugcuuguggccccagcug

SEQ ID NO: 686903 - RNA, 22 nt, Human
uccuggugaggggcagauucug

SEQ ID NO: 686904 - RNA, 18 nt, Human
ucgaagguggauagggaa

SEQ ID NO: 686905 - RNA, 20 nt, Human
ucgagucucuggcuuuggcc

SEQ ID NO: 686906 - RNA, 19 nt, Human
ucuagaaaaugcauguacc

SEQ ID NO: 686907 - RNA, 21 nt, Human
ucuccagagugcuuccagguu

SEQ ID NO: 686908 - RNA, 19 nt, Human
ucuccugguguggcuguug

SEQ ID NO: 686909 - RNA, 18 nt, Human
ucucucaauacuuuacug

SEQ ID NO: 686910 - RNA, 22 nt, Human
ucugcauuccucggcucauggc

SEQ ID NO: 686911 - RNA, 19 nt, Human
ucugcccaaggucacaucc

SEQ ID NO: 686912 - RNA, 23 nt, Human
ucugggcucaacguccagggccc

SEQ ID NO: 686913 - RNA, 19 nt, Human
ugaacguggaugugcgacc

SEQ ID NO: 686914 - RNA, 22 nt, Human
ugaacuuggguaugccagaucc

SEQ ID NO: 686915 - RNA, 23 nt, Human
ugaagacagcaagagccaaaggg

SEQ ID NO: 686916 - RNA, 22 nt, Human
ugaaggaggcugcacgggcagu

SEQ ID NO: 686917 - RNA, 18 nt, Human
ugaggacucacgugccuu

SEQ ID NO: 686918 - RNA, 21 nt, Human
ugaggagaggcugaggggaga

SEQ ID NO: 686919 - RNA, 21 nt, Human
ugaggggagauguaggcugcc

SEQ ID NO: 686920 - RNA, 19 nt, Human
ugaggggagauguaggcuu

SEQ ID NO: 686921 - RNA, 24 nt, Human
ugaggugaagucaucugcccaagg

SEQ ID NO: 686922 - RNA, 22 nt, Human
ugagucugcacagaccagagcu

SEQ ID NO: 686923 - RNA, 24 nt, Human
ugccaagccaggcacauuccaugg

SEQ ID NO: 686924 - RNA, 22 nt, Human
ugccagauccacagggggcccc

SEQ ID NO: 686925 - RNA, 20 nt, Human
ugccaggcuaccagccugcu

SEQ ID NO: 686926 - RNA, 18 nt, Human
ugccuuguaucccugccu

SEQ ID NO: 686927 - RNA, 19 nt, Human
ugcuaugugaagguaauau

SEQ ID NO: 686928 - RNA, 22 nt, Human
ugcugguggugguggggaggcu

SEQ ID NO: 686929 - RNA, 18 nt, Human
ugcuuguggccccagcug

SEQ ID NO: 686930 - RNA, 21 nt, Human
ugcuuguggccccagcugccc

SEQ ID NO: 686931 - RNA, 24 nt, Human
ugcuuguggccccagcugccccga

SEQ ID NO: 686932 - RNA, 22 nt, Human
uggaaagugccauccaccuccc

SEQ ID NO: 686933 - RNA, 18 nt, Human
uggcagggggcaguuagu

SEQ ID NO: 686934 - RNA, 20 nt, Human
uggcagggggcaguuagugg

SEQ ID NO: 686935 - RNA, 20 nt, Human
uggccccuggacccagcugg

SEQ ID NO: 686936 - RNA, 20 nt, Human
uggccucaggagcaagggag

SEQ ID NO: 686937 - RNA, 19 nt, Human
uggcggcacugacaaggca

SEQ ID NO: 686938 - RNA, 23 nt, Human
ugggagcagccaauagcccaggg

SEQ ID NO: 686939 - RNA, 21 nt, Human
ugggcucaacguccagggccc

SEQ ID NO: 686940 - RNA, 20 nt, Human
uggggaggcuguucgagucu

SEQ ID NO: 686941 - RNA, 19 nt, Human
ugggguggaggccacaacc

SEQ ID NO: 686942 - RNA, 25 nt, Human
uggguaugccagauccacagggggc

SEQ ID NO: 686943 - RNA, 21 nt, Human
uggguggagauggagagguca

SEQ ID NO: 686944 - RNA, 20 nt, Human
uggugaggggcagauucugg

SEQ ID NO: 686945 - RNA, 24 nt, Human
ugguguggcuccaacaucugggcu

SEQ ID NO: 686946 - RNA, 19 nt, Human
uguaacaaauuaucacaca

SEQ ID NO: 686947 - RNA, 24 nt, Human
ugugcucgagccaggcuuggccag

SEQ ID NO: 686948 - RNA, 21 nt, Human
uguucgagucucuggcuuugg

SEQ ID NO: 686949 - RNA, 19 nt, Human
uguuggagcuugaagaagu

SEQ ID NO: 686950 - RNA, 21 nt, Human
uuaggucaccauuuguuaguc

SEQ ID NO: 686951 - RNA, 19 nt, Human
uuccuccacacugcacccc

SEQ ID NO: 686952 - RNA, 19 nt, Human
uucucuugcucuccaugcc

SEQ ID NO: 686953 - RNA, 22 nt, Human
uucucuugcucuccaugccugg

SEQ ID NO: 686954 - RNA, 23 nt, Human
uucuuccagccucugcccauuuc

SEQ ID NO: 686955 - RNA, 23 nt, Human
uugcaauuccaaagccacuucaa

SEQ ID NO: 686956 - RNA, 25 nt, Human
aaaaauauggagggaaaaaccugac

SEQ ID NO: 686957 - RNA, 20 nt, Human
aacuuaucaaaagugaccaa

SEQ ID NO: 686958 - RNA, 21 nt, Human
acaggcaauucaaauuaaaac

SEQ ID NO: 686959 - RNA, 22 nt, Human
agugaccaaaaauauggaggga

SEQ ID NO: 686960 - RNA, 21 nt, Human
caaaauaaauauaugaauauu

SEQ ID NO: 686961 - RNA, 25 nt, Human
caaucacagaaaaauaaaaacaucu

SEQ ID NO: 686962 - RNA, 24 nt, Human
cauuuagaguaacuaaauguggcc

SEQ ID NO: 686963 - RNA, 19 nt, Human
ccaaaaauauggagggaaa

SEQ ID NO: 686964 - RNA, 19 nt, Human
cccaacuaaaaaugcacca

SEQ ID NO: 686965 - RNA, 23 nt, Human
gaaaaauaaaaacaucuaauuuc

SEQ ID NO: 686966 - RNA, 21 nt, Human
gagcuggcgggguggggcgcg

SEQ ID NO: 686967 - RNA, 18 nt, Human
gggguggggcgcggcucc

SEQ ID NO: 686968 - RNA, 19 nt, Human
uaccauaaaaguauaucaa

SEQ ID NO: 686969 - RNA, 18 nt, Human
uccgcagaggcggaauuc

SEQ ID NO: 686970 - RNA, 19 nt, Human
ugagagcacuucguuuuug

SEQ ID NO: 686971 - RNA, 19 nt, Human
ugagggagagaagggaggg

SEQ ID NO: 686972 - RNA, 19 nt, Human
ugagggagagaagggaggg

SEQ ID NO: 686973 - RNA, 19 nt, Human
ugagggagagaagggaggg

SEQ ID NO: 686974 - RNA, 22 nt, Human
ugagggagagaagggaggguga

SEQ ID NO: 686975 - RNA, 19 nt, Human
ugcauaaggaacccugaac

SEQ ID NO: 686976 - RNA, 27 nt, Human
uuauugagggagagaagggagggugag

SEQ ID NO: 686977 - RNA, 20 nt, Human
uucguuuuuguuguuuuugu

SEQ ID NO: 686978 - RNA, 24 nt, Human
aaaaacaaaaagaaaaagcaaaaa

SEQ ID NO: 686979 - RNA, 18 nt, Human
aaaaacaccucccauaca

SEQ ID NO: 686980 - RNA, 18 nt, Human
aaaaagcaaaaaucuaca

SEQ ID NO: 686981 - RNA, 23 nt, Human
aaaacaaaaagaaaaagcaaaaa

SEQ ID NO: 686982 - RNA, 22 nt, Human
aaaacaccaaauuuauugcaua

SEQ ID NO: 686983 - RNA, 24 nt, Human
aaaauaaagaagaaacgaaaggaa

SEQ ID NO: 686984 - RNA, 19 nt, Human
aaacaaaaacaaaaacacc

SEQ ID NO: 686985 - RNA, 18 nt, Human
aaacaaaaacaccuccca

SEQ ID NO: 686986 - RNA, 24 nt, Human
aaacaccucccauacaagggccaa

SEQ ID NO: 686987 - RNA, 24 nt, Human
aacaaaaagaaaaagcaaaaaucu

SEQ ID NO: 686988 - RNA, 22 nt, Human
aacacauucacaagugcaagga

SEQ ID NO: 686989 - RNA, 23 nt, Human
aacguccuuaaaucuuagcaauu

SEQ ID NO: 686990 - RNA, 20 nt, Human
aagaagaaacgaaaggaaaa

SEQ ID NO: 686991 - RNA, 21 nt, Human
aagaagaaacgaaaggaaaau

SEQ ID NO: 686992 - RNA, 23 nt, Human
aagaagaaacgaaaggaaaauca

SEQ ID NO: 686993 - RNA, 20 nt, Human
aagcaaaaaucuacaauccg

SEQ ID NO: 686994 - RNA, 22 nt, Human
agcaauuagggaagaggaaaaa

SEQ ID NO: 686995 - RNA, 21 nt, Human
agcagagugcaacacauucac

SEQ ID NO: 686996 - RNA, 18 nt, Human
aggaaggagaaaauggua

SEQ ID NO: 686997 - RNA, 24 nt, Human
aggaaggagaaaaugguagaggac

SEQ ID NO: 686998 - RNA, 21 nt, Human
agggaagaggaaaaaaaaucu

SEQ ID NO: 686999 - RNA, 22 nt, Human
auacaagggccaauuuuucacc

SEQ ID NO: 687000 - RNA, 21 nt, Human
auccccaaccucuaauuuuuc

SEQ ID NO: 687001 - RNA, 24 nt, Human
caaaaacaaaaacaccucccauac

SEQ ID NO: 687002 - RNA, 25 nt, Human
caaaaacaaaaacaccucccauaca

SEQ ID NO: 687003 - RNA, 27 nt, Human
caaaaacaccucccauacaagggccaa

SEQ ID NO: 687004 - RNA, 25 nt, Human
caaccaggcucaguauuuaaaaguc

SEQ ID NO: 687005 - RNA, 24 nt, Human
caagaacuuuuuaaaagcaagaua

SEQ ID NO: 687006 - RNA, 21 nt, Human
caaucccagaaacacaucaac

SEQ ID NO: 687007 - RNA, 24 nt, Human
cacacauagaaaauaaacauuuca

SEQ ID NO: 687008 - RNA, 21 nt, Human
caguccuuuccuccuuugggu

SEQ ID NO: 687009 - RNA, 25 nt, Human
ccagaaacacaucaaccaggcucag

SEQ ID NO: 687010 - RNA, 24 nt, Human
cccacuguaaacaaacauuucgaa

SEQ ID NO: 687011 - RNA, 24 nt, Human
ccccuaaaaucccacuguaaacaa

SEQ ID NO: 687012 - RNA, 22 nt, Human
cuguauauauauuuuuaauccu

SEQ ID NO: 687013 - RNA, 24 nt, Human
gaaaaggagaaaauaagggaaggg

SEQ ID NO: 687014 - RNA, 21 nt, Human
gaaaauaagggaagggaggaa

SEQ ID NO: 687015 - RNA, 19 nt, Human
gaaauaggcacagccaugg

SEQ ID NO: 687016 - RNA, 22 nt, Human
gaaccgcagcuugggacuccga

SEQ ID NO: 687017 - RNA, 22 nt, Human
gacaaggaagcacugugagaaa

SEQ ID NO: 687018 - RNA, 20 nt, Human
gcagcagccgaaccgcagcu

SEQ ID NO: 687019 - RNA, 19 nt, Human
gcuauacaaucccagaaac

SEQ ID NO: 687020 - RNA, 22 nt, Human
gcucccauaaauucuuaggagu

SEQ ID NO: 687021 - RNA, 18 nt, Human
ggaagggaggaaggagaa

SEQ ID NO: 687022 - RNA, 23 nt, Human
ggaaugagaaguuaagagaagga

SEQ ID NO: 687023 - RNA, 22 nt, Human
ggacacaggguacgaaaaggag

SEQ ID NO: 687024 - RNA, 18 nt, Human
ggagaggagaggaaggga

SEQ ID NO: 687025 - RNA, 21 nt, Human
gggacaaggaugagcaagaaa

SEQ ID NO: 687026 - RNA, 23 nt, Human
gggacaaggaugagcaagaaaaa

SEQ ID NO: 687027 - RNA, 24 nt, Human
gggaggacacaggguacgaaaagg

SEQ ID NO: 687028 - RNA, 21 nt, Human
guucucggcagcagccgaacc

SEQ ID NO: 687029 - RNA, 22 nt, Human
uaaaaacaaaaagaaaaagcaa

SEQ ID NO: 687030 - RNA, 23 nt, Human
uaaaaggucuaggaaauaggcac

SEQ ID NO: 687031 - RNA, 23 nt, Human
uaaaauaaagaagaaacgaaagg

SEQ ID NO: 687032 - RNA, 20 nt, Human
uaaacaaacauuucgaaugu

SEQ ID NO: 687033 - RNA, 22 nt, Human
uaacagagaaugggauaaaaua

SEQ ID NO: 687034 - RNA, 18 nt, Human
uaaggugauagaaaaagg

SEQ ID NO: 687035 - RNA, 23 nt, Human
uaaguuuuaaaaacaaaaagaaa

SEQ ID NO: 687036 - RNA, 22 nt, Human
uaaugcaacuugcuccaaaagc

SEQ ID NO: 687037 - RNA, 18 nt, Human
uagaaggagaggagagga

SEQ ID NO: 687038 - RNA, 21 nt, Human
uagaggaaugagaaguuaaga

SEQ ID NO: 687039 - RNA, 24 nt, Human
ucagcugcaacgaaugcuaagcug

SEQ ID NO: 687040 - RNA, 25 nt, Human
ucauaauaaagaacguccuuaaauc

SEQ ID NO: 687041 - RNA, 21 nt, Human
ucccagaaacacaucaaccag

SEQ ID NO: 687042 - RNA, 21 nt, Human
ucccucaagaacuuuuuaaaa

SEQ ID NO: 687043 - RNA, 18 nt, Human
uccuuuggguuaaaggag

SEQ ID NO: 687044 - RNA, 24 nt, Human
ugagaaaacaucagggcugagaga

SEQ ID NO: 687045 - RNA, 19 nt, Human
ugagagagacauuugggaa

SEQ ID NO: 687046 - RNA, 22 nt, Human
ugagcaagaaaaaauuaggcuc

SEQ ID NO: 687047 - RNA, 24 nt, Human
ugccaaaauaauggacccagacuc

SEQ ID NO: 687048 - RNA, 21 nt, Human
ugcgcagauaaaaaaggacag

SEQ ID NO: 687049 - RNA, 20 nt, Human
ugcuaagcugcucugcacau

SEQ ID NO: 687050 - RNA, 19 nt, Human
ugcuauacaaucccagaaa

SEQ ID NO: 687051 - RNA, 19 nt, Human
ugugauaaaguuucauaau

SEQ ID NO: 687052 - RNA, 23 nt, Human
uuaaccuuauugucaaagggacc

SEQ ID NO: 687053 - RNA, 23 nt, Human
uuacauggauucuuuaaucaugu

SEQ ID NO: 687054 - RNA, 23 nt, Human
uucacaagugcaaggaauacugg

SEQ ID NO: 687055 - RNA, 28 nt, Human
uucauauaacuguauauauauuuuuaau

SEQ ID NO: 687056 - RNA, 21 nt, Human
uugcaguucucggcagcagcc

SEQ ID NO: 687057 - RNA, 22 nt, Human
uugcuauucccucaagaacuuu

SEQ ID NO: 687058 - RNA, 19 nt, Human
uuuagcaauuggaauaagu

SEQ ID NO: 687059 - RNA, 21 nt, Human
uuucauaauaaagaacguccu

SEQ ID NO: 687060 - RNA, 22 nt, Human
uuuucaccccauccccaaccuc

SEQ ID NO: 687061 - RNA, 21 nt, Human
aaacauuccaacaggaaucaa

SEQ ID NO: 687062 - RNA, 22 nt, Human
aacacacaugcagacacacaca

SEQ ID NO: 687063 - RNA, 27 nt, Human
aaccacuucugcaucuaugacuucuau

SEQ ID NO: 687064 - RNA, 20 nt, Human
aagcauagacaugcaacacc

SEQ ID NO: 687065 - RNA, 18 nt, Human
aagcauaucaucauccac

SEQ ID NO: 687066 - RNA, 20 nt, Human
acacaugcagacacacacau

SEQ ID NO: 687067 - RNA, 24 nt, Human
acagugcuuauuaaacuacauaga

SEQ ID NO: 687068 - RNA, 18 nt, Human
acaugagaagccuugggc

SEQ ID NO: 687069 - RNA, 23 nt, Human
auaagucuuuccuagaaaagucc

SEQ ID NO: 687070 - RNA, 24 nt, Human
auucauaguaaaacuuuauugaac

SEQ ID NO: 687071 - RNA, 21 nt, Human
caacaggaaucaaaucguacc

SEQ ID NO: 687072 - RNA, 19 nt, Human
cagcuacagcacaaacacc

SEQ ID NO: 687073 - RNA, 22 nt, Human
caguccauuccugucaaagccu

SEQ ID NO: 687074 - RNA, 20 nt, Human
cauagacaugcaacaccuaa

SEQ ID NO: 687075 - RNA, 23 nt, Human
cauuccaacaggaaucaaaucgu

SEQ ID NO: 687076 - RNA, 22 nt, Human
ccagcagaaccacuucugcauc

SEQ ID NO: 687077 - RNA, 18 nt, Human
ccugucaaagccuccaac

SEQ ID NO: 687078 - RNA, 23 nt, Human
ccugucaaagccuccaacagccg

SEQ ID NO: 687079 - RNA, 23 nt, Human
cuaaaacaugucuagcaauuuca

SEQ ID NO: 687080 - RNA, 23 nt, Human
gcaaaguuccccuuaguuuaaag

SEQ ID NO: 687081 - RNA, 19 nt, Human
gcuggagucaggugaucca

SEQ ID NO: 687082 - RNA, 23 nt, Human
uaaagcucuucagaauaaagaca

SEQ ID NO: 687083 - RNA, 20 nt, Human
uaaggccuucuacguacagu

SEQ ID NO: 687084 - RNA, 22 nt, Human
uaagucuuuccuagaaaagucc

SEQ ID NO: 687085 - RNA, 20 nt, Human
uauguacaaacacacaugca

SEQ ID NO: 687086 - RNA, 26 nt, Human
uauguacaaacacacaugcagacaca

SEQ ID NO: 687087 - RNA, 26 nt, Human
uccuaggugccaggcaggcggcgucu

SEQ ID NO: 687088 - RNA, 24 nt, Human
uguacaaacacacaugcagacaca

SEQ ID NO: 687089 - RNA, 22 nt, Human
ugucggggcuccgcuccggggg

SEQ ID NO: 687090 - RNA, 21 nt, Human
uucagaauaaagacaugagaa

SEQ ID NO: 687091 - RNA, 18 nt, Human
uuucagggucauucauag

SEQ ID NO: 687092 - RNA, 18 nt, Human
uuuuuuuuuuucaggguc

SEQ ID NO: 687093 - RNA, 24 nt, Human
uuuuuuuuuuuuuuuuuuucaggg

SEQ ID NO: 687094 - RNA, 23 nt, Human
aaacugaaucucuguacccauga

SEQ ID NO: 687095 - RNA, 24 nt, Human
aaagugcugggauuacaggcguga

SEQ ID NO: 687096 - RNA, 23 nt, Human
aacaaaacaaacauuaccgcaaa

SEQ ID NO: 687097 - RNA, 23 nt, Human
aacuccccauucuucccaccccc

SEQ ID NO: 687098 - RNA, 26 nt, Human
aagcaccaacuccccauucuucccac

SEQ ID NO: 687099 - RNA, 22 nt, Human
aaggaacaagaaacaaaacaaa

SEQ ID NO: 687100 - RNA, 19 nt, Human
aagugcugggauuacaggc

SEQ ID NO: 687101 - RNA, 19 nt, Human
aagugcugggauuacaggc

SEQ ID NO: 687102 - RNA, 26 nt, Human
aagugcugggauuacaggcgugagcc

SEQ ID NO: 687103 - RNA, 23 nt, Human
acaaacauuaccgcaaaugaaac

SEQ ID NO: 687104 - RNA, 19 nt, Human
acccaugaagcaccaacuc

SEQ ID NO: 687105 - RNA, 20 nt, Human
acugcaagcuccaccuccca

SEQ ID NO: 687106 - RNA, 21 nt, Human
agagaagccccugggcaccuu

SEQ ID NO: 687107 - RNA, 19 nt, Human
agagaugggguuucaccgu

SEQ ID NO: 687108 - RNA, 24 nt, Human
agauggucucgaucuccugaccuc

SEQ ID NO: 687109 - RNA, 21 nt, Human
agccaccgcgcccggcccauc

SEQ ID NO: 687110 - RNA, 22 nt, Human
agcgguggcagcucuggaauug

SEQ ID NO: 687111 - RNA, 19 nt, Human
agugcaguggcgugaucuc

SEQ ID NO: 687112 - RNA, 20 nt, Human
agugcaguggcgugaucucg

SEQ ID NO: 687113 - RNA, 23 nt, Human
agugcaguggcgugaucucggcu

SEQ ID NO: 687114 - RNA, 24 nt, Human
agugcaguggcgugaucucggcuc

SEQ ID NO: 687115 - RNA, 18 nt, Human
agugcugggauuacaggc

SEQ ID NO: 687116 - RNA, 24 nt, Human
auaguagagaugggguuucaccgu

SEQ ID NO: 687117 - RNA, 23 nt, Human
augcacauucacauugcggugua

SEQ ID NO: 687118 - RNA, 18 nt, Human
augggguuucaccguguu

SEQ ID NO: 687119 - RNA, 19 nt, Human
augggguuucaccguguua

SEQ ID NO: 687120 - RNA, 20 nt, Human
augggguuucaccguguuag

SEQ ID NO: 687121 - RNA, 24 nt, Human
caaagugcugggauuacaggcgug

SEQ ID NO: 687122 - RNA, 18 nt, Human
caacuccccauucuuccc

SEQ ID NO: 687123 - RNA, 21 nt, Human
caacuccccauucuucccacc

SEQ ID NO: 687124 - RNA, 22 nt, Human
caacuccccauucuucccaccc

SEQ ID NO: 687125 - RNA, 18 nt, Human
caccccccagccccugcc

SEQ ID NO: 687126 - RNA, 24 nt, Human
caccguguuagccaagauggucuc

SEQ ID NO: 687127 - RNA, 20 nt, Human
cacugcaagcuccaccuccc

SEQ ID NO: 687128 - RNA, 19 nt, Human
caugcacauucacauugcg

SEQ ID NO: 687129 - RNA, 22 nt, Human
caugccauucuccugccucagc

SEQ ID NO: 687130 - RNA, 22 nt, Human
ccaaagugcugggauuacaggc

SEQ ID NO: 687131 - RNA, 22 nt, Human
ccaaagugcugggauuacaggc

SEQ ID NO: 687132 - RNA, 24 nt, Human
ccaaagugcugggauuacaggcgu

SEQ ID NO: 687133 - RNA, 19 nt, Human
ccaacuccccauucuuccc

SEQ ID NO: 687134 - RNA, 19 nt, Human
ccaucagcagcauccaucu

SEQ ID NO: 687135 - RNA, 19 nt, Human
ccauugacucaagcacagg

SEQ ID NO: 687136 - RNA, 22 nt, Human
cccagccuggagugcaguggcg

SEQ ID NO: 687137 - RNA, 20 nt, Human
cccagguucaugccauucuc

SEQ ID NO: 687138 - RNA, 19 nt, Human
ccccagccccugccaacca

SEQ ID NO: 687139 - RNA, 22 nt, Human
ccccauucuucccaccccccag

SEQ ID NO: 687140 - RNA, 23 nt, Human
ccccauucuucccaccccccagc

SEQ ID NO: 687141 - RNA, 20 nt, Human
cccccacgcccggcuaauuu

SEQ ID NO: 687142 - RNA, 21 nt, Human
ccccugggcaccuugccccag

SEQ ID NO: 687143 - RNA, 24 nt, Human
ccucccagguucaugccauucucc

SEQ ID NO: 687144 - RNA, 23 nt, Human
ccugccucagccucccgaguagc

SEQ ID NO: 687145 - RNA, 24 nt, Human
cgaaggaacaagaaacaaaacaaa

SEQ ID NO: 687146 - RNA, 24 nt, Human
cgccucggccucccaaagugcugg

SEQ ID NO: 687147 - RNA, 24 nt, Human
cgcucugucgcccagccuggagug

SEQ ID NO: 687148 - RNA, 24 nt, Human
cucacugcaagcuccaccucccag

SEQ ID NO: 687149 - RNA, 24 nt, Human
cucagccucccgaguagcugggac

SEQ ID NO: 687150 - RNA, 24 nt, Human
cucccgaguagcugggaccacagg

SEQ ID NO: 687151 - RNA, 24 nt, Human
cuccugaccucgugaucugcccgc

SEQ ID NO: 687152 - RNA, 24 nt, Human
cugcaagcuccaccucccagguuc

SEQ ID NO: 687153 - RNA, 23 nt, Human
cugccucagccucccgaguagcu

SEQ ID NO: 687154 - RNA, 25 nt, Human
gaaacaaaacaaacauuaccgcaaa

SEQ ID NO: 687155 - RNA, 22 nt, Human
gaccucgugaucugcccgccuc

SEQ ID NO: 687156 - RNA, 24 nt, Human
gaccucgugaucugcccgccucgg

SEQ ID NO: 687157 - RNA, 24 nt, Human
gagaugggguuucaccguguuagc

SEQ ID NO: 687158 - RNA, 18 nt, Human
gauuacaggcgugagcca

SEQ ID NO: 687159 - RNA, 20 nt, Human
gauuacaggcgugagccacc

SEQ ID NO: 687160 - RNA, 22 nt, Human
gauuacaggcgugagccaccgc

SEQ ID NO: 687161 - RNA, 18 nt, Human
gcaagcuccaccucccag

SEQ ID NO: 687162 - RNA, 22 nt, Human
gcaagcuccaccucccagguuc

SEQ ID NO: 687163 - RNA, 19 nt, Human
ggagagaagccccugggca

SEQ ID NO: 687164 - RNA, 21 nt, Human
gggaagcgguggcagcucugg

SEQ ID NO: 687165 - RNA, 19 nt, Human
gggaaugagaacuucugga

SEQ ID NO: 687166 - RNA, 18 nt, Human
gggguuucaccguguuag

SEQ ID NO: 687167 - RNA, 21 nt, Human
gugaucucggcucacugcaag

SEQ ID NO: 687168 - RNA, 24 nt, Human
gugaucugcccgccucggccuccc

SEQ ID NO: 687169 - RNA, 24 nt, Human
uaauuuuuuguauuuauaguagag

SEQ ID NO: 687170 - RNA, 25 nt, Human
uaauuuuuuguauuuauaguagaga

SEQ ID NO: 687171 - RNA, 23 nt, Human
uacaggcgugagccaccgcgccc

SEQ ID NO: 687172 - RNA, 20 nt, Human
uacccuggagcugcugaagc

SEQ ID NO: 687173 - RNA, 21 nt, Human
uaguagagaugggguuucacc

SEQ ID NO: 687174 - RNA, 21 nt, Human
uaguagagaugggguuucacc

SEQ ID NO: 687175 - RNA, 24 nt, Human
uaguagagaugggguuucaccgug

SEQ ID NO: 687176 - RNA, 26 nt, Human
uaguagagaugggguuucaccguguu

SEQ ID NO: 687177 - RNA, 24 nt, Human
ucaccguguuagccaagauggucu

SEQ ID NO: 687178 - RNA, 19 nt, Human
ucacugcaagcuccaccuc

SEQ ID NO: 687179 - RNA, 24 nt, Human
ucacugcaagcuccaccucccagg

SEQ ID NO: 687180 - RNA, 23 nt, Human
ucagccucccgaguagcugggac

SEQ ID NO: 687181 - RNA, 18 nt, Human
ucaugccauucuccugcc

SEQ ID NO: 687182 - RNA, 24 nt, Human
ucccaaagugcugggauuacaggc

SEQ ID NO: 687183 - RNA, 23 nt, Human
ucccagauagguacgaaggaaca

SEQ ID NO: 687184 - RNA, 20 nt, Human
ucccagguucaugccauucu

SEQ ID NO: 687185 - RNA, 21 nt, Human
ucccagguucaugccauucuc

SEQ ID NO: 687186 - RNA, 24 nt, Human
ucccagguucaugccauucuccug

SEQ ID NO: 687187 - RNA, 23 nt, Human
ucccgaguagcugggaccacagg

SEQ ID NO: 687188 - RNA, 24 nt, Human
ucgcccagccuggagugcaguggc

SEQ ID NO: 687189 - RNA, 18 nt, Human
ucggccucccaaagugcu

SEQ ID NO: 687190 - RNA, 24 nt, Human
ucuccugccucagccucccgagua

SEQ ID NO: 687191 - RNA, 24 nt, Human
ucucgcucugucgcccagccugga

SEQ ID NO: 687192 - RNA, 24 nt, Human
ucugucgcccagccuggagugcag

SEQ ID NO: 687193 - RNA, 22 nt, Human
ugagacggagucucgcucuguc

SEQ ID NO: 687194 - RNA, 22 nt, Human
ugcaguggcgugaucucggcuc

SEQ ID NO: 687195 - RNA, 24 nt, Human
ugccucagccucccgaguagcugg

SEQ ID NO: 687196 - RNA, 24 nt, Human
ugcugggauuacaggcgugagcca

SEQ ID NO: 687197 - RNA, 19 nt, Human
uggagugcaguggcgugau

SEQ ID NO: 687198 - RNA, 23 nt, Human
uggagugcaguggcgugaucucg

SEQ ID NO: 687199 - RNA, 24 nt, Human
uggagugcaguggcgugaucucgg

SEQ ID NO: 687200 - RNA, 20 nt, Human
uggcgugaucucggcucacu

SEQ ID NO: 687201 - RNA, 18 nt, Human
ugggaccacaggugcccg

SEQ ID NO: 687202 - RNA, 18 nt, Human
ugggauuacaggcgugag

SEQ ID NO: 687203 - RNA, 19 nt, Human
ugggauuacaggcgugagc

SEQ ID NO: 687204 - RNA, 21 nt, Human
ugggauuacaggcgugagcca

SEQ ID NO: 687205 - RNA, 22 nt, Human
ugggauuacaggcgugagccac

SEQ ID NO: 687206 - RNA, 23 nt, Human
ugggauuacaggcgugagccacc

SEQ ID NO: 687207 - RNA, 24 nt, Human
ugggauuacaggcgugagccaccg

SEQ ID NO: 687208 - RNA, 21 nt, Human
uggggucucaacuguuacgug

SEQ ID NO: 687209 - RNA, 19 nt, Human
ugggguuucaccguguuag

SEQ ID NO: 687210 - RNA, 20 nt, Human
uucacauugcgguguagcca

SEQ ID NO: 687211 - RNA, 19 nt, Human
uucaugccauucuccugcc

SEQ ID NO: 687212 - RNA, 18 nt, Human
uucccagauagguacgaa

SEQ ID NO: 687213 - RNA, 24 nt, Human
uuuauaguagagaugggguuucac

SEQ ID NO: 687214 - RNA, 19 nt, Human
uuucaccguguuagccaag

SEQ ID NO: 687215 - RNA, 21 nt, Human
uuuuuguauuuauaguagaga

SEQ ID NO: 687216 - RNA, 24 nt, Human
uuuuuuguauuuauaguagagaug

SEQ ID NO: 687217 - RNA, 25 nt, Human
uuuuuuuuuuuugagacggagucuc

SEQ ID NO: 687218 - RNA, 22 nt, Human
uuuuuuuuuuuuuugagacgga

SEQ ID NO: 687219 - RNA, 18 nt, Human
uuuuuuuuuuuuuuuuug

SEQ ID NO: 687220 - RNA, 18 nt, Human
aaaauucuuccuccugcc

SEQ ID NO: 687221 - RNA, 18 nt, Human
aaacaagauguacagagc

SEQ ID NO: 687222 - RNA, 22 nt, Human
aagcuuuuguuuagcccaggga

SEQ ID NO: 687223 - RNA, 18 nt, Human
acccacuccagagcugca

SEQ ID NO: 687224 - RNA, 25 nt, Human
acuccaaaauucuuuauuuaguaaa

SEQ ID NO: 687225 - RNA, 23 nt, Human
agcagcggggacggggagcggcg

SEQ ID NO: 687226 - RNA, 18 nt, Human
aggagggagggaagaccu

SEQ ID NO: 687227 - RNA, 22 nt, Human
aggcugggugggugaaccuggg

SEQ ID NO: 687228 - RNA, 18 nt, Human
agggagggaagaccuggg

SEQ ID NO: 687229 - RNA, 19 nt, Human
aucagaggagggagggaag

SEQ ID NO: 687230 - RNA, 23 nt, Human
auuccugccaccucugcccccag

SEQ ID NO: 687231 - RNA, 27 nt, Human
caaaauucuuuauuuaguaaaauuguc

SEQ ID NO: 687232 - RNA, 21 nt, Human
caaggguaacuaacuccaaaa

SEQ ID NO: 687233 - RNA, 28 nt, Human
caccucugcccccagagcccgcacaggg

SEQ ID NO: 687234 - RNA, 18 nt, Human
cagaggagggagggaaga

SEQ ID NO: 687235 - RNA, 22 nt, Human
cagcagcagcccagccguccgc

SEQ ID NO: 687236 - RNA, 21 nt, Human
cagcucugggcagugcagcug

SEQ ID NO: 687237 - RNA, 22 nt, Human
cagcugagugcaccugccucuc

SEQ ID NO: 687238 - RNA, 22 nt, Human
ccagcaccauuccugccaccuc

SEQ ID NO: 687239 - RNA, 23 nt, Human
cccagccguccgcgcuccccucg

SEQ ID NO: 687240 - RNA, 22 nt, Human
ccccgcaggacucuggcuggca

SEQ ID NO: 687241 - RNA, 23 nt, Human
cccgcaggacucuggcuggcauu

SEQ ID NO: 687242 - RNA, 20 nt, Human
cccuaaaaguuucuuaagaa

SEQ ID NO: 687243 - RNA, 21 nt, Human
cccuaccccaccacaucugaa

SEQ ID NO: 687244 - RNA, 18 nt, Human
cccugggaggagggagga

SEQ ID NO: 687245 - RNA, 23 nt, Human
ccgcccagcagcagcccagccgu

SEQ ID NO: 687246 - RNA, 22 nt, Human
ccgcuccgccggggacgcggca

SEQ ID NO: 687247 - RNA, 21 nt, Human
ccgcugccccgcggccgccca

SEQ ID NO: 687248 - RNA, 24 nt, Human
ccugcccguagcucccucccucca

SEQ ID NO: 687249 - RNA, 19 nt, Human
ccugggaggagggaggaga

SEQ ID NO: 687250 - RNA, 20 nt, Human
cuccagagcugcaggguccc

SEQ ID NO: 687251 - RNA, 21 nt, Human
cucccucccuccacccacucc

SEQ ID NO: 687252 - RNA, 26 nt, Human
cugcccguagcucccucccuccaccc

SEQ ID NO: 687253 - RNA, 27 nt, Human
cugggaggagggaggagauccagggag

SEQ ID NO: 687254 - RNA, 20 nt, Human
gaaacggggcuggggccuga

SEQ ID NO: 687255 - RNA, 21 nt, Human
gaaccugggagagcgcuggca

SEQ ID NO: 687256 - RNA, 23 nt, Human
gaggagggaggagauccagggag

SEQ ID NO: 687257 - RNA, 24 nt, Human
gaggagggagggaagaccugggag

SEQ ID NO: 687258 - RNA, 20 nt, Human
gcaggggcuaggagcagcgg

SEQ ID NO: 687259 - RNA, 23 nt, Human
gcaggggcuaggagcagcgggga

SEQ ID NO: 687260 - RNA, 25 nt, Human
gcucuacaaaauucuuccuccugcc

SEQ ID NO: 687261 - RNA, 19 nt, Human
ggagcggcggggaccggag

SEQ ID NO: 687262 - RNA, 21 nt, Human
ggagggaagaccugggagacu

SEQ ID NO: 687263 - RNA, 20 nt, Human
ggcuggugaaggcugggugg

SEQ ID NO: 687264 - RNA, 24 nt, Human
gggaagaccugggagacuuccagg

SEQ ID NO: 687265 - RNA, 28 nt, Human
gggcagugcagcugagugccgggccccc

SEQ ID NO: 687266 - RNA, 21 nt, Human
gggcugguuaccaggggcugc

SEQ ID NO: 687267 - RNA, 20 nt, Human
guagcucccucccuccaccc

SEQ ID NO: 687268 - RNA, 20 nt, Human
gugcagcugagugcaccugc

SEQ ID NO: 687269 - RNA, 21 nt, Human
uaccccaccacaucugaaccc

SEQ ID NO: 687270 - RNA, 19 nt, Human
uagcucccucccuccaccc

SEQ ID NO: 687271 - RNA, 18 nt, Human
ucccuccacccacuccag

SEQ ID NO: 687272 - RNA, 19 nt, Human
ucccucccuccacccacuc

SEQ ID NO: 687273 - RNA, 19 nt, Human
ucccucccuccacccacuc

SEQ ID NO: 687274 - RNA, 19 nt, Human
uccgcugccccgcggccgc

SEQ ID NO: 687275 - RNA, 23 nt, Human
ugaaguggcaaguucaagcuuuu

SEQ ID NO: 687276 - RNA, 23 nt, Human
ugacugggcugguuaccaggggc

SEQ ID NO: 687277 - RNA, 22 nt, Human
ugccccgcggccgcccagcagc

SEQ ID NO: 687278 - RNA, 19 nt, Human
ugcccguagcucccucccu

SEQ ID NO: 687279 - RNA, 22 nt, Human
ugccggcgcccuccgcugcccc

SEQ ID NO: 687280 - RNA, 23 nt, Human
uggaacacuagugcccagcacca

SEQ ID NO: 687281 - RNA, 21 nt, Human
uggaauacacaaacucaagug

SEQ ID NO: 687282 - RNA, 21 nt, Human
ugggagacuuccagggcccua

SEQ ID NO: 687283 - RNA, 21 nt, Human
ugggcugguuaccaggggcug

SEQ ID NO: 687284 - RNA, 22 nt, Human
ugggugaaccugggagagcgcu

SEQ ID NO: 687285 - RNA, 18 nt, Human
ugguuaccaggggcugcc

SEQ ID NO: 687286 - RNA, 19 nt, Human
uguuuagcccagggcugcc

SEQ ID NO: 687287 - RNA, 18 nt, Human
uuccagggcccuacccca

SEQ ID NO: 687288 - RNA, 23 nt, Human
uuguuuagcccagggcugccugg

SEQ ID NO: 687289 - RNA, 18 nt, Human
uuuuuuuuuuuucaaggg

SEQ ID NO: 687290 - RNA, 23 nt, Human
uuuuuuuuuuuuuuuuuucaagg

SEQ ID NO: 687291 - RNA, 18 nt, Human
aaaaguaaaccaacaaac

SEQ ID NO: 687292 - RNA, 19 nt, Human
aaacagaccaaaaauacua

SEQ ID NO: 687293 - RNA, 18 nt, Human
aaggagaaaaacagacca

SEQ ID NO: 687294 - RNA, 28 nt, Human
acaaacagaaucauguuaaccgaggucc

SEQ ID NO: 687295 - RNA, 21 nt, Human
acaguacaaaccuaucacaaa

SEQ ID NO: 687296 - RNA, 18 nt, Human
acaugacaugaugaaaaa

SEQ ID NO: 687297 - RNA, 19 nt, Human
accacaguuccaugcacca

SEQ ID NO: 687298 - RNA, 22 nt, Human
accuucaguuuccuuuccacca

SEQ ID NO: 687299 - RNA, 18 nt, Human
accuuggcaaccacaguu

SEQ ID NO: 687300 - RNA, 21 nt, Human
agaaaaacagaccaaaaauac

SEQ ID NO: 687301 - RNA, 23 nt, Human
aggcaaaaacggaaucauucugg

SEQ ID NO: 687302 - RNA, 23 nt, Human
auauaguuccccuccccccaaaa

SEQ ID NO: 687303 - RNA, 20 nt, Human
caaacccaguucaguggagg

SEQ ID NO: 687304 - RNA, 20 nt, Human
caaggagaaaaacagaccaa

SEQ ID NO: 687305 - RNA, 18 nt, Human
caccaaaaggaaaacuca

SEQ ID NO: 687306 - RNA, 25 nt, Human
caccaacacuccaaaugagaccuaa

SEQ ID NO: 687307 - RNA, 21 nt, Human
cagcggcucucuccuaacuaa

SEQ ID NO: 687308 - RNA, 22 nt, Human
caucaguacaacagaggucaaa

SEQ ID NO: 687309 - RNA, 21 nt, Human
ccaaaugagaccuaaccuauc

SEQ ID NO: 687310 - RNA, 21 nt, Human
ccaguccuggcagauaccagc

SEQ ID NO: 687311 - RNA, 25 nt, Human
cuaauacaugacaugaugaaaaaaa

SEQ ID NO: 687312 - RNA, 21 nt, Human
cuacucaauugaccacucgcc

SEQ ID NO: 687313 - RNA, 18 nt, Human
cuuuccaccaacacucca

SEQ ID NO: 687314 - RNA, 23 nt, Human
gaugaaaaaaacauuaaaaaaga

SEQ ID NO: 687315 - RNA, 26 nt, Human
gauucagggccaccaacaguuuguac

SEQ ID NO: 687316 - RNA, 18 nt, Human
gcaggaaagcccuuuuaa

SEQ ID NO: 687317 - RNA, 23 nt, Human
gcagucccaggaaaauuagguua

SEQ ID NO: 687318 - RNA, 19 nt, Human
ggagaaaaacagaccaaaa

SEQ ID NO: 687319 - RNA, 21 nt, Human
uaaaauucaauauaguucccc

SEQ ID NO: 687320 - RNA, 24 nt, Human
uaaauaccuuggcaaccacaguuc

SEQ ID NO: 687321 - RNA, 18 nt, Human
uaaggugauguuggcaac

SEQ ID NO: 687322 - RNA, 18 nt, Human
uaauucuaaaaacagacc

SEQ ID NO: 687323 - RNA, 19 nt, Human
uacaaggagaaaaacagac

SEQ ID NO: 687324 - RNA, 22 nt, Human
uacaugacaugaugaaaaaaac

SEQ ID NO: 687325 - RNA, 24 nt, Human
uacuaaauguuaagauuccccaaa

SEQ ID NO: 687326 - RNA, 27 nt, Human
uagcccaaaucaaauuaaauaaaucaa

SEQ ID NO: 687327 - RNA, 19 nt, Human
uaguuccccuccccccaaa

SEQ ID NO: 687328 - RNA, 22 nt, Human
uauacaaggagaaaaacagacc

SEQ ID NO: 687329 - RNA, 18 nt, Human
uccaccaacacuccaaau

SEQ ID NO: 687330 - RNA, 24 nt, Human
uccaccaacacuccaaaugagacc

SEQ ID NO: 687331 - RNA, 25 nt, Human
ugaaaaaaacauuaaaaaagauaaa

SEQ ID NO: 687332 - RNA, 19 nt, Human
ugacgacuuuaaggugaug

SEQ ID NO: 687333 - RNA, 21 nt, Human
ugauuugucaacgcuuugcuc

SEQ ID NO: 687334 - RNA, 23 nt, Human
ugcucagaaauauaaaauucaau

SEQ ID NO: 687335 - RNA, 18 nt, Human
uggaggucguuuaacuac

SEQ ID NO: 687336 - RNA, 20 nt, Human
uggucagauggauucagggc

SEQ ID NO: 687337 - RNA, 24 nt, Human
uguuaagauuccccaaauuuugag

SEQ ID NO: 687338 - RNA, 21 nt, Human
uuccccuccccccaaaagaau

SEQ ID NO: 687339 - RNA, 19 nt, Human
uuuaaauaccuuggcaacc

SEQ ID NO: 687340 - RNA, 19 nt, Human
aaaacaaaaccacaacccc

SEQ ID NO: 687341 - RNA, 18 nt, Human
aaaccaaacuccuacaaa

SEQ ID NO: 687342 - RNA, 23 nt, Human
aaacuaagauaaaacuagaucuu

SEQ ID NO: 687343 - RNA, 22 nt, Human
aaacugaauaaauuaaaccaaa

SEQ ID NO: 687344 - RNA, 22 nt, Human
aaagcagcaccauauuuugagc

SEQ ID NO: 687345 - RNA, 24 nt, Human
aaaucgaaaaaaacaaaaccacaa

SEQ ID NO: 687346 - RNA, 26 nt, Human
aaaucgaaaaaaacaaaaccacaacc

SEQ ID NO: 687347 - RNA, 26 nt, Human
aagcagcaccauauuuugagccaucc

SEQ ID NO: 687348 - RNA, 20 nt, Human
acaaaguaaugcaaaaaaga

SEQ ID NO: 687349 - RNA, 19 nt, Human
acacgacucucucacucuc

SEQ ID NO: 687350 - RNA, 24 nt, Human
acgaaaucgaaaaaaacaaaacca

SEQ ID NO: 687351 - RNA, 23 nt, Human
agagaaaaaaaagagaauaccac

SEQ ID NO: 687352 - RNA, 23 nt, Human
aggagaaaaugaagaggagggac

SEQ ID NO: 687353 - RNA, 19 nt, Human
agggagagaaaaaaaagag

SEQ ID NO: 687354 - RNA, 21 nt, Human
caaaaaagacuagguacagua

SEQ ID NO: 687355 - RNA, 18 nt, Human
cacugcuggaugguacgg

SEQ ID NO: 687356 - RNA, 25 nt, Human
caucauuaggagaaaaugaagagga

SEQ ID NO: 687357 - RNA, 23 nt, Human
ccacaaccccauuacauagcacu

SEQ ID NO: 687358 - RNA, 20 nt, Human
ccaguaaaaccuguugguuu

SEQ ID NO: 687359 - RNA, 21 nt, Human
cccauugcauacauucaucuu

SEQ ID NO: 687360 - RNA, 18 nt, Human
cccuuuccuuucuuaacc

SEQ ID NO: 687361 - RNA, 20 nt, Human
ccuguugguuucagcagaau

SEQ ID NO: 687362 - RNA, 23 nt, Human
ccuucagggugcagagguuuuaa

SEQ ID NO: 687363 - RNA, 27 nt, Human
ccuugugcaauguuauauauccagaag

SEQ ID NO: 687364 - RNA, 23 nt, Human
cgaaaaaaacaaaaccacaaccc

SEQ ID NO: 687365 - RNA, 27 nt, Human
cgaaaaaaacaaaaccacaaccccauu

SEQ ID NO: 687366 - RNA, 22 nt, Human
cgaaaucgaaaaaaacaaaacc

SEQ ID NO: 687367 - RNA, 18 nt, Human
cuccuacaaacuggagag

SEQ ID NO: 687368 - RNA, 18 nt, Human
gaccgcgcggggcacagc

SEQ ID NO: 687369 - RNA, 18 nt, Human
gagaaaaaaaagagaaua

SEQ ID NO: 687370 - RNA, 18 nt, Human
ggaucugucggcaucugu

SEQ ID NO: 687371 - RNA, 21 nt, Human
guaaaaccuguugguuucagc

SEQ ID NO: 687372 - RNA, 21 nt, Human
uaaacaaaaacucucacgugc

SEQ ID NO: 687373 - RNA, 22 nt, Human
uaaacaaaaacucucacgugcu

SEQ ID NO: 687374 - RNA, 25 nt, Human
uaaacaaaaacucucacgugcuuga

SEQ ID NO: 687375 - RNA, 21 nt, Human
uaacuucucccaaagggugac

SEQ ID NO: 687376 - RNA, 28 nt, Human
uaagauaaaacuagaucuuucaacuugg

SEQ ID NO: 687377 - RNA, 25 nt, Human
uacaaagaaggcaaacuaagauaaa

SEQ ID NO: 687378 - RNA, 21 nt, Human
uagaaaaagguuacaaaguaa

SEQ ID NO: 687379 - RNA, 21 nt, Human
uagcacuaguuuaggcauggg

SEQ ID NO: 687380 - RNA, 23 nt, Human
uauauaaauguaagguuuauaua

SEQ ID NO: 687381 - RNA, 23 nt, Human
uaucuuuuaaacaaaaacucuca

SEQ ID NO: 687382 - RNA, 22 nt, Human
uauguacaucccauugcauaca

SEQ ID NO: 687383 - RNA, 21 nt, Human
ucaggcacuuacgaaacacga

SEQ ID NO: 687384 - RNA, 23 nt, Human
uccacacaguagagaaaugaagu

SEQ ID NO: 687385 - RNA, 21 nt, Human
uccagaagaaaacuuccuaag

SEQ ID NO: 687386 - RNA, 19 nt, Human
ucccuuuccuuucuuaacc

SEQ ID NO: 687387 - RNA, 21 nt, Human
uccuuucuuaaccuauccucc

SEQ ID NO: 687388 - RNA, 19 nt, Human
ucucauaauguuuauugcu

SEQ ID NO: 687389 - RNA, 18 nt, Human
ucucccaaagggugacaa

SEQ ID NO: 687390 - RNA, 20 nt, Human
ucucuuaucuuuuaaacaaa

SEQ ID NO: 687391 - RNA, 18 nt, Human
ucugucccuuuccuuucu

SEQ ID NO: 687392 - RNA, 19 nt, Human
ucugucccuuuccuuucuu

SEQ ID NO: 687393 - RNA, 19 nt, Human
ugacaagaauagauguugc

SEQ ID NO: 687394 - RNA, 20 nt, Human
ugcagccuauugcaagacuu

SEQ ID NO: 687395 - RNA, 23 nt, Human
ugcauagaaaaagguuacaaagu

SEQ ID NO: 687396 - RNA, 19 nt, Human
ugccugggggccugcaggc

SEQ ID NO: 687397 - RNA, 23 nt, Human
ugggaucaaaugcaaucacuaac

SEQ ID NO: 687398 - RNA, 22 nt, Human
ugucauuaaacgaaaucgaaaa

SEQ ID NO: 687399 - RNA, 23 nt, Human
uuaccgagcugccuugaaccaaa

SEQ ID NO: 687400 - RNA, 21 nt, Human
uucaaaacaaauauuuaaaag

SEQ ID NO: 687401 - RNA, 19 nt, Human
aagggcccuuuuccccaag

SEQ ID NO: 687402 - RNA, 22 nt, Human
aaggggcagacaggguucccaa

SEQ ID NO: 687403 - RNA, 19 nt, Human
aaugaaagcaaguucaacc

SEQ ID NO: 687404 - RNA, 19 nt, Human
acagaguuuugcugcugcc

SEQ ID NO: 687405 - RNA, 20 nt, Human
acagcuccaggagagcuggg

SEQ ID NO: 687406 - RNA, 21 nt, Human
acgaagcaaagcagaaaaggc

SEQ ID NO: 687407 - RNA, 21 nt, Human
agaaacacaagaugcaagucc

SEQ ID NO: 687408 - RNA, 22 nt, Human
agaccagaacagcuccaggaga

SEQ ID NO: 687409 - RNA, 23 nt, Human
agaccucuuuguagccccugcuc

SEQ ID NO: 687410 - RNA, 19 nt, Human
agagcuguccaaggccugg

SEQ ID NO: 687411 - RNA, 24 nt, Human
agaggaggaggaggaggaggaguu

SEQ ID NO: 687412 - RNA, 20 nt, Human
agauggguuggaggaggagg

SEQ ID NO: 687413 - RNA, 24 nt, Human
agccccugcucaguuacuaucucc

SEQ ID NO: 687414 - RNA, 24 nt, Human
agcgaggcagacacuauguuccag

SEQ ID NO: 687415 - RNA, 18 nt, Human
aggagcagcaggagagga

SEQ ID NO: 687416 - RNA, 23 nt, Human
aggagcagcaggagaggaggagg

SEQ ID NO: 687417 - RNA, 23 nt, Human
aggaggaggaggaggaggaguug

SEQ ID NO: 687418 - RNA, 23 nt, Human
aggcagcacagacgucuggugcu

SEQ ID NO: 687419 - RNA, 21 nt, Human
aggcagugcccuuuuuugggc

SEQ ID NO: 687420 - RNA, 24 nt, Human
aggcuccgcuguucugcugggaac

SEQ ID NO: 687421 - RNA, 30 nt, Human
agggaggaggugggagaaucuucccagggg

SEQ ID NO: 687422 - RNA, 21 nt, Human
auccuuucucuugccccuccu

SEQ ID NO: 687423 - RNA, 23 nt, Human
aucuccucccucuuauccacuuc

SEQ ID NO: 687424 - RNA, 22 nt, Human
caaguccuugaccacagaauca

SEQ ID NO: 687425 - RNA, 23 nt, Human
cacaauaucccagggacaaugaa

SEQ ID NO: 687426 - RNA, 24 nt, Human
caccuuuccuuccacaauauccca

SEQ ID NO: 687427 - RNA, 23 nt, Human
cacgaagcaaagcagaaaaggca

SEQ ID NO: 687428 - RNA, 23 nt, Human
cacuauguuccagccucuuggcg

SEQ ID NO: 687429 - RNA, 23 nt, Human
cacugaccugguaucccaggagc

SEQ ID NO: 687430 - RNA, 21 nt, Human
cacugcaugaccuugaagggc

SEQ ID NO: 687431 - RNA, 23 nt, Human
cacugugcacccaauggggaggg

SEQ ID NO: 687432 - RNA, 18 nt, Human
cagaacagcuccaggaga

SEQ ID NO: 687433 - RNA, 23 nt, Human
cagccugccuuggguccuggugc

SEQ ID NO: 687434 - RNA, 22 nt, Human
caggaucucaggcgcucgaccc

SEQ ID NO: 687435 - RNA, 23 nt, Human
cagucuccccucugccucccucc

SEQ ID NO: 687436 - RNA, 23 nt, Human
ccacagucuccccucugccuccc

SEQ ID NO: 687437 - RNA, 23 nt, Human
ccagccugacaguccuuggcugu

SEQ ID NO: 687438 - RNA, 18 nt, Human
cccaagagguuccucucu

SEQ ID NO: 687439 - RNA, 28 nt, Human
cccacugcaugaccuugaaagguuuucc

SEQ ID NO: 687440 - RNA, 23 nt, Human
ccccaagguuucugcaaacucac

SEQ ID NO: 687441 - RNA, 21 nt, Human
ccccucugcacugugcaccca

SEQ ID NO: 687442 - RNA, 18 nt, Human
ccucucugcgcaccauca

SEQ ID NO: 687443 - RNA, 19 nt, Human
ccuguccccaauccuggga

SEQ ID NO: 687444 - RNA, 18 nt, Human
ccuguccugagugggccc

SEQ ID NO: 687445 - RNA, 21 nt, Human
ccuucuguuaccuccucuguc

SEQ ID NO: 687446 - RNA, 22 nt, Human
cggccccucugcacugugcacc

SEQ ID NO: 687447 - RNA, 22 nt, Human
cggggaaugaaauggcuucuga

SEQ ID NO: 687448 - RNA, 20 nt, Human
cuaaaaugauccccccucuc

SEQ ID NO: 687449 - RNA, 22 nt, Human
cuccccucugccucccuccgga

SEQ ID NO: 687450 - RNA, 25 nt, Human
cucuugccccuccuugcaguuauuu

SEQ ID NO: 687451 - RNA, 25 nt, Human
cuggugcccugcagguuaaagcuuu

SEQ ID NO: 687452 - RNA, 23 nt, Human
cuugcuacugcacaucucagaug

SEQ ID NO: 687453 - RNA, 21 nt, Human
gaaacuggccuuugccuucug

SEQ ID NO: 687454 - RNA, 19 nt, Human
gagaaggagagauggguug

SEQ ID NO: 687455 - RNA, 20 nt, Human
gagaaggagagauggguugg

SEQ ID NO: 687456 - RNA, 24 nt, Human
gagcaggcucugcugggcccccag

SEQ ID NO: 687457 - RNA, 21 nt, Human
gaggaggugggagaaucuucc

SEQ ID NO: 687458 - RNA, 19 nt, Human
gcagccucuggggagggug

SEQ ID NO: 687459 - RNA, 19 nt, Human
gcagccucuggggagggug

SEQ ID NO: 687460 - RNA, 18 nt, Human
gccugccuuggguccugg

SEQ ID NO: 687461 - RNA, 18 nt, Human
gccuuggguccuggugcc

SEQ ID NO: 687462 - RNA, 23 nt, Human
ggaaauguguuucccacagcccc

SEQ ID NO: 687463 - RNA, 22 nt, Human
ggagacaccaggaaggcuuggg

SEQ ID NO: 687464 - RNA, 19 nt, Human
ggaggaggaggaggaguug

SEQ ID NO: 687465 - RNA, 18 nt, Human
ggaggaggagggggccuc

SEQ ID NO: 687466 - RNA, 18 nt, Human
ggaggagggugggagcag

SEQ ID NO: 687467 - RNA, 19 nt, Human
ggaguccugggggaagugc

SEQ ID NO: 687468 - RNA, 20 nt, Human
ggaguccugggggaagugcc

SEQ ID NO: 687469 - RNA, 22 nt, Human
ggaugcaaaccaggcagcacag

SEQ ID NO: 687470 - RNA, 19 nt, Human
gggcaccuggagucacuug

SEQ ID NO: 687471 - RNA, 21 nt, Human
gggcaggagaggggucugggc

SEQ ID NO: 687472 - RNA, 19 nt, Human
gggcgggguggugaagggg

SEQ ID NO: 687473 - RNA, 21 nt, Human
ggggcgggguggugaaggggc

SEQ ID NO: 687474 - RNA, 21 nt, Human
ggguuggaggaggagggggcc

SEQ ID NO: 687475 - RNA, 24 nt, Human
ggugugcagagggcaggagagggg

SEQ ID NO: 687476 - RNA, 23 nt, Human
gucugucuuuucaaaagagcuuu

SEQ ID NO: 687477 - RNA, 21 nt, Human
gugcagagggcaggagagggg

SEQ ID NO: 687478 - RNA, 21 nt, Human
guuaccuccucugucccuguc

SEQ ID NO: 687479 - RNA, 19 nt, Human
uaccaggccagcugugugc

SEQ ID NO: 687480 - RNA, 22 nt, Human
uagaaacacaagaugcaagucc

SEQ ID NO: 687481 - RNA, 23 nt, Human
uaggaguccugggggaagugcca

SEQ ID NO: 687482 - RNA, 18 nt, Human
uaucuaaccaguguggaa

SEQ ID NO: 687483 - RNA, 19 nt, Human
ucaaagggaggagguggga

SEQ ID NO: 687484 - RNA, 22 nt, Human
ucagugagagggugggugucug

SEQ ID NO: 687485 - RNA, 23 nt, Human
ucagugagagggugggugucugc

SEQ ID NO: 687486 - RNA, 23 nt, Human
ucagugugaugguguggcccaag

SEQ ID NO: 687487 - RNA, 20 nt, Human
uccuugaccacagaaucaga

SEQ ID NO: 687488 - RNA, 18 nt, Human
uccuuggcuguuccagca

SEQ ID NO: 687489 - RNA, 22 nt, Human
uccuuggggcgggguggugaag

SEQ ID NO: 687490 - RNA, 24 nt, Human
ucuaccacagucuccccucugccu

SEQ ID NO: 687491 - RNA, 20 nt, Human
ucuccaggccuuggcugugg

SEQ ID NO: 687492 - RNA, 26 nt, Human
ucucuccuugaggagucugucuuuuc

SEQ ID NO: 687493 - RNA, 27 nt, Human
ucugagaccagaacagcuccaggagag

SEQ ID NO: 687494 - RNA, 18 nt, Human
ucugagcagagccagcuc

SEQ ID NO: 687495 - RNA, 22 nt, Human
ucugcugggcccccagucucca

SEQ ID NO: 687496 - RNA, 19 nt, Human
ucugucccuguccccaauc

SEQ ID NO: 687497 - RNA, 20 nt, Human
ucuguuaccuccucuguccc

SEQ ID NO: 687498 - RNA, 24 nt, Human
ucuguucaggugagaaauggaacc

SEQ ID NO: 687499 - RNA, 19 nt, Human
ucuugccccuccuugcagu

SEQ ID NO: 687500 - RNA, 20 nt, Human
ugaccugguaucccaggagc

SEQ ID NO: 687501 - RNA, 24 nt, Human
ugagaaauggaaccaagccucuga

SEQ ID NO: 687502 - RNA, 24 nt, Human
ugagaaggagagauggguuggagg

SEQ ID NO: 687503 - RNA, 22 nt, Human
ugagcagagccagcucugugga

SEQ ID NO: 687504 - RNA, 19 nt, Human
ugaggacacccugucacag

SEQ ID NO: 687505 - RNA, 22 nt, Human
ugccugcugcuggugugcagag

SEQ ID NO: 687506 - RNA, 23 nt, Human
ugcugaaucccaagagguuccuc

SEQ ID NO: 687507 - RNA, 21 nt, Human
ugcugggaggagggugggagc

SEQ ID NO: 687508 - RNA, 22 nt, Human
uggaaccaagccucugagacca

SEQ ID NO: 687509 - RNA, 19 nt, Human
uggaggaggagggggccuc

SEQ ID NO: 687510 - RNA, 25 nt, Human
uggaggaggagggggccucugaugg

SEQ ID NO: 687511 - RNA, 22 nt, Human
uggccuaggguggagccgggga

SEQ ID NO: 687512 - RNA, 19 nt, Human
uggcugugguggagaaagg

SEQ ID NO: 687513 - RNA, 22 nt, Human
ugggaaggggcagacaggguuc

SEQ ID NO: 687514 - RNA, 23 nt, Human
ugggaaggggcagacaggguucc

SEQ ID NO: 687515 - RNA, 24 nt, Human
ugggaggagggugggagcaggcuc

SEQ ID NO: 687516 - RNA, 21 nt, Human
ugggauaacagugagaaggag

SEQ ID NO: 687517 - RNA, 18 nt, Human
ugggcccccagucuccag

SEQ ID NO: 687518 - RNA, 21 nt, Human
ugggcuccugguaaaagaacc

SEQ ID NO: 687519 - RNA, 19 nt, Human
uggguccuggugcccugca

SEQ ID NO: 687520 - RNA, 21 nt, Human
uggguuggaggaggagggggc

SEQ ID NO: 687521 - RNA, 23 nt, Human
ugguuccaucaaagggaggaggu

SEQ ID NO: 687522 - RNA, 18 nt, Human
uguaagacgugggggcug

SEQ ID NO: 687523 - RNA, 20 nt, Human
uguccagccugacaguccuu

SEQ ID NO: 687524 - RNA, 18 nt, Human
ugucugggagagcugucc

SEQ ID NO: 687525 - RNA, 20 nt, Human
ugugaugguguggcccaagg

SEQ ID NO: 687526 - RNA, 19 nt, Human
uuucagucuguggagucuc

SEQ ID NO: 687527 - RNA, 18 nt, Human
uuucccacagccccacua

SEQ ID NO: 687528 - RNA, 22 nt, Human
uuuguagccccugcucaguuac

SEQ ID NO: 687529 - RNA, 22 nt, Human
uuuuuuuuuuuuuuuuuuccag

SEQ ID NO: 687530 - RNA, 19 nt, Human
caguacuugaaaaaugaaa

SEQ ID NO: 687531 - RNA, 22 nt, Human
gcuuugaaucucgugccgaauu

SEQ ID NO: 687532 - RNA, 20 nt, Human
uaaaacaguacuugaaaaau

SEQ ID NO: 687533 - RNA, 20 nt, Human
uggugguguugcuuugaauc

SEQ ID NO: 687534 - RNA, 24 nt, Human
uucagugguggugguguugcuuuu

SEQ ID NO: 687535 - RNA, 24 nt, Human
aaacacggcucgcgcccagcaucg

SEQ ID NO: 687536 - RNA, 21 nt, Human
aagaacugcuuuacacccuuc

SEQ ID NO: 687537 - RNA, 20 nt, Human
aagaugagccucagccaccu

SEQ ID NO: 687538 - RNA, 20 nt, Human
accucaggugcccaggcagc

SEQ ID NO: 687539 - RNA, 18 nt, Human
agaacgugcagaagccuc

SEQ ID NO: 687540 - RNA, 20 nt, Human
agagugccgagacccugcua

SEQ ID NO: 687541 - RNA, 22 nt, Human
agcggggggggacagcaggggu

SEQ ID NO: 687542 - RNA, 23 nt, Human
agcggggggggacagcaggggug

SEQ ID NO: 687543 - RNA, 22 nt, Human
agcgggggggggacagcggggg

SEQ ID NO: 687544 - RNA, 23 nt, Human
agcgggggggggacagcgggggu

SEQ ID NO: 687545 - RNA, 23 nt, Human
agcuggagaggcagagaaggaag

SEQ ID NO: 687546 - RNA, 24 nt, Human
aggcggugaugagaggcucugagc

SEQ ID NO: 687547 - RNA, 22 nt, Human
aggcguuucauucuucuucucg

SEQ ID NO: 687548 - RNA, 20 nt, Human
agggacagcggggggacaac

SEQ ID NO: 687549 - RNA, 20 nt, Human
agguggacagcaagggggac

SEQ ID NO: 687550 - RNA, 21 nt, Human
auacaggcguuucauucuucu

SEQ ID NO: 687551 - RNA, 22 nt, Human
caaagaugagccucagccaccu

SEQ ID NO: 687552 - RNA, 18 nt, Human
caacaggggggacagcgg

SEQ ID NO: 687553 - RNA, 19 nt, Human
cacguuuuccaccaugugc

SEQ ID NO: 687554 - RNA, 23 nt, Human
cacucuggcugcucggucgggag

SEQ ID NO: 687555 - RNA, 18 nt, Human
cacugcucccucccagcu

SEQ ID NO: 687556 - RNA, 22 nt, Human
cacugcucccucccagcuccca

SEQ ID NO: 687557 - RNA, 24 nt, Human
cacugcucccucccagcucccacc

SEQ ID NO: 687558 - RNA, 26 nt, Human
cacugugugacucggccacgcuggcu

SEQ ID NO: 687559 - RNA, 18 nt, Human
cagcaagggggacagcgg

SEQ ID NO: 687560 - RNA, 21 nt, Human
cagcaucgccccaccgugcag

SEQ ID NO: 687561 - RNA, 18 nt, Human
cagcggggcggccuggcc

SEQ ID NO: 687562 - RNA, 23 nt, Human
cagcucccacugcagcccugcuu

SEQ ID NO: 687563 - RNA, 22 nt, Human
cagggcacuuccccggucuuga

SEQ ID NO: 687564 - RNA, 20 nt, Human
caucuucccauggaagaucc

SEQ ID NO: 687565 - RNA, 22 nt, Human
ccacgacggggagcaaagggga

SEQ ID NO: 687566 - RNA, 19 nt, Human
ccaguuaacaacauauccc

SEQ ID NO: 687567 - RNA, 23 nt, Human
cccaccgugcagugagcggcccu

SEQ ID NO: 687568 - RNA, 21 nt, Human
cccagauguauugagucagaa

SEQ ID NO: 687569 - RNA, 23 nt, Human
cccuuuguccuuucagcaugcca

SEQ ID NO: 687570 - RNA, 20 nt, Human
ccucaaagaugagccucagc

SEQ ID NO: 687571 - RNA, 19 nt, Human
ccucagccaccucaggugc

SEQ ID NO: 687572 - RNA, 22 nt, Human
ccuccgucccuuuguccuuuca

SEQ ID NO: 687573 - RNA, 23 nt, Human
ccugcguccucuucacccaggag

SEQ ID NO: 687574 - RNA, 22 nt, Human
ccuggcgggcaucgacaggccc

SEQ ID NO: 687575 - RNA, 21 nt, Human
cgcccacauucagucuggacc

SEQ ID NO: 687576 - RNA, 18 nt, Human
cgcccagcaucgccccac

SEQ ID NO: 687577 - RNA, 23 nt, Human
cgucaggggagaccuggggcggc

SEQ ID NO: 687578 - RNA, 19 nt, Human
cguucugugucagaguuuc

SEQ ID NO: 687579 - RNA, 23 nt, Human
cucaaagaugagccucagccacc

SEQ ID NO: 687580 - RNA, 22 nt, Human
cucagaugaccaagugacuggg

SEQ ID NO: 687581 - RNA, 23 nt, Human
cucgugauaauugagcuuccaga

SEQ ID NO: 687582 - RNA, 21 nt, Human
cugacaccaaauuccacaggu

SEQ ID NO: 687583 - RNA, 18 nt, Human
cugcagcccugcuugcug

SEQ ID NO: 687584 - RNA, 21 nt, Human
cugcugaacuggcaccugugu

SEQ ID NO: 687585 - RNA, 20 nt, Human
cugcugggccccauggaugu

SEQ ID NO: 687586 - RNA, 22 nt, Human
cuguguccacguugggcguucu

SEQ ID NO: 687587 - RNA, 23 nt, Human
cuugcugugggggacccuucccg

SEQ ID NO: 687588 - RNA, 19 nt, Human
gacagcggggcggccuggc

SEQ ID NO: 687589 - RNA, 24 nt, Human
gacagcggggggggacagcagggg

SEQ ID NO: 687590 - RNA, 20 nt, Human
gacaggcugguggcuggggc

SEQ ID NO: 687591 - RNA, 20 nt, Human
gacggggagcaaaggggaug

SEQ ID NO: 687592 - RNA, 24 nt, Human
gacuuucuguuucuuaaauacuuu

SEQ ID NO: 687593 - RNA, 18 nt, Human
gagagaaauguuugcagu

SEQ ID NO: 687594 - RNA, 26 nt, Human
gagccgaggcacaggcagcaugaaaa

SEQ ID NO: 687595 - RNA, 23 nt, Human
gaggcacaggcagcaugaaaaca

SEQ ID NO: 687596 - RNA, 18 nt, Human
gagggauaguggggacag

SEQ ID NO: 687597 - RNA, 18 nt, Human
gcagcaugaaaacagucc

SEQ ID NO: 687598 - RNA, 20 nt, Human
gccuccgucccuuuguccuu

SEQ ID NO: 687599 - RNA, 21 nt, Human
gcggccccggggagaggccca

SEQ ID NO: 687600 - RNA, 19 nt, Human
gcucagaugaccaagugac

SEQ ID NO: 687601 - RNA, 20 nt, Human
gcuuucggggucacucuggc

SEQ ID NO: 687602 - RNA, 18 nt, Human
ggacaacaggggggacag

SEQ ID NO: 687603 - RNA, 23 nt, Human
ggacagcggggggacaacagggg

SEQ ID NO: 687604 - RNA, 21 nt, Human
ggacaggcugguggcuggggc

SEQ ID NO: 687605 - RNA, 20 nt, Human
ggcaucgacaggcccgggcc

SEQ ID NO: 687606 - RNA, 22 nt, Human
ggcgccuuucaccgaagccggg

SEQ ID NO: 687607 - RNA, 21 nt, Human
gggacagcggggcggccuggc

SEQ ID NO: 687608 - RNA, 20 nt, Human
gggacagcggggggggacag

SEQ ID NO: 687609 - RNA, 21 nt, Human
gggacagcgggggggggacag

SEQ ID NO: 687610 - RNA, 22 nt, Human
gggacagcgggggggggacagc

SEQ ID NO: 687611 - RNA, 22 nt, Human
ggggacagcggggggggacagc

SEQ ID NO: 687612 - RNA, 23 nt, Human
ggggacagcgggggugugacagc

SEQ ID NO: 687613 - RNA, 18 nt, Human
ggggcagagcugcggggg

SEQ ID NO: 687614 - RNA, 24 nt, Human
gggggacagcagggguggacagag

SEQ ID NO: 687615 - RNA, 19 nt, Human
ggugugacagcggggggga

SEQ ID NO: 687616 - RNA, 18 nt, Human
guaaaaugccuccguccc

SEQ ID NO: 687617 - RNA, 23 nt, Human
uaaaauguuucccaaacauauga

SEQ ID NO: 687618 - RNA, 19 nt, Human
uaaccaggauauacaggcg

SEQ ID NO: 687619 - RNA, 20 nt, Human
uaaccaggauauacaggcgu

SEQ ID NO: 687620 - RNA, 22 nt, Human
uaacggguguuucuuucagaaa

SEQ ID NO: 687621 - RNA, 18 nt, Human
uaaguugucaccggccca

SEQ ID NO: 687622 - RNA, 20 nt, Human
uauuauguacauuuacaugu

SEQ ID NO: 687623 - RNA, 22 nt, Human
ucacaucuucccauggaagauc

SEQ ID NO: 687624 - RNA, 20 nt, Human
ucagugcgcgucaccagcug

SEQ ID NO: 687625 - RNA, 21 nt, Human
uccccggucuugacggucacu

SEQ ID NO: 687626 - RNA, 18 nt, Human
ucccugggggcgcgacuu

SEQ ID NO: 687627 - RNA, 28 nt, Human
ucgcgcccagcaucgccccaccgugcag

SEQ ID NO: 687628 - RNA, 20 nt, Human
ucugugucagaguuuccugg

SEQ ID NO: 687629 - RNA, 20 nt, Human
ugacaccaaauuccacaggu

SEQ ID NO: 687630 - RNA, 20 nt, Human
ugacucggccacgcuggcag

SEQ ID NO: 687631 - RNA, 19 nt, Human
ugagccgaggcacaggcag

SEQ ID NO: 687632 - RNA, 19 nt, Human
ugagccucagccaccucag

SEQ ID NO: 687633 - RNA, 18 nt, Human
ugagggcaggcacugugu

SEQ ID NO: 687634 - RNA, 20 nt, Human
ugcagcccugcuugcuggag

SEQ ID NO: 687635 - RNA, 18 nt, Human
ugccuccgucccuuuguc

SEQ ID NO: 687636 - RNA, 21 nt, Human
ugcgaccugcguccucuucac

SEQ ID NO: 687637 - RNA, 22 nt, Human
ugcugggccccauggauguccu

SEQ ID NO: 687638 - RNA, 25 nt, Human
ugcuuugcucccaaaguucucuaaa

SEQ ID NO: 687639 - RNA, 18 nt, Human
uggcaggugcacugcucc

SEQ ID NO: 687640 - RNA, 20 nt, Human
uggcugcagugucacggggg

SEQ ID NO: 687641 - RNA, 21 nt, Human
uggcugcagugucacgggggc

SEQ ID NO: 687642 - RNA, 21 nt, Human
ugggcguucugugucagaguu

SEQ ID NO: 687643 - RNA, 20 nt, Human
uggggacaggcugguggcug

SEQ ID NO: 687644 - RNA, 22 nt, Human
ugggugugggcgucaggggaga

SEQ ID NO: 687645 - RNA, 24 nt, Human
ugggugugggcgucaggggagacc

SEQ ID NO: 687646 - RNA, 18 nt, Human
uggucaccacagggcacu

SEQ ID NO: 687647 - RNA, 21 nt, Human
ugguggcuggggccggacaca

SEQ ID NO: 687648 - RNA, 24 nt, Human
ugguucugucacaucuucccaugg

SEQ ID NO: 687649 - RNA, 24 nt, Human
ugucagaguuuccuggcuucccug

SEQ ID NO: 687650 - RNA, 21 nt, Human
ugugacagcgggggggacagc

SEQ ID NO: 687651 - RNA, 22 nt, Human
uuuuaugaaucguguauguucu

SEQ ID NO: 687652 - RNA, 19 nt, Human
aacauaaagagccauauuu

SEQ ID NO: 687653 - RNA, 19 nt, Human
aaccagugccugcuguccc

SEQ ID NO: 687654 - RNA, 25 nt, Human
acuuucugcuuucucuuucccaucu

SEQ ID NO: 687655 - RNA, 21 nt, Human
caaaccccaaaguuacugaga

SEQ ID NO: 687656 - RNA, 21 nt, Human
caacauaaagagccauauuua

SEQ ID NO: 687657 - RNA, 18 nt, Human
cacaggaagagaggggag

SEQ ID NO: 687658 - RNA, 21 nt, Human
caccuccucugcacaccgcuc

SEQ ID NO: 687659 - RNA, 24 nt, Human
cacggacggacucaacggcgacca

SEQ ID NO: 687660 - RNA, 25 nt, Human
cacugauacugcauugccuguuuug

SEQ ID NO: 687661 - RNA, 27 nt, Human
cagcccguugaccacaucuccagcugc

SEQ ID NO: 687662 - RNA, 20 nt, Human
cagcccucucccugcagucc

SEQ ID NO: 687663 - RNA, 19 nt, Human
cagcuccccggggacuccu

SEQ ID NO: 687664 - RNA, 23 nt, Human
ccacaucuccagcugccucggcc

SEQ ID NO: 687665 - RNA, 19 nt, Human
ccccaugaaucuccuccuc

SEQ ID NO: 687666 - RNA, 20 nt, Human
ccccggggacuccucgcagg

SEQ ID NO: 687667 - RNA, 24 nt, Human
cccgcugugucccgccuuuccucc

SEQ ID NO: 687668 - RNA, 21 nt, Human
ccucccuucccgcuguguccc

SEQ ID NO: 687669 - RNA, 20 nt, Human
ccugcagucccagcaccaag

SEQ ID NO: 687670 - RNA, 19 nt, Human
ccuuuccuccuggcgguug

SEQ ID NO: 687671 - RNA, 19 nt, Human
cgcugugccuaaccagugc

SEQ ID NO: 687672 - RNA, 19 nt, Human
cuaaauacuuaccugugca

SEQ ID NO: 687673 - RNA, 23 nt, Human
cucacagcccucucccugcaguc

SEQ ID NO: 687674 - RNA, 22 nt, Human
cuccagcugccucggccccagc

SEQ ID NO: 687675 - RNA, 23 nt, Human
cucccugcagucccagcaccaag

SEQ ID NO: 687676 - RNA, 22 nt, Human
cugcacaccgcucccuguuccc

SEQ ID NO: 687677 - RNA, 21 nt, Human
cuggaucaagcucugugggca

SEQ ID NO: 687678 - RNA, 21 nt, Human
cuguccccaugaaucuccucc

SEQ ID NO: 687679 - RNA, 19 nt, Human
cuuccucacagcccucucc

SEQ ID NO: 687680 - RNA, 21 nt, Human
cuucuggaucaagcucugugg

SEQ ID NO: 687681 - RNA, 25 nt, Human
gagcuacaacacuuacaaaccccaa

SEQ ID NO: 687682 - RNA, 22 nt, Human
gcauugccuguuuugucucuua

SEQ ID NO: 687683 - RNA, 19 nt, Human
gccuaaccagugccugcug

SEQ ID NO: 687684 - RNA, 20 nt, Human
gcuacaacacuuacaaaccc

SEQ ID NO: 687685 - RNA, 21 nt, Human
gggcauagcaggucauuuaaa

SEQ ID NO: 687686 - RNA, 21 nt, Human
gugaggugggggucaccacag

SEQ ID NO: 687687 - RNA, 26 nt, Human
uaaaaucaguuaaaaauaacaugugu

SEQ ID NO: 687688 - RNA, 26 nt, Human
uaaagagcacauucuugagauuguuc

SEQ ID NO: 687689 - RNA, 24 nt, Human
uaaccagugccugcuguccccaug

SEQ ID NO: 687690 - RNA, 22 nt, Human
uaaccgacacuaugagcuacaa

SEQ ID NO: 687691 - RNA, 25 nt, Human
uaaccgacacuaugagcuacaacac

SEQ ID NO: 687692 - RNA, 19 nt, Human
uccacagcuggugccaaga

SEQ ID NO: 687693 - RNA, 18 nt, Human
ucccgccuuuccuccugg

SEQ ID NO: 687694 - RNA, 19 nt, Human
ucccuguucccugcugggu

SEQ ID NO: 687695 - RNA, 19 nt, Human
ucugcuaggauccaacuca

SEQ ID NO: 687696 - RNA, 19 nt, Human
ugaccacaucuccagcugc

SEQ ID NO: 687697 - RNA, 23 nt, Human
ugcauugccuguuuugucucuua

SEQ ID NO: 687698 - RNA, 18 nt, Human
ugucccgccuuuccuccu

SEQ ID NO: 687699 - RNA, 23 nt, Human
ugugccuaaccagugccugcugu

SEQ ID NO: 687700 - RNA, 19 nt, Human
uguuuugucucuuaauuga

SEQ ID NO: 687701 - RNA, 25 nt, Human
uucaaaucaacaucggccagccugc

SEQ ID NO: 687702 - RNA, 20 nt, Human
uucccgggcaggccaccucc

SEQ ID NO: 687703 - RNA, 21 nt, Human
uugaccacaucuccagcugcc

SEQ ID NO: 687704 - RNA, 19 nt, Human
uuguaagugaggugggggu

SEQ ID NO: 687705 - RNA, 22 nt, Human
uuuuuguaagugaggugggggu

SEQ ID NO: 687706 - RNA, 20 nt, Human
aaaaagacaaaaaacauagc

SEQ ID NO: 687707 - RNA, 20 nt, Human
aaaacauaguaaaaagacaa

SEQ ID NO: 687708 - RNA, 22 nt, Human
aaaaugaaccacccuuaaagaa

SEQ ID NO: 687709 - RNA, 30 nt, Human
aaacauaguaaaaagacaaaaaacauagcc

SEQ ID NO: 687710 - RNA, 25 nt, Human
aacaagaaacugaagaaacauucac

SEQ ID NO: 687711 - RNA, 19 nt, Human
aacugccuuuuauuuccca

SEQ ID NO: 687712 - RNA, 20 nt, Human
aaggucagagaaaaugaacc

SEQ ID NO: 687713 - RNA, 18 nt, Human
agaaacugaagaaacauu

SEQ ID NO: 687714 - RNA, 20 nt, Human
aggaggaaaggguuuaaaaa

SEQ ID NO: 687715 - RNA, 27 nt, Human
aggaggaaaggguuuaaaaauuagaga

SEQ ID NO: 687716 - RNA, 22 nt, Human
agugaaauuaagaaaaaagucc

SEQ ID NO: 687717 - RNA, 20 nt, Human
aguuuuuucuuuuucuuuuc

SEQ ID NO: 687718 - RNA, 21 nt, Human
auuuuucaccuaaacuaccua

SEQ ID NO: 687719 - RNA, 24 nt, Human
caaccaaagccaaaauaaaaggga

SEQ ID NO: 687720 - RNA, 26 nt, Human
caagaacagaacauuucuuaggacuc

SEQ ID NO: 687721 - RNA, 21 nt, Human
cacaaccaaagccaaaauaaa

SEQ ID NO: 687722 - RNA, 21 nt, Human
cacaacucaaguguucuccaa

SEQ ID NO: 687723 - RNA, 22 nt, Human
ccaaaaccuucacaacucaagu

SEQ ID NO: 687724 - RNA, 28 nt, Human
ccacccuuaaagacacaaccuugggaaa

SEQ ID NO: 687725 - RNA, 28 nt, Human
cccaaaaccuucacaacucaaguguucu

SEQ ID NO: 687726 - RNA, 22 nt, Human
ccugacacucgggggccucggc

SEQ ID NO: 687727 - RNA, 24 nt, Human
cgaaaaacauaguaaaaagacaaa

SEQ ID NO: 687728 - RNA, 19 nt, Human
cggcagaugagccccggcu

SEQ ID NO: 687729 - RNA, 23 nt, Human
cggcgaacucuccucagcgcggc

SEQ ID NO: 687730 - RNA, 28 nt, Human
cgggcggcgacggcggcgaacucuccuc

SEQ ID NO: 687731 - RNA, 19 nt, Human
cucaaguguucuccaagug

SEQ ID NO: 687732 - RNA, 23 nt, Human
cuuccaaaaugcauuucuguaaa

SEQ ID NO: 687733 - RNA, 20 nt, Human
gaaaaacauaguaaaaagac

SEQ ID NO: 687734 - RNA, 24 nt, Human
gaaaggguuuaaaaauuagagaaa

SEQ ID NO: 687735 - RNA, 20 nt, Human
gaaaucacaaccaaagccaa

SEQ ID NO: 687736 - RNA, 22 nt, Human
gaggaaaggguuuaaaaauuag

SEQ ID NO: 687737 - RNA, 25 nt, Human
gaguuuuuaccacuguucucagcuu

SEQ ID NO: 687738 - RNA, 18 nt, Human
gcaaugcccuuuccucau

SEQ ID NO: 687739 - RNA, 19 nt, Human
gcggcagaugagccccggc

SEQ ID NO: 687740 - RNA, 18 nt, Human
gcggcggcggcagaugag

SEQ ID NO: 687741 - RNA, 22 nt, Human
ggggccucggcggacgcagcgg

SEQ ID NO: 687742 - RNA, 24 nt, Human
guuuuacaguauuuuucucuucca

SEQ ID NO: 687743 - RNA, 22 nt, Human
uaaaaagacaaaaaacauagca

SEQ ID NO: 687744 - RNA, 18 nt, Human
uaagaaaaaaguccuaau

SEQ ID NO: 687745 - RNA, 22 nt, Human
uaagaaaaaaguccuaauucuc

SEQ ID NO: 687746 - RNA, 23 nt, Human
uaguaaaaagacaaaaaacauag

SEQ ID NO: 687747 - RNA, 21 nt, Human
uaugcagaugcaaccguugcu

SEQ ID NO: 687748 - RNA, 19 nt, Human
uccaaaaugcauuucugua

SEQ ID NO: 687749 - RNA, 18 nt, Human
ucuccaagugcaaauguc

SEQ ID NO: 687750 - RNA, 22 nt, Human
ucuccucagcgcggcggcggcg

SEQ ID NO: 687751 - RNA, 22 nt, Human
ucuguaaacgaguuuuuaccac

SEQ ID NO: 687752 - RNA, 24 nt, Human
ugaaaucacaaccaaagccaaaau

SEQ ID NO: 687753 - RNA, 22 nt, Human
ugcacuuacggacuuaaaaauc

SEQ ID NO: 687754 - RNA, 20 nt, Human
ugggguggaugcccaaaacc

SEQ ID NO: 687755 - RNA, 19 nt, Human
uguuauauucuccuagaca

SEQ ID NO: 687756 - RNA, 19 nt, Human
uuaguuuuuucuuuuucuu

SEQ ID NO: 687757 - RNA, 24 nt, Human
uuccaguuaaguccuaugucuuuu

SEQ ID NO: 687758 - RNA, 22 nt, Human
uucucagcuuugaaaucaaauu

SEQ ID NO: 687759 - RNA, 18 nt, Human
uuuuuuuuuuuuuuuuug

SEQ ID NO: 687760 - RNA, 28 nt, Human
aaaaaacucgacucauaaaaauacuagc

SEQ ID NO: 687761 - RNA, 19 nt, Human
aagaaaaaacaguuuagaa

SEQ ID NO: 687762 - RNA, 20 nt, Human
acuccugggagaagaugcuc

SEQ ID NO: 687763 - RNA, 24 nt, Human
agaagaugcucagcagaguggccu

SEQ ID NO: 687764 - RNA, 19 nt, Human
agcaaacacacagcauagg

SEQ ID NO: 687765 - RNA, 23 nt, Human
aggcggcacagacacuaggcacu

SEQ ID NO: 687766 - RNA, 23 nt, Human
augaauuuuauacugaaacagaa

SEQ ID NO: 687767 - RNA, 21 nt, Human
caauggaacuaauacuuucaa

SEQ ID NO: 687768 - RNA, 23 nt, Human
caauggaacuaauacuuucaaau

SEQ ID NO: 687769 - RNA, 22 nt, Human
caauugcuuccgaaguaugaug

SEQ ID NO: 687770 - RNA, 25 nt, Human
cagcagaguggccugcgauugacug

SEQ ID NO: 687771 - RNA, 21 nt, Human
cccauaucaucuauucaacau

SEQ ID NO: 687772 - RNA, 22 nt, Human
ccuaaagaaaaaacaguuuaga

SEQ ID NO: 687773 - RNA, 18 nt, Human
ccucccagcuucucuucc

SEQ ID NO: 687774 - RNA, 24 nt, Human
ccucugguaauaacuuucaauugc

SEQ ID NO: 687775 - RNA, 20 nt, Human
cggcacagacacuaggcacu

SEQ ID NO: 687776 - RNA, 20 nt, Human
cguaaagauugaauauagca

SEQ ID NO: 687777 - RNA, 20 nt, Human
cucugcuucagcuuccucag

SEQ ID NO: 687778 - RNA, 20 nt, Human
cugaacuuacucgaguguuu

SEQ ID NO: 687779 - RNA, 23 nt, Human
cuuuuccucccagcuucucuucc

SEQ ID NO: 687780 - RNA, 19 nt, Human
gccagguccaggagcacug

SEQ ID NO: 687781 - RNA, 21 nt, Human
gugugugugugugugugugag

SEQ ID NO: 687782 - RNA, 20 nt, Human
gugugugugugugugugugu

SEQ ID NO: 687783 - RNA, 19 nt, Human
guguucaaauaacauuauu

SEQ ID NO: 687784 - RNA, 20 nt, Human
guuucugguacuccugggag

SEQ ID NO: 687785 - RNA, 18 nt, Human
uaaaaguacacaaaagug

SEQ ID NO: 687786 - RNA, 20 nt, Human
uaaaaguacacaaaagugaa

SEQ ID NO: 687787 - RNA, 22 nt, Human
uaaaauaaacaaauccuugaca

SEQ ID NO: 687788 - RNA, 22 nt, Human
uaauauucaacuucccgaaaga

SEQ ID NO: 687789 - RNA, 23 nt, Human
uaaugcaccccacucagaguuaa

SEQ ID NO: 687790 - RNA, 22 nt, Human
uaauguaaaauaaacaaauccu

SEQ ID NO: 687791 - RNA, 23 nt, Human
uacacaaaagugaauaaauuaaa

SEQ ID NO: 687792 - RNA, 23 nt, Human
uagaacaugccaggaaaccugcu

SEQ ID NO: 687793 - RNA, 24 nt, Human
uaggcaggcugccaucaaggucuu

SEQ ID NO: 687794 - RNA, 19 nt, Human
uaugucagcauggcagggu

SEQ ID NO: 687795 - RNA, 22 nt, Human
uaugucagcauggcaggguggc

SEQ ID NO: 687796 - RNA, 21 nt, Human
ucaagcaauguauauaaguua

SEQ ID NO: 687797 - RNA, 20 nt, Human
ucauuggccagguccaggag

SEQ ID NO: 687798 - RNA, 19 nt, Human
uccacacauguugggacca

SEQ ID NO: 687799 - RNA, 18 nt, Human
uccaccucauuggccagg

SEQ ID NO: 687800 - RNA, 24 nt, Human
ucucuuuuccucccagcuucucuu

SEQ ID NO: 687801 - RNA, 21 nt, Human
ucuuuuccucccagcuucucu

SEQ ID NO: 687802 - RNA, 20 nt, Human
ugccucucucuuuugauuua

SEQ ID NO: 687803 - RNA, 23 nt, Human
ugcuccagguuuauuucuggcac

SEQ ID NO: 687804 - RNA, 21 nt, Human
ugcuucagcuuccucaggcuc

SEQ ID NO: 687805 - RNA, 18 nt, Human
uggcuuuggacuuugugg

SEQ ID NO: 687806 - RNA, 19 nt, Human
ugggagaagaugcucagca

SEQ ID NO: 687807 - RNA, 24 nt, Human
ugguagaaaauaaacaaaguauaa

SEQ ID NO: 687808 - RNA, 18 nt, Human
uguguguguguguaucca

SEQ ID NO: 687809 - RNA, 18 nt, Human
uguguguguguguguauc

SEQ ID NO: 687810 - RNA, 18 nt, Human
ugugugugugugugugug

SEQ ID NO: 687811 - RNA, 18 nt, Human
ugugugugugugugugug

SEQ ID NO: 687812 - RNA, 21 nt, Human
ugugugugugugugugugugu

SEQ ID NO: 687813 - RNA, 23 nt, Human
uguguguguguguguguguguaa

SEQ ID NO: 687814 - RNA, 22 nt, Human
uuaaaaauaaacucuccucaau

SEQ ID NO: 687815 - RNA, 22 nt, Human
uuauuccuaaagaaaaaacagu

SEQ ID NO: 687816 - RNA, 22 nt, Human
uucagcuuccucaggcucugcc

SEQ ID NO: 687817 - RNA, 19 nt, Human
uuccucaggcucugccugg

SEQ ID NO: 687818 - RNA, 23 nt, Human
uuguauaaagugugugugugugu

SEQ ID NO: 687819 - RNA, 31 nt, Human
uuguauaaagugugugugugugugugugugg

SEQ ID NO: 687820 - RNA, 24 nt, Human
uuuguuuaauguaaaauaaacaaa

SEQ ID NO: 687821 - RNA, 19 nt, Human
uuuuucaccacuccauuca

SEQ ID NO: 687822 - RNA, 25 nt, Human
uuuuuuuuuuuuuuuuuuuauuuuu

SEQ ID NO: 687823 - RNA, 24 nt, Human
aaacacaguugaguacauccaugc

SEQ ID NO: 687824 - RNA, 19 nt, Human
aacaagucaaauaaaagca

SEQ ID NO: 687825 - RNA, 20 nt, Human
aagagccccgagcaaagcuc

SEQ ID NO: 687826 - RNA, 22 nt, Human
aagcuccaaucaagagccccga

SEQ ID NO: 687827 - RNA, 18 nt, Human
aaggaaggcggagcucag

SEQ ID NO: 687828 - RNA, 27 nt, Human
aaugcacaaacagaaauuuauauuaaa

SEQ ID NO: 687829 - RNA, 19 nt, Human
acaagucaaauaaaagcac

SEQ ID NO: 687830 - RNA, 23 nt, Human
acaagucaaauaaaagcacugcu

SEQ ID NO: 687831 - RNA, 20 nt, Human
agaaaagaaagcucucucau

SEQ ID NO: 687832 - RNA, 20 nt, Human
agccccgagcaaagcucguu

SEQ ID NO: 687833 - RNA, 25 nt, Human
agcuccaaucaagagccccgagcaa

SEQ ID NO: 687834 - RNA, 18 nt, Human
aggcggagcucaggagug

SEQ ID NO: 687835 - RNA, 21 nt, Human
caaaacaaaggaaggcggagc

SEQ ID NO: 687836 - RNA, 20 nt, Human
cacugcuuucuuuuccuuag

SEQ ID NO: 687837 - RNA, 18 nt, Human
ccucagaaaagaaagcuc

SEQ ID NO: 687838 - RNA, 22 nt, Human
cguuucauaacaucauuaagau

SEQ ID NO: 687839 - RNA, 23 nt, Human
cuucccaaguacaggcguaaaua

SEQ ID NO: 687840 - RNA, 21 nt, Human
gggaacgcgggaagggaagac

SEQ ID NO: 687841 - RNA, 21 nt, Human
uaaaaaaaaguccccagcuuc

SEQ ID NO: 687842 - RNA, 18 nt, Human
uaaaaaguuaagugaaaa

SEQ ID NO: 687843 - RNA, 24 nt, Human
uaaaauucagaguauuaaacacag

SEQ ID NO: 687844 - RNA, 19 nt, Human
uaaccucagaaaagaaagc

SEQ ID NO: 687845 - RNA, 22 nt, Human
uaacuagguggggguauuccug

SEQ ID NO: 687846 - RNA, 19 nt, Human
uacaggcguaaauaugaug

SEQ ID NO: 687847 - RNA, 23 nt, Human
uacauccaugcauacaugacaua

SEQ ID NO: 687848 - RNA, 18 nt, Human
uauccugcugagugaaga

SEQ ID NO: 687849 - RNA, 19 nt, Human
uauuaccaaaauaagagua

SEQ ID NO: 687850 - RNA, 20 nt, Human
ucaaaacaaaggaaggcgga

SEQ ID NO: 687851 - RNA, 20 nt, Human
ugaguacauccaugcauaca

SEQ ID NO: 687852 - RNA, 24 nt, Human
ugcauacaugacauaccgucauca

SEQ ID NO: 687853 - RNA, 25 nt, Human
ugcauacaugacauaccgucaucac

SEQ ID NO: 687854 - RNA, 21 nt, Human
uggaacaagucaaauaaaagc

SEQ ID NO: 687855 - RNA, 18 nt, Human
ugucagaaaugcacaaac

SEQ ID NO: 687856 - RNA, 23 nt, Human
ugugaagguagauagcauugcug

SEQ ID NO: 687857 - RNA, 22 nt, Human
aaaacuagacuaaaauaccuug

SEQ ID NO: 687858 - RNA, 22 nt, Human
aaauaaaugugauaccagaaaa

SEQ ID NO: 687859 - RNA, 24 nt, Human
augcuuggcuugggcucagaggcc

SEQ ID NO: 687860 - RNA, 18 nt, Human
auuucaccugggugcagg

SEQ ID NO: 687861 - RNA, 21 nt, Human
ccuacaugcaaaacagcugug

SEQ ID NO: 687862 - RNA, 19 nt, Human
ccugggugcaggugggcug

SEQ ID NO: 687863 - RNA, 22 nt, Human
cgaagggugauggauuaucauu

SEQ ID NO: 687864 - RNA, 19 nt, Human
cucaaggguggggagaauu

SEQ ID NO: 687865 - RNA, 18 nt, Human
cucacuguaaccuccugg

SEQ ID NO: 687866 - RNA, 18 nt, Human
cucacuguaaccuccugg

SEQ ID NO: 687867 - RNA, 19 nt, Human
cuccuacaugcaaaacagc

SEQ ID NO: 687868 - RNA, 19 nt, Human
cuugugcagaacauauuag

SEQ ID NO: 687869 - RNA, 22 nt, Human
gaaaaugguuacaacucuuugc

SEQ ID NO: 687870 - RNA, 21 nt, Human
ggaugcgaugcuuggcuuggg

SEQ ID NO: 687871 - RNA, 23 nt, Human
ggcccuuuucccuagcaaucuua

SEQ ID NO: 687872 - RNA, 23 nt, Human
gggcaggguggaucucacaaagu

SEQ ID NO: 687873 - RNA, 21 nt, Human
guauauuccacaucaccauca

SEQ ID NO: 687874 - RNA, 23 nt, Human
gugaaguuaagagcaauguuuug

SEQ ID NO: 687875 - RNA, 23 nt, Human
uaaauuggaauccuuaacaucca

SEQ ID NO: 687876 - RNA, 21 nt, Human
uaaccuuuccacuaaggugac

SEQ ID NO: 687877 - RNA, 22 nt, Human
uaaccuuuccacuaaggugacu

SEQ ID NO: 687878 - RNA, 24 nt, Human
uaagagcaauguuuugugggcagg

SEQ ID NO: 687879 - RNA, 23 nt, Human
uacgugcaaaucacaggggaugc

SEQ ID NO: 687880 - RNA, 21 nt, Human
uagugggucagugaaugaugu

SEQ ID NO: 687881 - RNA, 18 nt, Human
ucacaaugguggaauguc

SEQ ID NO: 687882 - RNA, 20 nt, Human
ucacaggggaugcgaugcuu

SEQ ID NO: 687883 - RNA, 19 nt, Human
ucaguuaaggcuauuuuua

SEQ ID NO: 687884 - RNA, 18 nt, Human
ucaguugaucagauuggg

SEQ ID NO: 687885 - RNA, 23 nt, Human
ucaucccaaaucgaguugguuac

SEQ ID NO: 687886 - RNA, 21 nt, Human
uccacaucaccaucacaaucu

SEQ ID NO: 687887 - RNA, 18 nt, Human
uccauuuucucugcuaug

SEQ ID NO: 687888 - RNA, 23 nt, Human
ucuccuacaugcaaaacagcugu

SEQ ID NO: 687889 - RNA, 22 nt, Human
ucuuaaggguggggaagauuac

SEQ ID NO: 687890 - RNA, 23 nt, Human
ucuucaguuacuuuaggccaucu

SEQ ID NO: 687891 - RNA, 20 nt, Human
ucuugguuuccaggcucugg

SEQ ID NO: 687892 - RNA, 22 nt, Human
ugaagaaaggggagaugaaguc

SEQ ID NO: 687893 - RNA, 20 nt, Human
uggaaugucaucaguuaagg

SEQ ID NO: 687894 - RNA, 21 nt, Human
ugggcugaguccgaaaagaga

SEQ ID NO: 687895 - RNA, 22 nt, Human
uguuuuguccauuuucucugcu

SEQ ID NO: 687896 - RNA, 18 nt, Human
uuacccugauacaaccgu

SEQ ID NO: 687897 - RNA, 20 nt, Human
uuagucuuuggugcccuaag

SEQ ID NO: 687898 - RNA, 24 nt, Human
uucaccugggugcaggugggcucc

SEQ ID NO: 687899 - RNA, 19 nt, Human
uuccaggcucugguuuucu

SEQ ID NO: 687900 - RNA, 23 nt, Human
uugccuggaauuguggugaagaa

SEQ ID NO: 687901 - RNA, 20 nt, Human
uuuaaccuuuccacuaaggu

SEQ ID NO: 687902 - RNA, 19 nt, Human
aaaauuacaaucaaagggg

SEQ ID NO: 687903 - RNA, 21 nt, Human
aagcuucugagccaggagaag

SEQ ID NO: 687904 - RNA, 21 nt, Human
aggagaaggaaguucacaggu

SEQ ID NO: 687905 - RNA, 19 nt, Human
aggcaggggcgggggucac

SEQ ID NO: 687906 - RNA, 24 nt, Human
aggcaggggcgggggucacaaggu

SEQ ID NO: 687907 - RNA, 19 nt, Human
agggagauagggguggggc

SEQ ID NO: 687908 - RNA, 22 nt, Human
auggcaggcaggggcggggguc

SEQ ID NO: 687909 - RNA, 24 nt, Human
caugcaggucacaggggauaugau

SEQ ID NO: 687910 - RNA, 20 nt, Human
ccaggagaaggaaguucaca

SEQ ID NO: 687911 - RNA, 23 nt, Human
cccuucuauauagaaguaacuug

SEQ ID NO: 687912 - RNA, 19 nt, Human
cggggucggcuggcagcug

SEQ ID NO: 687913 - RNA, 21 nt, Human
cggggucggcuggcagcuggg

SEQ ID NO: 687914 - RNA, 21 nt, Human
gaagggagauagggguggggc

SEQ ID NO: 687915 - RNA, 18 nt, Human
gauucuucacuugcuuca

SEQ ID NO: 687916 - RNA, 23 nt, Human
gcgcgguuggcgggagugcgggg

SEQ ID NO: 687917 - RNA, 20 nt, Human
ggagugcggguucggggucg

SEQ ID NO: 687918 - RNA, 20 nt, Human
ggcaggaaccggcccuuuuc

SEQ ID NO: 687919 - RNA, 20 nt, Human
gggagacuccagcucugggc

SEQ ID NO: 687920 - RNA, 20 nt, Human
gggccguuuuauaggauuug

SEQ ID NO: 687921 - RNA, 21 nt, Human
gggcgggggucacaaggugcu

SEQ ID NO: 687922 - RNA, 24 nt, Human
gggguuguucuauggcaggcaggg

SEQ ID NO: 687923 - RNA, 23 nt, Human
gguggggccguuuuauaggauuu

SEQ ID NO: 687924 - RNA, 22 nt, Human
uacaugcaggucacaggggaua

SEQ ID NO: 687925 - RNA, 18 nt, Human
ucacaaugguggaauguc

SEQ ID NO: 687926 - RNA, 22 nt, Human
ucuauggcaggcaggggcgggg

SEQ ID NO: 687927 - RNA, 24 nt, Human
ucuauggcaggcaggggcgggggu

SEQ ID NO: 687928 - RNA, 27 nt, Human
uggaaugucaucaguuaaggcaggaaa

SEQ ID NO: 687929 - RNA, 23 nt, Human
uggcuuugcuugggcucagaggu

SEQ ID NO: 687930 - RNA, 24 nt, Human
uggcuuugcuugggcucagagguc

SEQ ID NO: 687931 - RNA, 19 nt, Human
uguauacaugcaggucaca

SEQ ID NO: 687932 - RNA, 26 nt, Human
uuaaggcaggaaccggcccuuuucac

SEQ ID NO: 687933 - RNA, 22 nt, Human
uugcgugacaauaaagcuuuuu

SEQ ID NO: 687934 - RNA, 21 nt, Human
uugugauucuucacuugcuuc

SEQ ID NO: 687935 - RNA, 18 nt, Human
aaaauauaccuuaaaagc

SEQ ID NO: 687936 - RNA, 19 nt, Human
acuccgaaacuaaagcagc

SEQ ID NO: 687937 - RNA, 21 nt, Human
aggcagcaggcuggauuuggc

SEQ ID NO: 687938 - RNA, 25 nt, Human
aggcagcaggcuggauuuggccggc

SEQ ID NO: 687939 - RNA, 18 nt, Human
caaacacuccgaaacuaa

SEQ ID NO: 687940 - RNA, 26 nt, Human
cccaugcuacaaaauauaccuuaaaa

SEQ ID NO: 687941 - RNA, 27 nt, Human
cccaugcuacaaaauauaccuuaaaag

SEQ ID NO: 687942 - RNA, 19 nt, Human
ccccgucgccaaacacucc

SEQ ID NO: 687943 - RNA, 20 nt, Human
ccgaaacuaaagcagcagag

SEQ ID NO: 687944 - RNA, 19 nt, Human
cgccaaacacuccgaaacu

SEQ ID NO: 687945 - RNA, 21 nt, Human
cgcugccccgucgccaaacac

SEQ ID NO: 687946 - RNA, 24 nt, Human
gcagcagagcgagaaucucccgga

SEQ ID NO: 687947 - RNA, 19 nt, Human
uaaagcagcagagcgagaa

SEQ ID NO: 687948 - RNA, 21 nt, Human
uguagauugccaacccaugcu

SEQ ID NO: 687949 - RNA, 27 nt, Human
aaaagaaacagaaauaucgguaaaaag

SEQ ID NO: 687950 - RNA, 24 nt, Human
aaaagaccuaaagcucucaaaaua

SEQ ID NO: 687951 - RNA, 22 nt, Human
aaaugccacauucucccugaaa

SEQ ID NO: 687952 - RNA, 26 nt, Human
aaaugccaggguuacagguguaagcc

SEQ ID NO: 687953 - RNA, 19 nt, Human
aacacaaacaaaagauaaa

SEQ ID NO: 687954 - RNA, 21 nt, Human
aacgguuaaaagaaacagaaa

SEQ ID NO: 687955 - RNA, 21 nt, Human
aagaaacaaacuaaacaacua

SEQ ID NO: 687956 - RNA, 18 nt, Human
aaggacaccgccuguaac

SEQ ID NO: 687957 - RNA, 20 nt, Human
aaguaugcugaaggcacugu

SEQ ID NO: 687958 - RNA, 22 nt, Human
acaacuaaaauguucucauccc

SEQ ID NO: 687959 - RNA, 18 nt, Human
acagguguaagccaccgu

SEQ ID NO: 687960 - RNA, 24 nt, Human
accauguugcccuggcuggucucg

SEQ ID NO: 687961 - RNA, 20 nt, Human
accucucuuaaaaggcuagg

SEQ ID NO: 687962 - RNA, 26 nt, Human
agaaacagaaauaucgguaaaaagga

SEQ ID NO: 687963 - RNA, 22 nt, Human
agaaagauucaaaaguuugcua

SEQ ID NO: 687964 - RNA, 24 nt, Human
agacugcuuccuuucaaucaugaa

SEQ ID NO: 687965 - RNA, 22 nt, Human
agagauggagucucgcucuguu

SEQ ID NO: 687966 - RNA, 22 nt, Human
agcgguggcggcucugacuccg

SEQ ID NO: 687967 - RNA, 24 nt, Human
agcucacuccagccggcuccccug

SEQ ID NO: 687968 - RNA, 20 nt, Human
aggaggccagagccggccug

SEQ ID NO: 687969 - RNA, 24 nt, Human
aggcaaucugcccaccuuggccuc

SEQ ID NO: 687970 - RNA, 19 nt, Human
aggcauuuaacauuuggga

SEQ ID NO: 687971 - RNA, 23 nt, Human
agguguaagccaccgugccuggc

SEQ ID NO: 687972 - RNA, 22 nt, Human
aguagagaugggguuucaccau

SEQ ID NO: 687973 - RNA, 18 nt, Human
aguagcugggacuacagg

SEQ ID NO: 687974 - RNA, 19 nt, Human
aguagcugggacuacaggc

SEQ ID NO: 687975 - RNA, 24 nt, Human
aguucaguggcacaaucucggcuc

SEQ ID NO: 687976 - RNA, 21 nt, Human
auagcaauaaaagaaagauuc

SEQ ID NO: 687977 - RNA, 19 nt, Human
augggguuucaccauguug

SEQ ID NO: 687978 - RNA, 25 nt, Human
augggguuucaccauguugcccugg

SEQ ID NO: 687979 - RNA, 22 nt, Human
auugaaacuauuuucacauuug

SEQ ID NO: 687980 - RNA, 18 nt, Human
auuugccuacuuuuccuu

SEQ ID NO: 687981 - RNA, 24 nt, Human
auuuuaguagagaugggguuucac

SEQ ID NO: 687982 - RNA, 25 nt, Human
caaaaagcuguauuccuacaacuaa

SEQ ID NO: 687983 - RNA, 24 nt, Human
caaaaugccaggguuacaggugua

SEQ ID NO: 687984 - RNA, 22 nt, Human
caaaaugucccuaaguuauugu

SEQ ID NO: 687985 - RNA, 22 nt, Human
caagcaauucuccugccucagc

SEQ ID NO: 687986 - RNA, 22 nt, Human
cacacaguuuaggguguccacc

SEQ ID NO: 687987 - RNA, 24 nt, Human
caccauguugcccuggcuggucuc

SEQ ID NO: 687988 - RNA, 27 nt, Human
caccauguugcccuggcuggucucgaa

SEQ ID NO: 687989 - RNA, 21 nt, Human
caccgugccuggccaagacug

SEQ ID NO: 687990 - RNA, 23 nt, Human
cacugcaacuuccgccucucggg

SEQ ID NO: 687991 - RNA, 23 nt, Human
cacuucucccucuguugcucuuu

SEQ ID NO: 687992 - RNA, 22 nt, Human
cacuugguugaaaaacuuugca

SEQ ID NO: 687993 - RNA, 20 nt, Human
cagaucccaaaauuuaaagg

SEQ ID NO: 687994 - RNA, 23 nt, Human
cagcccagacgccgcaguggcgg

SEQ ID NO: 687995 - RNA, 20 nt, Human
cagccuccugaguagcuggg

SEQ ID NO: 687996 - RNA, 22 nt, Human
caggaguggaauuguaucuguc

SEQ ID NO: 687997 - RNA, 22 nt, Human
caggguuacagguguaagccac

SEQ ID NO: 687998 - RNA, 19 nt, Human
cagucggcauucagagucu

SEQ ID NO: 687999 - RNA, 20 nt, Human
caguggcacaaucucggcuc

SEQ ID NO: 688000 - RNA, 24 nt, Human
cauguugcccuggcuggucucgaa

SEQ ID NO: 688001 - RNA, 25 nt, Human
ccaaaaagaccuaaagcucucaaaa

SEQ ID NO: 688002 - RNA, 24 nt, Human
ccaaaaugccaggguuacaggugu

SEQ ID NO: 688003 - RNA, 24 nt, Human
ccaaagcauacuuucaaaauuucu

SEQ ID NO: 688004 - RNA, 23 nt, Human
ccaagcccagcuaacuuuuugua

SEQ ID NO: 688005 - RNA, 26 nt, Human
cccaaaaggaaauuuuuaaacaccau

SEQ ID NO: 688006 - RNA, 25 nt, Human
cccccguagucgcuccaagccccuu

SEQ ID NO: 688007 - RNA, 19 nt, Human
ccccggaaaguuagcgagc

SEQ ID NO: 688008 - RNA, 20 nt, Human
ccccgguggccugacgacgg

SEQ ID NO: 688009 - RNA, 23 nt, Human
ccccugcgagggggccuuccccc

SEQ ID NO: 688010 - RNA, 19 nt, Human
ccccugcgcguccucccgc

SEQ ID NO: 688011 - RNA, 18 nt, Human
cccgcgccgcgccgcugc

SEQ ID NO: 688012 - RNA, 20 nt, Human
cccgcgccgcgccgcugccg

SEQ ID NO: 688013 - RNA, 19 nt, Human
cccguagucgcuccaagcc

SEQ ID NO: 688014 - RNA, 22 nt, Human
cccucuguugcucuuuuucauc

SEQ ID NO: 688015 - RNA, 26 nt, Human
ccgccccugcgcguccucccgccucc

SEQ ID NO: 688016 - RNA, 19 nt, Human
ccgccgagcccgcgccgcg

SEQ ID NO: 688017 - RNA, 24 nt, Human
ccgcugccgccuagcucgccgccc

SEQ ID NO: 688018 - RNA, 20 nt, Human
ccggcagcggccgcauuuuc

SEQ ID NO: 688019 - RNA, 21 nt, Human
ccggcuccccugcgagggggc

SEQ ID NO: 688020 - RNA, 23 nt, Human
ccuaaaauuaugcuucuguuguu

SEQ ID NO: 688021 - RNA, 19 nt, Human
ccuaaaguuucuuuuaaaa

SEQ ID NO: 688022 - RNA, 25 nt, Human
ccuacaacuaauaaaaaaguaugcu

SEQ ID NO: 688023 - RNA, 23 nt, Human
ccucaaaugccacauucucccug

SEQ ID NO: 688024 - RNA, 21 nt, Human
ccucccgccucccuccggcuc

SEQ ID NO: 688025 - RNA, 19 nt, Human
ccucgaacucuuggcuagc

SEQ ID NO: 688026 - RNA, 24 nt, Human
ccucucggguucaagcaauucucc

SEQ ID NO: 688027 - RNA, 19 nt, Human
ccucucuuuccccucuucc

SEQ ID NO: 688028 - RNA, 19 nt, Human
ccucucuuuccccucuucc

SEQ ID NO: 688029 - RNA, 26 nt, Human
ccugacgacggcggcggccgccccuu

SEQ ID NO: 688030 - RNA, 23 nt, Human
ccugaguagcugggacuacaggc

SEQ ID NO: 688031 - RNA, 24 nt, Human
ccugaguagcugggacuacaggcg

SEQ ID NO: 688032 - RNA, 24 nt, Human
ccugccucagccuccugaguagcu

SEQ ID NO: 688033 - RNA, 24 nt, Human
ccuguaacuauaaauucuagcacu

SEQ ID NO: 688034 - RNA, 19 nt, Human
cgagccuccggcagcggcc

SEQ ID NO: 688035 - RNA, 18 nt, Human
cgcccugcgcugucuggg

SEQ ID NO: 688036 - RNA, 18 nt, Human
cgccgcgccgcugccgcc

SEQ ID NO: 688037 - RNA, 22 nt, Human
cgcgacccgggcucggccgcgc

SEQ ID NO: 688038 - RNA, 22 nt, Human
cgcgcgaucccucgcgcccugc

SEQ ID NO: 688039 - RNA, 24 nt, Human
cgcucuguugcccaggcuggagug

SEQ ID NO: 688040 - RNA, 21 nt, Human
cggguucaagcaauucuccug

SEQ ID NO: 688041 - RNA, 24 nt, Human
cuaguuaaaguaguuaaaauuuca

SEQ ID NO: 688042 - RNA, 24 nt, Human
cucacugcaacuuccgccucucgg

SEQ ID NO: 688043 - RNA, 24 nt, Human
cucagccuccugaguagcugggac

SEQ ID NO: 688044 - RNA, 24 nt, Human
cucaggcaaucugcccaccuuggc

SEQ ID NO: 688045 - RNA, 21 nt, Human
cucaucccaaaaagaccuaaa

SEQ ID NO: 688046 - RNA, 20 nt, Human
cucccugaaaccuuacugaa

SEQ ID NO: 688047 - RNA, 20 nt, Human
cuccuccuccuccuccucuu

SEQ ID NO: 688048 - RNA, 24 nt, Human
cucgcucuguugcccaggcuggag

SEQ ID NO: 688049 - RNA, 21 nt, Human
cucucuuuccccucuuccacu

SEQ ID NO: 688050 - RNA, 25 nt, Human
cugaaacacuucucccucuguugcu

SEQ ID NO: 688051 - RNA, 26 nt, Human
cugccucucuuuccccucuuccacuc

SEQ ID NO: 688052 - RNA, 22 nt, Human
cugcggcagcgguggcggcucu

SEQ ID NO: 688053 - RNA, 22 nt, Human
cugucuggaguagacaagagga

SEQ ID NO: 688054 - RNA, 20 nt, Human
cuuauaauccucacuucagu

SEQ ID NO: 688055 - RNA, 24 nt, Human
cuuucaucuaagccacacacuaua

SEQ ID NO: 688056 - RNA, 19 nt, Human
cuuuccccucuuccacucc

SEQ ID NO: 688057 - RNA, 19 nt, Human
gaaaaugcauauuuuuagu

SEQ ID NO: 688058 - RNA, 20 nt, Human
gaacucuuggcuagcggccc

SEQ ID NO: 688059 - RNA, 18 nt, Human
gagaugggguuucaccau

SEQ ID NO: 688060 - RNA, 23 nt, Human
gagaugggguuucaccauguugc

SEQ ID NO: 688061 - RNA, 22 nt, Human
gagccuccggcagcggccgcau

SEQ ID NO: 688062 - RNA, 24 nt, Human
gagcucaggcaaucugcccaccuu

SEQ ID NO: 688063 - RNA, 19 nt, Human
gaggaagggcugugaggug

SEQ ID NO: 688064 - RNA, 25 nt, Human
gaguagcugggacuacaggcgcaca

SEQ ID NO: 688065 - RNA, 22 nt, Human
gaucccaaaauuuaaagguuuu

SEQ ID NO: 688066 - RNA, 22 nt, Human
gaugggguuucaccauguugcc

SEQ ID NO: 688067 - RNA, 18 nt, Human
gcacaccgccaagcccag

SEQ ID NO: 688068 - RNA, 19 nt, Human
gcacaccgccaagcccagc

SEQ ID NO: 688069 - RNA, 20 nt, Human
gcccaggcuggagugcaggu

SEQ ID NO: 688070 - RNA, 21 nt, Human
gccccgaugcugggagcggcg

SEQ ID NO: 688071 - RNA, 20 nt, Human
gccucagccuccugaguagc

SEQ ID NO: 688072 - RNA, 19 nt, Human
gcgccgcgccgcugccgcc

SEQ ID NO: 688073 - RNA, 21 nt, Human
gcgguggcggcucugacuccg

SEQ ID NO: 688074 - RNA, 19 nt, Human
gcguccucccgccucccuc

SEQ ID NO: 688075 - RNA, 25 nt, Human
gcucuguugcccaggcuggagugca

SEQ ID NO: 688076 - RNA, 18 nt, Human
gcugggugcagggaacug

SEQ ID NO: 688077 - RNA, 21 nt, Human
gcugugaggugcugggugcag

SEQ ID NO: 688078 - RNA, 23 nt, Human
ggagucucgcucuguugcccagg

SEQ ID NO: 688079 - RNA, 20 nt, Human
gggguuucaccauguugccc

SEQ ID NO: 688080 - RNA, 22 nt, Human
ggguuacagguguaagccaccg

SEQ ID NO: 688081 - RNA, 24 nt, Human
ggguuacagguguaagccaccgug

SEQ ID NO: 688082 - RNA, 22 nt, Human
ggguucaagcaauucuccugcc

SEQ ID NO: 688083 - RNA, 18 nt, Human
gguuacagguguaagcca

SEQ ID NO: 688084 - RNA, 24 nt, Human
gguuacagguguaagccaccgugc

SEQ ID NO: 688085 - RNA, 23 nt, Human
guagagaugggguuucaccaugu

SEQ ID NO: 688086 - RNA, 21 nt, Human
guauguguguauguaugugua

SEQ ID NO: 688087 - RNA, 18 nt, Human
gucugaggaagagagucc

SEQ ID NO: 688088 - RNA, 23 nt, Human
uaacuuuuuguauuuuaguagag

SEQ ID NO: 688089 - RNA, 24 nt, Human
uaacuuuuuguauuuuaguagaga

SEQ ID NO: 688090 - RNA, 22 nt, Human
uaauaaaaaaguaugcugaagg

SEQ ID NO: 688091 - RNA, 23 nt, Human
uacaaaugcuuuauggaauaacu

SEQ ID NO: 688092 - RNA, 18 nt, Human
uacaauccugaaacacuc

SEQ ID NO: 688093 - RNA, 21 nt, Human
uacaauccugaaacacuucuc

SEQ ID NO: 688094 - RNA, 18 nt, Human
uacagaucuccuuagucu

SEQ ID NO: 688095 - RNA, 22 nt, Human
uacagguguaagccaccgugcc

SEQ ID NO: 688096 - RNA, 22 nt, Human
uagagaugggguuucaccaugu

SEQ ID NO: 688097 - RNA, 24 nt, Human
uaguagagaugggguuucaccaug

SEQ ID NO: 688098 - RNA, 26 nt, Human
uaguagagaugggguuucaccauguu

SEQ ID NO: 688099 - RNA, 20 nt, Human
uauguguguauguaugugua

SEQ ID NO: 688100 - RNA, 24 nt, Human
uauuaaauagagcuauuuuacuaa

SEQ ID NO: 688101 - RNA, 25 nt, Human
uauuauguggguuuguuuccuaaag

SEQ ID NO: 688102 - RNA, 22 nt, Human
uauuuauuuagagauggagucu

SEQ ID NO: 688103 - RNA, 24 nt, Human
uauuuuacuaaggcauuauguuuu

SEQ ID NO: 688104 - RNA, 21 nt, Human
ucacauauuaaaccauguaga

SEQ ID NO: 688105 - RNA, 21 nt, Human
ucacauccggaucgggaaggc

SEQ ID NO: 688106 - RNA, 23 nt, Human
ucacugcaacuuccgccucucgg

SEQ ID NO: 688107 - RNA, 24 nt, Human
ucacugcaacuuccgccucucggg

SEQ ID NO: 688108 - RNA, 25 nt, Human
ucacugcaacuuccgccucucgggu

SEQ ID NO: 688109 - RNA, 23 nt, Human
ucagccuccugaguagcugggac

SEQ ID NO: 688110 - RNA, 21 nt, Human
ucagguuaaaaaccucucuua

SEQ ID NO: 688111 - RNA, 21 nt, Human
ucauucuuuacagaucuccuu

SEQ ID NO: 688112 - RNA, 20 nt, Human
uccaagccccuuccuccucc

SEQ ID NO: 688113 - RNA, 22 nt, Human
uccaagccccuuccuccuccuc

SEQ ID NO: 688114 - RNA, 22 nt, Human
uccacauuuaaaaggacaccgc

SEQ ID NO: 688115 - RNA, 23 nt, Human
ucccaaaaugccaggguuacagg

SEQ ID NO: 688116 - RNA, 20 nt, Human
uccccucuuccacuccuaca

SEQ ID NO: 688117 - RNA, 25 nt, Human
uccgcauccccccguagucgcucca

SEQ ID NO: 688118 - RNA, 19 nt, Human
uccgccucucggguucaag

SEQ ID NO: 688119 - RNA, 24 nt, Human
uccgccucucggguucaagcaauu

SEQ ID NO: 688120 - RNA, 24 nt, Human
uccugaguagcugggacuacaggc

SEQ ID NO: 688121 - RNA, 19 nt, Human
uccuuuuucuguuuuccuu

SEQ ID NO: 688122 - RNA, 24 nt, Human
ucgcucuguugcccaggcuggagu

SEQ ID NO: 688123 - RNA, 18 nt, Human
ucucaucccaaaaagacc

SEQ ID NO: 688124 - RNA, 24 nt, Human
ucuccugccucagccuccugagua

SEQ ID NO: 688125 - RNA, 23 nt, Human
ucucgaacuccugagcucaggca

SEQ ID NO: 688126 - RNA, 19 nt, Human
ucucgcucuguugcccagg

SEQ ID NO: 688127 - RNA, 23 nt, Human
ucucgcucuguugcccaggcugg

SEQ ID NO: 688128 - RNA, 24 nt, Human
ucucgcucuguugcccaggcugga

SEQ ID NO: 688129 - RNA, 26 nt, Human
ucucgcucuguugcccaggcuggagu

SEQ ID NO: 688130 - RNA, 27 nt, Human
ucucgcucuguugcccaggcuggagug

SEQ ID NO: 688131 - RNA, 24 nt, Human
ucucggguucaagcaauucuccug

SEQ ID NO: 688132 - RNA, 23 nt, Human
ucugacuccgcgcacuccgcccc

SEQ ID NO: 688133 - RNA, 21 nt, Human
ucugcccaccuuggccuccca

SEQ ID NO: 688134 - RNA, 24 nt, Human
ucugcccaccuuggccucccaaaa

SEQ ID NO: 688135 - RNA, 23 nt, Human
ucugccucucuuuccccucuucc

SEQ ID NO: 688136 - RNA, 21 nt, Human
ucugggucaggaggccagagc

SEQ ID NO: 688137 - RNA, 24 nt, Human
ucuguugcccaggcuggagugcag

SEQ ID NO: 688138 - RNA, 25 nt, Human
ucuguugcccaggcuggagugcagg

SEQ ID NO: 688139 - RNA, 18 nt, Human
ugaaaagaaugguuucca

SEQ ID NO: 688140 - RNA, 19 nt, Human
ugaaucacucauucuaaga

SEQ ID NO: 688141 - RNA, 20 nt, Human
ugacugcuucuccgcauccc

SEQ ID NO: 688142 - RNA, 21 nt, Human
ugacugcuucuccgcaucccc

SEQ ID NO: 688143 - RNA, 21 nt, Human
ugagaacgguuaaaagaaaca

SEQ ID NO: 688144 - RNA, 21 nt, Human
ugaggaagagaguccacacag

SEQ ID NO: 688145 - RNA, 18 nt, Human
ugcccaggcuggagugca

SEQ ID NO: 688146 - RNA, 19 nt, Human
ugcccaggcuggagugcag

SEQ ID NO: 688147 - RNA, 24 nt, Human
ugcccuggcuggucucgaacuccu

SEQ ID NO: 688148 - RNA, 24 nt, Human
ugccucagccuccugaguagcugg

SEQ ID NO: 688149 - RNA, 23 nt, Human
ugcgagggggccuucccccucuc

SEQ ID NO: 688150 - RNA, 27 nt, Human
ugcggcagcgguggcggcucugacucc

SEQ ID NO: 688151 - RNA, 24 nt, Human
ugcugggagcggcgcgacccgggc

SEQ ID NO: 688152 - RNA, 22 nt, Human
uggaauaacugucuggaguaga

SEQ ID NO: 688153 - RNA, 23 nt, Human
uggaguagacaagaggaaaagua

SEQ ID NO: 688154 - RNA, 24 nt, Human
uggagucucgcucuguugcccagg

SEQ ID NO: 688155 - RNA, 19 nt, Human
uggaguucaguggcacaau

SEQ ID NO: 688156 - RNA, 24 nt, Human
uggaguucaguggcacaaucucgg

SEQ ID NO: 688157 - RNA, 24 nt, Human
uggcacaaucucggcucacugcaa

SEQ ID NO: 688158 - RNA, 21 nt, Human
ugggacuacaggcgcacaccg

SEQ ID NO: 688159 - RNA, 24 nt, Human
ugggacuacaggcgcacaccgcca

SEQ ID NO: 688160 - RNA, 18 nt, Human
ugggguuucaccauguug

SEQ ID NO: 688161 - RNA, 18 nt, Human
uguauguguguauguaug

SEQ ID NO: 688162 - RNA, 19 nt, Human
ugugcuuuucuucccccca

SEQ ID NO: 688163 - RNA, 21 nt, Human
uguguaagaaaaugcauauuu

SEQ ID NO: 688164 - RNA, 18 nt, Human
uguguguauguaugugua

SEQ ID NO: 688165 - RNA, 24 nt, Human
uguguguauguauguguaaauagc

SEQ ID NO: 688166 - RNA, 24 nt, Human
uguugcucuuuuucaucacauccc

SEQ ID NO: 688167 - RNA, 21 nt, Human
uuaacacaaacaaaagauaaa

SEQ ID NO: 688168 - RNA, 19 nt, Human
uuacagguguaagccaccg

SEQ ID NO: 688169 - RNA, 18 nt, Human
uuaguagagaugggguuu

SEQ ID NO: 688170 - RNA, 22 nt, Human
uuaguagagaugggguuucacc

SEQ ID NO: 688171 - RNA, 24 nt, Human
uuaguagagaugggguuucaccau

SEQ ID NO: 688172 - RNA, 19 nt, Human
uuauuuauuuauuuauuua

SEQ ID NO: 688173 - RNA, 19 nt, Human
uuauuuauuuauuuauuua

SEQ ID NO: 688174 - RNA, 19 nt, Human
uuauuuauuuauuuauuua

SEQ ID NO: 688175 - RNA, 19 nt, Human
uuauuuauuuauuuauuua

SEQ ID NO: 688176 - RNA, 19 nt, Human
uuauuuauuuauuuauuua

SEQ ID NO: 688177 - RNA, 24 nt, Human
uuauuuauuuauuuauuuauuuag

SEQ ID NO: 688178 - RNA, 25 nt, Human
uuauuuauuuauuuauuuauuuauu

SEQ ID NO: 688179 - RNA, 25 nt, Human
uuauuuauuuauuuauuuauuuauu

SEQ ID NO: 688180 - RNA, 25 nt, Human
uuauuuauuuauuuauuuauuuauu

SEQ ID NO: 688181 - RNA, 25 nt, Human
uuauuuauuuauuuauuuauuuauu

SEQ ID NO: 688182 - RNA, 21 nt, Human
uucaagcaauucuccugccuc

SEQ ID NO: 688183 - RNA, 24 nt, Human
uucaagcaauucuccugccucagc

SEQ ID NO: 688184 - RNA, 21 nt, Human
uuccauguuguuucaugagaa

SEQ ID NO: 688185 - RNA, 27 nt, Human
uuccauguuguuucaugagaaucuuac

SEQ ID NO: 688186 - RNA, 25 nt, Human
uuccccccaaaaggaaauuuuuaaa

SEQ ID NO: 688187 - RNA, 25 nt, Human
uuccccucuuccacuccuacaaucc

SEQ ID NO: 688188 - RNA, 23 nt, Human
uuccuaaaauuaugcuucuguug

SEQ ID NO: 688189 - RNA, 20 nt, Human
uuccuacaacuaauaaaaaa

SEQ ID NO: 688190 - RNA, 23 nt, Human
uugcccaggcuggagugcagguu

SEQ ID NO: 688191 - RNA, 24 nt, Human
uugguuaaaguaaaaaggcuuuca

SEQ ID NO: 688192 - RNA, 25 nt, Human
uuguuuauuuauuuauuuauuuauu

SEQ ID NO: 688193 - RNA, 22 nt, Human
uuuauuuauuuauuuauuuauu

SEQ ID NO: 688194 - RNA, 26 nt, Human
uuuuuaaacacucuccaguuuuaaca

SEQ ID NO: 688195 - RNA, 20 nt, Human
uuuuuguauuuuaguagaga

SEQ ID NO: 688196 - RNA, 21 nt, Human
uuuuuguauuuuaguagagau

SEQ ID NO: 688197 - RNA, 21 nt, Human
aaaacaugaucccucuuccag

SEQ ID NO: 688198 - RNA, 20 nt, Human
aaacaaaacagcuauaaccc

SEQ ID NO: 688199 - RNA, 25 nt, Human
aaacaagaguaccgacggccccggc

SEQ ID NO: 688200 - RNA, 21 nt, Human
aaacagcuauaaccccauccc

SEQ ID NO: 688201 - RNA, 24 nt, Human
aacaaaacagcuauaaccccaucc

SEQ ID NO: 688202 - RNA, 21 nt, Human
aacaaguaccucuaaacaaag

SEQ ID NO: 688203 - RNA, 22 nt, Human
aacagcuauaaccccaucccuc

SEQ ID NO: 688204 - RNA, 23 nt, Human
aacgggguucugggaaauaggag

SEQ ID NO: 688205 - RNA, 21 nt, Human
aagagguagcaaaaggucaga

SEQ ID NO: 688206 - RNA, 21 nt, Human
aagaguaccgacggccccggc

SEQ ID NO: 688207 - RNA, 24 nt, Human
aagccaaauguuguguuaaucccg

SEQ ID NO: 688208 - RNA, 21 nt, Human
aagcucccucacccccaaaag

SEQ ID NO: 688209 - RNA, 20 nt, Human
aaggccuggcaccuuuggcu

SEQ ID NO: 688210 - RNA, 21 nt, Human
aaggccuggcaccuuuggcuu

SEQ ID NO: 688211 - RNA, 26 nt, Human
aauacugacggauuuugacuccgaga

SEQ ID NO: 688212 - RNA, 27 nt, Human
acacacacauacgcacauacacacaca

SEQ ID NO: 688213 - RNA, 19 nt, Human
acagaaaaggcucgauaca

SEQ ID NO: 688214 - RNA, 21 nt, Human
acagacacaagcacacgugca

SEQ ID NO: 688215 - RNA, 19 nt, Human
acaggcugagguguauggc

SEQ ID NO: 688216 - RNA, 23 nt, Human
acccagucagccccuuccgcugc

SEQ ID NO: 688217 - RNA, 23 nt, Human
acccaguuuccuugugaggcucu

SEQ ID NO: 688218 - RNA, 19 nt, Human
acggauuuugggagugggu

SEQ ID NO: 688219 - RNA, 22 nt, Human
acgggguucugggaaauaggag

SEQ ID NO: 688220 - RNA, 22 nt, Human
agaaaguuaaaguggggugacu

SEQ ID NO: 688221 - RNA, 22 nt, Human
agacacggccagcggggugagg

SEQ ID NO: 688222 - RNA, 19 nt, Human
agacugcacacuucugaau

SEQ ID NO: 688223 - RNA, 22 nt, Human
agagagaaaaaaaaauggugaa

SEQ ID NO: 688224 - RNA, 21 nt, Human
agcagcagccagcggcggggg

SEQ ID NO: 688225 - RNA, 18 nt, Human
agccagcggcgggggggg

SEQ ID NO: 688226 - RNA, 20 nt, Human
agccuccccccaccccccgg

SEQ ID NO: 688227 - RNA, 22 nt, Human
agcucccucacccccaaaagac

SEQ ID NO: 688228 - RNA, 20 nt, Human
agcuggucaggaccagcaug

SEQ ID NO: 688229 - RNA, 24 nt, Human
aggaaucaccuacuuucacgaguc

SEQ ID NO: 688230 - RNA, 22 nt, Human
aguaggaauaacagcaacacag

SEQ ID NO: 688231 - RNA, 21 nt, Human
agugacagcggcgguggccag

SEQ ID NO: 688232 - RNA, 20 nt, Human
agugaugggugggguagaga

SEQ ID NO: 688233 - RNA, 22 nt, Human
auaaaacaaaacaugaucccuc

SEQ ID NO: 688234 - RNA, 22 nt, Human
augcagccuccugcucccugag

SEQ ID NO: 688235 - RNA, 23 nt, Human
augcauacggcacacaccacaca

SEQ ID NO: 688236 - RNA, 20 nt, Human
auggaggauaggaguggcag

SEQ ID NO: 688237 - RNA, 20 nt, Human
caaaacagcuauaaccccau

SEQ ID NO: 688238 - RNA, 20 nt, Human
caaaagacgccgcucaccac

SEQ ID NO: 688239 - RNA, 27 nt, Human
caacucagaaggguuuccagcagcagg

SEQ ID NO: 688240 - RNA, 19 nt, Human
caacucaggauggccgcag

SEQ ID NO: 688241 - RNA, 20 nt, Human
caagaguaccgacggccccg

SEQ ID NO: 688242 - RNA, 22 nt, Human
caaggugagguagggggagggg

SEQ ID NO: 688243 - RNA, 21 nt, Human
caaugugacaagugacagcgg

SEQ ID NO: 688244 - RNA, 22 nt, Human
cacaaaugaaaacaagaguacc

SEQ ID NO: 688245 - RNA, 21 nt, Human
cacacacaaaugaaaacaaga

SEQ ID NO: 688246 - RNA, 25 nt, Human
cacacacacacacucgcacacaccu

SEQ ID NO: 688247 - RNA, 18 nt, Human
cacacacagacacggcca

SEQ ID NO: 688248 - RNA, 19 nt, Human
cacaccccucaccuauacc

SEQ ID NO: 688249 - RNA, 19 nt, Human
cacagagguuugugugccc

SEQ ID NO: 688250 - RNA, 19 nt, Human
caccucacagaugcggcug

SEQ ID NO: 688251 - RNA, 20 nt, Human
cagagccgggggacgcgcag

SEQ ID NO: 688252 - RNA, 22 nt, Human
cagcaccuguucccugcagaac

SEQ ID NO: 688253 - RNA, 21 nt, Human
cagcagcaggggaggguuccc

SEQ ID NO: 688254 - RNA, 24 nt, Human
cagcagcaggggaggguucccugg

SEQ ID NO: 688255 - RNA, 20 nt, Human
cagcagccagcggcgggggg

SEQ ID NO: 688256 - RNA, 18 nt, Human
cagcagggggacccaagc

SEQ ID NO: 688257 - RNA, 20 nt, Human
cagcccagccccacagcuuc

SEQ ID NO: 688258 - RNA, 20 nt, Human
cagcgagacccacgugaccc

SEQ ID NO: 688259 - RNA, 20 nt, Human
caggaaaagcacucuccccu

SEQ ID NO: 688260 - RNA, 18 nt, Human
caggaccagcaugguccg

SEQ ID NO: 688261 - RNA, 24 nt, Human
cagggcucagggaccagggaagcc

SEQ ID NO: 688262 - RNA, 23 nt, Human
caguccucugucucccaccagga

SEQ ID NO: 688263 - RNA, 18 nt, Human
caguuaggucccucccca

SEQ ID NO: 688264 - RNA, 23 nt, Human
caucaacccauccccaaggguca

SEQ ID NO: 688265 - RNA, 24 nt, Human
cauugagucuagccuccccccacc

SEQ ID NO: 688266 - RNA, 19 nt, Human
ccaaaagacgccgcucacc

SEQ ID NO: 688267 - RNA, 19 nt, Human
ccaaaggcucaaagggaaa

SEQ ID NO: 688268 - RNA, 22 nt, Human
ccacagagguuugugugcccgg

SEQ ID NO: 688269 - RNA, 23 nt, Human
ccacccgcucacucgccccaagu

SEQ ID NO: 688270 - RNA, 19 nt, Human
ccacccggagccuccacuu

SEQ ID NO: 688271 - RNA, 18 nt, Human
ccacugccagucaccaac

SEQ ID NO: 688272 - RNA, 23 nt, Human
ccagcccggcucggcuccccgcc

SEQ ID NO: 688273 - RNA, 21 nt, Human
ccagcggcggggggggcuccu

SEQ ID NO: 688274 - RNA, 22 nt, Human
ccagucccugaaguucugcaaa

SEQ ID NO: 688275 - RNA, 23 nt, Human
ccagugccuggcuccaggcuggg

SEQ ID NO: 688276 - RNA, 20 nt, Human
cccaaaagacgccgcucacc

SEQ ID NO: 688277 - RNA, 23 nt, Human
cccaagcucccucacccccaaaa

SEQ ID NO: 688278 - RNA, 24 nt, Human
cccaagcucccucacccccaaaag

SEQ ID NO: 688279 - RNA, 18 nt, Human
cccaccgcucaugcccac

SEQ ID NO: 688280 - RNA, 22 nt, Human
cccagcgagacccacgugaccc

SEQ ID NO: 688281 - RNA, 19 nt, Human
ccccaacgggguucuggga

SEQ ID NO: 688282 - RNA, 22 nt, Human
ccccaccccccggaaccccaga

SEQ ID NO: 688283 - RNA, 23 nt, Human
ccccaccccccggaaccccagaa

SEQ ID NO: 688284 - RNA, 20 nt, Human
ccccagcccucacuccuggc

SEQ ID NO: 688285 - RNA, 18 nt, Human
ccccagggcuacccuucu

SEQ ID NO: 688286 - RNA, 19 nt, Human
ccccaucccuccccccucc

SEQ ID NO: 688287 - RNA, 21 nt, Human
cccccaaaagacgccgcucac

SEQ ID NO: 688288 - RNA, 22 nt, Human
cccccaaaagacgccgcucacc

SEQ ID NO: 688289 - RNA, 21 nt, Human
cccccagccccagggcuaccc

SEQ ID NO: 688290 - RNA, 23 nt, Human
cccccagccccagggcuacccuu

SEQ ID NO: 688291 - RNA, 23 nt, Human
cccccggaaccccagaccuucca

SEQ ID NO: 688292 - RNA, 24 nt, Human
cccccggaaccccagaccuuccag

SEQ ID NO: 688293 - RNA, 20 nt, Human
ccccguccgccugccgccag

SEQ ID NO: 688294 - RNA, 18 nt, Human
ccccugaggcagccgagg

SEQ ID NO: 688295 - RNA, 18 nt, Human
ccccuggcuucccuccuc

SEQ ID NO: 688296 - RNA, 21 nt, Human
ccccuggcuucccuccucucg

SEQ ID NO: 688297 - RNA, 21 nt, Human
ccccuuccgcugccuggggug

SEQ ID NO: 688298 - RNA, 18 nt, Human
cccgccccgccccacaaa

SEQ ID NO: 688299 - RNA, 21 nt, Human
cccgccccgccccacaaaccc

SEQ ID NO: 688300 - RNA, 21 nt, Human
cccggcucgcgccgcacgcgc

SEQ ID NO: 688301 - RNA, 24 nt, Human
cccggcucgcgccgcacgcgcccg

SEQ ID NO: 688302 - RNA, 23 nt, Human
cccggcucggcuccccgccuagc

SEQ ID NO: 688303 - RNA, 22 nt, Human
cccugcagcgccagagccgggg

SEQ ID NO: 688304 - RNA, 18 nt, Human
cccuggacuggccuuaca

SEQ ID NO: 688305 - RNA, 19 nt, Human
cccuggcuucccuccucuc

SEQ ID NO: 688306 - RNA, 20 nt, Human
cccugucagcacccagugcc

SEQ ID NO: 688307 - RNA, 21 nt, Human
ccgcacgcgcccgccccgucc

SEQ ID NO: 688308 - RNA, 18 nt, Human
ccgccccgccccacaaac

SEQ ID NO: 688309 - RNA, 21 nt, Human
ccgcucaugcccacccccaau

SEQ ID NO: 688310 - RNA, 21 nt, Human
ccggagccuccacuggaccca

SEQ ID NO: 688311 - RNA, 23 nt, Human
ccggccggccggcccuaccagcg

SEQ ID NO: 688312 - RNA, 23 nt, Human
ccuccccccaccccccggaaccc

SEQ ID NO: 688313 - RNA, 18 nt, Human
ccugaaguucugcaaagg

SEQ ID NO: 688314 - RNA, 25 nt, Human
ccuggaggagcccuugcuggggcuu

SEQ ID NO: 688315 - RNA, 18 nt, Human
ccuggccccacggggccc

SEQ ID NO: 688316 - RNA, 19 nt, Human
ccuggcuccaggcuggggg

SEQ ID NO: 688317 - RNA, 21 nt, Human
ccuggggugggguuagggggc

SEQ ID NO: 688318 - RNA, 24 nt, Human
ccugggucccccccggggugggag

SEQ ID NO: 688319 - RNA, 18 nt, Human
ccuuacagcugcugaggu

SEQ ID NO: 688320 - RNA, 21 nt, Human
ccuuacagcugcugaggucug

SEQ ID NO: 688321 - RNA, 19 nt, Human
ccuugcuggggcucggucc

SEQ ID NO: 688322 - RNA, 19 nt, Human
cgccgacaccccugcagcg

SEQ ID NO: 688323 - RNA, 18 nt, Human
cggcccuaccagcggccc

SEQ ID NO: 688324 - RNA, 18 nt, Human
cggcggcgcuccgcccgc

SEQ ID NO: 688325 - RNA, 21 nt, Human
cggggagcaagguggcagagg

SEQ ID NO: 688326 - RNA, 22 nt, Human
cguccgccugccgccagcccgg

SEQ ID NO: 688327 - RNA, 19 nt, Human
cucaaagggaaaacccaca

SEQ ID NO: 688328 - RNA, 22 nt, Human
cucacccccaaaagacgccgcu

SEQ ID NO: 688329 - RNA, 24 nt, Human
cucacuccuggcgucugauucaca

SEQ ID NO: 688330 - RNA, 19 nt, Human
cucccagucccugaaguuc

SEQ ID NO: 688331 - RNA, 23 nt, Human
cucccccagccccagggcuaccc

SEQ ID NO: 688332 - RNA, 20 nt, Human
cuccccccuucugggaaggg

SEQ ID NO: 688333 - RNA, 20 nt, Human
cuccuuccauggguucccgg

SEQ ID NO: 688334 - RNA, 20 nt, Human
cucgcaucaacccaucccca

SEQ ID NO: 688335 - RNA, 19 nt, Human
cugcucccagucccugaag

SEQ ID NO: 688336 - RNA, 18 nt, Human
cugcucccgacaccaccc

SEQ ID NO: 688337 - RNA, 19 nt, Human
cugcucccgacaccacccu

SEQ ID NO: 688338 - RNA, 19 nt, Human
cugcucccugagcccugcc

SEQ ID NO: 688339 - RNA, 24 nt, Human
cugcuggcuccugcacacgacuuc

SEQ ID NO: 688340 - RNA, 20 nt, Human
cuggcaccuuuggcuuuugu

SEQ ID NO: 688341 - RNA, 22 nt, Human
cugggugugggcagugggggcc

SEQ ID NO: 688342 - RNA, 19 nt, Human
cuucagcuggcugaagaca

SEQ ID NO: 688343 - RNA, 21 nt, Human
cuugcuggaaccugagaccca

SEQ ID NO: 688344 - RNA, 20 nt, Human
cuuggccuccaauaacccag

SEQ ID NO: 688345 - RNA, 20 nt, Human
cuuguccucagcgcccggcc

SEQ ID NO: 688346 - RNA, 20 nt, Human
gaagcuagugaugggugggg

SEQ ID NO: 688347 - RNA, 18 nt, Human
gaaguccaugggucuccu

SEQ ID NO: 688348 - RNA, 20 nt, Human
gacaccacccuggccguggc

SEQ ID NO: 688349 - RNA, 22 nt, Human
gacccucgcaucaacccauccc

SEQ ID NO: 688350 - RNA, 18 nt, Human
gagacaguggccgggggc

SEQ ID NO: 688351 - RNA, 19 nt, Human
gagcagcagccagcggcgg

SEQ ID NO: 688352 - RNA, 20 nt, Human
gagcagcagccagcggcggg

SEQ ID NO: 688353 - RNA, 19 nt, Human
gagcugcaaagaccugcca

SEQ ID NO: 688354 - RNA, 19 nt, Human
gagcugggggccugggugg

SEQ ID NO: 688355 - RNA, 23 nt, Human
gaggaccuuggucccuuuagggg

SEQ ID NO: 688356 - RNA, 21 nt, Human
gagguccagugaauacugacg

SEQ ID NO: 688357 - RNA, 24 nt, Human
gagguuugugugcccggggugcca

SEQ ID NO: 688358 - RNA, 22 nt, Human
gagucuagccuccccccacccc

SEQ ID NO: 688359 - RNA, 21 nt, Human
gcagcaggggaggguucccug

SEQ ID NO: 688360 - RNA, 21 nt, Human
gcaggagugccagcggccccu

SEQ ID NO: 688361 - RNA, 18 nt, Human
gccccgccccacaaaccc

SEQ ID NO: 688362 - RNA, 22 nt, Human
gccccguccgccugccgccagc

SEQ ID NO: 688363 - RNA, 18 nt, Human
gccugcucccgacaccac

SEQ ID NO: 688364 - RNA, 19 nt, Human
gccugcucccgacaccacc

SEQ ID NO: 688365 - RNA, 20 nt, Human
gcuggcuccugcacacgacu

SEQ ID NO: 688366 - RNA, 23 nt, Human
gcugggaccccuggcuucccucc

SEQ ID NO: 688367 - RNA, 19 nt, Human
gcuggggccucacaccccu

SEQ ID NO: 688368 - RNA, 21 nt, Human
ggaggagcccuugcuggggcu

SEQ ID NO: 688369 - RNA, 20 nt, Human
ggaguggcaggaugagggcu

SEQ ID NO: 688370 - RNA, 23 nt, Human
ggcagggggucagccugcccagc

SEQ ID NO: 688371 - RNA, 18 nt, Human
ggccaaaggcucaaaggg

SEQ ID NO: 688372 - RNA, 19 nt, Human
ggcgagaggugggccccga

SEQ ID NO: 688373 - RNA, 19 nt, Human
ggcuucuggggccuggaga

SEQ ID NO: 688374 - RNA, 19 nt, Human
gggagugggugggcggccc

SEQ ID NO: 688375 - RNA, 24 nt, Human
gggcagggggucagccugcccagc

SEQ ID NO: 688376 - RNA, 24 nt, Human
gggcucuuuagauguagagaggua

SEQ ID NO: 688377 - RNA, 19 nt, Human
ggggagcugggggccuggg

SEQ ID NO: 688378 - RNA, 19 nt, Human
gggugggagcccuggggau

SEQ ID NO: 688379 - RNA, 20 nt, Human
gggugggguuagggggcccc

SEQ ID NO: 688380 - RNA, 18 nt, Human
gguaggggaugacucugu

SEQ ID NO: 688381 - RNA, 21 nt, Human
gguuuccagcagcaggggagg

SEQ ID NO: 688382 - RNA, 21 nt, Human
gucauguggcuuaagugcuga

SEQ ID NO: 688383 - RNA, 18 nt, Human
gucccuccccccuucugg

SEQ ID NO: 688384 - RNA, 24 nt, Human
gucucuagagggguggggguaggg

SEQ ID NO: 688385 - RNA, 19 nt, Human
gucuugccccugcugcugc

SEQ ID NO: 688386 - RNA, 19 nt, Human
uaaaggcugccagcccagc

SEQ ID NO: 688387 - RNA, 22 nt, Human
uaacagcaacacaggcccagag

SEQ ID NO: 688388 - RNA, 24 nt, Human
uaacaguuucuuaucgcuguacau

SEQ ID NO: 688389 - RNA, 26 nt, Human
uagcaaggugagguagggggaggggg

SEQ ID NO: 688390 - RNA, 19 nt, Human
uagccuccccccacccccc

SEQ ID NO: 688391 - RNA, 18 nt, Human
uaggcgguggggucaccc

SEQ ID NO: 688392 - RNA, 26 nt, Human
uaucugcuauuuucugauuccuguuu

SEQ ID NO: 688393 - RNA, 20 nt, Human
uauguaaacaaugagauaaa

SEQ ID NO: 688394 - RNA, 24 nt, Human
uauugucuguuuugguuuaaaaaa

SEQ ID NO: 688395 - RNA, 21 nt, Human
ucagcgcccggcucgcgccgc

SEQ ID NO: 688396 - RNA, 25 nt, Human
uccacacacacacacucgcacacac

SEQ ID NO: 688397 - RNA, 18 nt, Human
uccaugggucuccucccc

SEQ ID NO: 688398 - RNA, 19 nt, Human
uccaugggucuccuccccc

SEQ ID NO: 688399 - RNA, 18 nt, Human
ucccagcgccagugaaca

SEQ ID NO: 688400 - RNA, 27 nt, Human
uccccaagggucacgggcagagcagca

SEQ ID NO: 688401 - RNA, 22 nt, Human
uccccccaccccccggaacccc

SEQ ID NO: 688402 - RNA, 24 nt, Human
uccccccaccccccggaaccccag

SEQ ID NO: 688403 - RNA, 20 nt, Human
uccccccuccccuucgaggu

SEQ ID NO: 688404 - RNA, 19 nt, Human
uccccggggggcccugugg

SEQ ID NO: 688405 - RNA, 19 nt, Human
ucccgccccgccccacaaa

SEQ ID NO: 688406 - RNA, 22 nt, Human
ucccugaacucaggcucuguuu

SEQ ID NO: 688407 - RNA, 24 nt, Human
ucccugaaguucugcaaaggaauc

SEQ ID NO: 688408 - RNA, 18 nt, Human
ucccugccccagugaggu

SEQ ID NO: 688409 - RNA, 21 nt, Human
ucccuggacuggccuuacagc

SEQ ID NO: 688410 - RNA, 22 nt, Human
ucccuggacuggccuuacagcu

SEQ ID NO: 688411 - RNA, 21 nt, Human
uccgcugccuggggugggguu

SEQ ID NO: 688412 - RNA, 22 nt, Human
uccugagcgcguggccuuccug

SEQ ID NO: 688413 - RNA, 20 nt, Human
uccugcacacgacuuccuag

SEQ ID NO: 688414 - RNA, 21 nt, Human
ucuacccaagcucccucaccc

SEQ ID NO: 688415 - RNA, 21 nt, Human
ucuccacacacacacacucgc

SEQ ID NO: 688416 - RNA, 21 nt, Human
ucuccuuccauggguucccgg

SEQ ID NO: 688417 - RNA, 23 nt, Human
ucugaccuugagagcccacuuca

SEQ ID NO: 688418 - RNA, 24 nt, Human
ucugauucacagguucaguaacau

SEQ ID NO: 688419 - RNA, 21 nt, Human
ucuucagacccaggcucagcc

SEQ ID NO: 688420 - RNA, 18 nt, Human
ugaacagugccacccugg

SEQ ID NO: 688421 - RNA, 19 nt, Human
ugagagcccuugucugcuc

SEQ ID NO: 688422 - RNA, 22 nt, Human
ugaugggugggguagagaggcu

SEQ ID NO: 688423 - RNA, 21 nt, Human
ugauucacagguucaguaaca

SEQ ID NO: 688424 - RNA, 19 nt, Human
ugcaauccuggaggagccc

SEQ ID NO: 688425 - RNA, 22 nt, Human
ugcacacacacagacacggcca

SEQ ID NO: 688426 - RNA, 18 nt, Human
ugccagggcugagagccc

SEQ ID NO: 688427 - RNA, 19 nt, Human
ugccagggcugagagcccu

SEQ ID NO: 688428 - RNA, 19 nt, Human
ugcccacccccaccccggc

SEQ ID NO: 688429 - RNA, 23 nt, Human
ugccugagguggggaaaguuggu

SEQ ID NO: 688430 - RNA, 23 nt, Human
ugccuggggugggguuagggggc

SEQ ID NO: 688431 - RNA, 21 nt, Human
uggaaccugagacccaggguc

SEQ ID NO: 688432 - RNA, 21 nt, Human
uggagggugggagcccugggg

SEQ ID NO: 688433 - RNA, 21 nt, Human
uggagggugggagcccugggg

SEQ ID NO: 688434 - RNA, 20 nt, Human
uggcagagggcgcccgcggg

SEQ ID NO: 688435 - RNA, 18 nt, Human
uggccagcgucccacugc

SEQ ID NO: 688436 - RNA, 23 nt, Human
uggcccccgcggggagcuggggg

SEQ ID NO: 688437 - RNA, 22 nt, Human
uggccguggccagcgucccacu

SEQ ID NO: 688438 - RNA, 22 nt, Human
uggccuccaauaacccaguuuc

SEQ ID NO: 688439 - RNA, 20 nt, Human
uggcgcgccgacaccccugc

SEQ ID NO: 688440 - RNA, 18 nt, Human
uggcuccaggcuggggcc

SEQ ID NO: 688441 - RNA, 18 nt, Human
uggggacccaccagaguc

SEQ ID NO: 688442 - RNA, 20 nt, Human
uggggagguagacgggcugg

SEQ ID NO: 688443 - RNA, 25 nt, Human
uggggagguagacgggcugggaccc

SEQ ID NO: 688444 - RNA, 18 nt, Human
uggggugggguuaggggg

SEQ ID NO: 688445 - RNA, 19 nt, Human
uggggugggguuagggggc

SEQ ID NO: 688446 - RNA, 22 nt, Human
ugggucuccuccccccaggucc

SEQ ID NO: 688447 - RNA, 24 nt, Human
uggguucccggggagcaagguggc

SEQ ID NO: 688448 - RNA, 22 nt, Human
ugguccggccagagggccuugg

SEQ ID NO: 688449 - RNA, 21 nt, Human
ugucagcacccagugccuggc

SEQ ID NO: 688450 - RNA, 20 nt, Human
ugugggcagugggggccaga

SEQ ID NO: 688451 - RNA, 22 nt, Human
ugugucauguggcuuaagugcu

SEQ ID NO: 688452 - RNA, 22 nt, Human
uguuaagaguguuugcaccguc

SEQ ID NO: 688453 - RNA, 24 nt, Human
uguuuauccucucuuuccuacaug

SEQ ID NO: 688454 - RNA, 22 nt, Human
uguuugcaccgucuauguuggu

SEQ ID NO: 688455 - RNA, 19 nt, Human
uuaacaucuccacacacac

SEQ ID NO: 688456 - RNA, 20 nt, Human
uuaaucccgccccgccccac

SEQ ID NO: 688457 - RNA, 23 nt, Human
uucuccaagccgccugcaacaaa

SEQ ID NO: 688458 - RNA, 20 nt, Human
uucucuuaauaaaaaacaag

SEQ ID NO: 688459 - RNA, 21 nt, Human
uucugggaagggcauaaaaca

SEQ ID NO: 688460 - RNA, 22 nt, Human
uugcuggaaccugagacccagg

SEQ ID NO: 688461 - RNA, 24 nt, Human
uuggcgcccugcuggcuccugcac

SEQ ID NO: 688462 - RNA, 18 nt, Human
uugugugcccggggugcc

SEQ ID NO: 688463 - RNA, 24 nt, Human
uuucacaggcugagguguauggcu

SEQ ID NO: 688464 - RNA, 23 nt, Human
uuugcaccgucuauguugguaag

SEQ ID NO: 688465 - RNA, 21 nt, Human
uuuuuggcuugagugggaccc

SEQ ID NO: 688466 - RNA, 23 nt, Human
aaaaaaaaaaaaaaagaaaagaa

SEQ ID NO: 688467 - RNA, 23 nt, Human
aaaaaaagaaaagaaaaccagag

SEQ ID NO: 688468 - RNA, 22 nt, Human
aaaaaagaaaagaaaaccagag

SEQ ID NO: 688469 - RNA, 22 nt, Human
aaacaaacacacagaggcuugc

SEQ ID NO: 688470 - RNA, 20 nt, Human
aaacaccccuccccaaaaaa

SEQ ID NO: 688471 - RNA, 25 nt, Human
aaacaccugacuccugggccauggc

SEQ ID NO: 688472 - RNA, 22 nt, Human
aacgcacucaggcaugcacaca

SEQ ID NO: 688473 - RNA, 22 nt, Human
aagaaaaccagagaccuuccaa

SEQ ID NO: 688474 - RNA, 22 nt, Human
aagcucagcaggaauaaaggau

SEQ ID NO: 688475 - RNA, 18 nt, Human
aagcugcagcccugagag

SEQ ID NO: 688476 - RNA, 22 nt, Human
aagcugcagcccugagaggggu

SEQ ID NO: 688477 - RNA, 20 nt, Human
aagguccuuuuauguauggc

SEQ ID NO: 688478 - RNA, 19 nt, Human
aaucacagcugcccaccug

SEQ ID NO: 688479 - RNA, 18 nt, Human
acacacacacacacacac

SEQ ID NO: 688480 - RNA, 29 nt, Human
acacacacacacacacacacggacacaca

SEQ ID NO: 688481 - RNA, 27 nt, Human
acacacacacacacacacggacacaca

SEQ ID NO: 688482 - RNA, 23 nt, Human
acacacacacacacgcacgcaca

SEQ ID NO: 688483 - RNA, 24 nt, Human
acacacacacacacgcacgcacag

SEQ ID NO: 688484 - RNA, 26 nt, Human
acacacacacacacggacacacacaa

SEQ ID NO: 688485 - RNA, 27 nt, Human
acacacacacacacggacacacacaca

SEQ ID NO: 688486 - RNA, 23 nt, Human
acacacacgcacgcacacacaca

SEQ ID NO: 688487 - RNA, 33 nt, Human
acacacacggacacacacacacacacgcacggu

SEQ ID NO: 688488 - RNA, 24 nt, Human
acacacagacacacacaaacaaac

SEQ ID NO: 688489 - RNA, 31 nt, Human
acacacggacacacacacacacacgcacgca

SEQ ID NO: 688490 - RNA, 19 nt, Human
acacagacaugaugacaac

SEQ ID NO: 688491 - RNA, 23 nt, Human
acacgcacgcacacacacacaca

SEQ ID NO: 688492 - RNA, 18 nt, Human
acacugcaucagagaacc

SEQ ID NO: 688493 - RNA, 21 nt, Human
accccuagaaccuagagaagc

SEQ ID NO: 688494 - RNA, 20 nt, Human
accccuccccaaaaaacgca

SEQ ID NO: 688495 - RNA, 19 nt, Human
acgcacacacacacacaca

SEQ ID NO: 688496 - RNA, 24 nt, Human
acgcacacacacacacacacccag

SEQ ID NO: 688497 - RNA, 21 nt, Human
acgcacacacagacacacaca

SEQ ID NO: 688498 - RNA, 21 nt, Human
agaaaagaaaaccagagaccu

SEQ ID NO: 688499 - RNA, 22 nt, Human
agaggugaggagacacagggcc

SEQ ID NO: 688500 - RNA, 18 nt, Human
agaugcuggaaguaaacc

SEQ ID NO: 688501 - RNA, 21 nt, Human
agaugcuggaaguaaaccuuu

SEQ ID NO: 688502 - RNA, 24 nt, Human
agcaggaauaaaggauauggccug

SEQ ID NO: 688503 - RNA, 21 nt, Human
aggaauaaaggauauggccug

SEQ ID NO: 688504 - RNA, 21 nt, Human
aggagcagaggugaggagaca

SEQ ID NO: 688505 - RNA, 24 nt, Human
aggcagacugaccuaauggucaga

SEQ ID NO: 688506 - RNA, 24 nt, Human
agugacagccugacccagaaggaa

SEQ ID NO: 688507 - RNA, 23 nt, Human
auacauacaugcgugugcaugca

SEQ ID NO: 688508 - RNA, 21 nt, Human
augcacacacauccacacgca

SEQ ID NO: 688509 - RNA, 23 nt, Human
augcaggacuuuaggcggggggc

SEQ ID NO: 688510 - RNA, 23 nt, Human
auuagagucccgguagccauucc

SEQ ID NO: 688511 - RNA, 20 nt, Human
caaaaaaaaaaaaaaagaaa

SEQ ID NO: 688512 - RNA, 21 nt, Human
caaaagcugggacuccacaca

SEQ ID NO: 688513 - RNA, 22 nt, Human
caaaagcugggacuccacacac

SEQ ID NO: 688514 - RNA, 21 nt, Human
caaacacacagaggcuugcac

SEQ ID NO: 688515 - RNA, 21 nt, Human
cacacacaaacaaacacacag

SEQ ID NO: 688516 - RNA, 22 nt, Human
cacacacaaacaaacacacaga

SEQ ID NO: 688517 - RNA, 18 nt, Human
cacacacacacacacaca

SEQ ID NO: 688518 - RNA, 24 nt, Human
cacacacacacacacacccagagg

SEQ ID NO: 688519 - RNA, 28 nt, Human
cacacacacacacgcacgcacacacaca

SEQ ID NO: 688520 - RNA, 26 nt, Human
cacacacacacacggacacacacaca

SEQ ID NO: 688521 - RNA, 24 nt, Human
cacacacacgcacgcacacacaca

SEQ ID NO: 688522 - RNA, 28 nt, Human
cacacacacgcacgcacacacacacaca

SEQ ID NO: 688523 - RNA, 21 nt, Human
cacacacauccacacgcaucc

SEQ ID NO: 688524 - RNA, 19 nt, Human
cacacagacacacacaaac

SEQ ID NO: 688525 - RNA, 25 nt, Human
cacacagacacacacaaacaaacac

SEQ ID NO: 688526 - RNA, 20 nt, Human
cacacugcaucagagaaccc

SEQ ID NO: 688527 - RNA, 27 nt, Human
caccacacugcccaaucccagggaccc

SEQ ID NO: 688528 - RNA, 21 nt, Human
cagaaaaggaaauucgacuuc

SEQ ID NO: 688529 - RNA, 30 nt, Human
cagggaacagauacauacaugcguguggug

SEQ ID NO: 688530 - RNA, 19 nt, Human
caucauagggccuggaggc

SEQ ID NO: 688531 - RNA, 27 nt, Human
caugcacacacauccacacgcauccuc

SEQ ID NO: 688532 - RNA, 24 nt, Human
ccaaacaccugacuccugggccau

SEQ ID NO: 688533 - RNA, 20 nt, Human
ccacacugcccaaucccagg

SEQ ID NO: 688534 - RNA, 22 nt, Human
ccacacugcccaaucccaggga

SEQ ID NO: 688535 - RNA, 18 nt, Human
ccacagcuaggagaacuc

SEQ ID NO: 688536 - RNA, 19 nt, Human
ccagaaggaacagggaaca

SEQ ID NO: 688537 - RNA, 30 nt, Human
ccaguguggacacacacacacacacacacg

SEQ ID NO: 688538 - RNA, 18 nt, Human
ccaguuagccucgggcag

SEQ ID NO: 688539 - RNA, 21 nt, Human
cccuccccaaaaaacgcacuc

SEQ ID NO: 688540 - RNA, 19 nt, Human
ccuaucuaauccucucuca

SEQ ID NO: 688541 - RNA, 19 nt, Human
ccugacccagaaggaacag

SEQ ID NO: 688542 - RNA, 24 nt, Human
ccugacuccugggccauggcaaga

SEQ ID NO: 688543 - RNA, 19 nt, Human
cgacuuccaugcuccacca

SEQ ID NO: 688544 - RNA, 18 nt, Human
cgcuuggagucuccuguc

SEQ ID NO: 688545 - RNA, 21 nt, Human
cuauguguuugcccgugcccu

SEQ ID NO: 688546 - RNA, 19 nt, Human
cucaaaggcaagccucccc

SEQ ID NO: 688547 - RNA, 19 nt, Human
cugcccaccuguaagcugc

SEQ ID NO: 688548 - RNA, 18 nt, Human
cuggcccugcagcccaga

SEQ ID NO: 688549 - RNA, 21 nt, Human
cuggggcacaagaggcaaggg

SEQ ID NO: 688550 - RNA, 19 nt, Human
cugucaggaggcagacuga

SEQ ID NO: 688551 - RNA, 26 nt, Human
cuucaaguugugcaaucacagcugcc

SEQ ID NO: 688552 - RNA, 19 nt, Human
cuugagcuuguaggcccag

SEQ ID NO: 688553 - RNA, 20 nt, Human
cuuucaccccauuagagucc

SEQ ID NO: 688554 - RNA, 26 nt, Human
gacacacacacacacacacacggaca

SEQ ID NO: 688555 - RNA, 18 nt, Human
gacccagaaggaacaggg

SEQ ID NO: 688556 - RNA, 23 nt, Human
gagccagagcucagaugcuggaa

SEQ ID NO: 688557 - RNA, 19 nt, Human
gagggguucccaggaguag

SEQ ID NO: 688558 - RNA, 18 nt, Human
gauggcccuucaaguugu

SEQ ID NO: 688559 - RNA, 21 nt, Human
gcaagccuauguguuugcccg

SEQ ID NO: 688560 - RNA, 23 nt, Human
gcacacacagacacacacaaaca

SEQ ID NO: 688561 - RNA, 19 nt, Human
gcaccccuagaaccuagag

SEQ ID NO: 688562 - RNA, 24 nt, Human
gcacgcacacacacacacacaccc

SEQ ID NO: 688563 - RNA, 18 nt, Human
gcccugagagggguuccc

SEQ ID NO: 688564 - RNA, 18 nt, Human
gcuccaaacaccugacuc

SEQ ID NO: 688565 - RNA, 21 nt, Human
ggaggcucuagccaguuagcc

SEQ ID NO: 688566 - RNA, 21 nt, Human
ggauauggccugggcagggag

SEQ ID NO: 688567 - RNA, 19 nt, Human
ggcaggcugcagugagacc

SEQ ID NO: 688568 - RNA, 24 nt, Human
ggcaugcacacacauccacacgca

SEQ ID NO: 688569 - RNA, 30 nt, Human
gggaacagauacauacaugcgugugcaugg

SEQ ID NO: 688570 - RNA, 23 nt, Human
gggcagagagagaaggugcuggg

SEQ ID NO: 688571 - RNA, 20 nt, Human
ggugagagccagagcucaga

SEQ ID NO: 688572 - RNA, 27 nt, Human
gugcaugcacacacacgcacacauucc

SEQ ID NO: 688573 - RNA, 20 nt, Human
guggagugccaacugcccug

SEQ ID NO: 688574 - RNA, 23 nt, Human
gugugcaugcacacacacgcaca

SEQ ID NO: 688575 - RNA, 26 nt, Human
uaaaaauaaacaccccuccccaaaaa

SEQ ID NO: 688576 - RNA, 23 nt, Human
uaaaauccaaguguaaaagcuua

SEQ ID NO: 688577 - RNA, 23 nt, Human
uaaacaccccuccccaaaaaacg

SEQ ID NO: 688578 - RNA, 24 nt, Human
uaaacaccccuccccaaaaaacgc

SEQ ID NO: 688579 - RNA, 21 nt, Human
uacacacagacaugaugacaa

SEQ ID NO: 688580 - RNA, 31 nt, Human
uacaugcgugugcaugcacacacacgcacag

SEQ ID NO: 688581 - RNA, 23 nt, Human
uaccgccuagagcuugacuacgc

SEQ ID NO: 688582 - RNA, 24 nt, Human
uacuaaaaauaaacaccccucccc

SEQ ID NO: 688583 - RNA, 23 nt, Human
uaugauggcuaaaauccaagugu

SEQ ID NO: 688584 - RNA, 20 nt, Human
ucagacuagcucuggcccug

SEQ ID NO: 688585 - RNA, 18 nt, Human
uccaaauaggaguggagu

SEQ ID NO: 688586 - RNA, 21 nt, Human
uccgaaguugacagacuaaca

SEQ ID NO: 688587 - RNA, 18 nt, Human
ucuggcagaggagcuggc

SEQ ID NO: 688588 - RNA, 21 nt, Human
ucuggcccugcagcccagaug

SEQ ID NO: 688589 - RNA, 27 nt, Human
ucuucccuuccagagagaaggugauga

SEQ ID NO: 688590 - RNA, 25 nt, Human
ugaaagagcuacacuugagaaggua

SEQ ID NO: 688591 - RNA, 19 nt, Human
ugaaugagcugccugggcu

SEQ ID NO: 688592 - RNA, 21 nt, Human
ugaaugagcugccugggcuug

SEQ ID NO: 688593 - RNA, 21 nt, Human
ugacccagaaggaacagggaa

SEQ ID NO: 688594 - RNA, 20 nt, Human
ugcaggagauagggcugaga

SEQ ID NO: 688595 - RNA, 23 nt, Human
ugccaacugcccugccucgcucc

SEQ ID NO: 688596 - RNA, 18 nt, Human
ugcccugccucgcuccaa

SEQ ID NO: 688597 - RNA, 22 nt, Human
uggcaaaaaaaaaaaaaaagaa

SEQ ID NO: 688598 - RNA, 23 nt, Human
uggcaagaguccaguccauuaag

SEQ ID NO: 688599 - RNA, 25 nt, Human
uggcaagaguccaguccauuaagug

SEQ ID NO: 688600 - RNA, 25 nt, Human
uggcuaaaauccaaguguaaaagcu

SEQ ID NO: 688601 - RNA, 24 nt, Human
ugucaggaggcagacugaccuaau

SEQ ID NO: 688602 - RNA, 21 nt, Human
uuagagucccgguagccauuc

SEQ ID NO: 688603 - RNA, 23 nt, Human
uuggagucuccuguccucaucaa

SEQ ID NO: 688604 - RNA, 22 nt, Human
uuggcaaaaaaaaaaaaaaaga

SEQ ID NO: 688605 - RNA, 21 nt, Human
acagcaccucggucuccuggc

SEQ ID NO: 688606 - RNA, 18 nt, Human
agaaagaaagcugggggg

SEQ ID NO: 688607 - RNA, 19 nt, Human
agagggaggagggaggggu

SEQ ID NO: 688608 - RNA, 21 nt, Human
agagggaggagggagggguca

SEQ ID NO: 688609 - RNA, 24 nt, Human
aggugggcgcugacgccgcgggcg

SEQ ID NO: 688610 - RNA, 19 nt, Human
caccaucuguagaaagaaa

SEQ ID NO: 688611 - RNA, 20 nt, Human
cagagcgagcagugccuucc

SEQ ID NO: 688612 - RNA, 21 nt, Human
cagagcgagcagugccuuccc

SEQ ID NO: 688613 - RNA, 21 nt, Human
cagcacaauucccuccauuga

SEQ ID NO: 688614 - RNA, 24 nt, Human
cagucuagucccuccccuuucccu

SEQ ID NO: 688615 - RNA, 21 nt, Human
cauagaugguggcagacagcu

SEQ ID NO: 688616 - RNA, 22 nt, Human
ccaucgcccaggcccccguugg

SEQ ID NO: 688617 - RNA, 19 nt, Human
cccccguuggcugaagggc

SEQ ID NO: 688618 - RNA, 20 nt, Human
ccugugcaugugccugugug

SEQ ID NO: 688619 - RNA, 19 nt, Human
ccuguguggcuggagaagu

SEQ ID NO: 688620 - RNA, 21 nt, Human
ccuugcgcagcuccguggucg

SEQ ID NO: 688621 - RNA, 21 nt, Human
cuccccuuucccuagcccagc

SEQ ID NO: 688622 - RNA, 21 nt, Human
cuccguggucgaccaucgccc

SEQ ID NO: 688623 - RNA, 22 nt, Human
cuccuggcugcgccggcugcgg

SEQ ID NO: 688624 - RNA, 22 nt, Human
cugagggguccuggcuucucuc

SEQ ID NO: 688625 - RNA, 21 nt, Human
gacagcugagggguccuggcu

SEQ ID NO: 688626 - RNA, 21 nt, Human
gaggagggaggggucagaccc

SEQ ID NO: 688627 - RNA, 19 nt, Human
gauagaggccuuguccagg

SEQ ID NO: 688628 - RNA, 19 nt, Human
gcacaauucccuccauuga

SEQ ID NO: 688629 - RNA, 22 nt, Human
gcgaagggcagcgugugagcca

SEQ ID NO: 688630 - RNA, 19 nt, Human
gcgccggcugcgggccgca

SEQ ID NO: 688631 - RNA, 20 nt, Human
ggaggccuuuuccuguggga

SEQ ID NO: 688632 - RNA, 18 nt, Human
gggcgaagggcagcgugu

SEQ ID NO: 688633 - RNA, 19 nt, Human
gggggguaagggaggcaca

SEQ ID NO: 688634 - RNA, 21 nt, Human
gggguaaauggggcuaagaag

SEQ ID NO: 688635 - RNA, 21 nt, Human
ggugaggucuuuaugguguau

SEQ ID NO: 688636 - RNA, 19 nt, Human
gugcagccaggacccgggu

SEQ ID NO: 688637 - RNA, 19 nt, Human
gugcaggaggggaugcggu

SEQ ID NO: 688638 - RNA, 18 nt, Human
uagaggccuuguccaggu

SEQ ID NO: 688639 - RNA, 21 nt, Human
uagaugguggcagacagcuga

SEQ ID NO: 688640 - RNA, 23 nt, Human
uccacaaacgggguaaauggggc

SEQ ID NO: 688641 - RNA, 19 nt, Human
uccagagggaggagggagg

SEQ ID NO: 688642 - RNA, 22 nt, Human
ucuguagaaagaaagcuggggg

SEQ ID NO: 688643 - RNA, 19 nt, Human
ucuuuaugguguauagagg

SEQ ID NO: 688644 - RNA, 22 nt, Human
ugccuguguggcuggagaaguc

SEQ ID NO: 688645 - RNA, 19 nt, Human
uggcaauaugcagacagca

SEQ ID NO: 688646 - RNA, 19 nt, Human
uggugaguuucagagccag

SEQ ID NO: 688647 - RNA, 19 nt, Human
ugguggcagacagcugagg

SEQ ID NO: 688648 - RNA, 20 nt, Human
ugugcaugugccuguguggc

SEQ ID NO: 688649 - RNA, 19 nt, Human
uuccuugcgcagcuccgug

SEQ ID NO: 688650 - RNA, 23 nt, Human
uuuaugguguauagagguuggug

SEQ ID NO: 688651 - RNA, 19 nt, Human
aaagugcuaggauuacagg

SEQ ID NO: 688652 - RNA, 24 nt, Human
aaagugcuaggauuacaggcauga

SEQ ID NO: 688653 - RNA, 25 nt, Human
aagcaauucucccgccucagccucc

SEQ ID NO: 688654 - RNA, 26 nt, Human
aagugcuaggauuacaggcaugagcc

SEQ ID NO: 688655 - RNA, 23 nt, Human
acaucuaagagaugucagagcca

SEQ ID NO: 688656 - RNA, 24 nt, Human
accagcgcagaagcuucccgccac

SEQ ID NO: 688657 - RNA, 22 nt, Human
acucccaacagcccacccacac

SEQ ID NO: 688658 - RNA, 21 nt, Human
acugaacacuccauccucacu

SEQ ID NO: 688659 - RNA, 23 nt, Human
acuuuaaaauguaaaaugagaaa

SEQ ID NO: 688660 - RNA, 24 nt, Human
acuuuuguauuuuuaguagagaug

SEQ ID NO: 688661 - RNA, 18 nt, Human
agaagcuucccgccacaa

SEQ ID NO: 688662 - RNA, 24 nt, Human
agccaccgcaaccggccuaaacag

SEQ ID NO: 688663 - RNA, 18 nt, Human
aggacccuacuccucugc

SEQ ID NO: 688664 - RNA, 22 nt, Human
aggccucugccaccacacccag

SEQ ID NO: 688665 - RNA, 24 nt, Human
aggugauccacccaccucagccuc

SEQ ID NO: 688666 - RNA, 22 nt, Human
aguagagaugggguuucgccau

SEQ ID NO: 688667 - RNA, 26 nt, Human
auccucacucccaacagcccacccac

SEQ ID NO: 688668 - RNA, 22 nt, Human
augggguuucgccauguuggcg

SEQ ID NO: 688669 - RNA, 23 nt, Human
augggguuucgccauguuggcga

SEQ ID NO: 688670 - RNA, 24 nt, Human
augggguuucgccauguuggcgag

SEQ ID NO: 688671 - RNA, 21 nt, Human
auucucccgccucagccuccc

SEQ ID NO: 688672 - RNA, 24 nt, Human
caaagugcuaggauuacaggcaug

SEQ ID NO: 688673 - RNA, 21 nt, Human
caagacuaaaggaaccccaga

SEQ ID NO: 688674 - RNA, 19 nt, Human
caaugagcauccaguuaga

SEQ ID NO: 688675 - RNA, 25 nt, Human
cacaaccucuucaacugcuauccaa

SEQ ID NO: 688676 - RNA, 22 nt, Human
cacaauguccauaacuugagca

SEQ ID NO: 688677 - RNA, 24 nt, Human
caccaaauaauugagcauaagaca

SEQ ID NO: 688678 - RNA, 22 nt, Human
caccagaccccgggguaagggc

SEQ ID NO: 688679 - RNA, 22 nt, Human
cacccaccucagccucccaaag

SEQ ID NO: 688680 - RNA, 23 nt, Human
cacccaccucagccucccaaagu

SEQ ID NO: 688681 - RNA, 24 nt, Human
caccucagccucccaaagugcuag

SEQ ID NO: 688682 - RNA, 21 nt, Human
caccugugcauuaaacaggcu

SEQ ID NO: 688683 - RNA, 23 nt, Human
cacucccaacagcccacccacac

SEQ ID NO: 688684 - RNA, 19 nt, Human
cacugaacacuccauccuc

SEQ ID NO: 688685 - RNA, 22 nt, Human
cacugcaaccuccguccccggg

SEQ ID NO: 688686 - RNA, 23 nt, Human
cagaccccgggguaagggcgaga

SEQ ID NO: 688687 - RNA, 22 nt, Human
cagccucccaaggaacugggau

SEQ ID NO: 688688 - RNA, 20 nt, Human
caucccaccacccccuucag

SEQ ID NO: 688689 - RNA, 19 nt, Human
ccaaagugcuaggauuaca

SEQ ID NO: 688690 - RNA, 24 nt, Human
ccaaagugcuaggauuacaggcau

SEQ ID NO: 688691 - RNA, 22 nt, Human
ccaauacacacuauguuggagg

SEQ ID NO: 688692 - RNA, 21 nt, Human
ccacaaaacucaccggagaca

SEQ ID NO: 688693 - RNA, 26 nt, Human
ccacccaccucagccucccaaagugc

SEQ ID NO: 688694 - RNA, 18 nt, Human
ccagaccccgggguaagg

SEQ ID NO: 688695 - RNA, 22 nt, Human
ccauguuggcgaggcuggucuc

SEQ ID NO: 688696 - RNA, 23 nt, Human
ccauguuggcgaggcuggucucg

SEQ ID NO: 688697 - RNA, 23 nt, Human
ccccagacagauguuuaggaagu

SEQ ID NO: 688698 - RNA, 19 nt, Human
ccccggguucaagcaauuc

SEQ ID NO: 688699 - RNA, 21 nt, Human
ccccggguucaagcaauucuc

SEQ ID NO: 688700 - RNA, 24 nt, Human
ccugaccucaggugauccacccac

SEQ ID NO: 688701 - RNA, 24 nt, Human
cgccauguuggcgaggcuggucuc

SEQ ID NO: 688702 - RNA, 26 nt, Human
cgggguaagggcgagaucaaccuauc

SEQ ID NO: 688703 - RNA, 24 nt, Human
cucacucccaacagcccacccaca

SEQ ID NO: 688704 - RNA, 18 nt, Human
cucauagccauaagcaau

SEQ ID NO: 688705 - RNA, 18 nt, Human
cuccauccucacucccaa

SEQ ID NO: 688706 - RNA, 20 nt, Human
cuccgggggaacagccggga

SEQ ID NO: 688707 - RNA, 21 nt, Human
cugaaguugggaccggggucc

SEQ ID NO: 688708 - RNA, 22 nt, Human
cugcaaccuccguccccggguu

SEQ ID NO: 688709 - RNA, 21 nt, Human
cuucccgccacaaaacucacc

SEQ ID NO: 688710 - RNA, 20 nt, Human
cuuuuguauuuuuaguagag

SEQ ID NO: 688711 - RNA, 24 nt, Human
cuuuuuuuuuuugagauggagucu

SEQ ID NO: 688712 - RNA, 24 nt, Human
gaaagcacagcauacaccagaccc

SEQ ID NO: 688713 - RNA, 24 nt, Human
gaccucaggugauccacccaccuc

SEQ ID NO: 688714 - RNA, 20 nt, Human
gagaugggguuucgccaugu

SEQ ID NO: 688715 - RNA, 24 nt, Human
gagaugggguuucgccauguuggc

SEQ ID NO: 688716 - RNA, 18 nt, Human
gauuacaggcaugagcca

SEQ ID NO: 688717 - RNA, 20 nt, Human
gauuacaggcaugagccacc

SEQ ID NO: 688718 - RNA, 23 nt, Human
gauuacaggcaugagccaccgca

SEQ ID NO: 688719 - RNA, 21 nt, Human
gcaaccuccguccccggguuc

SEQ ID NO: 688720 - RNA, 19 nt, Human
gcacagcauacaccagacc

SEQ ID NO: 688721 - RNA, 21 nt, Human
gcacagcauacaccagacccc

SEQ ID NO: 688722 - RNA, 23 nt, Human
gccucagccucccaaggaacugg

SEQ ID NO: 688723 - RNA, 19 nt, Human
gcuaggaaugggacuccca

SEQ ID NO: 688724 - RNA, 23 nt, Human
gcuggucucgaacuccugaccuc

SEQ ID NO: 688725 - RNA, 18 nt, Human
ggaacugggauuacaggc

SEQ ID NO: 688726 - RNA, 23 nt, Human
ggacccuccgggggaacagccgg

SEQ ID NO: 688727 - RNA, 22 nt, Human
ggauuacaggcaugagccaccg

SEQ ID NO: 688728 - RNA, 24 nt, Human
ggcuggucucgaacuccugaccuc

SEQ ID NO: 688729 - RNA, 19 nt, Human
gggguuucgccauguuggc

SEQ ID NO: 688730 - RNA, 22 nt, Human
ggguuucgccauguuggcgagg

SEQ ID NO: 688731 - RNA, 19 nt, Human
ggucucgaacuccugaccu

SEQ ID NO: 688732 - RNA, 23 nt, Human
guagagaugggguuucgccaugu

SEQ ID NO: 688733 - RNA, 24 nt, Human
gugauccacccaccucagccuccc

SEQ ID NO: 688734 - RNA, 18 nt, Human
guggcccaggcuggguac

SEQ ID NO: 688735 - RNA, 22 nt, Human
uaacuugagcaggcuuuggcau

SEQ ID NO: 688736 - RNA, 24 nt, Human
uaacuuuuguauuuuuaguagaga

SEQ ID NO: 688737 - RNA, 18 nt, Human
uaagacauucaagacuaa

SEQ ID NO: 688738 - RNA, 19 nt, Human
uaagagaugucagagccau

SEQ ID NO: 688739 - RNA, 23 nt, Human
uacaggcaugagccaccgcaacc

SEQ ID NO: 688740 - RNA, 24 nt, Human
uacaggccucugccaccacaccca

SEQ ID NO: 688741 - RNA, 22 nt, Human
uagagaugggguuucgccaugu

SEQ ID NO: 688742 - RNA, 18 nt, Human
uaggauuacaggcaugag

SEQ ID NO: 688743 - RNA, 21 nt, Human
uaggauuacaggcaugagcca

SEQ ID NO: 688744 - RNA, 22 nt, Human
uaggauuacaggcaugagccac

SEQ ID NO: 688745 - RNA, 23 nt, Human
uaggauuacaggcaugagccacc

SEQ ID NO: 688746 - RNA, 24 nt, Human
uaggauuacaggcaugagccaccg

SEQ ID NO: 688747 - RNA, 24 nt, Human
uaggauuacaggcaugagccaccg

SEQ ID NO: 688748 - RNA, 24 nt, Human
uaguagagaugggguuucgccaug

SEQ ID NO: 688749 - RNA, 18 nt, Human
uauggccaguauggaagg

SEQ ID NO: 688750 - RNA, 19 nt, Human
ucacugcaaccuccguccc

SEQ ID NO: 688751 - RNA, 22 nt, Human
ucacugcaaccuccguccccgg

SEQ ID NO: 688752 - RNA, 22 nt, Human
ucacugcaaccuccguccccgg

SEQ ID NO: 688753 - RNA, 23 nt, Human
ucacugcaaccuccguccccggg

SEQ ID NO: 688754 - RNA, 26 nt, Human
ucacugcaaccuccguccccggguuc

SEQ ID NO: 688755 - RNA, 18 nt, Human
ucagccucccaaagugcu

SEQ ID NO: 688756 - RNA, 20 nt, Human
ucagccucccaaggaacugg

SEQ ID NO: 688757 - RNA, 20 nt, Human
ucaggugauccacccaccuc

SEQ ID NO: 688758 - RNA, 21 nt, Human
uccacccaccucagccuccca

SEQ ID NO: 688759 - RNA, 24 nt, Human
uccauaacuugagcaggcuuuggc

SEQ ID NO: 688760 - RNA, 24 nt, Human
ucccaaagugcuaggauuacaggc

SEQ ID NO: 688761 - RNA, 19 nt, Human
ucccaacagcugaaguugg

SEQ ID NO: 688762 - RNA, 24 nt, Human
ucccaaggaacugggauuacaggc

SEQ ID NO: 688763 - RNA, 23 nt, Human
ucccaccacccccuucagaccaa

SEQ ID NO: 688764 - RNA, 23 nt, Human
uccccggguucaagcaauucucc

SEQ ID NO: 688765 - RNA, 21 nt, Human
uccuucugaaaggccucugga

SEQ ID NO: 688766 - RNA, 22 nt, Human
ucgccauguuggcgaggcuggu

SEQ ID NO: 688767 - RNA, 24 nt, Human
ucucauagccauaagcaauccacu

SEQ ID NO: 688768 - RNA, 25 nt, Human
ucucccgccucagccucccaaggaa

SEQ ID NO: 688769 - RNA, 23 nt, Human
ucucgaacuccugaccucaggug

SEQ ID NO: 688770 - RNA, 20 nt, Human
ucugaaaggccucuggaccc

SEQ ID NO: 688771 - RNA, 22 nt, Human
ucuugcacuguggcccaggcug

SEQ ID NO: 688772 - RNA, 23 nt, Human
ucuugcacuguggcccaggcugg

SEQ ID NO: 688773 - RNA, 23 nt, Human
ucuugcacuguggcccaggcugg

SEQ ID NO: 688774 - RNA, 24 nt, Human
ucuugcacuguggcccaggcuggg

SEQ ID NO: 688775 - RNA, 25 nt, Human
ucuuuucuuuuuuuuuuugagaugg

SEQ ID NO: 688776 - RNA, 21 nt, Human
ugaaaauaucaccaucuccca

SEQ ID NO: 688777 - RNA, 21 nt, Human
ugaccucaggugauccaccca

SEQ ID NO: 688778 - RNA, 24 nt, Human
ugaccucaggugauccacccaccu

SEQ ID NO: 688779 - RNA, 23 nt, Human
ugagauggagucuugcacugugg

SEQ ID NO: 688780 - RNA, 24 nt, Human
ugauccacccaccucagccuccca

SEQ ID NO: 688781 - RNA, 23 nt, Human
ugcuaggaaugggacucccaucu

SEQ ID NO: 688782 - RNA, 19 nt, Human
uggaggagcucuuguggaa

SEQ ID NO: 688783 - RNA, 18 nt, Human
uggcaucccaccaccccc

SEQ ID NO: 688784 - RNA, 25 nt, Human
uggcaucccaccacccccuucagac

SEQ ID NO: 688785 - RNA, 22 nt, Human
uggcccaggcuggguacagcag

SEQ ID NO: 688786 - RNA, 24 nt, Human
uggcgaggcuggucucgaacuccu

SEQ ID NO: 688787 - RNA, 19 nt, Human
ugggauuacaggccucugc

SEQ ID NO: 688788 - RNA, 21 nt, Human
ugggauuacaggccucugcca

SEQ ID NO: 688789 - RNA, 22 nt, Human
ugggauuacaggccucugccac

SEQ ID NO: 688790 - RNA, 24 nt, Human
ugggauuacaggccucugccacca

SEQ ID NO: 688791 - RNA, 24 nt, Human
ugggguuucgccauguuggcgagg

SEQ ID NO: 688792 - RNA, 19 nt, Human
ugucuaggucaguguucca

SEQ ID NO: 688793 - RNA, 18 nt, Human
uuaguagagaugggguuu

SEQ ID NO: 688794 - RNA, 22 nt, Human
uuaguagagaugggguuucgcc

SEQ ID NO: 688795 - RNA, 24 nt, Human
uuaguagagaugggguuucgccau

SEQ ID NO: 688796 - RNA, 23 nt, Human
uucaagacuaaaggaaccccaga

SEQ ID NO: 688797 - RNA, 24 nt, Human
uucaagcaauucucccgccucagc

SEQ ID NO: 688798 - RNA, 21 nt, Human
uugaaaauaucaccaucuccc

SEQ ID NO: 688799 - RNA, 21 nt, Human
uugcacuguggcccaggcugg

SEQ ID NO: 688800 - RNA, 23 nt, Human
uuguauuuuuaguagagaugggg

SEQ ID NO: 688801 - RNA, 21 nt, Human
uuucgccauguuggcgaggcu

SEQ ID NO: 688802 - RNA, 22 nt, Human
uuuuuaguagagaugggguuuc

SEQ ID NO: 688803 - RNA, 23 nt, Human
uuuuuaguagagaugggguuucg

SEQ ID NO: 688804 - RNA, 20 nt, Human
uuuuuuuuuuuuuuuuuugg

SEQ ID NO: 688805 - RNA, 21 nt, Human
aagagaaaauuauccccaaaa

SEQ ID NO: 688806 - RNA, 18 nt, Human
auacuggaaauugccuaa

SEQ ID NO: 688807 - RNA, 24 nt, Human
cauacacaggcaaaaauaagugug

SEQ ID NO: 688808 - RNA, 19 nt, Human
uaacuuaaucauugccuaa

SEQ ID NO: 688809 - RNA, 22 nt, Human
uccauacacaggcaaaaauaag

SEQ ID NO: 688810 - RNA, 23 nt, Human
ucucuccauacacaggcaaaaau

SEQ ID NO: 688811 - RNA, 21 nt, Human
ugcgguuuuaaaauuauuucu

SEQ ID NO: 688812 - RNA, 24 nt, Human
ugcgguuuuaaaauuauuucuuga

SEQ ID NO: 688813 - RNA, 19 nt, Human
cccugagccgcgggaaccu

SEQ ID NO: 688814 - RNA, 25 nt, Human
cccugagccgcgggaaccucucacc

SEQ ID NO: 688815 - RNA, 22 nt, Human
guccauuuuucccuuuccaucc

SEQ ID NO: 688816 - RNA, 19 nt, Human
uuuuuuuuuuuuuaaggga

SEQ ID NO: 688817 - RNA, 23 nt, Human
uuuuuuuuuuuuuuuuuuaaggg

SEQ ID NO: 688818 - RNA, 22 nt, Human
aaaauauucacauaacuguauc

SEQ ID NO: 688819 - RNA, 26 nt, Human
aaacccaacaaaucuuaaaauugcaa

SEQ ID NO: 688820 - RNA, 25 nt, Human
aaccauugaaacaagucaguaacaa

SEQ ID NO: 688821 - RNA, 19 nt, Human
aacuuaaaaaaauacagag

SEQ ID NO: 688822 - RNA, 21 nt, Human
aauuugucuuaaauaggauuu

SEQ ID NO: 688823 - RNA, 18 nt, Human
acagagcccuuguugauu

SEQ ID NO: 688824 - RNA, 19 nt, Human
acaguaauaaagguuccca

SEQ ID NO: 688825 - RNA, 22 nt, Human
acauaacuguaucacagaucuu

SEQ ID NO: 688826 - RNA, 20 nt, Human
accucgagacgucgccccuc

SEQ ID NO: 688827 - RNA, 22 nt, Human
agacuuaaaagggaccuaaaua

SEQ ID NO: 688828 - RNA, 21 nt, Human
aggaaacagacauucagaaaa

SEQ ID NO: 688829 - RNA, 18 nt, Human
aggcuuuggggagaggga

SEQ ID NO: 688830 - RNA, 18 nt, Human
aguaacaaaauauucaca

SEQ ID NO: 688831 - RNA, 20 nt, Human
agugaaaacuggcaucugaa

SEQ ID NO: 688832 - RNA, 25 nt, Human
auugcaauuagacuuaaaagggacc

SEQ ID NO: 688833 - RNA, 18 nt, Human
cacccgccccucgcggcc

SEQ ID NO: 688834 - RNA, 21 nt, Human
ccacuuuauguuucuuccccc

SEQ ID NO: 688835 - RNA, 20 nt, Human
cccgcaccuccuccguuuua

SEQ ID NO: 688836 - RNA, 20 nt, Human
cccgccccucgcggccuaga

SEQ ID NO: 688837 - RNA, 25 nt, Human
ccucggccucuccagggcuaccggg

SEQ ID NO: 688838 - RNA, 23 nt, Human
cgucccgcaccuccuccguuuua

SEQ ID NO: 688839 - RNA, 19 nt, Human
cuccagggcuaccgggccc

SEQ ID NO: 688840 - RNA, 24 nt, Human
cucuccagggcuaccgggcccgcg

SEQ ID NO: 688841 - RNA, 20 nt, Human
cugacgcugggcggugaucc

SEQ ID NO: 688842 - RNA, 21 nt, Human
gagagggaaggagacgcggug

SEQ ID NO: 688843 - RNA, 22 nt, Human
gccucucauaaaacccaacaaa

SEQ ID NO: 688844 - RNA, 19 nt, Human
ggcggugauccaggcuuug

SEQ ID NO: 688845 - RNA, 20 nt, Human
gucuccgcgucccgcaccuc

SEQ ID NO: 688846 - RNA, 24 nt, Human
uaaaaagaugcaaugcuucaaaaa

SEQ ID NO: 688847 - RNA, 25 nt, Human
uaaaacccaacaaaucuuaaaauug

SEQ ID NO: 688848 - RNA, 24 nt, Human
uaaaagggaccuaaauaccacuuc

SEQ ID NO: 688849 - RNA, 23 nt, Human
uaaaauugcaauuagacuuaaaa

SEQ ID NO: 688850 - RNA, 22 nt, Human
uaacaaaauauucacauaacug

SEQ ID NO: 688851 - RNA, 23 nt, Human
uaacuuaaaaaaauacagagccc

SEQ ID NO: 688852 - RNA, 25 nt, Human
uaaguaacagccucucauaaaaccc

SEQ ID NO: 688853 - RNA, 19 nt, Human
uagacuuaaaagggaccua

SEQ ID NO: 688854 - RNA, 23 nt, Human
uagauuuauuaaaaagaugcaau

SEQ ID NO: 688855 - RNA, 20 nt, Human
uauaaaauccuuauacaagu

SEQ ID NO: 688856 - RNA, 21 nt, Human
uauaacugacuacuuacugag

SEQ ID NO: 688857 - RNA, 23 nt, Human
uaucacagaucuuaggaaacaga

SEQ ID NO: 688858 - RNA, 21 nt, Human
uaucauauauauaaaauccuu

SEQ ID NO: 688859 - RNA, 24 nt, Human
ucacaguaauaaagguucccacaa

SEQ ID NO: 688860 - RNA, 22 nt, Human
ucuccuucacaguaauaaaggu

SEQ ID NO: 688861 - RNA, 23 nt, Human
ugacgcugggcggugauccaggc

SEQ ID NO: 688862 - RNA, 19 nt, Human
ugaggaacuucaaagccgg

SEQ ID NO: 688863 - RNA, 24 nt, Human
uuaacuuaaaaaaauacagagccc

SEQ ID NO: 688864 - RNA, 22 nt, Human
uucaggauagauuuauuaaaaa

SEQ ID NO: 688865 - RNA, 21 nt, Human
uuccauuacagugaauucuga

SEQ ID NO: 688866 - RNA, 18 nt, Human
uuuggggagagggaagga

SEQ ID NO: 688867 - RNA, 18 nt, Human
uuuugcaacauuuucugc

SEQ ID NO: 688868 - RNA, 21 nt, Human
uuuuuuuuuuuuuuuuugcaa

SEQ ID NO: 688869 - RNA, 25 nt, Human
uuuuuuuuuuuuuuuuugcaacauu

SEQ ID NO: 688870 - RNA, 20 nt, Human
uuuuuuuuuuuuuuuuuugg

SEQ ID NO: 688871 - RNA, 23 nt, Human
aaaaaaggcaaauaaaugcagaa

SEQ ID NO: 688872 - RNA, 18 nt, Human
aaaaagaaaaaaggcaaa

SEQ ID NO: 688873 - RNA, 18 nt, Human
aaauaggggaagacaaca

SEQ ID NO: 688874 - RNA, 21 nt, Human
aacagugguggccaccacccc

SEQ ID NO: 688875 - RNA, 19 nt, Human
aagcaagagaaaaagaaaa

SEQ ID NO: 688876 - RNA, 26 nt, Human
aagcaagagaaaaagaaaaaaggcaa

SEQ ID NO: 688877 - RNA, 21 nt, Human
aagcauauuuguucuucagag

SEQ ID NO: 688878 - RNA, 22 nt, Human
aagccggagggagcccugaggc

SEQ ID NO: 688879 - RNA, 20 nt, Human
acagagcaggcuccaacaag

SEQ ID NO: 688880 - RNA, 22 nt, Human
agaaaaagaaaaaaggcaaaua

SEQ ID NO: 688881 - RNA, 19 nt, Human
agacaacaggccaaggcca

SEQ ID NO: 688882 - RNA, 24 nt, Human
agagccucccagaugccccugcuc

SEQ ID NO: 688883 - RNA, 19 nt, Human
agaggggaagggcaagaug

SEQ ID NO: 688884 - RNA, 24 nt, Human
agagugcugaaugucaacucccaa

SEQ ID NO: 688885 - RNA, 25 nt, Human
agcaauaaggaagccaugucugaga

SEQ ID NO: 688886 - RNA, 21 nt, Human
aggaaggaugugugggaauca

SEQ ID NO: 688887 - RNA, 21 nt, Human
aggcagccagagccucccaga

SEQ ID NO: 688888 - RNA, 25 nt, Human
caacucccaggccuccucuuccagc

SEQ ID NO: 688889 - RNA, 27 nt, Human
caagagaaaaagaaaaaaggcaaauaa

SEQ ID NO: 688890 - RNA, 21 nt, Human
cacacuggggccugcaggcau

SEQ ID NO: 688891 - RNA, 19 nt, Human
caccaccccuuagaagcaa

SEQ ID NO: 688892 - RNA, 24 nt, Human
caccaccccuuagaagcaagagaa

SEQ ID NO: 688893 - RNA, 22 nt, Human
caccaggccauugcugcauuug

SEQ ID NO: 688894 - RNA, 18 nt, Human
cagaaaauaggggaagaa

SEQ ID NO: 688895 - RNA, 20 nt, Human
cagaaggcagccagagccuc

SEQ ID NO: 688896 - RNA, 20 nt, Human
cagagccucccagaugcccc

SEQ ID NO: 688897 - RNA, 21 nt, Human
cagggcuuggccacaggcagg

SEQ ID NO: 688898 - RNA, 23 nt, Human
caguugaggcacacacuggggcc

SEQ ID NO: 688899 - RNA, 23 nt, Human
cauagcccaggcagagggacaga

SEQ ID NO: 688900 - RNA, 22 nt, Human
ccaaaagcauauuuguucuuca

SEQ ID NO: 688901 - RNA, 22 nt, Human
ccagagccucccagaugccccu

SEQ ID NO: 688902 - RNA, 22 nt, Human
cccauagcccaggcagagggac

SEQ ID NO: 688903 - RNA, 23 nt, Human
ccccacuucccauagcccaggca

SEQ ID NO: 688904 - RNA, 18 nt, Human
cccgcagucuccgcccuc

SEQ ID NO: 688905 - RNA, 20 nt, Human
cccugcucaggacccuuccc

SEQ ID NO: 688906 - RNA, 26 nt, Human
cccugcugccaaaccaccaugaucca

SEQ ID NO: 688907 - RNA, 20 nt, Human
ccgccccgcagucuccgccc

SEQ ID NO: 688908 - RNA, 18 nt, Human
ccucccagaugccccugc

SEQ ID NO: 688909 - RNA, 24 nt, Human
ccugaagucagaaucaguugaggc

SEQ ID NO: 688910 - RNA, 21 nt, Human
ccugcaggcaucgagugagcc

SEQ ID NO: 688911 - RNA, 19 nt, Human
cuaaaaacaauucucuacg

SEQ ID NO: 688912 - RNA, 18 nt, Human
cuggaagagugcugaaug

SEQ ID NO: 688913 - RNA, 21 nt, Human
cuucccauagcccaggcagag

SEQ ID NO: 688914 - RNA, 20 nt, Human
cuuggccacaggcagggcuu

SEQ ID NO: 688915 - RNA, 19 nt, Human
gaaauggaguggggagcac

SEQ ID NO: 688916 - RNA, 21 nt, Human
gaaggcagccagagccuccca

SEQ ID NO: 688917 - RNA, 18 nt, Human
gccccgcagucuccgccc

SEQ ID NO: 688918 - RNA, 18 nt, Human
gcccugaggccucauccu

SEQ ID NO: 688919 - RNA, 23 nt, Human
gcucaggacccuuccccgcagcu

SEQ ID NO: 688920 - RNA, 20 nt, Human
ggaugcaggaaggaugugug

SEQ ID NO: 688921 - RNA, 18 nt, Human
gggaagacaacaggccaa

SEQ ID NO: 688922 - RNA, 24 nt, Human
gggcaagagccaagcugucuggga

SEQ ID NO: 688923 - RNA, 27 nt, Human
gggcaagagccaagcugucugggaggg

SEQ ID NO: 688924 - RNA, 18 nt, Human
gugguggccaccaccccu

SEQ ID NO: 688925 - RNA, 18 nt, Human
uaaaugcagaaggcagcc

SEQ ID NO: 688926 - RNA, 20 nt, Human
uagcccaggcagagggacag

SEQ ID NO: 688927 - RNA, 21 nt, Human
uauccugucaggggcaagagc

SEQ ID NO: 688928 - RNA, 25 nt, Human
ucccagaugccccugcucaggaccc

SEQ ID NO: 688929 - RNA, 18 nt, Human
uccucacuggggguccua

SEQ ID NO: 688930 - RNA, 19 nt, Human
ucuaaacagugguggccac

SEQ ID NO: 688931 - RNA, 19 nt, Human
ugagaggggaagggcaaga

SEQ ID NO: 688932 - RNA, 20 nt, Human
ugccaagccggagggagccc

SEQ ID NO: 688933 - RNA, 20 nt, Human
uggaagagugcugaauguca

SEQ ID NO: 688934 - RNA, 24 nt, Human
uggaggaacauguugugucugccg

SEQ ID NO: 688935 - RNA, 22 nt, Human
uggaguggggagcacagagcag

SEQ ID NO: 688936 - RNA, 21 nt, Human
ugugggaaucaccaggccauu

SEQ ID NO: 688937 - RNA, 18 nt, Human
uugcugcauuugggguga

SEQ ID NO: 688938 - RNA, 21 nt, Human
uuggcaguggccacucagggc

SEQ ID NO: 688939 - RNA, 22 nt, Human
uuggucacaaacucugcuaaaa

SEQ ID NO: 688940 - RNA, 18 nt, Human
uuuuuuuuuuuuuuuucg

SEQ ID NO: 688941 - RNA, 21 nt, Human
uuuuuuuuuuuuuuuucgugg

SEQ ID NO: 688942 - RNA, 20 nt, Human
uuuuuuuuuuuuuuuuucgu

SEQ ID NO: 688943 - RNA, 21 nt, Human
aaccaauucggcgccggcacc

SEQ ID NO: 688944 - RNA, 21 nt, Human
cacccuuugggugaaaccuaa

SEQ ID NO: 688945 - RNA, 19 nt, Human
cagcuuguguccuugggag

SEQ ID NO: 688946 - RNA, 25 nt, Human
cccgccuuuuuuucuucucggccuc

SEQ ID NO: 688947 - RNA, 21 nt, Human
cccgcgacgcugccuuucuca

SEQ ID NO: 688948 - RNA, 23 nt, Human
ccuuuuguggcuucaagugucua

SEQ ID NO: 688949 - RNA, 19 nt, Human
cuuuuuuucuucucggccu

SEQ ID NO: 688950 - RNA, 19 nt, Human
gaccguuggcccuuggccg

SEQ ID NO: 688951 - RNA, 24 nt, Human
gacgcugccuuucucacuggucac

SEQ ID NO: 688952 - RNA, 22 nt, Human
gacggcucccgccuuuuuuucu

SEQ ID NO: 688953 - RNA, 23 nt, Human
ggcucccgccuuuuuuucuucuc

SEQ ID NO: 688954 - RNA, 21 nt, Human
uaaguacauuagagucaggaa

SEQ ID NO: 688955 - RNA, 18 nt, Human
ucagcccgcgacgcugcc

SEQ ID NO: 688956 - RNA, 21 nt, Human
uccacagacacagggcaaggg

SEQ ID NO: 688957 - RNA, 20 nt, Human
uccucgcgagcagaugagga

SEQ ID NO: 688958 - RNA, 20 nt, Human
ucgcgcacgcgcagugcugc

SEQ ID NO: 688959 - RNA, 24 nt, Human
ugaaaccuaaucagcccgcgacgc

SEQ ID NO: 688960 - RNA, 18 nt, Human
ugcugcggcaacgugggg

SEQ ID NO: 688961 - RNA, 19 nt, Human
uguaugcuuuguacaugua

SEQ ID NO: 688962 - RNA, 18 nt, Human
uguuccacagacacaggg

SEQ ID NO: 688963 - RNA, 19 nt, Human
uuagaaaccaauucggcgc

SEQ ID NO: 688964 - RNA, 19 nt, Human
uucgcaaggcagaagagag

SEQ ID NO: 688965 - RNA, 21 nt, Human
uugggagcugcagucuucucu

SEQ ID NO: 688966 - RNA, 22 nt, Human
uuguacauguaucaaggguccc

SEQ ID NO: 688967 - RNA, 24 nt, Human
acaagucugacuguuaugcccaaa

SEQ ID NO: 688968 - RNA, 18 nt, Human
agcccggcggcaacagcc

SEQ ID NO: 688969 - RNA, 21 nt, Human
caaggcggcgaccgcuccgcu

SEQ ID NO: 688970 - RNA, 20 nt, Human
cacugggugauaaaaggcug

SEQ ID NO: 688971 - RNA, 23 nt, Human
cagcccggcggcaacagccgcag

SEQ ID NO: 688972 - RNA, 18 nt, Human
ccggcggcaacagccgca

SEQ ID NO: 688973 - RNA, 24 nt, Human
ccggcggcaacagccgcagcuccc

SEQ ID NO: 688974 - RNA, 19 nt, Human
cggcgaccgcuccgcuggc

SEQ ID NO: 688975 - RNA, 21 nt, Human
ggcggcaacagccgcagcucc

SEQ ID NO: 688976 - RNA, 26 nt, Human
gguagugggaaaaguggucuuuguac

SEQ ID NO: 688977 - RNA, 21 nt, Human
ucugacuguuaugcccaaaga

SEQ ID NO: 688978 - RNA, 21 nt, Human
ugaugcagaggcuguuucuua

SEQ ID NO: 688979 - RNA, 21 nt, Human
ugcagguagugggaaaagugg

SEQ ID NO: 688980 - RNA, 23 nt, Human
ugcagguagugggaaaagugguc

SEQ ID NO: 688981 - RNA, 26 nt, Human
uggauucuucaacauaugacagaacc

SEQ ID NO: 688982 - RNA, 22 nt, Human
ugggugauaaaaggcugcagga

SEQ ID NO: 688983 - RNA, 22 nt, Human
uuaaucuucaaguuccucagca

SEQ ID NO: 688984 - RNA, 21 nt, Human
uuaaugguguauggauucuuc

SEQ ID NO: 688985 - RNA, 22 nt, Human
uuuuuuuuuucugaagagcaua

SEQ ID NO: 688986 - RNA, 20 nt, Human
uuuuuuuuuuucugaagagc

SEQ ID NO: 688987 - RNA, 18 nt, Human
uuuuuuuuuuuuuuucug

SEQ ID NO: 688988 - RNA, 19 nt, Human
uuuuuuuuuuuuuuuuucu

SEQ ID NO: 688989 - RNA, 19 nt, Human
cccugacaccggagagcuc

SEQ ID NO: 688990 - RNA, 21 nt, Human
ccuuacagaugccaggagcug

SEQ ID NO: 688991 - RNA, 24 nt, Human
ugauuuagucuccucuccuccuug

SEQ ID NO: 688992 - RNA, 22 nt, Human
uuagaauuccaguuuuuccguc

SEQ ID NO: 688993 - RNA, 23 nt, Human
uucucgcccugacaccggagagc

SEQ ID NO: 688994 - RNA, 22 nt, Human
uugaugugauuuagucuccucu

SEQ ID NO: 688995 - RNA, 22 nt, Human
aaaucagucucaguccgugugg

SEQ ID NO: 688996 - RNA, 19 nt, Human
aauacuggggccaaaaaag

SEQ ID NO: 688997 - RNA, 18 nt, Human
aggacagauguugauccc

SEQ ID NO: 688998 - RNA, 23 nt, Human
aggcggagguaaagaagagggac

SEQ ID NO: 688999 - RNA, 21 nt, Human
agggugucucccacaagucau

SEQ ID NO: 689000 - RNA, 24 nt, Human
caaacaccaccaaagcauuuagug

SEQ ID NO: 689001 - RNA, 22 nt, Human
caggggcugucacaaacccaug

SEQ ID NO: 689002 - RNA, 22 nt, Human
ccacucaaagucagcacagcgg

SEQ ID NO: 689003 - RNA, 22 nt, Human
cuaguagguguccaacaaaccc

SEQ ID NO: 689004 - RNA, 26 nt, Human
cuuaaagggcacugagcacgcagggg

SEQ ID NO: 689005 - RNA, 21 nt, Human
gguguccaacaaacccugcca

SEQ ID NO: 689006 - RNA, 21 nt, Human
uaaucaaaucagucucagucc

SEQ ID NO: 689007 - RNA, 21 nt, Human
uaggacagauguugaucccac

SEQ ID NO: 689008 - RNA, 19 nt, Human
ugggaagggaagcuaguag

SEQ ID NO: 689009 - RNA, 25 nt, Human
ugggaagggaagcuaguaggugucc

SEQ ID NO: 689010 - RNA, 18 nt, Human
uggggccaaaaaagaggg

SEQ ID NO: 689011 - RNA, 19 nt, Human
uguguguguguguugaaug

SEQ ID NO: 689012 - RNA, 22 nt, Human
acaagggaggacauuuucugca

SEQ ID NO: 689013 - RNA, 20 nt, Human
agcacaaaaguugaagauga

SEQ ID NO: 689014 - RNA, 23 nt, Human
aggccaagggcaggaacugagga

SEQ ID NO: 689015 - RNA, 23 nt, Human
agggaggacauuuucugcaguug

SEQ ID NO: 689016 - RNA, 21 nt, Human
caacuagguccugagaaagcc

SEQ ID NO: 689017 - RNA, 20 nt, Human
caguagcaacuagguccuga

SEQ ID NO: 689018 - RNA, 23 nt, Human
ccaguagcaacuagguccugaga

SEQ ID NO: 689019 - RNA, 18 nt, Human
ucucucguggaagaauaa

SEQ ID NO: 689020 - RNA, 18 nt, Human
ugagaaagcccucucucc

SEQ ID NO: 689021 - RNA, 24 nt, Human
uggaagaauaacagccaggcggga

SEQ ID NO: 689022 - RNA, 20 nt, Human
uggggcagaagauucuuccu

SEQ ID NO: 689023 - RNA, 21 nt, Human
uugugguacagggugaguaca

SEQ ID NO: 689024 - RNA, 22 nt, Human
uuuaggcaaaggggagcacaaa

SEQ ID NO: 689025 - RNA, 20 nt, Human
aaacaagagaggaauggagg

SEQ ID NO: 689026 - RNA, 20 nt, Human
aaacacaagcgaaggaaccg

SEQ ID NO: 689027 - RNA, 27 nt, Human
aacagcuuucuauccugaagccgacca

SEQ ID NO: 689028 - RNA, 20 nt, Human
aaccaaagcaugugagucuc

SEQ ID NO: 689029 - RNA, 21 nt, Human
aagaaggccaacaagucacaa

SEQ ID NO: 689030 - RNA, 19 nt, Human
aagcaaguuucagaugccu

SEQ ID NO: 689031 - RNA, 20 nt, Human
aaucagauucucugaaucug

SEQ ID NO: 689032 - RNA, 18 nt, Human
aaugaugccugggcuucc

SEQ ID NO: 689033 - RNA, 19 nt, Human
acccgaggagcugagcccc

SEQ ID NO: 689034 - RNA, 22 nt, Human
agaaacacaagcgaaggaacca

SEQ ID NO: 689035 - RNA, 18 nt, Human
agagaggaauggauugca

SEQ ID NO: 689036 - RNA, 23 nt, Human
aguacagaaacacaagcgaagga

SEQ ID NO: 689037 - RNA, 22 nt, Human
caacaagucacaaguagaucuc

SEQ ID NO: 689038 - RNA, 27 nt, Human
caugugagucucuucccugaguccauu

SEQ ID NO: 689039 - RNA, 20 nt, Human
ccaggugaccuacuggcuug

SEQ ID NO: 689040 - RNA, 18 nt, Human
ccccccccagucugaggc

SEQ ID NO: 689041 - RNA, 21 nt, Human
cccgaggagcugagccccccc

SEQ ID NO: 689042 - RNA, 21 nt, Human
cccuauuacacccaccggaaa

SEQ ID NO: 689043 - RNA, 21 nt, Human
ccugcgagcgucagagaugaa

SEQ ID NO: 689044 - RNA, 18 nt, Human
ccugggcuuccuccagga

SEQ ID NO: 689045 - RNA, 25 nt, Human
cuccaggagcaacacaauucccucc

SEQ ID NO: 689046 - RNA, 19 nt, Human
cucccacucaucugccaca

SEQ ID NO: 689047 - RNA, 22 nt, Human
cugagccccccccagucugagg

SEQ ID NO: 689048 - RNA, 19 nt, Human
gaacgugcacccccucuac

SEQ ID NO: 689049 - RNA, 19 nt, Human
gaugaagcaaguuucagau

SEQ ID NO: 689050 - RNA, 24 nt, Human
gccucgccuagugaaugcuccagc

SEQ ID NO: 689051 - RNA, 20 nt, Human
ggaaacacagauacuaacca

SEQ ID NO: 689052 - RNA, 22 nt, Human
ggaacgugcacccccucuaccc

SEQ ID NO: 689053 - RNA, 22 nt, Human
gggcagaggcacguuucccuuu

SEQ ID NO: 689054 - RNA, 22 nt, Human
ggggcuaauccccuauuacacc

SEQ ID NO: 689055 - RNA, 24 nt, Human
ggugaccuacuggcuuguuuaaug

SEQ ID NO: 689056 - RNA, 27 nt, Human
gucacaaguagaucucuggcuccaacu

SEQ ID NO: 689057 - RNA, 21 nt, Human
gucagagaugaagcaaguuuc

SEQ ID NO: 689058 - RNA, 19 nt, Human
gucugaggcagauguggga

SEQ ID NO: 689059 - RNA, 19 nt, Human
uaaaacgaaacagguggga

SEQ ID NO: 689060 - RNA, 21 nt, Human
uaaguacagaaacacaagcga

SEQ ID NO: 689061 - RNA, 18 nt, Human
uagaucucuggcuccaac

SEQ ID NO: 689062 - RNA, 20 nt, Human
ucagcucuccuuaucccugc

SEQ ID NO: 689063 - RNA, 18 nt, Human
ucagucccuucuggggcu

SEQ ID NO: 689064 - RNA, 19 nt, Human
uccaaucucagcucuccuu

SEQ ID NO: 689065 - RNA, 20 nt, Human
ucccuccaaucucagcucuc

SEQ ID NO: 689066 - RNA, 21 nt, Human
ucuaaagcuugucugaaagau

SEQ ID NO: 689067 - RNA, 22 nt, Human
ucuacccguggggcagaggcug

SEQ ID NO: 689068 - RNA, 27 nt, Human
ugaagugguagauuuuugacucuuuga

SEQ ID NO: 689069 - RNA, 19 nt, Human
ugaagugguagauuuuugg

SEQ ID NO: 689070 - RNA, 26 nt, Human
ugaagugguagauuuuugguaaguac

SEQ ID NO: 689071 - RNA, 22 nt, Human
ugaaucuggaaguuccaggaaa

SEQ ID NO: 689072 - RNA, 25 nt, Human
ugaggcagaugugggaagaaggcca

SEQ ID NO: 689073 - RNA, 22 nt, Human
ugaguccauuucucuaaagcuu

SEQ ID NO: 689074 - RNA, 22 nt, Human
ugaugccugggcuuccuccagg

SEQ ID NO: 689075 - RNA, 19 nt, Human
ugcacccccucuacccgug

SEQ ID NO: 689076 - RNA, 18 nt, Human
ugccugggcuuccuccag

SEQ ID NO: 689077 - RNA, 22 nt, Human
ugccugggcuuccuccaggagc

SEQ ID NO: 689078 - RNA, 21 nt, Human
ugggaagaaggccaacaaguc

SEQ ID NO: 689079 - RNA, 21 nt, Human
ugguugaaagcagcaaugcca

SEQ ID NO: 689080 - RNA, 19 nt, Human
ugucuccuaucaaaauuua

SEQ ID NO: 689081 - RNA, 19 nt, Human
ugucuccuaucaaaauuua

SEQ ID NO: 689082 - RNA, 18 nt, Human
uugaaagcagcaaugcca

SEQ ID NO: 689083 - RNA, 23 nt, Human
aaacucccuucuucaaccgacua

SEQ ID NO: 689084 - RNA, 23 nt, Human
aagauacuuuccauaaccaauca

SEQ ID NO: 689085 - RNA, 21 nt, Human
aauuuguuuuccccuccuuaa

SEQ ID NO: 689086 - RNA, 20 nt, Human
agaaaagaggacauaaaaaa

SEQ ID NO: 689087 - RNA, 21 nt, Human
agguuuugauuuuuuucccaa

SEQ ID NO: 689088 - RNA, 21 nt, Human
auaggcuccuuccccaaaaga

SEQ ID NO: 689089 - RNA, 21 nt, Human
aucauuaacaguauuuaacaa

SEQ ID NO: 689090 - RNA, 19 nt, Human
augaaguuuucauuugaug

SEQ ID NO: 689091 - RNA, 19 nt, Human
auguagcagcacacagccu

SEQ ID NO: 689092 - RNA, 19 nt, Human
caaaacuagaagagaaagg

SEQ ID NO: 689093 - RNA, 19 nt, Human
caagaggaagucucucaaa

SEQ ID NO: 689094 - RNA, 22 nt, Human
cagaaagccccuaucaaacccu

SEQ ID NO: 689095 - RNA, 19 nt, Human
cccaaaagacaacaaugaa

SEQ ID NO: 689096 - RNA, 21 nt, Human
ccuccuugugggagccaagag

SEQ ID NO: 689097 - RNA, 18 nt, Human
cucaaaacuagaagagaa

SEQ ID NO: 689098 - RNA, 18 nt, Human
gaaaagaggacauaaaaa

SEQ ID NO: 689099 - RNA, 20 nt, Human
gggcauggugaugauggcag

SEQ ID NO: 689100 - RNA, 19 nt, Human
ggugaugauggcaguggga

SEQ ID NO: 689101 - RNA, 21 nt, Human
gguuucacuggaaaguccaga

SEQ ID NO: 689102 - RNA, 25 nt, Human
guuuagagugaggguugaacaacuu

SEQ ID NO: 689103 - RNA, 21 nt, Human
uaaaguggcuaugugugucaa

SEQ ID NO: 689104 - RNA, 21 nt, Human
uauuucagcaggacaugggca

SEQ ID NO: 689105 - RNA, 19 nt, Human
ucaaccuuucucuugggca

SEQ ID NO: 689106 - RNA, 20 nt, Human
ucauuaacaguauuuaacaa

SEQ ID NO: 689107 - RNA, 22 nt, Human
uccacaacccagaaagagaacc

SEQ ID NO: 689108 - RNA, 25 nt, Human
uccacaacccagaaagagaaccgcu

SEQ ID NO: 689109 - RNA, 18 nt, Human
ucccaagccaaacuauac

SEQ ID NO: 689110 - RNA, 21 nt, Human
ucucaaaacuagaagagaaag

SEQ ID NO: 689111 - RNA, 21 nt, Human
ugaggguugaacaacuuuuca

SEQ ID NO: 689112 - RNA, 21 nt, Human
ugauuuuuuucccaagccaaa

SEQ ID NO: 689113 - RNA, 26 nt, Human
uguccuauucaaccuuucucuugggc

SEQ ID NO: 689114 - RNA, 19 nt, Human
uguucugugugcuaacaau

SEQ ID NO: 689115 - RNA, 23 nt, Human
uuaaaaauaguauuucaaacugu

SEQ ID NO: 689116 - RNA, 18 nt, Human
uugaacaacuuuucauga

SEQ ID NO: 689117 - RNA, 22 nt, Human
uuucaaacucccuucuucaacc

SEQ ID NO: 689118 - RNA, 20 nt, Human
aaaaaucaguucaggacaga

SEQ ID NO: 689119 - RNA, 24 nt, Human
aacaaucuucaaaaaccaggacag

SEQ ID NO: 689120 - RNA, 21 nt, Human
aacuauaaaauuuccacaagg

SEQ ID NO: 689121 - RNA, 23 nt, Human
aaggaaguguccugugugcuaac

SEQ ID NO: 689122 - RNA, 18 nt, Human
aagggaaucaagaacaau

SEQ ID NO: 689123 - RNA, 19 nt, Human
aaguacauauuaaaagcau

SEQ ID NO: 689124 - RNA, 21 nt, Human
aauuuccaaacuccccuccuc

SEQ ID NO: 689125 - RNA, 25 nt, Human
acaaucuucaaaaaccaggacagaa

SEQ ID NO: 689126 - RNA, 24 nt, Human
acacuguaaggcuuccgugccaaa

SEQ ID NO: 689127 - RNA, 24 nt, Human
acugcugugugugugugccaauua

SEQ ID NO: 689128 - RNA, 19 nt, Human
acuugcccuuuccacaaaa

SEQ ID NO: 689129 - RNA, 23 nt, Human
agacaaccacuucgaauaugaaa

SEQ ID NO: 689130 - RNA, 24 nt, Human
agcaauuuuacuucuagguguuua

SEQ ID NO: 689131 - RNA, 22 nt, Human
aggaauaagcaccuaaaaauau

SEQ ID NO: 689132 - RNA, 21 nt, Human
aggccacaucaaaacucucgg

SEQ ID NO: 689133 - RNA, 23 nt, Human
agugcagagacaaccacuucgaa

SEQ ID NO: 689134 - RNA, 19 nt, Human
auagugcagagacaaccac

SEQ ID NO: 689135 - RNA, 22 nt, Human
auaucaaaaaagauagcauaau

SEQ ID NO: 689136 - RNA, 19 nt, Human
augacuuuggguaggaaag

SEQ ID NO: 689137 - RNA, 24 nt, Human
auggcaaaaaauguuaacagguac

SEQ ID NO: 689138 - RNA, 18 nt, Human
augugaaaggcaaaacua

SEQ ID NO: 689139 - RNA, 23 nt, Human
auuuccaaacuccccuccuccaa

SEQ ID NO: 689140 - RNA, 25 nt, Human
caaacaguagagucacuauaaguac

SEQ ID NO: 689141 - RNA, 20 nt, Human
caaacuccccuccuccaaaa

SEQ ID NO: 689142 - RNA, 22 nt, Human
caacauaacuuaaaaaagccaa

SEQ ID NO: 689143 - RNA, 22 nt, Human
caacauaacuuaaaaaagccaa

SEQ ID NO: 689144 - RNA, 25 nt, Human
caaccacuucgaauaugaaaaaugu

SEQ ID NO: 689145 - RNA, 21 nt, Human
caaucuucaaaaaccaggaca

SEQ ID NO: 689146 - RNA, 21 nt, Human
caggaugaauccacaaacuga

SEQ ID NO: 689147 - RNA, 22 nt, Human
cauaaagcauuccuauagaucc

SEQ ID NO: 689148 - RNA, 24 nt, Human
cauaacuuaaaaaagccaaaauuc

SEQ ID NO: 689149 - RNA, 27 nt, Human
ccaggacagaaaauccuauuuucccuu

SEQ ID NO: 689150 - RNA, 19 nt, Human
cccacacuguaaggcuucc

SEQ ID NO: 689151 - RNA, 20 nt, Human
ccccuccuccaaaagucacc

SEQ ID NO: 689152 - RNA, 18 nt, Human
cccuuauguacugcugug

SEQ ID NO: 689153 - RNA, 18 nt, Human
cuuggcaaagauauaugu

SEQ ID NO: 689154 - RNA, 24 nt, Human
cuuuucaguaaauagugcagagac

SEQ ID NO: 689155 - RNA, 18 nt, Human
gaaaggacaaaaugaaaa

SEQ ID NO: 689156 - RNA, 24 nt, Human
gaaauaggcaacaaucuauaacau

SEQ ID NO: 689157 - RNA, 20 nt, Human
gaacaagaaagauuuucaga

SEQ ID NO: 689158 - RNA, 22 nt, Human
gauuuucagagaggguggacac

SEQ ID NO: 689159 - RNA, 21 nt, Human
gcuugagcaguccuguugggu

SEQ ID NO: 689160 - RNA, 21 nt, Human
ggaaaggaucuccccccaaaa

SEQ ID NO: 689161 - RNA, 18 nt, Human
ggacaggagaucuccaca

SEQ ID NO: 689162 - RNA, 18 nt, Human
gggaaagacugaccaaug

SEQ ID NO: 689163 - RNA, 22 nt, Human
guaaaaccagcaggaugaaucc

SEQ ID NO: 689164 - RNA, 24 nt, Human
guaaaccauaaagggaaagacuga

SEQ ID NO: 689165 - RNA, 20 nt, Human
guaaagcacucugcaaacag

SEQ ID NO: 689166 - RNA, 20 nt, Human
guaggaaaggaucucccccc

SEQ ID NO: 689167 - RNA, 19 nt, Human
guccuguugggugcuucug

SEQ ID NO: 689168 - RNA, 21 nt, Human
uaaaaccagcaggaugaaucc

SEQ ID NO: 689169 - RNA, 23 nt, Human
uaaaccauaaagggaaagacuga

SEQ ID NO: 689170 - RNA, 20 nt, Human
uaacaagacacaaaaagcgu

SEQ ID NO: 689171 - RNA, 23 nt, Human
uaacaagacacaaaaagcguaaa

SEQ ID NO: 689172 - RNA, 25 nt, Human
uaacaagacacaaaaagcguaaacc

SEQ ID NO: 689173 - RNA, 28 nt, Human
uaagaaguacauauuaaaaaggguuucc

SEQ ID NO: 689174 - RNA, 23 nt, Human
uaagaaguacauauuaaaagcau

SEQ ID NO: 689175 - RNA, 21 nt, Human
uacaaaucacuggggaaagga

SEQ ID NO: 689176 - RNA, 18 nt, Human
uaccagcuuggcaaagau

SEQ ID NO: 689177 - RNA, 22 nt, Human
uauagauccaugaggaaaggac

SEQ ID NO: 689178 - RNA, 22 nt, Human
uaucaaaaaagauagcauaaua

SEQ ID NO: 689179 - RNA, 19 nt, Human
uaugagcuuuucucaggcc

SEQ ID NO: 689180 - RNA, 20 nt, Human
uauguacugcugugugugug

SEQ ID NO: 689181 - RNA, 19 nt, Human
ucaguaaauagugcagaga

SEQ ID NO: 689182 - RNA, 21 nt, Human
ucaguaaauagugcagagaca

SEQ ID NO: 689183 - RNA, 19 nt, Human
uccaaaagucaccguaaaa

SEQ ID NO: 689184 - RNA, 20 nt, Human
uccaaacuccccuccuccaa

SEQ ID NO: 689185 - RNA, 23 nt, Human
uccaaacuccccuccuccaaaag

SEQ ID NO: 689186 - RNA, 22 nt, Human
uccacaaaagacaacaaggaag

SEQ ID NO: 689187 - RNA, 21 nt, Human
uccacaaacugaaaacaggaa

SEQ ID NO: 689188 - RNA, 22 nt, Human
uccccacacuguaaggcuuccg

SEQ ID NO: 689189 - RNA, 25 nt, Human
ucggggaaagaggagacacgaaguu

SEQ ID NO: 689190 - RNA, 24 nt, Human
ucuauaacauuuuacaauuuccaa

SEQ ID NO: 689191 - RNA, 22 nt, Human
ucuguccuccucacgcuguucc

SEQ ID NO: 689192 - RNA, 24 nt, Human
ugaaaaauguuaaguugaauuucu

SEQ ID NO: 689193 - RNA, 21 nt, Human
ugaaaacaggaaucuuggcuc

SEQ ID NO: 689194 - RNA, 19 nt, Human
ugacuuuggguaggaaagg

SEQ ID NO: 689195 - RNA, 19 nt, Human
ugagugaggaauaagcacc

SEQ ID NO: 689196 - RNA, 19 nt, Human
ugauggcaucggggaaaga

SEQ ID NO: 689197 - RNA, 18 nt, Human
ugccaaaguggcugacac

SEQ ID NO: 689198 - RNA, 19 nt, Human
ugcugugugugugugccaa

SEQ ID NO: 689199 - RNA, 24 nt, Human
ugggaaucaagggaaucaagaaca

SEQ ID NO: 689200 - RNA, 22 nt, Human
ugucagagaaucucuccuggga

SEQ ID NO: 689201 - RNA, 26 nt, Human
uuccaaacuccccuccuccaaaaguc

SEQ ID NO: 689202 - RNA, 25 nt, Human
uuuaacaagacacaaaaagcguaaa

SEQ ID NO: 689203 - RNA, 22 nt, Human
uuucaaacaguagagucacuau

SEQ ID NO: 689204 - RNA, 19 nt, Human
uuucucaggcccacuuuga

SEQ ID NO: 689205 - RNA, 21 nt, Human
aaaaaauaaaagcuuaagaac

SEQ ID NO: 689206 - RNA, 22 nt, Human
acuuucaaaaguuggaaaaaaa

SEQ ID NO: 689207 - RNA, 23 nt, Human
agagcugggguagaggugacugg

SEQ ID NO: 689208 - RNA, 19 nt, Human
agugcuuccaaucucccag

SEQ ID NO: 689209 - RNA, 24 nt, Human
ccucccaccgccauuucuguggcc

SEQ ID NO: 689210 - RNA, 19 nt, Human
ccuccucccaccgccauuu

SEQ ID NO: 689211 - RNA, 23 nt, Human
ccuccucccaccgccauuucugu

SEQ ID NO: 689212 - RNA, 25 nt, Human
cuuccaaucucccagugcuuauuuc

SEQ ID NO: 689213 - RNA, 18 nt, Human
gagaaaaaaauucaaaau

SEQ ID NO: 689214 - RNA, 18 nt, Human
ggaggcagggccggcgcc

SEQ ID NO: 689215 - RNA, 23 nt, Human
gugugauucccacguugguugug

SEQ ID NO: 689216 - RNA, 22 nt, Human
guugugcugcaaggaccagagg

SEQ ID NO: 689217 - RNA, 19 nt, Human
uagcagugcuuccaaucuc

SEQ ID NO: 689218 - RNA, 20 nt, Human
ucucccagugcuuauuucuc

SEQ ID NO: 689219 - RNA, 22 nt, Human
ucucccagugcuuauuucucuc

SEQ ID NO: 689220 - RNA, 26 nt, Human
ucuugcgaggaggucgugagaagagu

SEQ ID NO: 689221 - RNA, 20 nt, Human
ugaaauggaggcagggccgg

SEQ ID NO: 689222 - RNA, 19 nt, Human
ugagaagaguccuccuccc

SEQ ID NO: 689223 - RNA, 21 nt, Human
uggagcugugggaggucugga

SEQ ID NO: 689224 - RNA, 22 nt, Human
uggagcugugggaggucuggag

SEQ ID NO: 689225 - RNA, 18 nt, Human
uggccggguggucccacc

SEQ ID NO: 689226 - RNA, 19 nt, Human
ugggaggucuggagggugu

SEQ ID NO: 689227 - RNA, 18 nt, Human
ugucacagcugaaaugga

SEQ ID NO: 689228 - RNA, 19 nt, Human
ugugcugcaaggaccagag

SEQ ID NO: 689229 - RNA, 21 nt, Human
uguggccggguggucccaccc

SEQ ID NO: 689230 - RNA, 22 nt, Human
uuagcagugcuuccaaucuccc

SEQ ID NO: 689231 - RNA, 22 nt, Human
uugucacagcugaaauggaggc

SEQ ID NO: 689232 - RNA, 21 nt, Human
uugugcugcaaggaccagagg

SEQ ID NO: 689233 - RNA, 19 nt, Human
aaaaaauacuuccgccucu

SEQ ID NO: 689234 - RNA, 21 nt, Human
aaaaugcaccagaggccagca

SEQ ID NO: 689235 - RNA, 26 nt, Human
aaacaaacaaaaacuuaaaagucagg

SEQ ID NO: 689236 - RNA, 19 nt, Human
aaacgauuuggcauugugg

SEQ ID NO: 689237 - RNA, 18 nt, Human
aaacuuaaaagucaggug

SEQ ID NO: 689238 - RNA, 18 nt, Human
aaccuucaggucucuucc

SEQ ID NO: 689239 - RNA, 21 nt, Human
aagcaaaagacaaagaaaauc

SEQ ID NO: 689240 - RNA, 23 nt, Human
aagcaaaagacaaagaaaaucug

SEQ ID NO: 689241 - RNA, 26 nt, Human
aagcaguaccacaucucaaauaacca

SEQ ID NO: 689242 - RNA, 18 nt, Human
aaggaacaaaaagaaaua

SEQ ID NO: 689243 - RNA, 19 nt, Human
acaauaccaaggaacaaaa

SEQ ID NO: 689244 - RNA, 22 nt, Human
accaaggaacaaaaagaaauau

SEQ ID NO: 689245 - RNA, 18 nt, Human
accacaucucaaauaacc

SEQ ID NO: 689246 - RNA, 21 nt, Human
acccugcccugccccgccccc

SEQ ID NO: 689247 - RNA, 23 nt, Human
acccuggagcccccacugaagcu

SEQ ID NO: 689248 - RNA, 25 nt, Human
accuacugacaaaaauacaccacaa

SEQ ID NO: 689249 - RNA, 21 nt, Human
acgccuuucuucccagacugu

SEQ ID NO: 689250 - RNA, 20 nt, Human
acucugcaacccuggagccc

SEQ ID NO: 689251 - RNA, 23 nt, Human
acuggagcuuggcuuagccaaug

SEQ ID NO: 689252 - RNA, 20 nt, Human
agacuugugaggaagcaguc

SEQ ID NO: 689253 - RNA, 19 nt, Human
agaggcaggcgaaugccug

SEQ ID NO: 689254 - RNA, 23 nt, Human
agcaacacagcaagccacaaaaa

SEQ ID NO: 689255 - RNA, 18 nt, Human
agccaguuuaaugcuuuu

SEQ ID NO: 689256 - RNA, 24 nt, Human
agcguuugcugaugcagaacccac

SEQ ID NO: 689257 - RNA, 29 nt, Human
aggccagcacauuucacuaugacaggggu

SEQ ID NO: 689258 - RNA, 19 nt, Human
aggccaugugggucugccc

SEQ ID NO: 689259 - RNA, 23 nt, Human
aggugacucagggugauuggagg

SEQ ID NO: 689260 - RNA, 21 nt, Human
augcuagucuuauuacccagc

SEQ ID NO: 689261 - RNA, 20 nt, Human
augcuuuuuguucauguucu

SEQ ID NO: 689262 - RNA, 24 nt, Human
auuacaccaaaaaauacuuccgcc

SEQ ID NO: 689263 - RNA, 18 nt, Human
caaaaucagcucuucucu

SEQ ID NO: 689264 - RNA, 24 nt, Human
caaaaugcaccagaggccagcaca

SEQ ID NO: 689265 - RNA, 23 nt, Human
caacacgaaacaugccuuuguac

SEQ ID NO: 689266 - RNA, 18 nt, Human
caagcaaaagacaaagaa

SEQ ID NO: 689267 - RNA, 27 nt, Human
caagcaaaagacaaagaaaagggaccc

SEQ ID NO: 689268 - RNA, 23 nt, Human
caauaccaaggaacaaaaagaaa

SEQ ID NO: 689269 - RNA, 20 nt, Human
cacagcaagccacaaaaaaa

SEQ ID NO: 689270 - RNA, 22 nt, Human
cacagcaagccacaaaaaaaua

SEQ ID NO: 689271 - RNA, 18 nt, Human
caccaaaaaauacuuccg

SEQ ID NO: 689272 - RNA, 22 nt, Human
caccagaggccagcacauuuca

SEQ ID NO: 689273 - RNA, 24 nt, Human
caccccgccccccauucuggcugg

SEQ ID NO: 689274 - RNA, 22 nt, Human
cagagcccaggccauguggguc

SEQ ID NO: 689275 - RNA, 23 nt, Human
cagcaacacagcaagccacaaaa

SEQ ID NO: 689276 - RNA, 23 nt, Human
cagcaagccacaaaaaaauaccc

SEQ ID NO: 689277 - RNA, 18 nt, Human
caggaguccucccuccuc

SEQ ID NO: 689278 - RNA, 24 nt, Human
caggcgaaugccugauacgguucc

SEQ ID NO: 689279 - RNA, 21 nt, Human
ccacaaaaaaauacccuuuac

SEQ ID NO: 689280 - RNA, 18 nt, Human
ccagcugguucuggcccu

SEQ ID NO: 689281 - RNA, 24 nt, Human
cccacagagucugugcucuucacu

SEQ ID NO: 689282 - RNA, 18 nt, Human
cccaggccaugugggucu

SEQ ID NO: 689283 - RNA, 19 nt, Human
ccccacccugcccugcccc

SEQ ID NO: 689284 - RNA, 24 nt, Human
ccccacugaagcuacguuuucuua

SEQ ID NO: 689285 - RNA, 19 nt, Human
ccccauaucccaggaguac

SEQ ID NO: 689286 - RNA, 19 nt, Human
cccccacccugcccugccc

SEQ ID NO: 689287 - RNA, 20 nt, Human
cccccugcugcugucucguc

SEQ ID NO: 689288 - RNA, 25 nt, Human
cccgcccccauaucccaggaguaca

SEQ ID NO: 689289 - RNA, 25 nt, Human
cccgccccccauucuggcuggggcc

SEQ ID NO: 689290 - RNA, 21 nt, Human
cccgcccccgcccccauaucc

SEQ ID NO: 689291 - RNA, 27 nt, Human
cccgcccccgcccccauaucccaggag

SEQ ID NO: 689292 - RNA, 21 nt, Human
ccgcccccgcccccauauccc

SEQ ID NO: 689293 - RNA, 26 nt, Human
ccucccucucccccugcugcugucuc

SEQ ID NO: 689294 - RNA, 19 nt, Human
ccucuccaccccgcccccc

SEQ ID NO: 689295 - RNA, 19 nt, Human
ccuucccucccucuccccc

SEQ ID NO: 689296 - RNA, 22 nt, Human
cgaagugggcaaaagacagucc

SEQ ID NO: 689297 - RNA, 23 nt, Human
cgaaugccugauacgguuccagg

SEQ ID NO: 689298 - RNA, 22 nt, Human
cugcccugccccgcccccgccc

SEQ ID NO: 689299 - RNA, 18 nt, Human
cuggagcugacacccugc

SEQ ID NO: 689300 - RNA, 21 nt, Human
cugggcuuaguaaugccaaaa

SEQ ID NO: 689301 - RNA, 22 nt, Human
cugguucuggcccugugggucc

SEQ ID NO: 689302 - RNA, 21 nt, Human
cuuuguacaugagccugacuc

SEQ ID NO: 689303 - RNA, 21 nt, Human
gagcugacacccugcagaacu

SEQ ID NO: 689304 - RNA, 27 nt, Human
gccagcacauuucacuaugacaggggu

SEQ ID NO: 689305 - RNA, 20 nt, Human
gcccugccccgcccccgccc

SEQ ID NO: 689306 - RNA, 18 nt, Human
gcccuucaacgucuucug

SEQ ID NO: 689307 - RNA, 21 nt, Human
gccuuucuucccagacugugc

SEQ ID NO: 689308 - RNA, 23 nt, Human
gcguuugcugaugcagaacccac

SEQ ID NO: 689309 - RNA, 23 nt, Human
ggaaacaacaaacaaacaaaaac

SEQ ID NO: 689310 - RNA, 23 nt, Human
ggagcuuggcuuagccaaugggg

SEQ ID NO: 689311 - RNA, 22 nt, Human
gggaaacaacaaacaaacaaaa

SEQ ID NO: 689312 - RNA, 21 nt, Human
gggugauuggagguuggggga

SEQ ID NO: 689313 - RNA, 21 nt, Human
gguuaugugcguucugggcuu

SEQ ID NO: 689314 - RNA, 23 nt, Human
gucugugcucuucacugcccuuc

SEQ ID NO: 689315 - RNA, 22 nt, Human
gugggucugcccagguccuagg

SEQ ID NO: 689316 - RNA, 23 nt, Human
uaaaaauaucuuacaugggaaca

SEQ ID NO: 689317 - RNA, 22 nt, Human
uaacacaacgaagugggcaaaa

SEQ ID NO: 689318 - RNA, 21 nt, Human
uacaguguugucuuguaacug

SEQ ID NO: 689319 - RNA, 22 nt, Human
uacauuuuccuaacaaagaaua

SEQ ID NO: 689320 - RNA, 24 nt, Human
uacauuuuccuaacaaagaauaag

SEQ ID NO: 689321 - RNA, 19 nt, Human
uaccaaggaacaaaaagaa

SEQ ID NO: 689322 - RNA, 26 nt, Human
uaccacaucucaaauaaccaauucuc

SEQ ID NO: 689323 - RNA, 27 nt, Human
uaggauggaggcccagaaaguuugugc

SEQ ID NO: 689324 - RNA, 25 nt, Human
ucacaugccugucccgugccuuccu

SEQ ID NO: 689325 - RNA, 22 nt, Human
ucacugcccuucaacgucuucu

SEQ ID NO: 689326 - RNA, 23 nt, Human
ucacugcccuucaacgucuucug

SEQ ID NO: 689327 - RNA, 19 nt, Human
uccuggagcugacacccug

SEQ ID NO: 689328 - RNA, 18 nt, Human
uccuuuucugcuguuaca

SEQ ID NO: 689329 - RNA, 18 nt, Human
ucucuccagcucggccau

SEQ ID NO: 689330 - RNA, 23 nt, Human
ucugugucacucauacucugcaa

SEQ ID NO: 689331 - RNA, 25 nt, Human
ugaagaggaggaggacggccaggag

SEQ ID NO: 689332 - RNA, 24 nt, Human
ugacacccugcagaacuggccucc

SEQ ID NO: 689333 - RNA, 22 nt, Human
ugacucggcgacgaaucaacaa

SEQ ID NO: 689334 - RNA, 19 nt, Human
ugcagccgcaccuuccuuc

SEQ ID NO: 689335 - RNA, 22 nt, Human
uggagcugacacccugcagaac

SEQ ID NO: 689336 - RNA, 20 nt, Human
uggaggcccagaaaguuugu

SEQ ID NO: 689337 - RNA, 19 nt, Human
uggcauugugguggcccca

SEQ ID NO: 689338 - RNA, 22 nt, Human
uucaagccaauuugaagaggag

SEQ ID NO: 689339 - RNA, 19 nt, Human
uugcugaugcagaacccac

SEQ ID NO: 689340 - RNA, 23 nt, Human
aacacggcagaaaggggacaccu

SEQ ID NO: 689341 - RNA, 23 nt, Human
aagaacagaagaagagaggaagc

SEQ ID NO: 689342 - RNA, 25 nt, Human
aagaagcugcgggaaggacagcagg

SEQ ID NO: 689343 - RNA, 22 nt, Human
aagcugcgggaaggacagcagg

SEQ ID NO: 689344 - RNA, 22 nt, Human
aauguuaggaacacggcagaaa

SEQ ID NO: 689345 - RNA, 19 nt, Human
acagaagaagagaggaagc

SEQ ID NO: 689346 - RNA, 22 nt, Human
acggcagaaaggggacaccugg

SEQ ID NO: 689347 - RNA, 20 nt, Human
agaacaguaauacgcuagca

SEQ ID NO: 689348 - RNA, 23 nt, Human
agacaggaaucaaaauguuagga

SEQ ID NO: 689349 - RNA, 21 nt, Human
agacuccaagaagaagcugcg

SEQ ID NO: 689350 - RNA, 20 nt, Human
agagaagaaaucaaggccaa

SEQ ID NO: 689351 - RNA, 19 nt, Human
agggaagucacagaacagu

SEQ ID NO: 689352 - RNA, 21 nt, Human
caaacgcaggaugaggaguuc

SEQ ID NO: 689353 - RNA, 25 nt, Human
caaagccaagcccacugcagcugcc

SEQ ID NO: 689354 - RNA, 21 nt, Human
cacugcagcugccacaucccu

SEQ ID NO: 689355 - RNA, 18 nt, Human
cagcugccacaucccugg

SEQ ID NO: 689356 - RNA, 21 nt, Human
cagcugccacaucccugggcu

SEQ ID NO: 689357 - RNA, 24 nt, Human
caggaugaggaguucugcagaggu

SEQ ID NO: 689358 - RNA, 25 nt, Human
cauuucagcuucuggccacugggag

SEQ ID NO: 689359 - RNA, 22 nt, Human
cccacugcagcugccacauccc

SEQ ID NO: 689360 - RNA, 26 nt, Human
cggcagaaaggggacaccuggagacc

SEQ ID NO: 689361 - RNA, 19 nt, Human
cugcagcugccacaucccu

SEQ ID NO: 689362 - RNA, 24 nt, Human
cugcagcugccacaucccugggcu

SEQ ID NO: 689363 - RNA, 24 nt, Human
cugcugucauuucagcuucuggcc

SEQ ID NO: 689364 - RNA, 18 nt, Human
cuggccacugggaggugc

SEQ ID NO: 689365 - RNA, 21 nt, Human
gaaucaaaauguuaggaacac

SEQ ID NO: 689366 - RNA, 22 nt, Human
gaggaguucugcagaggucaca

SEQ ID NO: 689367 - RNA, 20 nt, Human
gcagcaggugcuuuuuucaa

SEQ ID NO: 689368 - RNA, 18 nt, Human
gcuagcaggggcaugggg

SEQ ID NO: 689369 - RNA, 21 nt, Human
gcuuacggugcagcaggugcu

SEQ ID NO: 689370 - RNA, 18 nt, Human
ggacagcagggguccugg

SEQ ID NO: 689371 - RNA, 23 nt, Human
ggcgugaagaacagaagaagaga

SEQ ID NO: 689372 - RNA, 21 nt, Human
gggacaccuggagaccaaacg

SEQ ID NO: 689373 - RNA, 18 nt, Human
ggugcuuuuuucaagaca

SEQ ID NO: 689374 - RNA, 20 nt, Human
gucacagggaagucacagaa

SEQ ID NO: 689375 - RNA, 18 nt, Human
gugaagaacagaagaaga

SEQ ID NO: 689376 - RNA, 26 nt, Human
gugaagaacagaagaagagaggaagc

SEQ ID NO: 689377 - RNA, 24 nt, Human
uaggaacacggcagaaaggggaca

SEQ ID NO: 689378 - RNA, 20 nt, Human
ucccugggcuuacggugcag

SEQ ID NO: 689379 - RNA, 24 nt, Human
uccugggguuuuagccucuggccc

SEQ ID NO: 689380 - RNA, 27 nt, Human
ugccacaucccugggcuuaccggcgcc

SEQ ID NO: 689381 - RNA, 23 nt, Human
uggacacacucaguuccucacaa

SEQ ID NO: 689382 - RNA, 22 nt, Human
ugggguuuuagccucuggccca

SEQ ID NO: 689383 - RNA, 23 nt, Human
agacagaacgacagcguucagga

SEQ ID NO: 689384 - RNA, 20 nt, Human
ccacacccaacagccgacca

SEQ ID NO: 689385 - RNA, 18 nt, Human
cccgaggggcgcugggaa

SEQ ID NO: 689386 - RNA, 22 nt, Human
cuccacacccaacagccgacca

SEQ ID NO: 689387 - RNA, 21 nt, Human
ggaaacagacagaacgacagc

SEQ ID NO: 689388 - RNA, 24 nt, Human
ggaaacuccacacccaacagccga

SEQ ID NO: 689389 - RNA, 23 nt, Human
uccacacccaacagccgaccacc

SEQ ID NO: 689390 - RNA, 19 nt, Human
uggcgccggagcagaacgc

SEQ ID NO: 689391 - RNA, 22 nt, Human
aaaaagcaagaauucacaagca

SEQ ID NO: 689392 - RNA, 21 nt, Human
aaacgcuccuaucaaaaugac

SEQ ID NO: 689393 - RNA, 26 nt, Human
aaagaauccaaaccuaagaacccaag

SEQ ID NO: 689394 - RNA, 21 nt, Human
aaagcaccaccaccuuugcca

SEQ ID NO: 689395 - RNA, 19 nt, Human
aacauggcuacccuaucuc

SEQ ID NO: 689396 - RNA, 21 nt, Human
aacauggcuacccuaucucuu

SEQ ID NO: 689397 - RNA, 19 nt, Human
aagaaagacacaggaagaa

SEQ ID NO: 689398 - RNA, 21 nt, Human
aagaauccaaaccuaagaacc

SEQ ID NO: 689399 - RNA, 18 nt, Human
aagcaagaauucacaagc

SEQ ID NO: 689400 - RNA, 19 nt, Human
aagcuuuguagaggguggc

SEQ ID NO: 689401 - RNA, 18 nt, Human
aaggaccaugcccugccc

SEQ ID NO: 689402 - RNA, 19 nt, Human
aaggcacgggucuccaagc

SEQ ID NO: 689403 - RNA, 24 nt, Human
aaucccaccccacugccucgcaga

SEQ ID NO: 689404 - RNA, 22 nt, Human
acagacauacaggacaccuccc

SEQ ID NO: 689405 - RNA, 23 nt, Human
acagaguguuucuuggcuccaaa

SEQ ID NO: 689406 - RNA, 21 nt, Human
accaccaccuuugccauccca

SEQ ID NO: 689407 - RNA, 21 nt, Human
accagcccugugugaaagaca

SEQ ID NO: 689408 - RNA, 20 nt, Human
accuccccacccucaccccc

SEQ ID NO: 689409 - RNA, 20 nt, Human
acuccuucaucuccuggccu

SEQ ID NO: 689410 - RNA, 23 nt, Human
agacacaggaagaauuuaaacaa

SEQ ID NO: 689411 - RNA, 30 nt, Human
agacaggcagauuccaacaugagaucagag

SEQ ID NO: 689412 - RNA, 25 nt, Human
agaggaaaaaagcaagaauucacaa

SEQ ID NO: 689413 - RNA, 20 nt, Human
agagggugagaacaggaugc

SEQ ID NO: 689414 - RNA, 23 nt, Human
agauccagaaguucuauaaagcu

SEQ ID NO: 689415 - RNA, 22 nt, Human
agcaccaccaccuuugccaucc

SEQ ID NO: 689416 - RNA, 21 nt, Human
aggaagaauuuaaacaagcca

SEQ ID NO: 689417 - RNA, 19 nt, Human
aggaaggggagcuuggcag

SEQ ID NO: 689418 - RNA, 21 nt, Human
aggcaaucaaaagggggaagc

SEQ ID NO: 689419 - RNA, 24 nt, Human
aguggacaggcuguuuugguuucu

SEQ ID NO: 689420 - RNA, 22 nt, Human
aucccaccccacugccucgcag

SEQ ID NO: 689421 - RNA, 22 nt, Human
caacaugagaucagaucaggcc

SEQ ID NO: 689422 - RNA, 24 nt, Human
caacuguuacaccccauucugccu

SEQ ID NO: 689423 - RNA, 19 nt, Human
caagcaaaacuggcaugua

SEQ ID NO: 689424 - RNA, 20 nt, Human
cacccucaccccccuuccag

SEQ ID NO: 689425 - RNA, 20 nt, Human
cagaagucccugccaggggc

SEQ ID NO: 689426 - RNA, 18 nt, Human
cagaaguuauaaauggua

SEQ ID NO: 689427 - RNA, 21 nt, Human
cagaauggaagcgguucugcu

SEQ ID NO: 689428 - RNA, 23 nt, Human
cagaauggaagcgguucugcuaa

SEQ ID NO: 689429 - RNA, 21 nt, Human
cagaguguuucuuggcuccaa

SEQ ID NO: 689430 - RNA, 18 nt, Human
cagcagcaguggacaggc

SEQ ID NO: 689431 - RNA, 18 nt, Human
cagcagggcuugcaugcg

SEQ ID NO: 689432 - RNA, 21 nt, Human
caggacaccucccaaauguaa

SEQ ID NO: 689433 - RNA, 18 nt, Human
caggagacgcugagcagc

SEQ ID NO: 689434 - RNA, 22 nt, Human
caggagacgcugagcagccagg

SEQ ID NO: 689435 - RNA, 18 nt, Human
cauacaggacaccuccca

SEQ ID NO: 689436 - RNA, 26 nt, Human
cauccccacagaggcaucucccagcc

SEQ ID NO: 689437 - RNA, 21 nt, Human
caucuggaaggcacgggucuc

SEQ ID NO: 689438 - RNA, 21 nt, Human
caugcccugccccaccucccc

SEQ ID NO: 689439 - RNA, 22 nt, Human
ccagcccugugugaaagacagg

SEQ ID NO: 689440 - RNA, 23 nt, Human
ccagugugccagguguaggaagg

SEQ ID NO: 689441 - RNA, 21 nt, Human
ccauaacccagaagucccugc

SEQ ID NO: 689442 - RNA, 18 nt, Human
ccaucuggaaggcacggg

SEQ ID NO: 689443 - RNA, 19 nt, Human
cccaaauguaaacgacagc

SEQ ID NO: 689444 - RNA, 22 nt, Human
cccaagcaucucuucuuuccac

SEQ ID NO: 689445 - RNA, 20 nt, Human
cccaccuccccacccucacc

SEQ ID NO: 689446 - RNA, 21 nt, Human
cccagugagcagacuaagcac

SEQ ID NO: 689447 - RNA, 23 nt, Human
cccauaacccagaagucccugcc

SEQ ID NO: 689448 - RNA, 24 nt, Human
ccccacccucaccccccuuccagu

SEQ ID NO: 689449 - RNA, 18 nt, Human
ccccauuucauccccaca

SEQ ID NO: 689450 - RNA, 20 nt, Human
ccgccgccacccucagcucg

SEQ ID NO: 689451 - RNA, 23 nt, Human
ccuaagaacccaagguucccaag

SEQ ID NO: 689452 - RNA, 25 nt, Human
ccuccccacccucaccccccuucca

SEQ ID NO: 689453 - RNA, 20 nt, Human
ccuggccuaaggucucuagu

SEQ ID NO: 689454 - RNA, 18 nt, Human
cgaggaaaagcaaucaag

SEQ ID NO: 689455 - RNA, 20 nt, Human
cgcaggaacucuucuucucc

SEQ ID NO: 689456 - RNA, 25 nt, Human
cucagagcaaagcugcugccgccac

SEQ ID NO: 689457 - RNA, 24 nt, Human
cuccaucacagcugcccaggggcu

SEQ ID NO: 689458 - RNA, 21 nt, Human
cucuguuaacagaugcccacc

SEQ ID NO: 689459 - RNA, 24 nt, Human
cucuucuuccucuuugguguaccu

SEQ ID NO: 689460 - RNA, 21 nt, Human
cugaagaugaaagcaccacca

SEQ ID NO: 689461 - RNA, 18 nt, Human
cuggcuccggguggagca

SEQ ID NO: 689462 - RNA, 23 nt, Human
cuuaauacaaauacagagacgag

SEQ ID NO: 689463 - RNA, 21 nt, Human
cuucuuccucuuugguguacc

SEQ ID NO: 689464 - RNA, 22 nt, Human
gaaagaaggcaggacagaugca

SEQ ID NO: 689465 - RNA, 20 nt, Human
gauaacuauuauuauuuggu

SEQ ID NO: 689466 - RNA, 23 nt, Human
gcagaccccagugugccaggugu

SEQ ID NO: 689467 - RNA, 21 nt, Human
gcagcccuugagggggauggg

SEQ ID NO: 689468 - RNA, 24 nt, Human
gcccaguaccgucacguccuauuu

SEQ ID NO: 689469 - RNA, 18 nt, Human
gccuuguaaaaauaacaa

SEQ ID NO: 689470 - RNA, 18 nt, Human
gcugccgccacccagacg

SEQ ID NO: 689471 - RNA, 18 nt, Human
gcuugcaugcgcaggaac

SEQ ID NO: 689472 - RNA, 27 nt, Human
ggaccaagaccagcccugugugaaaga

SEQ ID NO: 689473 - RNA, 22 nt, Human
ggagacgcugagcagccaggcu

SEQ ID NO: 689474 - RNA, 20 nt, Human
ggcggaaguaaagagcuuuu

SEQ ID NO: 689475 - RNA, 23 nt, Human
gggaugcuggauuuagcagccgu

SEQ ID NO: 689476 - RNA, 23 nt, Human
gggcagaggcuucugccugaaga

SEQ ID NO: 689477 - RNA, 20 nt, Human
gggcagcaugagaacugggc

SEQ ID NO: 689478 - RNA, 23 nt, Human
gggcuucugcuguaguucauauu

SEQ ID NO: 689479 - RNA, 22 nt, Human
ggggagcuuggcaggcggcucc

SEQ ID NO: 689480 - RNA, 24 nt, Human
guacagacauacaggacaccuccc

SEQ ID NO: 689481 - RNA, 25 nt, Human
gugaggcagcaugagccugacugaa

SEQ ID NO: 689482 - RNA, 23 nt, Human
guuucagauggcaggaacugggc

SEQ ID NO: 689483 - RNA, 21 nt, Human
uaaaaauaacaaaacgcuccu

SEQ ID NO: 689484 - RNA, 19 nt, Human
uaaaggaccaagaccagcc

SEQ ID NO: 689485 - RNA, 24 nt, Human
uaagaacccaagguucccaagcau

SEQ ID NO: 689486 - RNA, 20 nt, Human
uacacaugagugauggccag

SEQ ID NO: 689487 - RNA, 18 nt, Human
uacaggacaccucccaaa

SEQ ID NO: 689488 - RNA, 20 nt, Human
uacgccuccuccaucccaca

SEQ ID NO: 689489 - RNA, 24 nt, Human
uauuaaagaauccaaaccuaagaa

SEQ ID NO: 689490 - RNA, 22 nt, Human
uccaaaccuaagaacccaaggu

SEQ ID NO: 689491 - RNA, 23 nt, Human
ucccaagcaucucuucuuuccac

SEQ ID NO: 689492 - RNA, 21 nt, Human
ucccaccccacugccucgcag

SEQ ID NO: 689493 - RNA, 22 nt, Human
ucccaccccacugccucgcaga

SEQ ID NO: 689494 - RNA, 23 nt, Human
ucccaccccgcucauuugggcaa

SEQ ID NO: 689495 - RNA, 19 nt, Human
uccccacccucaccccccu

SEQ ID NO: 689496 - RNA, 21 nt, Human
uccccacccucaccccccuuc

SEQ ID NO: 689497 - RNA, 21 nt, Human
uccucuuugguguaccugaac

SEQ ID NO: 689498 - RNA, 25 nt, Human
ucggaaauaucugaauagauuuuua

SEQ ID NO: 689499 - RNA, 23 nt, Human
ugaaagacaggcagauuccaaca

SEQ ID NO: 689500 - RNA, 24 nt, Human
ugaaagcaccaccaccuuugccau

SEQ ID NO: 689501 - RNA, 26 nt, Human
ugaaagcaccaccaccuuugccaucc

SEQ ID NO: 689502 - RNA, 20 nt, Human
ugaagcacaaaccaccugaa

SEQ ID NO: 689503 - RNA, 20 nt, Human
ugaaucccaccccacugccu

SEQ ID NO: 689504 - RNA, 21 nt, Human
ugaaucccaccccacugccuc

SEQ ID NO: 689505 - RNA, 20 nt, Human
ugacggccaggagacgcuga

SEQ ID NO: 689506 - RNA, 18 nt, Human
ugacuugugaagggaacu

SEQ ID NO: 689507 - RNA, 22 nt, Human
ugacuugugaagggaacugucu

SEQ ID NO: 689508 - RNA, 23 nt, Human
ugacuuugaagcacaaaccaccu

SEQ ID NO: 689509 - RNA, 22 nt, Human
ugacuuugcuacugaacuccuu

SEQ ID NO: 689510 - RNA, 21 nt, Human
ugcaagaagaguaaugucagg

SEQ ID NO: 689511 - RNA, 26 nt, Human
ugcccugccccaccuccccacccuca

SEQ ID NO: 689512 - RNA, 18 nt, Human
uggacaggcuguuuuggu

SEQ ID NO: 689513 - RNA, 21 nt, Human
uggacaggugugacuuugcua

SEQ ID NO: 689514 - RNA, 19 nt, Human
uggcaggaacugggcacuu

SEQ ID NO: 689515 - RNA, 23 nt, Human
uggcaggaacugggcacuucaga

SEQ ID NO: 689516 - RNA, 20 nt, Human
uggcaggcggcuccugcagg

SEQ ID NO: 689517 - RNA, 19 nt, Human
uggccuaaggucucuaguc

SEQ ID NO: 689518 - RNA, 23 nt, Human
uggccuccacagcucuucuuccu

SEQ ID NO: 689519 - RNA, 21 nt, Human
ugggcaaaaggaaaugaaaac

SEQ ID NO: 689520 - RNA, 20 nt, Human
ugggcagaggcuucugccug

SEQ ID NO: 689521 - RNA, 26 nt, Human
uguaaaaauaacaaaacgcuccuauc

SEQ ID NO: 689522 - RNA, 19 nt, Human
uguguguagagucacacag

SEQ ID NO: 689523 - RNA, 22 nt, Human
uguuucaagaaaagacuacaga

SEQ ID NO: 689524 - RNA, 23 nt, Human
uguuuugguuucuuucagucauu

SEQ ID NO: 689525 - RNA, 24 nt, Human
uuagcagccgugaucuccagaaug

SEQ ID NO: 689526 - RNA, 24 nt, Human
uucccaucucugguuucucccaua

SEQ ID NO: 689527 - RNA, 20 nt, Human
uucugcuuacgccuccucca

SEQ ID NO: 689528 - RNA, 26 nt, Human
uuugccaucccauuagcugagugagc

SEQ ID NO: 689529 - RNA, 24 nt, Human
uuuuccucauucccaucucugguu

SEQ ID NO: 689530 - RNA, 19 nt, Human
aaaaagccuccccuccccu

SEQ ID NO: 689531 - RNA, 21 nt, Human
aaccagcgcccccauuccugg

SEQ ID NO: 689532 - RNA, 20 nt, Human
aagcccaaccagcgccccca

SEQ ID NO: 689533 - RNA, 19 nt, Human
accccgggcucggcggcac

SEQ ID NO: 689534 - RNA, 21 nt, Human
agaaagaaugcuuugccucca

SEQ ID NO: 689535 - RNA, 21 nt, Human
agaguccugggugcuguuccu

SEQ ID NO: 689536 - RNA, 19 nt, Human
agcagcccccuugcuucuc

SEQ ID NO: 689537 - RNA, 18 nt, Human
auggcucuggcagugccc

SEQ ID NO: 689538 - RNA, 24 nt, Human
augucuugugcugaaugaaauagg

SEQ ID NO: 689539 - RNA, 18 nt, Human
auucacugacucuuccuu

SEQ ID NO: 689540 - RNA, 23 nt, Human
caagaugaaggccagaggugccg

SEQ ID NO: 689541 - RNA, 25 nt, Human
caagaugaaggccagaggugccguu

SEQ ID NO: 689542 - RNA, 20 nt, Human
caagcccaaccagcgccccc

SEQ ID NO: 689543 - RNA, 21 nt, Human
caagcccaaccagcgccccca

SEQ ID NO: 689544 - RNA, 18 nt, Human
caaucaggaaaccauucu

SEQ ID NO: 689545 - RNA, 19 nt, Human
cacagaaagaaugcuuugc

SEQ ID NO: 689546 - RNA, 20 nt, Human
caccacaccacccucuggcc

SEQ ID NO: 689547 - RNA, 20 nt, Human
caccagugaugggugaagcc

SEQ ID NO: 689548 - RNA, 18 nt, Human
caccaugcaggcucaggc

SEQ ID NO: 689549 - RNA, 24 nt, Human
cacccagguaaggcaagucagaac

SEQ ID NO: 689550 - RNA, 18 nt, Human
caccgcagccauucacug

SEQ ID NO: 689551 - RNA, 19 nt, Human
caccgcagccauucacugg

SEQ ID NO: 689552 - RNA, 18 nt, Human
caccugguuagccccagg

SEQ ID NO: 689553 - RNA, 18 nt, Human
caccugguuagccccagg

SEQ ID NO: 689554 - RNA, 21 nt, Human
caccuucuaaaaucguauguc

SEQ ID NO: 689555 - RNA, 19 nt, Human
cacugcuggaggcuaccug

SEQ ID NO: 689556 - RNA, 22 nt, Human
cagcaccaagaugaaggccaga

SEQ ID NO: 689557 - RNA, 22 nt, Human
cagcccccuugcuucucugucc

SEQ ID NO: 689558 - RNA, 18 nt, Human
cagcgguccuggcugugg

SEQ ID NO: 689559 - RNA, 23 nt, Human
caggaacaaaauagucacagaaa

SEQ ID NO: 689560 - RNA, 19 nt, Human
ccaguucucagcgguccug

SEQ ID NO: 689561 - RNA, 21 nt, Human
ccaugguccuuuuaaggcccu

SEQ ID NO: 689562 - RNA, 19 nt, Human
cccccuugcuucucugucc

SEQ ID NO: 689563 - RNA, 20 nt, Human
ccccuggacaccacaccacc

SEQ ID NO: 689564 - RNA, 21 nt, Human
ccccuggacaccacaccaccc

SEQ ID NO: 689565 - RNA, 25 nt, Human
ccccuggacaccacaccacccucug

SEQ ID NO: 689566 - RNA, 25 nt, Human
cccugcaccagggccuaccuuguug

SEQ ID NO: 689567 - RNA, 21 nt, Human
cccuggacaccacaccacccu

SEQ ID NO: 689568 - RNA, 20 nt, Human
cccugggggcgccgcgcggg

SEQ ID NO: 689569 - RNA, 18 nt, Human
ccuaacgcugugugaugc

SEQ ID NO: 689570 - RNA, 24 nt, Human
ccuccccuccccucaccuucuaaa

SEQ ID NO: 689571 - RNA, 18 nt, Human
ccuccgcgccgcggcccg

SEQ ID NO: 689572 - RNA, 23 nt, Human
ccuuaggcuccuccccuggcccu

SEQ ID NO: 689573 - RNA, 23 nt, Human
ccuugcuucucugucccuccuca

SEQ ID NO: 689574 - RNA, 18 nt, Human
cgaggccuccgcgccgcg

SEQ ID NO: 689575 - RNA, 18 nt, Human
cgccgggauccacagcag

SEQ ID NO: 689576 - RNA, 18 nt, Human
cgcgcgggguccugggag

SEQ ID NO: 689577 - RNA, 22 nt, Human
cggcggcagcggaaguaaggaa

SEQ ID NO: 689578 - RNA, 22 nt, Human
cgucuucagccccaacauggga

SEQ ID NO: 689579 - RNA, 22 nt, Human
cucaaagacacuccccuucucu

SEQ ID NO: 689580 - RNA, 22 nt, Human
cucagaguccugggugcuguuc

SEQ ID NO: 689581 - RNA, 24 nt, Human
cuccgcgccgcggcccgucggguc

SEQ ID NO: 689582 - RNA, 22 nt, Human
cuggaggcuaccugggcgcugg

SEQ ID NO: 689583 - RNA, 19 nt, Human
cuggcucccuccuccaccc

SEQ ID NO: 689584 - RNA, 22 nt, Human
cugggugcuguuccugcaaccc

SEQ ID NO: 689585 - RNA, 18 nt, Human
cugugugaugcuuccucc

SEQ ID NO: 689586 - RNA, 19 nt, Human
gaggcccgccccaccuugc

SEQ ID NO: 689587 - RNA, 22 nt, Human
gcagccugagcuccaagcccaa

SEQ ID NO: 689588 - RNA, 19 nt, Human
gcccgccccaccuugcccc

SEQ ID NO: 689589 - RNA, 22 nt, Human
gccgggccugugggcgaagcgc

SEQ ID NO: 689590 - RNA, 21 nt, Human
gccuggcucccuccuccaccc

SEQ ID NO: 689591 - RNA, 22 nt, Human
gcgcuagaccggcuuugggggc

SEQ ID NO: 689592 - RNA, 19 nt, Human
ggagaagacagguggagau

SEQ ID NO: 689593 - RNA, 22 nt, Human
ggcagcggaaguaaggaagacg

SEQ ID NO: 689594 - RNA, 18 nt, Human
ggcauggauucuggaaag

SEQ ID NO: 689595 - RNA, 18 nt, Human
ggguccugggagcucggg

SEQ ID NO: 689596 - RNA, 24 nt, Human
gguucagaagcauggaccagcauu

SEQ ID NO: 689597 - RNA, 18 nt, Human
guggcggcggcggcagcg

SEQ ID NO: 689598 - RNA, 18 nt, Human
gugguggaggaaggguca

SEQ ID NO: 689599 - RNA, 21 nt, Human
uaaugcacgcagggguguggg

SEQ ID NO: 689600 - RNA, 18 nt, Human
uacacaggcauggauucu

SEQ ID NO: 689601 - RNA, 23 nt, Human
uaccugggcgcuggguuuuauug

SEQ ID NO: 689602 - RNA, 24 nt, Human
uagaaaaagccuccccuccccuca

SEQ ID NO: 689603 - RNA, 21 nt, Human
ucagaguccugggugcuguuc

SEQ ID NO: 689604 - RNA, 22 nt, Human
ucagaguccugggugcuguucc

SEQ ID NO: 689605 - RNA, 19 nt, Human
ucagaucuucaccugguua

SEQ ID NO: 689606 - RNA, 20 nt, Human
ucagcagcccccuugcuucu

SEQ ID NO: 689607 - RNA, 20 nt, Human
ucagccccaacaugggagcu

SEQ ID NO: 689608 - RNA, 22 nt, Human
uccacaauugucgcagcaccaa

SEQ ID NO: 689609 - RNA, 23 nt, Human
uccccucugaggugagcaaaggc

SEQ ID NO: 689610 - RNA, 22 nt, Human
uccccugaacugagguucuugu

SEQ ID NO: 689611 - RNA, 21 nt, Human
uccgcgccgcggcccgucggg

SEQ ID NO: 689612 - RNA, 24 nt, Human
uccucagaucugaugcugcaaaag

SEQ ID NO: 689613 - RNA, 19 nt, Human
uccugggagcucgggaggc

SEQ ID NO: 689614 - RNA, 19 nt, Human
uccugggugcuguuccugc

SEQ ID NO: 689615 - RNA, 20 nt, Human
ucugucccuccucagagucc

SEQ ID NO: 689616 - RNA, 19 nt, Human
ugacucuuccuucugcagc

SEQ ID NO: 689617 - RNA, 27 nt, Human
ugccaggaagccgcacugcuggaggcu

SEQ ID NO: 689618 - RNA, 24 nt, Human
ugccccgaggccuccgcgccgcgg

SEQ ID NO: 689619 - RNA, 19 nt, Human
ugccccugcucgucuucag

SEQ ID NO: 689620 - RNA, 22 nt, Human
ugccccugcucgucuucagccc

SEQ ID NO: 689621 - RNA, 19 nt, Human
ugcuggaggcuaccugggc

SEQ ID NO: 689622 - RNA, 24 nt, Human
ugcuguuccugcaacccaccagug

SEQ ID NO: 689623 - RNA, 19 nt, Human
uggaccccuggacaccaca

SEQ ID NO: 689624 - RNA, 23 nt, Human
uggaccccuggacaccacaccac

SEQ ID NO: 689625 - RNA, 22 nt, Human
uggagcggcgcucguccggguc

SEQ ID NO: 689626 - RNA, 18 nt, Human
uggcggcggcggcagcgg

SEQ ID NO: 689627 - RNA, 18 nt, Human
uggcucccuccuccaccc

SEQ ID NO: 689628 - RNA, 19 nt, Human
uggcucccuccuccacccc

SEQ ID NO: 689629 - RNA, 19 nt, Human
ugggagcucgggaggcccg

SEQ ID NO: 689630 - RNA, 25 nt, Human
ugguuacccaccuuccagucacaug

SEQ ID NO: 689631 - RNA, 22 nt, Human
ugucccaguucucagcgguccu

SEQ ID NO: 689632 - RNA, 22 nt, Human
ugucuugugcugaaugaaauag

SEQ ID NO: 689633 - RNA, 21 nt, Human
ugugggcaggguccucagagc

SEQ ID NO: 689634 - RNA, 20 nt, Human
uguuccugcaacccaccagu

SEQ ID NO: 689635 - RNA, 19 nt, Human
uucucagguagaaaaagcc

SEQ ID NO: 689636 - RNA, 25 nt, Human
uuuaaggcccucaaagacacucccu

SEQ ID NO: 689637 - RNA, 27 nt, Human
aaaaauauagaggauuugagccacaac

SEQ ID NO: 689638 - RNA, 19 nt, Human
aaauauagaggauuugagc

SEQ ID NO: 689639 - RNA, 21 nt, Human
aauguaugggagugagaaaga

SEQ ID NO: 689640 - RNA, 19 nt, Human
acauuugaagaaugaggaa

SEQ ID NO: 689641 - RNA, 19 nt, Human
acucaggaucuggaguucc

SEQ ID NO: 689642 - RNA, 24 nt, Human
agaggauuugagccacaacuggcc

SEQ ID NO: 689643 - RNA, 24 nt, Human
agccugaaauuuguugacaugggg

SEQ ID NO: 689644 - RNA, 20 nt, Human
auguaugggagugagaaaga

SEQ ID NO: 689645 - RNA, 20 nt, Human
caaaaaacaaggcuagcucc

SEQ ID NO: 689646 - RNA, 19 nt, Human
caguggauuuuccuuuuaa

SEQ ID NO: 689647 - RNA, 18 nt, Human
cccugggucuggggcauc

SEQ ID NO: 689648 - RNA, 21 nt, Human
ccuccuauuucucccucccca

SEQ ID NO: 689649 - RNA, 21 nt, Human
cucccugggccugcccgcaua

SEQ ID NO: 689650 - RNA, 20 nt, Human
cugcugccugcucccugggc

SEQ ID NO: 689651 - RNA, 24 nt, Human
gaaauuuguugacauggggcagga

SEQ ID NO: 689652 - RNA, 18 nt, Human
gaggaagagaggacagag

SEQ ID NO: 689653 - RNA, 19 nt, Human
gcccugggucuggggcauc

SEQ ID NO: 689654 - RNA, 19 nt, Human
ggagggaacauugaggguu

SEQ ID NO: 689655 - RNA, 18 nt, Human
ggugccagaguagaagga

SEQ ID NO: 689656 - RNA, 19 nt, Human
uacaagguuagagcccugg

SEQ ID NO: 689657 - RNA, 19 nt, Human
uaugggagugagaaagaug

SEQ ID NO: 689658 - RNA, 19 nt, Human
ucaggacacugaagggagg

SEQ ID NO: 689659 - RNA, 22 nt, Human
ugagccacaacuggcccacauu

SEQ ID NO: 689660 - RNA, 20 nt, Human
uggagaaaguccuguuccuc

SEQ ID NO: 689661 - RNA, 21 nt, Human
uggggcauccuuagccugaaa

SEQ ID NO: 689662 - RNA, 19 nt, Human
uuugaagaaugaggaacaa

SEQ ID NO: 689663 - RNA, 23 nt, Human
uuuuuuuuuuuuuuagcagugga

SEQ ID NO: 689664 - RNA, 22 nt, Human
aaaagguaaaaacaacucuucc

SEQ ID NO: 689665 - RNA, 27 nt, Human
aaacguuaacaauuccaaaacuaaacu

SEQ ID NO: 689666 - RNA, 18 nt, Human
acaacucuuccuuguacu

SEQ ID NO: 689667 - RNA, 22 nt, Human
acuguuugccucauuuaucaag

SEQ ID NO: 689668 - RNA, 26 nt, Human
caacagguucuucuuuuuguuaguuu

SEQ ID NO: 689669 - RNA, 24 nt, Human
ccucauuuaucaagaaaauuuaca

SEQ ID NO: 689670 - RNA, 24 nt, Human
uaaauguaagaagacuaguacuca

SEQ ID NO: 689671 - RNA, 19 nt, Human
uaacaggagcuuguugaaa

SEQ ID NO: 689672 - RNA, 18 nt, Human
uacaagggaagaagccau

SEQ ID NO: 689673 - RNA, 18 nt, Human
ucggucaguuugccgguc

SEQ ID NO: 689674 - RNA, 23 nt, Human
ucucccaaaagcauaaaaaugga

SEQ ID NO: 689675 - RNA, 26 nt, Human
ucucccaaaagcauaaaaauggagac

SEQ ID NO: 689676 - RNA, 22 nt, Human
ugaggcggcgccagucgcagcc

SEQ ID NO: 689677 - RNA, 24 nt, Human
ugggaggcggugaggcggcgccag

SEQ ID NO: 689678 - RNA, 25 nt, Human
ugggaggcggugaggcggcgccagu

SEQ ID NO: 689679 - RNA, 24 nt, Human
uuuuuggucccaagucuguuccug

SEQ ID NO: 689680 - RNA, 18 nt, Human
aaacuaccccccacccca

SEQ ID NO: 689681 - RNA, 19 nt, Human
aaacuaccccccaccccaa

SEQ ID NO: 689682 - RNA, 24 nt, Human
aaacuaccccccaccccaaccccc

SEQ ID NO: 689683 - RNA, 26 nt, Human
aaacuaccccccaccccaacccccac

SEQ ID NO: 689684 - RNA, 19 nt, Human
aaagggaaggggagggaag

SEQ ID NO: 689685 - RNA, 22 nt, Human
aacuaccccccaccccaacccc

SEQ ID NO: 689686 - RNA, 25 nt, Human
aacuaccccccaccccaacccccac

SEQ ID NO: 689687 - RNA, 29 nt, Human
aaggaagagaggaagggggagggaagggg

SEQ ID NO: 689688 - RNA, 22 nt, Human
acaaaaauguguauguggggcc

SEQ ID NO: 689689 - RNA, 24 nt, Human
acaacaaaguaaacuaccccccac

SEQ ID NO: 689690 - RNA, 18 nt, Human
accccaacccccacccag

SEQ ID NO: 689691 - RNA, 22 nt, Human
accccccaccccaacccccacc

SEQ ID NO: 689692 - RNA, 19 nt, Human
acuaccccccaccccaacc

SEQ ID NO: 689693 - RNA, 23 nt, Human
acuaccccccaccccaaccccca

SEQ ID NO: 689694 - RNA, 20 nt, Human
agaaucagcaaguucacucc

SEQ ID NO: 689695 - RNA, 24 nt, Human
agacauuuugcuaguauaaaaacg

SEQ ID NO: 689696 - RNA, 27 nt, Human
agagaggaagggggagggaaggggagc

SEQ ID NO: 689697 - RNA, 21 nt, Human
aggaaggaagagaggaagggg

SEQ ID NO: 689698 - RNA, 21 nt, Human
aggaagggggagggaagggga

SEQ ID NO: 689699 - RNA, 24 nt, Human
aggcaaauagaggaacacccccaa

SEQ ID NO: 689700 - RNA, 20 nt, Human
aggcggugugugugaggggg

SEQ ID NO: 689701 - RNA, 19 nt, Human
agggaaggggagggaagga

SEQ ID NO: 689702 - RNA, 20 nt, Human
agggaaggggagggaaggaa

SEQ ID NO: 689703 - RNA, 21 nt, Human
agggcaaaacagggaaggcgg

SEQ ID NO: 689704 - RNA, 19 nt, Human
aggggagggaaggaaggaa

SEQ ID NO: 689705 - RNA, 20 nt, Human
aggggguggggcuuaggagu

SEQ ID NO: 689706 - RNA, 23 nt, Human
agguggcaggcaaauagaggaac

SEQ ID NO: 689707 - RNA, 21 nt, Human
aguucacucccucccuccccc

SEQ ID NO: 689708 - RNA, 18 nt, Human
auagaaaacgcuguagcc

SEQ ID NO: 689709 - RNA, 25 nt, Human
caacaaaguaaacuaccccccaccc

SEQ ID NO: 689710 - RNA, 19 nt, Human
cacucccucccucccccca

SEQ ID NO: 689711 - RNA, 21 nt, Human
cacucccucccuccccccaaa

SEQ ID NO: 689712 - RNA, 24 nt, Human
cacucccucccuccccccaaaaaa

SEQ ID NO: 689713 - RNA, 30 nt, Human
cagcaaguucacucccucccuccccccaag

SEQ ID NO: 689714 - RNA, 24 nt, Human
ccaacccccacccagguuuugcua

SEQ ID NO: 689715 - RNA, 19 nt, Human
ccaaguaauaauaaaaaaa

SEQ ID NO: 689716 - RNA, 19 nt, Human
ccaccgcuaccgccgccgc

SEQ ID NO: 689717 - RNA, 23 nt, Human
cccaaaaaacacaaauuaaaaca

SEQ ID NO: 689718 - RNA, 18 nt, Human
ccccaacccccacccagg

SEQ ID NO: 689719 - RNA, 18 nt, Human
ccccaaggguaagcagcc

SEQ ID NO: 689720 - RNA, 23 nt, Human
cccccacccagguuuugcuacag

SEQ ID NO: 689721 - RNA, 19 nt, Human
cccccaccccaacccccac

SEQ ID NO: 689722 - RNA, 26 nt, Human
cccccaccccaacccccacccagguu

SEQ ID NO: 689723 - RNA, 20 nt, Human
ccccccaccccaacccccac

SEQ ID NO: 689724 - RNA, 22 nt, Human
ccccccaccccaacccccaccc

SEQ ID NO: 689725 - RNA, 18 nt, Human
cccuccccccaaaaaacc

SEQ ID NO: 689726 - RNA, 23 nt, Human
ccgagguuucgccgucgccgccg

SEQ ID NO: 689727 - RNA, 19 nt, Human
ccuauagccacucccaggc

SEQ ID NO: 689728 - RNA, 23 nt, Human
ccuauagccacucccaggcauuu

SEQ ID NO: 689729 - RNA, 20 nt, Human
ccuccgcuccccccucgucc

SEQ ID NO: 689730 - RNA, 22 nt, Human
cgaggagacuggaagacaacca

SEQ ID NO: 689731 - RNA, 22 nt, Human
cuacacagcuugggcccagccg

SEQ ID NO: 689732 - RNA, 24 nt, Human
cuaccccccaccccaacccccacc

SEQ ID NO: 689733 - RNA, 20 nt, Human
cuaccccuauagccacuccc

SEQ ID NO: 689734 - RNA, 20 nt, Human
cuaccgccgccgccgccacc

SEQ ID NO: 689735 - RNA, 23 nt, Human
cuaccgccgccgccgccaccucc

SEQ ID NO: 689736 - RNA, 25 nt, Human
cuccccccaaaaaacacaaauuaaa

SEQ ID NO: 689737 - RNA, 20 nt, Human
cuggaagacaaccaaggcca

SEQ ID NO: 689738 - RNA, 21 nt, Human
gaagggggagggaaggggagc

SEQ ID NO: 689739 - RNA, 22 nt, Human
gaagggggagggaaggggagcg

SEQ ID NO: 689740 - RNA, 19 nt, Human
gagagacaagagagguggc

SEQ ID NO: 689741 - RNA, 22 nt, Human
gaggaagggggagggaagggga

SEQ ID NO: 689742 - RNA, 22 nt, Human
gauccaaguagauuucauagaa

SEQ ID NO: 689743 - RNA, 21 nt, Human
ggaagagaggaagggggaggg

SEQ ID NO: 689744 - RNA, 20 nt, Human
ggaaggaaggaagagaggaa

SEQ ID NO: 689745 - RNA, 25 nt, Human
ggaaggcggugugugugagggggug

SEQ ID NO: 689746 - RNA, 22 nt, Human
gggaaggaaggaagagaggaag

SEQ ID NO: 689747 - RNA, 21 nt, Human
gggaagggaaaaagggaaggg

SEQ ID NO: 689748 - RNA, 24 nt, Human
gggccgaguccaucuucagaggga

SEQ ID NO: 689749 - RNA, 19 nt, Human
ggggagggaaggggagcgg

SEQ ID NO: 689750 - RNA, 18 nt, Human
ggggguggggcuuaggag

SEQ ID NO: 689751 - RNA, 19 nt, Human
guaaacuaccccccacccc

SEQ ID NO: 689752 - RNA, 23 nt, Human
guccaaguaauaauaaaaaaaua

SEQ ID NO: 689753 - RNA, 18 nt, Human
uaaaaaaauagaguccau

SEQ ID NO: 689754 - RNA, 19 nt, Human
uaaaaaaauagaguccauc

SEQ ID NO: 689755 - RNA, 24 nt, Human
uaaacuaccccccaccccaacccc

SEQ ID NO: 689756 - RNA, 19 nt, Human
uacagaaucagcaaguuca

SEQ ID NO: 689757 - RNA, 19 nt, Human
uaccccccaccccaacccc

SEQ ID NO: 689758 - RNA, 22 nt, Human
uaccccccaccccaacccccac

SEQ ID NO: 689759 - RNA, 20 nt, Human
uaccccuauagccacuccca

SEQ ID NO: 689760 - RNA, 23 nt, Human
uagaaaacgcuguagccagguua

SEQ ID NO: 689761 - RNA, 23 nt, Human
ucacucccucccuccccccaaaa

SEQ ID NO: 689762 - RNA, 20 nt, Human
uccaaguaauaauaaaaaaa

SEQ ID NO: 689763 - RNA, 26 nt, Human
ucccccaagggcaaaacagggaaggc

SEQ ID NO: 689764 - RNA, 23 nt, Human
ucccuccccccaaaaaacacaaa

SEQ ID NO: 689765 - RNA, 23 nt, Human
ugacuguaacacaaaaaugugua

SEQ ID NO: 689766 - RNA, 20 nt, Human
ugcccccgcccugcgagcuc

SEQ ID NO: 689767 - RNA, 19 nt, Human
ugcuacagaaucagcaagu

SEQ ID NO: 689768 - RNA, 22 nt, Human
uggaagacaaccaaggccaccg

SEQ ID NO: 689769 - RNA, 21 nt, Human
uguaacacaaaaauguguaug

SEQ ID NO: 689770 - RNA, 21 nt, Human
ugugaggggguggggcuuagg

SEQ ID NO: 689771 - RNA, 21 nt, Human
uucacucccucccucccccca

SEQ ID NO: 689772 - RNA, 18 nt, Human
uucagagggagagacaga

SEQ ID NO: 689773 - RNA, 21 nt, Human
uuucgccgucgccgccguuau

SEQ ID NO: 689774 - RNA, 22 nt, Human
aaaaagacaaagcuacaacaga

SEQ ID NO: 689775 - RNA, 18 nt, Human
aaaacaguagacaugggu

SEQ ID NO: 689776 - RNA, 23 nt, Human
aaaagaaaaagaaaaagacaaag

SEQ ID NO: 689777 - RNA, 25 nt, Human
aacaccgccaccauauccaccaccu

SEQ ID NO: 689778 - RNA, 22 nt, Human
aacauucuuuacacccaaaacc

SEQ ID NO: 689779 - RNA, 21 nt, Human
aaccaaauagaaauuuugaga

SEQ ID NO: 689780 - RNA, 23 nt, Human
aacuaccaaagaaggaguaacag

SEQ ID NO: 689781 - RNA, 21 nt, Human
aagaguguguucuuugucuuu

SEQ ID NO: 689782 - RNA, 23 nt, Human
aaggaaacaccuucgaaacugca

SEQ ID NO: 689783 - RNA, 24 nt, Human
aauaguaauuaacaaugaucuucu

SEQ ID NO: 689784 - RNA, 20 nt, Human
acaaggaaacaccuucgaaa

SEQ ID NO: 689785 - RNA, 26 nt, Human
acacacauauauauaccuguauauau

SEQ ID NO: 689786 - RNA, 21 nt, Human
acagauaaaagaaccucagga

SEQ ID NO: 689787 - RNA, 18 nt, Human
acaggacucaccucuucc

SEQ ID NO: 689788 - RNA, 24 nt, Human
acaguacaaacaggaaagcaugcc

SEQ ID NO: 689789 - RNA, 19 nt, Human
acccaaaaccuauggcagc

SEQ ID NO: 689790 - RNA, 21 nt, Human
accuugguuuccauauccugg

SEQ ID NO: 689791 - RNA, 18 nt, Human
acuaccacaauuuacagg

SEQ ID NO: 689792 - RNA, 19 nt, Human
acuuccaccaccagaucca

SEQ ID NO: 689793 - RNA, 20 nt, Human
agaaaaagacaaagcuacaa

SEQ ID NO: 689794 - RNA, 22 nt, Human
agacaggacucaccucuuccaa

SEQ ID NO: 689795 - RNA, 23 nt, Human
agcaacaagagagcauauucaaa

SEQ ID NO: 689796 - RNA, 20 nt, Human
aggacucaccucuuccaacu

SEQ ID NO: 689797 - RNA, 18 nt, Human
agggacugcccgagcuuc

SEQ ID NO: 689798 - RNA, 23 nt, Human
auagauuccccuuaaacugcaag

SEQ ID NO: 689799 - RNA, 19 nt, Human
auauaccuguauauauaua

SEQ ID NO: 689800 - RNA, 25 nt, Human
auauauauauauauguauauaugua

SEQ ID NO: 689801 - RNA, 19 nt, Human
auauauccauauauauaua

SEQ ID NO: 689802 - RNA, 19 nt, Human
auauauccauauauauaua

SEQ ID NO: 689803 - RNA, 19 nt, Human
auauaucuauauauauaca

SEQ ID NO: 689804 - RNA, 18 nt, Human
auguauauauguauauac

SEQ ID NO: 689805 - RNA, 21 nt, Human
caaaaaauguaaacuaaugca

SEQ ID NO: 689806 - RNA, 23 nt, Human
caaauugguaacaacaugauuua

SEQ ID NO: 689807 - RNA, 19 nt, Human
caacaccgccaccauaucc

SEQ ID NO: 689808 - RNA, 22 nt, Human
caccaccagauccauaaccacc

SEQ ID NO: 689809 - RNA, 23 nt, Human
caccacuuccaccaccagaucca

SEQ ID NO: 689810 - RNA, 25 nt, Human
caccagauccauaaccaccaccaua

SEQ ID NO: 689811 - RNA, 22 nt, Human
caccauaguuacuaccgucaaa

SEQ ID NO: 689812 - RNA, 22 nt, Human
cacccaaaaccuauggcagcag

SEQ ID NO: 689813 - RNA, 22 nt, Human
cagcagguguuucuuuacaguu

SEQ ID NO: 689814 - RNA, 21 nt, Human
caguacaaacaggaaagcaug

SEQ ID NO: 689815 - RNA, 20 nt, Human
cauacccgccucuacuacua

SEQ ID NO: 689816 - RNA, 20 nt, Human
cauauccuccaacaccgcca

SEQ ID NO: 689817 - RNA, 24 nt, Human
cauauucaaacacuagcaugcgcc

SEQ ID NO: 689818 - RNA, 23 nt, Human
caugaggccaauuuccauguggc

SEQ ID NO: 689819 - RNA, 21 nt, Human
cauguggcauugcaugcaucc

SEQ ID NO: 689820 - RNA, 19 nt, Human
cauugcaaacacacaaauu

SEQ ID NO: 689821 - RNA, 19 nt, Human
ccaaaaccuauggcagcag

SEQ ID NO: 689822 - RNA, 26 nt, Human
ccaccaccuugguuuccauauccugg

SEQ ID NO: 689823 - RNA, 20 nt, Human
ccagggccuucccaacaaau

SEQ ID NO: 689824 - RNA, 18 nt, Human
ccauguggcauugcaugc

SEQ ID NO: 689825 - RNA, 21 nt, Human
ccgucaaaauuuccuccuuca

SEQ ID NO: 689826 - RNA, 24 nt, Human
ccuccaacaccgccaccauaucca

SEQ ID NO: 689827 - RNA, 26 nt, Human
ccugguccaccaccaccauacccgcc

SEQ ID NO: 689828 - RNA, 20 nt, Human
ccuguacuaagcaacugucc

SEQ ID NO: 689829 - RNA, 24 nt, Human
ccuucauuguaaccaucauauccu

SEQ ID NO: 689830 - RNA, 21 nt, Human
ccuucugcuaccauauccacc

SEQ ID NO: 689831 - RNA, 24 nt, Human
cuaaaacacacauugcaaacacac

SEQ ID NO: 689832 - RNA, 24 nt, Human
cuccaacaccgccaccauauccac

SEQ ID NO: 689833 - RNA, 24 nt, Human
cugauguaaugaaaagaaaaagaa

SEQ ID NO: 689834 - RNA, 20 nt, Human
cugcccccuuucaugugucc

SEQ ID NO: 689835 - RNA, 22 nt, Human
cugcuguuuuuagaaccuucug

SEQ ID NO: 689836 - RNA, 22 nt, Human
cuguauauauauauauaaaaua

SEQ ID NO: 689837 - RNA, 25 nt, Human
cuuaaacugcaagucagcagguguu

SEQ ID NO: 689838 - RNA, 19 nt, Human
gaaaagaaaaagaaaaaga

SEQ ID NO: 689839 - RNA, 25 nt, Human
gcaguaaacauucuuuacacccaaa

SEQ ID NO: 689840 - RNA, 19 nt, Human
gccucuacuacuauaaccg

SEQ ID NO: 689841 - RNA, 18 nt, Human
gcuaugacaguccugaac

SEQ ID NO: 689842 - RNA, 26 nt, Human
gcugcaguuagguuauuuuggacaau

SEQ ID NO: 689843 - RNA, 24 nt, Human
ggaaaaaagguuacccacuaauuu

SEQ ID NO: 689844 - RNA, 21 nt, Human
ggagggcaguaaacauucuuu

SEQ ID NO: 689845 - RNA, 18 nt, Human
guauauauauauauaaaa

SEQ ID NO: 689846 - RNA, 20 nt, Human
uaacucacaaggaaacaccu

SEQ ID NO: 689847 - RNA, 19 nt, Human
uaagcacuagcugaagcaa

SEQ ID NO: 689848 - RNA, 22 nt, Human
uaagcugcaguaacuuuucuga

SEQ ID NO: 689849 - RNA, 21 nt, Human
uaaugaaaagaaaaagaaaaa

SEQ ID NO: 689850 - RNA, 23 nt, Human
uacacaagaaauaagaguguguu

SEQ ID NO: 689851 - RNA, 18 nt, Human
uacaguacaaacaggaaa

SEQ ID NO: 689852 - RNA, 18 nt, Human
uaccaaagaaggaguaac

SEQ ID NO: 689853 - RNA, 19 nt, Human
uaccaaagaaggaguaaca

SEQ ID NO: 689854 - RNA, 20 nt, Human
uaccuguauauauauauaua

SEQ ID NO: 689855 - RNA, 19 nt, Human
uacuacuauaaccaggacc

SEQ ID NO: 689856 - RNA, 18 nt, Human
uagcccuuuuccugcugu

SEQ ID NO: 689857 - RNA, 18 nt, Human
uauaaccaggaccacugc

SEQ ID NO: 689858 - RNA, 31 nt, Human
uauacacacacauauauauaccuguauauag

SEQ ID NO: 689859 - RNA, 20 nt, Human
uauaccuguauauauauaua

SEQ ID NO: 689860 - RNA, 19 nt, Human
uauauacacacacauauau

SEQ ID NO: 689861 - RNA, 24 nt, Human
uauauacacacacauauauauacc

SEQ ID NO: 689862 - RNA, 18 nt, Human
uauauacauauauauaua

SEQ ID NO: 689863 - RNA, 18 nt, Human
uauauacauauauauaua

SEQ ID NO: 689864 - RNA, 20 nt, Human
uauauacauauauauauaua

SEQ ID NO: 689865 - RNA, 22 nt, Human
uauauacauauauauauauaca

SEQ ID NO: 689866 - RNA, 24 nt, Human
uauauacauauauauauauacaca

SEQ ID NO: 689867 - RNA, 20 nt, Human
uauauaccuguauauauaua

SEQ ID NO: 689868 - RNA, 19 nt, Human
uauauauacacacacauau

SEQ ID NO: 689869 - RNA, 24 nt, Human
uauauauacacacacauauauaua

SEQ ID NO: 689870 - RNA, 23 nt, Human
uauauauaccuguauauauauau

SEQ ID NO: 689871 - RNA, 22 nt, Human
uauauauauacacacacauagu

SEQ ID NO: 689872 - RNA, 25 nt, Human
uauauauauacacacacauauauag

SEQ ID NO: 689873 - RNA, 18 nt, Human
uauauauauauguauaua

SEQ ID NO: 689874 - RNA, 22 nt, Human
uauauauaucuauauauauaca

SEQ ID NO: 689875 - RNA, 24 nt, Human
uauauauauguauauauguauaua

SEQ ID NO: 689876 - RNA, 20 nt, Human
uauauauccauauauauaua

SEQ ID NO: 689877 - RNA, 20 nt, Human
uauauauccauauauauaua

SEQ ID NO: 689878 - RNA, 18 nt, Human
uauauauguauauacaua

SEQ ID NO: 689879 - RNA, 22 nt, Human
uauauauguauauacauauaua

SEQ ID NO: 689880 - RNA, 20 nt, Human
uauauccauauauauauaua

SEQ ID NO: 689881 - RNA, 20 nt, Human
uauauccauauauauauaua

SEQ ID NO: 689882 - RNA, 21 nt, Human
uauauccauauauauauauau

SEQ ID NO: 689883 - RNA, 22 nt, Human
uauauccauauauauauauaua

SEQ ID NO: 689884 - RNA, 24 nt, Human
uauauccauauauauauauauaug

SEQ ID NO: 689885 - RNA, 20 nt, Human
uauauguauauacauauaua

SEQ ID NO: 689886 - RNA, 22 nt, Human
uauauguauauauccauauaua

SEQ ID NO: 689887 - RNA, 24 nt, Human
uauauguauauauccauauauaua

SEQ ID NO: 689888 - RNA, 24 nt, Human
uauccauauauauauauauaugua

SEQ ID NO: 689889 - RNA, 24 nt, Human
uauccauauauauauauauaugua

SEQ ID NO: 689890 - RNA, 25 nt, Human
uauccauauauauauauauauguaa

SEQ ID NO: 689891 - RNA, 23 nt, Human
uaugacaguccugaacaagaagg

SEQ ID NO: 689892 - RNA, 24 nt, Human
uauguauauacauauauauauaua

SEQ ID NO: 689893 - RNA, 20 nt, Human
uauguauauauccauauaua

SEQ ID NO: 689894 - RNA, 18 nt, Human
uauguauauauguauaua

SEQ ID NO: 689895 - RNA, 21 nt, Human
uauguauauauguauauacau

SEQ ID NO: 689896 - RNA, 24 nt, Human
uauguauauauguauauacauaua

SEQ ID NO: 689897 - RNA, 28 nt, Human
uauguauauauguauauacauauauaua

SEQ ID NO: 689898 - RNA, 21 nt, Human
ucagcagguguuucuuuacag

SEQ ID NO: 689899 - RNA, 20 nt, Human
ucauauccuccaacaccgcc

SEQ ID NO: 689900 - RNA, 18 nt, Human
uccaccaccaccauaccc

SEQ ID NO: 689901 - RNA, 21 nt, Human
uccaccaccagauccauaacc

SEQ ID NO: 689902 - RNA, 24 nt, Human
uccaccaccagauccauaaccacc

SEQ ID NO: 689903 - RNA, 19 nt, Human
uccauauauauauauauau

SEQ ID NO: 689904 - RNA, 19 nt, Human
uccauauauauauauauau

SEQ ID NO: 689905 - RNA, 19 nt, Human
uccauauauauauauauau

SEQ ID NO: 689906 - RNA, 19 nt, Human
uccauauauauauauauau

SEQ ID NO: 689907 - RNA, 28 nt, Human
ucccaacaaauugguaacaacaugauuu

SEQ ID NO: 689908 - RNA, 22 nt, Human
ucuaaaacacacauugcaaaca

SEQ ID NO: 689909 - RNA, 21 nt, Human
ucuaaacacagcuaggacuca

SEQ ID NO: 689910 - RNA, 26 nt, Human
ucuaaacacagcuaggacucagcaag

SEQ ID NO: 689911 - RNA, 20 nt, Human
ucuaacguaggagagggaaa

SEQ ID NO: 689912 - RNA, 24 nt, Human
ugcaagucagcagguguuucuuua

SEQ ID NO: 689913 - RNA, 23 nt, Human
ugcuuuaaaaaaggaaaaaaggu

SEQ ID NO: 689914 - RNA, 21 nt, Human
uggcuaugacaguccugaaca

SEQ ID NO: 689915 - RNA, 21 nt, Human
ugguuuggaaauggggagaau

SEQ ID NO: 689916 - RNA, 19 nt, Human
uguagaaaaacugaacuac

SEQ ID NO: 689917 - RNA, 23 nt, Human
uguauauacauauauauauauac

SEQ ID NO: 689918 - RNA, 21 nt, Human
uguauauauauauauaaaaua

SEQ ID NO: 689919 - RNA, 20 nt, Human
uguauauauccauauauaua

SEQ ID NO: 689920 - RNA, 22 nt, Human
uguauauauccauauauauaua

SEQ ID NO: 689921 - RNA, 20 nt, Human
uguauauauguauauacaua

SEQ ID NO: 689922 - RNA, 21 nt, Human
ugucucaaaguaaccugcagc

SEQ ID NO: 689923 - RNA, 24 nt, Human
uuaaaagaaaaugcacaaaaacca

SEQ ID NO: 689924 - RNA, 19 nt, Human
uuaucuaaaacucuucuca

SEQ ID NO: 689925 - RNA, 21 nt, Human
uuccaccaaaacugcccccuu

SEQ ID NO: 689926 - RNA, 18 nt, Human
uugcaaacuguggcuaug

SEQ ID NO: 689927 - RNA, 20 nt, Human
uuuucagaauuuaaauggaa

SEQ ID NO: 689928 - RNA, 23 nt, Human
aaacaccuagagcucuggaaaua

SEQ ID NO: 689929 - RNA, 19 nt, Human
aacaggagagugauuucca

SEQ ID NO: 689930 - RNA, 21 nt, Human
aacugugucuccuccuccuug

SEQ ID NO: 689931 - RNA, 18 nt, Human
aaggugaaaaaaagguga

SEQ ID NO: 689932 - RNA, 26 nt, Human
accugguaauaaaaaucagcccauga

SEQ ID NO: 689933 - RNA, 21 nt, Human
acuccauauccaaacaaagca

SEQ ID NO: 689934 - RNA, 25 nt, Human
aggccgaggcgcggcggcuccucgc

SEQ ID NO: 689935 - RNA, 29 nt, Human
aggggaaggcgccgcaggcuccccaaggg

SEQ ID NO: 689936 - RNA, 23 nt, Human
caccacacgcugccuaaacaccu

SEQ ID NO: 689937 - RNA, 21 nt, Human
cacuccauauccaaacaaagc

SEQ ID NO: 689938 - RNA, 20 nt, Human
cagacaccacacgcugccua

SEQ ID NO: 689939 - RNA, 23 nt, Human
cagagcggcagcaggaagcagag

SEQ ID NO: 689940 - RNA, 18 nt, Human
caggcugcagagcggcag

SEQ ID NO: 689941 - RNA, 20 nt, Human
ccaacagccaagcuccgucc

SEQ ID NO: 689942 - RNA, 23 nt, Human
ccacggagcugcuccaacugugu

SEQ ID NO: 689943 - RNA, 23 nt, Human
ccccagucagcccacggagcugc

SEQ ID NO: 689944 - RNA, 23 nt, Human
ccgccgccgcacgggaacccacc

SEQ ID NO: 689945 - RNA, 22 nt, Human
gaccugguaauaaaaaucagcc

SEQ ID NO: 689946 - RNA, 18 nt, Human
gacgccgcggggcccgcu

SEQ ID NO: 689947 - RNA, 18 nt, Human
gagcggcagcaggaagca

SEQ ID NO: 689948 - RNA, 19 nt, Human
gagcggcagcaggaagcag

SEQ ID NO: 689949 - RNA, 21 nt, Human
gagcggcagcaggaagcagag

SEQ ID NO: 689950 - RNA, 23 nt, Human
ggaagcagagccucucaccugcu

SEQ ID NO: 689951 - RNA, 21 nt, Human
uaaaauaccuuacaauacauu

SEQ ID NO: 689952 - RNA, 22 nt, Human
uacaaccaggguccacaggucc

SEQ ID NO: 689953 - RNA, 21 nt, Human
ucacccaggcuugggguuuuu

SEQ ID NO: 689954 - RNA, 26 nt, Human
ucagcccaugauggcgcuauggccuc

SEQ ID NO: 689955 - RNA, 24 nt, Human
uccacagguccaggcugcagagcg

SEQ ID NO: 689956 - RNA, 19 nt, Human
ucccacacucacccaggcu

SEQ ID NO: 689957 - RNA, 24 nt, Human
uccuuggccgccgccgcacgggaa

SEQ ID NO: 689958 - RNA, 19 nt, Human
ugcuccaacugugucuccu

SEQ ID NO: 689959 - RNA, 20 nt, Human
uggcaaaaucaggacacgug

SEQ ID NO: 689960 - RNA, 19 nt, Human
uggccgccgccgcacggga

SEQ ID NO: 689961 - RNA, 18 nt, Human
uuacaggaaauguaugac

SEQ ID NO: 689962 - RNA, 23 nt, Human
uuagauucccaaaagggguacca

SEQ ID NO: 689963 - RNA, 19 nt, Human
uucacuccauauccaaaca

SEQ ID NO: 689964 - RNA, 24 nt, Human
uuuuucccacacucacccaggcuu

SEQ ID NO: 689965 - RNA, 23 nt, Human
uuuuuuuuuucccacacucaccc

SEQ ID NO: 689966 - RNA, 21 nt, Human
aacugccccacacagcacacu

SEQ ID NO: 689967 - RNA, 18 nt, Human
aagagauucgauucugag

SEQ ID NO: 689968 - RNA, 23 nt, Human
aagcaaaaauuacaggguaagac

SEQ ID NO: 689969 - RNA, 20 nt, Human
acaugccaacucucauucac

SEQ ID NO: 689970 - RNA, 23 nt, Human
agaggaugcauuugacaugccaa

SEQ ID NO: 689971 - RNA, 21 nt, Human
aguaucaacuuuagaaaacaa

SEQ ID NO: 689972 - RNA, 23 nt, Human
auacuucuaacucaaagcugcuu

SEQ ID NO: 689973 - RNA, 20 nt, Human
augccgacugcugcuggagg

SEQ ID NO: 689974 - RNA, 25 nt, Human
caaaaaaaucucacaagaaggggag

SEQ ID NO: 689975 - RNA, 22 nt, Human
caaaauuaaaagcaaaaauuac

SEQ ID NO: 689976 - RNA, 20 nt, Human
caacgcggccacaaccgcuu

SEQ ID NO: 689977 - RNA, 22 nt, Human
cacaaaaaucccacaguaucaa

SEQ ID NO: 689978 - RNA, 25 nt, Human
ccaaacaucaggcuguucacaaaaa

SEQ ID NO: 689979 - RNA, 18 nt, Human
cccugcauaacaagagau

SEQ ID NO: 689980 - RNA, 21 nt, Human
ccgaaaauguagcugaagauc

SEQ ID NO: 689981 - RNA, 27 nt, Human
cgaaaauguagcugaagaucaaaaaaa

SEQ ID NO: 689982 - RNA, 20 nt, Human
cggcaacgcggccacaaccg

SEQ ID NO: 689983 - RNA, 19 nt, Human
cugaagauacuaggggaga

SEQ ID NO: 689984 - RNA, 23 nt, Human
cugaagaucaaaaaaaucucaca

SEQ ID NO: 689985 - RNA, 18 nt, Human
gagguaucaaaauuaaaa

SEQ ID NO: 689986 - RNA, 21 nt, Human
gauucugagucuccuacuccc

SEQ ID NO: 689987 - RNA, 21 nt, Human
ggaaggacaaggauggggaga

SEQ ID NO: 689988 - RNA, 23 nt, Human
ggacaaggauggggagaacagug

SEQ ID NO: 689989 - RNA, 21 nt, Human
gguaaagaaauaaugggauaa

SEQ ID NO: 689990 - RNA, 22 nt, Human
gguaaagaaauaaugggauaag

SEQ ID NO: 689991 - RNA, 19 nt, Human
uaacaaaacuacuaggagc

SEQ ID NO: 689992 - RNA, 20 nt, Human
uaacucaaagcugcuuucaa

SEQ ID NO: 689993 - RNA, 27 nt, Human
uagcugaagaucaaaaaaaucucacaa

SEQ ID NO: 689994 - RNA, 23 nt, Human
ucacaaaaaucccacaguaucaa

SEQ ID NO: 689995 - RNA, 18 nt, Human
ucuucgucucuucacaaa

SEQ ID NO: 689996 - RNA, 21 nt, Human
ugaaaagaacuguacucccug

SEQ ID NO: 689997 - RNA, 24 nt, Human
ugaaaagaacuguacucccugcau

SEQ ID NO: 689998 - RNA, 18 nt, Human
ugaagaucaaaaaaaucu

SEQ ID NO: 689999 - RNA, 19 nt, Human
ugggaaggacaaggauggg

SEQ ID NO: 690000 - RNA, 23 nt, Human
ugggauaagauuucuaaacccca

SEQ ID NO: 690001 - RNA, 27 nt, Human
aaacaaaaaauggcauaaaggggaccc

SEQ ID NO: 690002 - RNA, 30 nt, Human
accuagcauuuaaaaaaaaaaaaaaaaaaa

SEQ ID NO: 690003 - RNA, 19 nt, Human
agcacaaauguaugaacag

SEQ ID NO: 690004 - RNA, 27 nt, Human
aggaaagagaaaugucuuccugcucag

SEQ ID NO: 690005 - RNA, 19 nt, Human
aggaaagagaaaugucuuu

SEQ ID NO: 690006 - RNA, 22 nt, Human
auaacaguuccccucucccucc

SEQ ID NO: 690007 - RNA, 21 nt, Human
caguuccccucucccuccccc

SEQ ID NO: 690008 - RNA, 22 nt, Human
ccucuacaaaccuagcauuuaa

SEQ ID NO: 690009 - RNA, 25 nt, Human
ccugcagauuuccagcguuuccauu

SEQ ID NO: 690010 - RNA, 23 nt, Human
cuugggagauaacaguuccccuc

SEQ ID NO: 690011 - RNA, 23 nt, Human
gcagcacaaauguaugaacagga

SEQ ID NO: 690012 - RNA, 25 nt, Human
uaacaaaaacaaaaaauggcauaaa

SEQ ID NO: 690013 - RNA, 21 nt, Human
uaacaguuccccucucccucc

SEQ ID NO: 690014 - RNA, 22 nt, Human
uaugaacaggaaaaaaaaaaau

SEQ ID NO: 690015 - RNA, 21 nt, Human
uccccucucccucccccugca

SEQ ID NO: 690016 - RNA, 18 nt, Human
ucuugggagauaacaguu

SEQ ID NO: 690017 - RNA, 19 nt, Human
uggcauaaaggaaagagaa

SEQ ID NO: 690018 - RNA, 24 nt, Human
ugugccaagaguacaugggcagca

SEQ ID NO: 690019 - RNA, 20 nt, Human
uuaaaaaaaaaaaaaaaaaa

SEQ ID NO: 690020 - RNA, 28 nt, Human
uuaaaaaaaaaaaaaaaaaaaaaggaau

SEQ ID NO: 690021 - RNA, 21 nt, Human
aaaaauaaaaagacuugagua

SEQ ID NO: 690022 - RNA, 24 nt, Human
aaaaugcuacuuaaagaugaaaca

SEQ ID NO: 690023 - RNA, 21 nt, Human
aaaucaugauuuaacagugug

SEQ ID NO: 690024 - RNA, 23 nt, Human
aacucugcaagcccaauaauguc

SEQ ID NO: 690025 - RNA, 23 nt, Human
aacucugcaagcccaauaauguc

SEQ ID NO: 690026 - RNA, 18 nt, Human
acuucuaggaaugcaaaa

SEQ ID NO: 690027 - RNA, 20 nt, Human
agacaaagcacuagcuugua

SEQ ID NO: 690028 - RNA, 21 nt, Human
agcuuguuuugaagcuaaaau

SEQ ID NO: 690029 - RNA, 27 nt, Human
aucuaucccaaauccaaaaaaaugaaa

SEQ ID NO: 690030 - RNA, 22 nt, Human
caaaaaaaugaaacuguccaaa

SEQ ID NO: 690031 - RNA, 22 nt, Human
cagcccaauacaaauggcagca

SEQ ID NO: 690032 - RNA, 18 nt, Human
cagggcagagcgggggcc

SEQ ID NO: 690033 - RNA, 25 nt, Human
cagugugcccagcuuguuuugaagc

SEQ ID NO: 690034 - RNA, 23 nt, Human
ccaaaaccaaagguucugcaaaa

SEQ ID NO: 690035 - RNA, 27 nt, Human
cuguccaaaaccaaagguucugcaaaa

SEQ ID NO: 690036 - RNA, 22 nt, Human
gaaauacaaucacaucaaagaa

SEQ ID NO: 690037 - RNA, 20 nt, Human
gaacaagaaauuggaaauac

SEQ ID NO: 690038 - RNA, 26 nt, Human
gggaacucugcaagcccaauaauguc

SEQ ID NO: 690039 - RNA, 19 nt, Human
gggcagagcgggggccggc

SEQ ID NO: 690040 - RNA, 19 nt, Human
gggcagagcgggggccggc

SEQ ID NO: 690041 - RNA, 25 nt, Human
gggccggcagccgggcccgugagaa

SEQ ID NO: 690042 - RNA, 23 nt, Human
uaaaaacacaguuaaccuacuuc

SEQ ID NO: 690043 - RNA, 22 nt, Human
uaaaacuacuaagacaaagcac

SEQ ID NO: 690044 - RNA, 22 nt, Human
uaaaacuacuaagacaaagcac

SEQ ID NO: 690045 - RNA, 20 nt, Human
uaagacaaagcacuagcuug

SEQ ID NO: 690046 - RNA, 18 nt, Human
uacacaauagugauuucu

SEQ ID NO: 690047 - RNA, 24 nt, Human
uccaaaaaaaugaaacuguccaaa

SEQ ID NO: 690048 - RNA, 24 nt, Human
ugaagaauguagaucuagagccaa

SEQ ID NO: 690049 - RNA, 20 nt, Human
uugaagcuaaaaugaagccu

SEQ ID NO: 690050 - RNA, 23 nt, Human
aaaaaaaaucaacccacaaagcu

SEQ ID NO: 690051 - RNA, 22 nt, Human
aacccacaaagcuucuaaaaaa

SEQ ID NO: 690052 - RNA, 23 nt, Human
aaguuuuacauuuuuaacagccc

SEQ ID NO: 690053 - RNA, 23 nt, Human
aaguuuuacauuuuuaacagccc

SEQ ID NO: 690054 - RNA, 22 nt, Human
aaguuuuaguuuucaaucccaa

SEQ ID NO: 690055 - RNA, 22 nt, Human
aaguuuuaguuuucaaucccaa

SEQ ID NO: 690056 - RNA, 20 nt, Human
aauaaaagacaccagguaca

SEQ ID NO: 690057 - RNA, 20 nt, Human
aauaaaagacaccagguaca

SEQ ID NO: 690058 - RNA, 23 nt, Human
aauuaugguauuaaccuucacaa

SEQ ID NO: 690059 - RNA, 23 nt, Human
aauuaugguauuaaccuucacaa

SEQ ID NO: 690060 - RNA, 24 nt, Human
acccacaaagcuucuaaaaaagga

SEQ ID NO: 690061 - RNA, 23 nt, Human
agaaaaaaaaucaacccacaaag

SEQ ID NO: 690062 - RNA, 18 nt, Human
agaaucaaaaugcagaac

SEQ ID NO: 690063 - RNA, 18 nt, Human
agaaucaaaaugcagaac

SEQ ID NO: 690064 - RNA, 18 nt, Human
auaaaaaaaaaaaaaagu

SEQ ID NO: 690065 - RNA, 24 nt, Human
caauuaaaaauguacaaaaaagaa

SEQ ID NO: 690066 - RNA, 23 nt, Human
caccgaguucgcgaggagcucac

SEQ ID NO: 690067 - RNA, 22 nt, Human
caccgaguucgcgaggagcucc

SEQ ID NO: 690068 - RNA, 20 nt, Human
cagaaucaaaaugcagaacc

SEQ ID NO: 690069 - RNA, 19 nt, Human
caggcacuuccucuugugg

SEQ ID NO: 690070 - RNA, 23 nt, Human
cagucgacuucuugugaagguuu

SEQ ID NO: 690071 - RNA, 23 nt, Human
ccacaaagcuucuaaaaaaggaa

SEQ ID NO: 690072 - RNA, 21 nt, Human
cccccuccacuacccagcaaa

SEQ ID NO: 690073 - RNA, 21 nt, Human
cccccuccacuacccagcaaa

SEQ ID NO: 690074 - RNA, 23 nt, Human
cccgcaggcacuuccucuugugg

SEQ ID NO: 690075 - RNA, 24 nt, Human
ccucuuguggaauguuuaaaaagu

SEQ ID NO: 690076 - RNA, 19 nt, Human
cgcaggcacuuccucuugu

SEQ ID NO: 690077 - RNA, 23 nt, Human
cuccacuacccagcaaacuacag

SEQ ID NO: 690078 - RNA, 23 nt, Human
cuccacuacccagcaaacuacag

SEQ ID NO: 690079 - RNA, 20 nt, Human
cuuacccccuccacuaccca

SEQ ID NO: 690080 - RNA, 20 nt, Human
cuuacccccuccacuaccca

SEQ ID NO: 690081 - RNA, 25 nt, Human
gcaauuaaaaauguacaaaaaagaa

SEQ ID NO: 690082 - RNA, 18 nt, Human
gcaggcacuuccucuugu

SEQ ID NO: 690083 - RNA, 20 nt, Human
gcggcggcugcggcugcggc

SEQ ID NO: 690084 - RNA, 18 nt, Human
gcggcugcuccucggccc

SEQ ID NO: 690085 - RNA, 20 nt, Human
gcggcugcugcggcugcucc

SEQ ID NO: 690086 - RNA, 21 nt, Human
gcugcggcugcuccucggccc

SEQ ID NO: 690087 - RNA, 21 nt, Human
ggcggcggcugcggcugcggc

SEQ ID NO: 690088 - RNA, 20 nt, Human
ggcuggagauggguucgugc

SEQ ID NO: 690089 - RNA, 22 nt, Human
gggcggcggcugcggcugcggc

SEQ ID NO: 690090 - RNA, 24 nt, Human
guaaauucuuaauaaaagacacca

SEQ ID NO: 690091 - RNA, 24 nt, Human
guaaauucuuaauaaaagacacca

SEQ ID NO: 690092 - RNA, 25 nt, Human
uaaagaaaacagucgacuucuugug

SEQ ID NO: 690093 - RNA, 22 nt, Human
uaaauucuuaauaaaagacacc

SEQ ID NO: 690094 - RNA, 22 nt, Human
uaaauucuuaauaaaagacacc

SEQ ID NO: 690095 - RNA, 18 nt, Human
uaacagcccuucuacaua

SEQ ID NO: 690096 - RNA, 18 nt, Human
uaacagcccuucuacaua

SEQ ID NO: 690097 - RNA, 18 nt, Human
uacagauaaaauguagaa

SEQ ID NO: 690098 - RNA, 24 nt, Human
uagaacccugaaauacugacacau

SEQ ID NO: 690099 - RNA, 25 nt, Human
uagccuacuaaagaaaacagucgac

SEQ ID NO: 690100 - RNA, 18 nt, Human
ucaaacucggcuccgcuc

SEQ ID NO: 690101 - RNA, 22 nt, Human
ucaccgaguucgcgagggagac

SEQ ID NO: 690102 - RNA, 22 nt, Human
uccacaaauaaugcaaccaagu

SEQ ID NO: 690103 - RNA, 22 nt, Human
uccacaaauaaugcaaccaagu

SEQ ID NO: 690104 - RNA, 22 nt, Human
ucgaacggcgccaauuccuuuc

SEQ ID NO: 690105 - RNA, 26 nt, Human
ucuguugugauaaaaaaaaaaaaaag

SEQ ID NO: 690106 - RNA, 26 nt, Human
ucuguugugauaaaaaaaaaaaaaag

SEQ ID NO: 690107 - RNA, 20 nt, Human
ugaaauacugacacauucuc

SEQ ID NO: 690108 - RNA, 18 nt, Human
ugauaaaaaaaaaaaaaa

SEQ ID NO: 690109 - RNA, 18 nt, Human
ugauaaaaaaaaaaaaaa

SEQ ID NO: 690110 - RNA, 24 nt, Human
uggaauguuuaaaaaguuagccua

SEQ ID NO: 690111 - RNA, 18 nt, Human
ugugagaaauggggggag

SEQ ID NO: 690112 - RNA, 18 nt, Human
ugugagaaauggggggag

SEQ ID NO: 690113 - RNA, 25 nt, Human
uuaacagcccuucuacauacacucc

SEQ ID NO: 690114 - RNA, 25 nt, Human
uuaacagcccuucuacauacacucc

SEQ ID NO: 690115 - RNA, 19 nt, Human
uucagaaucaaaaugcaga

SEQ ID NO: 690116 - RNA, 19 nt, Human
uucagaaucaaaaugcaga

SEQ ID NO: 690117 - RNA, 23 nt, Human
uugugauaaaaaaaaaaaaaagu

SEQ ID NO: 690118 - RNA, 23 nt, Human
uugugauaaaaaaaaaaaaaagu

SEQ ID NO: 690119 - RNA, 19 nt, Human
uuuuuuuuuuacaacaagu

SEQ ID NO: 690120 - RNA, 19 nt, Human
uuuuuuuuuuacaacaagu

SEQ ID NO: 690121 - RNA, 19 nt, Human
aaaacucuuuuccccccaa

SEQ ID NO: 690122 - RNA, 22 nt, Human
aagcgccacgcuugggccggaa

SEQ ID NO: 690123 - RNA, 30 nt, Human
acaacuuccccgaacuccggcagccgcacu

SEQ ID NO: 690124 - RNA, 22 nt, Human
agaauguuccacgugggggcag

SEQ ID NO: 690125 - RNA, 21 nt, Human
agacuccuccgagucuaauau

SEQ ID NO: 690126 - RNA, 18 nt, Human
agcacaggaagugggugg

SEQ ID NO: 690127 - RNA, 19 nt, Human
agccgcacggcacacgccc

SEQ ID NO: 690128 - RNA, 21 nt, Human
agcgccacgcuugggccggaa

SEQ ID NO: 690129 - RNA, 19 nt, Human
caccaaagagguugcacga

SEQ ID NO: 690130 - RNA, 21 nt, Human
caccaaagagguugcacgaug

SEQ ID NO: 690131 - RNA, 23 nt, Human
cacuggcaccaaagagguugcac

SEQ ID NO: 690132 - RNA, 22 nt, Human
cagccucggcuuuugccagccu

SEQ ID NO: 690133 - RNA, 20 nt, Human
caguggguccaagccgggug

SEQ ID NO: 690134 - RNA, 18 nt, Human
cccaaauccagccucggc

SEQ ID NO: 690135 - RNA, 24 nt, Human
cccaaauccagccucggcuuuugc

SEQ ID NO: 690136 - RNA, 28 nt, Human
ccccaaaguauucuuuguuccccuccuu

SEQ ID NO: 690137 - RNA, 23 nt, Human
cccccgggcgagcacaggaagug

SEQ ID NO: 690138 - RNA, 21 nt, Human
ccuugcccacacuggcaccaa

SEQ ID NO: 690139 - RNA, 18 nt, Human
cgaccgggaggcgcgggg

SEQ ID NO: 690140 - RNA, 22 nt, Human
cgagcacaggaagugggugggg

SEQ ID NO: 690141 - RNA, 18 nt, Human
cgcggggacugagcggug

SEQ ID NO: 690142 - RNA, 19 nt, Human
cggaaggucucauucuguu

SEQ ID NO: 690143 - RNA, 18 nt, Human
cggagcgagcgcggggac

SEQ ID NO: 690144 - RNA, 25 nt, Human
cucuauggacugauugaauuuggga

SEQ ID NO: 690145 - RNA, 21 nt, Human
cugagcccuugcccacacugg

SEQ ID NO: 690146 - RNA, 28 nt, Human
cuugcaguggguccaagccgggugugcu

SEQ ID NO: 690147 - RNA, 18 nt, Human
gaaaaccgguuccacgga

SEQ ID NO: 690148 - RNA, 26 nt, Human
gcagagaggcugagcccuugcccaca

SEQ ID NO: 690149 - RNA, 18 nt, Human
gggcucccuccucgcugc

SEQ ID NO: 690150 - RNA, 23 nt, Human
ggugugcuguguucuucccguuu

SEQ ID NO: 690151 - RNA, 21 nt, Human
gucuaauauuccucccccaaa

SEQ ID NO: 690152 - RNA, 19 nt, Human
gugcggagcgagcgcgggg

SEQ ID NO: 690153 - RNA, 24 nt, Human
uauggacugauugaauuugggaug

SEQ ID NO: 690154 - RNA, 26 nt, Human
uccccccaaaguauucuuuguucccc

SEQ ID NO: 690155 - RNA, 23 nt, Human
ucgacagccacaacuuccccgaa

SEQ ID NO: 690156 - RNA, 23 nt, Human
ucuaauauuccucccccaaaucc

SEQ ID NO: 690157 - RNA, 20 nt, Human
ucugucccaugaggcugugu

SEQ ID NO: 690158 - RNA, 19 nt, Human
ugcagcuugcagugggucc

SEQ ID NO: 690159 - RNA, 22 nt, Human
ugcaguggguccaagccgggug

SEQ ID NO: 690160 - RNA, 21 nt, Human
ugcugucgguguugccauugc

SEQ ID NO: 690161 - RNA, 19 nt, Human
ugggcagagaggcugagcc

SEQ ID NO: 690162 - RNA, 18 nt, Human
uggggugcggagcgagcc

SEQ ID NO: 690163 - RNA, 25 nt, Human
uggugguggcggcagccuuucccuu

SEQ ID NO: 690164 - RNA, 18 nt, Human
uggugguggugguggcgg

SEQ ID NO: 690165 - RNA, 20 nt, Human
uggugguggugguggcggca

SEQ ID NO: 690166 - RNA, 20 nt, Human
uggugguggugguggcggcc

SEQ ID NO: 690167 - RNA, 23 nt, Human
ugugggcagagaggcugagcccu

SEQ ID NO: 690168 - RNA, 24 nt, Human
uguuccccucccucaaauuucugu

SEQ ID NO: 690169 - RNA, 23 nt, Human
uugaauuugggauggccagcucc

SEQ ID NO: 690170 - RNA, 21 nt, Human
uugggaaaagaaaacuccauu

SEQ ID NO: 690171 - RNA, 18 nt, Human
uuggugguggugguggcg

SEQ ID NO: 690172 - RNA, 21 nt, Human
uuggugguggugguggcggca

SEQ ID NO: 690173 - RNA, 19 nt, Human
uugguugcugucgguguug

SEQ ID NO: 690174 - RNA, 19 nt, Human
uuuuuuuuuuuuuuuugcu

SEQ ID NO: 690175 - RNA, 24 nt, Human
uuuuuuuuuuuuuuuuugcucuuu

SEQ ID NO: 690176 - RNA, 20 nt, Human
uuuuuuuuuuuuuuuuuugg

SEQ ID NO: 690177 - RNA, 18 nt, Human
aaauguugaagguagacc

SEQ ID NO: 690178 - RNA, 20 nt, Human
aagaaaaggaacacuguugc

SEQ ID NO: 690179 - RNA, 20 nt, Human
acacagaagaacguccuaga

SEQ ID NO: 690180 - RNA, 20 nt, Human
accucacaaggccagagaag

SEQ ID NO: 690181 - RNA, 22 nt, Human
acuuugugccagacauugugcu

SEQ ID NO: 690182 - RNA, 19 nt, Human
agauauaaacaucccugcc

SEQ ID NO: 690183 - RNA, 21 nt, Human
aggcaacuccgggccagaaaa

SEQ ID NO: 690184 - RNA, 22 nt, Human
auguuguucucucugugccccc

SEQ ID NO: 690185 - RNA, 20 nt, Human
cacagcaaaucaucugcuca

SEQ ID NO: 690186 - RNA, 22 nt, Human
cacccaccagaagcuuguuuuc

SEQ ID NO: 690187 - RNA, 22 nt, Human
cagaaaaugcacccaccagaag

SEQ ID NO: 690188 - RNA, 21 nt, Human
cagcaaaucaucugcucagaa

SEQ ID NO: 690189 - RNA, 18 nt, Human
cauaugguugcaacagcc

SEQ ID NO: 690190 - RNA, 22 nt, Human
cauugugcuaggcacccucacu

SEQ ID NO: 690191 - RNA, 21 nt, Human
cucagaaauuaaaaccaagaa

SEQ ID NO: 690192 - RNA, 21 nt, Human
cuuaugaaagauauaaacauc

SEQ ID NO: 690193 - RNA, 19 nt, Human
gggcaguagcguggaugca

SEQ ID NO: 690194 - RNA, 21 nt, Human
gggcggggccugggccucggc

SEQ ID NO: 690195 - RNA, 21 nt, Human
uaaaaccaagaaaaggaacac

SEQ ID NO: 690196 - RNA, 19 nt, Human
uaaaaggagccugauggcu

SEQ ID NO: 690197 - RNA, 24 nt, Human
uaaaaggagccugauggcuuggug

SEQ ID NO: 690198 - RNA, 26 nt, Human
ugaacaaauauuuauuaagcaccuac

SEQ ID NO: 690199 - RNA, 24 nt, Human
ugcacccaccagaagcuuguuuuc

SEQ ID NO: 690200 - RNA, 25 nt, Human
ugugccagacauugugcuaggcacc

SEQ ID NO: 690201 - RNA, 21 nt, Human
uuaaagccucucgauguugac

SEQ ID NO: 690202 - RNA, 20 nt, Human
uuaagcaccuacuuugugcc

SEQ ID NO: 690203 - RNA, 18 nt, Human
aaaacagccccaaagcug

SEQ ID NO: 690204 - RNA, 23 nt, Human
aaacagccccaaagcugccaaca

SEQ ID NO: 690205 - RNA, 22 nt, Human
aaccagagccgacuggggccca

SEQ ID NO: 690206 - RNA, 23 nt, Human
acaaugagaagcucaaaaacagc

SEQ ID NO: 690207 - RNA, 19 nt, Human
accccagcccagcccggcc

SEQ ID NO: 690208 - RNA, 24 nt, Human
caaaaacagccccaaagcugccaa

SEQ ID NO: 690209 - RNA, 22 nt, Human
caaagcugccaacaaccagagc

SEQ ID NO: 690210 - RNA, 21 nt, Human
cacccagggcuaaguugggac

SEQ ID NO: 690211 - RNA, 19 nt, Human
caccccagcccagcccggc

SEQ ID NO: 690212 - RNA, 21 nt, Human
cagccccaaagcugccaacaa

SEQ ID NO: 690213 - RNA, 21 nt, Human
caucccaggccggaaucguuc

SEQ ID NO: 690214 - RNA, 24 nt, Human
ccaacaaccagagccgacuggggc

SEQ ID NO: 690215 - RNA, 20 nt, Human
ccagagagguggcaggagca

SEQ ID NO: 690216 - RNA, 19 nt, Human
ccaggccggaaucguucau

SEQ ID NO: 690217 - RNA, 18 nt, Human
ccccagcccagcccggcc

SEQ ID NO: 690218 - RNA, 20 nt, Human
ccccagcccagcccggcccc

SEQ ID NO: 690219 - RNA, 21 nt, Human
cccccgcggcgcugacuccgc

SEQ ID NO: 690220 - RNA, 21 nt, Human
ccgcgcugccgggcgccccgc

SEQ ID NO: 690221 - RNA, 21 nt, Human
ccgggcccgcgcccuccgcgc

SEQ ID NO: 690222 - RNA, 23 nt, Human
ccuggcccgcaucccaggccgga

SEQ ID NO: 690223 - RNA, 21 nt, Human
cggcgcugacuccgcgcugcc

SEQ ID NO: 690224 - RNA, 22 nt, Human
cuaugccgccugcagccuggcc

SEQ ID NO: 690225 - RNA, 24 nt, Human
cugccgggcgccccgcucgcuccc

SEQ ID NO: 690226 - RNA, 18 nt, Human
cuggcccgcaucccaggc

SEQ ID NO: 690227 - RNA, 21 nt, Human
gagaagcucaaaaacagcccc

SEQ ID NO: 690228 - RNA, 22 nt, Human
gcccgcaucccaggccggaauc

SEQ ID NO: 690229 - RNA, 19 nt, Human
ggagcacugguuuggcccc

SEQ ID NO: 690230 - RNA, 21 nt, Human
ggucaggcugggaugggcagg

SEQ ID NO: 690231 - RNA, 20 nt, Human
ggugcggcccccgcggcgcu

SEQ ID NO: 690232 - RNA, 20 nt, Human
uccgcgcugccgggcgcccc

SEQ ID NO: 690233 - RNA, 22 nt, Human
ugccgggcgccccgcucgcucc

SEQ ID NO: 690234 - RNA, 22 nt, Human
uggcccgcaucccaggccggaa

SEQ ID NO: 690235 - RNA, 21 nt, Human
uggcucccgggcccgcgcccu

SEQ ID NO: 690236 - RNA, 24 nt, Human
ugggaugggcaggcucuagggggc

SEQ ID NO: 690237 - RNA, 21 nt, Human
uggggcccaccccagcccagc

SEQ ID NO: 690238 - RNA, 19 nt, Human
uucauagaaaaccagcccc

SEQ ID NO: 690239 - RNA, 21 nt, Human
uuuuuuuuuuuuucacgcuua

SEQ ID NO: 690240 - RNA, 22 nt, Human
uuuuuuuuuuuuuuucacgcuu

SEQ ID NO: 690241 - RNA, 24 nt, Human
uuuuuuuuuuuuuuuuuuuucacg

SEQ ID NO: 690242 - RNA, 20 nt, Human
aggagccggcguccacgacc

SEQ ID NO: 690243 - RNA, 20 nt, Human
cacccccuccucacccgccc

SEQ ID NO: 690244 - RNA, 25 nt, Human
cacccccuccucacccgcccccgcc

SEQ ID NO: 690245 - RNA, 18 nt, Human
caccugagccccgcccuc

SEQ ID NO: 690246 - RNA, 21 nt, Human
caggcccgacccgcgcagcuc

SEQ ID NO: 690247 - RNA, 18 nt, Human
cccccgccucgcuccagc

SEQ ID NO: 690248 - RNA, 18 nt, Human
cccccuccccuuccuggg

SEQ ID NO: 690249 - RNA, 21 nt, Human
cccgacccgcgcagcucacgc

SEQ ID NO: 690250 - RNA, 18 nt, Human
ccuaccggcucuccucca

SEQ ID NO: 690251 - RNA, 19 nt, Human
ccuccaggagccggcgucc

SEQ ID NO: 690252 - RNA, 21 nt, Human
ccugcuagcccccaggaaagc

SEQ ID NO: 690253 - RNA, 19 nt, Human
cgcccccuccccuuccugg

SEQ ID NO: 690254 - RNA, 21 nt, Human
cgcguccggcgucacccccuc

SEQ ID NO: 690255 - RNA, 21 nt, Human
cgcugccaggcaccugagccc

SEQ ID NO: 690256 - RNA, 23 nt, Human
cgcugccaggcaccugagccccg

SEQ ID NO: 690257 - RNA, 18 nt, Human
cuccaggagccggcgucc

SEQ ID NO: 690258 - RNA, 18 nt, Human
cuccaggagccggcgucc

SEQ ID NO: 690259 - RNA, 20 nt, Human
cucgguaccaggcccgaccc

SEQ ID NO: 690260 - RNA, 18 nt, Human
gcccccgccucgcuccag

SEQ ID NO: 690261 - RNA, 25 nt, Human
gcgcgaacccucgcgcugucgacgc

SEQ ID NO: 690262 - RNA, 21 nt, Human
gcggacaccuucaccucccuc

SEQ ID NO: 690263 - RNA, 23 nt, Human
gcggacaccuucaccucccuccu

SEQ ID NO: 690264 - RNA, 21 nt, Human
gcugccaggcaccugagcccc

SEQ ID NO: 690265 - RNA, 20 nt, Human
ggacaccuucaccucccucc

SEQ ID NO: 690266 - RNA, 18 nt, Human
uccugggccccggccgcg

SEQ ID NO: 690267 - RNA, 19 nt, Human
ugccaggcaccugagcccc

SEQ ID NO: 690268 - RNA, 24 nt, Human
ugccaggcaccugagccccgcccu

SEQ ID NO: 690269 - RNA, 21 nt, Human
ugcuagcccccaggaaagcuc

SEQ ID NO: 690270 - RNA, 22 nt, Human
ugggccccggccgcgcugccag

SEQ ID NO: 690271 - RNA, 19 nt, Human
uuuuuuuuuuuuuuuuugc

SEQ ID NO: 690272 - RNA, 27 nt, Human
uuuuuuuuuuuuuuuuuuuuuuugggg

SEQ ID NO: 690273 - RNA, 18 nt, Human
aaaaagaacaggccuaua

SEQ ID NO: 690274 - RNA, 23 nt, Human
aaaaucagagucuccugaggcag

SEQ ID NO: 690275 - RNA, 19 nt, Human
agagagagaaucaacaaca

SEQ ID NO: 690276 - RNA, 22 nt, Human
agagggaagagcagagaucaug

SEQ ID NO: 690277 - RNA, 18 nt, Human
aggguggguggagcccag

SEQ ID NO: 690278 - RNA, 23 nt, Human
aucacauugcuaaaaagaacagg

SEQ ID NO: 690279 - RNA, 26 nt, Human
aucuaccucccgcccucccuccccac

SEQ ID NO: 690280 - RNA, 20 nt, Human
caaagcucucgagcaccugg

SEQ ID NO: 690281 - RNA, 26 nt, Human
caccuggcugaagcccagugcugggc

SEQ ID NO: 690282 - RNA, 22 nt, Human
cagcacaugaacuccagagaga

SEQ ID NO: 690283 - RNA, 20 nt, Human
cagccuccggguccgccacc

SEQ ID NO: 690284 - RNA, 23 nt, Human
ccaggccacggagccccggcgcc

SEQ ID NO: 690285 - RNA, 20 nt, Human
cccaccaaucugggagaggg

SEQ ID NO: 690286 - RNA, 19 nt, Human
cccgcccucccuccccacc

SEQ ID NO: 690287 - RNA, 21 nt, Human
cccuccccaccaaucugggag

SEQ ID NO: 690288 - RNA, 23 nt, Human
ccuauaucuaccucccgcccucc

SEQ ID NO: 690289 - RNA, 18 nt, Human
ccucccgcccucccuccc

SEQ ID NO: 690290 - RNA, 19 nt, Human
ccucccgcccucccucccc

SEQ ID NO: 690291 - RNA, 24 nt, Human
ccucccgcccucccuccccaccaa

SEQ ID NO: 690292 - RNA, 22 nt, Human
ccucccuccccaccaaucuggg

SEQ ID NO: 690293 - RNA, 21 nt, Human
ccuccggguccgccaccagcg

SEQ ID NO: 690294 - RNA, 21 nt, Human
cgccgcagcagccuccggguc

SEQ ID NO: 690295 - RNA, 19 nt, Human
cggagccccggcgccgcag

SEQ ID NO: 690296 - RNA, 26 nt, Human
cucucgagcaccuggcugaagcccag

SEQ ID NO: 690297 - RNA, 23 nt, Human
gaacaggccuauaucuaccuccc

SEQ ID NO: 690298 - RNA, 24 nt, Human
gagcuggaggaagccagggugggu

SEQ ID NO: 690299 - RNA, 28 nt, Human
gaggaagccaggguggguggagcccagg

SEQ ID NO: 690300 - RNA, 19 nt, Human
ggagcccaggcuggcuuga

SEQ ID NO: 690301 - RNA, 24 nt, Human
ggagccccggcgccgcagcagccu

SEQ ID NO: 690302 - RNA, 21 nt, Human
gggaagagcagagaucauggc

SEQ ID NO: 690303 - RNA, 23 nt, Human
uaaaaagaacaggccuauaucua

SEQ ID NO: 690304 - RNA, 20 nt, Human
ucccgcccucccuccccacc

SEQ ID NO: 690305 - RNA, 19 nt, Human
ucucgagcaccuggcugaa

SEQ ID NO: 690306 - RNA, 23 nt, Human
ucucgagcaccuggcugaagccc

SEQ ID NO: 690307 - RNA, 21 nt, Human
ugaacgccuuuauuuuucuca

SEQ ID NO: 690308 - RNA, 21 nt, Human
ugagcuggaggaagccagggu

SEQ ID NO: 690309 - RNA, 22 nt, Human
ugaggcagcacaugaacuccag

SEQ ID NO: 690310 - RNA, 19 nt, Human
uggagcccaggcuggcuug

SEQ ID NO: 690311 - RNA, 19 nt, Human
uggaggaagccaggguggg

SEQ ID NO: 690312 - RNA, 24 nt, Human
uggaggaagccaggguggguggag

SEQ ID NO: 690313 - RNA, 19 nt, Human
uggguggagcccaggcugg

SEQ ID NO: 690314 - RNA, 25 nt, Human
uuuuuuuuuuugcagauugaacgcc

SEQ ID NO: 690315 - RNA, 23 nt, Human
uuuuuuuuuuuuuuuuugcagau

SEQ ID NO: 690316 - RNA, 26 nt, Human
uuuuuuuuuuuuuuuuugcagauuga

SEQ ID NO: 690317 - RNA, 20 nt, Human
uuuuuuuuuuuuuuuuuugg

SEQ ID NO: 690318 - RNA, 20 nt, Human
aaaaacagccauguggguaa

SEQ ID NO: 690319 - RNA, 18 nt, Human
aaaaauaacugaaaggac

SEQ ID NO: 690320 - RNA, 21 nt, Human
aaaaauaacugaaaggacuac

SEQ ID NO: 690321 - RNA, 24 nt, Human
aaaacaaagauacaggagagagaa

SEQ ID NO: 690322 - RNA, 21 nt, Human
aaacagccauguggguaagac

SEQ ID NO: 690323 - RNA, 19 nt, Human
aacaaagauacaggagaga

SEQ ID NO: 690324 - RNA, 20 nt, Human
aaccaaagaaacuaaaacaa

SEQ ID NO: 690325 - RNA, 30 nt, Human
aagaagaggacauuuucauacaaagaaaaa

SEQ ID NO: 690326 - RNA, 19 nt, Human
aagaggacauuuucauaca

SEQ ID NO: 690327 - RNA, 21 nt, Human
acuaaaacaaagauacaggag

SEQ ID NO: 690328 - RNA, 18 nt, Human
agccugacaccccggcac

SEQ ID NO: 690329 - RNA, 23 nt, Human
auaccugcagccugacaccccgg

SEQ ID NO: 690330 - RNA, 23 nt, Human
caaaauaaaaaccaaagaaacua

SEQ ID NO: 690331 - RNA, 21 nt, Human
caagccuugaacaagcucaca

SEQ ID NO: 690332 - RNA, 22 nt, Human
cacauaccugcagccugacacc

SEQ ID NO: 690333 - RNA, 18 nt, Human
cagccugacaccccggca

SEQ ID NO: 690334 - RNA, 22 nt, Human
ccauguggguaagacaagccuu

SEQ ID NO: 690335 - RNA, 23 nt, Human
ccugcagccugacaccccggcac

SEQ ID NO: 690336 - RNA, 21 nt, Human
cuaaaacaaagauacaggaga

SEQ ID NO: 690337 - RNA, 18 nt, Human
cuaauucauuacaaagcc

SEQ ID NO: 690338 - RNA, 19 nt, Human
cuaauucauuacaaagccu

SEQ ID NO: 690339 - RNA, 20 nt, Human
cucaaaaugagaaacacuaa

SEQ ID NO: 690340 - RNA, 23 nt, Human
ggagcacuggcccgaggccuaga

SEQ ID NO: 690341 - RNA, 26 nt, Human
uacaaaauaaaaaccaaagaaacuaa

SEQ ID NO: 690342 - RNA, 22 nt, Human
ugaaaggacuacaaaauaaaaa

SEQ ID NO: 690343 - RNA, 21 nt, Human
uggcacauuaaaaauaacuga

SEQ ID NO: 690344 - RNA, 27 nt, Human
uggcugaguuuccugaaauguucuugu

SEQ ID NO: 690345 - RNA, 21 nt, Human
ugggugcaggugucugugauu

SEQ ID NO: 690346 - RNA, 23 nt, Human
uguaacagaaguauguugugggu

SEQ ID NO: 690347 - RNA, 21 nt, Human
uuacaaagccuauaccuuuga

SEQ ID NO: 690348 - RNA, 21 nt, Human
uucuuguguguaacagaaguu

SEQ ID NO: 690349 - RNA, 26 nt, Human
aaaagugcuuagaaaauaagauuuug

SEQ ID NO: 690350 - RNA, 18 nt, Human
acacucugaagccucugc

SEQ ID NO: 690351 - RNA, 25 nt, Human
acucugaagccucugcuguuaacca

SEQ ID NO: 690352 - RNA, 22 nt, Human
cccgaguacagguuacacucug

SEQ ID NO: 690353 - RNA, 18 nt, Human
ccucugcuguuaaccaca

SEQ ID NO: 690354 - RNA, 22 nt, Human
uacagguuacacucugaagccu

SEQ ID NO: 690355 - RNA, 24 nt, Human
ucugaagccucugcuguuaaccac

SEQ ID NO: 690356 - RNA, 22 nt, Human
ugaagccucugcuguuaaccac

SEQ ID NO: 690357 - RNA, 22 nt, Human
uugauaucaaaagugcuuagaa

SEQ ID NO: 690358 - RNA, 21 nt, Human
uuuaauaucucaaaaaggaag

SEQ ID NO: 690359 - RNA, 18 nt, Human
acugggucucgcuaguga

SEQ ID NO: 690360 - RNA, 21 nt, Human
agcaggauggggcagcagggg

SEQ ID NO: 690361 - RNA, 21 nt, Human
agucuguguugauuccagcag

SEQ ID NO: 690362 - RNA, 18 nt, Human
auggggcagcaggggcug

SEQ ID NO: 690363 - RNA, 24 nt, Human
caagucuguguugauuccagcagg

SEQ ID NO: 690364 - RNA, 23 nt, Human
caggugaugucuacauuuuccuu

SEQ ID NO: 690365 - RNA, 23 nt, Human
ccucugauuuaaaccucucuucc

SEQ ID NO: 690366 - RNA, 21 nt, Human
gaugucugaaaacagaggaua

SEQ ID NO: 690367 - RNA, 26 nt, Human
uaccuaggcuaagaucacgcuaugac

SEQ ID NO: 690368 - RNA, 22 nt, Human
ucaaucccucugauuuaaaccu

SEQ ID NO: 690369 - RNA, 19 nt, Human
ugaugucuacauuuuccuu

SEQ ID NO: 690370 - RNA, 23 nt, Human
uggaagcagcccagcaggcccac

SEQ ID NO: 690371 - RNA, 27 nt, Human
uguugauuccagcaggauggggcagca

SEQ ID NO: 690372 - RNA, 19 nt, Human
aaacaguggccaggugagc

SEQ ID NO: 690373 - RNA, 19 nt, Human
aacaguggccaggugagcc

SEQ ID NO: 690374 - RNA, 19 nt, Human
aaccagaaccccaggcccc

SEQ ID NO: 690375 - RNA, 21 nt, Human
aaccagugguugcuaucccca

SEQ ID NO: 690376 - RNA, 21 nt, Human
aagacauucuugaccccacag

SEQ ID NO: 690377 - RNA, 22 nt, Human
aagaccacaaucucagaagcuu

SEQ ID NO: 690378 - RNA, 22 nt, Human
aagagacucugaaaagaagaaa

SEQ ID NO: 690379 - RNA, 21 nt, Human
aagaucuugauggaggggagg

SEQ ID NO: 690380 - RNA, 22 nt, Human
aagcagaaccagcacacuugga

SEQ ID NO: 690381 - RNA, 21 nt, Human
aagccaacuccccuaugccca

SEQ ID NO: 690382 - RNA, 20 nt, Human
aagcuuuuuagcaggaagcc

SEQ ID NO: 690383 - RNA, 22 nt, Human
aaucucagcuuccaagucuaga

SEQ ID NO: 690384 - RNA, 21 nt, Human
acaggagaaagaccugaugaa

SEQ ID NO: 690385 - RNA, 26 nt, Human
accacauccuauaaagcauaauccca

SEQ ID NO: 690386 - RNA, 19 nt, Human
acccugggcugacagcacc

SEQ ID NO: 690387 - RNA, 19 nt, Human
accuccuggggcaaaagcc

SEQ ID NO: 690388 - RNA, 20 nt, Human
accuucugcuuagcugagac

SEQ ID NO: 690389 - RNA, 20 nt, Human
agaacacugagugcuugaaa

SEQ ID NO: 690390 - RNA, 19 nt, Human
agacccaauuuggcccugu

SEQ ID NO: 690391 - RNA, 21 nt, Human
agagaaaagaagugaaaaucc

SEQ ID NO: 690392 - RNA, 20 nt, Human
agagcaugccuggcacauuu

SEQ ID NO: 690393 - RNA, 24 nt, Human
agaugugucuuguaaaugaccaua

SEQ ID NO: 690394 - RNA, 23 nt, Human
agccaugaaauucugugugguug

SEQ ID NO: 690395 - RNA, 20 nt, Human
aggaaaggauuuagugccuu

SEQ ID NO: 690396 - RNA, 19 nt, Human
aggaugcuucgaggguucu

SEQ ID NO: 690397 - RNA, 20 nt, Human
aggaugcuucgaggguucug

SEQ ID NO: 690398 - RNA, 20 nt, Human
aggccagccagagaggucau

SEQ ID NO: 690399 - RNA, 20 nt, Human
aggcuggggcuggaagggcc

SEQ ID NO: 690400 - RNA, 19 nt, Human
agggaagagacucugaaaa

SEQ ID NO: 690401 - RNA, 18 nt, Human
agggaugcuuccucucug

SEQ ID NO: 690402 - RNA, 21 nt, Human
agguggggcuagaagacaggg

SEQ ID NO: 690403 - RNA, 23 nt, Human
agucuuagcccugugucaccucc

SEQ ID NO: 690404 - RNA, 19 nt, Human
auaaaaugacuguagcucc

SEQ ID NO: 690405 - RNA, 19 nt, Human
aucuaugugucugugaugc

SEQ ID NO: 690406 - RNA, 23 nt, Human
augaaauucugugugguugcgaa

SEQ ID NO: 690407 - RNA, 22 nt, Human
caacuccuuaaccucaccuccu

SEQ ID NO: 690408 - RNA, 20 nt, Human
caaguacaggagaaagaccu

SEQ ID NO: 690409 - RNA, 28 nt, Human
cacaagacauaccuaauagccggggccc

SEQ ID NO: 690410 - RNA, 22 nt, Human
caccauauggcuggucaugagc

SEQ ID NO: 690411 - RNA, 18 nt, Human
cacccugggcugacagca

SEQ ID NO: 690412 - RNA, 23 nt, Human
caccuguguacuagacuguuuuc

SEQ ID NO: 690413 - RNA, 23 nt, Human
cacugagcuguuagcacagcugc

SEQ ID NO: 690414 - RNA, 19 nt, Human
cagaaccccaggcccccaa

SEQ ID NO: 690415 - RNA, 24 nt, Human
cagagaagcaggacaggugggcac

SEQ ID NO: 690416 - RNA, 22 nt, Human
cagaggacucccaggacagcac

SEQ ID NO: 690417 - RNA, 18 nt, Human
cagaggacugggugggcc

SEQ ID NO: 690418 - RNA, 22 nt, Human
cagaugcaauuccccugccccg

SEQ ID NO: 690419 - RNA, 22 nt, Human
cagcaaggcaaauuucuaccuc

SEQ ID NO: 690420 - RNA, 21 nt, Human
cagcaccuguguacuagacug

SEQ ID NO: 690421 - RNA, 20 nt, Human
cagcuguauagcucauggau

SEQ ID NO: 690422 - RNA, 21 nt, Human
cagcugugcucuccaaggucu

SEQ ID NO: 690423 - RNA, 22 nt, Human
cagcuuagucacagaaauggac

SEQ ID NO: 690424 - RNA, 24 nt, Human
caggagaaagaccugaugaagaag

SEQ ID NO: 690425 - RNA, 23 nt, Human
caguggccuugcuaccuccaagg

SEQ ID NO: 690426 - RNA, 18 nt, Human
cagugguugcaaaccagu

SEQ ID NO: 690427 - RNA, 23 nt, Human
caugcugcaucucuuuccugcag

SEQ ID NO: 690428 - RNA, 22 nt, Human
cauugucaggaaaggauuuagu

SEQ ID NO: 690429 - RNA, 23 nt, Human
ccaaaugcuuuucauuucguccu

SEQ ID NO: 690430 - RNA, 21 nt, Human
ccaauccagaaacgaacuacc

SEQ ID NO: 690431 - RNA, 21 nt, Human
ccagugguugcaaaccagugg

SEQ ID NO: 690432 - RNA, 19 nt, Human
cccacagugaucucuaaag

SEQ ID NO: 690433 - RNA, 21 nt, Human
cccacccugggcugacagcac

SEQ ID NO: 690434 - RNA, 23 nt, Human
cccaguagagcuugggaccaagc

SEQ ID NO: 690435 - RNA, 22 nt, Human
cccaguggccuugcuaccucca

SEQ ID NO: 690436 - RNA, 24 nt, Human
cccauggguauguguguccagaag

SEQ ID NO: 690437 - RNA, 21 nt, Human
ccccagccucaccauauggcu

SEQ ID NO: 690438 - RNA, 23 nt, Human
ccccagcuucuucucuuugggcc

SEQ ID NO: 690439 - RNA, 19 nt, Human
ccccaucccacgccauucc

SEQ ID NO: 690440 - RNA, 25 nt, Human
ccccgggcucagcaaucauuuccug

SEQ ID NO: 690441 - RNA, 22 nt, Human
cccgggcucagcaaucauuucc

SEQ ID NO: 690442 - RNA, 23 nt, Human
cccugggcugacagcaccugugu

SEQ ID NO: 690443 - RNA, 21 nt, Human
ccggcagucaaagcaugcagc

SEQ ID NO: 690444 - RNA, 22 nt, Human
ccucccagacuaaccagccuuc

SEQ ID NO: 690445 - RNA, 22 nt, Human
ccucucaaacagagcaugccug

SEQ ID NO: 690446 - RNA, 19 nt, Human
ccugacuacagcugaaagg

SEQ ID NO: 690447 - RNA, 18 nt, Human
ccuggccuggcauugugu

SEQ ID NO: 690448 - RNA, 18 nt, Human
ccuggccuggcauugugu

SEQ ID NO: 690449 - RNA, 20 nt, Human
ccugucccugaagucagcac

SEQ ID NO: 690450 - RNA, 21 nt, Human
ccugucccugaagucagcacc

SEQ ID NO: 690451 - RNA, 21 nt, Human
ccugugacaggccugugggac

SEQ ID NO: 690452 - RNA, 20 nt, Human
ccuucucucucugcagcaag

SEQ ID NO: 690453 - RNA, 18 nt, Human
cuaaacaguggccaggug

SEQ ID NO: 690454 - RNA, 18 nt, Human
cuaaagucagcucaaagc

SEQ ID NO: 690455 - RNA, 23 nt, Human
cuaaccagaaccccaggccccca

SEQ ID NO: 690456 - RNA, 18 nt, Human
cucaggaauggacagacc

SEQ ID NO: 690457 - RNA, 19 nt, Human
cuccuaaacuuccaaaugc

SEQ ID NO: 690458 - RNA, 19 nt, Human
cuccugaaauaauaaaaug

SEQ ID NO: 690459 - RNA, 21 nt, Human
cuccugacuaugugaucuugc

SEQ ID NO: 690460 - RNA, 18 nt, Human
cuccuuaaccucaccucc

SEQ ID NO: 690461 - RNA, 25 nt, Human
cugaagcagcaaaaacugcugagag

SEQ ID NO: 690462 - RNA, 22 nt, Human
cugaggccggucgccgggucgc

SEQ ID NO: 690463 - RNA, 22 nt, Human
cugcugggcugucugagaauau

SEQ ID NO: 690464 - RNA, 23 nt, Human
cugggugggccagagaggggggc

SEQ ID NO: 690465 - RNA, 22 nt, Human
cuuaaaaaguguuaucugguag

SEQ ID NO: 690466 - RNA, 21 nt, Human
cuuaaccucaccuccuggggc

SEQ ID NO: 690467 - RNA, 20 nt, Human
cuugcccugcugucaaccuc

SEQ ID NO: 690468 - RNA, 24 nt, Human
gaagagacucugaaaagaagaaau

SEQ ID NO: 690469 - RNA, 20 nt, Human
gacaggugggcacucaggag

SEQ ID NO: 690470 - RNA, 23 nt, Human
gacaggugggcacucaggaguga

SEQ ID NO: 690471 - RNA, 18 nt, Human
gacccugccccucaccag

SEQ ID NO: 690472 - RNA, 18 nt, Human
gagaagcaggacaggugg

SEQ ID NO: 690473 - RNA, 24 nt, Human
gaggaagggcuugggcagaggacu

SEQ ID NO: 690474 - RNA, 24 nt, Human
gaggacucccaggacagcacugag

SEQ ID NO: 690475 - RNA, 18 nt, Human
gaggcagaacacugagug

SEQ ID NO: 690476 - RNA, 18 nt, Human
gcuaagccaggcugguga

SEQ ID NO: 690477 - RNA, 18 nt, Human
gcugaagcagcaaaaacu

SEQ ID NO: 690478 - RNA, 20 nt, Human
ggaagagacccccuuuaugg

SEQ ID NO: 690479 - RNA, 18 nt, Human
ggagaccccagcuucuuc

SEQ ID NO: 690480 - RNA, 18 nt, Human
ggaggccagccagagagg

SEQ ID NO: 690481 - RNA, 24 nt, Human
ggcagcugugcucuccaaggucug

SEQ ID NO: 690482 - RNA, 20 nt, Human
ggcuggaaguuugccucaca

SEQ ID NO: 690483 - RNA, 18 nt, Human
gggagguggccaugcccc

SEQ ID NO: 690484 - RNA, 24 nt, Human
gggauggggaagagacccccuuua

SEQ ID NO: 690485 - RNA, 19 nt, Human
gggcacucaggagugagga

SEQ ID NO: 690486 - RNA, 21 nt, Human
gggccagagaggggggcugga

SEQ ID NO: 690487 - RNA, 24 nt, Human
ggguauguguguccagaagccugg

SEQ ID NO: 690488 - RNA, 19 nt, Human
gguggucccaguuccuggc

SEQ ID NO: 690489 - RNA, 20 nt, Human
gguucuggccaagugggagg

SEQ ID NO: 690490 - RNA, 21 nt, Human
gucccuccuccugggaggcca

SEQ ID NO: 690491 - RNA, 24 nt, Human
gugaacuccccagccucaccauau

SEQ ID NO: 690492 - RNA, 27 nt, Human
uaagaugcucaucaauuagcccaaaaa

SEQ ID NO: 690493 - RNA, 23 nt, Human
uaaucccaggaucaagagaauuc

SEQ ID NO: 690494 - RNA, 22 nt, Human
uacccugccuggagaccccagc

SEQ ID NO: 690495 - RNA, 24 nt, Human
uagaguauauuuuaaccuccugaa

SEQ ID NO: 690496 - RNA, 23 nt, Human
uagccagcuccugggagcaaugc

SEQ ID NO: 690497 - RNA, 27 nt, Human
uagcugagacccugacggcuggaaguu

SEQ ID NO: 690498 - RNA, 19 nt, Human
uagucacagaaauggacag

SEQ ID NO: 690499 - RNA, 24 nt, Human
uagugaaaagcuuuucaccagaag

SEQ ID NO: 690500 - RNA, 21 nt, Human
uaugugagaaggcagauucug

SEQ ID NO: 690501 - RNA, 23 nt, Human
ucaaagaucuugauggaggggag

SEQ ID NO: 690502 - RNA, 18 nt, Human
ucaauguuuugauugucu

SEQ ID NO: 690503 - RNA, 22 nt, Human
ucacuuagugaaaagcuuuuca

SEQ ID NO: 690504 - RNA, 27 nt, Human
ucagcacccaaccggaguaaguaugua

SEQ ID NO: 690505 - RNA, 21 nt, Human
ucaggaauggacagacccaau

SEQ ID NO: 690506 - RNA, 19 nt, Human
ucauuucguccuucugcag

SEQ ID NO: 690507 - RNA, 18 nt, Human
ucccagacuaaccagccu

SEQ ID NO: 690508 - RNA, 24 nt, Human
uccccagccucaccauauggcugg

SEQ ID NO: 690509 - RNA, 23 nt, Human
ucccccagaguuuucaccugcag

SEQ ID NO: 690510 - RNA, 19 nt, Human
uccuaaccagaaccccagg

SEQ ID NO: 690511 - RNA, 18 nt, Human
uccugaaauaauaaaaug

SEQ ID NO: 690512 - RNA, 19 nt, Human
ucgcgggccggcagcugug

SEQ ID NO: 690513 - RNA, 18 nt, Human
ucgcuggauggcuccgag

SEQ ID NO: 690514 - RNA, 23 nt, Human
ucgcuggauggcuccgagccucg

SEQ ID NO: 690515 - RNA, 20 nt, Human
ucucuuuugcagggugaggu

SEQ ID NO: 690516 - RNA, 21 nt, Human
ucugaaacuaaacccaaucca

SEQ ID NO: 690517 - RNA, 24 nt, Human
ucugagucagaggacucccaggac

SEQ ID NO: 690518 - RNA, 19 nt, Human
ucuuucuuuucuuuccccc

SEQ ID NO: 690519 - RNA, 18 nt, Human
ugaaaauccucaccucca

SEQ ID NO: 690520 - RNA, 18 nt, Human
ugaaauagcuccucccag

SEQ ID NO: 690521 - RNA, 24 nt, Human
ugaaauagcuccucccagacuaaa

SEQ ID NO: 690522 - RNA, 21 nt, Human
ugaagcagcaaaaacugcuga

SEQ ID NO: 690523 - RNA, 24 nt, Human
ugaagcagcaaaaacugcugagag

SEQ ID NO: 690524 - RNA, 22 nt, Human
ugacagcaccuguguacuagac

SEQ ID NO: 690525 - RNA, 22 nt, Human
ugacagcaccuguguacuagac

SEQ ID NO: 690526 - RNA, 23 nt, Human
ugacauaaauuucauuuuucuua

SEQ ID NO: 690527 - RNA, 20 nt, Human
ugagaaggcagauucuggga

SEQ ID NO: 690528 - RNA, 20 nt, Human
ugagaauauugggccugagg

SEQ ID NO: 690529 - RNA, 19 nt, Human
ugagaguggcagcucagga

SEQ ID NO: 690530 - RNA, 18 nt, Human
ugagcacacagucccugg

SEQ ID NO: 690531 - RNA, 24 nt, Human
ugccauugucaggaaaggauuuag

SEQ ID NO: 690532 - RNA, 19 nt, Human
ugccuaaacaguggccagg

SEQ ID NO: 690533 - RNA, 19 nt, Human
uggaagauguugaacuacc

SEQ ID NO: 690534 - RNA, 21 nt, Human
uggaggggaggaagggcuugg

SEQ ID NO: 690535 - RNA, 20 nt, Human
uggccaagugggaggugggg

SEQ ID NO: 690536 - RNA, 21 nt, Human
uggccaugccccuucuggcca

SEQ ID NO: 690537 - RNA, 23 nt, Human
uggcuccuaaacuuccaaaugcu

SEQ ID NO: 690538 - RNA, 24 nt, Human
ugggacacccaggaguaugcagga

SEQ ID NO: 690539 - RNA, 24 nt, Human
ugggaggccagccagagaggucau

SEQ ID NO: 690540 - RNA, 18 nt, Human
ugggaucuggagccucag

SEQ ID NO: 690541 - RNA, 21 nt, Human
ugggcagaggacugggugggc

SEQ ID NO: 690542 - RNA, 24 nt, Human
uggggcuagaagacaggguacugg

SEQ ID NO: 690543 - RNA, 22 nt, Human
ugggugggccagagaggggggc

SEQ ID NO: 690544 - RNA, 21 nt, Human
uguagcagaaaguugcuuguu

SEQ ID NO: 690545 - RNA, 20 nt, Human
uguccugggccaccuguugu

SEQ ID NO: 690546 - RNA, 18 nt, Human
ugugaguauagaaugaga

SEQ ID NO: 690547 - RNA, 19 nt, Human
ugugaugcugacugaccgc

SEQ ID NO: 690548 - RNA, 23 nt, Human
uguggcaagucucucucagcugg

SEQ ID NO: 690549 - RNA, 18 nt, Human
uguggcagugaaggaaca

SEQ ID NO: 690550 - RNA, 25 nt, Human
uuagucuuaaaaaguguuaucuggu

SEQ ID NO: 690551 - RNA, 23 nt, Human
uucauuuaaucauuuuauaauaa

SEQ ID NO: 690552 - RNA, 18 nt, Human
uuccagagggcacaagau

SEQ ID NO: 690553 - RNA, 18 nt, Human
uuccuggccuggcauugu

SEQ ID NO: 690554 - RNA, 18 nt, Human
uugcagggugaggugguc

SEQ ID NO: 690555 - RNA, 20 nt, Human
uugcuaccuccaagggccca

SEQ ID NO: 690556 - RNA, 22 nt, Human
aaacucaagaccaccaacuggc

SEQ ID NO: 690557 - RNA, 24 nt, Human
aaagagaaaacucaagaccaccaa

SEQ ID NO: 690558 - RNA, 23 nt, Human
aagaaagagaaaacucaagacca

SEQ ID NO: 690559 - RNA, 18 nt, Human
aagagaaaacucaagacc

SEQ ID NO: 690560 - RNA, 20 nt, Human
acaguagaguaauuuugcug

SEQ ID NO: 690561 - RNA, 18 nt, Human
agaaaacucaagaccacc

SEQ ID NO: 690562 - RNA, 19 nt, Human
agaaagagaaaacucaaga

SEQ ID NO: 690563 - RNA, 24 nt, Human
caaacaagcggaaucauccagcaa

SEQ ID NO: 690564 - RNA, 22 nt, Human
ccagcaaggcaaacgcgaaguc

SEQ ID NO: 690565 - RNA, 20 nt, Human
cggaaucauccagcaaggca

SEQ ID NO: 690566 - RNA, 21 nt, Human
gcgaagucggcagcacugcca

SEQ ID NO: 690567 - RNA, 21 nt, Human
ggcagcacugccaccucuggu

SEQ ID NO: 690568 - RNA, 19 nt, Human
ugcaagaaagagaaaacuc

SEQ ID NO: 690569 - RNA, 22 nt, Human
uuaacaguagaguaauuuugcu

SEQ ID NO: 690570 - RNA, 21 nt, Human
aaaacacaagcccacauccca

SEQ ID NO: 690571 - RNA, 23 nt, Human
aaacaagccaggacagaguccac

SEQ ID NO: 690572 - RNA, 21 nt, Human
aaacacaagcccacaucccag

SEQ ID NO: 690573 - RNA, 21 nt, Human
aaacaggcuccucucccaucu

SEQ ID NO: 690574 - RNA, 24 nt, Human
aaacaggcuccucucccaucuccc

SEQ ID NO: 690575 - RNA, 18 nt, Human
aaccagcucuugcuucgg

SEQ ID NO: 690576 - RNA, 21 nt, Human
aaguccucgugcugggccucg

SEQ ID NO: 690577 - RNA, 23 nt, Human
aaucacuuccccagcccuuccau

SEQ ID NO: 690578 - RNA, 18 nt, Human
acagaacaagggggcaag

SEQ ID NO: 690579 - RNA, 23 nt, Human
acagugacaaaacacaagcccac

SEQ ID NO: 690580 - RNA, 18 nt, Human
accccaggguaaguccuc

SEQ ID NO: 690581 - RNA, 19 nt, Human
acuucacccccuagggaca

SEQ ID NO: 690582 - RNA, 21 nt, Human
agaaacccaaaguucccagag

SEQ ID NO: 690583 - RNA, 18 nt, Human
agcucuuuagcuucagau

SEQ ID NO: 690584 - RNA, 22 nt, Human
aggacagaguccacccuccagg

SEQ ID NO: 690585 - RNA, 20 nt, Human
aggcaggggguguggggugg

SEQ ID NO: 690586 - RNA, 22 nt, Human
aggcaggggguguggggugucc

SEQ ID NO: 690587 - RNA, 24 nt, Human
agggaggugaagccgugggagaag

SEQ ID NO: 690588 - RNA, 26 nt, Human
agggggauacagaacaagggggcaag

SEQ ID NO: 690589 - RNA, 22 nt, Human
agucaaaucccaaggcaccggu

SEQ ID NO: 690590 - RNA, 22 nt, Human
aucucccccuucacagugacaa

SEQ ID NO: 690591 - RNA, 21 nt, Human
caagggcaaagggggauacag

SEQ ID NO: 690592 - RNA, 23 nt, Human
caccuagcaucauagcugcaaca

SEQ ID NO: 690593 - RNA, 19 nt, Human
cagaaucagauugccuucc

SEQ ID NO: 690594 - RNA, 21 nt, Human
cagaccccaccccaaaacagg

SEQ ID NO: 690595 - RNA, 24 nt, Human
cagacuccaaaacccacacucaau

SEQ ID NO: 690596 - RNA, 23 nt, Human
cagcaacucuagucaaaucccaa

SEQ ID NO: 690597 - RNA, 24 nt, Human
cagcccuuccaucgccuuuuuuga

SEQ ID NO: 690598 - RNA, 19 nt, Human
caggcuccucucccaucuc

SEQ ID NO: 690599 - RNA, 23 nt, Human
caggcuccucucccaucuccccc

SEQ ID NO: 690600 - RNA, 21 nt, Human
ccaaaacccacacucaauuug

SEQ ID NO: 690601 - RNA, 25 nt, Human
ccaaaacccacacucaauuugcuac

SEQ ID NO: 690602 - RNA, 22 nt, Human
ccaaaccuaacaaaaccccagg

SEQ ID NO: 690603 - RNA, 23 nt, Human
ccaagaucacuuggccuggauuu

SEQ ID NO: 690604 - RNA, 20 nt, Human
cccacacucaauuugcuaca

SEQ ID NO: 690605 - RNA, 21 nt, Human
cccagcccuuccaucgccuuu

SEQ ID NO: 690606 - RNA, 21 nt, Human
ccccaaaacaggcuccucucc

SEQ ID NO: 690607 - RNA, 23 nt, Human
ccccaccccaaaacaggcuccuc

SEQ ID NO: 690608 - RNA, 21 nt, Human
ccccagaccccaccccaaaac

SEQ ID NO: 690609 - RNA, 23 nt, Human
ccccagaccccaccccaaaacag

SEQ ID NO: 690610 - RNA, 22 nt, Human
ccccuagggacagcugcuucca

SEQ ID NO: 690611 - RNA, 24 nt, Human
ccccuucacagugacaaaacacaa

SEQ ID NO: 690612 - RNA, 22 nt, Human
ccucgugcugggccucgagccc

SEQ ID NO: 690613 - RNA, 19 nt, Human
ccuggauuugagccugagg

SEQ ID NO: 690614 - RNA, 22 nt, Human
cuccaaaacccacacucaauuu

SEQ ID NO: 690615 - RNA, 21 nt, Human
cuuccaaaccuaacaaaaccc

SEQ ID NO: 690616 - RNA, 20 nt, Human
cuuccccagcccuuccaucg

SEQ ID NO: 690617 - RNA, 18 nt, Human
gcugcuguggcugccacc

SEQ ID NO: 690618 - RNA, 20 nt, Human
gggcugggccaggccaaggc

SEQ ID NO: 690619 - RNA, 18 nt, Human
gggcuggugauuuugcuc

SEQ ID NO: 690620 - RNA, 21 nt, Human
ggggccaaggcagcugugagc

SEQ ID NO: 690621 - RNA, 23 nt, Human
gggggggacuucacccccuaggg

SEQ ID NO: 690622 - RNA, 21 nt, Human
ggguaaguccucgugcugggc

SEQ ID NO: 690623 - RNA, 24 nt, Human
gguggggccaaggcagcugugagc

SEQ ID NO: 690624 - RNA, 21 nt, Human
gugggagaagcagggguaaaa

SEQ ID NO: 690625 - RNA, 18 nt, Human
uaaaaaaaaaaagggggg

SEQ ID NO: 690626 - RNA, 22 nt, Human
uacagaacaagggggcaaguac

SEQ ID NO: 690627 - RNA, 19 nt, Human
uagcaucauagcugcaaca

SEQ ID NO: 690628 - RNA, 22 nt, Human
uauuuaaucacuuccccagccc

SEQ ID NO: 690629 - RNA, 23 nt, Human
uccaaaacccacacucaauuugc

SEQ ID NO: 690630 - RNA, 25 nt, Human
uccaaaccuaacaaaaccccagggu

SEQ ID NO: 690631 - RNA, 18 nt, Human
ucccagagauuaacuugc

SEQ ID NO: 690632 - RNA, 19 nt, Human
ucccagagauuaacuugcc

SEQ ID NO: 690633 - RNA, 19 nt, Human
uccccagaccccaccccaa

SEQ ID NO: 690634 - RNA, 19 nt, Human
uccccagaccccaccccaa

SEQ ID NO: 690635 - RNA, 19 nt, Human
ucccugaggcugcuguggc

SEQ ID NO: 690636 - RNA, 19 nt, Human
uccucucccaucucccccu

SEQ ID NO: 690637 - RNA, 21 nt, Human
ucucccaucucccccuucaca

SEQ ID NO: 690638 - RNA, 20 nt, Human
ugacaaaacacaagcccaca

SEQ ID NO: 690639 - RNA, 23 nt, Human
ugacaaaacacaagcccacaucc

SEQ ID NO: 690640 - RNA, 19 nt, Human
ugagcaaaaggagaaguau

SEQ ID NO: 690641 - RNA, 25 nt, Human
ugaggacaccaaacaagcuggagac

SEQ ID NO: 690642 - RNA, 22 nt, Human
ugcaugcauuugcauagacggc

SEQ ID NO: 690643 - RNA, 21 nt, Human
uggaagggcaaggcaagggca

SEQ ID NO: 690644 - RNA, 23 nt, Human
uggauuugagccugaggcucaga

SEQ ID NO: 690645 - RNA, 18 nt, Human
ugggauggacccauccau

SEQ ID NO: 690646 - RNA, 19 nt, Human
ugggccucgagccagcaac

SEQ ID NO: 690647 - RNA, 21 nt, Human
uggggacauacacucaagagg

SEQ ID NO: 690648 - RNA, 23 nt, Human
uuaaucacuuccccagcccuucc

SEQ ID NO: 690649 - RNA, 19 nt, Human
uuauuuaaucacuucccca

SEQ ID NO: 690650 - RNA, 24 nt, Human
uuucuugcguugcuuuuauuuaau

SEQ ID NO: 690651 - RNA, 18 nt, Human
uuuuuuuuuuuuuucuug

SEQ ID NO: 690652 - RNA, 22 nt, Human
uuuuuuuuuuuuuucuugcguu

SEQ ID NO: 690653 - RNA, 20 nt, Human
aaacaggacucaauacuaca

SEQ ID NO: 690654 - RNA, 24 nt, Human
aaacaggacucaauacuacaccuc

SEQ ID NO: 690655 - RNA, 18 nt, Human
agagacaaaggcaaggga

SEQ ID NO: 690656 - RNA, 18 nt, Human
aggcaagggaggagaggc

SEQ ID NO: 690657 - RNA, 18 nt, Human
agggaggagaggcaaggg

SEQ ID NO: 690658 - RNA, 27 nt, Human
caggaaaaagagaacaauagcucaaac

SEQ ID NO: 690659 - RNA, 23 nt, Human
cucaauacuacaccucacaaacu

SEQ ID NO: 690660 - RNA, 24 nt, Human
gaaaaagagaacaauagcucaaac

SEQ ID NO: 690661 - RNA, 21 nt, Human
gacucaauacuacaccucaca

SEQ ID NO: 690662 - RNA, 18 nt, Human
gaggcaagggcuugcagu

SEQ ID NO: 690663 - RNA, 21 nt, Human
ggacugaagagacaaaggcaa

SEQ ID NO: 690664 - RNA, 18 nt, Human
ggaggagaggcaagggcu

SEQ ID NO: 690665 - RNA, 18 nt, Human
gggagcaagauauucucc

SEQ ID NO: 690666 - RNA, 22 nt, Human
gggagcaagauauucucccuuu

SEQ ID NO: 690667 - RNA, 18 nt, Human
gggcaacaccaggcugac

SEQ ID NO: 690668 - RNA, 19 nt, Human
ugacucaggaggggagcaa

SEQ ID NO: 690669 - RNA, 21 nt, Human
ugagaucacacaaacaagugg

SEQ ID NO: 690670 - RNA, 23 nt, Human
ugagaucacacaaacaaguggga

SEQ ID NO: 690671 - RNA, 19 nt, Human
ugcacauaaggggaauaaa

SEQ ID NO: 690672 - RNA, 22 nt, Human
aaaaaaaaaucccaaccaacaa

SEQ ID NO: 690673 - RNA, 25 nt, Human
aaaaaaaagacagcaauaaauccaa

SEQ ID NO: 690674 - RNA, 22 nt, Human
aaaaaacagucccugaaaucug

SEQ ID NO: 690675 - RNA, 25 nt, Human
aaaagaaaaaaaaaaacagucccug

SEQ ID NO: 690676 - RNA, 21 nt, Human
aaacaggaaaaaagaaaaaga

SEQ ID NO: 690677 - RNA, 22 nt, Human
aacaaauuugucacauugggcc

SEQ ID NO: 690678 - RNA, 18 nt, Human
aagcggccuuggagucuu

SEQ ID NO: 690679 - RNA, 24 nt, Human
aagcggccuuggagucuuccaguc

SEQ ID NO: 690680 - RNA, 25 nt, Human
aauacagaaagaaaauaucauacaa

SEQ ID NO: 690681 - RNA, 24 nt, Human
aauccacauggcucuuguaaaaag

SEQ ID NO: 690682 - RNA, 24 nt, Human
acaagccaguuacaaaaaaaaaaa

SEQ ID NO: 690683 - RNA, 20 nt, Human
agaaagaaaauaucauacaa

SEQ ID NO: 690684 - RNA, 24 nt, Human
agaaauacagaaagaaaauaucau

SEQ ID NO: 690685 - RNA, 22 nt, Human
agacagcaauaaauccaaucca

SEQ ID NO: 690686 - RNA, 20 nt, Human
agccuggacauccaacauuu

SEQ ID NO: 690687 - RNA, 22 nt, Human
aggugguuuuuagaggccacag

SEQ ID NO: 690688 - RNA, 20 nt, Human
auagagaaauacagaaagaa

SEQ ID NO: 690689 - RNA, 21 nt, Human
caagcggccuuggagucuucc

SEQ ID NO: 690690 - RNA, 20 nt, Human
caccgccuccuguuucuugc

SEQ ID NO: 690691 - RNA, 18 nt, Human
caggaaaaaagaaaaaga

SEQ ID NO: 690692 - RNA, 22 nt, Human
caggaaaaaagaaaaagaaaaa

SEQ ID NO: 690693 - RNA, 22 nt, Human
ccaccgccuccuguuucuugcu

SEQ ID NO: 690694 - RNA, 24 nt, Human
ccaguuacaaaaaaaaaaaaaaaa

SEQ ID NO: 690695 - RNA, 27 nt, Human
ccaguuacaaaaaaaaaaaaaaaaucc

SEQ ID NO: 690696 - RNA, 22 nt, Human
ccucaaaaaaaagacagcaaua

SEQ ID NO: 690697 - RNA, 18 nt, Human
ccuuagucauccugguga

SEQ ID NO: 690698 - RNA, 22 nt, Human
cuagccuggacauccaacauuu

SEQ ID NO: 690699 - RNA, 23 nt, Human
cucaaagacaagcggccuuggag

SEQ ID NO: 690700 - RNA, 24 nt, Human
cugcauuagaaaacaggaaaaaag

SEQ ID NO: 690701 - RNA, 18 nt, Human
ggagucuuccaguccaua

SEQ ID NO: 690702 - RNA, 21 nt, Human
uacaaaaaaaaaaaaaaaauc

SEQ ID NO: 690703 - RNA, 22 nt, Human
uacaaaaaaaaaaaaaaaaucc

SEQ ID NO: 690704 - RNA, 22 nt, Human
uacaaaaugauauagagaaaua

SEQ ID NO: 690705 - RNA, 22 nt, Human
uagaaaacaggaaaaaagaaaa

SEQ ID NO: 690706 - RNA, 18 nt, Human
uagcaaucaagccucaaa

SEQ ID NO: 690707 - RNA, 18 nt, Human
ucccugaaaucuggcagg

SEQ ID NO: 690708 - RNA, 22 nt, Human
ugauuuauagcaaucaagccuc

SEQ ID NO: 690709 - RNA, 22 nt, Human
ugcagucugaggucucaaagac

SEQ ID NO: 690710 - RNA, 22 nt, Human
uggagucuuccaguccauaucu

SEQ ID NO: 690711 - RNA, 23 nt, Human
uuguauucuguggccacaucaug

SEQ ID NO: 690712 - RNA, 22 nt, Human
aaaacaguaaaaucaguaaacc

SEQ ID NO: 690713 - RNA, 24 nt, Human
aaacaguaaaaucaguaaaccaaa

SEQ ID NO: 690714 - RNA, 22 nt, Human
aagaauuggugguuguugggac

SEQ ID NO: 690715 - RNA, 18 nt, Human
agagcccaauugugucuu

SEQ ID NO: 690716 - RNA, 23 nt, Human
aucaguaaaccaaacuccacucc

SEQ ID NO: 690717 - RNA, 21 nt, Human
auucauacuaagcugcauuuc

SEQ ID NO: 690718 - RNA, 23 nt, Human
cacaaaacaguaaaaucaguaaa

SEQ ID NO: 690719 - RNA, 20 nt, Human
caguaaaaucaguaaaccaa

SEQ ID NO: 690720 - RNA, 22 nt, Human
ccaaacuccacuccugcuggcu

SEQ ID NO: 690721 - RNA, 18 nt, Human
guugggacaauuucuugg

SEQ ID NO: 690722 - RNA, 22 nt, Human
uaaaaucaguaaaccaaacucc

SEQ ID NO: 690723 - RNA, 22 nt, Human
uaaaaucaguaaaccaaacucc

SEQ ID NO: 690724 - RNA, 27 nt, Human
uaacuccauuaaaauaaagauucauga

SEQ ID NO: 690725 - RNA, 22 nt, Human
uccaaauacauuuuccugugcu

SEQ ID NO: 690726 - RNA, 18 nt, Human
uguugggacaauuucuug

SEQ ID NO: 690727 - RNA, 21 nt, Human
uugcugacucuguguccagcc

SEQ ID NO: 690728 - RNA, 19 nt, Human
uuggugguuguugggacaa

SEQ ID NO: 690729 - RNA, 19 nt, Human
uuuuuuuuuugcagagccc

SEQ ID NO: 690730 - RNA, 18 nt, Human
uuuuuuuuuuuuuuuuug

SEQ ID NO: 690731 - RNA, 21 nt, Human
uuuuuuuuuuuuuuuuugcag

SEQ ID NO: 690732 - RNA, 23 nt, Human
aaaaaaaaaaagcccucagaaaa

SEQ ID NO: 690733 - RNA, 24 nt, Human
aaagcccucagaaaauuucucaca

SEQ ID NO: 690734 - RNA, 25 nt, Human
aacacucuucuaugaacaaccacca

SEQ ID NO: 690735 - RNA, 20 nt, Human
accaccaccaccaaaaaaaa

SEQ ID NO: 690736 - RNA, 23 nt, Human
accaccaccaccaaaaaaaaaaa

SEQ ID NO: 690737 - RNA, 21 nt, Human
caaaaaaaaaaaaagcccuca

SEQ ID NO: 690738 - RNA, 20 nt, Human
caaaagggauaaaccuaaau

SEQ ID NO: 690739 - RNA, 19 nt, Human
caccaaaaaaaaaaaaagc

SEQ ID NO: 690740 - RNA, 20 nt, Human
caccaaaaaaaaaaaaagcc

SEQ ID NO: 690741 - RNA, 24 nt, Human
ccaccaaaaaaaaaaaaagcccuc

SEQ ID NO: 690742 - RNA, 22 nt, Human
cucaaaauccuuuacaaaagga

SEQ ID NO: 690743 - RNA, 21 nt, Human
cuuguuaucauuagagaggga

SEQ ID NO: 690744 - RNA, 20 nt, Human
gaacaaccaccaccaccaaa

SEQ ID NO: 690745 - RNA, 23 nt, Human
gaacacucuucuaugaacaacca

SEQ ID NO: 690746 - RNA, 23 nt, Human
uccuuuacaaaaggagauaguuc

SEQ ID NO: 690747 - RNA, 25 nt, Human
ucuaugaacaaccaccaccaccaaa

SEQ ID NO: 690748 - RNA, 21 nt, Human
uuuuuuuuuuucaaaagggau

SEQ ID NO: 690749 - RNA, 21 nt, Human
uuuuuuuuuuuuucaaaaggg

SEQ ID NO: 690750 - RNA, 24 nt, Human
uuuuuuuuuuuuuuuucaaaaggg

SEQ ID NO: 690751 - RNA, 23 nt, Human
aaaagacaaaauuuaagccaaaa

SEQ ID NO: 690752 - RNA, 23 nt, Human
aaaagacaggggcaggcaguggg

SEQ ID NO: 690753 - RNA, 23 nt, Human
aaagacaggggcaggcagguccc

SEQ ID NO: 690754 - RNA, 19 nt, Human
aaccaaggggaaaagacag

SEQ ID NO: 690755 - RNA, 18 nt, Human
aaccccagccucuuucca

SEQ ID NO: 690756 - RNA, 25 nt, Human
aacucuuguaacacaaaaccaaggg

SEQ ID NO: 690757 - RNA, 19 nt, Human
aaggggccuggggggaggg

SEQ ID NO: 690758 - RNA, 24 nt, Human
acaaaaccaaggggaaaagacagg

SEQ ID NO: 690759 - RNA, 19 nt, Human
agacaaaauuuaagccaaa

SEQ ID NO: 690760 - RNA, 18 nt, Human
agaggaaaggggccuggg

SEQ ID NO: 690761 - RNA, 21 nt, Human
agaggcuggggcugggcuggg

SEQ ID NO: 690762 - RNA, 21 nt, Human
aggcaggucccagcuccugug

SEQ ID NO: 690763 - RNA, 18 nt, Human
aggcuggggcugggcugg

SEQ ID NO: 690764 - RNA, 22 nt, Human
aggggccuggggggaggggcgg

SEQ ID NO: 690765 - RNA, 19 nt, Human
augggaaccccagccucuu

SEQ ID NO: 690766 - RNA, 22 nt, Human
caaaagacacuaguaaggaagu

SEQ ID NO: 690767 - RNA, 26 nt, Human
caacuucaaaagacaaaauuuaagcc

SEQ ID NO: 690768 - RNA, 22 nt, Human
cacaaaaccaaggggaaaagac

SEQ ID NO: 690769 - RNA, 22 nt, Human
cacacuugggaacgggagcuaa

SEQ ID NO: 690770 - RNA, 20 nt, Human
cacuccuguuccucuuuccc

SEQ ID NO: 690771 - RNA, 23 nt, Human
cagagccuuuucuaaacuggaaa

SEQ ID NO: 690772 - RNA, 22 nt, Human
cagccaccaccacaagaggcuu

SEQ ID NO: 690773 - RNA, 19 nt, Human
cagcuccuguggucccucc

SEQ ID NO: 690774 - RNA, 20 nt, Human
cagcuccuguggucccuccu

SEQ ID NO: 690775 - RNA, 24 nt, Human
caggagcaggcgcacuggcccuug

SEQ ID NO: 690776 - RNA, 20 nt, Human
cagggcugaagaguuggaga

SEQ ID NO: 690777 - RNA, 18 nt, Human
cagggucccucagugcug

SEQ ID NO: 690778 - RNA, 18 nt, Human
caggucccagcuccugug

SEQ ID NO: 690779 - RNA, 18 nt, Human
cagugugacuccgcacau

SEQ ID NO: 690780 - RNA, 24 nt, Human
caucugaaacugucuccaacaacu

SEQ ID NO: 690781 - RNA, 24 nt, Human
ccacagggcauagggggcacagcc

SEQ ID NO: 690782 - RNA, 22 nt, Human
cccgccugcacccccacuccca

SEQ ID NO: 690783 - RNA, 24 nt, Human
cccucagugcugcccgccugcacc

SEQ ID NO: 690784 - RNA, 21 nt, Human
ccuccagccccucuggagucc

SEQ ID NO: 690785 - RNA, 19 nt, Human
ccugcacccccacucccag

SEQ ID NO: 690786 - RNA, 22 nt, Human
ccuggcccggagaccaggaacc

SEQ ID NO: 690787 - RNA, 21 nt, Human
cggcacugcagugugacuccg

SEQ ID NO: 690788 - RNA, 19 nt, Human
cucuuucucagagcugggg

SEQ ID NO: 690789 - RNA, 24 nt, Human
cugaagaguuggagaggaaggcug

SEQ ID NO: 690790 - RNA, 19 nt, Human
cugcacccccacucccagg

SEQ ID NO: 690791 - RNA, 21 nt, Human
gaaaagacaggggcaggcagg

SEQ ID NO: 690792 - RNA, 19 nt, Human
gaaaugccacagggcauag

SEQ ID NO: 690793 - RNA, 20 nt, Human
gaagaguuggagaggaaggc

SEQ ID NO: 690794 - RNA, 19 nt, Human
gagcaggcgcacuggcccu

SEQ ID NO: 690795 - RNA, 19 nt, Human
gagcuaauacuguucggca

SEQ ID NO: 690796 - RNA, 21 nt, Human
gcacagccaccaccacaagag

SEQ ID NO: 690797 - RNA, 21 nt, Human
gccgcgagcccgcucaauccg

SEQ ID NO: 690798 - RNA, 25 nt, Human
gcggcugggcaguggcugcugggug

SEQ ID NO: 690799 - RNA, 19 nt, Human
gcggggcagggucccucag

SEQ ID NO: 690800 - RNA, 20 nt, Human
gcggggcagggucccucagu

SEQ ID NO: 690801 - RNA, 18 nt, Human
gcugcugggugagacagg

SEQ ID NO: 690802 - RNA, 19 nt, Human
ggaaagaccaggagucugg

SEQ ID NO: 690803 - RNA, 21 nt, Human
ggaaagaccaggagucuggca

SEQ ID NO: 690804 - RNA, 19 nt, Human
ggagcaggcgcacuggccc

SEQ ID NO: 690805 - RNA, 21 nt, Human
ggcacagccaccaccacaaga

SEQ ID NO: 690806 - RNA, 18 nt, Human
ggcagccccuucuccugg

SEQ ID NO: 690807 - RNA, 18 nt, Human
ggccuggggggaggggcg

SEQ ID NO: 690808 - RNA, 27 nt, Human
ggcgcugggauugcaguggucgagucc

SEQ ID NO: 690809 - RNA, 21 nt, Human
ggcugcugggugagacagguc

SEQ ID NO: 690810 - RNA, 21 nt, Human
gggaagaagagggcuucucag

SEQ ID NO: 690811 - RNA, 18 nt, Human
gggcaggcaggucccagc

SEQ ID NO: 690812 - RNA, 23 nt, Human
gggggaggggcggggcagggucc

SEQ ID NO: 690813 - RNA, 23 nt, Human
gguugccaguaagacgcagaaau

SEQ ID NO: 690814 - RNA, 21 nt, Human
guaauuccaauucuaaacuuc

SEQ ID NO: 690815 - RNA, 19 nt, Human
guugagaaguggccuuccu

SEQ ID NO: 690816 - RNA, 18 nt, Human
uaaauaaucaucugaaac

SEQ ID NO: 690817 - RNA, 24 nt, Human
ucaauccgcgcgacugcggcugcc

SEQ ID NO: 690818 - RNA, 21 nt, Human
ucagugcugcccgccugcacc

SEQ ID NO: 690819 - RNA, 18 nt, Human
ucccgggauuaagcauuc

SEQ ID NO: 690820 - RNA, 24 nt, Human
ucccucagugcugcccgccugcca

SEQ ID NO: 690821 - RNA, 25 nt, Human
ucccuccuuggcacagagccuuuuc

SEQ ID NO: 690822 - RNA, 20 nt, Human
uccgcacauacaaguagggc

SEQ ID NO: 690823 - RNA, 20 nt, Human
ugacccgagauccccauggc

SEQ ID NO: 690824 - RNA, 21 nt, Human
ugagaaguggccuuccuuggg

SEQ ID NO: 690825 - RNA, 22 nt, Human
ugagacaggucagucucacuug

SEQ ID NO: 690826 - RNA, 19 nt, Human
ugcagaggaaaggggccug

SEQ ID NO: 690827 - RNA, 21 nt, Human
ugcagaggaaaggggccuggg

SEQ ID NO: 690828 - RNA, 18 nt, Human
ugccacagggcauagggg

SEQ ID NO: 690829 - RNA, 24 nt, Human
ugccuccagccccucuggaguccu

SEQ ID NO: 690830 - RNA, 20 nt, Human
ugccuggagugcggcugggc

SEQ ID NO: 690831 - RNA, 22 nt, Human
ugccuggagugcggcugggcag

SEQ ID NO: 690832 - RNA, 20 nt, Human
uggaaagaccaggagucugg

SEQ ID NO: 690833 - RNA, 25 nt, Human
uggagaggaaggcuggaacugaccc

SEQ ID NO: 690834 - RNA, 24 nt, Human
uggaggggcagccccuucuccugg

SEQ ID NO: 690835 - RNA, 21 nt, Human
uggcccggagaccaggaaccc

SEQ ID NO: 690836 - RNA, 20 nt, Human
uggcugccugggacuggagu

SEQ ID NO: 690837 - RNA, 24 nt, Human
ugucuccaacaacucuuguaacac

SEQ ID NO: 690838 - RNA, 19 nt, Human
uguuccagcgagggcugcu

SEQ ID NO: 690839 - RNA, 22 nt, Human
uucaaaagacaaaauuuaagcc

SEQ ID NO: 690840 - RNA, 23 nt, Human
uucaaaagacaaaauuuaagccc

SEQ ID NO: 690841 - RNA, 23 nt, Human
aaaacacccagaauggaaaagca

SEQ ID NO: 690842 - RNA, 27 nt, Human
aaacacccagaauggaaaagcagagaa

SEQ ID NO: 690843 - RNA, 20 nt, Human
aaacaucccacgaacaucaa

SEQ ID NO: 690844 - RNA, 25 nt, Human
aaacaucccacgaacaucaaguuca

SEQ ID NO: 690845 - RNA, 23 nt, Human
aauuuugucucucuugauuaaac

SEQ ID NO: 690846 - RNA, 19 nt, Human
acccaggugcuugcuuugg

SEQ ID NO: 690847 - RNA, 23 nt, Human
agcaggcggugccgagggggccg

SEQ ID NO: 690848 - RNA, 18 nt, Human
aggcagaggagcaugcag

SEQ ID NO: 690849 - RNA, 23 nt, Human
aggccugaggcuuaugcaagaga

SEQ ID NO: 690850 - RNA, 19 nt, Human
aggcggugccgagggggcc

SEQ ID NO: 690851 - RNA, 21 nt, Human
aggcguggcugagggaggcuc

SEQ ID NO: 690852 - RNA, 22 nt, Human
aguaacugcgaagggugggcac

SEQ ID NO: 690853 - RNA, 22 nt, Human
caauccagcccugagcuccuca

SEQ ID NO: 690854 - RNA, 21 nt, Human
cacagcucagccggaagccuu

SEQ ID NO: 690855 - RNA, 24 nt, Human
cacaggcagaggagcaugcagagc

SEQ ID NO: 690856 - RNA, 23 nt, Human
cacccagccuccaguccagccag

SEQ ID NO: 690857 - RNA, 21 nt, Human
cacuuuugggggcagagagag

SEQ ID NO: 690858 - RNA, 18 nt, Human
cagaaggcagcaaaggca

SEQ ID NO: 690859 - RNA, 22 nt, Human
cagcacauggcgaagcggcccc

SEQ ID NO: 690860 - RNA, 19 nt, Human
cagccgggcccccuccucc

SEQ ID NO: 690861 - RNA, 21 nt, Human
cagcgcagcgggcacaggcag

SEQ ID NO: 690862 - RNA, 21 nt, Human
caggaaggcgccuccauggca

SEQ ID NO: 690863 - RNA, 19 nt, Human
cagggccagaugcccagga

SEQ ID NO: 690864 - RNA, 23 nt, Human
cagggccagaugcccaggagacc

SEQ ID NO: 690865 - RNA, 27 nt, Human
ccaauccagcccugagcuccucagcaa

SEQ ID NO: 690866 - RNA, 19 nt, Human
ccacaccugccaauccagc

SEQ ID NO: 690867 - RNA, 23 nt, Human
ccacaccugccaauccagcccug

SEQ ID NO: 690868 - RNA, 19 nt, Human
ccacgaacaucaaguucac

SEQ ID NO: 690869 - RNA, 21 nt, Human
ccagaauggaaaagcagagaa

SEQ ID NO: 690870 - RNA, 18 nt, Human
ccagaauguggggggcag

SEQ ID NO: 690871 - RNA, 18 nt, Human
ccccugggggaacgagcc

SEQ ID NO: 690872 - RNA, 18 nt, Human
cccucgggcccagccggg

SEQ ID NO: 690873 - RNA, 20 nt, Human
cccucgggcccagccgggcc

SEQ ID NO: 690874 - RNA, 20 nt, Human
ccggccgagagcugggcggc

SEQ ID NO: 690875 - RNA, 19 nt, Human
ccgggagccucgucuuugc

SEQ ID NO: 690876 - RNA, 18 nt, Human
ccgggcccccuccuccca

SEQ ID NO: 690877 - RNA, 20 nt, Human
ccggugcgaccgugcagccg

SEQ ID NO: 690878 - RNA, 25 nt, Human
cgagccggguagggggcagcagggc

SEQ ID NO: 690879 - RNA, 25 nt, Human
cgccuugggacccucgggcccagcc

SEQ ID NO: 690880 - RNA, 20 nt, Human
cgggucggguuuccccuggg

SEQ ID NO: 690881 - RNA, 22 nt, Human
cggugcgaccgugcagccggcg

SEQ ID NO: 690882 - RNA, 20 nt, Human
cucacgguuugcagggcagc

SEQ ID NO: 690883 - RNA, 23 nt, Human
cucccaacaacccccagaggccc

SEQ ID NO: 690884 - RNA, 18 nt, Human
cuccucccaacaaccccc

SEQ ID NO: 690885 - RNA, 24 nt, Human
cuggaccgccccugcacgccuugg

SEQ ID NO: 690886 - RNA, 20 nt, Human
cuggccaacccaggaaggcu

SEQ ID NO: 690887 - RNA, 25 nt, Human
cuugggacccucgggcccagccggg

SEQ ID NO: 690888 - RNA, 23 nt, Human
cuuuugggggcagagagaguugg

SEQ ID NO: 690889 - RNA, 20 nt, Human
gaaaagcagagaacagcuuc

SEQ ID NO: 690890 - RNA, 19 nt, Human
gaccugggcugagagaggc

SEQ ID NO: 690891 - RNA, 18 nt, Human
gacggugugcaggugugu

SEQ ID NO: 690892 - RNA, 23 nt, Human
gagagcugggcggccgggagggg

SEQ ID NO: 690893 - RNA, 20 nt, Human
gagcugggcggccgggaggg

SEQ ID NO: 690894 - RNA, 21 nt, Human
gagguccugggugagcaaaca

SEQ ID NO: 690895 - RNA, 25 nt, Human
ggaaaagcagagaacagccgguacc

SEQ ID NO: 690896 - RNA, 22 nt, Human
ggaccuccagacugucccuccc

SEQ ID NO: 690897 - RNA, 22 nt, Human
ggagggaggagggcgugggagc

SEQ ID NO: 690898 - RNA, 22 nt, Human
ggcaggcuuggccaccagggcu

SEQ ID NO: 690899 - RNA, 21 nt, Human
ggccccuugacacuuuugggg

SEQ ID NO: 690900 - RNA, 19 nt, Human
gggcaccagcagggggugg

SEQ ID NO: 690901 - RNA, 22 nt, Human
gggcaccagcagggggugggca

SEQ ID NO: 690902 - RNA, 22 nt, Human
gggcagagagaguuggugggaa

SEQ ID NO: 690903 - RNA, 22 nt, Human
gggccagagcaggcggugccga

SEQ ID NO: 690904 - RNA, 23 nt, Human
gggcccccuccucccaacaaccc

SEQ ID NO: 690905 - RNA, 24 nt, Human
gggcccccuccucccaacaacccc

SEQ ID NO: 690906 - RNA, 23 nt, Human
gggcccuuggccgggucggguuu

SEQ ID NO: 690907 - RNA, 20 nt, Human
gggccggggccggggccaga

SEQ ID NO: 690908 - RNA, 24 nt, Human
gggcggccgggaggggccccggcc

SEQ ID NO: 690909 - RNA, 21 nt, Human
ggugggaagaggggugaaagg

SEQ ID NO: 690910 - RNA, 22 nt, Human
gucugggaccuccagacugucc

SEQ ID NO: 690911 - RNA, 20 nt, Human
gugggaagaggggugaaagg

SEQ ID NO: 690912 - RNA, 24 nt, Human
uaagagagggccacagacacggcg

SEQ ID NO: 690913 - RNA, 23 nt, Human
uagcggagggaggagggcguggg

SEQ ID NO: 690914 - RNA, 21 nt, Human
ucugaaaacacccagaaugga

SEQ ID NO: 690915 - RNA, 21 nt, Human
ugagcaaacagaguggccggg

SEQ ID NO: 690916 - RNA, 23 nt, Human
ugaggggcccucuggccaaccca

SEQ ID NO: 690917 - RNA, 24 nt, Human
ugcagaggcaaacugcuagggcag

SEQ ID NO: 690918 - RNA, 22 nt, Human
ugcagggcagcgcagcgggcac

SEQ ID NO: 690919 - RNA, 18 nt, Human
ugccaauccagcccugag

SEQ ID NO: 690920 - RNA, 22 nt, Human
uggaaaagcagagaacagcuuc

SEQ ID NO: 690921 - RNA, 19 nt, Human
uggcacagcucagccggaa

SEQ ID NO: 690922 - RNA, 19 nt, Human
ugggaagaacaccaaccag

SEQ ID NO: 690923 - RNA, 19 nt, Human
ugggaagaacaccaaccag

SEQ ID NO: 690924 - RNA, 24 nt, Human
ugggaagaacaccaaccaguaacu

SEQ ID NO: 690925 - RNA, 21 nt, Human
ugggaagaggggugaaagggc

SEQ ID NO: 690926 - RNA, 22 nt, Human
ugggacccucgggcccagccgg

SEQ ID NO: 690927 - RNA, 23 nt, Human
ugggggaacgagccggguagggg

SEQ ID NO: 690928 - RNA, 24 nt, Human
ugggggcagagagaguuccccgag

SEQ ID NO: 690929 - RNA, 26 nt, Human
uggugggaagaggggugaaagggcca

SEQ ID NO: 690930 - RNA, 18 nt, Human
uguggggggcagggccgg

SEQ ID NO: 690931 - RNA, 20 nt, Human
uuccuagggccccuugacac

SEQ ID NO: 690932 - RNA, 21 nt, Human
aaaaaauaauuauugacaccc

SEQ ID NO: 690933 - RNA, 26 nt, Human
aaaaauaccaaaauuagccaggcaug

SEQ ID NO: 690934 - RNA, 18 nt, Human
aaaaggacaaaacauaac

SEQ ID NO: 690935 - RNA, 22 nt, Human
aaaaggacaaaacauaaccaaa

SEQ ID NO: 690936 - RNA, 21 nt, Human
aaaagggcaagauaaagggca

SEQ ID NO: 690937 - RNA, 23 nt, Human
aaaauaccaaaauuagccaggca

SEQ ID NO: 690938 - RNA, 19 nt, Human
aaaauggcaaaaccucauc

SEQ ID NO: 690939 - RNA, 24 nt, Human
aaacaaaacuggauuuuuguaauc

SEQ ID NO: 690940 - RNA, 19 nt, Human
aaagugcugggauuucagg

SEQ ID NO: 690941 - RNA, 24 nt, Human
aaagugcugggauuucaggcguga

SEQ ID NO: 690942 - RNA, 19 nt, Human
aacacagugagacuucauc

SEQ ID NO: 690943 - RNA, 20 nt, Human
aacacagugagacuucaucu

SEQ ID NO: 690944 - RNA, 21 nt, Human
aacacagugagacuucaucuc

SEQ ID NO: 690945 - RNA, 20 nt, Human
aacacggcaauacccugucu

SEQ ID NO: 690946 - RNA, 27 nt, Human
aacagaguugggcagucccagccagga

SEQ ID NO: 690947 - RNA, 21 nt, Human
aacccuaccucacccacccac

SEQ ID NO: 690948 - RNA, 24 nt, Human
aagaaacaccaauaaaaucuuacc

SEQ ID NO: 690949 - RNA, 19 nt, Human
aagaaacaugaaaaucacc

SEQ ID NO: 690950 - RNA, 23 nt, Human
aagaaacaugaaaaucaccaaac

SEQ ID NO: 690951 - RNA, 19 nt, Human
aagugcugggauuucaggc

SEQ ID NO: 690952 - RNA, 24 nt, Human
aaucgcuugaacccaggaggcaga

SEQ ID NO: 690953 - RNA, 18 nt, Human
aauuagccaggcauggug

SEQ ID NO: 690954 - RNA, 24 nt, Human
acagagcaagaaucugucucaaaa

SEQ ID NO: 690955 - RNA, 25 nt, Human
acagagcaagacccccaucucaaaa

SEQ ID NO: 690956 - RNA, 23 nt, Human
acagagcaagaugcugucucaaa

SEQ ID NO: 690957 - RNA, 20 nt, Human
accagggccuccaaaauaac

SEQ ID NO: 690958 - RNA, 24 nt, Human
accauguuggccaggauggucucg

SEQ ID NO: 690959 - RNA, 21 nt, Human
acccuaccucacccacccacu

SEQ ID NO: 690960 - RNA, 18 nt, Human
accucaucucuacuaaaa

SEQ ID NO: 690961 - RNA, 24 nt, Human
accucaugauccgcccaccuuggc

SEQ ID NO: 690962 - RNA, 23 nt, Human
accuguagucccacauacuuggg

SEQ ID NO: 690963 - RNA, 24 nt, Human
acgcuccagccugggagacagagc

SEQ ID NO: 690964 - RNA, 18 nt, Human
acuacgcuccagccuggg

SEQ ID NO: 690965 - RNA, 22 nt, Human
acuacgcuccagccugggagac

SEQ ID NO: 690966 - RNA, 24 nt, Human
acuacgcuccagccugggagacag

SEQ ID NO: 690967 - RNA, 18 nt, Human
acugcacuccagccuggg

SEQ ID NO: 690968 - RNA, 18 nt, Human
acugcacuccagccuggg

SEQ ID NO: 690969 - RNA, 18 nt, Human
acugcacuccagccuggg

SEQ ID NO: 690970 - RNA, 19 nt, Human
acugcacuccagccugggu

SEQ ID NO: 690971 - RNA, 21 nt, Human
acugcacuccagccuggguga

SEQ ID NO: 690972 - RNA, 22 nt, Human
acugcacuccagccugggugac

SEQ ID NO: 690973 - RNA, 24 nt, Human
acugcacuccagccugggugacag

SEQ ID NO: 690974 - RNA, 26 nt, Human
acugcacuccagccugggugacagag

SEQ ID NO: 690975 - RNA, 24 nt, Human
acugcacuccugcgugggcaacag

SEQ ID NO: 690976 - RNA, 24 nt, Human
acuuguauuuuaauguuugaaguu

SEQ ID NO: 690977 - RNA, 21 nt, Human
agaaaaagagaacaggaagaa

SEQ ID NO: 690978 - RNA, 24 nt, Human
agacaaggaagaggugaggacuaa

SEQ ID NO: 690979 - RNA, 20 nt, Human
agacaggcagagaacacuuc

SEQ ID NO: 690980 - RNA, 24 nt, Human
agagguugcagugaucccugauca

SEQ ID NO: 690981 - RNA, 25 nt, Human
agccaaggaguuccaggcugcagug

SEQ ID NO: 690982 - RNA, 20 nt, Human
aggaguuugagaccagucug

SEQ ID NO: 690983 - RNA, 24 nt, Human
aggauugcuugagccaaggaguuc

SEQ ID NO: 690984 - RNA, 24 nt, Human
aggauuguuucagcccaggaguuu

SEQ ID NO: 690985 - RNA, 18 nt, Human
aggcagagguugcaguga

SEQ ID NO: 690986 - RNA, 19 nt, Human
aggcagagguugcagugau

SEQ ID NO: 690987 - RNA, 22 nt, Human
aggcagcaggauugcuugagcc

SEQ ID NO: 690988 - RNA, 24 nt, Human
aggcaugcggcgccacaaccagcu

SEQ ID NO: 690989 - RNA, 21 nt, Human
aggccaaggcgggaggauugu

SEQ ID NO: 690990 - RNA, 24 nt, Human
aggcugggcaacacagugagacuu

SEQ ID NO: 690991 - RNA, 22 nt, Human
aguacagaugggguuucaccau

SEQ ID NO: 690992 - RNA, 21 nt, Human
aguagcugggacuacaggcau

SEQ ID NO: 690993 - RNA, 23 nt, Human
agucagggcugcagugagcugag

SEQ ID NO: 690994 - RNA, 21 nt, Human
auaaagggcagaccugauuca

SEQ ID NO: 690995 - RNA, 24 nt, Human
aucaugcuacugcacuccagccug

SEQ ID NO: 690996 - RNA, 22 nt, Human
aucccagcacuuugggaggcca

SEQ ID NO: 690997 - RNA, 22 nt, Human
augcagucucuucaccaucucu

SEQ ID NO: 690998 - RNA, 25 nt, Human
auggaacauagaaagaaaacaaaac

SEQ ID NO: 690999 - RNA, 18 nt, Human
augggguuucaccauguu

SEQ ID NO: 691000 - RNA, 22 nt, Human
augggguuucaccauguuggcc

SEQ ID NO: 691001 - RNA, 24 nt, Human
augggguuucaccauguuggccag

SEQ ID NO: 691002 - RNA, 21 nt, Human
auuccccugccucagccuccc

SEQ ID NO: 691003 - RNA, 24 nt, Human
auugacacccaggcugggcaacac

SEQ ID NO: 691004 - RNA, 24 nt, Human
auugcauuacuacgcuccagccug

SEQ ID NO: 691005 - RNA, 24 nt, Human
auuuuaguacagaugggguuucac

SEQ ID NO: 691006 - RNA, 21 nt, Human
caaaauaacuucacugaggac

SEQ ID NO: 691007 - RNA, 20 nt, Human
caaaguauaaccuaugcuaa

SEQ ID NO: 691008 - RNA, 24 nt, Human
caaagugcugggauuucaggcgug

SEQ ID NO: 691009 - RNA, 22 nt, Human
caacucaaacccuaccucaccc

SEQ ID NO: 691010 - RNA, 20 nt, Human
caagauaaagggcagaccug

SEQ ID NO: 691011 - RNA, 24 nt, Human
cacauaauaaaggaauaccucuga

SEQ ID NO: 691012 - RNA, 18 nt, Human
caccauguuggccaggau

SEQ ID NO: 691013 - RNA, 22 nt, Human
caccauguuggccaggaugguc

SEQ ID NO: 691014 - RNA, 24 nt, Human
caccauguuggccaggauggucuc

SEQ ID NO: 691015 - RNA, 24 nt, Human
caccugcaaucccagcugcucagg

SEQ ID NO: 691016 - RNA, 22 nt, Human
cacuccagccugggugacagag

SEQ ID NO: 691017 - RNA, 18 nt, Human
cacugaucagaacagagu

SEQ ID NO: 691018 - RNA, 23 nt, Human
cacugcacuccugcgugggcaac

SEQ ID NO: 691019 - RNA, 24 nt, Human
cacugcacuccugcgugggcaaca

SEQ ID NO: 691020 - RNA, 26 nt, Human
cacuucaagaaaggcaacaauuuaaa

SEQ ID NO: 691021 - RNA, 22 nt, Human
cagcacuuugggaggccaaggc

SEQ ID NO: 691022 - RNA, 24 nt, Human
cagcacuuugggaggccaaggcgg

SEQ ID NO: 691023 - RNA, 21 nt, Human
caggcgugagccaccaugccc

SEQ ID NO: 691024 - RNA, 19 nt, Human
caucucuacagaaauaauu

SEQ ID NO: 691025 - RNA, 18 nt, Human
ccaaaauaacuucacuga

SEQ ID NO: 691026 - RNA, 22 nt, Human
ccaaaauggcaaaaccucaucu

SEQ ID NO: 691027 - RNA, 22 nt, Human
ccaaagugcugggauuucaggc

SEQ ID NO: 691028 - RNA, 24 nt, Human
ccaaagugcugggauuucaggcgu

SEQ ID NO: 691029 - RNA, 23 nt, Human
ccaccagggccuccaaaauaacu

SEQ ID NO: 691030 - RNA, 20 nt, Human
ccacugcacuccugcguggg

SEQ ID NO: 691031 - RNA, 20 nt, Human
ccacugcacuccugcguggg

SEQ ID NO: 691032 - RNA, 21 nt, Human
ccacugcacuccugcgugggc

SEQ ID NO: 691033 - RNA, 24 nt, Human
ccacugcacuccugcgugggcaac

SEQ ID NO: 691034 - RNA, 21 nt, Human
ccagccugaccaaaauggcaa

SEQ ID NO: 691035 - RNA, 22 nt, Human
ccaggaggcagagguugcagug

SEQ ID NO: 691036 - RNA, 23 nt, Human
cccgaguagcugggacuacaggc

SEQ ID NO: 691037 - RNA, 24 nt, Human
cccgaguagcugggacuacaggca

SEQ ID NO: 691038 - RNA, 20 nt, Human
cccggguucaagcaauuccc

SEQ ID NO: 691039 - RNA, 23 nt, Human
cccggguucaagcaauuccccug

SEQ ID NO: 691040 - RNA, 24 nt, Human
cccugccucagccucccgaguagc

SEQ ID NO: 691041 - RNA, 27 nt, Human
ccgccucccggguucaagcaauucuuu

SEQ ID NO: 691042 - RNA, 22 nt, Human
ccuauaaucccagcacuuuggg

SEQ ID NO: 691043 - RNA, 22 nt, Human
ccucccggguucaagcaauucc

SEQ ID NO: 691044 - RNA, 24 nt, Human
ccugaucaugcuacugcacuccag

SEQ ID NO: 691045 - RNA, 25 nt, Human
ccugcaaucccagcugcucaggugg

SEQ ID NO: 691046 - RNA, 22 nt, Human
ccugcggucccagcuacucugg

SEQ ID NO: 691047 - RNA, 23 nt, Human
ccugcggucccagcuacucugga

SEQ ID NO: 691048 - RNA, 19 nt, Human
ccugcgugggcaacagagc

SEQ ID NO: 691049 - RNA, 19 nt, Human
ccugggugacagagcaaga

SEQ ID NO: 691050 - RNA, 23 nt, Human
ccugugaccaccagggccggggc

SEQ ID NO: 691051 - RNA, 22 nt, Human
cgccucccggguucaagcaauu

SEQ ID NO: 691052 - RNA, 24 nt, Human
cuacugcacuccagccugggugac

SEQ ID NO: 691053 - RNA, 24 nt, Human
cucagccucccgaguagcugggac

SEQ ID NO: 691054 - RNA, 23 nt, Human
cuccaaaauaacuucacugagga

SEQ ID NO: 691055 - RNA, 22 nt, Human
cuccagccugggagacagagca

SEQ ID NO: 691056 - RNA, 20 nt, Human
cuccugaccucaugauccgc

SEQ ID NO: 691057 - RNA, 22 nt, Human
cugaccaaaauggcaaaaccuc

SEQ ID NO: 691058 - RNA, 23 nt, Human
cugaccaaaauggcaaaaccuca

SEQ ID NO: 691059 - RNA, 21 nt, Human
cugcaaucccagcugcucagg

SEQ ID NO: 691060 - RNA, 21 nt, Human
cugcagugagcuaugauugca

SEQ ID NO: 691061 - RNA, 19 nt, Human
cugcagugagcugagagca

SEQ ID NO: 691062 - RNA, 21 nt, Human
cugcagugagcugagagcaug

SEQ ID NO: 691063 - RNA, 23 nt, Human
cugccucagccucccgaguagcu

SEQ ID NO: 691064 - RNA, 21 nt, Human
cuggccaacacggcaauaccc

SEQ ID NO: 691065 - RNA, 20 nt, Human
cuugagccaaggaguuccag

SEQ ID NO: 691066 - RNA, 23 nt, Human
cuugugccuauaaucccagcacu

SEQ ID NO: 691067 - RNA, 23 nt, Human
gaaacaccaauaaaaucuuaccg

SEQ ID NO: 691068 - RNA, 20 nt, Human
gaaauuuugugacaaagaca

SEQ ID NO: 691069 - RNA, 21 nt, Human
gacccccaucucaaaagaaaa

SEQ ID NO: 691070 - RNA, 25 nt, Human
gaccucaugauccgcccaccuuggc

SEQ ID NO: 691071 - RNA, 18 nt, Human
gagaacaggaagaaaugg

SEQ ID NO: 691072 - RNA, 19 nt, Human
gagaugaaauuaacuauga

SEQ ID NO: 691073 - RNA, 18 nt, Human
gagcaagacccccaucuc

SEQ ID NO: 691074 - RNA, 20 nt, Human
gaguagcugggacuacaggc

SEQ ID NO: 691075 - RNA, 24 nt, Human
gaguagcugggacuacaggcaugc

SEQ ID NO: 691076 - RNA, 18 nt, Human
gauuucaggcgugagcca

SEQ ID NO: 691077 - RNA, 21 nt, Human
gauuucaggcgugagccacca

SEQ ID NO: 691078 - RNA, 22 nt, Human
gauuucaggcgugagccaccau

SEQ ID NO: 691079 - RNA, 20 nt, Human
gcaaaacuccgccucccggg

SEQ ID NO: 691080 - RNA, 24 nt, Human
gcacuccagccugggugacagagc

SEQ ID NO: 691081 - RNA, 20 nt, Human
gcagaccugauucauuuagg

SEQ ID NO: 691082 - RNA, 23 nt, Human
gccaacacggcaauacccugucu

SEQ ID NO: 691083 - RNA, 24 nt, Human
gccacugcacuccugcgugggcaa

SEQ ID NO: 691084 - RNA, 23 nt, Human
gccaggagguucuuuuuccuauu

SEQ ID NO: 691085 - RNA, 21 nt, Human
gccaggcuggcaaaacuccgc

SEQ ID NO: 691086 - RNA, 24 nt, Human
gccuaggcagucagggcugcagug

SEQ ID NO: 691087 - RNA, 19 nt, Human
gccuauaaucccagcacuu

SEQ ID NO: 691088 - RNA, 19 nt, Human
gcgugagccaccaugcccg

SEQ ID NO: 691089 - RNA, 19 nt, Human
gcuacugcacuccagccug

SEQ ID NO: 691090 - RNA, 24 nt, Human
gcuacugcacuccagccuggguga

SEQ ID NO: 691091 - RNA, 18 nt, Human
ggacuacaggcaugcggc

SEQ ID NO: 691092 - RNA, 20 nt, Human
ggacuacaggcaugcggcgg

SEQ ID NO: 691093 - RNA, 23 nt, Human
ggauugcuugagccaaggaguuc

SEQ ID NO: 691094 - RNA, 22 nt, Human
ggauuguuucagcccaggaguu

SEQ ID NO: 691095 - RNA, 24 nt, Human
ggauuucaggcgugagccaccaug

SEQ ID NO: 691096 - RNA, 18 nt, Human
ggcaacacagugagacuu

SEQ ID NO: 691097 - RNA, 19 nt, Human
ggcaugcggcgccacaacc

SEQ ID NO: 691098 - RNA, 21 nt, Human
gggcugcagugagcugagagc

SEQ ID NO: 691099 - RNA, 22 nt, Human
gggguuucaccauguuggccag

SEQ ID NO: 691100 - RNA, 18 nt, Human
ggguuucaccauguuggc

SEQ ID NO: 691101 - RNA, 22 nt, Human
ggguuucaccauguuggccagg

SEQ ID NO: 691102 - RNA, 20 nt, Human
ggucucgaucuccugaccuc

SEQ ID NO: 691103 - RNA, 24 nt, Human
ggugucuugugccuauaaucccag

SEQ ID NO: 691104 - RNA, 24 nt, Human
gguuucaccauguuggccaggaug

SEQ ID NO: 691105 - RNA, 24 nt, Human
guaagaagauugcuggagccuagg

SEQ ID NO: 691106 - RNA, 22 nt, Human
guguauauaaacauuauguaca

SEQ ID NO: 691107 - RNA, 21 nt, Human
guucuuuuuccuauugcaugc

SEQ ID NO: 691108 - RNA, 23 nt, Human
uaaaaauaccaaaauuagccagg

SEQ ID NO: 691109 - RNA, 24 nt, Human
uaaaaauaccaaaauuagccaggc

SEQ ID NO: 691110 - RNA, 18 nt, Human
uaaaagacaaggaagagg

SEQ ID NO: 691111 - RNA, 21 nt, Human
uaaaaggacaaaacauaacca

SEQ ID NO: 691112 - RNA, 19 nt, Human
uaaagggcagaccugauuc

SEQ ID NO: 691113 - RNA, 21 nt, Human
uacccugucuuaucaaaauua

SEQ ID NO: 691114 - RNA, 24 nt, Human
uaccuguagucccacauacuuggg

SEQ ID NO: 691115 - RNA, 21 nt, Human
uacugcacuccagccugggug

SEQ ID NO: 691116 - RNA, 23 nt, Human
uacugcacuccagccugggugac

SEQ ID NO: 691117 - RNA, 24 nt, Human
uacugcacuccagccugggugaca

SEQ ID NO: 691118 - RNA, 25 nt, Human
uacugcacuccagccugggugacag

SEQ ID NO: 691119 - RNA, 25 nt, Human
uagaaagaaaacaaaacuggauuuu

SEQ ID NO: 691120 - RNA, 24 nt, Human
uaguacagaugggguuucaccaug

SEQ ID NO: 691121 - RNA, 23 nt, Human
uauaaaaucuggacacacacagg

SEQ ID NO: 691122 - RNA, 22 nt, Human
ucaaaauuaaaaaaaaaaaaaa

SEQ ID NO: 691123 - RNA, 24 nt, Human
ucaaaauuaaaaaaaaaaaaaauu

SEQ ID NO: 691124 - RNA, 22 nt, Human
ucacauaccuaaaauguguagu

SEQ ID NO: 691125 - RNA, 24 nt, Human
ucaccauguuggccaggauggucu

SEQ ID NO: 691126 - RNA, 18 nt, Human
ucaccugggcacaugccc

SEQ ID NO: 691127 - RNA, 21 nt, Human
ucacuggaguaauuuaccauu

SEQ ID NO: 691128 - RNA, 18 nt, Human
ucagcccaggaguuugag

SEQ ID NO: 691129 - RNA, 23 nt, Human
ucagcccaggaguuugagaccag

SEQ ID NO: 691130 - RNA, 23 nt, Human
ucagccucccgaguagcugggac

SEQ ID NO: 691131 - RNA, 23 nt, Human
ucaugcuacugcacuccagccug

SEQ ID NO: 691132 - RNA, 24 nt, Human
uccagccugggugacagagcaaga

SEQ ID NO: 691133 - RNA, 24 nt, Human
ucccaaagugcugggauuucaggc

SEQ ID NO: 691134 - RNA, 20 nt, Human
ucccacacuacgcuuucuuc

SEQ ID NO: 691135 - RNA, 24 nt, Human
uccccugccucagccucccgagua

SEQ ID NO: 691136 - RNA, 24 nt, Human
ucccgaguagcugggacuacaggc

SEQ ID NO: 691137 - RNA, 19 nt, Human
ucccggguucaagcaauuc

SEQ ID NO: 691138 - RNA, 24 nt, Human
ucccggguucaagcaauuccccug

SEQ ID NO: 691139 - RNA, 22 nt, Human
ucuaagaaacaugaaaaucacc

SEQ ID NO: 691140 - RNA, 21 nt, Human
ucucuacuaaaaauaccaaaa

SEQ ID NO: 691141 - RNA, 24 nt, Human
ucugucucaaaaaaccuuuuuaaa

SEQ ID NO: 691142 - RNA, 22 nt, Human
ucuugccaacucaaacccuacc

SEQ ID NO: 691143 - RNA, 24 nt, Human
ucuugccaacucaaacccuaccuc

SEQ ID NO: 691144 - RNA, 18 nt, Human
ucuugcucuguugccagg

SEQ ID NO: 691145 - RNA, 21 nt, Human
ucuugcucuguugccaggcug

SEQ ID NO: 691146 - RNA, 22 nt, Human
ucuugcucuguugccaggcugg

SEQ ID NO: 691147 - RNA, 20 nt, Human
ugacaaagacaggcagagaa

SEQ ID NO: 691148 - RNA, 24 nt, Human
ugacacccaggcugggcaacacaa

SEQ ID NO: 691149 - RNA, 22 nt, Human
ugacuucaaagugcagaucuga

SEQ ID NO: 691150 - RNA, 23 nt, Human
ugagaaaaaugaaauuuugugac

SEQ ID NO: 691151 - RNA, 19 nt, Human
ugagaccagucuggccaac

SEQ ID NO: 691152 - RNA, 23 nt, Human
ugagaccagucuggccaacacgg

SEQ ID NO: 691153 - RNA, 22 nt, Human
ugaucagaacagaguugggcag

SEQ ID NO: 691154 - RNA, 24 nt, Human
ugauccgcccaccuuggccuccca

SEQ ID NO: 691155 - RNA, 20 nt, Human
ugauguggaagcuagaaaaa

SEQ ID NO: 691156 - RNA, 20 nt, Human
ugcaccugcaaucccagcug

SEQ ID NO: 691157 - RNA, 21 nt, Human
ugcauuacuacgcuccagccu

SEQ ID NO: 691158 - RNA, 24 nt, Human
ugccucagccucccgaguagcugg

SEQ ID NO: 691159 - RNA, 19 nt, Human
ugccugcggucccagcuac

SEQ ID NO: 691160 - RNA, 24 nt, Human
ugccugcggucccagcuacucugg

SEQ ID NO: 691161 - RNA, 22 nt, Human
uggcaaaacuccgccucccggg

SEQ ID NO: 691162 - RNA, 18 nt, Human
uggcaagugccugcgguc

SEQ ID NO: 691163 - RNA, 22 nt, Human
uggcaugcaccugcaaucccag

SEQ ID NO: 691164 - RNA, 24 nt, Human
uggccaggauggucucgaucuccu

SEQ ID NO: 691165 - RNA, 23 nt, Human
ugggacaagccauacuuucaacc

SEQ ID NO: 691166 - RNA, 24 nt, Human
ugggacuacaggcaugcggcgcca

SEQ ID NO: 691167 - RNA, 21 nt, Human
ugggagacagagcaagaugcu

SEQ ID NO: 691168 - RNA, 19 nt, Human
ugggaggccaaggcagcag

SEQ ID NO: 691169 - RNA, 19 nt, Human
ugggaggccaaggcagcag

SEQ ID NO: 691170 - RNA, 21 nt, Human
ugggaggccaaggcagcagga

SEQ ID NO: 691171 - RNA, 24 nt, Human
ugggaggccaaggcagcaggauug

SEQ ID NO: 691172 - RNA, 22 nt, Human
ugggaggccaaggcgggaggau

SEQ ID NO: 691173 - RNA, 18 nt, Human
ugggauuucaggcgugag

SEQ ID NO: 691174 - RNA, 24 nt, Human
ugggauuucaggcgugagccacca

SEQ ID NO: 691175 - RNA, 25 nt, Human
ugggauuucaggcgugagccaccau

SEQ ID NO: 691176 - RNA, 24 nt, Human
ugggguuucaccauguuggccagg

SEQ ID NO: 691177 - RNA, 24 nt, Human
ugggugacagagcaagaaucuguc

SEQ ID NO: 691178 - RNA, 24 nt, Human
ugguggcgaguaccuguaguccca

SEQ ID NO: 691179 - RNA, 24 nt, Human
uggugucuugugccuauaauccca

SEQ ID NO: 691180 - RNA, 22 nt, Human
ugucuugugccuauaaucccag

SEQ ID NO: 691181 - RNA, 24 nt, Human
ugucuugugccuauaaucccagca

SEQ ID NO: 691182 - RNA, 21 nt, Human
ugucuugugccuccggugucc

SEQ ID NO: 691183 - RNA, 20 nt, Human
ugugccuauaaucccagcac

SEQ ID NO: 691184 - RNA, 24 nt, Human
ugugccuauaaucccagcacuuug

SEQ ID NO: 691185 - RNA, 25 nt, Human
uuaaaaaauaauuauugacacccag

SEQ ID NO: 691186 - RNA, 19 nt, Human
uuacuacgcuccagccugg

SEQ ID NO: 691187 - RNA, 24 nt, Human
uuacuacgcuccagccugggagac

SEQ ID NO: 691188 - RNA, 18 nt, Human
uuaguacagaugggguuu

SEQ ID NO: 691189 - RNA, 22 nt, Human
uuaguacagaugggguuucacc

SEQ ID NO: 691190 - RNA, 24 nt, Human
uuaguacagaugggguuucaccau

SEQ ID NO: 691191 - RNA, 24 nt, Human
uuaguggggcgugguggcaagugc

SEQ ID NO: 691192 - RNA, 25 nt, Human
uuaguggggcgugguggcaagugcc

SEQ ID NO: 691193 - RNA, 19 nt, Human
uuauugacacccaggcugg

SEQ ID NO: 691194 - RNA, 23 nt, Human
uucaaccauuggugaccacugcc

SEQ ID NO: 691195 - RNA, 21 nt, Human
uucaagcaauuccccugccuc

SEQ ID NO: 691196 - RNA, 24 nt, Human
uucaagcaauuccccugccucagc

SEQ ID NO: 691197 - RNA, 23 nt, Human
uucagcccaggaguuugagacca

SEQ ID NO: 691198 - RNA, 19 nt, Human
uucaggcgugagccaccau

SEQ ID NO: 691199 - RNA, 19 nt, Human
uuccccugccucagccucc

SEQ ID NO: 691200 - RNA, 18 nt, Human
uugcuggagccuaggcag

SEQ ID NO: 691201 - RNA, 24 nt, Human
uugcuugagccaaggaguuccagg

SEQ ID NO: 691202 - RNA, 18 nt, Human
uuggccucccaaagugcu

SEQ ID NO: 691203 - RNA, 19 nt, Human
uugggcagucccagccagg

SEQ ID NO: 691204 - RNA, 21 nt, Human
uuguuucagcccaggaguuug

SEQ ID NO: 691205 - RNA, 20 nt, Human
uuuaaaaaauuuuuaguggg

SEQ ID NO: 691206 - RNA, 25 nt, Human
uuuaaaaggacaaaacauaaccaaa

SEQ ID NO: 691207 - RNA, 23 nt, Human
uuucaaccauuggugaccacugc

SEQ ID NO: 691208 - RNA, 19 nt, Human
uuucaccauguuggccagg

SEQ ID NO: 691209 - RNA, 20 nt, Human
uuucaccauguuggccagga

SEQ ID NO: 691210 - RNA, 23 nt, Human
uuucagcccaggaguuugagacc

SEQ ID NO: 691211 - RNA, 20 nt, Human
uuuguauuuuaguacagaug

SEQ ID NO: 691212 - RNA, 18 nt, Human
uuuuuuuuuuuuuuuuug

SEQ ID NO: 691213 - RNA, 26 nt, Human
aaacugaagguggagagaagggaccc

SEQ ID NO: 691214 - RNA, 19 nt, Human
aaacuggaacaguccagug

SEQ ID NO: 691215 - RNA, 21 nt, Human
aaagguuggaaguugcacacu

SEQ ID NO: 691216 - RNA, 25 nt, Human
aagcuuugcaagggugugguuuugg

SEQ ID NO: 691217 - RNA, 18 nt, Human
aaggagcuuguggggcag

SEQ ID NO: 691218 - RNA, 19 nt, Human
aaggagcuuguggggcagg

SEQ ID NO: 691219 - RNA, 20 nt, Human
aaggagcuuguggggcaggg

SEQ ID NO: 691220 - RNA, 21 nt, Human
aauaaagauuaaaaauuuacu

SEQ ID NO: 691221 - RNA, 20 nt, Human
acaauaaaggaggaaguacc

SEQ ID NO: 691222 - RNA, 22 nt, Human
agaggcagcagaagguuuggag

SEQ ID NO: 691223 - RNA, 20 nt, Human
agcccagcacugccacacuc

SEQ ID NO: 691224 - RNA, 20 nt, Human
agcugccuggagaucaucug

SEQ ID NO: 691225 - RNA, 18 nt, Human
aggcagcagaagguuugg

SEQ ID NO: 691226 - RNA, 25 nt, Human
aggcaggaaagagaucugagcugcc

SEQ ID NO: 691227 - RNA, 23 nt, Human
agguaggaaauucaggaaaagga

SEQ ID NO: 691228 - RNA, 24 nt, Human
cagcaaaaucauacgccaucuacc

SEQ ID NO: 691229 - RNA, 22 nt, Human
cagcccagcacugccacacucc

SEQ ID NO: 691230 - RNA, 22 nt, Human
cagguaaugaacuucagcugca

SEQ ID NO: 691231 - RNA, 21 nt, Human
ccggccagcccagcacugcca

SEQ ID NO: 691232 - RNA, 21 nt, Human
ccggccgcgcgcgggccgcag

SEQ ID NO: 691233 - RNA, 21 nt, Human
cgcuaaacugaagguggagag

SEQ ID NO: 691234 - RNA, 18 nt, Human
cgggccgcagcccagccc

SEQ ID NO: 691235 - RNA, 18 nt, Human
gaaaaggagcuugugggg

SEQ ID NO: 691236 - RNA, 19 nt, Human
gagaucaucuggggugcgg

SEQ ID NO: 691237 - RNA, 18 nt, Human
gaggaugagguccaaguu

SEQ ID NO: 691238 - RNA, 18 nt, Human
gaguacaaagcuuugcaa

SEQ ID NO: 691239 - RNA, 20 nt, Human
gaguaugugcaggcccgggc

SEQ ID NO: 691240 - RNA, 19 nt, Human
gcagcccagcccgccggcc

SEQ ID NO: 691241 - RNA, 18 nt, Human
gcaggaagggaaggaacg

SEQ ID NO: 691242 - RNA, 19 nt, Human
gcaggcccgggcuugggca

SEQ ID NO: 691243 - RNA, 20 nt, Human
gcaggcccgggcuugggcag

SEQ ID NO: 691244 - RNA, 22 nt, Human
gggaacagugcagggcaaaggc

SEQ ID NO: 691245 - RNA, 20 nt, Human
gggcacucugacaucuuuaa

SEQ ID NO: 691246 - RNA, 21 nt, Human
gggcaggaagggaaggaacgg

SEQ ID NO: 691247 - RNA, 24 nt, Human
ggucaacagaguugaaaggagaaa

SEQ ID NO: 691248 - RNA, 18 nt, Human
guaggaaauucaggaaaa

SEQ ID NO: 691249 - RNA, 21 nt, Human
uaacaagucuuguaaaggcuu

SEQ ID NO: 691250 - RNA, 21 nt, Human
uacaaagcuuugcaagggugu

SEQ ID NO: 691251 - RNA, 18 nt, Human
uacagauuggcuggggag

SEQ ID NO: 691252 - RNA, 19 nt, Human
uaccggggaacagugcagg

SEQ ID NO: 691253 - RNA, 21 nt, Human
uaccgugaugacugccaacuc

SEQ ID NO: 691254 - RNA, 21 nt, Human
uaccuuaaaaguuaaguccac

SEQ ID NO: 691255 - RNA, 27 nt, Human
ucaaaaaccaauucaucagaucgcugc

SEQ ID NO: 691256 - RNA, 24 nt, Human
ucuagaggaagaccagacagaggg

SEQ ID NO: 691257 - RNA, 22 nt, Human
ugaaaggagaaaauaauugagg

SEQ ID NO: 691258 - RNA, 23 nt, Human
ugaaaggggcaggaagacuggca

SEQ ID NO: 691259 - RNA, 21 nt, Human
ugcaagggugugguuuuggaa

SEQ ID NO: 691260 - RNA, 21 nt, Human
ugcaggcccgggcuugggcag

SEQ ID NO: 691261 - RNA, 20 nt, Human
ugccuggagaucaucugggg

SEQ ID NO: 691262 - RNA, 22 nt, Human
uggcagacccuuucugggauuc

SEQ ID NO: 691263 - RNA, 20 nt, Human
uguaccaacuauacccuaau

SEQ ID NO: 691264 - RNA, 22 nt, Human
ugugaaaggggcaggaagacug

SEQ ID NO: 691265 - RNA, 23 nt, Human
ugugcaggcccgggcuugggcag

SEQ ID NO: 691266 - RNA, 22 nt, Human
uuacauuccaguuaacuaccuu

SEQ ID NO: 691267 - RNA, 23 nt, Human
uuuagguaggaaauucaggaaaa

SEQ ID NO: 691268 - RNA, 24 nt, Human
aaauggaaucuagaagcuaaauuu

SEQ ID NO: 691269 - RNA, 18 nt, Human
accaaacucuuuguaacu

SEQ ID NO: 691270 - RNA, 21 nt, Human
accaaauggaaucuagaagcu

SEQ ID NO: 691271 - RNA, 23 nt, Human
acccugaugcagacgaagagaaa

SEQ ID NO: 691272 - RNA, 24 nt, Human
acuaaaacucuucaaacccaguag

SEQ ID NO: 691273 - RNA, 20 nt, Human
acuacuguuuaccgaguacu

SEQ ID NO: 691274 - RNA, 23 nt, Human
acuauucuaauacuaauacacca

SEQ ID NO: 691275 - RNA, 18 nt, Human
agaccaaacucuuuguaa

SEQ ID NO: 691276 - RNA, 23 nt, Human
agauguagccaucguuccuauca

SEQ ID NO: 691277 - RNA, 22 nt, Human
aggcacaagaugguggacaggg

SEQ ID NO: 691278 - RNA, 24 nt, Human
auaaaagacagugcuaaaccuaca

SEQ ID NO: 691279 - RNA, 20 nt, Human
caaaagaucuacucugugcc

SEQ ID NO: 691280 - RNA, 20 nt, Human
caacucuuacaccaauacau

SEQ ID NO: 691281 - RNA, 20 nt, Human
cacaaaugacaagcccuagc

SEQ ID NO: 691282 - RNA, 24 nt, Human
cauaagauuauuccaugauuaaaa

SEQ ID NO: 691283 - RNA, 25 nt, Human
cauacacaugaccagaaauuauaua

SEQ ID NO: 691284 - RNA, 24 nt, Human
cauccagauguggcuaacauaagg

SEQ ID NO: 691285 - RNA, 25 nt, Human
ccuaucauaggcaagagcaucuccg

SEQ ID NO: 691286 - RNA, 18 nt, Human
cggaagggaaauaggaag

SEQ ID NO: 691287 - RNA, 22 nt, Human
cuaaauacacaaaugacaagcc

SEQ ID NO: 691288 - RNA, 24 nt, Human
cuccguagugaugaaaagcucuau

SEQ ID NO: 691289 - RNA, 23 nt, Human
cugugccagagaaaacacaaauc

SEQ ID NO: 691290 - RNA, 19 nt, Human
gaugcaaaauguuugcagu

SEQ ID NO: 691291 - RNA, 24 nt, Human
gaugcaaaauguuugcaguuugac

SEQ ID NO: 691292 - RNA, 22 nt, Human
gcaaaaagaaguuuuuaacaac

SEQ ID NO: 691293 - RNA, 23 nt, Human
gcccaaaucuaauaaccuuaagc

SEQ ID NO: 691294 - RNA, 19 nt, Human
ggaaauaggaaggaagagg

SEQ ID NO: 691295 - RNA, 18 nt, Human
guuuaccgaguacuuuuc

SEQ ID NO: 691296 - RNA, 25 nt, Human
uaaaagacagugcuaaaccuacaaa

SEQ ID NO: 691297 - RNA, 25 nt, Human
uaaguuucauaaauauaugcaauuc

SEQ ID NO: 691298 - RNA, 21 nt, Human
uaccgaguacuuuuccacccu

SEQ ID NO: 691299 - RNA, 20 nt, Human
uacucugugccagagaaaac

SEQ ID NO: 691300 - RNA, 24 nt, Human
uauaagauuuuagcaauacuucca

SEQ ID NO: 691301 - RNA, 22 nt, Human
uauaugcaauucuaaucauaaa

SEQ ID NO: 691302 - RNA, 23 nt, Human
uaucuuaacacuaaauacacaaa

SEQ ID NO: 691303 - RNA, 23 nt, Human
uaucuuauuuugguuaaguuuca

SEQ ID NO: 691304 - RNA, 25 nt, Human
ucaaagaaaaaccuucauuuuuagc

SEQ ID NO: 691305 - RNA, 23 nt, Human
uccacuuucauauauauuuccca

SEQ ID NO: 691306 - RNA, 23 nt, Human
ucccaaaagaucuacucugugcc

SEQ ID NO: 691307 - RNA, 20 nt, Human
uccguagugaugaaaagcuc

SEQ ID NO: 691308 - RNA, 22 nt, Human
ugacaagcccuagcugagacag

SEQ ID NO: 691309 - RNA, 23 nt, Human
ugacaccaauuuuuuuccuuagc

SEQ ID NO: 691310 - RNA, 23 nt, Human
ugagcaagauaauaaguauacau

SEQ ID NO: 691311 - RNA, 23 nt, Human
ugcuaaaccuacaaauucaauaa

SEQ ID NO: 691312 - RNA, 27 nt, Human
ugcuaaaccuacaaauucaauaaaaca

SEQ ID NO: 691313 - RNA, 19 nt, Human
uggacaggguacauaaagc

SEQ ID NO: 691314 - RNA, 23 nt, Human
ugguggacaggguacauaaagcu

SEQ ID NO: 691315 - RNA, 20 nt, Human
ugguuacuacuguuuaccga

SEQ ID NO: 691316 - RNA, 28 nt, Human
uuagcaauacuuccaauauugauuuccu

SEQ ID NO: 691317 - RNA, 21 nt, Human
uuccuaucauaggcaagagcu

SEQ ID NO: 691318 - RNA, 22 nt, Human
uugcagaaguugacccacuggg

SEQ ID NO: 691319 - RNA, 22 nt, Human
uuuacagaaaauucuagaacaa

SEQ ID NO: 691320 - RNA, 19 nt, Human
uuuaccgaguacuuuucca

SEQ ID NO: 691321 - RNA, 22 nt, Human
uuugcucagcuucagauguagc

SEQ ID NO: 691322 - RNA, 24 nt, Human
uuuuaacauacacaugaccagaaa

SEQ ID NO: 691323 - RNA, 22 nt, Human
aaaguauaaaguguuuuggaaa

SEQ ID NO: 691324 - RNA, 21 nt, Human
acucacacacaggcucugcag

SEQ ID NO: 691325 - RNA, 25 nt, Human
agagggggaccaggguuggaggcac

SEQ ID NO: 691326 - RNA, 21 nt, Human
agcaggaggcaggaacgugga

SEQ ID NO: 691327 - RNA, 21 nt, Human
agccucgaaggaggcuguggg

SEQ ID NO: 691328 - RNA, 22 nt, Human
agccuggagggucugcagcugg

SEQ ID NO: 691329 - RNA, 22 nt, Human
aggaaaaaaaucuauauaaaaa

SEQ ID NO: 691330 - RNA, 26 nt, Human
aggaauugcuuuuuuuuuuuuuuuuu

SEQ ID NO: 691331 - RNA, 19 nt, Human
aggcaggaacguggacgcg

SEQ ID NO: 691332 - RNA, 22 nt, Human
agggaaggagggcggcuggucc

SEQ ID NO: 691333 - RNA, 19 nt, Human
agggggacaaaauggaccc

SEQ ID NO: 691334 - RNA, 21 nt, Human
agggggaccaggguuggaggc

SEQ ID NO: 691335 - RNA, 18 nt, Human
agguagggcaggaagagg

SEQ ID NO: 691336 - RNA, 20 nt, Human
aguuaagagguucagggagg

SEQ ID NO: 691337 - RNA, 19 nt, Human
auaugcagugugugugugu

SEQ ID NO: 691338 - RNA, 26 nt, Human
auaugcagugugugugugugugugug

SEQ ID NO: 691339 - RNA, 21 nt, Human
auggaccccguugagaaccgc

SEQ ID NO: 691340 - RNA, 18 nt, Human
caaccagaaguauuccca

SEQ ID NO: 691341 - RNA, 20 nt, Human
cacacaggcucugcagucag

SEQ ID NO: 691342 - RNA, 18 nt, Human
cacagccaaaugucccca

SEQ ID NO: 691343 - RNA, 20 nt, Human
cacguguggcccacagaggg

SEQ ID NO: 691344 - RNA, 21 nt, Human
cagacacagccaaaugucccc

SEQ ID NO: 691345 - RNA, 20 nt, Human
cagaccucugggccagggcc

SEQ ID NO: 691346 - RNA, 20 nt, Human
cagcucagaagcccaagcag

SEQ ID NO: 691347 - RNA, 23 nt, Human
ccaagggggacaaaauggacccc

SEQ ID NO: 691348 - RNA, 20 nt, Human
ccagggcggcgggagcagga

SEQ ID NO: 691349 - RNA, 21 nt, Human
cccacagaggguggggagaaa

SEQ ID NO: 691350 - RNA, 25 nt, Human
ccccccacuuccccggggcaagggu

SEQ ID NO: 691351 - RNA, 19 nt, Human
ccccgccgccgccgccgcc

SEQ ID NO: 691352 - RNA, 21 nt, Human
ccccgccgccgccgccgccgc

SEQ ID NO: 691353 - RNA, 25 nt, Human
cccgccgccgccgccgccgccgccc

SEQ ID NO: 691354 - RNA, 18 nt, Human
cccucucggccgcccgcc

SEQ ID NO: 691355 - RNA, 25 nt, Human
ccgccgccgccccucucggccgccc

SEQ ID NO: 691356 - RNA, 19 nt, Human
ccgccgccgccgccgcccc

SEQ ID NO: 691357 - RNA, 24 nt, Human
ccgccgccgccgccgccccucucg

SEQ ID NO: 691358 - RNA, 18 nt, Human
ccgccgccgccgccgccg

SEQ ID NO: 691359 - RNA, 18 nt, Human
ccgccgccgccgccgccg

SEQ ID NO: 691360 - RNA, 24 nt, Human
ccgccgccgccgccgccgccgccc

SEQ ID NO: 691361 - RNA, 22 nt, Human
ccgccgccgccgccgccgccgg

SEQ ID NO: 691362 - RNA, 19 nt, Human
ccuccagccuggagggucu

SEQ ID NO: 691363 - RNA, 25 nt, Human
ccucugggccagggccaccagcucu

SEQ ID NO: 691364 - RNA, 18 nt, Human
ccuggagggucugcagcu

SEQ ID NO: 691365 - RNA, 20 nt, Human
cgccccagggcggcgggagc

SEQ ID NO: 691366 - RNA, 18 nt, Human
cggccgcccgccgccgcg

SEQ ID NO: 691367 - RNA, 25 nt, Human
cggcgccccagggcggcgggagcag

SEQ ID NO: 691368 - RNA, 28 nt, Human
cggggcaaggguccaaguggcgaacacg

SEQ ID NO: 691369 - RNA, 21 nt, Human
cucucgggccgggcuccgcgg

SEQ ID NO: 691370 - RNA, 25 nt, Human
cugcagaccuccuuguguggggccu

SEQ ID NO: 691371 - RNA, 26 nt, Human
cuggagacagagggggaccaggguug

SEQ ID NO: 691372 - RNA, 23 nt, Human
cuggaggcuccccuguccugcag

SEQ ID NO: 691373 - RNA, 23 nt, Human
cugggccuccgccagaccucugg

SEQ ID NO: 691374 - RNA, 30 nt, Human
cugugugucugugugugugugugugugugg

SEQ ID NO: 691375 - RNA, 19 nt, Human
cuucacauauaaaauccug

SEQ ID NO: 691376 - RNA, 21 nt, Human
cuuggcccagugggccucggc

SEQ ID NO: 691377 - RNA, 22 nt, Human
cuuuuuuuuuuuuuuuuuaaag

SEQ ID NO: 691378 - RNA, 19 nt, Human
gacacagccaaaugucccc

SEQ ID NO: 691379 - RNA, 19 nt, Human
gaggcuccccuguccugca

SEQ ID NO: 691380 - RNA, 18 nt, Human
gcacagccucgaaggagg

SEQ ID NO: 691381 - RNA, 25 nt, Human
gcacagccucgaaggaggcuguggg

SEQ ID NO: 691382 - RNA, 23 nt, Human
gccagaccucugggccagggcca

SEQ ID NO: 691383 - RNA, 20 nt, Human
gccccccacuuccccggggc

SEQ ID NO: 691384 - RNA, 18 nt, Human
gccgccgccgccccucuc

SEQ ID NO: 691385 - RNA, 20 nt, Human
gccuggagggucugcagcug

SEQ ID NO: 691386 - RNA, 23 nt, Human
gcgccccagggcggcgggagcag

SEQ ID NO: 691387 - RNA, 18 nt, Human
gcuggagacagaggggga

SEQ ID NO: 691388 - RNA, 24 nt, Human
ggaauugcuuuuuuuuuuuuuuuu

SEQ ID NO: 691389 - RNA, 21 nt, Human
ggagacagagggggaccaggg

SEQ ID NO: 691390 - RNA, 21 nt, Human
ggagggaaggagggcggcugg

SEQ ID NO: 691391 - RNA, 22 nt, Human
ggccacuagccccccacuuccc

SEQ ID NO: 691392 - RNA, 23 nt, Human
ggcuguggggccauggaggccag

SEQ ID NO: 691393 - RNA, 21 nt, Human
gggcaggaaguguuaguagga

SEQ ID NO: 691394 - RNA, 18 nt, Human
ggggccauggaggccagc

SEQ ID NO: 691395 - RNA, 18 nt, Human
guccaagugcagaguguc

SEQ ID NO: 691396 - RNA, 22 nt, Human
guccugcagaccuccuugugug

SEQ ID NO: 691397 - RNA, 18 nt, Human
gucugugugugugugugu

SEQ ID NO: 691398 - RNA, 26 nt, Human
guguguguauccguguggcgucagcg

SEQ ID NO: 691399 - RNA, 21 nt, Human
guguguguguguguauccgug

SEQ ID NO: 691400 - RNA, 22 nt, Human
guguguguguguguguguguaa

SEQ ID NO: 691401 - RNA, 21 nt, Human
gugugugugugugugugugug

SEQ ID NO: 691402 - RNA, 21 nt, Human
gugugugugugugugugugug

SEQ ID NO: 691403 - RNA, 20 nt, Human
uacaugugugcacgugugug

SEQ ID NO: 691404 - RNA, 23 nt, Human
uagcucccucuguccugagcccc

SEQ ID NO: 691405 - RNA, 21 nt, Human
uauauauguguacacacacac

SEQ ID NO: 691406 - RNA, 23 nt, Human
uaugugucugugugucugugugu

SEQ ID NO: 691407 - RNA, 20 nt, Human
uccccgacgcugccccggcc

SEQ ID NO: 691408 - RNA, 21 nt, Human
uccccgacgcugccccggccc

SEQ ID NO: 691409 - RNA, 21 nt, Human
ucccuguguucagggagugac

SEQ ID NO: 691410 - RNA, 20 nt, Human
uccgccagaccucugggcca

SEQ ID NO: 691411 - RNA, 22 nt, Human
uccuccagccuggagggucugc

SEQ ID NO: 691412 - RNA, 24 nt, Human
ucgggccgggcuccgcggcgcggg

SEQ ID NO: 691413 - RNA, 26 nt, Human
ucugcacccagcacagccucgaagga

SEQ ID NO: 691414 - RNA, 21 nt, Human
ucuggcgguucugcacccagc

SEQ ID NO: 691415 - RNA, 18 nt, Human
ucugugugucugugugug

SEQ ID NO: 691416 - RNA, 24 nt, Human
ucugugugugugugugugugugug

SEQ ID NO: 691417 - RNA, 23 nt, Human
ugcacguguggcccacagagggu

SEQ ID NO: 691418 - RNA, 22 nt, Human
ugccccggccccuuccauccgc

SEQ ID NO: 691419 - RNA, 18 nt, Human
ugccugggccuccgccag

SEQ ID NO: 691420 - RNA, 25 nt, Human
ugccugggccuccgccagaccucug

SEQ ID NO: 691421 - RNA, 21 nt, Human
uggaggcuccccuguccugca

SEQ ID NO: 691422 - RNA, 21 nt, Human
uggcccagugggccucggcag

SEQ ID NO: 691423 - RNA, 24 nt, Human
ugguacggguccaaauggggcagg

SEQ ID NO: 691424 - RNA, 18 nt, Human
uguacuaagcauuguuuu

SEQ ID NO: 691425 - RNA, 24 nt, Human
uguacuaagcauuguuuuuauugg

SEQ ID NO: 691426 - RNA, 18 nt, Human
uguccugcagaccuccuu

SEQ ID NO: 691427 - RNA, 28 nt, Human
ugugacaaccagaaguauucccagacac

SEQ ID NO: 691428 - RNA, 19 nt, Human
ugugcacgugugugcguau

SEQ ID NO: 691429 - RNA, 19 nt, Human
ugugcacgugugugcguau

SEQ ID NO: 691430 - RNA, 24 nt, Human
uguguacaugugugcacgugugug

SEQ ID NO: 691431 - RNA, 26 nt, Human
uguguauccguguguacaugugugca

SEQ ID NO: 691432 - RNA, 20 nt, Human
ugugugcacgugugugcgua

SEQ ID NO: 691433 - RNA, 18 nt, Human
uguguguauccgugugua

SEQ ID NO: 691434 - RNA, 20 nt, Human
ugugugucugugugugugug

SEQ ID NO: 691435 - RNA, 21 nt, Human
ugugugucugugugugugugu

SEQ ID NO: 691436 - RNA, 21 nt, Human
ugugugucugugugugugugu

SEQ ID NO: 691437 - RNA, 21 nt, Human
ugugugucugugugugugugu

SEQ ID NO: 691438 - RNA, 23 nt, Human
ugugugucugugugugugugugu

SEQ ID NO: 691439 - RNA, 20 nt, Human
uguguguguauccgugugua

SEQ ID NO: 691440 - RNA, 21 nt, Human
uguguguguguauccgugugu

SEQ ID NO: 691441 - RNA, 23 nt, Human
uguguguguguguauccgugugu

SEQ ID NO: 691442 - RNA, 20 nt, Human
uguguguguguguggugggu

SEQ ID NO: 691443 - RNA, 22 nt, Human
uguguguguguguguauccgug

SEQ ID NO: 691444 - RNA, 26 nt, Human
uguguguguguguguauccgugugua

SEQ ID NO: 691445 - RNA, 18 nt, Human
ugugugugugugugugug

SEQ ID NO: 691446 - RNA, 18 nt, Human
ugugugugugugugugug

SEQ ID NO: 691447 - RNA, 18 nt, Human
ugugugugugugugugug

SEQ ID NO: 691448 - RNA, 18 nt, Human
ugugugugugugugugug

SEQ ID NO: 691449 - RNA, 18 nt, Human
ugugugugugugugugug

SEQ ID NO: 691450 - RNA, 18 nt, Human
ugugugugugugugugug

SEQ ID NO: 691451 - RNA, 18 nt, Human
ugugugugugugugugug

SEQ ID NO: 691452 - RNA, 18 nt, Human
ugugugugugugugugug

SEQ ID NO: 691453 - RNA, 18 nt, Human
ugugugugugugugugug

SEQ ID NO: 691454 - RNA, 19 nt, Human
ugugugugugugugugugu

SEQ ID NO: 691455 - RNA, 19 nt, Human
ugugugugugugugugugu

SEQ ID NO: 691456 - RNA, 20 nt, Human
ugugugugugugugugugug

SEQ ID NO: 691457 - RNA, 21 nt, Human
ugugugugugugugugugugu

SEQ ID NO: 691458 - RNA, 21 nt, Human
ugugugugugugugugugugu

SEQ ID NO: 691459 - RNA, 21 nt, Human
ugugugugugugugugugugu

SEQ ID NO: 691460 - RNA, 21 nt, Human
ugugugugugugugugugugu

SEQ ID NO: 691461 - RNA, 21 nt, Human
ugugugugugugugugugugu

SEQ ID NO: 691462 - RNA, 21 nt, Human
ugugugugugugugugugugu

SEQ ID NO: 691463 - RNA, 21 nt, Human
ugugugugugugugugugugu

SEQ ID NO: 691464 - RNA, 21 nt, Human
ugugugugugugugugugugu

SEQ ID NO: 691465 - RNA, 21 nt, Human
ugugugugugugugugugugu

SEQ ID NO: 691466 - RNA, 21 nt, Human
ugugugugugugugugugugu

SEQ ID NO: 691467 - RNA, 21 nt, Human
ugugugugugugugugugugu

SEQ ID NO: 691468 - RNA, 21 nt, Human
ugugugugugugugugugugu

SEQ ID NO: 691469 - RNA, 21 nt, Human
ugugugugugugugugugugu

SEQ ID NO: 691470 - RNA, 21 nt, Human
ugugugugugugugugugugu

SEQ ID NO: 691471 - RNA, 22 nt, Human
ugugugugugugugugugugug

SEQ ID NO: 691472 - RNA, 22 nt, Human
ugugugugugugugugugugug

SEQ ID NO: 691473 - RNA, 22 nt, Human
ugugugugugugugugugugug

SEQ ID NO: 691474 - RNA, 22 nt, Human
ugugugugugugugugugugug

SEQ ID NO: 691475 - RNA, 24 nt, Human
uuaaaguauaaaguguuuuggaaa

SEQ ID NO: 691476 - RNA, 28 nt, Human
uuauauauguguacacacacacggugug

SEQ ID NO: 691477 - RNA, 25 nt, Human
uuauauauguguacacacacacguu

SEQ ID NO: 691478 - RNA, 19 nt, Human
uucagggagcagaagagaa

SEQ ID NO: 691479 - RNA, 18 nt, Human
uuccccgacgcugccccg

SEQ ID NO: 691480 - RNA, 26 nt, Human
uuuuuuuuuuuuucacaauaaaauua

SEQ ID NO: 691481 - RNA, 23 nt, Human
uuuuuuuuuuuuuuuuucacaau

SEQ ID NO: 691482 - RNA, 26 nt, Human
aaaaaaauuaacaaaauacauuuuua

SEQ ID NO: 691483 - RNA, 22 nt, Human
aaaauacaaucaaagcacacua

SEQ ID NO: 691484 - RNA, 21 nt, Human
aaagagucagaacacagacca

SEQ ID NO: 691485 - RNA, 24 nt, Human
aaauauacaaccccaaacaucgua

SEQ ID NO: 691486 - RNA, 20 nt, Human
aacaaaauacauuuuuacag

SEQ ID NO: 691487 - RNA, 22 nt, Human
aacaauucuuccaaguuuucca

SEQ ID NO: 691488 - RNA, 20 nt, Human
aaccaugaauaagccuuacc

SEQ ID NO: 691489 - RNA, 18 nt, Human
aagaaaggcaacagagua

SEQ ID NO: 691490 - RNA, 21 nt, Human
aagcacacuauguggugagcc

SEQ ID NO: 691491 - RNA, 22 nt, Human
aagccaaaauacaaucaaagca

SEQ ID NO: 691492 - RNA, 18 nt, Human
aagccaaugauucacuca

SEQ ID NO: 691493 - RNA, 23 nt, Human
aagcuuucugguguuuuucccag

SEQ ID NO: 691494 - RNA, 24 nt, Human
aaggggaaagggaaaaggaaagga

SEQ ID NO: 691495 - RNA, 18 nt, Human
aauacaaaguguuauugg

SEQ ID NO: 691496 - RNA, 18 nt, Human
aauacaaugaacaaaggc

SEQ ID NO: 691497 - RNA, 21 nt, Human
acaaaauauacaaccccaaac

SEQ ID NO: 691498 - RNA, 20 nt, Human
acaacacagcaacuggagag

SEQ ID NO: 691499 - RNA, 23 nt, Human
acacagaccaggagagcgucucc

SEQ ID NO: 691500 - RNA, 20 nt, Human
accccaaacaucguacuaug

SEQ ID NO: 691501 - RNA, 18 nt, Human
agagcgucuccggcugcc

SEQ ID NO: 691502 - RNA, 19 nt, Human
auauauauauauauauaua

SEQ ID NO: 691503 - RNA, 19 nt, Human
auauauauauauauauaua

SEQ ID NO: 691504 - RNA, 19 nt, Human
auauauauauauauauaua

SEQ ID NO: 691505 - RNA, 25 nt, Human
caaagccaaaauacaaucaaagcac

SEQ ID NO: 691506 - RNA, 25 nt, Human
cacaacacaaauggcugcuaaacaa

SEQ ID NO: 691507 - RNA, 23 nt, Human
cacagcaacuggagaggucagcu

SEQ ID NO: 691508 - RNA, 21 nt, Human
cagaacacagaccaggagagc

SEQ ID NO: 691509 - RNA, 21 nt, Human
cagagcugcggccgcugcgcg

SEQ ID NO: 691510 - RNA, 19 nt, Human
cagcaagcuuucugguguu

SEQ ID NO: 691511 - RNA, 18 nt, Human
cagcugccuccauccucc

SEQ ID NO: 691512 - RNA, 28 nt, Human
cauuuuuacagauauauauauauauauu

SEQ ID NO: 691513 - RNA, 21 nt, Human
ccaaaaaaauuaacaaaauac

SEQ ID NO: 691514 - RNA, 21 nt, Human
ccacggcgacagcucugaccc

SEQ ID NO: 691515 - RNA, 18 nt, Human
ccacuggugaccccagcc

SEQ ID NO: 691516 - RNA, 18 nt, Human
ccagagcugcggccgcug

SEQ ID NO: 691517 - RNA, 18 nt, Human
ccagaugagauaacaaac

SEQ ID NO: 691518 - RNA, 22 nt, Human
cccguggcggggacggcgaggc

SEQ ID NO: 691519 - RNA, 19 nt, Human
ccgucgucuuuaggccggu

SEQ ID NO: 691520 - RNA, 18 nt, Human
ccucccccacauuucaga

SEQ ID NO: 691521 - RNA, 22 nt, Human
cgacgggcccgaggcggggacg

SEQ ID NO: 691522 - RNA, 21 nt, Human
cgcgggccgcccccgccgucg

SEQ ID NO: 691523 - RNA, 21 nt, Human
cggcgcgggacuccccucggc

SEQ ID NO: 691524 - RNA, 21 nt, Human
cggcgggaagagucgucggcc

SEQ ID NO: 691525 - RNA, 18 nt, Human
cgggccugaagaggagcc

SEQ ID NO: 691526 - RNA, 21 nt, Human
cggugccuugagggcgagcgg

SEQ ID NO: 691527 - RNA, 18 nt, Human
cuccauccucccccacau

SEQ ID NO: 691528 - RNA, 20 nt, Human
cugcggccgcugcgcgggcc

SEQ ID NO: 691529 - RNA, 20 nt, Human
cugcggccgcugcgcgggcc

SEQ ID NO: 691530 - RNA, 19 nt, Human
cugggcaucugauuucuag

SEQ ID NO: 691531 - RNA, 21 nt, Human
cugguguuuuaaggggaaagg

SEQ ID NO: 691532 - RNA, 20 nt, Human
cuucacaacacaaauggcug

SEQ ID NO: 691533 - RNA, 23 nt, Human
gaaaggaggagguugaggaaagg

SEQ ID NO: 691534 - RNA, 23 nt, Human
gaaauggcagagucaaagccaaa

SEQ ID NO: 691535 - RNA, 18 nt, Human
gacggggagccgcgacgg

SEQ ID NO: 691536 - RNA, 20 nt, Human
gaggagcgagcgcugcuugc

SEQ ID NO: 691537 - RNA, 21 nt, Human
gcaaugaaccaugaauaagcc

SEQ ID NO: 691538 - RNA, 23 nt, Human
gcgggccgcccccgccgucgucu

SEQ ID NO: 691539 - RNA, 21 nt, Human
gcuccuggcaaugaaccauga

SEQ ID NO: 691540 - RNA, 21 nt, Human
gcugcgcgggccgcccccgcc

SEQ ID NO: 691541 - RNA, 18 nt, Human
ggaaagggaaaaggaaag

SEQ ID NO: 691542 - RNA, 20 nt, Human
ggaaagggaaaaggaaagga

SEQ ID NO: 691543 - RNA, 18 nt, Human
ggcucggagcgcgccgcc

SEQ ID NO: 691544 - RNA, 19 nt, Human
gggcccgaggcggggacgg

SEQ ID NO: 691545 - RNA, 22 nt, Human
uaaauuuuuuagcuuccaugaa

SEQ ID NO: 691546 - RNA, 23 nt, Human
uaacaaaauauacaaccccaaac

SEQ ID NO: 691547 - RNA, 20 nt, Human
uacaacacagcaacuggaga

SEQ ID NO: 691548 - RNA, 18 nt, Human
uacagauauauauauaua

SEQ ID NO: 691549 - RNA, 30 nt, Human
uacauuuuuacagauauauauauauauauu

SEQ ID NO: 691550 - RNA, 25 nt, Human
uagcaggacaaugcaucucaagaaa

SEQ ID NO: 691551 - RNA, 22 nt, Human
uaggaauacaacacagcaacug

SEQ ID NO: 691552 - RNA, 19 nt, Human
uagucuuggaucaucuggg

SEQ ID NO: 691553 - RNA, 22 nt, Human
uauacaaccccaaacaucguac

SEQ ID NO: 691554 - RNA, 19 nt, Human
uauauauauauauauauau

SEQ ID NO: 691555 - RNA, 23 nt, Human
ucagaaauggcagagucaaagcc

SEQ ID NO: 691556 - RNA, 21 nt, Human
uccaaguuuuccauuucagca

SEQ ID NO: 691557 - RNA, 23 nt, Human
uccgcgacgaggagccggagggc

SEQ ID NO: 691558 - RNA, 18 nt, Human
uccuuaagcucuuuucca

SEQ ID NO: 691559 - RNA, 18 nt, Human
ucuaccccuucacaacac

SEQ ID NO: 691560 - RNA, 26 nt, Human
ucuccggcugccgcugucgccuggau

SEQ ID NO: 691561 - RNA, 21 nt, Human
ucucuugguguagguuccaga

SEQ ID NO: 691562 - RNA, 24 nt, Human
ucuucuaccccuucacaacacaaa

SEQ ID NO: 691563 - RNA, 20 nt, Human
ugaagccggccgggcccggc

SEQ ID NO: 691564 - RNA, 23 nt, Human
ugauucacucacaaguagcucua

SEQ ID NO: 691565 - RNA, 22 nt, Human
uggguaggaauacaacacagca

SEQ ID NO: 691566 - RNA, 23 nt, Human
uguaaacaguaaacaaaagagcu

SEQ ID NO: 691567 - RNA, 24 nt, Human
uuacagauauauauauauauauau

SEQ ID NO: 691568 - RNA, 19 nt, Human
uucagagaucuucuacccc

SEQ ID NO: 691569 - RNA, 18 nt, Human
uuggaucaucugggcauc

SEQ ID NO: 691570 - RNA, 19 nt, Human
uuuacagauauauauauau

SEQ ID NO: 691571 - RNA, 21 nt, Human
uuuacagauauauauauauau

SEQ ID NO: 691572 - RNA, 22 nt, Human
uuuuacagauauauauauauau

SEQ ID NO: 691573 - RNA, 18 nt, Human
uuuuuuuuuuuuuuucug

SEQ ID NO: 691574 - RNA, 19 nt, Human
caggguuuucaccaaccug

SEQ ID NO: 691575 - RNA, 22 nt, Human
cauucuguguuucuacgaucgc

SEQ ID NO: 691576 - RNA, 20 nt, Human
cccccucuggaaaacgggac

SEQ ID NO: 691577 - RNA, 22 nt, Human
ccccgcgcucgggccgccccuc

SEQ ID NO: 691578 - RNA, 19 nt, Human
ccccucgccuccucucccu

SEQ ID NO: 691579 - RNA, 21 nt, Human
ccccucgccuccucucccucc

SEQ ID NO: 691580 - RNA, 19 nt, Human
ccgccgcgcuccagccgcc

SEQ ID NO: 691581 - RNA, 19 nt, Human
ccgccgcgcuccagccgcc

SEQ ID NO: 691582 - RNA, 22 nt, Human
ccgccgcgcuccagccgccggg

SEQ ID NO: 691583 - RNA, 25 nt, Human
ccgccgcgcuccagccgccgggggc

SEQ ID NO: 691584 - RNA, 19 nt, Human
ccgcgcuccagccgccggg

SEQ ID NO: 691585 - RNA, 19 nt, Human
ccgcgcuccagccgccggg

SEQ ID NO: 691586 - RNA, 19 nt, Human
ccgcggccuuucaagcucu

SEQ ID NO: 691587 - RNA, 18 nt, Human
ccucgccuccucucccuc

SEQ ID NO: 691588 - RNA, 25 nt, Human
ccucuggaaaacgggaaccagcuuu

SEQ ID NO: 691589 - RNA, 19 nt, Human
cgccgcgcuccagccgccg

SEQ ID NO: 691590 - RNA, 19 nt, Human
cgggccgccccucgccucc

SEQ ID NO: 691591 - RNA, 25 nt, Human
cucggcuccggccccaccaagaagc

SEQ ID NO: 691592 - RNA, 21 nt, Human
cuguuucugcagcuggauuuc

SEQ ID NO: 691593 - RNA, 22 nt, Human
gcuggccucgcucccgccccgc

SEQ ID NO: 691594 - RNA, 21 nt, Human
gcuuccccagucccauucugu

SEQ ID NO: 691595 - RNA, 22 nt, Human
uauauauauagagcuguaugua

SEQ ID NO: 691596 - RNA, 23 nt, Human
uccaaggacacaggguuuucacc

SEQ ID NO: 691597 - RNA, 23 nt, Human
uccccagucccauucuguguuuc

SEQ ID NO: 691598 - RNA, 19 nt, Human
ucccuccggccucugcgcc

SEQ ID NO: 691599 - RNA, 19 nt, Human
ucccuccggccucugcgcc

SEQ ID NO: 691600 - RNA, 25 nt, Human
ucgcuccggcugggucucggcuccc

SEQ ID NO: 691601 - RNA, 19 nt, Human
ucucggcuccggccccacc

SEQ ID NO: 691602 - RNA, 21 nt, Human
ucugggcucccccucuggaaa

SEQ ID NO: 691603 - RNA, 20 nt, Human
ugcagcuggauuuccaaagg

SEQ ID NO: 691604 - RNA, 18 nt, Human
ugucuguuucugcagcug

SEQ ID NO: 691605 - RNA, 22 nt, Human
uuccccagucccauucuguguu

SEQ ID NO: 691606 - RNA, 22 nt, Human
uucuacgaucgcuccaggcgcu

SEQ ID NO: 691607 - RNA, 21 nt, Human
aggaaccgcggaggggaaagc

SEQ ID NO: 691608 - RNA, 27 nt, Human
caguaacucuuccucuagcuggaguuu

SEQ ID NO: 691609 - RNA, 21 nt, Human
cggcucggggaggaaccgcgg

SEQ ID NO: 691610 - RNA, 24 nt, Human
cucgccggcccccaggccuugcag

SEQ ID NO: 691611 - RNA, 26 nt, Human
gggcggcucggggaggaaccgcggag

SEQ ID NO: 691612 - RNA, 22 nt, Human
guagauucuuccagaaguucac

SEQ ID NO: 691613 - RNA, 22 nt, Human
uacgccccuggcgaguucccag

SEQ ID NO: 691614 - RNA, 22 nt, Human
uauauuggauguauuucuggaa

SEQ ID NO: 691615 - RNA, 22 nt, Human
ugagagaaggcaagggaaggaa

SEQ ID NO: 691616 - RNA, 20 nt, Human
ugucaguaacucuuccucua

SEQ ID NO: 691617 - RNA, 24 nt, Human
uugcuugugucaguaacucuuccu

SEQ ID NO: 691618 - RNA, 22 nt, Human
uuguagauucuuccagaaguuc

SEQ ID NO: 691619 - RNA, 22 nt, Human
uuuuucguauauauuggaugua

SEQ ID NO: 691620 - RNA, 18 nt, Human
uuuuuuuuuuuuuuuucg

SEQ ID NO: 691621 - RNA, 20 nt, Human
uuuuuuuuuuuuuuuuucgu

SEQ ID NO: 691622 - RNA, 29 nt, Human
acacaugcacgcacacgcacaccaccgca

SEQ ID NO: 691623 - RNA, 22 nt, Human
acacaugcacgcacacgcacag

SEQ ID NO: 691624 - RNA, 21 nt, Human
accgcacacacagauaaucug

SEQ ID NO: 691625 - RNA, 21 nt, Human
accuaggucuacccacuuggu

SEQ ID NO: 691626 - RNA, 27 nt, Human
acgcacacgcacaccaccgcacacaca

SEQ ID NO: 691627 - RNA, 26 nt, Human
agaacaccuaggucuacccacuuggu

SEQ ID NO: 691628 - RNA, 22 nt, Human
agaccagaacuaguacagagaa

SEQ ID NO: 691629 - RNA, 21 nt, Human
agguucuaguggaagcaaucu

SEQ ID NO: 691630 - RNA, 23 nt, Human
agucaaaaggagaccagaacuag

SEQ ID NO: 691631 - RNA, 28 nt, Human
auauauauucuaggcacacgcgcacgca

SEQ ID NO: 691632 - RNA, 22 nt, Human
caaaaggagaccagaacuagua

SEQ ID NO: 691633 - RNA, 19 nt, Human
caacagaaucuccucugag

SEQ ID NO: 691634 - RNA, 24 nt, Human
caaucuucaaggcagaguugaaaa

SEQ ID NO: 691635 - RNA, 23 nt, Human
cacacaccccucugagagaacac

SEQ ID NO: 691636 - RNA, 22 nt, Human
cacgcacacgcacaccaccgca

SEQ ID NO: 691637 - RNA, 22 nt, Human
cagcuggguugaguggacacau

SEQ ID NO: 691638 - RNA, 25 nt, Human
caugcacgcacacgcacaccaccgc

SEQ ID NO: 691639 - RNA, 20 nt, Human
cccagccacagcacgccagg

SEQ ID NO: 691640 - RNA, 19 nt, Human
cccgcagcaugcaaaacuc

SEQ ID NO: 691641 - RNA, 18 nt, Human
cccggagagucacaguua

SEQ ID NO: 691642 - RNA, 19 nt, Human
ccgcguucuccgccauuuu

SEQ ID NO: 691643 - RNA, 25 nt, Human
ccucggggcccagccacagcacgcc

SEQ ID NO: 691644 - RNA, 26 nt, Human
ccugcaaggguuuggugauaccgaga

SEQ ID NO: 691645 - RNA, 18 nt, Human
ccugggcagcuggguuga

SEQ ID NO: 691646 - RNA, 27 nt, Human
cgcacacacacacacaccccucugaga

SEQ ID NO: 691647 - RNA, 22 nt, Human
cgcacacgcacaccaccgcaca

SEQ ID NO: 691648 - RNA, 25 nt, Human
cgcgcacgcacacacacacacaccc

SEQ ID NO: 691649 - RNA, 26 nt, Human
cgggcugggggggcugggaggggggg

SEQ ID NO: 691650 - RNA, 23 nt, Human
cguccugggcagcuggguugagu

SEQ ID NO: 691651 - RNA, 18 nt, Human
cuaugucuccagguucua

SEQ ID NO: 691652 - RNA, 19 nt, Human
cuccgccauuuuccuccuc

SEQ ID NO: 691653 - RNA, 22 nt, Human
cuggaggccuucuguccagugg

SEQ ID NO: 691654 - RNA, 18 nt, Human
gaacuaguacagagaaug

SEQ ID NO: 691655 - RNA, 21 nt, Human
gagcaggcagcgggaggagug

SEQ ID NO: 691656 - RNA, 23 nt, Human
gcacacgcacaccaccgcacaca

SEQ ID NO: 691657 - RNA, 22 nt, Human
gcacgcacacacacacacaccc

SEQ ID NO: 691658 - RNA, 21 nt, Human
gcccacuggagcccuggggag

SEQ ID NO: 691659 - RNA, 22 nt, Human
gcggaggagcuggaggccuucu

SEQ ID NO: 691660 - RNA, 23 nt, Human
gcugggggggcugggaggggggg

SEQ ID NO: 691661 - RNA, 21 nt, Human
ggcagagcccacuggagcccu

SEQ ID NO: 691662 - RNA, 23 nt, Human
gggcagagcggaggagcuggagg

SEQ ID NO: 691663 - RNA, 21 nt, Human
gggcugggggggcugggaggg

SEQ ID NO: 691664 - RNA, 22 nt, Human
uaaucacaaaacaaauuccuau

SEQ ID NO: 691665 - RNA, 23 nt, Human
uagcagggacgacgggcuggggg

SEQ ID NO: 691666 - RNA, 31 nt, Human
uaggcacacgcgcacgcacacacacacacag

SEQ ID NO: 691667 - RNA, 28 nt, Human
uauaugcacgcauauacagguguuugug

SEQ ID NO: 691668 - RNA, 26 nt, Human
uauauucuaggcacacgcgcacgcac

SEQ ID NO: 691669 - RNA, 24 nt, Human
ucaaggcagaguugaaaacucugg

SEQ ID NO: 691670 - RNA, 19 nt, Human
ucagagccacaguccaguc

SEQ ID NO: 691671 - RNA, 23 nt, Human
ugaguggacacaugauggacgca

SEQ ID NO: 691672 - RNA, 23 nt, Human
ugcacgcacacgcacaccaccgc

SEQ ID NO: 691673 - RNA, 18 nt, Human
ugccccguccugggcagc

SEQ ID NO: 691674 - RNA, 23 nt, Human
uggcaacacaaagccuucgugaa

SEQ ID NO: 691675 - RNA, 22 nt, Human
ugguuguauaugcacgcauaua

SEQ ID NO: 691676 - RNA, 25 nt, Human
uuguauaugcacgcauauacaggug

SEQ ID NO: 691677 - RNA, 19 nt, Human
uuucaugcccauaagagcc

SEQ ID NO: 691678 - RNA, 20 nt, Human
uuuuuguucucauguguguu

SEQ ID NO: 691679 - RNA, 19 nt, Human
uuuuuuuuuuuuuuguucu

SEQ ID NO: 691680 - RNA, 19 nt, Human
uuuuuuuuuuuuuuuuguu

SEQ ID NO: 691681 - RNA, 20 nt, Human
agaaaauacuccucaaagag

SEQ ID NO: 691682 - RNA, 21 nt, Human
agaaaauacuccucaaagagc

SEQ ID NO: 691683 - RNA, 20 nt, Human
auacgccacucagcuagcuu

SEQ ID NO: 691684 - RNA, 23 nt, Human
aucaugggccucccuaaagaggg

SEQ ID NO: 691685 - RNA, 22 nt, Human
cagcuccaccugcauacgccac

SEQ ID NO: 691686 - RNA, 18 nt, Human
caucuccaccacggccac

SEQ ID NO: 691687 - RNA, 24 nt, Human
cgaucaugggccucccuaaagagg

SEQ ID NO: 691688 - RNA, 18 nt, Human
cgccuagggucaccugcu

SEQ ID NO: 691689 - RNA, 21 nt, Human
cuccuugaccauugaauccaa

SEQ ID NO: 691690 - RNA, 18 nt, Human
gagccaauauucagcucc

SEQ ID NO: 691691 - RNA, 19 nt, Human
gccaauauucagcuccacc

SEQ ID NO: 691692 - RNA, 18 nt, Human
ggacaggcugcgccuagg

SEQ ID NO: 691693 - RNA, 23 nt, Human
ucagcaacucagaaauauucucc

SEQ ID NO: 691694 - RNA, 19 nt, Human
ucagcuccaccugcauacg

SEQ ID NO: 691695 - RNA, 21 nt, Human
uccaauguugaaaagucccag

SEQ ID NO: 691696 - RNA, 26 nt, Human
ugaggaagacauuauaguuggcugcc

SEQ ID NO: 691697 - RNA, 18 nt, Human
ugcagaaaauacuccuca

SEQ ID NO: 691698 - RNA, 21 nt, Human
ugcaucaucuccaccacggcc

SEQ ID NO: 691699 - RNA, 22 nt, Human
ugcaucaucuccaccacggcca

SEQ ID NO: 691700 - RNA, 22 nt, Human
ugcuaagccagccaggcccugc

SEQ ID NO: 691701 - RNA, 28 nt, Human
uguuuuuuuguuuuuuuguuuuuuuuuu

SEQ ID NO: 691702 - RNA, 23 nt, Human
uuagucgaucaugggccucccua

SEQ ID NO: 691703 - RNA, 25 nt, Human
uucaccucuuccacugcaugcucca

SEQ ID NO: 691704 - RNA, 24 nt, Human
uuguuuuuuuguuuuuuuguuuuu

SEQ ID NO: 691705 - RNA, 20 nt, Human
uuguuuuuuuguuuuuuuuu

SEQ ID NO: 691706 - RNA, 19 nt, Human
aaaaugcccuccauuuaac

SEQ ID NO: 691707 - RNA, 23 nt, Human
aaacaauacaaaaugcccuccau

SEQ ID NO: 691708 - RNA, 20 nt, Human
acacaauguuaacaaccaug

SEQ ID NO: 691709 - RNA, 22 nt, Human
acacaauguuaacaaccaugaa

SEQ ID NO: 691710 - RNA, 21 nt, Human
aggaaaguuucugagcuuagc

SEQ ID NO: 691711 - RNA, 20 nt, Human
aguggcacaugggcguuuca

SEQ ID NO: 691712 - RNA, 24 nt, Human
aguuccuucauauagagacauauu

SEQ ID NO: 691713 - RNA, 20 nt, Human
uaacaaguagaaaaauauaa

SEQ ID NO: 691714 - RNA, 19 nt, Human
uaguauauauggcaauugu

SEQ ID NO: 691715 - RNA, 23 nt, Human
ucagugaaauaguuuaguuccuu

SEQ ID NO: 691716 - RNA, 24 nt, Human
ucagugaaauaguuuaguuccuuc

SEQ ID NO: 691717 - RNA, 24 nt, Human
ugaaaaacaauacaaaaugcccuc

SEQ ID NO: 691718 - RNA, 20 nt, Human
aaaggaacuguugacccaaa

SEQ ID NO: 691719 - RNA, 21 nt, Human
aaaggaacuguugacccaaag

SEQ ID NO: 691720 - RNA, 18 nt, Human
aagaaccacaccacuaaa

SEQ ID NO: 691721 - RNA, 19 nt, Human
aagaaccacaccacuaaau

SEQ ID NO: 691722 - RNA, 20 nt, Human
aagaagaagcuauaaauaaa

SEQ ID NO: 691723 - RNA, 20 nt, Human
aagcccccaucccugcccag

SEQ ID NO: 691724 - RNA, 24 nt, Human
aagccugaugaacuuaauccguac

SEQ ID NO: 691725 - RNA, 19 nt, Human
aagcuggggcaggagagag

SEQ ID NO: 691726 - RNA, 21 nt, Human
acaccacuaaauccccuuggc

SEQ ID NO: 691727 - RNA, 21 nt, Human
accauccuguccuuggacccc

SEQ ID NO: 691728 - RNA, 23 nt, Human
acccaaagcaugaagcaggaccc

SEQ ID NO: 691729 - RNA, 18 nt, Human
accuagacaaaaacaauu

SEQ ID NO: 691730 - RNA, 19 nt, Human
acugccagcugccgccgcc

SEQ ID NO: 691731 - RNA, 23 nt, Human
acugugguggcugaguggaagcu

SEQ ID NO: 691732 - RNA, 26 nt, Human
agaaaggagaacagaggcaggggagc

SEQ ID NO: 691733 - RNA, 24 nt, Human
agaaucugaaagcucgagucccag

SEQ ID NO: 691734 - RNA, 21 nt, Human
agagacaccagcuuggccucc

SEQ ID NO: 691735 - RNA, 23 nt, Human
agcacgcuuuccucugacccacu

SEQ ID NO: 691736 - RNA, 20 nt, Human
agcuccacucccugccuguu

SEQ ID NO: 691737 - RNA, 22 nt, Human
aggacccccaccaaccccagcc

SEQ ID NO: 691738 - RNA, 24 nt, Human
aggagacugcuuuccaaaugcagc

SEQ ID NO: 691739 - RNA, 25 nt, Human
aggccaggagagcagcuccaggcac

SEQ ID NO: 691740 - RNA, 26 nt, Human
aggccucuggcuggguguccaccucc

SEQ ID NO: 691741 - RNA, 18 nt, Human
agggaguggguggggccu

SEQ ID NO: 691742 - RNA, 19 nt, Human
agggaguggguggggccug

SEQ ID NO: 691743 - RNA, 24 nt, Human
agggcauaaggaauggggacaggg

SEQ ID NO: 691744 - RNA, 22 nt, Human
aggggcuaugggauggccugga

SEQ ID NO: 691745 - RNA, 18 nt, Human
aggguggggagggcugag

SEQ ID NO: 691746 - RNA, 18 nt, Human
aggucuggggguccuggu

SEQ ID NO: 691747 - RNA, 21 nt, Human
aggugaggucaccuugagcca

SEQ ID NO: 691748 - RNA, 23 nt, Human
aggugaggucaccuugagccagg

SEQ ID NO: 691749 - RNA, 20 nt, Human
agugcugugugcauaguugg

SEQ ID NO: 691750 - RNA, 23 nt, Human
aucagcuuuggccuccugaccca

SEQ ID NO: 691751 - RNA, 19 nt, Human
aucccuggccaaagccucc

SEQ ID NO: 691752 - RNA, 23 nt, Human
augaauaaccaaaaaauuucuuc

SEQ ID NO: 691753 - RNA, 23 nt, Human
auugggggcagccagaagaggag

SEQ ID NO: 691754 - RNA, 21 nt, Human
caaaacaaccugcgcucaggc

SEQ ID NO: 691755 - RNA, 23 nt, Human
caaaggaacuguugacccaaagc

SEQ ID NO: 691756 - RNA, 21 nt, Human
caaaucccagugggucagaaa

SEQ ID NO: 691757 - RNA, 23 nt, Human
caagaggccuccccguggccacc

SEQ ID NO: 691758 - RNA, 23 nt, Human
cacaaguggcagcaucccuggcc

SEQ ID NO: 691759 - RNA, 22 nt, Human
cacaccccccaagaggccuccc

SEQ ID NO: 691760 - RNA, 24 nt, Human
cacaccccccaagaggccuccccg

SEQ ID NO: 691761 - RNA, 26 nt, Human
caccaaccccagccagguggccugca

SEQ ID NO: 691762 - RNA, 21 nt, Human
caccacuaaauccccuuggca

SEQ ID NO: 691763 - RNA, 23 nt, Human
cacccugcccuguugaccauccu

SEQ ID NO: 691764 - RNA, 23 nt, Human
cacgugcuuacaacggauaugca

SEQ ID NO: 691765 - RNA, 21 nt, Human
cagaaaggagaacagaggcag

SEQ ID NO: 691766 - RNA, 21 nt, Human
cagaggcaggggagcccucgg

SEQ ID NO: 691767 - RNA, 22 nt, Human
cagcaucccuggccaaagccuc

SEQ ID NO: 691768 - RNA, 19 nt, Human
cagcugccgccgccucugg

SEQ ID NO: 691769 - RNA, 20 nt, Human
cagcugccgccgccucugga

SEQ ID NO: 691770 - RNA, 18 nt, Human
caggaagcccauggugaa

SEQ ID NO: 691771 - RNA, 18 nt, Human
cauggcuuuugguagggc

SEQ ID NO: 691772 - RNA, 18 nt, Human
ccaaagccuccccacucc

SEQ ID NO: 691773 - RNA, 19 nt, Human
ccaaucuacucucuggggg

SEQ ID NO: 691774 - RNA, 23 nt, Human
ccaccaaccccagccagguggcc

SEQ ID NO: 691775 - RNA, 24 nt, Human
ccaccuacagcuguuuugccaagg

SEQ ID NO: 691776 - RNA, 19 nt, Human
ccacucccugccuguuucc

SEQ ID NO: 691777 - RNA, 18 nt, Human
ccagggagguggcccugc

SEQ ID NO: 691778 - RNA, 18 nt, Human
ccauccuguccuuggacc

SEQ ID NO: 691779 - RNA, 23 nt, Human
cccagggagguggcccugcgcgg

SEQ ID NO: 691780 - RNA, 19 nt, Human
ccccaaaguaaaauggggc

SEQ ID NO: 691781 - RNA, 19 nt, Human
cccccaagaggccuccccg

SEQ ID NO: 691782 - RNA, 19 nt, Human
ccccccaagaggccucccc

SEQ ID NO: 691783 - RNA, 21 nt, Human
cccgcgcacccaggaagccca

SEQ ID NO: 691784 - RNA, 20 nt, Human
cccggacagaggagcuaaga

SEQ ID NO: 691785 - RNA, 22 nt, Human
ccuacagcuguuuugccaaggc

SEQ ID NO: 691786 - RNA, 22 nt, Human
ccuaguagcccggacagaggag

SEQ ID NO: 691787 - RNA, 20 nt, Human
ccucccuuugaaagaaccac

SEQ ID NO: 691788 - RNA, 23 nt, Human
ccugaacaucagcuuuggccucc

SEQ ID NO: 691789 - RNA, 18 nt, Human
ccugaccccagcuucggc

SEQ ID NO: 691790 - RNA, 22 nt, Human
ccugaccccagcuucggcuucc

SEQ ID NO: 691791 - RNA, 28 nt, Human
ccugcgcucaggcccgcgcacccaggaa

SEQ ID NO: 691792 - RNA, 19 nt, Human
ccugcggccugagcacaca

SEQ ID NO: 691793 - RNA, 27 nt, Human
ccuggagcuggggcaguugccagaagc

SEQ ID NO: 691794 - RNA, 20 nt, Human
ccuggguucaaguuaaacag

SEQ ID NO: 691795 - RNA, 26 nt, Human
ccuuccagucugagccaggccugccu

SEQ ID NO: 691796 - RNA, 23 nt, Human
cgauaaauccaaggaggccagga

SEQ ID NO: 691797 - RNA, 18 nt, Human
cggcgcuggcacgcuguc

SEQ ID NO: 691798 - RNA, 22 nt, Human
cucacaauccccugaacguguu

SEQ ID NO: 691799 - RNA, 24 nt, Human
cucaggcccgcgcacccaggaagc

SEQ ID NO: 691800 - RNA, 18 nt, Human
cuccaagggccagccgcg

SEQ ID NO: 691801 - RNA, 18 nt, Human
cucccggccuggcagguc

SEQ ID NO: 691802 - RNA, 23 nt, Human
cucccugccuguuuccguccuca

SEQ ID NO: 691803 - RNA, 19 nt, Human
cucuugcgcaaaccuucag

SEQ ID NO: 691804 - RNA, 24 nt, Human
cugcagagcccacugcccuaccuc

SEQ ID NO: 691805 - RNA, 22 nt, Human
cuucgagcacgcuuuccucuga

SEQ ID NO: 691806 - RNA, 24 nt, Human
cuugcgcaaaccuucaguuuuugc

SEQ ID NO: 691807 - RNA, 20 nt, Human
gacagggcacagggcacgug

SEQ ID NO: 691808 - RNA, 21 nt, Human
gaccugucgucuguccuguuu

SEQ ID NO: 691809 - RNA, 22 nt, Human
gagaggacccccaccaacccca

SEQ ID NO: 691810 - RNA, 19 nt, Human
gagaggggagcaggcuucc

SEQ ID NO: 691811 - RNA, 22 nt, Human
gagcagauucccauugacccug

SEQ ID NO: 691812 - RNA, 18 nt, Human
gagcaggcuuccuggggg

SEQ ID NO: 691813 - RNA, 22 nt, Human
gagcccacugcccuaccucuga

SEQ ID NO: 691814 - RNA, 18 nt, Human
gcacgcuguccacccugc

SEQ ID NO: 691815 - RNA, 21 nt, Human
gcacgcuuuccucugacccac

SEQ ID NO: 691816 - RNA, 19 nt, Human
gcagaaggcgcuugcuccc

SEQ ID NO: 691817 - RNA, 21 nt, Human
gcauccacccagggagguggc

SEQ ID NO: 691818 - RNA, 23 nt, Human
gccaaggugccccacguggcuug

SEQ ID NO: 691819 - RNA, 19 nt, Human
gccagagaggggagcaggc

SEQ ID NO: 691820 - RNA, 18 nt, Human
gcccucgguccccagccc

SEQ ID NO: 691821 - RNA, 18 nt, Human
gccugagcacaccaaucu

SEQ ID NO: 691822 - RNA, 23 nt, Human
gcuuuugguagggccauugcagc

SEQ ID NO: 691823 - RNA, 24 nt, Human
ggacacuugggggcugagggcacu

SEQ ID NO: 691824 - RNA, 20 nt, Human
ggagagcagcuccaggcaca

SEQ ID NO: 691825 - RNA, 21 nt, Human
ggagagccaggguggggaggg

SEQ ID NO: 691826 - RNA, 24 nt, Human
ggaggggacguuugcaggucuggg

SEQ ID NO: 691827 - RNA, 18 nt, Human
ggauggccuggagcuggg

SEQ ID NO: 691828 - RNA, 22 nt, Human
ggcaggggcuauggucccaugc

SEQ ID NO: 691829 - RNA, 18 nt, Human
ggccuggagcuggggcag

SEQ ID NO: 691830 - RNA, 20 nt, Human
ggccuggagcuggggcaguu

SEQ ID NO: 691831 - RNA, 23 nt, Human
ggcuaguugagaaucugaaagcu

SEQ ID NO: 691832 - RNA, 18 nt, Human
gggacguuugcaggucug

SEQ ID NO: 691833 - RNA, 19 nt, Human
gggacguuugcaggucugg

SEQ ID NO: 691834 - RNA, 19 nt, Human
gggcagccagaagaggagg

SEQ ID NO: 691835 - RNA, 19 nt, Human
ggggacguuugcaggucug

SEQ ID NO: 691836 - RNA, 20 nt, Human
ggggagggcugagugucugg

SEQ ID NO: 691837 - RNA, 20 nt, Human
ggggcagccagaagaggagg

SEQ ID NO: 691838 - RNA, 22 nt, Human
gggggcagccagaagaggaggg

SEQ ID NO: 691839 - RNA, 20 nt, Human
gguguggcaacugugguggc

SEQ ID NO: 691840 - RNA, 19 nt, Human
gugcuuccgugugaguugg

SEQ ID NO: 691841 - RNA, 25 nt, Human
uaaagcuuuaaacaauccuggguuc

SEQ ID NO: 691842 - RNA, 18 nt, Human
uaagagcgagugcugugu

SEQ ID NO: 691843 - RNA, 21 nt, Human
uaagcuguuagcuccacuccc

SEQ ID NO: 691844 - RNA, 21 nt, Human
uacaacggauaugcaacaugg

SEQ ID NO: 691845 - RNA, 20 nt, Human
uauguacaaaacaaccugcg

SEQ ID NO: 691846 - RNA, 23 nt, Human
ucacgcacaaguggcagcauccc

SEQ ID NO: 691847 - RNA, 21 nt, Human
ucagaaaggagaacagaggca

SEQ ID NO: 691848 - RNA, 21 nt, Human
uccacccugcccuguugacca

SEQ ID NO: 691849 - RNA, 22 nt, Human
uccaccuccugccgggaagcca

SEQ ID NO: 691850 - RNA, 22 nt, Human
uccagucugagccaggccugcc

SEQ ID NO: 691851 - RNA, 20 nt, Human
ucccaagcccguggugaccc

SEQ ID NO: 691852 - RNA, 20 nt, Human
uccccguggccaccaccgcc

SEQ ID NO: 691853 - RNA, 18 nt, Human
ucccuggccaaagccucc

SEQ ID NO: 691854 - RNA, 21 nt, Human
uccgaggguacggcuccuggg

SEQ ID NO: 691855 - RNA, 18 nt, Human
uccguacgcuggugggag

SEQ ID NO: 691856 - RNA, 21 nt, Human
uccguccucacagcccuggga

SEQ ID NO: 691857 - RNA, 18 nt, Human
uccucgucucuugcgcaa

SEQ ID NO: 691858 - RNA, 18 nt, Human
ucucugggggauccaggg

SEQ ID NO: 691859 - RNA, 21 nt, Human
ugaaagaaccacaccacuaaa

SEQ ID NO: 691860 - RNA, 20 nt, Human
ugaaggugaggucaccuuga

SEQ ID NO: 691861 - RNA, 22 nt, Human
ugaccauggcauccuucgagca

SEQ ID NO: 691862 - RNA, 20 nt, Human
ugacccaaagcaugaagcag

SEQ ID NO: 691863 - RNA, 21 nt, Human
ugaccccagcuucggcuuccu

SEQ ID NO: 691864 - RNA, 25 nt, Human
ugacuugcuuuuccaucaucaacuc

SEQ ID NO: 691865 - RNA, 19 nt, Human
ugagaaucugaaagcucga

SEQ ID NO: 691866 - RNA, 19 nt, Human
ugagggagcuacagauggg

SEQ ID NO: 691867 - RNA, 20 nt, Human
ugauggggcuggggcagccu

SEQ ID NO: 691868 - RNA, 22 nt, Human
ugcagaaggcgcuugcucccaa

SEQ ID NO: 691869 - RNA, 23 nt, Human
ugcagcgaagagacugagacaag

SEQ ID NO: 691870 - RNA, 24 nt, Human
ugcagcucgggccuacuacccaaa

SEQ ID NO: 691871 - RNA, 22 nt, Human
ugccaaggcuaguugagaaucu

SEQ ID NO: 691872 - RNA, 23 nt, Human
ugccaggcuggacacuugggggc

SEQ ID NO: 691873 - RNA, 25 nt, Human
ugccaguuggcccgaggaaggccgg

SEQ ID NO: 691874 - RNA, 23 nt, Human
ugcccuguugaccauccuguccu

SEQ ID NO: 691875 - RNA, 21 nt, Human
ugcgauaaauccaaggaggcc

SEQ ID NO: 691876 - RNA, 23 nt, Human
ugcgcaaaccuucaguuuuugcc

SEQ ID NO: 691877 - RNA, 18 nt, Human
uggagcagguuugggaug

SEQ ID NO: 691878 - RNA, 21 nt, Human
uggcccgaggaaggccggcaa

SEQ ID NO: 691879 - RNA, 21 nt, Human
uggcuggguguccaccuccug

SEQ ID NO: 691880 - RNA, 24 nt, Human
ugggaugcucaucccuugacaguc

SEQ ID NO: 691881 - RNA, 28 nt, Human
ugggauggccuggagcuggggcaguugc

SEQ ID NO: 691882 - RNA, 20 nt, Human
uggggcaguugccagaagcu

SEQ ID NO: 691883 - RNA, 19 nt, Human
ugggggcagccagaagagg

SEQ ID NO: 691884 - RNA, 24 nt, Human
ugggggcuggacucgagucuucuu

SEQ ID NO: 691885 - RNA, 18 nt, Human
ugggucagaaaggagaac

SEQ ID NO: 691886 - RNA, 18 nt, Human
ugguauuugagcucuuga

SEQ ID NO: 691887 - RNA, 21 nt, Human
ugguggcugaguggaagcugg

SEQ ID NO: 691888 - RNA, 23 nt, Human
ugguguggcaacugugguggcug

SEQ ID NO: 691889 - RNA, 20 nt, Human
uguacaaaacaaccugcgcu

SEQ ID NO: 691890 - RNA, 28 nt, Human
uguccuguuuuaucccccacacccccca

SEQ ID NO: 691891 - RNA, 19 nt, Human
ugugaugcauccacccagg

SEQ ID NO: 691892 - RNA, 24 nt, Human
ugugcaagaccucaccgguucccc

SEQ ID NO: 691893 - RNA, 18 nt, Human
uguggcaacugugguggc

SEQ ID NO: 691894 - RNA, 21 nt, Human
uguuccuggcuuccccuucca

SEQ ID NO: 691895 - RNA, 21 nt, Human
uguugaccauccuguccuugg

SEQ ID NO: 691896 - RNA, 19 nt, Human
uguuggccagguuguacgg

SEQ ID NO: 691897 - RNA, 20 nt, Human
uucaaguuaaacaguuccag

SEQ ID NO: 691898 - RNA, 24 nt, Human
uuccgcuguccucgucucuugcgc

SEQ ID NO: 691899 - RNA, 19 nt, Human
uuggcccgaggaaggccgg

SEQ ID NO: 691900 - RNA, 20 nt, Human
aagcccccaucccugcccag

SEQ ID NO: 691901 - RNA, 23 nt, Human
acccaaagcaugaagcaggaccc

SEQ ID NO: 691902 - RNA, 19 nt, Human
acuuugagggagcuacaga

SEQ ID NO: 691903 - RNA, 23 nt, Human
agcacgcuuuccucugacccacu

SEQ ID NO: 691904 - RNA, 25 nt, Human
aggccaggagagcagcuccaggcac

SEQ ID NO: 691905 - RNA, 18 nt, Human
agggaguggguggggccu

SEQ ID NO: 691906 - RNA, 19 nt, Human
agggaguggguggggccug

SEQ ID NO: 691907 - RNA, 22 nt, Human
aggggcuaugggauggccugga

SEQ ID NO: 691908 - RNA, 23 nt, Human
aucagcuuuggccuccugaccca

SEQ ID NO: 691909 - RNA, 23 nt, Human
auugggggcagccagaagaggag

SEQ ID NO: 691910 - RNA, 23 nt, Human
caagaggccuccccguggccacc

SEQ ID NO: 691911 - RNA, 22 nt, Human
cacaccccccaagaggccuccc

SEQ ID NO: 691912 - RNA, 24 nt, Human
cacaccccccaagaggccuccccg

SEQ ID NO: 691913 - RNA, 22 nt, Human
ccccaggccucggggcauuggg

SEQ ID NO: 691914 - RNA, 19 nt, Human
cccccaagaggccuccccg

SEQ ID NO: 691915 - RNA, 19 nt, Human
ccccccaagaggccucccc

SEQ ID NO: 691916 - RNA, 19 nt, Human
cccggacagaggaguuaag

SEQ ID NO: 691917 - RNA, 19 nt, Human
cccggcccggcuacucggc

SEQ ID NO: 691918 - RNA, 18 nt, Human
ccgccgcgcccgcgcucc

SEQ ID NO: 691919 - RNA, 20 nt, Human
ccgcgcccgcgcuccggccc

SEQ ID NO: 691920 - RNA, 21 nt, Human
ccgcgcccgcgcuccggcccu

SEQ ID NO: 691921 - RNA, 20 nt, Human
ccgcgcuccggcccggcccg

SEQ ID NO: 691922 - RNA, 22 nt, Human
ccuaguagcccggacagaggag

SEQ ID NO: 691923 - RNA, 23 nt, Human
ccugaacaucagcuuuggccucc

SEQ ID NO: 691924 - RNA, 27 nt, Human
ccuggagcuggggcaguugccagaagc

SEQ ID NO: 691925 - RNA, 23 nt, Human
cgauaaauccaaggaggccagga

SEQ ID NO: 691926 - RNA, 25 nt, Human
cgccgcgcccgcgcuccggcccggc

SEQ ID NO: 691927 - RNA, 21 nt, Human
cggcccggcccggcuacucgg

SEQ ID NO: 691928 - RNA, 18 nt, Human
cucccggccuggcagguc

SEQ ID NO: 691929 - RNA, 19 nt, Human
cucuugcgcaaaccuucag

SEQ ID NO: 691930 - RNA, 20 nt, Human
cuguagggagugggugggag

SEQ ID NO: 691931 - RNA, 22 nt, Human
cuucgagcacgcuuuccucuga

SEQ ID NO: 691932 - RNA, 24 nt, Human
cuugcgcaaaccuucaguuuuugc

SEQ ID NO: 691933 - RNA, 26 nt, Human
cuuuccgcuguccucgucucuugcgc

SEQ ID NO: 691934 - RNA, 19 nt, Human
gagaggggagcaggcuucc

SEQ ID NO: 691935 - RNA, 19 nt, Human
gaggaggggcuaugggaug

SEQ ID NO: 691936 - RNA, 21 nt, Human
gagugcugugugcauaguugg

SEQ ID NO: 691937 - RNA, 21 nt, Human
gcacgcuuuccucugacccac

SEQ ID NO: 691938 - RNA, 19 nt, Human
gccagagaggggagcaggc

SEQ ID NO: 691939 - RNA, 18 nt, Human
gccgcgcggccgccgccg

SEQ ID NO: 691940 - RNA, 18 nt, Human
gccuggagcuggggcagu

SEQ ID NO: 691941 - RNA, 20 nt, Human
ggagagcagcuccaggcaca

SEQ ID NO: 691942 - RNA, 27 nt, Human
ggaggggaggagccgggcgcagcugcc

SEQ ID NO: 691943 - RNA, 18 nt, Human
ggauggccuggagcuggg

SEQ ID NO: 691944 - RNA, 25 nt, Human
ggcauugggggcagccagaagagga

SEQ ID NO: 691945 - RNA, 18 nt, Human
ggccuggagcuggggcag

SEQ ID NO: 691946 - RNA, 21 nt, Human
ggccugggaggggaggagccg

SEQ ID NO: 691947 - RNA, 22 nt, Human
gggaggagccgggcgcagcugc

SEQ ID NO: 691948 - RNA, 19 nt, Human
gggcagccagaagaggagg

SEQ ID NO: 691949 - RNA, 20 nt, Human
ggggcagccagaagaggagg

SEQ ID NO: 691950 - RNA, 18 nt, Human
ggggcccgggcggggggc

SEQ ID NO: 691951 - RNA, 22 nt, Human
gggggcagccagaagaggaggg

SEQ ID NO: 691952 - RNA, 18 nt, Human
uaagagcgagugcugugu

SEQ ID NO: 691953 - RNA, 20 nt, Human
uccccguggccaccaccgcc

SEQ ID NO: 691954 - RNA, 18 nt, Human
uccucgucucuugcgcaa

SEQ ID NO: 691955 - RNA, 18 nt, Human
ucgccggggcccgggcgg

SEQ ID NO: 691956 - RNA, 22 nt, Human
ugaccauggcauccuucgagca

SEQ ID NO: 691957 - RNA, 20 nt, Human
ugacccaaagcaugaagcag

SEQ ID NO: 691958 - RNA, 19 nt, Human
ugagggagcuacagauggg

SEQ ID NO: 691959 - RNA, 21 nt, Human
ugcgauaaauccaaggaggcc

SEQ ID NO: 691960 - RNA, 23 nt, Human
ugcgcaaaccuucaguuuuugcc

SEQ ID NO: 691961 - RNA, 18 nt, Human
uggagcagguuugggaug

SEQ ID NO: 691962 - RNA, 19 nt, Human
ugggaggggaggagccggg

SEQ ID NO: 691963 - RNA, 24 nt, Human
ugggaugcucaucccuugacaguc

SEQ ID NO: 691964 - RNA, 28 nt, Human
ugggauggccuggagcuggggcaguugc

SEQ ID NO: 691965 - RNA, 20 nt, Human
uggggcaguugccagaagcu

SEQ ID NO: 691966 - RNA, 24 nt, Human
ugggggcuggacucgagucuucuu

SEQ ID NO: 691967 - RNA, 28 nt, Human
uguccuguuuuaucccccacacccccca

SEQ ID NO: 691968 - RNA, 24 nt, Human
uuccgcuguccucgucucuugcgc

SEQ ID NO: 691969 - RNA, 23 nt, Human
uuccucugacccacugggcugca

SEQ ID NO: 691970 - RNA, 19 nt, Human
agaaauauguauuuucucu

SEQ ID NO: 691971 - RNA, 19 nt, Human
aucccaugaguucuuguuc

SEQ ID NO: 691972 - RNA, 21 nt, Human
cagagaauacucuaaucccau

SEQ ID NO: 691973 - RNA, 26 nt, Human
cuuuccuuuuucucucucucucuuuu

SEQ ID NO: 691974 - RNA, 24 nt, Human
uauuuucucuuuccuuuuucucuc

SEQ ID NO: 691975 - RNA, 18 nt, Human
ucucuuuccuuuuucucu

SEQ ID NO: 691976 - RNA, 18 nt, Human
ucucuuuuuuuuuguuuu

SEQ ID NO: 691977 - RNA, 23 nt, Human
uuuucucuuuccuuuuucucucu

SEQ ID NO: 691978 - RNA, 25 nt, Human
uuuuucagaucucuagcagagaaua

SEQ ID NO: 691979 - RNA, 21 nt, Human
aaaggaaaaaagacacaaagc

SEQ ID NO: 691980 - RNA, 23 nt, Human
aaaucaaaucacaacaaagcuga

SEQ ID NO: 691981 - RNA, 22 nt, Human
aaaucacaacaaagcugacuug

SEQ ID NO: 691982 - RNA, 21 nt, Human
aagagagaaaaggaaaaaaga

SEQ ID NO: 691983 - RNA, 21 nt, Human
aaucacaacaaagcugacuug

SEQ ID NO: 691984 - RNA, 22 nt, Human
agagggagaguaaaggggggac

SEQ ID NO: 691985 - RNA, 20 nt, Human
agaggggugggaggggcaga

SEQ ID NO: 691986 - RNA, 25 nt, Human
agaguaaaggggggacaaauuuagg

SEQ ID NO: 691987 - RNA, 23 nt, Human
agggcagagaggggugggagggg

SEQ ID NO: 691988 - RNA, 20 nt, Human
augaccccggcaccgccggc

SEQ ID NO: 691989 - RNA, 20 nt, Human
augaccccggcaccgccggc

SEQ ID NO: 691990 - RNA, 19 nt, Human
caaaucacaacaaagcuga

SEQ ID NO: 691991 - RNA, 23 nt, Human
cacagcccagcccuuggagcagg

SEQ ID NO: 691992 - RNA, 25 nt, Human
cagagccccuggcccauguguccaa

SEQ ID NO: 691993 - RNA, 18 nt, Human
ccaccccaacucaggugg

SEQ ID NO: 691994 - RNA, 21 nt, Human
ccagggcagagagggguggga

SEQ ID NO: 691995 - RNA, 23 nt, Human
cccaaaaucccaguaucccaccc

SEQ ID NO: 691996 - RNA, 23 nt, Human
cccaaaaucccaguaucccaccc

SEQ ID NO: 691997 - RNA, 22 nt, Human
cccacagcccagcccuuggagc

SEQ ID NO: 691998 - RNA, 18 nt, Human
cccucccuuuccccccca

SEQ ID NO: 691999 - RNA, 19 nt, Human
cccuuggagcaggagugaa

SEQ ID NO: 692000 - RNA, 18 nt, Human
ccuuggagcaggagugaa

SEQ ID NO: 692001 - RNA, 22 nt, Human
cgcccucccuuucccccccacc

SEQ ID NO: 692002 - RNA, 19 nt, Human
cucuuugagccuccuggau

SEQ ID NO: 692003 - RNA, 18 nt, Human
gagagaaaaauagaggga

SEQ ID NO: 692004 - RNA, 21 nt, Human
gagccuccuggaucaccguau

SEQ ID NO: 692005 - RNA, 20 nt, Human
gaggggcagacccugcccag

SEQ ID NO: 692006 - RNA, 19 nt, Human
gauucggcucuccuaggcu

SEQ ID NO: 692007 - RNA, 24 nt, Human
gcccaaaaucccaguaucccaccc

SEQ ID NO: 692008 - RNA, 21 nt, Human
gcccucccuuucccccccacc

SEQ ID NO: 692009 - RNA, 19 nt, Human
gcucccagggcagagaggg

SEQ ID NO: 692010 - RNA, 18 nt, Human
gcugcuucagagccccug

SEQ ID NO: 692011 - RNA, 18 nt, Human
ggaaaauccaguggccca

SEQ ID NO: 692012 - RNA, 19 nt, Human
ggaaaauccaguggcccaa

SEQ ID NO: 692013 - RNA, 21 nt, Human
ggcagagaggggugggagggg

SEQ ID NO: 692014 - RNA, 23 nt, Human
gggcagagaggggugggaggggc

SEQ ID NO: 692015 - RNA, 20 nt, Human
uaagagugaggcugcuucag

SEQ ID NO: 692016 - RNA, 20 nt, Human
uagagggagaguaaaggggg

SEQ ID NO: 692017 - RNA, 21 nt, Human
uagagggagaguaaagggggg

SEQ ID NO: 692018 - RNA, 24 nt, Human
uagaucaguuuuguacaagaguuu

SEQ ID NO: 692019 - RNA, 21 nt, Human
ucacaacaaagcugacuuggc

SEQ ID NO: 692020 - RNA, 19 nt, Human
uccagacuccaaguggagu

SEQ ID NO: 692021 - RNA, 20 nt, Human
ucccaguaucccacccacag

SEQ ID NO: 692022 - RNA, 23 nt, Human
ucccaguaucccacccacagccc

SEQ ID NO: 692023 - RNA, 20 nt, Human
ucccccccaccccaacucag

SEQ ID NO: 692024 - RNA, 18 nt, Human
ucccuuucccccccaccc

SEQ ID NO: 692025 - RNA, 24 nt, Human
ucccuuucccccccaccccaacuc

SEQ ID NO: 692026 - RNA, 21 nt, Human
ucgcccucccuuuccccccca

SEQ ID NO: 692027 - RNA, 21 nt, Human
ucuucacaaacacugauucgg

SEQ ID NO: 692028 - RNA, 19 nt, Human
ugacuuggcuucucuuuga

SEQ ID NO: 692029 - RNA, 22 nt, Human
ugagccuccuggaucaccguau

SEQ ID NO: 692030 - RNA, 19 nt, Human
ugguuacaggucugaggga

SEQ ID NO: 692031 - RNA, 22 nt, Human
ugguuuaaaagagagaaaagga

SEQ ID NO: 692032 - RNA, 23 nt, Human
uguguccauccagacuccaagug

SEQ ID NO: 692033 - RNA, 23 nt, Human
uuccauggagugugaacacgaag

SEQ ID NO: 692034 - RNA, 19 nt, Human
uuucccccccaccccaacu

SEQ ID NO: 692035 - RNA, 21 nt, Human
aacaauggaugcaugaaggga

SEQ ID NO: 692036 - RNA, 22 nt, Human
aaggaagggccgagcaccggug

SEQ ID NO: 692037 - RNA, 19 nt, Human
accccacuggaccucccca

SEQ ID NO: 692038 - RNA, 22 nt, Human
accccggaacuccagcuuccac

SEQ ID NO: 692039 - RNA, 20 nt, Human
acggacagucgccuccccgc

SEQ ID NO: 692040 - RNA, 22 nt, Human
caccacggacagucgccucccc

SEQ ID NO: 692041 - RNA, 19 nt, Human
caugucacacugcuccugu

SEQ ID NO: 692042 - RNA, 25 nt, Human
ccccgcccaccccggaacuccagcc

SEQ ID NO: 692043 - RNA, 28 nt, Human
ccccgcccaccccggaacuccagcuucc

SEQ ID NO: 692044 - RNA, 20 nt, Human
ccccggaacuccagcuucca

SEQ ID NO: 692045 - RNA, 24 nt, Human
cccuaagcgaccccacuggaccuc

SEQ ID NO: 692046 - RNA, 18 nt, Human
ccuuugggacgaacugcc

SEQ ID NO: 692047 - RNA, 22 nt, Human
cucaugucacacugcuccuguu

SEQ ID NO: 692048 - RNA, 20 nt, Human
cuccagcuuccacucgcgcc

SEQ ID NO: 692049 - RNA, 20 nt, Human
cucgcgccccugccucgcuc

SEQ ID NO: 692050 - RNA, 21 nt, Human
gaaugaacagaacaauggaug

SEQ ID NO: 692051 - RNA, 22 nt, Human
gcuccgcgcccgcucucgccgg

SEQ ID NO: 692052 - RNA, 25 nt, Human
gggagcuuuuggagccggguggggg

SEQ ID NO: 692053 - RNA, 21 nt, Human
gggccgagcaccggugccugg

SEQ ID NO: 692054 - RNA, 24 nt, Human
gggccgagcaccggugccugggga

SEQ ID NO: 692055 - RNA, 24 nt, Human
ucagaggcagguggauguauggau

SEQ ID NO: 692056 - RNA, 22 nt, Human
uccccgcccaccccggaacucc

SEQ ID NO: 692057 - RNA, 23 nt, Human
ugaagggaagcgauggggcccuu

SEQ ID NO: 692058 - RNA, 23 nt, Human
ugcaugaagggaagcgauggggc

SEQ ID NO: 692059 - RNA, 21 nt, Human
ugccucgcucguuugcgccca

SEQ ID NO: 692060 - RNA, 20 nt, Human
uggauguauggaugaaugaa

SEQ ID NO: 692061 - RNA, 23 nt, Human
ugggagcuuuuggagccgggugg

SEQ ID NO: 692062 - RNA, 23 nt, Human
ugggagcuuuuggagccgggugg

SEQ ID NO: 692063 - RNA, 18 nt, Human
ugggcccuaagcgacccc

SEQ ID NO: 692064 - RNA, 24 nt, Human
uucucaguucuggcagagucuuau

SEQ ID NO: 692065 - RNA, 20 nt, Human
uuggggcgcccuccugaugc

SEQ ID NO: 692066 - RNA, 27 nt, Human
uuucugaccgaaggaagggccgagcac

SEQ ID NO: 692067 - RNA, 21 nt, Human
aaaauugcugugucucaaagc

SEQ ID NO: 692068 - RNA, 21 nt, Human
aaccacagaggcagcgugaga

SEQ ID NO: 692069 - RNA, 19 nt, Human
aagcaacaguggacucgua

SEQ ID NO: 692070 - RNA, 22 nt, Human
aagcaagagagagggaggugag

SEQ ID NO: 692071 - RNA, 25 nt, Human
aagcaagagagagggaggugaggag

SEQ ID NO: 692072 - RNA, 23 nt, Human
aagccaaacaaauucagagcuag

SEQ ID NO: 692073 - RNA, 19 nt, Human
aagccaaaugaagcaagag

SEQ ID NO: 692074 - RNA, 24 nt, Human
aagcuuaccaaugaucaccaucca

SEQ ID NO: 692075 - RNA, 26 nt, Human
aagggguaggggaggggaaagaaugg

SEQ ID NO: 692076 - RNA, 22 nt, Human
aauccauaauuucccaagccaa

SEQ ID NO: 692077 - RNA, 21 nt, Human
acaaaauacauuauacagaag

SEQ ID NO: 692078 - RNA, 23 nt, Human
acaaucuacauuccagccagggc

SEQ ID NO: 692079 - RNA, 21 nt, Human
acacuguaaccaaaaaaagca

SEQ ID NO: 692080 - RNA, 22 nt, Human
acagaagacagcucacaguaca

SEQ ID NO: 692081 - RNA, 23 nt, Human
acaguacacauuacuaaaaacac

SEQ ID NO: 692082 - RNA, 23 nt, Human
acauuacuaaaaacacaaucuac

SEQ ID NO: 692083 - RNA, 24 nt, Human
acauuacuaaaaacacaaucuaca

SEQ ID NO: 692084 - RNA, 23 nt, Human
accucaucuucccucccuggcag

SEQ ID NO: 692085 - RNA, 23 nt, Human
agaacaaccccccuuaaaaugcu

SEQ ID NO: 692086 - RNA, 23 nt, Human
agaagccacuuuccaggagagga

SEQ ID NO: 692087 - RNA, 22 nt, Human
agcagcaaacauuaaaaguccc

SEQ ID NO: 692088 - RNA, 21 nt, Human
aggacacagguguauagaaca

SEQ ID NO: 692089 - RNA, 23 nt, Human
aggacccaccuugugggaguggc

SEQ ID NO: 692090 - RNA, 20 nt, Human
aggcaguugucccaagucug

SEQ ID NO: 692091 - RNA, 19 nt, Human
agggagggaaccacagagg

SEQ ID NO: 692092 - RNA, 23 nt, Human
aggggauggggugggaugugcga

SEQ ID NO: 692093 - RNA, 20 nt, Human
agguggguguggguagaguu

SEQ ID NO: 692094 - RNA, 26 nt, Human
aguacagacuccccaccucaucuucc

SEQ ID NO: 692095 - RNA, 21 nt, Human
auuguaguuuggcaggccagg

SEQ ID NO: 692096 - RNA, 24 nt, Human
caagccaaacaaauucagagcuag

SEQ ID NO: 692097 - RNA, 25 nt, Human
caagucuggguuuucugagacuugg

SEQ ID NO: 692098 - RNA, 21 nt, Human
caccucaucuucccucccugg

SEQ ID NO: 692099 - RNA, 23 nt, Human
cagacuccccaccucaucuuccc

SEQ ID NO: 692100 - RNA, 25 nt, Human
cagcaaguacauacaacacagcacu

SEQ ID NO: 692101 - RNA, 20 nt, Human
cagcauugagugggacuggu

SEQ ID NO: 692102 - RNA, 24 nt, Human
cagcgugagauccaaauacagcau

SEQ ID NO: 692103 - RNA, 26 nt, Human
caggaaaaaugagggagggaaccaca

SEQ ID NO: 692104 - RNA, 19 nt, Human
caggcucugcauuccaagg

SEQ ID NO: 692105 - RNA, 20 nt, Human
caguacagacuccccaccuc

SEQ ID NO: 692106 - RNA, 23 nt, Human
caucucaguacagacuccccacc

SEQ ID NO: 692107 - RNA, 18 nt, Human
caucucuaccaaagcaac

SEQ ID NO: 692108 - RNA, 18 nt, Human
ccaccucccaaguaguuc

SEQ ID NO: 692109 - RNA, 25 nt, Human
cccagagcaagcuuacagacaaaga

SEQ ID NO: 692110 - RNA, 27 nt, Human
cccauccccacucaauucauucaaaag

SEQ ID NO: 692111 - RNA, 23 nt, Human
ccccaccucaucuucccucccug

SEQ ID NO: 692112 - RNA, 25 nt, Human
ccccaccucaucuucccucccuggc

SEQ ID NO: 692113 - RNA, 18 nt, Human
ccccuccccaccucccaa

SEQ ID NO: 692114 - RNA, 18 nt, Human
cccucaaaagaaaagggg

SEQ ID NO: 692115 - RNA, 21 nt, Human
ccgcuagaugcaaagucaugc

SEQ ID NO: 692116 - RNA, 21 nt, Human
ccugagccugggguaaggaca

SEQ ID NO: 692117 - RNA, 19 nt, Human
ccugggguaaggacacagg

SEQ ID NO: 692118 - RNA, 22 nt, Human
cguaccccuccccaccucccaa

SEQ ID NO: 692119 - RNA, 21 nt, Human
cguuuagaauagccaucauug

SEQ ID NO: 692120 - RNA, 20 nt, Human
cuagucuggagcacagcuga

SEQ ID NO: 692121 - RNA, 25 nt, Human
cucaaccucagcauguuuuauuagc

SEQ ID NO: 692122 - RNA, 18 nt, Human
cucccuggcaguuccuga

SEQ ID NO: 692123 - RNA, 27 nt, Human
cucuagcauccuaguucccaggcaguu

SEQ ID NO: 692124 - RNA, 19 nt, Human
cugagacuugggucuucac

SEQ ID NO: 692125 - RNA, 24 nt, Human
cuugagccucauuuucuuuuucuu

SEQ ID NO: 692126 - RNA, 22 nt, Human
gacucguaccccuccccaccuc

SEQ ID NO: 692127 - RNA, 18 nt, Human
gaggagaaaucuaggggc

SEQ ID NO: 692128 - RNA, 21 nt, Human
gaggagaaaucuaggggcaga

SEQ ID NO: 692129 - RNA, 20 nt, Human
gccacagaggccuugaaaac

SEQ ID NO: 692130 - RNA, 18 nt, Human
ggacucguaccccucccc

SEQ ID NO: 692131 - RNA, 20 nt, Human
ggccaucuuuggccucuguc

SEQ ID NO: 692132 - RNA, 26 nt, Human
gggcaggugcugguugcuccagaggc

SEQ ID NO: 692133 - RNA, 22 nt, Human
gguaggggaggggaaagaaugg

SEQ ID NO: 692134 - RNA, 18 nt, Human
ggugagcaaagcuuacca

SEQ ID NO: 692135 - RNA, 20 nt, Human
ggugguaaguucagaagaaa

SEQ ID NO: 692136 - RNA, 22 nt, Human
guaccccuccccaccucccaag

SEQ ID NO: 692137 - RNA, 19 nt, Human
guaguucaggggauggggu

SEQ ID NO: 692138 - RNA, 21 nt, Human
guccuaagaauuaacaccauc

SEQ ID NO: 692139 - RNA, 25 nt, Human
uaaaaacacaaucuacauuccagcc

SEQ ID NO: 692140 - RNA, 24 nt, Human
uaaaaauaaagaugagucaagacc

SEQ ID NO: 692141 - RNA, 21 nt, Human
uaagaggcugagucccagagc

SEQ ID NO: 692142 - RNA, 20 nt, Human
uacagacuccccaccucauc

SEQ ID NO: 692143 - RNA, 21 nt, Human
uaccccuccccaccucccaag

SEQ ID NO: 692144 - RNA, 25 nt, Human
uagaacaaccccccuuaaaaugcua

SEQ ID NO: 692145 - RNA, 19 nt, Human
uagcaaggguuccagcaag

SEQ ID NO: 692146 - RNA, 20 nt, Human
uagcaaggguuccagcaagg

SEQ ID NO: 692147 - RNA, 20 nt, Human
uagcguuuagaauagccauc

SEQ ID NO: 692148 - RNA, 21 nt, Human
uagguggguguggguagaguu

SEQ ID NO: 692149 - RNA, 22 nt, Human
uaguucaggggaugggguggga

SEQ ID NO: 692150 - RNA, 27 nt, Human
ucacaguacacauuacuaaaaacacaa

SEQ ID NO: 692151 - RNA, 22 nt, Human
ucaguacagacuccccaccuca

SEQ ID NO: 692152 - RNA, 19 nt, Human
ucaugcccaaacuuuuaca

SEQ ID NO: 692153 - RNA, 23 nt, Human
uccaaguuucucuugcuuuagca

SEQ ID NO: 692154 - RNA, 19 nt, Human
uccagcaauauaaggaggc

SEQ ID NO: 692155 - RNA, 21 nt, Human
uccauaauuucccaagccaaa

SEQ ID NO: 692156 - RNA, 22 nt, Human
uccauaauuucccaagccaaac

SEQ ID NO: 692157 - RNA, 26 nt, Human
uccauaauuucccaagccaaacaaau

SEQ ID NO: 692158 - RNA, 21 nt, Human
ucccaaagauacauuuuuuuc

SEQ ID NO: 692159 - RNA, 24 nt, Human
ucccuggcaguuccugagccuggg

SEQ ID NO: 692160 - RNA, 23 nt, Human
ucguaccccuccccaccucccaa

SEQ ID NO: 692161 - RNA, 19 nt, Human
ucucuugcuuuagcagcaa

SEQ ID NO: 692162 - RNA, 22 nt, Human
ucuggguuuucugagacuuggg

SEQ ID NO: 692163 - RNA, 23 nt, Human
ucuuuggccucugucauuucacu

SEQ ID NO: 692164 - RNA, 24 nt, Human
ugaaaacaucugugacuagaaaag

SEQ ID NO: 692165 - RNA, 19 nt, Human
ugagaucagaaaagaccac

SEQ ID NO: 692166 - RNA, 20 nt, Human
ugagccugggguaaggacac

SEQ ID NO: 692167 - RNA, 21 nt, Human
ugagggagggaaccacagagg

SEQ ID NO: 692168 - RNA, 18 nt, Human
ugccuggggagggaggaa

SEQ ID NO: 692169 - RNA, 28 nt, Human
ugggguaaggacacagguggcgaacacg

SEQ ID NO: 692170 - RNA, 18 nt, Human
ugguuggucuguaaguca

SEQ ID NO: 692171 - RNA, 18 nt, Human
ugucucaaagcauuacag

SEQ ID NO: 692172 - RNA, 21 nt, Human
ugugcgaauaaaaauaaagau

SEQ ID NO: 692173 - RNA, 27 nt, Human
uugcagccacacagcugagaucagaaa

SEQ ID NO: 692174 - RNA, 19 nt, Human
uugguuggucuguaaguca

SEQ ID NO: 692175 - RNA, 22 nt, Human
uuguaguuuggcaggccaggcu

SEQ ID NO: 692176 - RNA, 19 nt, Human
uuugauaaagccaaaugaa

SEQ ID NO: 692177 - RNA, 18 nt, Human
aaaauaccauaaagguag

SEQ ID NO: 692178 - RNA, 22 nt, Human
aacaaucagcugguccuaaagc

SEQ ID NO: 692179 - RNA, 20 nt, Human
aagaagaugcagguuuuuaa

SEQ ID NO: 692180 - RNA, 21 nt, Human
aagcagccauugagggauuac

SEQ ID NO: 692181 - RNA, 23 nt, Human
aagcagccauugagggauuaccu

SEQ ID NO: 692182 - RNA, 19 nt, Human
aauaucaaguccuggauaa

SEQ ID NO: 692183 - RNA, 18 nt, Human
acgcggccaaggccucgg

SEQ ID NO: 692184 - RNA, 21 nt, Human
acgcggccaaggccucggggc

SEQ ID NO: 692185 - RNA, 20 nt, Human
acucgggagcacaaagcuug

SEQ ID NO: 692186 - RNA, 24 nt, Human
aggaaaagggauuucccccagugc

SEQ ID NO: 692187 - RNA, 21 nt, Human
aggaagaaggguucuggucgg

SEQ ID NO: 692188 - RNA, 19 nt, Human
aggcacuagaagucuaggc

SEQ ID NO: 692189 - RNA, 19 nt, Human
aggcagacaggcaggcagg

SEQ ID NO: 692190 - RNA, 25 nt, Human
aggcaggaaaagggauuucccccag

SEQ ID NO: 692191 - RNA, 19 nt, Human
agugaacaccaaaauacca

SEQ ID NO: 692192 - RNA, 23 nt, Human
agugaacaccaaaauaccauaaa

SEQ ID NO: 692193 - RNA, 22 nt, Human
auggcaccacaauuuucacaaa

SEQ ID NO: 692194 - RNA, 22 nt, Human
auucagaaauacugauuucaac

SEQ ID NO: 692195 - RNA, 21 nt, Human
caaagacccuuuccgccggcu

SEQ ID NO: 692196 - RNA, 22 nt, Human
caaagacccuuuccgccggcuc

SEQ ID NO: 692197 - RNA, 18 nt, Human
cacagcauucacaggacu

SEQ ID NO: 692198 - RNA, 22 nt, Human
cacagcauucacaggacugaag

SEQ ID NO: 692199 - RNA, 22 nt, Human
caccucaaacuccccucagccc

SEQ ID NO: 692200 - RNA, 19 nt, Human
cagccccaauauccuggca

SEQ ID NO: 692201 - RNA, 25 nt, Human
caggaaaagggauuucccccagugc

SEQ ID NO: 692202 - RNA, 21 nt, Human
cauaaaaccugcagaauucac

SEQ ID NO: 692203 - RNA, 22 nt, Human
cauaaaaccugcagaauucacc

SEQ ID NO: 692204 - RNA, 23 nt, Human
cauaacaaucagcugguccuaaa

SEQ ID NO: 692205 - RNA, 19 nt, Human
caucccugcuuacucggga

SEQ ID NO: 692206 - RNA, 22 nt, Human
ccagcccuucacguugugacaa

SEQ ID NO: 692207 - RNA, 22 nt, Human
cccauaaaaccugcagaauuca

SEQ ID NO: 692208 - RNA, 24 nt, Human
ccccauacugcguuuaagccaaau

SEQ ID NO: 692209 - RNA, 22 nt, Human
ccccggggcucgccgccuuccu

SEQ ID NO: 692210 - RNA, 22 nt, Human
ccccucagccccaauauccugg

SEQ ID NO: 692211 - RNA, 18 nt, Human
cccugcuuacucgggagc

SEQ ID NO: 692212 - RNA, 21 nt, Human
ccucaaacuccccucagcccc

SEQ ID NO: 692213 - RNA, 18 nt, Human
ccucacuuccuccucccg

SEQ ID NO: 692214 - RNA, 18 nt, Human
ccucaggagugucucugu

SEQ ID NO: 692215 - RNA, 24 nt, Human
ccucaucuuuaacucuuucuccaa

SEQ ID NO: 692216 - RNA, 21 nt, Human
ccuugcaagauuccuauuuuu

SEQ ID NO: 692217 - RNA, 23 nt, Human
cguaagugaacaccaaaauacca

SEQ ID NO: 692218 - RNA, 25 nt, Human
cguuacauacacgcugucacauaca

SEQ ID NO: 692219 - RNA, 23 nt, Human
cuagcaaaaaccuacaauggaaa

SEQ ID NO: 692220 - RNA, 22 nt, Human
cucagccccaauauccuggcau

SEQ ID NO: 692221 - RNA, 20 nt, Human
cucgaagcgggaccuggggc

SEQ ID NO: 692222 - RNA, 18 nt, Human
cucucauuuauuucaugc

SEQ ID NO: 692223 - RNA, 19 nt, Human
cucucauuuauuucaugcu

SEQ ID NO: 692224 - RNA, 18 nt, Human
cuucaagaagaugcaggu

SEQ ID NO: 692225 - RNA, 23 nt, Human
gaauuaccuugcaagauuccuau

SEQ ID NO: 692226 - RNA, 22 nt, Human
gagaaaagcaaggaaguccaac

SEQ ID NO: 692227 - RNA, 19 nt, Human
gauaugugccugcugugga

SEQ ID NO: 692228 - RNA, 25 nt, Human
gcccauaaaaccugcagaauucacc

SEQ ID NO: 692229 - RNA, 24 nt, Human
gccccgggucccuuccuagggagu

SEQ ID NO: 692230 - RNA, 20 nt, Human
gcccuggguuaacagcaacc

SEQ ID NO: 692231 - RNA, 20 nt, Human
gcggccaaggccucggggcc

SEQ ID NO: 692232 - RNA, 19 nt, Human
ggaaaagggauuuccccca

SEQ ID NO: 692233 - RNA, 21 nt, Human
ggagagugagauccaggcugu

SEQ ID NO: 692234 - RNA, 21 nt, Human
ggaggggaugauuuuccacug

SEQ ID NO: 692235 - RNA, 19 nt, Human
ggcagggagaaaacucuga

SEQ ID NO: 692236 - RNA, 18 nt, Human
ggccaaggccucggggcc

SEQ ID NO: 692237 - RNA, 20 nt, Human
ggcccuggguuaacagcaac

SEQ ID NO: 692238 - RNA, 22 nt, Human
ggggaggggaugauuuuccacu

SEQ ID NO: 692239 - RNA, 20 nt, Human
ggggaugagaagcacacagu

SEQ ID NO: 692240 - RNA, 19 nt, Human
gggucccuuccuagggagu

SEQ ID NO: 692241 - RNA, 22 nt, Human
gguaauauacauuccagcccuu

SEQ ID NO: 692242 - RNA, 18 nt, Human
ggucacaggcagacaggc

SEQ ID NO: 692243 - RNA, 19 nt, Human
gguccuuuuuuuuuccccc

SEQ ID NO: 692244 - RNA, 21 nt, Human
gguggaaguacguuuguugcu

SEQ ID NO: 692245 - RNA, 18 nt, Human
guccuggauaacuucaua

SEQ ID NO: 692246 - RNA, 19 nt, Human
guccuuuuuuuuucccccu

SEQ ID NO: 692247 - RNA, 21 nt, Human
guccuuuuuuuuucccccuaa

SEQ ID NO: 692248 - RNA, 23 nt, Human
guggaucuggggacacaucuggu

SEQ ID NO: 692249 - RNA, 24 nt, Human
uaaaacugaugcuucaagaagaug

SEQ ID NO: 692250 - RNA, 20 nt, Human
uaacucuuucuccaacaccu

SEQ ID NO: 692251 - RNA, 24 nt, Human
uaagcauaaaacuggucaucccuu

SEQ ID NO: 692252 - RNA, 18 nt, Human
uaagccaaauuaggcuaa

SEQ ID NO: 692253 - RNA, 24 nt, Human
uaagccaaauuaggcuaaaauggg

SEQ ID NO: 692254 - RNA, 21 nt, Human
uaagugaacaccaaaauacca

SEQ ID NO: 692255 - RNA, 21 nt, Human
uaagugaacaccaaaauaccu

SEQ ID NO: 692256 - RNA, 20 nt, Human
uaauacguacacaggucaca

SEQ ID NO: 692257 - RNA, 22 nt, Human
uaauauaaauaggauuccuaca

SEQ ID NO: 692258 - RNA, 25 nt, Human
uaccacaaccaggggaugagaagca

SEQ ID NO: 692259 - RNA, 21 nt, Human
ucacaggcagacaggcaggca

SEQ ID NO: 692260 - RNA, 19 nt, Human
ucacguugugacaagccca

SEQ ID NO: 692261 - RNA, 18 nt, Human
uccaacaccuuuuuccag

SEQ ID NO: 692262 - RNA, 19 nt, Human
ucccccagugcaggcuccu

SEQ ID NO: 692263 - RNA, 18 nt, Human
ucccugcuuacucgggag

SEQ ID NO: 692264 - RNA, 20 nt, Human
uccuugaccuaccacaacca

SEQ ID NO: 692265 - RNA, 24 nt, Human
uccuuugguucugccucagaggca

SEQ ID NO: 692266 - RNA, 26 nt, Human
ucuauggguggggagugccacaggaa

SEQ ID NO: 692267 - RNA, 20 nt, Human
ucugccucagaggcacuaga

SEQ ID NO: 692268 - RNA, 26 nt, Human
ugaacacauaacccacuugcaaauaa

SEQ ID NO: 692269 - RNA, 19 nt, Human
ugaacaccaaaauaccaua

SEQ ID NO: 692270 - RNA, 23 nt, Human
ugcccgggcgcagcagcaaagac

SEQ ID NO: 692271 - RNA, 19 nt, Human
ugccugggagcuuccuggc

SEQ ID NO: 692272 - RNA, 21 nt, Human
uguuacuaagaggagagugag

SEQ ID NO: 692273 - RNA, 20 nt, Human
uuaacaccucaaacuccccu

SEQ ID NO: 692274 - RNA, 26 nt, Human
uuaccugaaggaccuuucuuaauugc

SEQ ID NO: 692275 - RNA, 21 nt, Human
uucaaagcagccauugaggga

SEQ ID NO: 692276 - RNA, 18 nt, Human
uucuccaacaccuuuuuc

SEQ ID NO: 692277 - RNA, 21 nt, Human
uucugccucagaggcacuaga

SEQ ID NO: 692278 - RNA, 18 nt, Human
uuuaacaccucaaacucc

SEQ ID NO: 692279 - RNA, 20 nt, Human
uuuggcccuaccuugcucuu

SEQ ID NO: 692280 - RNA, 20 nt, Human
uuuuuccagucauccaucuu

SEQ ID NO: 692281 - RNA, 23 nt, Human
aaaaaguacagaagcauauccuc

SEQ ID NO: 692282 - RNA, 18 nt, Human
aaaauuuauacaaauuug

SEQ ID NO: 692283 - RNA, 19 nt, Human
aaagugcuggaauuacagg

SEQ ID NO: 692284 - RNA, 24 nt, Human
aaagugcuggaauuacaggcguga

SEQ ID NO: 692285 - RNA, 25 nt, Human
aagcgauccuccugccucagccucc

SEQ ID NO: 692286 - RNA, 24 nt, Human
aaguaccugggacuacaggugugu

SEQ ID NO: 692287 - RNA, 26 nt, Human
aagugcuggaauuacaggcgugagcc

SEQ ID NO: 692288 - RNA, 18 nt, Human
aauuacaggcgugagcca

SEQ ID NO: 692289 - RNA, 22 nt, Human
aauuacaggcgugagccacugc

SEQ ID NO: 692290 - RNA, 22 nt, Human
aauuacaggcgugagccacugc

SEQ ID NO: 692291 - RNA, 22 nt, Human
aauucucauuuuaauaaucuua

SEQ ID NO: 692292 - RNA, 18 nt, Human
acaggguuuuaccauguu

SEQ ID NO: 692293 - RNA, 21 nt, Human
acaggguuuuaccauguuggc

SEQ ID NO: 692294 - RNA, 24 nt, Human
acaggguuuuaccauguuggccag

SEQ ID NO: 692295 - RNA, 22 nt, Human
accauguuggccagccuggucu

SEQ ID NO: 692296 - RNA, 22 nt, Human
accauguuggccagccuggucu

SEQ ID NO: 692297 - RNA, 23 nt, Human
accucggccucccaaagugcugg

SEQ ID NO: 692298 - RNA, 19 nt, Human
acuacaggugugugccacc

SEQ ID NO: 692299 - RNA, 23 nt, Human
acucuguagcccaggcuggacug

SEQ ID NO: 692300 - RNA, 25 nt, Human
acucuguagcccaggcuggacugca

SEQ ID NO: 692301 - RNA, 24 nt, Human
acugcaguagcacgaucucagcuc

SEQ ID NO: 692302 - RNA, 22 nt, Human
acuucauaaacaaaaaaaacua

SEQ ID NO: 692303 - RNA, 26 nt, Human
agccuggucuugaacuccugaccucc

SEQ ID NO: 692304 - RNA, 18 nt, Human
aggcacugggggauggag

SEQ ID NO: 692305 - RNA, 21 nt, Human
auaaacaaaaaaaacuauaca

SEQ ID NO: 692306 - RNA, 24 nt, Human
auaauaaaaucuucugggaguuca

SEQ ID NO: 692307 - RNA, 24 nt, Human
caaagugcuggaauuacaggcgug

SEQ ID NO: 692308 - RNA, 22 nt, Human
caagcgauccuccugccucagc

SEQ ID NO: 692309 - RNA, 27 nt, Human
caagcgauccuccugccucagccuccc

SEQ ID NO: 692310 - RNA, 25 nt, Human
cacaauuuagauuuauuuucuaccu

SEQ ID NO: 692311 - RNA, 18 nt, Human
cacucuguagcccaggcu

SEQ ID NO: 692312 - RNA, 23 nt, Human
cacugcaaccucugcuuccuggg

SEQ ID NO: 692313 - RNA, 23 nt, Human
caggguuuuaccauguuggccag

SEQ ID NO: 692314 - RNA, 24 nt, Human
caguagagacaggguuuuaccaug

SEQ ID NO: 692315 - RNA, 22 nt, Human
ccaaagugcuggaauuacaggc

SEQ ID NO: 692316 - RNA, 24 nt, Human
ccaaagugcuggaauuacaggcgu

SEQ ID NO: 692317 - RNA, 20 nt, Human
ccaccacacccgacuaauuu

SEQ ID NO: 692318 - RNA, 22 nt, Human
cccaaguaccugggacuacagg

SEQ ID NO: 692319 - RNA, 21 nt, Human
ccugcagcggggugccagagc

SEQ ID NO: 692320 - RNA, 20 nt, Human
ccuggguucaagcgauccuc

SEQ ID NO: 692321 - RNA, 23 nt, Human
ccuggguucaagcgauccuccug

SEQ ID NO: 692322 - RNA, 24 nt, Human
cucacugcaaccucugcuuccugg

SEQ ID NO: 692323 - RNA, 23 nt, Human
cugcaaccucugcuuccuggguu

SEQ ID NO: 692324 - RNA, 24 nt, Human
cugcaaccucugcuuccuggguuc

SEQ ID NO: 692325 - RNA, 24 nt, Human
cuuccuggguucaagcgauccucc

SEQ ID NO: 692326 - RNA, 21 nt, Human
cuugaacuccugaccucaacc

SEQ ID NO: 692327 - RNA, 24 nt, Human
gaccucaacugacccgcccaccuc

SEQ ID NO: 692328 - RNA, 20 nt, Human
gagcagcugagcgcaggccc

SEQ ID NO: 692329 - RNA, 24 nt, Human
gccuggucuugaacuccugaccuc

SEQ ID NO: 692330 - RNA, 24 nt, Human
gcgauccuccugccucagccuccc

SEQ ID NO: 692331 - RNA, 19 nt, Human
ggucuugaacuccugaccu

SEQ ID NO: 692332 - RNA, 18 nt, Human
guacagaagcauauccuc

SEQ ID NO: 692333 - RNA, 18 nt, Human
guuuuuguuguuuuucag

SEQ ID NO: 692334 - RNA, 21 nt, Human
uaaaaucuucugggaguucau

SEQ ID NO: 692335 - RNA, 23 nt, Human
uacaggcgugagccacugcgucc

SEQ ID NO: 692336 - RNA, 23 nt, Human
uacaggcgugagccacugcgucc

SEQ ID NO: 692337 - RNA, 23 nt, Human
uacaggugugugccaccacaccc

SEQ ID NO: 692338 - RNA, 21 nt, Human
uaccauguuggccagccuggu

SEQ ID NO: 692339 - RNA, 24 nt, Human
uaccauguuggccagccuggucuu

SEQ ID NO: 692340 - RNA, 21 nt, Human
uagagacaggguuuuaccaug

SEQ ID NO: 692341 - RNA, 22 nt, Human
uagagacaggguuuuaccaugu

SEQ ID NO: 692342 - RNA, 20 nt, Human
uagauauaauuaauaacacu

SEQ ID NO: 692343 - RNA, 24 nt, Human
uagcacgaucucagcucacugcaa

SEQ ID NO: 692344 - RNA, 18 nt, Human
uauccucaagaugugaag

SEQ ID NO: 692345 - RNA, 19 nt, Human
ucaagcgauccuccugccu

SEQ ID NO: 692346 - RNA, 24 nt, Human
ucacugcaaccucugcuuccuggg

SEQ ID NO: 692347 - RNA, 24 nt, Human
ucaguagagacaggguuuuaccau

SEQ ID NO: 692348 - RNA, 24 nt, Human
ucccaaagugcuggaauuacaggc

SEQ ID NO: 692349 - RNA, 24 nt, Human
ucccaaguaccugggacuacaggu

SEQ ID NO: 692350 - RNA, 26 nt, Human
uccuccugccucagccucccaaguac

SEQ ID NO: 692351 - RNA, 21 nt, Human
uccuggguucaagcgauccuc

SEQ ID NO: 692352 - RNA, 24 nt, Human
uccuggguucaagcgauccuccug

SEQ ID NO: 692353 - RNA, 23 nt, Human
ucucacucuguagcccaggcugg

SEQ ID NO: 692354 - RNA, 24 nt, Human
ucucacucuguagcccaggcugga

SEQ ID NO: 692355 - RNA, 18 nt, Human
ucugauugggacauaaga

SEQ ID NO: 692356 - RNA, 18 nt, Human
ucuguagcccaggcugga

SEQ ID NO: 692357 - RNA, 24 nt, Human
ucuguagcccaggcuggacugcag

SEQ ID NO: 692358 - RNA, 19 nt, Human
ucuugaacuccugaccuca

SEQ ID NO: 692359 - RNA, 24 nt, Human
ugacccgcccaccucggccuccca

SEQ ID NO: 692360 - RNA, 22 nt, Human
ugaccucaacugacccgcccac

SEQ ID NO: 692361 - RNA, 18 nt, Human
ugagcgcaggcccuucug

SEQ ID NO: 692362 - RNA, 18 nt, Human
ugagcgcaggcccuucug

SEQ ID NO: 692363 - RNA, 19 nt, Human
ugcaaccucugcuuccugg

SEQ ID NO: 692364 - RNA, 24 nt, Human
ugccucagccucccaaguaccugg

SEQ ID NO: 692365 - RNA, 24 nt, Human
ugcuggaauuacaggcgugagcca

SEQ ID NO: 692366 - RNA, 19 nt, Human
uggaauuacaggcgugagc

SEQ ID NO: 692367 - RNA, 21 nt, Human
uggaauuacaggcgugagcca

SEQ ID NO: 692368 - RNA, 22 nt, Human
uggaauuacaggcgugagccac

SEQ ID NO: 692369 - RNA, 22 nt, Human
uggaauuacaggcgugagccac

SEQ ID NO: 692370 - RNA, 24 nt, Human
uggaauuacaggcgugagccacug

SEQ ID NO: 692371 - RNA, 24 nt, Human
uggaauuacaggcgugagccacug

SEQ ID NO: 692372 - RNA, 26 nt, Human
uggaauuacaggcgugagccacugcg

SEQ ID NO: 692373 - RNA, 22 nt, Human
uggaggacaccuuguuuccuca

SEQ ID NO: 692374 - RNA, 21 nt, Human
ugggacuacaggugugugcca

SEQ ID NO: 692375 - RNA, 22 nt, Human
ugggacuacaggugugugccac

SEQ ID NO: 692376 - RNA, 24 nt, Human
ugggacuacaggugugugccacca

SEQ ID NO: 692377 - RNA, 18 nt, Human
ugggaguucaugaucccu

SEQ ID NO: 692378 - RNA, 23 nt, Human
uggguucaagcgauccuccugcc

SEQ ID NO: 692379 - RNA, 24 nt, Human
uggguucaagcgauccuccugccu

SEQ ID NO: 692380 - RNA, 21 nt, Human
uguagcccaggcuggacugca

SEQ ID NO: 692381 - RNA, 23 nt, Human
ugugaaggcacugggggauggag

SEQ ID NO: 692382 - RNA, 27 nt, Human
uguuggccagccuggucuugaacuccu

SEQ ID NO: 692383 - RNA, 25 nt, Human
uuaccauguuggccagccuggucuu

SEQ ID NO: 692384 - RNA, 21 nt, Human
uucaagcgauccuccugccuc

SEQ ID NO: 692385 - RNA, 24 nt, Human
uucaagcgauccuccugccucagc

SEQ ID NO: 692386 - RNA, 22 nt, Human
uuguuguuuguuuuuguuuuuu

SEQ ID NO: 692387 - RNA, 22 nt, Human
uuuaccauguuggccagccugg

SEQ ID NO: 692388 - RNA, 24 nt, Human
uuuucaguagagacaggguuuuac

SEQ ID NO: 692389 - RNA, 23 nt, Human
aaaaaaaccaucaucaucuuaag

SEQ ID NO: 692390 - RNA, 20 nt, Human
aaacugccauucagagcgag

SEQ ID NO: 692391 - RNA, 18 nt, Human
aaagaggggcucugggug

SEQ ID NO: 692392 - RNA, 18 nt, Human
aaaggccauucuaugagu

SEQ ID NO: 692393 - RNA, 24 nt, Human
aacauuuggaagaauccuaaacag

SEQ ID NO: 692394 - RNA, 26 nt, Human
aaccaaugcucagcgacccaacucuc

SEQ ID NO: 692395 - RNA, 21 nt, Human
aacccaggcuucccagcucca

SEQ ID NO: 692396 - RNA, 28 nt, Human
aacccauuuuccuccugaaauaaacuuu

SEQ ID NO: 692397 - RNA, 18 nt, Human
aacucagcccaauaaaaa

SEQ ID NO: 692398 - RNA, 23 nt, Human
aagaaaugccaacuugaacagaa

SEQ ID NO: 692399 - RNA, 18 nt, Human
aagaagaaucugacaagc

SEQ ID NO: 692400 - RNA, 23 nt, Human
aauaaaaaaaaccaucaucaucu

SEQ ID NO: 692401 - RNA, 23 nt, Human
aauaucaaagaccccaggaagaa

SEQ ID NO: 692402 - RNA, 21 nt, Human
acaaacaaauaucaaagaccc

SEQ ID NO: 692403 - RNA, 22 nt, Human
acaaacaaauaucaaagacccc

SEQ ID NO: 692404 - RNA, 18 nt, Human
acaaagaggggcucuggg

SEQ ID NO: 692405 - RNA, 22 nt, Human
acaagaaaugccaacuugaaca

SEQ ID NO: 692406 - RNA, 24 nt, Human
acaggaucuuauuuaacccuguaa

SEQ ID NO: 692407 - RNA, 22 nt, Human
accaauaccgauuggauacucu

SEQ ID NO: 692408 - RNA, 23 nt, Human
accuaauuggguucuccccauaa

SEQ ID NO: 692409 - RNA, 22 nt, Human
agaccuuggggacaagucuggu

SEQ ID NO: 692410 - RNA, 22 nt, Human
agcccaauaaaaaaaaccauca

SEQ ID NO: 692411 - RNA, 19 nt, Human
agccuccagggucacagua

SEQ ID NO: 692412 - RNA, 21 nt, Human
agcgcugagaccuuggggaca

SEQ ID NO: 692413 - RNA, 23 nt, Human
aggaggaaaacacugacuauuuc

SEQ ID NO: 692414 - RNA, 23 nt, Human
aggcacagagagggcgugacuug

SEQ ID NO: 692415 - RNA, 24 nt, Human
aggcacagagagggcgugacuugu

SEQ ID NO: 692416 - RNA, 23 nt, Human
agugaaggaagaaaguaucuaaa

SEQ ID NO: 692417 - RNA, 23 nt, Human
augcagaaaacggaggcacagag

SEQ ID NO: 692418 - RNA, 22 nt, Human
caaacaaauaucaaagacccca

SEQ ID NO: 692419 - RNA, 20 nt, Human
caaagaccccaggaagaaca

SEQ ID NO: 692420 - RNA, 23 nt, Human
caacucucaucugaauggacacc

SEQ ID NO: 692421 - RNA, 20 nt, Human
caagaaaugccaacuugaac

SEQ ID NO: 692422 - RNA, 22 nt, Human
cacaauccagaaauagucucgg

SEQ ID NO: 692423 - RNA, 19 nt, Human
cacccaugcuuccuauugu

SEQ ID NO: 692424 - RNA, 19 nt, Human
cagaaaacggaggcacaga

SEQ ID NO: 692425 - RNA, 23 nt, Human
cagaauguaguuugcuuuuugug

SEQ ID NO: 692426 - RNA, 21 nt, Human
caggccccuuauuuccugggg

SEQ ID NO: 692427 - RNA, 20 nt, Human
caucagggcacaaagagggg

SEQ ID NO: 692428 - RNA, 26 nt, Human
caucaucaucuuaagagccuccaggg

SEQ ID NO: 692429 - RNA, 23 nt, Human
cauuuggaagaauccuaaacagg

SEQ ID NO: 692430 - RNA, 23 nt, Human
ccaggaaaucugguguuccuagg

SEQ ID NO: 692431 - RNA, 19 nt, Human
ccaucaucaucuuaagagc

SEQ ID NO: 692432 - RNA, 19 nt, Human
cccaauaaaaaaaaccauc

SEQ ID NO: 692433 - RNA, 23 nt, Human
ccccuaauucgugaacucagccc

SEQ ID NO: 692434 - RNA, 24 nt, Human
cccugcucaucccaacaucuucca

SEQ ID NO: 692435 - RNA, 22 nt, Human
ccugcucaucccaacaucuucc

SEQ ID NO: 692436 - RNA, 21 nt, Human
cgacuuccagcuccugccccu

SEQ ID NO: 692437 - RNA, 18 nt, Human
cgaggagcacacaaucca

SEQ ID NO: 692438 - RNA, 20 nt, Human
cgagugcaguccuguugagc

SEQ ID NO: 692439 - RNA, 23 nt, Human
cgcagcgcugagaccuuggggac

SEQ ID NO: 692440 - RNA, 18 nt, Human
cuccaggauuuggcagcg

SEQ ID NO: 692441 - RNA, 23 nt, Human
cuccccugcaauauuaguuuuau

SEQ ID NO: 692442 - RNA, 24 nt, Human
cugugugccaucccagcacugggg

SEQ ID NO: 692443 - RNA, 21 nt, Human
cuucccaggagagaaaacccu

SEQ ID NO: 692444 - RNA, 21 nt, Human
cuugggguuacacacaggauu

SEQ ID NO: 692445 - RNA, 19 nt, Human
gaaaacggaggcacagaga

SEQ ID NO: 692446 - RNA, 24 nt, Human
gaaauaaacuuucuaagcacccau

SEQ ID NO: 692447 - RNA, 18 nt, Human
gaaccaggaaaucuggug

SEQ ID NO: 692448 - RNA, 19 nt, Human
gaccagaacccaggcuucc

SEQ ID NO: 692449 - RNA, 22 nt, Human
gacccaacucucaucugaaugg

SEQ ID NO: 692450 - RNA, 24 nt, Human
gacccaacucucaucugaauggac

SEQ ID NO: 692451 - RNA, 24 nt, Human
gaccgcagcgcugagaccuugggg

SEQ ID NO: 692452 - RNA, 21 nt, Human
gaccuuggggacaagucuggu

SEQ ID NO: 692453 - RNA, 19 nt, Human
gagcacacaauccagaaau

SEQ ID NO: 692454 - RNA, 21 nt, Human
gaguucugcugcaggucuggg

SEQ ID NO: 692455 - RNA, 23 nt, Human
gaugacauggacagccccaagga

SEQ ID NO: 692456 - RNA, 20 nt, Human
ggcaagcuucucccugagca

SEQ ID NO: 692457 - RNA, 21 nt, Human
ggcagaaguguuuaaccccuu

SEQ ID NO: 692458 - RNA, 23 nt, Human
gggacaagucuggucugcaugcu

SEQ ID NO: 692459 - RNA, 18 nt, Human
gggcagggcagagacgag

SEQ ID NO: 692460 - RNA, 21 nt, Human
guuuucaggggugagacaggg

SEQ ID NO: 692461 - RNA, 28 nt, Human
uaacaaacaaauaucaaagaccccagga

SEQ ID NO: 692462 - RNA, 18 nt, Human
uaacccuguaacuccccu

SEQ ID NO: 692463 - RNA, 19 nt, Human
uaauucgugaacucagccc

SEQ ID NO: 692464 - RNA, 20 nt, Human
uagaaggggccaacauauca

SEQ ID NO: 692465 - RNA, 20 nt, Human
uaguuugcuuuuugugugaa

SEQ ID NO: 692466 - RNA, 20 nt, Human
ucagcccaauaaaaaaaacc

SEQ ID NO: 692467 - RNA, 18 nt, Human
uccagcuccugccccuaa

SEQ ID NO: 692468 - RNA, 23 nt, Human
ucccagcacuggggauauggugg

SEQ ID NO: 692469 - RNA, 18 nt, Human
uccugggggaggugggga

SEQ ID NO: 692470 - RNA, 23 nt, Human
ugaaaaaauaaaaacacagucga

SEQ ID NO: 692471 - RNA, 20 nt, Human
ugaaacuaaaagguaaggau

SEQ ID NO: 692472 - RNA, 21 nt, Human
ugaggaaacugccauucagag

SEQ ID NO: 692473 - RNA, 24 nt, Human
ugauggggacaugaaguaaagaaa

SEQ ID NO: 692474 - RNA, 21 nt, Human
ugccagagaaugcacaugaag

SEQ ID NO: 692475 - RNA, 25 nt, Human
ugccccuaauucgugaacucagccc

SEQ ID NO: 692476 - RNA, 20 nt, Human
ugcuuugccuaaggucuccc

SEQ ID NO: 692477 - RNA, 20 nt, Human
uggacagccccaaggauuga

SEQ ID NO: 692478 - RNA, 22 nt, Human
uggggaaugggggucacuucaa

SEQ ID NO: 692479 - RNA, 23 nt, Human
ugggggagguggggagcaggacg

SEQ ID NO: 692480 - RNA, 19 nt, Human
uggugaggacugcugaaac

SEQ ID NO: 692481 - RNA, 22 nt, Human
uuccaguucaaaggcaagcuuc

SEQ ID NO: 692482 - RNA, 26 nt, Human
uucccaggagagaaaacccugaaagc

SEQ ID NO: 692483 - RNA, 22 nt, Human
uuccgccguugcugccgcugcu

SEQ ID NO: 692484 - RNA, 21 nt, Human
uuuuaagaaaucuaagagaug

SEQ ID NO: 692485 - RNA, 20 nt, Human
aaagugccaucgaggcaaaa

SEQ ID NO: 692486 - RNA, 25 nt, Human
aaaugagucucuuucucauaggcuc

SEQ ID NO: 692487 - RNA, 20 nt, Human
aggaaagugccaucgaggca

SEQ ID NO: 692488 - RNA, 22 nt, Human
aggcaaaauucccccaucugcg

SEQ ID NO: 692489 - RNA, 23 nt, Human
caaaacaaggaucugcuggugau

SEQ ID NO: 692490 - RNA, 19 nt, Human
cucuggugggggcggaguc

SEQ ID NO: 692491 - RNA, 23 nt, Human
cugaggcuggggcucuggguacc

SEQ ID NO: 692492 - RNA, 21 nt, Human
gagccuagccccucugguggg

SEQ ID NO: 692493 - RNA, 24 nt, Human
gaugcuucacagugaaaccuccau

SEQ ID NO: 692494 - RNA, 18 nt, Human
ucccagagccuagccccu

SEQ ID NO: 692495 - RNA, 24 nt, Human
ucccagagccuagccccucuggug

SEQ ID NO: 692496 - RNA, 22 nt, Human
ugccuuuagacuuauucugcuc

SEQ ID NO: 692497 - RNA, 19 nt, Human
ugcuggugaugcuucacag

SEQ ID NO: 692498 - RNA, 19 nt, Human
uuuuuuuuuuuuuuuuugu

SEQ ID NO: 692499 - RNA, 27 nt, Human
uuuuuuuuuuuuuuuuuuuuuuugggg

SEQ ID NO: 692500 - RNA, 18 nt, Human
aaaaaacaagcugaacuc

SEQ ID NO: 692501 - RNA, 25 nt, Human
aaacaaaaaucagacaggaagacga

SEQ ID NO: 692502 - RNA, 23 nt, Human
aaagaucgacaggauccaggcug

SEQ ID NO: 692503 - RNA, 26 nt, Human
aaaucaaccccaaauccagacgucac

SEQ ID NO: 692504 - RNA, 19 nt, Human
aacaacaggaccccaucuc

SEQ ID NO: 692505 - RNA, 19 nt, Human
aacguggggacagaaagaa

SEQ ID NO: 692506 - RNA, 22 nt, Human
aacguggggacagaaagaauaa

SEQ ID NO: 692507 - RNA, 21 nt, Human
aaggaaucgagggcccagaac

SEQ ID NO: 692508 - RNA, 25 nt, Human
aauaagacuccucucucugccuucu

SEQ ID NO: 692509 - RNA, 21 nt, Human
aaucccaccccagcacaaaaa

SEQ ID NO: 692510 - RNA, 27 nt, Human
acaaaaaucagacaggaagacgaaaca

SEQ ID NO: 692511 - RNA, 19 nt, Human
acaacaggaccccaucuca

SEQ ID NO: 692512 - RNA, 21 nt, Human
acuacaaaacaaaaaucagac

SEQ ID NO: 692513 - RNA, 18 nt, Human
agcaaaccgaagaaaaac

SEQ ID NO: 692514 - RNA, 18 nt, Human
agcacagucaaugcugca

SEQ ID NO: 692515 - RNA, 20 nt, Human
aggaccacgguuuauuacca

SEQ ID NO: 692516 - RNA, 22 nt, Human
aucaaugugaccauuagcuccg

SEQ ID NO: 692517 - RNA, 18 nt, Human
aucgcaaaaaggaccacg

SEQ ID NO: 692518 - RNA, 24 nt, Human
auucuucaacauugacccauaauc

SEQ ID NO: 692519 - RNA, 21 nt, Human
caacaggaccccaucucagau

SEQ ID NO: 692520 - RNA, 18 nt, Human
cacaaaaaucaaccccaa

SEQ ID NO: 692521 - RNA, 19 nt, Human
cacaaaaaucaaccccaaa

SEQ ID NO: 692522 - RNA, 22 nt, Human
cacaaaaaucaaccccaaaucc

SEQ ID NO: 692523 - RNA, 24 nt, Human
cagcacaaaaaucaaccccaaauc

SEQ ID NO: 692524 - RNA, 23 nt, Human
cagcgaaagauagagaugcccuu

SEQ ID NO: 692525 - RNA, 20 nt, Human
caggauccaggcugcacugu

SEQ ID NO: 692526 - RNA, 20 nt, Human
cagggccaaggcaauaguga

SEQ ID NO: 692527 - RNA, 21 nt, Human
cagggccaaggcaauagugag

SEQ ID NO: 692528 - RNA, 23 nt, Human
ccaaagaauagaauauauauuua

SEQ ID NO: 692529 - RNA, 21 nt, Human
ccacgguuuauuaccaucucu

SEQ ID NO: 692530 - RNA, 19 nt, Human
ccagcaaaccgaagaaaaa

SEQ ID NO: 692531 - RNA, 18 nt, Human
cccaccccagcacaaaaa

SEQ ID NO: 692532 - RNA, 18 nt, Human
ccuaaaaaucccacagca

SEQ ID NO: 692533 - RNA, 21 nt, Human
cgaaggauguccaauaagcac

SEQ ID NO: 692534 - RNA, 19 nt, Human
cgacaggauccaggcugca

SEQ ID NO: 692535 - RNA, 21 nt, Human
cucucaaaucuugcagcccuu

SEQ ID NO: 692536 - RNA, 22 nt, Human
cuggcugcuccaaguuccuuuu

SEQ ID NO: 692537 - RNA, 24 nt, Human
cugggcggcacuggugcaccucug

SEQ ID NO: 692538 - RNA, 21 nt, Human
cuuuucuugggaaaagggugc

SEQ ID NO: 692539 - RNA, 18 nt, Human
gacccauaaucccacccc

SEQ ID NO: 692540 - RNA, 18 nt, Human
gacuucuucuggcugcuc

SEQ ID NO: 692541 - RNA, 18 nt, Human
gacuuuucuugggaaaag

SEQ ID NO: 692542 - RNA, 22 nt, Human
gacuuuucuugggaaaagggug

SEQ ID NO: 692543 - RNA, 18 nt, Human
gcacugugugcacaacag

SEQ ID NO: 692544 - RNA, 18 nt, Human
gggaaaggaaucgagggc

SEQ ID NO: 692545 - RNA, 21 nt, Human
gggccaaggcaauagugagaa

SEQ ID NO: 692546 - RNA, 24 nt, Human
ggugggaaaggaaucgagggccca

SEQ ID NO: 692547 - RNA, 22 nt, Human
gguggugggaaaggaaucgagg

SEQ ID NO: 692548 - RNA, 20 nt, Human
guccaauaagcaccugggaa

SEQ ID NO: 692549 - RNA, 24 nt, Human
uaaaaauaauaagacuccucucuc

SEQ ID NO: 692550 - RNA, 18 nt, Human
uaacaaagaccccgcgug

SEQ ID NO: 692551 - RNA, 21 nt, Human
uacaaaacaaaaaucagacag

SEQ ID NO: 692552 - RNA, 19 nt, Human
uacaacagacagacuauac

SEQ ID NO: 692553 - RNA, 23 nt, Human
uacagacuuaaaaauucuucaac

SEQ ID NO: 692554 - RNA, 19 nt, Human
uaccaucucuaacgcccau

SEQ ID NO: 692555 - RNA, 22 nt, Human
uacuggagccaaaaaacaagcu

SEQ ID NO: 692556 - RNA, 24 nt, Human
uagagaugcccuugaaaauguguc

SEQ ID NO: 692557 - RNA, 23 nt, Human
ucaguccuggauggauccuagac

SEQ ID NO: 692558 - RNA, 20 nt, Human
uccagcaaaccgaagaaaaa

SEQ ID NO: 692559 - RNA, 20 nt, Human
uccaggcugcacugugugcc

SEQ ID NO: 692560 - RNA, 24 nt, Human
ucccaccccagcacaaaaaucaac

SEQ ID NO: 692561 - RNA, 22 nt, Human
uccccgagggaagaacggaagc

SEQ ID NO: 692562 - RNA, 21 nt, Human
ucuuaucuaccugggcggcac

SEQ ID NO: 692563 - RNA, 26 nt, Human
ucuugcagcccuuuacuuccuuuauu

SEQ ID NO: 692564 - RNA, 19 nt, Human
ugacaucgcaaaaaggacc

SEQ ID NO: 692565 - RNA, 24 nt, Human
ugacccauaaucccaccccagcac

SEQ ID NO: 692566 - RNA, 22 nt, Human
ugagcaggagcgagagggcgcc

SEQ ID NO: 692567 - RNA, 20 nt, Human
ugauaauaaacaacaggacc

SEQ ID NO: 692568 - RNA, 18 nt, Human
ugcaccucugaggucagg

SEQ ID NO: 692569 - RNA, 25 nt, Human
ugcgcgccccacccugugcaagaau

SEQ ID NO: 692570 - RNA, 21 nt, Human
uggauccuagaccuggggcuu

SEQ ID NO: 692571 - RNA, 20 nt, Human
uggauggauccuagaccugg

SEQ ID NO: 692572 - RNA, 18 nt, Human
ugucuucaggugccacaa

SEQ ID NO: 692573 - RNA, 21 nt, Human
ugugaccauuagcuccgccac

SEQ ID NO: 692574 - RNA, 20 nt, Human
uuaaaacugcagaggaauac

SEQ ID NO: 692575 - RNA, 24 nt, Human
uuaaaagacacaauguuaaaaaua

SEQ ID NO: 692576 - RNA, 22 nt, Human
uuaacagcacaaaagacgacac

SEQ ID NO: 692577 - RNA, 21 nt, Human
uucaggugccacaacgugggg

SEQ ID NO: 692578 - RNA, 21 nt, Human
uucgugccacaguguaaucaa

SEQ ID NO: 692579 - RNA, 18 nt, Human
uugcagcccuuuacuucc

SEQ ID NO: 692580 - RNA, 25 nt, Human
uuuaaaaauaauaagacuccucucu

SEQ ID NO: 692581 - RNA, 20 nt, Human
aagaccccagccccugcugc

SEQ ID NO: 692582 - RNA, 22 nt, Human
aggagggacgguggugcugggg

SEQ ID NO: 692583 - RNA, 18 nt, Human
aggcagccugagugagcc

SEQ ID NO: 692584 - RNA, 21 nt, Human
caccaggaugcgccggguuuc

SEQ ID NO: 692585 - RNA, 21 nt, Human
cagccgggaccagaaccagga

SEQ ID NO: 692586 - RNA, 23 nt, Human
caggagccgcccaguggaagggu

SEQ ID NO: 692587 - RNA, 22 nt, Human
caguggaaggguaggugcugga

SEQ ID NO: 692588 - RNA, 22 nt, Human
caugcacgcaaguguccagaaa

SEQ ID NO: 692589 - RNA, 19 nt, Human
ccagaaccaggagccgccc

SEQ ID NO: 692590 - RNA, 20 nt, Human
ccaggagccgcccaguggaa

SEQ ID NO: 692591 - RNA, 23 nt, Human
ccaggccggcuggguguggcuuc

SEQ ID NO: 692592 - RNA, 20 nt, Human
cccauggagucaggcuucag

SEQ ID NO: 692593 - RNA, 20 nt, Human
ccccagccucccgucacacc

SEQ ID NO: 692594 - RNA, 20 nt, Human
cccggggccugggaccaggc

SEQ ID NO: 692595 - RNA, 21 nt, Human
cccugccgacucagccccggc

SEQ ID NO: 692596 - RNA, 19 nt, Human
ccgacgcuacaaacagcag

SEQ ID NO: 692597 - RNA, 21 nt, Human
ccgggaccagaaccaggagcc

SEQ ID NO: 692598 - RNA, 21 nt, Human
ccgugcccggggccugggacc

SEQ ID NO: 692599 - RNA, 22 nt, Human
ccucccgucacaccucugcugg

SEQ ID NO: 692600 - RNA, 21 nt, Human
cggggcgagucccaaacugug

SEQ ID NO: 692601 - RNA, 21 nt, Human
cgguggugcuggggccuuggc

SEQ ID NO: 692602 - RNA, 23 nt, Human
cucacuugagggguuuucuuuuu

SEQ ID NO: 692603 - RNA, 22 nt, Human
cuccccaacacagcgauuuucc

SEQ ID NO: 692604 - RNA, 19 nt, Human
cuccuggcuccugugugcu

SEQ ID NO: 692605 - RNA, 20 nt, Human
cugcugcuccccaacacagc

SEQ ID NO: 692606 - RNA, 19 nt, Human
gaagcagaugggaguggag

SEQ ID NO: 692607 - RNA, 19 nt, Human
gaagcagaugggaguggag

SEQ ID NO: 692608 - RNA, 21 nt, Human
gacgcuacaaacagcagcaac

SEQ ID NO: 692609 - RNA, 23 nt, Human
gagccagccgggaccagaaccag

SEQ ID NO: 692610 - RNA, 23 nt, Human
gcccggggccugggaccaggccg

SEQ ID NO: 692611 - RNA, 21 nt, Human
gcccuggggucggggggcaga

SEQ ID NO: 692612 - RNA, 22 nt, Human
gccugagugagccagccgggac

SEQ ID NO: 692613 - RNA, 19 nt, Human
gcucugaaagggaagcaga

SEQ ID NO: 692614 - RNA, 23 nt, Human
ggaccagaaccaggagccgccca

SEQ ID NO: 692615 - RNA, 19 nt, Human
ggcucugaaagggaagcag

SEQ ID NO: 692616 - RNA, 22 nt, Human
gggucggggggcagaggugggu

SEQ ID NO: 692617 - RNA, 20 nt, Human
ggucggggggcagagguggg

SEQ ID NO: 692618 - RNA, 23 nt, Human
gucucuccccagccucccgucac

SEQ ID NO: 692619 - RNA, 18 nt, Human
gugcugggcaugcacgca

SEQ ID NO: 692620 - RNA, 23 nt, Human
gugcugggcuucgguuuaucaca

SEQ ID NO: 692621 - RNA, 25 nt, Human
guggaaggguaggugcuggaugccc

SEQ ID NO: 692622 - RNA, 27 nt, Human
guggaaggguaggugcuggaugcccug

SEQ ID NO: 692623 - RNA, 18 nt, Human
guggcucacuugaggggu

SEQ ID NO: 692624 - RNA, 20 nt, Human
guggugcuggggccuuggcc

SEQ ID NO: 692625 - RNA, 25 nt, Human
uacagcccuggggucggggggcaga

SEQ ID NO: 692626 - RNA, 21 nt, Human
ucaacucggggcgagucccaa

SEQ ID NO: 692627 - RNA, 22 nt, Human
ucaaggugcuggggucucuccc

SEQ ID NO: 692628 - RNA, 21 nt, Human
uccaggauccgacgcuacaaa

SEQ ID NO: 692629 - RNA, 26 nt, Human
uccgacgcuacaaacagcagcaacau

SEQ ID NO: 692630 - RNA, 20 nt, Human
ucggggggcagagguggguu

SEQ ID NO: 692631 - RNA, 24 nt, Human
ucuccccagccucccgucacaccu

SEQ ID NO: 692632 - RNA, 23 nt, Human
ugcacgcaaguguccagaaagcg

SEQ ID NO: 692633 - RNA, 18 nt, Human
ugcuggggccuuggccac

SEQ ID NO: 692634 - RNA, 19 nt, Human
ugcuuucuuuccaguggcu

SEQ ID NO: 692635 - RNA, 21 nt, Human
ugcuuucuuuccaguggcuca

SEQ ID NO: 692636 - RNA, 21 nt, Human
uggagcgccgacuccagaggg

SEQ ID NO: 692637 - RNA, 24 nt, Human
uggaggggaccccgugcccggggc

SEQ ID NO: 692638 - RNA, 18 nt, Human
uggccaccggccgggcag

SEQ ID NO: 692639 - RNA, 19 nt, Human
uggcucacuugagggguuu

SEQ ID NO: 692640 - RNA, 18 nt, Human
ugggaccaggccggcugg

SEQ ID NO: 692641 - RNA, 20 nt, Human
uggggucggggggcagaggu

SEQ ID NO: 692642 - RNA, 21 nt, Human
uggggucucuccccagccucc

SEQ ID NO: 692643 - RNA, 18 nt, Human
ugugugcucaaggugcug

SEQ ID NO: 692644 - RNA, 23 nt, Human
uguuuugcuuucuuuccaguggc

SEQ ID NO: 692645 - RNA, 20 nt, Human
uuacagcccuggggucgggg

SEQ ID NO: 692646 - RNA, 23 nt, Human
uucaggagaagaccccagccccu

SEQ ID NO: 692647 - RNA, 22 nt, Human
uucucagaagggcgagcuggug

SEQ ID NO: 692648 - RNA, 20 nt, Human
uucuuuggggucccauggag

SEQ ID NO: 692649 - RNA, 23 nt, Human
uuucucagaagggcgagcuggug

SEQ ID NO: 692650 - RNA, 22 nt, Human
uuuucccaggcccugggggagc

SEQ ID NO: 692651 - RNA, 22 nt, Human
aaaaauggcuaacuagucaccu

SEQ ID NO: 692652 - RNA, 18 nt, Human
aacauacuuaucaugaca

SEQ ID NO: 692653 - RNA, 21 nt, Human
aaggaaaaauacaguaauuca

SEQ ID NO: 692654 - RNA, 20 nt, Human
aagguacuuuugaacaacca

SEQ ID NO: 692655 - RNA, 18 nt, Human
acaaaaucagcccaauga

SEQ ID NO: 692656 - RNA, 20 nt, Human
acucacuccugcuccucuca

SEQ ID NO: 692657 - RNA, 21 nt, Human
acugaaaucaguaacaaucca

SEQ ID NO: 692658 - RNA, 18 nt, Human
acuucaauugcuucgauc

SEQ ID NO: 692659 - RNA, 20 nt, Human
acuuuacugaaaucaguaac

SEQ ID NO: 692660 - RNA, 19 nt, Human
cacacacggccaccagagc

SEQ ID NO: 692661 - RNA, 22 nt, Human
cacacacggccaccagagcagc

SEQ ID NO: 692662 - RNA, 22 nt, Human
cacacggccaccagagcagcuc

SEQ ID NO: 692663 - RNA, 23 nt, Human
cacccgcgacagcaguaaaucca

SEQ ID NO: 692664 - RNA, 19 nt, Human
caguaaauccaacucgugg

SEQ ID NO: 692665 - RNA, 19 nt, Human
caucaagcacacacacuca

SEQ ID NO: 692666 - RNA, 21 nt, Human
cgagggacagggaauggcgug

SEQ ID NO: 692667 - RNA, 19 nt, Human
cucacuuucgccgggagac

SEQ ID NO: 692668 - RNA, 21 nt, Human
cucgcucacuuucgccgggag

SEQ ID NO: 692669 - RNA, 20 nt, Human
cugaaaucaguaacaaucca

SEQ ID NO: 692670 - RNA, 21 nt, Human
cuuuugaacaaccacacacaa

SEQ ID NO: 692671 - RNA, 22 nt, Human
gaaauaauagauuuauucaaag

SEQ ID NO: 692672 - RNA, 22 nt, Human
gggccgagggacagggaauggc

SEQ ID NO: 692673 - RNA, 18 nt, Human
ggggccgagggacaggga

SEQ ID NO: 692674 - RNA, 20 nt, Human
gguacuaacagccagggagg

SEQ ID NO: 692675 - RNA, 23 nt, Human
uaaaacauacuuaucaugacaac

SEQ ID NO: 692676 - RNA, 23 nt, Human
uaaaauguccuggguaaagcuuc

SEQ ID NO: 692677 - RNA, 25 nt, Human
uaagucaaauacuaaaacauacuua

SEQ ID NO: 692678 - RNA, 25 nt, Human
uaaguguaacuagucuucugcacaa

SEQ ID NO: 692679 - RNA, 24 nt, Human
uaauaauacuauuucugauacugu

SEQ ID NO: 692680 - RNA, 23 nt, Human
ucacuccugcuccucucacacac

SEQ ID NO: 692681 - RNA, 25 nt, Human
uccugcuccucucacacacggccac

SEQ ID NO: 692682 - RNA, 22 nt, Human
ucgcucacuuucgccgggagac

SEQ ID NO: 692683 - RNA, 20 nt, Human
ucuauaaaaacgcuacaccc

SEQ ID NO: 692684 - RNA, 24 nt, Human
ucucugaaaaauggcuaacuaguc

SEQ ID NO: 692685 - RNA, 24 nt, Human
ugaaaaauggcuaacuagucaccu

SEQ ID NO: 692686 - RNA, 25 nt, Human
ugaaauaauagauuuauucaaagag

SEQ ID NO: 692687 - RNA, 18 nt, Human
ugacaacucaaggugaca

SEQ ID NO: 692688 - RNA, 21 nt, Human
uggcaaaacauacuuuacuga

SEQ ID NO: 692689 - RNA, 21 nt, Human
uguaucucugaaaaauggcua

SEQ ID NO: 692690 - RNA, 21 nt, Human
aacagagcuaaaggccuaaag

SEQ ID NO: 692691 - RNA, 19 nt, Human
acagagcuaaaggccuaaa

SEQ ID NO: 692692 - RNA, 22 nt, Human
acgucaaggaggaccaaagagg

SEQ ID NO: 692693 - RNA, 18 nt, Human
aggaggaccaaagagggc

SEQ ID NO: 692694 - RNA, 24 nt, Human
caaaaauagucaaguaaauaaugu

SEQ ID NO: 692695 - RNA, 22 nt, Human
caacaguaguaguauugaacca

SEQ ID NO: 692696 - RNA, 22 nt, Human
cagaaagcgggcccacaggccc

SEQ ID NO: 692697 - RNA, 19 nt, Human
cagagcuaaaggccuaaag

SEQ ID NO: 692698 - RNA, 24 nt, Human
cuugaaaauuucuguuuuccaaau

SEQ ID NO: 692699 - RNA, 20 nt, Human
gaagcauauuuuaacuuuuu

SEQ ID NO: 692700 - RNA, 22 nt, Human
guaaagcaaaagcauuaucuuc

SEQ ID NO: 692701 - RNA, 23 nt, Human
uacaguauauaacaguaaauaga

SEQ ID NO: 692702 - RNA, 18 nt, Human
uacuggaggaacagagcu

SEQ ID NO: 692703 - RNA, 24 nt, Human
uacuuagaacuuuccaacuuuaaa

SEQ ID NO: 692704 - RNA, 21 nt, Human
uccaacuuuaaaauucagaau

SEQ ID NO: 692705 - RNA, 19 nt, Human
ugaauagauuggaccagca

SEQ ID NO: 692706 - RNA, 25 nt, Human
uuauauauuaaaaacuuugauacuu

SEQ ID NO: 692707 - RNA, 24 nt, Human
uucagaaucauaaauggugacaac

SEQ ID NO: 692708 - RNA, 20 nt, Human
aagguaggggacaguaguca

SEQ ID NO: 692709 - RNA, 19 nt, Human
agcacugaggggagcuggg

SEQ ID NO: 692710 - RNA, 21 nt, Human
cagcacugaggggagcugggg

SEQ ID NO: 692711 - RNA, 19 nt, Human
cagcagcacugaggggagc

SEQ ID NO: 692712 - RNA, 24 nt, Human
ccucgcgcucaucgccggccccgg

SEQ ID NO: 692713 - RNA, 23 nt, Human
cuggagagggguccaguuggugg

SEQ ID NO: 692714 - RNA, 21 nt, Human
gacaguagucaacgcuucccc

SEQ ID NO: 692715 - RNA, 20 nt, Human
gaggggagcugggggcugcc

SEQ ID NO: 692716 - RNA, 22 nt, Human
gagggguccaguugguggcuca

SEQ ID NO: 692717 - RNA, 21 nt, Human
gaguguagacagucgccaacc

SEQ ID NO: 692718 - RNA, 23 nt, Human
ggacaguagucaacgcuucccca

SEQ ID NO: 692719 - RNA, 18 nt, Human
gggaggugguggcggugg

SEQ ID NO: 692720 - RNA, 27 nt, Human
ggguggggguggucucgggggaggagu

SEQ ID NO: 692721 - RNA, 19 nt, Human
ggguggucucgggggagga

SEQ ID NO: 692722 - RNA, 26 nt, Human
ucucgggggaggaguguaacguaaac

SEQ ID NO: 692723 - RNA, 18 nt, Human
ugacagcagcacugaggg

SEQ ID NO: 692724 - RNA, 19 nt, Human
uggagagggguccaguugg

SEQ ID NO: 692725 - RNA, 20 nt, Human
uggggguggucucgggggag

SEQ ID NO: 692726 - RNA, 20 nt, Human
uugcuggagagggguccagu

SEQ ID NO: 692727 - RNA, 19 nt, Human
aaaaacucaaagcaaauga

SEQ ID NO: 692728 - RNA, 22 nt, Human
aaaacaccacuauuaauguaaa

SEQ ID NO: 692729 - RNA, 19 nt, Human
aaaauacacauuggggaga

SEQ ID NO: 692730 - RNA, 25 nt, Human
aaacauaaaguucuauaacuuuagc

SEQ ID NO: 692731 - RNA, 20 nt, Human
aaggaauauaaaaacucaaa

SEQ ID NO: 692732 - RNA, 25 nt, Human
ccaugugguaucucucuguuauccu

SEQ ID NO: 692733 - RNA, 20 nt, Human
gcaugagacugccauccaaa

SEQ ID NO: 692734 - RNA, 19 nt, Human
guauuuucuuuuugugucg

SEQ ID NO: 692735 - RNA, 19 nt, Human
uaaaaaaucugcaugagac

SEQ ID NO: 692736 - RNA, 21 nt, Human
uaaagcaugcauauuuuuccu

SEQ ID NO: 692737 - RNA, 24 nt, Human
uaaagcaugcauauuuuuccuaaa

SEQ ID NO: 692738 - RNA, 20 nt, Human
uagaaauguagaauuuauug

SEQ ID NO: 692739 - RNA, 21 nt, Human
uccaaauuaaaauacacauug

SEQ ID NO: 692740 - RNA, 19 nt, Human
uccuaaauccuuaagaccc

SEQ ID NO: 692741 - RNA, 24 nt, Human
uggaaaugcagcccugcucugcca

SEQ ID NO: 692742 - RNA, 19 nt, Human
uggagcugcugcacgcgcc

SEQ ID NO: 692743 - RNA, 18 nt, Human
uuuuccuaaauccuuaag

SEQ ID NO: 692744 - RNA, 22 nt, Human
aaaaaugccagauuccaguaua

SEQ ID NO: 692745 - RNA, 22 nt, Human
aaaugccagauuccaguauaaa

SEQ ID NO: 692746 - RNA, 20 nt, Human
auaaaaccugucuacacaua

SEQ ID NO: 692747 - RNA, 21 nt, Human
caagaaacuggggggaaauca

SEQ ID NO: 692748 - RNA, 18 nt, Human
caagaaccgccaaaguuu

SEQ ID NO: 692749 - RNA, 23 nt, Human
cacauaguaguuagcugcaaaaa

SEQ ID NO: 692750 - RNA, 20 nt, Human
ccccgaugcccagcuuggcg

SEQ ID NO: 692751 - RNA, 22 nt, Human
guccaagaugugaagauaccau

SEQ ID NO: 692752 - RNA, 18 nt, Human
uaugcaagaaccgccaaa

SEQ ID NO: 692753 - RNA, 18 nt, Human
uccccgaugcccagcuug

SEQ ID NO: 692754 - RNA, 25 nt, Human
ugaagauaccauguucaagaaacug

SEQ ID NO: 692755 - RNA, 21 nt, Human
uguuuaauaaugaauagcaca

SEQ ID NO: 692756 - RNA, 25 nt, Human
aaaaaacuacuaaccaaauguccac

SEQ ID NO: 692757 - RNA, 23 nt, Human
aaaacucauugcaguuuuccaaa

SEQ ID NO: 692758 - RNA, 27 nt, Human
aaacaaaaauagaaaauuuccugucug

SEQ ID NO: 692759 - RNA, 22 nt, Human
aacucuaaacaaaaauagaaaa

SEQ ID NO: 692760 - RNA, 24 nt, Human
aagaugcuaggauuacagguguga

SEQ ID NO: 692761 - RNA, 25 nt, Human
aagcaauccucccaccucagccucc

SEQ ID NO: 692762 - RNA, 22 nt, Human
aagcucuugacuauagcugucu

SEQ ID NO: 692763 - RNA, 25 nt, Human
acaauccugcuaaaaguguugaaaa

SEQ ID NO: 692764 - RNA, 19 nt, Human
acagauaguuggaaguggg

SEQ ID NO: 692765 - RNA, 20 nt, Human
accaacugucaccacaaacu

SEQ ID NO: 692766 - RNA, 24 nt, Human
acccaagcuggagugcaguggcgu

SEQ ID NO: 692767 - RNA, 18 nt, Human
accuuuccuucucccauc

SEQ ID NO: 692768 - RNA, 18 nt, Human
acuauacugcccaggcaa

SEQ ID NO: 692769 - RNA, 18 nt, Human
acuuugucacccaagcug

SEQ ID NO: 692770 - RNA, 25 nt, Human
acuuugucacccaagcuggagugca

SEQ ID NO: 692771 - RNA, 25 nt, Human
agaaaaaagaaaaauaggcuauaaa

SEQ ID NO: 692772 - RNA, 26 nt, Human
agaugcuaggauuacaggugugagcc

SEQ ID NO: 692773 - RNA, 20 nt, Human
aggcacguaccaccacaccc

SEQ ID NO: 692774 - RNA, 18 nt, Human
aguagcugggacuacagg

SEQ ID NO: 692775 - RNA, 23 nt, Human
agugcaauggcaagaucauagcu

SEQ ID NO: 692776 - RNA, 19 nt, Human
agugcaguggcgugauccc

SEQ ID NO: 692777 - RNA, 20 nt, Human
agugcaguggcgugauccca

SEQ ID NO: 692778 - RNA, 22 nt, Human
agugcaguggcgugaucccauu

SEQ ID NO: 692779 - RNA, 21 nt, Human
auaaaauuuaccauguuaccc

SEQ ID NO: 692780 - RNA, 23 nt, Human
aucauagcucccuacaaccucaa

SEQ ID NO: 692781 - RNA, 21 nt, Human
augcuaggauuacagguguga

SEQ ID NO: 692782 - RNA, 19 nt, Human
caaaacacaagcucuugac

SEQ ID NO: 692783 - RNA, 25 nt, Human
caaacuccugggcucaagcaauccu

SEQ ID NO: 692784 - RNA, 22 nt, Human
caacccuccugccugggccucc

SEQ ID NO: 692785 - RNA, 24 nt, Human
caaccucaaacuccugggcucaag

SEQ ID NO: 692786 - RNA, 24 nt, Human
caagaugcuaggauuacaggugug

SEQ ID NO: 692787 - RNA, 27 nt, Human
caagcaauccucccaccucagccuccu

SEQ ID NO: 692788 - RNA, 23 nt, Human
caagcagucuuucuaccagcuuc

SEQ ID NO: 692789 - RNA, 25 nt, Human
caagcagucuuucuaccagcuuccc

SEQ ID NO: 692790 - RNA, 19 nt, Human
caagcucuugacuauagcu

SEQ ID NO: 692791 - RNA, 19 nt, Human
cacaccaccacacuuggcu

SEQ ID NO: 692792 - RNA, 24 nt, Human
cacccaagcuggagugcaguggcg

SEQ ID NO: 692793 - RNA, 24 nt, Human
caccucagccuccuaaguagcuag

SEQ ID NO: 692794 - RNA, 18 nt, Human
cacguaccaccacaccca

SEQ ID NO: 692795 - RNA, 23 nt, Human
cacugcaaccuaugucuuccagg

SEQ ID NO: 692796 - RNA, 18 nt, Human
cagcucaggcucugcugg

SEQ ID NO: 692797 - RNA, 21 nt, Human
caggugcacaccaccacacuu

SEQ ID NO: 692798 - RNA, 24 nt, Human
cauucaaaaaaacuacuaaccaaa

SEQ ID NO: 692799 - RNA, 24 nt, Human
ccaaaacacacacaauuguguuca

SEQ ID NO: 692800 - RNA, 24 nt, Human
ccaagaugcuaggauuacaggugu

SEQ ID NO: 692801 - RNA, 18 nt, Human
ccacugcacccagcuaag

SEQ ID NO: 692802 - RNA, 19 nt, Human
ccacugcacccagcuaagu

SEQ ID NO: 692803 - RNA, 23 nt, Human
cccaccucagccuccuaaguagc

SEQ ID NO: 692804 - RNA, 18 nt, Human
cccaggcaaauucuuauu

SEQ ID NO: 692805 - RNA, 18 nt, Human
cccaucuauuuuucuccc

SEQ ID NO: 692806 - RNA, 23 nt, Human
cccgaguagcugggacuacaggu

SEQ ID NO: 692807 - RNA, 24 nt, Human
cccgaguagcugggacuacaggug

SEQ ID NO: 692808 - RNA, 24 nt, Human
ccucccaccucagccuccuaagua

SEQ ID NO: 692809 - RNA, 20 nt, Human
ccugggcucaagcaauccuc

SEQ ID NO: 692810 - RNA, 23 nt, Human
cuacaaccucaaacuccugggcu

SEQ ID NO: 692811 - RNA, 21 nt, Human
cuaccagcuucccgaguagcu

SEQ ID NO: 692812 - RNA, 24 nt, Human
cucaagcaauccucccaccucagc

SEQ ID NO: 692813 - RNA, 19 nt, Human
cucaagcagucuuucuacc

SEQ ID NO: 692814 - RNA, 20 nt, Human
cugaggaauucaggauaaga

SEQ ID NO: 692815 - RNA, 24 nt, Human
cugcaaccuaugucuuccaggcuc

SEQ ID NO: 692816 - RNA, 23 nt, Human
cugcuagauguaacucaaaccau

SEQ ID NO: 692817 - RNA, 24 nt, Human
cuuacuuugucacccaagcuggag

SEQ ID NO: 692818 - RNA, 25 nt, Human
cuuccaggcucaagcagucuuucua

SEQ ID NO: 692819 - RNA, 21 nt, Human
cuuuccuucucccaucugccc

SEQ ID NO: 692820 - RNA, 24 nt, Human
cuuuuuuuuuuuuuuaagacaggg

SEQ ID NO: 692821 - RNA, 22 nt, Human
gaauaaguuuuagugcugcuag

SEQ ID NO: 692822 - RNA, 26 nt, Human
gaguagcugggacuacaggugcacac

SEQ ID NO: 692823 - RNA, 18 nt, Human
gauuacaggugugagcca

SEQ ID NO: 692824 - RNA, 22 nt, Human
gauuacaggugugagccacugc

SEQ ID NO: 692825 - RNA, 23 nt, Human
gauuacaggugugagccacugca

SEQ ID NO: 692826 - RNA, 19 nt, Human
gccuacaggcacguaccac

SEQ ID NO: 692827 - RNA, 23 nt, Human
gcuggagugcaauggcaagauca

SEQ ID NO: 692828 - RNA, 25 nt, Human
gcuggagugcaguggcgugauccca

SEQ ID NO: 692829 - RNA, 22 nt, Human
ggauuacaggugugagccacug

SEQ ID NO: 692830 - RNA, 22 nt, Human
gguagugacugcaaauagguac

SEQ ID NO: 692831 - RNA, 21 nt, Human
guggugauagagguagugacu

SEQ ID NO: 692832 - RNA, 22 nt, Human
uaaaaguguugaaaagcucuua

SEQ ID NO: 692833 - RNA, 21 nt, Human
uaaacucuacuaaagaaaaau

SEQ ID NO: 692834 - RNA, 19 nt, Human
uaaccaaaacacacacaau

SEQ ID NO: 692835 - RNA, 25 nt, Human
uaacccaucuauuuuucucccaaca

SEQ ID NO: 692836 - RNA, 21 nt, Human
uaagacagggucuuacuuugu

SEQ ID NO: 692837 - RNA, 23 nt, Human
uaaguguuaucuacaaaauuugu

SEQ ID NO: 692838 - RNA, 20 nt, Human
uaauguauuuguagauuuug

SEQ ID NO: 692839 - RNA, 21 nt, Human
uacaggugcacaccaccacac

SEQ ID NO: 692840 - RNA, 19 nt, Human
uacaggugugagccacugc

SEQ ID NO: 692841 - RNA, 24 nt, Human
uacaggugugagccacugcaccca

SEQ ID NO: 692842 - RNA, 23 nt, Human
uaccaccacacccagcuaaauuu

SEQ ID NO: 692843 - RNA, 24 nt, Human
uacuuugucacccaagcuggagug

SEQ ID NO: 692844 - RNA, 20 nt, Human
uagaaaaaagaaaaauaggc

SEQ ID NO: 692845 - RNA, 26 nt, Human
uagaauaaauaaccuuuccuucuccc

SEQ ID NO: 692846 - RNA, 19 nt, Human
uaggauuacaggugugagc

SEQ ID NO: 692847 - RNA, 21 nt, Human
uaggauuacaggugugagcca

SEQ ID NO: 692848 - RNA, 22 nt, Human
uaggauuacaggugugagccac

SEQ ID NO: 692849 - RNA, 22 nt, Human
uaggauuacaggugugagccac

SEQ ID NO: 692850 - RNA, 24 nt, Human
uaggauuacaggugugagccacug

SEQ ID NO: 692851 - RNA, 24 nt, Human
uaggccuacaggcacguaccacca

SEQ ID NO: 692852 - RNA, 23 nt, Human
uauacugcccaggcaaauucuua

SEQ ID NO: 692853 - RNA, 19 nt, Human
uauguuacccggacugucg

SEQ ID NO: 692854 - RNA, 23 nt, Human
uauguuacccggacugucgugaa

SEQ ID NO: 692855 - RNA, 23 nt, Human
ucaggcucugcugguggugguga

SEQ ID NO: 692856 - RNA, 20 nt, Human
uccaaauuccuuuuuuuuuu

SEQ ID NO: 692857 - RNA, 23 nt, Human
ucccaagaugcuaggauuacagg

SEQ ID NO: 692858 - RNA, 23 nt, Human
ucccgaguagcugggacuacagg

SEQ ID NO: 692859 - RNA, 22 nt, Human
ucccuacaaccucaaacuccug

SEQ ID NO: 692860 - RNA, 19 nt, Human
uccuaaguagcuaggccua

SEQ ID NO: 692861 - RNA, 24 nt, Human
uccuaaguagcuaggccuacaggc

SEQ ID NO: 692862 - RNA, 18 nt, Human
uccugggcucaagcaauc

SEQ ID NO: 692863 - RNA, 22 nt, Human
uccugggcucaagcaauccucc

SEQ ID NO: 692864 - RNA, 24 nt, Human
uccugggcucaagcaauccuccca

SEQ ID NO: 692865 - RNA, 23 nt, Human
ucgauaucugauguauuuguaac

SEQ ID NO: 692866 - RNA, 23 nt, Human
ucucacuauacugcccaggcaaa

SEQ ID NO: 692867 - RNA, 22 nt, Human
ucucagcuggagugcaauggca

SEQ ID NO: 692868 - RNA, 24 nt, Human
ucuuacuuugucacccaagcugga

SEQ ID NO: 692869 - RNA, 21 nt, Human
ugacauacccauucaaaaaaa

SEQ ID NO: 692870 - RNA, 20 nt, Human
ugacuucaacccuccugccu

SEQ ID NO: 692871 - RNA, 24 nt, Human
ugcuaggauuacaggugugagcca

SEQ ID NO: 692872 - RNA, 19 nt, Human
uggaaaacagccauuucau

SEQ ID NO: 692873 - RNA, 21 nt, Human
uggagugcaauggcaagauca

SEQ ID NO: 692874 - RNA, 19 nt, Human
uggagugcaguggcgugau

SEQ ID NO: 692875 - RNA, 19 nt, Human
uggagugcaguggcgugau

SEQ ID NO: 692876 - RNA, 23 nt, Human
uggagugcaguggcgugauccca

SEQ ID NO: 692877 - RNA, 28 nt, Human
uggagugcaguggcgugauggcucuagc

SEQ ID NO: 692878 - RNA, 23 nt, Human
uggcuauaggugcuauuuuagag

SEQ ID NO: 692879 - RNA, 24 nt, Human
ugggacuacaggugcacaccacca

SEQ ID NO: 692880 - RNA, 27 nt, Human
uguauuuguagauuuugucacccaagg

SEQ ID NO: 692881 - RNA, 26 nt, Human
uguauuuguagauuuugucacccagg

SEQ ID NO: 692882 - RNA, 21 nt, Human
uguguagucugaaccugugug

SEQ ID NO: 692883 - RNA, 18 nt, Human
uguuaucuacaaaauuug

SEQ ID NO: 692884 - RNA, 20 nt, Human
uuuaacagauaguuggaagu

SEQ ID NO: 692885 - RNA, 24 nt, Human
uuugucacccaagcuggagugcag

SEQ ID NO: 692886 - RNA, 23 nt, Human
uuuuuuuuuuaagacagggucuu

SEQ ID NO: 692887 - RNA, 23 nt, Human
uuuuuuuuuuuuaagacaggguc

SEQ ID NO: 692888 - RNA, 24 nt, Human
uuuuuuuuuuuuaagacagggucu

SEQ ID NO: 692889 - RNA, 18 nt, Human
acacggugaagaaugggg

SEQ ID NO: 692890 - RNA, 21 nt, Human
aguauuggagaagacauaggu

SEQ ID NO: 692891 - RNA, 19 nt, Human
caguauuggagaagacaua

SEQ ID NO: 692892 - RNA, 26 nt, Human
cucugcgaugagcccgggaaccccuc

SEQ ID NO: 692893 - RNA, 19 nt, Human
gaccuaagccagucuggua

SEQ ID NO: 692894 - RNA, 20 nt, Human
gaccuaagccagucugguau

SEQ ID NO: 692895 - RNA, 25 nt, Human
gcccgggaaccccuccucgauucuc

SEQ ID NO: 692896 - RNA, 25 nt, Human
ggaaccccuccucgauucuccgccu

SEQ ID NO: 692897 - RNA, 26 nt, Human
ucagaaaucuucaaucucaaauauuc

SEQ ID NO: 692898 - RNA, 23 nt, Human
ucagaggggcugcccauucggcg

SEQ ID NO: 692899 - RNA, 23 nt, Human
uccgccuagcugggccggcaccc

SEQ ID NO: 692900 - RNA, 21 nt, Human
ucucucccugaagagugagga

SEQ ID NO: 692901 - RNA, 20 nt, Human
ugggagguagagggggucuc

SEQ ID NO: 692902 - RNA, 18 nt, Human
agaggagccgacgggggc

SEQ ID NO: 692903 - RNA, 23 nt, Human
aguggaggacuggaaaagaggag

SEQ ID NO: 692904 - RNA, 23 nt, Human
ccgcggccgggcccagccccggc

SEQ ID NO: 692905 - RNA, 24 nt, Human
ccuucgguccuucccgcggccggg

SEQ ID NO: 692906 - RNA, 21 nt, Human
cgccaggccguugcuaagggc

SEQ ID NO: 692907 - RNA, 22 nt, Human
cucuugcagccgccgcagggac

SEQ ID NO: 692908 - RNA, 20 nt, Human
gcugcagcagcagggaaacc

SEQ ID NO: 692909 - RNA, 18 nt, Human
ggacuggaaaagaggagc

SEQ ID NO: 692910 - RNA, 22 nt, Human
ggcaguggaggacuggaaaaga

SEQ ID NO: 692911 - RNA, 18 nt, Human
gggcugcagcagcaggga

SEQ ID NO: 692912 - RNA, 23 nt, Human
guggaggacuggaaaagaggagc

SEQ ID NO: 692913 - RNA, 19 nt, Human
uggaggacuggaaaagagg

SEQ ID NO: 692914 - RNA, 21 nt, Human
uggaggacuggaaaagaggag

SEQ ID NO: 692915 - RNA, 23 nt, Human
uugcagccgccgcagggacacgc

SEQ ID NO: 692916 - RNA, 24 nt, Human
uuuuuuuuuuuuuuuuguuacugg

SEQ ID NO: 692917 - RNA, 24 nt, Human
uuuuuuuuuuuuuuuuuuguuacu

SEQ ID NO: 692918 - RNA, 23 nt, Human
uuuuuuuuuuuuuuuuuuuuggg

SEQ ID NO: 692919 - RNA, 23 nt, Human
aaacaaaucaaaucgaucuccau

SEQ ID NO: 692920 - RNA, 19 nt, Human
aagcagauaaaacugccaa

SEQ ID NO: 692921 - RNA, 21 nt, Human
aagcagauaaaacugccaagu

SEQ ID NO: 692922 - RNA, 18 nt, Human
aagcauaguuuagugggc

SEQ ID NO: 692923 - RNA, 18 nt, Human
aagucagucuuauauuaa

SEQ ID NO: 692924 - RNA, 19 nt, Human
acacagccuagguaaagac

SEQ ID NO: 692925 - RNA, 24 nt, Human
agagaaaauacaggaauaaugauc

SEQ ID NO: 692926 - RNA, 21 nt, Human
aggcagcuggguguccaagca

SEQ ID NO: 692927 - RNA, 19 nt, Human
agucuuauauuaagucauu

SEQ ID NO: 692928 - RNA, 20 nt, Human
auaaaaccguaaagagaucu

SEQ ID NO: 692929 - RNA, 24 nt, Human
auaaagaacaauuccauauaaaug

SEQ ID NO: 692930 - RNA, 27 nt, Human
aucaaaucgaucuccauuucuucaagu

SEQ ID NO: 692931 - RNA, 23 nt, Human
auuucaaucaccaaagaaaugua

SEQ ID NO: 692932 - RNA, 20 nt, Human
caaaauuaaaagccagaagc

SEQ ID NO: 692933 - RNA, 18 nt, Human
caguuucagagaaaauac

SEQ ID NO: 692934 - RNA, 20 nt, Human
caguuucagagaaaauacag

SEQ ID NO: 692935 - RNA, 20 nt, Human
cuuuccacuaggccucacua

SEQ ID NO: 692936 - RNA, 25 nt, Human
cuuuccacuaggccucacuaccuuc

SEQ ID NO: 692937 - RNA, 21 nt, Human
gggcuucaugugucagaaaua

SEQ ID NO: 692938 - RNA, 20 nt, Human
ggugcugaaaacucagagcu

SEQ ID NO: 692939 - RNA, 18 nt, Human
guagaguaucaacuuaaa

SEQ ID NO: 692940 - RNA, 21 nt, Human
uaaacugagaagaaauaugca

SEQ ID NO: 692941 - RNA, 23 nt, Human
uaaaugacaaccuuuauucugag

SEQ ID NO: 692942 - RNA, 20 nt, Human
uaaauugcagugugucugcu

SEQ ID NO: 692943 - RNA, 23 nt, Human
uaaggccccauuuuuuuuucuuu

SEQ ID NO: 692944 - RNA, 22 nt, Human
uacccuugauaaagaacaauuc

SEQ ID NO: 692945 - RNA, 22 nt, Human
uagugggcuucaugugucagaa

SEQ ID NO: 692946 - RNA, 23 nt, Human
uauccagaauauaugucagaaac

SEQ ID NO: 692947 - RNA, 23 nt, Human
uaugucagaaaccccuaaaagca

SEQ ID NO: 692948 - RNA, 23 nt, Human
ucagaaaccccuaaaagcaacuu

SEQ ID NO: 692949 - RNA, 21 nt, Human
ucagucuuauauuaagucauu

SEQ ID NO: 692950 - RNA, 22 nt, Human
ucaguuucagagaaaauacagg

SEQ ID NO: 692951 - RNA, 20 nt, Human
uccaggaggaggcgccggcc

SEQ ID NO: 692952 - RNA, 23 nt, Human
ugacaaggucagauuuucaaaac

SEQ ID NO: 692953 - RNA, 22 nt, Human
ugagaagaaauaugcauuauag

SEQ ID NO: 692954 - RNA, 21 nt, Human
ugcugaaaacucagagcuuag

SEQ ID NO: 692955 - RNA, 21 nt, Human
uggcaaaauuaaaagccagaa

SEQ ID NO: 692956 - RNA, 21 nt, Human
ugguaccauagauggcugcca

SEQ ID NO: 692957 - RNA, 21 nt, Human
uguaaauugcagugugucugc

SEQ ID NO: 692958 - RNA, 21 nt, Human
ugucauaugugugaucaauau

SEQ ID NO: 692959 - RNA, 21 nt, Human
uuucacaauuauuuucauguc

SEQ ID NO: 692960 - RNA, 20 nt, Human
uuucugggucaggguuucag

SEQ ID NO: 692961 - RNA, 20 nt, Human
uuugaagcagauaaaacugc

SEQ ID NO: 692962 - RNA, 20 nt, Human
uuuuuguuuguuuauuuuuu

SEQ ID NO: 692963 - RNA, 20 nt, Human
aaccucugccucccagccuc

SEQ ID NO: 692964 - RNA, 24 nt, Human
aagugauccuucugccuuggccuc

SEQ ID NO: 692965 - RNA, 25 nt, Human
aagugauccuucugccuuggccucc

SEQ ID NO: 692966 - RNA, 26 nt, Human
accucauccuucugaguagcugggac

SEQ ID NO: 692967 - RNA, 24 nt, Human
acuauguuucucaggcuggucuug

SEQ ID NO: 692968 - RNA, 21 nt, Human
agaagguaugcaauguuccag

SEQ ID NO: 692969 - RNA, 18 nt, Human
agagauccucccaccuca

SEQ ID NO: 692970 - RNA, 25 nt, Human
aggcuggagugcaguggcacaaucu

SEQ ID NO: 692971 - RNA, 21 nt, Human
aggcuggucuugaacuccugg

SEQ ID NO: 692972 - RNA, 21 nt, Human
agugcaguggcacaaucucag

SEQ ID NO: 692973 - RNA, 22 nt, Human
caagugauccuucugccuuggc

SEQ ID NO: 692974 - RNA, 27 nt, Human
caagugauccuucugccuuggccuccc

SEQ ID NO: 692975 - RNA, 21 nt, Human
caccucauccuucugaguagc

SEQ ID NO: 692976 - RNA, 24 nt, Human
cacuauguuucucaggcuggucuu

SEQ ID NO: 692977 - RNA, 18 nt, Human
cacugcaaccucugccuc

SEQ ID NO: 692978 - RNA, 21 nt, Human
cacugcaaccucugccuccca

SEQ ID NO: 692979 - RNA, 20 nt, Human
cagaagguaugcaauguucc

SEQ ID NO: 692980 - RNA, 20 nt, Human
cagccucaagagauccuccc

SEQ ID NO: 692981 - RNA, 22 nt, Human
cagggucucgcugucacccagg

SEQ ID NO: 692982 - RNA, 22 nt, Human
caugccaccacacccagcuauu

SEQ ID NO: 692983 - RNA, 24 nt, Human
ccucccaccucauccuucugagua

SEQ ID NO: 692984 - RNA, 24 nt, Human
ccucccagccucaagagauccucc

SEQ ID NO: 692985 - RNA, 18 nt, Human
ccuggucucaagugaucc

SEQ ID NO: 692986 - RNA, 18 nt, Human
ccuggucucaagugaucc

SEQ ID NO: 692987 - RNA, 20 nt, Human
ccuggucucaagugauccuu

SEQ ID NO: 692988 - RNA, 20 nt, Human
cgcaugccaccacacccagc

SEQ ID NO: 692989 - RNA, 19 nt, Human
cucaagagauccucccacc

SEQ ID NO: 692990 - RNA, 24 nt, Human
cucaagagauccucccaccucauc

SEQ ID NO: 692991 - RNA, 20 nt, Human
cucaagugauccuucugccu

SEQ ID NO: 692992 - RNA, 24 nt, Human
cucaagugauccuucugccuuggc

SEQ ID NO: 692993 - RNA, 24 nt, Human
cucacugcaaccucugccucccag

SEQ ID NO: 692994 - RNA, 24 nt, Human
cugcaaccucugccucccagccuc

SEQ ID NO: 692995 - RNA, 23 nt, Human
cugccuuggccucccaaagugcu

SEQ ID NO: 692996 - RNA, 20 nt, Human
gacagggucucgcugucacc

SEQ ID NO: 692997 - RNA, 26 nt, Human
gaguagcugggacuacaugcgcaugc

SEQ ID NO: 692998 - RNA, 19 nt, Human
gcaugccaccacacccagc

SEQ ID NO: 692999 - RNA, 22 nt, Human
gccuuggccucccaaagugcug

SEQ ID NO: 693000 - RNA, 19 nt, Human
gcuggagugcaguggcaca

SEQ ID NO: 693001 - RNA, 24 nt, Human
gcugucacccaggcuggagugcag

SEQ ID NO: 693002 - RNA, 24 nt, Human
ggcuggucuugaacuccuggucuc

SEQ ID NO: 693003 - RNA, 24 nt, Human
ggucucaagugauccuucugccuu

SEQ ID NO: 693004 - RNA, 23 nt, Human
gucucgcugucacccaggcugga

SEQ ID NO: 693005 - RNA, 24 nt, Human
uacaugcgcaugccaccacaccca

SEQ ID NO: 693006 - RNA, 22 nt, Human
uagagacaagggcucacuaugu

SEQ ID NO: 693007 - RNA, 19 nt, Human
uauguuucucaggcugguc

SEQ ID NO: 693008 - RNA, 24 nt, Human
uauguuucucaggcuggucuugaa

SEQ ID NO: 693009 - RNA, 22 nt, Human
ucacccaggcuggagugcagug

SEQ ID NO: 693010 - RNA, 19 nt, Human
ucacugcaaccucugccuc

SEQ ID NO: 693011 - RNA, 23 nt, Human
ucacugcaaccucugccucccag

SEQ ID NO: 693012 - RNA, 24 nt, Human
ucacugcaaccucugccucccagc

SEQ ID NO: 693013 - RNA, 26 nt, Human
ucacugcaaccucugccucccagccu

SEQ ID NO: 693014 - RNA, 27 nt, Human
ucagcucacugcaaccucugccuccca

SEQ ID NO: 693015 - RNA, 23 nt, Human
ucauccuucugaguagcugggac

SEQ ID NO: 693016 - RNA, 23 nt, Human
ucgcugucacccaggcuggagug

SEQ ID NO: 693017 - RNA, 21 nt, Human
ucucgcugucacccaggcugg

SEQ ID NO: 693018 - RNA, 21 nt, Human
ucucgcugucacccaggcugg

SEQ ID NO: 693019 - RNA, 22 nt, Human
ucucgcugucacccaggcugga

SEQ ID NO: 693020 - RNA, 24 nt, Human
ucucgcugucacccaggcuggagu

SEQ ID NO: 693021 - RNA, 18 nt, Human
ucugaguagcugggacua

SEQ ID NO: 693022 - RNA, 21 nt, Human
ucugaguagcugggacuacau

SEQ ID NO: 693023 - RNA, 21 nt, Human
ucuugaacuccuggucucaag

SEQ ID NO: 693024 - RNA, 22 nt, Human
ugcaguggcacaaucucagcuc

SEQ ID NO: 693025 - RNA, 19 nt, Human
ugccaccacacccagcuau

SEQ ID NO: 693026 - RNA, 18 nt, Human
uggagugcaguggcacaa

SEQ ID NO: 693027 - RNA, 23 nt, Human
uggagugcaguggcacaaucuca

SEQ ID NO: 693028 - RNA, 24 nt, Human
uggagugcaguggcacaaucucag

SEQ ID NO: 693029 - RNA, 24 nt, Human
uggcacaaucucagcucacugcaa

SEQ ID NO: 693030 - RNA, 24 nt, Human
ugggacuacaugcgcaugccacca

SEQ ID NO: 693031 - RNA, 20 nt, Human
uggucucaagugauccuucu

SEQ ID NO: 693032 - RNA, 23 nt, Human
uggucucaagugauccuucugcc

SEQ ID NO: 693033 - RNA, 24 nt, Human
uuccagagugucauugucagcucu

SEQ ID NO: 693034 - RNA, 24 nt, Human
uucucaggcuggucuugaacuccu

SEQ ID NO: 693035 - RNA, 20 nt, Human
uugagacagggucucgcugu

SEQ ID NO: 693036 - RNA, 18 nt, Human
uuggccucccaaagugcu

SEQ ID NO: 693037 - RNA, 18 nt, Human
acacagccccggggccca

SEQ ID NO: 693038 - RNA, 23 nt, Human
agcccugcacugggggugggggu

SEQ ID NO: 693039 - RNA, 20 nt, Human
auccaaaauacaauucugac

SEQ ID NO: 693040 - RNA, 25 nt, Human
caaaauacaauucugacuaugaaca

SEQ ID NO: 693041 - RNA, 18 nt, Human
caagaccagcccugcacu

SEQ ID NO: 693042 - RNA, 19 nt, Human
cccaagaccagcccugcac

SEQ ID NO: 693043 - RNA, 22 nt, Human
ccccaaccaaaccacaggacac

SEQ ID NO: 693044 - RNA, 20 nt, Human
ccccaagaccagcccugcac

SEQ ID NO: 693045 - RNA, 20 nt, Human
ccccggggcccagcauggcc

SEQ ID NO: 693046 - RNA, 19 nt, Human
ccgcgccagccuuccgggc

SEQ ID NO: 693047 - RNA, 22 nt, Human
ccgcgccagccuuccgggccgc

SEQ ID NO: 693048 - RNA, 19 nt, Human
ccgcgccgccgcccgcugc

SEQ ID NO: 693049 - RNA, 19 nt, Human
ccgcgccgccgcccgcugc

SEQ ID NO: 693050 - RNA, 23 nt, Human
ccgcugcgcacacacagccccgg

SEQ ID NO: 693051 - RNA, 22 nt, Human
cgccgcccgcugcgcacacaca

SEQ ID NO: 693052 - RNA, 22 nt, Human
cugaccagaggugcugcccaga

SEQ ID NO: 693053 - RNA, 24 nt, Human
cuguguguauauaucuguguaucu

SEQ ID NO: 693054 - RNA, 21 nt, Human
gagcggccgcaaagaggggcc

SEQ ID NO: 693055 - RNA, 23 nt, Human
gagcggccgcaaagaggggccga

SEQ ID NO: 693056 - RNA, 25 nt, Human
gagggagcggccgcaaagaggggcc

SEQ ID NO: 693057 - RNA, 18 nt, Human
gcagggucaguccaggug

SEQ ID NO: 693058 - RNA, 20 nt, Human
gccagccuuccgggccgcgc

SEQ ID NO: 693059 - RNA, 19 nt, Human
gcccugcacuggggguggg

SEQ ID NO: 693060 - RNA, 20 nt, Human
gccgcgccgccgcccgcugc

SEQ ID NO: 693061 - RNA, 19 nt, Human
gcggccgacccaccagugc

SEQ ID NO: 693062 - RNA, 18 nt, Human
ggacacgggguuggggga

SEQ ID NO: 693063 - RNA, 19 nt, Human
ggccgcaaagaggggccga

SEQ ID NO: 693064 - RNA, 22 nt, Human
gggaauaggcggagggagcggc

SEQ ID NO: 693065 - RNA, 21 nt, Human
gucuguuuauagaucucugcc

SEQ ID NO: 693066 - RNA, 24 nt, Human
uauggcggccgacccaccagugcc

SEQ ID NO: 693067 - RNA, 18 nt, Human
ucaguccagguguggcug

SEQ ID NO: 693068 - RNA, 22 nt, Human
uccccaagaccagcccugcacu

SEQ ID NO: 693069 - RNA, 19 nt, Human
ugaccagaggugcugccca

SEQ ID NO: 693070 - RNA, 20 nt, Human
ugcccugccuccccaagaca

SEQ ID NO: 693071 - RNA, 23 nt, Human
ugcccugccuccccaagaccagc

SEQ ID NO: 693072 - RNA, 24 nt, Human
uggcaggccagggugacccuccuc

SEQ ID NO: 693073 - RNA, 18 nt, Human
uggcccagcuccuccggg

SEQ ID NO: 693074 - RNA, 19 nt, Human
ugggcggcuggcccagcuc

SEQ ID NO: 693075 - RNA, 19 nt, Human
ugggggugggggugggcgg

SEQ ID NO: 693076 - RNA, 22 nt, Human
ugggggugggggugggcggcug

SEQ ID NO: 693077 - RNA, 18 nt, Human
ugucuuguccguccaucc

SEQ ID NO: 693078 - RNA, 18 nt, Human
uguguaaaaauccaaaag

SEQ ID NO: 693079 - RNA, 19 nt, Human
uguguguauauaucugugu

SEQ ID NO: 693080 - RNA, 20 nt, Human
uguguguauauaucugugua

SEQ ID NO: 693081 - RNA, 19 nt, Human
uuuuuuuuuuuuagagccu

SEQ ID NO: 693082 - RNA, 23 nt, Human
aaaaauaacuggagcagagaagc

SEQ ID NO: 693083 - RNA, 24 nt, Human
aaacaaaacaaagcaauuuacaaa

SEQ ID NO: 693084 - RNA, 23 nt, Human
aaacaaagcaauuuacaaaaaaa

SEQ ID NO: 693085 - RNA, 23 nt, Human
aaacaaaugaaguuuuacaagau

SEQ ID NO: 693086 - RNA, 24 nt, Human
aaagaaacaaaugaaguuuuacaa

SEQ ID NO: 693087 - RNA, 22 nt, Human
aaagauauccaauuuaccaaaa

SEQ ID NO: 693088 - RNA, 18 nt, Human
aacaaaacaaagcaauuu

SEQ ID NO: 693089 - RNA, 21 nt, Human
acaaaacaaagcaauuuacaa

SEQ ID NO: 693090 - RNA, 27 nt, Human
acaaagcaauuuacaaaaaaaguacca

SEQ ID NO: 693091 - RNA, 24 nt, Human
acauguaaaguccacuuccugggg

SEQ ID NO: 693092 - RNA, 22 nt, Human
accggaaaaccuuuauuuaaaa

SEQ ID NO: 693093 - RNA, 20 nt, Human
acuggagcagagaagcuuua

SEQ ID NO: 693094 - RNA, 19 nt, Human
aggugcuuuuauuccacag

SEQ ID NO: 693095 - RNA, 21 nt, Human
augcaaauagacagcaucaaa

SEQ ID NO: 693096 - RNA, 25 nt, Human
caaaaaaacacaaaccggaaaaccu

SEQ ID NO: 693097 - RNA, 21 nt, Human
caaacaggaaaacaaacaaaa

SEQ ID NO: 693098 - RNA, 24 nt, Human
caaaugacuuacacucaaugcaaa

SEQ ID NO: 693099 - RNA, 25 nt, Human
caagauacaggcacuuuauguuccc

SEQ ID NO: 693100 - RNA, 23 nt, Human
cacaguaucugauuaaacaaaac

SEQ ID NO: 693101 - RNA, 21 nt, Human
cacuccaucccaucccacccc

SEQ ID NO: 693102 - RNA, 23 nt, Human
cagcgagcauucacguacacuuu

SEQ ID NO: 693103 - RNA, 19 nt, Human
caucaaacaggaaaacaaa

SEQ ID NO: 693104 - RNA, 26 nt, Human
cgcggugguagcggcggcggcagcuu

SEQ ID NO: 693105 - RNA, 19 nt, Human
cucacuccaucccauccca

SEQ ID NO: 693106 - RNA, 19 nt, Human
cucacuccaucccauccca

SEQ ID NO: 693107 - RNA, 20 nt, Human
cuccaucccaucccaccccc

SEQ ID NO: 693108 - RNA, 18 nt, Human
gaaagcucugcaagagug

SEQ ID NO: 693109 - RNA, 21 nt, Human
gaaccaaaagaaacaaaugaa

SEQ ID NO: 693110 - RNA, 20 nt, Human
gcagcugaguaacaccugaa

SEQ ID NO: 693111 - RNA, 24 nt, Human
gcagcugaguaacaccugaaagcu

SEQ ID NO: 693112 - RNA, 21 nt, Human
gcggugguagcggcggcggca

SEQ ID NO: 693113 - RNA, 25 nt, Human
ggaaaaccuuuauuuaaaacuaguc

SEQ ID NO: 693114 - RNA, 24 nt, Human
guaaaaaaaagauauccaauuuac

SEQ ID NO: 693115 - RNA, 27 nt, Human
guagcggcggcggcagcuacggcagca

SEQ ID NO: 693116 - RNA, 28 nt, Human
uaaaaaaaagauauccaauuuaccaaaa

SEQ ID NO: 693117 - RNA, 23 nt, Human
uaaaaauaacuggagcagagaag

SEQ ID NO: 693118 - RNA, 21 nt, Human
uacaaaaaaaguaccaaauga

SEQ ID NO: 693119 - RNA, 23 nt, Human
uacauguaaaguccacuuccugg

SEQ ID NO: 693120 - RNA, 22 nt, Human
uacucaacauucauuguauuua

SEQ ID NO: 693121 - RNA, 22 nt, Human
ucaaaaaaacacaaaccggaaa

SEQ ID NO: 693122 - RNA, 19 nt, Human
ucagacagcgagcauucac

SEQ ID NO: 693123 - RNA, 21 nt, Human
ucuauauauauggagcuggaa

SEQ ID NO: 693124 - RNA, 20 nt, Human
ucugaaccaaaagaaacaaa

SEQ ID NO: 693125 - RNA, 19 nt, Human
ugaaagcucugcaagagug

SEQ ID NO: 693126 - RNA, 18 nt, Human
ugagaaaagcaaaaggug

SEQ ID NO: 693127 - RNA, 22 nt, Human
uuaaacaaaacaaagcaauuua

SEQ ID NO: 693128 - RNA, 22 nt, Human
uuagugagaaaagcaaaaggug

SEQ ID NO: 693129 - RNA, 22 nt, Human
uucucugaaccaaaagaaacaa

SEQ ID NO: 693130 - RNA, 19 nt, Human
auaauugcagaaauuuuua

SEQ ID NO: 693131 - RNA, 20 nt, Human
cugcaugguuuucaggacug

SEQ ID NO: 693132 - RNA, 18 nt, Human
uacucuuccggccugcau

SEQ ID NO: 693133 - RNA, 22 nt, Human
uuugucaauguaaauguuaguc

SEQ ID NO: 693134 - RNA, 22 nt, Human
aaaccuacauuuauugaaaaug

SEQ ID NO: 693135 - RNA, 20 nt, Human
aaacggcccagaggccagag

SEQ ID NO: 693136 - RNA, 24 nt, Human
aagcugcugccuucagcuugugcc

SEQ ID NO: 693137 - RNA, 18 nt, Human
aagucaguuccaggaggu

SEQ ID NO: 693138 - RNA, 18 nt, Human
agaagucaguuccaggag

SEQ ID NO: 693139 - RNA, 21 nt, Human
agaauggacaaccaugugaag

SEQ ID NO: 693140 - RNA, 21 nt, Human
aggggcuuuaccagcccuugg

SEQ ID NO: 693141 - RNA, 23 nt, Human
caacagcagccucacaucccuga

SEQ ID NO: 693142 - RNA, 24 nt, Human
caacagcagccucacaucccugau

SEQ ID NO: 693143 - RNA, 23 nt, Human
caaccaugugaagcagcucaggu

SEQ ID NO: 693144 - RNA, 21 nt, Human
caaccugcucaaaacccuaag

SEQ ID NO: 693145 - RNA, 24 nt, Human
cacacugcaaaccccuccacccac

SEQ ID NO: 693146 - RNA, 21 nt, Human
caccauaccccaaccugcuca

SEQ ID NO: 693147 - RNA, 27 nt, Human
caccccaaccagcaccaaggccucuac

SEQ ID NO: 693148 - RNA, 21 nt, Human
cacccccaacagcagccucac

SEQ ID NO: 693149 - RNA, 20 nt, Human
cacgcccagcuccacagcca

SEQ ID NO: 693150 - RNA, 27 nt, Human
cacugcaaaccccuccacccacccuca

SEQ ID NO: 693151 - RNA, 20 nt, Human
cagaagaagucaguuccagg

SEQ ID NO: 693152 - RNA, 21 nt, Human
cagaauggacaaccaugugaa

SEQ ID NO: 693153 - RNA, 19 nt, Human
cagcagccucacaucccug

SEQ ID NO: 693154 - RNA, 25 nt, Human
caggagguccuuucucccccagccu

SEQ ID NO: 693155 - RNA, 23 nt, Human
caggcaccauaccccaaccugcu

SEQ ID NO: 693156 - RNA, 19 nt, Human
ccaaccugcucaaaacccu

SEQ ID NO: 693157 - RNA, 26 nt, Human
cccaacagcagccucacaucccugau

SEQ ID NO: 693158 - RNA, 25 nt, Human
ccccaacagcagccucacaucccug

SEQ ID NO: 693159 - RNA, 26 nt, Human
ccccaaccugcucaaaacccuaaguu

SEQ ID NO: 693160 - RNA, 25 nt, Human
ccccccacccccaacagcagccuca

SEQ ID NO: 693161 - RNA, 19 nt, Human
cccgguuccgggccggggc

SEQ ID NO: 693162 - RNA, 18 nt, Human
cccuccacccacccucaa

SEQ ID NO: 693163 - RNA, 23 nt, Human
cccuccacccacccucaacucac

SEQ ID NO: 693164 - RNA, 22 nt, Human
ccgggccggggccggacgagca

SEQ ID NO: 693165 - RNA, 20 nt, Human
ccuccacccacccucaacuc

SEQ ID NO: 693166 - RNA, 22 nt, Human
ccugcccauuccccucccccca

SEQ ID NO: 693167 - RNA, 24 nt, Human
cggacgagcagcacgcccagcucc

SEQ ID NO: 693168 - RNA, 18 nt, Human
cgggccggggccggacga

SEQ ID NO: 693169 - RNA, 20 nt, Human
cugcaaaccccuccacccac

SEQ ID NO: 693170 - RNA, 22 nt, Human
cugcaggccccaccccaaccag

SEQ ID NO: 693171 - RNA, 18 nt, Human
cuuuaagccccagaaugg

SEQ ID NO: 693172 - RNA, 20 nt, Human
gaacagguauggcuggaaac

SEQ ID NO: 693173 - RNA, 24 nt, Human
gccacauucccacacugcaaaccc

SEQ ID NO: 693174 - RNA, 19 nt, Human
gcccauuccccucccccca

SEQ ID NO: 693175 - RNA, 26 nt, Human
gccugcccauuccccuccccccaccc

SEQ ID NO: 693176 - RNA, 22 nt, Human
gcucaggucaacugcagggcca

SEQ ID NO: 693177 - RNA, 22 nt, Human
ggacgagcagcacgcccagcuc

SEQ ID NO: 693178 - RNA, 20 nt, Human
gggccggggccggacgagca

SEQ ID NO: 693179 - RNA, 23 nt, Human
gggccggggccggacgagcagca

SEQ ID NO: 693180 - RNA, 19 nt, Human
guccuuucucccccagccu

SEQ ID NO: 693181 - RNA, 24 nt, Human
uaacaaaccuacauuuauugaaaa

SEQ ID NO: 693182 - RNA, 22 nt, Human
uaaguuagcaaaggaagacaac

SEQ ID NO: 693183 - RNA, 18 nt, Human
uaccaaacggcccagagg

SEQ ID NO: 693184 - RNA, 18 nt, Human
uaccccaaccugcucaaa

SEQ ID NO: 693185 - RNA, 20 nt, Human
uacuuggucuggucccaguu

SEQ ID NO: 693186 - RNA, 23 nt, Human
ucagcuugugccugugggugccu

SEQ ID NO: 693187 - RNA, 23 nt, Human
ucaguaacuaagacucugcaggc

SEQ ID NO: 693188 - RNA, 23 nt, Human
uccacagccaucuugcuccaccu

SEQ ID NO: 693189 - RNA, 25 nt, Human
uccacccacccucaacucacacaca

SEQ ID NO: 693190 - RNA, 20 nt, Human
uccagccccucucccuucca

SEQ ID NO: 693191 - RNA, 20 nt, Human
ucccacacugcaaaccccuc

SEQ ID NO: 693192 - RNA, 23 nt, Human
ucccacacugcaaaccccuccac

SEQ ID NO: 693193 - RNA, 21 nt, Human
uccuuucucccccagccuggg

SEQ ID NO: 693194 - RNA, 26 nt, Human
uccuuucucccccagccugggaggau

SEQ ID NO: 693195 - RNA, 19 nt, Human
ucuaggcugaaagagagaa

SEQ ID NO: 693196 - RNA, 19 nt, Human
ucugcaggccccaccccaa

SEQ ID NO: 693197 - RNA, 18 nt, Human
ugaagcagcucaggucaa

SEQ ID NO: 693198 - RNA, 18 nt, Human
ugacaggcaccauacccc

SEQ ID NO: 693199 - RNA, 22 nt, Human
ugaggugccaagaggaggggcu

SEQ ID NO: 693200 - RNA, 22 nt, Human
ugauucugaggugccaagagga

SEQ ID NO: 693201 - RNA, 24 nt, Human
ugccuccagccccucucccuucca

SEQ ID NO: 693202 - RNA, 22 nt, Human
ugccugugggugccuccagccc

SEQ ID NO: 693203 - RNA, 21 nt, Human
uggaaaccaguccuccugaca

SEQ ID NO: 693204 - RNA, 22 nt, Human
ugggugccuccagccccucucc

SEQ ID NO: 693205 - RNA, 23 nt, Human
uuuuuuuuuuauugggaaacuca

SEQ ID NO: 693206 - RNA, 22 nt, Human
aaaaagaaaaaagagaagcuaa

SEQ ID NO: 693207 - RNA, 21 nt, Human
aaagguucuagggccucuccu

SEQ ID NO: 693208 - RNA, 23 nt, Human
aagaaaaaagagaagcuaaaugu

SEQ ID NO: 693209 - RNA, 20 nt, Human
aagagaagcuaaaugugcug

SEQ ID NO: 693210 - RNA, 22 nt, Human
aucaggcucugucccgacgccu

SEQ ID NO: 693211 - RNA, 18 nt, Human
ccucuccgacugcgagag

SEQ ID NO: 693212 - RNA, 22 nt, Human
ccugagagaaagucugaaaccc

SEQ ID NO: 693213 - RNA, 22 nt, Human
ccuggaucaggcucugucccga

SEQ ID NO: 693214 - RNA, 22 nt, Human
cgagagcugccaccggccgccg

SEQ ID NO: 693215 - RNA, 24 nt, Human
cuagggccucuccuucgcgucucu

SEQ ID NO: 693216 - RNA, 21 nt, Human
cucuccuucgcgucucugcug

SEQ ID NO: 693217 - RNA, 21 nt, Human
cugaaacccacucaguccccg

SEQ ID NO: 693218 - RNA, 19 nt, Human
cugaagccagcggaaaucc

SEQ ID NO: 693219 - RNA, 23 nt, Human
cugagagaaagucugaaacccac

SEQ ID NO: 693220 - RNA, 20 nt, Human
gaaccugaagccagcggaaa

SEQ ID NO: 693221 - RNA, 24 nt, Human
gccgaagccuggaucaggcucugu

SEQ ID NO: 693222 - RNA, 22 nt, Human
ucuccuucgcgucucugcugug

SEQ ID NO: 693223 - RNA, 24 nt, Human
ucugaaacccacucaguccccgaa

SEQ ID NO: 693224 - RNA, 22 nt, Human
ugaaacccacucaguccccgaa

SEQ ID NO: 693225 - RNA, 23 nt, Human
ugagagaaagucugaaacccacu

SEQ ID NO: 693226 - RNA, 22 nt, Human
ugccaccggccgccgaagccug

SEQ ID NO: 693227 - RNA, 25 nt, Human
aacagaacaaacagaugauauggga

SEQ ID NO: 693228 - RNA, 21 nt, Human
aacaucuuuauuccauuuccc

SEQ ID NO: 693229 - RNA, 22 nt, Human
aaguagcugggauuacaggcau

SEQ ID NO: 693230 - RNA, 24 nt, Human
aaguagcugggauuacaggcaugc

SEQ ID NO: 693231 - RNA, 20 nt, Human
aauaaccagcucaccccaug

SEQ ID NO: 693232 - RNA, 24 nt, Human
acagagugcugggacuacaggcau

SEQ ID NO: 693233 - RNA, 18 nt, Human
accauguuggccaggcug

SEQ ID NO: 693234 - RNA, 18 nt, Human
acccauagcucuguggcc

SEQ ID NO: 693235 - RNA, 18 nt, Human
acgggguuucaccauguu

SEQ ID NO: 693236 - RNA, 23 nt, Human
acgggguuucaccauguuggcca

SEQ ID NO: 693237 - RNA, 24 nt, Human
acgggguuucaccauguuggccag

SEQ ID NO: 693238 - RNA, 23 nt, Human
acucugucauccaggcuggacug

SEQ ID NO: 693239 - RNA, 25 nt, Human
acucugucauccaggcuggacugca

SEQ ID NO: 693240 - RNA, 24 nt, Human
acugcagugaugcgaucucggcuc

SEQ ID NO: 693241 - RNA, 18 nt, Human
agacaacagaacaaacag

SEQ ID NO: 693242 - RNA, 24 nt, Human
agagugcugggacuacaggcauga

SEQ ID NO: 693243 - RNA, 18 nt, Human
agccccuggcagcgaguc

SEQ ID NO: 693244 - RNA, 19 nt, Human
aggaacagaccccaaaaac

SEQ ID NO: 693245 - RNA, 20 nt, Human
aggaacagaccccaaaaaca

SEQ ID NO: 693246 - RNA, 18 nt, Human
aggcaugagccacugagc

SEQ ID NO: 693247 - RNA, 21 nt, Human
aggcaugagccacugagcccg

SEQ ID NO: 693248 - RNA, 22 nt, Human
agugcaggaacagaccccaaaa

SEQ ID NO: 693249 - RNA, 23 nt, Human
agugcaggaacagaccccaaaaa

SEQ ID NO: 693250 - RNA, 18 nt, Human
agugcugggacuacaggc

SEQ ID NO: 693251 - RNA, 22 nt, Human
agugcugggacuacaggcauga

SEQ ID NO: 693252 - RNA, 19 nt, Human
auagacgggguuucaccau

SEQ ID NO: 693253 - RNA, 19 nt, Human
augagccacugagcccggc

SEQ ID NO: 693254 - RNA, 28 nt, Human
caagcaauucucccgccucaggcuccca

SEQ ID NO: 693255 - RNA, 24 nt, Human
caagcgaucugccugccucggccc

SEQ ID NO: 693256 - RNA, 21 nt, Human
caccauguuggccaggcuggu

SEQ ID NO: 693257 - RNA, 24 nt, Human
caccauguuggccaggcuggucuc

SEQ ID NO: 693258 - RNA, 27 nt, Human
caccauguuggccaggcuggucucaaa

SEQ ID NO: 693259 - RNA, 23 nt, Human
cacucugucauccaggcuggacu

SEQ ID NO: 693260 - RNA, 24 nt, Human
cacucugucauccaggcuggacug

SEQ ID NO: 693261 - RNA, 21 nt, Human
cacugcaaccucugccucccg

SEQ ID NO: 693262 - RNA, 23 nt, Human
cacugcaaccucugccucccggg

SEQ ID NO: 693263 - RNA, 21 nt, Human
cacuggggcugauguauagcu

SEQ ID NO: 693264 - RNA, 23 nt, Human
cagagugcugggacuacaggcau

SEQ ID NO: 693265 - RNA, 24 nt, Human
cagagugcugggacuacaggcaug

SEQ ID NO: 693266 - RNA, 24 nt, Human
caggagccuggguuucgauucaag

SEQ ID NO: 693267 - RNA, 20 nt, Human
cauccaggcuggacugcagu

SEQ ID NO: 693268 - RNA, 24 nt, Human
cauguuggccaggcuggucucaaa

SEQ ID NO: 693269 - RNA, 23 nt, Human
ccaaguagcugggauuacaggca

SEQ ID NO: 693270 - RNA, 24 nt, Human
ccaaguagcugggauuacaggcau

SEQ ID NO: 693271 - RNA, 19 nt, Human
ccacugagcccggcuugca

SEQ ID NO: 693272 - RNA, 24 nt, Human
cccaaaaacaucuuuauuccauuu

SEQ ID NO: 693273 - RNA, 23 nt, Human
cccaaguagcugggauuacaggc

SEQ ID NO: 693274 - RNA, 24 nt, Human
cccaaguagcugggauuacaggca

SEQ ID NO: 693275 - RNA, 26 nt, Human
cccacagagugcugggacuacaggca

SEQ ID NO: 693276 - RNA, 20 nt, Human
cccuuggauggccgaggccc

SEQ ID NO: 693277 - RNA, 22 nt, Human
ccucagucucuucuucaaaaca

SEQ ID NO: 693278 - RNA, 24 nt, Human
ccucccggguucaagcaauucucc

SEQ ID NO: 693279 - RNA, 21 nt, Human
ccugaccucaagcgaucugcc

SEQ ID NO: 693280 - RNA, 21 nt, Human
cgccucaggcucccaaguagc

SEQ ID NO: 693281 - RNA, 24 nt, Human
cucacugcaaccucugccucccgg

SEQ ID NO: 693282 - RNA, 26 nt, Human
cuccugaccucaagcgaucugccugc

SEQ ID NO: 693283 - RNA, 23 nt, Human
cugcaaccucugccucccggguu

SEQ ID NO: 693284 - RNA, 24 nt, Human
cugcaaccucugccucccggguuc

SEQ ID NO: 693285 - RNA, 24 nt, Human
gaccucaagcgaucugccugccuc

SEQ ID NO: 693286 - RNA, 21 nt, Human
gacuacaggcaugagccacug

SEQ ID NO: 693287 - RNA, 18 nt, Human
gauuacaggcaugcgcca

SEQ ID NO: 693288 - RNA, 22 nt, Human
gccagugccugcaggagccugg

SEQ ID NO: 693289 - RNA, 21 nt, Human
gccccuggcagcgagucccag

SEQ ID NO: 693290 - RNA, 23 nt, Human
gccucaggcucccaaguagcugg

SEQ ID NO: 693291 - RNA, 23 nt, Human
gcuggucucaaacuccugaccuc

SEQ ID NO: 693292 - RNA, 25 nt, Human
ggaaaagggcucggauucaccuggc

SEQ ID NO: 693293 - RNA, 20 nt, Human
ggacuacaggcaugagccac

SEQ ID NO: 693294 - RNA, 22 nt, Human
ggacuacaggcaugagccacug

SEQ ID NO: 693295 - RNA, 19 nt, Human
ggauuacaggcaugcgcca

SEQ ID NO: 693296 - RNA, 24 nt, Human
ggcuggucucaaacuccugaccuc

SEQ ID NO: 693297 - RNA, 23 nt, Human
gggguuucaccauguuggccagg

SEQ ID NO: 693298 - RNA, 22 nt, Human
ggguuucaccauguuggccagg

SEQ ID NO: 693299 - RNA, 18 nt, Human
ggucuggcacuggggcug

SEQ ID NO: 693300 - RNA, 21 nt, Human
gguguggggccauggaagaaa

SEQ ID NO: 693301 - RNA, 19 nt, Human
gucccagagccagggugga

SEQ ID NO: 693302 - RNA, 25 nt, Human
uaauuuuugaauuuuuuaguauaga

SEQ ID NO: 693303 - RNA, 23 nt, Human
uacaggcaugagccacugagccc

SEQ ID NO: 693304 - RNA, 23 nt, Human
uacaggcaugcgccaccacgucc

SEQ ID NO: 693305 - RNA, 26 nt, Human
uagacaacagaacaaacagaugauau

SEQ ID NO: 693306 - RNA, 24 nt, Human
uaguauagacgggguuucaccaug

SEQ ID NO: 693307 - RNA, 18 nt, Human
ucaaauccuggugcugac

SEQ ID NO: 693308 - RNA, 21 nt, Human
ucaccuggcuucaaauccugg

SEQ ID NO: 693309 - RNA, 24 nt, Human
ucacugcaaccucugccucccggg

SEQ ID NO: 693310 - RNA, 25 nt, Human
ucacugcaaccucugccucccgggu

SEQ ID NO: 693311 - RNA, 24 nt, Human
ucccaaguagcugggauuacaggc

SEQ ID NO: 693312 - RNA, 21 nt, Human
ucccggguucaagcaauucuc

SEQ ID NO: 693313 - RNA, 24 nt, Human
ucccggguucaagcaauucucccg

SEQ ID NO: 693314 - RNA, 21 nt, Human
ucccugagggccuugcucuga

SEQ ID NO: 693315 - RNA, 24 nt, Human
uccugggguggagggaaggucacc

SEQ ID NO: 693316 - RNA, 23 nt, Human
ucucacucugucauccaggcugg

SEQ ID NO: 693317 - RNA, 24 nt, Human
ucucacucugucauccaggcugga

SEQ ID NO: 693318 - RNA, 24 nt, Human
ucugccucccggguucaagcaauu

SEQ ID NO: 693319 - RNA, 24 nt, Human
ucugucauccaggcuggacugcag

SEQ ID NO: 693320 - RNA, 18 nt, Human
ugaccucaagcgaucugc

SEQ ID NO: 693321 - RNA, 22 nt, Human
ugagauggagucucacucuguc

SEQ ID NO: 693322 - RNA, 22 nt, Human
ugcagugaugcgaucucggcuc

SEQ ID NO: 693323 - RNA, 18 nt, Human
ugccagugccugcaggag

SEQ ID NO: 693324 - RNA, 23 nt, Human
ugccaugguguggggccauggaa

SEQ ID NO: 693325 - RNA, 25 nt, Human
ugccccaaaccaucagcgucacucu

SEQ ID NO: 693326 - RNA, 24 nt, Human
uggacugcagugaugcgaucucgg

SEQ ID NO: 693327 - RNA, 24 nt, Human
uggccaggcuggucucaaacuccu

SEQ ID NO: 693328 - RNA, 21 nt, Human
ugggacuacaggcaugagcca

SEQ ID NO: 693329 - RNA, 22 nt, Human
ugggacuacaggcaugagccac

SEQ ID NO: 693330 - RNA, 22 nt, Human
ugggacuacaggcaugagccac

SEQ ID NO: 693331 - RNA, 24 nt, Human
ugggacuacaggcaugagccacug

SEQ ID NO: 693332 - RNA, 24 nt, Human
ugggacuacaggcaugagccacug

SEQ ID NO: 693333 - RNA, 26 nt, Human
ugggacuacaggcaugagccacugag

SEQ ID NO: 693334 - RNA, 18 nt, Human
ugggauuacaggcaugcg

SEQ ID NO: 693335 - RNA, 21 nt, Human
ugggauuacaggcaugcgcca

SEQ ID NO: 693336 - RNA, 22 nt, Human
ugggauuacaggcaugcgccac

SEQ ID NO: 693337 - RNA, 24 nt, Human
ugggauuacaggcaugcgccacca

SEQ ID NO: 693338 - RNA, 23 nt, Human
ugggguggagggaaggucaccug

SEQ ID NO: 693339 - RNA, 25 nt, Human
ugguguggggccauggaagaaaugu

SEQ ID NO: 693340 - RNA, 20 nt, Human
ugugccagugccugcaggag

SEQ ID NO: 693341 - RNA, 24 nt, Human
uuaguauagacgggguuucaccau

SEQ ID NO: 693342 - RNA, 22 nt, Human
uucaaaacauggaggaugaccc

SEQ ID NO: 693343 - RNA, 25 nt, Human
uucaagcaauucucccgccucaggc

SEQ ID NO: 693344 - RNA, 22 nt, Human
uucccgaagacccccggaugcc

SEQ ID NO: 693345 - RNA, 18 nt, Human
uucccggguucccgaaga

SEQ ID NO: 693346 - RNA, 21 nt, Human
uucccggguucccgaagaccc

SEQ ID NO: 693347 - RNA, 21 nt, Human
uuguugcuaaaauaaccagcu

SEQ ID NO: 693348 - RNA, 24 nt, Human
uuucaccauguuggccaggcuggu

SEQ ID NO: 693349 - RNA, 24 nt, Human
uuuuuaguauagacgggguuucac

SEQ ID NO: 693350 - RNA, 21 nt, Human
aaaacaccaacuuucaaagca

SEQ ID NO: 693351 - RNA, 20 nt, Human
aaaauuagugacagggauaa

SEQ ID NO: 693352 - RNA, 18 nt, Human
aaacaccaacuuucaaag

SEQ ID NO: 693353 - RNA, 18 nt, Human
acaauacacacacauaua

SEQ ID NO: 693354 - RNA, 18 nt, Human
acaauacacacacauaua

SEQ ID NO: 693355 - RNA, 21 nt, Human
acugaaauguaaagacauuua

SEQ ID NO: 693356 - RNA, 20 nt, Human
aguuuuuuuuuuuuuuuuuu

SEQ ID NO: 693357 - RNA, 25 nt, Human
auuucauuacuggguaugugaacaa

SEQ ID NO: 693358 - RNA, 21 nt, Human
caaccaaaaacaccaacuuuc

SEQ ID NO: 693359 - RNA, 24 nt, Human
caggugacagagacaguuuuuuuu

SEQ ID NO: 693360 - RNA, 22 nt, Human
ccaaaaacaccaacuuucaaag

SEQ ID NO: 693361 - RNA, 23 nt, Human
ccaaaaacaccaacuuucaaagc

SEQ ID NO: 693362 - RNA, 24 nt, Human
ccaaaaacaccaacuuucaaagca

SEQ ID NO: 693363 - RNA, 27 nt, Human
ccaacuuucaaagcaaacagucccaua

SEQ ID NO: 693364 - RNA, 30 nt, Human
gacagagacaguuuuuuuuuuuuuuuuuuu

SEQ ID NO: 693365 - RNA, 20 nt, Human
gagacaguuuuuuuuuuuuu

SEQ ID NO: 693366 - RNA, 20 nt, Human
ggaccaaauuuauucuacaa

SEQ ID NO: 693367 - RNA, 25 nt, Human
uaaauucucaucaaccaaaaacacc

SEQ ID NO: 693368 - RNA, 19 nt, Human
uacaauacacacacauaua

SEQ ID NO: 693369 - RNA, 25 nt, Human
uacaauacacacacauauagguagg

SEQ ID NO: 693370 - RNA, 27 nt, Human
uaccauuaauaccucaauauauguuau

SEQ ID NO: 693371 - RNA, 22 nt, Human
uacuggguaugugaacaauuga

SEQ ID NO: 693372 - RNA, 23 nt, Human
uagauugcagacguaaauucuca

SEQ ID NO: 693373 - RNA, 19 nt, Human
uauggcacuaagaaaggua

SEQ ID NO: 693374 - RNA, 22 nt, Human
ucucaucaaccaaaaacaccaa

SEQ ID NO: 693375 - RNA, 23 nt, Human
ugaaggaaauccaaacggccauu

SEQ ID NO: 693376 - RNA, 21 nt, Human
uuuuuuuuuuuuuuuugaagg

SEQ ID NO: 693377 - RNA, 18 nt, Human
uuuuuuuuuuuuuuuuug

SEQ ID NO: 693378 - RNA, 23 nt, Human
aacagaaaacaaguuuaaugcaa

SEQ ID NO: 693379 - RNA, 22 nt, Human
aaccaagagguaaucaacagaa

SEQ ID NO: 693380 - RNA, 24 nt, Human
aagcagccauccacagcgccuccc

SEQ ID NO: 693381 - RNA, 21 nt, Human
aaggaaaagaguggccaucag

SEQ ID NO: 693382 - RNA, 21 nt, Human
acccugggaagucaaaccaag

SEQ ID NO: 693383 - RNA, 24 nt, Human
accugauccccacucucccauccc

SEQ ID NO: 693384 - RNA, 22 nt, Human
acgcagccccugagcccaaggg

SEQ ID NO: 693385 - RNA, 19 nt, Human
agauguugaacacacacgu

SEQ ID NO: 693386 - RNA, 20 nt, Human
agccccugagcccaagggcc

SEQ ID NO: 693387 - RNA, 22 nt, Human
aggaccccacggcccacagaaa

SEQ ID NO: 693388 - RNA, 25 nt, Human
aggaguccuucacuccagggauguc

SEQ ID NO: 693389 - RNA, 20 nt, Human
auacugaagcccucagaggc

SEQ ID NO: 693390 - RNA, 20 nt, Human
auguugaacacacacgugug

SEQ ID NO: 693391 - RNA, 22 nt, Human
cacucucccaucccaagacccu

SEQ ID NO: 693392 - RNA, 23 nt, Human
cagaggcagaggggagucaagga

SEQ ID NO: 693393 - RNA, 21 nt, Human
cagccuccgcgcgccucuccc

SEQ ID NO: 693394 - RNA, 22 nt, Human
cauucagacucccccaguguuc

SEQ ID NO: 693395 - RNA, 20 nt, Human
ccaagacccugggaagucaa

SEQ ID NO: 693396 - RNA, 18 nt, Human
ccccacucucccauccca

SEQ ID NO: 693397 - RNA, 20 nt, Human
ccccacugccccccaugcug

SEQ ID NO: 693398 - RNA, 22 nt, Human
ccccaucaauacugaagcccuc

SEQ ID NO: 693399 - RNA, 21 nt, Human
ccccaugcugaggaguccuuc

SEQ ID NO: 693400 - RNA, 18 nt, Human
ccccugagcccaagggcc

SEQ ID NO: 693401 - RNA, 22 nt, Human
ccccugagcccaagggccgucu

SEQ ID NO: 693402 - RNA, 23 nt, Human
cccuccccgcccuucuggaaccu

SEQ ID NO: 693403 - RNA, 19 nt, Human
cccugagcccaagggccgu

SEQ ID NO: 693404 - RNA, 21 nt, Human
ccucaucucagggccucgcgg

SEQ ID NO: 693405 - RNA, 22 nt, Human
ccuccaccacuggaaugggggc

SEQ ID NO: 693406 - RNA, 18 nt, Human
ccucccacccgccggggc

SEQ ID NO: 693407 - RNA, 19 nt, Human
cgcagccuccgcgcgccuc

SEQ ID NO: 693408 - RNA, 25 nt, Human
cgcgccucccacccgccggggccug

SEQ ID NO: 693409 - RNA, 23 nt, Human
cggccaggcaggaacgggcgcgg

SEQ ID NO: 693410 - RNA, 18 nt, Human
cgguucugagucccgccu

SEQ ID NO: 693411 - RNA, 20 nt, Human
cuaacgugugccccacugcc

SEQ ID NO: 693412 - RNA, 22 nt, Human
cucccaucccaagacccuggga

SEQ ID NO: 693413 - RNA, 23 nt, Human
cugaggaguccuucacuccaggg

SEQ ID NO: 693414 - RNA, 21 nt, Human
cuggaaugggggcagcccuaa

SEQ ID NO: 693415 - RNA, 20 nt, Human
gauccccacucucccauccc

SEQ ID NO: 693416 - RNA, 18 nt, Human
gcaggaacgggcgcggga

SEQ ID NO: 693417 - RNA, 23 nt, Human
gccauccacagcgccuccaccac

SEQ ID NO: 693418 - RNA, 19 nt, Human
gcgccucccacccgccggg

SEQ ID NO: 693419 - RNA, 18 nt, Human
gcggccaggcaggaacgg

SEQ ID NO: 693420 - RNA, 25 nt, Human
gcggcccugaacgccgguucugagu

SEQ ID NO: 693421 - RNA, 19 nt, Human
ggaaugggggcagcccuaa

SEQ ID NO: 693422 - RNA, 19 nt, Human
ggcgcccccuccccgcccu

SEQ ID NO: 693423 - RNA, 18 nt, Human
ggugacaacggucuggag

SEQ ID NO: 693424 - RNA, 23 nt, Human
gugcugcuguuggagcggccggc

SEQ ID NO: 693425 - RNA, 23 nt, Human
guucugagucccgccuugugcug

SEQ ID NO: 693426 - RNA, 23 nt, Human
uaacgugugccccacugcccccc

SEQ ID NO: 693427 - RNA, 21 nt, Human
uaaugcaacaggugacaacgg

SEQ ID NO: 693428 - RNA, 22 nt, Human
uacccugaugcucucuacuugg

SEQ ID NO: 693429 - RNA, 18 nt, Human
uacugaagcccucagagg

SEQ ID NO: 693430 - RNA, 20 nt, Human
uaguuaucuucugccuccug

SEQ ID NO: 693431 - RNA, 18 nt, Human
ucaauacugaagcccuca

SEQ ID NO: 693432 - RNA, 21 nt, Human
ucagcgcgcggcgcccccucc

SEQ ID NO: 693433 - RNA, 22 nt, Human
uccacagcgccuccaccacugg

SEQ ID NO: 693434 - RNA, 27 nt, Human
ucccaagacccugggaagucaaaccaa

SEQ ID NO: 693435 - RNA, 21 nt, Human
uccccaucaauacugaagccc

SEQ ID NO: 693436 - RNA, 18 nt, Human
ucccgccuugugcugcug

SEQ ID NO: 693437 - RNA, 21 nt, Human
ucccuccccaucaauacugaa

SEQ ID NO: 693438 - RNA, 18 nt, Human
ucgcggccgcuggcggcc

SEQ ID NO: 693439 - RNA, 19 nt, Human
ucgcggccgcuggcggccc

SEQ ID NO: 693440 - RNA, 21 nt, Human
ugauccccacucucccauccc

SEQ ID NO: 693441 - RNA, 28 nt, Human
uggcggcccugaacgccgguucugaguc

SEQ ID NO: 693442 - RNA, 22 nt, Human
ugucuucaccccaaucauucag

SEQ ID NO: 693443 - RNA, 22 nt, Human
uugaggaaaagcagccauccac

SEQ ID NO: 693444 - RNA, 23 nt, Human
uuuggagccucaucucagggccu

SEQ ID NO: 693445 - RNA, 19 nt, Human
aaaagcccagcccaaacca

SEQ ID NO: 693446 - RNA, 19 nt, Human
aaaaucuccccaucucaca

SEQ ID NO: 693447 - RNA, 18 nt, Human
aaccauacaccaccuccc

SEQ ID NO: 693448 - RNA, 20 nt, Human
aaccauacaccaccuccccc

SEQ ID NO: 693449 - RNA, 21 nt, Human
aaccauacaccaccuccccca

SEQ ID NO: 693450 - RNA, 25 nt, Human
aacccggcauccagcucagaacaca

SEQ ID NO: 693451 - RNA, 24 nt, Human
aaccuggcuccucgggccccucca

SEQ ID NO: 693452 - RNA, 20 nt, Human
aagaugcacagcuccguaac

SEQ ID NO: 693453 - RNA, 21 nt, Human
aagcagcggcaugccuggagc

SEQ ID NO: 693454 - RNA, 18 nt, Human
aagccauacaagcagcgg

SEQ ID NO: 693455 - RNA, 21 nt, Human
acaaaagcccagcccaaacca

SEQ ID NO: 693456 - RNA, 19 nt, Human
acacacgcccccgcgggug

SEQ ID NO: 693457 - RNA, 24 nt, Human
acagggauaaaucaaaagacaaaa

SEQ ID NO: 693458 - RNA, 24 nt, Human
accagggcacaaaagcccagccca

SEQ ID NO: 693459 - RNA, 20 nt, Human
acccgccacccaggccccgg

SEQ ID NO: 693460 - RNA, 19 nt, Human
acccggcauccagcucaga

SEQ ID NO: 693461 - RNA, 22 nt, Human
accugggcugccgcauggccuc

SEQ ID NO: 693462 - RNA, 26 nt, Human
acggcagugaaagcaagcgaugcgcc

SEQ ID NO: 693463 - RNA, 19 nt, Human
agaaauggaggguccccuc

SEQ ID NO: 693464 - RNA, 21 nt, Human
agcaggaggcuccacucugcc

SEQ ID NO: 693465 - RNA, 20 nt, Human
agcugguuuugguucgucuc

SEQ ID NO: 693466 - RNA, 22 nt, Human
aggcagggaggaggagaggcag

SEQ ID NO: 693467 - RNA, 19 nt, Human
agggaggaggagaggcagu

SEQ ID NO: 693468 - RNA, 20 nt, Human
agggggagaaauggaggguc

SEQ ID NO: 693469 - RNA, 23 nt, Human
agggucagaggccaaagaaagcc

SEQ ID NO: 693470 - RNA, 20 nt, Human
aguccccaggagccagcacc

SEQ ID NO: 693471 - RNA, 23 nt, Human
auaaaucaaaagacaaaaucucc

SEQ ID NO: 693472 - RNA, 20 nt, Human
auacaccaccucccccaagc

SEQ ID NO: 693473 - RNA, 19 nt, Human
aucaaaagacaaaaucucc

SEQ ID NO: 693474 - RNA, 24 nt, Human
aucauucccccuucaucuacaacc

SEQ ID NO: 693475 - RNA, 20 nt, Human
caaaagacaaaaucucccca

SEQ ID NO: 693476 - RNA, 21 nt, Human
caaaaucuccccaucucacag

SEQ ID NO: 693477 - RNA, 20 nt, Human
caacaccagaagagaagcaa

SEQ ID NO: 693478 - RNA, 22 nt, Human
caacccuaggccaaguccuccu

SEQ ID NO: 693479 - RNA, 22 nt, Human
caagccccaccacacacacgcc

SEQ ID NO: 693480 - RNA, 22 nt, Human
caauaaaugcaaccuggcuccu

SEQ ID NO: 693481 - RNA, 18 nt, Human
cacagcccuaccggcccc

SEQ ID NO: 693482 - RNA, 21 nt, Human
cacagcccuaccggccccagc

SEQ ID NO: 693483 - RNA, 20 nt, Human
caccacacacacgcccccgc

SEQ ID NO: 693484 - RNA, 21 nt, Human
caccaccucccccaagcggga

SEQ ID NO: 693485 - RNA, 20 nt, Human
caccacucccucccuggcca

SEQ ID NO: 693486 - RNA, 19 nt, Human
caccagaagagaagcaacg

SEQ ID NO: 693487 - RNA, 19 nt, Human
caccccccacccugggcuu

SEQ ID NO: 693488 - RNA, 19 nt, Human
cacccgccacccaggcccc

SEQ ID NO: 693489 - RNA, 24 nt, Human
cacccgccacccaggccccggcuc

SEQ ID NO: 693490 - RNA, 25 nt, Human
cacccggcuagccuccccagaagau

SEQ ID NO: 693491 - RNA, 22 nt, Human
cacccugggcuucaccagggac

SEQ ID NO: 693492 - RNA, 18 nt, Human
cacucccucccuggccac

SEQ ID NO: 693493 - RNA, 18 nt, Human
cacugggcuccccaggca

SEQ ID NO: 693494 - RNA, 20 nt, Human
cagaaaugaggccgggcaca

SEQ ID NO: 693495 - RNA, 22 nt, Human
cagagagaaugggagggaggaa

SEQ ID NO: 693496 - RNA, 23 nt, Human
cagaggccaaagaaagccauaca

SEQ ID NO: 693497 - RNA, 19 nt, Human
cagcaaaucccaaguccac

SEQ ID NO: 693498 - RNA, 19 nt, Human
cagcaacacagguggcaga

SEQ ID NO: 693499 - RNA, 24 nt, Human
cagcagggucagaggccaaagaaa

SEQ ID NO: 693500 - RNA, 19 nt, Human
cagcaugcagaccugggcu

SEQ ID NO: 693501 - RNA, 21 nt, Human
cagcccaaaccacuaaugccc

SEQ ID NO: 693502 - RNA, 24 nt, Human
cagcggcaugccuggagcuggagc

SEQ ID NO: 693503 - RNA, 18 nt, Human
caggaggcuccacucugc

SEQ ID NO: 693504 - RNA, 23 nt, Human
cagggcacaaaagcccagcccaa

SEQ ID NO: 693505 - RNA, 22 nt, Human
cauacaccaccucccccaagcu

SEQ ID NO: 693506 - RNA, 20 nt, Human
caucagcaacacagguggca

SEQ ID NO: 693507 - RNA, 24 nt, Human
caugccaagccccaccacacacac

SEQ ID NO: 693508 - RNA, 24 nt, Human
caugccuggagcuggagcugccau

SEQ ID NO: 693509 - RNA, 21 nt, Human
cauggccucucccugagcccu

SEQ ID NO: 693510 - RNA, 23 nt, Human
ccaaacacccaaggaagagggag

SEQ ID NO: 693511 - RNA, 18 nt, Human
ccaagccccaccacacac

SEQ ID NO: 693512 - RNA, 24 nt, Human
ccacccggcccccacccgccaccc

SEQ ID NO: 693513 - RNA, 20 nt, Human
ccaccucccacccggccccc

SEQ ID NO: 693514 - RNA, 24 nt, Human
ccacugcccugacaccccccaccc

SEQ ID NO: 693515 - RNA, 19 nt, Human
ccacugggcuccccaggca

SEQ ID NO: 693516 - RNA, 23 nt, Human
ccagcccaaaccacuaaugcccc

SEQ ID NO: 693517 - RNA, 19 nt, Human
cccacacuccucagcuuuc

SEQ ID NO: 693518 - RNA, 22 nt, Human
cccacccgccacccaggccccg

SEQ ID NO: 693519 - RNA, 21 nt, Human
cccacccggcccccacccgcc

SEQ ID NO: 693520 - RNA, 18 nt, Human
cccacccggcuagccucc

SEQ ID NO: 693521 - RNA, 22 nt, Human
ccccaccacacacacgcccccg

SEQ ID NO: 693522 - RNA, 20 nt, Human
ccccacccgccacccaggcc

SEQ ID NO: 693523 - RNA, 21 nt, Human
ccccacccgccacccaggccc

SEQ ID NO: 693524 - RNA, 25 nt, Human
ccccagaagaucucacagcccuacc

SEQ ID NO: 693525 - RNA, 19 nt, Human
ccccagcaucuuccucgcc

SEQ ID NO: 693526 - RNA, 22 nt, Human
ccccaggagccagcaccaaaca

SEQ ID NO: 693527 - RNA, 21 nt, Human
cccccacccgccacccaggcc

SEQ ID NO: 693528 - RNA, 28 nt, Human
cccccacccgccacccaggccccggcuc

SEQ ID NO: 693529 - RNA, 22 nt, Human
ccccuccacugcccugacaccc

SEQ ID NO: 693530 - RNA, 22 nt, Human
ccccuggaucugagcucagccc

SEQ ID NO: 693531 - RNA, 22 nt, Human
cccggcauccagcucagaacac

SEQ ID NO: 693532 - RNA, 19 nt, Human
cccuccuaucccaccucuu

SEQ ID NO: 693533 - RNA, 27 nt, Human
cccugacaccccccacccugggcuuca

SEQ ID NO: 693534 - RNA, 22 nt, Human
cccuggcuuguuccugggaccc

SEQ ID NO: 693535 - RNA, 21 nt, Human
ccuaucagcccugggcugagc

SEQ ID NO: 693536 - RNA, 23 nt, Human
ccucccacccggcccccacccgc

SEQ ID NO: 693537 - RNA, 24 nt, Human
ccuccccagaagaucucacagccc

SEQ ID NO: 693538 - RNA, 19 nt, Human
ccuccuaucccaccucuuc

SEQ ID NO: 693539 - RNA, 20 nt, Human
ccucgggccccuccacugcc

SEQ ID NO: 693540 - RNA, 26 nt, Human
ccugccagcccuacagggauaaauca

SEQ ID NO: 693541 - RNA, 22 nt, Human
ccugggaccccaggcugcccaa

SEQ ID NO: 693542 - RNA, 23 nt, Human
ccugggaccccaggcugcccaag

SEQ ID NO: 693543 - RNA, 19 nt, Human
cgagagggaggaggagugg

SEQ ID NO: 693544 - RNA, 19 nt, Human
cgagagggaggaggagugg

SEQ ID NO: 693545 - RNA, 20 nt, Human
cgccacauugaggccuucuc

SEQ ID NO: 693546 - RNA, 19 nt, Human
cggcccccacccgccaccc

SEQ ID NO: 693547 - RNA, 22 nt, Human
cguaaccauacaccaccucccc

SEQ ID NO: 693548 - RNA, 22 nt, Human
cuaaugccccuuggagcucccc

SEQ ID NO: 693549 - RNA, 21 nt, Human
cuaccggccccagcaucuucc

SEQ ID NO: 693550 - RNA, 24 nt, Human
cuagccuccccagaagaucucaca

SEQ ID NO: 693551 - RNA, 19 nt, Human
cucacagcccuaccggccu

SEQ ID NO: 693552 - RNA, 21 nt, Human
cuccaguggagcugccggcuc

SEQ ID NO: 693553 - RNA, 25 nt, Human
cuccccauccaauaaaugcaaccug

SEQ ID NO: 693554 - RNA, 23 nt, Human
cuccccaucucacagcgagugac

SEQ ID NO: 693555 - RNA, 20 nt, Human
cucccuggccacugggcucc

SEQ ID NO: 693556 - RNA, 21 nt, Human
cuccguaaccauacaccaccu

SEQ ID NO: 693557 - RNA, 21 nt, Human
cuccucgggccccuccacugc

SEQ ID NO: 693558 - RNA, 20 nt, Human
cucugccugcacugcucucc

SEQ ID NO: 693559 - RNA, 24 nt, Human
cugacaccccccacccugggcuuc

SEQ ID NO: 693560 - RNA, 23 nt, Human
cugaggcaacgagagggaggagg

SEQ ID NO: 693561 - RNA, 21 nt, Human
cuggcuccucgggccccucca

SEQ ID NO: 693562 - RNA, 24 nt, Human
cuuccagcauuucuucccccugga

SEQ ID NO: 693563 - RNA, 18 nt, Human
cuuccucgccacauugag

SEQ ID NO: 693564 - RNA, 18 nt, Human
gaagagagugcacaggcu

SEQ ID NO: 693565 - RNA, 22 nt, Human
gaaggaagaagggaguccuagc

SEQ ID NO: 693566 - RNA, 19 nt, Human
gaaggaaggaagaagggag

SEQ ID NO: 693567 - RNA, 18 nt, Human
gagccagcaccaaacacc

SEQ ID NO: 693568 - RNA, 25 nt, Human
gagccagcaccaaacacccaaggaa

SEQ ID NO: 693569 - RNA, 19 nt, Human
gcaagcuguggaggauggg

SEQ ID NO: 693570 - RNA, 22 nt, Human
gcaguccccuccuaucccaccu

SEQ ID NO: 693571 - RNA, 23 nt, Human
gccaccucccacccggcccccac

SEQ ID NO: 693572 - RNA, 22 nt, Human
gccccagcaucuuccucgccac

SEQ ID NO: 693573 - RNA, 22 nt, Human
gccugcacugcucuccagugga

SEQ ID NO: 693574 - RNA, 27 nt, Human
gccuugcccucgaagcucucugccagc

SEQ ID NO: 693575 - RNA, 19 nt, Human
gcuccguaaccauacacca

SEQ ID NO: 693576 - RNA, 23 nt, Human
ggagagcaggaggcuccacucug

SEQ ID NO: 693577 - RNA, 21 nt, Human
ggagcugccaucacaugccaa

SEQ ID NO: 693578 - RNA, 21 nt, Human
ggaguugcagagagaauggga

SEQ ID NO: 693579 - RNA, 19 nt, Human
ggaguuggaaagcaguucc

SEQ ID NO: 693580 - RNA, 21 nt, Human
ggcagugaaagcaagcgaugc

SEQ ID NO: 693581 - RNA, 20 nt, Human
ggcccccacccgccacccag

SEQ ID NO: 693582 - RNA, 18 nt, Human
ggccuggggagggaaacu

SEQ ID NO: 693583 - RNA, 28 nt, Human
ggccuugcccucgaagcucucugccagc

SEQ ID NO: 693584 - RNA, 21 nt, Human
ggcggggugacaggagagagc

SEQ ID NO: 693585 - RNA, 18 nt, Human
ggcuccccaggcagggag

SEQ ID NO: 693586 - RNA, 20 nt, Human
gggaaggaaggaagaaggga

SEQ ID NO: 693587 - RNA, 18 nt, Human
gggccccuccacugcccu

SEQ ID NO: 693588 - RNA, 18 nt, Human
ggggcggggugacaggag

SEQ ID NO: 693589 - RNA, 21 nt, Human
gggggucugcagcugguccag

SEQ ID NO: 693590 - RNA, 24 nt, Human
ggguguggggggccuggggaggga

SEQ ID NO: 693591 - RNA, 20 nt, Human
ggguugggggucugcagcug

SEQ ID NO: 693592 - RNA, 22 nt, Human
ggugagggggagaaauggaggg

SEQ ID NO: 693593 - RNA, 23 nt, Human
gguguggggggccuggggaggga

SEQ ID NO: 693594 - RNA, 19 nt, Human
gguugggggucugcagcug

SEQ ID NO: 693595 - RNA, 18 nt, Human
gugagggggagaaaugga

SEQ ID NO: 693596 - RNA, 21 nt, Human
guuacagcgacuggcuccacc

SEQ ID NO: 693597 - RNA, 18 nt, Human
uaaccauacaccaccucc

SEQ ID NO: 693598 - RNA, 23 nt, Human
uaaccauacaccaccucccccaa

SEQ ID NO: 693599 - RNA, 22 nt, Human
uaagacuacugccaccucccac

SEQ ID NO: 693600 - RNA, 18 nt, Human
uacaacccugccagcccu

SEQ ID NO: 693601 - RNA, 24 nt, Human
uacaagcagcggcaugccuggagc

SEQ ID NO: 693602 - RNA, 18 nt, Human
uacaccaccucccccaag

SEQ ID NO: 693603 - RNA, 22 nt, Human
uaccagggcacaaaagcccagc

SEQ ID NO: 693604 - RNA, 19 nt, Human
uagcaagacgugucagggg

SEQ ID NO: 693605 - RNA, 19 nt, Human
uagucugagggugagggca

SEQ ID NO: 693606 - RNA, 18 nt, Human
ucaaaagacaaaaucucc

SEQ ID NO: 693607 - RNA, 21 nt, Human
ucaaaagacaaaaucucccca

SEQ ID NO: 693608 - RNA, 22 nt, Human
ucaccucugccuagucugaggg

SEQ ID NO: 693609 - RNA, 21 nt, Human
ucaguguuacagcgacuggcu

SEQ ID NO: 693610 - RNA, 24 nt, Human
ucaguuuuauugacuuccagcauu

SEQ ID NO: 693611 - RNA, 19 nt, Human
uccccaggagccagcacca

SEQ ID NO: 693612 - RNA, 20 nt, Human
ucccccuucaucuacaaccc

SEQ ID NO: 693613 - RNA, 24 nt, Human
ucuacacucagcaugggugagggg

SEQ ID NO: 693614 - RNA, 19 nt, Human
ugaaucuggacagcugaga

SEQ ID NO: 693615 - RNA, 20 nt, Human
ugacaccccccacccugggg

SEQ ID NO: 693616 - RNA, 20 nt, Human
ugacuuccagcauuucuucc

SEQ ID NO: 693617 - RNA, 23 nt, Human
ugacuuccagcauuucuuccccc

SEQ ID NO: 693618 - RNA, 18 nt, Human
ugagaggcucccgcccca

SEQ ID NO: 693619 - RNA, 20 nt, Human
ugagggggagaaauggaggg

SEQ ID NO: 693620 - RNA, 19 nt, Human
ugcagagagaaugggaggg

SEQ ID NO: 693621 - RNA, 18 nt, Human
ugcccugacaccccccac

SEQ ID NO: 693622 - RNA, 24 nt, Human
ugcccugcccacucuaacccuggg

SEQ ID NO: 693623 - RNA, 26 nt, Human
ugccgcauggccucucccugagcccu

SEQ ID NO: 693624 - RNA, 18 nt, Human
uggaaagcaguuccuaca

SEQ ID NO: 693625 - RNA, 19 nt, Human
uggaggauggggcucagca

SEQ ID NO: 693626 - RNA, 20 nt, Human
uggagggagcuuggaguugg

SEQ ID NO: 693627 - RNA, 22 nt, Human
uggcacagaaaccaggguuggg

SEQ ID NO: 693628 - RNA, 24 nt, Human
uggcacagaaaccaggguuggggg

SEQ ID NO: 693629 - RNA, 19 nt, Human
uggcuccucgggccccucc

SEQ ID NO: 693630 - RNA, 20 nt, Human
ugggaccccaggcugcccaa

SEQ ID NO: 693631 - RNA, 23 nt, Human
ugggaccccaggcugcccaaggg

SEQ ID NO: 693632 - RNA, 23 nt, Human
uggggagggaaacuuguggaggg

SEQ ID NO: 693633 - RNA, 18 nt, Human
uggggggccuggggaggg

SEQ ID NO: 693634 - RNA, 20 nt, Human
ugggggucugcagcuggucc

SEQ ID NO: 693635 - RNA, 23 nt, Human
ugggguguggggggccuggggag

SEQ ID NO: 693636 - RNA, 22 nt, Human
uguuggaaagaaugggcagcag

SEQ ID NO: 693637 - RNA, 20 nt, Human
uucccccuucaucuacaacc

SEQ ID NO: 693638 - RNA, 19 nt, Human
uuccucgccacauugaggc

SEQ ID NO: 693639 - RNA, 23 nt, Human
uuccugggaccccaggcugccca

SEQ ID NO: 693640 - RNA, 18 nt, Human
uuggagcuccccauccaa

SEQ ID NO: 693641 - RNA, 21 nt, Human
uuuuuuuucucaaacucaguu

SEQ ID NO: 693642 - RNA, 21 nt, Human
aucucuuaggaaacaaaagcu

SEQ ID NO: 693643 - RNA, 21 nt, Human
cuaaccucaaaguacggcaug

SEQ ID NO: 693644 - RNA, 25 nt, Human
uaagugcaagaaguauuuucauucc

SEQ ID NO: 693645 - RNA, 23 nt, Human
ucagaacauuacaagaggcauga

SEQ ID NO: 693646 - RNA, 22 nt, Human
ucagacuaaccucaaaguacgg

SEQ ID NO: 693647 - RNA, 21 nt, Human
ugaaagaaaaaauaauuccau

SEQ ID NO: 693648 - RNA, 19 nt, Human
uuaauacuuucaucauuca

SEQ ID NO: 693649 - RNA, 23 nt, Human
uuuuuuuuuuuuuuuuuuacuga

SEQ ID NO: 693650 - RNA, 24 nt, Human
aaaaaaaacaaaaaaaaaccguau

SEQ ID NO: 693651 - RNA, 23 nt, Human
aaaaagaaagugaagucuuuaau

SEQ ID NO: 693652 - RNA, 20 nt, Human
aaacaccccagcagccccuc

SEQ ID NO: 693653 - RNA, 22 nt, Human
aaacuaaugaggaacaaaacaa

SEQ ID NO: 693654 - RNA, 19 nt, Human
aaagcgcugggauuauagg

SEQ ID NO: 693655 - RNA, 24 nt, Human
aaagcgcugggauuauagguguga

SEQ ID NO: 693656 - RNA, 19 nt, Human
aacauggauaaaccccauc

SEQ ID NO: 693657 - RNA, 20 nt, Human
aacauggauaaaccccaucu

SEQ ID NO: 693658 - RNA, 21 nt, Human
aacauggauaaaccccaucuc

SEQ ID NO: 693659 - RNA, 20 nt, Human
aacuuuuuuuuuuuuuugaa

SEQ ID NO: 693660 - RNA, 21 nt, Human
aagcaaauguuuuagagcuga

SEQ ID NO: 693661 - RNA, 25 nt, Human
aagcaauccuuucaccucagccucc

SEQ ID NO: 693662 - RNA, 22 nt, Human
aagcacuuugggaggccgaggc

SEQ ID NO: 693663 - RNA, 24 nt, Human
aagcacuuugggaggccgaggcgg

SEQ ID NO: 693664 - RNA, 26 nt, Human
aagcgcugggauuauaggugugagcc

SEQ ID NO: 693665 - RNA, 24 nt, Human
aaucacuugaacccaggaggcaga

SEQ ID NO: 693666 - RNA, 19 nt, Human
acaaaaaaaaaccguauag

SEQ ID NO: 693667 - RNA, 20 nt, Human
acaagagcgaaacuccgucu

SEQ ID NO: 693668 - RNA, 21 nt, Human
acaagagcgaaacuccgucuc

SEQ ID NO: 693669 - RNA, 22 nt, Human
accauugcacuccagccugggc

SEQ ID NO: 693670 - RNA, 24 nt, Human
accccaucucuacuaaaaauacaa

SEQ ID NO: 693671 - RNA, 23 nt, Human
accucagccuccugaguaucugg

SEQ ID NO: 693672 - RNA, 24 nt, Human
accugaggucaggaguucaagacc

SEQ ID NO: 693673 - RNA, 19 nt, Human
acugcacugagauuccggc

SEQ ID NO: 693674 - RNA, 25 nt, Human
acugcagccuugaccucccuggcuc

SEQ ID NO: 693675 - RNA, 20 nt, Human
agacaacaggcuuaacugca

SEQ ID NO: 693676 - RNA, 24 nt, Human
agagcuugcagugagccgagaucg

SEQ ID NO: 693677 - RNA, 21 nt, Human
agcaauccuccaaccucagcc

SEQ ID NO: 693678 - RNA, 23 nt, Human
agcacuuugggaggccgaggcgg

SEQ ID NO: 693679 - RNA, 24 nt, Human
agcacuuugggaggccgaggcggg

SEQ ID NO: 693680 - RNA, 18 nt, Human
agcgcugggauuauaggu

SEQ ID NO: 693681 - RNA, 24 nt, Human
aggaaaaggcaguuuuaggaugua

SEQ ID NO: 693682 - RNA, 23 nt, Human
aggaggcugaggcaggagaauca

SEQ ID NO: 693683 - RNA, 21 nt, Human
aggcagagcuugcagugagcc

SEQ ID NO: 693684 - RNA, 24 nt, Human
aggcagagcuugcagugagccgag

SEQ ID NO: 693685 - RNA, 18 nt, Human
aggcaggagaaucacuug

SEQ ID NO: 693686 - RNA, 23 nt, Human
aggcaggagaaucacuugaaccc

SEQ ID NO: 693687 - RNA, 24 nt, Human
aggcaggagaaucacuugaaccca

SEQ ID NO: 693688 - RNA, 21 nt, Human
aggccgaggcgggcggaucac

SEQ ID NO: 693689 - RNA, 22 nt, Human
aggcgggcggaucaccugaggu

SEQ ID NO: 693690 - RNA, 26 nt, Human
aggcgggcggaucaccugaggucagg

SEQ ID NO: 693691 - RNA, 24 nt, Human
aggcugaggcaggagaaucacuug

SEQ ID NO: 693692 - RNA, 18 nt, Human
aggcuggagugcaguggc

SEQ ID NO: 693693 - RNA, 22 nt, Human
agugcaguggccuuucacggcu

SEQ ID NO: 693694 - RNA, 23 nt, Human
agugcaguggccuuucacggcuc

SEQ ID NO: 693695 - RNA, 24 nt, Human
aucaccugaggucaggaguucaag

SEQ ID NO: 693696 - RNA, 24 nt, Human
aucgcaccauugcacuccagccug

SEQ ID NO: 693697 - RNA, 28 nt, Human
aucgcaccauugcacuccagccugggca

SEQ ID NO: 693698 - RNA, 23 nt, Human
auggcgggugucuguaaucccag

SEQ ID NO: 693699 - RNA, 23 nt, Human
augugcuagaagaauuccaaacu

SEQ ID NO: 693700 - RNA, 24 nt, Human
auugcacuccagccugggcaacaa

SEQ ID NO: 693701 - RNA, 31 nt, Human
caaaaaaaaaaaacaaaaaaaaaccguauag

SEQ ID NO: 693702 - RNA, 20 nt, Human
caaaaaaaaaccguauaggu

SEQ ID NO: 693703 - RNA, 19 nt, Human
caaaacuuuacauagaugu

SEQ ID NO: 693704 - RNA, 24 nt, Human
caaagcgcugggauuauaggugug

SEQ ID NO: 693705 - RNA, 18 nt, Human
caacauggauaaacccca

SEQ ID NO: 693706 - RNA, 22 nt, Human
caacauggauaaaccccaucuc

SEQ ID NO: 693707 - RNA, 27 nt, Human
caagcaauccuuucaccucagccuccu

SEQ ID NO: 693708 - RNA, 23 nt, Human
caccugaggucaggaguucaaga

SEQ ID NO: 693709 - RNA, 24 nt, Human
cacuccagccugggcaacaagagc

SEQ ID NO: 693710 - RNA, 25 nt, Human
cacuccagccugggcaacaagagcg

SEQ ID NO: 693711 - RNA, 20 nt, Human
cagaagcaggaacucuuccc

SEQ ID NO: 693712 - RNA, 20 nt, Human
cagccuccugaguaucuggg

SEQ ID NO: 693713 - RNA, 21 nt, Human
cagccuugaccucccuggcuc

SEQ ID NO: 693714 - RNA, 24 nt, Human
cagcuacucaggaggcugaggcag

SEQ ID NO: 693715 - RNA, 19 nt, Human
cagcuccgcaaaccgccga

SEQ ID NO: 693716 - RNA, 24 nt, Human
cagucgguguucaaaacaagggca

SEQ ID NO: 693717 - RNA, 22 nt, Human
cauacuggcacagacacagcua

SEQ ID NO: 693718 - RNA, 25 nt, Human
caucuccaccuuuugugcuugggga

SEQ ID NO: 693719 - RNA, 24 nt, Human
caugccuguaauccaagcacuuug

SEQ ID NO: 693720 - RNA, 18 nt, Human
cauggauaaaccccaucu

SEQ ID NO: 693721 - RNA, 24 nt, Human
cauguuacccaggcuggucuugaa

SEQ ID NO: 693722 - RNA, 24 nt, Human
cauucugucacucaggcuggagug

SEQ ID NO: 693723 - RNA, 19 nt, Human
cauugcacuccagccuggg

SEQ ID NO: 693724 - RNA, 21 nt, Human
cauugcacuccagccugggca

SEQ ID NO: 693725 - RNA, 23 nt, Human
cauugcacuccagccugggcaac

SEQ ID NO: 693726 - RNA, 20 nt, Human
cauuguggaaaaacugaaau

SEQ ID NO: 693727 - RNA, 21 nt, Human
ccaaagcgcugggauuauagg

SEQ ID NO: 693728 - RNA, 21 nt, Human
ccaaagcgcugggauuauagg

SEQ ID NO: 693729 - RNA, 24 nt, Human
ccaaagcgcugggauuauaggugu

SEQ ID NO: 693730 - RNA, 22 nt, Human
ccaaccucagccuccaaagcgc

SEQ ID NO: 693731 - RNA, 22 nt, Human
ccaagaaacuuuuuuuuuuuuu

SEQ ID NO: 693732 - RNA, 19 nt, Human
ccagcagccccucgcguuc

SEQ ID NO: 693733 - RNA, 20 nt, Human
ccauugcacuccagccuggg

SEQ ID NO: 693734 - RNA, 21 nt, Human
ccauugcacuccagccugggc

SEQ ID NO: 693735 - RNA, 23 nt, Human
ccauugcacuccagccugggcaa

SEQ ID NO: 693736 - RNA, 24 nt, Human
ccauugcacuccagccugggcaac

SEQ ID NO: 693737 - RNA, 25 nt, Human
ccauugcacuccagccugggcaaca

SEQ ID NO: 693738 - RNA, 23 nt, Human
cccaacccuuucaagggcagcaa

SEQ ID NO: 693739 - RNA, 19 nt, Human
cccacacagcugacagcca

SEQ ID NO: 693740 - RNA, 24 nt, Human
cccauguuacccaggcuggucuug

SEQ ID NO: 693741 - RNA, 24 nt, Human
ccccauguuacccaggcuggucuu

SEQ ID NO: 693742 - RNA, 27 nt, Human
ccccauguuacccaggcuggucuugaa

SEQ ID NO: 693743 - RNA, 19 nt, Human
cccuggcucaagcaauccu

SEQ ID NO: 693744 - RNA, 20 nt, Human
cccuggcucaagcaauccuu

SEQ ID NO: 693745 - RNA, 23 nt, Human
ccuccaaccucagccuccaaagc

SEQ ID NO: 693746 - RNA, 23 nt, Human
ccucgcguuccgcgcucggcccu

SEQ ID NO: 693747 - RNA, 24 nt, Human
ccugaccaacauggauaaacccca

SEQ ID NO: 693748 - RNA, 24 nt, Human
ccugaguaucugggacuacaggcu

SEQ ID NO: 693749 - RNA, 22 nt, Human
ccuguaauccaagcacuuuggg

SEQ ID NO: 693750 - RNA, 24 nt, Human
ccuguaauccaagcacuuugggag

SEQ ID NO: 693751 - RNA, 23 nt, Human
ccuuuuuuuuuuuuuuuuuuuaa

SEQ ID NO: 693752 - RNA, 24 nt, Human
cgaaacuccgucuccagaaaaaag

SEQ ID NO: 693753 - RNA, 20 nt, Human
cgaggcgggcggaucaccug

SEQ ID NO: 693754 - RNA, 24 nt, Human
cgaggcgggcggaucaccugaggu

SEQ ID NO: 693755 - RNA, 21 nt, Human
cgcaccauugcacuccagccu

SEQ ID NO: 693756 - RNA, 24 nt, Human
cggaucaccugaggucaggaguuc

SEQ ID NO: 693757 - RNA, 27 nt, Human
cggaucaccugaggucaggaguucaag

SEQ ID NO: 693758 - RNA, 24 nt, Human
cggcucacugcagccuugaccucc

SEQ ID NO: 693759 - RNA, 18 nt, Human
cgggcggaucaccugagg

SEQ ID NO: 693760 - RNA, 24 nt, Human
cgggcggaucaccugaggucagga

SEQ ID NO: 693761 - RNA, 24 nt, Human
cucaagcaauccuuucaccucagc

SEQ ID NO: 693762 - RNA, 23 nt, Human
cucauaguguacugguuuacauu

SEQ ID NO: 693763 - RNA, 24 nt, Human
cucaugccuguaauccaagcacuu

SEQ ID NO: 693764 - RNA, 24 nt, Human
cucauucugucacucaggcuggag

SEQ ID NO: 693765 - RNA, 24 nt, Human
cuccaaccucagccuccaaagcgc

SEQ ID NO: 693766 - RNA, 19 nt, Human
cucccacacagcugacagc

SEQ ID NO: 693767 - RNA, 20 nt, Human
cucccuggcucaagcaaucc

SEQ ID NO: 693768 - RNA, 21 nt, Human
cugaagagaacuccgcccagu

SEQ ID NO: 693769 - RNA, 19 nt, Human
cugaauuuuuccuuuuuuu

SEQ ID NO: 693770 - RNA, 21 nt, Human
cugggauuauaggugugagcc

SEQ ID NO: 693771 - RNA, 18 nt, Human
cuguaaucccagcuacuc

SEQ ID NO: 693772 - RNA, 21 nt, Human
cuguaaucccagcuacucagg

SEQ ID NO: 693773 - RNA, 19 nt, Human
cuugcagugagccgagauc

SEQ ID NO: 693774 - RNA, 21 nt, Human
cuugcagugagccgagaucgc

SEQ ID NO: 693775 - RNA, 24 nt, Human
cuuuuuuuuuuuuuuuuuuuaagg

SEQ ID NO: 693776 - RNA, 18 nt, Human
gaaauaucuacacaaacg

SEQ ID NO: 693777 - RNA, 18 nt, Human
gaagagaacuccgcccag

SEQ ID NO: 693778 - RNA, 24 nt, Human
gacaaacaccccagcagccccucg

SEQ ID NO: 693779 - RNA, 23 nt, Human
gagaaucacuugaacccaggagg

SEQ ID NO: 693780 - RNA, 23 nt, Human
gagaucgcaccauugcacuccag

SEQ ID NO: 693781 - RNA, 25 nt, Human
gaggcgggcggaucaccugagguca

SEQ ID NO: 693782 - RNA, 18 nt, Human
gagggugguggcucccac

SEQ ID NO: 693783 - RNA, 21 nt, Human
gaucaccugaggucaggaguu

SEQ ID NO: 693784 - RNA, 23 nt, Human
gaucaccugaggucaggaguuca

SEQ ID NO: 693785 - RNA, 24 nt, Human
gaucaccugaggucaggaguucaa

SEQ ID NO: 693786 - RNA, 18 nt, Human
gauuauaggugugagcca

SEQ ID NO: 693787 - RNA, 21 nt, Human
gauuauaggugugagccacca

SEQ ID NO: 693788 - RNA, 22 nt, Human
gauuauaggugugagccaccac

SEQ ID NO: 693789 - RNA, 20 nt, Human
gcaccauugcacuccagccu

SEQ ID NO: 693790 - RNA, 22 nt, Human
gcaggagaaucacuugaaccca

SEQ ID NO: 693791 - RNA, 20 nt, Human
gcgggugucuguaaucccag

SEQ ID NO: 693792 - RNA, 18 nt, Human
gcugggugcgguggcuca

SEQ ID NO: 693793 - RNA, 22 nt, Human
gcugggugcgguggcucaugcc

SEQ ID NO: 693794 - RNA, 23 nt, Human
ggaucaccugaggucaggaguuc

SEQ ID NO: 693795 - RNA, 21 nt, Human
ggcggaucaccugaggucagg

SEQ ID NO: 693796 - RNA, 18 nt, Human
ggcuggucuugaacuccu

SEQ ID NO: 693797 - RNA, 20 nt, Human
ggcuuuucaaaaaaaaaaaa

SEQ ID NO: 693798 - RNA, 19 nt, Human
gggcuaguagaaaauuuca

SEQ ID NO: 693799 - RNA, 24 nt, Human
gggugcgguggcucaugccuguaa

SEQ ID NO: 693800 - RNA, 21 nt, Human
gguggcucaugccuguaaucc

SEQ ID NO: 693801 - RNA, 24 nt, Human
gguggcucaugccuguaauccaag

SEQ ID NO: 693802 - RNA, 20 nt, Human
gucuggacacugcacugaga

SEQ ID NO: 693803 - RNA, 26 nt, Human
uaaaaauacaaaauuagcugggugcc

SEQ ID NO: 693804 - RNA, 20 nt, Human
uaaauaauccucauauguac

SEQ ID NO: 693805 - RNA, 23 nt, Human
uaacugcaagagguuuacagaca

SEQ ID NO: 693806 - RNA, 24 nt, Human
uacccaggcuggucuugaacuccu

SEQ ID NO: 693807 - RNA, 20 nt, Human
uacuacaucuuagauucucu

SEQ ID NO: 693808 - RNA, 19 nt, Human
uacuagaaaaagaucaggc

SEQ ID NO: 693809 - RNA, 22 nt, Human
uacuagaaaaagaucaggccuc

SEQ ID NO: 693810 - RNA, 24 nt, Human
uauaggugugagccaccacgcucu

SEQ ID NO: 693811 - RNA, 24 nt, Human
ucacucaggcuggagugcaguggc

SEQ ID NO: 693812 - RNA, 19 nt, Human
ucacugcagccuugaccuc

SEQ ID NO: 693813 - RNA, 24 nt, Human
ucacugcagccuugaccucccugg

SEQ ID NO: 693814 - RNA, 25 nt, Human
ucacugcagccuugaccucccuggc

SEQ ID NO: 693815 - RNA, 22 nt, Human
ucauucugucacucaggcugga

SEQ ID NO: 693816 - RNA, 24 nt, Human
ucauucugucacucaggcuggagu

SEQ ID NO: 693817 - RNA, 23 nt, Human
uccaaagcgcugggauuauaggu

SEQ ID NO: 693818 - RNA, 19 nt, Human
uccauaacccagacugagc

SEQ ID NO: 693819 - RNA, 20 nt, Human
ucccagagagggugguggcu

SEQ ID NO: 693820 - RNA, 24 nt, Human
ucccuggcucaagcaauccuuuca

SEQ ID NO: 693821 - RNA, 24 nt, Human
uccgcaaaccgccgaggaaaaccc

SEQ ID NO: 693822 - RNA, 19 nt, Human
uccuccaaccucagccucc

SEQ ID NO: 693823 - RNA, 24 nt, Human
uccugaguaucugggacuacaggc

SEQ ID NO: 693824 - RNA, 18 nt, Human
uccuuuuuuuuuuuuuuu

SEQ ID NO: 693825 - RNA, 18 nt, Human
uccuuuuuuuuuuuuuuu

SEQ ID NO: 693826 - RNA, 23 nt, Human
ucgcaccauugcacuccagccug

SEQ ID NO: 693827 - RNA, 31 nt, Human; identical to SEQ ID NO: 515949

SEQ ID NO: 693828 - RNA, 23 nt, Human
ucucauucugucacucaggcugg

SEQ ID NO: 693829 - RNA, 24 nt, Human
ucucauucugucacucaggcugga

SEQ ID NO: 693830 - RNA, 20 nt, Human
ucucuacuaaaaauacaaaa

SEQ ID NO: 693831 - RNA, 24 nt, Human
ucugaaauaucuacacaaacguga

SEQ ID NO: 693832 - RNA, 21 nt, Human
ucuguaaucccagcuacucag

SEQ ID NO: 693833 - RNA, 24 nt, Human
ucugucacucaggcuggagugcag

SEQ ID NO: 693834 - RNA, 28 nt, Human
ucuuacagacuacaacagacaacaggcu

SEQ ID NO: 693835 - RNA, 23 nt, Human
ucuugaacuccuggacuuaagca

SEQ ID NO: 693836 - RNA, 24 nt, Human
ucuugcugggugcgguggcucaug

SEQ ID NO: 693837 - RNA, 24 nt, Human
ugaacuccuggacuuaagcaaucc

SEQ ID NO: 693838 - RNA, 22 nt, Human
ugagacaaggucucauucuguc

SEQ ID NO: 693839 - RNA, 22 nt, Human
ugagccgagaucgcaccauugc

SEQ ID NO: 693840 - RNA, 20 nt, Human
ugaggcaggagaaucacuug

SEQ ID NO: 693841 - RNA, 24 nt, Human
ugaggcaggagaaucacuugaacc

SEQ ID NO: 693842 - RNA, 25 nt, Human
ugaggcaggagaaucacuugaaccc

SEQ ID NO: 693843 - RNA, 19 nt, Human
ugcacuccagccugggcaa

SEQ ID NO: 693844 - RNA, 22 nt, Human
ugcacuccagccugggcaacaa

SEQ ID NO: 693845 - RNA, 22 nt, Human
ugcaguggccuuucacggcuca

SEQ ID NO: 693846 - RNA, 23 nt, Human
ugccuguaauccaagcacuuugg

SEQ ID NO: 693847 - RNA, 22 nt, Human
ugcgacaaacaccccagcagcc

SEQ ID NO: 693848 - RNA, 20 nt, Human
uggacuuaagcaauccucca

SEQ ID NO: 693849 - RNA, 18 nt, Human
uggagugcaguggccuuu

SEQ ID NO: 693850 - RNA, 23 nt, Human
uggagugcaguggccuuucacgg

SEQ ID NO: 693851 - RNA, 21 nt, Human
uggcgggugucuguaauccca

SEQ ID NO: 693852 - RNA, 24 nt, Human
uggcgggugucuguaaucccagcu

SEQ ID NO: 693853 - RNA, 24 nt, Human
uggcucaugccuguaauccaagca

SEQ ID NO: 693854 - RNA, 21 nt, Human
ugggacuacaggcuuguucca

SEQ ID NO: 693855 - RNA, 19 nt, Human
ugggaggccgaggcgggcg

SEQ ID NO: 693856 - RNA, 24 nt, Human
ugggaggccgaggcgggcggauca

SEQ ID NO: 693857 - RNA, 18 nt, Human
ugggauuauaggugugag

SEQ ID NO: 693858 - RNA, 19 nt, Human
ugggauuauaggugugagc

SEQ ID NO: 693859 - RNA, 22 nt, Human
ugggauuauaggugugagccac

SEQ ID NO: 693860 - RNA, 23 nt, Human
ugggauuauaggugugagccacc

SEQ ID NO: 693861 - RNA, 24 nt, Human
ugggauuauaggugugagccacca

SEQ ID NO: 693862 - RNA, 22 nt, Human
ugggugcgguggcucaugccug

SEQ ID NO: 693863 - RNA, 21 nt, Human
ugguggcucccacacagcuga

SEQ ID NO: 693864 - RNA, 21 nt, Human
uguaagcaaauguuuuagagc

SEQ ID NO: 693865 - RNA, 19 nt, Human
ugucaaagagaguauagga

SEQ ID NO: 693866 - RNA, 24 nt, Human
ugucuguaaucccagcuacucagg

SEQ ID NO: 693867 - RNA, 24 nt, Human
uuagagcugaauuuuuccuuuuuu

SEQ ID NO: 693868 - RNA, 23 nt, Human
uuccaccccauguuacccaggcu

SEQ ID NO: 693869 - RNA, 18 nt, Human
uugcagugagccgagauc

SEQ ID NO: 693870 - RNA, 19 nt, Human
uugcagugagccgagaucg

SEQ ID NO: 693871 - RNA, 22 nt, Human
uugcagugagccgagaucgcac

SEQ ID NO: 693872 - RNA, 25 nt, Human
uugggaggccgaggcgggcggauca

SEQ ID NO: 693873 - RNA, 19 nt, Human
uugugcuuggggaaugugu

SEQ ID NO: 693874 - RNA, 24 nt, Human
uuucaaaaaaaaaaaacaaaaaaa

SEQ ID NO: 693875 - RNA, 25 nt, Human
uuucaaaaaaaaaaaacaaaaaaaa

SEQ ID NO: 693876 - RNA, 26 nt, Human
uuucaaaaaaaaaaaacaaaaaaaaa

SEQ ID NO: 693877 - RNA, 23 nt, Human
uuuuagagcugaauuuuuccuuu

SEQ ID NO: 693878 - RNA, 21 nt, Human
uuuucaacuucuccauaaccc

SEQ ID NO: 693879 - RNA, 20 nt, Human
uuuuuuuuuuugagacaagg

SEQ ID NO: 693880 - RNA, 23 nt, Human
uuuuuuuuuuuugagacaagguc

SEQ ID NO: 693881 - RNA, 26 nt, Human
uuuuuuuuuuuugagacaaggucuca

SEQ ID NO: 693882 - RNA, 23 nt, Human
aaagcaucauucccauuucacag

SEQ ID NO: 693883 - RNA, 21 nt, Human
aacagggcagcuccuggcccc

SEQ ID NO: 693884 - RNA, 19 nt, Human
acggggccgcuuggugagg

SEQ ID NO: 693885 - RNA, 21 nt, Human
agcccuuucccuucugugccc

SEQ ID NO: 693886 - RNA, 24 nt, Human
agucacacagcugugcagggggca

SEQ ID NO: 693887 - RNA, 22 nt, Human
auggaauguacccaggagcccc

SEQ ID NO: 693888 - RNA, 25 nt, Human
cagcugguuuucucugccacgaccu

SEQ ID NO: 693889 - RNA, 21 nt, Human
caggagccccuaaucccccau

SEQ ID NO: 693890 - RNA, 23 nt, Human
cauucccauuucacagauaaggg

SEQ ID NO: 693891 - RNA, 23 nt, Human
ccauggagacucugcacggcccc

SEQ ID NO: 693892 - RNA, 22 nt, Human
ccuccucacaaccccauggaga

SEQ ID NO: 693893 - RNA, 24 nt, Human
cuggaguggaguccagguugggcu

SEQ ID NO: 693894 - RNA, 21 nt, Human
cugugcagggggcaaaccugg

SEQ ID NO: 693895 - RNA, 21 nt, Human
cuuucugaguuaagccaggga

SEQ ID NO: 693896 - RNA, 21 nt, Human
gcagggggcaaaccuggagug

SEQ ID NO: 693897 - RNA, 19 nt, Human
gccccggcucuuucugagu

SEQ ID NO: 693898 - RNA, 21 nt, Human
uaagccagggacugaaauggg

SEQ ID NO: 693899 - RNA, 25 nt, Human
uaagggggacugaggcucagcagug

SEQ ID NO: 693900 - RNA, 23 nt, Human
uacaaggaaagcaucauucccau

SEQ ID NO: 693901 - RNA, 19 nt, Human
uauuaacagggcagcuccu

SEQ ID NO: 693902 - RNA, 19 nt, Human
ucaauggaauguacccagg

SEQ ID NO: 693903 - RNA, 22 nt, Human
ucagcagucuucuugucccacu

SEQ ID NO: 693904 - RNA, 23 nt, Human
uccucacaaccccauggagacuc

SEQ ID NO: 693905 - RNA, 23 nt, Human
ucucaauggaauguacccaggag

SEQ ID NO: 693906 - RNA, 19 nt, Human
ucugccacgaccugaaguc

SEQ ID NO: 693907 - RNA, 22 nt, Human
ucugguuccaucuucccacgcc

SEQ ID NO: 693908 - RNA, 18 nt, Human
ucuucggcaucacucguu

SEQ ID NO: 693909 - RNA, 20 nt, Human
ugcucucccgcugucucaau

SEQ ID NO: 693910 - RNA, 23 nt, Human
ugcucugcucucccgcugucuca

SEQ ID NO: 693911 - RNA, 20 nt, Human
uggugagggcugcggaugcc

SEQ ID NO: 693912 - RNA, 24 nt, Human
ugugcagccccggcucuuucugag

SEQ ID NO: 693913 - RNA, 23 nt, Human
uucccuucugugcccuccucaca

SEQ ID NO: 693914 - RNA, 18 nt, Human
uuuauaaagcccuuuccc

SEQ ID NO: 693915 - RNA, 24 nt, Human
uuuugcucugcucguucgaauugu

SEQ ID NO: 693916 - RNA, 21 nt, Human
aaaaaaccuugaagcaucuga

SEQ ID NO: 693917 - RNA, 22 nt, Human
aaaaacaaacaaaacaggccug

SEQ ID NO: 693918 - RNA, 19 nt, Human
aaacaaacaaacaaacagg

SEQ ID NO: 693919 - RNA, 21 nt, Human
aaacaaacaaacaaacaggcc

SEQ ID NO: 693920 - RNA, 21 nt, Human
aaacaaacaaacaggccaggc

SEQ ID NO: 693921 - RNA, 25 nt, Human
aaacaggccaggcacagugguucac

SEQ ID NO: 693922 - RNA, 24 nt, Human
aaacuguuggagaguaugaccugg

SEQ ID NO: 693923 - RNA, 23 nt, Human
aaaguggcauuuuguugguuguu

SEQ ID NO: 693924 - RNA, 23 nt, Human
aacacuugaauccaggaggcaga

SEQ ID NO: 693925 - RNA, 19 nt, Human
aacauggcgaaaccccauc

SEQ ID NO: 693926 - RNA, 20 nt, Human
aacauggcgaaaccccaucu

SEQ ID NO: 693927 - RNA, 21 nt, Human
aacauggcgaaaccccaucuc

SEQ ID NO: 693928 - RNA, 21 nt, Human
aacauggcgaaaccccaucuc

SEQ ID NO: 693929 - RNA, 20 nt, Human
aacauggugaaaccccaugu

SEQ ID NO: 693930 - RNA, 20 nt, Human
aacauggugaaaccccaugu

SEQ ID NO: 693931 - RNA, 21 nt, Human
aacauggugaaaccccauguc

SEQ ID NO: 693932 - RNA, 22 nt, Human
aacauggugaaaccccaugucu

SEQ ID NO: 693933 - RNA, 21 nt, Human
aagcaucugacagaggaaacg

SEQ ID NO: 693934 - RNA, 19 nt, Human
acaaaaacaaacaaaacag

SEQ ID NO: 693935 - RNA, 21 nt, Human
acaaaaacaaacaaaacaggc

SEQ ID NO: 693936 - RNA, 21 nt, Human
acaaacaaaaaaacaauugug

SEQ ID NO: 693937 - RNA, 23 nt, Human
acagaggaaacguacuccagagc

SEQ ID NO: 693938 - RNA, 23 nt, Human
acauacaguuuucugaaaguggc

SEQ ID NO: 693939 - RNA, 19 nt, Human
acaucuguaauccuagcac

SEQ ID NO: 693940 - RNA, 19 nt, Human
acucugcaucucaaacaaa

SEQ ID NO: 693941 - RNA, 23 nt, Human
acuuuguucaguguuccuuucua

SEQ ID NO: 693942 - RNA, 24 nt, Human
agagaguuugcucugggaccugga

SEQ ID NO: 693943 - RNA, 19 nt, Human
agcaaaaaaaaaaaaaaaa

SEQ ID NO: 693944 - RNA, 24 nt, Human
agcacuuucggaggccgagguggg

SEQ ID NO: 693945 - RNA, 19 nt, Human
agcacuuugggaggucggg

SEQ ID NO: 693946 - RNA, 22 nt, Human
agccugggcaacauggcgaaac

SEQ ID NO: 693947 - RNA, 24 nt, Human
agccugggcaacauggcgaaaccc

SEQ ID NO: 693948 - RNA, 19 nt, Human
agccugggcaacaugguga

SEQ ID NO: 693949 - RNA, 22 nt, Human
agccugggcaacauggugaaac

SEQ ID NO: 693950 - RNA, 24 nt, Human
agccugggcaacauggugaaaccc

SEQ ID NO: 693951 - RNA, 23 nt, Human
agccuguaaucccagcacuuugg

SEQ ID NO: 693952 - RNA, 24 nt, Human
agccuguaaucccagcacuuuggg

SEQ ID NO: 693953 - RNA, 21 nt, Human
aggaauuugagauuagccugg

SEQ ID NO: 693954 - RNA, 24 nt, Human
aggcacagugguucacaucuguaa

SEQ ID NO: 693955 - RNA, 20 nt, Human
aggcagagguuacaguaagc

SEQ ID NO: 693956 - RNA, 21 nt, Human
aggccgaggugggcagaucgc

SEQ ID NO: 693957 - RNA, 19 nt, Human
aggccucaucuguacccaa

SEQ ID NO: 693958 - RNA, 18 nt, Human
aggcucugcuuuauccug

SEQ ID NO: 693959 - RNA, 26 nt, Human
aggcucugcuuuauccuggugggggg

SEQ ID NO: 693960 - RNA, 26 nt, Human
aggugggcagaucgcuuuagcucagg

SEQ ID NO: 693961 - RNA, 24 nt, Human
agugguucacaucuguaauccuag

SEQ ID NO: 693962 - RNA, 21 nt, Human
aguguccccucagcaggcagc

SEQ ID NO: 693963 - RNA, 24 nt, Human
caaaacaggccuggcacgguggcu

SEQ ID NO: 693964 - RNA, 23 nt, Human
caaacaaacaaaaaaacaauugu

SEQ ID NO: 693965 - RNA, 23 nt, Human
caaaggccuguggacaauaacug

SEQ ID NO: 693966 - RNA, 25 nt, Human
caacacgaacagauauugguccuca

SEQ ID NO: 693967 - RNA, 24 nt, Human
caacauggcgaaaccccaucucuc

SEQ ID NO: 693968 - RNA, 24 nt, Human
caacauggugaaaccccaugucua

SEQ ID NO: 693969 - RNA, 24 nt, Human
caagccuguaaucccagcacuuug

SEQ ID NO: 693970 - RNA, 28 nt, Human
caauaacugccucagcaaaaaaaaaaaa

SEQ ID NO: 693971 - RNA, 20 nt, Human
cacaucuguaauccuagcac

SEQ ID NO: 693972 - RNA, 23 nt, Human
cacaucuguaauccuagcacuuu

SEQ ID NO: 693973 - RNA, 20 nt, Human
caccgugagcugccccuguu

SEQ ID NO: 693974 - RNA, 20 nt, Human
cacugcacucuagacucugc

SEQ ID NO: 693975 - RNA, 27 nt, Human
cacuuauaucucaagacuuuucaaggg

SEQ ID NO: 693976 - RNA, 25 nt, Human
cagagccaccgugagcugccccugu

SEQ ID NO: 693977 - RNA, 24 nt, Human
cagaucacuugaggucgggagguc

SEQ ID NO: 693978 - RNA, 24 nt, Human
cagaucgcuuuagcucaggaauuu

SEQ ID NO: 693979 - RNA, 24 nt, Human
cagcacuuugggaggucggggcag

SEQ ID NO: 693980 - RNA, 25 nt, Human
cagcacuuugggaggucggggcagg

SEQ ID NO: 693981 - RNA, 22 nt, Human
cagccccgaggccucaucugua

SEQ ID NO: 693982 - RNA, 21 nt, Human
cagcuggaggcucccaggcau

SEQ ID NO: 693983 - RNA, 23 nt, Human
caggccaggcacagugguucaca

SEQ ID NO: 693984 - RNA, 20 nt, Human
caucucaaacaaacaaaaaa

SEQ ID NO: 693985 - RNA, 24 nt, Human
caucuguaauccuagcacuuucgg

SEQ ID NO: 693986 - RNA, 21 nt, Human
ccaacccaggguuguagagug

SEQ ID NO: 693987 - RNA, 21 nt, Human
ccaccaagcccagccuggaca

SEQ ID NO: 693988 - RNA, 20 nt, Human
ccacugcacucuagacucug

SEQ ID NO: 693989 - RNA, 20 nt, Human
ccacugcacucuagacucug

SEQ ID NO: 693990 - RNA, 21 nt, Human
ccacugcacucuagacucugc

SEQ ID NO: 693991 - RNA, 21 nt, Human
ccacugcacucuagacucugg

SEQ ID NO: 693992 - RNA, 24 nt, Human
ccacuggauccaacccaggguugu

SEQ ID NO: 693993 - RNA, 19 nt, Human
ccaguuauaaaaacaaagc

SEQ ID NO: 693994 - RNA, 18 nt, Human
ccccaguccugcuuuccc

SEQ ID NO: 693995 - RNA, 22 nt, Human
cccgcccuggccugaggcuggc

SEQ ID NO: 693996 - RNA, 21 nt, Human
ccgaggccucaucuguaccca

SEQ ID NO: 693997 - RNA, 22 nt, Human
ccucagcaaaaaaaaaaaaaaa

SEQ ID NO: 693998 - RNA, 20 nt, Human
ccugcuuucccgcccuggcc

SEQ ID NO: 693999 - RNA, 22 nt, Human
ccugggacugaaacuguggagc

SEQ ID NO: 694000 - RNA, 24 nt, Human
ccugggcaacauggcgaaacccca

SEQ ID NO: 694001 - RNA, 24 nt, Human
ccugggcaacauggugaaacccca

SEQ ID NO: 694002 - RNA, 18 nt, Human
cgaggugggcagaucgcu

SEQ ID NO: 694003 - RNA, 26 nt, Human
cgaggugggcagaucgcuuuagcuca

SEQ ID NO: 694004 - RNA, 28 nt, Human
cucaagacuuuucaagggcugacccuuu

SEQ ID NO: 694005 - RNA, 24 nt, Human
cucaagccuguaaucccagcacuu

SEQ ID NO: 694006 - RNA, 24 nt, Human
cucagcaaaaaaaaaaaaaaaaaa

SEQ ID NO: 694007 - RNA, 22 nt, Human
cucucuacaaaaacaaacaaaa

SEQ ID NO: 694008 - RNA, 24 nt, Human
cucucuacaaaaacaaacaaaaca

SEQ ID NO: 694009 - RNA, 19 nt, Human
cugcaccucaucuccucaa

SEQ ID NO: 694010 - RNA, 24 nt, Human
gaaaguggcauuuuguugguuguu

SEQ ID NO: 694011 - RNA, 23 nt, Human
gacaauaacugccucagcaaaaa

SEQ ID NO: 694012 - RNA, 25 nt, Human
gaccuggaaugagugauggagaaau

SEQ ID NO: 694013 - RNA, 23 nt, Human
gagcuugcaccacugcacucuag

SEQ ID NO: 694014 - RNA, 24 nt, Human
gaucacuugaggucgggaggucaa

SEQ ID NO: 694015 - RNA, 25 nt, Human
gaucgcuuuagcucaggaauuugag

SEQ ID NO: 694016 - RNA, 18 nt, Human
gaugugaacacuuacucc

SEQ ID NO: 694017 - RNA, 23 nt, Human
gcaaaaaaaaaaaaaaaaaaaaa

SEQ ID NO: 694018 - RNA, 18 nt, Human
gcacagugguucacaucu

SEQ ID NO: 694019 - RNA, 19 nt, Human
gccucaucuguacccaaag

SEQ ID NO: 694020 - RNA, 19 nt, Human
ggaccuggaaugagugaug

SEQ ID NO: 694021 - RNA, 18 nt, Human
ggaggccgaggugggcag

SEQ ID NO: 694022 - RNA, 23 nt, Human
ggcacgguggcucaagccuguaa

SEQ ID NO: 694023 - RNA, 21 nt, Human
ggcagaucgcuuuagcucagg

SEQ ID NO: 694024 - RNA, 20 nt, Human
ggcaggcagaucacuugagg

SEQ ID NO: 694025 - RNA, 21 nt, Human
ggcaggcagaucacuugaggu

SEQ ID NO: 694026 - RNA, 25 nt, Human
ggcaggcagaucacuugaggucggg

SEQ ID NO: 694027 - RNA, 20 nt, Human
gggaggucggggcaggcaga

SEQ ID NO: 694028 - RNA, 21 nt, Human
gggcauuacagauuuuugaua

SEQ ID NO: 694029 - RNA, 22 nt, Human
ggucgggaggucaagaccagcc

SEQ ID NO: 694030 - RNA, 23 nt, Human
gguggcucaagccuguaauccca

SEQ ID NO: 694031 - RNA, 24 nt, Human
gguggcucaagccuguaaucccag

SEQ ID NO: 694032 - RNA, 23 nt, Human
guccuggaucucuccccaguccu

SEQ ID NO: 694033 - RNA, 22 nt, Human
gugggaagguuccuagguuuac

SEQ ID NO: 694034 - RNA, 21 nt, Human
uaaaaauacaaaacuuagcug

SEQ ID NO: 694035 - RNA, 24 nt, Human
uaaaaugagaucaauaggaauauu

SEQ ID NO: 694036 - RNA, 25 nt, Human
uaaacaaacaaacaaacaggccagg

SEQ ID NO: 694037 - RNA, 26 nt, Human
uaacagcuggaggcucccaggcauac

SEQ ID NO: 694038 - RNA, 19 nt, Human
uaaccacuggauccaaccc

SEQ ID NO: 694039 - RNA, 21 nt, Human
uaacugccucagcaaaaaaaa

SEQ ID NO: 694040 - RNA, 23 nt, Human
uacuccagagccaccgugagcug

SEQ ID NO: 694041 - RNA, 26 nt, Human
uacugcacuccaguuuaaaacagugg

SEQ ID NO: 694042 - RNA, 24 nt, Human
uagcacuuucggaggccgaggugg

SEQ ID NO: 694043 - RNA, 19 nt, Human
uauccuggugggggauggg

SEQ ID NO: 694044 - RNA, 23 nt, Human
uauuuugguauuucuacuuuuga

SEQ ID NO: 694045 - RNA, 18 nt, Human
ucaaacaaacaaaaaaac

SEQ ID NO: 694046 - RNA, 23 nt, Human
ucacaucuguaauccuagcacuu

SEQ ID NO: 694047 - RNA, 23 nt, Human
ucagcaaaaaaaaaaaaaaaaaa

SEQ ID NO: 694048 - RNA, 19 nt, Human
ucagccccgaggccucauc

SEQ ID NO: 694049 - RNA, 23 nt, Human
ucagccccgaggccucaucugua

SEQ ID NO: 694050 - RNA, 21 nt, Human
uccccaaguguccccucagca

SEQ ID NO: 694051 - RNA, 26 nt, Human
ucuacaaaaacaaacaaaacaggccu

SEQ ID NO: 694052 - RNA, 18 nt, Human
ucuacuaaaaauacaaaa

SEQ ID NO: 694053 - RNA, 19 nt, Human
ugaccaccaagcccagccu

SEQ ID NO: 694054 - RNA, 24 nt, Human
ugagaaguuuuuagaaaggauggc

SEQ ID NO: 694055 - RNA, 24 nt, Human
ugagaucaauaggaauauuccagg

SEQ ID NO: 694056 - RNA, 23 nt, Human
ugagauuagccugggcaacaugg

SEQ ID NO: 694057 - RNA, 18 nt, Human
ugcuuucccaccggugcc

SEQ ID NO: 694058 - RNA, 18 nt, Human
uggcaucuacauauauau

SEQ ID NO: 694059 - RNA, 23 nt, Human
uggccugaggcuggcucaguccu

SEQ ID NO: 694060 - RNA, 24 nt, Human
uggcucaagccuguaaucccagca

SEQ ID NO: 694061 - RNA, 21 nt, Human
ugggaggucggggcaggcaga

SEQ ID NO: 694062 - RNA, 24 nt, Human
ugggaggucggggcaggcagauca

SEQ ID NO: 694063 - RNA, 22 nt, Human
ugggcaacauggcgaaacccca

SEQ ID NO: 694064 - RNA, 22 nt, Human
ugggcaacauggugaaacccca

SEQ ID NO: 694065 - RNA, 21 nt, Human
ugguucacaucuguaauccua

SEQ ID NO: 694066 - RNA, 24 nt, Human
ugguucacaucuguaauccuagca

SEQ ID NO: 694067 - RNA, 24 nt, Human
ugguuguuauuauacugaugacac

SEQ ID NO: 694068 - RNA, 18 nt, Human
uguggagucugcaccuca

SEQ ID NO: 694069 - RNA, 23 nt, Human
uuaaacaaacaaacaaacaggcc

SEQ ID NO: 694070 - RNA, 21 nt, Human
uuagcugggcguggggccaca

SEQ ID NO: 694071 - RNA, 21 nt, Human
uuagcugggcguggggccaca

SEQ ID NO: 694072 - RNA, 18 nt, Human
uucaagggcugacccacc

SEQ ID NO: 694073 - RNA, 24 nt, Human
uucuaaaaccuaaccacuggaucc

SEQ ID NO: 694074 - RNA, 21 nt, Human
uugaacuuuguucaguguucc

SEQ ID NO: 694075 - RNA, 24 nt, Human
uuguagaguguccauucugagucu

SEQ ID NO: 694076 - RNA, 19 nt, Human
uuucaagggcugacccacc

SEQ ID NO: 694077 - RNA, 20 nt, Human
uuuuuagaaaggauggcauc

SEQ ID NO: 694078 - RNA, 19 nt, Human
aacacaaagagggauccac

SEQ ID NO: 694079 - RNA, 20 nt, Human
aacagccaaacaaguaacau

SEQ ID NO: 694080 - RNA, 22 nt, Human
acaaagagggauccaccccggc

SEQ ID NO: 694081 - RNA, 18 nt, Human
agccacuggaaagauaag

SEQ ID NO: 694082 - RNA, 18 nt, Human
aggaaguugggugugaug

SEQ ID NO: 694083 - RNA, 18 nt, Human
caacacaaagagggaucc

SEQ ID NO: 694084 - RNA, 21 nt, Human
caagcaaaagguuucgaugca

SEQ ID NO: 694085 - RNA, 19 nt, Human
cacacuuuuaauagcaugg

SEQ ID NO: 694086 - RNA, 23 nt, Human
cacauccccaagcaaaagguuuc

SEQ ID NO: 694087 - RNA, 23 nt, Human
caccgugacuacaugaacagcca

SEQ ID NO: 694088 - RNA, 18 nt, Human
ccaaacaaguaacauaau

SEQ ID NO: 694089 - RNA, 24 nt, Human
cccgggcagccugcccaagccaga

SEQ ID NO: 694090 - RNA, 26 nt, Human
gagcaccgugacuacaugaacagcca

SEQ ID NO: 694091 - RNA, 19 nt, Human
gaggcucuuggucuguggg

SEQ ID NO: 694092 - RNA, 21 nt, Human
gccacuggaaagauaaggaag

SEQ ID NO: 694093 - RNA, 25 nt, Human
gcccgggcagccugcccaagccaga

SEQ ID NO: 694094 - RNA, 18 nt, Human
gcguuaucugccucucca

SEQ ID NO: 694095 - RNA, 19 nt, Human
ggaaauguugaggcucuug

SEQ ID NO: 694096 - RNA, 18 nt, Human
ggccgcggcugcuuccgg

SEQ ID NO: 694097 - RNA, 21 nt, Human
ggccgcggcugcuuccggcuu

SEQ ID NO: 694098 - RNA, 19 nt, Human
gggccgcggcugcuuccgg

SEQ ID NO: 694099 - RNA, 20 nt, Human
uaaaaaacccagcauauuaa

SEQ ID NO: 694100 - RNA, 22 nt, Human
uaauagcauggacuacaacaca

SEQ ID NO: 694101 - RNA, 22 nt, Human
uaguaaaaugccgcaugugcac

SEQ ID NO: 694102 - RNA, 19 nt, Human
uauuaaaaaacccagcaua

SEQ ID NO: 694103 - RNA, 22 nt, Human
uccaagcacauccccaagcaaa

SEQ ID NO: 694104 - RNA, 21 nt, Human
uccuggguccagaguggggcu

SEQ ID NO: 694105 - RNA, 22 nt, Human
ugaacagccaaacaaguaacau

SEQ ID NO: 694106 - RNA, 19 nt, Human
ugagaauaaaacucaucuc

SEQ ID NO: 694107 - RNA, 19 nt, Human
ugagagcaccgugacuaca

SEQ ID NO: 694108 - RNA, 20 nt, Human
ugcauaagguggcagcugcc

SEQ ID NO: 694109 - RNA, 21 nt, Human
ugccgcaugugcacauguaua

SEQ ID NO: 694110 - RNA, 25 nt, Human
ugcuuccggcuuccugccacggccc

SEQ ID NO: 694111 - RNA, 25 nt, Human
ugugcacauguauacagauaguaug

SEQ ID NO: 694112 - RNA, 19 nt, Human
uuccugccacggcccgggc

SEQ ID NO: 694113 - RNA, 24 nt, Human
uuggucugugggccacacuuuuaa

SEQ ID NO: 694114 - RNA, 21 nt, Human
aaaugcaagaaaacuaccuug

SEQ ID NO: 694115 - RNA, 22 nt, Human
aacaggaucgacauuucuucca

SEQ ID NO: 694116 - RNA, 21 nt, Human
aacccugggagaaagcggggc

SEQ ID NO: 694117 - RNA, 22 nt, Human
aacccugggagaaagcggggcu

SEQ ID NO: 694118 - RNA, 24 nt, Human
acagccgcggccugucaggagccu

SEQ ID NO: 694119 - RNA, 20 nt, Human
acauugacaauauacuguau

SEQ ID NO: 694120 - RNA, 21 nt, Human
agaaagcggggcucagccucc

SEQ ID NO: 694121 - RNA, 18 nt, Human
agaaaugguuuuagaaag

SEQ ID NO: 694122 - RNA, 26 nt, Human
agacaaaagucaguuucauccucagu

SEQ ID NO: 694123 - RNA, 18 nt, Human
agagagaaaguuuaaagu

SEQ ID NO: 694124 - RNA, 21 nt, Human
agcaaaaugcaagaaaacuag

SEQ ID NO: 694125 - RNA, 23 nt, Human
aggaaucugaaaguuaccaaggc

SEQ ID NO: 694126 - RNA, 22 nt, Human
aucacagcccucuugaacaaca

SEQ ID NO: 694127 - RNA, 25 nt, Human
caaaagacaaaagucaguuucaucc

SEQ ID NO: 694128 - RNA, 20 nt, Human
caauuccacaggaaucugaa

SEQ ID NO: 694129 - RNA, 23 nt, Human
cacauuugacuagcuuuuguuuu

SEQ ID NO: 694130 - RNA, 21 nt, Human
cacccacacacaugcugaaug

SEQ ID NO: 694131 - RNA, 18 nt, Human
caguacaguuuuuuuucu

SEQ ID NO: 694132 - RNA, 20 nt, Human
caguacaguuuuuuuucucc

SEQ ID NO: 694133 - RNA, 20 nt, Human
cauccacacccacacacaug

SEQ ID NO: 694134 - RNA, 25 nt, Human
cauccacacccacacacaugcugaa

SEQ ID NO: 694135 - RNA, 24 nt, Human
cauuugacuagcuuuuguuuuacu

SEQ ID NO: 694136 - RNA, 18 nt, Human
cccugggagaaagcgggg

SEQ ID NO: 694137 - RNA, 24 nt, Human
ccgccucgggucucggucugcguc

SEQ ID NO: 694138 - RNA, 21 nt, Human
ccucgggucucggucugcguc

SEQ ID NO: 694139 - RNA, 24 nt, Human
cgccuccgccucgggucucggucu

SEQ ID NO: 694140 - RNA, 21 nt, Human
cgcggcucgcacaccggcgcc

SEQ ID NO: 694141 - RNA, 21 nt, Human
cgcgguccgccuccgccucgg

SEQ ID NO: 694142 - RNA, 18 nt, Human
cuccaaaagacaaaaguc

SEQ ID NO: 694143 - RNA, 19 nt, Human
cuccgcaccucggguugcc

SEQ ID NO: 694144 - RNA, 23 nt, Human
cuucuccugccgccgcuuucugc

SEQ ID NO: 694145 - RNA, 18 nt, Human
cuugaacaacaguacagu

SEQ ID NO: 694146 - RNA, 21 nt, Human
cuuucugcccuggccgcguuc

SEQ ID NO: 694147 - RNA, 22 nt, Human
gccgccgcuuucugcccuggcc

SEQ ID NO: 694148 - RNA, 20 nt, Human
gccucgggucucggucugcg

SEQ ID NO: 694149 - RNA, 24 nt, Human
gcugauaagaaacccugggagaaa

SEQ ID NO: 694150 - RNA, 20 nt, Human
gcuuucugcccuggccgcgu

SEQ ID NO: 694151 - RNA, 20 nt, Human
ggagccuccuacucccccgg

SEQ ID NO: 694152 - RNA, 22 nt, Human
ggcccccugccugcuucuccug

SEQ ID NO: 694153 - RNA, 20 nt, Human
uaaacauccacacccacaca

SEQ ID NO: 694154 - RNA, 22 nt, Human
uacuauggcaaaaauauuuuau

SEQ ID NO: 694155 - RNA, 18 nt, Human
uauaaacauccacaccca

SEQ ID NO: 694156 - RNA, 18 nt, Human
uauagugagagagaaagu

SEQ ID NO: 694157 - RNA, 20 nt, Human
uccaaaagacaaaagucagu

SEQ ID NO: 694158 - RNA, 21 nt, Human
uccaaaagacaaaagucaguu

SEQ ID NO: 694159 - RNA, 20 nt, Human
uccacacccacacacaugcu

SEQ ID NO: 694160 - RNA, 24 nt, Human
ucuaaauauccuuaaaaaagaaaa

SEQ ID NO: 694161 - RNA, 18 nt, Human
ucuccaaaagacaaaagu

SEQ ID NO: 694162 - RNA, 22 nt, Human
ucuccaaaagacaaaagucaga

SEQ ID NO: 694163 - RNA, 22 nt, Human
ugacaccauaagaugaacuuua

SEQ ID NO: 694164 - RNA, 19 nt, Human
ugauaagaaacccugggag

SEQ ID NO: 694165 - RNA, 20 nt, Human
ugcaagaaaacuaccuuggc

SEQ ID NO: 694166 - RNA, 23 nt, Human
ugcguccuccggcccccugccug

SEQ ID NO: 694167 - RNA, 22 nt, Human
ugcuccggcccgcggggucugg

SEQ ID NO: 694168 - RNA, 23 nt, Human
uggcaaaaauauuuuauuaauug

SEQ ID NO: 694169 - RNA, 19 nt, Human
uggcaggaacaaaugcuua

SEQ ID NO: 694170 - RNA, 23 nt, Human
ugucaggagccuccuacuccccc

SEQ ID NO: 694171 - RNA, 23 nt, Human
uuccacaggaaucugaaaguuac

SEQ ID NO: 694172 - RNA, 18 nt, Human
aaagagggggauggaugg

SEQ ID NO: 694173 - RNA, 24 nt, Human
aaagccccauccaugcccuggcuu

SEQ ID NO: 694174 - RNA, 18 nt, Human
aagaacacaggccugugg

SEQ ID NO: 694175 - RNA, 18 nt, Human
aaggaccagccccacccc

SEQ ID NO: 694176 - RNA, 24 nt, Human
aaggaccagccccacccccaaccc

SEQ ID NO: 694177 - RNA, 18 nt, Human
acaaagcacagcacucag

SEQ ID NO: 694178 - RNA, 18 nt, Human
acagcagccccaggggcc

SEQ ID NO: 694179 - RNA, 22 nt, Human
acagcagccccaggggccuccu

SEQ ID NO: 694180 - RNA, 21 nt, Human
accagccccacccccaacccc

SEQ ID NO: 694181 - RNA, 21 nt, Human
acccaaagccccauccaugcc

SEQ ID NO: 694182 - RNA, 21 nt, Human
acccacccuuccccuccaccc

SEQ ID NO: 694183 - RNA, 26 nt, Human
accggcccugcugacagcccgacacg

SEQ ID NO: 694184 - RNA, 23 nt, Human
acuccucagugcccagagguggg

SEQ ID NO: 694185 - RNA, 21 nt, Human
agaaccugggcugagaugucc

SEQ ID NO: 694186 - RNA, 19 nt, Human
agcagccccaggggccucc

SEQ ID NO: 694187 - RNA, 22 nt, Human
agcagccccaggggccuccuca

SEQ ID NO: 694188 - RNA, 24 nt, Human
agcagcuguugacacccuggguuc

SEQ ID NO: 694189 - RNA, 18 nt, Human
agccccacccccaacccc

SEQ ID NO: 694190 - RNA, 21 nt, Human
agcccgacacgcaggccgaga

SEQ ID NO: 694191 - RNA, 18 nt, Human
aggccgaucacagcagcc

SEQ ID NO: 694192 - RNA, 19 nt, Human
agggcccuaguuugggagg

SEQ ID NO: 694193 - RNA, 21 nt, Human
aggggcccagaguggugggag

SEQ ID NO: 694194 - RNA, 18 nt, Human
agguuccagcgucagggc

SEQ ID NO: 694195 - RNA, 19 nt, Human
agguuccagcgucagggcu

SEQ ID NO: 694196 - RNA, 20 nt, Human
aguggagggcccuaguuugg

SEQ ID NO: 694197 - RNA, 22 nt, Human
aguggagggcccuaguuuggga

SEQ ID NO: 694198 - RNA, 20 nt, Human
aguggugggagugagaggga

SEQ ID NO: 694199 - RNA, 21 nt, Human
auacagauguggcauggcucu

SEQ ID NO: 694200 - RNA, 21 nt, Human
auauguccugcuggucccauu

SEQ ID NO: 694201 - RNA, 21 nt, Human
augacuccccccaucccccag

SEQ ID NO: 694202 - RNA, 21 nt, Human
augggagcagccccaagaaca

SEQ ID NO: 694203 - RNA, 23 nt, Human
caaagcacagcacucaguggcuc

SEQ ID NO: 694204 - RNA, 21 nt, Human
cacccccaaccccacguggcc

SEQ ID NO: 694205 - RNA, 19 nt, Human
cacccuuccccuccacccu

SEQ ID NO: 694206 - RNA, 19 nt, Human
cacccuuccccuccaccuc

SEQ ID NO: 694207 - RNA, 18 nt, Human
cacccuugccugugaccu

SEQ ID NO: 694208 - RNA, 22 nt, Human
cacguggccuugccuggaggcc

SEQ ID NO: 694209 - RNA, 18 nt, Human
cacugcacagggcuggau

SEQ ID NO: 694210 - RNA, 22 nt, Human
cagccugggggcuccugaggac

SEQ ID NO: 694211 - RNA, 18 nt, Human
caggagagggugugggcg

SEQ ID NO: 694212 - RNA, 21 nt, Human
cagugcccagagguggggagu

SEQ ID NO: 694213 - RNA, 23 nt, Human
ccaaagccccauccaugcccugg

SEQ ID NO: 694214 - RNA, 23 nt, Human
ccacccccaaccccacguggccu

SEQ ID NO: 694215 - RNA, 25 nt, Human
ccaccuggggucuggggugcguggg

SEQ ID NO: 694216 - RNA, 23 nt, Human
ccagagguggggaguugagagca

SEQ ID NO: 694217 - RNA, 23 nt, Human
ccaggccgaucacagcagcccca

SEQ ID NO: 694218 - RNA, 23 nt, Human
ccaguccucccccaaggggccca

SEQ ID NO: 694219 - RNA, 21 nt, Human
cccaaagccccauccaugccc

SEQ ID NO: 694220 - RNA, 22 nt, Human
cccaaagccccauccaugcccu

SEQ ID NO: 694221 - RNA, 24 nt, Human
cccacccccaaccccacguggccg

SEQ ID NO: 694222 - RNA, 23 nt, Human
cccacccuuccccuccacccugc

SEQ ID NO: 694223 - RNA, 25 nt, Human
cccacggcccccuccccaguccucc

SEQ ID NO: 694224 - RNA, 18 nt, Human
cccaucccccagcuggaa

SEQ ID NO: 694225 - RNA, 24 nt, Human
ccccacccccaaccccacguggcc

SEQ ID NO: 694226 - RNA, 22 nt, Human
ccccagaaccuugcaaguuugg

SEQ ID NO: 694227 - RNA, 18 nt, Human
ccccagccccuguacucu

SEQ ID NO: 694228 - RNA, 23 nt, Human
ccccagccccuguacucuggauu

SEQ ID NO: 694229 - RNA, 18 nt, Human
ccccaggggccuccucac

SEQ ID NO: 694230 - RNA, 18 nt, Human
cccccaaccccacguggc

SEQ ID NO: 694231 - RNA, 22 nt, Human
ccccccaucccccagcuggaag

SEQ ID NO: 694232 - RNA, 18 nt, Human
cccggaggggaagguggc

SEQ ID NO: 694233 - RNA, 21 nt, Human
cccguuaaugaaaauggagau

SEQ ID NO: 694234 - RNA, 21 nt, Human
cccuccagacucugguucucc

SEQ ID NO: 694235 - RNA, 21 nt, Human
cccugcuaacugagacccacc

SEQ ID NO: 694236 - RNA, 23 nt, Human
cccugcuaacugagacccacccu

SEQ ID NO: 694237 - RNA, 18 nt, Human
cccugcugacagcccgac

SEQ ID NO: 694238 - RNA, 22 nt, Human
cccuggauagaguggagggccc

SEQ ID NO: 694239 - RNA, 23 nt, Human
cccugggcuuggggccaggguac

SEQ ID NO: 694240 - RNA, 22 nt, Human
ccgacacgcaggccgagagggc

SEQ ID NO: 694241 - RNA, 18 nt, Human
ccggaggggaagguggca

SEQ ID NO: 694242 - RNA, 18 nt, Human
ccgggcccugcccaggcg

SEQ ID NO: 694243 - RNA, 23 nt, Human
ccucgaggacccaaagccccauc

SEQ ID NO: 694244 - RNA, 20 nt, Human
ccucgggcaauuaguuccac

SEQ ID NO: 694245 - RNA, 27 nt, Human
ccugaccccagccccuguaccgguucc

SEQ ID NO: 694246 - RNA, 20 nt, Human
ccugcucgcuggcguggggc

SEQ ID NO: 694247 - RNA, 19 nt, Human
ccugcuggucccauucccc

SEQ ID NO: 694248 - RNA, 23 nt, Human
ccugggcugagauguccuggagc

SEQ ID NO: 694249 - RNA, 21 nt, Human
cggcccccuccccaguccucc

SEQ ID NO: 694250 - RNA, 25 nt, Human
cguggccuugccuggaggccccagc

SEQ ID NO: 694251 - RNA, 22 nt, Human
cuaaccuucagugacaaagcac

SEQ ID NO: 694252 - RNA, 28 nt, Human
cuaacugagacccacccuuccccuccaa

SEQ ID NO: 694253 - RNA, 22 nt, Human
cucaccacugcacagggcugga

SEQ ID NO: 694254 - RNA, 22 nt, Human
cucucccacggcccccucccca

SEQ ID NO: 694255 - RNA, 20 nt, Human
cucugucguucccacucccc

SEQ ID NO: 694256 - RNA, 25 nt, Human
cuggaaaucuucucccgugcaccgg

SEQ ID NO: 694257 - RNA, 20 nt, Human
cuggauuaagugacggaggc

SEQ ID NO: 694258 - RNA, 24 nt, Human
cugggcuuggggccagccccuugu

SEQ ID NO: 694259 - RNA, 21 nt, Human
cugggggcuccugaggacugu

SEQ ID NO: 694260 - RNA, 24 nt, Human
cuggguucagaucuaaccuucagu

SEQ ID NO: 694261 - RNA, 18 nt, Human
cuguccuuuauuguguau

SEQ ID NO: 694262 - RNA, 18 nt, Human
cugucguucccacucccc

SEQ ID NO: 694263 - RNA, 20 nt, Human
gaaccuugcaaguuuggggu

SEQ ID NO: 694264 - RNA, 23 nt, Human
gacccacccuuccccuccacccu

SEQ ID NO: 694265 - RNA, 19 nt, Human
gagcagccccaagaacaca

SEQ ID NO: 694266 - RNA, 23 nt, Human
gagcucacagccugacauuccag

SEQ ID NO: 694267 - RNA, 22 nt, Human
gaggaugguccaccuggggucu

SEQ ID NO: 694268 - RNA, 22 nt, Human
gagggugugggcgcaggccucu

SEQ ID NO: 694269 - RNA, 19 nt, Human
gauccugucuccuugccac

SEQ ID NO: 694270 - RNA, 24 nt, Human
gauccugucuccuugccacucgga

SEQ ID NO: 694271 - RNA, 20 nt, Human
gcaccggcccugcugacagc

SEQ ID NO: 694272 - RNA, 18 nt, Human
gcacggggugggcaggca

SEQ ID NO: 694273 - RNA, 19 nt, Human
gcacggggugggcaggcag

SEQ ID NO: 694274 - RNA, 18 nt, Human
gcccuggggaccccugcu

SEQ ID NO: 694275 - RNA, 21 nt, Human
gccuguccauggcccagaggg

SEQ ID NO: 694276 - RNA, 21 nt, Human
gccuugccuggaggccccagc

SEQ ID NO: 694277 - RNA, 20 nt, Human
gcgcaggccucugggcgagc

SEQ ID NO: 694278 - RNA, 21 nt, Human
gcguggggcuuggaggcuggu

SEQ ID NO: 694279 - RNA, 19 nt, Human
gcugggggcacgggguggg

SEQ ID NO: 694280 - RNA, 20 nt, Human
ggacaggagagggugugggc

SEQ ID NO: 694281 - RNA, 20 nt, Human
ggaccucggugccugcccca

SEQ ID NO: 694282 - RNA, 23 nt, Human
ggcacagccagcuggcugggggc

SEQ ID NO: 694283 - RNA, 19 nt, Human
ggcgccgggcccugcccag

SEQ ID NO: 694284 - RNA, 21 nt, Human
gggacagggaaagggaaggga

SEQ ID NO: 694285 - RNA, 21 nt, Human
gggcgaaggcuggacaggaga

SEQ ID NO: 694286 - RNA, 18 nt, Human
ggggcggggggacaggga

SEQ ID NO: 694287 - RNA, 21 nt, Human
guccauggcccagagggggcu

SEQ ID NO: 694288 - RNA, 23 nt, Human
guggccuugccuggaggccccag

SEQ ID NO: 694289 - RNA, 21 nt, Human
guguuuuguuuccccugucag

SEQ ID NO: 694290 - RNA, 19 nt, Human
uacagguuccagcgucagg

SEQ ID NO: 694291 - RNA, 23 nt, Human
uagaaccugggcugagauguccu

SEQ ID NO: 694292 - RNA, 23 nt, Human
uaugugggagacgaaaccaagag

SEQ ID NO: 694293 - RNA, 23 nt, Human
ucagaggguuugucugccugucu

SEQ ID NO: 694294 - RNA, 20 nt, Human
ucaggccagggagucccugg

SEQ ID NO: 694295 - RNA, 23 nt, Human
ucaguggcucggggauguuuccc

SEQ ID NO: 694296 - RNA, 22 nt, Human
uccaugcccuggcuuccaucuc

SEQ ID NO: 694297 - RNA, 18 nt, Human
uccauggcccagaggggg

SEQ ID NO: 694298 - RNA, 20 nt, Human
ucccacggcccccuccccag

SEQ ID NO: 694299 - RNA, 24 nt, Human
ucccacggcccccuccccaguccu

SEQ ID NO: 694300 - RNA, 18 nt, Human
ucccaggguuaaggcuga

SEQ ID NO: 694301 - RNA, 19 nt, Human
uccccugucagccuggggg

SEQ ID NO: 694302 - RNA, 21 nt, Human
uccccugucagccugggggcu

SEQ ID NO: 694303 - RNA, 21 nt, Human
ucccucugucguucccacucc

SEQ ID NO: 694304 - RNA, 22 nt, Human
ucccucugucguucccacuccc

SEQ ID NO: 694305 - RNA, 21 nt, Human
ucccugggcuuggggccagcc

SEQ ID NO: 694306 - RNA, 22 nt, Human
ucccugggcuuggggccagccc

SEQ ID NO: 694307 - RNA, 19 nt, Human
uccucagugcccagaggug

SEQ ID NO: 694308 - RNA, 22 nt, Human
uccugcuggucccauuccccug

SEQ ID NO: 694309 - RNA, 19 nt, Human
uccuggagcuguuguaaug

SEQ ID NO: 694310 - RNA, 22 nt, Human
ucuccuugccacucggaccucg

SEQ ID NO: 694311 - RNA, 19 nt, Human
ugaaggacaacgauagggg

SEQ ID NO: 694312 - RNA, 19 nt, Human
ugaccagagaggcauggag

SEQ ID NO: 694313 - RNA, 19 nt, Human
ugacuccccccauccccca

SEQ ID NO: 694314 - RNA, 26 nt, Human
ugagacccacccuuccccuccacccu

SEQ ID NO: 694315 - RNA, 18 nt, Human
ugagaggccacccuaagg

SEQ ID NO: 694316 - RNA, 19 nt, Human
ugcagagacuucauagauc

SEQ ID NO: 694317 - RNA, 23 nt, Human
ugcaugggagcagccccaagaac

SEQ ID NO: 694318 - RNA, 23 nt, Human
ugcccggaggggaagguggcaag

SEQ ID NO: 694319 - RNA, 19 nt, Human
ugcccuggauagaguggag

SEQ ID NO: 694320 - RNA, 21 nt, Human
ugcccuggcuuccaucucugu

SEQ ID NO: 694321 - RNA, 22 nt, Human
ugcccuggggaccccugcuaac

SEQ ID NO: 694322 - RNA, 22 nt, Human
ugccugccccagaaccuugcaa

SEQ ID NO: 694323 - RNA, 18 nt, Human
uggaggccccagcaggcg

SEQ ID NO: 694324 - RNA, 26 nt, Human
uggcaagaagcugggguccaaccucg

SEQ ID NO: 694325 - RNA, 26 nt, Human
uggcaagaagcuggggucccggaagc

SEQ ID NO: 694326 - RNA, 21 nt, Human
uggcugggggcacgggguggg

SEQ ID NO: 694327 - RNA, 19 nt, Human
ugggagcagccccaagaac

SEQ ID NO: 694328 - RNA, 20 nt, Human
ugggcaggcagccugcucgc

SEQ ID NO: 694329 - RNA, 20 nt, Human
ugggcgagcgugccaggcuc

SEQ ID NO: 694330 - RNA, 19 nt, Human
ugggggcacggggugggca

SEQ ID NO: 694331 - RNA, 24 nt, Human
ugggggcagcaggcauuucccagg

SEQ ID NO: 694332 - RNA, 21 nt, Human
ugucagccugggggcuccuga

SEQ ID NO: 694333 - RNA, 22 nt, Human
uguccugcagagcuucucgucg

SEQ ID NO: 694334 - RNA, 19 nt, Human
uguccugcuggucccauuc

SEQ ID NO: 694335 - RNA, 21 nt, Human
uguccuggagcuguuguaaug

SEQ ID NO: 694336 - RNA, 20 nt, Human
uguguguuuuguuuccccug

SEQ ID NO: 694337 - RNA, 21 nt, Human
uguuaggugauccugucugca

SEQ ID NO: 694338 - RNA, 22 nt, Human
uguuaggugauccugucugcau

SEQ ID NO: 694339 - RNA, 18 nt, Human
uguuuuguuuccccuguc

SEQ ID NO: 694340 - RNA, 20 nt, Human
uguuuuguuuccccugucaa

SEQ ID NO: 694341 - RNA, 20 nt, Human
uuagcgaggcuuugcuggca

SEQ ID NO: 694342 - RNA, 23 nt, Human
uugccuggaggccccagcaggcg

SEQ ID NO: 694343 - RNA, 20 nt, Human
uuggccucaaccaaugguaa

SEQ ID NO: 694344 - RNA, 21 nt, Human
uugggguuuauuguguguuuu

SEQ ID NO: 694345 - RNA, 18 nt, Human
uuguguguuuuguuuccc

SEQ ID NO: 694346 - RNA, 20 nt, Human
uuuccccugucagccugggg

SEQ ID NO: 694347 - RNA, 19 nt, Human
uuuccuaugacucccccca

SEQ ID NO: 694348 - RNA, 18 nt, Human
uuuuuuuuuuuuuuucug

SEQ ID NO: 694349 - RNA, 19 nt, Human
uuuuuuuuuuuuuuucugu

SEQ ID NO: 694350 - RNA, 23 nt, Human
aaaaguaagcagccgguuggucc

SEQ ID NO: 694351 - RNA, 20 nt, Human
aaagagcagccaguuuggcc

SEQ ID NO: 694352 - RNA, 24 nt, Human
aagaagccccggcgacucccgccc

SEQ ID NO: 694353 - RNA, 19 nt, Human
aagcuuacaaacaaagagc

SEQ ID NO: 694354 - RNA, 19 nt, Human
aaguaugggaugagagagg

SEQ ID NO: 694355 - RNA, 24 nt, Human
agacauuacuuccugcuggaaaua

SEQ ID NO: 694356 - RNA, 21 nt, Human
agacccgaagcugcaccacag

SEQ ID NO: 694357 - RNA, 24 nt, Human
aggcggagcggagcuggggugggg

SEQ ID NO: 694358 - RNA, 19 nt, Human
aguaugggaugagagagga

SEQ ID NO: 694359 - RNA, 23 nt, Human
cagaguaggggccaaacuccgag

SEQ ID NO: 694360 - RNA, 18 nt, Human
caggcuaaaaguauggga

SEQ ID NO: 694361 - RNA, 20 nt, Human
caugaaagaagguggcaaca

SEQ ID NO: 694362 - RNA, 21 nt, Human
ccccggcgacucccgccccuc

SEQ ID NO: 694363 - RNA, 21 nt, Human
cggagcggagcuggggugggg

SEQ ID NO: 694364 - RNA, 24 nt, Human
cugggguggggucagaguaggggc

SEQ ID NO: 694365 - RNA, 18 nt, Human
gaacccaaggcggagcgg

SEQ ID NO: 694366 - RNA, 21 nt, Human
gaacccaaggcggagcggagc

SEQ ID NO: 694367 - RNA, 25 nt, Human
gagcugggguggggucagaguaggg

SEQ ID NO: 694368 - RNA, 23 nt, Human
gaggaaugugcaugaaagaaggu

SEQ ID NO: 694369 - RNA, 23 nt, Human
gcaccacaggaagaagccccggc

SEQ ID NO: 694370 - RNA, 21 nt, Human
ggcggagcggagcuggggugg

SEQ ID NO: 694371 - RNA, 22 nt, Human
gggguggggucagaguaggggc

SEQ ID NO: 694372 - RNA, 24 nt, Human
uaaauacauuuacaaaugugcaaa

SEQ ID NO: 694373 - RNA, 20 nt, Human
uaggggccaaacuccgagac

SEQ ID NO: 694374 - RNA, 22 nt, Human
uaggggccaaacuccgagaccc

SEQ ID NO: 694375 - RNA, 26 nt, Human
ucaucuuuauuuuagucauacuacuu

SEQ ID NO: 694376 - RNA, 20 nt, Human
ucccugguugaggcugagga

SEQ ID NO: 694377 - RNA, 19 nt, Human
uuuuaaaagucaucuucca

SEQ ID NO: 694378 - RNA, 20 nt, Human
uuuuuuuuuuuuuuguucgu

SEQ ID NO: 694379 - RNA, 18 nt, Human
uuuuuuuuuuuuuuuuug

SEQ ID NO: 694380 - RNA, 24 nt, Human
uuuuuuuuuuuuuuuuuuguucgu

SEQ ID NO: 694381 - RNA, 26 nt, Human
aacccgugccccuccucccguccccc

SEQ ID NO: 694382 - RNA, 20 nt, Human
acugcacagagacgggcugg

SEQ ID NO: 694383 - RNA, 18 nt, Human
agacgggcuggcacaccc

SEQ ID NO: 694384 - RNA, 22 nt, Human
agacgggcuggcacacccuggg

SEQ ID NO: 694385 - RNA, 23 nt, Human
agacgggcuggcacacccugggu

SEQ ID NO: 694386 - RNA, 19 nt, Human
agcucuggcguccugaugg

SEQ ID NO: 694387 - RNA, 23 nt, Human
aggcaagaggccugggguuccca

SEQ ID NO: 694388 - RNA, 18 nt, Human
agguggucaccgcugaag

SEQ ID NO: 694389 - RNA, 19 nt, Human
agugaaggaggagaaggag

SEQ ID NO: 694390 - RNA, 19 nt, Human
caagucccuuaaacccgug

SEQ ID NO: 694391 - RNA, 21 nt, Human
caagucccuuaaacccgugcc

SEQ ID NO: 694392 - RNA, 19 nt, Human
cacccuccaaaggagauga

SEQ ID NO: 694393 - RNA, 19 nt, Human
ccacggagaagggggcaag

SEQ ID NO: 694394 - RNA, 21 nt, Human
ccaggcaccuaggcccugcga

SEQ ID NO: 694395 - RNA, 21 nt, Human
ccaguggcuccccaagucccu

SEQ ID NO: 694396 - RNA, 18 nt, Human
cccaugcacccuccaaag

SEQ ID NO: 694397 - RNA, 22 nt, Human
cccaugcacccuccaaaggaga

SEQ ID NO: 694398 - RNA, 19 nt, Human
ccccaagucccuuaaaccc

SEQ ID NO: 694399 - RNA, 19 nt, Human
ccccucccauccgggcccc

SEQ ID NO: 694400 - RNA, 19 nt, Human
ccccuccucccguccccca

SEQ ID NO: 694401 - RNA, 24 nt, Human
cccuggguccaggcaccuaggccc

SEQ ID NO: 694402 - RNA, 25 nt, Human
cccuugggagagggccuuguaggug

SEQ ID NO: 694403 - RNA, 27 nt, Human
cccuugggagagggccuuguagguggg

SEQ ID NO: 694404 - RNA, 21 nt, Human
ccuacagacaaagucguccgc

SEQ ID NO: 694405 - RNA, 20 nt, Human
ccuucgugcgggcgccgccc

SEQ ID NO: 694406 - RNA, 19 nt, Human
cgccgcugcuccuacagac

SEQ ID NO: 694407 - RNA, 22 nt, Human
cgucccccaugcacccuccaaa

SEQ ID NO: 694408 - RNA, 21 nt, Human
cucaaguagcuggucaaagcc

SEQ ID NO: 694409 - RNA, 19 nt, Human
cuccaagcugggacgcccc

SEQ ID NO: 694410 - RNA, 18 nt, Human
cuccuacagacaaagucg

SEQ ID NO: 694411 - RNA, 20 nt, Human
cugaagcagcucuggcgucc

SEQ ID NO: 694412 - RNA, 22 nt, Human
cuucgugcgggcgccgccccuu

SEQ ID NO: 694413 - RNA, 24 nt, Human
gaugacaaaggcggcagugaagga

SEQ ID NO: 694414 - RNA, 19 nt, Human
gauucuugagggucucccc

SEQ ID NO: 694415 - RNA, 19 nt, Human
gccccuccucccguccccc

SEQ ID NO: 694416 - RNA, 19 nt, Human
ggagaagguggucaccgcu

SEQ ID NO: 694417 - RNA, 21 nt, Human
ggaggugggguccaaggagcu

SEQ ID NO: 694418 - RNA, 21 nt, Human
uacagacaaagucguccgcac

SEQ ID NO: 694419 - RNA, 22 nt, Human
uccccaagucccuuaaacccgu

SEQ ID NO: 694420 - RNA, 20 nt, Human
ugagagcaugggaggugggg

SEQ ID NO: 694421 - RNA, 19 nt, Human
ugagagugagagcauggga

SEQ ID NO: 694422 - RNA, 24 nt, Human
uggcuccccaagucccuuaaaccc

SEQ ID NO: 694423 - RNA, 21 nt, Human
ugggagagggccuuguaggug

SEQ ID NO: 694424 - RNA, 21 nt, Human
ugggaggugggguccaaggag

SEQ ID NO: 694425 - RNA, 21 nt, Human
uggggagggaggcaagaggcc

SEQ ID NO: 694426 - RNA, 27 nt, Human
uggugccuuucucagcgccccuuccag

SEQ ID NO: 694427 - RNA, 21 nt, Human
uguguuagagggagaaggugg

SEQ ID NO: 694428 - RNA, 19 nt, Human
uuggaagagcuguguggac

SEQ ID NO: 694429 - RNA, 20 nt, Human
uuuuuuuuuuaaagagcaac

SEQ ID NO: 694430 - RNA, 19 nt, Human
uuuuuuuuuuuuaaagagc

SEQ ID NO: 694431 - RNA, 21 nt, Human
uuuuuuuuuuuuuaaagagca

SEQ ID NO: 694432 - RNA, 22 nt, Human
uuuuuuuuuuuuuuuuuuaaag

SEQ ID NO: 694433 - RNA, 19 nt, Human
aacucgcguccggucccuc

SEQ ID NO: 694434 - RNA, 18 nt, Human
ugacuggagaacccagau

SEQ ID NO: 694435 - RNA, 19 nt, Human
uuuuuuuuuuuuaaagucu

SEQ ID NO: 694436 - RNA, 19 nt, Human
uuuuuuuuuuuuuuuuuaa

SEQ ID NO: 694437 - RNA, 26 nt, Human
aaaaaacaaagucccauccucccccc

SEQ ID NO: 694438 - RNA, 23 nt, Human
aaaacaaagucccauccuccccc

SEQ ID NO: 694439 - RNA, 20 nt, Human
agaucuccgaggugccuccc

SEQ ID NO: 694440 - RNA, 18 nt, Human
cacccagaucuccgaggu

SEQ ID NO: 694441 - RNA, 22 nt, Human
cccauccuccccccauugucua

SEQ ID NO: 694442 - RNA, 26 nt, Human
cccauccuccccccauugucuaagaa

SEQ ID NO: 694443 - RNA, 21 nt, Human
cuuggaaaaaacaaaguccca

SEQ ID NO: 694444 - RNA, 23 nt, Human
ggccccgccccuccaaaugguca

SEQ ID NO: 694445 - RNA, 21 nt, Human
uaacccugggcuuuugcaccc

SEQ ID NO: 694446 - RNA, 25 nt, Human
ucccgcgggccgcugcccgcugcuu

SEQ ID NO: 694447 - RNA, 20 nt, Human
uggaaaaaacaaagucccau

SEQ ID NO: 694448 - RNA, 20 nt, Human
aaacaaggaaacaaacuaca

SEQ ID NO: 694449 - RNA, 22 nt, Human
aacaaggaaacaaacuacaaga

SEQ ID NO: 694450 - RNA, 21 nt, Human
aaggaaacaaacuacaagaag

SEQ ID NO: 694451 - RNA, 24 nt, Human
aaggggguaaaccacaaagucaga

SEQ ID NO: 694452 - RNA, 25 nt, Human
aguucuguucuuuugacauuggcca

SEQ ID NO: 694453 - RNA, 19 nt, Human
augcacaccucucaaacaa

SEQ ID NO: 694454 - RNA, 22 nt, Human
caagguuaguaagaaggccaac

SEQ ID NO: 694455 - RNA, 19 nt, Human
cacagcaagugugcagugg

SEQ ID NO: 694456 - RNA, 24 nt, Human
ccucguaacaacugcgucccugga

SEQ ID NO: 694457 - RNA, 22 nt, Human
cuccagcagguuggacaugauc

SEQ ID NO: 694458 - RNA, 21 nt, Human
gagcugccacgucuaaccucg

SEQ ID NO: 694459 - RNA, 19 nt, Human
guucuuuugacauuggcca

SEQ ID NO: 694460 - RNA, 22 nt, Human
uaaaccacaaagucagaaacuu

SEQ ID NO: 694461 - RNA, 19 nt, Human
uacacagcaagugugcagu

SEQ ID NO: 694462 - RNA, 23 nt, Human
ucauuguacacagcaagugugca

SEQ ID NO: 694463 - RNA, 21 nt, Human
ucuugggcucaaucacggucc

SEQ ID NO: 694464 - RNA, 18 nt, Human
ugaaggggcuccagcagg

SEQ ID NO: 694465 - RNA, 19 nt, Human
ugaaggggcuccagcaggu

SEQ ID NO: 694466 - RNA, 25 nt, Human
ugaaggggguaaaccacaaagucaa

SEQ ID NO: 694467 - RNA, 23 nt, Human
ugacauuggccaaaugcguaagu

SEQ ID NO: 694468 - RNA, 22 nt, Human
ugagcaggauucaauuucuaca

SEQ ID NO: 694469 - RNA, 23 nt, Human
uggggcaucauccaccaugugaa

SEQ ID NO: 694470 - RNA, 19 nt, Human
uguacacagcaagugugca

SEQ ID NO: 694471 - RNA, 18 nt, Human
ugugcagugggcaaaguu

SEQ ID NO: 694472 - RNA, 19 nt, Human
ugugcagugggcaaaguuc

SEQ ID NO: 694473 - RNA, 25 nt, Human
uucucaauuugacccuauguauccc

SEQ ID NO: 694474 - RNA, 21 nt, Human
uuuuuuuuuuuuuuuuuccag

SEQ ID NO: 694475 - RNA, 23 nt, Human
uuuuuuuuuuuuuuuuuuccagg

SEQ ID NO: 694476 - RNA, 19 nt, Human
aaacagguugaauugaaac

SEQ ID NO: 694477 - RNA, 18 nt, Human
aagaugacuauaaacaag

SEQ ID NO: 694478 - RNA, 21 nt, Human
aagaugacuauaaacaagaug

SEQ ID NO: 694479 - RNA, 22 nt, Human
acuuuuuuaaagacaaaggcua

SEQ ID NO: 694480 - RNA, 18 nt, Human
agaacaagaaaaaaugag

SEQ ID NO: 694481 - RNA, 19 nt, Human
agaccagaccaaaaucaaa

SEQ ID NO: 694482 - RNA, 20 nt, Human
agaccagaccaaaaucaaaa

SEQ ID NO: 694483 - RNA, 23 nt, Human
caaaauauacuuuuaauuguaaa

SEQ ID NO: 694484 - RNA, 21 nt, Human
cgaccccgccgcucacuuccg

SEQ ID NO: 694485 - RNA, 27 nt, Human
cucucugccccguuaccgucagucgac

SEQ ID NO: 694486 - RNA, 24 nt, Human
cuguaaaccaaagaccccuccaaa

SEQ ID NO: 694487 - RNA, 23 nt, Human
gcaacaacuuuuuuaaagacaaa

SEQ ID NO: 694488 - RNA, 21 nt, Human
gcuacuauaaaguuuauagac

SEQ ID NO: 694489 - RNA, 23 nt, Human
uaaagaccagaccaaaaucaaaa

SEQ ID NO: 694490 - RNA, 21 nt, Human
uacaaaaaaaccuagaaacag

SEQ ID NO: 694491 - RNA, 22 nt, Human
uacaaagaugacuauaaacaag

SEQ ID NO: 694492 - RNA, 19 nt, Human
uacaguacaaagaugacua

SEQ ID NO: 694493 - RNA, 23 nt, Human
ucaaaacuaaauuuacaaaaaaa

SEQ ID NO: 694494 - RNA, 26 nt, Human
ucaaacaauaacuauaauccuaaaau

SEQ ID NO: 694495 - RNA, 22 nt, Human
ucugaaagaugcuacuauaaag

SEQ ID NO: 694496 - RNA, 23 nt, Human
ucugcgaacagccucucugcccc

SEQ ID NO: 694497 - RNA, 25 nt, Human
ugaaaucaauuaaaaauguuuauuc

SEQ ID NO: 694498 - RNA, 19 nt, Human
ugacuauaaacaagaugca

SEQ ID NO: 694499 - RNA, 20 nt, Human
uuaaagacaaaggcuacugu

SEQ ID NO: 694500 - RNA, 27 nt, Human
uuauucugaaagaugcuacuauaaagu

SEQ ID NO: 694501 - RNA, 18 nt, Human
uugcuuuaauuuuucacu

SEQ ID NO: 694502 - RNA, 20 nt, Human
uuuuuuuuuuuuuuuuugcu

SEQ ID NO: 694503 - RNA, 23 nt, Human
uuuuuuuuuuuuuuuuuugcuaa

SEQ ID NO: 694504 - RNA, 27 nt, Human
uuuuuuuuuuuuuuuuuuuuuuugggg

SEQ ID NO: 694505 - RNA, 22 nt, Human
caacagcuccaagacaacacuu

SEQ ID NO: 694506 - RNA, 28 nt, Human
cagaugaaauaaagggucaccaucuccu

SEQ ID NO: 694507 - RNA, 21 nt, Human
ccugccgccgcuuccccagac

SEQ ID NO: 694508 - RNA, 21 nt, Human
cuccaagacaacacuuaauuc

SEQ ID NO: 694509 - RNA, 18 nt, Human
gcaaaagauguuauggca

SEQ ID NO: 694510 - RNA, 18 nt, Human
uauggcagggaauagaga

SEQ ID NO: 694511 - RNA, 20 nt, Human
uggcaaaagauguuauggca

SEQ ID NO: 694512 - RNA, 22 nt, Human
aaagaaaaaagaaacacuuugu

SEQ ID NO: 694513 - RNA, 21 nt, Human
aaaugccuauaaaauaaaaua

SEQ ID NO: 694514 - RNA, 21 nt, Human
aacucuaaaaaccuaagaaau

SEQ ID NO: 694515 - RNA, 25 nt, Human
aagaagaaaauauuccuuuaaaaaa

SEQ ID NO: 694516 - RNA, 22 nt, Human
aagaagaaauuaauaaaugaaa

SEQ ID NO: 694517 - RNA, 22 nt, Human
aagauaccagaagucuagaaua

SEQ ID NO: 694518 - RNA, 20 nt, Human
aagcaagaagaaauuaauaa

SEQ ID NO: 694519 - RNA, 22 nt, Human
aaucacaguuuaucuucuuucu

SEQ ID NO: 694520 - RNA, 21 nt, Human
aaucauaugcuucaaaucaag

SEQ ID NO: 694521 - RNA, 19 nt, Human
acaugucauuuucuaacuc

SEQ ID NO: 694522 - RNA, 23 nt, Human
acauuaaaauagauaacauugcu

SEQ ID NO: 694523 - RNA, 22 nt, Human
accauaaaucuuuuuacaaaga

SEQ ID NO: 694524 - RNA, 23 nt, Human
accccuccugucucucuucucca

SEQ ID NO: 694525 - RNA, 20 nt, Human
acuguaacugauuaauuuuu

SEQ ID NO: 694526 - RNA, 19 nt, Human
agaaacaauaaggaugauc

SEQ ID NO: 694527 - RNA, 18 nt, Human
agaaagaaguggaaaagg

SEQ ID NO: 694528 - RNA, 23 nt, Human
agcaaugacucaaccagaaaaaa

SEQ ID NO: 694529 - RNA, 25 nt, Human
agcagcauaaacagugacagcagaa

SEQ ID NO: 694530 - RNA, 19 nt, Human
aggaaagaaaaaucgaaaa

SEQ ID NO: 694531 - RNA, 18 nt, Human
augaaauaaaggcaaaaa

SEQ ID NO: 694532 - RNA, 19 nt, Human
auggaucugaaguccuugu

SEQ ID NO: 694533 - RNA, 19 nt, Human
auucuuguaaauacauaua

SEQ ID NO: 694534 - RNA, 23 nt, Human
caaauucucuuuuuaacaaaauu

SEQ ID NO: 694535 - RNA, 24 nt, Human
caacaaagccuauuuccaccaaaa

SEQ ID NO: 694536 - RNA, 24 nt, Human
caacauucaguacuaugcaaauca

SEQ ID NO: 694537 - RNA, 22 nt, Human
cagcagaacaaaccccagcaca

SEQ ID NO: 694538 - RNA, 21 nt, Human
cagcauaaacagugacagcag

SEQ ID NO: 694539 - RNA, 25 nt, Human
cagugcuaaguuccagcagcauaaa

SEQ ID NO: 694540 - RNA, 18 nt, Human
caucugauugaaauaauu

SEQ ID NO: 694541 - RNA, 25 nt, Human
ccaaaaaagcaagaagaaauuaaua

SEQ ID NO: 694542 - RNA, 23 nt, Human
ccaaaauagaauuucugagcacg

SEQ ID NO: 694543 - RNA, 21 nt, Human
ccaacagucuuacagugagca

SEQ ID NO: 694544 - RNA, 24 nt, Human
ccacuuacagaauugaacauguca

SEQ ID NO: 694545 - RNA, 19 nt, Human
cccuccugucucucuucuc

SEQ ID NO: 694546 - RNA, 22 nt, Human
ccuccugucucucuucuccaaa

SEQ ID NO: 694547 - RNA, 21 nt, Human
ccugaacucuaaaaaccuaag

SEQ ID NO: 694548 - RNA, 22 nt, Human
ccuuaagcugguuuuaccccuc

SEQ ID NO: 694549 - RNA, 25 nt, Human
ccuuuauuuuaaugugucaaaaaaa

SEQ ID NO: 694550 - RNA, 19 nt, Human
cuaaagagcaaugacucaa

SEQ ID NO: 694551 - RNA, 23 nt, Human
cuaaagagcaaugacucaaccag

SEQ ID NO: 694552 - RNA, 23 nt, Human
cucaaaaagucaccacuuacaga

SEQ ID NO: 694553 - RNA, 24 nt, Human
cucaaccagaaaaaauaguaaagg

SEQ ID NO: 694554 - RNA, 22 nt, Human
cucaauacacaccacuguccaa

SEQ ID NO: 694555 - RNA, 25 nt, Human
cugccuuuuccuuuuuaaagugcuu

SEQ ID NO: 694556 - RNA, 22 nt, Human
cuggaaauuaaaaauauccaaa

SEQ ID NO: 694557 - RNA, 26 nt, Human
cuuaaagauauucuuguaaauacaua

SEQ ID NO: 694558 - RNA, 23 nt, Human
cuuuuaaaaauugucagggaggu

SEQ ID NO: 694559 - RNA, 24 nt, Human
gaaaauucuuauuuaaaaauggau

SEQ ID NO: 694560 - RNA, 24 nt, Human
gagacugaauuauauauuauugug

SEQ ID NO: 694561 - RNA, 21 nt, Human
gauuaaauagauuaaggaaau

SEQ ID NO: 694562 - RNA, 21 nt, Human
guggaaaaggaaagaaaaauc

SEQ ID NO: 694563 - RNA, 29 nt, Human
guuagaaagaaguggaaaaggaaagaaaa

SEQ ID NO: 694564 - RNA, 24 nt, Human
uaagaagaaaauauuccuuuaaaa

SEQ ID NO: 694565 - RNA, 21 nt, Human
uaauacugaaaggugcucaaa

SEQ ID NO: 694566 - RNA, 22 nt, Human
uacaaauacauaauacugaaag

SEQ ID NO: 694567 - RNA, 20 nt, Human
uacaacaaagccuauuucca

SEQ ID NO: 694568 - RNA, 21 nt, Human
uacacaccacuguccaacagu

SEQ ID NO: 694569 - RNA, 20 nt, Human
uagaauuucugagcacgaac

SEQ ID NO: 694570 - RNA, 20 nt, Human
uagagcauuuuauaguauag

SEQ ID NO: 694571 - RNA, 24 nt, Human
uagagcauuuuauaguauaggaag

SEQ ID NO: 694572 - RNA, 18 nt, Human
uauaucuuaagaagaaaa

SEQ ID NO: 694573 - RNA, 20 nt, Human
uauuucacuccacauaaaca

SEQ ID NO: 694574 - RNA, 21 nt, Human
ucaaaucaagacagugcuaag

SEQ ID NO: 694575 - RNA, 20 nt, Human
ucaauacacaccacugucca

SEQ ID NO: 694576 - RNA, 22 nt, Human
ucaauacacaccacuguccaac

SEQ ID NO: 694577 - RNA, 18 nt, Human
ucaguggaucacagcaga

SEQ ID NO: 694578 - RNA, 20 nt, Human
uccacauaaacaguaaacau

SEQ ID NO: 694579 - RNA, 22 nt, Human
uccaccaaaaaagcaagaagaa

SEQ ID NO: 694580 - RNA, 21 nt, Human
ucugcauuaaugaagauugcu

SEQ ID NO: 694581 - RNA, 21 nt, Human
ugaaauccugaacucuaaaaa

SEQ ID NO: 694582 - RNA, 23 nt, Human
ugaaauccugaacucuaaaaacc

SEQ ID NO: 694583 - RNA, 21 nt, Human
ugaaaucuauugcugaugcua

SEQ ID NO: 694584 - RNA, 21 nt, Human
ugaauauaauaaagcaaucca

SEQ ID NO: 694585 - RNA, 28 nt, Human
ugacaaauacacauuaaaaaggguuucc

SEQ ID NO: 694586 - RNA, 21 nt, Human
ugacagcagaacaaaccccag

SEQ ID NO: 694587 - RNA, 22 nt, Human
ugacagcagaacaaaccccagc

SEQ ID NO: 694588 - RNA, 19 nt, Human
ugggggguaauuaagcuac

SEQ ID NO: 694589 - RNA, 23 nt, Human
uguaaauacauauaagcugugug

SEQ ID NO: 694590 - RNA, 26 nt, Human
uguacaacauauuaacuauauauaua

SEQ ID NO: 694591 - RNA, 21 nt, Human
uguauuucuuaagagcuugac

SEQ ID NO: 694592 - RNA, 23 nt, Human
ugucaaaaaaacacuuaaagaua

SEQ ID NO: 694593 - RNA, 22 nt, Human
ugucagggagguuugcaaucag

SEQ ID NO: 694594 - RNA, 20 nt, Human
uguuauugugacaaauacac

SEQ ID NO: 694595 - RNA, 25 nt, Human
uuaaaaauauccaaaucuguuagaa

SEQ ID NO: 694596 - RNA, 22 nt, Human
uuacaaauacauaauacugaaa

SEQ ID NO: 694597 - RNA, 20 nt, Human
uugcuucaaauggcucucaa

SEQ ID NO: 694598 - RNA, 22 nt, Human
uuuaaaaauugucagggagguu

SEQ ID NO: 694599 - RNA, 19 nt, Human
uuuaaagugcuuauuagcu

SEQ ID NO: 694600 - RNA, 21 nt, Human
uuuacaaauacauaauacuga

SEQ ID NO: 694601 - RNA, 20 nt, Human
uuuucugcaugagacuaucg

SEQ ID NO: 694602 - RNA, 19 nt, Human
agcccagugcugggggaca

SEQ ID NO: 694603 - RNA, 29 nt, Human
agguagggggugggauguugggggacccc

SEQ ID NO: 694604 - RNA, 22 nt, Human
cacccuuggcccccacugaagu

SEQ ID NO: 694605 - RNA, 24 nt, Human
cacccuuggcccccacugaaguuc

SEQ ID NO: 694606 - RNA, 20 nt, Human
caggaccugggaaggggcac

SEQ ID NO: 694607 - RNA, 18 nt, Human
caggguccucuuccugac

SEQ ID NO: 694608 - RNA, 22 nt, Human
ccuguggaggcaggaccuggga

SEQ ID NO: 694609 - RNA, 22 nt, Human
cugggggacaggguccucuucc

SEQ ID NO: 694610 - RNA, 20 nt, Human
gcagccugugggaugacuug

SEQ ID NO: 694611 - RNA, 21 nt, Human
ggagguagggggugggauguu

SEQ ID NO: 694612 - RNA, 20 nt, Human
ucagcacccuuggcccccac

SEQ ID NO: 694613 - RNA, 20 nt, Human
ucauugcuggguucucagca

SEQ ID NO: 694614 - RNA, 19 nt, Human
ucuaggugaagcccagugc

SEQ ID NO: 694615 - RNA, 22 nt, Human
ugcaaggucccauauggaggua

SEQ ID NO: 694616 - RNA, 21 nt, Human
uuuuuuuuuuuuacugacaaa

SEQ ID NO: 694617 - RNA, 23 nt, Human
uuuuuuuuuuuuuuuuuuacuga

SEQ ID NO: 694618 - RNA, 19 nt, Human
aaagugcugggauuacagg

SEQ ID NO: 694619 - RNA, 24 nt, Human
aaagugcugggauuacaggcgcga

SEQ ID NO: 694620 - RNA, 23 nt, Human
aaccucaagugauccguccgccu

SEQ ID NO: 694621 - RNA, 24 nt, Human
aagugauccguccgccuuggccuc

SEQ ID NO: 694622 - RNA, 18 nt, Human
aagugcugggauuacagg

SEQ ID NO: 694623 - RNA, 19 nt, Human
aagugcugggauuacaggc

SEQ ID NO: 694624 - RNA, 18 nt, Human
aaucaugauuucuaauuc

SEQ ID NO: 694625 - RNA, 23 nt, Human
acacaaacacaggaaacaaagcu

SEQ ID NO: 694626 - RNA, 23 nt, Human
acaccaauuacuguauagaaaaa

SEQ ID NO: 694627 - RNA, 22 nt, Human
acagaagaaaaugaaccuuauu

SEQ ID NO: 694628 - RNA, 23 nt, Human
acaguaaauaagaagucccugaa

SEQ ID NO: 694629 - RNA, 18 nt, Human
accauguuggccaggcug

SEQ ID NO: 694630 - RNA, 20 nt, Human
acccguuuuucuucuauacc

SEQ ID NO: 694631 - RNA, 18 nt, Human
agcugguagguggcagaa

SEQ ID NO: 694632 - RNA, 20 nt, Human
agguagauggccaaagcuga

SEQ ID NO: 694633 - RNA, 18 nt, Human
augggguuucaccauguu

SEQ ID NO: 694634 - RNA, 22 nt, Human
augggguuucaccauguuggcc

SEQ ID NO: 694635 - RNA, 24 nt, Human
augggguuucaccauguuggccag

SEQ ID NO: 694636 - RNA, 18 nt, Human
caaagaucugaaacccca

SEQ ID NO: 694637 - RNA, 24 nt, Human
caaagugcugggauuacaggcgcg

SEQ ID NO: 694638 - RNA, 19 nt, Human
cacacaaacacaggaaaca

SEQ ID NO: 694639 - RNA, 21 nt, Human
caccauguuggccaggcuggu

SEQ ID NO: 694640 - RNA, 24 nt, Human
caccauguuggccaggcuggucuc

SEQ ID NO: 694641 - RNA, 27 nt, Human
caccauguuggccaggcuggucucaaa

SEQ ID NO: 694642 - RNA, 21 nt, Human
cagguagauggccaaagcuga

SEQ ID NO: 694643 - RNA, 24 nt, Human
cauguuggccaggcuggucucaaa

SEQ ID NO: 694644 - RNA, 21 nt, Human
ccaaaaaucagacuuucuaau

SEQ ID NO: 694645 - RNA, 19 nt, Human
ccaaagugcugggauuaca

SEQ ID NO: 694646 - RNA, 20 nt, Human
ccaaagugcugggauuacag

SEQ ID NO: 694647 - RNA, 22 nt, Human
ccaaagugcugggauuacaggc

SEQ ID NO: 694648 - RNA, 23 nt, Human
ccaaagugcugggauuacaggcg

SEQ ID NO: 694649 - RNA, 22 nt, Human
ccacacaaacacaggaaacaaa

SEQ ID NO: 694650 - RNA, 21 nt, Human
ccgccuuggccucccaaagug

SEQ ID NO: 694651 - RNA, 18 nt, Human
ccuaaccucaagugaucc

SEQ ID NO: 694652 - RNA, 26 nt, Human
cuccuaaccucaagugauccguccgc

SEQ ID NO: 694653 - RNA, 20 nt, Human
cuucuauaccacacaccaau

SEQ ID NO: 694654 - RNA, 24 nt, Human
gaacccguuuuucuucuauaccac

SEQ ID NO: 694655 - RNA, 23 nt, Human
gaaccuuauuaaagcugaaugac

SEQ ID NO: 694656 - RNA, 21 nt, Human
gaagugggguuugaacccguu

SEQ ID NO: 694657 - RNA, 18 nt, Human
gagaugggguuucaccau

SEQ ID NO: 694658 - RNA, 24 nt, Human
gagaugggguuucaccauguuggc

SEQ ID NO: 694659 - RNA, 19 nt, Human
gauuacaggcgcgacacug

SEQ ID NO: 694660 - RNA, 22 nt, Human
gccuuggccucccaaagugcug

SEQ ID NO: 694661 - RNA, 23 nt, Human
gcuggucucaaacuccuaaccuc

SEQ ID NO: 694662 - RNA, 23 nt, Human
ggcagaagugggguuugaacccg

SEQ ID NO: 694663 - RNA, 22 nt, Human
gggguuucaccauguuggccag

SEQ ID NO: 694664 - RNA, 18 nt, Human
ggguuucaccauguuggc

SEQ ID NO: 694665 - RNA, 22 nt, Human
ggguuucaccauguuggccagg

SEQ ID NO: 694666 - RNA, 23 nt, Human
guagagaugggguuucaccaugu

SEQ ID NO: 694667 - RNA, 18 nt, Human
guccacacaaacacagga

SEQ ID NO: 694668 - RNA, 19 nt, Human
uaaccucaagugauccguc

SEQ ID NO: 694669 - RNA, 20 nt, Human
uaauaaaaaagaaaauccuu

SEQ ID NO: 694670 - RNA, 18 nt, Human
uaauaagaauccagccug

SEQ ID NO: 694671 - RNA, 24 nt, Human
uagaaaaauagcugaauugcuccu

SEQ ID NO: 694672 - RNA, 22 nt, Human
uagagaugggguuucaccaugu

SEQ ID NO: 694673 - RNA, 24 nt, Human
uaguagagaugggguuucaccaug

SEQ ID NO: 694674 - RNA, 26 nt, Human
uaguagagaugggguuucaccauguu

SEQ ID NO: 694675 - RNA, 22 nt, Human
uauuaauaaaaaagaaaauccu

SEQ ID NO: 694676 - RNA, 18 nt, Human
ucacagauaacaauaagc

SEQ ID NO: 694677 - RNA, 23 nt, Human
ucagguagauggccaaagcugau

SEQ ID NO: 694678 - RNA, 26 nt, Human
uccacacaaacacaggaaacaaagcu

SEQ ID NO: 694679 - RNA, 24 nt, Human
ucccaaagugcugggauuacaggc

SEQ ID NO: 694680 - RNA, 20 nt, Human
ugacaaaauucaacaugaug

SEQ ID NO: 694681 - RNA, 19 nt, Human
ugaugguggaguccacaca

SEQ ID NO: 694682 - RNA, 24 nt, Human
ugcauauuaauaaaaaagaaaauc

SEQ ID NO: 694683 - RNA, 22 nt, Human
ugcugggauuacaggcgcgaca

SEQ ID NO: 694684 - RNA, 24 nt, Human
uggccaggcuggucucaaacuccu

SEQ ID NO: 694685 - RNA, 18 nt, Human
ugggauuacaggcgcgac

SEQ ID NO: 694686 - RNA, 19 nt, Human
ugggauuacaggcgcgaca

SEQ ID NO: 694687 - RNA, 20 nt, Human
ugggauuacaggcgcgacac

SEQ ID NO: 694688 - RNA, 20 nt, Human
ugggauuacaggcgcgacac

SEQ ID NO: 694689 - RNA, 22 nt, Human
ugggauuacaggcgcgacacug

SEQ ID NO: 694690 - RNA, 23 nt, Human
ugggauuacaggcgcgacacugu

SEQ ID NO: 694691 - RNA, 24 nt, Human
ugggguuucaccauguuggccagg

SEQ ID NO: 694692 - RNA, 20 nt, Human
ugucagugauagagaguacc

SEQ ID NO: 694693 - RNA, 21 nt, Human
uuaaacagaagaaaaugaacc

SEQ ID NO: 694694 - RNA, 22 nt, Human
uuaaagcugaaugacucauuca

SEQ ID NO: 694695 - RNA, 18 nt, Human
uuaguagagaugggguuu

SEQ ID NO: 694696 - RNA, 22 nt, Human
uuaguagagaugggguuucacc

SEQ ID NO: 694697 - RNA, 24 nt, Human
uuaguagagaugggguuucaccau

SEQ ID NO: 694698 - RNA, 19 nt, Human
uuaucacagauaacaauaa

SEQ ID NO: 694699 - RNA, 22 nt, Human
uucuaauuccaaaaaucagacu

SEQ ID NO: 694700 - RNA, 21 nt, Human
uucuucuauaccacacaccaa

SEQ ID NO: 694701 - RNA, 18 nt, Human
uugagccaucucuguaua

SEQ ID NO: 694702 - RNA, 24 nt, Human
uuuaaacagaagaaaaugaaccuu

SEQ ID NO: 694703 - RNA, 19 nt, Human
uuucaaguuuugugucuuu

SEQ ID NO: 694704 - RNA, 24 nt, Human
uuucaccauguuggccaggcuggu

SEQ ID NO: 694705 - RNA, 24 nt, Human
uuuuuaguagagaugggguuucac

SEQ ID NO: 694706 - RNA, 23 nt, Human
uuuuuuaguagagaugggguuuc

SEQ ID NO: 694707 - RNA, 21 nt, Human
aaaacagauaaauagaaaccc

SEQ ID NO: 694708 - RNA, 20 nt, Human
aaaagacaaccuauccagca

SEQ ID NO: 694709 - RNA, 23 nt, Human
aaacagauaaauagaaacccugg

SEQ ID NO: 694710 - RNA, 20 nt, Human
aaacauaaucaucaugugac

SEQ ID NO: 694711 - RNA, 24 nt, Human
aacauaaucaucaugugacugaca

SEQ ID NO: 694712 - RNA, 21 nt, Human
aauaaacagucuucuugggua

SEQ ID NO: 694713 - RNA, 22 nt, Human
aauaacaagugcauggaaagaa

SEQ ID NO: 694714 - RNA, 23 nt, Human
aauuacuuuuuaaaaauccuuuu

SEQ ID NO: 694715 - RNA, 21 nt, Human
acaaaagacaaccuauccagc

SEQ ID NO: 694716 - RNA, 21 nt, Human
acaaucucaccacagcaugaa

SEQ ID NO: 694717 - RNA, 20 nt, Human
acacuggucuggucucauca

SEQ ID NO: 694718 - RNA, 22 nt, Human
acagaauucucccugaaaucag

SEQ ID NO: 694719 - RNA, 18 nt, Human
aucauuguaaaaagggca

SEQ ID NO: 694720 - RNA, 20 nt, Human
auuucaucccugagaaguga

SEQ ID NO: 694721 - RNA, 23 nt, Human
caaaaacauaaucaucaugugac

SEQ ID NO: 694722 - RNA, 19 nt, Human
caaaagacaaccuauccag

SEQ ID NO: 694723 - RNA, 21 nt, Human
caaaauaauuaaccaaggagc

SEQ ID NO: 694724 - RNA, 25 nt, Human
caaggaacuucaaaacuuugaaaaa

SEQ ID NO: 694725 - RNA, 18 nt, Human
cacacuccacaaugugcu

SEQ ID NO: 694726 - RNA, 23 nt, Human
caccaagaaauagaaauguaaug

SEQ ID NO: 694727 - RNA, 20 nt, Human
caucaugugacugacagaau

SEQ ID NO: 694728 - RNA, 23 nt, Human
ccgaaguccaagcgauuucucuc

SEQ ID NO: 694729 - RNA, 20 nt, Human
ccuauugacaaacucaauga

SEQ ID NO: 694730 - RNA, 23 nt, Human
cguccgaggccgccccgaagucc

SEQ ID NO: 694731 - RNA, 21 nt, Human
cguggcgccuccacggccucg

SEQ ID NO: 694732 - RNA, 21 nt, Human
cuacaagugcaacauuaaaaa

SEQ ID NO: 694733 - RNA, 24 nt, Human
cuccaccaagaaauagaaauguaa

SEQ ID NO: 694734 - RNA, 20 nt, Human
gaaagaauuguuaaacaaaa

SEQ ID NO: 694735 - RNA, 24 nt, Human
gccaagcuaagauauaaauauucc

SEQ ID NO: 694736 - RNA, 22 nt, Human
uaaaaaaaaaaacagauaaaua

SEQ ID NO: 694737 - RNA, 21 nt, Human
uaaaaaaagagaagcaacagu

SEQ ID NO: 694738 - RNA, 24 nt, Human
uaaaacuguauuaugagauaggca

SEQ ID NO: 694739 - RNA, 24 nt, Human
uaaaugcuucacaauaaacagucu

SEQ ID NO: 694740 - RNA, 18 nt, Human
uacuauuaacacugagca

SEQ ID NO: 694741 - RNA, 19 nt, Human
uagaaaaauaucuaaaaaa

SEQ ID NO: 694742 - RNA, 23 nt, Human
uaucuaaaaaaagagaagcaaca

SEQ ID NO: 694743 - RNA, 19 nt, Human
ucacacuccacaaugugcu

SEQ ID NO: 694744 - RNA, 24 nt, Human
uccaagcgauuucucucccgccgc

SEQ ID NO: 694745 - RNA, 22 nt, Human
ucccugagaagugagagauaga

SEQ ID NO: 694746 - RNA, 19 nt, Human
uccucuucugagucuccau

SEQ ID NO: 694747 - RNA, 19 nt, Human
uccuggagaguuacugccc

SEQ ID NO: 694748 - RNA, 18 nt, Human
ucugacaaugaaaaucug

SEQ ID NO: 694749 - RNA, 24 nt, Human
ucuugcacccuuuuaacaaucuca

SEQ ID NO: 694750 - RNA, 24 nt, Human
ugaaaaagaauuucaucccugaga

SEQ ID NO: 694751 - RNA, 20 nt, Human
ugacugacagaauucucccu

SEQ ID NO: 694752 - RNA, 25 nt, Human
ugacugacagaauucucccugaaau

SEQ ID NO: 694753 - RNA, 23 nt, Human
ugagacauaaaaacaaaagacaa

SEQ ID NO: 694754 - RNA, 21 nt, Human
ugagauaggcaaacaaucuca

SEQ ID NO: 694755 - RNA, 23 nt, Human
ugcaaggaacuucaaaacuuuga

SEQ ID NO: 694756 - RNA, 21 nt, Human
ugccauucuacaccuuuaaaa

SEQ ID NO: 694757 - RNA, 24 nt, Human
uuaaaaauccuuuuaauuuuaucu

SEQ ID NO: 694758 - RNA, 25 nt, Human
uuccaguccuggagaguuacugccu

SEQ ID NO: 694759 - RNA, 24 nt, Human
uucuccuauaaacaaagaugccau

SEQ ID NO: 694760 - RNA, 27 nt, Human
uucuccuauaaacaaagaugccauucu

SEQ ID NO: 694761 - RNA, 24 nt, Human
uucucucccgccgccgcaagggac

SEQ ID NO: 694762 - RNA, 19 nt, Human
uugugggcuaauauuuacg

SEQ ID NO: 694763 - RNA, 22 nt, Human
uuuaaaucaucauuguaaaaag

SEQ ID NO: 694764 - RNA, 21 nt, Human
uuuuaugcagaaagguugaaa

SEQ ID NO: 694765 - RNA, 24 nt, Human
uuuucugacaaugaaaaucuguag

SEQ ID NO: 694766 - RNA, 24 nt, Human
aaagugcugggauuacaggcauga

SEQ ID NO: 694767 - RNA, 28 nt, Human
aacaaaaauggaaaacagaaccacacaa

SEQ ID NO: 694768 - RNA, 21 nt, Human
aacucgcggcacuacaaccuu

SEQ ID NO: 694769 - RNA, 22 nt, Human
aagaggagcucaacucgcggca

SEQ ID NO: 694770 - RNA, 24 nt, Human
aagugaucugcccgccuuggccuc

SEQ ID NO: 694771 - RNA, 19 nt, Human
aagugcugggauuacaggc

SEQ ID NO: 694772 - RNA, 21 nt, Human
aagugcugggauuacaggcau

SEQ ID NO: 694773 - RNA, 18 nt, Human
acaggguuucaccauguu

SEQ ID NO: 694774 - RNA, 21 nt, Human
acaggguuucaccauguuggc

SEQ ID NO: 694775 - RNA, 24 nt, Human
acaggguuucaccauguuggccag

SEQ ID NO: 694776 - RNA, 18 nt, Human
accauguuggccaggcug

SEQ ID NO: 694777 - RNA, 19 nt, Human
acccaggcuggagugcagu

SEQ ID NO: 694778 - RNA, 18 nt, Human
accuucccgcccccgcug

SEQ ID NO: 694779 - RNA, 22 nt, Human
acucacugucacccaggcugga

SEQ ID NO: 694780 - RNA, 24 nt, Human
acucacugucacccaggcuggagu

SEQ ID NO: 694781 - RNA, 25 nt, Human
aggcuggagugcagugacaccgucu

SEQ ID NO: 694782 - RNA, 23 nt, Human
aguagcugggauuacaggcgugu

SEQ ID NO: 694783 - RNA, 24 nt, Human
agugcagugacaccgucucagcuc

SEQ ID NO: 694784 - RNA, 18 nt, Human
agugcugggauuacaggc

SEQ ID NO: 694785 - RNA, 22 nt, Human
aguggcaauuggucagcacuuc

SEQ ID NO: 694786 - RNA, 19 nt, Human
aguuauaaguccagaaaga

SEQ ID NO: 694787 - RNA, 19 nt, Human
auuacaggcgugugccacc

SEQ ID NO: 694788 - RNA, 21 nt, Human
caaaaaauaucaaaguucacc

SEQ ID NO: 694789 - RNA, 24 nt, Human
caaagugcugggauuacaggcaug

SEQ ID NO: 694790 - RNA, 22 nt, Human
caagcgauucuccugccucagc

SEQ ID NO: 694791 - RNA, 24 nt, Human
caaucaccugggacccgaggacac

SEQ ID NO: 694792 - RNA, 23 nt, Human
cacacaaacucaucauuuaugug

SEQ ID NO: 694793 - RNA, 25 nt, Human
cacacaaacucaucauuuauguggu

SEQ ID NO: 694794 - RNA, 21 nt, Human
caccauguuggccaggcuggu

SEQ ID NO: 694795 - RNA, 24 nt, Human
caccauguuggccaggcuggucuc

SEQ ID NO: 694796 - RNA, 27 nt, Human
caccauguuggccaggcuggucucaaa

SEQ ID NO: 694797 - RNA, 20 nt, Human
caccugggacccgaggacac

SEQ ID NO: 694798 - RNA, 19 nt, Human
cacuacaaccuucccgccc

SEQ ID NO: 694799 - RNA, 21 nt, Human
cacugcaaccccugccuccca

SEQ ID NO: 694800 - RNA, 19 nt, Human
cagcacuucacaaucaccu

SEQ ID NO: 694801 - RNA, 20 nt, Human
cagccuccugaguagcuggg

SEQ ID NO: 694802 - RNA, 25 nt, Human
cagcuuccacagcucucaucauccu

SEQ ID NO: 694803 - RNA, 24 nt, Human
caggguuucaccauguuggccagg

SEQ ID NO: 694804 - RNA, 24 nt, Human
cauguuggccaggcuggucucaaa

SEQ ID NO: 694805 - RNA, 23 nt, Human
ccaaagugcugggauuacaggca

SEQ ID NO: 694806 - RNA, 24 nt, Human
ccaaagugcugggauuacaggcau

SEQ ID NO: 694807 - RNA, 24 nt, Human
cccaaagugcugggauuacaggca

SEQ ID NO: 694808 - RNA, 20 nt, Human
cccagguucaagcgauucuc

SEQ ID NO: 694809 - RNA, 23 nt, Human
cccagguucaagcgauucuccug

SEQ ID NO: 694810 - RNA, 22 nt, Human
cccgccuuggccucccaaagug

SEQ ID NO: 694811 - RNA, 20 nt, Human
ccgcccccgcugcgcuuccc

SEQ ID NO: 694812 - RNA, 24 nt, Human
ccucccagguucaagcgauucucc

SEQ ID NO: 694813 - RNA, 23 nt, Human
ccugaguagcugggauuacaggc

SEQ ID NO: 694814 - RNA, 23 nt, Human
ccugaguagcugggauuacaggc

SEQ ID NO: 694815 - RNA, 22 nt, Human
ccugaucucaagugaucugccc

SEQ ID NO: 694816 - RNA, 22 nt, Human
ccugggacccgaggacaccggg

SEQ ID NO: 694817 - RNA, 18 nt, Human
cgaggacaccgggaccgc

SEQ ID NO: 694818 - RNA, 24 nt, Human
cggcacuacaaccuucccgccccc

SEQ ID NO: 694819 - RNA, 24 nt, Human
cgugugccaccacacauggcuaau

SEQ ID NO: 694820 - RNA, 20 nt, Human
cucaagugaucugcccgccu

SEQ ID NO: 694821 - RNA, 24 nt, Human
cucacugcaaccccugccucccag

SEQ ID NO: 694822 - RNA, 21 nt, Human
cucacugucacccaggcugga

SEQ ID NO: 694823 - RNA, 23 nt, Human
cucagccuccugaguagcuggga

SEQ ID NO: 694824 - RNA, 22 nt, Human
cuccugccucagccuccugagu

SEQ ID NO: 694825 - RNA, 24 nt, Human
cuccuuacaaucgcugcucuuaaa

SEQ ID NO: 694826 - RNA, 22 nt, Human
cugaguagcugggauuacaggc

SEQ ID NO: 694827 - RNA, 24 nt, Human
cugaguagcugggauuacaggcgu

SEQ ID NO: 694828 - RNA, 21 nt, Human
cugcaaccccugccucccagg

SEQ ID NO: 694829 - RNA, 23 nt, Human
cugcaaccccugccucccagguu

SEQ ID NO: 694830 - RNA, 24 nt, Human
cugcaaccccugccucccagguuc

SEQ ID NO: 694831 - RNA, 23 nt, Human
cugccucagccuccugaguagcu

SEQ ID NO: 694832 - RNA, 19 nt, Human
cugcucuuaaagggggcgc

SEQ ID NO: 694833 - RNA, 19 nt, Human
cuucccgcccccgcugcgc

SEQ ID NO: 694834 - RNA, 20 nt, Human
cuugaaaaucuacuguggac

SEQ ID NO: 694835 - RNA, 25 nt, Human
cuuucagcuuucacuuacacauucc

SEQ ID NO: 694836 - RNA, 24 nt, Human
cuuuuaguagagacaggguuucac

SEQ ID NO: 694837 - RNA, 26 nt, Human
gaacaaaaauggaaaacagaaccaca

SEQ ID NO: 694838 - RNA, 20 nt, Human
gaguagcugggauuacaggc

SEQ ID NO: 694839 - RNA, 25 nt, Human
gaguagcugggauuacaggcgugug

SEQ ID NO: 694840 - RNA, 18 nt, Human
gauuacaggcaugaggca

SEQ ID NO: 694841 - RNA, 20 nt, Human
gauuacaggcaugaggcacc

SEQ ID NO: 694842 - RNA, 18 nt, Human
gauuacaggcgugugcca

SEQ ID NO: 694843 - RNA, 21 nt, Human
gauucuccugccucagccucc

SEQ ID NO: 694844 - RNA, 20 nt, Human
gccucagccuccugaguagc

SEQ ID NO: 694845 - RNA, 22 nt, Human
gccuuggccucccaaagugcug

SEQ ID NO: 694846 - RNA, 24 nt, Human
gcgauucuccugccucagccuccu

SEQ ID NO: 694847 - RNA, 20 nt, Human
gcuggagugcagugacaccg

SEQ ID NO: 694848 - RNA, 24 nt, Human
ggauuacaggcaugaggcaccgug

SEQ ID NO: 694849 - RNA, 24 nt, Human
ggcuggucucaaacuccugaucuc

SEQ ID NO: 694850 - RNA, 22 nt, Human
ggguuucaccauguuggccagg

SEQ ID NO: 694851 - RNA, 18 nt, Human
guagcugggauuacaggc

SEQ ID NO: 694852 - RNA, 23 nt, Human
gugugccaccacacauggcuaau

SEQ ID NO: 694853 - RNA, 22 nt, Human
uaaaagcagccuuguuucuuua

SEQ ID NO: 694854 - RNA, 22 nt, Human
uaaacagcaaauauggaugcaa

SEQ ID NO: 694855 - RNA, 18 nt, Human
uaaacgcaaaagguauac

SEQ ID NO: 694856 - RNA, 24 nt, Human
uaauuuuuuauacuuuuaguagag

SEQ ID NO: 694857 - RNA, 24 nt, Human
uacaggcaugaggcaccgugccca

SEQ ID NO: 694858 - RNA, 22 nt, Human
uagagacaggguuucaccaugu

SEQ ID NO: 694859 - RNA, 24 nt, Human
uaguagagacaggguuucaccaug

SEQ ID NO: 694860 - RNA, 26 nt, Human
uaguagagacaggguuucaccauguu

SEQ ID NO: 694861 - RNA, 21 nt, Human
uauaaaagaugguuaagacug

SEQ ID NO: 694862 - RNA, 20 nt, Human
uauuacaaagucacuuuucc

SEQ ID NO: 694863 - RNA, 24 nt, Human
ucacccaggcuggagugcagugac

SEQ ID NO: 694864 - RNA, 18 nt, Human
ucacugcaaccccugccu

SEQ ID NO: 694865 - RNA, 19 nt, Human
ucacugcaaccccugccuc

SEQ ID NO: 694866 - RNA, 24 nt, Human
ucacugcaaccccugccucccagg

SEQ ID NO: 694867 - RNA, 23 nt, Human
ucacugucacccaggcuggagug

SEQ ID NO: 694868 - RNA, 20 nt, Human
ucagccuccugaguagcugg

SEQ ID NO: 694869 - RNA, 26 nt, Human
ucagcucacugcaaccccugccuccc

SEQ ID NO: 694870 - RNA, 24 nt, Human
ucccaaagugcugggauuacaggc

SEQ ID NO: 694871 - RNA, 21 nt, Human
ucccagguucaagcgauucuc

SEQ ID NO: 694872 - RNA, 24 nt, Human
ucccagguucaagcgauucuccug

SEQ ID NO: 694873 - RNA, 24 nt, Human
uccugaguagcugggauuacaggc

SEQ ID NO: 694874 - RNA, 22 nt, Human
uccuuggacgauacagcuucca

SEQ ID NO: 694875 - RNA, 24 nt, Human
uccuuggacgauacagcuuccaca

SEQ ID NO: 694876 - RNA, 24 nt, Human
ugacaccgucucagcucacugcaa

SEQ ID NO: 694877 - RNA, 20 nt, Human
ugacuauaaacgcaaaaggu

SEQ ID NO: 694878 - RNA, 20 nt, Human
ugauaguagcuuuggcauuu

SEQ ID NO: 694879 - RNA, 18 nt, Human
ugaucucaagugaucugc

SEQ ID NO: 694880 - RNA, 24 nt, Human
ugaucucaagugaucugcccgccu

SEQ ID NO: 694881 - RNA, 24 nt, Human
ugccucagccuccugaguagcugg

SEQ ID NO: 694882 - RNA, 24 nt, Human
ugcugggauuacaggcaugaggca

SEQ ID NO: 694883 - RNA, 20 nt, Human
uggaaaacagaaccacacaa

SEQ ID NO: 694884 - RNA, 23 nt, Human
uggagugcagugacaccgucuca

SEQ ID NO: 694885 - RNA, 24 nt, Human
uggccaggcuggucucaaacuccu

SEQ ID NO: 694886 - RNA, 18 nt, Human
ugggauuacaggcaugag

SEQ ID NO: 694887 - RNA, 18 nt, Human
ugggauuacaggcaugag

SEQ ID NO: 694888 - RNA, 19 nt, Human
ugggauuacaggcaugagg

SEQ ID NO: 694889 - RNA, 21 nt, Human
ugggauuacaggcaugaggca

SEQ ID NO: 694890 - RNA, 22 nt, Human
ugggauuacaggcaugaggcac

SEQ ID NO: 694891 - RNA, 23 nt, Human
ugggauuacaggcaugaggcacc

SEQ ID NO: 694892 - RNA, 23 nt, Human
ugggauuacaggcaugaggcacc

SEQ ID NO: 694893 - RNA, 24 nt, Human
ugggauuacaggcaugaggcaccg

SEQ ID NO: 694894 - RNA, 18 nt, Human
ugggauuacaggcgugug

SEQ ID NO: 694895 - RNA, 19 nt, Human
ugggauuacaggcgugugc

SEQ ID NO: 694896 - RNA, 21 nt, Human
ugggauuacaggcgugugcca

SEQ ID NO: 694897 - RNA, 22 nt, Human
ugggauuacaggcgugugccac

SEQ ID NO: 694898 - RNA, 24 nt, Human
ugggauuacaggcgugugccacca

SEQ ID NO: 694899 - RNA, 21 nt, Human
ugucacccaggcuggagugca

SEQ ID NO: 694900 - RNA, 24 nt, Human
uuaaagugaaaaagggggaaguag

SEQ ID NO: 694901 - RNA, 20 nt, Human
uuacaggcaugaggcaccgu

SEQ ID NO: 694902 - RNA, 24 nt, Human
uuaguagagacaggguuucaccau

SEQ ID NO: 694903 - RNA, 25 nt, Human
uuaguucauuuuuuaaaagcagccu

SEQ ID NO: 694904 - RNA, 21 nt, Human
uucaagcgauucuccugccuc

SEQ ID NO: 694905 - RNA, 23 nt, Human
uucaagcgauucuccugccucag

SEQ ID NO: 694906 - RNA, 24 nt, Human
uucaagcgauucuccugccucagc

SEQ ID NO: 694907 - RNA, 22 nt, Human
uucacuuacacauuccuuucuu

SEQ ID NO: 694908 - RNA, 23 nt, Human
uucuugagguuuguuuuaaagug

SEQ ID NO: 694909 - RNA, 24 nt, Human
uuucaccauguuggccaggcuggu

SEQ ID NO: 694910 - RNA, 21 nt, Human
uuuuuauacuuuuaguagaga

SEQ ID NO: 694911 - RNA, 24 nt, Human
uuuuuuauacuuuuaguagagaca

SEQ ID NO: 694912 - RNA, 19 nt, Human
agauaggaggcugaagggg

SEQ ID NO: 694913 - RNA, 26 nt, Human
cagcaguccuccagccucagccuccc

SEQ ID NO: 694914 - RNA, 23 nt, Human
caggugccgaggcaagagaccga

SEQ ID NO: 694915 - RNA, 26 nt, Human
caggugccgaggcaagagaccgaggg

SEQ ID NO: 694916 - RNA, 22 nt, Human
ccaccguggucuagcuguagcg

SEQ ID NO: 694917 - RNA, 18 nt, Human
ccagaagacaagagugcg

SEQ ID NO: 694918 - RNA, 26 nt, Human
ccuccagccucagccucccaaagugc

SEQ ID NO: 694919 - RNA, 31 nt, Human
ccuggccuccagcaguccuccagccucagcc

SEQ ID NO: 694920 - RNA, 22 nt, Human
cgaggcaagagaccgagggcac

SEQ ID NO: 694921 - RNA, 22 nt, Human
cgcucuacaaucauaaccuagg

SEQ ID NO: 694922 - RNA, 19 nt, Human
cuccagcaguccuccagcc

SEQ ID NO: 694923 - RNA, 25 nt, Human
cuccagccucagccucccaaagugc

SEQ ID NO: 694924 - RNA, 21 nt, Human
cugguauugaacuccuggccu

SEQ ID NO: 694925 - RNA, 21 nt, Human
gaggcaagagaccgagggcac

SEQ ID NO: 694926 - RNA, 23 nt, Human
gccuccagcaguccuccagccuc

SEQ ID NO: 694927 - RNA, 22 nt, Human
gcugguauugaacuccuggccu

SEQ ID NO: 694928 - RNA, 23 nt, Human
gcugguauugaacuccuggccuc

SEQ ID NO: 694929 - RNA, 24 nt, Human
ggcugguauugaacuccuggccuc

SEQ ID NO: 694930 - RNA, 24 nt, Human
gggggucucccuauguugcccagg

SEQ ID NO: 694931 - RNA, 22 nt, Human
gggucucccuauguugcccagg

SEQ ID NO: 694932 - RNA, 19 nt, Human
gguauugaacuccuggccu

SEQ ID NO: 694933 - RNA, 18 nt, Human
uaaccuaggaaacaccag

SEQ ID NO: 694934 - RNA, 23 nt, Human
uauguugcccaggcugguauuga

SEQ ID NO: 694935 - RNA, 24 nt, Human
uauguugcccaggcugguauugaa

SEQ ID NO: 694936 - RNA, 21 nt, Human
ucagccucccaaagugcacuu

SEQ ID NO: 694937 - RNA, 24 nt, Human
ucagccucccaaagugcacuuggg

SEQ ID NO: 694938 - RNA, 19 nt, Human
ucccaaagugcacuuggug

SEQ ID NO: 694939 - RNA, 19 nt, Human
uccuccagccucagccucc

SEQ ID NO: 694940 - RNA, 21 nt, Human
ucuacaaucauaaccuaggaa

SEQ ID NO: 694941 - RNA, 23 nt, Human
ucucccuauguugcccaggcugg

SEQ ID NO: 694942 - RNA, 24 nt, Human
ucucccuauguugcccaggcuggu

SEQ ID NO: 694943 - RNA, 24 nt, Human
ugaacuccuggccuccagcagucc

SEQ ID NO: 694944 - RNA, 19 nt, Human
ugcacuugguggauguggg

SEQ ID NO: 694945 - RNA, 24 nt, Human
ugcccaggcugguauugaacuccu

SEQ ID NO: 694946 - RNA, 19 nt, Human
ugggaagacaccuguugcc

SEQ ID NO: 694947 - RNA, 23 nt, Human
ugugggcagcaagccacccaggu

SEQ ID NO: 694948 - RNA, 18 nt, Human
aaagcgccuccaccucuc

SEQ ID NO: 694949 - RNA, 24 nt, Human
aagccuauuucccccacuuagaau

SEQ ID NO: 694950 - RNA, 24 nt, Human
aauuucgcaaaguggauccugcca

SEQ ID NO: 694951 - RNA, 18 nt, Human
acacccggaagggugaac

SEQ ID NO: 694952 - RNA, 23 nt, Human
acagccccgcaccgcccucgcgc

SEQ ID NO: 694953 - RNA, 24 nt, Human
acaguccacaauuucgcaaagugg

SEQ ID NO: 694954 - RNA, 22 nt, Human
auuauucauuaaaauccguuaa

SEQ ID NO: 694955 - RNA, 22 nt, Human
caaaguggauccugccagcaug

SEQ ID NO: 694956 - RNA, 20 nt, Human
caccgcccucgcgcucucac

SEQ ID NO: 694957 - RNA, 18 nt, Human
ccaggagggaggggcaca

SEQ ID NO: 694958 - RNA, 21 nt, Human
ccccacuuagaaucacagucc

SEQ ID NO: 694959 - RNA, 22 nt, Human
cccccacuuagaaucacagucc

SEQ ID NO: 694960 - RNA, 22 nt, Human
cccgcaccgcccucgcgcucuc

SEQ ID NO: 694961 - RNA, 24 nt, Human
cucaccuuucaaagcgccuccacc

SEQ ID NO: 694962 - RNA, 19 nt, Human
guggauccugccagcaugg

SEQ ID NO: 694963 - RNA, 20 nt, Human
guggauccugccagcauggu

SEQ ID NO: 694964 - RNA, 24 nt, Human
uagaaucacaguccaacaguccac

SEQ ID NO: 694965 - RNA, 20 nt, Human
uucaaagcgccuccaccucc

SEQ ID NO: 694966 - RNA, 22 nt, Human
aaaaaagaaaaagauaaauggg

SEQ ID NO: 694967 - RNA, 23 nt, Human
aaaaaagaaaaagauaaaugggc

SEQ ID NO: 694968 - RNA, 24 nt, Human
aaaagauaaaugggcacauauaua

SEQ ID NO: 694969 - RNA, 20 nt, Human
aaaauacugucaauuucuac

SEQ ID NO: 694970 - RNA, 20 nt, Human
aagaaaaagauaaaugggca

SEQ ID NO: 694971 - RNA, 19 nt, Human
aauuucuacugggccaaca

SEQ ID NO: 694972 - RNA, 22 nt, Human
cacauguacuccuggcacagcc

SEQ ID NO: 694973 - RNA, 18 nt, Human
caccgcagauaauacugc

SEQ ID NO: 694974 - RNA, 19 nt, Human
cagucuuucccugcagagu

SEQ ID NO: 694975 - RNA, 21 nt, Human
cauguacuccuggcacagcca

SEQ ID NO: 694976 - RNA, 24 nt, Human
cccccaccgcagauaauacugcuu

SEQ ID NO: 694977 - RNA, 24 nt, Human
cuacugggccaacacaguagccac

SEQ ID NO: 694978 - RNA, 23 nt, Human
cuauaucuccuccccccaccgca

SEQ ID NO: 694979 - RNA, 19 nt, Human
gcaccugagccuccuugcc

SEQ ID NO: 694980 - RNA, 21 nt, Human
gccacaauaccagucucuggg

SEQ ID NO: 694981 - RNA, 21 nt, Human
gcuuccucggguggcccuugg

SEQ ID NO: 694982 - RNA, 24 nt, Human
uagccacugcaauguuucuccuuu

SEQ ID NO: 694983 - RNA, 20 nt, Human
uaugucaccuacuccacgug

SEQ ID NO: 694984 - RNA, 22 nt, Human
uccuugccagucuuucccugca

SEQ ID NO: 694985 - RNA, 23 nt, Human
uggcacagccacaauaccagucu

SEQ ID NO: 694986 - RNA, 18 nt, Human
uggcagggagcuggagug

SEQ ID NO: 694987 - RNA, 21 nt, Human
ugggccaacacaguagccacu

SEQ ID NO: 694988 - RNA, 21 nt, Human
augauggugagggcgaaggug

SEQ ID NO: 694989 - RNA, 19 nt, Human
cgaugauggugagggcgaa

SEQ ID NO: 694990 - RNA, 18 nt, Human
uuuuuuuuuuucaagggc

SEQ ID NO: 694991 - RNA, 20 nt, Human
uuuuuuuuuuucaagggcaa

SEQ ID NO: 694992 - RNA, 24 nt, Human
uuuuuuuuuuuuuuuuuuucaagg

SEQ ID NO: 694993 - RNA, 19 nt, Human
acagcucgaucagcaacag

SEQ ID NO: 694994 - RNA, 22 nt, Human
acucucugaauccgagggcaga

SEQ ID NO: 694995 - RNA, 25 nt, Human
agcaacagauacugggcauuugucu

SEQ ID NO: 694996 - RNA, 19 nt, Human
aucaauauccaauaaaagg

SEQ ID NO: 694997 - RNA, 21 nt, Human
cacccugcgcugcccucugcc

SEQ ID NO: 694998 - RNA, 23 nt, Human
cagauacugggcauuugucucuu

SEQ ID NO: 694999 - RNA, 19 nt, Human
cagcaacagauacugggca

SEQ ID NO: 695000 - RNA, 21 nt, Human
ccuccacggcuucaaacccau

SEQ ID NO: 695001 - RNA, 23 nt, Human
cugaugcugcaacuuugaucagc

SEQ ID NO: 695002 - RNA, 22 nt, Human
cugcgcugcccucugccuccac

SEQ ID NO: 695003 - RNA, 18 nt, Human
cuuccauauaaaaacugu

SEQ ID NO: 695004 - RNA, 24 nt, Human
ggcacccugcgcugcccucugccu

SEQ ID NO: 695005 - RNA, 21 nt, Human
uaaacauauuauaauggcaaa

SEQ ID NO: 695006 - RNA, 21 nt, Human
ucaauauccaauaaaaggcuu

SEQ ID NO: 695007 - RNA, 26 nt, Human
ucucugaauccgagggcagaaguugg

SEQ ID NO: 695008 - RNA, 25 nt, Human
ugaauaccgaaaaucaauauccaau

SEQ ID NO: 695009 - RNA, 23 nt, Human
ugaucagcucaugcaaccuuggu

SEQ ID NO: 695010 - RNA, 22 nt, Human
uuccccggcacccugcgcugcc

SEQ ID NO: 695011 - RNA, 18 nt, Human
uugaauguaauagccaga

SEQ ID NO: 695012 - RNA, 19 nt, Human
cacagcuggaggcaguggc

SEQ ID NO: 695013 - RNA, 20 nt, Human
cacagcuggaggcaguggcc

SEQ ID NO: 695014 - RNA, 22 nt, Human
aaaaauagcaugaagcuguggc

SEQ ID NO: 695015 - RNA, 20 nt, Human
aaaauagcaugaagcugugg

SEQ ID NO: 695016 - RNA, 24 nt, Human
aaagccccuuccuuuuagcacccu

SEQ ID NO: 695017 - RNA, 23 nt, Human
aagucaguucuggcacuuacugg

SEQ ID NO: 695018 - RNA, 21 nt, Human
acagcuguaaaacagggauac

SEQ ID NO: 695019 - RNA, 22 nt, Human
agccaaguggaauuuacuggga

SEQ ID NO: 695020 - RNA, 21 nt, Human
aucaagacagagagcuagguu

SEQ ID NO: 695021 - RNA, 26 nt, Human
augaaacaucuagcaaaaaguaagca

SEQ ID NO: 695022 - RNA, 21 nt, Human
caccaauggaaagagcaguag

SEQ ID NO: 695023 - RNA, 18 nt, Human
cagaaagguuccuaaaaa

SEQ ID NO: 695024 - RNA, 20 nt, Human
ccaccugcuacuucccuuuu

SEQ ID NO: 695025 - RNA, 21 nt, Human
cccuuuuuuuuuuuuuuuccc

SEQ ID NO: 695026 - RNA, 24 nt, Human
ccucugaaaccccagccaagugga

SEQ ID NO: 695027 - RNA, 20 nt, Human
ccugaaucaagacagagagc

SEQ ID NO: 695028 - RNA, 23 nt, Human
ccuuuuuuuuuuuuuuucccauu

SEQ ID NO: 695029 - RNA, 19 nt, Human
cuacuucccuuuuuuuuuu

SEQ ID NO: 695030 - RNA, 25 nt, Human
cucaaagccccuuccuuuuagcacc

SEQ ID NO: 695031 - RNA, 19 nt, Human
cugaaaccccagccaagug

SEQ ID NO: 695032 - RNA, 20 nt, Human
cugaaaccccagccaagugg

SEQ ID NO: 695033 - RNA, 18 nt, Human
cugggaacugggucacac

SEQ ID NO: 695034 - RNA, 19 nt, Human
gcugcauaggaccuuuaac

SEQ ID NO: 695035 - RNA, 27 nt, Human
uaaaaggaacaaaaaaauuuaugauag

SEQ ID NO: 695036 - RNA, 19 nt, Human
uaagcaggggucccugugc

SEQ ID NO: 695037 - RNA, 19 nt, Human
uacuucccuuuuuuuuuuu

SEQ ID NO: 695038 - RNA, 23 nt, Human
uaucccaucaucuuugccucuca

SEQ ID NO: 695039 - RNA, 18 nt, Human
ucccuuuuuuuuuuuuuu

SEQ ID NO: 695040 - RNA, 22 nt, Human
ucccuuuuuuuuuuuuuuuccc

SEQ ID NO: 695041 - RNA, 24 nt, Human
uccuucacuucacuuuccacagcu

SEQ ID NO: 695042 - RNA, 20 nt, Human
ugaguaaaaagccugcuugc

SEQ ID NO: 695043 - RNA, 24 nt, Human
ugcuugcucaccucugaaacccca

SEQ ID NO: 695044 - RNA, 26 nt, Human
ugcuugcucaccucugaaaccccagc

SEQ ID NO: 695045 - RNA, 20 nt, Human
uggcaacuguagaugugcag

SEQ ID NO: 695046 - RNA, 23 nt, Human
ugggcugccacugguuucagaaa

SEQ ID NO: 695047 - RNA, 23 nt, Human
uguaaaacagggauacgggauaa

SEQ ID NO: 695048 - RNA, 21 nt, Human
uuacaugugacugaugcugga

SEQ ID NO: 695049 - RNA, 21 nt, Human
uuaucuccaccugcuacuucc

SEQ ID NO: 695050 - RNA, 18 nt, Human
uuuccuaucaaucccuaa

SEQ ID NO: 695051 - RNA, 22 nt, Human
uuuuuuuuuuuuuuucccauuu

SEQ ID NO: 695052 - RNA, 24 nt, Human
aaaagcagguaaaggagaaggcca

SEQ ID NO: 695053 - RNA, 21 nt, Human
aacacacuucauccaaaaguc

SEQ ID NO: 695054 - RNA, 22 nt, Human
aacacacuucauccaaaagucu

SEQ ID NO: 695055 - RNA, 21 nt, Human
aacauauugacauuuuuuccc

SEQ ID NO: 695056 - RNA, 23 nt, Human
aaccaguacuggaaacuaaccuc

SEQ ID NO: 695057 - RNA, 21 nt, Human
aacuugacuggggcccuucug

SEQ ID NO: 695058 - RNA, 23 nt, Human
aagcagguaaaggagaaggccag

SEQ ID NO: 695059 - RNA, 24 nt, Human
aagcagguaaaggagaaggccagg

SEQ ID NO: 695060 - RNA, 22 nt, Human
aagugaucgugaucagcagaac

SEQ ID NO: 695061 - RNA, 23 nt, Human
aaucuuucaaaaucaucauuuaa

SEQ ID NO: 695062 - RNA, 22 nt, Human
aaugauaaggagcaggaagaaa

SEQ ID NO: 695063 - RNA, 18 nt, Human
acaagcaggaaaucugca

SEQ ID NO: 695064 - RNA, 24 nt, Human
acacagcuuucaaauaauaccucu

SEQ ID NO: 695065 - RNA, 23 nt, Human
acagcaaaagaccaagaaauaaa

SEQ ID NO: 695066 - RNA, 24 nt, Human
acagcaaaagaccaagaaauaaaa

SEQ ID NO: 695067 - RNA, 19 nt, Human
acauacacacauacaguau

SEQ ID NO: 695068 - RNA, 21 nt, Human
accaagaaaaccuccaucacg

SEQ ID NO: 695069 - RNA, 19 nt, Human
accaaugucagugacccca

SEQ ID NO: 695070 - RNA, 21 nt, Human
accacacucucuacacacaua

SEQ ID NO: 695071 - RNA, 18 nt, Human
accuuauccucuucccca

SEQ ID NO: 695072 - RNA, 18 nt, Human
acuaaugauuccuccaca

SEQ ID NO: 695073 - RNA, 24 nt, Human
acuagccauaccauggaguuacac

SEQ ID NO: 695074 - RNA, 21 nt, Human
agaaaagcagguaaaggagaa

SEQ ID NO: 695075 - RNA, 21 nt, Human
agaagacaauuaucacacuag

SEQ ID NO: 695076 - RNA, 20 nt, Human
agaaggccaggcacugugcc

SEQ ID NO: 695077 - RNA, 19 nt, Human
agacacugcaagcuacucc

SEQ ID NO: 695078 - RNA, 21 nt, Human
aggaaaucugcagcuccucug

SEQ ID NO: 695079 - RNA, 20 nt, Human
aggaagaaaagcagguaaag

SEQ ID NO: 695080 - RNA, 20 nt, Human
aggaagaaaagcagguaaag

SEQ ID NO: 695081 - RNA, 22 nt, Human
aggaagaaaagcagguaaagga

SEQ ID NO: 695082 - RNA, 22 nt, Human
aguuuccaacauauugacauuu

SEQ ID NO: 695083 - RNA, 22 nt, Human
auacacuaacacaauaccaaca

SEQ ID NO: 695084 - RNA, 23 nt, Human
auaugauuaagacaaaguacacc

SEQ ID NO: 695085 - RNA, 23 nt, Human
aucacacauaauuauucccaauu

SEQ ID NO: 695086 - RNA, 24 nt, Human
caaagcucaaugauaaggagcagg

SEQ ID NO: 695087 - RNA, 27 nt, Human
caagaaaaccuccaucacggagaaugc

SEQ ID NO: 695088 - RNA, 22 nt, Human
caagaaaaugucuacaaacuca

SEQ ID NO: 695089 - RNA, 23 nt, Human
caaugaacaucccuggcccucuc

SEQ ID NO: 695090 - RNA, 22 nt, Human
cacauacacacauacaguauaa

SEQ ID NO: 695091 - RNA, 24 nt, Human
caccacacucucuacacacauaca

SEQ ID NO: 695092 - RNA, 22 nt, Human
cacccuuaaaaucuucugcaua

SEQ ID NO: 695093 - RNA, 21 nt, Human
caggaaccaagaaaaccucca

SEQ ID NO: 695094 - RNA, 18 nt, Human
caggcacugugccaggug

SEQ ID NO: 695095 - RNA, 19 nt, Human
cauaacaccaucacacaua

SEQ ID NO: 695096 - RNA, 24 nt, Human
caucacggagaaugcauucugaua

SEQ ID NO: 695097 - RNA, 18 nt, Human
ccaaaacauuucagaaau

SEQ ID NO: 695098 - RNA, 19 nt, Human
cccaacacacuucauccaa

SEQ ID NO: 695099 - RNA, 19 nt, Human
ccuacuguggguugcugcu

SEQ ID NO: 695100 - RNA, 20 nt, Human
ccuggcccucucagucugac

SEQ ID NO: 695101 - RNA, 23 nt, Human
cucaaugauaaggagcaggaaga

SEQ ID NO: 695102 - RNA, 19 nt, Human
cuguggguugcugcucagg

SEQ ID NO: 695103 - RNA, 18 nt, Human
cuuuaagaaaaaaggucc

SEQ ID NO: 695104 - RNA, 22 nt, Human
cuuuaagccucaccacacucuc

SEQ ID NO: 695105 - RNA, 20 nt, Human
gagccaggaaccaagaaaaa

SEQ ID NO: 695106 - RNA, 22 nt, Human
guacuggauaaaauagucauau

SEQ ID NO: 695107 - RNA, 20 nt, Human
guaggacaauaaagugaucg

SEQ ID NO: 695108 - RNA, 21 nt, Human
gugaaacauacaaauacagaa

SEQ ID NO: 695109 - RNA, 22 nt, Human
guugcacagcuguauaaaaaaa

SEQ ID NO: 695110 - RNA, 18 nt, Human
guuuacauaacaccauca

SEQ ID NO: 695111 - RNA, 24 nt, Human
uaaaaaaauaggaauaugauuaag

SEQ ID NO: 695112 - RNA, 23 nt, Human
uaaaacucgcucagcccccuuaa

SEQ ID NO: 695113 - RNA, 19 nt, Human
uaaagacacugcaagcuac

SEQ ID NO: 695114 - RNA, 26 nt, Human
uaaagacacugcaagcuacuccaguc

SEQ ID NO: 695115 - RNA, 22 nt, Human
uaaucuccacaaugaacauccc

SEQ ID NO: 695116 - RNA, 23 nt, Human
uaaucuccacaaugaacaucccu

SEQ ID NO: 695117 - RNA, 21 nt, Human
uacaagcaggaaaucugcagc

SEQ ID NO: 695118 - RNA, 25 nt, Human
uacacacauacacacauacaguaua

SEQ ID NO: 695119 - RNA, 18 nt, Human
uacuagggaaacauuuac

SEQ ID NO: 695120 - RNA, 21 nt, Human
uagucauauuacuagggaaac

SEQ ID NO: 695121 - RNA, 24 nt, Human
uauuauagugaaacauacaaauac

SEQ ID NO: 695122 - RNA, 21 nt, Human
ucacuuacucagaacauuuaa

SEQ ID NO: 695123 - RNA, 22 nt, Human
ucagaacauuuaaucuccacaa

SEQ ID NO: 695124 - RNA, 23 nt, Human
ucagaagacaauuaucacacuag

SEQ ID NO: 695125 - RNA, 27 nt, Human
ucagugaccccacccuuaaaaucuucu

SEQ ID NO: 695126 - RNA, 24 nt, Human
ucauccaucauguauucugauccc

SEQ ID NO: 695127 - RNA, 24 nt, Human
uccaaacuucucuuuccucaggac

SEQ ID NO: 695128 - RNA, 23 nt, Human
uccacaaugaacaucccuggccc

SEQ ID NO: 695129 - RNA, 24 nt, Human
uccacaaugaacaucccuggcccu

SEQ ID NO: 695130 - RNA, 22 nt, Human
ucccagaagcaauaugguugca

SEQ ID NO: 695131 - RNA, 30 nt, Human
uccccaacacacuucauccaaaagucuguu

SEQ ID NO: 695132 - RNA, 22 nt, Human
ucccccgucaaaccccaguaag

SEQ ID NO: 695133 - RNA, 18 nt, Human
uccgugagagcguggcca

SEQ ID NO: 695134 - RNA, 22 nt, Human
ucuacacacauacacacauaca

SEQ ID NO: 695135 - RNA, 19 nt, Human
ucucaaugcacauuauccu

SEQ ID NO: 695136 - RNA, 18 nt, Human
ucuccacaaugaacaucc

SEQ ID NO: 695137 - RNA, 18 nt, Human
ugaaacagcccauuuucc

SEQ ID NO: 695138 - RNA, 23 nt, Human
ugacauuuuuucccagaagcaau

SEQ ID NO: 695139 - RNA, 25 nt, Human
ugcauucugauacaucaacuacugu

SEQ ID NO: 695140 - RNA, 21 nt, Human
ugcccaaaacauuucagaaau

SEQ ID NO: 695141 - RNA, 24 nt, Human
ugugccagguguuuacauaacacc

SEQ ID NO: 695142 - RNA, 23 nt, Human
uguuuacauaacaccaucacaca

SEQ ID NO: 695143 - RNA, 31 nt, Human
uuacauaacaccaucacacauaauuauuccc

SEQ ID NO: 695144 - RNA, 22 nt, Human
uuagguaucauacauaaaagcc

SEQ ID NO: 695145 - RNA, 25 nt, Human
uugacucuacucaaauuaacuauau

SEQ ID NO: 695146 - RNA, 20 nt, Human
uugcugcucaggaggaacga

SEQ ID NO: 695147 - RNA, 19 nt, Human
uuggcuuaaaaucugaguu

SEQ ID NO: 695148 - RNA, 18 nt, Human
uugguccauacacuaaca

SEQ ID NO: 695149 - RNA, 20 nt, Human
uugugcuucaacggcagcug

SEQ ID NO: 695150 - RNA, 20 nt, Human
uuuucuggucaaugcucuga

SEQ ID NO: 695151 - RNA, 24 nt, Human
uuuuucagaguuuuggcuaaaacu

SEQ ID NO: 695152 - RNA, 22 nt, Human
aagaacacacaagaaauauaua

SEQ ID NO: 695153 - RNA, 26 nt, Human
acacaagaaauauauaggauuucagu

SEQ ID NO: 695154 - RNA, 20 nt, Human
agagaagccagugcuggccg

SEQ ID NO: 695155 - RNA, 27 nt, Human
agagaagccagugcuggccggcgcaga

SEQ ID NO: 695156 - RNA, 21 nt, Human
caaauagaaaagaacacacaa

SEQ ID NO: 695157 - RNA, 21 nt, Human
gaaaagaacacacaagaaaua

SEQ ID NO: 695158 - RNA, 23 nt, Human
gauauggugaaauggagaugaug

SEQ ID NO: 695159 - RNA, 22 nt, Human
uaauaaaggauauaauucagca

SEQ ID NO: 695160 - RNA, 18 nt, Human
ucuggguucuucuccugg

SEQ ID NO: 695161 - RNA, 28 nt, Human
ugagcagaagcaagauguucuacauuca

SEQ ID NO: 695162 - RNA, 21 nt, Human
uuacaaauagaaaagaacaca

SEQ ID NO: 695163 - RNA, 22 nt, Human
uuuacaaauagaaaagaacaca

SEQ ID NO: 695164 - RNA, 21 nt, Human
uuuuuuuuuuuuuuuuuccgg

SEQ ID NO: 695165 - RNA, 28 nt, Human
uuuuuuuuuuuuuuuuuccggggaauua

SEQ ID NO: 695166 - RNA, 24 nt, Human
uuuuuuuuuuuuuuuuuuuccggg

SEQ ID NO: 695167 - RNA, 19 nt, Human
aaaacagugacauaaucug

SEQ ID NO: 695168 - RNA, 20 nt, Human
aacacuugguacagauacga

SEQ ID NO: 695169 - RNA, 20 nt, Human
aagaacaauccucagagauu

SEQ ID NO: 695170 - RNA, 19 nt, Human
aagaaucuauagcuuaaaa

SEQ ID NO: 695171 - RNA, 19 nt, Human
aagcaggagggaguuaugg

SEQ ID NO: 695172 - RNA, 25 nt, Human
aagccagucaugguaacaugauggc

SEQ ID NO: 695173 - RNA, 21 nt, Human
aagcugccuaguaaccacuua

SEQ ID NO: 695174 - RNA, 22 nt, Human
aaugggagaaaggcuggagaag

SEQ ID NO: 695175 - RNA, 18 nt, Human
aauguccaucauuucgcg

SEQ ID NO: 695176 - RNA, 21 nt, Human
acucugccauccacaaacaag

SEQ ID NO: 695177 - RNA, 24 nt, Human
acuuccucauggaccuccucauca

SEQ ID NO: 695178 - RNA, 22 nt, Human
agacaaggaguuagaaaucaag

SEQ ID NO: 695179 - RNA, 19 nt, Human
agaggcuacuuugaagguu

SEQ ID NO: 695180 - RNA, 18 nt, Human
agaucagacuuuggcaga

SEQ ID NO: 695181 - RNA, 20 nt, Human
agcaaaugagccugguugug

SEQ ID NO: 695182 - RNA, 18 nt, Human
aggagggaguuaugggua

SEQ ID NO: 695183 - RNA, 22 nt, Human
aggaguuagaaaucaagaguuc

SEQ ID NO: 695184 - RNA, 23 nt, Human
aggaguuagaaaucaagaguucu

SEQ ID NO: 695185 - RNA, 23 nt, Human
agggauauauuuuauaggcagag

SEQ ID NO: 695186 - RNA, 22 nt, Human
agguaguuuuggaaaugcuggg

SEQ ID NO: 695187 - RNA, 19 nt, Human
aguacugaccgaucaucau

SEQ ID NO: 695188 - RNA, 19 nt, Human
agugaggugguaauaaacu

SEQ ID NO: 695189 - RNA, 23 nt, Human
augggacuagguaguuuuggaaa

SEQ ID NO: 695190 - RNA, 18 nt, Human
cagugacauaaucugacu

SEQ ID NO: 695191 - RNA, 23 nt, Human
ccucauggaccuccucaucacuu

SEQ ID NO: 695192 - RNA, 18 nt, Human
cgggcggcggcgccgggc

SEQ ID NO: 695193 - RNA, 25 nt, Human
cucaacucugccauccacaaacaau

SEQ ID NO: 695194 - RNA, 24 nt, Human
cuggggaaaaaaaaaaagccuugu

SEQ ID NO: 695195 - RNA, 24 nt, Human
gacacgaauagugauaucacaaaa

SEQ ID NO: 695196 - RNA, 21 nt, Human
gaccgaucaucaucauccgga

SEQ ID NO: 695197 - RNA, 20 nt, Human
gagaagcaggauucagacaa

SEQ ID NO: 695198 - RNA, 22 nt, Human
gaugaagagugguaaggaaaaa

SEQ ID NO: 695199 - RNA, 21 nt, Human
gcagaguugacaggacuuaag

SEQ ID NO: 695200 - RNA, 20 nt, Human
gcuggggaaaaaaaaaaagc

SEQ ID NO: 695201 - RNA, 18 nt, Human
ggagaagcaggauucaga

SEQ ID NO: 695202 - RNA, 19 nt, Human
ggagcuaugaguaaauguu

SEQ ID NO: 695203 - RNA, 20 nt, Human
gggaagaaugcaaucagagg

SEQ ID NO: 695204 - RNA, 21 nt, Human
gggcggcggcgccgggcccgg

SEQ ID NO: 695205 - RNA, 22 nt, Human
uaauuaaaaaagaaaagaugau

SEQ ID NO: 695206 - RNA, 20 nt, Human
uacagauuagaaaaguagac

SEQ ID NO: 695207 - RNA, 24 nt, Human
uacuuugaagguuauugcaguagu

SEQ ID NO: 695208 - RNA, 22 nt, Human
ucacagcaguccguacagcaca

SEQ ID NO: 695209 - RNA, 19 nt, Human
ucacucagcgaacucugag

SEQ ID NO: 695210 - RNA, 21 nt, Human
ucauccggagagcauuagugc

SEQ ID NO: 695211 - RNA, 20 nt, Human
ucguguagggcuuuagaagg

SEQ ID NO: 695212 - RNA, 23 nt, Human
ucugacuuaauuaaaaaagaaaa

SEQ ID NO: 695213 - RNA, 21 nt, Human
ugaaaugcccuuuauacauuu

SEQ ID NO: 695214 - RNA, 21 nt, Human
ugacaggcugggacacuuccu

SEQ ID NO: 695215 - RNA, 20 nt, Human
ugagaugaaaugcuugaauu

SEQ ID NO: 695216 - RNA, 18 nt, Human
ugcgaaagaaaucacugc

SEQ ID NO: 695217 - RNA, 19 nt, Human
uggaacugucugcugauca

SEQ ID NO: 695218 - RNA, 24 nt, Human
uggagaagcaggauucagacaagg

SEQ ID NO: 695219 - RNA, 20 nt, Human
uggaguuguaaacucaaccc

SEQ ID NO: 695220 - RNA, 22 nt, Human
uggggaaaaaaaaaaagccuug

SEQ ID NO: 695221 - RNA, 22 nt, Human
ugguacagauacgauuuaaagc

SEQ ID NO: 695222 - RNA, 23 nt, Human
uguaaacucaacccuuaagaggu

SEQ ID NO: 695223 - RNA, 22 nt, Human
uguccuggacacgaauagugau

SEQ ID NO: 695224 - RNA, 22 nt, Human
uguuucaaccacucaacucugc

SEQ ID NO: 695225 - RNA, 24 nt, Human
uuacuuugaaaaguauacugaagu

SEQ ID NO: 695226 - RNA, 21 nt, Human
uugaaaaguauacugaaguga

SEQ ID NO: 695227 - RNA, 20 nt, Human
uuggacuuguucacuuccug

SEQ ID NO: 695228 - RNA, 19 nt, Human
uuucucauccucggcuugg

SEQ ID NO: 695229 - RNA, 23 nt, Human
uuugccaacacuugguacagaua

SEQ ID NO: 695230 - RNA, 22 nt, Human
uuuggcagauguuuuucacagc

SEQ ID NO: 695231 - RNA, 21 nt, Human
aaaaaaaaaaaaaauuagcug

SEQ ID NO: 695232 - RNA, 19 nt, Human
aaacaaacaccaacauuuc

SEQ ID NO: 695233 - RNA, 20 nt, Human
aaacaaacaccaacauuuca

SEQ ID NO: 695234 - RNA, 21 nt, Human
aaacagaaacaaacaccaaca

SEQ ID NO: 695235 - RNA, 22 nt, Human
aaacaugaaggacugccucuca

SEQ ID NO: 695236 - RNA, 19 nt, Human
aaagaaagagagaaagaga

SEQ ID NO: 695237 - RNA, 20 nt, Human
aaagcacccccuuccaucca

SEQ ID NO: 695238 - RNA, 19 nt, Human
aacaaguaucauacuuccu

SEQ ID NO: 695239 - RNA, 19 nt, Human
aacaucgugaaaccccauc

SEQ ID NO: 695240 - RNA, 20 nt, Human
aacaucgugaaaccccaucu

SEQ ID NO: 695241 - RNA, 21 nt, Human
aacaucgugaaaccccaucuc

SEQ ID NO: 695242 - RNA, 20 nt, Human
aacaugaaggacugccucuc

SEQ ID NO: 695243 - RNA, 19 nt, Human
aacauggugaaaccccauc

SEQ ID NO: 695244 - RNA, 20 nt, Human
aacauggugaaaccccaucu

SEQ ID NO: 695245 - RNA, 21 nt, Human
aacauggugaaaccccaucuc

SEQ ID NO: 695246 - RNA, 21 nt, Human
aacauggugaaaccccaucuc

SEQ ID NO: 695247 - RNA, 22 nt, Human
aacugugacacaccucuaaaca

SEQ ID NO: 695248 - RNA, 20 nt, Human
aagagaaaaagcguauaugc

SEQ ID NO: 695249 - RNA, 21 nt, Human
aagcacccccuuccauccaag

SEQ ID NO: 695250 - RNA, 18 nt, Human
aagccguggccugccucu

SEQ ID NO: 695251 - RNA, 23 nt, Human
aaucgcuugaacccaggaggagg

SEQ ID NO: 695252 - RNA, 19 nt, Human
aaugaaguccucaaggccu

SEQ ID NO: 695253 - RNA, 21 nt, Human
aaugaaguccucaaggccuuc

SEQ ID NO: 695254 - RNA, 21 nt, Human
aauucccaagucccagaggac

SEQ ID NO: 695255 - RNA, 24 nt, Human
aauugcuugaaucccagaggugga

SEQ ID NO: 695256 - RNA, 18 nt, Human
acacaccucuaaacaugc

SEQ ID NO: 695257 - RNA, 24 nt, Human
acagagcaagacuccaucucaaaa

SEQ ID NO: 695258 - RNA, 18 nt, Human
accccaucucuacuaaaa

SEQ ID NO: 695259 - RNA, 23 nt, Human
accccaucucuacuaaaaauaca

SEQ ID NO: 695260 - RNA, 23 nt, Human
acggcagcuuugcagcauggccu

SEQ ID NO: 695261 - RNA, 20 nt, Human
acucagccuggguggggggu

SEQ ID NO: 695262 - RNA, 24 nt, Human
acuccagcaugggggacagagcaa

SEQ ID NO: 695263 - RNA, 19 nt, Human
acucugcacucacccaucc

SEQ ID NO: 695264 - RNA, 18 nt, Human
acugcacuccagcauggg

SEQ ID NO: 695265 - RNA, 19 nt, Human
acugcacuccagccuuggg

SEQ ID NO: 695266 - RNA, 19 nt, Human
acugcacuccagccuuggg

SEQ ID NO: 695267 - RNA, 18 nt, Human
agaaauauguuugcccuu

SEQ ID NO: 695268 - RNA, 21 nt, Human
agacagggaacagugagagga

SEQ ID NO: 695269 - RNA, 21 nt, Human
agacgugcccuggccuguuuc

SEQ ID NO: 695270 - RNA, 28 nt, Human
agagagaaagagagacagagagagugac

SEQ ID NO: 695271 - RNA, 24 nt, Human
agagagugaccaagacagaccaca

SEQ ID NO: 695272 - RNA, 21 nt, Human
agagcacggccagccaggcug

SEQ ID NO: 695273 - RNA, 19 nt, Human
agaucacaaaaugaaagac

SEQ ID NO: 695274 - RNA, 21 nt, Human
agcaaauggaucacauccaag

SEQ ID NO: 695275 - RNA, 23 nt, Human
agccaggugugguggugggcgcc

SEQ ID NO: 695276 - RNA, 24 nt, Human
agccuggccaacaucgugaaaccc

SEQ ID NO: 695277 - RNA, 22 nt, Human
agccuggccaacauggugaaac

SEQ ID NO: 695278 - RNA, 24 nt, Human
agccuggccaacauggugaaaccc

SEQ ID NO: 695279 - RNA, 18 nt, Human
agcggccccugccaaugc

SEQ ID NO: 695280 - RNA, 24 nt, Human
agcuacucgagaggcugagguggg

SEQ ID NO: 695281 - RNA, 24 nt, Human
agcugggcaugguggcgcauagcu

SEQ ID NO: 695282 - RNA, 19 nt, Human
agcuguucgccucugccuc

SEQ ID NO: 695283 - RNA, 18 nt, Human
aggaaucaggcaggucuc

SEQ ID NO: 695284 - RNA, 19 nt, Human
aggaggaggagguugcagc

SEQ ID NO: 695285 - RNA, 22 nt, Human
aggaggaggagguugcagcgag

SEQ ID NO: 695286 - RNA, 24 nt, Human
aggaggagguugcagcgagccgag

SEQ ID NO: 695287 - RNA, 21 nt, Human
aggcaggccacacaggucaga

SEQ ID NO: 695288 - RNA, 20 nt, Human
aggccgaggcggguggauca

SEQ ID NO: 695289 - RNA, 22 nt, Human
aggcgggcagaucacuugaagg

SEQ ID NO: 695290 - RNA, 24 nt, Human
aggcggguggaucaugaggucagg

SEQ ID NO: 695291 - RNA, 24 nt, Human
aggcugagguaggagaaucgcuug

SEQ ID NO: 695292 - RNA, 24 nt, Human
aggcugaggugggagaauugcuug

SEQ ID NO: 695293 - RNA, 23 nt, Human
agguaggagaaucgcuugaaccc

SEQ ID NO: 695294 - RNA, 24 nt, Human
agguggagguugcagugagccaag

SEQ ID NO: 695295 - RNA, 24 nt, Human
aggugugggaaggucacuuucacu

SEQ ID NO: 695296 - RNA, 24 nt, Human
aggugugguggugggcgccuguaa

SEQ ID NO: 695297 - RNA, 23 nt, Human
aguggcucacgccuguaauccca

SEQ ID NO: 695298 - RNA, 24 nt, Human
aucaugccacugcacuccagcaug

SEQ ID NO: 695299 - RNA, 25 nt, Human
auugcaccacugcacuccagccuug

SEQ ID NO: 695300 - RNA, 20 nt, Human
auuguuuccuguuguuaauu

SEQ ID NO: 695301 - RNA, 22 nt, Human
caaaacagaaacaaacaccaac

SEQ ID NO: 695302 - RNA, 25 nt, Human
caaaacagaaacaaacaccaacauu

SEQ ID NO: 695303 - RNA, 20 nt, Human
caaacaaguaucauacuucc

SEQ ID NO: 695304 - RNA, 24 nt, Human
caacacuuggggaggccgaggcgg

SEQ ID NO: 695305 - RNA, 24 nt, Human
caacauggugaaaccccaucucua

SEQ ID NO: 695306 - RNA, 19 nt, Human
caaccauuccgucaaacaa

SEQ ID NO: 695307 - RNA, 21 nt, Human
caagacuccaucucaaaaaaa

SEQ ID NO: 695308 - RNA, 23 nt, Human
cacagggggacccaggaagccca

SEQ ID NO: 695309 - RNA, 20 nt, Human
caccaaacugaagaguaaac

SEQ ID NO: 695310 - RNA, 27 nt, Human
caccacugcacuccagccuuggggaca

SEQ ID NO: 695311 - RNA, 24 nt, Human
caccaggcagacagggaacaguga

SEQ ID NO: 695312 - RNA, 23 nt, Human
cacgccuguaaucccaacacuug

SEQ ID NO: 695313 - RNA, 23 nt, Human
cacuccagcaugggggacagagc

SEQ ID NO: 695314 - RNA, 18 nt, Human
cacugcacuccagcaugg

SEQ ID NO: 695315 - RNA, 19 nt, Human
cacugcacuccagcauggg

SEQ ID NO: 695316 - RNA, 19 nt, Human
cacugcacuccagcauggg

SEQ ID NO: 695317 - RNA, 24 nt, Human
cacugcacuccagcaugggggaca

SEQ ID NO: 695318 - RNA, 20 nt, Human
cacugcacuccagccuugga

SEQ ID NO: 695319 - RNA, 20 nt, Human
cacugcacuccagccuuggg

SEQ ID NO: 695320 - RNA, 20 nt, Human
cacugcacuccagccuuggg

SEQ ID NO: 695321 - RNA, 24 nt, Human
cacugcacuccagccuuggggaca

SEQ ID NO: 695322 - RNA, 24 nt, Human
cacuggucuucaucucuguucugg

SEQ ID NO: 695323 - RNA, 18 nt, Human
cacugugcugugcucagc

SEQ ID NO: 695324 - RNA, 21 nt, Human
cagaucacuugaaguuagauu

SEQ ID NO: 695325 - RNA, 24 nt, Human
cagcacuuugagagggcgaggcgg

SEQ ID NO: 695326 - RNA, 24 nt, Human
cagcuacucgagaggcugaggugg

SEQ ID NO: 695327 - RNA, 22 nt, Human
cagugagaaccagcguaaaaca

SEQ ID NO: 695328 - RNA, 20 nt, Human
caucuuguuggaauuugugg

SEQ ID NO: 695329 - RNA, 22 nt, Human
caugccuaaucccagcacuuug

SEQ ID NO: 695330 - RNA, 23 nt, Human
ccacacaggucagaaguggcugg

SEQ ID NO: 695331 - RNA, 21 nt, Human
ccacccccuucucggaccaag

SEQ ID NO: 695332 - RNA, 20 nt, Human
ccacugcacuccagcauggg

SEQ ID NO: 695333 - RNA, 22 nt, Human
ccacugcacuccagcauggggg

SEQ ID NO: 695334 - RNA, 24 nt, Human
ccacugcacuccagcaugggggac

SEQ ID NO: 695335 - RNA, 18 nt, Human
ccacugcacuccagccuu

SEQ ID NO: 695336 - RNA, 21 nt, Human
ccacugcacuccagccuuggg

SEQ ID NO: 695337 - RNA, 22 nt, Human
ccacugcacuccagccuugggg

SEQ ID NO: 695338 - RNA, 24 nt, Human
ccacugcacuccagccuuggggac

SEQ ID NO: 695339 - RNA, 24 nt, Human
ccagagguggagguugcagugagc

SEQ ID NO: 695340 - RNA, 21 nt, Human
ccagccuggccaacaucguga

SEQ ID NO: 695341 - RNA, 19 nt, Human
ccaggcacugugcugugcu

SEQ ID NO: 695342 - RNA, 20 nt, Human
cccagagguggagguugcag

SEQ ID NO: 695343 - RNA, 21 nt, Human
cccaugggcagauguggccca

SEQ ID NO: 695344 - RNA, 23 nt, Human
cccauguuuucccacuggucuuc

SEQ ID NO: 695345 - RNA, 18 nt, Human
ccccaugaccuaggcaga

SEQ ID NO: 695346 - RNA, 23 nt, Human
ccccugccaaugccgugugccca

SEQ ID NO: 695347 - RNA, 20 nt, Human
cccugugguucuuucagugg

SEQ ID NO: 695348 - RNA, 19 nt, Human
ccucugucuuggaaauaug

SEQ ID NO: 695349 - RNA, 18 nt, Human
ccugaaacccaacaaaag

SEQ ID NO: 695350 - RNA, 23 nt, Human
ccuggccaacaucgugaaacccc

SEQ ID NO: 695351 - RNA, 24 nt, Human
ccuggccaacaucgugaaacccca

SEQ ID NO: 695352 - RNA, 23 nt, Human
ccuggccaacauggugaaacccc

SEQ ID NO: 695353 - RNA, 24 nt, Human
ccuggccaacauggugaaacccca

SEQ ID NO: 695354 - RNA, 18 nt, Human
ccuguaaucccagcuacu

SEQ ID NO: 695355 - RNA, 21 nt, Human
ccuguaaucccagcuacuggg

SEQ ID NO: 695356 - RNA, 22 nt, Human
ccuguaaucccagcuacugggg

SEQ ID NO: 695357 - RNA, 21 nt, Human
ccuuggccugcugagagauca

SEQ ID NO: 695358 - RNA, 24 nt, Human
cgacuaggaaacagcucuagagau

SEQ ID NO: 695359 - RNA, 24 nt, Human
cgagaccagccuggccaacauggu

SEQ ID NO: 695360 - RNA, 23 nt, Human
cgagccgagaucaugccacugca

SEQ ID NO: 695361 - RNA, 22 nt, Human
cgaggcggguggaucaugaggu

SEQ ID NO: 695362 - RNA, 24 nt, Human
cgaggcggguggaucaugagguca

SEQ ID NO: 695363 - RNA, 22 nt, Human
cgccuguaaucccaacacuugg

SEQ ID NO: 695364 - RNA, 23 nt, Human
cgccuguaaucccaacacuuggg

SEQ ID NO: 695365 - RNA, 20 nt, Human
cuaauuucaaagauguugau

SEQ ID NO: 695366 - RNA, 18 nt, Human
cuacaguuaagacaaacu

SEQ ID NO: 695367 - RNA, 18 nt, Human
cuacuaaaaauacagaaa

SEQ ID NO: 695368 - RNA, 20 nt, Human
cuagaaaggagcugauuacu

SEQ ID NO: 695369 - RNA, 18 nt, Human
cuaggcagacauagugag

SEQ ID NO: 695370 - RNA, 22 nt, Human
cucacgccuguaaucccaacac

SEQ ID NO: 695371 - RNA, 24 nt, Human
cucacgccuguaaucccaacacuu

SEQ ID NO: 695372 - RNA, 19 nt, Human
cuccaucucaaaaaaaaaa

SEQ ID NO: 695373 - RNA, 24 nt, Human
cucucccuccucuaucccucuccc

SEQ ID NO: 695374 - RNA, 24 nt, Human
cugcucgugguucagucuguucag

SEQ ID NO: 695375 - RNA, 19 nt, Human
cugcugagagaucaccagg

SEQ ID NO: 695376 - RNA, 21 nt, Human
cuggagcuguucgccucugcc

SEQ ID NO: 695377 - RNA, 23 nt, Human
cuggccaacaucgugaaacccca

SEQ ID NO: 695378 - RNA, 23 nt, Human
cuggccaacauggugaaacccca

SEQ ID NO: 695379 - RNA, 24 nt, Human
cuguggccgcucccuugggagaug

SEQ ID NO: 695380 - RNA, 19 nt, Human
cuguucagauuguuuccug

SEQ ID NO: 695381 - RNA, 20 nt, Human
cuucagaagucgcagccccu

SEQ ID NO: 695382 - RNA, 24 nt, Human
cuuuucccauuuuccccaacuuuu

SEQ ID NO: 695383 - RNA, 20 nt, Human
gaaacaaacaccaacauuuc

SEQ ID NO: 695384 - RNA, 22 nt, Human
gaacaaacaguauauugcacaa

SEQ ID NO: 695385 - RNA, 24 nt, Human
gaagacccagagcacggccagcca

SEQ ID NO: 695386 - RNA, 20 nt, Human
gacaaaacagaaacaaacac

SEQ ID NO: 695387 - RNA, 20 nt, Human
gacacaccucuaaacaugcc

SEQ ID NO: 695388 - RNA, 19 nt, Human
gacuagaaaggagcugauu

SEQ ID NO: 695389 - RNA, 23 nt, Human
gagaaucgcuugaacccaggagg

SEQ ID NO: 695390 - RNA, 20 nt, Human
gagaggagaccuaggggugu

SEQ ID NO: 695391 - RNA, 23 nt, Human
gagaucaugccacugcacuccag

SEQ ID NO: 695392 - RNA, 23 nt, Human
gaggcggguggaucaugagguca

SEQ ID NO: 695393 - RNA, 24 nt, Human
gaggugggagaauugcuugaaucc

SEQ ID NO: 695394 - RNA, 18 nt, Human
gagguugcagugagccaa

SEQ ID NO: 695395 - RNA, 23 nt, Human
gagguugcagugagccaagauug

SEQ ID NO: 695396 - RNA, 22 nt, Human
gaucaugaggucaggaguucga

SEQ ID NO: 695397 - RNA, 24 nt, Human
gaucaugaggucaggaguucgaga

SEQ ID NO: 695398 - RNA, 19 nt, Human
gcacccccuuccauccaag

SEQ ID NO: 695399 - RNA, 24 nt, Human
gccaacaucgugaaaccccaucuc

SEQ ID NO: 695400 - RNA, 24 nt, Human
gccaacauggugaaaccccaucuc

SEQ ID NO: 695401 - RNA, 23 nt, Human
gccaugggaggggcaggaauucc

SEQ ID NO: 695402 - RNA, 21 nt, Human
ggaaaagaucacaaaaugaaa

SEQ ID NO: 695403 - RNA, 23 nt, Human
ggaagguuuggccaaaggacugg

SEQ ID NO: 695404 - RNA, 23 nt, Human
ggagguugcagcgagccgagauc

SEQ ID NO: 695405 - RNA, 24 nt, Human
ggagguugcagcgagccgagauca

SEQ ID NO: 695406 - RNA, 22 nt, Human
ggagguugcagugagccaagau

SEQ ID NO: 695407 - RNA, 24 nt, Human
ggagguugcagugagccaagauug

SEQ ID NO: 695408 - RNA, 20 nt, Human
ggaguagggaagacccagag

SEQ ID NO: 695409 - RNA, 23 nt, Human
ggauuauggggaagagaaaaagc

SEQ ID NO: 695410 - RNA, 23 nt, Human
ggccaaaggacuggaaaggggca

SEQ ID NO: 695411 - RNA, 23 nt, Human
ggcgccuguaaucccagcuacug

SEQ ID NO: 695412 - RNA, 23 nt, Human
ggcggguggaucaugaggucagg

SEQ ID NO: 695413 - RNA, 21 nt, Human
gggaagguuuggccaaaggac

SEQ ID NO: 695414 - RNA, 22 nt, Human
gggaagguuuggccaaaggacu

SEQ ID NO: 695415 - RNA, 23 nt, Human
gggaggccgaggcggguggauca

SEQ ID NO: 695416 - RNA, 22 nt, Human
gggaggcugagguaggagaauc

SEQ ID NO: 695417 - RNA, 26 nt, Human
gggcaugguggcgcauagcuguagcc

SEQ ID NO: 695418 - RNA, 19 nt, Human
gggccaugggaggggcagg

SEQ ID NO: 695419 - RNA, 20 nt, Human
ggggacccaggaagcccaau

SEQ ID NO: 695420 - RNA, 21 nt, Human
gggggguugggaacaccaggc

SEQ ID NO: 695421 - RNA, 22 nt, Human
gguaguucaugccuaaucccag

SEQ ID NO: 695422 - RNA, 23 nt, Human
ggugcaguggcucacgccuguaa

SEQ ID NO: 695423 - RNA, 23 nt, Human
gguggaucaugaggucaggaguu

SEQ ID NO: 695424 - RNA, 19 nt, Human
ggugggggguugggaacac

SEQ ID NO: 695425 - RNA, 24 nt, Human
gguggugggcgccuguaaucccag

SEQ ID NO: 695426 - RNA, 22 nt, Human
guacuggguccucugccagguc

SEQ ID NO: 695427 - RNA, 21 nt, Human
guagcuccagaggggcaccug

SEQ ID NO: 695428 - RNA, 23 nt, Human
guggaucaugaggucaggaguuc

SEQ ID NO: 695429 - RNA, 21 nt, Human
guggugagacgugcccuggcc

SEQ ID NO: 695430 - RNA, 22 nt, Human
uaaaaauacagaaauuaggccg

SEQ ID NO: 695431 - RNA, 26 nt, Human
uaaaaauuagccaggugugguggugg

SEQ ID NO: 695432 - RNA, 23 nt, Human
uaacugcaaaguucagguugguu

SEQ ID NO: 695433 - RNA, 18 nt, Human
uaacuguaucuuagacuc

SEQ ID NO: 695434 - RNA, 24 nt, Human
uaacugugacacaccucuaaacau

SEQ ID NO: 695435 - RNA, 23 nt, Human
uaccccaccaaacugaagaguaa

SEQ ID NO: 695436 - RNA, 24 nt, Human
uaccccaccaaacugaagaguaaa

SEQ ID NO: 695437 - RNA, 19 nt, Human
uacucagccuggguggggg

SEQ ID NO: 695438 - RNA, 25 nt, Human
uacuggguccucugccagguggggg

SEQ ID NO: 695439 - RNA, 18 nt, Human
uagaaaggagcugauuac

SEQ ID NO: 695440 - RNA, 24 nt, Human
uagccccagcuacucgagaggcug

SEQ ID NO: 695441 - RNA, 23 nt, Human
uagccuggggaugaccacccccu

SEQ ID NO: 695442 - RNA, 20 nt, Human
uaguucaugccuaaucccag

SEQ ID NO: 695443 - RNA, 22 nt, Human
uaguucaugccuaaucccagca

SEQ ID NO: 695444 - RNA, 18 nt, Human
ucaaagccacaauuccca

SEQ ID NO: 695445 - RNA, 20 nt, Human
ucacaaaaugaaagacccca

SEQ ID NO: 695446 - RNA, 22 nt, Human
ucaggaaugagaagccagaaga

SEQ ID NO: 695447 - RNA, 21 nt, Human
ucaggagugccacacuaaagc

SEQ ID NO: 695448 - RNA, 18 nt, Human
ucaucuugguuuccuucg

SEQ ID NO: 695449 - RNA, 24 nt, Human
ucaugaggucaggaguucgagacc

SEQ ID NO: 695450 - RNA, 21 nt, Human
ucaugccuaaucccagcacuu

SEQ ID NO: 695451 - RNA, 21 nt, Human
ucauguaguggucuguaagcc

SEQ ID NO: 695452 - RNA, 20 nt, Human
uccaaacugcgagagcaaca

SEQ ID NO: 695453 - RNA, 21 nt, Human
uccaggggccaggcugugaaa

SEQ ID NO: 695454 - RNA, 23 nt, Human
uccaucucaaaaaaaaaaaaaaa

SEQ ID NO: 695455 - RNA, 20 nt, Human
ucgcuugaacccaggaggag

SEQ ID NO: 695456 - RNA, 20 nt, Human
ucggacugaugaaaggggga

SEQ ID NO: 695457 - RNA, 18 nt, Human
ucuaccaaucacucaucc

SEQ ID NO: 695458 - RNA, 21 nt, Human
ucucuacuaaaaauaaaaauu

SEQ ID NO: 695459 - RNA, 24 nt, Human
ucugcugcucgugguucagucugu

SEQ ID NO: 695460 - RNA, 19 nt, Human
ucuguaagccguggccugc

SEQ ID NO: 695461 - RNA, 19 nt, Human
ucuguggguucugagagga

SEQ ID NO: 695462 - RNA, 19 nt, Human
ucuugguuuccuucgugcu

SEQ ID NO: 695463 - RNA, 19 nt, Human
ugaaaccccaucucuacua

SEQ ID NO: 695464 - RNA, 19 nt, Human
ugaaaccccaucucuacua

SEQ ID NO: 695465 - RNA, 19 nt, Human
ugaaagaccccacucuggg

SEQ ID NO: 695466 - RNA, 21 nt, Human
ugaccaagacagaccacacac

SEQ ID NO: 695467 - RNA, 24 nt, Human
ugagagggcgaggcgggcagauca

SEQ ID NO: 695468 - RNA, 24 nt, Human
ugagguaggagaaucgcuugaacc

SEQ ID NO: 695469 - RNA, 23 nt, Human
ugaggugggagaauugcuugaau

SEQ ID NO: 695470 - RNA, 21 nt, Human
ugcaccacugcacuccagccu

SEQ ID NO: 695471 - RNA, 21 nt, Human
ugcaccacugcacuccagccu

SEQ ID NO: 695472 - RNA, 23 nt, Human
ugcagggacaaagaaggaccauc

SEQ ID NO: 695473 - RNA, 18 nt, Human
ugcccagguggguggaac

SEQ ID NO: 695474 - RNA, 21 nt, Human
ugccccauuuccagugagaac

SEQ ID NO: 695475 - RNA, 23 nt, Human
ugcugugugccaggcacugugcu

SEQ ID NO: 695476 - RNA, 20 nt, Human
uggaacagugaccugcaaaa

SEQ ID NO: 695477 - RNA, 24 nt, Human
uggaagacuacagcaaauggauca

SEQ ID NO: 695478 - RNA, 22 nt, Human
uggaucaugaggucaggaguuc

SEQ ID NO: 695479 - RNA, 24 nt, Human
uggaucaugaggucaggaguucga

SEQ ID NO: 695480 - RNA, 24 nt, Human
uggccaacauggugaaaccccauc

SEQ ID NO: 695481 - RNA, 21 nt, Human
uggccagggagcccccaugac

SEQ ID NO: 695482 - RNA, 24 nt, Human
uggcucacgccuguaaucccaaca

SEQ ID NO: 695483 - RNA, 25 nt, Human
ugggaacaccaggcagacagggaac

SEQ ID NO: 695484 - RNA, 20 nt, Human
ugggaaggucacuuucacua

SEQ ID NO: 695485 - RNA, 23 nt, Human
ugggaggggcaggaauuccuuug

SEQ ID NO: 695486 - RNA, 21 nt, Human
uggguccucugccaggugggg

SEQ ID NO: 695487 - RNA, 21 nt, Human
ugguaacaguuccaggggcca

SEQ ID NO: 695488 - RNA, 20 nt, Human
ugguaagcaguugccaggug

SEQ ID NO: 695489 - RNA, 24 nt, Human
ugguggugggcgccuguaauccca

SEQ ID NO: 695490 - RNA, 24 nt, Human
uguaguggucuguaagccguggcc

SEQ ID NO: 695491 - RNA, 19 nt, Human
uguggugguggcugccuag

SEQ ID NO: 695492 - RNA, 23 nt, Human
uuaaaagacacacccuaauuuca

SEQ ID NO: 695493 - RNA, 24 nt, Human
uuaaaagacacacccuaauuucaa

SEQ ID NO: 695494 - RNA, 18 nt, Human
uuagcugggcaugguggc

SEQ ID NO: 695495 - RNA, 20 nt, Human
uuagcugggcaugguggcgc

SEQ ID NO: 695496 - RNA, 24 nt, Human
uuaggccgggugcaguggcucacg

SEQ ID NO: 695497 - RNA, 18 nt, Human
uuccaaaguugguguaac

SEQ ID NO: 695498 - RNA, 23 nt, Human
uucccaagucccagaggacugcu

SEQ ID NO: 695499 - RNA, 19 nt, Human
uugaaagagaauaccccac

SEQ ID NO: 695500 - RNA, 24 nt, Human
uugaaucccagagguggagguugc

SEQ ID NO: 695501 - RNA, 23 nt, Human
uugcaccacugcacuccagccuu

SEQ ID NO: 695502 - RNA, 20 nt, Human
uugcagcgagccgagaucau

SEQ ID NO: 695503 - RNA, 22 nt, Human
uugcagugagccaagauugcac

SEQ ID NO: 695504 - RNA, 22 nt, Human
uugccagggucccauaucuagc

SEQ ID NO: 695505 - RNA, 24 nt, Human
uugcuugaaucccagagguggagg

SEQ ID NO: 695506 - RNA, 20 nt, Human
uuguggugguggcugccuag

SEQ ID NO: 695507 - RNA, 18 nt, Human
uuucccugaaacccaaca

SEQ ID NO: 695508 - RNA, 19 nt, Human
uuugcugugugccaggcac

SEQ ID NO: 695509 - RNA, 20 nt, Human
uuuuuuguaaucccaagaaa

SEQ ID NO: 695510 - RNA, 21 nt, Human
uuuuuuguaaucccaagaaag

SEQ ID NO: 695511 - RNA, 26 nt, Human
aaaaagaaacauacagcuguauugga

SEQ ID NO: 695512 - RNA, 20 nt, Human
aaaagaaaaagaaacauaca

SEQ ID NO: 695513 - RNA, 21 nt, Human
aaacuggaacuuugcaacaac

SEQ ID NO: 695514 - RNA, 23 nt, Human
aaagaaacauacagcuguauugg

SEQ ID NO: 695515 - RNA, 19 nt, Human
aaaguucccaagcuugaaa

SEQ ID NO: 695516 - RNA, 22 nt, Human
acagaaaauggcuuccaagcau

SEQ ID NO: 695517 - RNA, 22 nt, Human
agaaaaagaaacauacagcugu

SEQ ID NO: 695518 - RNA, 23 nt, Human
agaaaagaaaaagaaacauacag

SEQ ID NO: 695519 - RNA, 20 nt, Human
agaacggcuuggggacagga

SEQ ID NO: 695520 - RNA, 21 nt, Human
caaaaggcucucaaaaucuuu

SEQ ID NO: 695521 - RNA, 23 nt, Human
caccaaauuagaaaagaaaaaga

SEQ ID NO: 695522 - RNA, 22 nt, Human
ccaauccuaauguguccuuagc

SEQ ID NO: 695523 - RNA, 26 nt, Human
ccaccaaauuagaaaagaaaaagaaa

SEQ ID NO: 695524 - RNA, 19 nt, Human
cccaagcuugaaaucaagu

SEQ ID NO: 695525 - RNA, 21 nt, Human
cgcagccgcgcacggguuucc

SEQ ID NO: 695526 - RNA, 22 nt, Human
cuuuaauguuuuuuuuaaaagu

SEQ ID NO: 695527 - RNA, 21 nt, Human
gaacuuugcaacaacuccucu

SEQ ID NO: 695528 - RNA, 18 nt, Human
gucuagaacggcuugggg

SEQ ID NO: 695529 - RNA, 20 nt, Human
uaaagaaaaaaaccacccuc

SEQ ID NO: 695530 - RNA, 24 nt, Human
uagaaaagaaaaagaaacauacag

SEQ ID NO: 695531 - RNA, 22 nt, Human
ucccaagcuugaaaucaaguua

SEQ ID NO: 695532 - RNA, 25 nt, Human
ucccaagcuugaaaucaaguuaguu

SEQ ID NO: 695533 - RNA, 25 nt, Human
ugacaacacacguccuauacaaaga

SEQ ID NO: 695534 - RNA, 26 nt, Human
ugccaccaaauuagaaaagaaaaaga

SEQ ID NO: 695535 - RNA, 23 nt, Human
uggaacuuugcaacaacuccucu

SEQ ID NO: 695536 - RNA, 21 nt, Human
uggcuuccaagcaucacaccu

SEQ ID NO: 695537 - RNA, 22 nt, Human
uggcuuccaagcaucacaccuu

SEQ ID NO: 695538 - RNA, 23 nt, Human
uuaaagaaaaaaaccacccucau

SEQ ID NO: 695539 - RNA, 21 nt, Human
uucauccgcgucuagaacggc

SEQ ID NO: 695540 - RNA, 23 nt, Human
uuuuuuuuaaaaguucccaagcu

SEQ ID NO: 695541 - RNA, 20 nt, Human
agaaagcagcuugggguaca

SEQ ID NO: 695542 - RNA, 18 nt, Human
agacagggcuccugcuuc

SEQ ID NO: 695543 - RNA, 20 nt, Human
agcaggcuagaccaggcuuc

SEQ ID NO: 695544 - RNA, 21 nt, Human
agcauugguccagagaaagca

SEQ ID NO: 695545 - RNA, 21 nt, Human
cagagcagguccacuggcacc

SEQ ID NO: 695546 - RNA, 19 nt, Human
cagccagacagggcuccug

SEQ ID NO: 695547 - RNA, 21 nt, Human
cagguccacuggcacccacaa

SEQ ID NO: 695548 - RNA, 21 nt, Human
ccucacaauaguguguccaca

SEQ ID NO: 695549 - RNA, 19 nt, Human
ccuccagcaggcuagacca

SEQ ID NO: 695550 - RNA, 19 nt, Human
cgggaugccauggucuugg

SEQ ID NO: 695551 - RNA, 19 nt, Human
cguggauccccucuaacuu

SEQ ID NO: 695552 - RNA, 21 nt, Human
cucucaggacuccacuuucag

SEQ ID NO: 695553 - RNA, 23 nt, Human
cuggggcuuuggcuggaacgauu

SEQ ID NO: 695554 - RNA, 19 nt, Human
gacagggcuccugcuucuu

SEQ ID NO: 695555 - RNA, 19 nt, Human
gagcucagccuacaugggc

SEQ ID NO: 695556 - RNA, 23 nt, Human
gcccgcgggccugcggcagauuc

SEQ ID NO: 695557 - RNA, 21 nt, Human
gcuccaugggagaggagccug

SEQ ID NO: 695558 - RNA, 20 nt, Human
gggaugccauggucuuggau

SEQ ID NO: 695559 - RNA, 21 nt, Human
gggaugccauggucuuggaug

SEQ ID NO: 695560 - RNA, 18 nt, Human
gguggcccuucucaucug

SEQ ID NO: 695561 - RNA, 19 nt, Human
guucagguggcccuucuca

SEQ ID NO: 695562 - RNA, 22 nt, Human
uacauccuuaguaggccucaca

SEQ ID NO: 695563 - RNA, 19 nt, Human
uacuggggcuuuggcugga

SEQ ID NO: 695564 - RNA, 21 nt, Human
ucaguuucuuccacuucuggg

SEQ ID NO: 695565 - RNA, 21 nt, Human
uccacaauacggguuaguggg

SEQ ID NO: 695566 - RNA, 21 nt, Human
uccacuuucaguuucuuccac

SEQ ID NO: 695567 - RNA, 21 nt, Human
ucccgggcggcccgcgggccu

SEQ ID NO: 695568 - RNA, 26 nt, Human
ucuauuacuggggcuuuggcuggaac

SEQ ID NO: 695569 - RNA, 22 nt, Human
ucucauccuccagcaggcuaga

SEQ ID NO: 695570 - RNA, 22 nt, Human
ugaugguggaaggguucccucu

SEQ ID NO: 695571 - RNA, 20 nt, Human
uggagaguuguccuucuggg

SEQ ID NO: 695572 - RNA, 23 nt, Human
uggagaguuguccuucuggguuu

SEQ ID NO: 695573 - RNA, 24 nt, Human
ugggaugcuccaugggagaggagc

SEQ ID NO: 695574 - RNA, 18 nt, Human
aagaugcacacuggaagg

SEQ ID NO: 695575 - RNA, 22 nt, Human
agaauuuacagggcugggagga

SEQ ID NO: 695576 - RNA, 23 nt, Human
caguggcugacucguccagcuuc

SEQ ID NO: 695577 - RNA, 23 nt, Human
cuagaguagaagcaacucucuuc

SEQ ID NO: 695578 - RNA, 18 nt, Human
cuggaaggcugaggcuga

SEQ ID NO: 695579 - RNA, 18 nt, Human
gauagaauuuacagggcu

SEQ ID NO: 695580 - RNA, 22 nt, Human
guagaagcaacucucuucccuu

SEQ ID NO: 695581 - RNA, 24 nt, Human
uaagauaaguaucaaagauagaau

SEQ ID NO: 695582 - RNA, 20 nt, Human
uaucaaagauagaauuuaca

SEQ ID NO: 695583 - RNA, 20 nt, Human
ucaaagauagaauuuacagg

SEQ ID NO: 695584 - RNA, 21 nt, Human
ucaaagauagaauuuacaggg

SEQ ID NO: 695585 - RNA, 19 nt, Human
ucguccagcuucaggcaau

SEQ ID NO: 695586 - RNA, 20 nt, Human
ugagccugggcuagagacca

SEQ ID NO: 695587 - RNA, 19 nt, Human
uggaaggcugaggcugagc

SEQ ID NO: 695588 - RNA, 18 nt, Human
uuggaaauguucuagucc

SEQ ID NO: 695589 - RNA, 21 nt, Human
uuuuuuuuugcuagaguagaa

SEQ ID NO: 695590 - RNA, 22 nt, Human
ugcaggaacaagggcgcggcag

SEQ ID NO: 695591 - RNA, 22 nt, Human
uguggcagucaaaagauaacug

SEQ ID NO: 695592 - RNA, 21 nt, Human
cccaagugaccugcagagccc

SEQ ID NO: 695593 - RNA, 24 nt, Human
uuuuuuuuuuguagacaagucugg

SEQ ID NO: 695594 - RNA, 18 nt, Human
uuuuuuuuuuuuuuuuug

SEQ ID NO: 695595 - RNA, 19 nt, Human
uuuuuuuuuuuuuuuuugu

SEQ ID NO: 695596 - RNA, 20 nt, Human
aacacgcugccucugucucu

SEQ ID NO: 695597 - RNA, 23 nt, Human
aacagcagguucuggcuuuuccg

SEQ ID NO: 695598 - RNA, 22 nt, Human
acacagcaccuccuugccuuac

SEQ ID NO: 695599 - RNA, 20 nt, Human
accaccgcaccagcagcuca

SEQ ID NO: 695600 - RNA, 20 nt, Human
accagcagcucaaacacgcu

SEQ ID NO: 695601 - RNA, 22 nt, Human
acucccggcccugugauuccgg

SEQ ID NO: 695602 - RNA, 22 nt, Human
agcaccuccuugccuuacaccc

SEQ ID NO: 695603 - RNA, 24 nt, Human
agccacacagcaccuccuugccuu

SEQ ID NO: 695604 - RNA, 26 nt, Human
cacccuggcuccagcuucacuggucc

SEQ ID NO: 695605 - RNA, 21 nt, Human
caccgcaccagcagcucaaac

SEQ ID NO: 695606 - RNA, 18 nt, Human
ccacccugaaaacagcag

SEQ ID NO: 695607 - RNA, 24 nt, Human
ccggaaggcgugcacaaggcuuug

SEQ ID NO: 695608 - RNA, 19 nt, Human
ccucagccuggggcagcug

SEQ ID NO: 695609 - RNA, 18 nt, Human
ccuugccuuacacccugg

SEQ ID NO: 695610 - RNA, 18 nt, Human
cugccucugucucucaga

SEQ ID NO: 695611 - RNA, 18 nt, Human
cuucaccgggaggcugag

SEQ ID NO: 695612 - RNA, 19 nt, Human
gcuccagcuucacuggucc

SEQ ID NO: 695613 - RNA, 18 nt, Human
ggcauuuggggaaaugua

SEQ ID NO: 695614 - RNA, 18 nt, Human
gggaccuggccagccccu

SEQ ID NO: 695615 - RNA, 23 nt, Human
ggggcagcugugauguaaacccc

SEQ ID NO: 695616 - RNA, 22 nt, Human
uauuauguacacacuauauuua

SEQ ID NO: 695617 - RNA, 19 nt, Human
ucacccacccugaaaacag

SEQ ID NO: 695618 - RNA, 19 nt, Human
uccccagagcggggagugu

SEQ ID NO: 695619 - RNA, 23 nt, Human
ucuccugcugcuguggcccggac

SEQ ID NO: 695620 - RNA, 18 nt, Human
ugaaccaucgaagccucc

SEQ ID NO: 695621 - RNA, 20 nt, Human
ugccucugucucucagaccu

SEQ ID NO: 695622 - RNA, 22 nt, Human
ugccuuacacccuggcuccagc

SEQ ID NO: 695623 - RNA, 26 nt, Human
ugccuuacacccuggcuccagcuuca

SEQ ID NO: 695624 - RNA, 21 nt, Human
uggagccucugagaacaguuc

SEQ ID NO: 695625 - RNA, 26 nt, Human
uggcuccagcuucacugguccggggg

SEQ ID NO: 695626 - RNA, 19 nt, Human
ugguacccauagguugccu

SEQ ID NO: 695627 - RNA, 18 nt, Human
ugugcacgugugugugua

SEQ ID NO: 695628 - RNA, 23 nt, Human
uuccgugaacccccagaugaaua

SEQ ID NO: 695629 - RNA, 18 nt, Human
uucugauuccaugggacc

SEQ ID NO: 695630 - RNA, 23 nt, Human
uuuuccgugaacccccagaugaa

SEQ ID NO: 695631 - RNA, 20 nt, Human
uuuucuccugcugcuguggc

SEQ ID NO: 695632 - RNA, 24 nt, Human
aaaggugggcaaugugccucuucc

SEQ ID NO: 695633 - RNA, 20 nt, Human
acagaacuuucuucaugaca

SEQ ID NO: 695634 - RNA, 18 nt, Human
acaucuacccaucccuaa

SEQ ID NO: 695635 - RNA, 18 nt, Human
acuucagagaggguuggu

SEQ ID NO: 695636 - RNA, 19 nt, Human
agccgcugccgcguagucc

SEQ ID NO: 695637 - RNA, 24 nt, Human
aggcauauuccucccuuuccaaag

SEQ ID NO: 695638 - RNA, 18 nt, Human
cacuuccacuucagagag

SEQ ID NO: 695639 - RNA, 18 nt, Human
cagaacuuucuucaugac

SEQ ID NO: 695640 - RNA, 23 nt, Human
cccugaaagcagcagccucccca

SEQ ID NO: 695641 - RNA, 20 nt, Human
ccucccuuuccaaagguggg

SEQ ID NO: 695642 - RNA, 20 nt, Human
cggaauguaaacagagcuug

SEQ ID NO: 695643 - RNA, 20 nt, Human
cgggccccugaaagcagcag

SEQ ID NO: 695644 - RNA, 20 nt, Human
cuaaagaucaguaugacugg

SEQ ID NO: 695645 - RNA, 21 nt, Human
cugaaagcagcagccucccca

SEQ ID NO: 695646 - RNA, 22 nt, Human
gaacuuucuucaugacaccucu

SEQ ID NO: 695647 - RNA, 20 nt, Human
gcguaaggcaguuugacauc

SEQ ID NO: 695648 - RNA, 22 nt, Human
gggccccugaaagcagcagccu

SEQ ID NO: 695649 - RNA, 18 nt, Human
ggugucaggcagcccugc

SEQ ID NO: 695650 - RNA, 24 nt, Human
uaaagaucaguaugacugcguaag

SEQ ID NO: 695651 - RNA, 19 nt, Human
uccacuuccacuucagaga

SEQ ID NO: 695652 - RNA, 25 nt, Human
ugaacagaacuuucuucaugacacc

SEQ ID NO: 695653 - RNA, 19 nt, Human
uggaacaaccaaggagaag

SEQ ID NO: 695654 - RNA, 19 nt, Human
uggaacaaccaaggagaag

SEQ ID NO: 695655 - RNA, 20 nt, Human
uggcuaaagaucaguaugac

SEQ ID NO: 695656 - RNA, 23 nt, Human
uguaaacagagcuuggugugaag

SEQ ID NO: 695657 - RNA, 24 nt, Human
ugucaggcagcccugcuguccaag

SEQ ID NO: 695658 - RNA, 22 nt, Human
uuacaagcacgggccccugaaa

SEQ ID NO: 695659 - RNA, 19 nt, Human
uugaagagccgcugccgcg

SEQ ID NO: 695660 - RNA, 22 nt, Human
uuuacaagcacgggccccugaa

SEQ ID NO: 695661 - RNA, 21 nt, Human
aaagcaggccucaaacccuag

SEQ ID NO: 695662 - RNA, 24 nt, Human
aacaugagauaggguugggguggg

SEQ ID NO: 695663 - RNA, 18 nt, Human
aagaaugaaccucucauc

SEQ ID NO: 695664 - RNA, 19 nt, Human
agaaagcaggccucaaacc

SEQ ID NO: 695665 - RNA, 20 nt, Human
agcagaaagcaggccucaaa

SEQ ID NO: 695666 - RNA, 21 nt, Human
aggcuaggcucgcugcgccuc

SEQ ID NO: 695667 - RNA, 20 nt, Human
aggcucgcugcgccucgcug

SEQ ID NO: 695668 - RNA, 20 nt, Human
caagaaugaaccucucaucc

SEQ ID NO: 695669 - RNA, 25 nt, Human
cacaagaaugaaccucucaucagau

SEQ ID NO: 695670 - RNA, 22 nt, Human
cagaaagcaggccucaaacccu

SEQ ID NO: 695671 - RNA, 23 nt, Human
cagaaagcaggccucaaacccua

SEQ ID NO: 695672 - RNA, 20 nt, Human
cgagcagaaagcaggccuca

SEQ ID NO: 695673 - RNA, 24 nt, Human
cgagcagaaagcaggccucaaacc

SEQ ID NO: 695674 - RNA, 20 nt, Human
cgccucgcugccucagguaa

SEQ ID NO: 695675 - RNA, 21 nt, Human
cgcgagcagaaagcaggccuc

SEQ ID NO: 695676 - RNA, 19 nt, Human
gcaagaagccaucuaaauc

SEQ ID NO: 695677 - RNA, 23 nt, Human
gcgccugcaacccggcaccucga

SEQ ID NO: 695678 - RNA, 20 nt, Human
uaacagccuucuauagagug

SEQ ID NO: 695679 - RNA, 21 nt, Human
uagccucacugagaauuuaau

SEQ ID NO: 695680 - RNA, 23 nt, Human
uagcugaaaagaacaaaucucaa

SEQ ID NO: 695681 - RNA, 21 nt, Human
ucagauaucaggaauccaugu

SEQ ID NO: 695682 - RNA, 21 nt, Human
ucaugcaaguacuacaauaag

SEQ ID NO: 695683 - RNA, 21 nt, Human
ucuggcauguauuagacagac

SEQ ID NO: 695684 - RNA, 22 nt, Human
ugaaccucucaucagauaucag

SEQ ID NO: 695685 - RNA, 18 nt, Human
ugagauaggguuggggug

SEQ ID NO: 695686 - RNA, 21 nt, Human
ugagauaggguuggggugggc

SEQ ID NO: 695687 - RNA, 18 nt, Human
ugagccuuuuggugucau

SEQ ID NO: 695688 - RNA, 18 nt, Human
ugagcgccugcaacccgc

SEQ ID NO: 695689 - RNA, 19 nt, Human
ugagcgccugcaacccggc

SEQ ID NO: 695690 - RNA, 18 nt, Human
ugagucacuuuaacagcc

SEQ ID NO: 695691 - RNA, 24 nt, Human
ugcaacccggcaccucgagauacc

SEQ ID NO: 695692 - RNA, 20 nt, Human
ugccucagguagugcucugc

SEQ ID NO: 695693 - RNA, 22 nt, Human
uggggugggcugagccuuuugg

SEQ ID NO: 695694 - RNA, 23 nt, Human
uuaacauuaaaaaaacuuuuaca

SEQ ID NO: 695695 - RNA, 25 nt, Human
uugguucaagaagguaaaacugucg

SEQ ID NO: 695696 - RNA, 19 nt, Human
augcgcucagguucaggcc

SEQ ID NO: 695697 - RNA, 23 nt, Human
gcaaaaaaugagaaaauauacag

SEQ ID NO: 695698 - RNA, 19 nt, Human
ggcgcaggacaacucucgg

SEQ ID NO: 695699 - RNA, 24 nt, Human
uacagcaggagggaugaggaguac

SEQ ID NO: 695700 - RNA, 20 nt, Human
ucaggccgcacgugggaaca

SEQ ID NO: 695701 - RNA, 24 nt, Human
ucaggccgcacgugggaacaccgg

SEQ ID NO: 695702 - RNA, 21 nt, Human
ugggaacaccggcgcaggaca

SEQ ID NO: 695703 - RNA, 18 nt, Human
uuuuuuuuuuuuuuuuug

SEQ ID NO: 695704 - RNA, 20 nt, Human
uuuuuuuuuuuuuuuuuggu

SEQ ID NO: 695705 - RNA, 18 nt, Human
agcaauccaguuuauguc

SEQ ID NO: 695706 - RNA, 22 nt, Human
cacagaagaaccuaauaggcag

SEQ ID NO: 695707 - RNA, 20 nt, Human
cagaagaaccuaauaggcag

SEQ ID NO: 695708 - RNA, 23 nt, Human
cauaauaaaaauaugugaacauc

SEQ ID NO: 695709 - RNA, 21 nt, Human
gaggcacaugucacagaagaa

SEQ ID NO: 695710 - RNA, 19 nt, Human
uacaaaaguauuacaugcu

SEQ ID NO: 695711 - RNA, 19 nt, Human
ucacugcugggaggcacau

SEQ ID NO: 695712 - RNA, 19 nt, Human
ucagaggcaaauaaauaag

SEQ ID NO: 695713 - RNA, 20 nt, Human
ucucauaugguacaaaaguu

SEQ ID NO: 695714 - RNA, 20 nt, Human
ucuugcaaaauaagagguuc

SEQ ID NO: 695715 - RNA, 23 nt, Human
uuacaugcuugggccugucuugc

SEQ ID NO: 695716 - RNA, 21 nt, Human
uucacugcugggaggcacaug

SEQ ID NO: 695717 - RNA, 26 nt, Human
aaacagaauucuuuauaaacugcaga

SEQ ID NO: 695718 - RNA, 21 nt, Human
aaaugaaacuuacauagacua

SEQ ID NO: 695719 - RNA, 23 nt, Human
aacugcauugguggcuugggagu

SEQ ID NO: 695720 - RNA, 26 nt, Human
aagaaaaagcaagacgggguacaaaa

SEQ ID NO: 695721 - RNA, 21 nt, Human
aagugccguucuuugacaucc

SEQ ID NO: 695722 - RNA, 19 nt, Human
aauaaugggcaccaaaaga

SEQ ID NO: 695723 - RNA, 20 nt, Human
acaaaaacagucugagccug

SEQ ID NO: 695724 - RNA, 28 nt, Human
acaaacccacuuagagcaccaaacagag

SEQ ID NO: 695725 - RNA, 18 nt, Human
acaaagcaggaaaacggc

SEQ ID NO: 695726 - RNA, 25 nt, Human
accccgcagcagcaacagaaccagc

SEQ ID NO: 695727 - RNA, 23 nt, Human
acuucauuccuggagaaaaccaa

SEQ ID NO: 695728 - RNA, 22 nt, Human
agaaaaaccacuaugagagcau

SEQ ID NO: 695729 - RNA, 20 nt, Human
agauauacgccaucacaaug

SEQ ID NO: 695730 - RNA, 21 nt, Human
agcaccaaacagagagaaaau

SEQ ID NO: 695731 - RNA, 18 nt, Human
agcugcauuagagaacca

SEQ ID NO: 695732 - RNA, 22 nt, Human
aggcagcaguaacuaaaucaag

SEQ ID NO: 695733 - RNA, 23 nt, Human
aggcuccggcgauggucccgacu

SEQ ID NO: 695734 - RNA, 19 nt, Human
auguauucgaucugagaua

SEQ ID NO: 695735 - RNA, 24 nt, Human
caaaaugcaaauuucaccaguaug

SEQ ID NO: 695736 - RNA, 24 nt, Human
caaauucuaccuuccauaaaaagc

SEQ ID NO: 695737 - RNA, 22 nt, Human
caacagaaccagcuccuucagc

SEQ ID NO: 695738 - RNA, 22 nt, Human
caagacgggguacaaaaugcaa

SEQ ID NO: 695739 - RNA, 18 nt, Human
caagccaaacaggugacc

SEQ ID NO: 695740 - RNA, 25 nt, Human
cagauguccugucauaaaaaauuuc

SEQ ID NO: 695741 - RNA, 19 nt, Human
cagcagcaacagaaccagc

SEQ ID NO: 695742 - RNA, 21 nt, Human
caguaacuaaaucaagccaaa

SEQ ID NO: 695743 - RNA, 20 nt, Human
caucacaaugguuuaaaucu

SEQ ID NO: 695744 - RNA, 18 nt, Human
ccaaacagagagaaaaua

SEQ ID NO: 695745 - RNA, 19 nt, Human
ccacaggauuaugcauagc

SEQ ID NO: 695746 - RNA, 31 nt, Human
cccgcagcagcaacagaaccagcuccuucuu

SEQ ID NO: 695747 - RNA, 23 nt, Human
cccgcuuaccccgcagcagcaac

SEQ ID NO: 695748 - RNA, 22 nt, Human
ccggcgauggucccgacugcgc

SEQ ID NO: 695749 - RNA, 22 nt, Human
cuacaggucaaacugcuggugg

SEQ ID NO: 695750 - RNA, 22 nt, Human
cuugauuuuugaaaagauuuca

SEQ ID NO: 695751 - RNA, 18 nt, Human
cuuucuccucaaagauug

SEQ ID NO: 695752 - RNA, 19 nt, Human
gauuuuugaaaagauuuca

SEQ ID NO: 695753 - RNA, 21 nt, Human
gcauagaaaaaccacuaugag

SEQ ID NO: 695754 - RNA, 18 nt, Human
gggaguguacugcgccac

SEQ ID NO: 695755 - RNA, 24 nt, Human
uaaaaagccucccgaaaaggagau

SEQ ID NO: 695756 - RNA, 25 nt, Human
uaaacaaauauacaaugugcaggca

SEQ ID NO: 695757 - RNA, 25 nt, Human
uaacaagcauacaaaauaucaaacu

SEQ ID NO: 695758 - RNA, 24 nt, Human
uaacugagagcauaacagagguac

SEQ ID NO: 695759 - RNA, 25 nt, Human
uaagaaaaagcaagacgggguacaa

SEQ ID NO: 695760 - RNA, 23 nt, Human
uaauaaaaaacuaaaaauugacu

SEQ ID NO: 695761 - RNA, 26 nt, Human
uacaguagaauauuacagaaacaaaa

SEQ ID NO: 695762 - RNA, 20 nt, Human
uaccaagacuguuauacagu

SEQ ID NO: 695763 - RNA, 24 nt, Human
uaccaagacuguuauacaguuuua

SEQ ID NO: 695764 - RNA, 22 nt, Human
uaccccgcagcagcaacagaac

SEQ ID NO: 695765 - RNA, 19 nt, Human
uagaaaaaccacuaugaga

SEQ ID NO: 695766 - RNA, 22 nt, Human
uagaaaaaccacuaugagagca

SEQ ID NO: 695767 - RNA, 18 nt, Human
uagaaaauacugagucac

SEQ ID NO: 695768 - RNA, 18 nt, Human
uagagcaccaaacagaga

SEQ ID NO: 695769 - RNA, 26 nt, Human
uagcauagaaaaaccacuaugagagc

SEQ ID NO: 695770 - RNA, 18 nt, Human
uauggcaauguuuugucu

SEQ ID NO: 695771 - RNA, 19 nt, Human
ucaagccaaacaggugacc

SEQ ID NO: 695772 - RNA, 19 nt, Human
ucacuggaguugccuaguu

SEQ ID NO: 695773 - RNA, 21 nt, Human
ucagccagucgccauuucccg

SEQ ID NO: 695774 - RNA, 18 nt, Human
ucauucauauauucuuau

SEQ ID NO: 695775 - RNA, 19 nt, Human
uccauaaaaagccucccga

SEQ ID NO: 695776 - RNA, 19 nt, Human
ugaaaagauuucaccuaca

SEQ ID NO: 695777 - RNA, 19 nt, Human
ugaagcgccucaacuaaaa

SEQ ID NO: 695778 - RNA, 18 nt, Human
ugagagcauauuaacugc

SEQ ID NO: 695779 - RNA, 23 nt, Human
ugagauagauaaagucuccuuuc

SEQ ID NO: 695780 - RNA, 23 nt, Human
ugcaguugagaggcaaagcauac

SEQ ID NO: 695781 - RNA, 18 nt, Human
ugcauugguggcuuggga

SEQ ID NO: 695782 - RNA, 21 nt, Human
ugcgccacaggauuaugcaua

SEQ ID NO: 695783 - RNA, 21 nt, Human
uguauucgaucugagauagau

SEQ ID NO: 695784 - RNA, 26 nt, Human
uuaauaaugggcaccaaaagauaaga

SEQ ID NO: 695785 - RNA, 19 nt, Human
uucauauagcauagaaaaa

SEQ ID NO: 695786 - RNA, 21 nt, Human
uuccuggagaaaaccaaaggc

SEQ ID NO: 695787 - RNA, 22 nt, Human
uuuuuuuuuuuuuuuuuaucag

SEQ ID NO: 695788 - RNA, 23 nt, Human
uuuuuuuuuuuuuuuuuaucagu

SEQ ID NO: 695789 - RNA, 21 nt, Human
accucggccggugccggaagc

SEQ ID NO: 695790 - RNA, 22 nt, Human
agaugaucagacugauuucuuu

SEQ ID NO: 695791 - RNA, 20 nt, Human
agcauuuugguuucuagucu

SEQ ID NO: 695792 - RNA, 19 nt, Human
cugcagcuuucuuugaaca

SEQ ID NO: 695793 - RNA, 21 nt, Human
gaaggcacaggaucucuggag

SEQ ID NO: 695794 - RNA, 19 nt, Human
gcugaaauuuucgggugau

SEQ ID NO: 695795 - RNA, 18 nt, Human
uaagaaacuuuuugauca

SEQ ID NO: 695796 - RNA, 19 nt, Human
uaucuugauuuuccauucu

SEQ ID NO: 695797 - RNA, 18 nt, Human
uauuuuuugagauggagu

SEQ ID NO: 695798 - RNA, 19 nt, Human
ugaaggcacaggaucucug

SEQ ID NO: 695799 - RNA, 22 nt, Human
ugaaggcacaggaucucuggag

SEQ ID NO: 695800 - RNA, 18 nt, Human
uguguaaggaauauacug

SEQ ID NO: 695801 - RNA, 27 nt, Human
uuuauuauuauuauuauuuuuugagau

SEQ ID NO: 695802 - RNA, 20 nt, Human
uuuccauucugcagcuuucu

SEQ ID NO: 695803 - RNA, 29 nt, Human
uuuuuuuuuuuuuuuuuuuucuaugaaaa

SEQ ID NO: 695804 - RNA, 24 nt, Human
acacuaccacccucagccgggugc

SEQ ID NO: 695805 - RNA, 21 nt, Human
agcucgccucucccgccuccg

SEQ ID NO: 695806 - RNA, 20 nt, Human
aggaagaaaggaccaacaaa

SEQ ID NO: 695807 - RNA, 22 nt, Human
caagggcuccuucuguagcaag

SEQ ID NO: 695808 - RNA, 18 nt, Human
cacccucagcaugacuuc

SEQ ID NO: 695809 - RNA, 21 nt, Human
ccccaaaaaguuauccuccuu

SEQ ID NO: 695810 - RNA, 25 nt, Human
ccccaaaaaguuauccuccuuuagc

SEQ ID NO: 695811 - RNA, 18 nt, Human
cugcccaguuuuauuggg

SEQ ID NO: 695812 - RNA, 19 nt, Human
gaagaaaggaccaacaaag

SEQ ID NO: 695813 - RNA, 22 nt, Human
gagaagggagcccaagggcucc

SEQ ID NO: 695814 - RNA, 20 nt, Human
gagcucgccucucccgccuc

SEQ ID NO: 695815 - RNA, 24 nt, Human
gccucucccgccuccgcccucagc

SEQ ID NO: 695816 - RNA, 21 nt, Human
gggcugggaggguaagagacc

SEQ ID NO: 695817 - RNA, 26 nt, Human
uaacugcuaucaaagagaagggagcu

SEQ ID NO: 695818 - RNA, 20 nt, Human
ucacacuaccacccucagca

SEQ ID NO: 695819 - RNA, 19 nt, Human
ucgccucucccgccuccgc

SEQ ID NO: 695820 - RNA, 25 nt, Human
uggcacuuaaggaagaaaggaccaa

SEQ ID NO: 695821 - RNA, 20 nt, Human
uuuuuuuuuuccaucugccc

SEQ ID NO: 695822 - RNA, 20 nt, Human
uuuuuuuuuuuuuuuuccau

SEQ ID NO: 695823 - RNA, 21 nt, Human
uuuuuuuuuuuuuuuuuucca

SEQ ID NO: 695824 - RNA, 18 nt, Human
uuuuuuuuuuuuuuuuug

SEQ ID NO: 695825 - RNA, 22 nt, Human
aaaaaaaugaaucauagccaaa

SEQ ID NO: 695826 - RNA, 20 nt, Human
aaaacaaaaugucuugccuu

SEQ ID NO: 695827 - RNA, 21 nt, Human
aaacaaaaugucuugccuuug

SEQ ID NO: 695828 - RNA, 20 nt, Human
aagaaccuuccagaauuugc

SEQ ID NO: 695829 - RNA, 19 nt, Human
aaucauagccaaaacaaaa

SEQ ID NO: 695830 - RNA, 20 nt, Human
agaaugccucugcccccgcg

SEQ ID NO: 695831 - RNA, 18 nt, Human
agcuucagucucuaagca

SEQ ID NO: 695832 - RNA, 19 nt, Human
caagaaugccucugccccc

SEQ ID NO: 695833 - RNA, 19 nt, Human
cagcggcaagaaugccucu

SEQ ID NO: 695834 - RNA, 19 nt, Human
cccccgcgaacucugaccu

SEQ ID NO: 695835 - RNA, 19 nt, Human
cccuagucgagacuaagaa

SEQ ID NO: 695836 - RNA, 23 nt, Human
ccggcgacuaggaguccuggggc

SEQ ID NO: 695837 - RNA, 22 nt, Human
cucugcccccgcgaacucugac

SEQ ID NO: 695838 - RNA, 25 nt, Human
cugaagccggcgacuaggaguccug

SEQ ID NO: 695839 - RNA, 25 nt, Human
gaccuucucuuccuaagcagcccac

SEQ ID NO: 695840 - RNA, 23 nt, Human
ggaaaaaagucuuuaaugaugaa

SEQ ID NO: 695841 - RNA, 20 nt, Human
ggaguccuggggcuacugcc

SEQ ID NO: 695842 - RNA, 22 nt, Human
uaaaaaaaaugaaucauagcca

SEQ ID NO: 695843 - RNA, 19 nt, Human
uaagcuucagucucuaagc

SEQ ID NO: 695844 - RNA, 22 nt, Human
uacuuggcacacuacuguuugg

SEQ ID NO: 695845 - RNA, 20 nt, Human
uagccaaaacaaaaugucuu
